United States Patent Application Publication US 2020/0095579 A1 - sequence listing, part 11

SEQ ID NO: 154358 - DNA, 20 bp, Artificial Sequence
  Description of Artificial Sequence: Synthetic oligonucleotide
  Target: LAMA2; (+) strand; PAM type: NRG; PAM sequence: TGG
ttgtcactttatctataaaa

SEQ ID NO: 154359 - DNA, 20 bp, Artificial Sequence
  Description of Artificial Sequence: Synthetic oligonucleotide
  Target: LAMA2; (+) strand; PAM type: NRG; PAM sequence: GAG
gtcactttatctataaaatg

SEQ ID NO: 154360 - DNA, 20 bp, Artificial Sequence
  Description of Artificial Sequence: Synthetic oligonucleotide
  Target: LAMA2; (+) strand; PAM type: NRG; PAM sequence: GAG
cactttatctataaaatgga

SEQ ID NO: 154361 - DNA, 20 bp, Artificial Sequence
  Description of Artificial Sequence: Synthetic oligonucleotide
  Target: LAMA2; (+) strand; PAM type: NRG; PAM sequence: TAG
agagtgtaaatactacttct

SEQ ID NO: 154362 - DNA, 20 bp, Artificial Sequence
  Description of Artificial Sequence: Synthetic oligonucleotide
  Target: LAMA2; (+) strand; PAM type: NRG; PAM sequence: GAG
agtgtaaatactacttctta

SEQ ID NO: 154363 - DNA, 20 bp, Artificial Sequence
  Description of Artificial Sequence: Synthetic oligonucleotide
  Target: LAMA2; (+) strand; PAM type: NRG; PAM sequence: GAG
tctttaatctaataactcat

SEQ ID NO: 154364 - DNA, 20 bp, Artificial Sequence
  Description of Artificial Sequence: Synthetic oligonucleotide
  Target: LAMA2; (+) strand; PAM type: NRG; PAM sequence: TGG
tctaataactcatgagacac

SEQ ID NO: 154365 - DNA, 20 bp, Artificial Sequence
  Description of Artificial Sequence: Synthetic oligonucleotide
  Target: LAMA2; (+) strand; PAM type: NRG; PAM sequence: TAG
atgagacactggatatgtaa

SEQ ID NO: 154366 - DNA, 20 bp, Artificial Sequence
  Description of Artificial Sequence: Synthetic oligonucleotide
  Target: LAMA2; (+) strand; PAM type: NRG; PAM sequence: AGG
tgagacactggatatgtaat

SEQ ID NO: 154367 - DNA, 20 bp, Artificial Sequence
  Description of Artificial Sequence: Synthetic oligonucleotide
  Target: LAMA2; (+) strand; PAM type: NRG; PAM sequence: CAG
ttgctttcccttgacatttc

SEQ ID NO: 154368 - DNA, 20 bp, Artificial Sequence
  Description of Artificial Sequence: Synthetic oligonucleotide
  Target: LAMA2; (+) strand; PAM type: NRG; PAM sequence: GAG
ccagaaaataaaacttgatt

SEQ ID NO: 154369 - DNA, 20 bp, Artificial Sequence
  Description of Artificial Sequence: Synthetic oligonucleotide
  Target: LAMA2; (+) strand; PAM type: NRG; PAM sequence: AAG
taaaacttgattgagtatct

SEQ ID NO: 154370 - DNA, 20 bp, Artificial Sequence
  Description of Artificial Sequence: Synthetic oligonucleotide
  Target: LAMA2; (+) strand; PAM type: NRG; PAM sequence: CAG
gagtatctaagattatataa

SEQ ID NO: 154371 - DNA, 20 bp, Artificial Sequence
  Description of Artificial Sequence: Synthetic oligonucleotide
  Target: LAMA2; (+) strand; PAM type: NRG; PAM sequence: TAG
gattatataacagatcccac

SEQ ID NO: 154372 - DNA, 20 bp, Artificial Sequence
  Description of Artificial Sequence: Synthetic oligonucleotide
  Target: LAMA2; (+) strand; PAM type: NRG; PAM sequence: AAG
ataacagatcccactagact

SEQ ID NO: 154373 - DNA, 20 bp, Artificial Sequence
  Description of Artificial Sequence: Synthetic oligonucleotide
  Target: LAMA2; (+) strand; PAM type: NRG; PAM sequence: GAG
ccactagactaagtgaatct

SEQ ID NO: 154374 - DNA, 20 bp, Artificial Sequence
  Description of Artificial Sequence: Synthetic oligonucleotide
  Target: LAMA2; (+) strand; PAM type: NRG; PAM sequence: AGG
cactagactaagtgaatctg

SEQ ID NO: 154375 - DNA, 20 bp, Artificial Sequence
  Description of Artificial Sequence: Synthetic oligonucleotide
  Target: LAMA2; (+) strand; PAM type: NRG; PAM sequence: GGG
actagactaagtgaatctga

SEQ ID NO: 154376 - DNA, 20 bp, Artificial Sequence
  Description of Artificial Sequence: Synthetic oligonucleotide
  Target: LAMA2; (+) strand; PAM type: NRG; PAM sequence: AAG
agactaagtgaatctgaggg

SEQ ID NO: 154377 - DNA, 20 bp, Artificial Sequence
  Description of Artificial Sequence: Synthetic oligonucleotide
  Target: LAMA2; (+) strand; PAM type: NRG; PAM sequence: TGG
gtcacttttcttctcttctt

SEQ ID NO: 154378 - DNA, 20 bp, Artificial Sequence
  Description of Artificial Sequence: Synthetic oligonucleotide
  Target: LAMA2; (+) strand; PAM type: NRG; PAM sequence: AAG
tctcttctttggtttttaaa

SEQ ID NO: 154379 - DNA, 20 bp, Artificial Sequence
  Description of Artificial Sequence: Synthetic oligonucleotide
  Target: LAMA2; (+) strand; PAM type: NRG; PAM sequence: TAG
tggtttttaaaaagtatcat

SEQ ID NO: 154380 - DNA, 20 bp, Artificial Sequence
  Description of Artificial Sequence: Synthetic oligonucleotide
  Target: LAMA2; (+) strand; PAM type: NRG; PAM sequence: TAG
ttaaaaagtatcattagaaa

SEQ ID NO: 154381 - DNA, 20 bp, Artificial Sequence
  Description of Artificial Sequence: Synthetic oligonucleotide
  Target: LAMA2; (+) strand; PAM type: NRG; PAM sequence: CAG
agtatcattagaaatagaat

SEQ ID NO: 154382 - DNA, 20 bp, Artificial Sequence
  Description of Artificial Sequence: Synthetic oligonucleotide
  Target: LAMA2; (+) strand; PAM type: NRG; PAM sequence: CAG
caaatttctgtgtactgatc

SEQ ID NO: 154383 - DNA, 20 bp, Artificial Sequence
  Description of Artificial Sequence: Synthetic oligonucleotide
  Target: LAMA2; (+) strand; PAM type: NRG; PAM sequence: CAG
gtgtactgatccagtattaa

SEQ ID NO: 154384 - DNA, 20 bp, Artificial Sequence
  Description of Artificial Sequence: Synthetic oligonucleotide
  Target: LAMA2; (+) strand; PAM type: NRG; PAM sequence: GAG
gtactgatccagtattaaca

SEQ ID NO: 154385 - DNA, 20 bp, Artificial Sequence
  Description of Artificial Sequence: Synthetic oligonucleotide
  Target: LAMA2; (+) strand; PAM type: NRG; PAM sequence: TGG
agtattaacagagaaaataa

SEQ ID NO: 154386 - DNA, 20 bp, Artificial Sequence
  Description of Artificial Sequence: Synthetic oligonucleotide
  Target: LAMA2; (+) strand; PAM type: NRG; PAM sequence: AAG
ttgactgtgccttactgtgc

SEQ ID NO: 154387 - DNA, 20 bp, Artificial Sequence
  Description of Artificial Sequence: Synthetic oligonucleotide
  Target: LAMA2; (+) strand; PAM type: NRG; PAM sequence: AGG
tgactgtgccttactgtgca

SEQ ID NO: 154388 - DNA, 20 bp, Artificial Sequence
  Description of Artificial Sequence: Synthetic oligonucleotide
  Target: LAMA2; (+) strand; PAM type: NRG; PAM sequence: GAG
ttactgtgcaaggcaaaaat

SEQ ID NO: 154389 - DNA, 20 bp, Artificial Sequence
  Description of Artificial Sequence: Synthetic oligonucleotide
  Target: LAMA2; (+) strand; PAM type: NRG; PAM sequence: AAG
tgcaaggcaaaaatgagctc

SEQ ID NO: 154390 - DNA, 20 bp, Artificial Sequence
  Description of Artificial Sequence: Synthetic oligonucleotide
  Target: LAMA2; (+) strand; PAM type: NRG; PAM sequence: AAG
atgagctcaagatattatca

SEQ ID NO: 154391 - DNA, 20 bp, Artificial Sequence
  Description of Artificial Sequence: Synthetic oligonucleotide
  Target: LAMA2; (+) strand; PAM type: NRG; PAM sequence: CAG
atattatcaaagtcatgaat

SEQ ID NO: 154392 - DNA, 20 bp, Artificial Sequence
  Description of Artificial Sequence: Synthetic oligonucleotide
  Target: LAMA2; (+) strand; PAM type: NRG; PAM sequence: AAG
tatcaaagtcatgaatcaga

SEQ ID NO: 154393 - DNA, 20 bp, Artificial Sequence
  Description of Artificial Sequence: Synthetic oligonucleotide
  Target: LAMA2; (+) strand; PAM type: NRG; PAM sequence: GAG
tcaaagtcatgaatcagaaa

SEQ ID NO: 154394 - DNA, 20 bp, Artificial Sequence
  Description of Artificial Sequence: Synthetic oligonucleotide
  Target: LAMA2; (+) strand; PAM type: NRG; PAM sequence: TGG
gaatttcgttttacaaatga

SEQ ID NO: 154395 - DNA, 20 bp, Artificial Sequence
  Description of Artificial Sequence: Synthetic oligonucleotide
  Target: LAMA2; (+) strand; PAM type: NRG; PAM sequence: TAG
ttcgttttacaaatgatgga

SEQ ID NO: 154396 - DNA, 20 bp, Artificial Sequence
  Description of Artificial Sequence: Synthetic oligonucleotide
  Target: LAMA2; (+) strand; PAM type: NRG; PAM sequence: TAG
atggatagccacaaaacaac

SEQ ID NO: 154397 - DNA, 20 bp, Artificial Sequence
  Description of Artificial Sequence: Synthetic oligonucleotide
  Target: LAMA2; (+) strand; PAM type: NRG; PAM sequence: AGG
tggatagccacaaaacaact

SEQ ID NO: 154398 - DNA, 20 bp, Artificial Sequence
  Description of Artificial Sequence: Synthetic oligonucleotide
  Target: LAMA2; (+) strand; PAM type: NRG; PAM sequence: CAG
aatctctgattacacaactg

SEQ ID NO: 154399 - DNA, 20 bp, Artificial Sequence
  Description of Artificial Sequence: Synthetic oligonucleotide
  Target: LAMA2; (+) strand; PAM type: NRG; PAM sequence: TAG
gattacacaactgcagtcta

SEQ ID NO: 154400 - DNA, 20 bp, Artificial Sequence
  Description of Artificial Sequence: Synthetic oligonucleotide
  Target: LAMA2; (+) strand; PAM type: NRG; PAM sequence: CAG
cagtctatagctacattctg

SEQ ID NO: 154401 - DNA, 20 bp, Artificial Sequence
  Description of Artificial Sequence: Synthetic oligonucleotide
  Target: LAMA2; (+) strand; PAM type: NRG; PAM sequence: CAG
attctgcagattaaacacca

SEQ ID NO: 154402 - DNA, 20 bp, Artificial Sequence
  Description of Artificial Sequence: Synthetic oligonucleotide
  Target: LAMA2; (+) strand; PAM type: NRG; PAM sequence: TAG
ctgcagattaaacaccacag

SEQ ID NO: 154403 - DNA, 20 bp, Artificial Sequence
  Description of Artificial Sequence: Synthetic oligonucleotide
  Target: LAMA2; (+) strand; PAM type: NRG; PAM sequence: GAG
gcagattaaacaccacagta

SEQ ID NO: 154404 - DNA, 20 bp, Artificial Sequence
  Description of Artificial Sequence: Synthetic oligonucleotide
  Target: LAMA2; (+) strand; PAM type: NRG; PAM sequence: TGG
attaaacaccacagtagaga

SEQ ID NO: 154405 - DNA, 20 bp, Artificial Sequence
  Description of Artificial Sequence: Synthetic oligonucleotide
  Target: LAMA2; (+) strand; PAM type: NRG; PAM sequence: CAG
gttctcttttgtttttatgt

SEQ ID NO: 154406 - DNA, 20 bp, Artificial Sequence
  Description of Artificial Sequence: Synthetic oligonucleotide
  Target: LAMA2; (+) strand; PAM type: NRG; PAM sequence: GAG
ttttgtttttatgtcagttt

SEQ ID NO: 154407 - DNA, 20 bp, Artificial Sequence
  Description of Artificial Sequence: Synthetic oligonucleotide
  Target: LAMA2; (+) strand; PAM type: NRG; PAM sequence: GAG
ttgtttttatgtcagtttga

SEQ ID NO: 154408 - DNA, 20 bp, Artificial Sequence
  Description of Artificial Sequence: Synthetic oligonucleotide
  Target: LAMA2; (+) strand; PAM type: NRG; PAM sequence: TAG
tttttatgtcagtttgagag

SEQ ID NO: 154409 - DNA, 20 bp, Artificial Sequence
  Description of Artificial Sequence: Synthetic oligonucleotide
  Target: LAMA2; (+) strand; PAM type: NRG; PAM sequence: AAG
ttatgtcagtttgagagtag

SEQ ID NO: 154410 - DNA, 20 bp, Artificial Sequence
  Description of Artificial Sequence: Synthetic oligonucleotide
  Target: LAMA2; (+) strand; PAM type: NRG; PAM sequence: GAG
gagagtagaagaatatcctt

SEQ ID NO: 154411 - DNA, 20 bp, Artificial Sequence
  Description of Artificial Sequence: Synthetic oligonucleotide
  Target: LAMA2; (+) strand; PAM type: NRG; PAM sequence: AGG
agagtagaagaatatccttg

SEQ ID NO: 154412 - DNA, 20 bp, Artificial Sequence
  Description of Artificial Sequence: Synthetic oligonucleotide
  Target: LAMA2; (+) strand; PAM type: NRG; PAM sequence: GGG
gagtagaagaatatccttga

SEQ ID NO: 154413 - DNA, 20 bp, Artificial Sequence
  Description of Artificial Sequence: Synthetic oligonucleotide
  Target: LAMA2; (+) strand; PAM type: NRG; PAM sequence: TAG
aaaacatgcctttcatacat

SEQ ID NO: 154414 - DNA, 20 bp, Artificial Sequence
  Description of Artificial Sequence: Synthetic oligonucleotide
  Target: LAMA2; (+) strand; PAM type: NRG; PAM sequence: GAG
aacatgcctttcatacatta

SEQ ID NO: 154415 - DNA, 20 bp, Artificial Sequence
  Description of Artificial Sequence: Synthetic oligonucleotide
  Target: LAMA2; (+) strand; PAM type: NRG; PAM sequence: TAG
tttcatacattagagctgcc

SEQ ID NO: 154416 - DNA, 20 bp, Artificial Sequence
  Description of Artificial Sequence: Synthetic oligonucleotide
  Target: LAMA2; (+) strand; PAM type: NRG; PAM sequence: GAG
tcatacattagagctgccta

SEQ ID NO: 154417 - DNA, 20 bp, Artificial Sequence
  Description of Artificial Sequence: Synthetic oligonucleotide
  Target: LAMA2; (+) strand; PAM type: NRG; PAM sequence: TAG
cattagagctgcctagagca

SEQ ID NO: 154418 - DNA, 20 bp, Artificial Sequence
  Description of Artificial Sequence: Synthetic oligonucleotide
  Target: LAMA2; (+) strand; PAM type: NRG; PAM sequence: TGG
gagctgcctagagcatagtc

SEQ ID NO: 154419 - DNA, 20 bp, Artificial Sequence
  Description of Artificial Sequence: Synthetic oligonucleotide
  Target: LAMA2; (+) strand; PAM type: NRG; PAM sequence: TGG
ataattaaactgatgttctt

SEQ ID NO: 154420 - DNA, 20 bp, Artificial Sequence
  Description of Artificial Sequence: Synthetic oligonucleotide
  Target: LAMA2; (+) strand; PAM type: NRG; PAM sequence: GAG
aaactgatgttctttggaat

SEQ ID NO: 154421 - DNA, 20 bp, Artificial Sequence
  Description of Artificial Sequence: Synthetic oligonucleotide
  Target: LAMA2; (+) strand; PAM type: NRG; PAM sequence: AGG
aactgatgttctttggaatg

SEQ ID NO: 154422 - DNA, 20 bp, Artificial Sequence
  Description of Artificial Sequence: Synthetic oligonucleotide
  Target: LAMA2; (+) strand; PAM type: NRG; PAM sequence: TGG
gatgttctttggaatgagga

SEQ ID NO: 154423 - DNA, 20 bp, Artificial Sequence
  Description of Artificial Sequence: Synthetic oligonucleotide
  Target: LAMA2; (+) strand; PAM type: NRG; PAM sequence: GAG
tgttctttggaatgaggatg

SEQ ID NO: 154424 - DNA, 20 bp, Artificial Sequence
  Description of Artificial Sequence: Synthetic oligonucleotide
  Target: LAMA2; (+) strand; PAM type: NRG; PAM sequence: TAG
ggaatgaggatggagacaca

SEQ ID NO: 154425 - DNA, 20 bp, Artificial Sequence
  Description of Artificial Sequence: Synthetic oligonucleotide
  Target: LAMA2; (+) strand; PAM type: NRG; PAM sequence: AAG
atagttatctgaattgcctt

SEQ ID NO: 154426 - DNA, 20 bp, Artificial Sequence
  Description of Artificial Sequence: Synthetic oligonucleotide
  Target: LAMA2; (+) strand; PAM type: NRG; PAM sequence: TAG
ttatctgaattgccttaagc

SEQ ID NO: 154427 - DNA, 20 bp, Artificial Sequence
  Description of Artificial Sequence: Synthetic oligonucleotide
  Target: LAMA2; (+) strand; PAM type: NRG; PAM sequence: AAG
ccttaagctagttttgcaat

SEQ ID NO: 154428 - DNA, 20 bp, Artificial Sequence
  Description of Artificial Sequence: Synthetic oligonucleotide
  Target: LAMA2; (+) strand; PAM type: NRG; PAM sequence: TAG
taagctagttttgcaataag

SEQ ID NO: 154429 - DNA, 20 bp, Artificial Sequence
  Description of Artificial Sequence: Synthetic oligonucleotide
  Target: LAMA2; (+) strand; PAM type: NRG; PAM sequence: TAG
taagtagatttttactattc

SEQ ID NO: 154430 - DNA, 20 bp, Artificial Sequence
  Description of Artificial Sequence: Synthetic oligonucleotide
  Target: LAMA2; (+) strand; PAM type: NRG; PAM sequence: AAG
aatgaatcatgctatgttac

SEQ ID NO: 154431 - DNA, 20 bp, Artificial Sequence
  Description of Artificial Sequence: Synthetic oligonucleotide
  Target: LAMA2; (+) strand; PAM type: NRG; PAM sequence: AAG
aatcatgctatgttacaagt

SEQ ID NO: 154432 - DNA, 20 bp, Artificial Sequence
  Description of Artificial Sequence: Synthetic oligonucleotide
  Target: LAMA2; (+) strand; PAM type: NRG; PAM sequence: TGG
tacaagtaagtattaattaa

SEQ ID NO: 154433 - DNA, 20 bp, Artificial Sequence
  Description of Artificial Sequence: Synthetic oligonucleotide
  Target: LAMA2; (+) strand; PAM type: NRG; PAM sequence: AAG
taagtattaattaatggttg

SEQ ID NO: 154434 - DNA, 20 bp, Artificial Sequence
  Description of Artificial Sequence: Synthetic oligonucleotide
  Target: LAMA2; (+) strand; PAM type: NRG; PAM sequence: CAG
ttatatgataatctacatca

SEQ ID NO: 154435 - DNA, 20 bp, Artificial Sequence
  Description of Artificial Sequence: Synthetic oligonucleotide
  Target: LAMA2; (+) strand; PAM type: NRG; PAM sequence: AAG
gataatctacatcacagtga

SEQ ID NO: 154436 - DNA, 20 bp, Artificial Sequence
  Description of Artificial Sequence: Synthetic oligonucleotide
  Target: LAMA2; (+) strand; PAM type: NRG; PAM sequence: AGG
ataatctacatcacagtgaa

SEQ ID NO: 154437 - DNA, 20 bp, Artificial Sequence
  Description of Artificial Sequence: Synthetic oligonucleotide
  Target: LAMA2; (+) strand; PAM type: NRG; PAM sequence: TAG
gaatttatcatgacaaatgc

SEQ ID NO: 154438 - DNA, 20 bp, Artificial Sequence
  Description of Artificial Sequence: Synthetic oligonucleotide
  Target: LAMA2; (+) strand; PAM type: NRG; PAM sequence: CAG
tgctagtcaatgttgaatca

SEQ ID NO: 154439 - DNA, 20 bp, Artificial Sequence
  Description of Artificial Sequence: Synthetic oligonucleotide
  Target: LAMA2; (+) strand; PAM type: NRG; PAM sequence: GAG
ctagtcaatgttgaatcaca

SEQ ID NO: 154440 - DNA, 20 bp, Artificial Sequence
  Description of Artificial Sequence: Synthetic oligonucleotide
  Target: LAMA2; (+) strand; PAM type: NRG; PAM sequence: AGG
tagtcaatgttgaatcacag

SEQ ID NO: 154441 - DNA, 20 bp, Artificial Sequence
  Description of Artificial Sequence: Synthetic oligonucleotide
  Target: LAMA2; (+) strand; PAM type: NRG; PAM sequence: GGG
agtcaatgttgaatcacaga

SEQ ID NO: 154442 - DNA, 20 bp, Artificial Sequence
  Description of Artificial Sequence: Synthetic oligonucleotide
  Target: LAMA2; (+) strand; PAM type: NRG; PAM sequence: GAG
tgaatcacagagggctatat

SEQ ID NO: 154443 - DNA, 20 bp, Artificial Sequence
  Description of Artificial Sequence: Synthetic oligonucleotide
  Target: LAMA2; (+) strand; PAM type: NRG; PAM sequence: AAG
gagatccattttcattctta

SEQ ID NO: 154444 - DNA, 20 bp, Artificial Sequence
  Description of Artificial Sequence: Synthetic oligonucleotide
  Target: LAMA2; (+) strand; PAM type: NRG; PAM sequence: TGG
attatatctttttattaata

SEQ ID NO: 154445 - DNA, 20 bp, Artificial Sequence
  Description of Artificial Sequence: Synthetic oligonucleotide
  Target: LAMA2; (+) strand; PAM type: NRG; PAM sequence: TGG
atatctttttattaatatgg

SEQ ID NO: 154446 - DNA, 20 bp, Artificial Sequence
  Description of Artificial Sequence: Synthetic oligonucleotide
  Target: LAMA2; (+) strand; PAM type: NRG; PAM sequence: CAG
taatatggtggatatttact

SEQ ID NO: 154447 - DNA, 20 bp, Artificial Sequence
  Description of Artificial Sequence: Synthetic oligonucleotide
  Target: LAMA2; (+) strand; PAM type: NRG; PAM sequence: AAG
tatttactcagtaaataata

SEQ ID NO: 154448 - DNA, 20 bp, Artificial Sequence
  Description of Artificial Sequence: Synthetic oligonucleotide
  Target: LAMA2; (+) strand; PAM type: NRG; PAM sequence: AAG
taataaagaaaactaatatg

SEQ ID NO: 154449 - DNA, 20 bp, Artificial Sequence
  Description of Artificial Sequence: Synthetic oligonucleotide
  Target: LAMA2; (+) strand; PAM type: NRG; PAM sequence: TAG
catgatttttgttgcacaat

SEQ ID NO: 154450 - DNA, 20 bp, Artificial Sequence
  Description of Artificial Sequence: Synthetic oligonucleotide
  Target: LAMA2; (+) strand; PAM type: NRG; PAM sequence: AAG
tgcacaattagaaaatactt

SEQ ID NO: 154451 - DNA, 20 bp, Artificial Sequence
  Description of Artificial Sequence: Synthetic oligonucleotide
  Target: LAMA2; (+) strand; PAM type: NRG; PAM sequence: GAG
tagaaaatacttaagttctt

SEQ ID NO: 154452 - DNA, 20 bp, Artificial Sequence
  Description of Artificial Sequence: Synthetic oligonucleotide
  Target: LAMA2; (+) strand; PAM type: NRG; PAM sequence: TAG
aatacttaagttcttgagaa

SEQ ID NO: 154453 - DNA, 20 bp, Artificial Sequence
  Description of Artificial Sequence: Synthetic oligonucleotide
  Target: LAMA2; (+) strand; PAM type: NRG; PAM sequence: TGG
cttaagttcttgagaatagt

SEQ ID NO: 154454 - DNA, 20 bp, Artificial Sequence
  Description of Artificial Sequence: Synthetic oligonucleotide
  Target: LAMA2; (+) strand; PAM type: NRG; PAM sequence: AAG
agttcttgagaatagttgga

SEQ ID NO: 154455 - DNA, 20 bp, Artificial Sequence
  Description of Artificial Sequence: Synthetic oligonucleotide
  Target: LAMA2; (+) strand; PAM type: NRG; PAM sequence: AGG
gttcttgagaatagttggaa

SEQ ID NO: 154456 - DNA, 20 bp, Artificial Sequence
  Description of Artificial Sequence: Synthetic oligonucleotide
  Target: LAMA2; (+) strand; PAM type: NRG; PAM sequence: GGG
ttcttgagaatagttggaaa

SEQ ID NO: 154457 - DNA, 20 bp, Artificial Sequence
  Description of Artificial Sequence: Synthetic oligonucleotide
  Target: LAMA2; (+) strand; PAM type: NRG; PAM sequence: CAG
ttggaaagggttgtaatgat

SEQ ID NO: 154458 - DNA, 20 bp, Artificial Sequence
  Description of Artificial Sequence: Synthetic oligonucleotide
  Target: LAMA2; (+) strand; PAM type: NRG; PAM sequence: AAG
attatacctaaacatgtatt

SEQ ID NO: 154459 - DNA, 20 bp, Artificial Sequence
  Description of Artificial Sequence: Synthetic oligonucleotide
  Target: LAMA2; (+) strand; PAM type: NRG; PAM sequence: TAG
taagaccttgttttaaaaat

SEQ ID NO: 154460 - DNA, 20 bp, Artificial Sequence
  Description of Artificial Sequence: Synthetic oligonucleotide
  Target: LAMA2; (+) strand; PAM type: NRG; PAM sequence: TGG
ttgttttaaaaattagatct

SEQ ID NO: 154461 - DNA, 20 bp, Artificial Sequence
  Description of Artificial Sequence: Synthetic oligonucleotide
  Target: LAMA2; (+) strand; PAM type: NRG; PAM sequence: GAG
gttttaaaaattagatcttg

SEQ ID NO: 154462 - DNA, 20 bp, Artificial Sequence
  Description of Artificial Sequence: Synthetic oligonucleotide
  Target: LAMA2; (+) strand; PAM type: NRG; PAM sequence: AAG
taaaaattagatcttggagc

SEQ ID NO: 154463 - DNA, 20 bp, Artificial Sequence
  Description of Artificial Sequence: Synthetic oligonucleotide
  Target: LAMA2; (+) strand; PAM type: NRG; PAM sequence: AAG
aaattagatcttggagcaag

SEQ ID NO: 154464 - DNA, 20 bp, Artificial Sequence
  Description of Artificial Sequence: Synthetic oligonucleotide
  Target: LAMA2; (+) strand; PAM type: NRG; PAM sequence: AGG
aattagatcttggagcaaga

SEQ ID NO: 154465 - DNA, 20 bp, Artificial Sequence
  Description of Artificial Sequence: Synthetic oligonucleotide
  Target: LAMA2; (+) strand; PAM type: NRG; PAM sequence: AAG
agatcttggagcaagaaggt

SEQ ID NO: 154466 - DNA, 20 bp, Artificial Sequence
  Description of Artificial Sequence: Synthetic oligonucleotide
  Target: LAMA2; (+) strand; PAM type: NRG; PAM sequence: TAG
aagctgtatcattacgttct

SEQ ID NO: 154467 - DNA, 20 bp, Artificial Sequence
  Description of Artificial Sequence: Synthetic oligonucleotide
  Target: LAMA2; (+) strand; PAM type: NRG; PAM sequence: CAG
atcattacgttcttagaata

SEQ ID NO: 154468 - DNA, 20 bp, Artificial Sequence
  Description of Artificial Sequence: Synthetic oligonucleotide
  Target: LAMA2; (+) strand; PAM type: NRG; PAM sequence: AGG
tcattacgttcttagaatac

SEQ ID NO: 154469 - DNA, 20 bp, Artificial Sequence
  Description of Artificial Sequence: Synthetic oligonucleotide
  Target: LAMA2; (+) strand; PAM type: NRG; PAM sequence: GGG
cattacgttcttagaataca

SEQ ID NO: 154470 - DNA, 20 bp, Artificial Sequence
  Description of Artificial Sequence: Synthetic oligonucleotide
  Target: LAMA2; (+) strand; PAM type: NRG; PAM sequence: TGG
acgttcttagaatacagggt

SEQ ID NO: 154471 - DNA, 20 bp, Artificial Sequence
  Description of Artificial Sequence: Synthetic oligonucleotide
  Target: LAMA2; (+) strand; PAM type: NRG; PAM sequence: GGG
cgttcttagaatacagggtt

SEQ ID NO: 154472 - DNA, 20 bp, Artificial Sequence
  Description of Artificial Sequence: Synthetic oligonucleotide
  Target: LAMA2; (+) strand; PAM type: NRG; PAM sequence: TGG
ttagaatacagggttgggcg

SEQ ID NO: 154473 - DNA, 20 bp, Artificial Sequence
  Description of Artificial Sequence: Synthetic oligonucleotide
  Target: LAMA2; (+) strand; PAM type: NRG; PAM sequence: GGG
tagaatacagggttgggcgt

SEQ ID NO: 154474 - DNA, 20 bp, Artificial Sequence
  Description of Artificial Sequence: Synthetic oligonucleotide
  Target: LAMA2; (+) strand; PAM type: NRG; PAM sequence: GGG
agaatacagggttgggcgtg

SEQ ID NO: 154475 - DNA, 20 bp, Artificial Sequence
  Description of Artificial Sequence: Synthetic oligonucleotide
  Target: LAMA2; (+) strand; PAM type: NRG; PAM sequence: GGG
gaatacagggttgggcgtgg

SEQ ID NO: 154476 - DNA, 20 bp, Artificial Sequence
  Description of Artificial Sequence: Synthetic oligonucleotide
  Target: LAMA2; (+) strand; PAM type: NRG; PAM sequence: CAG
ggggctcatgcctgtaatcc

SEQ ID NO: 154477 - DNA, 20 bp, Artificial Sequence
  Description of Artificial Sequence: Synthetic oligonucleotide
  Target: LAMA2; (+) strand; PAM type: NRG; PAM sequence: TGG
tgcctgtaatcccagcattt

SEQ ID NO: 154478 - DNA, 20 bp, Artificial Sequence
  Description of Artificial Sequence: Synthetic oligonucleotide
  Target: LAMA2; (+) strand; PAM type: NRG; PAM sequence: GGG
gcctgtaatcccagcatttt

SEQ ID NO: 154479 - DNA, 20 bp, Artificial Sequence
  Description of Artificial Sequence: Synthetic oligonucleotide
  Target: LAMA2; (+) strand; PAM type: NRG; PAM sequence: GAG
ctgtaatcccagcattttgg

SEQ ID NO: 154480 - DNA, 20 bp, Artificial Sequence
  Description of Artificial Sequence: Synthetic oligonucleotide
  Target: LAMA2; (+) strand; PAM type: NRG; PAM sequence: AGG
tgtaatcccagcattttggg

SEQ ID NO: 154481 - DNA, 20 bp, Artificial Sequence
  Description of Artificial Sequence: Synthetic oligonucleotide
  Target: LAMA2; (+) strand; PAM type: NRG; PAM sequence: GAG
tcccagcattttgggaggct

SEQ ID NO: 154482 - DNA, 20 bp, Artificial Sequence
  Description of Artificial Sequence: Synthetic oligonucleotide
  Target: LAMA2; (+) strand; PAM type: NRG; PAM sequence: AGG
cccagcattttgggaggctg

SEQ ID NO: 154483 - DNA, 20 bp, Artificial Sequence
  Description of Artificial Sequence: Synthetic oligonucleotide
  Target: LAMA2; (+) strand; PAM type: NRG; PAM sequence: CGG
agcattttgggaggctgagg

SEQ ID NO: 154484 - DNA, 20 bp, Artificial Sequence
  Description of Artificial Sequence: Synthetic oligonucleotide
  Target: LAMA2; (+) strand; PAM type: NRG; PAM sequence: GGG
gcattttgggaggctgaggc

SEQ ID NO: 154485 - DNA, 20 bp, Artificial Sequence
  Description of Artificial Sequence: Synthetic oligonucleotide
  Target: LAMA2; (+) strand; PAM type: NRG; PAM sequence: TGG
ttttgggaggctgaggcggg

SEQ ID NO: 154486 - DNA, 20 bp, Artificial Sequence
  Description of Artificial Sequence: Synthetic oligonucleotide
  Target: LAMA2; (+) strand; PAM type: NRG; PAM sequence: GAG
ggctgaggcgggtggatcac

SEQ ID NO: 154487 - DNA, 20 bp, Artificial Sequence
  Description of Artificial Sequence: Synthetic oligonucleotide
  Target: LAMA2; (+) strand; PAM type: NRG; PAM sequence: AGG
gctgaggcgggtggatcacg

SEQ ID NO: 154488 - DNA, 20 bp, Artificial Sequence
  Description of Artificial Sequence: Synthetic oligonucleotide
  Target: LAMA2; (+) strand; PAM type: NRG; PAM sequence: CAG
aggcgggtggatcacgaggt

SEQ ID NO: 154489 - DNA, 20 bp, Artificial Sequence
  Description of Artificial Sequence: Synthetic oligonucleotide
  Target: LAMA2; (+) strand; PAM type: NRG; PAM sequence: AGG
ggcgggtggatcacgaggtc

SEQ ID NO: 154490 - DNA, 20 bp, Artificial Sequence
  Description of Artificial Sequence: Synthetic oligonucleotide
  Target: LAMA2; (+) strand; PAM type: NRG; PAM sequence: GAG
cgggtggatcacgaggtcag

SEQ ID NO: 154491 - DNA, 20 bp, Artificial Sequence
  Description of Artificial Sequence: Synthetic oligonucleotide
  Target: LAMA2; (+) strand; PAM type: NRG; PAM sequence: AAG
gatcacgaggtcaggagatc

SEQ ID NO: 154492 - DNA, 20 bp, Artificial Sequence
  Description of Artificial Sequence: Synthetic oligonucleotide
  Target: LAMA2; (+) strand; PAM type: NRG; PAM sequence: TGG
tcaggagatcaagaccatcc

SEQ ID NO: 154493 - DNA, 20 bp, Artificial Sequence
  Description of Artificial Sequence: Synthetic oligonucleotide
  Target: LAMA2; (+) strand; PAM type: NRG; PAM sequence: TGG
ctaaaaatacaaaaattacc

SEQ ID NO: 154494 - DNA, 20 bp, Artificial Sequence
  Description of Artificial Sequence: Synthetic oligonucleotide
  Target: LAMA2; (+) strand; PAM type: NRG; PAM sequence: GGG
taaaaatacaaaaattacct

SEQ ID NO: 154495 - DNA, 20 bp, Artificial Sequence
  Description of Artificial Sequence: Synthetic oligonucleotide
  Target: LAMA2; (+) strand; PAM type: NRG; PAM sequence: TGG
atacaaaaattacctgggta

SEQ ID NO: 154496 - DNA, 20 bp, Artificial Sequence
  Description of Artificial Sequence: Synthetic oligonucleotide
  Target: LAMA2; (+) strand; PAM type: NRG; PAM sequence: TGG
caaaaattacctgggtatgg

SEQ ID NO: 154497 - DNA, 20 bp, Artificial Sequence
  Description of Artificial Sequence: Synthetic oligonucleotide
  Target: LAMA2; (+) strand; PAM type: NRG; PAM sequence: CAG
gtggcgtgtgcctgtaatcc

SEQ ID NO: 154498 - DNA, 20 bp, Artificial Sequence
  Description of Artificial Sequence: Synthetic oligonucleotide
  Target: LAMA2; (+) strand; PAM type: NRG; PAM sequence: TGG
tgcctgtaatcccagctact

SEQ ID NO: 154499 - DNA, 20 bp, Artificial Sequence
  Description of Artificial Sequence: Synthetic oligonucleotide
  Target: LAMA2; (+) strand; PAM type: NRG; PAM sequence: GGG
gcctgtaatcccagctactt

SEQ ID NO: 154500 - DNA, 20 bp, Artificial Sequence
  Description of Artificial Sequence: Synthetic oligonucleotide
  Target: LAMA2; (+) strand; PAM type: NRG; PAM sequence: GAG
ctgtaatcccagctacttgg

SEQ ID NO: 154501 - DNA, 20 bp, Artificial Sequence
  Description of Artificial Sequence: Synthetic oligonucleotide
  Target: LAMA2; (+) strand; PAM type: NRG; PAM sequence: AGG
tgtaatcccagctacttggg

SEQ ID NO: 154502 - DNA, 20 bp, Artificial Sequence
  Description of Artificial Sequence: Synthetic oligonucleotide
  Target: LAMA2; (+) strand; PAM type: NRG; PAM sequence: GAG
tcccagctacttgggaggct

SEQ ID NO: 154503 - DNA, 20 bp, Artificial Sequence
  Description of Artificial Sequence: Synthetic oligonucleotide
  Target: LAMA2; (+) strand; PAM type: NRG; PAM sequence: AGG
cccagctacttgggaggctg

SEQ ID NO: 154504 - DNA, 20 bp, Artificial Sequence
  Description of Artificial Sequence: Synthetic oligonucleotide
  Target: LAMA2; (+) strand; PAM type: NRG; PAM sequence: CAG
agctacttgggaggctgagg

SEQ ID NO: 154505 - DNA, 20 bp, Artificial Sequence
  Description of Artificial Sequence: Synthetic oligonucleotide
  Target: LAMA2; (+) strand; PAM type: NRG; PAM sequence: AGG
gctacttgggaggctgaggc

SEQ ID NO: 154506 - DNA, 20 bp, Artificial Sequence
  Description of Artificial Sequence: Synthetic oligonucleotide
  Target: LAMA2; (+) strand; PAM type: NRG; PAM sequence: GAG
tacttgggaggctgaggcag

SEQ ID NO: 154507 - DNA, 20 bp, Artificial Sequence
  Description of Artificial Sequence: Synthetic oligonucleotide
  Target: LAMA2; (+) strand; PAM type: NRG; PAM sequence: CAG
gcaggagaatcgcttgaacc

SEQ ID NO: 154508 - DNA, 20 bp, Artificial Sequence
  Description of Artificial Sequence: Synthetic oligonucleotide
  Target: LAMA2; (+) strand; PAM type: NRG; PAM sequence: AGG
caggagaatcgcttgaaccc

SEQ ID NO: 154509 - DNA, 20 bp, Artificial Sequence
  Description of Artificial Sequence: Synthetic oligonucleotide
  Target: LAMA2; (+) strand; PAM type: NRG; PAM sequence: GAG
ggagaatcgcttgaacccag

SEQ ID NO: 154510 - DNA, 20 bp, Artificial Sequence
  Description of Artificial Sequence: Synthetic oligonucleotide
  Target: LAMA2; (+) strand; PAM type: NRG; PAM sequence: AGG
gagaatcgcttgaacccagg

SEQ ID NO: 154511 - DNA, 20 bp, Artificial Sequence
  Description of Artificial Sequence: Synthetic oligonucleotide
  Target: LAMA2; (+) strand; PAM type: NRG; PAM sequence: CGG
aatcgcttgaacccaggagg

SEQ ID NO: 154512 - DNA, 20 bp, Artificial Sequence
  Description of Artificial Sequence: Synthetic oligonucleotide
  Target: LAMA2; (+) strand; PAM type: NRG; PAM sequence: GAG
tcgcttgaacccaggaggcg

SEQ ID NO: 154513 - DNA, 20 bp, Artificial Sequence
  Description of Artificial Sequence: Synthetic oligonucleotide
  Target: LAMA2; (+) strand; PAM type: NRG; PAM sequence: AGG
cgcttgaacccaggaggcgg

SEQ ID NO: 154514 - DNA, 20 bp, Artificial Sequence
  Description of Artificial Sequence: Synthetic oligonucleotide
  Target: LAMA2; (+) strand; PAM type: NRG; PAM sequence: CAG
aacccaggaggcggaggttg

SEQ ID NO: 154515 - DNA, 20 bp, Artificial Sequence
  Description of Artificial Sequence: Synthetic oligonucleotide
  Target: LAMA2; (+) strand; PAM type: NRG; PAM sequence: GAG
caggaggcggaggttgcagt

SEQ ID NO: 154516 - DNA, 20 bp, Artificial Sequence
  Description of Artificial Sequence: Synthetic oligonucleotide
  Target: LAMA2; (+) strand; PAM type: NRG; PAM sequence: GAG
ggcggaggttgcagtgagct

SEQ ID NO: 154517 - DNA, 20 bp, Artificial Sequence
  Description of Artificial Sequence: Synthetic oligonucleotide
  Target: LAMA2; (+) strand; PAM type: NRG; PAM sequence: CAG
gagatcgtgcctctgcactc

SEQ ID NO: 154518 - DNA, 20 bp, Artificial Sequence
  Description of Artificial Sequence: Synthetic oligonucleotide
  Target: LAMA2; (+) strand; PAM type: NRG; PAM sequence: TGG
cgtgcctctgcactccagcc

SEQ ID NO: 154519 - DNA, 20 bp, Artificial Sequence
  Description of Artificial Sequence: Synthetic oligonucleotide
  Target: LAMA2; (+) strand; PAM type: NRG; PAM sequence: CAG
tctgcactccagcctggtga

SEQ ID NO: 154520 - DNA, 20 bp, Artificial Sequence
  Description of Artificial Sequence: Synthetic oligonucleotide
  Target: LAMA2; (+) strand; PAM type: NRG; PAM sequence: GAG
tgcactccagcctggtgaca

SEQ ID NO: 154521 - DNA, 20 bp, Artificial Sequence
  Description of Artificial Sequence: Synthetic oligonucleotide
  Target: LAMA2; (+) strand; PAM type: NRG; PAM sequence: GAG
ctccagcctggtgacagagc

SEQ ID NO: 154522 - DNA, 20 bp, Artificial Sequence
  Description of Artificial Sequence: Synthetic oligonucleotide
  Target: LAMA2; (+) strand; PAM type: NRG; PAM sequence: AAG
aaaaaaataataataataat

SEQ ID NO: 154523 - DNA, 20 bp, Artificial Sequence
  Description of Artificial Sequence: Synthetic oligonucleotide
  Target: LAMA2; (+) strand; PAM type: NRG; PAM sequence: AGG
aaaaaataataataataata

SEQ ID NO: 154524 - DNA, 20 bp, Artificial Sequence
  Description of Artificial Sequence: Synthetic oligonucleotide
  Target: LAMA2; (+) strand; PAM type: NRG; PAM sequence: GGG
aaaaataataataataataa

SEQ ID NO: 154525 - DNA, 20 bp, Artificial Sequence
  Description of Artificial Sequence: Synthetic oligonucleotide
  Target: LAMA2; (+) strand; PAM type: NRG; PAM sequence: AAG
ataataataagggtaaatac

SEQ ID NO: 154526 - DNA, 20 bp, Artificial Sequence
  Description of Artificial Sequence: Synthetic oligonucleotide
  Target: LAMA2; (+) strand; PAM type: NRG; PAM sequence: AGG
taataataagggtaaataca

SEQ ID NO: 154527 - DNA, 20 bp, Artificial Sequence
  Description of Artificial Sequence: Synthetic oligonucleotide
  Target: LAMA2; (+) strand; PAM type: NRG; PAM sequence: GAG
ataataagggtaaatacaag

SEQ ID NO: 154528 - DNA, 20 bp, Artificial Sequence
  Description of Artificial Sequence: Synthetic oligonucleotide
  Target: LAMA2; (+) strand; PAM type: NRG; PAM sequence: TAG
gaatacaaaatatctatttt

SEQ ID NO: 154529 - DNA, 20 bp, Artificial Sequence
  Description of Artificial Sequence: Synthetic oligonucleotide
  Target: LAMA2; (+) strand; PAM type: NRG; PAM sequence: GAG
ttttagaatctcaaacccat

SEQ ID NO: 154530 - DNA, 20 bp, Artificial Sequence
  Description of Artificial Sequence: Synthetic oligonucleotide
  Target: LAMA2; (+) strand; PAM type: NRG; PAM sequence: AAG
agttactttcttccatatat

SEQ ID NO: 154531 - DNA, 20 bp, Artificial Sequence
  Description of Artificial Sequence: Synthetic oligonucleotide
  Target: LAMA2; (+) strand; PAM type: NRG; PAM sequence: CAG
cccaacatgttttctataat

SEQ ID NO: 154532 - DNA, 20 bp, Artificial Sequence
  Description of Artificial Sequence: Synthetic oligonucleotide
  Target: LAMA2; (+) strand; PAM type: NRG; PAM sequence: TAG
tataatcagtctatgtctat

SEQ ID NO: 154533 - DNA, 20 bp, Artificial Sequence
  Description of Artificial Sequence: Synthetic oligonucleotide
  Target: LAMA2; (+) strand; PAM type: NRG; PAM sequence: TGG
cacatgaataccaaattatt

SEQ ID NO: 154534 - DNA, 20 bp, Artificial Sequence
  Description of Artificial Sequence: Synthetic oligonucleotide
  Target: LAMA2; (+) strand; PAM type: NRG; PAM sequence: TAG
gttaatcttcgaatttcttt

SEQ ID NO: 154535 - DNA, 20 bp, Artificial Sequence
  Description of Artificial Sequence: Synthetic oligonucleotide
  Target: LAMA2; (+) strand; PAM type: NRG; PAM sequence: CAG
agcaattatatactctcctc

SEQ ID NO: 154536 - DNA, 20 bp, Artificial Sequence
  Description of Artificial Sequence: Synthetic oligonucleotide
  Target: LAMA2; (+) strand; PAM type: NRG; PAM sequence: AGG
gcaattatatactctcctcc

SEQ ID NO: 154537 - DNA, 20 bp, Artificial Sequence
  Description of Artificial Sequence: Synthetic oligonucleotide
  Target: LAMA2; (+) strand; PAM type: NRG; PAM sequence: TAG
ttatatactctcctccaggt

SEQ ID NO: 154538 - DNA, 20 bp, Artificial Sequence
  Description of Artificial Sequence: Synthetic oligonucleotide
  Target: LAMA2; (+) strand; PAM type: NRG; PAM sequence: GAG
actctcctccaggttagatt

SEQ ID NO: 154539 - DNA, 20 bp, Artificial Sequence
  Description of Artificial Sequence: Synthetic oligonucleotide
  Target: LAMA2; (+) strand; PAM type: NRG; PAM sequence: CAG
attgagctttcccttcaact

SEQ ID NO: 154540 - DNA, 20 bp, Artificial Sequence
  Description of Artificial Sequence: Synthetic oligonucleotide
  Target: LAMA2; (+) strand; PAM type: NRG; PAM sequence: GAG
tgagctttcccttcaactca

SEQ ID NO: 154541 - DNA, 20 bp, Artificial Sequence
  Description of Artificial Sequence: Synthetic oligonucleotide
  Target: LAMA2; (+) strand; PAM type: NRG; PAM sequence: CAG
tcccttcaactcagagaaat

SEQ ID NO: 154542 - DNA, 20 bp, Artificial Sequence
  Description of Artificial Sequence: Synthetic oligonucleotide
  Target: LAMA2; (+) strand; PAM type: NRG; PAM sequence: CAG
ctcagagaaatcagtgtcaa

SEQ ID NO: 154543 - DNA, 20 bp, Artificial Sequence
  Description of Artificial Sequence: Synthetic oligonucleotide
  Target: LAMA2; (+) strand; PAM type: NRG; PAM sequence: AGG
tcagagaaatcagtgtcaac

SEQ ID NO: 154544 - DNA, 20 bp, Artificial Sequence
  Description of Artificial Sequence: Synthetic oligonucleotide
  Target: LAMA2; (+) strand; PAM type: NRG; PAM sequence: AAG
gtcaacaggctaccttctgt

SEQ ID NO: 154545 - DNA, 20 bp, Artificial Sequence
  Description of Artificial Sequence: Synthetic oligonucleotide
  Target: LAMA2; (+) strand; PAM type: NRG; PAM sequence: CAG
gctaccttctgtaagactac

SEQ ID NO: 154546 - DNA, 20 bp, Artificial Sequence
  Description of Artificial Sequence: Synthetic oligonucleotide
  Target: LAMA2; (+) strand; PAM type: NRG; PAM sequence: GAG
taccttctgtaagactacca

SEQ ID NO: 154547 - DNA, 20 bp, Artificial Sequence
  Description of Artificial Sequence: Synthetic oligonucleotide
  Target: LAMA2; (+) strand; PAM type: NRG; PAM sequence: GAG
ccttctgtaagactaccaga

SEQ ID NO: 154548 - DNA, 20 bp, Artificial Sequence
  Description of Artificial Sequence: Synthetic oligonucleotide
  Target: LAMA2; (+) strand; PAM type: NRG; PAM sequence: AAG
gctatgcattactctgtaca

SEQ ID NO: 154549 - DNA, 20 bp, Artificial Sequence
  Description of Artificial Sequence: Synthetic oligonucleotide
  Target: LAMA2; (+) strand; PAM type: NRG; PAM sequence: AGG
ctatgcattactctgtacaa

SEQ ID NO: 154550 - DNA, 20 bp, Artificial Sequence
  Description of Artificial Sequence: Synthetic oligonucleotide
  Target: LAMA2; (+) strand; PAM type: NRG; PAM sequence: TAG
aaggatatttctcctataaa

SEQ ID NO: 154551 - DNA, 20 bp, Artificial Sequence
  Description of Artificial Sequence: Synthetic oligonucleotide
  Target: LAMA2; (+) strand; PAM type: NRG; PAM sequence: TAG
cctataaatagtgctttcaa

SEQ ID NO: 154552 - DNA, 20 bp, Artificial Sequence
  Description of Artificial Sequence: Synthetic oligonucleotide
  Target: LAMA2; (+) strand; PAM type: NRG; PAM sequence: GAG
tataaatagtgctttcaata

SEQ ID NO: 154553 - DNA, 20 bp, Artificial Sequence
  Description of Artificial Sequence: Synthetic oligonucleotide
  Target: LAMA2; (+) strand; PAM type: NRG; PAM sequence: CAG
aaaatctgttatcatgttgt

SEQ ID NO: 154554 - DNA, 20 bp, Artificial Sequence
  Description of Artificial Sequence: Synthetic oligonucleotide
  Target: LAMA2; (+) strand; PAM type: NRG; PAM sequence: TGG
aattcaaatattttctcttt

SEQ ID NO: 154555 - DNA, 20 bp, Artificial Sequence
  Description of Artificial Sequence: Synthetic oligonucleotide
  Target: LAMA2; (+) strand; PAM type: NRG; PAM sequence: AAG
tactctgttcctattaaaac

SEQ ID NO: 154556 - DNA, 20 bp, Artificial Sequence
  Description of Artificial Sequence: Synthetic oligonucleotide
  Target: LAMA2; (+) strand; PAM type: NRG; PAM sequence: GAG
ctctgttcctattaaaacaa

SEQ ID NO: 154557 - DNA, 20 bp, Artificial Sequence
  Description of Artificial Sequence: Synthetic oligonucleotide
  Target: LAMA2; (+) strand; PAM type: NRG; PAM sequence: AAG
gctgtttccttctttgaaac

SEQ ID NO: 154558 - DNA, 20 bp, Artificial Sequence
  Description of Artificial Sequence: Synthetic oligonucleotide
  Target: LAMA2; (+) strand; PAM type: NRG; PAM sequence: TGG
acaagttatttatatttatg

SEQ ID NO: 154559 - DNA, 20 bp, Artificial Sequence
  Description of Artificial Sequence: Synthetic oligonucleotide
  Target: LAMA2; (+) strand; PAM type: NRG; PAM sequence: AAG
ttatttatatttatgtggtt

SEQ ID NO: 154560 - DNA, 20 bp, Artificial Sequence
  Description of Artificial Sequence: Synthetic oligonucleotide
  Target: LAMA2; (+) strand; PAM type: NRG; PAM sequence: AAG
gatatcctatcttaaaccat

SEQ ID NO: 154561 - DNA, 20 bp, Artificial Sequence
  Description of Artificial Sequence: Synthetic oligonucleotide
  Target: LAMA2; (+) strand; PAM type: NRG; PAM sequence: CAG
ctttttgaatacttcacata

SEQ ID NO: 154562 - DNA, 20 bp, Artificial Sequence
  Description of Artificial Sequence: Synthetic oligonucleotide
  Target: LAMA2; (+) strand; PAM type: NRG; PAM sequence: CAG
gaaaaaaattaaacaaatat

SEQ ID NO: 154563 - DNA, 20 bp, Artificial Sequence
  Description of Artificial Sequence: Synthetic oligonucleotide
  Target: LAMA2; (+) strand; PAM type: NRG; PAM sequence: GAG
aaaaaattaaacaaatatca

SEQ ID NO: 154564 - DNA, 20 bp, Artificial Sequence
  Description of Artificial Sequence: Synthetic oligonucleotide
  Target: LAMA2; (+) strand; PAM type: NRG; PAM sequence: TGG
taaacaaatatcagagttgc

SEQ ID NO: 154565 - DNA, 20 bp, Artificial Sequence
  Description of Artificial Sequence: Synthetic oligonucleotide
  Target: LAMA2; (+) strand; PAM type: NRG; PAM sequence: GGG
aaacaaatatcagagttgct

SEQ ID NO: 154566 - DNA, 20 bp, Artificial Sequence
  Description of Artificial Sequence: Synthetic oligonucleotide
  Target: LAMA2; (+) strand; PAM type: NRG; PAM sequence: CAG
atcagagttgctgggaaccc

SEQ ID NO: 154567 - DNA, 20 bp, Artificial Sequence
  Description of Artificial Sequence: Synthetic oligonucleotide
  Target: LAMA2; (+) strand; PAM type: NRG; PAM sequence: AGG
tcagagttgctgggaacccc

SEQ ID NO: 154568 - DNA, 20 bp, Artificial Sequence
  Description of Artificial Sequence: Synthetic oligonucleotide
  Target: LAMA2; (+) strand; PAM type: NRG; PAM sequence: TGG
ccccaggatataatctactg

SEQ ID NO: 154569 - DNA, 20 bp, Artificial Sequence
  Description of Artificial Sequence: Synthetic oligonucleotide
  Target: LAMA2; (+) strand; PAM type: NRG; PAM sequence: TAG
aggatataatctactgtgga

SEQ ID NO: 154570 - DNA, 20 bp, Artificial Sequence
  Description of Artificial Sequence: Synthetic oligonucleotide
  Target: LAMA2; (+) strand; PAM type: NRG; PAM sequence: TAG
ctactgtggatagtcattca

SEQ ID NO: 154571 - DNA, 20 bp, Artificial Sequence
  Description of Artificial Sequence: Synthetic oligonucleotide
  Target: LAMA2; (+) strand; PAM type: NRG; PAM sequence: AAG
tggatagtcattcatagaca

SEQ ID NO: 154572 - DNA, 20 bp, Artificial Sequence
  Description of Artificial Sequence: Synthetic oligonucleotide
  Target: LAMA2; (+) strand; PAM type: NRG; PAM sequence: TAG
acaaagacacctcctattta

SEQ ID NO: 154573 - DNA, 20 bp, Artificial Sequence
  Description of Artificial Sequence: Synthetic oligonucleotide
  Target: LAMA2; (+) strand; PAM type: NRG; PAM sequence: AGG
caaagacacctcctatttat

SEQ ID NO: 154574 - DNA, 20 bp, Artificial Sequence
  Description of Artificial Sequence: Synthetic oligonucleotide
  Target: LAMA2; (+) strand; PAM type: NRG; PAM sequence: TGG
acacctcctatttataggct

SEQ ID NO: 154575 - DNA, 20 bp, Artificial Sequence
  Description of Artificial Sequence: Synthetic oligonucleotide
  Target: LAMA2; (+) strand; PAM type: NRG; PAM sequence: GGG
cacctcctatttataggctt

SEQ ID NO: 154576 - DNA, 20 bp, Artificial Sequence
  Description of Artificial Sequence: Synthetic oligonucleotide
  Target: LAMA2; (+) strand; PAM type: NRG; PAM sequence: CAG
tcctatttataggcttggga

SEQ ID NO: 154577 - DNA, 20 bp, Artificial Sequence
  Description of Artificial Sequence: Synthetic oligonucleotide
  Target: LAMA2; (+) strand; PAM type: NRG; PAM sequence: CAG
tttataggcttgggacagtt

SEQ ID NO: 154578 - DNA, 20 bp, Artificial Sequence
  Description of Artificial Sequence: Synthetic oligonucleotide
  Target: LAMA2; (+) strand; PAM type: NRG; PAM sequence: AAG
agttcagcttctccaacttg

SEQ ID NO: 154579 - DNA, 20 bp, Artificial Sequence
  Description of Artificial Sequence: Synthetic oligonucleotide
  Target: LAMA2; (+) strand; PAM type: NRG; PAM sequence: GAG
ttcagcttctccaacttgaa

SEQ ID NO: 154580 - DNA, 20 bp, Artificial Sequence
  Description of Artificial Sequence: Synthetic oligonucleotide
  Target: LAMA2; (+) strand; PAM type: NRG; PAM sequence: GAG
cagcttctccaacttgaaga

SEQ ID NO: 154581 - DNA, 20 bp, Artificial Sequence
  Description of Artificial Sequence: Synthetic oligonucleotide
  Target: LAMA2; (+) strand; PAM type: NRG; PAM sequence: AAG
ccaacttgaagagagttttg

SEQ ID NO: 154582 - DNA, 20 bp, Artificial Sequence
  Description of Artificial Sequence: Synthetic oligonucleotide
  Target: LAMA2; (+) strand; PAM type: NRG; PAM sequence: TGG
ttttgaagatcaaatacaaa

SEQ ID NO: 154583 - DNA, 20 bp, Artificial Sequence
  Description of Artificial Sequence: Synthetic oligonucleotide
  Target: LAMA2; (+) strand; PAM type: NRG; PAM sequence: GGG
tttgaagatcaaatacaaat

SEQ ID NO: 154584 - DNA, 20 bp, Artificial Sequence
  Description of Artificial Sequence: Synthetic oligonucleotide
  Target: LAMA2; (+) strand; PAM type: NRG; PAM sequence: AAG
aaatacaaatgggtcttgtg

SEQ ID NO: 154585 - DNA, 20 bp, Artificial Sequence
  Description of Artificial Sequence: Synthetic oligonucleotide
  Target: LAMA2; (+) strand; PAM type: NRG; PAM sequence: AAG
gtttcaaaaaatgtttctca

SEQ ID NO: 154586 - DNA, 20 bp, Artificial Sequence
  Description of Artificial Sequence: Synthetic oligonucleotide
  Target: LAMA2; (+) strand; PAM type: NRG; PAM sequence: GAG
aatgtttctcaaagtccttt

SEQ ID NO: 154587 - DNA, 20 bp, Artificial Sequence
  Description of Artificial Sequence: Synthetic oligonucleotide
  Target: LAMA2; (+) strand; PAM type: NRG; PAM sequence: TGG
tcctttgagaaaaataaact

SEQ ID NO: 154588 - DNA, 20 bp, Artificial Sequence
  Description of Artificial Sequence: Synthetic oligonucleotide
  Target: LAMA2; (+) strand; PAM type: NRG; PAM sequence: GGG
cctttgagaaaaataaactt

SEQ ID NO: 154589 - DNA, 20 bp, Artificial Sequence
  Description of Artificial Sequence: Synthetic oligonucleotide
  Target: LAMA2; (+) strand; PAM type: NRG; PAM sequence: TAG
gaaaaataaacttgggcctg

SEQ ID NO: 154590 - DNA, 20 bp, Artificial Sequence
  Description of Artificial Sequence: Synthetic oligonucleotide
  Target: LAMA2; (+) strand; PAM type: NRG; PAM sequence: TAG
aaacttgggcctgtagccaa

SEQ ID NO: 154591 - DNA, 20 bp, Artificial Sequence
  Description of Artificial Sequence: Synthetic oligonucleotide
  Target: LAMA2; (+) strand; PAM type: NRG; PAM sequence: CAG
gtagccaatagtttgtattc

SEQ ID NO: 154592 - DNA, 20 bp, Artificial Sequence
  Description of Artificial Sequence: Synthetic oligonucleotide
  Target: LAMA2; (+) strand; PAM type: NRG; PAM sequence: AGG
tagccaatagtttgtattcc

SEQ ID NO: 154593 - DNA, 20 bp, Artificial Sequence
  Description of Artificial Sequence: Synthetic oligonucleotide
  Target: LAMA2; (+) strand; PAM type: NRG; PAM sequence: CAG
ttttaaaaaaaattcaaata

SEQ ID NO: 154594 - DNA, 20 bp, Artificial Sequence
  Description of Artificial Sequence: Synthetic oligonucleotide
  Target: LAMA2; (+) strand; PAM type: NRG; PAM sequence: CAG
aaattcaaatacagaaacat

SEQ ID NO: 154595 - DNA, 20 bp, Artificial Sequence
  Description of Artificial Sequence: Synthetic oligonucleotide
  Target: LAMA2; (+) strand; PAM type: NRG; PAM sequence: TAG
acatcagattttcattgcca

SEQ ID NO: 154596 - DNA, 20 bp, Artificial Sequence
  Description of Artificial Sequence: Synthetic oligonucleotide
  Target: LAMA2; (+) strand; PAM type: NRG; PAM sequence: AGG
catcagattttcattgccat

SEQ ID NO: 154597 - DNA, 20 bp, Artificial Sequence
  Description of Artificial Sequence: Synthetic oligonucleotide
  Target: LAMA2; (+) strand; PAM type: NRG; PAM sequence: GGG
atcagattttcattgccata

SEQ ID NO: 154598 - DNA, 20 bp, Artificial Sequence
  Description of Artificial Sequence: Synthetic oligonucleotide
  Target: LAMA2; (+) strand; PAM type: NRG; PAM sequence: GGG
tcagattttcattgccatag

SEQ ID NO: 154599 - DNA, 20 bp, Artificial Sequence
  Description of Artificial Sequence: Synthetic oligonucleotide
  Target: LAMA2; (+) strand; PAM type: NRG; PAM sequence: AAG
gtcatgacatcttttaacat

SEQ ID NO: 154600 - DNA, 20 bp, Artificial Sequence
  Description of Artificial Sequence: Synthetic oligonucleotide
  Target: LAMA2; (+) strand; PAM type: NRG; PAM sequence: CAG
gacatcttttaacataagtg

SEQ ID NO: 154601 - DNA, 20 bp, Artificial Sequence
  Description of Artificial Sequence: Synthetic oligonucleotide
  Target: LAMA2; (+) strand; PAM type: NRG; PAM sequence: CAG
taatgaatcaaaacttaaat

SEQ ID NO: 154602 - DNA, 20 bp, Artificial Sequence
  Description of Artificial Sequence: Synthetic oligonucleotide
  Target: LAMA2; (+) strand; PAM type: NRG; PAM sequence: AAG
aacttaaatcagatgacatt

SEQ ID NO: 154603 - DNA, 20 bp, Artificial Sequence
  Description of Artificial Sequence: Synthetic oligonucleotide
  Target: LAMA2; (+) strand; PAM type: NRG; PAM sequence: CAG
aaatcagatgacattaagac

SEQ ID NO: 154604 - DNA, 20 bp, Artificial Sequence
  Description of Artificial Sequence: Synthetic oligonucleotide
  Target: LAMA2; (+) strand; PAM type: NRG; PAM sequence: CAG
gaccagctttgctattacca

SEQ ID NO: 154605 - DNA, 20 bp, Artificial Sequence
  Description of Artificial Sequence: Synthetic oligonucleotide
  Target: LAMA2; (+) strand; PAM type: NRG; PAM sequence: TGG
agctttgctattaccacaga

SEQ ID NO: 154606 - DNA, 20 bp, Artificial Sequence
  Description of Artificial Sequence: Synthetic oligonucleotide
  Target: LAMA2; (+) strand; PAM type: NRG; PAM sequence: GAG
ttttaatatatcaaaaatgt

SEQ ID NO: 154607 - DNA, 20 bp, Artificial Sequence
  Description of Artificial Sequence: Synthetic oligonucleotide
  Target: LAMA2; (+) strand; PAM type: NRG; PAM sequence: CAG
tgagtgtactcatatattat

SEQ ID NO: 154608 - DNA, 20 bp, Artificial Sequence
  Description of Artificial Sequence: Synthetic oligonucleotide
  Target: LAMA2; (+) strand; PAM type: NRG; PAM sequence: CAG
atattccaacattaacatct

SEQ ID NO: 154609 - DNA, 20 bp, Artificial Sequence
  Description of Artificial Sequence: Synthetic oligonucleotide
  Target: LAMA2; (+) strand; PAM type: NRG; PAM sequence: TAG
gtacaatatttttcttcttc

SEQ ID NO: 154610 - DNA, 20 bp, Artificial Sequence
  Description of Artificial Sequence: Synthetic oligonucleotide
  Target: LAMA2; (+) strand; PAM type: NRG; PAM sequence: AAG
tctagacttttaatttcttg

SEQ ID NO: 154611 - DNA, 20 bp, Artificial Sequence
  Description of Artificial Sequence: Synthetic oligonucleotide
  Target: LAMA2; (+) strand; PAM type: NRG; PAM sequence: AGG
ctagacttttaatttcttga

SEQ ID NO: 154612 - DNA, 20 bp, Artificial Sequence
  Description of Artificial Sequence: Synthetic oligonucleotide
  Target: LAMA2; (+) strand; PAM type: NRG; PAM sequence: AAG
gacttttaatttcttgaagg

SEQ ID NO: 154613 - DNA, 20 bp, Artificial Sequence
  Description of Artificial Sequence: Synthetic oligonucleotide
  Target: LAMA2; (+) strand; PAM type: NRG; PAM sequence: AGG
acttttaatttcttgaagga

SEQ ID NO: 154614 - DNA, 20 bp, Artificial Sequence
  Description of Artificial Sequence: Synthetic oligonucleotide
  Target: LAMA2; (+) strand; PAM type: NRG; PAM sequence: TAG
aacgcattttactcatcttg

SEQ ID NO: 154615 - DNA, 20 bp, Artificial Sequence
  Description of Artificial Sequence: Synthetic oligonucleotide
  Target: LAMA2; (+) strand; PAM type: NRG; PAM sequence: GAG
cctccctgtacatgttgcct

SEQ ID NO: 154616 - DNA, 20 bp, Artificial Sequence
  Description of Artificial Sequence: Synthetic oligonucleotide
  Target: LAMA2; (+) strand; PAM type: NRG; PAM sequence: CAG
taactattcaaaaatgttta

SEQ ID NO: 154617 - DNA, 20 bp, Artificial Sequence
  Description of Artificial Sequence: Synthetic oligonucleotide
  Target: LAMA2; (+) strand; PAM type: NRG; PAM sequence: TGG
caatgaaattatataaatct

SEQ ID NO: 154618 - DNA, 20 bp, Artificial Sequence
  Description of Artificial Sequence: Synthetic oligonucleotide
  Target: LAMA2; (+) strand; PAM type: NRG; PAM sequence: AAG
tatataaatcttggtttaaa

SEQ ID NO: 154619 - DNA, 20 bp, Artificial Sequence
  Description of Artificial Sequence: Synthetic oligonucleotide
  Target: LAMA2; (+) strand; PAM type: NRG; PAM sequence: TGG
gatatacaatgaaacatact

SEQ ID NO: 154620 - DNA, 20 bp, Artificial Sequence
  Description of Artificial Sequence: Synthetic oligonucleotide
  Target: LAMA2; (+) strand; PAM type: NRG; PAM sequence: GGG
atatacaatgaaacatactt

SEQ ID NO: 154621 - DNA, 20 bp, Artificial Sequence
  Description of Artificial Sequence: Synthetic oligonucleotide
  Target: LAMA2; (+) strand; PAM type: NRG; PAM sequence: AAG
acatacttgggcaaattata

SEQ ID NO: 154622 - DNA, 20 bp, Artificial Sequence
  Description of Artificial Sequence: Synthetic oligonucleotide
  Target: LAMA2; (+) strand; PAM type: NRG; PAM sequence: GAG
caaattataaagctgttcct

SEQ ID NO: 154623 - DNA, 20 bp, Artificial Sequence
  Description of Artificial Sequence: Synthetic oligonucleotide
  Target: LAMA2; (+) strand; PAM type: NRG; PAM sequence: GAG
ataaagctgttcctgagaat

SEQ ID NO: 154624 - DNA, 20 bp, Artificial Sequence
  Description of Artificial Sequence: Synthetic oligonucleotide
  Target: LAMA2; (+) strand; PAM type: NRG; PAM sequence: TAG
agaatgagctaatacatatt

SEQ ID NO: 154625 - DNA, 20 bp, Artificial Sequence
  Description of Artificial Sequence: Synthetic oligonucleotide
  Target: LAMA2; (+) strand; PAM type: NRG; PAM sequence: GAG
tatttagttgttaaaattct

SEQ ID NO: 154626 - DNA, 20 bp, Artificial Sequence
  Description of Artificial Sequence: Synthetic oligonucleotide
  Target: LAMA2; (+) strand; PAM type: NRG; PAM sequence: AGG
atttagttgttaaaattctg

SEQ ID NO: 154627 - DNA, 20 bp, Artificial Sequence
  Description of Artificial Sequence: Synthetic oligonucleotide
  Target: LAMA2; (+) strand; PAM type: NRG; PAM sequence: GGG
tttagttgttaaaattctga

SEQ ID NO: 154628 - DNA, 20 bp, Artificial Sequence
  Description of Artificial Sequence: Synthetic oligonucleotide
  Target: LAMA2; (+) strand; PAM type: NRG; PAM sequence: GGG
ttagttgttaaaattctgag

SEQ ID NO: 154629 - DNA, 20 bp, Artificial Sequence
  Description of Artificial Sequence: Synthetic oligonucleotide
  Target: LAMA2; (+) strand; PAM type: NRG; PAM sequence: TAG
tctgaggggaaaatgtaaat

SEQ ID NO: 154630 - DNA, 20 bp, Artificial Sequence
  Description of Artificial Sequence: Synthetic oligonucleotide
  Target: LAMA2; (+) strand; PAM type: NRG; PAM sequence: AAG
gtgaactacctctacaatat

SEQ ID NO: 154631 - DNA, 20 bp, Artificial Sequence
  Description of Artificial Sequence: Synthetic oligonucleotide
  Target: LAMA2; (+) strand; PAM type: NRG; PAM sequence: TAG
actacctctacaatataaga

SEQ ID NO: 154632 - DNA, 20 bp, Artificial Sequence
  Description of Artificial Sequence: Synthetic oligonucleotide
  Target: LAMA2; (+) strand; PAM type: NRG; PAM sequence: CAG
acctctacaatataagatag

SEQ ID NO: 154633 - DNA, 20 bp, Artificial Sequence
  Description of Artificial Sequence: Synthetic oligonucleotide
  Target: LAMA2; (+) strand; PAM type: NRG; PAM sequence: TAG
tctacaatataagatagcag

SEQ ID NO: 154634 - DNA, 20 bp, Artificial Sequence
  Description of Artificial Sequence: Synthetic oligonucleotide
  Target: LAMA2; (+) strand; PAM type: NRG; PAM sequence: AGG
ctacaatataagatagcagt

SEQ ID NO: 154635 - DNA, 20 bp, Artificial Sequence
  Description of Artificial Sequence: Synthetic oligonucleotide
  Target: LAMA2; (+) strand; PAM type: NRG; PAM sequence: AAG
ataagatagcagtaggctgt

SEQ ID NO: 154636 - DNA, 20 bp, Artificial Sequence
  Description of Artificial Sequence: Synthetic oligonucleotide
  Target: LAMA2; (+) strand; PAM type: NRG; PAM sequence: CAG
taatcatttttctcattttt

SEQ ID NO: 154637 - DNA, 20 bp, Artificial Sequence
  Description of Artificial Sequence: Synthetic oligonucleotide
  Target: LAMA2; (+) strand; PAM type: NRG; PAM sequence: AAG
tctgaaaattgactataata

SEQ ID NO: 154638 - DNA, 20 bp, Artificial Sequence
  Description of Artificial Sequence: Synthetic oligonucleotide
  Target: LAMA2; (+) strand; PAM type: NRG; PAM sequence: TGG
tgactataataaagaaatcc

SEQ ID NO: 154639 - DNA, 20 bp, Artificial Sequence
  Description of Artificial Sequence: Synthetic oligonucleotide
  Target: LAMA2; (+) strand; PAM type: NRG; PAM sequence: TAG
ataaaattgtcatccactca

SEQ ID NO: 154640 - DNA, 20 bp, Artificial Sequence
  Description of Artificial Sequence: Synthetic oligonucleotide
  Target: LAMA2; (+) strand; PAM type: NRG; PAM sequence: AGG
taaaattgtcatccactcat

SEQ ID NO: 154641 - DNA, 20 bp, Artificial Sequence
  Description of Artificial Sequence: Synthetic oligonucleotide
  Target: LAMA2; (+) strand; PAM type: NRG; PAM sequence: TAG
aattgtcatccactcatagg

SEQ ID NO: 154642 - DNA, 20 bp, Artificial Sequence
  Description of Artificial Sequence: Synthetic oligonucleotide
  Target: LAMA2; (+) strand; PAM type: NRG; PAM sequence: GAG
cactcataggtagaataaat

SEQ ID NO: 154643 - DNA, 20 bp, Artificial Sequence
  Description of Artificial Sequence: Synthetic oligonucleotide
  Target: LAMA2; (+) strand; PAM type: NRG; PAM sequence: GAG
ctcataggtagaataaatga

SEQ ID NO: 154644 - DNA, 20 bp, Artificial Sequence
  Description of Artificial Sequence: Synthetic oligonucleotide
  Target: LAMA2; (+) strand; PAM type: NRG; PAM sequence: TGG
tagaataaatgagagaatta

SEQ ID NO: 154645 - DNA, 20 bp, Artificial Sequence
  Description of Artificial Sequence: Synthetic oligonucleotide
  Target: LAMA2; (+) strand; PAM type: NRG; PAM sequence: TAG
gaattatggtgatctaaata

SEQ ID NO: 154646 - DNA, 20 bp, Artificial Sequence
  Description of Artificial Sequence: Synthetic oligonucleotide
  Target: LAMA2; (+) strand; PAM type: NRG; PAM sequence: AAG
tatggtgatctaaatataga

SEQ ID NO: 154647 - DNA, 20 bp, Artificial Sequence
  Description of Artificial Sequence: Synthetic oligonucleotide
  Target: LAMA2; (+) strand; PAM type: NRG; PAM sequence: TAG
aatatagaaagcatttaaat

SEQ ID NO: 154648 - DNA, 20 bp, Artificial Sequence
  Description of Artificial Sequence: Synthetic oligonucleotide
  Target: LAMA2; (+) strand; PAM type: NRG; PAM sequence: GAG
tatagaaagcatttaaatta

SEQ ID NO: 154649 - DNA, 20 bp, Artificial Sequence
  Description of Artificial Sequence: Synthetic oligonucleotide
  Target: LAMA2; (+) strand; PAM type: NRG; PAM sequence: CAG
aaagcatttaaattagagaa

SEQ ID NO: 154650 - DNA, 20 bp, Artificial Sequence
  Description of Artificial Sequence: Synthetic oligonucleotide
  Target: LAMA2; (+) strand; PAM type: NRG; PAM sequence: CAG
attgtgcttctaaaacattt

SEQ ID NO: 154651 - DNA, 20 bp, Artificial Sequence
  Description of Artificial Sequence: Synthetic oligonucleotide
  Target: LAMA2; (+) strand; PAM type: NRG; PAM sequence: AAG
tctatatgttatattgaaaa

SEQ ID NO: 154652 - DNA, 20 bp, Artificial Sequence
  Description of Artificial Sequence: Synthetic oligonucleotide
  Target: LAMA2; (+) strand; PAM type: NRG; PAM sequence: TGG
ttatattgaaaaaagtaata

SEQ ID NO: 154653 - DNA, 20 bp, Artificial Sequence
  Description of Artificial Sequence: Synthetic oligonucleotide
  Target: LAMA2; (+) strand; PAM type: NRG; PAM sequence: CAG
aaatgtaatgttttcatttg

SEQ ID NO: 154654 - DNA, 20 bp, Artificial Sequence
  Description of Artificial Sequence: Synthetic oligonucleotide
  Target: LAMA2; (+) strand; PAM type: NRG; PAM sequence: TAG
catttgcagatgcttaaatt

SEQ ID NO: 154655 - DNA, 20 bp, Artificial Sequence
  Description of Artificial Sequence: Synthetic oligonucleotide
  Target: LAMA2; (+) strand; PAM type: NRG; PAM sequence: CAG
ctgtaatcattttgatcaaa

SEQ ID NO: 154656 - DNA, 20 bp, Artificial Sequence
  Description of Artificial Sequence: Synthetic oligonucleotide
  Target: LAMA2; (+) strand; PAM type: NRG; PAM sequence: CAG
taatcattttgatcaaacag

SEQ ID NO: 154657 - DNA, 20 bp, Artificial Sequence
  Description of Artificial Sequence: Synthetic oligonucleotide
  Target: LAMA2; (+) strand; PAM type: NRG; PAM sequence: TGG
actttcatctaccttaatga

SEQ ID NO: 154658 - DNA, 20 bp, Artificial Sequence
  Description of Artificial Sequence: Synthetic oligonucleotide
  Target: LAMA2; (+) strand; PAM type: NRG; PAM sequence: AAG
taatgatggtattgtgataa

SEQ ID NO: 154659 - DNA, 20 bp, Artificial Sequence
  Description of Artificial Sequence: Synthetic oligonucleotide
  Target: LAMA2; (+) strand; PAM type: NRG; PAM sequence: AAG
aaaagtacccatgtatcacc

SEQ ID NO: 154660 - DNA, 20 bp, Artificial Sequence
  Description of Artificial Sequence: Synthetic oligonucleotide
  Target: LAMA2; (+) strand; PAM type: NRG; PAM sequence: AAG
ccaattctttttattcctta

SEQ ID NO: 154661 - DNA, 20 bp, Artificial Sequence
  Description of Artificial Sequence: Synthetic oligonucleotide
  Target: LAMA2; (+) strand; PAM type: NRG; PAM sequence: TGG
aagaatatctgacaatttgc

SEQ ID NO: 154662 - DNA, 20 bp, Artificial Sequence
  Description of Artificial Sequence: Synthetic oligonucleotide
  Target: LAMA2; (+) strand; PAM type: NRG; PAM sequence: AAG
gacaatttgctggtttgtat

SEQ ID NO: 154663 - DNA, 20 bp, Artificial Sequence
  Description of Artificial Sequence: Synthetic oligonucleotide
  Target: LAMA2; (+) strand; PAM type: NRG; PAM sequence: GAG
ttgctggtttgtataagttt

SEQ ID NO: 154664 - DNA, 20 bp, Artificial Sequence
  Description of Artificial Sequence: Synthetic oligonucleotide
  Target: LAMA2; (+) strand; PAM type: NRG; PAM sequence: AAG
ggtttgtataagtttgagtt

SEQ ID NO: 154665 - DNA, 20 bp, Artificial Sequence
  Description of Artificial Sequence: Synthetic oligonucleotide
  Target: LAMA2; (+) strand; PAM type: NRG; PAM sequence: CAG
gacaccgtaataatgtcctg

SEQ ID NO: 154666 - DNA, 20 bp, Artificial Sequence
  Description of Artificial Sequence: Synthetic oligonucleotide
  Target: LAMA2; (+) strand; PAM type: NRG; PAM sequence: TGG
agtatatatgtcaaaataca

SEQ ID NO: 154667 - DNA, 20 bp, Artificial Sequence
  Description of Artificial Sequence: Synthetic oligonucleotide
  Target: LAMA2; (+) strand; PAM type: NRG; PAM sequence: GGG
gtatatatgtcaaaatacat

SEQ ID NO: 154668 - DNA, 20 bp, Artificial Sequence
  Description of Artificial Sequence: Synthetic oligonucleotide
  Target: LAMA2; (+) strand; PAM type: NRG; PAM sequence: AAG
gtcaaaatacatgggtcaaa

SEQ ID NO: 154669 - DNA, 20 bp, Artificial Sequence
  Description of Artificial Sequence: Synthetic oligonucleotide
  Target: LAMA2; (+) strand; PAM type: NRG; PAM sequence: TAG
gtcaaaaagacactctaaaa

SEQ ID NO: 154670 - DNA, 20 bp, Artificial Sequence
  Description of Artificial Sequence: Synthetic oligonucleotide
  Target: LAMA2; (+) strand; PAM type: NRG; PAM sequence: CAG
aaaaagacactctaaaatag

SEQ ID NO: 154671 - DNA, 20 bp, Artificial Sequence
  Description of Artificial Sequence: Synthetic oligonucleotide
  Target: LAMA2; (+) strand; PAM type: NRG; PAM sequence: AAG
actctaaaatagcagtctcc

SEQ ID NO: 154672 - DNA, 20 bp, Artificial Sequence
  Description of Artificial Sequence: Synthetic oligonucleotide
  Target: LAMA2; (+) strand; PAM type: NRG; PAM sequence: CAG
aatagcagtctccaagaacc

SEQ ID NO: 154673 - DNA, 20 bp, Artificial Sequence
  Description of Artificial Sequence: Synthetic oligonucleotide
  Target: LAMA2; (+) strand; PAM type: NRG; PAM sequence: AGG
atagcagtctccaagaaccc

SEQ ID NO: 154674 - DNA, 20 bp, Artificial Sequence
  Description of Artificial Sequence: Synthetic oligonucleotide
  Target: LAMA2; (+) strand; PAM type: NRG; PAM sequence: AAG
gcagtctccaagaacccagg

SEQ ID NO: 154675 - DNA, 20 bp, Artificial Sequence
  Description of Artificial Sequence: Synthetic oligonucleotide
  Target: LAMA2; (+) strand; PAM type: NRG; PAM sequence: TAG
cccaggaagtatgtgatcca

SEQ ID NO: 154676 - DNA, 20 bp, Artificial Sequence
  Description of Artificial Sequence: Synthetic oligonucleotide
  Target: LAMA2; (+) strand; PAM type: NRG; PAM sequence: AGG
ccaggaagtatgtgatccat

SEQ ID NO: 154677 - DNA, 20 bp, Artificial Sequence
  Description of Artificial Sequence: Synthetic oligonucleotide
  Target: LAMA2; (+) strand; PAM type: NRG; PAM sequence: GAG
aggaagtatgtgatccatag

SEQ ID NO: 154678 - DNA, 20 bp, Artificial Sequence
  Description of Artificial Sequence: Synthetic oligonucleotide
  Target: LAMA2; (+) strand; PAM type: NRG; PAM sequence: AAG
ttttattttctttaaaaaat

SEQ ID NO: 154679 - DNA, 20 bp, Artificial Sequence
  Description of Artificial Sequence: Synthetic oligonucleotide
  Target: LAMA2; (+) strand; PAM type: NRG; PAM sequence: CAG
attttctttaaaaaataaga

SEQ ID NO: 154680 - DNA, 20 bp, Artificial Sequence
  Description of Artificial Sequence: Synthetic oligonucleotide
  Target: LAMA2; (+) strand; PAM type: NRG; PAM sequence: AAG
ataagacagacacttctcaa

SEQ ID NO: 154681 - DNA, 20 bp, Artificial Sequence
  Description of Artificial Sequence: Synthetic oligonucleotide
  Target: LAMA2; (+) strand; PAM type: NRG; PAM sequence: AAG
agacagacacttctcaaaag

SEQ ID NO: 154682 - DNA, 20 bp, Artificial Sequence
  Description of Artificial Sequence: Synthetic oligonucleotide
  Target: LAMA2; (+) strand; PAM type: NRG; PAM sequence: CAG
ctcaaaagaagacatttatg

SEQ ID NO: 154683 - DNA, 20 bp, Artificial Sequence
  Description of Artificial Sequence: Synthetic oligonucleotide
  Target: LAMA2; (+) strand; PAM type: NRG; PAM sequence: TGG
gaaaaaatgctcaccatcac

SEQ ID NO: 154684 - DNA, 20 bp, Artificial Sequence
  Description of Artificial Sequence: Synthetic oligonucleotide
  Target: LAMA2; (+) strand; PAM type: NRG; PAM sequence: CAG
tgctcaccatcactggccat

SEQ ID NO: 154685 - DNA, 20 bp, Artificial Sequence
  Description of Artificial Sequence: Synthetic oligonucleotide
  Target: LAMA2; (+) strand; PAM type: NRG; PAM sequence: GAG
ctcaccatcactggccatca

SEQ ID NO: 154686 - DNA, 20 bp, Artificial Sequence
  Description of Artificial Sequence: Synthetic oligonucleotide
  Target: LAMA2; (+) strand; PAM type: NRG; PAM sequence: GAG
atgcaaatcaaaaccacaat

SEQ ID NO: 154687 - DNA, 20 bp, Artificial Sequence
  Description of Artificial Sequence: Synthetic oligonucleotide
  Target: LAMA2; (+) strand; PAM type: NRG; PAM sequence: TAG
agataccatctcacaccaat

SEQ ID NO: 154688 - DNA, 20 bp, Artificial Sequence
  Description of Artificial Sequence: Synthetic oligonucleotide
  Target: LAMA2; (+) strand; PAM type: NRG; PAM sequence: TGG
ccatctcacaccaattagaa

SEQ ID NO: 154689 - DNA, 20 bp, Artificial Sequence
  Description of Artificial Sequence: Synthetic oligonucleotide
  Target: LAMA2; (+) strand; PAM type: NRG; PAM sequence: CAG
tctcacaccaattagaatgg

SEQ ID NO: 154690 - DNA, 20 bp, Artificial Sequence
  Description of Artificial Sequence: Synthetic oligonucleotide
  Target: LAMA2; (+) strand; PAM type: NRG; PAM sequence: AAG
ttagaatggcagtcattaaa

SEQ ID NO: 154691 - DNA, 20 bp, Artificial Sequence
  Description of Artificial Sequence: Synthetic oligonucleotide
  Target: LAMA2; (+) strand; PAM type: NRG; PAM sequence: CAG
aatggcagtcattaaaaagt

SEQ ID NO: 154692 - DNA, 20 bp, Artificial Sequence
  Description of Artificial Sequence: Synthetic oligonucleotide
  Target: LAMA2; (+) strand; PAM type: NRG; PAM sequence: AGG
atggcagtcattaaaaagtc

SEQ ID NO: 154693 - DNA, 20 bp, Artificial Sequence
  Description of Artificial Sequence: Synthetic oligonucleotide
  Target: LAMA2; (+) strand; PAM type: NRG; PAM sequence: CAG
attaaaaagtcaggaaacaa

SEQ ID NO: 154694 - DNA, 20 bp, Artificial Sequence
  Description of Artificial Sequence: Synthetic oligonucleotide
  Target: LAMA2; (+) strand; PAM type: NRG; PAM sequence: TGG
agtcaggaaacaacagatgc

SEQ ID NO: 154695 - DNA, 20 bp, Artificial Sequence
  Description of Artificial Sequence: Synthetic oligonucleotide
  Target: LAMA2; (+) strand; PAM type: NRG; PAM sequence: GAG
tcaggaaacaacagatgctg

SEQ ID NO: 154696 - DNA, 20 bp, Artificial Sequence
  Description of Artificial Sequence: Synthetic oligonucleotide
  Target: LAMA2; (+) strand; PAM type: NRG; PAM sequence: GAG
aggaaacaacagatgctgga

SEQ ID NO: 154697 - DNA, 20 bp, Artificial Sequence
  Description of Artificial Sequence: Synthetic oligonucleotide
  Target: LAMA2; (+) strand; PAM type: NRG; PAM sequence: AGG
ggaaacaacagatgctggag

SEQ ID NO: 154698 - DNA, 20 bp, Artificial Sequence
  Description of Artificial Sequence: Synthetic oligonucleotide
  Target: LAMA2; (+) strand; PAM type: NRG; PAM sequence: TGG
aacagatgctggagaggatg

SEQ ID NO: 154699 - DNA, 20 bp, Artificial Sequence
  Description of Artificial Sequence: Synthetic oligonucleotide
  Target: LAMA2; (+) strand; PAM type: NRG; PAM sequence: GAG
cagatgctggagaggatgtg

SEQ ID NO: 154700 - DNA, 20 bp, Artificial Sequence
  Description of Artificial Sequence: Synthetic oligonucleotide
  Target: LAMA2; (+) strand; PAM type: NRG; PAM sequence: TAG
ctggagaggatgtggagaaa

SEQ ID NO: 154701 - DNA, 20 bp, Artificial Sequence
  Description of Artificial Sequence: Synthetic oligonucleotide
  Target: LAMA2; (+) strand; PAM type: NRG; PAM sequence: AGG
tggagaggatgtggagaaat

SEQ ID NO: 154702 - DNA, 20 bp, Artificial Sequence
  Description of Artificial Sequence: Synthetic oligonucleotide
  Target: LAMA2; (+) strand; PAM type: NRG; PAM sequence: TGG
taggaacacttttacactgt

SEQ ID NO: 154703 - DNA, 20 bp, Artificial Sequence
  Description of Artificial Sequence: Synthetic oligonucleotide
  Target: LAMA2; (+) strand; PAM type: NRG; PAM sequence: TGG
gaacacttttacactgttgg

SEQ ID NO: 154704 - DNA, 20 bp, Artificial Sequence
  Description of Artificial Sequence: Synthetic oligonucleotide
  Target: LAMA2; (+) strand; PAM type: NRG; PAM sequence: GGG
aacacttttacactgttggt

SEQ ID NO: 154705 - DNA, 20 bp, Artificial Sequence
  Description of Artificial Sequence: Synthetic oligonucleotide
  Target: LAMA2; (+) strand; PAM type: NRG; PAM sequence: TAG
ctgttggtgggactgtaaac

SEQ ID NO: 154706 - DNA, 20 bp, Artificial Sequence
  Description of Artificial Sequence: Synthetic oligonucleotide
  Target: LAMA2; (+) strand; PAM type: NRG; PAM sequence: TGG
gtaaactagtttaaccattg

SEQ ID NO: 154707 - DNA, 20 bp, Artificial Sequence
  Description of Artificial Sequence: Synthetic oligonucleotide
  Target: LAMA2; (+) strand; PAM type: NRG; PAM sequence: AAG
aactagtttaaccattgtgg

SEQ ID NO: 154708 - DNA, 20 bp, Artificial Sequence
  Description of Artificial Sequence: Synthetic oligonucleotide
  Target: LAMA2; (+) strand; PAM type: NRG; PAM sequence: CAG
agtttaaccattgtggaagt

SEQ ID NO: 154709 - DNA, 20 bp, Artificial Sequence
  Description of Artificial Sequence: Synthetic oligonucleotide
  Target: LAMA2; (+) strand; PAM type: NRG; PAM sequence: TGG
aaccattgtggaagtcagtg

SEQ ID NO: 154710 - DNA, 20 bp, Artificial Sequence
  Description of Artificial Sequence: Synthetic oligonucleotide
  Target: LAMA2; (+) strand; PAM type: NRG; PAM sequence: CAG
aagtcagtgtggtgattcct

SEQ ID NO: 154711 - DNA, 20 bp, Artificial Sequence
  Description of Artificial Sequence: Synthetic oligonucleotide
  Target: LAMA2; (+) strand; PAM type: NRG; PAM sequence: AGG
agtcagtgtggtgattcctc

SEQ ID NO: 154712 - DNA, 20 bp, Artificial Sequence
  Description of Artificial Sequence: Synthetic oligonucleotide
  Target: LAMA2; (+) strand; PAM type: NRG; PAM sequence: GGG
gtcagtgtggtgattcctca

SEQ ID NO: 154713 - DNA, 20 bp, Artificial Sequence
  Description of Artificial Sequence: Synthetic oligonucleotide
  Target: LAMA2; (+) strand; PAM type: NRG; PAM sequence: TAG
gtggtgattcctcagggatc

SEQ ID NO: 154714 - DNA, 20 bp, Artificial Sequence
  Description of Artificial Sequence: Synthetic oligonucleotide
  Target: LAMA2; (+) strand; PAM type: NRG; PAM sequence: CAG
acttgaaataccatttgacc

SEQ ID NO: 154715 - DNA, 20 bp, Artificial Sequence
  Description of Artificial Sequence: Synthetic oligonucleotide
  Target: LAMA2; (+) strand; PAM type: NRG; PAM sequence: TGG
tgacccagccatcccattac

SEQ ID NO: 154716 - DNA, 20 bp, Artificial Sequence
  Description of Artificial Sequence: Synthetic oligonucleotide
  Target: LAMA2; (+) strand; PAM type: NRG; PAM sequence: GGG
gacccagccatcccattact

SEQ ID NO: 154717 - DNA, 20 bp, Artificial Sequence
  Description of Artificial Sequence: Synthetic oligonucleotide
  Target: LAMA2; (+) strand; PAM type: NRG; PAM sequence: AAG
cattactgggtatgtaccca

SEQ ID NO: 154718 - DNA, 20 bp, Artificial Sequence
  Description of Artificial Sequence: Synthetic oligonucleotide
  Target: LAMA2; (+) strand; PAM type: NRG; PAM sequence: AGG
attactgggtatgtacccaa

SEQ ID NO: 154719 - DNA, 20 bp, Artificial Sequence
  Description of Artificial Sequence: Synthetic oligonucleotide
  Target: LAMA2; (+) strand; PAM type: NRG; PAM sequence: AAG
ctataaatcatgctgctata

SEQ ID NO: 154720 - DNA, 20 bp, Artificial Sequence
  Description of Artificial Sequence: Synthetic oligonucleotide
  Target: LAMA2; (+) strand; PAM type: NRG; PAM sequence: TGG
atgcacacgtatgtttattg

SEQ ID NO: 154721 - DNA, 20 bp, Artificial Sequence
  Description of Artificial Sequence: Synthetic oligonucleotide
  Target: LAMA2; (+) strand; PAM type: NRG; PAM sequence: TAG
tattgtggcactattcacaa

SEQ ID NO: 154722 - DNA, 20 bp, Artificial Sequence
  Description of Artificial Sequence: Synthetic oligonucleotide
  Target: LAMA2; (+) strand; PAM type: NRG; PAM sequence: AAG
tggcactattcacaatagca

SEQ ID NO: 154723 - DNA, 20 bp, Artificial Sequence
  Description of Artificial Sequence: Synthetic oligonucleotide
  Target: LAMA2; (+) strand; PAM type: NRG; PAM sequence: TGG
tattcacaatagcaaagact

SEQ ID NO: 154724 - DNA, 20 bp, Artificial Sequence
  Description of Artificial Sequence: Synthetic oligonucleotide
  Target: LAMA2; (+) strand; PAM type: NRG; PAM sequence: TAG
acccaaatgtccaacaatga

SEQ ID NO: 154725 - DNA, 20 bp, Artificial Sequence
  Description of Artificial Sequence: Synthetic oligonucleotide
  Target: LAMA2; (+) strand; PAM type: NRG; PAM sequence: TGG
aatgtccaacaatgatagac

SEQ ID NO: 154726 - DNA, 20 bp, Artificial Sequence
  Description of Artificial Sequence: Synthetic oligonucleotide
  Target: LAMA2; (+) strand; PAM type: NRG; PAM sequence: AAG
caacaatgatagactggatt

SEQ ID NO: 154727 - DNA, 20 bp, Artificial Sequence
  Description of Artificial Sequence: Synthetic oligonucleotide
  Target: LAMA2; (+) strand; PAM type: NRG; PAM sequence: TGG
tagactggattaagaaaatg

SEQ ID NO: 154728 - DNA, 20 bp, Artificial Sequence
  Description of Artificial Sequence: Synthetic oligonucleotide
  Target: LAMA2; (+) strand; PAM type: NRG; PAM sequence: TGG
aatgtggcacatatacacca

SEQ ID NO: 154729 - DNA, 20 bp, Artificial Sequence
  Description of Artificial Sequence: Synthetic oligonucleotide
  Target: LAMA2; (+) strand; PAM type: NRG; PAM sequence: CAG
atacaccatggaatactatg

SEQ ID NO: 154730 - DNA, 20 bp, Artificial Sequence
  Description of Artificial Sequence: Synthetic oligonucleotide
  Target: LAMA2; (+) strand; PAM type: NRG; PAM sequence: GAG
atgcagccataaaaaatgat

SEQ ID NO: 154731 - DNA, 20 bp, Artificial Sequence
  Description of Artificial Sequence: Synthetic oligonucleotide
  Target: LAMA2; (+) strand; PAM type: NRG; PAM sequence: TAG
tgatgagttcatgtcctttg

SEQ ID NO: 154732 - DNA, 20 bp, Artificial Sequence
  Description of Artificial Sequence: Synthetic oligonucleotide
  Target: LAMA2; (+) strand; PAM type: NRG; PAM sequence: AGG
gatgagttcatgtcctttgt

SEQ ID NO: 154733 - DNA, 20 bp, Artificial Sequence
  Description of Artificial Sequence: Synthetic oligonucleotide
  Target: LAMA2; (+) strand; PAM type: NRG; PAM sequence: GGG
atgagttcatgtcctttgta

SEQ ID NO: 154734 - DNA, 20 bp, Artificial Sequence
  Description of Artificial Sequence: Synthetic oligonucleotide
  Target: LAMA2; (+) strand; PAM type: NRG; PAM sequence: TGG
tcatgtcctttgtagggaca

SEQ ID NO: 154735 - DNA, 20 bp, Artificial Sequence
  Description of Artificial Sequence: Synthetic oligonucleotide
  Target: LAMA2; (+) strand; PAM type: NRG; PAM sequence: TGG
tgtagggacatggatgaaat

SEQ ID NO: 154736 - DNA, 20 bp, Artificial Sequence
  Description of Artificial Sequence: Synthetic oligonucleotide
  Target: LAMA2; (+) strand; PAM type: NRG; PAM sequence: CAG
aaattggaaatcatcattct

SEQ ID NO: 154737 - DNA, 20 bp, Artificial Sequence
  Description of Artificial Sequence: Synthetic oligonucleotide
  Target: LAMA2; (+) strand; PAM type: NRG; PAM sequence: AAG
cattctcagtaaactatcac

SEQ ID NO: 154738 - DNA, 20 bp, Artificial Sequence
  Description of Artificial Sequence: Synthetic oligonucleotide
  Target: LAMA2; (+) strand; PAM type: NRG; PAM sequence: AGG
attctcagtaaactatcaca

SEQ ID NO: 154739 - DNA, 20 bp, Artificial Sequence
  Description of Artificial Sequence: Synthetic oligonucleotide
  Target: LAMA2; (+) strand; PAM type: NRG; PAM sequence: TAG
acaccacatgttctcactca

SEQ ID NO: 154740 - DNA, 20 bp, Artificial Sequence
  Description of Artificial Sequence: Synthetic oligonucleotide
  Target: LAMA2; (+) strand; PAM type: NRG; PAM sequence: AGG
caccacatgttctcactcat

SEQ ID NO: 154741 - DNA, 20 bp, Artificial Sequence
  Description of Artificial Sequence: Synthetic oligonucleotide
  Target: LAMA2; (+) strand; PAM type: NRG; PAM sequence: TGG
cacatgttctcactcatagg

SEQ ID NO: 154742 - DNA, 20 bp, Artificial Sequence
  Description of Artificial Sequence: Synthetic oligonucleotide
  Target: LAMA2; (+) strand; PAM type: NRG; PAM sequence: GGG
acatgttctcactcataggt

SEQ ID NO: 154743 - DNA, 20 bp, Artificial Sequence
  Description of Artificial Sequence: Synthetic oligonucleotide
  Target: LAMA2; (+) strand; PAM type: NRG; PAM sequence: GAG
ataggtgggaattgaacaat

SEQ ID NO: 154744 - DNA, 20 bp, Artificial Sequence
  Description of Artificial Sequence: Synthetic oligonucleotide
  Target: LAMA2; (+) strand; PAM type: NRG; PAM sequence: TGG
aattgaacaatgagaacaca

SEQ ID NO: 154745 - DNA, 20 bp, Artificial Sequence
  Description of Artificial Sequence: Synthetic oligonucleotide
  Target: LAMA2; (+) strand; PAM type: NRG; PAM sequence: CAG
acaatgagaacacatggaca

SEQ ID NO: 154746 - DNA, 20 bp, Artificial Sequence
  Description of Artificial Sequence: Synthetic oligonucleotide
  Target: LAMA2; (+) strand; PAM type: NRG; PAM sequence: AGG
caatgagaacacatggacac

SEQ ID NO: 154747 - DNA, 20 bp, Artificial Sequence
  Description of Artificial Sequence: Synthetic oligonucleotide
  Target: LAMA2; (+) strand; PAM type: NRG; PAM sequence: AAG
tgagaacacatggacacagg

SEQ ID NO: 154748 - DNA, 20 bp, Artificial Sequence
  Description of Artificial Sequence: Synthetic oligonucleotide
  Target: LAMA2; (+) strand; PAM type: NRG; PAM sequence: AGG
gagaacacatggacacagga

SEQ ID NO: 154749 - DNA, 20 bp, Artificial Sequence
  Description of Artificial Sequence: Synthetic oligonucleotide
  Target: LAMA2; (+) strand; PAM type: NRG; PAM sequence: GGG
agaacacatggacacaggaa

SEQ ID NO: 154750 - DNA, 20 bp, Artificial Sequence
  Description of Artificial Sequence: Synthetic oligonucleotide
  Target: LAMA2; (+) strand; PAM type: NRG; PAM sequence: GGG
gaacacatggacacaggaag

SEQ ID NO: 154751 - DNA, 20 bp, Artificial Sequence
  Description of Artificial Sequence: Synthetic oligonucleotide
  Target: LAMA2; (+) strand; PAM type: NRG; PAM sequence: TGG
ggaaggggaacatcacactc

SEQ ID NO: 154752 - DNA, 20 bp, Artificial Sequence
  Description of Artificial Sequence: Synthetic oligonucleotide
  Target: LAMA2; (+) strand; PAM type: NRG; PAM sequence: GGG
gaaggggaacatcacactct

SEQ ID NO: 154753 - DNA, 20 bp, Artificial Sequence
  Description of Artificial Sequence: Synthetic oligonucleotide
  Target: LAMA2; (+) strand; PAM type: NRG; PAM sequence: GGG
aaggggaacatcacactctg

SEQ ID NO: 154754 - DNA, 20 bp, Artificial Sequence
  Description of Artificial Sequence: Synthetic oligonucleotide
  Target: LAMA2; (+) strand; PAM type: NRG; PAM sequence: TGG
tcacactctggggactgttg

SEQ ID NO: 154755 - DNA, 20 bp, Artificial Sequence
  Description of Artificial Sequence: Synthetic oligonucleotide
  Target: LAMA2; (+) strand; PAM type: NRG; PAM sequence: GGG
cacactctggggactgttgt

SEQ ID NO: 154756 - DNA, 20 bp, Artificial Sequence
  Description of Artificial Sequence: Synthetic oligonucleotide
  Target: LAMA2; (+) strand; PAM type: NRG; PAM sequence: GGG
acactctggggactgttgtg

SEQ ID NO: 154757 - DNA, 20 bp, Artificial Sequence
  Description of Artificial Sequence: Synthetic oligonucleotide
  Target: LAMA2; (+) strand; PAM type: NRG; PAM sequence: TGG
ctctggggactgttgtgggg

SEQ ID NO: 154758 - DNA, 20 bp, Artificial Sequence
  Description of Artificial Sequence: Synthetic oligonucleotide
  Target: LAMA2; (+) strand; PAM type: NRG; PAM sequence: GGG
tctggggactgttgtggggt

SEQ ID NO: 154759 - DNA, 20 bp, Artificial Sequence
  Description of Artificial Sequence: Synthetic oligonucleotide
  Target: LAMA2; (+) strand; PAM type: NRG; PAM sequence: GGG
ctggggactgttgtggggtg

SEQ ID NO: 154760 - DNA, 20 bp, Artificial Sequence
  Description of Artificial Sequence: Synthetic oligonucleotide
  Target: LAMA2; (+) strand; PAM type: NRG; PAM sequence: GGG
tggggactgttgtggggtgg

SEQ ID NO: 154761 - DNA, 20 bp, Artificial Sequence
  Description of Artificial Sequence: Synthetic oligonucleotide
  Target: LAMA2; (+) strand; PAM type: NRG; PAM sequence: GGG
ggggactgttgtggggtggg

SEQ ID NO: 154762 - DNA, 20 bp, Artificial Sequence
  Description of Artificial Sequence: Synthetic oligonucleotide
  Target: LAMA2; (+) strand; PAM type: NRG; PAM sequence: GGG
gggactgttgtggggtgggg

SEQ ID NO: 154763 - DNA, 20 bp, Artificial Sequence
  Description of Artificial Sequence: Synthetic oligonucleotide
  Target: LAMA2; (+) strand; PAM type: NRG; PAM sequence: GAG
gactgttgtggggtgggggg

SEQ ID NO: 154764 - DNA, 20 bp, Artificial Sequence
  Description of Artificial Sequence: Synthetic oligonucleotide
  Target: LAMA2; (+) strand; PAM type: NRG; PAM sequence: AGG
actgttgtggggtggggggg

SEQ ID NO: 154765 - DNA, 20 bp, Artificial Sequence
  Description of Artificial Sequence: Synthetic oligonucleotide
  Target: LAMA2; (+) strand; PAM type: NRG; PAM sequence: GGG
ctgttgtggggtggggggga

SEQ ID NO: 154766 - DNA, 20 bp, Artificial Sequence
  Description of Artificial Sequence: Synthetic oligonucleotide
  Target: LAMA2; (+) strand; PAM type: NRG; PAM sequence: GGG
tgttgtggggtgggggggag

SEQ ID NO: 154767 - DNA, 20 bp, Artificial Sequence
  Description of Artificial Sequence: Synthetic oligonucleotide
  Target: LAMA2; (+) strand; PAM type: NRG; PAM sequence: GGG
gttgtggggtgggggggagg

SEQ ID NO: 154768 - DNA, 20 bp, Artificial Sequence
  Description of Artificial Sequence: Synthetic oligonucleotide
  Target: LAMA2; (+) strand; PAM type: NRG; PAM sequence: GGG
ttgtggggtgggggggaggg

SEQ ID NO: 154769 - DNA, 20 bp, Artificial Sequence
  Description of Artificial Sequence: Synthetic oligonucleotide
  Target: LAMA2; (+) strand; PAM type: NRG; PAM sequence: GAG
gtggggtgggggggaggggg

SEQ ID NO: 154770 - DNA, 20 bp, Artificial Sequence
  Description of Artificial Sequence: Synthetic oligonucleotide
  Target: LAMA2; (+) strand; PAM type: NRG; PAM sequence: GAG
ggggtgggggggagggggga

SEQ ID NO: 154771 - DNA, 20 bp, Artificial Sequence
  Description of Artificial Sequence: Synthetic oligonucleotide
  Target: LAMA2; (+) strand; PAM type: NRG; PAM sequence: TAG
tgggggggaggggggagaga

SEQ ID NO: 154772 - DNA, 20 bp, Artificial Sequence
  Description of Artificial Sequence: Synthetic oligonucleotide
  Target: LAMA2; (+) strand; PAM type: NRG; PAM sequence: TAG
ggaggggggagagatagcat

SEQ ID NO: 154773 - DNA, 20 bp, Artificial Sequence
  Description of Artificial Sequence: Synthetic oligonucleotide
  Target: LAMA2; (+) strand; PAM type: NRG; PAM sequence: AGG
gaggggggagagatagcatt

SEQ ID NO: 154774 - DNA, 20 bp, Artificial Sequence
  Description of Artificial Sequence: Synthetic oligonucleotide
  Target: LAMA2; (+) strand; PAM type: NRG; PAM sequence: GAG
ggggggagagatagcattag

SEQ ID NO: 154775 - DNA, 20 bp, Artificial Sequence
  Description of Artificial Sequence: Synthetic oligonucleotide
  Target: LAMA2; (+) strand; PAM type: NRG; PAM sequence: GAG
attaggagatgctaaatgac

SEQ ID NO: 154776 - DNA, 20 bp, Artificial Sequence
  Description of Artificial Sequence: Synthetic oligonucleotide
  Target: LAMA2; (+) strand; PAM type: NRG; PAM sequence: TGG
gatgctaaatgacgagttaa

SEQ ID NO: 154777 - DNA, 20 bp, Artificial Sequence
  Description of Artificial Sequence: Synthetic oligonucleotide
  Target: LAMA2; (+) strand; PAM type: NRG; PAM sequence: GGG
atgctaaatgacgagttaat

SEQ ID NO: 154778 - DNA, 20 bp, Artificial Sequence
  Description of Artificial Sequence: Synthetic oligonucleotide
  Target: LAMA2; (+) strand; PAM type: NRG; PAM sequence: CAG
aaatgacgagttaatgggtg

SEQ ID NO: 154779 - DNA, 20 bp, Artificial Sequence
  Description of Artificial Sequence: Synthetic oligonucleotide
  Target: LAMA2; (+) strand; PAM type: NRG; PAM sequence: CAG
agttaatgggtgcagcacac

SEQ ID NO: 154780 - DNA, 20 bp, Artificial Sequence
  Description of Artificial Sequence: Synthetic oligonucleotide
  Target: LAMA2; (+) strand; PAM type: NRG; PAM sequence: TGG
atgggtgcagcacaccagca

SEQ ID NO: 154781 - DNA, 20 bp, Artificial Sequence
  Description of Artificial Sequence: Synthetic oligonucleotide
  Target: LAMA2; (+) strand; PAM type: NRG; PAM sequence: TGG
tgtatacatatgtaactaac

SEQ ID NO: 154782 - DNA, 20 bp, Artificial Sequence
  Description of Artificial Sequence: Synthetic oligonucleotide
  Target: LAMA2; (+) strand; PAM type: NRG; PAM sequence: TGG
atatgtaactaactggcaca

SEQ ID NO: 154783 - DNA, 20 bp, Artificial Sequence
  Description of Artificial Sequence: Synthetic oligonucleotide
  Target: LAMA2; (+) strand; PAM type: NRG; PAM sequence: AAG
cacatgtaccctaaaactta

SEQ ID NO: 154784 - DNA, 20 bp, Artificial Sequence
  Description of Artificial Sequence: Synthetic oligonucleotide
  Target: LAMA2; (+) strand; PAM type: NRG; PAM sequence: AAG
aaataaaaataaaataaaat

SEQ ID NO: 154785 - DNA, 20 bp, Artificial Sequence
  Description of Artificial Sequence: Synthetic oligonucleotide
  Target: LAMA2; (+) strand; PAM type: NRG; PAM sequence: AAG
aaaataagaccattaaaaaa

SEQ ID NO: 154786 - DNA, 20 bp, Artificial Sequence
  Description of Artificial Sequence: Synthetic oligonucleotide
  Target: LAMA2; (+) strand; PAM type: NRG; PAM sequence: TGG
ttaaaaaaaagttcatcgta

SEQ ID NO: 154787 - DNA, 20 bp, Artificial Sequence
  Description of Artificial Sequence: Synthetic oligonucleotide
  Target: LAMA2; (+) strand; PAM type: NRG; PAM sequence: TGG
ttcatcgtatggattgacac

SEQ ID NO: 154788 - DNA, 20 bp, Artificial Sequence
  Description of Artificial Sequence: Synthetic oligonucleotide
  Target: LAMA2; (+) strand; PAM type: NRG; PAM sequence: GGG
tcatcgtatggattgacact

SEQ ID NO: 154789 - DNA, 20 bp, Artificial Sequence
  Description of Artificial Sequence: Synthetic oligonucleotide
  Target: LAMA2; (+) strand; PAM type: NRG; PAM sequence: TGG
attgacactgggctgctccc

SEQ ID NO: 154790 - DNA, 20 bp, Artificial Sequence
  Description of Artificial Sequence: Synthetic oligonucleotide
  Target: LAMA2; (+) strand; PAM type: NRG; PAM sequence: TGG
gacactgggctgctccctgg

SEQ ID NO: 154791 - DNA, 20 bp, Artificial Sequence
  Description of Artificial Sequence: Synthetic oligonucleotide
  Target: LAMA2; (+) strand; PAM type: NRG; PAM sequence: GAG
cactgggctgctccctggtg

SEQ ID NO: 154792 - DNA, 20 bp, Artificial Sequence
  Description of Artificial Sequence: Synthetic oligonucleotide
  Target: LAMA2; (+) strand; PAM type: NRG; PAM sequence: CAG
gctgctccctggtggagtac

SEQ ID NO: 154793 - DNA, 20 bp, Artificial Sequence
  Description of Artificial Sequence: Synthetic oligonucleotide
  Target: LAMA2; (+) strand; PAM type: NRG; PAM sequence: AAG
ccctggtggagtaccagctc

SEQ ID NO: 154794 - DNA, 20 bp, Artificial Sequence
  Description of Artificial Sequence: Synthetic oligonucleotide
  Target: LAMA2; (+) strand; PAM type: NRG; PAM sequence: GAG
gtaccagctcaagatgtttt

SEQ ID NO: 154795 - DNA, 20 bp, Artificial Sequence
  Description of Artificial Sequence: Synthetic oligonucleotide
  Target: LAMA2; (+) strand; PAM type: NRG; PAM sequence: AGG
taccagctcaagatgttttg

SEQ ID NO: 154796 - DNA, 20 bp, Artificial Sequence
  Description of Artificial Sequence: Synthetic oligonucleotide
  Target: LAMA2; (+) strand; PAM type: NRG; PAM sequence: AAG
ggaaaaaatttgcatttacc

SEQ ID NO: 154797 - DNA, 20 bp, Artificial Sequence
  Description of Artificial Sequence: Synthetic oligonucleotide
  Target: LAMA2; (+) strand; PAM type: NRG; PAM sequence: TGG
aaaaatttgcatttaccaag

SEQ ID NO: 154798 - DNA, 20 bp, Artificial Sequence
  Description of Artificial Sequence: Synthetic oligonucleotide
  Target: LAMA2; (+) strand; PAM type: NRG; PAM sequence: GGG
aaaatttgcatttaccaagt

SEQ ID NO: 154799 - DNA, 20 bp, Artificial Sequence
  Description of Artificial Sequence: Synthetic oligonucleotide
  Target: LAMA2; (+) strand; PAM type: NRG; PAM sequence: GAG
aatttgcatttaccaagtgg

SEQ ID NO: 154800 - DNA, 20 bp, Artificial Sequence
  Description of Artificial Sequence: Synthetic oligonucleotide
  Target: LAMA2; (+) strand; PAM type: NRG; PAM sequence: AGG
atttgcatttaccaagtggg

SEQ ID NO: 154801 - DNA, 20 bp, Artificial Sequence
  Description of Artificial Sequence: Synthetic oligonucleotide
  Target: LAMA2; (+) strand; PAM type: NRG; PAM sequence: TAG
ttaccaagtgggaggattta

SEQ ID NO: 154802 - DNA, 20 bp, Artificial Sequence
  Description of Artificial Sequence: Synthetic oligonucleotide
  Target: LAMA2; (+) strand; PAM type: NRG; PAM sequence: TGG
ccaagtgggaggatttatag

SEQ ID NO: 154803 - DNA, 20 bp, Artificial Sequence
  Description of Artificial Sequence: Synthetic oligonucleotide
  Target: LAMA2; (+) strand; PAM type: NRG; PAM sequence: TAG
atttcacttgttcattgatt

SEQ ID NO: 154804 - DNA, 20 bp, Artificial Sequence
  Description of Artificial Sequence: Synthetic oligonucleotide
  Target: LAMA2; (+) strand; PAM type: NRG; PAM sequence: AAG
attatattttttgcacaact

SEQ ID NO: 154805 - DNA, 20 bp, Artificial Sequence
  Description of Artificial Sequence: Synthetic oligonucleotide
  Target: LAMA2; (+) strand; PAM type: NRG; PAM sequence: TGG
tattttttgcacaactaagt

SEQ ID NO: 154806 - DNA, 20 bp, Artificial Sequence
  Description of Artificial Sequence: Synthetic oligonucleotide
  Target: LAMA2; (+) strand; PAM type: NRG; PAM sequence: CAG
tgcacaactaagttggcttt

SEQ ID NO: 154807 - DNA, 20 bp, Artificial Sequence
  Description of Artificial Sequence: Synthetic oligonucleotide
  Target: LAMA2; (+) strand; PAM type: NRG; PAM sequence: AAG
accatatttttaactaaatg

SEQ ID NO: 154808 - DNA, 20 bp, Artificial Sequence
  Description of Artificial Sequence: Synthetic oligonucleotide
  Target: LAMA2; (+) strand; PAM type: NRG; PAM sequence: TAG
atattccttcaaaaaacata

SEQ ID NO: 154809 - DNA, 20 bp, Artificial Sequence
  Description of Artificial Sequence: Synthetic oligonucleotide
  Target: LAMA2; (+) strand; PAM type: NRG; PAM sequence: AAG
gaaataatattaactacaca

SEQ ID NO: 154810 - DNA, 20 bp, Artificial Sequence
  Description of Artificial Sequence: Synthetic oligonucleotide
  Target: LAMA2; (+) strand; PAM type: NRG; PAM sequence: AAG
aatattaactacacaaagat

SEQ ID NO: 154811 - DNA, 20 bp, Artificial Sequence
  Description of Artificial Sequence: Synthetic oligonucleotide
  Target: LAMA2; (+) strand; PAM type: NRG; PAM sequence: GAG
actacacaaagataagcaat

SEQ ID NO: 154812 - DNA, 20 bp, Artificial Sequence
  Description of Artificial Sequence: Synthetic oligonucleotide
  Target: LAMA2; (+) strand; PAM type: NRG; PAM sequence: TAG
agcaatgagcaaaaaaacac

SEQ ID NO: 154813 - DNA, 20 bp, Artificial Sequence
  Description of Artificial Sequence: Synthetic oligonucleotide
  Target: LAMA2; (+) strand; PAM type: NRG; PAM sequence: TGG
ctagtgcttaccactgctct

SEQ ID NO: 154814 - DNA, 20 bp, Artificial Sequence
  Description of Artificial Sequence: Synthetic oligonucleotide
  Target: LAMA2; (+) strand; PAM type: NRG; PAM sequence: AAG
tgcttaccactgctcttggt

SEQ ID NO: 154815 - DNA, 20 bp, Artificial Sequence
  Description of Artificial Sequence: Synthetic oligonucleotide
  Target: LAMA2; (+) strand; PAM type: NRG; PAM sequence: GAG
cttaccactgctcttggtaa

SEQ ID NO: 154816 - DNA, 20 bp, Artificial Sequence
  Description of Artificial Sequence: Synthetic oligonucleotide
  Target: LAMA2; (+) strand; PAM type: NRG; PAM sequence: CAG
tcttggtaagagctttcctt

SEQ ID NO: 154817 - DNA, 20 bp, Artificial Sequence
  Description of Artificial Sequence: Synthetic oligonucleotide
  Target: LAMA2; (+) strand; PAM type: NRG; PAM sequence: AGG
cttggtaagagctttccttc

SEQ ID NO: 154818 - DNA, 20 bp, Artificial Sequence
  Description of Artificial Sequence: Synthetic oligonucleotide
  Target: LAMA2; (+) strand; PAM type: NRG; PAM sequence: GAG
ctttccttcaggcacaaaat

SEQ ID NO: 154819 - DNA, 20 bp, Artificial Sequence
  Description of Artificial Sequence: Synthetic oligonucleotide
  Target: LAMA2; (+) strand; PAM type: NRG; PAM sequence: AAG
tcaggcacaaaatgagataa

SEQ ID NO: 154820 - DNA, 20 bp, Artificial Sequence
  Description of Artificial Sequence: Synthetic oligonucleotide
  Target: LAMA2; (+) strand; PAM type: NRG; PAM sequence: AAG
aatgagataaaagtaatgac

SEQ ID NO: 154821 - DNA, 20 bp, Artificial Sequence
  Description of Artificial Sequence: Synthetic oligonucleotide
  Target: LAMA2; (+) strand; PAM type: NRG; PAM sequence: AGG
atgagataaaagtaatgaca

SEQ ID NO: 154822 - DNA, 20 bp, Artificial Sequence
  Description of Artificial Sequence: Synthetic oligonucleotide
  Target: LAMA2; (+) strand; PAM type: NRG; PAM sequence: TGG
aagtaatgacaaggtaaaac

SEQ ID NO: 154823 - DNA, 20 bp, Artificial Sequence
  Description of Artificial Sequence: Synthetic oligonucleotide
  Target: LAMA2; (+) strand; PAM type: NRG; PAM sequence: TGG
aggtaaaactggatgaaaat

SEQ ID NO: 154824 - DNA, 20 bp, Artificial Sequence
  Description of Artificial Sequence: Synthetic oligonucleotide
  Target: LAMA2; (+) strand; PAM type: NRG; PAM sequence: AAG
ctggatgaaaattggtcaac

SEQ ID NO: 154825 - DNA, 20 bp, Artificial Sequence
  Description of Artificial Sequence: Synthetic oligonucleotide
  Target: LAMA2; (+) strand; PAM type: NRG; PAM sequence: GAG
atgaaaattggtcaacaagt

SEQ ID NO: 154826 - DNA, 20 bp, Artificial Sequence
  Description of Artificial Sequence: Synthetic oligonucleotide
  Target: LAMA2; (+) strand; PAM type: NRG; PAM sequence: AGG
tgaaaattggtcaacaagtg

SEQ ID NO: 154827 - DNA, 20 bp, Artificial Sequence
  Description of Artificial Sequence: Synthetic oligonucleotide
  Target: LAMA2; (+) strand; PAM type: NRG; PAM sequence: AAG
aggaattaactgccttgcaa

SEQ ID NO: 154828 - DNA, 20 bp, Artificial Sequence
  Description of Artificial Sequence: Synthetic oligonucleotide
  Target: LAMA2; (+) strand; PAM type: NRG; PAM sequence: CAG
aattaactgccttgcaaaag

SEQ ID NO: 154829 - DNA, 20 bp, Artificial Sequence
  Description of Artificial Sequence: Synthetic oligonucleotide
  Target: LAMA2; (+) strand; PAM type: NRG; PAM sequence: CAG
caaaagcagtttttattata

SEQ ID NO: 154830 - DNA, 20 bp, Artificial Sequence
  Description of Artificial Sequence: Synthetic oligonucleotide
  Target: LAMA2; (+) strand; PAM type: NRG; PAM sequence: AAG
ttatacagaaaccattttga

SEQ ID NO: 154831 - DNA, 20 bp, Artificial Sequence
  Description of Artificial Sequence: Synthetic oligonucleotide
  Target: LAMA2; (+) strand; PAM type: NRG; PAM sequence: CAG
tacagaaaccattttgaaag

SEQ ID NO: 154832 - DNA, 20 bp, Artificial Sequence
  Description of Artificial Sequence: Synthetic oligonucleotide
  Target: LAMA2; (+) strand; PAM type: NRG; PAM sequence: CAG
ccattttgaaagcagttatt

SEQ ID NO: 154833 - DNA, 20 bp, Artificial Sequence
  Description of Artificial Sequence: Synthetic oligonucleotide
  Target: LAMA2; (+) strand; PAM type: NRG; PAM sequence: AAG
tttgaaagcagttattcaga

SEQ ID NO: 154834 - DNA, 20 bp, Artificial Sequence
  Description of Artificial Sequence: Synthetic oligonucleotide
  Target: LAMA2; (+) strand; PAM type: NRG; PAM sequence: CAG
gttattcagaaagtttctat

SEQ ID NO: 154835 - DNA, 20 bp, Artificial Sequence
  Description of Artificial Sequence: Synthetic oligonucleotide
  Target: LAMA2; (+) strand; PAM type: NRG; PAM sequence: TAG
ttctatcagtatatgatttg

SEQ ID NO: 154836 - DNA, 20 bp, Artificial Sequence
  Description of Artificial Sequence: Synthetic oligonucleotide
  Target: LAMA2; (+) strand; PAM type: NRG; PAM sequence: TGG
tttgtagctcaaattattgt

SEQ ID NO: 154837 - DNA, 20 bp, Artificial Sequence
  Description of Artificial Sequence: Synthetic oligonucleotide
  Target: LAMA2; (+) strand; PAM type: NRG; PAM sequence: TAG
atactattttctgcataata

SEQ ID NO: 154838 - DNA, 20 bp, Artificial Sequence
  Description of Artificial Sequence: Synthetic oligonucleotide
  Target: LAMA2; (+) strand; PAM type: NRG; PAM sequence: TAG
tattttctgcataatatagc

SEQ ID NO: 154839 - DNA, 20 bp, Artificial Sequence
  Description of Artificial Sequence: Synthetic oligonucleotide
  Target: LAMA2; (+) strand; PAM type: NRG; PAM sequence: AAG
aattatctaacttattttta

SEQ ID NO: 154840 - DNA, 20 bp, Artificial Sequence
  Description of Artificial Sequence: Synthetic oligonucleotide
  Target: LAMA2; (+) strand; PAM type: NRG; PAM sequence: AAG
tttaaagtcttctaaacatg

SEQ ID NO: 154841 - DNA, 20 bp, Artificial Sequence
  Description of Artificial Sequence: Synthetic oligonucleotide
  Target: LAMA2; (+) strand; PAM type: NRG; PAM sequence: CAG
gtcttctaaacatgaagttt

SEQ ID NO: 154842 - DNA, 20 bp, Artificial Sequence
  Description of Artificial Sequence: Synthetic oligonucleotide
  Target: LAMA2; (+) strand; PAM type: NRG; PAM sequence: GAG
tctaaacatgaagtttcagt

SEQ ID NO: 154843 - DNA, 20 bp, Artificial Sequence
  Description of Artificial Sequence: Synthetic oligonucleotide
  Target: LAMA2; (+) strand; PAM type: NRG; PAM sequence: AAG
tgaagtttcagtgagctttg

SEQ ID NO: 154844 - DNA, 20 bp, Artificial Sequence
  Description of Artificial Sequence: Synthetic oligonucleotide
  Target: LAMA2; (+) strand; PAM type: NRG; PAM sequence: TAG
aaaatgtcatactttccaaa

SEQ ID NO: 154845 - DNA, 20 bp, Artificial Sequence
  Description of Artificial Sequence: Synthetic oligonucleotide
  Target: LAMA2; (+) strand; PAM type: NRG; PAM sequence: TAG
agtttccaattataaccaat

SEQ ID NO: 154846 - DNA, 20 bp, Artificial Sequence
  Description of Artificial Sequence: Synthetic oligonucleotide
  Target: LAMA2; (+) strand; PAM type: NRG; PAM sequence: CAG
caattataaccaattagcat

SEQ ID NO: 154847 - DNA, 20 bp, Artificial Sequence
  Description of Artificial Sequence: Synthetic oligonucleotide
  Target: LAMA2; (+) strand; PAM type: NRG; PAM sequence: TAG
attagcatcagaaaatttat

SEQ ID NO: 154848 - DNA, 20 bp, Artificial Sequence
  Description of Artificial Sequence: Synthetic oligonucleotide
  Target: LAMA2; (+) strand; PAM type: NRG; PAM sequence: AAG
tttattagccaaatttcacc

SEQ ID NO: 154849 - DNA, 20 bp, Artificial Sequence
  Description of Artificial Sequence: Synthetic oligonucleotide
  Target: LAMA2; (+) strand; PAM type: NRG; PAM sequence: GAG
tcaccaagaacctaatttgt

SEQ ID NO: 154850 - DNA, 20 bp, Artificial Sequence
  Description of Artificial Sequence: Synthetic oligonucleotide
  Target: LAMA2; (+) strand; PAM type: NRG; PAM sequence: GAG
accaagaacctaatttgtga

SEQ ID NO: 154851 - DNA, 20 bp, Artificial Sequence
  Description of Artificial Sequence: Synthetic oligonucleotide
  Target: LAMA2; (+) strand; PAM type: NRG; PAM sequence: GAG
ttgtgagagaattgaaaaat

SEQ ID NO: 154852 - DNA, 20 bp, Artificial Sequence
  Description of Artificial Sequence: Synthetic oligonucleotide
  Target: LAMA2; (+) strand; PAM type: NRG; PAM sequence: TAG
gaaaaatgagtaccataatt

SEQ ID NO: 154853 - DNA, 20 bp, Artificial Sequence
  Description of Artificial Sequence: Synthetic oligonucleotide
  Target: LAMA2; (+) strand; PAM type: NRG; PAM sequence: CAG
gtaccataatttagtatgct

SEQ ID NO: 154854 - DNA, 20 bp, Artificial Sequence
  Description of Artificial Sequence: Synthetic oligonucleotide
  Target: LAMA2; (+) strand; PAM type: NRG; PAM sequence: TGG
cactgatgtaatgcttataa

SEQ ID NO: 154855 - DNA, 20 bp, Artificial Sequence
  Description of Artificial Sequence: Synthetic oligonucleotide
  Target: LAMA2; (+) strand; PAM type: NRG; PAM sequence: GGG
actgatgtaatgcttataat

SEQ ID NO: 154856 - DNA, 20 bp, Artificial Sequence
  Description of Artificial Sequence: Synthetic oligonucleotide
  Target: LAMA2; (+) strand; PAM type: NRG; PAM sequence: CAG
gtctgtgctgtatctctttt

SEQ ID NO: 154857 - DNA, 20 bp, Artificial Sequence
  Description of Artificial Sequence: Synthetic oligonucleotide
  Target: LAMA2; (+) strand; PAM type: NRG; PAM sequence: AAG
ctgtgaaaactattattact

SEQ ID NO: 154858 - DNA, 20 bp, Artificial Sequence
  Description of Artificial Sequence: Synthetic oligonucleotide
  Target: LAMA2; (+) strand; PAM type: NRG; PAM sequence: GAG
actaagtattaaaacaaact

SEQ ID NO: 154859 - DNA, 20 bp, Artificial Sequence
  Description of Artificial Sequence: Synthetic oligonucleotide
  Target: LAMA2; (+) strand; PAM type: NRG; PAM sequence: AGG
ctaagtattaaaacaaactg

SEQ ID NO: 154860 - DNA, 20 bp, Artificial Sequence
  Description of Artificial Sequence: Synthetic oligonucleotide
  Target: LAMA2; (+) strand; PAM type: NRG; PAM sequence: GGG
taagtattaaaacaaactga

SEQ ID NO: 154861 - DNA, 20 bp, Artificial Sequence
  Description of Artificial Sequence: Synthetic oligonucleotide
  Target: LAMA2; (+) strand; PAM type: NRG; PAM sequence: AAG
tattaaaacaaactgagggc

SEQ ID NO: 154862 - DNA, 20 bp, Artificial Sequence
  Description of Artificial Sequence: Synthetic oligonucleotide
  Target: LAMA2; (+) strand; PAM type: NRG; PAM sequence: AGG
attaaaacaaactgagggca

SEQ ID NO: 154863 - DNA, 20 bp, Artificial Sequence
  Description of Artificial Sequence: Synthetic oligonucleotide
  Target: LAMA2; (+) strand; PAM type: NRG; PAM sequence: CGG
aacaaactgagggcaaggca

SEQ ID NO: 154864 - DNA, 20 bp, Artificial Sequence
  Description of Artificial Sequence: Synthetic oligonucleotide
  Target: LAMA2; (+) strand; PAM type: NRG; PAM sequence: TGG
aaactgagggcaaggcacgg

SEQ ID NO: 154865 - DNA, 20 bp, Artificial Sequence
  Description of Artificial Sequence: Synthetic oligonucleotide
  Target: LAMA2; (+) strand; PAM type: NRG; PAM sequence: CAG
gtggctcatgcccgtattcc

SEQ ID NO: 154866 - DNA, 20 bp, Artificial Sequence
  Description of Artificial Sequence: Synthetic oligonucleotide
  Target: LAMA2; (+) strand; PAM type: NRG; PAM sequence: TGG
tgcccgtattcccagcactg

SEQ ID NO: 154867 - DNA, 20 bp, Artificial Sequence
  Description of Artificial Sequence: Synthetic oligonucleotide
  Target: LAMA2; (+) strand; PAM type: NRG; PAM sequence: GGG
gcccgtattcccagcactgt

SEQ ID NO: 154868 - DNA, 20 bp, Artificial Sequence
  Description of Artificial Sequence: Synthetic oligonucleotide
  Target: LAMA2; (+) strand; PAM type: NRG; PAM sequence: GAG
ccgtattcccagcactgtgg

SEQ ID NO: 154869 - DNA, 20 bp, Artificial Sequence
  Description of Artificial Sequence: Synthetic oligonucleotide
  Target: LAMA2; (+) strand; PAM type: NRG; PAM sequence: AGG
cgtattcccagcactgtggg

SEQ ID NO: 154870 - DNA, 20 bp, Artificial Sequence
  Description of Artificial Sequence: Synthetic oligonucleotide
  Target: LAMA2; (+) strand; PAM type: NRG; PAM sequence: GAG
tcccagcactgtgggaggcc

SEQ ID NO: 154871 - DNA, 20 bp, Artificial Sequence
  Description of Artificial Sequence: Synthetic oligonucleotide
  Target: LAMA2; (+) strand; PAM type: NRG; PAM sequence: AGG
cccagcactgtgggaggccg

SEQ ID NO: 154872 - DNA, 20 bp, Artificial Sequence
  Description of Artificial Sequence: Synthetic oligonucleotide
  Target: LAMA2; (+) strand; PAM type: NRG; PAM sequence: GAG
cagcactgtgggaggccgag

SEQ ID NO: 154873 - DNA, 20 bp, Artificial Sequence
  Description of Artificial Sequence: Synthetic oligonucleotide
  Target: LAMA2; (+) strand; PAM type: NRG; PAM sequence: AGG
agcactgtgggaggccgagg

SEQ ID NO: 154874 - DNA, 20 bp, Artificial Sequence
  Description of Artificial Sequence: Synthetic oligonucleotide
  Target: LAMA2; (+) strand; PAM type: NRG; PAM sequence: GGG
gcactgtgggaggccgagga

SEQ ID NO: 154875 - DNA, 20 bp, Artificial Sequence
  Description of Artificial Sequence: Synthetic oligonucleotide
  Target: LAMA2; (+) strand; PAM type: NRG; PAM sequence: TGG
ctgtgggaggccgaggaggg

SEQ ID NO: 154876 - DNA, 20 bp, Artificial Sequence
  Description of Artificial Sequence: Synthetic oligonucleotide
  Target: LAMA2; (+) strand; PAM type: NRG; PAM sequence: CAG
ccgaggagggtggatcactt

SEQ ID NO: 154877 - DNA, 20 bp, Artificial Sequence
  Description of Artificial Sequence: Synthetic oligonucleotide
  Target: LAMA2; (+) strand; PAM type: NRG; PAM sequence: CAG
gagggtggatcacttcagat

SEQ ID NO: 154878 - DNA, 20 bp, Artificial Sequence
  Description of Artificial Sequence: Synthetic oligonucleotide
  Target: LAMA2; (+) strand; PAM type: NRG; PAM sequence: AGG
agggtggatcacttcagatc

SEQ ID NO: 154879 - DNA, 20 bp, Artificial Sequence
  Description of Artificial Sequence: Synthetic oligonucleotide
  Target: LAMA2; (+) strand; PAM type: NRG; PAM sequence: GAG
ggtggatcacttcagatcag

SEQ ID NO: 154880 - DNA, 20 bp, Artificial Sequence
  Description of Artificial Sequence: Synthetic oligonucleotide
  Target: LAMA2; (+) strand; PAM type: NRG; PAM sequence: AAG
tcacttcagatcaggagttc

SEQ ID NO: 154881 - DNA, 20 bp, Artificial Sequence
  Description of Artificial Sequence: Synthetic oligonucleotide
  Target: LAMA2; (+) strand; PAM type: NRG; PAM sequence: CAG
tcagatcaggagttcaagac

SEQ ID NO: 154882 - DNA, 20 bp, Artificial Sequence
  Description of Artificial Sequence: Synthetic oligonucleotide
  Target: LAMA2; (+) strand; PAM type: NRG; PAM sequence: CGG
caagaccagccttgccaacg

SEQ ID NO: 154883 - DNA, 20 bp, Artificial Sequence
  Description of Artificial Sequence: Synthetic oligonucleotide
  Target: LAMA2; (+) strand; PAM type: NRG; PAM sequence: TAG
tctactaaaaatacaaaaat

SEQ ID NO: 154884 - DNA, 20 bp, Artificial Sequence
  Description of Artificial Sequence: Synthetic oligonucleotide
  Target: LAMA2; (+) strand; PAM type: NRG; PAM sequence: CGG
ctaaaaatacaaaaattagc

SEQ ID NO: 154885 - DNA, 20 bp, Artificial Sequence
  Description of Artificial Sequence: Synthetic oligonucleotide
  Target: LAMA2; (+) strand; PAM type: NRG; PAM sequence: GGG
taaaaatacaaaaattagcc

SEQ ID NO: 154886 - DNA, 20 bp, Artificial Sequence
  Description of Artificial Sequence: Synthetic oligonucleotide
  Target: LAMA2; (+) strand; PAM type: NRG; PAM sequence: TGG
atacaaaaattagccgggca

SEQ ID NO: 154887 - DNA, 20 bp, Artificial Sequence
  Description of Artificial Sequence: Synthetic oligonucleotide
  Target: LAMA2; (+) strand; PAM type: NRG; PAM sequence: TGG
caaaaattagccgggcatgg

SEQ ID NO: 154888 - DNA, 20 bp, Artificial Sequence
  Description of Artificial Sequence: Synthetic oligonucleotide
  Target: LAMA2; (+) strand; PAM type: NRG; PAM sequence: CAG
gtggcacatgcctgtaatcc

SEQ ID NO: 154889 - DNA, 20 bp, Artificial Sequence
  Description of Artificial Sequence: Synthetic oligonucleotide
  Target: LAMA2; (+) strand; PAM type: NRG; PAM sequence: GAG
ctgtaatcccagctactcgt

SEQ ID NO: 154890 - DNA, 20 bp, Artificial Sequence
  Description of Artificial Sequence: Synthetic oligonucleotide
  Target: LAMA2; (+) strand; PAM type: NRG; PAM sequence: AGG
tgtaatcccagctactcgtg

SEQ ID NO: 154891 - DNA, 20 bp, Artificial Sequence
  Description of Artificial Sequence: Synthetic oligonucleotide
  Target: LAMA2; (+) strand; PAM type: NRG; PAM sequence: GAG
tcccagctactcgtgaggct

SEQ ID NO: 154892 - DNA, 20 bp, Artificial Sequence
  Description of Artificial Sequence: Synthetic oligonucleotide
  Target: LAMA2; (+) strand; PAM type: NRG; PAM sequence: AGG
cccagctactcgtgaggctg

SEQ ID NO: 154893 - DNA, 20 bp, Artificial Sequence
  Description of Artificial Sequence: Synthetic oligonucleotide
  Target: LAMA2; (+) strand; PAM type: NRG; PAM sequence: CAG
agctactcgtgaggctgagg

SEQ ID NO: 154894 - DNA, 20 bp, Artificial Sequence
  Description of Artificial Sequence: Synthetic oligonucleotide
  Target: LAMA2; (+) strand; PAM type: NRG; PAM sequence: AGG
gctactcgtgaggctgaggc

SEQ ID NO: 154895 - DNA, 20 bp, Artificial Sequence
  Description of Artificial Sequence: Synthetic oligonucleotide
  Target: LAMA2; (+) strand; PAM type: NRG; PAM sequence: GAG
tactcgtgaggctgaggcag

SEQ ID NO: 154896 - DNA, 20 bp, Artificial Sequence
  Description of Artificial Sequence: Synthetic oligonucleotide
  Target: LAMA2; (+) strand; PAM type: NRG; PAM sequence: TGG
gcaggagaatcgcttgaacc

SEQ ID NO: 154897 - DNA, 20 bp, Artificial Sequence
  Description of Artificial Sequence: Synthetic oligonucleotide
  Target: LAMA2; (+) strand; PAM type: NRG; PAM sequence: GGG
caggagaatcgcttgaacct

SEQ ID NO: 154898 - DNA, 20 bp, Artificial Sequence
  Description of Artificial Sequence: Synthetic oligonucleotide
  Target: LAMA2; (+) strand; PAM type: NRG; PAM sequence: GAG
ggagaatcgcttgaacctgg

SEQ ID NO: 154899 - DNA, 20 bp, Artificial Sequence
  Description of Artificial Sequence: Synthetic oligonucleotide
  Target: LAMA2; (+) strand; PAM type: NRG; PAM sequence: AAG
atcgcttgaacctgggagac

SEQ ID NO: 154900 - DNA, 20 bp, Artificial Sequence
  Description of Artificial Sequence: Synthetic oligonucleotide
  Target: LAMA2; (+) strand; PAM type: NRG; PAM sequence: GAG
cgcttgaacctgggagacaa

SEQ ID NO: 154901 - DNA, 20 bp, Artificial Sequence
  Description of Artificial Sequence: Synthetic oligonucleotide
  Target: LAMA2; (+) strand; PAM type: NRG; PAM sequence: AGG
gcttgaacctgggagacaag

SEQ ID NO: 154902 - DNA, 20 bp, Artificial Sequence
  Description of Artificial Sequence: Synthetic oligonucleotide
  Target: LAMA2; (+) strand; PAM type: NRG; PAM sequence: CAG
acctgggagacaagaggttg

SEQ ID NO: 154903 - DNA, 20 bp, Artificial Sequence
  Description of Artificial Sequence: Synthetic oligonucleotide
  Target: LAMA2; (+) strand; PAM type: NRG; PAM sequence: GAG
gggagacaagaggttgcagt

SEQ ID NO: 154904 - DNA, 20 bp, Artificial Sequence
  Description of Artificial Sequence: Synthetic oligonucleotide
  Target: LAMA2; (+) strand; PAM type: NRG; PAM sequence: AAG
acaagaggttgcagtgagcc

SEQ ID NO: 154905 - DNA, 20 bp, Artificial Sequence
  Description of Artificial Sequence: Synthetic oligonucleotide
  Target: LAMA2; (+) strand; PAM type: NRG; PAM sequence: CAG
aagatcacaccactgcactc

SEQ ID NO: 154906 - DNA, 20 bp, Artificial Sequence
  Description of Artificial Sequence: Synthetic oligonucleotide
  Target: LAMA2; (+) strand; PAM type: NRG; PAM sequence: TGG
cacaccactgcactccagcc

SEQ ID NO: 154907 - DNA, 20 bp, Artificial Sequence
  Description of Artificial Sequence: Synthetic oligonucleotide
  Target: LAMA2; (+) strand; PAM type: NRG; PAM sequence: GGG
acaccactgcactccagcct

SEQ ID NO: 154908 - DNA, 20 bp, Artificial Sequence
  Description of Artificial Sequence: Synthetic oligonucleotide
  Target: LAMA2; (+) strand; PAM type: NRG; PAM sequence: GAG
accactgcactccagcctgg

SEQ ID NO: 154909 - DNA, 20 bp, Artificial Sequence
  Description of Artificial Sequence: Synthetic oligonucleotide
  Target: LAMA2; (+) strand; PAM type: NRG; PAM sequence: CAG
ctgcactccagcctgggaga

SEQ ID NO: 154910 - DNA, 20 bp, Artificial Sequence
  Description of Artificial Sequence: Synthetic oligonucleotide
  Target: LAMA2; (+) strand; PAM type: NRG; PAM sequence: GAG
gcactccagcctgggagaca

SEQ ID NO: 154911 - DNA, 20 bp, Artificial Sequence
  Description of Artificial Sequence: Synthetic oligonucleotide
  Target: LAMA2; (+) strand; PAM type: NRG; PAM sequence: AAG
tccagcctgggagacagagc

SEQ ID NO: 154912 - DNA, 20 bp, Artificial Sequence
  Description of Artificial Sequence: Synthetic oligonucleotide
  Target: LAMA2; (+) strand; PAM type: NRG; PAM sequence: AAG
aaaaataaaaattaaaaaaa

SEQ ID NO: 154913 - DNA, 20 bp, Artificial Sequence
  Description of Artificial Sequence: Synthetic oligonucleotide
  Target: LAMA2; (+) strand; PAM type: NRG; PAM sequence: TAG
ttaaaaaaaaagcctgaacc

SEQ ID NO: 154914 - DNA, 20 bp, Artificial Sequence
  Description of Artificial Sequence: Synthetic oligonucleotide
  Target: LAMA2; (+) strand; PAM type: NRG; PAM sequence: CGG
aaaaagcctgaacctagaaa

SEQ ID NO: 154915 - DNA, 20 bp, Artificial Sequence
  Description of Artificial Sequence: Synthetic oligonucleotide
  Target: LAMA2; (+) strand; PAM type: NRG; PAM sequence: TAG
gacctacaaatgtcaatact

SEQ ID NO: 154916 - DNA, 20 bp, Artificial Sequence
  Description of Artificial Sequence: Synthetic oligonucleotide
  Target: LAMA2; (+) strand; PAM type: NRG; PAM sequence: AAG
tagtaatatttttaattatt

SEQ ID NO: 154917 - DNA, 20 bp, Artificial Sequence
  Description of Artificial Sequence: Synthetic oligonucleotide
  Target: LAMA2; (+) strand; PAM type: NRG; PAM sequence: AAG
atatttttaattattaagcc

SEQ ID NO: 154918 - DNA, 20 bp, Artificial Sequence
  Description of Artificial Sequence: Synthetic oligonucleotide
  Target: LAMA2; (+) strand; PAM type: NRG; PAM sequence: AAG
aagccaagatttccaaaaat

SEQ ID NO: 154919 - DNA, 20 bp, Artificial Sequence
  Description of Artificial Sequence: Synthetic oligonucleotide
  Target: LAMA2; (+) strand; PAM type: NRG; PAM sequence: AAG
aagatttccaaaaataagaa

SEQ ID NO: 154920 - DNA, 20 bp, Artificial Sequence
  Description of Artificial Sequence: Synthetic oligonucleotide
  Target: LAMA2; (+) strand; PAM type: NRG; PAM sequence: TGG
aaaagcataattgattatac

SEQ ID NO: 154921 - DNA, 20 bp, Artificial Sequence
  Description of Artificial Sequence: Synthetic oligonucleotide
  Target: LAMA2; (+) strand; PAM type: NRG; PAM sequence: TGG
ctttttttttttttttcatt

SEQ ID NO: 154922 - DNA, 20 bp, Artificial Sequence
  Description of Artificial Sequence: Synthetic oligonucleotide
  Target: LAMA2; (+) strand; PAM type: NRG; PAM sequence: GAG
ttcatttggaacatataatt

SEQ ID NO: 154923 - DNA, 20 bp, Artificial Sequence
  Description of Artificial Sequence: Synthetic oligonucleotide
  Target: LAMA2; (+) strand; PAM type: NRG; PAM sequence: AAG
tttggaacatataattgaga

SEQ ID NO: 154924 - DNA, 20 bp, Artificial Sequence
  Description of Artificial Sequence: Synthetic oligonucleotide
  Target: LAMA2; (+) strand; PAM type: NRG; PAM sequence: TAG
acatataattgagaaagctt

SEQ ID NO: 154925 - DNA, 20 bp, Artificial Sequence
  Description of Artificial Sequence: Synthetic oligonucleotide
  Target: LAMA2; (+) strand; PAM type: NRG; PAM sequence: AAG
attgagaaagctttagtatc

SEQ ID NO: 154926 - DNA, 20 bp, Artificial Sequence
  Description of Artificial Sequence: Synthetic oligonucleotide
  Target: LAMA2; (+) strand; PAM type: NRG; PAM sequence: AAG
tttagtatcaagcatatgta

SEQ ID NO: 154927 - DNA, 20 bp, Artificial Sequence
  Description of Artificial Sequence: Synthetic oligonucleotide
  Target: LAMA2; (+) strand; PAM type: NRG; PAM sequence: AAG
gtaaagactcataaaataat

SEQ ID NO: 154928 - DNA, 20 bp, Artificial Sequence
  Description of Artificial Sequence: Synthetic oligonucleotide
  Target: LAMA2; (+) strand; PAM type: NRG; PAM sequence: AGG
taaagactcataaaataata

SEQ ID NO: 154929 - DNA, 20 bp, Artificial Sequence
  Description of Artificial Sequence: Synthetic oligonucleotide
  Target: LAMA2; (+) strand; PAM type: NRG; PAM sequence: AAG
gactcataaaataataagga

SEQ ID NO: 154930 - DNA, 20 bp, Artificial Sequence
  Description of Artificial Sequence: Synthetic oligonucleotide
  Target: LAMA2; (+) strand; PAM type: NRG; PAM sequence: AGG
actcataaaataataaggaa

SEQ ID NO: 154931 - DNA, 20 bp, Artificial Sequence
  Description of Artificial Sequence: Synthetic oligonucleotide
  Target: LAMA2; (+) strand; PAM type: NRG; PAM sequence: TAG
ggaaaggccaaactgcctga

SEQ ID NO: 154932 - DNA, 20 bp, Artificial Sequence
  Description of Artificial Sequence: Synthetic oligonucleotide
  Target: LAMA2; (+) strand; PAM type: NRG; PAM sequence: CAG
aatcaacaataaacatttta

SEQ ID NO: 154933 - DNA, 20 bp, Artificial Sequence
  Description of Artificial Sequence: Synthetic oligonucleotide
  Target: LAMA2; (+) strand; PAM type: NRG; PAM sequence: GAG
tcaacaataaacattttaca

SEQ ID NO: 154934 - DNA, 20 bp, Artificial Sequence
  Description of Artificial Sequence: Synthetic oligonucleotide
  Target: LAMA2; (+) strand; PAM type: NRG; PAM sequence: AGG
caacaataaacattttacag

SEQ ID NO: 154935 - DNA, 20 bp, Artificial Sequence
  Description of Artificial Sequence: Synthetic oligonucleotide
  Target: LAMA2; (+) strand; PAM type: NRG; PAM sequence: GAG
acaataaacattttacagag

SEQ ID NO: 154936 - DNA, 20 bp, Artificial Sequence
  Description of Artificial Sequence: Synthetic oligonucleotide
  Target: LAMA2; (+) strand; PAM type: NRG; PAM sequence: CAG
aacattttacagaggagaaa

SEQ ID NO: 154937 - DNA, 20 bp, Artificial Sequence
  Description of Artificial Sequence: Synthetic oligonucleotide
  Target: LAMA2; (+) strand; PAM type: NRG; PAM sequence: GAG
cattttacagaggagaaaca

SEQ ID NO: 154938 - DNA, 20 bp, Artificial Sequence
  Description of Artificial Sequence: Synthetic oligonucleotide
  Target: LAMA2; (+) strand; PAM type: NRG; PAM sequence: CAG
gagaaacagagaaacatata

SEQ ID NO: 154939 - DNA, 20 bp, Artificial Sequence
  Description of Artificial Sequence: Synthetic oligonucleotide
  Target: LAMA2; (+) strand; PAM type: NRG; PAM sequence: TGG
catatacagctaaaaacata

SEQ ID NO: 154940 - DNA, 20 bp, Artificial Sequence
  Description of Artificial Sequence: Synthetic oligonucleotide
  Target: LAMA2; (+) strand; PAM type: NRG; PAM sequence: AAG
atacagctaaaaacatatgg

SEQ ID NO: 154941 - DNA, 20 bp, Artificial Sequence
  Description of Artificial Sequence: Synthetic oligonucleotide
  Target: LAMA2; (+) strand; PAM type: NRG; PAM sequence: AGG
tacagctaaaaacatatgga

SEQ ID NO: 154942 - DNA, 20 bp, Artificial Sequence
  Description of Artificial Sequence: Synthetic oligonucleotide
  Target: LAMA2; (+) strand; PAM type: NRG; PAM sequence: GAG
aaaacatatggaaggatctt

SEQ ID NO: 154943 - DNA, 20 bp, Artificial Sequence
  Description of Artificial Sequence: Synthetic oligonucleotide
  Target: LAMA2; (+) strand; PAM type: NRG; PAM sequence: TAG
tggaaggatcttgagtctta

SEQ ID NO: 154944 - DNA, 20 bp, Artificial Sequence
  Description of Artificial Sequence: Synthetic oligonucleotide
  Target: LAMA2; (+) strand; PAM type: NRG; PAM sequence: GAG
agtcttatagcaatattgat

SEQ ID NO: 154945 - DNA, 20 bp, Artificial Sequence
  Description of Artificial Sequence: Synthetic oligonucleotide
  Target: LAMA2; (+) strand; PAM type: NRG; PAM sequence: TAG
ttgatgagcaaatcaatatg

SEQ ID NO: 154946 - DNA, 20 bp, Artificial Sequence
  Description of Artificial Sequence: Synthetic oligonucleotide
  Target: LAMA2; (+) strand; PAM type: NRG; PAM sequence: TAG
gagcaaatcaatatgtagaa

SEQ ID NO: 154947 - DNA, 20 bp, Artificial Sequence
  Description of Artificial Sequence: Synthetic oligonucleotide
  Target: LAMA2; (+) strand; PAM type: NRG; PAM sequence: CAG
caatatgtagaatagcaaat

SEQ ID NO: 154948 - DNA, 20 bp, Artificial Sequence
  Description of Artificial Sequence: Synthetic oligonucleotide
  Target: LAMA2; (+) strand; PAM type: NRG; PAM sequence: AAG
gcaaatcagtatcattatca

SEQ ID NO: 154949 - DNA, 20 bp, Artificial Sequence
  Description of Artificial Sequence: Synthetic oligonucleotide
  Target: LAMA2; (+) strand; PAM type: NRG; PAM sequence: GAG
aaatcagtatcattatcaaa

SEQ ID NO: 154950 - DNA, 20 bp, Artificial Sequence
  Description of Artificial Sequence: Synthetic oligonucleotide
  Target: LAMA2; (+) strand; PAM type: NRG; PAM sequence: TGG
tatcattatcaaagagataa

SEQ ID NO: 154951 - DNA, 20 bp, Artificial Sequence
  Description of Artificial Sequence: Synthetic oligonucleotide
  Target: LAMA2; (+) strand; PAM type: NRG; PAM sequence: TGG
tctctttatactcaatttat

SEQ ID NO: 154952 - DNA, 20 bp, Artificial Sequence
  Description of Artificial Sequence: Synthetic oligonucleotide
  Target: LAMA2; (+) strand; PAM type: NRG; PAM sequence: AAG
tcaatttattggcaataatt

SEQ ID NO: 154953 - DNA, 20 bp, Artificial Sequence
  Description of Artificial Sequence: Synthetic oligonucleotide
  Target: LAMA2; (+) strand; PAM type: NRG; PAM sequence: CAG
ataattaagaatttaaacta

SEQ ID NO: 154954 - DNA, 20 bp, Artificial Sequence
  Description of Artificial Sequence: Synthetic oligonucleotide
  Target: LAMA2; (+) strand; PAM type: NRG; PAM sequence: AAG
taaactacagaaatattgaa

SEQ ID NO: 154955 - DNA, 20 bp, Artificial Sequence
  Description of Artificial Sequence: Synthetic oligonucleotide
  Target: LAMA2; (+) strand; PAM type: NRG; PAM sequence: CAG
tgaaaagtatttgaatcaac

SEQ ID NO: 154956 - DNA, 20 bp, Artificial Sequence
  Description of Artificial Sequence: Synthetic oligonucleotide
  Target: LAMA2; (+) strand; PAM type: NRG; PAM sequence: TAG
aatcaaccagatttcttata

SEQ ID NO: 154957 - DNA, 20 bp, Artificial Sequence
  Description of Artificial Sequence: Synthetic oligonucleotide
  Target: LAMA2; (+) strand; PAM type: NRG; PAM sequence: TGG
tatatagtgctaatataaat

SEQ ID NO: 154958 - DNA, 20 bp, Artificial Sequence
  Description of Artificial Sequence: Synthetic oligonucleotide
  Target: LAMA2; (+) strand; PAM type: NRG; PAM sequence: AAG
ccacttgacattatctttta

SEQ ID NO: 154959 - DNA, 20 bp, Artificial Sequence
  Description of Artificial Sequence: Synthetic oligonucleotide
  Target: LAMA2; (+) strand; PAM type: NRG; PAM sequence: TAG
cctatgacccaacaattttc

SEQ ID NO: 154960 - DNA, 20 bp, Artificial Sequence
  Description of Artificial Sequence: Synthetic oligonucleotide
  Target: LAMA2; (+) strand; PAM type: NRG; PAM sequence: AAG
ttttctagatgtatatacta

SEQ ID NO: 154961 - DNA, 20 bp, Artificial Sequence
  Description of Artificial Sequence: Synthetic oligonucleotide
  Target: LAMA2; (+) strand; PAM type: NRG; PAM sequence: AGG
tttctagatgtatatactaa

SEQ ID NO: 154962 - DNA, 20 bp, Artificial Sequence
  Description of Artificial Sequence: Synthetic oligonucleotide
  Target: LAMA2; (+) strand; PAM type: NRG; PAM sequence: CAG
aattattacatttgtgcacc

SEQ ID NO: 154963 - DNA, 20 bp, Artificial Sequence
  Description of Artificial Sequence: Synthetic oligonucleotide
  Target: LAMA2; (+) strand; PAM type: NRG; PAM sequence: AAG
gcacccagataaacacataa

SEQ ID NO: 154964 - DNA, 20 bp, Artificial Sequence
  Description of Artificial Sequence: Synthetic oligonucleotide
  Target: LAMA2; (+) strand; PAM type: NRG; PAM sequence: AAG
acacataaaagtgttcataa

SEQ ID NO: 154965 - DNA, 20 bp, Artificial Sequence
  Description of Artificial Sequence: Synthetic oligonucleotide
  Target: LAMA2; (+) strand; PAM type: NRG; PAM sequence: AAG
ataaaagtactgtttatatt

SEQ ID NO: 154966 - DNA, 20 bp, Artificial Sequence
  Description of Artificial Sequence: Synthetic oligonucleotide
  Target: LAMA2; (+) strand; PAM type: NRG; PAM sequence: AAG
aaagtactgtttatattaag

SEQ ID NO: 154967 - DNA, 20 bp, Artificial Sequence
  Description of Artificial Sequence: Synthetic oligonucleotide
  Target: LAMA2; (+) strand; PAM type: NRG; PAM sequence: GAG
agtactgtttatattaagaa

SEQ ID NO: 154968 - DNA, 20 bp, Artificial Sequence
  Description of Artificial Sequence: Synthetic oligonucleotide
  Target: LAMA2; (+) strand; PAM type: NRG; PAM sequence: CAG
tttatattaagaagagccga

SEQ ID NO: 154969 - DNA, 20 bp, Artificial Sequence
  Description of Artificial Sequence: Synthetic oligonucleotide
  Target: LAMA2; (+) strand; PAM type: NRG; PAM sequence: CAG
atattaagaagagccgacag

SEQ ID NO: 154970 - DNA, 20 bp, Artificial Sequence
  Description of Artificial Sequence: Synthetic oligonucleotide
  Target: LAMA2; (+) strand; PAM type: NRG; PAM sequence: CAG
gccgacagcagatgcctatc

SEQ ID NO: 154971 - DNA, 20 bp, Artificial Sequence
  Description of Artificial Sequence: Synthetic oligonucleotide
  Target: LAMA2; (+) strand; PAM type: NRG; PAM sequence: GAG
cgacagcagatgcctatcca

SEQ ID NO: 154972 - DNA, 20 bp, Artificial Sequence
  Description of Artificial Sequence: Synthetic oligonucleotide
  Target: LAMA2; (+) strand; PAM type: NRG; PAM sequence: AGG
gacagcagatgcctatccag

SEQ ID NO: 154973 - DNA, 20 bp, Artificial Sequence
  Description of Artificial Sequence: Synthetic oligonucleotide
  Target: LAMA2; (+) strand; PAM type: NRG; PAM sequence: TGG
taaacaaattgtaatatatc

SEQ ID NO: 154974 - DNA, 20 bp, Artificial Sequence
  Description of Artificial Sequence: Synthetic oligonucleotide
  Target: LAMA2; (+) strand; PAM type: NRG; PAM sequence: CAG
caatgaaaataaatgaacta

SEQ ID NO: 154975 - DNA, 20 bp, Artificial Sequence
  Description of Artificial Sequence: Synthetic oligonucleotide
  Target: LAMA2; (+) strand; PAM type: NRG; PAM sequence: AGG
aatgaaaataaatgaactac

SEQ ID NO: 154976 - DNA, 20 bp, Artificial Sequence
  Description of Artificial Sequence: Synthetic oligonucleotide
  Target: LAMA2; (+) strand; PAM type: NRG; PAM sequence: TAG
atacgtgataatatgatgct

SEQ ID NO: 154977 - DNA, 20 bp, Artificial Sequence
  Description of Artificial Sequence: Synthetic oligonucleotide
  Target: LAMA2; (+) strand; PAM type: NRG; PAM sequence: TAG
gataatatgatgcttagtga

SEQ ID NO: 154978 - DNA, 20 bp, Artificial Sequence
  Description of Artificial Sequence: Synthetic oligonucleotide
  Target: LAMA2; (+) strand; PAM type: NRG; PAM sequence: AGG
ataatatgatgcttagtgat

SEQ ID NO: 154979 - DNA, 20 bp, Artificial Sequence
  Description of Artificial Sequence: Synthetic oligonucleotide
  Target: LAMA2; (+) strand; PAM type: NRG; PAM sequence: CAG
gatgcttagtgataggttct

SEQ ID NO: 154980 - DNA, 20 bp, Artificial Sequence
  Description of Artificial Sequence: Synthetic oligonucleotide
  Target: LAMA2; (+) strand; PAM type: NRG; PAM sequence: CAG
gataggttctcagatgatca

SEQ ID NO: 154981 - DNA, 20 bp, Artificial Sequence
  Description of Artificial Sequence: Synthetic oligonucleotide
  Target: LAMA2; (+) strand; PAM type: NRG; PAM sequence: TGG
ctcagatgatcacagcatga

SEQ ID NO: 154982 - DNA, 20 bp, Artificial Sequence
  Description of Artificial Sequence: Synthetic oligonucleotide
  Target: LAMA2; (+) strand; PAM type: NRG; PAM sequence: AAG
cacagcatgatggtctttat

SEQ ID NO: 154983 - DNA, 20 bp, Artificial Sequence
  Description of Artificial Sequence: Synthetic oligonucleotide
  Target: LAMA2; (+) strand; PAM type: NRG; PAM sequence: GAG
ttataagcaataacattttt

SEQ ID NO: 154984 - DNA, 20 bp, Artificial Sequence
  Description of Artificial Sequence: Synthetic oligonucleotide
  Target: LAMA2; (+) strand; PAM type: NRG; PAM sequence: AAG
aattatctttttaaaaatgt

SEQ ID NO: 154985 - DNA, 20 bp, Artificial Sequence
  Description of Artificial Sequence: Synthetic oligonucleotide
  Target: LAMA2; (+) strand; PAM type: NRG; PAM sequence: CAG
aataatataaacacaaaatt

SEQ ID NO: 154986 - DNA, 20 bp, Artificial Sequence
  Description of Artificial Sequence: Synthetic oligonucleotide
  Target: LAMA2; (+) strand; PAM type: NRG; PAM sequence: CAG
aaacacaaaattcagcatgt

SEQ ID NO: 154987 - DNA, 20 bp, Artificial Sequence
  Description of Artificial Sequence: Synthetic oligonucleotide
  Target: LAMA2; (+) strand; PAM type: NRG; PAM sequence: AGG
aacacaaaattcagcatgtc

SEQ ID NO: 154988 - DNA, 20 bp, Artificial Sequence
  Description of Artificial Sequence: Synthetic oligonucleotide
  Target: LAMA2; (+) strand; PAM type: NRG; PAM sequence: GGG
acacaaaattcagcatgtca

SEQ ID NO: 154989 - DNA, 20 bp, Artificial Sequence
  Description of Artificial Sequence: Synthetic oligonucleotide
  Target: LAMA2; (+) strand; PAM type: NRG; PAM sequence: CAG
agcatgtcagggttatgctg

SEQ ID NO: 154990 - DNA, 20 bp, Artificial Sequence
  Description of Artificial Sequence: Synthetic oligonucleotide
  Target: LAMA2; (+) strand; PAM type: NRG; PAM sequence: AGG
gcatgtcagggttatgctgc

SEQ ID NO: 154991 - DNA, 20 bp, Artificial Sequence
  Description of Artificial Sequence: Synthetic oligonucleotide
  Target: LAMA2; (+) strand; PAM type: NRG; PAM sequence: GGG
catgtcagggttatgctgca

SEQ ID NO: 154992 - DNA, 20 bp, Artificial Sequence
  Description of Artificial Sequence: Synthetic oligonucleotide
  Target: LAMA2; (+) strand; PAM type: NRG; PAM sequence: CGG
agggttatgctgcagggtaa

SEQ ID NO: 154993 - DNA, 20 bp, Artificial Sequence
  Description of Artificial Sequence: Synthetic oligonucleotide
  Target: LAMA2; (+) strand; PAM type: NRG; PAM sequence: GGG
gggttatgctgcagggtaac

SEQ ID NO: 154994 - DNA, 20 bp, Artificial Sequence
  Description of Artificial Sequence: Synthetic oligonucleotide
  Target: LAMA2; (+) strand; PAM type: NRG; PAM sequence: GGG
ggttatgctgcagggtaacg

SEQ ID NO: 154995 - DNA, 20 bp, Artificial Sequence
  Description of Artificial Sequence: Synthetic oligonucleotide
  Target: LAMA2; (+) strand; PAM type: NRG; PAM sequence: TGG
tatgctgcagggtaacgggg

SEQ ID NO: 154996 - DNA, 20 bp, Artificial Sequence
  Description of Artificial Sequence: Synthetic oligonucleotide
  Target: LAMA2; (+) strand; PAM type: NRG; PAM sequence: GAG
ctgcagggtaacggggtggt

SEQ ID NO: 154997 - DNA, 20 bp, Artificial Sequence
  Description of Artificial Sequence: Synthetic oligonucleotide
  Target: LAMA2; (+) strand; PAM type: NRG; PAM sequence: AGG
tgcagggtaacggggtggtg

SEQ ID NO: 154998 - DNA, 20 bp, Artificial Sequence
  Description of Artificial Sequence: Synthetic oligonucleotide
  Target: LAMA2; (+) strand; PAM type: NRG; PAM sequence: TAG
acggggtggtgaggattgta

SEQ ID NO: 154999 - DNA, 20 bp, Artificial Sequence
  Description of Artificial Sequence: Synthetic oligonucleotide
  Target: LAMA2; (+) strand; PAM type: NRG; PAM sequence: TAG
ggtggtgaggattgtataga

SEQ ID NO: 155000 - DNA, 20 bp, Artificial Sequence
  Description of Artificial Sequence: Synthetic oligonucleotide
  Target: LAMA2; (+) strand; PAM type: NRG; PAM sequence: TGG
attgctcatgttcaacttct

SEQ ID NO: 155001 - DNA, 20 bp, Artificial Sequence
  Description of Artificial Sequence: Synthetic oligonucleotide
  Target: LAMA2; (+) strand; PAM type: NRG; PAM sequence: GGG
ttgctcatgttcaacttctt

SEQ ID NO: 155002 - DNA, 20 bp, Artificial Sequence
  Description of Artificial Sequence: Synthetic oligonucleotide
  Target: LAMA2; (+) strand; PAM type: NRG; PAM sequence: TGG
tcatgttcaacttcttgggt

SEQ ID NO: 155003 - DNA, 20 bp, Artificial Sequence
  Description of Artificial Sequence: Synthetic oligonucleotide
  Target: LAMA2; (+) strand; PAM type: NRG; PAM sequence: GGG
catgttcaacttcttgggtt

SEQ ID NO: 155004 - DNA, 20 bp, Artificial Sequence
  Description of Artificial Sequence: Synthetic oligonucleotide
  Target: LAMA2; (+) strand; PAM type: NRG; PAM sequence: TAG
gttcaacttcttgggttggg

SEQ ID NO: 155005 - DNA, 20 bp, Artificial Sequence
  Description of Artificial Sequence: Synthetic oligonucleotide
  Target: LAMA2; (+) strand; PAM type: NRG; PAM sequence: TGG
aacttcttgggttgggtagt

SEQ ID NO: 155006 - DNA, 20 bp, Artificial Sequence
  Description of Artificial Sequence: Synthetic oligonucleotide
  Target: LAMA2; (+) strand; PAM type: NRG; PAM sequence: AAG
gttggcttttatcactaaca

SEQ ID NO: 155007 - DNA, 20 bp, Artificial Sequence
  Description of Artificial Sequence: Synthetic oligonucleotide
  Target: LAMA2; (+) strand; PAM type: NRG; PAM sequence: AAG
tttatcactaacaaagtaat

SEQ ID NO: 155008 - DNA, 20 bp, Artificial Sequence
  Description of Artificial Sequence: Synthetic oligonucleotide
  Target: LAMA2; (+) strand; PAM type: NRG; PAM sequence: CAG
tcactaacaaagtaataagc

SEQ ID NO: 155009 - DNA, 20 bp, Artificial Sequence
  Description of Artificial Sequence: Synthetic oligonucleotide
  Target: LAMA2; (+) strand; PAM type: NRG; PAM sequence: AGG
cactaacaaagtaataagcc

SEQ ID NO: 155010 - DNA, 20 bp, Artificial Sequence
  Description of Artificial Sequence: Synthetic oligonucleotide
  Target: LAMA2; (+) strand; PAM type: NRG; PAM sequence: GGG
actaacaaagtaataagcca

SEQ ID NO: 155011 - DNA, 20 bp, Artificial Sequence
  Description of Artificial Sequence: Synthetic oligonucleotide
  Target: LAMA2; (+) strand; PAM type: NRG; PAM sequence: TGG
taataagccagggaatacaa

SEQ ID NO: 155012 - DNA, 20 bp, Artificial Sequence
  Description of Artificial Sequence: Synthetic oligonucleotide
  Target: LAMA2; (+) strand; PAM type: NRG; PAM sequence: GGG
aataagccagggaatacaat

SEQ ID NO: 155013 - DNA, 20 bp, Artificial Sequence
  Description of Artificial Sequence: Synthetic oligonucleotide
  Target: LAMA2; (+) strand; PAM type: NRG; PAM sequence: TAG
gggtaaatgaaaaaataaaa

SEQ ID NO: 155014 - DNA, 20 bp, Artificial Sequence
  Description of Artificial Sequence: Synthetic oligonucleotide
  Target: LAMA2; (+) strand; PAM type: NRG; PAM sequence: GAG
gtaaatgaaaaaataaaata

SEQ ID NO: 155015 - DNA, 20 bp, Artificial Sequence
  Description of Artificial Sequence: Synthetic oligonucleotide
  Target: LAMA2; (+) strand; PAM type: NRG; PAM sequence: TAG
aaataaaatagagtcacgat

SEQ ID NO: 155016 - DNA, 20 bp, Artificial Sequence
  Description of Artificial Sequence: Synthetic oligonucleotide
  Target: LAMA2; (+) strand; PAM type: NRG; PAM sequence: TAG
cacgattagaccaatgatga

SEQ ID NO: 155017 - DNA, 20 bp, Artificial Sequence
  Description of Artificial Sequence: Synthetic oligonucleotide
  Target: LAMA2; (+) strand; PAM type: NRG; PAM sequence: AAG
atgatagtatatcataaatc

SEQ ID NO: 155018 - DNA, 20 bp, Artificial Sequence
  Description of Artificial Sequence: Synthetic oligonucleotide
  Target: LAMA2; (+) strand; PAM type: NRG; PAM sequence: TGG
aagtcttctcatctttaaaa

SEQ ID NO: 155019 - DNA, 20 bp, Artificial Sequence
  Description of Artificial Sequence: Synthetic oligonucleotide
  Target: LAMA2; (+) strand; PAM type: NRG; PAM sequence: TAG
tctcatctttaaaatggaat

SEQ ID NO: 155020 - DNA, 20 bp, Artificial Sequence
  Description of Artificial Sequence: Synthetic oligonucleotide
  Target: LAMA2; (+) strand; PAM type: NRG; PAM sequence: TAG
catctttaaaatggaattag

SEQ ID NO: 155021 - DNA, 20 bp, Artificial Sequence
  Description of Artificial Sequence: Synthetic oligonucleotide
  Target: LAMA2; (+) strand; PAM type: NRG; PAM sequence: AGG
atctttaaaatggaattagt

SEQ ID NO: 155022 - DNA, 20 bp, Artificial Sequence
  Description of Artificial Sequence: Synthetic oligonucleotide
  Target: LAMA2; (+) strand; PAM type: NRG; PAM sequence: GAG
ctttaaaatggaattagtag

SEQ ID NO: 155023 - DNA, 20 bp, Artificial Sequence
  Description of Artificial Sequence: Synthetic oligonucleotide
  Target: LAMA2; (+) strand; PAM type: NRG; PAM sequence: TAG
atggaattagtaggagtact

SEQ ID NO: 155024 - DNA, 20 bp, Artificial Sequence
  Description of Artificial Sequence: Synthetic oligonucleotide
  Target: LAMA2; (+) strand; PAM type: NRG; PAM sequence: TAG
agtaggagtacttagcttcc

SEQ ID NO: 155025 - DNA, 20 bp, Artificial Sequence
  Description of Artificial Sequence: Synthetic oligonucleotide
  Target: LAMA2; (+) strand; PAM type: NRG; PAM sequence: AGG
gtaggagtacttagcttcct

SEQ ID NO: 155026 - DNA, 20 bp, Artificial Sequence
  Description of Artificial Sequence: Synthetic oligonucleotide
  Target: LAMA2; (+) strand; PAM type: NRG; PAM sequence: GGG
taggagtacttagcttccta

SEQ ID NO: 155027 - DNA, 20 bp, Artificial Sequence
  Description of Artificial Sequence: Synthetic oligonucleotide
  Target: LAMA2; (+) strand; PAM type: NRG; PAM sequence: AAG
agcttcctagggttgttatg

SEQ ID NO: 155028 - DNA, 20 bp, Artificial Sequence
  Description of Artificial Sequence: Synthetic oligonucleotide
  Target: LAMA2; (+) strand; PAM type: NRG; PAM sequence: AGG
gcttcctagggttgttatga

SEQ ID NO: 155029 - DNA, 20 bp, Artificial Sequence
  Description of Artificial Sequence: Synthetic oligonucleotide
  Target: LAMA2; (+) strand; PAM type: NRG; PAM sequence: TAG
gttatgaaggttgaaattct

SEQ ID NO: 155030 - DNA, 20 bp, Artificial Sequence
  Description of Artificial Sequence: Synthetic oligonucleotide
  Target: LAMA2; (+) strand; PAM type: NRG; PAM sequence: TGG
gaaattcttagaataatgcc

SEQ ID NO: 155031 - DNA, 20 bp, Artificial Sequence
  Description of Artificial Sequence: Synthetic oligonucleotide
  Target: LAMA2; (+) strand; PAM type: NRG; PAM sequence: TAG
ttagaataatgcctggtaca

SEQ ID NO: 155032 - DNA, 20 bp, Artificial Sequence
  Description of Artificial Sequence: Synthetic oligonucleotide
  Target: LAMA2; (+) strand; PAM type: NRG; PAM sequence: AAG
tacatagcattttttttttt

SEQ ID NO: 155033 - DNA, 20 bp, Artificial Sequence
  Description of Artificial Sequence: Synthetic oligonucleotide
  Target: LAMA2; (+) strand; PAM type: NRG; PAM sequence: AAG
agcatttttttttttaagtt

SEQ ID NO: 155034 - DNA, 20 bp, Artificial Sequence
  Description of Artificial Sequence: Synthetic oligonucleotide
  Target: LAMA2; (+) strand; PAM type: NRG; PAM sequence: TAG
tttttttttaagttaagttc

SEQ ID NO: 155035 - DNA, 20 bp, Artificial Sequence
  Description of Artificial Sequence: Synthetic oligonucleotide
  Target: LAMA2; (+) strand; PAM type: NRG; PAM sequence: AGG
ttttttttaagttaagttct

SEQ ID NO: 155036 - DNA, 20 bp, Artificial Sequence
  Description of Artificial Sequence: Synthetic oligonucleotide
  Target: LAMA2; (+) strand; PAM type: NRG; PAM sequence: GGG
tttttttaagttaagttcta

SEQ ID NO: 155037 - DNA, 20 bp, Artificial Sequence
  Description of Artificial Sequence: Synthetic oligonucleotide
  Target: LAMA2; (+) strand; PAM type: NRG; PAM sequence: CAG
gggtacatgtgcacaatgtg

SEQ ID NO: 155038 - DNA, 20 bp, Artificial Sequence
  Description of Artificial Sequence: Synthetic oligonucleotide
  Target: LAMA2; (+) strand; PAM type: NRG; PAM sequence: AGG
ggtacatgtgcacaatgtgc

SEQ ID NO: 155039 - DNA, 20 bp, Artificial Sequence
  Description of Artificial Sequence: Synthetic oligonucleotide
  Target: LAMA2; (+) strand; PAM type: NRG; PAM sequence: TGG
tatgtgtacatgtgccatgt

SEQ ID NO: 155040 - DNA, 20 bp, Artificial Sequence
  Description of Artificial Sequence: Synthetic oligonucleotide
  Target: LAMA2; (+) strand; PAM type: NRG; PAM sequence: TAG
cattaactcgttatttacgt

SEQ ID NO: 155041 - DNA, 20 bp, Artificial Sequence
  Description of Artificial Sequence: Synthetic oligonucleotide
  Target: LAMA2; (+) strand; PAM type: NRG; PAM sequence: AGG
attaactcgttatttacgtt

SEQ ID NO: 155042 - DNA, 20 bp, Artificial Sequence
  Description of Artificial Sequence: Synthetic oligonucleotide
  Target: LAMA2; (+) strand; PAM type: NRG; PAM sequence: CAG
cccctccccccaccctacga

SEQ ID NO: 155043 - DNA, 20 bp, Artificial Sequence
  Description of Artificial Sequence: Synthetic oligonucleotide
  Target: LAMA2; (+) strand; PAM type: NRG; PAM sequence: AGG
ccctccccccaccctacgac

SEQ ID NO: 155044 - DNA, 20 bp, Artificial Sequence
  Description of Artificial Sequence: Synthetic oligonucleotide
  Target: LAMA2; (+) strand; PAM type: NRG; PAM sequence: CGG
ccccaccctacgacaggccc

SEQ ID NO: 155045 - DNA, 20 bp, Artificial Sequence
  Description of Artificial Sequence: Synthetic oligonucleotide
  Target: LAMA2; (+) strand; PAM type: NRG; PAM sequence: AAG
atgttccccttcctgtgtcc

SEQ ID NO: 155046 - DNA, 20 bp, Artificial Sequence
  Description of Artificial Sequence: Synthetic oligonucleotide
  Target: LAMA2; (+) strand; PAM type: NRG; PAM sequence: CAG
gtccaagtgttttcattgtt

SEQ ID NO: 155047 - DNA, 20 bp, Artificial Sequence
  Description of Artificial Sequence: Synthetic oligonucleotide
  Target: LAMA2; (+) strand; PAM type: NRG; PAM sequence: GAG
attgttcagttcccacctat

SEQ ID NO: 155048 - DNA, 20 bp, Artificial Sequence
  Description of Artificial Sequence: Synthetic oligonucleotide
  Target: LAMA2; (+) strand; PAM type: NRG; PAM sequence: GAG
ttcagttcccacctatgagt

SEQ ID NO: 155049 - DNA, 20 bp, Artificial Sequence
  Description of Artificial Sequence: Synthetic oligonucleotide
  Target: LAMA2; (+) strand; PAM type: NRG; PAM sequence: TAG
gagtgagaatatgcgatgtt

SEQ ID NO: 155050 - DNA, 20 bp, Artificial Sequence
  Description of Artificial Sequence: Synthetic oligonucleotide
  Target: LAMA2; (+) strand; PAM type: NRG; PAM sequence: TAG
ttagtttgttgtccttgtga

SEQ ID NO: 155051 - DNA, 20 bp, Artificial Sequence
  Description of Artificial Sequence: Synthetic oligonucleotide
  Target: LAMA2; (+) strand; PAM type: NRG; PAM sequence: GAG
tgtccttgtgatagtttgct

SEQ ID NO: 155052 - DNA, 20 bp, Artificial Sequence
  Description of Artificial Sequence: Synthetic oligonucleotide
  Target: LAMA2; (+) strand; PAM type: NRG; PAM sequence: TGG
tgatagtttgctgagaatga

SEQ ID NO: 155053 - DNA, 20 bp, Artificial Sequence
  Description of Artificial Sequence: Synthetic oligonucleotide
  Target: LAMA2; (+) strand; PAM type: NRG; PAM sequence: TAG
ttgctgagaatgatggtttc

SEQ ID NO: 155054 - DNA, 20 bp, Artificial Sequence
  Description of Artificial Sequence: Synthetic oligonucleotide
  Target: LAMA2; (+) strand; PAM type: NRG; PAM sequence: AAG
gcttcatccatgtccctaca

SEQ ID NO: 155055 - DNA, 20 bp, Artificial Sequence
  Description of Artificial Sequence: Synthetic oligonucleotide
  Target: LAMA2; (+) strand; PAM type: NRG; PAM sequence: AGG
cttcatccatgtccctacaa

SEQ ID NO: 155056 - DNA, 20 bp, Artificial Sequence
  Description of Artificial Sequence: Synthetic oligonucleotide
  Target: LAMA2; (+) strand; PAM type: NRG; PAM sequence: TGG
cgtgaactcatcctttttta

SEQ ID NO: 155057 - DNA, 20 bp, Artificial Sequence
  Description of Artificial Sequence: Synthetic oligonucleotide
  Target: LAMA2; (+) strand; PAM type: NRG; PAM sequence: TAG
catccttttttatggctgca

SEQ ID NO: 155058 - DNA, 20 bp, Artificial Sequence
  Description of Artificial Sequence: Synthetic oligonucleotide
  Target: LAMA2; (+) strand; PAM type: NRG; PAM sequence: TGG
tatggctgcatagtattcca

SEQ ID NO: 155059 - DNA, 20 bp, Artificial Sequence
  Description of Artificial Sequence: Synthetic oligonucleotide
  Target: LAMA2; (+) strand; PAM type: NRG; PAM sequence: CAG
catgccacattttcttaatc

SEQ ID NO: 155060 - DNA, 20 bp, Artificial Sequence
  Description of Artificial Sequence: Synthetic oligonucleotide
  Target: LAMA2; (+) strand; PAM type: NRG; PAM sequence: TGG
ttaatccagtctatcattga

SEQ ID NO: 155061 - DNA, 20 bp, Artificial Sequence
  Description of Artificial Sequence: Synthetic oligonucleotide
  Target: LAMA2; (+) strand; PAM type: NRG; PAM sequence: TGG
gtctatcattgatggacatt

SEQ ID NO: 155062 - DNA, 20 bp, Artificial Sequence
  Description of Artificial Sequence: Synthetic oligonucleotide
  Target: LAMA2; (+) strand; PAM type: NRG; PAM sequence: GGG
tctatcattgatggacattt

SEQ ID NO: 155063 - DNA, 20 bp, Artificial Sequence
  Description of Artificial Sequence: Synthetic oligonucleotide
  Target: LAMA2; (+) strand; PAM type: NRG; PAM sequence: TGG
tcattgatggacatttgggt

SEQ ID NO: 155064 - DNA, 20 bp, Artificial Sequence
  Description of Artificial Sequence: Synthetic oligonucleotide
  Target: LAMA2; (+) strand; PAM type: NRG; PAM sequence: AAG
tggacatttgggttggttcc

SEQ ID NO: 155065 - DNA, 20 bp, Artificial Sequence
  Description of Artificial Sequence: Synthetic oligonucleotide
  Target: LAMA2; (+) strand; PAM type: NRG; PAM sequence: TAG
caagtctttgctattatgaa

SEQ ID NO: 155066 - DNA, 20 bp, Artificial Sequence
  Description of Artificial Sequence: Synthetic oligonucleotide
  Target: LAMA2; (+) strand; PAM type: NRG; PAM sequence: TAG
tacatgtgcatgtgtcttta

SEQ ID NO: 155067 - DNA, 20 bp, Artificial Sequence
  Description of Artificial Sequence: Synthetic oligonucleotide
  Target: LAMA2; (+) strand; PAM type: NRG; PAM sequence: CAG
atgtgcatgtgtctttatag

SEQ ID NO: 155068 - DNA, 20 bp, Artificial Sequence
  Description of Artificial Sequence: Synthetic oligonucleotide
  Target: LAMA2; (+) strand; PAM type: NRG; PAM sequence: TGG
cagcatgatttataatcctt

SEQ ID NO: 155069 - DNA, 20 bp, Artificial Sequence
  Description of Artificial Sequence: Synthetic oligonucleotide
  Target: LAMA2; (+) strand; PAM type: NRG; PAM sequence: GGG
agcatgatttataatccttt

SEQ ID NO: 155070 - DNA, 20 bp, Artificial Sequence
  Description of Artificial Sequence: Synthetic oligonucleotide
  Target: LAMA2; (+) strand; PAM type: NRG; PAM sequence: CAG
taatcctttgggtatatacc

SEQ ID NO: 155071 - DNA, 20 bp, Artificial Sequence
  Description of Artificial Sequence: Synthetic oligonucleotide
  Target: LAMA2; (+) strand; PAM type: NRG; PAM sequence: TGG
tttgggtatatacccagtaa

SEQ ID NO: 155072 - DNA, 20 bp, Artificial Sequence
  Description of Artificial Sequence: Synthetic oligonucleotide
  Target: LAMA2; (+) strand; PAM type: NRG; PAM sequence: GGG
ttgggtatatacccagtaat

SEQ ID NO: 155073 - DNA, 20 bp, Artificial Sequence
  Description of Artificial Sequence: Synthetic oligonucleotide
  Target: LAMA2; (+) strand; PAM type: NRG; PAM sequence: TGG
atacccagtaatgggatgac

SEQ ID NO: 155074 - DNA, 20 bp, Artificial Sequence
  Description of Artificial Sequence: Synthetic oligonucleotide
  Target: LAMA2; (+) strand; PAM type: NRG; PAM sequence: GGG
tacccagtaatgggatgact

SEQ ID NO: 155075 - DNA, 20 bp, Artificial Sequence
  Description of Artificial Sequence: Synthetic oligonucleotide
  Target: LAMA2; (+) strand; PAM type: NRG; PAM sequence: TGG
aatgggatgactgggtcaaa

SEQ ID NO: 155076 - DNA, 20 bp, Artificial Sequence
  Description of Artificial Sequence: Synthetic oligonucleotide
  Target: LAMA2; (+) strand; PAM type: NRG; PAM sequence: TAG
actgggtcaaatggtatttc

SEQ ID NO: 155077 - DNA, 20 bp, Artificial Sequence
  Description of Artificial Sequence: Synthetic oligonucleotide
  Target: LAMA2; (+) strand; PAM type: NRG; PAM sequence: TAG
tcaaatggtatttctagttc

SEQ ID NO: 155078 - DNA, 20 bp, Artificial Sequence
  Description of Artificial Sequence: Synthetic oligonucleotide
  Target: LAMA2; (+) strand; PAM type: NRG; PAM sequence: GAG
atttctagttctagatcctt

SEQ ID NO: 155079 - DNA, 20 bp, Artificial Sequence
  Description of Artificial Sequence: Synthetic oligonucleotide
  Target: LAMA2; (+) strand; PAM type: NRG; PAM sequence: AGG
tttctagttctagatccttg

SEQ ID NO: 155080 - DNA, 20 bp, Artificial Sequence
  Description of Artificial Sequence: Synthetic oligonucleotide
  Target: LAMA2; (+) strand; PAM type: NRG; PAM sequence: TGG
cgccccactgtcttccacaa

SEQ ID NO: 155081 - DNA, 20 bp, Artificial Sequence
  Description of Artificial Sequence: Synthetic oligonucleotide
  Target: LAMA2; (+) strand; PAM type: NRG; PAM sequence: TAG
gtcttccacaatggttgaac

SEQ ID NO: 155082 - DNA, 20 bp, Artificial Sequence
  Description of Artificial Sequence: Synthetic oligonucleotide
  Target: LAMA2; (+) strand; PAM type: NRG; PAM sequence: CAG
ctagtttacaatcccaccaa

SEQ ID NO: 155083 - DNA, 20 bp, Artificial Sequence
  Description of Artificial Sequence: Synthetic oligonucleotide
  Target: LAMA2; (+) strand; PAM type: NRG; PAM sequence: AAG
caatcccaccaacagtgtaa

SEQ ID NO: 155084 - DNA, 20 bp, Artificial Sequence
  Description of Artificial Sequence: Synthetic oligonucleotide
  Target: LAMA2; (+) strand; PAM type: NRG; PAM sequence: CAG
ctatttctccacatcctctc

SEQ ID NO: 155085 - DNA, 20 bp, Artificial Sequence
  Description of Artificial Sequence: Synthetic oligonucleotide
  Target: LAMA2; (+) strand; PAM type: NRG; PAM sequence: CAG
tctccagcacctgttgtttc

SEQ ID NO: 155086 - DNA, 20 bp, Artificial Sequence
  Description of Artificial Sequence: Synthetic oligonucleotide
  Target: LAMA2; (+) strand; PAM type: NRG; PAM sequence: CAG
ccagactttttaatgatcac

SEQ ID NO: 155087 - DNA, 20 bp, Artificial Sequence
  Description of Artificial Sequence: Synthetic oligonucleotide
  Target: LAMA2; (+) strand; PAM type: NRG; PAM sequence: TGG
ttaatgatcaccagtctaac

SEQ ID NO: 155088 - DNA, 20 bp, Artificial Sequence
  Description of Artificial Sequence: Synthetic oligonucleotide
  Target: LAMA2; (+) strand; PAM type: NRG; PAM sequence: TAG
gatcaccagtctaactggtg

SEQ ID NO: 155089 - DNA, 20 bp, Artificial Sequence
  Description of Artificial Sequence: Synthetic oligonucleotide
  Target: LAMA2; (+) strand; PAM type: NRG; PAM sequence: AGG
atcaccagtctaactggtgt

SEQ ID NO: 155090 - DNA, 20 bp, Artificial Sequence
  Description of Artificial Sequence: Synthetic oligonucleotide
  Target: LAMA2; (+) strand; PAM type: NRG; PAM sequence: TGG
ccagtctaactggtgtagga

SEQ ID NO: 155091 - DNA, 20 bp, Artificial Sequence
  Description of Artificial Sequence: Synthetic oligonucleotide
  Target: LAMA2; (+) strand; PAM type: NRG; PAM sequence: TGG
tgtaggatggtatctcattg

SEQ ID NO: 155092 - DNA, 20 bp, Artificial Sequence
  Description of Artificial Sequence: Synthetic oligonucleotide
  Target: LAMA2; (+) strand; PAM type: NRG; PAM sequence: TGG
tttgatttgcatttctctga

SEQ ID NO: 155093 - DNA, 20 bp, Artificial Sequence
  Description of Artificial Sequence: Synthetic oligonucleotide
  Target: LAMA2; (+) strand; PAM type: NRG; PAM sequence: CAG
atttgcatttctctgatggc

SEQ ID NO: 155094 - DNA, 20 bp, Artificial Sequence
  Description of Artificial Sequence: Synthetic oligonucleotide
  Target: LAMA2; (+) strand; PAM type: NRG; PAM sequence: GAG
ctctgatggccagtgatgat

SEQ ID NO: 155095 - DNA, 20 bp, Artificial Sequence
  Description of Artificial Sequence: Synthetic oligonucleotide
  Target: LAMA2; (+) strand; PAM type: NRG; PAM sequence: TGG
gcattttttcatgtgtctgc

SEQ ID NO: 155096 - DNA, 20 bp, Artificial Sequence
  Description of Artificial Sequence: Synthetic oligonucleotide
  Target: LAMA2; (+) strand; PAM type: NRG; PAM sequence: CAG
catgtgtctgctggctgcat

SEQ ID NO: 155097 - DNA, 20 bp, Artificial Sequence
  Description of Artificial Sequence: Synthetic oligonucleotide
  Target: LAMA2; (+) strand; PAM type: NRG; PAM sequence: GAG
ctgcatcagtgtcttctttt

SEQ ID NO: 155098 - DNA, 20 bp, Artificial Sequence
  Description of Artificial Sequence: Synthetic oligonucleotide
  Target: LAMA2; (+) strand; PAM type: NRG; PAM sequence: AAG
catcagtgtcttcttttgag

SEQ ID NO: 155099 - DNA, 20 bp, Artificial Sequence
  Description of Artificial Sequence: Synthetic oligonucleotide
  Target: LAMA2; (+) strand; PAM type: NRG; PAM sequence: TGG
tatcctttgcccaattttga

SEQ ID NO: 155100 - DNA, 20 bp, Artificial Sequence
  Description of Artificial Sequence: Synthetic oligonucleotide
  Target: LAMA2; (+) strand; PAM type: NRG; PAM sequence: GGG
atcctttgcccaattttgat

SEQ ID NO: 155101 - DNA, 20 bp, Artificial Sequence
  Description of Artificial Sequence: Synthetic oligonucleotide
  Target: LAMA2; (+) strand; PAM type: NRG; PAM sequence: GGG
tcctttgcccaattttgatg

SEQ ID NO: 155102 - DNA, 20 bp, Artificial Sequence
  Description of Artificial Sequence: Synthetic oligonucleotide
  Target: LAMA2; (+) strand; PAM type: NRG; PAM sequence: AAG
gttatttgtttttttcttgt

SEQ ID NO: 155103 - DNA, 20 bp, Artificial Sequence
  Description of Artificial Sequence: Synthetic oligonucleotide
  Target: LAMA2; (+) strand; PAM type: NRG; PAM sequence: GAG
tttttcttgtaagtttgttt

SEQ ID NO: 155104 - DNA, 20 bp, Artificial Sequence
  Description of Artificial Sequence: Synthetic oligonucleotide
  Target: LAMA2; (+) strand; PAM type: NRG; PAM sequence: TAG
aagtttgtttgagttctttg

SEQ ID NO: 155105 - DNA, 20 bp, Artificial Sequence
  Description of Artificial Sequence: Synthetic oligonucleotide
  Target: LAMA2; (+) strand; PAM type: NRG; PAM sequence: TGG
tttgagttctttgtagattc

SEQ ID NO: 155106 - DNA, 20 bp, Artificial Sequence
  Description of Artificial Sequence: Synthetic oligonucleotide
  Target: LAMA2; (+) strand; PAM type: NRG; PAM sequence: TAG
tctttgtagattctggatat

SEQ ID NO: 155107 - DNA, 20 bp, Artificial Sequence
  Description of Artificial Sequence: Synthetic oligonucleotide
  Target: LAMA2; (+) strand; PAM type: NRG; PAM sequence: CAG
tctggatattagccctttgt

SEQ ID NO: 155108 - DNA, 20 bp, Artificial Sequence
  Description of Artificial Sequence: Synthetic oligonucleotide
  Target: LAMA2; (+) strand; PAM type: NRG; PAM sequence: GAG
atattagccctttgtcagat

SEQ ID NO: 155109 - DNA, 20 bp, Artificial Sequence
  Description of Artificial Sequence: Synthetic oligonucleotide
  Target: LAMA2; (+) strand; PAM type: NRG; PAM sequence: TAG
ttagccctttgtcagatgag

SEQ ID NO: 155110 - DNA, 20 bp, Artificial Sequence
  Description of Artificial Sequence: Synthetic oligonucleotide
  Target: LAMA2; (+) strand; PAM type: NRG; PAM sequence: TAG
aaaaatcttctcccattctg

SEQ ID NO: 155111 - DNA, 20 bp, Artificial Sequence
  Description of Artificial Sequence: Synthetic oligonucleotide
  Target: LAMA2; (+) strand; PAM type: NRG; PAM sequence: AGG
aaaatcttctcccattctgt

SEQ ID NO: 155112 - DNA, 20 bp, Artificial Sequence
  Description of Artificial Sequence: Synthetic oligonucleotide
  Target: LAMA2; (+) strand; PAM type: NRG; PAM sequence: TGG
aggttgcctgttcactctga

SEQ ID NO: 155113 - DNA, 20 bp, Artificial Sequence
  Description of Artificial Sequence: Synthetic oligonucleotide
  Target: LAMA2; (+) strand; PAM type: NRG; PAM sequence: TAG
ttgcctgttcactctgatgg

SEQ ID NO: 155114 - DNA, 20 bp, Artificial Sequence
  Description of Artificial Sequence: Synthetic oligonucleotide
  Target: LAMA2; (+) strand; PAM type: NRG; PAM sequence: CAG
tggtagtttcttttgctgtg

SEQ ID NO: 155115 - DNA, 20 bp, Artificial Sequence
  Description of Artificial Sequence: Synthetic oligonucleotide
  Target: LAMA2; (+) strand; PAM type: NRG; PAM sequence: AAG
tagtttcttttgctgtgcag

SEQ ID NO: 155116 - DNA, 20 bp, Artificial Sequence
  Description of Artificial Sequence: Synthetic oligonucleotide
  Target: LAMA2; (+) strand; PAM type: NRG; PAM sequence: TAG
tttgctgtgcagaagctctt

SEQ ID NO: 155117 - DNA, 20 bp, Artificial Sequence
  Description of Artificial Sequence: Synthetic oligonucleotide
  Target: LAMA2; (+) strand; PAM type: NRG; PAM sequence: TAG
cagaagctctttagtttaat

SEQ ID NO: 155118 - DNA, 20 bp, Artificial Sequence
  Description of Artificial Sequence: Synthetic oligonucleotide
  Target: LAMA2; (+) strand; PAM type: NRG; PAM sequence: TGG
tagatcccatttgtcaactt

SEQ ID NO: 155119 - DNA, 20 bp, Artificial Sequence
  Description of Artificial Sequence: Synthetic oligonucleotide
  Target: LAMA2; (+) strand; PAM type: NRG; PAM sequence: TAG
tgcccttgcttttcgtgttt

SEQ ID NO: 155120 - DNA, 20 bp, Artificial Sequence
  Description of Artificial Sequence: Synthetic oligonucleotide
  Target: LAMA2; (+) strand; PAM type: NRG; PAM sequence: AAG
cttttcgtgttttagacaaa

SEQ ID NO: 155121 - DNA, 20 bp, Artificial Sequence
  Description of Artificial Sequence: Synthetic oligonucleotide
  Target: LAMA2; (+) strand; PAM type: NRG; PAM sequence: TGG
acccatgcctatgtcctcaa

SEQ ID NO: 155122 - DNA, 20 bp, Artificial Sequence
  Description of Artificial Sequence: Synthetic oligonucleotide
  Target: LAMA2; (+) strand; PAM type: NRG; PAM sequence: TAG
atgtcctcaatggtattgcc

SEQ ID NO: 155123 - DNA, 20 bp, Artificial Sequence
  Description of Artificial Sequence: Synthetic oligonucleotide
  Target: LAMA2; (+) strand; PAM type: NRG; PAM sequence: AGG
tgtcctcaatggtattgcct

SEQ ID NO: 155124 - DNA, 20 bp, Artificial Sequence
  Description of Artificial Sequence: Synthetic oligonucleotide
  Target: LAMA2; (+) strand; PAM type: NRG; PAM sequence: TAG
gtattgcctaggttttcttc

SEQ ID NO: 155125 - DNA, 20 bp, Artificial Sequence
  Description of Artificial Sequence: Synthetic oligonucleotide
  Target: LAMA2; (+) strand; PAM type: NRG; PAM sequence: AGG
tattgcctaggttttcttct

SEQ ID NO: 155126 - DNA, 20 bp, Artificial Sequence
  Description of Artificial Sequence: Synthetic oligonucleotide
  Target: LAMA2; (+) strand; PAM type: NRG; PAM sequence: GGG
attgcctaggttttcttcta

SEQ ID NO: 155127 - DNA, 20 bp, Artificial Sequence
  Description of Artificial Sequence: Synthetic oligonucleotide
  Target: LAMA2; (+) strand; PAM type: NRG; PAM sequence: TGG
gttttcttctagggttttta

SEQ ID NO: 155128 - DNA, 20 bp, Artificial Sequence
  Description of Artificial Sequence: Synthetic oligonucleotide
  Target: LAMA2; (+) strand; PAM type: NRG; PAM sequence: AAG
tggttttatgtctaacattt

SEQ ID NO: 155129 - DNA, 20 bp, Artificial Sequence
  Description of Artificial Sequence: Synthetic oligonucleotide
  Target: LAMA2; (+) strand; PAM type: NRG; PAM sequence: AAG
tcttgaattaatttttgtat

SEQ ID NO: 155130 - DNA, 20 bp, Artificial Sequence
  Description of Artificial Sequence: Synthetic oligonucleotide
  Target: LAMA2; (+) strand; PAM type: NRG; PAM sequence: AGG
cttgaattaatttttgtata

SEQ ID NO: 155131 - DNA, 20 bp, Artificial Sequence
  Description of Artificial Sequence: Synthetic oligonucleotide
  Target: LAMA2; (+) strand; PAM type: NRG; PAM sequence: AAG
ttaatttttgtataaggtgt

SEQ ID NO: 155132 - DNA, 20 bp, Artificial Sequence
  Description of Artificial Sequence: Synthetic oligonucleotide
  Target: LAMA2; (+) strand; PAM type: NRG; PAM sequence: AGG
taatttttgtataaggtgta

SEQ ID NO: 155133 - DNA, 20 bp, Artificial Sequence
  Description of Artificial Sequence: Synthetic oligonucleotide
  Target: LAMA2; (+) strand; PAM type: NRG; PAM sequence: AAG
tttttgtataaggtgtaagg

SEQ ID NO: 155134 - DNA, 20 bp, Artificial Sequence
  Description of Artificial Sequence: Synthetic oligonucleotide
  Target: LAMA2; (+) strand; PAM type: NRG; PAM sequence: AGG
ttttgtataaggtgtaagga

SEQ ID NO: 155135 - DNA, 20 bp, Artificial Sequence
  Description of Artificial Sequence: Synthetic oligonucleotide
  Target: LAMA2; (+) strand; PAM type: NRG; PAM sequence: GGG
tttgtataaggtgtaaggaa

SEQ ID NO: 155136 - DNA, 20 bp, Artificial Sequence
  Description of Artificial Sequence: Synthetic oligonucleotide
  Target: LAMA2; (+) strand; PAM type: NRG; PAM sequence: CAG
taaggtgtaaggaagggatc

SEQ ID NO: 155137 - DNA, 20 bp, Artificial Sequence
  Description of Artificial Sequence: Synthetic oligonucleotide
  Target: LAMA2; (+) strand; PAM type: NRG; PAM sequence: CAG
gtaaggaagggatccagttt

SEQ ID NO: 155138 - DNA, 20 bp, Artificial Sequence
  Description of Artificial Sequence: Synthetic oligonucleotide
  Target: LAMA2; (+) strand; PAM type: NRG; PAM sequence: TGG
cagtttcagctttctacata

SEQ ID NO: 155139 - DNA, 20 bp, Artificial Sequence
  Description of Artificial Sequence: Synthetic oligonucleotide
  Target: LAMA2; (+) strand; PAM type: NRG; PAM sequence: TAG
ttcagctttctacatatggc

SEQ ID NO: 155140 - DNA, 20 bp, Artificial Sequence
  Description of Artificial Sequence: Synthetic oligonucleotide
  Target: LAMA2; (+) strand; PAM type: NRG; PAM sequence: CAG
gctttctacatatggctagc

SEQ ID NO: 155141 - DNA, 20 bp, Artificial Sequence
  Description of Artificial Sequence: Synthetic oligonucleotide
  Target: LAMA2; (+) strand; PAM type: NRG; PAM sequence: CAG
atatggctagccagttttcc

SEQ ID NO: 155142 - DNA, 20 bp, Artificial Sequence
  Description of Artificial Sequence: Synthetic oligonucleotide
  Target: LAMA2; (+) strand; PAM type: NRG; PAM sequence: TAG
tcccagcaccatttattaaa

SEQ ID NO: 155143 - DNA, 20 bp, Artificial Sequence
  Description of Artificial Sequence: Synthetic oligonucleotide
  Target: LAMA2; (+) strand; PAM type: NRG; PAM sequence: AGG
cccagcaccatttattaaat

SEQ ID NO: 155144 - DNA, 20 bp, Artificial Sequence
  Description of Artificial Sequence: Synthetic oligonucleotide
  Target: LAMA2; (+) strand; PAM type: NRG; PAM sequence: GGG
ccagcaccatttattaaata

SEQ ID NO: 155145 - DNA, 20 bp, Artificial Sequence
  Description of Artificial Sequence: Synthetic oligonucleotide
  Target: LAMA2; (+) strand; PAM type: NRG; PAM sequence: CAG
tccccattgcttgtttttgt

SEQ ID NO: 155146 - DNA, 20 bp, Artificial Sequence
  Description of Artificial Sequence: Synthetic oligonucleotide
  Target: LAMA2; (+) strand; PAM type: NRG; PAM sequence: AGG
ccccattgcttgtttttgtc

SEQ ID NO: 155147 - DNA, 20 bp, Artificial Sequence
  Description of Artificial Sequence: Synthetic oligonucleotide
  Target: LAMA2; (+) strand; PAM type: NRG; PAM sequence: AAG
tgtttttgtcaggtttgtca

SEQ ID NO: 155148 - DNA, 20 bp, Artificial Sequence
  Description of Artificial Sequence: Synthetic oligonucleotide
  Target: LAMA2; (+) strand; PAM type: NRG; PAM sequence: CAG
ttgtcaggtttgtcaaagat

SEQ ID NO: 155149 - DNA, 20 bp, Artificial Sequence
  Description of Artificial Sequence: Synthetic oligonucleotide
  Target: LAMA2; (+) strand; PAM type: NRG; PAM sequence: TGG
caggtttgtcaaagatcaga

SEQ ID NO: 155150 - DNA, 20 bp, Artificial Sequence
  Description of Artificial Sequence: Synthetic oligonucleotide
  Target: LAMA2; (+) strand; PAM type: NRG; PAM sequence: TAG
tgtcaaagatcagatggttg

SEQ ID NO: 155151 - DNA, 20 bp, Artificial Sequence
  Description of Artificial Sequence: Synthetic oligonucleotide
  Target: LAMA2; (+) strand; PAM type: NRG; PAM sequence: TGG
atcagatggttgtagatgtg

SEQ ID NO: 155152 - DNA, 20 bp, Artificial Sequence
  Description of Artificial Sequence: Synthetic oligonucleotide
  Target: LAMA2; (+) strand; PAM type: NRG; PAM sequence: GAG
agatgtgtggtattatttct

SEQ ID NO: 155153 - DNA, 20 bp, Artificial Sequence
  Description of Artificial Sequence: Synthetic oligonucleotide
  Target: LAMA2; (+) strand; PAM type: NRG; PAM sequence: AGG
gatgtgtggtattatttctg

SEQ ID NO: 155154 - DNA, 20 bp, Artificial Sequence
  Description of Artificial Sequence: Synthetic oligonucleotide
  Target: LAMA2; (+) strand; PAM type: NRG; PAM sequence: GGG
atgtgtggtattatttctga

SEQ ID NO: 155155 - DNA, 20 bp, Artificial Sequence
  Description of Artificial Sequence: Synthetic oligonucleotide
  Target: LAMA2; (+) strand; PAM type: NRG; PAM sequence: TGG
attgatctacatctctcttt

SEQ ID NO: 155156 - DNA, 20 bp, Artificial Sequence
  Description of Artificial Sequence: Synthetic oligonucleotide
  Target: LAMA2; (+) strand; PAM type: NRG; PAM sequence: CAG
ctacatctctcttttggtac

SEQ ID NO: 155157 - DNA, 20 bp, Artificial Sequence
  Description of Artificial Sequence: Synthetic oligonucleotide
  Target: LAMA2; (+) strand; PAM type: NRG; PAM sequence: TGG
gtaccagtaccatgctgttt

SEQ ID NO: 155158 - DNA, 20 bp, Artificial Sequence
  Description of Artificial Sequence: Synthetic oligonucleotide
  Target: LAMA2; (+) strand; PAM type: NRG; PAM sequence: TAG
ccatgctgttttggttactg

SEQ ID NO: 155159 - DNA, 20 bp, Artificial Sequence
  Description of Artificial Sequence: Synthetic oligonucleotide
  Target: LAMA2; (+) strand; PAM type: NRG; PAM sequence: TAG
ttttggttactgtagccttg

SEQ ID NO: 155160 - DNA, 20 bp, Artificial Sequence
  Description of Artificial Sequence: Synthetic oligonucleotide
  Target: LAMA2; (+) strand; PAM type: NRG; PAM sequence: TAG
gttactgtagccttgtagta

SEQ ID NO: 155161 - DNA, 20 bp, Artificial Sequence
  Description of Artificial Sequence: Synthetic oligonucleotide
  Target: LAMA2; (+) strand; PAM type: NRG; PAM sequence: AAG
tagccttgtagtatagtttg

SEQ ID NO: 155162 - DNA, 20 bp, Artificial Sequence
  Description of Artificial Sequence: Synthetic oligonucleotide
  Target: LAMA2; (+) strand; PAM type: NRG; PAM sequence: CAG
cttgtagtatagtttgaagt

SEQ ID NO: 155163 - DNA, 20 bp, Artificial Sequence
  Description of Artificial Sequence: Synthetic oligonucleotide
  Target: LAMA2; (+) strand; PAM type: NRG; PAM sequence: AGG
ttgtagtatagtttgaagtc

SEQ ID NO: 155164 - DNA, 20 bp, Artificial Sequence
  Description of Artificial Sequence: Synthetic oligonucleotide
  Target: LAMA2; (+) strand; PAM type: NRG; PAM sequence: TAG
tagtatagtttgaagtcagg

SEQ ID NO: 155165 - DNA, 20 bp, Artificial Sequence
  Description of Artificial Sequence: Synthetic oligonucleotide
  Target: LAMA2; (+) strand; PAM type: NRG; PAM sequence: CAG
gtcaggtagcatgatgcctc

SEQ ID NO: 155166 - DNA, 20 bp, Artificial Sequence
  Description of Artificial Sequence: Synthetic oligonucleotide
  Target: LAMA2; (+) strand; PAM type: NRG; PAM sequence: TGG
tgcctccagctttgttcttt

SEQ ID NO: 155167 - DNA, 20 bp, Artificial Sequence
  Description of Artificial Sequence: Synthetic oligonucleotide
  Target: LAMA2; (+) strand; PAM type: NRG; PAM sequence: TAG
ccagctttgttcttttggct

SEQ ID NO: 155168 - DNA, 20 bp, Artificial Sequence
  Description of Artificial Sequence: Synthetic oligonucleotide
  Target: LAMA2; (+) strand; PAM type: NRG; PAM sequence: AGG
cagctttgttcttttggctt

SEQ ID NO: 155169 - DNA, 20 bp, Artificial Sequence
  Description of Artificial Sequence: Synthetic oligonucleotide
  Target: LAMA2; (+) strand; PAM type: NRG; PAM sequence: TGG
cttttggcttaggattgact

SEQ ID NO: 155170 - DNA, 20 bp, Artificial Sequence
  Description of Artificial Sequence: Synthetic oligonucleotide
  Target: LAMA2; (+) strand; PAM type: NRG; PAM sequence: GGG
ttttggcttaggattgactt

SEQ ID NO: 155171 - DNA, 20 bp, Artificial Sequence
  Description of Artificial Sequence: Synthetic oligonucleotide
  Target: LAMA2; (+) strand; PAM type: NRG; PAM sequence: TGG
ttaggattgacttgggaatg

SEQ ID NO: 155172 - DNA, 20 bp, Artificial Sequence
  Description of Artificial Sequence: Synthetic oligonucleotide
  Target: LAMA2; (+) strand; PAM type: NRG; PAM sequence: GGG
taggattgacttgggaatgt

SEQ ID NO: 155173 - DNA, 20 bp, Artificial Sequence
  Description of Artificial Sequence: Synthetic oligonucleotide
  Target: LAMA2; (+) strand; PAM type: NRG; PAM sequence: TGG
tgggaatgtgggctcttttt

SEQ ID NO: 155174 - DNA, 20 bp, Artificial Sequence
  Description of Artificial Sequence: Synthetic oligonucleotide
  Target: LAMA2; (+) strand; PAM type: NRG; PAM sequence: AAG
ttggttccatatgaacttta

SEQ ID NO: 155175 - DNA, 20 bp, Artificial Sequence
  Description of Artificial Sequence: Synthetic oligonucleotide
  Target: LAMA2; (+) strand; PAM type: NRG; PAM sequence: TAG
gttccatatgaactttaaag

SEQ ID NO: 155176 - DNA, 20 bp, Artificial Sequence
  Description of Artificial Sequence: Synthetic oligonucleotide
  Target: LAMA2; (+) strand; PAM type: NRG; PAM sequence: AAG
gttttttttccaattctgtg

SEQ ID NO: 155177 - DNA, 20 bp, Artificial Sequence
  Description of Artificial Sequence: Synthetic oligonucleotide
  Target: LAMA2; (+) strand; PAM type: NRG; PAM sequence: AAG
tttttccaattctgtgaaga

SEQ ID NO: 155178 - DNA, 20 bp, Artificial Sequence
  Description of Artificial Sequence: Synthetic oligonucleotide
  Target: LAMA2; (+) strand; PAM type: NRG; PAM sequence: TGG
aattctgtgaagaaagtcac

SEQ ID NO: 155179 - DNA, 20 bp, Artificial Sequence
  Description of Artificial Sequence: Synthetic oligonucleotide
  Target: LAMA2; (+) strand; PAM type: NRG; PAM sequence: TAG
tctgtgaagaaagtcactgg

SEQ ID NO: 155180 - DNA, 20 bp, Artificial Sequence
  Description of Artificial Sequence: Synthetic oligonucleotide
  Target: LAMA2; (+) strand; PAM type: NRG; PAM sequence: TAG
gaaagtcactggtagcttga

SEQ ID NO: 155181 - DNA, 20 bp, Artificial Sequence
  Description of Artificial Sequence: Synthetic oligonucleotide
  Target: LAMA2; (+) strand; PAM type: NRG; PAM sequence: AGG
aaagtcactggtagcttgat

SEQ ID NO: 155182 - DNA, 20 bp, Artificial Sequence
  Description of Artificial Sequence: Synthetic oligonucleotide
  Target: LAMA2; (+) strand; PAM type: NRG; PAM sequence: GGG
aagtcactggtagcttgata

SEQ ID NO: 155183 - DNA, 20 bp, Artificial Sequence
  Description of Artificial Sequence: Synthetic oligonucleotide
  Target: LAMA2; (+) strand; PAM type: NRG; PAM sequence: TGG
cactggtagcttgataggga

SEQ ID NO: 155184 - DNA, 20 bp, Artificial Sequence
  Description of Artificial Sequence: Synthetic oligonucleotide
  Target: LAMA2; (+) strand; PAM type: NRG; PAM sequence: TGG
attgaatctatgaattacct

SEQ ID NO: 155185 - DNA, 20 bp, Artificial Sequence
  Description of Artificial Sequence: Synthetic oligonucleotide
  Target: LAMA2; (+) strand; PAM type: NRG; PAM sequence: GGG
ttgaatctatgaattacctt

SEQ ID NO: 155186 - DNA, 20 bp, Artificial Sequence
  Description of Artificial Sequence: Synthetic oligonucleotide
  Target: LAMA2; (+) strand; PAM type: NRG; PAM sequence: CAG
aatctatgaattaccttggg

SEQ ID NO: 155187 - DNA, 20 bp, Artificial Sequence
  Description of Artificial Sequence: Synthetic oligonucleotide
  Target: LAMA2; (+) strand; PAM type: NRG; PAM sequence: TGG
atgaattaccttgggcagta

SEQ ID NO: 155188 - DNA, 20 bp, Artificial Sequence
  Description of Artificial Sequence: Synthetic oligonucleotide
  Target: LAMA2; (+) strand; PAM type: NRG; PAM sequence: AAG
tattgattcttcctatccat

SEQ ID NO: 155189 - DNA, 20 bp, Artificial Sequence
  Description of Artificial Sequence: Synthetic oligonucleotide
  Target: LAMA2; (+) strand; PAM type: NRG; PAM sequence: TGG
attcttcctatccataagca

SEQ ID NO: 155190 - DNA, 20 bp, Artificial Sequence
  Description of Artificial Sequence: Synthetic oligonucleotide
  Target: LAMA2; (+) strand; PAM type: NRG; PAM sequence: GAG
gtgtcctcttttattttgtt

SEQ ID NO: 155191 - DNA, 20 bp, Artificial Sequence
  Description of Artificial Sequence: Synthetic oligonucleotide
  Target: LAMA2; (+) strand; PAM type: NRG; PAM sequence: CAG
tcctcttttattttgttgag

SEQ ID NO: 155192 - DNA, 20 bp, Artificial Sequence
  Description of Artificial Sequence: Synthetic oligonucleotide
  Target: LAMA2; (+) strand; PAM type: NRG; PAM sequence: CAG
ttttgttgagcagtaatttg

SEQ ID NO: 155193 - DNA, 20 bp, Artificial Sequence
  Description of Artificial Sequence: Synthetic oligonucleotide
  Target: LAMA2; (+) strand; PAM type: NRG; PAM sequence: AAG
gtaatttgcagttctccttg

SEQ ID NO: 155194 - DNA, 20 bp, Artificial Sequence
  Description of Artificial Sequence: Synthetic oligonucleotide
  Target: LAMA2; (+) strand; PAM type: NRG; PAM sequence: GAG
aatttgcagttctccttgaa

SEQ ID NO: 155195 - DNA, 20 bp, Artificial Sequence
  Description of Artificial Sequence: Synthetic oligonucleotide
  Target: LAMA2; (+) strand; PAM type: NRG; PAM sequence: AGG
atttgcagttctccttgaag

SEQ ID NO: 155196 - DNA, 20 bp, Artificial Sequence
  Description of Artificial Sequence: Synthetic oligonucleotide
  Target: LAMA2; (+) strand; PAM type: NRG; PAM sequence: AAG
aggtccttcacatcccttgt

SEQ ID NO: 155197 - DNA, 20 bp, Artificial Sequence
  Description of Artificial Sequence: Synthetic oligonucleotide
  Target: LAMA2; (+) strand; PAM type: NRG; PAM sequence: TGG
ccttcacatcccttgtaagt

SEQ ID NO: 155198 - DNA, 20 bp, Artificial Sequence
  Description of Artificial Sequence: Synthetic oligonucleotide
  Target: LAMA2; (+) strand; PAM type: NRG; PAM sequence: TAG
tcccttgtaagttggattcc

SEQ ID NO: 155199 - DNA, 20 bp, Artificial Sequence
  Description of Artificial Sequence: Synthetic oligonucleotide
  Target: LAMA2; (+) strand; PAM type: NRG; PAM sequence: AGG
cccttgtaagttggattcct

SEQ ID NO: 155200 - DNA, 20 bp, Artificial Sequence
  Description of Artificial Sequence: Synthetic oligonucleotide
  Target: LAMA2; (+) strand; PAM type: NRG; PAM sequence: AAG
taggtattttattctctttg

SEQ ID NO: 155201 - DNA, 20 bp, Artificial Sequence
  Description of Artificial Sequence: Synthetic oligonucleotide
  Target: LAMA2; (+) strand; PAM type: NRG; PAM sequence: TAG
ctctttgaagcaattgtgaa

SEQ ID NO: 155202 - DNA, 20 bp, Artificial Sequence
  Description of Artificial Sequence: Synthetic oligonucleotide
  Target: LAMA2; (+) strand; PAM type: NRG; PAM sequence: AGG
tctttgaagcaattgtgaat

SEQ ID NO: 155203 - DNA, 20 bp, Artificial Sequence
  Description of Artificial Sequence: Synthetic oligonucleotide
  Target: LAMA2; (+) strand; PAM type: NRG; PAM sequence: GAG
tttgaagcaattgtgaatag

SEQ ID NO: 155204 - DNA, 20 bp, Artificial Sequence
  Description of Artificial Sequence: Synthetic oligonucleotide
  Target: LAMA2; (+) strand; PAM type: NRG; PAM sequence: TGG
ataggagttcactcatgatt

SEQ ID NO: 155205 - DNA, 20 bp, Artificial Sequence
  Description of Artificial Sequence: Synthetic oligonucleotide
  Target: LAMA2; (+) strand; PAM type: NRG; PAM sequence: TAG
gctctctgattgtctgttgt

SEQ ID NO: 155206 - DNA, 20 bp, Artificial Sequence
  Description of Artificial Sequence: Synthetic oligonucleotide
  Target: LAMA2; (+) strand; PAM type: NRG; PAM sequence: AAG
attgtctgttgttagtgtat

SEQ ID NO: 155207 - DNA, 20 bp, Artificial Sequence
  Description of Artificial Sequence: Synthetic oligonucleotide
  Target: LAMA2; (+) strand; PAM type: NRG; PAM sequence: GAG
ctacattgattttgtatcct

SEQ ID NO: 155208 - DNA, 20 bp, Artificial Sequence
  Description of Artificial Sequence: Synthetic oligonucleotide
  Target: LAMA2; (+) strand; PAM type: NRG; PAM sequence: TGG
gattttgtatcctgagactt

SEQ ID NO: 155209 - DNA, 20 bp, Artificial Sequence
  Description of Artificial Sequence: Synthetic oligonucleotide
  Target: LAMA2; (+) strand; PAM type: NRG; PAM sequence: AAG
tgtatcctgagactttggtg

SEQ ID NO: 155210 - DNA, 20 bp, Artificial Sequence
  Description of Artificial Sequence: Synthetic oligonucleotide
  Target: LAMA2; (+) strand; PAM type: NRG; PAM sequence: CAG
actttggtgaagttgcttat

SEQ ID NO: 155211 - DNA, 20 bp, Artificial Sequence
  Description of Artificial Sequence: Synthetic oligonucleotide
  Target: LAMA2; (+) strand; PAM type: NRG; PAM sequence: TAG
gtgaagttgcttatcagctt

SEQ ID NO: 155212 - DNA, 20 bp, Artificial Sequence
  Description of Artificial Sequence: Synthetic oligonucleotide
  Target: LAMA2; (+) strand; PAM type: NRG; PAM sequence: AGG
tgaagttgcttatcagcttt

SEQ ID NO: 155213 - DNA, 20 bp, Artificial Sequence
  Description of Artificial Sequence: Synthetic oligonucleotide
  Target: LAMA2; (+) strand; PAM type: NRG; PAM sequence: GAG
aagttgcttatcagctttag

SEQ ID NO: 155214 - DNA, 20 bp, Artificial Sequence
  Description of Artificial Sequence: Synthetic oligonucleotide
  Target: LAMA2; (+) strand; PAM type: NRG; PAM sequence: TGG
ttatcagctttaggagattt

SEQ ID NO: 155215 - DNA, 20 bp, Artificial Sequence
  Description of Artificial Sequence: Synthetic oligonucleotide
  Target: LAMA2; (+) strand; PAM type: NRG; PAM sequence: GGG
tatcagctttaggagatttt

SEQ ID NO: 155216 - DNA, 20 bp, Artificial Sequence
  Description of Artificial Sequence: Synthetic oligonucleotide
  Target: LAMA2; (+) strand; PAM type: NRG; PAM sequence: GAG
gctttaggagattttgggct

SEQ ID NO: 155217 - DNA, 20 bp, Artificial Sequence
  Description of Artificial Sequence: Synthetic oligonucleotide
  Target: LAMA2; (+) strand; PAM type: NRG; PAM sequence: TGG
gagattttgggctgagacaa

SEQ ID NO: 155218 - DNA, 20 bp, Artificial Sequence
  Description of Artificial Sequence: Synthetic oligonucleotide
  Target: LAMA2; (+) strand; PAM type: NRG; PAM sequence: GGG
agattttgggctgagacaat

SEQ ID NO: 155219 - DNA, 20 bp, Artificial Sequence
  Description of Artificial Sequence: Synthetic oligonucleotide
  Target: LAMA2; (+) strand; PAM type: NRG; PAM sequence: GGG
gattttgggctgagacaatg

SEQ ID NO: 155220 - DNA, 20 bp, Artificial Sequence
  Description of Artificial Sequence: Synthetic oligonucleotide
  Target: LAMA2; (+) strand; PAM type: NRG; PAM sequence: CAG
acaattatgtcatctgcaaa

SEQ ID NO: 155221 - DNA, 20 bp, Artificial Sequence
  Description of Artificial Sequence: Synthetic oligonucleotide
  Target: LAMA2; (+) strand; PAM type: NRG; PAM sequence: AGG
caattatgtcatctgcaaac

SEQ ID NO: 155222 - DNA, 20 bp, Artificial Sequence
  Description of Artificial Sequence: Synthetic oligonucleotide
  Target: LAMA2; (+) strand; PAM type: NRG; PAM sequence: GGG
aattatgtcatctgcaaaca

SEQ ID NO: 155223 - DNA, 20 bp, Artificial Sequence
  Description of Artificial Sequence: Synthetic oligonucleotide
  Target: LAMA2; (+) strand; PAM type: NRG; PAM sequence: TGG
tttctcctgcctgattgccc

SEQ ID NO: 155224 - DNA, 20 bp, Artificial Sequence
  Description of Artificial Sequence: Synthetic oligonucleotide
  Target: LAMA2; (+) strand; PAM type: NRG; PAM sequence: CAG
tcctgcctgattgccctggc

SEQ ID NO: 155225 - DNA, 20 bp, Artificial Sequence
  Description of Artificial Sequence: Synthetic oligonucleotide
  Target: LAMA2; (+) strand; PAM type: NRG; PAM sequence: TAG
acttccaacactatgttgaa

SEQ ID NO: 155226 - DNA, 20 bp, Artificial Sequence
  Description of Artificial Sequence: Synthetic oligonucleotide
  Target: LAMA2; (+) strand; PAM type: NRG; PAM sequence: AGG
cttccaacactatgttgaat

SEQ ID NO: 155227 - DNA, 20 bp, Artificial Sequence
  Description of Artificial Sequence: Synthetic oligonucleotide
  Target: LAMA2; (+) strand; PAM type: NRG; PAM sequence: GAG
tccaacactatgttgaatag

SEQ ID NO: 155228 - DNA, 20 bp, Artificial Sequence
  Description of Artificial Sequence: Synthetic oligonucleotide
  Target: LAMA2; (+) strand; PAM type: NRG; PAM sequence: TGG
aacactatgttgaataggag

SEQ ID NO: 155229 - DNA, 20 bp, Artificial Sequence
  Description of Artificial Sequence: Synthetic oligonucleotide
  Target: LAMA2; (+) strand; PAM type: NRG; PAM sequence: GAG
ctatgttgaataggagtggt

SEQ ID NO: 155230 - DNA, 20 bp, Artificial Sequence
  Description of Artificial Sequence: Synthetic oligonucleotide
  Target: LAMA2; (+) strand; PAM type: NRG; PAM sequence: GAG
atgttgaataggagtggtga

SEQ ID NO: 155231 - DNA, 20 bp, Artificial Sequence
  Description of Artificial Sequence: Synthetic oligonucleotide
  Target: LAMA2; (+) strand; PAM type: NRG; PAM sequence: GAG
gttgaataggagtggtgaga

SEQ ID NO: 155232 - DNA, 20 bp, Artificial Sequence
  Description of Artificial Sequence: Synthetic oligonucleotide
  Target: LAMA2; (+) strand; PAM type: NRG; PAM sequence: AGG
ttgaataggagtggtgagag

SEQ ID NO: 155233 - DNA, 20 bp, Artificial Sequence
  Description of Artificial Sequence: Synthetic oligonucleotide
  Target: LAMA2; (+) strand; PAM type: NRG; PAM sequence: GGG
tgaataggagtggtgagaga

SEQ ID NO: 155234 - DNA, 20 bp, Artificial Sequence
  Description of Artificial Sequence: Synthetic oligonucleotide
  Target: LAMA2; (+) strand; PAM type: NRG; PAM sequence: CAG
agggcatccctgtcttgtgc

SEQ ID NO: 155235 - DNA, 20 bp, Artificial Sequence
  Description of Artificial Sequence: Synthetic oligonucleotide
  Target: LAMA2; (+) strand; PAM type: NRG; PAM sequence: AAG
ctgtcttgtgccagttttca

SEQ ID NO: 155236 - DNA, 20 bp, Artificial Sequence
  Description of Artificial Sequence: Synthetic oligonucleotide
  Target: LAMA2; (+) strand; PAM type: NRG; PAM sequence: AGG
tgtcttgtgccagttttcaa

SEQ ID NO: 155237 - DNA, 20 bp, Artificial Sequence
  Description of Artificial Sequence: Synthetic oligonucleotide
  Target: LAMA2; (+) strand; PAM type: NRG; PAM sequence: GGG
gtcttgtgccagttttcaaa

SEQ ID NO: 155238 - DNA, 20 bp, Artificial Sequence
  Description of Artificial Sequence: Synthetic oligonucleotide
  Target: LAMA2; (+) strand; PAM type: NRG; PAM sequence: CAG
gttttcaaagggaatgcttc

SEQ ID NO: 155239 - DNA, 20 bp, Artificial Sequence
  Description of Artificial Sequence: Synthetic oligonucleotide
  Target: LAMA2; (+) strand; PAM type: NRG; PAM sequence: CAG
gcttccagtttttgcccatt

SEQ ID NO: 155240 - DNA, 20 bp, Artificial Sequence
  Description of Artificial Sequence: Synthetic oligonucleotide
  Target: LAMA2; (+) strand; PAM type: NRG; PAM sequence: TGG
ttgcccattcagtatgatat

SEQ ID NO: 155241 - DNA, 20 bp, Artificial Sequence
  Description of Artificial Sequence: Synthetic oligonucleotide
  Target: LAMA2; (+) strand; PAM type: NRG; PAM sequence: TGG
attcagtatgatattggctg

SEQ ID NO: 155242 - DNA, 20 bp, Artificial Sequence
  Description of Artificial Sequence: Synthetic oligonucleotide
  Target: LAMA2; (+) strand; PAM type: NRG; PAM sequence: GGG
ttcagtatgatattggctgt

SEQ ID NO: 155243 - DNA, 20 bp, Artificial Sequence
  Description of Artificial Sequence: Synthetic oligonucleotide
  Target: LAMA2; (+) strand; PAM type: NRG; PAM sequence: TAG
tattggctgtgggtttgtca

SEQ ID NO: 155244 - DNA, 20 bp, Artificial Sequence
  Description of Artificial Sequence: Synthetic oligonucleotide
  Target: LAMA2; (+) strand; PAM type: NRG; PAM sequence: TAG
ggctgtgggtttgtcataga

SEQ ID NO: 155245 - DNA, 20 bp, Artificial Sequence
  Description of Artificial Sequence: Synthetic oligonucleotide
  Target: LAMA2; (+) strand; PAM type: NRG; PAM sequence: GAG
tagatagctcttattatttt

SEQ ID NO: 155246 - DNA, 20 bp, Artificial Sequence
  Description of Artificial Sequence: Synthetic oligonucleotide
  Target: LAMA2; (+) strand; PAM type: NRG; PAM sequence: GAG
ccatcaatacctaatttatt

SEQ ID NO: 155247 - DNA, 20 bp, Artificial Sequence
  Description of Artificial Sequence: Synthetic oligonucleotide
  Target: LAMA2; (+) strand; PAM type: NRG; PAM sequence: GAG
atcaatacctaatttattga

SEQ ID NO: 155248 - DNA, 20 bp, Artificial Sequence
  Description of Artificial Sequence: Synthetic oligonucleotide
  Target: LAMA2; (+) strand; PAM type: NRG; PAM sequence: TGG
cctaatttattgagagtttt

SEQ ID NO: 155249 - DNA, 20 bp, Artificial Sequence
  Description of Artificial Sequence: Synthetic oligonucleotide
  Target: LAMA2; (+) strand; PAM type: NRG; PAM sequence: AAG
tattgagagtttttggcatg

SEQ ID NO: 155250 - DNA, 20 bp, Artificial Sequence
  Description of Artificial Sequence: Synthetic oligonucleotide
  Target: LAMA2; (+) strand; PAM type: NRG; PAM sequence: AGG
attgagagtttttggcatga

SEQ ID NO: 155251 - DNA, 20 bp, Artificial Sequence
  Description of Artificial Sequence: Synthetic oligonucleotide
  Target: LAMA2; (+) strand; PAM type: NRG; PAM sequence: GGG
ttgagagtttttggcatgaa

SEQ ID NO: 155252 - DNA, 20 bp, Artificial Sequence
  Description of Artificial Sequence: Synthetic oligonucleotide
  Target: LAMA2; (+) strand; PAM type: NRG; PAM sequence: AAG
agggctgttgaattttgtca

SEQ ID NO: 155253 - DNA, 20 bp, Artificial Sequence
  Description of Artificial Sequence: Synthetic oligonucleotide
  Target: LAMA2; (+) strand; PAM type: NRG; PAM sequence: AGG
gggctgttgaattttgtcaa

SEQ ID NO: 155254 - DNA, 20 bp, Artificial Sequence
  Description of Artificial Sequence: Synthetic oligonucleotide
  Target: LAMA2; (+) strand; PAM type: NRG; PAM sequence: GAG
aggccttttctgcatttatt

SEQ ID NO: 155255 - DNA, 20 bp, Artificial Sequence
  Description of Artificial Sequence: Synthetic oligonucleotide
  Target: LAMA2; (+) strand; PAM type: NRG; PAM sequence: TGG
catttattgagataatcatg

SEQ ID NO: 155256 - DNA, 20 bp, Artificial Sequence
  Description of Artificial Sequence: Synthetic oligonucleotide
  Target: LAMA2; (+) strand; PAM type: NRG; PAM sequence: TGG
tgtggtttttgtttatatgc

SEQ ID NO: 155257 - DNA, 20 bp, Artificial Sequence
  Description of Artificial Sequence: Synthetic oligonucleotide
  Target: LAMA2; (+) strand; PAM type: NRG; PAM sequence: CAG
ttgatttgtgtatgttgaac

SEQ ID NO: 155258 - DNA, 20 bp, Artificial Sequence
  Description of Artificial Sequence: Synthetic oligonucleotide
  Target: LAMA2; (+) strand; PAM type: NRG; PAM sequence: TGG
tgaaccagccttgcatcccg

SEQ ID NO: 155259 - DNA, 20 bp, Artificial Sequence
  Description of Artificial Sequence: Synthetic oligonucleotide
  Target: LAMA2; (+) strand; PAM type: NRG; PAM sequence: AAG
agccttgcatcccgtggatg

SEQ ID NO: 155260 - DNA, 20 bp, Artificial Sequence
  Description of Artificial Sequence: Synthetic oligonucleotide
  Target: LAMA2; (+) strand; PAM type: NRG; PAM sequence: TGG
ggatgaagcccacttgatcg

SEQ ID NO: 155261 - DNA, 20 bp, Artificial Sequence
  Description of Artificial Sequence: Synthetic oligonucleotide
  Target: LAMA2; (+) strand; PAM type: NRG; PAM sequence: TGG
tgaagcccacttgatcgtgg

SEQ ID NO: 155262 - DNA, 20 bp, Artificial Sequence
  Description of Artificial Sequence: Synthetic oligonucleotide
  Target: LAMA2; (+) strand; PAM type: NRG; PAM sequence: AAG
cccacttgatcgtggtggat

SEQ ID NO: 155263 - DNA, 20 bp, Artificial Sequence
  Description of Artificial Sequence: Synthetic oligonucleotide
  Target: LAMA2; (+) strand; PAM type: NRG; PAM sequence: CAG
ttttgatgtgctgctgcatt

SEQ ID NO: 155264 - DNA, 20 bp, Artificial Sequence
  Description of Artificial Sequence: Synthetic oligonucleotide
  Target: LAMA2; (+) strand; PAM type: NRG; PAM sequence: GAG
cagtttgccattattttatt

SEQ ID NO: 155265 - DNA, 20 bp, Artificial Sequence
  Description of Artificial Sequence: Synthetic oligonucleotide
  Target: LAMA2; (+) strand; PAM type: NRG; PAM sequence: AGG
agtttgccattattttattg

SEQ ID NO: 155266 - DNA, 20 bp, Artificial Sequence
  Description of Artificial Sequence: Synthetic oligonucleotide
  Target: LAMA2; (+) strand; PAM type: NRG; PAM sequence: CAG
atttttgcattgatgttcat

SEQ ID NO: 155267 - DNA, 20 bp, Artificial Sequence
  Description of Artificial Sequence: Synthetic oligonucleotide
  Target: LAMA2; (+) strand; PAM type: NRG; PAM sequence: AGG
tttttgcattgatgttcatc

SEQ ID NO: 155268 - DNA, 20 bp, Artificial Sequence
  Description of Artificial Sequence: Synthetic oligonucleotide
  Target: LAMA2; (+) strand; PAM type: NRG; PAM sequence: GGG
ttttgcattgatgttcatca

SEQ ID NO: 155269 - DNA, 20 bp, Artificial Sequence
  Description of Artificial Sequence: Synthetic oligonucleotide
  Target: LAMA2; (+) strand; PAM type: NRG; PAM sequence: TAG
ttgatgttcatcagggatat

SEQ ID NO: 155270 - DNA, 20 bp, Artificial Sequence
  Description of Artificial Sequence: Synthetic oligonucleotide
  Target: LAMA2; (+) strand; PAM type: NRG; PAM sequence: CAG
cttttttgttgtgtctctgc

SEQ ID NO: 155271 - DNA, 20 bp, Artificial Sequence
  Description of Artificial Sequence: Synthetic oligonucleotide
  Target: LAMA2; (+) strand; PAM type: NRG; PAM sequence: AGG
ttttttgttgtgtctctgcc

SEQ ID NO: 155272 - DNA, 20 bp, Artificial Sequence
  Description of Artificial Sequence: Synthetic oligonucleotide
  Target: LAMA2; (+) strand; PAM type: NRG; PAM sequence: CAG
tctctgccaggcttttgtat

SEQ ID NO: 155273 - DNA, 20 bp, Artificial Sequence
  Description of Artificial Sequence: Synthetic oligonucleotide
  Target: LAMA2; (+) strand; PAM type: NRG; PAM sequence: AGG
ctctgccaggcttttgtatc

SEQ ID NO: 155274 - DNA, 20 bp, Artificial Sequence
  Description of Artificial Sequence: Synthetic oligonucleotide
  Target: LAMA2; (+) strand; PAM type: NRG; PAM sequence: GAG
ctgccaggcttttgtatcag

SEQ ID NO: 155275 - DNA, 20 bp, Artificial Sequence
  Description of Artificial Sequence: Synthetic oligonucleotide
  Target: LAMA2; (+) strand; PAM type: NRG; PAM sequence: AGG
tgccaggcttttgtatcagg

SEQ ID NO: 155276 - DNA, 20 bp, Artificial Sequence
  Description of Artificial Sequence: Synthetic oligonucleotide
  Target: LAMA2; (+) strand; PAM type: NRG; PAM sequence: TGG
cttttgtatcaggaggatgc

SEQ ID NO: 155277 - DNA, 20 bp, Artificial Sequence
  Description of Artificial Sequence: Synthetic oligonucleotide
  Target: LAMA2; (+) strand; PAM type: NRG; PAM sequence: GAG
ggatgctggcctcatcaaat

SEQ ID NO: 155278 - DNA, 20 bp, Artificial Sequence
  Description of Artificial Sequence: Synthetic oligonucleotide
  Target: LAMA2; (+) strand; PAM type: NRG; PAM sequence: TAG
gctggcctcatcaaatgagt

SEQ ID NO: 155279 - DNA, 20 bp, Artificial Sequence
  Description of Artificial Sequence: Synthetic oligonucleotide
  Target: LAMA2; (+) strand; PAM type: NRG; PAM sequence: GAG
tggcctcatcaaatgagtta

SEQ ID NO: 155280 - DNA, 20 bp, Artificial Sequence
  Description of Artificial Sequence: Synthetic oligonucleotide
  Target: LAMA2; (+) strand; PAM type: NRG; PAM sequence: GAG
gcctcatcaaatgagttaga

SEQ ID NO: 155281 - DNA, 20 bp, Artificial Sequence
  Description of Artificial Sequence: Synthetic oligonucleotide
  Target: LAMA2; (+) strand; PAM type: NRG; PAM sequence: AGG
cctcatcaaatgagttagag

SEQ ID NO: 155282 - DNA, 20 bp, Artificial Sequence
  Description of Artificial Sequence: Synthetic oligonucleotide
  Target: LAMA2; (+) strand; PAM type: NRG; PAM sequence: TGG
ttccctctttttctattgat

SEQ ID NO: 155283 - DNA, 20 bp, Artificial Sequence
  Description of Artificial Sequence: Synthetic oligonucleotide
  Target: LAMA2; (+) strand; PAM type: NRG; PAM sequence: TAG
tctttttctattgattggaa

SEQ ID NO: 155284 - DNA, 20 bp, Artificial Sequence
  Description of Artificial Sequence: Synthetic oligonucleotide
  Target: LAMA2; (+) strand; PAM type: NRG; PAM sequence: CAG
tctattgattggaatagttt

SEQ ID NO: 155285 - DNA, 20 bp, Artificial Sequence
  Description of Artificial Sequence: Synthetic oligonucleotide
  Target: LAMA2; (+) strand; PAM type: NRG; PAM sequence: AAG
attgattggaatagtttcag

SEQ ID NO: 155286 - DNA, 20 bp, Artificial Sequence
  Description of Artificial Sequence: Synthetic oligonucleotide
  Target: LAMA2; (+) strand; PAM type: NRG; PAM sequence: AGG
ttgattggaatagtttcaga

SEQ ID NO: 155287 - DNA, 20 bp, Artificial Sequence
  Description of Artificial Sequence: Synthetic oligonucleotide
  Target: LAMA2; (+) strand; PAM type: NRG; PAM sequence: TGG
tggaatagtttcagaaggaa

SEQ ID NO: 155288 - DNA, 20 bp, Artificial Sequence
  Description of Artificial Sequence: Synthetic oligonucleotide
  Target: LAMA2; (+) strand; PAM type: NRG; PAM sequence: TGG
ccacctcctccttgtacctc

SEQ ID NO: 155289 - DNA, 20 bp, Artificial Sequence
  Description of Artificial Sequence: Synthetic oligonucleotide
  Target: LAMA2; (+) strand; PAM type: NRG; PAM sequence: TAG
cctcctccttgtacctctgg

SEQ ID NO: 155290 - DNA, 20 bp, Artificial Sequence
  Description of Artificial Sequence: Synthetic oligonucleotide
  Target: LAMA2; (+) strand; PAM type: NRG; PAM sequence: CGG
cttgtacctctggtagaatt

SEQ ID NO: 155291 - DNA, 20 bp, Artificial Sequence
  Description of Artificial Sequence: Synthetic oligonucleotide
  Target: LAMA2; (+) strand; PAM type: NRG; PAM sequence: TGG
aattcggctgtgaatccatc

SEQ ID NO: 155292 - DNA, 20 bp, Artificial Sequence
  Description of Artificial Sequence: Synthetic oligonucleotide
  Target: LAMA2; (+) strand; PAM type: NRG; PAM sequence: TGG
gctgtgaatccatctggtcc

SEQ ID NO: 155293 - DNA, 20 bp, Artificial Sequence
  Description of Artificial Sequence: Synthetic oligonucleotide
  Target: LAMA2; (+) strand; PAM type: NRG; PAM sequence: TGG
atctggtcctggactttttt

SEQ ID NO: 155294 - DNA, 20 bp, Artificial Sequence
  Description of Artificial Sequence: Synthetic oligonucleotide
  Target: LAMA2; (+) strand; PAM type: NRG; PAM sequence: TGG
ggtcctggactttttttggt

SEQ ID NO: 155295 - DNA, 20 bp, Artificial Sequence
  Description of Artificial Sequence: Synthetic oligonucleotide
  Target: LAMA2; (+) strand; PAM type: NRG; PAM sequence: TAG
cctggactttttttggttgg

SEQ ID NO: 155296 - DNA, 20 bp, Artificial Sequence
  Description of Artificial Sequence: Synthetic oligonucleotide
  Target: LAMA2; (+) strand; PAM type: NRG; PAM sequence: AGG
ctggactttttttggttggt

SEQ ID NO: 155297 - DNA, 20 bp, Artificial Sequence
  Description of Artificial Sequence: Synthetic oligonucleotide
  Target: LAMA2; (+) strand; PAM type: NRG; PAM sequence: CAG
attaattattgcctcaattt

SEQ ID NO: 155298 - DNA, 20 bp, Artificial Sequence
  Description of Artificial Sequence: Synthetic oligonucleotide
  Target: LAMA2; (+) strand; PAM type: NRG; PAM sequence: GAG
taattattgcctcaatttca

SEQ ID NO: 155299 - DNA, 20 bp, Artificial Sequence
  Description of Artificial Sequence: Synthetic oligonucleotide
  Target: LAMA2; (+) strand; PAM type: NRG; PAM sequence: TGG
tcaatttcagagcctgttat

SEQ ID NO: 155300 - DNA, 20 bp, Artificial Sequence
  Description of Artificial Sequence: Synthetic oligonucleotide
  Target: LAMA2; (+) strand; PAM type: NRG; PAM sequence: CAG
gagcctgttattggtctatt

SEQ ID NO: 155301 - DNA, 20 bp, Artificial Sequence
  Description of Artificial Sequence: Synthetic oligonucleotide
  Target: LAMA2; (+) strand; PAM type: NRG; PAM sequence: GAG
gcctgttattggtctattca

SEQ ID NO: 155302 - DNA, 20 bp, Artificial Sequence
  Description of Artificial Sequence: Synthetic oligonucleotide
  Target: LAMA2; (+) strand; PAM type: NRG; PAM sequence: TAG
gattcaacttcttccttgtt

SEQ ID NO: 155303 - DNA, 20 bp, Artificial Sequence
  Description of Artificial Sequence: Synthetic oligonucleotide
  Target: LAMA2; (+) strand; PAM type: NRG; PAM sequence: TGG
acttcttccttgtttagtat

SEQ ID NO: 155304 - DNA, 20 bp, Artificial Sequence
  Description of Artificial Sequence: Synthetic oligonucleotide
  Target: LAMA2; (+) strand; PAM type: NRG; PAM sequence: GGG
cttcttccttgtttagtatt

SEQ ID NO: 155305 - DNA, 20 bp, Artificial Sequence
  Description of Artificial Sequence: Synthetic oligonucleotide
  Target: LAMA2; (+) strand; PAM type: NRG; PAM sequence: GAG
tcttccttgtttagtattgg

SEQ ID NO: 155306 - DNA, 20 bp, Artificial Sequence
  Description of Artificial Sequence: Synthetic oligonucleotide
  Target: LAMA2; (+) strand; PAM type: NRG; PAM sequence: AGG
cttccttgtttagtattggg

SEQ ID NO: 155307 - DNA, 20 bp, Artificial Sequence
  Description of Artificial Sequence: Synthetic oligonucleotide
  Target: LAMA2; (+) strand; PAM type: NRG; PAM sequence: GGG
ttccttgtttagtattggga

SEQ ID NO: 155308 - DNA, 20 bp, Artificial Sequence
  Description of Artificial Sequence: Synthetic oligonucleotide
  Target: LAMA2; (+) strand; PAM type: NRG; PAM sequence: CAG
attgggagggtgtatgtgtc

SEQ ID NO: 155309 - DNA, 20 bp, Artificial Sequence
  Description of Artificial Sequence: Synthetic oligonucleotide
  Target: LAMA2; (+) strand; PAM type: NRG; PAM sequence: AGG
ttgggagggtgtatgtgtcc

SEQ ID NO: 155310 - DNA, 20 bp, Artificial Sequence
  Description of Artificial Sequence: Synthetic oligonucleotide
  Target: LAMA2; (+) strand; PAM type: NRG; PAM sequence: AAG
aggaatctatccatttcttc

SEQ ID NO: 155311 - DNA, 20 bp, Artificial Sequence
  Description of Artificial Sequence: Synthetic oligonucleotide
  Target: LAMA2; (+) strand; PAM type: NRG; PAM sequence: TAG
tccatttcttcaagattttc

SEQ ID NO: 155312 - DNA, 20 bp, Artificial Sequence
  Description of Artificial Sequence: Synthetic oligonucleotide
  Target: LAMA2; (+) strand; PAM type: NRG; PAM sequence: TAG
gattttctagtttatttgca

SEQ ID NO: 155313 - DNA, 20 bp, Artificial Sequence
  Description of Artificial Sequence: Synthetic oligonucleotide
  Target: LAMA2; (+) strand; PAM type: NRG; PAM sequence: GAG
ttttctagtttatttgcata

SEQ ID NO: 155314 - DNA, 20 bp, Artificial Sequence
  Description of Artificial Sequence: Synthetic oligonucleotide
  Target: LAMA2; (+) strand; PAM type: NRG; PAM sequence: AGG
tttctagtttatttgcatag

SEQ ID NO: 155315 - DNA, 20 bp, Artificial Sequence
  Description of Artificial Sequence: Synthetic oligonucleotide
  Target: LAMA2; (+) strand; PAM type: NRG; PAM sequence: TAG
tatttgcatagaggtgttta

SEQ ID NO: 155316 - DNA, 20 bp, Artificial Sequence
  Description of Artificial Sequence: Synthetic oligonucleotide
  Target: LAMA2; (+) strand; PAM type: NRG; PAM sequence: TGG
gtgtttatagtattctctga

SEQ ID NO: 155317 - DNA, 20 bp, Artificial Sequence
  Description of Artificial Sequence: Synthetic oligonucleotide
  Target: LAMA2; (+) strand; PAM type: NRG; PAM sequence: TAG
tttatagtattctctgatgg

SEQ ID NO: 155318 - DNA, 20 bp, Artificial Sequence
  Description of Artificial Sequence: Synthetic oligonucleotide
  Target: LAMA2; (+) strand; PAM type: NRG; PAM sequence: TGG
gatggtagtttgtatttctg

SEQ ID NO: 155319 - DNA, 20 bp, Artificial Sequence
  Description of Artificial Sequence: Synthetic oligonucleotide
  Target: LAMA2; (+) strand; PAM type: NRG; PAM sequence: GGG
atggtagtttgtatttctgt

SEQ ID NO: 155320 - DNA, 20 bp, Artificial Sequence
  Description of Artificial Sequence: Synthetic oligonucleotide
  Target: LAMA2; (+) strand; PAM type: NRG; PAM sequence: CGG
agtttgtatttctgtgggat

SEQ ID NO: 155321 - DNA, 20 bp, Artificial Sequence
  Description of Artificial Sequence: Synthetic oligonucleotide
  Target: LAMA2; (+) strand; PAM type: NRG; PAM sequence: TGG
ttgtatttctgtgggatcgg

SEQ ID NO: 155322 - DNA, 20 bp, Artificial Sequence
  Description of Artificial Sequence: Synthetic oligonucleotide
  Target: LAMA2; (+) strand; PAM type: NRG; PAM sequence: TAG
ttctctcttttcttctttat

SEQ ID NO: 155323 - DNA, 20 bp, Artificial Sequence
  Description of Artificial Sequence: Synthetic oligonucleotide
  Target: LAMA2; (+) strand; PAM type: NRG; PAM sequence: TAG
ttcttctttattagtcttgc

SEQ ID NO: 155324 - DNA, 20 bp, Artificial Sequence
  Description of Artificial Sequence: Synthetic oligonucleotide
  Target: LAMA2; (+) strand; PAM type: NRG; PAM sequence: CAG
ttctttattagtcttgctag

SEQ ID NO: 155325 - DNA, 20 bp, Artificial Sequence
  Description of Artificial Sequence: Synthetic oligonucleotide
  Target: LAMA2; (+) strand; PAM type: NRG; PAM sequence: TGG
cttttcaaaaaatcatctcc

SEQ ID NO: 155326 - DNA, 20 bp, Artificial Sequence
  Description of Artificial Sequence: Synthetic oligonucleotide
  Target: LAMA2; (+) strand; PAM type: NRG; PAM sequence: AAG
ctggattcactgatttgttg

SEQ ID NO: 155327 - DNA, 20 bp, Artificial Sequence
  Description of Artificial Sequence: Synthetic oligonucleotide
  Target: LAMA2; (+) strand; PAM type: NRG; PAM sequence: AGG
tggattcactgatttgttga

SEQ ID NO: 155328 - DNA, 20 bp, Artificial Sequence
  Description of Artificial Sequence: Synthetic oligonucleotide
  Target: LAMA2; (+) strand; PAM type: NRG; PAM sequence: GGG
ggattcactgatttgttgaa

SEQ ID NO: 155329 - DNA, 20 bp, Artificial Sequence
  Description of Artificial Sequence: Synthetic oligonucleotide
  Target: LAMA2; (+) strand; PAM type: NRG; PAM sequence: CAG
ttttgtgactctatctcctt

SEQ ID NO: 155330 - DNA, 20 bp, Artificial Sequence
  Description of Artificial Sequence: Synthetic oligonucleotide
  Target: LAMA2; (+) strand; PAM type: NRG; PAM sequence: TAG
cttcagttctgctctgatct

SEQ ID NO: 155331 - DNA, 20 bp, Artificial Sequence
  Description of Artificial Sequence: Synthetic oligonucleotide
  Target: LAMA2; (+) strand; PAM type: NRG; PAM sequence: TAG
agttatttcttgccttctgc

SEQ ID NO: 155332 - DNA, 20 bp, Artificial Sequence
  Description of Artificial Sequence: Synthetic oligonucleotide
  Target: LAMA2; (+) strand; PAM type: NRG; PAM sequence: GAG
cttgccttctgctagctttt

SEQ ID NO: 155333 - DNA, 20 bp, Artificial Sequence
  Description of Artificial Sequence: Synthetic oligonucleotide
  Target: LAMA2; (+) strand; PAM type: NRG; PAM sequence: TAG
tgtgtttgctcttgcttctc

SEQ ID NO: 155334 - DNA, 20 bp, Artificial Sequence
  Description of Artificial Sequence: Synthetic oligonucleotide
  Target: LAMA2; (+) strand; PAM type: NRG; PAM sequence: TAG
agttcttttaattgtgatgt

SEQ ID NO: 155335 - DNA, 20 bp, Artificial Sequence
  Description of Artificial Sequence: Synthetic oligonucleotide
  Target: LAMA2; (+) strand; PAM type: NRG; PAM sequence: AGG
gttcttttaattgtgatgtt

SEQ ID NO: 155336 - DNA, 20 bp, Artificial Sequence
  Description of Artificial Sequence: Synthetic oligonucleotide
  Target: LAMA2; (+) strand; PAM type: NRG; PAM sequence: GGG
ttcttttaattgtgatgtta

SEQ ID NO: 155337 - DNA, 20 bp, Artificial Sequence
  Description of Artificial Sequence: Synthetic oligonucleotide
  Target: LAMA2; (+) strand; PAM type: NRG; PAM sequence: TGG
tgatgttagggtgtcaattt

SEQ ID NO: 155338 - DNA, 20 bp, Artificial Sequence
  Description of Artificial Sequence: Synthetic oligonucleotide
  Target: LAMA2; (+) strand; PAM type: NRG; PAM sequence: TGG
atctttcctgctttctcttg

SEQ ID NO: 155339 - DNA, 20 bp, Artificial Sequence
  Description of Artificial Sequence: Synthetic oligonucleotide
  Target: LAMA2; (+) strand; PAM type: NRG; PAM sequence: GGG
tctttcctgctttctcttgt

SEQ ID NO: 155340 - DNA, 20 bp, Artificial Sequence
  Description of Artificial Sequence: Synthetic oligonucleotide
  Target: LAMA2; (+) strand; PAM type: NRG; PAM sequence: TAG
tgctttctcttgtgggcatt

SEQ ID NO: 155341 - DNA, 20 bp, Artificial Sequence
  Description of Artificial Sequence: Synthetic oligonucleotide
  Target: LAMA2; (+) strand; PAM type: NRG; PAM sequence: CAG
acactgctttaaatgtgtcc

SEQ ID NO: 155342 - DNA, 20 bp, Artificial Sequence
  Description of Artificial Sequence: Synthetic oligonucleotide
  Target: LAMA2; (+) strand; PAM type: NRG; PAM sequence: GAG
actgctttaaatgtgtccca

SEQ ID NO: 155343 - DNA, 20 bp, Artificial Sequence
  Description of Artificial Sequence: Synthetic oligonucleotide
  Target: LAMA2; (+) strand; PAM type: NRG; PAM sequence: TGG
taaatgtgtcccagagattc

SEQ ID NO: 155344 - DNA, 20 bp, Artificial Sequence
  Description of Artificial Sequence: Synthetic oligonucleotide
  Target: LAMA2; (+) strand; PAM type: NRG; PAM sequence: TAG
tgttgtatctttgttctcat

SEQ ID NO: 155345 - DNA, 20 bp, Artificial Sequence
  Description of Artificial Sequence: Synthetic oligonucleotide
  Target: LAMA2; (+) strand; PAM type: NRG; PAM sequence: AAG
ctttgttctcattagtttca

SEQ ID NO: 155346 - DNA, 20 bp, Artificial Sequence
  Description of Artificial Sequence: Synthetic oligonucleotide
  Target: LAMA2; (+) strand; PAM type: NRG; PAM sequence: CAG
ttcaaagaacatctttattc

SEQ ID NO: 155347 - DNA, 20 bp, Artificial Sequence
  Description of Artificial Sequence: Synthetic oligonucleotide
  Target: LAMA2; (+) strand; PAM type: NRG; PAM sequence: CAG
ccttcatttcgttatatacc

SEQ ID NO: 155348 - DNA, 20 bp, Artificial Sequence
  Description of Artificial Sequence: Synthetic oligonucleotide
  Target: LAMA2; (+) strand; PAM type: NRG; PAM sequence: TAG
tcatttcgttatatacccag

SEQ ID NO: 155349 - DNA, 20 bp, Artificial Sequence
  Description of Artificial Sequence: Synthetic oligonucleotide
  Target: LAMA2; (+) strand; PAM type: NRG; PAM sequence: CAG
ttatatacccagtagtcatt

SEQ ID NO: 155350 - DNA, 20 bp, Artificial Sequence
  Description of Artificial Sequence: Synthetic oligonucleotide
  Target: LAMA2; (+) strand; PAM type: NRG; PAM sequence: AGG
tatatacccagtagtcattc

SEQ ID NO: 155351 - DNA, 20 bp, Artificial Sequence
  Description of Artificial Sequence: Synthetic oligonucleotide
  Target: LAMA2; (+) strand; PAM type: NRG; PAM sequence: CAG
acccagtagtcattcaggaa

SEQ ID NO: 155352 - DNA, 20 bp, Artificial Sequence
  Description of Artificial Sequence: Synthetic oligonucleotide
  Target: LAMA2; (+) strand; PAM type: NRG; PAM sequence: AGG
cccagtagtcattcaggaac

SEQ ID NO: 155353 - DNA, 20 bp, Artificial Sequence
  Description of Artificial Sequence: Synthetic oligonucleotide
  Target: LAMA2; (+) strand; PAM type: NRG; PAM sequence: CAG
tcattcaggaacaggttgtt

SEQ ID NO: 155354 - DNA, 20 bp, Artificial Sequence
  Description of Artificial Sequence: Synthetic oligonucleotide
  Target: LAMA2; (+) strand; PAM type: NRG; PAM sequence: TAG
caggttgttcagtttccatg

SEQ ID NO: 155355 - DNA, 20 bp, Artificial Sequence
  Description of Artificial Sequence: Synthetic oligonucleotide
  Target: LAMA2; (+) strand; PAM type: NRG; PAM sequence: GAG
tgttcagtttccatgtagtt

SEQ ID NO: 155356 - DNA, 20 bp, Artificial Sequence
  Description of Artificial Sequence: Synthetic oligonucleotide
  Target: LAMA2; (+) strand; PAM type: NRG; PAM sequence: CAG
ccatgtagttgagccgtttt

SEQ ID NO: 155357 - DNA, 20 bp, Artificial Sequence
  Description of Artificial Sequence: Synthetic oligonucleotide
  Target: LAMA2; (+) strand; PAM type: NRG; PAM sequence: GAG
gtagttgagccgttttcagt

SEQ ID NO: 155358 - DNA, 20 bp, Artificial Sequence
  Description of Artificial Sequence: Synthetic oligonucleotide
  Target: LAMA2; (+) strand; PAM type: NRG; PAM sequence: GAG
tcagtgagtttcttaatcct

SEQ ID NO: 155359 - DNA, 20 bp, Artificial Sequence
  Description of Artificial Sequence: Synthetic oligonucleotide
  Target: LAMA2; (+) strand; PAM type: NRG; PAM sequence: TAG
agtttcttaatcctgagttc

SEQ ID NO: 155360 - DNA, 20 bp, Artificial Sequence
  Description of Artificial Sequence: Synthetic oligonucleotide
  Target: LAMA2; (+) strand; PAM type: NRG; PAM sequence: TGG
gttctagtttgattgcactg

SEQ ID NO: 155361 - DNA, 20 bp, Artificial Sequence
  Description of Artificial Sequence: Synthetic oligonucleotide
  Target: LAMA2; (+) strand; PAM type: NRG; PAM sequence: GAG
gtttgattgcactgtggtct

SEQ ID NO: 155362 - DNA, 20 bp, Artificial Sequence
  Description of Artificial Sequence: Synthetic oligonucleotide
  Target: LAMA2; (+) strand; PAM type: NRG; PAM sequence: GAG
ttgattgcactgtggtctga

SEQ ID NO: 155363 - DNA, 20 bp, Artificial Sequence
  Description of Artificial Sequence: Synthetic oligonucleotide
  Target: LAMA2; (+) strand; PAM type: NRG; PAM sequence: CAG
ttgcactgtggtctgagaga

SEQ ID NO: 155364 - DNA, 20 bp, Artificial Sequence
  Description of Artificial Sequence: Synthetic oligonucleotide
  Target: LAMA2; (+) strand; PAM type: NRG; PAM sequence: GAG
tctgatcttttacatttgct

SEQ ID NO: 155365 - DNA, 20 bp, Artificial Sequence
  Description of Artificial Sequence: Synthetic oligonucleotide
  Target: LAMA2; (+) strand; PAM type: NRG; PAM sequence: AGG
ctgatcttttacatttgctg

SEQ ID NO: 155366 - DNA, 20 bp, Artificial Sequence
  Description of Artificial Sequence: Synthetic oligonucleotide
  Target: LAMA2; (+) strand; PAM type: NRG; PAM sequence: GAG
gatcttttacatttgctgag

SEQ ID NO: 155367 - DNA, 20 bp, Artificial Sequence
  Description of Artificial Sequence: Synthetic oligonucleotide
  Target: LAMA2; (+) strand; PAM type: NRG; PAM sequence: TGG
gtgctttacttccaactatg

SEQ ID NO: 155368 - DNA, 20 bp, Artificial Sequence
  Description of Artificial Sequence: Synthetic oligonucleotide
  Target: LAMA2; (+) strand; PAM type: NRG; PAM sequence: TGG
tccaactatgtggtcaattt

SEQ ID NO: 155369 - DNA, 20 bp, Artificial Sequence
  Description of Artificial Sequence: Synthetic oligonucleotide
  Target: LAMA2; (+) strand; PAM type: NRG; PAM sequence: AAG
tatgtggtcaattttggaat

SEQ ID NO: 155370 - DNA, 20 bp, Artificial Sequence
  Description of Artificial Sequence: Synthetic oligonucleotide
  Target: LAMA2; (+) strand; PAM type: NRG; PAM sequence: TGG
attttggaataagtgtgatg

SEQ ID NO: 155371 - DNA, 20 bp, Artificial Sequence
  Description of Artificial Sequence: Synthetic oligonucleotide
  Target: LAMA2; (+) strand; PAM type: NRG; PAM sequence: GAG
aataagtgtgatgtggtgct

SEQ ID NO: 155372 - DNA, 20 bp, Artificial Sequence
  Description of Artificial Sequence: Synthetic oligonucleotide
  Target: LAMA2; (+) strand; PAM type: NRG; PAM sequence: CAG
aagtgtgatgtggtgctgag

SEQ ID NO: 155373 - DNA, 20 bp, Artificial Sequence
  Description of Artificial Sequence: Synthetic oligonucleotide
  Target: LAMA2; (+) strand; PAM type: NRG; PAM sequence: TGG
gaatgtatattctgttgatt

SEQ ID NO: 155374 - DNA, 20 bp, Artificial Sequence
  Description of Artificial Sequence: Synthetic oligonucleotide
  Target: LAMA2; (+) strand; PAM type: NRG; PAM sequence: GGG
aatgtatattctgttgattt

SEQ ID NO: 155375 - DNA, 20 bp, Artificial Sequence
  Description of Artificial Sequence: Synthetic oligonucleotide
  Target: LAMA2; (+) strand; PAM type: NRG; PAM sequence: GGG
atgtatattctgttgatttg

SEQ ID NO: 155376 - DNA, 20 bp, Artificial Sequence
  Description of Artificial Sequence: Synthetic oligonucleotide
  Target: LAMA2; (+) strand; PAM type: NRG; PAM sequence: TGG
tatattctgttgatttgggg

SEQ ID NO: 155377 - DNA, 20 bp, Artificial Sequence
  Description of Artificial Sequence: Synthetic oligonucleotide
  Target: LAMA2; (+) strand; PAM type: NRG; PAM sequence: GAG
tattctgttgatttggggtg

SEQ ID NO: 155378 - DNA, 20 bp, Artificial Sequence
  Description of Artificial Sequence: Synthetic oligonucleotide
  Target: LAMA2; (+) strand; PAM type: NRG; PAM sequence: GAG
ttctgttgatttggggtgga

SEQ ID NO: 155379 - DNA, 20 bp, Artificial Sequence
  Description of Artificial Sequence: Synthetic oligonucleotide
  Target: LAMA2; (+) strand; PAM type: NRG; PAM sequence: TAG
agagttctgcaaatgtctat

SEQ ID NO: 155380 - DNA, 20 bp, Artificial Sequence
  Description of Artificial Sequence: Synthetic oligonucleotide
  Target: LAMA2; (+) strand; PAM type: NRG; PAM sequence: AGG
gagttctgcaaatgtctatt

SEQ ID NO: 155381 - DNA, 20 bp, Artificial Sequence
  Description of Artificial Sequence: Synthetic oligonucleotide
  Target: LAMA2; (+) strand; PAM type: NRG; PAM sequence: TGG
aaatgtctattaggtccact

SEQ ID NO: 155382 - DNA, 20 bp, Artificial Sequence
  Description of Artificial Sequence: Synthetic oligonucleotide
  Target: LAMA2; (+) strand; PAM type: NRG; PAM sequence: CAG
tctattaggtccacttggtg

SEQ ID NO: 155383 - DNA, 20 bp, Artificial Sequence
  Description of Artificial Sequence: Synthetic oligonucleotide
  Target: LAMA2; (+) strand; PAM type: NRG; PAM sequence: GAG
tattaggtccacttggtgca

SEQ ID NO: 155384 - DNA, 20 bp, Artificial Sequence
  Description of Artificial Sequence: Synthetic oligonucleotide
  Target: LAMA2; (+) strand; PAM type: NRG; PAM sequence: GAG
ggtccacttggtgcagagct

SEQ ID NO: 155385 - DNA, 20 bp, Artificial Sequence
  Description of Artificial Sequence: Synthetic oligonucleotide
  Target: LAMA2; (+) strand; PAM type: NRG; PAM sequence: TGG
gcagagctgagttcaattcc

SEQ ID NO: 155386 - DNA, 20 bp, Artificial Sequence
  Description of Artificial Sequence: Synthetic oligonucleotide
  Target: LAMA2; (+) strand; PAM type: NRG; PAM sequence: CAG
gttgatctgtctaatgttga

SEQ ID NO: 155387 - DNA, 20 bp, Artificial Sequence
  Description of Artificial Sequence: Synthetic oligonucleotide
  Target: LAMA2; (+) strand; PAM type: NRG; PAM sequence: TGG
gatctgtctaatgttgacag

SEQ ID NO: 155388 - DNA, 20 bp, Artificial Sequence
  Description of Artificial Sequence: Synthetic oligonucleotide
  Target: LAMA2; (+) strand; PAM type: NRG; PAM sequence: GGG
atctgtctaatgttgacagt

SEQ ID NO: 155389 - DNA, 20 bp, Artificial Sequence
  Description of Artificial Sequence: Synthetic oligonucleotide
  Target: LAMA2; (+) strand; PAM type: NRG; PAM sequence: GGG
tctgtctaatgttgacagtg

SEQ ID NO: 155390 - DNA, 20 bp, Artificial Sequence
  Description of Artificial Sequence: Synthetic oligonucleotide
  Target: LAMA2; (+) strand; PAM type: NRG; PAM sequence: AAG
atgttgacagtggggtgtta

SEQ ID NO: 155391 - DNA, 20 bp, Artificial Sequence
  Description of Artificial Sequence: Synthetic oligonucleotide
  Target: LAMA2; (+) strand; PAM type: NRG; PAM sequence: TGG
agtctcccattattattgtg

SEQ ID NO: 155392 - DNA, 20 bp, Artificial Sequence
  Description of Artificial Sequence: Synthetic oligonucleotide
  Target: LAMA2; (+) strand; PAM type: NRG; PAM sequence: GGG
gtctcccattattattgtgt

SEQ ID NO: 155393 - DNA, 20 bp, Artificial Sequence
  Description of Artificial Sequence: Synthetic oligonucleotide
  Target: LAMA2; (+) strand; PAM type: NRG; PAM sequence: GAG
ctcccattattattgtgtgg

SEQ ID NO: 155394 - DNA, 20 bp, Artificial Sequence
  Description of Artificial Sequence: Synthetic oligonucleotide
  Target: LAMA2; (+) strand; PAM type: NRG; PAM sequence: AAG
ttattattgtgtgggagtct

SEQ ID NO: 155395 - DNA, 20 bp, Artificial Sequence
  Description of Artificial Sequence: Synthetic oligonucleotide
  Target: LAMA2; (+) strand; PAM type: NRG; PAM sequence: TAG
tgggagtctaagtctctttg

SEQ ID NO: 155396 - DNA, 20 bp, Artificial Sequence
  Description of Artificial Sequence: Synthetic oligonucleotide
  Target: LAMA2; (+) strand; PAM type: NRG; PAM sequence: AGG
gggagtctaagtctctttgt

SEQ ID NO: 155397 - DNA, 20 bp, Artificial Sequence
  Description of Artificial Sequence: Synthetic oligonucleotide
  Target: LAMA2; (+) strand; PAM type: NRG; PAM sequence: AAG
aagtctctttgtaggtctct

SEQ ID NO: 155398 - DNA, 20 bp, Artificial Sequence
  Description of Artificial Sequence: Synthetic oligonucleotide
  Target: LAMA2; (+) strand; PAM type: NRG; PAM sequence: AGG
agtctctttgtaggtctcta

SEQ ID NO: 155399 - DNA, 20 bp, Artificial Sequence
  Description of Artificial Sequence: Synthetic oligonucleotide
  Target: LAMA2; (+) strand; PAM type: NRG; PAM sequence: GAG
aggacttgctttatgaatct

SEQ ID NO: 155400 - DNA, 20 bp, Artificial Sequence
  Description of Artificial Sequence: Synthetic oligonucleotide
  Target: LAMA2; (+) strand; PAM type: NRG; PAM sequence: TGG
gaatctgagtgctcctgtat

SEQ ID NO: 155401 - DNA, 20 bp, Artificial Sequence
  Description of Artificial Sequence: Synthetic oligonucleotide
  Target: LAMA2; (+) strand; PAM type: NRG; PAM sequence: GGG
aatctgagtgctcctgtatt

SEQ ID NO: 155402 - DNA, 20 bp, Artificial Sequence
  Description of Artificial Sequence: Synthetic oligonucleotide
  Target: LAMA2; (+) strand; PAM type: NRG; PAM sequence: TAG
gtattgggtgcatatatatt

SEQ ID NO: 155403 - DNA, 20 bp, Artificial Sequence
  Description of Artificial Sequence: Synthetic oligonucleotide
  Target: LAMA2; (+) strand; PAM type: NRG; PAM sequence: AGG
tattgggtgcatatatattt

SEQ ID NO: 155404 - DNA, 20 bp, Artificial Sequence
  Description of Artificial Sequence: Synthetic oligonucleotide
  Target: LAMA2; (+) strand; PAM type: NRG; PAM sequence: TAG
gggtgcatatatatttagga

SEQ ID NO: 155405 - DNA, 20 bp, Artificial Sequence
  Description of Artificial Sequence: Synthetic oligonucleotide
  Target: LAMA2; (+) strand; PAM type: NRG; PAM sequence: TAG
gcatatatatttaggatagt

SEQ ID NO: 155406 - DNA, 20 bp, Artificial Sequence
  Description of Artificial Sequence: Synthetic oligonucleotide
  Target: LAMA2; (+) strand; PAM type: NRG; PAM sequence: TGG
atccctttaccattatgtaa

SEQ ID NO: 155407 - DNA, 20 bp, Artificial Sequence
  Description of Artificial Sequence: Synthetic oligonucleotide
  Target: LAMA2; (+) strand; PAM type: NRG; PAM sequence: TGG
ttgtctcttttgatctttgt

SEQ ID NO: 155408 - DNA, 20 bp, Artificial Sequence
  Description of Artificial Sequence: Synthetic oligonucleotide
  Target: LAMA2; (+) strand; PAM type: NRG; PAM sequence: CAG
tggtttaatgtctgttttat

SEQ ID NO: 155409 - DNA, 20 bp, Artificial Sequence
  Description of Artificial Sequence: Synthetic oligonucleotide
  Target: LAMA2; (+) strand; PAM type: NRG; PAM sequence: GAG
gtttaatgtctgttttatca

SEQ ID NO: 155410 - DNA, 20 bp, Artificial Sequence
  Description of Artificial Sequence: Synthetic oligonucleotide
  Target: LAMA2; (+) strand; PAM type: NRG; PAM sequence: TAG
atgtctgttttatcagagac

SEQ ID NO: 155411 - DNA, 20 bp, Artificial Sequence
  Description of Artificial Sequence: Synthetic oligonucleotide
  Target: LAMA2; (+) strand; PAM type: NRG; PAM sequence: AGG
tgtctgttttatcagagact

SEQ ID NO: 155412 - DNA, 20 bp, Artificial Sequence
  Description of Artificial Sequence: Synthetic oligonucleotide
  Target: LAMA2; (+) strand; PAM type: NRG; PAM sequence: TGG
ttttttgttttctatttcct

SEQ ID NO: 155413 - DNA, 20 bp, Artificial Sequence
  Description of Artificial Sequence: Synthetic oligonucleotide
  Target: LAMA2; (+) strand; PAM type: NRG; PAM sequence: TAG
tttgttttctatttccttgg

SEQ ID NO: 155414 - DNA, 20 bp, Artificial Sequence
  Description of Artificial Sequence: Synthetic oligonucleotide
  Target: LAMA2; (+) strand; PAM type: NRG; PAM sequence: GAG
ttcctccatccctttatttt

SEQ ID NO: 155415 - DNA, 20 bp, Artificial Sequence
  Description of Artificial Sequence: Synthetic oligonucleotide
  Target: LAMA2; (+) strand; PAM type: NRG; PAM sequence: GAG
ctgtgtgtgtctctgcacat

SEQ ID NO: 155416 - DNA, 20 bp, Artificial Sequence
  Description of Artificial Sequence: Synthetic oligonucleotide
  Target: LAMA2; (+) strand; PAM type: NRG; PAM sequence: TGG
gtgtgtctctgcacatgaga

SEQ ID NO: 155417 - DNA, 20 bp, Artificial Sequence
  Description of Artificial Sequence: Synthetic oligonucleotide
  Target: LAMA2; (+) strand; PAM type: NRG; PAM sequence: GGG
tgtgtctctgcacatgagat

SEQ ID NO: 155418 - DNA, 20 bp, Artificial Sequence
  Description of Artificial Sequence: Synthetic oligonucleotide
  Target: LAMA2; (+) strand; PAM type: NRG; PAM sequence: CAG
tgagatgggtctcttgaata

SEQ ID NO: 155419 - DNA, 20 bp, Artificial Sequence
  Description of Artificial Sequence: Synthetic oligonucleotide
  Target: LAMA2; (+) strand; PAM type: NRG; PAM sequence: TGG
tcttgaatacagcacactga

SEQ ID NO: 155420 - DNA, 20 bp, Artificial Sequence
  Description of Artificial Sequence: Synthetic oligonucleotide
  Target: LAMA2; (+) strand; PAM type: NRG; PAM sequence: GGG
cttgaatacagcacactgat

SEQ ID NO: 155421 - DNA, 20 bp, Artificial Sequence
  Description of Artificial Sequence: Synthetic oligonucleotide
  Target: LAMA2; (+) strand; PAM type: NRG; PAM sequence: GAG
acagcacactgatgggtctt

SEQ ID NO: 155422 - DNA, 20 bp, Artificial Sequence
  Description of Artificial Sequence: Synthetic oligonucleotide
  Target: LAMA2; (+) strand; PAM type: NRG; PAM sequence: CAG
tgagtctttatccaatttgc

SEQ ID NO: 155423 - DNA, 20 bp, Artificial Sequence
  Description of Artificial Sequence: Synthetic oligonucleotide
  Target: LAMA2; (+) strand; PAM type: NRG; PAM sequence: TAG
gccagtctgtgtcttttaat

SEQ ID NO: 155424 - DNA, 20 bp, Artificial Sequence
  Description of Artificial Sequence: Synthetic oligonucleotide
  Target: LAMA2; (+) strand; PAM type: NRG; PAM sequence: GAG
cagtctgtgtcttttaatta

SEQ ID NO: 155425 - DNA, 20 bp, Artificial Sequence
  Description of Artificial Sequence: Synthetic oligonucleotide
  Target: LAMA2; (+) strand; PAM type: NRG; PAM sequence: TAG
tgtcttttaattagagcatt

SEQ ID NO: 155426 - DNA, 20 bp, Artificial Sequence
  Description of Artificial Sequence: Synthetic oligonucleotide
  Target: LAMA2; (+) strand; PAM type: NRG; PAM sequence: AAG
catttagcccatttacgttt

SEQ ID NO: 155427 - DNA, 20 bp, Artificial Sequence
  Description of Artificial Sequence: Synthetic oligonucleotide
  Target: LAMA2; (+) strand; PAM type: NRG; PAM sequence: AGG
atttagcccatttacgttta

SEQ ID NO: 155428 - DNA, 20 bp, Artificial Sequence
  Description of Artificial Sequence: Synthetic oligonucleotide
  Target: LAMA2; (+) strand; PAM type: NRG; PAM sequence: TAG
tgatcctgtcattatgatgt

SEQ ID NO: 155429 - DNA, 20 bp, Artificial Sequence
  Description of Artificial Sequence: Synthetic oligonucleotide
  Target: LAMA2; (+) strand; PAM type: NRG; PAM sequence: TGG
cctgtcattatgatgttagc

SEQ ID NO: 155430 - DNA, 20 bp, Artificial Sequence
  Description of Artificial Sequence: Synthetic oligonucleotide
  Target: LAMA2; (+) strand; PAM type: NRG; PAM sequence: TAG
tagctggttattttgctcgt

SEQ ID NO: 155431 - DNA, 20 bp, Artificial Sequence
  Description of Artificial Sequence: Synthetic oligonucleotide
  Target: LAMA2; (+) strand; PAM type: NRG; PAM sequence: CAG
attttgctcgttagttgttt

SEQ ID NO: 155432 - DNA, 20 bp, Artificial Sequence
  Description of Artificial Sequence: Synthetic oligonucleotide
  Target: LAMA2; (+) strand; PAM type: NRG; PAM sequence: TAG
tagttgtttcagtttcttcc

SEQ ID NO: 155433 - DNA, 20 bp, Artificial Sequence
  Description of Artificial Sequence: Synthetic oligonucleotide
  Target: LAMA2; (+) strand; PAM type: NRG; PAM sequence: TGG
cagtttcttcctagcatcga

SEQ ID NO: 155434 - DNA, 20 bp, Artificial Sequence
  Description of Artificial Sequence: Synthetic oligonucleotide
  Target: LAMA2; (+) strand; PAM type: NRG; PAM sequence: TGG
catcgatggtctttacaatt

SEQ ID NO: 155435 - DNA, 20 bp, Artificial Sequence
  Description of Artificial Sequence: Synthetic oligonucleotide
  Target: LAMA2; (+) strand; PAM type: NRG; PAM sequence: CAG
tacaatttggcatgtttttg

SEQ ID NO: 155436 - DNA, 20 bp, Artificial Sequence
  Description of Artificial Sequence: Synthetic oligonucleotide
  Target: LAMA2; (+) strand; PAM type: NRG; PAM sequence: TGG
aatttggcatgtttttgcag

SEQ ID NO: 155437 - DNA, 20 bp, Artificial Sequence
  Description of Artificial Sequence: Synthetic oligonucleotide
  Target: LAMA2; (+) strand; PAM type: NRG; PAM sequence: TGG
tggcatgtttttgcagtggc

SEQ ID NO: 155438 - DNA, 20 bp, Artificial Sequence
  Description of Artificial Sequence: Synthetic oligonucleotide
  Target: LAMA2; (+) strand; PAM type: NRG; PAM sequence: TGG
gtttttgcagtggctggtac

SEQ ID NO: 155439 - DNA, 20 bp, Artificial Sequence
  Description of Artificial Sequence: Synthetic oligonucleotide
  Target: LAMA2; (+) strand; PAM type: NRG; PAM sequence: TAG
tggttgttcctttccatgtt

SEQ ID NO: 155440 - DNA, 20 bp, Artificial Sequence
  Description of Artificial Sequence: Synthetic oligonucleotide
  Target: LAMA2; (+) strand; PAM type: NRG; PAM sequence: CAG
tccatgtttagcacttcctt

SEQ ID NO: 155441 - DNA, 20 bp, Artificial Sequence
  Description of Artificial Sequence: Synthetic oligonucleotide
  Target: LAMA2; (+) strand; PAM type: NRG; PAM sequence: AGG
ccatgtttagcacttccttc

SEQ ID NO: 155442 - DNA, 20 bp, Artificial Sequence
  Description of Artificial Sequence: Synthetic oligonucleotide
  Target: LAMA2; (+) strand; PAM type: NRG; PAM sequence: GAG
atgtttagcacttccttcag

SEQ ID NO: 155443 - DNA, 20 bp, Artificial Sequence
  Description of Artificial Sequence: Synthetic oligonucleotide
  Target: LAMA2; (+) strand; PAM type: NRG; PAM sequence: TAG
acttccttcaggagctcttt

SEQ ID NO: 155444 - DNA, 20 bp, Artificial Sequence
  Description of Artificial Sequence: Synthetic oligonucleotide
  Target: LAMA2; (+) strand; PAM type: NRG; PAM sequence: AGG
cttccttcaggagctctttt

SEQ ID NO: 155445 - DNA, 20 bp, Artificial Sequence
  Description of Artificial Sequence: Synthetic oligonucleotide
  Target: LAMA2; (+) strand; PAM type: NRG; PAM sequence: GGG
ttccttcaggagctctttta

SEQ ID NO: 155446 - DNA, 20 bp, Artificial Sequence
  Description of Artificial Sequence: Synthetic oligonucleotide
  Target: LAMA2; (+) strand; PAM type: NRG; PAM sequence: CAG
cttcaggagctcttttaggg

SEQ ID NO: 155447 - DNA, 20 bp, Artificial Sequence
  Description of Artificial Sequence: Synthetic oligonucleotide
  Target: LAMA2; (+) strand; PAM type: NRG; PAM sequence: AGG
ttcaggagctcttttagggc

SEQ ID NO: 155448 - DNA, 20 bp, Artificial Sequence
  Description of Artificial Sequence: Synthetic oligonucleotide
  Target: LAMA2; (+) strand; PAM type: NRG; PAM sequence: TGG
gagctcttttagggcaggcc

SEQ ID NO: 155449 - DNA, 20 bp, Artificial Sequence
  Description of Artificial Sequence: Synthetic oligonucleotide
  Target: LAMA2; (+) strand; PAM type: NRG; PAM sequence: TGG
ctcttttagggcaggcctgg

SEQ ID NO: 155450 - DNA, 20 bp, Artificial Sequence
  Description of Artificial Sequence: Synthetic oligonucleotide
  Target: LAMA2; (+) strand; PAM type: NRG; PAM sequence: CAG
ctggtggtgacaaaatctct

SEQ ID NO: 155451 - DNA, 20 bp, Artificial Sequence
  Description of Artificial Sequence: Synthetic oligonucleotide
  Target: LAMA2; (+) strand; PAM type: NRG; PAM sequence: AAG
tcagcatttgcttgtctgta

SEQ ID NO: 155452 - DNA, 20 bp, Artificial Sequence
  Description of Artificial Sequence: Synthetic oligonucleotide
  Target: LAMA2; (+) strand; PAM type: NRG; PAM sequence: AAG
ttatttctccttcacttatg

SEQ ID NO: 155453 - DNA, 20 bp, Artificial Sequence
  Description of Artificial Sequence: Synthetic oligonucleotide
  Target: LAMA2; (+) strand; PAM type: NRG; PAM sequence: TAG
tctccttcacttatgaagct

SEQ ID NO: 155454 - DNA, 20 bp, Artificial Sequence
  Description of Artificial Sequence: Synthetic oligonucleotide
  Target: LAMA2; (+) strand; PAM type: NRG; PAM sequence: TGG
ttcacttatgaagcttagtt

SEQ ID NO: 155455 - DNA, 20 bp, Artificial Sequence
  Description of Artificial Sequence: Synthetic oligonucleotide
  Target: LAMA2; (+) strand; PAM type: NRG; PAM sequence: TGG
cttatgaagcttagtttggc

SEQ ID NO: 155456 - DNA, 20 bp, Artificial Sequence
  Description of Artificial Sequence: Synthetic oligonucleotide
  Target: LAMA2; (+) strand; PAM type: NRG; PAM sequence: TGG
tttggctggatatgaaattc

SEQ ID NO: 155457 - DNA, 20 bp, Artificial Sequence
  Description of Artificial Sequence: Synthetic oligonucleotide
  Target: LAMA2; (+) strand; PAM type: NRG; PAM sequence: GGG
ttggctggatatgaaattct

SEQ ID NO: 155458 - DNA, 20 bp, Artificial Sequence
  Description of Artificial Sequence: Synthetic oligonucleotide
  Target: LAMA2; (+) strand; PAM type: NRG; PAM sequence: AAG
ggttgaaaattcttttcttt

SEQ ID NO: 155459 - DNA, 20 bp, Artificial Sequence
  Description of Artificial Sequence: Synthetic oligonucleotide
  Target: LAMA2; (+) strand; PAM type: NRG; PAM sequence: TGG
tctttaagaatgttgaatat

SEQ ID NO: 155460 - DNA, 20 bp, Artificial Sequence
  Description of Artificial Sequence: Synthetic oligonucleotide
  Target: LAMA2; (+) strand; PAM type: NRG; PAM sequence: CGG
tattggcccccactctcttc

SEQ ID NO: 155461 - DNA, 20 bp, Artificial Sequence
  Description of Artificial Sequence: Synthetic oligonucleotide
  Target: LAMA2; (+) strand; PAM type: NRG; PAM sequence: TAG
ccccactctcttccggcttg

SEQ ID NO: 155462 - DNA, 20 bp, Artificial Sequence
  Description of Artificial Sequence: Synthetic oligonucleotide
  Target: LAMA2; (+) strand; PAM type: NRG; PAM sequence: GAG
ccactctcttccggcttgta

SEQ ID NO: 155463 - DNA, 20 bp, Artificial Sequence
  Description of Artificial Sequence: Synthetic oligonucleotide
  Target: LAMA2; (+) strand; PAM type: NRG; PAM sequence: GAG
cggcttgtagagtttctgcc

SEQ ID NO: 155464 - DNA, 20 bp, Artificial Sequence
  Description of Artificial Sequence: Synthetic oligonucleotide
  Target: LAMA2; (+) strand; PAM type: NRG; PAM sequence: TAG
tctgccgagcgatctgctgt

SEQ ID NO: 155465 - DNA, 20 bp, Artificial Sequence
  Description of Artificial Sequence: Synthetic oligonucleotide
  Target: LAMA2; (+) strand; PAM type: NRG; PAM sequence: TGG
gcgatctgctgttagtctga

SEQ ID NO: 155466 - DNA, 20 bp, Artificial Sequence
  Description of Artificial Sequence: Synthetic oligonucleotide
  Target: LAMA2; (+) strand; PAM type: NRG; PAM sequence: GGG
cgatctgctgttagtctgat

SEQ ID NO: 155467 - DNA, 20 bp, Artificial Sequence
  Description of Artificial Sequence: Synthetic oligonucleotide
  Target: LAMA2; (+) strand; PAM type: NRG; PAM sequence: GAG
agtctgatgggcttcccttt

SEQ ID NO: 155468 - DNA, 20 bp, Artificial Sequence
  Description of Artificial Sequence: Synthetic oligonucleotide
  Target: LAMA2; (+) strand; PAM type: NRG; PAM sequence: AGG
gtctgatgggcttccctttg

SEQ ID NO: 155469 - DNA, 20 bp, Artificial Sequence
  Description of Artificial Sequence: Synthetic oligonucleotide
  Target: LAMA2; (+) strand; PAM type: NRG; PAM sequence: GGG
tctgatgggcttccctttga

SEQ ID NO: 155470 - DNA, 20 bp, Artificial Sequence
  Description of Artificial Sequence: Synthetic oligonucleotide
  Target: LAMA2; (+) strand; PAM type: NRG; PAM sequence: TGG
ggtaacccgacctttctctc

SEQ ID NO: 155471 - DNA, 20 bp, Artificial Sequence
  Description of Artificial Sequence: Synthetic oligonucleotide
  Target: LAMA2; (+) strand; PAM type: NRG; PAM sequence: TGG
tttttccttcatttcaactt

SEQ ID NO: 155472 - DNA, 20 bp, Artificial Sequence
  Description of Artificial Sequence: Synthetic oligonucleotide
  Target: LAMA2; (+) strand; PAM type: NRG; PAM sequence: AAG
tctgacaattatgtgtcttg

SEQ ID NO: 155473 - DNA, 20 bp, Artificial Sequence
  Description of Artificial Sequence: Synthetic oligonucleotide
  Target: LAMA2; (+) strand; PAM type: NRG; PAM sequence: GAG
gtcttgaagttgctcttctc

SEQ ID NO: 155474 - DNA, 20 bp, Artificial Sequence
  Description of Artificial Sequence: Synthetic oligonucleotide
  Target: LAMA2; (+) strand; PAM type: NRG; PAM sequence: AGG
tcttgaagttgctcttctcg

SEQ ID NO: 155475 - DNA, 20 bp, Artificial Sequence
  Description of Artificial Sequence: Synthetic oligonucleotide
  Target: LAMA2; (+) strand; PAM type: NRG; PAM sequence: GAG
ttgaagttgctcttctcgag

SEQ ID NO: 155476 - DNA, 20 bp, Artificial Sequence
  Description of Artificial Sequence: Synthetic oligonucleotide
  Target: LAMA2; (+) strand; PAM type: NRG; PAM sequence: TGG
cttctcgaggagtatctttg

SEQ ID NO: 155477 - DNA, 20 bp, Artificial Sequence
  Description of Artificial Sequence: Synthetic oligonucleotide
  Target: LAMA2; (+) strand; PAM type: NRG; PAM sequence: TGG
tgtttcctgaatttgaatgt

SEQ ID NO: 155478 - DNA, 20 bp, Artificial Sequence
  Description of Artificial Sequence: Synthetic oligonucleotide
  Target: LAMA2; (+) strand; PAM type: NRG; PAM sequence: TAG
tgaatgttggcctgccttgc

SEQ ID NO: 155479 - DNA, 20 bp, Artificial Sequence
  Description of Artificial Sequence: Synthetic oligonucleotide
  Target: LAMA2; (+) strand; PAM type: NRG; PAM sequence: AGG
gaatgttggcctgccttgct

SEQ ID NO: 155480 - DNA, 20 bp, Artificial Sequence
  Description of Artificial Sequence: Synthetic oligonucleotide
  Target: LAMA2; (+) strand; PAM type: NRG; PAM sequence: TGG
gttggcctgccttgctaggt

SEQ ID NO: 155481 - DNA, 20 bp, Artificial Sequence
  Description of Artificial Sequence: Synthetic oligonucleotide
  Target: LAMA2; (+) strand; PAM type: NRG; PAM sequence: GGG
ttggcctgccttgctaggtt

SEQ ID NO: 155482 - DNA, 20 bp, Artificial Sequence
  Description of Artificial Sequence: Synthetic oligonucleotide
  Target: LAMA2; (+) strand; PAM type: NRG; PAM sequence: GGG
tggcctgccttgctaggttg

SEQ ID NO: 155483 - DNA, 20 bp, Artificial Sequence
  Description of Artificial Sequence: Synthetic oligonucleotide
  Target: LAMA2; (+) strand; PAM type: NRG; PAM sequence: AAG
cctgccttgctaggttgggg

SEQ ID NO: 155484 - DNA, 20 bp, Artificial Sequence
  Description of Artificial Sequence: Synthetic oligonucleotide
  Target: LAMA2; (+) strand; PAM type: NRG; PAM sequence: TGG
ctaggttggggaagttctcc

SEQ ID NO: 155485 - DNA, 20 bp, Artificial Sequence
  Description of Artificial Sequence: Synthetic oligonucleotide
  Target: LAMA2; (+) strand; PAM type: NRG; PAM sequence: CAG
ttctcctggataatatcctg

SEQ ID NO: 155486 - DNA, 20 bp, Artificial Sequence
  Description of Artificial Sequence: Synthetic oligonucleotide
  Target: LAMA2; (+) strand; PAM type: NRG; PAM sequence: TGG
ctgcagaatgttttccaact

SEQ ID NO: 155487 - DNA, 20 bp, Artificial Sequence
  Description of Artificial Sequence: Synthetic oligonucleotide
  Target: LAMA2; (+) strand; PAM type: NRG; PAM sequence: CAG
gccactttcatgtacccaat

SEQ ID NO: 155488 - DNA, 20 bp, Artificial Sequence
  Description of Artificial Sequence: Synthetic oligonucleotide
  Target: LAMA2; (+) strand; PAM type: NRG; PAM sequence: AGG
ccactttcatgtacccaatc

SEQ ID NO: 155489 - DNA, 20 bp, Artificial Sequence
  Description of Artificial Sequence: Synthetic oligonucleotide
  Target: LAMA2; (+) strand; PAM type: NRG; PAM sequence: TAG
ttcatgtacccaatcaggca

SEQ ID NO: 155490 - DNA, 20 bp, Artificial Sequence
  Description of Artificial Sequence: Synthetic oligonucleotide
  Target: LAMA2; (+) strand; PAM type: NRG; PAM sequence: TGG
tacccaatcaggcatagatt

SEQ ID NO: 155491 - DNA, 20 bp, Artificial Sequence
  Description of Artificial Sequence: Synthetic oligonucleotide
  Target: LAMA2; (+) strand; PAM type: NRG; PAM sequence: TAG
atagatttggtcttttcaca

SEQ ID NO: 155492 - DNA, 20 bp, Artificial Sequence
  Description of Artificial Sequence: Synthetic oligonucleotide
  Target: LAMA2; (+) strand; PAM type: NRG; PAM sequence: TGG
tcacatagtcccatatttct

SEQ ID NO: 155493 - DNA, 20 bp, Artificial Sequence
  Description of Artificial Sequence: Synthetic oligonucleotide
  Target: LAMA2; (+) strand; PAM type: NRG; PAM sequence: GAG
acatagtcccatatttcttg

SEQ ID NO: 155494 - DNA, 20 bp, Artificial Sequence
  Description of Artificial Sequence: Synthetic oligonucleotide
  Target: LAMA2; (+) strand; PAM type: NRG; PAM sequence: AGG
catagtcccatatttcttgg

SEQ ID NO: 155495 - DNA, 20 bp, Artificial Sequence
  Description of Artificial Sequence: Synthetic oligonucleotide
  Target: LAMA2; (+) strand; PAM type: NRG; PAM sequence: CAG
atcactgataccctttcttc

SEQ ID NO: 155496 - DNA, 20 bp, Artificial Sequence
  Description of Artificial Sequence: Synthetic oligonucleotide
  Target: LAMA2; (+) strand; PAM type: NRG; PAM sequence: CAG
tttcttccagttgatcgaat

SEQ ID NO: 155497 - DNA, 20 bp, Artificial Sequence
  Description of Artificial Sequence: Synthetic oligonucleotide
  Target: LAMA2; (+) strand; PAM type: NRG; PAM sequence: GAG
agttgatcgaatcagctcct

SEQ ID NO: 155498 - DNA, 20 bp, Artificial Sequence
  Description of Artificial Sequence: Synthetic oligonucleotide
  Target: LAMA2; (+) strand; PAM type: NRG; PAM sequence: AGG
gttgatcgaatcagctcctg

SEQ ID NO: 155499 - DNA, 20 bp, Artificial Sequence
  Description of Artificial Sequence: Synthetic oligonucleotide
  Target: LAMA2; (+) strand; PAM type: NRG; PAM sequence: CAG
cctgaggcttgtgcatttgt

SEQ ID NO: 155500 - DNA, 20 bp, Artificial Sequence
  Description of Artificial Sequence: Synthetic oligonucleotide
  Target: LAMA2; (+) strand; PAM type: NRG; PAM sequence: AGG
ctgaggcttgtgcatttgtc

SEQ ID NO: 155501 - DNA, 20 bp, Artificial Sequence
  Description of Artificial Sequence: Synthetic oligonucleotide
  Target: LAMA2; (+) strand; PAM type: NRG; PAM sequence: TAG
gtcaggtacttctcgtgcca

SEQ ID NO: 155502 - DNA, 20 bp, Artificial Sequence
  Description of Artificial Sequence: Synthetic oligonucleotide
  Target: LAMA2; (+) strand; PAM type: NRG; PAM sequence: CAG
acttctcgtgccatagtttt

SEQ ID NO: 155503 - DNA, 20 bp, Artificial Sequence
  Description of Artificial Sequence: Synthetic oligonucleotide
  Target: LAMA2; (+) strand; PAM type: NRG; PAM sequence: CAG
gccatagttttcagctccat

SEQ ID NO: 155504 - DNA, 20 bp, Artificial Sequence
  Description of Artificial Sequence: Synthetic oligonucleotide
  Target: LAMA2; (+) strand; PAM type: NRG; PAM sequence: AGG
ccatagttttcagctccatc

SEQ ID NO: 155505 - DNA, 20 bp, Artificial Sequence
  Description of Artificial Sequence: Synthetic oligonucleotide
  Target: LAMA2; (+) strand; PAM type: NRG; PAM sequence: AAG
tcagctccatcaggtcattt

SEQ ID NO: 155506 - DNA, 20 bp, Artificial Sequence
  Description of Artificial Sequence: Synthetic oligonucleotide
  Target: LAMA2; (+) strand; PAM type: NRG; PAM sequence: AGG
cagctccatcaggtcattta

SEQ ID NO: 155507 - DNA, 20 bp, Artificial Sequence
  Description of Artificial Sequence: Synthetic oligonucleotide
  Target: LAMA2; (+) strand; PAM type: NRG; PAM sequence: TGG
atttaaggacttctctacac

SEQ ID NO: 155508 - DNA, 20 bp, Artificial Sequence
  Description of Artificial Sequence: Synthetic oligonucleotide
  Target: LAMA2; (+) strand; PAM type: NRG; PAM sequence: TAG
cttctctacactggttattc

SEQ ID NO: 155509 - DNA, 20 bp, Artificial Sequence
  Description of Artificial Sequence: Synthetic oligonucleotide
  Target: LAMA2; (+) strand; PAM type: NRG; PAM sequence: AGG
ttctctacactggttattct

SEQ ID NO: 155510 - DNA, 20 bp, Artificial Sequence
  Description of Artificial Sequence: Synthetic oligonucleotide
  Target: LAMA2; (+) strand; PAM type: NRG; PAM sequence: TAG
tctacactggttattctagg

SEQ ID NO: 155511 - DNA, 20 bp, Artificial Sequence
  Description of Artificial Sequence: Synthetic oligonucleotide
  Target: LAMA2; (+) strand; PAM type: NRG; PAM sequence: AAG
catttgtcctatcttttttc

SEQ ID NO: 155512 - DNA, 20 bp, Artificial Sequence
  Description of Artificial Sequence: Synthetic oligonucleotide
  Target: LAMA2; (+) strand; PAM type: NRG; PAM sequence: AGG
atttgtcctatcttttttca

SEQ ID NO: 155513 - DNA, 20 bp, Artificial Sequence
  Description of Artificial Sequence: Synthetic oligonucleotide
  Target: LAMA2; (+) strand; PAM type: NRG; PAM sequence: TAG
ctatcttttttcaaggtttt

SEQ ID NO: 155514 - DNA, 20 bp, Artificial Sequence
  Description of Artificial Sequence: Synthetic oligonucleotide
  Target: LAMA2; (+) strand; PAM type: NRG; PAM sequence: TGG
ggtttttagcttctttgtga

SEQ ID NO: 155515 - DNA, 20 bp, Artificial Sequence
  Description of Artificial Sequence: Synthetic oligonucleotide
  Target: LAMA2; (+) strand; PAM type: NRG; PAM sequence: GGG
gtttttagcttctttgtgat

SEQ ID NO: 155516 - DNA, 20 bp, Artificial Sequence
  Description of Artificial Sequence: Synthetic oligonucleotide
  Target: LAMA2; (+) strand; PAM type: NRG; PAM sequence: TAG
tgggttcgaacttcctcctt

SEQ ID NO: 155517 - DNA, 20 bp, Artificial Sequence
  Description of Artificial Sequence: Synthetic oligonucleotide
  Target: LAMA2; (+) strand; PAM type: NRG; PAM sequence: CAG
tcgaacttcctcctttagct

SEQ ID NO: 155518 - DNA, 20 bp, Artificial Sequence
  Description of Artificial Sequence: Synthetic oligonucleotide
  Target: LAMA2; (+) strand; PAM type: NRG; PAM sequence: GAG
gaacttcctcctttagctca

SEQ ID NO: 155519 - DNA, 20 bp, Artificial Sequence
  Description of Artificial Sequence: Synthetic oligonucleotide
  Target: LAMA2; (+) strand; PAM type: NRG; PAM sequence: AAG
cttcctcctttagctcagag

SEQ ID NO: 155520 - DNA, 20 bp, Artificial Sequence
  Description of Artificial Sequence: Synthetic oligonucleotide
  Target: LAMA2; (+) strand; PAM type: NRG; PAM sequence: AAG
cagagaagtttgatcgtctg

SEQ ID NO: 155521 - DNA, 20 bp, Artificial Sequence
  Description of Artificial Sequence: Synthetic oligonucleotide
  Target: LAMA2; (+) strand; PAM type: NRG; PAM sequence: AAG
cttcttctctcaactcctca

SEQ ID NO: 155522 - DNA, 20 bp, Artificial Sequence
  Description of Artificial Sequence: Synthetic oligonucleotide
  Target: LAMA2; (+) strand; PAM type: NRG; PAM sequence: CAG
cctcaaagtcattctccatc

SEQ ID NO: 155523 - DNA, 20 bp, Artificial Sequence
  Description of Artificial Sequence: Synthetic oligonucleotide
  Target: LAMA2; (+) strand; PAM type: NRG; PAM sequence: TGG
atccagctttgttccattgc

SEQ ID NO: 155524 - DNA, 20 bp, Artificial Sequence
  Description of Artificial Sequence: Synthetic oligonucleotide
  Target: LAMA2; (+) strand; PAM type: NRG; PAM sequence: AAG
agctttgttccattgctggc

SEQ ID NO: 155525 - DNA, 20 bp, Artificial Sequence
  Description of Artificial Sequence: Synthetic oligonucleotide
  Target: LAMA2; (+) strand; PAM type: NRG; PAM sequence: AGG
gctttgttccattgctggca

SEQ ID NO: 155526 - DNA, 20 bp, Artificial Sequence
  Description of Artificial Sequence: Synthetic oligonucleotide
  Target: LAMA2; (+) strand; PAM type: NRG; PAM sequence: GAG
tttgttccattgctggcaag

SEQ ID NO: 155527 - DNA, 20 bp, Artificial Sequence
  Description of Artificial Sequence: Synthetic oligonucleotide
  Target: LAMA2; (+) strand; PAM type: NRG; PAM sequence: TGG
ggcaaggagcttcattcctt

SEQ ID NO: 155528 - DNA, 20 bp, Artificial Sequence
  Description of Artificial Sequence: Synthetic oligonucleotide
  Target: LAMA2; (+) strand; PAM type: NRG; PAM sequence: GAG
caaggagcttcattcctttg

SEQ ID NO: 155529 - DNA, 20 bp, Artificial Sequence
  Description of Artificial Sequence: Synthetic oligonucleotide
  Target: LAMA2; (+) strand; PAM type: NRG; PAM sequence: AGG
aaggagcttcattcctttgg

SEQ ID NO: 155530 - DNA, 20 bp, Artificial Sequence
  Description of Artificial Sequence: Synthetic oligonucleotide
  Target: LAMA2; (+) strand; PAM type: NRG; PAM sequence: GAG
ggagcttcattcctttggag

SEQ ID NO: 155531 - DNA, 20 bp, Artificial Sequence
  Description of Artificial Sequence: Synthetic oligonucleotide
  Target: LAMA2; (+) strand; PAM type: NRG; PAM sequence: AGG
gagcttcattcctttggagg

SEQ ID NO: 155532 - DNA, 20 bp, Artificial Sequence
  Description of Artificial Sequence: Synthetic oligonucleotide
  Target: LAMA2; (+) strand; PAM type: NRG; PAM sequence: GAG
gcttcattcctttggaggag

SEQ ID NO: 155533 - DNA, 20 bp, Artificial Sequence
  Description of Artificial Sequence: Synthetic oligonucleotide
  Target: LAMA2; (+) strand; PAM type: NRG; PAM sequence: GAG
ttcattcctttggaggagga

SEQ ID NO: 155534 - DNA, 20 bp, Artificial Sequence
  Description of Artificial Sequence: Synthetic oligonucleotide
  Target: LAMA2; (+) strand; PAM type: NRG; PAM sequence: AGG
tcattcctttggaggaggag

SEQ ID NO: 155535 - DNA, 20 bp, Artificial Sequence
  Description of Artificial Sequence: Synthetic oligonucleotide
  Target: LAMA2; (+) strand; PAM type: NRG; PAM sequence: TAG
aggagaggcgctctgatttt

SEQ ID NO: 155536 - DNA, 20 bp, Artificial Sequence
  Description of Artificial Sequence: Synthetic oligonucleotide
  Target: LAMA2; (+) strand; PAM type: NRG; PAM sequence: GAG
gagaggcgctctgattttta

SEQ ID NO: 155537 - DNA, 20 bp, Artificial Sequence
  Description of Artificial Sequence: Synthetic oligonucleotide
  Target: LAMA2; (+) strand; PAM type: NRG; PAM sequence: CAG
gctctgatttttagagtttt

SEQ ID NO: 155538 - DNA, 20 bp, Artificial Sequence
  Description of Artificial Sequence: Synthetic oligonucleotide
  Target: LAMA2; (+) strand; PAM type: NRG; PAM sequence: TGG
ctgttttttccccatctttg

SEQ ID NO: 155539 - DNA, 20 bp, Artificial Sequence
  Description of Artificial Sequence: Synthetic oligonucleotide
  Target: LAMA2; (+) strand; PAM type: NRG; PAM sequence: TGG
tttgtggttttatctacctt

SEQ ID NO: 155540 - DNA, 20 bp, Artificial Sequence
  Description of Artificial Sequence: Synthetic oligonucleotide
  Target: LAMA2; (+) strand; PAM type: NRG; PAM sequence: CGG
tggtctttgatgatgatgta

SEQ ID NO: 155541 - DNA, 20 bp, Artificial Sequence
  Description of Artificial Sequence: Synthetic oligonucleotide
  Target: LAMA2; (+) strand; PAM type: NRG; PAM sequence: TGG
ctttgatgatgatgtacgga

SEQ ID NO: 155542 - DNA, 20 bp, Artificial Sequence
  Description of Artificial Sequence: Synthetic oligonucleotide
  Target: LAMA2; (+) strand; PAM type: NRG; PAM sequence: GGG
tttgatgatgatgtacggat

SEQ ID NO: 155543 - DNA, 20 bp, Artificial Sequence
  Description of Artificial Sequence: Synthetic oligonucleotide
  Target: LAMA2; (+) strand; PAM type: NRG; PAM sequence: GGG
ttgatgatgatgtacggatg

SEQ ID NO: 155544 - DNA, 20 bp, Artificial Sequence
  Description of Artificial Sequence: Synthetic oligonucleotide
  Target: LAMA2; (+) strand; PAM type: NRG; PAM sequence: TGG
atgatgtacggatggggttt

SEQ ID NO: 155545 - DNA, 20 bp, Artificial Sequence
  Description of Artificial Sequence: Synthetic oligonucleotide
  Target: LAMA2; (+) strand; PAM type: NRG; PAM sequence: TGG
gtacggatggggttttggtg

SEQ ID NO: 155546 - DNA, 20 bp, Artificial Sequence
  Description of Artificial Sequence: Synthetic oligonucleotide
  Target: LAMA2; (+) strand; PAM type: NRG; PAM sequence: GGG
tacggatggggttttggtgt

SEQ ID NO: 155547 - DNA, 20 bp, Artificial Sequence
  Description of Artificial Sequence: Synthetic oligonucleotide
  Target: LAMA2; (+) strand; PAM type: NRG; PAM sequence: TAG
tgggtgtcctttctatttgt

SEQ ID NO: 155548 - DNA, 20 bp, Artificial Sequence
  Description of Artificial Sequence: Synthetic oligonucleotide
  Target: LAMA2; (+) strand; PAM type: NRG; PAM sequence: CAG
tttgttagttttccttctta

SEQ ID NO: 155549 - DNA, 20 bp, Artificial Sequence
  Description of Artificial Sequence: Synthetic oligonucleotide
  Target: LAMA2; (+) strand; PAM type: NRG; PAM sequence: CAG
ttagttttccttcttacagt

SEQ ID NO: 155550 - DNA, 20 bp, Artificial Sequence
  Description of Artificial Sequence: Synthetic oligonucleotide
  Target: LAMA2; (+) strand; PAM type: NRG; PAM sequence: AGG
tagttttccttcttacagtc

SEQ ID NO: 155551 - DNA, 20 bp, Artificial Sequence
  Description of Artificial Sequence: Synthetic oligonucleotide
  Target: LAMA2; (+) strand; PAM type: NRG; PAM sequence: CAG
cttcttacagtcaggaccct

SEQ ID NO: 155552 - DNA, 20 bp, Artificial Sequence
  Description of Artificial Sequence: Synthetic oligonucleotide
  Target: LAMA2; (+) strand; PAM type: NRG; PAM sequence: CAG
acagtcaggaccctcagctg

SEQ ID NO: 155553 - DNA, 20 bp, Artificial Sequence
  Description of Artificial Sequence: Synthetic oligonucleotide
  Target: LAMA2; (+) strand; PAM type: NRG; PAM sequence: AGG
cagtcaggaccctcagctgc

SEQ ID NO: 155554 - DNA, 20 bp, Artificial Sequence
  Description of Artificial Sequence: Synthetic oligonucleotide
  Target: LAMA2; (+) strand; PAM type: NRG; PAM sequence: TGG
accctcagctgcaggtctgt

SEQ ID NO: 155555 - DNA, 20 bp, Artificial Sequence
  Description of Artificial Sequence: Synthetic oligonucleotide
  Target: LAMA2; (+) strand; PAM type: NRG; PAM sequence: GAG
cctcagctgcaggtctgttg

SEQ ID NO: 155556 - DNA, 20 bp, Artificial Sequence
  Description of Artificial Sequence: Synthetic oligonucleotide
  Target: LAMA2; (+) strand; PAM type: NRG; PAM sequence: TGG
gcaggtctgttggagtttgc

SEQ ID NO: 155557 - DNA, 20 bp, Artificial Sequence
  Description of Artificial Sequence: Synthetic oligonucleotide
  Target: LAMA2; (+) strand; PAM type: NRG; PAM sequence: GAG
aggtctgttggagtttgctg

SEQ ID NO: 155558 - DNA, 20 bp, Artificial Sequence
  Description of Artificial Sequence: Synthetic oligonucleotide
  Target: LAMA2; (+) strand; PAM type: NRG; PAM sequence: AGG
ggtctgttggagtttgctgg

SEQ ID NO: 155559 - DNA, 20 bp, Artificial Sequence
  Description of Artificial Sequence: Synthetic oligonucleotide
  Target: LAMA2; (+) strand; PAM type: NRG; PAM sequence: CAG
agtttgctggaggtccactc

SEQ ID NO: 155560 - DNA, 20 bp, Artificial Sequence
  Description of Artificial Sequence: Synthetic oligonucleotide
  Target: LAMA2; (+) strand; PAM type: NRG; PAM sequence: TGG
cactccagaccctgtttgcc

SEQ ID NO: 155561 - DNA, 20 bp, Artificial Sequence
  Description of Artificial Sequence: Synthetic oligonucleotide
  Target: LAMA2; (+) strand; PAM type: NRG; PAM sequence: GGG
actccagaccctgtttgcct

SEQ ID NO: 155562 - DNA, 20 bp, Artificial Sequence
  Description of Artificial Sequence: Synthetic oligonucleotide
  Target: LAMA2; (+) strand; PAM type: NRG; PAM sequence: CAG
gaccctgtttgcctgggtat

SEQ ID NO: 155563 - DNA, 20 bp, Artificial Sequence
  Description of Artificial Sequence: Synthetic oligonucleotide
  Target: LAMA2; (+) strand; PAM type: NRG; PAM sequence: CAG
cctgtttgcctgggtatcag

SEQ ID NO: 155564 - DNA, 20 bp, Artificial Sequence
  Description of Artificial Sequence: Synthetic oligonucleotide
  Target: LAMA2; (+) strand; PAM type: NRG; PAM sequence: CGG
gtttgcctgggtatcagcag

SEQ ID NO: 155565 - DNA, 20 bp, Artificial Sequence
  Description of Artificial Sequence: Synthetic oligonucleotide
  Target: LAMA2; (+) strand; PAM type: NRG; PAM sequence: GAG
ttgcctgggtatcagcagcg

SEQ ID NO: 155566 - DNA, 20 bp, Artificial Sequence
  Description of Artificial Sequence: Synthetic oligonucleotide
  Target: LAMA2; (+) strand; PAM type: NRG; PAM sequence: AGG
tgcctgggtatcagcagcgg

SEQ ID NO: 155567 - DNA, 20 bp, Artificial Sequence
  Description of Artificial Sequence: Synthetic oligonucleotide
  Target: LAMA2; (+) strand; PAM type: NRG; PAM sequence: CAG
ggtatcagcagcggaggctg

SEQ ID NO: 155568 - DNA, 20 bp, Artificial Sequence
  Description of Artificial Sequence: Synthetic oligonucleotide
  Target: LAMA2; (+) strand; PAM type: NRG; PAM sequence: CAG
cagcagcggaggctgcagaa

SEQ ID NO: 155569 - DNA, 20 bp, Artificial Sequence
  Description of Artificial Sequence: Synthetic oligonucleotide
  Target: LAMA2; (+) strand; PAM type: NRG; PAM sequence: CAG
cagcggaggctgcagaacag

SEQ ID NO: 155570 - DNA, 20 bp, Artificial Sequence
  Description of Artificial Sequence: Synthetic oligonucleotide
  Target: LAMA2; (+) strand; PAM type: NRG; PAM sequence: CAG
gaacagcagatattgctgaa

SEQ ID NO: 155571 - DNA, 20 bp, Artificial Sequence
  Description of Artificial Sequence: Synthetic oligonucleotide
  Target: LAMA2; (+) strand; PAM type: NRG; PAM sequence: TGG
ttgccgcctgatcgttcctc

SEQ ID NO: 155572 - DNA, 20 bp, Artificial Sequence
  Description of Artificial Sequence: Synthetic oligonucleotide
  Target: LAMA2; (+) strand; PAM type: NRG; PAM sequence: AAG
ccgcctgatcgttcctctgg

SEQ ID NO: 155573 - DNA, 20 bp, Artificial Sequence
  Description of Artificial Sequence: Synthetic oligonucleotide
  Target: LAMA2; (+) strand; PAM type: NRG; PAM sequence: CAG
ttcctctggaagcttcgtct

SEQ ID NO: 155574 - DNA, 20 bp, Artificial Sequence
  Description of Artificial Sequence: Synthetic oligonucleotide
  Target: LAMA2; (+) strand; PAM type: NRG; PAM sequence: GAG
cctctggaagcttcgtctca

SEQ ID NO: 155575 - DNA, 20 bp, Artificial Sequence
  Description of Artificial Sequence: Synthetic oligonucleotide
  Target: LAMA2; (+) strand; PAM type: NRG; PAM sequence: AGG
ctctggaagcttcgtctcag

SEQ ID NO: 155576 - DNA, 20 bp, Artificial Sequence
  Description of Artificial Sequence: Synthetic oligonucleotide
  Target: LAMA2; (+) strand; PAM type: NRG; PAM sequence: GGG
tctggaagcttcgtctcaga

SEQ ID NO: 155577 - DNA, 20 bp, Artificial Sequence
  Description of Artificial Sequence: Synthetic oligonucleotide
  Target: LAMA2; (+) strand; PAM type: NRG; PAM sequence: GGG
ctggaagcttcgtctcagag

SEQ ID NO: 155578 - DNA, 20 bp, Artificial Sequence
  Description of Artificial Sequence: Synthetic oligonucleotide
  Target: LAMA2; (+) strand; PAM type: NRG; PAM sequence: CGG
cttcgtctcagaggggtact

SEQ ID NO: 155579 - DNA, 20 bp, Artificial Sequence
  Description of Artificial Sequence: Synthetic oligonucleotide
  Target: LAMA2; (+) strand; PAM type: NRG; PAM sequence: TGG
cagaggggtactcggccgtg

SEQ ID NO: 155580 - DNA, 20 bp, Artificial Sequence
  Description of Artificial Sequence: Synthetic oligonucleotide
  Target: LAMA2; (+) strand; PAM type: NRG; PAM sequence: GGG
agaggggtactcggccgtgt

SEQ ID NO: 155581 - DNA, 20 bp, Artificial Sequence
  Description of Artificial Sequence: Synthetic oligonucleotide
  Target: LAMA2; (+) strand; PAM type: NRG; PAM sequence: CAG
tactcggccgtgtgggatgt

SEQ ID NO: 155582 - DNA, 20 bp, Artificial Sequence
  Description of Artificial Sequence: Synthetic oligonucleotide
  Target: LAMA2; (+) strand; PAM type: NRG; PAM sequence: TGG
ggatgtcagtctgcccctac

SEQ ID NO: 155583 - DNA, 20 bp, Artificial Sequence
  Description of Artificial Sequence: Synthetic oligonucleotide
  Target: LAMA2; (+) strand; PAM type: NRG; PAM sequence: GGG
gatgtcagtctgcccctact

SEQ ID NO: 155584 - DNA, 20 bp, Artificial Sequence
  Description of Artificial Sequence: Synthetic oligonucleotide
  Target: LAMA2; (+) strand; PAM type: NRG; PAM sequence: TGG
gtcagtctgcccctactggg

SEQ ID NO: 155585 - DNA, 20 bp, Artificial Sequence
  Description of Artificial Sequence: Synthetic oligonucleotide
  Target: LAMA2; (+) strand; PAM type: NRG; PAM sequence: CAG
ccctactgggtggtgcctca

SEQ ID NO: 155586 - DNA, 20 bp, Artificial Sequence
  Description of Artificial Sequence: Synthetic oligonucleotide
  Target: LAMA2; (+) strand; PAM type: NRG; PAM sequence: TAG
actgggtggtgcctcacagt

SEQ ID NO: 155587 - DNA, 20 bp, Artificial Sequence
  Description of Artificial Sequence: Synthetic oligonucleotide
  Target: LAMA2; (+) strand; PAM type: NRG; PAM sequence: AGG
ctgggtggtgcctcacagtt

SEQ ID NO: 155588 - DNA, 20 bp, Artificial Sequence
  Description of Artificial Sequence: Synthetic oligonucleotide
  Target: LAMA2; (+) strand; PAM type: NRG; PAM sequence: CAG
tgcctcacagttaggctatt

SEQ ID NO: 155589 - DNA, 20 bp, Artificial Sequence
  Description of Artificial Sequence: Synthetic oligonucleotide
  Target: LAMA2; (+) strand; PAM type: NRG; PAM sequence: AGG
gcctcacagttaggctattc

SEQ ID NO: 155590 - DNA, 20 bp, Artificial Sequence
  Description of Artificial Sequence: Synthetic oligonucleotide
  Target: LAMA2; (+) strand; PAM type: NRG; PAM sequence: GGG
cctcacagttaggctattca

SEQ ID NO: 155591 - DNA, 20 bp, Artificial Sequence
  Description of Artificial Sequence: Synthetic oligonucleotide
  Target: LAMA2; (+) strand; PAM type: NRG; PAM sequence: CAG
cagttaggctattcagggct

SEQ ID NO: 155592 - DNA, 20 bp, Artificial Sequence
  Description of Artificial Sequence: Synthetic oligonucleotide
  Target: LAMA2; (+) strand; PAM type: NRG; PAM sequence: AGG
agttaggctattcagggctc

SEQ ID NO: 155593 - DNA, 20 bp, Artificial Sequence
  Description of Artificial Sequence: Synthetic oligonucleotide
  Target: LAMA2; (+) strand; PAM type: NRG; PAM sequence: GGG
gttaggctattcagggctca

SEQ ID NO: 155594 - DNA, 20 bp, Artificial Sequence
  Description of Artificial Sequence: Synthetic oligonucleotide
  Target: LAMA2; (+) strand; PAM type: NRG; PAM sequence: GAG
cagggctcagggatccactt

SEQ ID NO: 155595 - DNA, 20 bp, Artificial Sequence
  Description of Artificial Sequence: Synthetic oligonucleotide
  Target: LAMA2; (+) strand; PAM type: NRG; PAM sequence: AGG
agggctcagggatccacttg

SEQ ID NO: 155596 - DNA, 20 bp, Artificial Sequence
  Description of Artificial Sequence: Synthetic oligonucleotide
  Target: LAMA2; (+) strand; PAM type: NRG; PAM sequence: GAG
ggctcagggatccacttgag

SEQ ID NO: 155597 - DNA, 20 bp, Artificial Sequence
  Description of Artificial Sequence: Synthetic oligonucleotide
  Target: LAMA2; (+) strand; PAM type: NRG; PAM sequence: AGG
gctcagggatccacttgagg

SEQ ID NO: 155598 - DNA, 20 bp, Artificial Sequence
  Description of Artificial Sequence: Synthetic oligonucleotide
  Target: LAMA2; (+) strand; PAM type: NRG; PAM sequence: CAG
cagggatccacttgaggagg

SEQ ID NO: 155599 - DNA, 20 bp, Artificial Sequence
  Description of Artificial Sequence: Synthetic oligonucleotide
  Target: LAMA2; (+) strand; PAM type: NRG; PAM sequence: CAG
ggaggcagtctgttcattct

SEQ ID NO: 155600 - DNA, 20 bp, Artificial Sequence
  Description of Artificial Sequence: Synthetic oligonucleotide
  Target: LAMA2; (+) strand; PAM type: NRG; PAM sequence: TGG
tcagatctcaaactccatgc

SEQ ID NO: 155601 - DNA, 20 bp, Artificial Sequence
  Description of Artificial Sequence: Synthetic oligonucleotide
  Target: LAMA2; (+) strand; PAM type: NRG; PAM sequence: GGG
cagatctcaaactccatgct

SEQ ID NO: 155602 - DNA, 20 bp, Artificial Sequence
  Description of Artificial Sequence: Synthetic oligonucleotide
  Target: LAMA2; (+) strand; PAM type: NRG; PAM sequence: GAG
gatctcaaactccatgctgg

SEQ ID NO: 155603 - DNA, 20 bp, Artificial Sequence
  Description of Artificial Sequence: Synthetic oligonucleotide
  Target: LAMA2; (+) strand; PAM type: NRG; PAM sequence: AAG
gagaaccactactctcttca

SEQ ID NO: 155604 - DNA, 20 bp, Artificial Sequence
  Description of Artificial Sequence: Synthetic oligonucleotide
  Target: LAMA2; (+) strand; PAM type: NRG; PAM sequence: CAG
actactctcttcaaagctgt

SEQ ID NO: 155605 - DNA, 20 bp, Artificial Sequence
  Description of Artificial Sequence: Synthetic oligonucleotide
  Target: LAMA2; (+) strand; PAM type: NRG; PAM sequence: CAG
ctctcttcaaagctgtcaga

SEQ ID NO: 155606 - DNA, 20 bp, Artificial Sequence
  Description of Artificial Sequence: Synthetic oligonucleotide
  Target: LAMA2; (+) strand; PAM type: NRG; PAM sequence: AGG
tctcttcaaagctgtcagac

SEQ ID NO: 155607 - DNA, 20 bp, Artificial Sequence
  Description of Artificial Sequence: Synthetic oligonucleotide
  Target: LAMA2; (+) strand; PAM type: NRG; PAM sequence: GGG
ctcttcaaagctgtcagaca

SEQ ID NO: 155608 - DNA, 20 bp, Artificial Sequence
  Description of Artificial Sequence: Synthetic oligonucleotide
  Target: LAMA2; (+) strand; PAM type: NRG; PAM sequence: AAG
gctgtcagacagggacattt

SEQ ID NO: 155609 - DNA, 20 bp, Artificial Sequence
  Description of Artificial Sequence: Synthetic oligonucleotide
  Target: LAMA2; (+) strand; PAM type: NRG; PAM sequence: CAG
gacagggacatttaagtctg

SEQ ID NO: 155610 - DNA, 20 bp, Artificial Sequence
  Description of Artificial Sequence: Synthetic oligonucleotide
  Target: LAMA2; (+) strand; PAM type: NRG; PAM sequence: GAG
cagggacatttaagtctgca

SEQ ID NO: 155611 - DNA, 20 bp, Artificial Sequence
  Description of Artificial Sequence: Synthetic oligonucleotide
  Target: LAMA2; (+) strand; PAM type: NRG; PAM sequence: AGG
agggacatttaagtctgcag

SEQ ID NO: 155612 - DNA, 20 bp, Artificial Sequence
  Description of Artificial Sequence: Synthetic oligonucleotide
  Target: LAMA2; (+) strand; PAM type: NRG; PAM sequence: CGG
ggtttctgctgtcttttgtt

SEQ ID NO: 155613 - DNA, 20 bp, Artificial Sequence
  Description of Artificial Sequence: Synthetic oligonucleotide
  Target: LAMA2; (+) strand; PAM type: NRG; PAM sequence: CAG
gttcggctatgtcctactcc

SEQ ID NO: 155614 - DNA, 20 bp, Artificial Sequence
  Description of Artificial Sequence: Synthetic oligonucleotide
  Target: LAMA2; (+) strand; PAM type: NRG; PAM sequence: GAG
tcggctatgtcctactccca

SEQ ID NO: 155615 - DNA, 20 bp, Artificial Sequence
  Description of Artificial Sequence: Synthetic oligonucleotide
  Target: LAMA2; (+) strand; PAM type: NRG; PAM sequence: AGG
cggctatgtcctactcccag

SEQ ID NO: 155616 - DNA, 20 bp, Artificial Sequence
  Description of Artificial Sequence: Synthetic oligonucleotide
  Target: LAMA2; (+) strand; PAM type: NRG; PAM sequence: TGG
ctatgtcctactcccagagg

SEQ ID NO: 155617 - DNA, 20 bp, Artificial Sequence
  Description of Artificial Sequence: Synthetic oligonucleotide
  Target: LAMA2; (+) strand; PAM type: NRG; PAM sequence: GAG
atgtcctactcccagaggtg

SEQ ID NO: 155618 - DNA, 20 bp, Artificial Sequence
  Description of Artificial Sequence: Synthetic oligonucleotide
  Target: LAMA2; (+) strand; PAM type: NRG; PAM sequence: CAG
actcccagaggtggagtcta

SEQ ID NO: 155619 - DNA, 20 bp, Artificial Sequence
  Description of Artificial Sequence: Synthetic oligonucleotide
  Target: LAMA2; (+) strand; PAM type: NRG; PAM sequence: GAG
tcccagaggtggagtctaca

SEQ ID NO: 155620 - DNA, 20 bp, Artificial Sequence
  Description of Artificial Sequence: Synthetic oligonucleotide
  Target: LAMA2; (+) strand; PAM type: NRG; PAM sequence: AGG
cccagaggtggagtctacag

SEQ ID NO: 155621 - DNA, 20 bp, Artificial Sequence
  Description of Artificial Sequence: Synthetic oligonucleotide
  Target: LAMA2; (+) strand; PAM type: NRG; PAM sequence: CAG
agaggtggagtctacagagg

SEQ ID NO: 155622 - DNA, 20 bp, Artificial Sequence
  Description of Artificial Sequence: Synthetic oligonucleotide
  Target: LAMA2; (+) strand; PAM type: NRG; PAM sequence: AGG
gaggtggagtctacagaggc

SEQ ID NO: 155623 - DNA, 20 bp, Artificial Sequence
  Description of Artificial Sequence: Synthetic oligonucleotide
  Target: LAMA2; (+) strand; PAM type: NRG; PAM sequence: CAG
gtggagtctacagaggcagg

SEQ ID NO: 155624 - DNA, 20 bp, Artificial Sequence
  Description of Artificial Sequence: Synthetic oligonucleotide
  Target: LAMA2; (+) strand; PAM type: NRG; PAM sequence: AGG
tggagtctacagaggcaggc

SEQ ID NO: 155625 - DNA, 20 bp, Artificial Sequence
  Description of Artificial Sequence: Synthetic oligonucleotide
  Target: LAMA2; (+) strand; PAM type: NRG; PAM sequence: GAG
agaggcaggcaggcatcctt

SEQ ID NO: 155626 - DNA, 20 bp, Artificial Sequence
  Description of Artificial Sequence: Synthetic oligonucleotide
  Target: LAMA2; (+) strand; PAM type: NRG; PAM sequence: CAG
aggcaggcatccttgagctg

SEQ ID NO: 155627 - DNA, 20 bp, Artificial Sequence
  Description of Artificial Sequence: Synthetic oligonucleotide
  Target: LAMA2; (+) strand; PAM type: NRG; PAM sequence: TGG
caggcatccttgagctgcag

SEQ ID NO: 155628 - DNA, 20 bp, Artificial Sequence
  Description of Artificial Sequence: Synthetic oligonucleotide
  Target: LAMA2; (+) strand; PAM type: NRG; PAM sequence: GGG
aggcatccttgagctgcagt

SEQ ID NO: 155629 - DNA, 20 bp, Artificial Sequence
  Description of Artificial Sequence: Synthetic oligonucleotide
  Target: LAMA2; (+) strand; PAM type: NRG; PAM sequence: CAG
gagctgcagtgggcttcacc

SEQ ID NO: 155630 - DNA, 20 bp, Artificial Sequence
  Description of Artificial Sequence: Synthetic oligonucleotide
  Target: LAMA2; (+) strand; PAM type: NRG; PAM sequence: AAG
cagtgggcttcacccagttc

SEQ ID NO: 155631 - DNA, 20 bp, Artificial Sequence
  Description of Artificial Sequence: Synthetic oligonucleotide
  Target: LAMA2; (+) strand; PAM type: NRG; PAM sequence: CAG
ttcacccagttcaagcttcc

SEQ ID NO: 155632 - DNA, 20 bp, Artificial Sequence
  Description of Artificial Sequence: Synthetic oligonucleotide
  Target: LAMA2; (+) strand; PAM type: NRG; PAM sequence: CAG
cagttcaagcttcccagcca

SEQ ID NO: 155633 - DNA, 20 bp, Artificial Sequence
  Description of Artificial Sequence: Synthetic oligonucleotide
  Target: LAMA2; (+) strand; PAM type: NRG; PAM sequence: AAG
cacagtttgtttgcctactc

SEQ ID NO: 155634 - DNA, 20 bp, Artificial Sequence
  Description of Artificial Sequence: Synthetic oligonucleotide
  Target: LAMA2; (+) strand; PAM type: NRG; PAM sequence: CGG
ttgtttgcctactcaagcct

SEQ ID NO: 155635 - DNA, 20 bp, Artificial Sequence
  Description of Artificial Sequence: Synthetic oligonucleotide
  Target: LAMA2; (+) strand; PAM type: NRG; PAM sequence: TGG
gcctactcaagcctcggcaa

SEQ ID NO: 155636 - DNA, 20 bp, Artificial Sequence
  Description of Artificial Sequence: Synthetic oligonucleotide
  Target: LAMA2; (+) strand; PAM type: NRG; PAM sequence: CGG
tactcaagcctcggcaatgg

SEQ ID NO: 155637 - DNA, 20 bp, Artificial Sequence
  Description of Artificial Sequence: Synthetic oligonucleotide
  Target: LAMA2; (+) strand; PAM type: NRG; PAM sequence: GGG
actcaagcctcggcaatggc

SEQ ID NO: 155638 - DNA, 20 bp, Artificial Sequence
  Description of Artificial Sequence: Synthetic oligonucleotide
  Target: LAMA2; (+) strand; PAM type: NRG; PAM sequence: CAG
ccaaccttgctgccaccttg

SEQ ID NO: 155639 - DNA, 20 bp, Artificial Sequence
  Description of Artificial Sequence: Synthetic oligonucleotide
  Target: LAMA2; (+) strand; PAM type: NRG; PAM sequence: CAG
cttgctgccaccttgcagtt

SEQ ID NO: 155640 - DNA, 20 bp, Artificial Sequence
  Description of Artificial Sequence: Synthetic oligonucleotide
  Target: LAMA2; (+) strand; PAM type: NRG; PAM sequence: CAG
gccaccttgcagttcagtct

SEQ ID NO: 155641 - DNA, 20 bp, Artificial Sequence
  Description of Artificial Sequence: Synthetic oligonucleotide
  Target: LAMA2; (+) strand; PAM type: NRG; PAM sequence: TGG
gcagttcagtctcagactgc

SEQ ID NO: 155642 - DNA, 20 bp, Artificial Sequence
  Description of Artificial Sequence: Synthetic oligonucleotide
  Target: LAMA2; (+) strand; PAM type: NRG; PAM sequence: GGG
cagttcagtctcagactgct

SEQ ID NO: 155643 - DNA, 20 bp, Artificial Sequence
  Description of Artificial Sequence: Synthetic oligonucleotide
  Target: LAMA2; (+) strand; PAM type: NRG; PAM sequence: TAG
tcagtctcagactgctgggc

SEQ ID NO: 155644 - DNA, 20 bp, Artificial Sequence
  Description of Artificial Sequence: Synthetic oligonucleotide
  Target: LAMA2; (+) strand; PAM type: NRG; PAM sequence: AAG
ctgctgggctagcaatgaac

SEQ ID NO: 155645 - DNA, 20 bp, Artificial Sequence
  Description of Artificial Sequence: Synthetic oligonucleotide
  Target: LAMA2; (+) strand; PAM type: NRG; PAM sequence: AGG
tgctgggctagcaatgaaca

SEQ ID NO: 155646 - DNA, 20 bp, Artificial Sequence
  Description of Artificial Sequence: Synthetic oligonucleotide
  Target: LAMA2; (+) strand; PAM type: NRG; PAM sequence: TAG
tagcaatgaacaaggctccg

SEQ ID NO: 155647 - DNA, 20 bp, Artificial Sequence
  Description of Artificial Sequence: Synthetic oligonucleotide
  Target: LAMA2; (+) strand; PAM type: NRG; PAM sequence: AGG
agcaatgaacaaggctccgt

SEQ ID NO: 155648 - DNA, 20 bp, Artificial Sequence
  Description of Artificial Sequence: Synthetic oligonucleotide
  Target: LAMA2; (+) strand; PAM type: NRG; PAM sequence: TGG
tgaacaaggctccgtaggca

SEQ ID NO: 155649 - DNA, 20 bp, Artificial Sequence
  Description of Artificial Sequence: Synthetic oligonucleotide
  Target: LAMA2; (+) strand; PAM type: NRG; PAM sequence: GGG
gaacaaggctccgtaggcat

SEQ ID NO: 155650 - DNA, 20 bp, Artificial Sequence
  Description of Artificial Sequence: Synthetic oligonucleotide
  Target: LAMA2; (+) strand; PAM type: NRG; PAM sequence: GAG
ccgtaggcatgggaccctcc

SEQ ID NO: 155651 - DNA, 20 bp, Artificial Sequence
  Description of Artificial Sequence: Synthetic oligonucleotide
  Target: LAMA2; (+) strand; PAM type: NRG; PAM sequence: CAG
aggcatgggaccctccgagc

SEQ ID NO: 155652 - DNA, 20 bp, Artificial Sequence
  Description of Artificial Sequence: Synthetic oligonucleotide
  Target: LAMA2; (+) strand; PAM type: NRG; PAM sequence: AGG
ggcatgggaccctccgagcc

SEQ ID NO: 155653 - DNA, 20 bp, Artificial Sequence
  Description of Artificial Sequence: Synthetic oligonucleotide
  Target: LAMA2; (+) strand; PAM type: NRG; PAM sequence: TGG
gggaccctccgagccaggtg

SEQ ID NO: 155654 - DNA, 20 bp, Artificial Sequence
  Description of Artificial Sequence: Synthetic oligonucleotide
  Target: LAMA2; (+) strand; PAM type: NRG; PAM sequence: GGG
ggaccctccgagccaggtgt

SEQ ID NO: 155655 - DNA, 20 bp, Artificial Sequence
  Description of Artificial Sequence: Synthetic oligonucleotide
  Target: LAMA2; (+) strand; PAM type: NRG; PAM sequence: TGG
aggtgtgggatataatctcc

SEQ ID NO: 155656 - DNA, 20 bp, Artificial Sequence
  Description of Artificial Sequence: Synthetic oligonucleotide
  Target: LAMA2; (+) strand; PAM type: NRG; PAM sequence: AAG
ctcctggtgtgccgtttgct

SEQ ID NO: 155657 - DNA, 20 bp, Artificial Sequence
  Description of Artificial Sequence: Synthetic oligonucleotide
  Target: LAMA2; (+) strand; PAM type: NRG; PAM sequence: TGG
gtgccgtttgctaagaccat

SEQ ID NO: 155658 - DNA, 20 bp, Artificial Sequence
  Description of Artificial Sequence: Synthetic oligonucleotide
  Target: LAMA2; (+) strand; PAM type: NRG; PAM sequence: AAG
gtttgctaagaccattggaa

SEQ ID NO: 155659 - DNA, 20 bp, Artificial Sequence
  Description of Artificial Sequence: Synthetic oligonucleotide
  Target: LAMA2; (+) strand; PAM type: NRG; PAM sequence: TGG
ctaagaccattggaaaagcg

SEQ ID NO: 155660 - DNA, 20 bp, Artificial Sequence
  Description of Artificial Sequence: Synthetic oligonucleotide
  Target: LAMA2; (+) strand; PAM type: NRG; PAM sequence: TAG
ccattggaaaagcgtggtat

SEQ ID NO: 155661 - DNA, 20 bp, Artificial Sequence
  Description of Artificial Sequence: Synthetic oligonucleotide
  Target: LAMA2; (+) strand; PAM type: NRG; PAM sequence: AGG
cattggaaaagcgtggtatt

SEQ ID NO: 155662 - DNA, 20 bp, Artificial Sequence
  Description of Artificial Sequence: Synthetic oligonucleotide
  Target: LAMA2; (+) strand; PAM type: NRG; PAM sequence: GGG
attggaaaagcgtggtatta

SEQ ID NO: 155663 - DNA, 20 bp, Artificial Sequence
  Description of Artificial Sequence: Synthetic oligonucleotide
  Target: LAMA2; (+) strand; PAM type: NRG; PAM sequence: TGG
ggaaaagcgtggtattaggg

SEQ ID NO: 155664 - DNA, 20 bp, Artificial Sequence
  Description of Artificial Sequence: Synthetic oligonucleotide
  Target: LAMA2; (+) strand; PAM type: NRG; PAM sequence: GGG
gaaaagcgtggtattagggt

SEQ ID NO: 155665 - DNA, 20 bp, Artificial Sequence
  Description of Artificial Sequence: Synthetic oligonucleotide
  Target: LAMA2; (+) strand; PAM type: NRG; PAM sequence: GAG
aaagcgtggtattagggtgg

SEQ ID NO: 155666 - DNA, 20 bp, Artificial Sequence
  Description of Artificial Sequence: Synthetic oligonucleotide
  Target: LAMA2; (+) strand; PAM type: NRG; PAM sequence: CAG
gtgggagtgacccgattttc

SEQ ID NO: 155667 - DNA, 20 bp, Artificial Sequence
  Description of Artificial Sequence: Synthetic oligonucleotide
  Target: LAMA2; (+) strand; PAM type: NRG; PAM sequence: AGG
tgggagtgacccgattttcc

SEQ ID NO: 155668 - DNA, 20 bp, Artificial Sequence
  Description of Artificial Sequence: Synthetic oligonucleotide
  Target: LAMA2; (+) strand; PAM type: NRG; PAM sequence: CAG
tttccaggtgccgtctgtca

SEQ ID NO: 155669 - DNA, 20 bp, Artificial Sequence
  Description of Artificial Sequence: Synthetic oligonucleotide
  Target: LAMA2; (+) strand; PAM type: NRG; PAM sequence: TGG
ccgtctgtcacagcttccct

SEQ ID NO: 155670 - DNA, 20 bp, Artificial Sequence
  Description of Artificial Sequence: Synthetic oligonucleotide
  Target: LAMA2; (+) strand; PAM type: NRG; PAM sequence: TAG
ctgtcacagcttcccttggc

SEQ ID NO: 155671 - DNA, 20 bp, Artificial Sequence
  Description of Artificial Sequence: Synthetic oligonucleotide
  Target: LAMA2; (+) strand; PAM type: NRG; PAM sequence: AGG
tgtcacagcttcccttggct

SEQ ID NO: 155672 - DNA, 20 bp, Artificial Sequence
  Description of Artificial Sequence: Synthetic oligonucleotide
  Target: LAMA2; (+) strand; PAM type: NRG; PAM sequence: AAG
acagcttcccttggctagga

SEQ ID NO: 155673 - DNA, 20 bp, Artificial Sequence
  Description of Artificial Sequence: Synthetic oligonucleotide
  Target: LAMA2; (+) strand; PAM type: NRG; PAM sequence: AGG
cagcttcccttggctaggaa

SEQ ID NO: 155674 - DNA, 20 bp, Artificial Sequence
  Description of Artificial Sequence: Synthetic oligonucleotide
  Target: LAMA2; (+) strand; PAM type: NRG; PAM sequence: GGG
agcttcccttggctaggaaa

SEQ ID NO: 155675 - DNA, 20 bp, Artificial Sequence
  Description of Artificial Sequence: Synthetic oligonucleotide
  Target: LAMA2; (+) strand; PAM type: NRG; PAM sequence: CGG
tcctgaccccttgtgcttcc

SEQ ID NO: 155676 - DNA, 20 bp, Artificial Sequence
  Description of Artificial Sequence: Synthetic oligonucleotide
  Target: LAMA2; (+) strand; PAM type: NRG; PAM sequence: GGG
cctgaccccttgtgcttccc

SEQ ID NO: 155677 - DNA, 20 bp, Artificial Sequence
  Description of Artificial Sequence: Synthetic oligonucleotide
  Target: LAMA2; (+) strand; PAM type: NRG; PAM sequence: GAG
accccttgtgcttcccgggt

SEQ ID NO: 155678 - DNA, 20 bp, Artificial Sequence
  Description of Artificial Sequence: Synthetic oligonucleotide
  Target: LAMA2; (+) strand; PAM type: NRG; PAM sequence: AGG
ccccttgtgcttcccgggtg

SEQ ID NO: 155679 - DNA, 20 bp, Artificial Sequence
  Description of Artificial Sequence: Synthetic oligonucleotide
  Target: LAMA2; (+) strand; PAM type: NRG; PAM sequence: TGG
ggtgatgcctcgccctgctt

SEQ ID NO: 155680 - DNA, 20 bp, Artificial Sequence
  Description of Artificial Sequence: Synthetic oligonucleotide
  Target: LAMA2; (+) strand; PAM type: NRG; PAM sequence: TGG
ctgctttggctgacacttga

SEQ ID NO: 155681 - DNA, 20 bp, Artificial Sequence
  Description of Artificial Sequence: Synthetic oligonucleotide
  Target: LAMA2; (+) strand; PAM type: NRG; PAM sequence: GGG
tgctttggctgacacttgat

SEQ ID NO: 155682 - DNA, 20 bp, Artificial Sequence
  Description of Artificial Sequence: Synthetic oligonucleotide
  Target: LAMA2; (+) strand; PAM type: NRG; PAM sequence: CAG
cactgtcctgcacccactgt

SEQ ID NO: 155683 - DNA, 20 bp, Artificial Sequence
  Description of Artificial Sequence: Synthetic oligonucleotide
  Target: LAMA2; (+) strand; PAM type: NRG; PAM sequence: AAG
tcctgcacccactgtcagac

SEQ ID NO: 155684 - DNA, 20 bp, Artificial Sequence
  Description of Artificial Sequence: Synthetic oligonucleotide
  Target: LAMA2; (+) strand; PAM type: NRG; PAM sequence: CAG
acccactgtcagacaagccc

SEQ ID NO: 155685 - DNA, 20 bp, Artificial Sequence
  Description of Artificial Sequence: Synthetic oligonucleotide
  Target: LAMA2; (+) strand; PAM type: NRG; PAM sequence: GAG
actgtcagacaagccccagt

SEQ ID NO: 155686 - DNA, 20 bp, Artificial Sequence
  Description of Artificial Sequence: Synthetic oligonucleotide
  Target: LAMA2; (+) strand; PAM type: NRG; PAM sequence: AGG
ctgtcagacaagccccagtg

SEQ ID NO: 155687 - DNA, 20 bp, Artificial Sequence
  Description of Artificial Sequence: Synthetic oligonucleotide
  Target: LAMA2; (+) strand; PAM type: NRG; PAM sequence: TGG
aagccccagtgaggtgaacc

SEQ ID NO: 155688 - DNA, 20 bp, Artificial Sequence
  Description of Artificial Sequence: Synthetic oligonucleotide
  Target: LAMA2; (+) strand; PAM type: NRG; PAM sequence: TGG
ggtgaacctggtacctcaat

SEQ ID NO: 155689 - DNA, 20 bp, Artificial Sequence
  Description of Artificial Sequence: Synthetic oligonucleotide
  Target: LAMA2; (+) strand; PAM type: NRG; PAM sequence: TGG
tggtacctcaattggaaatg

SEQ ID NO: 155690 - DNA, 20 bp, Artificial Sequence
  Description of Artificial Sequence: Synthetic oligonucleotide
  Target: LAMA2; (+) strand; PAM type: NRG; PAM sequence: AAG
tacctcaattggaaatgtgg

SEQ ID NO: 155691 - DNA, 20 bp, Artificial Sequence
  Description of Artificial Sequence: Synthetic oligonucleotide
  Target: LAMA2; (+) strand; PAM type: NRG; PAM sequence: TGG
atattctgtgtcgctcatgc

SEQ ID NO: 155692 - DNA, 20 bp, Artificial Sequence
  Description of Artificial Sequence: Synthetic oligonucleotide
  Target: LAMA2; (+) strand; PAM type: NRG; PAM sequence: GGG
tattctgtgtcgctcatgct

SEQ ID NO: 155693 - DNA, 20 bp, Artificial Sequence
  Description of Artificial Sequence: Synthetic oligonucleotide
  Target: LAMA2; (+) strand; PAM type: NRG; PAM sequence: GAG
ttctgtgtcgctcatgctgg

SEQ ID NO: 155694 - DNA, 20 bp, Artificial Sequence
  Description of Artificial Sequence: Synthetic oligonucleotide
  Target: LAMA2; (+) strand; PAM type: NRG; PAM sequence: TAG
gtcgctcatgctgggagctg

SEQ ID NO: 155695 - DNA, 20 bp, Artificial Sequence
  Description of Artificial Sequence: Synthetic oligonucleotide
  Target: LAMA2; (+) strand; PAM type: NRG; PAM sequence: TGG
tcatgctgggagctgtagac

SEQ ID NO: 155696 - DNA, 20 bp, Artificial Sequence
  Description of Artificial Sequence: Synthetic oligonucleotide
  Target: LAMA2; (+) strand; PAM type: NRG; PAM sequence: GAG
atgctgggagctgtagactg

SEQ ID NO: 155697 - DNA, 20 bp, Artificial Sequence
  Description of Artificial Sequence: Synthetic oligonucleotide
  Target: LAMA2; (+) strand; PAM type: NRG; PAM sequence: TGG
tgttcctattccaattatac

SEQ ID NO: 155698 - DNA, 20 bp, Artificial Sequence
  Description of Artificial Sequence: Synthetic oligonucleotide
  Target: LAMA2; (+) strand; PAM type: NRG; PAM sequence: AAG
aattatactggtttctaaaa

SEQ ID NO: 155699 - DNA, 20 bp, Artificial Sequence
  Description of Artificial Sequence: Synthetic oligonucleotide
  Target: LAMA2; (+) strand; PAM type: NRG; PAM sequence: GAG
aaagattgtaatatattgtt

SEQ ID NO: 155700 - DNA, 20 bp, Artificial Sequence
  Description of Artificial Sequence: Synthetic oligonucleotide
  Target: LAMA2; (+) strand; PAM type: NRG; PAM sequence: GAG
agattgtaatatattgttga

SEQ ID NO: 155701 - DNA, 20 bp, Artificial Sequence
  Description of Artificial Sequence: Synthetic oligonucleotide
  Target: LAMA2; (+) strand; PAM type: NRG; PAM sequence: AAG
gtaatatattgttgagagtg

SEQ ID NO: 155702 - DNA, 20 bp, Artificial Sequence
  Description of Artificial Sequence: Synthetic oligonucleotide
  Target: LAMA2; (+) strand; PAM type: NRG; PAM sequence: AGG
taatatattgttgagagtga

SEQ ID NO: 155703 - DNA, 20 bp, Artificial Sequence
  Description of Artificial Sequence: Synthetic oligonucleotide
  Target: LAMA2; (+) strand; PAM type: NRG; PAM sequence: GGG
aatatattgttgagagtgaa

SEQ ID NO: 155704 - DNA, 20 bp, Artificial Sequence
  Description of Artificial Sequence: Synthetic oligonucleotide
  Target: LAMA2; (+) strand; PAM type: NRG; PAM sequence: GAG
tatattgttgagagtgaagg

SEQ ID NO: 155705 - DNA, 20 bp, Artificial Sequence
  Description of Artificial Sequence: Synthetic oligonucleotide
  Target: LAMA2; (+) strand; PAM type: NRG; PAM sequence: TAG
tttacattttaataatatat

SEQ ID NO: 155706 - DNA, 20 bp, Artificial Sequence
  Description of Artificial Sequence: Synthetic oligonucleotide
  Target: LAMA2; (+) strand; PAM type: NRG; PAM sequence: CAG
cataacacatgtgtataata

SEQ ID NO: 155707 - DNA, 20 bp, Artificial Sequence
  Description of Artificial Sequence: Synthetic oligonucleotide
  Target: LAMA2; (+) strand; PAM type: NRG; PAM sequence: TAG
acacatgtgtataatacagc

SEQ ID NO: 155708 - DNA, 20 bp, Artificial Sequence
  Description of Artificial Sequence: Synthetic oligonucleotide
  Target: LAMA2; (+) strand; PAM type: NRG; PAM sequence: AAG
atgtgtataatacagctaga

SEQ ID NO: 155709 - DNA, 20 bp, Artificial Sequence
  Description of Artificial Sequence: Synthetic oligonucleotide
  Target: LAMA2; (+) strand; PAM type: NRG; PAM sequence: GAG
gtgtataatacagctagaaa

SEQ ID NO: 155710 - DNA, 20 bp, Artificial Sequence
  Description of Artificial Sequence: Synthetic oligonucleotide
  Target: LAMA2; (+) strand; PAM type: NRG; PAM sequence: GAG
gtataatacagctagaaaga

SEQ ID NO: 155711 - DNA, 20 bp, Artificial Sequence
  Description of Artificial Sequence: Synthetic oligonucleotide
  Target: LAMA2; (+) strand; PAM type: NRG; PAM sequence: GAG
ataatacagctagaaagaga

SEQ ID NO: 155712 - DNA, 20 bp, Artificial Sequence
  Description of Artificial Sequence: Synthetic oligonucleotide
  Target: LAMA2; (+) strand; PAM type: NRG; PAM sequence: AAG
gagagagcatatataccctg

SEQ ID NO: 155713 - DNA, 20 bp, Artificial Sequence
  Description of Artificial Sequence: Synthetic oligonucleotide
  Target: LAMA2; (+) strand; PAM type: NRG; PAM sequence: AGG
agagagcatatataccctga

SEQ ID NO: 155714 - DNA, 20 bp, Artificial Sequence
  Description of Artificial Sequence: Synthetic oligonucleotide
  Target: LAMA2; (+) strand; PAM type: NRG; PAM sequence: AAG
tattgtaaaaccaaactcta

SEQ ID NO: 155715 - DNA, 20 bp, Artificial Sequence
  Description of Artificial Sequence: Synthetic oligonucleotide
  Target: LAMA2; (+) strand; PAM type: NRG; PAM sequence: TAG
aactctaaagactcctgttc

SEQ ID NO: 155716 - DNA, 20 bp, Artificial Sequence
  Description of Artificial Sequence: Synthetic oligonucleotide
  Target: LAMA2; (+) strand; PAM type: NRG; PAM sequence: AGG
actctaaagactcctgttct

SEQ ID NO: 155717 - DNA, 20 bp, Artificial Sequence
  Description of Artificial Sequence: Synthetic oligonucleotide
  Target: LAMA2; (+) strand; PAM type: NRG; PAM sequence: TAG
tcctgttctaggtaattgat

SEQ ID NO: 155718 - DNA, 20 bp, Artificial Sequence
  Description of Artificial Sequence: Synthetic oligonucleotide
  Target: LAMA2; (+) strand; PAM type: NRG; PAM sequence: CAG
ttctaggtaattgattagtc

SEQ ID NO: 155719 - DNA, 20 bp, Artificial Sequence
  Description of Artificial Sequence: Synthetic oligonucleotide
  Target: LAMA2; (+) strand; PAM type: NRG; PAM sequence: TAG
attgattagtccagtaaatg

SEQ ID NO: 155720 - DNA, 20 bp, Artificial Sequence
  Description of Artificial Sequence: Synthetic oligonucleotide
  Target: LAMA2; (+) strand; PAM type: NRG; PAM sequence: AGG
ttgattagtccagtaaatgt

SEQ ID NO: 155721 - DNA, 20 bp, Artificial Sequence
  Description of Artificial Sequence: Synthetic oligonucleotide
  Target: LAMA2; (+) strand; PAM type: NRG; PAM sequence: AAG
agtccagtaaatgtaggcat

SEQ ID NO: 155722 - DNA, 20 bp, Artificial Sequence
  Description of Artificial Sequence: Synthetic oligonucleotide
  Target: LAMA2; (+) strand; PAM type: NRG; PAM sequence: TAG
cataagaaaaatgtatgaaa

SEQ ID NO: 155723 - DNA, 20 bp, Artificial Sequence
  Description of Artificial Sequence: Synthetic oligonucleotide
  Target: LAMA2; (+) strand; PAM type: NRG; PAM sequence: CAG
tgcacaataacacctttctc

SEQ ID NO: 155724 - DNA, 20 bp, Artificial Sequence
  Description of Artificial Sequence: Synthetic oligonucleotide
  Target: LAMA2; (+) strand; PAM type: NRG; PAM sequence: TGG
ataacacctttctccagctg

SEQ ID NO: 155725 - DNA, 20 bp, Artificial Sequence
  Description of Artificial Sequence: Synthetic oligonucleotide
  Target: LAMA2; (+) strand; PAM type: NRG; PAM sequence: TGG
tgtggctctaactgtcctga

SEQ ID NO: 155726 - DNA, 20 bp, Artificial Sequence
  Description of Artificial Sequence: Synthetic oligonucleotide
  Target: LAMA2; (+) strand; PAM type: NRG; PAM sequence: CAG
gatggattctttactgctct

SEQ ID NO: 155727 - DNA, 20 bp, Artificial Sequence
  Description of Artificial Sequence: Synthetic oligonucleotide
  Target: LAMA2; (+) strand; PAM type: NRG; PAM sequence: TGG
ctctcagctaatccattata

SEQ ID NO: 155728 - DNA, 20 bp, Artificial Sequence
  Description of Artificial Sequence: Synthetic oligonucleotide
  Target: LAMA2; (+) strand; PAM type: NRG; PAM sequence: TAG
gctaatccattatatggttt

SEQ ID NO: 155729 - DNA, 20 bp, Artificial Sequence
  Description of Artificial Sequence: Synthetic oligonucleotide
  Target: LAMA2; (+) strand; PAM type: NRG; PAM sequence: CAG
attatatggttttagacatc

SEQ ID NO: 155730 - DNA, 20 bp, Artificial Sequence
  Description of Artificial Sequence: Synthetic oligonucleotide
  Target: LAMA2; (+) strand; PAM type: NRG; PAM sequence: AGG
ttatatggttttagacatcc

SEQ ID NO: 155731 - DNA, 20 bp, Artificial Sequence
  Description of Artificial Sequence: Synthetic oligonucleotide
  Target: LAMA2; (+) strand; PAM type: NRG; PAM sequence: TAG
atggttttagacatccagga

SEQ ID NO: 155732 - DNA, 20 bp, Artificial Sequence
  Description of Artificial Sequence: Synthetic oligonucleotide
  Target: LAMA2; (+) strand; PAM type: NRG; PAM sequence: AAG
acatccaggatagacactga

SEQ ID NO: 155733 - DNA, 20 bp, Artificial Sequence
  Description of Artificial Sequence: Synthetic oligonucleotide
  Target: LAMA2; (+) strand; PAM type: NRG; PAM sequence: AGG
catccaggatagacactgaa

SEQ ID NO: 155734 - DNA, 20 bp, Artificial Sequence
  Description of Artificial Sequence: Synthetic oligonucleotide
  Target: LAMA2; (+) strand; PAM type: NRG; PAM sequence: AAG
gaaaggaataactattacaa

SEQ ID NO: 155735 - DNA, 20 bp, Artificial Sequence
  Description of Artificial Sequence: Synthetic oligonucleotide
  Target: LAMA2; (+) strand; PAM type: NRG; PAM sequence: AAG
actattacaaaagtaatttt

SEQ ID NO: 155736 - DNA, 20 bp, Artificial Sequence
  Description of Artificial Sequence: Synthetic oligonucleotide
  Target: LAMA2; (+) strand; PAM type: NRG; PAM sequence: GAG
tattacaaaagtaattttaa

SEQ ID NO: 155737 - DNA, 20 bp, Artificial Sequence
  Description of Artificial Sequence: Synthetic oligonucleotide
  Target: LAMA2; (+) strand; PAM type: NRG; PAM sequence: AGG
attacaaaagtaattttaag

SEQ ID NO: 155738 - DNA, 20 bp, Artificial Sequence
  Description of Artificial Sequence: Synthetic oligonucleotide
  Target: LAMA2; (+) strand; PAM type: NRG; PAM sequence: GAG
tacaaaagtaattttaagag

SEQ ID NO: 155739 - DNA, 20 bp, Artificial Sequence
  Description of Artificial Sequence: Synthetic oligonucleotide
  Target: LAMA2; (+) strand; PAM type: NRG; PAM sequence: TGG
catatacttgatgatttgat

SEQ ID NO: 155740 - DNA, 20 bp, Artificial Sequence
  Description of Artificial Sequence: Synthetic oligonucleotide
  Target: LAMA2; (+) strand; PAM type: NRG; PAM sequence: TGG
atacttgatgatttgattgg

SEQ ID NO: 155741 - DNA, 20 bp, Artificial Sequence
  Description of Artificial Sequence: Synthetic oligonucleotide
  Target: LAMA2; (+) strand; PAM type: NRG; PAM sequence: CAG
tttgattggtggtttgattc

SEQ ID NO: 155742 - DNA, 20 bp, Artificial Sequence
  Description of Artificial Sequence: Synthetic oligonucleotide
  Target: LAMA2; (+) strand; PAM type: NRG; PAM sequence: CAG
ttccagttatattaacttgc

SEQ ID NO: 155743 - DNA, 20 bp, Artificial Sequence
  Description of Artificial Sequence: Synthetic oligonucleotide
  Target: LAMA2; (+) strand; PAM type: NRG; PAM sequence: TAG
ttaacttgccagaaactttc

SEQ ID NO: 155744 - DNA, 20 bp, Artificial Sequence
  Description of Artificial Sequence: Synthetic oligonucleotide
  Target: LAMA2; (+) strand; PAM type: NRG; PAM sequence: CAG
gaaactttctagtttccaaa

SEQ ID NO: 155745 - DNA, 20 bp, Artificial Sequence
  Description of Artificial Sequence: Synthetic oligonucleotide
  Target: LAMA2; (+) strand; PAM type: NRG; PAM sequence: TAG
tccaaacagtgaatacaact

SEQ ID NO: 155746 - DNA, 20 bp, Artificial Sequence
  Description of Artificial Sequence: Synthetic oligonucleotide
  Target: LAMA2; (+) strand; PAM type: NRG; PAM sequence: AAG
aatacaacttagacctcatg

SEQ ID NO: 155747 - DNA, 20 bp, Artificial Sequence
  Description of Artificial Sequence: Synthetic oligonucleotide
  Target: LAMA2; (+) strand; PAM type: NRG; PAM sequence: TAG
acctcatgaagcttacattc

SEQ ID NO: 155748 - DNA, 20 bp, Artificial Sequence
  Description of Artificial Sequence: Synthetic oligonucleotide
  Target: LAMA2; (+) strand; PAM type: NRG; PAM sequence: TAG
catgaagcttacattctagt

SEQ ID NO: 155749 - DNA, 20 bp, Artificial Sequence
  Description of Artificial Sequence: Synthetic oligonucleotide
  Target: LAMA2; (+) strand; PAM type: NRG; PAM sequence: AAG
gaagcttacattctagttag

SEQ ID NO: 155750 - DNA, 20 bp, Artificial Sequence
  Description of Artificial Sequence: Synthetic oligonucleotide
  Target: LAMA2; (+) strand; PAM type: NRG; PAM sequence: GAG
agcttacattctagttagaa

SEQ ID NO: 155751 - DNA, 20 bp, Artificial Sequence
  Description of Artificial Sequence: Synthetic oligonucleotide
  Target: LAMA2; (+) strand; PAM type: NRG; PAM sequence: GAG
cttacattctagttagaaga

SEQ ID NO: 155752 - DNA, 20 bp, Artificial Sequence
  Description of Artificial Sequence: Synthetic oligonucleotide
  Target: LAMA2; (+) strand; PAM type: NRG; PAM sequence: TAG
ttagaagagagaatattaat

SEQ ID NO: 155753 - DNA, 20 bp, Artificial Sequence
  Description of Artificial Sequence: Synthetic oligonucleotide
  Target: LAMA2; (+) strand; PAM type: NRG; PAM sequence: AAG
agagagaatattaattagat

SEQ ID NO: 155754 - DNA, 20 bp, Artificial Sequence
  Description of Artificial Sequence: Synthetic oligonucleotide
  Target: LAMA2; (+) strand; PAM type: NRG; PAM sequence: TAG
cacataaaatatacatgtgt

SEQ ID NO: 155755 - DNA, 20 bp, Artificial Sequence
  Description of Artificial Sequence: Synthetic oligonucleotide
  Target: LAMA2; (+) strand; PAM type: NRG; PAM sequence: TAG
taaaatatacatgtgttaga

SEQ ID NO: 155756 - DNA, 20 bp, Artificial Sequence
  Description of Artificial Sequence: Synthetic oligonucleotide
  Target: LAMA2; (+) strand; PAM type: NRG; PAM sequence: AAG
gttagatagtgataaatgac

SEQ ID NO: 155757 - DNA, 20 bp, Artificial Sequence
  Description of Artificial Sequence: Synthetic oligonucleotide
  Target: LAMA2; (+) strand; PAM type: NRG; PAM sequence: AAG
gtgataaatgacaagaaaaa

SEQ ID NO: 155758 - DNA, 20 bp, Artificial Sequence
  Description of Artificial Sequence: Synthetic oligonucleotide
  Target: LAMA2; (+) strand; PAM type: NRG; PAM sequence: TAG
ataaatgacaagaaaaaaag

SEQ ID NO: 155759 - DNA, 20 bp, Artificial Sequence
  Description of Artificial Sequence: Synthetic oligonucleotide
  Target: LAMA2; (+) strand; PAM type: NRG; PAM sequence: GAG
aaatgacaagaaaaaaagta

SEQ ID NO: 155760 - DNA, 20 bp, Artificial Sequence
  Description of Artificial Sequence: Synthetic oligonucleotide
  Target: LAMA2; (+) strand; PAM type: NRG; PAM sequence: TGG
acaagaaaaaaagtagagca

SEQ ID NO: 155761 - DNA, 20 bp, Artificial Sequence
  Description of Artificial Sequence: Synthetic oligonucleotide
  Target: LAMA2; (+) strand; PAM type: NRG; PAM sequence: GAG
aagaaaaaaagtagagcatg

SEQ ID NO: 155762 - DNA, 20 bp, Artificial Sequence
  Description of Artificial Sequence: Synthetic oligonucleotide
  Target: LAMA2; (+) strand; PAM type: NRG; PAM sequence: AGG
agaaaaaaagtagagcatgg

SEQ ID NO: 155763 - DNA, 20 bp, Artificial Sequence
  Description of Artificial Sequence: Synthetic oligonucleotide
  Target: LAMA2; (+) strand; PAM type: NRG; PAM sequence: GGG
gaaaaaaagtagagcatgga

SEQ ID NO: 155764 - DNA, 20 bp, Artificial Sequence
  Description of Artificial Sequence: Synthetic oligonucleotide
  Target: LAMA2; (+) strand; PAM type: NRG; PAM sequence: TAG
aaagtagagcatggagggcc

SEQ ID NO: 155765 - DNA, 20 bp, Artificial Sequence
  Description of Artificial Sequence: Synthetic oligonucleotide
  Target: LAMA2; (+) strand; PAM type: NRG; PAM sequence: AGG
aagtagagcatggagggcct

SEQ ID NO: 155766 - DNA, 20 bp, Artificial Sequence
  Description of Artificial Sequence: Synthetic oligonucleotide
  Target: LAMA2; (+) strand; PAM type: NRG; PAM sequence: AAG
tagagcatggagggcctagg

SEQ ID NO: 155767 - DNA, 20 bp, Artificial Sequence
  Description of Artificial Sequence: Synthetic oligonucleotide
  Target: LAMA2; (+) strand; PAM type: NRG; PAM sequence: AGG
agagcatggagggcctagga

SEQ ID NO: 155768 - DNA, 20 bp, Artificial Sequence
  Description of Artificial Sequence: Synthetic oligonucleotide
  Target: LAMA2; (+) strand; PAM type: NRG; PAM sequence: TAG
ggagggcctaggaaggatga

SEQ ID NO: 155769 - DNA, 20 bp, Artificial Sequence
  Description of Artificial Sequence: Synthetic oligonucleotide
  Target: LAMA2; (+) strand; PAM type: NRG; PAM sequence: TGG
gggcctaggaaggatgatag

SEQ ID NO: 155770 - DNA, 20 bp, Artificial Sequence
  Description of Artificial Sequence: Synthetic oligonucleotide
  Target: LAMA2; (+) strand; PAM type: NRG; PAM sequence: TAG
gaaggatgatagtggttgaa

SEQ ID NO: 155771 - DNA, 20 bp, Artificial Sequence
  Description of Artificial Sequence: Synthetic oligonucleotide
  Target: LAMA2; (+) strand; PAM type: NRG; PAM sequence: TAG
gaatagactttaattttata

SEQ ID NO: 155772 - DNA, 20 bp, Artificial Sequence
  Description of Artificial Sequence: Synthetic oligonucleotide
  Target: LAMA2; (+) strand; PAM type: NRG; PAM sequence: TAG
tttaattttatatagaatat

SEQ ID NO: 155773 - DNA, 20 bp, Artificial Sequence
  Description of Artificial Sequence: Synthetic oligonucleotide
  Target: LAMA2; (+) strand; PAM type: NRG; PAM sequence: AGG
ttaattttatatagaatatt

SEQ ID NO: 155774 - DNA, 20 bp, Artificial Sequence
  Description of Artificial Sequence: Synthetic oligonucleotide
  Target: LAMA2; (+) strand; PAM type: NRG; PAM sequence: CAG
ttttatatagaatattaggt

SEQ ID NO: 155775 - DNA, 20 bp, Artificial Sequence
  Description of Artificial Sequence: Synthetic oligonucleotide
  Target: LAMA2; (+) strand; PAM type: NRG; PAM sequence: GAG
ttatatagaatattaggtca

SEQ ID NO: 155776 - DNA, 20 bp, Artificial Sequence
  Description of Artificial Sequence: Synthetic oligonucleotide
  Target: LAMA2; (+) strand; PAM type: NRG; PAM sequence: AAG
aatattaggtcagagatctg

SEQ ID NO: 155777 - DNA, 20 bp, Artificial Sequence
  Description of Artificial Sequence: Synthetic oligonucleotide
  Target: LAMA2; (+) strand; PAM type: NRG; PAM sequence: AGG
atattaggtcagagatctga

SEQ ID NO: 155778 - DNA, 20 bp, Artificial Sequence
  Description of Artificial Sequence: Synthetic oligonucleotide
  Target: LAMA2; (+) strand; PAM type: NRG; PAM sequence: TAG
gtcagagatctgaaggtgac

SEQ ID NO: 155779 - DNA, 20 bp, Artificial Sequence
  Description of Artificial Sequence: Synthetic oligonucleotide
  Target: LAMA2; (+) strand; PAM type: NRG; PAM sequence: AGG
tcagagatctgaaggtgact

SEQ ID NO: 155780 - DNA, 20 bp, Artificial Sequence
  Description of Artificial Sequence: Synthetic oligonucleotide
  Target: LAMA2; (+) strand; PAM type: NRG; PAM sequence: AAG
atctgaaggtgactaggaaa

SEQ ID NO: 155781 - DNA, 20 bp, Artificial Sequence
  Description of Artificial Sequence: Synthetic oligonucleotide
  Target: LAMA2; (+) strand; PAM type: NRG; PAM sequence: TGG
gtgactaggaaaaagttatg

SEQ ID NO: 155782 - DNA, 20 bp, Artificial Sequence
  Description of Artificial Sequence: Synthetic oligonucleotide
  Target: LAMA2; (+) strand; PAM type: NRG; PAM sequence: GGG
tgactaggaaaaagttatgt

SEQ ID NO: 155783 - DNA, 20 bp, Artificial Sequence
  Description of Artificial Sequence: Synthetic oligonucleotide
  Target: LAMA2; (+) strand; PAM type: NRG; PAM sequence: TGG
gaaaaagttatgtgggtatc

SEQ ID NO: 155784 - DNA, 20 bp, Artificial Sequence
  Description of Artificial Sequence: Synthetic oligonucleotide
  Target: LAMA2; (+) strand; PAM type: NRG; PAM sequence: GAG
aaaagttatgtgggtatctg

SEQ ID NO: 155785 - DNA, 20 bp, Artificial Sequence
  Description of Artificial Sequence: Synthetic oligonucleotide
  Target: LAMA2; (+) strand; PAM type: NRG; PAM sequence: AAG
gttatgtgggtatctggagc

SEQ ID NO: 155786 - DNA, 20 bp, Artificial Sequence
  Description of Artificial Sequence: Synthetic oligonucleotide
  Target: LAMA2; (+) strand; PAM type: NRG; PAM sequence: GAG
tatgtgggtatctggagcaa

SEQ ID NO: 155787 - DNA, 20 bp, Artificial Sequence
  Description of Artificial Sequence: Synthetic oligonucleotide
  Target: LAMA2; (+) strand; PAM type: NRG; PAM sequence: TAG
tatctggagcaagagcatct

SEQ ID NO: 155788 - DNA, 20 bp, Artificial Sequence
  Description of Artificial Sequence: Synthetic oligonucleotide
  Target: LAMA2; (+) strand; PAM type: NRG; PAM sequence: AGG
atctggagcaagagcatctt

SEQ ID NO: 155789 - DNA, 20 bp, Artificial Sequence
  Description of Artificial Sequence: Synthetic oligonucleotide
  Target: LAMA2; (+) strand; PAM type: NRG; PAM sequence: AAG
agcaagagcatcttaggaca

SEQ ID NO: 155790 - DNA, 20 bp, Artificial Sequence
  Description of Artificial Sequence: Synthetic oligonucleotide
  Target: LAMA2; (+) strand; PAM type: NRG; PAM sequence: GAG
caagagcatcttaggacaaa

SEQ ID NO: 155791 - DNA, 20 bp, Artificial Sequence
  Description of Artificial Sequence: Synthetic oligonucleotide
  Target: LAMA2; (+) strand; PAM type: NRG; PAM sequence: AAG
agcatcttaggacaaagaga

SEQ ID NO: 155792 - DNA, 20 bp, Artificial Sequence
  Description of Artificial Sequence: Synthetic oligonucleotide
  Target: LAMA2; (+) strand; PAM type: NRG; PAM sequence: AAG
tcttaggacaaagagaaagt

SEQ ID NO: 155793 - DNA, 20 bp, Artificial Sequence
  Description of Artificial Sequence: Synthetic oligonucleotide
  Target: LAMA2; (+) strand; PAM type: NRG; PAM sequence: AAG
acaaagagaaagtaagtgaa

SEQ ID NO: 155794 - DNA, 20 bp, Artificial Sequence
  Description of Artificial Sequence: Synthetic oligonucleotide
  Target: LAMA2; (+) strand; PAM type: NRG; PAM sequence: AGG
caaagagaaagtaagtgaaa

SEQ ID NO: 155795 - DNA, 20 bp, Artificial Sequence
  Description of Artificial Sequence: Synthetic oligonucleotide
  Target: LAMA2; (+) strand; PAM type: NRG; PAM sequence: AAG
aaagtaagtgaaaaggccct

SEQ ID NO: 155796 - DNA, 20 bp, Artificial Sequence
  Description of Artificial Sequence: Synthetic oligonucleotide
  Target: LAMA2; (+) strand; PAM type: NRG; PAM sequence: TGG
aaggccctaagatatgaatg

SEQ ID NO: 155797 - DNA, 20 bp, Artificial Sequence
  Description of Artificial Sequence: Synthetic oligonucleotide
  Target: LAMA2; (+) strand; PAM type: NRG; PAM sequence: TGG
ccctaagatatgaatgtggc

SEQ ID NO: 155798 - DNA, 20 bp, Artificial Sequence
  Description of Artificial Sequence: Synthetic oligonucleotide
  Target: LAMA2; (+) strand; PAM type: NRG; PAM sequence: AAG
gaatgtggctggcatgttca

SEQ ID NO: 155799 - DNA, 20 bp, Artificial Sequence
  Description of Artificial Sequence: Synthetic oligonucleotide
  Target: LAMA2; (+) strand; PAM type: NRG; PAM sequence: AAG
tggcatgttcaaagaccctc

SEQ ID NO: 155800 - DNA, 20 bp, Artificial Sequence
  Description of Artificial Sequence: Synthetic oligonucleotide
  Target: LAMA2; (+) strand; PAM type: NRG; PAM sequence: AGG
ggcatgttcaaagaccctca

SEQ ID NO: 155801 - DNA, 20 bp, Artificial Sequence
  Description of Artificial Sequence: Synthetic oligonucleotide
  Target: LAMA2; (+) strand; PAM type: NRG; PAM sequence: TGG
tgttcaaagaccctcaagga

SEQ ID NO: 155802 - DNA, 20 bp, Artificial Sequence
  Description of Artificial Sequence: Synthetic oligonucleotide
  Target: LAMA2; (+) strand; PAM type: NRG; PAM sequence: GGG
gttcaaagaccctcaaggat

SEQ ID NO: 155803 - DNA, 20 bp, Artificial Sequence
  Description of Artificial Sequence: Synthetic oligonucleotide
  Target: LAMA2; (+) strand; PAM type: NRG; PAM sequence: GGG
ttcaaagaccctcaaggatg

SEQ ID NO: 155804 - DNA, 20 bp, Artificial Sequence
  Description of Artificial Sequence: Synthetic oligonucleotide
  Target: LAMA2; (+) strand; PAM type: NRG; PAM sequence: AAG
aagaccctcaaggatggggt

SEQ ID NO: 155805 - DNA, 20 bp, Artificial Sequence
  Description of Artificial Sequence: Synthetic oligonucleotide
  Target: LAMA2; (+) strand; PAM type: NRG; PAM sequence: GAG
gaccctcaaggatggggtaa

SEQ ID NO: 155806 - DNA, 20 bp, Artificial Sequence
  Description of Artificial Sequence: Synthetic oligonucleotide
  Target: LAMA2; (+) strand; PAM type: NRG; PAM sequence: TGG
cctcaaggatggggtaagag

SEQ ID NO: 155807 - DNA, 20 bp, Artificial Sequence
  Description of Artificial Sequence: Synthetic oligonucleotide
  Target: LAMA2; (+) strand; PAM type: NRG; PAM sequence: GGG
ctcaaggatggggtaagagt

SEQ ID NO: 155808 - DNA, 20 bp, Artificial Sequence
  Description of Artificial Sequence: Synthetic oligonucleotide
  Target: LAMA2; (+) strand; PAM type: NRG; PAM sequence: GGG
tcaaggatggggtaagagtg

SEQ ID NO: 155809 - DNA, 20 bp, Artificial Sequence
  Description of Artificial Sequence: Synthetic oligonucleotide
  Target: LAMA2; (+) strand; PAM type: NRG; PAM sequence: AAG
aggatggggtaagagtgggg

SEQ ID NO: 155810 - DNA, 20 bp, Artificial Sequence
  Description of Artificial Sequence: Synthetic oligonucleotide
  Target: LAMA2; (+) strand; PAM type: NRG; PAM sequence: GAG
gatggggtaagagtggggaa

SEQ ID NO: 155811 - DNA, 20 bp, Artificial Sequence
  Description of Artificial Sequence: Synthetic oligonucleotide
  Target: LAMA2; (+) strand; PAM type: NRG; PAM sequence: AAG
gtaagagtggggaagagttg

SEQ ID NO: 155812 - DNA, 20 bp, Artificial Sequence
  Description of Artificial Sequence: Synthetic oligonucleotide
  Target: LAMA2; (+) strand; PAM type: NRG; PAM sequence: AGG
taagagtggggaagagttga

SEQ ID NO: 155813 - DNA, 20 bp, Artificial Sequence
  Description of Artificial Sequence: Synthetic oligonucleotide
  Target: LAMA2; (+) strand; PAM type: NRG; PAM sequence: TGG
tggggaagagttgaaggata

SEQ ID NO: 155814 - DNA, 20 bp, Artificial Sequence
  Description of Artificial Sequence: Synthetic oligonucleotide
  Target: LAMA2; (+) strand; PAM type: NRG; PAM sequence: GGG
ggggaagagttgaaggatat

SEQ ID NO: 155815 - DNA, 20 bp, Artificial Sequence
  Description of Artificial Sequence: Synthetic oligonucleotide
  Target: LAMA2; (+) strand; PAM type: NRG; PAM sequence: GGG
gggaagagttgaaggatatg

SEQ ID NO: 155816 - DNA, 20 bp, Artificial Sequence
  Description of Artificial Sequence: Synthetic oligonucleotide
  Target: LAMA2; (+) strand; PAM type: NRG; PAM sequence: AAG
aagagttgaaggatatgggg

SEQ ID NO: 155817 - DNA, 20 bp, Artificial Sequence
  Description of Artificial Sequence: Synthetic oligonucleotide
  Target: LAMA2; (+) strand; PAM type: NRG; PAM sequence: AGG
agagttgaaggatatgggga

SEQ ID NO: 155818 - DNA, 20 bp, Artificial Sequence
  Description of Artificial Sequence: Synthetic oligonucleotide
  Target: LAMA2; (+) strand; PAM type: NRG; PAM sequence: GGG
gagttgaaggatatggggaa

SEQ ID NO: 155819 - DNA, 20 bp, Artificial Sequence
  Description of Artificial Sequence: Synthetic oligonucleotide
  Target: LAMA2; (+) strand; PAM type: NRG; PAM sequence: GGG
agttgaaggatatggggaag

SEQ ID NO: 155820 - DNA, 20 bp, Artificial Sequence
  Description of Artificial Sequence: Synthetic oligonucleotide
  Target: LAMA2; (+) strand; PAM type: NRG; PAM sequence: TAG
tggggaaggggaaaatatcg

SEQ ID NO: 155821 - DNA, 20 bp, Artificial Sequence
  Description of Artificial Sequence: Synthetic oligonucleotide
  Target: LAMA2; (+) strand; PAM type: NRG; PAM sequence: AGG
ggggaaggggaaaatatcgt

SEQ ID NO: 155822 - DNA, 20 bp, Artificial Sequence
  Description of Artificial Sequence: Synthetic oligonucleotide
  Target: LAMA2; (+) strand; PAM type: NRG; PAM sequence: TGG
gggaaaatatcgtaggtctt

SEQ ID NO: 155823 - DNA, 20 bp, Artificial Sequence
  Description of Artificial Sequence: Synthetic oligonucleotide
  Target: LAMA2; (+) strand; PAM type: NRG; PAM sequence: TAG
cgtaggtctttggcacactg

SEQ ID NO: 155824 - DNA, 20 bp, Artificial Sequence
  Description of Artificial Sequence: Synthetic oligonucleotide
  Target: LAMA2; (+) strand; PAM type: NRG; PAM sequence: GAG
catttttcttgcaatgcaat

SEQ ID NO: 155825 - DNA, 20 bp, Artificial Sequence
  Description of Artificial Sequence: Synthetic oligonucleotide
  Target: LAMA2; (+) strand; PAM type: NRG; PAM sequence: CAG
ttgcaatgcaatgagaaaca

SEQ ID NO: 155826 - DNA, 20 bp, Artificial Sequence
  Description of Artificial Sequence: Synthetic oligonucleotide
  Target: LAMA2; (+) strand; PAM type: NRG; PAM sequence: GAG
acacagacatgtaatgatct

SEQ ID NO: 155827 - DNA, 20 bp, Artificial Sequence
  Description of Artificial Sequence: Synthetic oligonucleotide
  Target: LAMA2; (+) strand; PAM type: NRG; PAM sequence: TAG
tgatctgagttatgttttaa

SEQ ID NO: 155828 - DNA, 20 bp, Artificial Sequence
  Description of Artificial Sequence: Synthetic oligonucleotide
  Target: LAMA2; (+) strand; PAM type: NRG; PAM sequence: AGG
gatctgagttatgttttaat

SEQ ID NO: 155829 - DNA, 20 bp, Artificial Sequence
  Description of Artificial Sequence: Synthetic oligonucleotide
  Target: LAMA2; (+) strand; PAM type: NRG; PAM sequence: GGG
atctgagttatgttttaata

SEQ ID NO: 155830 - DNA, 20 bp, Artificial Sequence
  Description of Artificial Sequence: Synthetic oligonucleotide
  Target: LAMA2; (+) strand; PAM type: NRG; PAM sequence: TAG
gagttatgttttaatagggt

SEQ ID NO: 155831 - DNA, 20 bp, Artificial Sequence
  Description of Artificial Sequence: Synthetic oligonucleotide
  Target: LAMA2; (+) strand; PAM type: NRG; PAM sequence: GAG
gttagtatgattgttacttt

SEQ ID NO: 155832 - DNA, 20 bp, Artificial Sequence
  Description of Artificial Sequence: Synthetic oligonucleotide
  Target: LAMA2; (+) strand; PAM type: NRG; PAM sequence: GAG
tagtatgattgttactttga

SEQ ID NO: 155833 - DNA, 20 bp, Artificial Sequence
  Description of Artificial Sequence: Synthetic oligonucleotide
  Target: LAMA2; (+) strand; PAM type: NRG; PAM sequence: TGG
atgattgttactttgagagt

SEQ ID NO: 155834 - DNA, 20 bp, Artificial Sequence
  Description of Artificial Sequence: Synthetic oligonucleotide
  Target: LAMA2; (+) strand; PAM type: NRG; PAM sequence: GAG
actttgagagttggttgaat

SEQ ID NO: 155835 - DNA, 20 bp, Artificial Sequence
  Description of Artificial Sequence: Synthetic oligonucleotide
  Target: LAMA2; (+) strand; PAM type: NRG; PAM sequence: AGG
ctttgagagttggttgaatg

SEQ ID NO: 155836 - DNA, 20 bp, Artificial Sequence
  Description of Artificial Sequence: Synthetic oligonucleotide
  Target: LAMA2; (+) strand; PAM type: NRG; PAM sequence: CAG
gttggttgaatgaggacaaa

SEQ ID NO: 155837 - DNA, 20 bp, Artificial Sequence
  Description of Artificial Sequence: Synthetic oligonucleotide
  Target: LAMA2; (+) strand; PAM type: NRG; PAM sequence: TAG
gttgaatgaggacaaacaga

SEQ ID NO: 155838 - DNA, 20 bp, Artificial Sequence
  Description of Artificial Sequence: Synthetic oligonucleotide
  Target: LAMA2; (+) strand; PAM type: NRG; PAM sequence: CAG
atgaggacaaacagatagac

SEQ ID NO: 155839 - DNA, 20 bp, Artificial Sequence
  Description of Artificial Sequence: Synthetic oligonucleotide
  Target: LAMA2; (+) strand; PAM type: NRG; PAM sequence: AAG
gacaaacagatagaccagtt

SEQ ID NO: 155840 - DNA, 20 bp, Artificial Sequence
  Description of Artificial Sequence: Synthetic oligonucleotide
  Target: LAMA2; (+) strand; PAM type: NRG; PAM sequence: GAG
caaacagatagaccagttaa

SEQ ID NO: 155841 - DNA, 20 bp, Artificial Sequence
  Description of Artificial Sequence: Synthetic oligonucleotide
  Target: LAMA2; (+) strand; PAM type: NRG; PAM sequence: TGG
gatagaccagttaagagact

SEQ ID NO: 155842 - DNA, 20 bp, Artificial Sequence
  Description of Artificial Sequence: Synthetic oligonucleotide
  Target: LAMA2; (+) strand; PAM type: NRG; PAM sequence: CAG
taagagacttggcattcatc

SEQ ID NO: 155843 - DNA, 20 bp, Artificial Sequence
  Description of Artificial Sequence: Synthetic oligonucleotide
  Target: LAMA2; (+) strand; PAM type: NRG; PAM sequence: TAG
cttggcattcatccagtcat

SEQ ID NO: 155844 - DNA, 20 bp, Artificial Sequence
  Description of Artificial Sequence: Synthetic oligonucleotide
  Target: LAMA2; (+) strand; PAM type: NRG; PAM sequence: AAG
tcatccagtcattagctgtg

SEQ ID NO: 155845 - DNA, 20 bp, Artificial Sequence
  Description of Artificial Sequence: Synthetic oligonucleotide
  Target: LAMA2; (+) strand; PAM type: NRG; PAM sequence: TGG
agtcattagctgtgaagtct

SEQ ID NO: 155846 - DNA, 20 bp, Artificial Sequence
  Description of Artificial Sequence: Synthetic oligonucleotide
  Target: LAMA2; (+) strand; PAM type: NRG; PAM sequence: CAG
agctgtgaagtcttggacca

SEQ ID NO: 155847 - DNA, 20 bp, Artificial Sequence
  Description of Artificial Sequence: Synthetic oligonucleotide
  Target: LAMA2; (+) strand; PAM type: NRG; PAM sequence: TGG
gtcttggaccacagtgataa

SEQ ID NO: 155848 - DNA, 20 bp, Artificial Sequence
  Description of Artificial Sequence: Synthetic oligonucleotide
  Target: LAMA2; (+) strand; PAM type: NRG; PAM sequence: AAG
tgataatggtgaaaatgatc

SEQ ID NO: 155849 - DNA, 20 bp, Artificial Sequence
  Description of Artificial Sequence: Synthetic oligonucleotide
  Target: LAMA2; (+) strand; PAM type: NRG; PAM sequence: TGG
atggtgaaaatgatcaagtg

SEQ ID NO: 155850 - DNA, 20 bp, Artificial Sequence
  Description of Artificial Sequence: Synthetic oligonucleotide
  Target: LAMA2; (+) strand; PAM type: NRG; PAM sequence: CAG
gatcaagtgtggtttgattc

SEQ ID NO: 155851 - DNA, 20 bp, Artificial Sequence
  Description of Artificial Sequence: Synthetic oligonucleotide
  Target: LAMA2; (+) strand; PAM type: NRG; PAM sequence: AAG
ttgattccagatacattttg

SEQ ID NO: 155852 - DNA, 20 bp, Artificial Sequence
  Description of Artificial Sequence: Synthetic oligonucleotide
  Target: LAMA2; (+) strand; PAM type: NRG; PAM sequence: AGG
tgattccagatacattttga

SEQ ID NO: 155853 - DNA, 20 bp, Artificial Sequence
  Description of Artificial Sequence: Synthetic oligonucleotide
  Target: LAMA2; (+) strand; PAM type: NRG; PAM sequence: AAG
attttgaaggtaatgctgaa

SEQ ID NO: 155854 - DNA, 20 bp, Artificial Sequence
  Description of Artificial Sequence: Synthetic oligonucleotide
  Target: LAMA2; (+) strand; PAM type: NRG; PAM sequence: TAG
atgctgaaaagatatgctaa

SEQ ID NO: 155855 - DNA, 20 bp, Artificial Sequence
  Description of Artificial Sequence: Synthetic oligonucleotide
  Target: LAMA2; (+) strand; PAM type: NRG; PAM sequence: TGG
gaaaagatatgctaatagtt

SEQ ID NO: 155856 - DNA, 20 bp, Artificial Sequence
  Description of Artificial Sequence: Synthetic oligonucleotide
  Target: LAMA2; (+) strand; PAM type: NRG; PAM sequence: TGG
atatgctaatagtttggctg

SEQ ID NO: 155857 - DNA, 20 bp, Artificial Sequence
  Description of Artificial Sequence: Synthetic oligonucleotide
  Target: LAMA2; (+) strand; PAM type: NRG; PAM sequence: AAG
agtttggctgtggaacatga

SEQ ID NO: 155858 - DNA, 20 bp, Artificial Sequence
  Description of Artificial Sequence: Synthetic oligonucleotide
  Target: LAMA2; (+) strand; PAM type: NRG; PAM sequence: AAG
tggctgtggaacatgaaaga

SEQ ID NO: 155859 - DNA, 20 bp, Artificial Sequence
  Description of Artificial Sequence: Synthetic oligonucleotide
  Target: LAMA2; (+) strand; PAM type: NRG; PAM sequence: GAG
gctgtggaacatgaaagaaa

SEQ ID NO: 155860 - DNA, 20 bp, Artificial Sequence
  Description of Artificial Sequence: Synthetic oligonucleotide
  Target: LAMA2; (+) strand; PAM type: NRG; PAM sequence: AGG
ctgtggaacatgaaagaaag

SEQ ID NO: 155861 - DNA, 20 bp, Artificial Sequence
  Description of Artificial Sequence: Synthetic oligonucleotide
  Target: LAMA2; (+) strand; PAM type: NRG; PAM sequence: GAG
gtggaacatgaaagaaagag

SEQ ID NO: 155862 - DNA, 20 bp, Artificial Sequence
  Description of Artificial Sequence: Synthetic oligonucleotide
  Target: LAMA2; (+) strand; PAM type: NRG; PAM sequence: GAG
acatgaaagaaagaggagtt

SEQ ID NO: 155863 - DNA, 20 bp, Artificial Sequence
  Description of Artificial Sequence: Synthetic oligonucleotide
  Target: LAMA2; (+) strand; PAM type: NRG; PAM sequence: AGG
catgaaagaaagaggagttg

SEQ ID NO: 155864 - DNA, 20 bp, Artificial Sequence
  Description of Artificial Sequence: Synthetic oligonucleotide
  Target: LAMA2; (+) strand; PAM type: NRG; PAM sequence: TGG
tgaggattatttcccaacta

SEQ ID NO: 155865 - DNA, 20 bp, Artificial Sequence
  Description of Artificial Sequence: Synthetic oligonucleotide
  Target: LAMA2; (+) strand; PAM type: NRG; PAM sequence: GAG
tatttcccaactatggacct

SEQ ID NO: 155866 - DNA, 20 bp, Artificial Sequence
  Description of Artificial Sequence: Synthetic oligonucleotide
  Target: LAMA2; (+) strand; PAM type: NRG; PAM sequence: AAG
ctatggacctgagcaactaa

SEQ ID NO: 155867 - DNA, 20 bp, Artificial Sequence
  Description of Artificial Sequence: Synthetic oligonucleotide
  Target: LAMA2; (+) strand; PAM type: NRG; PAM sequence: TAG
taaaagacttgtcattgatt

SEQ ID NO: 155868 - DNA, 20 bp, Artificial Sequence
  Description of Artificial Sequence: Synthetic oligonucleotide
  Target: LAMA2; (+) strand; PAM type: NRG; PAM sequence: TGG
agacttgtcattgatttaga

SEQ ID NO: 155869 - DNA, 20 bp, Artificial Sequence
  Description of Artificial Sequence: Synthetic oligonucleotide
  Target: LAMA2; (+) strand; PAM type: NRG; PAM sequence: GGG
gacttgtcattgatttagat

SEQ ID NO: 155870 - DNA, 20 bp, Artificial Sequence
  Description of Artificial Sequence: Synthetic oligonucleotide
  Target: LAMA2; (+) strand; PAM type: NRG; PAM sequence: GGG
acttgtcattgatttagatg

SEQ ID NO: 155871 - DNA, 20 bp, Artificial Sequence
  Description of Artificial Sequence: Synthetic oligonucleotide
  Target: LAMA2; (+) strand; PAM type: NRG; PAM sequence: AAG
tgtcattgatttagatgggg

SEQ ID NO: 155872 - DNA, 20 bp, Artificial Sequence
  Description of Artificial Sequence: Synthetic oligonucleotide
  Target: LAMA2; (+) strand; PAM type: NRG; PAM sequence: TGG
gatttagatggggaagactg

SEQ ID NO: 155873 - DNA, 20 bp, Artificial Sequence
  Description of Artificial Sequence: Synthetic oligonucleotide
  Target: LAMA2; (+) strand; PAM type: NRG; PAM sequence: CAG
tggtaaaaacaaatttttta

SEQ ID NO: 155874 - DNA, 20 bp, Artificial Sequence
  Description of Artificial Sequence: Synthetic oligonucleotide
  Target: LAMA2; (+) strand; PAM type: NRG; PAM sequence: AGG
ggtaaaaacaaattttttac

SEQ ID NO: 155875 - DNA, 20 bp, Artificial Sequence
  Description of Artificial Sequence: Synthetic oligonucleotide
  Target: LAMA2; (+) strand; PAM type: NRG; PAM sequence: GAG
taaaaacaaattttttacag

SEQ ID NO: 155876 - DNA, 20 bp, Artificial Sequence
  Description of Artificial Sequence: Synthetic oligonucleotide
  Target: LAMA2; (+) strand; PAM type: NRG; PAM sequence: CAG
tttacaggagatcatgaact

SEQ ID NO: 155877 - DNA, 20 bp, Artificial Sequence
  Description of Artificial Sequence: Synthetic oligonucleotide
  Target: LAMA2; (+) strand; PAM type: NRG; PAM sequence: TAG
aggagatcatgaactcagct

SEQ ID NO: 155878 - DNA, 20 bp, Artificial Sequence
  Description of Artificial Sequence: Synthetic oligonucleotide
  Target: LAMA2; (+) strand; PAM type: NRG; PAM sequence: AAG
tcagcttagctaattatata

SEQ ID NO: 155879 - DNA, 20 bp, Artificial Sequence
  Description of Artificial Sequence: Synthetic oligonucleotide
  Target: LAMA2; (+) strand; PAM type: NRG; PAM sequence: TAG
cttagctaattatataaagt

SEQ ID NO: 155880 - DNA, 20 bp, Artificial Sequence
  Description of Artificial Sequence: Synthetic oligonucleotide
  Target: LAMA2; (+) strand; PAM type: NRG; PAM sequence: GAG
tagctaattatataaagtta

SEQ ID NO: 155881 - DNA, 20 bp, Artificial Sequence
  Description of Artificial Sequence: Synthetic oligonucleotide
  Target: LAMA2; (+) strand; PAM type: NRG; PAM sequence: GAG
agagatgcctattatatatc

SEQ ID NO: 155882 - DNA, 20 bp, Artificial Sequence
  Description of Artificial Sequence: Synthetic oligonucleotide
  Target: LAMA2; (+) strand; PAM type: NRG; PAM sequence: AGG
gagatgcctattatatatcg

SEQ ID NO: 155883 - DNA, 20 bp, Artificial Sequence
  Description of Artificial Sequence: Synthetic oligonucleotide
  Target: LAMA2; (+) strand; PAM type: NRG; PAM sequence: AAG
atatcgaggtgtaaatgtta

SEQ ID NO: 155884 - DNA, 20 bp, Artificial Sequence
  Description of Artificial Sequence: Synthetic oligonucleotide
  Target: LAMA2; (+) strand; PAM type: NRG; PAM sequence: TAG
aggtgtaaatgttaaagtga

SEQ ID NO: 155885 - DNA, 20 bp, Artificial Sequence
  Description of Artificial Sequence: Synthetic oligonucleotide
  Target: LAMA2; (+) strand; PAM type: NRG; PAM sequence: TAG
gtaaatgttaaagtgatagc

SEQ ID NO: 155886 - DNA, 20 bp, Artificial Sequence
  Description of Artificial Sequence: Synthetic oligonucleotide
  Target: LAMA2; (+) strand; PAM type: NRG; PAM sequence: AAG
taaagtgatagctagtatac

SEQ ID NO: 155887 - DNA, 20 bp, Artificial Sequence
  Description of Artificial Sequence: Synthetic oligonucleotide
  Target: LAMA2; (+) strand; PAM type: NRG; PAM sequence: AAG
atagctagtatacaagtctg

SEQ ID NO: 155888 - DNA, 20 bp, Artificial Sequence
  Description of Artificial Sequence: Synthetic oligonucleotide
  Target: LAMA2; (+) strand; PAM type: NRG; PAM sequence: TGG
tatacaagtctgaagttcat

SEQ ID NO: 155889 - DNA, 20 bp, Artificial Sequence
  Description of Artificial Sequence: Synthetic oligonucleotide
  Target: LAMA2; (+) strand; PAM type: NRG; PAM sequence: GGG
atacaagtctgaagttcatt

SEQ ID NO: 155890 - DNA, 20 bp, Artificial Sequence
  Description of Artificial Sequence: Synthetic oligonucleotide
  Target: LAMA2; (+) strand; PAM type: NRG; PAM sequence: CAG
aagtctgaagttcattgggt

SEQ ID NO: 155891 - DNA, 20 bp, Artificial Sequence
  Description of Artificial Sequence: Synthetic oligonucleotide
  Target: LAMA2; (+) strand; PAM type: NRG; PAM sequence: AGG
agtctgaagttcattgggtc

SEQ ID NO: 155892 - DNA, 20 bp, Artificial Sequence
  Description of Artificial Sequence: Synthetic oligonucleotide
  Target: LAMA2; (+) strand; PAM type: NRG; PAM sequence: AAG
ggtcaggaacatctgaactg

SEQ ID NO: 155893 - DNA, 20 bp, Artificial Sequence
  Description of Artificial Sequence: Synthetic oligonucleotide
  Target: LAMA2; (+) strand; PAM type: NRG; PAM sequence: CAG
aatccatatgtcatttaaac

SEQ ID NO: 155894 - DNA, 20 bp, Artificial Sequence
  Description of Artificial Sequence: Synthetic oligonucleotide
  Target: LAMA2; (+) strand; PAM type: NRG; PAM sequence: AAG
ccatatgtcatttaaaccag

SEQ ID NO: 155895 - DNA, 20 bp, Artificial Sequence
  Description of Artificial Sequence: Synthetic oligonucleotide
  Target: LAMA2; (+) strand; PAM type: NRG; PAM sequence: TAG
tgtcatttaaaccagaagac

SEQ ID NO: 155896 - DNA, 20 bp, Artificial Sequence
  Description of Artificial Sequence: Synthetic oligonucleotide
  Target: LAMA2; (+) strand; PAM type: NRG; PAM sequence: AAG
gaagactagatgtgataacc

SEQ ID NO: 155897 - DNA, 20 bp, Artificial Sequence
  Description of Artificial Sequence: Synthetic oligonucleotide
  Target: LAMA2; (+) strand; PAM type: NRG; PAM sequence: GAG
taaccaagaaaatgaataac

SEQ ID NO: 155898 - DNA, 20 bp, Artificial Sequence
  Description of Artificial Sequence: Synthetic oligonucleotide
  Target: LAMA2; (+) strand; PAM type: NRG; PAM sequence: GAG
tgaataacgagacaaaatat

SEQ ID NO: 155899 - DNA, 20 bp, Artificial Sequence
  Description of Artificial Sequence: Synthetic oligonucleotide
  Target: LAMA2; (+) strand; PAM type: NRG; PAM sequence: AAG
cgagacaaaatatgagatct

SEQ ID NO: 155900 - DNA, 20 bp, Artificial Sequence
  Description of Artificial Sequence: Synthetic oligonucleotide
  Target: LAMA2; (+) strand; PAM type: NRG; PAM sequence: AGG
gagacaaaatatgagatcta

SEQ ID NO: 155901 - DNA, 20 bp, Artificial Sequence
  Description of Artificial Sequence: Synthetic oligonucleotide
  Target: LAMA2; (+) strand; PAM type: NRG; PAM sequence: TGG
aaaatatgagatctaaggat

SEQ ID NO: 155902 - DNA, 20 bp, Artificial Sequence
  Description of Artificial Sequence: Synthetic oligonucleotide
  Target: LAMA2; (+) strand; PAM type: NRG; PAM sequence: GGG
aaatatgagatctaaggatt

SEQ ID NO: 155903 - DNA, 20 bp, Artificial Sequence
  Description of Artificial Sequence: Synthetic oligonucleotide
  Target: LAMA2; (+) strand; PAM type: NRG; PAM sequence: TAG
gatctaaggattgggcccta

SEQ ID NO: 155904 - DNA, 20 bp, Artificial Sequence
  Description of Artificial Sequence: Synthetic oligonucleotide
  Target: LAMA2; (+) strand; PAM type: NRG; PAM sequence: TAG
ccctatagcaccccaacatt

SEQ ID NO: 155905 - DNA, 20 bp, Artificial Sequence
  Description of Artificial Sequence: Synthetic oligonucleotide
  Target: LAMA2; (+) strand; PAM type: NRG; PAM sequence: GAG
ctatagcaccccaacattta

SEQ ID NO: 155906 - DNA, 20 bp, Artificial Sequence
  Description of Artificial Sequence: Synthetic oligonucleotide
  Target: LAMA2; (+) strand; PAM type: NRG; PAM sequence: AGG
tatagcaccccaacatttag

SEQ ID NO: 155907 - DNA, 20 bp, Artificial Sequence
  Description of Artificial Sequence: Synthetic oligonucleotide
  Target: LAMA2; (+) strand; PAM type: NRG; PAM sequence: TAG
gcaccccaacatttagaggt

SEQ ID NO: 155908 - DNA, 20 bp, Artificial Sequence
  Description of Artificial Sequence: Synthetic oligonucleotide
  Target: LAMA2; (+) strand; PAM type: NRG; PAM sequence: AGG
caccccaacatttagaggtt

SEQ ID NO: 155909 - DNA, 20 bp, Artificial Sequence
  Description of Artificial Sequence: Synthetic oligonucleotide
  Target: LAMA2; (+) strand; PAM type: NRG; PAM sequence: GAG
catttagaggttaggaaact

SEQ ID NO: 155910 - DNA, 20 bp, Artificial Sequence
  Description of Artificial Sequence: Synthetic oligonucleotide
  Target: LAMA2; (+) strand; PAM type: NRG; PAM sequence: AGG
atttagaggttaggaaactg

SEQ ID NO: 155911 - DNA, 20 bp, Artificial Sequence
  Description of Artificial Sequence: Synthetic oligonucleotide
  Target: LAMA2; (+) strand; PAM type: NRG; PAM sequence: TAG
ttaggaaactgaggacgaac

SEQ ID NO: 155912 - DNA, 20 bp, Artificial Sequence
  Description of Artificial Sequence: Synthetic oligonucleotide
  Target: LAMA2; (+) strand; PAM type: NRG; PAM sequence: AAG
gaaactgaggacgaactaga

SEQ ID NO: 155913 - DNA, 20 bp, Artificial Sequence
  Description of Artificial Sequence: Synthetic oligonucleotide
  Target: LAMA2; (+) strand; PAM type: NRG; PAM sequence: AGG
aaactgaggacgaactagaa

SEQ ID NO: 155914 - DNA, 20 bp, Artificial Sequence
  Description of Artificial Sequence: Synthetic oligonucleotide
  Target: LAMA2; (+) strand; PAM type: NRG; PAM sequence: GAG
actgaggacgaactagaaag

SEQ ID NO: 155915 - DNA, 20 bp, Artificial Sequence
  Description of Artificial Sequence: Synthetic oligonucleotide
  Target: LAMA2; (+) strand; PAM type: NRG; PAM sequence: AAG
gacgaactagaaaggagact

SEQ ID NO: 155916 - DNA, 20 bp, Artificial Sequence
  Description of Artificial Sequence: Synthetic oligonucleotide
  Target: LAMA2; (+) strand; PAM type: NRG; PAM sequence: CAG
ctagaaaggagactaagaat

SEQ ID NO: 155917 - DNA, 20 bp, Artificial Sequence
  Description of Artificial Sequence: Synthetic oligonucleotide
  Target: LAMA2; (+) strand; PAM type: NRG; PAM sequence: AAG
ctaagaatcagtgaccaaaa

SEQ ID NO: 155918 - DNA, 20 bp, Artificial Sequence
  Description of Artificial Sequence: Synthetic oligonucleotide
  Target: LAMA2; (+) strand; PAM type: NRG; PAM sequence: TAG
agaatcagtgaccaaaaaag

SEQ ID NO: 155919 - DNA, 20 bp, Artificial Sequence
  Description of Artificial Sequence: Synthetic oligonucleotide
  Target: LAMA2; (+) strand; PAM type: NRG; PAM sequence: AAG
atcagtgaccaaaaaagtag

SEQ ID NO: 155920 - DNA, 20 bp, Artificial Sequence
  Description of Artificial Sequence: Synthetic oligonucleotide
  Target: LAMA2; (+) strand; PAM type: NRG; PAM sequence: AGG
tcagtgaccaaaaaagtaga

SEQ ID NO: 155921 - DNA, 20 bp, Artificial Sequence
  Description of Artificial Sequence: Synthetic oligonucleotide
  Target: LAMA2; (+) strand; PAM type: NRG; PAM sequence: CAG
aaaaagtagaaggaaaacca

SEQ ID NO: 155922 - DNA, 20 bp, Artificial Sequence
  Description of Artificial Sequence: Synthetic oligonucleotide
  Target: LAMA2; (+) strand; PAM type: NRG; PAM sequence: AAG
aagtagaaggaaaaccacag

SEQ ID NO: 155923 - DNA, 20 bp, Artificial Sequence
  Description of Artificial Sequence: Synthetic oligonucleotide
  Target: LAMA2; (+) strand; PAM type: NRG; PAM sequence: AAG
ccacagaagtcatgtattga

SEQ ID NO: 155924 - DNA, 20 bp, Artificial Sequence
  Description of Artificial Sequence: Synthetic oligonucleotide
  Target: LAMA2; (+) strand; PAM type: NRG; PAM sequence: AAG
gaaagtcatttgaatgaatc

SEQ ID NO: 155925 - DNA, 20 bp, Artificial Sequence
  Description of Artificial Sequence: Synthetic oligonucleotide
  Target: LAMA2; (+) strand; PAM type: NRG; PAM sequence: CAG
aatcaagtgatcaactttgt

SEQ ID NO: 155926 - DNA, 20 bp, Artificial Sequence
  Description of Artificial Sequence: Synthetic oligonucleotide
  Target: LAMA2; (+) strand; PAM type: NRG; PAM sequence: TGG
actttgtcagatactgttga

SEQ ID NO: 155927 - DNA, 20 bp, Artificial Sequence
  Description of Artificial Sequence: Synthetic oligonucleotide
  Target: LAMA2; (+) strand; PAM type: NRG; PAM sequence: GGG
ctttgtcagatactgttgat

SEQ ID NO: 155928 - DNA, 20 bp, Artificial Sequence
  Description of Artificial Sequence: Synthetic oligonucleotide
  Target: LAMA2; (+) strand; PAM type: NRG; PAM sequence: AAG
atactgttgatgggccaaat

SEQ ID NO: 155929 - DNA, 20 bp, Artificial Sequence
  Description of Artificial Sequence: Synthetic oligonucleotide
  Target: LAMA2; (+) strand; PAM type: NRG; PAM sequence: AGG
tactgttgatgggccaaata

SEQ ID NO: 155930 - DNA, 20 bp, Artificial Sequence
  Description of Artificial Sequence: Synthetic oligonucleotide
  Target: LAMA2; (+) strand; PAM type: NRG; PAM sequence: AAG
gttgatgggccaaataaggt

SEQ ID NO: 155931 - DNA, 20 bp, Artificial Sequence
  Description of Artificial Sequence: Synthetic oligonucleotide
  Target: LAMA2; (+) strand; PAM type: NRG; PAM sequence: GAG
ggccaaataaggtaagaaat

SEQ ID NO: 155932 - DNA, 20 bp, Artificial Sequence
  Description of Artificial Sequence: Synthetic oligonucleotide
  Target: LAMA2; (+) strand; PAM type: NRG; PAM sequence: TGG
aagaaatgagaattgaccat

SEQ ID NO: 155933 - DNA, 20 bp, Artificial Sequence
  Description of Artificial Sequence: Synthetic oligonucleotide
  Target: LAMA2; (+) strand; PAM type: NRG; PAM sequence: TAG
tgagaattgaccattggata

SEQ ID NO: 155934 - DNA, 20 bp, Artificial Sequence
  Description of Artificial Sequence: Synthetic oligonucleotide
  Target: LAMA2; (+) strand; PAM type: NRG; PAM sequence: GAG
tgcattcgaccaatgacctt

SEQ ID NO: 155935 - DNA, 20 bp, Artificial Sequence
  Description of Artificial Sequence: Synthetic oligonucleotide
  Target: LAMA2; (+) strand; PAM type: NRG; PAM sequence: AAG
attcgaccaatgaccttgag

SEQ ID NO: 155936 - DNA, 20 bp, Artificial Sequence
  Description of Artificial Sequence: Synthetic oligonucleotide
  Target: LAMA2; (+) strand; PAM type: NRG; PAM sequence: GAG
tcgaccaatgaccttgagaa

SEQ ID NO: 155937 - DNA, 20 bp, Artificial Sequence
  Description of Artificial Sequence: Synthetic oligonucleotide
  Target: LAMA2; (+) strand; PAM type: NRG; PAM sequence: CAG
tgaccttgagaagagtattt

SEQ ID NO: 155938 - DNA, 20 bp, Artificial Sequence
  Description of Artificial Sequence: Synthetic oligonucleotide
  Target: LAMA2; (+) strand; PAM type: NRG; PAM sequence: TGG
ccttgagaagagtatttcag

SEQ ID NO: 155939 - DNA, 20 bp, Artificial Sequence
  Description of Artificial Sequence: Synthetic oligonucleotide
  Target: LAMA2; (+) strand; PAM type: NRG; PAM sequence: AAG
aagagtatttcagtggaatg

SEQ ID NO: 155940 - DNA, 20 bp, Artificial Sequence
  Description of Artificial Sequence: Synthetic oligonucleotide
  Target: LAMA2; (+) strand; PAM type: NRG; PAM sequence: AGG
agagtatttcagtggaatga

SEQ ID NO: 155941 - DNA, 20 bp, Artificial Sequence
  Description of Artificial Sequence: Synthetic oligonucleotide
  Target: LAMA2; (+) strand; PAM type: NRG; PAM sequence: GGG
gagtatttcagtggaatgaa

SEQ ID NO: 155942 - DNA, 20 bp, Artificial Sequence
  Description of Artificial Sequence: Synthetic oligonucleotide
  Target: LAMA2; (+) strand; PAM type: NRG; PAM sequence: TGG
cagtggaatgaagggcaaca

SEQ ID NO: 155943 - DNA, 20 bp, Artificial Sequence
  Description of Artificial Sequence: Synthetic oligonucleotide
  Target: LAMA2; (+) strand; PAM type: NRG; PAM sequence: TAG
atgaagggcaacatggaaac

SEQ ID NO: 155944 - DNA, 20 bp, Artificial Sequence
  Description of Artificial Sequence: Synthetic oligonucleotide
  Target: LAMA2; (+) strand; PAM type: NRG; PAM sequence: GAG
gaagggcaacatggaaacta

SEQ ID NO: 155945 - DNA, 20 bp, Artificial Sequence
  Description of Artificial Sequence: Synthetic oligonucleotide
  Target: LAMA2; (+) strand; PAM type: NRG; PAM sequence: TGG
gggcaacatggaaactagag

SEQ ID NO: 155946 - DNA, 20 bp, Artificial Sequence
  Description of Artificial Sequence: Synthetic oligonucleotide
  Target: LAMA2; (+) strand; PAM type: NRG; PAM sequence: AAG
atggaaactagagtggattt

SEQ ID NO: 155947 - DNA, 20 bp, Artificial Sequence
  Description of Artificial Sequence: Synthetic oligonucleotide
  Target: LAMA2; (+) strand; PAM type: NRG; PAM sequence: GAG
ggaaactagagtggatttaa

SEQ ID NO: 155948 - DNA, 20 bp, Artificial Sequence
  Description of Artificial Sequence: Synthetic oligonucleotide
  Target: LAMA2; (+) strand; PAM type: NRG; PAM sequence: GAG
aaactagagtggatttaaga

SEQ ID NO: 155949 - DNA, 20 bp, Artificial Sequence
  Description of Artificial Sequence: Synthetic oligonucleotide
  Target: LAMA2; (+) strand; PAM type: NRG; PAM sequence: AAG
gagtggatttaagagagaat

SEQ ID NO: 155950 - DNA, 20 bp, Artificial Sequence
  Description of Artificial Sequence: Synthetic oligonucleotide
  Target: LAMA2; (+) strand; PAM type: NRG; PAM sequence: AAG
tggatttaagagagaataag

SEQ ID NO: 155951 - DNA, 20 bp, Artificial Sequence
  Description of Artificial Sequence: Synthetic oligonucleotide
  Target: LAMA2; (+) strand; PAM type: NRG; PAM sequence: AAG
tttaagagagaataagaaga

SEQ ID NO: 155952 - DNA, 20 bp, Artificial Sequence
  Description of Artificial Sequence: Synthetic oligonucleotide
  Target: LAMA2; (+) strand; PAM type: NRG; PAM sequence: TGG
gagaataagaagaaagaata

SEQ ID NO: 155953 - DNA, 20 bp, Artificial Sequence
  Description of Artificial Sequence: Synthetic oligonucleotide
  Target: LAMA2; (+) strand; PAM type: NRG; PAM sequence: GAG
gaataagaagaaagaatatg

SEQ ID NO: 155954 - DNA, 20 bp, Artificial Sequence
  Description of Artificial Sequence: Synthetic oligonucleotide
  Target: LAMA2; (+) strand; PAM type: NRG; PAM sequence: TAG
aagaagaaagaatatggaga

SEQ ID NO: 155955 - DNA, 20 bp, Artificial Sequence
  Description of Artificial Sequence: Synthetic oligonucleotide
  Target: LAMA2; (+) strand; PAM type: NRG; PAM sequence: AAG
agaaagaatatggagatagc

SEQ ID NO: 155956 - DNA, 20 bp, Artificial Sequence
  Description of Artificial Sequence: Synthetic oligonucleotide
  Target: LAMA2; (+) strand; PAM type: NRG; PAM sequence: TAG
gaatatggagatagcaagtg

SEQ ID NO: 155957 - DNA, 20 bp, Artificial Sequence
  Description of Artificial Sequence: Synthetic oligonucleotide
  Target: LAMA2; (+) strand; PAM type: NRG; PAM sequence: TAG
agtgtagacttgtctttttc

SEQ ID NO: 155958 - DNA, 20 bp, Artificial Sequence
  Description of Artificial Sequence: Synthetic oligonucleotide
  Target: LAMA2; (+) strand; PAM type: NRG; PAM sequence: AAG
tagacttgtctttttctaga

SEQ ID NO: 155959 - DNA, 20 bp, Artificial Sequence
  Description of Artificial Sequence: Synthetic oligonucleotide
  Target: LAMA2; (+) strand; PAM type: NRG; PAM sequence: AAG
tctttttctagaaagaaaat

SEQ ID NO: 155960 - DNA, 20 bp, Artificial Sequence
  Description of Artificial Sequence: Synthetic oligonucleotide
  Target: LAMA2; (+) strand; PAM type: NRG; PAM sequence: AGG
ctttttctagaaagaaaata

SEQ ID NO: 155961 - DNA, 20 bp, Artificial Sequence
  Description of Artificial Sequence: Synthetic oligonucleotide
  Target: LAMA2; (+) strand; PAM type: NRG; PAM sequence: GGG
tttttctagaaagaaaataa

SEQ ID NO: 155962 - DNA, 20 bp, Artificial Sequence
  Description of Artificial Sequence: Synthetic oligonucleotide
  Target: LAMA2; (+) strand; PAM type: NRG; PAM sequence: TAG
ctagaaagaaaataagggca

SEQ ID NO: 155963 - DNA, 20 bp, Artificial Sequence
  Description of Artificial Sequence: Synthetic oligonucleotide
  Target: LAMA2; (+) strand; PAM type: NRG; PAM sequence: TGG
taagggcatagatactttta

SEQ ID NO: 155964 - DNA, 20 bp, Artificial Sequence
  Description of Artificial Sequence: Synthetic oligonucleotide
  Target: LAMA2; (+) strand; PAM type: NRG; PAM sequence: GGG
aagggcatagatacttttat

SEQ ID NO: 155965 - DNA, 20 bp, Artificial Sequence
  Description of Artificial Sequence: Synthetic oligonucleotide
  Target: LAMA2; (+) strand; PAM type: NRG; PAM sequence: TGG
atagatacttttatgggatg

SEQ ID NO: 155966 - DNA, 20 bp, Artificial Sequence
  Description of Artificial Sequence: Synthetic oligonucleotide
  Target: LAMA2; (+) strand; PAM type: NRG; PAM sequence: TGG
tacttttatgggatgtggaa

SEQ ID NO: 155967 - DNA, 20 bp, Artificial Sequence
  Description of Artificial Sequence: Synthetic oligonucleotide
  Target: LAMA2; (+) strand; PAM type: NRG; PAM sequence: TGG
tatgggatgtggaatggtgc

SEQ ID NO: 155968 - DNA, 20 bp, Artificial Sequence
  Description of Artificial Sequence: Synthetic oligonucleotide
  Target: LAMA2; (+) strand; PAM type: NRG; PAM sequence: GGG
atgggatgtggaatggtgct

SEQ ID NO: 155969 - DNA, 20 bp, Artificial Sequence
  Description of Artificial Sequence: Synthetic oligonucleotide
  Target: LAMA2; (+) strand; PAM type: NRG; PAM sequence: TGG
tggaatggtgctgggacatg

SEQ ID NO: 155970 - DNA, 20 bp, Artificial Sequence
  Description of Artificial Sequence: Synthetic oligonucleotide
  Target: LAMA2; (+) strand; PAM type: NRG; PAM sequence: AAG
aatggtgctgggacatgtgg

SEQ ID NO: 155971 - DNA, 20 bp, Artificial Sequence
  Description of Artificial Sequence: Synthetic oligonucleotide
  Target: LAMA2; (+) strand; PAM type: NRG; PAM sequence: TGG
catgtggaagtctcttctat

SEQ ID NO: 155972 - DNA, 20 bp, Artificial Sequence
  Description of Artificial Sequence: Synthetic oligonucleotide
  Target: LAMA2; (+) strand; PAM type: NRG; PAM sequence: TAG
tctattggtctgtatattct

SEQ ID NO: 155973 - DNA, 20 bp, Artificial Sequence
  Description of Artificial Sequence: Synthetic oligonucleotide
  Target: LAMA2; (+) strand; PAM type: NRG; PAM sequence: TAG
gtctgtatattcttagaaaa

SEQ ID NO: 155974 - DNA, 20 bp, Artificial Sequence
  Description of Artificial Sequence: Synthetic oligonucleotide
  Target: LAMA2; (+) strand; PAM type: NRG; PAM sequence: GAG
ttagaaaatagaaaataatt

SEQ ID NO: 155975 - DNA, 20 bp, Artificial Sequence
  Description of Artificial Sequence: Synthetic oligonucleotide
  Target: LAMA2; (+) strand; PAM type: NRG; PAM sequence: GAG
aatagaaaataattgagtat

SEQ ID NO: 155976 - DNA, 20 bp, Artificial Sequence
  Description of Artificial Sequence: Synthetic oligonucleotide
  Target: LAMA2; (+) strand; PAM type: NRG; PAM sequence: TGG
aataattgagtatgagaaca

SEQ ID NO: 155977 - DNA, 20 bp, Artificial Sequence
  Description of Artificial Sequence: Synthetic oligonucleotide
  Target: LAMA2; (+) strand; PAM type: NRG; PAM sequence: GGG
ataattgagtatgagaacat

SEQ ID NO: 155978 - DNA, 20 bp, Artificial Sequence
  Description of Artificial Sequence: Synthetic oligonucleotide
  Target: LAMA2; (+) strand; PAM type: NRG; PAM sequence: GAG
aattgagtatgagaacatgg

SEQ ID NO: 155979 - DNA, 20 bp, Artificial Sequence
  Description of Artificial Sequence: Synthetic oligonucleotide
  Target: LAMA2; (+) strand; PAM type: NRG; PAM sequence: AGG
attgagtatgagaacatggg

SEQ ID NO: 155980 - DNA, 20 bp, Artificial Sequence
  Description of Artificial Sequence: Synthetic oligonucleotide
  Target: LAMA2; (+) strand; PAM type: NRG; PAM sequence: AAG
aacatgggaggaaaatgctg

SEQ ID NO: 155981 - DNA, 20 bp, Artificial Sequence
  Description of Artificial Sequence: Synthetic oligonucleotide
  Target: LAMA2; (+) strand; PAM type: NRG; PAM sequence: AAG
gaggaaaatgctgaagattc

SEQ ID NO: 155982 - DNA, 20 bp, Artificial Sequence
  Description of Artificial Sequence: Synthetic oligonucleotide
  Target: LAMA2; (+) strand; PAM type: NRG; PAM sequence: AGG
aggaaaatgctgaagattca

SEQ ID NO: 155983 - DNA, 20 bp, Artificial Sequence
  Description of Artificial Sequence: Synthetic oligonucleotide
  Target: LAMA2; (+) strand; PAM type: NRG; PAM sequence: GAG
gaaaatgctgaagattcaag

SEQ ID NO: 155984 - DNA, 20 bp, Artificial Sequence
  Description of Artificial Sequence: Synthetic oligonucleotide
  Target: LAMA2; (+) strand; PAM type: NRG; PAM sequence: AAG
tgctgaagattcaaggagaa

SEQ ID NO: 155985 - DNA, 20 bp, Artificial Sequence
  Description of Artificial Sequence: Synthetic oligonucleotide
  Target: LAMA2; (+) strand; PAM type: NRG; PAM sequence: GAG
ctgaagattcaaggagaaaa

SEQ ID NO: 155986 - DNA, 20 bp, Artificial Sequence
  Description of Artificial Sequence: Synthetic oligonucleotide
  Target: LAMA2; (+) strand; PAM type: NRG; PAM sequence: AAG
agattcaaggagaaaagaga

SEQ ID NO: 155987 - DNA, 20 bp, Artificial Sequence
  Description of Artificial Sequence: Synthetic oligonucleotide
  Target: LAMA2; (+) strand; PAM type: NRG; PAM sequence: AAG
agaaaagagaaagtatgaaa

SEQ ID NO: 155988 - DNA, 20 bp, Artificial Sequence
  Description of Artificial Sequence: Synthetic oligonucleotide
  Target: LAMA2; (+) strand; PAM type: NRG; PAM sequence: CAG
agaaagtatgaaaaagtatc

SEQ ID NO: 155989 - DNA, 20 bp, Artificial Sequence
  Description of Artificial Sequence: Synthetic oligonucleotide
  Target: LAMA2; (+) strand; PAM type: NRG; PAM sequence: AGG
gaaagtatgaaaaagtatcc

SEQ ID NO: 155990 - DNA, 20 bp, Artificial Sequence
  Description of Artificial Sequence: Synthetic oligonucleotide
  Target: LAMA2; (+) strand; PAM type: NRG; PAM sequence: TAG
tgaaaaagtatccaggaaca

SEQ ID NO: 155991 - DNA, 20 bp, Artificial Sequence
  Description of Artificial Sequence: Synthetic oligonucleotide
  Target: LAMA2; (+) strand; PAM type: NRG; PAM sequence: AAG
aagtatccaggaacatagca

SEQ ID NO: 155992 - DNA, 20 bp, Artificial Sequence
  Description of Artificial Sequence: Synthetic oligonucleotide
  Target: LAMA2; (+) strand; PAM type: NRG; PAM sequence: TGG
caggaacatagcaaagaaca

SEQ ID NO: 155993 - DNA, 20 bp, Artificial Sequence
  Description of Artificial Sequence: Synthetic oligonucleotide
  Target: LAMA2; (+) strand; PAM type: NRG; PAM sequence: CAG
acatagcaaagaacatggac

SEQ ID NO: 155994 - DNA, 20 bp, Artificial Sequence
  Description of Artificial Sequence: Synthetic oligonucleotide
  Target: LAMA2; (+) strand; PAM type: NRG; PAM sequence: CAG
agcaaagaacatggaccaga

SEQ ID NO: 155995 - DNA, 20 bp, Artificial Sequence
  Description of Artificial Sequence: Synthetic oligonucleotide
  Target: LAMA2; (+) strand; PAM type: NRG; PAM sequence: TAG
gaacatggaccagacagcat

SEQ ID NO: 155996 - DNA, 20 bp, Artificial Sequence
  Description of Artificial Sequence: Synthetic oligonucleotide
  Target: LAMA2; (+) strand; PAM type: NRG; PAM sequence: AGG
aacatggaccagacagcatt

SEQ ID NO: 155997 - DNA, 20 bp, Artificial Sequence
  Description of Artificial Sequence: Synthetic oligonucleotide
  Target: LAMA2; (+) strand; PAM type: NRG; PAM sequence: GGG
acatggaccagacagcatta

SEQ ID NO: 155998 - DNA, 20 bp, Artificial Sequence
  Description of Artificial Sequence: Synthetic oligonucleotide
  Target: LAMA2; (+) strand; PAM type: NRG; PAM sequence: GAG
acagcattagggatctatgt

SEQ ID NO: 155999 - DNA, 20 bp, Artificial Sequence
  Description of Artificial Sequence: Synthetic oligonucleotide
  Target: LAMA2; (+) strand; PAM type: NRG; PAM sequence: TAG
attagggatctatgtgagtt

SEQ ID NO: 156000 - DNA, 20 bp, Artificial Sequence
  Description of Artificial Sequence: Synthetic oligonucleotide
  Target: LAMA2; (+) strand; PAM type: NRG; PAM sequence: AAG
gtttagtaatcatgaatttg

SEQ ID NO: 156001 - DNA, 20 bp, Artificial Sequence
  Description of Artificial Sequence: Synthetic oligonucleotide
  Target: LAMA2; (+) strand; PAM type: NRG; PAM sequence: AAG
agtaatcatgaatttgaagc

SEQ ID NO: 156002 - DNA, 20 bp, Artificial Sequence
  Description of Artificial Sequence: Synthetic oligonucleotide
  Target: LAMA2; (+) strand; PAM type: NRG; PAM sequence: AGG
gtaatcatgaatttgaagca

SEQ ID NO: 156003 - DNA, 20 bp, Artificial Sequence
  Description of Artificial Sequence: Synthetic oligonucleotide
  Target: LAMA2; (+) strand; PAM type: NRG; PAM sequence: CAG
tcatgaatttgaagcaaggt

SEQ ID NO: 156004 - DNA, 20 bp, Artificial Sequence
  Description of Artificial Sequence: Synthetic oligonucleotide
  Target: LAMA2; (+) strand; PAM type: NRG; PAM sequence: CAG
tttgaagcaaggtcagtcaa

SEQ ID NO: 156005 - DNA, 20 bp, Artificial Sequence
  Description of Artificial Sequence: Synthetic oligonucleotide
  Target: LAMA2; (+) strand; PAM type: NRG; PAM sequence: AGG
ttgaagcaaggtcagtcaac

SEQ ID NO: 156006 - DNA, 20 bp, Artificial Sequence
  Description of Artificial Sequence: Synthetic oligonucleotide
  Target: LAMA2; (+) strand; PAM type: NRG; PAM sequence: GAG
ggtcagtcaacaggtactat

SEQ ID NO: 156007 - DNA, 20 bp, Artificial Sequence
  Description of Artificial Sequence: Synthetic oligonucleotide
  Target: LAMA2; (+) strand; PAM type: NRG; PAM sequence: CAG
acaggtactatgagtttctt

SEQ ID NO: 156008 - DNA, 20 bp, Artificial Sequence
  Description of Artificial Sequence: Synthetic oligonucleotide
  Target: LAMA2; (+) strand; PAM type: NRG; PAM sequence: CAG
tgagtttcttcagatgtatc

SEQ ID NO: 156009 - DNA, 20 bp, Artificial Sequence
  Description of Artificial Sequence: Synthetic oligonucleotide
  Target: LAMA2; (+) strand; PAM type: NRG; PAM sequence: CAG
ttcttcagatgtatccagct

SEQ ID NO: 156010 - DNA, 20 bp, Artificial Sequence
  Description of Artificial Sequence: Synthetic oligonucleotide
  Target: LAMA2; (+) strand; PAM type: NRG; PAM sequence: CAG
ttcagatgtatccagctcag

SEQ ID NO: 156011 - DNA, 20 bp, Artificial Sequence
  Description of Artificial Sequence: Synthetic oligonucleotide
  Target: LAMA2; (+) strand; PAM type: NRG; PAM sequence: CAG
tgtatccagctcagcagttg

SEQ ID NO: 156012 - DNA, 20 bp, Artificial Sequence
  Description of Artificial Sequence: Synthetic oligonucleotide
  Target: LAMA2; (+) strand; PAM type: NRG; PAM sequence: AGG
gtatccagctcagcagttgc

SEQ ID NO: 156013 - DNA, 20 bp, Artificial Sequence
  Description of Artificial Sequence: Synthetic oligonucleotide
  Target: LAMA2; (+) strand; PAM type: NRG; PAM sequence: CAG
cagctcagcagttgcaggta

SEQ ID NO: 156014 - DNA, 20 bp, Artificial Sequence
  Description of Artificial Sequence: Synthetic oligonucleotide
  Target: LAMA2; (+) strand; PAM type: NRG; PAM sequence: GAG
gctcagcagttgcaggtaca

SEQ ID NO: 156015 - DNA, 20 bp, Artificial Sequence
  Description of Artificial Sequence: Synthetic oligonucleotide
  Target: LAMA2; (+) strand; PAM type: NRG; PAM sequence: AAG
cagcagttgcaggtacagag

SEQ ID NO: 156016 - DNA, 20 bp, Artificial Sequence
  Description of Artificial Sequence: Synthetic oligonucleotide
  Target: LAMA2; (+) strand; PAM type: NRG; PAM sequence: TAG
agttgcaggtacagagaaga

SEQ ID NO: 156017 - DNA, 20 bp, Artificial Sequence
  Description of Artificial Sequence: Synthetic oligonucleotide
  Target: LAMA2; (+) strand; PAM type: NRG; PAM sequence: GAG
ttgcaggtacagagaagata

SEQ ID NO: 156018 - DNA, 20 bp, Artificial Sequence
  Description of Artificial Sequence: Synthetic oligonucleotide
  Target: LAMA2; (+) strand; PAM type: NRG; PAM sequence: AGG
tgcaggtacagagaagatag

SEQ ID NO: 156019 - DNA, 20 bp, Artificial Sequence
  Description of Artificial Sequence: Synthetic oligonucleotide
  Target: LAMA2; (+) strand; PAM type: NRG; PAM sequence: TAG
ggtacagagaagatagaggt

SEQ ID NO: 156020 - DNA, 20 bp, Artificial Sequence
  Description of Artificial Sequence: Synthetic oligonucleotide
  Target: LAMA2; (+) strand; PAM type: NRG; PAM sequence: TGG
gttagatttaactgacgttg

SEQ ID NO: 156021 - DNA, 20 bp, Artificial Sequence
  Description of Artificial Sequence: Synthetic oligonucleotide
  Target: LAMA2; (+) strand; PAM type: NRG; PAM sequence: AAG
atttaactgacgttgtggtt

SEQ ID NO: 156022 - DNA, 20 bp, Artificial Sequence
  Description of Artificial Sequence: Synthetic oligonucleotide
  Target: LAMA2; (+) strand; PAM type: NRG; PAM sequence: AAG
actgacgttgtggttaagcc

SEQ ID NO: 156023 - DNA, 20 bp, Artificial Sequence
  Description of Artificial Sequence: Synthetic oligonucleotide
  Target: LAMA2; (+) strand; PAM type: NRG; PAM sequence: CAG
gtggttaagccaagtgaata

SEQ ID NO: 156024 - DNA, 20 bp, Artificial Sequence
  Description of Artificial Sequence: Synthetic oligonucleotide
  Target: LAMA2; (+) strand; PAM type: NRG; PAM sequence: TAG
ccaagtgaatacagtaaaac

SEQ ID NO: 156025 - DNA, 20 bp, Artificial Sequence
  Description of Artificial Sequence: Synthetic oligonucleotide
  Target: LAMA2; (+) strand; PAM type: NRG; PAM sequence: GAG
aagtgaatacagtaaaacta

SEQ ID NO: 156026 - DNA, 20 bp, Artificial Sequence
  Description of Artificial Sequence: Synthetic oligonucleotide
  Target: LAMA2; (+) strand; PAM type: NRG; PAM sequence: TGG
gagattaaaataattgacca

SEQ ID NO: 156027 - DNA, 20 bp, Artificial Sequence
  Description of Artificial Sequence: Synthetic oligonucleotide
  Target: LAMA2; (+) strand; PAM type: NRG; PAM sequence: AAG
aataattgaccatggaatct

SEQ ID NO: 156028 - DNA, 20 bp, Artificial Sequence
  Description of Artificial Sequence: Synthetic oligonucleotide
  Target: LAMA2; (+) strand; PAM type: NRG; PAM sequence: CAG
attgaccatggaatctaaga

SEQ ID NO: 156029 - DNA, 20 bp, Artificial Sequence
  Description of Artificial Sequence: Synthetic oligonucleotide
  Target: LAMA2; (+) strand; PAM type: NRG; PAM sequence: GAG
atggaatctaagacagtgat

SEQ ID NO: 156030 - DNA, 20 bp, Artificial Sequence
  Description of Artificial Sequence: Synthetic oligonucleotide
  Target: LAMA2; (+) strand; PAM type: NRG; PAM sequence: AAG
gacagtgatgagaaaccctc

SEQ ID NO: 156031 - DNA, 20 bp, Artificial Sequence
  Description of Artificial Sequence: Synthetic oligonucleotide
  Target: LAMA2; (+) strand; PAM type: NRG; PAM sequence: CAG
gatgagaaaccctcaagcta

SEQ ID NO: 156032 - DNA, 20 bp, Artificial Sequence
  Description of Artificial Sequence: Synthetic oligonucleotide
  Target: LAMA2; (+) strand; PAM type: NRG; PAM sequence: TAG
attgtctccctaaatgctat

SEQ ID NO: 156033 - DNA, 20 bp, Artificial Sequence
  Description of Artificial Sequence: Synthetic oligonucleotide
  Target: LAMA2; (+) strand; PAM type: NRG; PAM sequence: TAG
cctaaatgctattagtactg

SEQ ID NO: 156034 - DNA, 20 bp, Artificial Sequence
  Description of Artificial Sequence: Synthetic oligonucleotide
  Target: LAMA2; (+) strand; PAM type: NRG; PAM sequence: AAG
atgctattagtactgtagcc

SEQ ID NO: 156035 - DNA, 20 bp, Artificial Sequence
  Description of Artificial Sequence: Synthetic oligonucleotide
  Target: LAMA2; (+) strand; PAM type: NRG; PAM sequence: AAG
attagtactgtagccaagac

SEQ ID NO: 156036 - DNA, 20 bp, Artificial Sequence
  Description of Artificial Sequence: Synthetic oligonucleotide
  Target: LAMA2; (+) strand; PAM type: NRG; PAM sequence: TAG
caagacaagtctttctttta

SEQ ID NO: 156037 - DNA, 20 bp, Artificial Sequence
  Description of Artificial Sequence: Synthetic oligonucleotide
  Target: LAMA2; (+) strand; PAM type: NRG; PAM sequence: AGG
aagacaagtctttcttttat

SEQ ID NO: 156038 - DNA, 20 bp, Artificial Sequence
  Description of Artificial Sequence: Synthetic oligonucleotide
  Target: LAMA2; (+) strand; PAM type: NRG; PAM sequence: AAG
tttcttttataggactatac

SEQ ID NO: 156039 - DNA, 20 bp, Artificial Sequence
  Description of Artificial Sequence: Synthetic oligonucleotide
  Target: LAMA2; (+) strand; PAM type: NRG; PAM sequence: AGG
ttcttttataggactataca

SEQ ID NO: 156040 - DNA, 20 bp, Artificial Sequence
  Description of Artificial Sequence: Synthetic oligonucleotide
  Target: LAMA2; (+) strand; PAM type: NRG; PAM sequence: TAG
tataggactatacaaggcct

SEQ ID NO: 156041 - DNA, 20 bp, Artificial Sequence
  Description of Artificial Sequence: Synthetic oligonucleotide
  Target: LAMA2; (+) strand; PAM type: NRG; PAM sequence: GAG
taggactatacaaggcctta

SEQ ID NO: 156042 - DNA, 20 bp, Artificial Sequence
  Description of Artificial Sequence: Synthetic oligonucleotide
  Target: LAMA2; (+) strand; PAM type: NRG; PAM sequence: AGG
aggactatacaaggccttag

SEQ ID NO: 156043 - DNA, 20 bp, Artificial Sequence
  Description of Artificial Sequence: Synthetic oligonucleotide
  Target: LAMA2; (+) strand; PAM type: NRG; PAM sequence: TAG
acaaggccttagaggatatt

SEQ ID NO: 156044 - DNA, 20 bp, Artificial Sequence
  Description of Artificial Sequence: Synthetic oligonucleotide
  Target: LAMA2; (+) strand; PAM type: NRG; PAM sequence: TGG
tagaggatatttagtatcct

SEQ ID NO: 156045 - DNA, 20 bp, Artificial Sequence
  Description of Artificial Sequence: Synthetic oligonucleotide
  Target: LAMA2; (+) strand; PAM type: NRG; PAM sequence: AAG
tatttagtatccttggccta

SEQ ID NO: 156046 - DNA, 20 bp, Artificial Sequence
  Description of Artificial Sequence: Synthetic oligonucleotide
  Target: LAMA2; (+) strand; PAM type: NRG; PAM sequence: AGG
atttagtatccttggcctaa

SEQ ID NO: 156047 - DNA, 20 bp, Artificial Sequence
  Description of Artificial Sequence: Synthetic oligonucleotide
  Target: LAMA2; (+) strand; PAM type: NRG; PAM sequence: AAG
tatccttggcctaaaggata

SEQ ID NO: 156048 - DNA, 20 bp, Artificial Sequence
  Description of Artificial Sequence: Synthetic oligonucleotide
  Target: LAMA2; (+) strand; PAM type: NRG; PAM sequence: AGG
atccttggcctaaaggataa

SEQ ID NO: 156049 - DNA, 20 bp, Artificial Sequence
  Description of Artificial Sequence: Synthetic oligonucleotide
  Target: LAMA2; (+) strand; PAM type: NRG; PAM sequence: AAG
tggcctaaaggataaaggta

SEQ ID NO: 156050 - DNA, 20 bp, Artificial Sequence
  Description of Artificial Sequence: Synthetic oligonucleotide
  Target: LAMA2; (+) strand; PAM type: NRG; PAM sequence: TGG
cctaaaggataaaggtaaag

SEQ ID NO: 156051 - DNA, 20 bp, Artificial Sequence
  Description of Artificial Sequence: Synthetic oligonucleotide
  Target: LAMA2; (+) strand; PAM type: NRG; PAM sequence: CAG
aggataaaggtaaagtggta

SEQ ID NO: 156052 - DNA, 20 bp, Artificial Sequence
  Description of Artificial Sequence: Synthetic oligonucleotide
  Target: LAMA2; (+) strand; PAM type: NRG; PAM sequence: TAG
aaagtggtacagtacacatt

SEQ ID NO: 156053 - DNA, 20 bp, Artificial Sequence
  Description of Artificial Sequence: Synthetic oligonucleotide
  Target: LAMA2; (+) strand; PAM type: NRG; PAM sequence: CAG
gtgtgctgtacactaaatat

SEQ ID NO: 156054 - DNA, 20 bp, Artificial Sequence
  Description of Artificial Sequence: Synthetic oligonucleotide
  Target: LAMA2; (+) strand; PAM type: NRG; PAM sequence: TAG
tgctgtacactaaatatcag

SEQ ID NO: 156055 - DNA, 20 bp, Artificial Sequence
  Description of Artificial Sequence: Synthetic oligonucleotide
  Target: LAMA2; (+) strand; PAM type: NRG; PAM sequence: AAG
tagcactttgccacaaatta

SEQ ID NO: 156056 - DNA, 20 bp, Artificial Sequence
  Description of Artificial Sequence: Synthetic oligonucleotide
  Target: LAMA2; (+) strand; PAM type: NRG; PAM sequence: AGG
agcactttgccacaaattaa

SEQ ID NO: 156057 - DNA, 20 bp, Artificial Sequence
  Description of Artificial Sequence: Synthetic oligonucleotide
  Target: LAMA2; (+) strand; PAM type: NRG; PAM sequence: CAG
tttgccacaaattaaaggaa

SEQ ID NO: 156058 - DNA, 20 bp, Artificial Sequence
  Description of Artificial Sequence: Synthetic oligonucleotide
  Target: LAMA2; (+) strand; PAM type: NRG; PAM sequence: CAG
gaacagtatataatccttga

SEQ ID NO: 156059 - DNA, 20 bp, Artificial Sequence
  Description of Artificial Sequence: Synthetic oligonucleotide
  Target: LAMA2; (+) strand; PAM type: NRG; PAM sequence: TAG
cattgcatttccttcttttt

SEQ ID NO: 156060 - DNA, 20 bp, Artificial Sequence
  Description of Artificial Sequence: Synthetic oligonucleotide
  Target: LAMA2; (+) strand; PAM type: NRG; PAM sequence: TGG
catttccttcttttttagaa

SEQ ID NO: 156061 - DNA, 20 bp, Artificial Sequence
  Description of Artificial Sequence: Synthetic oligonucleotide
  Target: LAMA2; (+) strand; PAM type: NRG; PAM sequence: AAG
ttttttctatatgttcccca

SEQ ID NO: 156062 - DNA, 20 bp, Artificial Sequence
  Description of Artificial Sequence: Synthetic oligonucleotide
  Target: LAMA2; (+) strand; PAM type: NRG; PAM sequence: AAG
ttctatatgttccccaaagc

SEQ ID NO: 156063 - DNA, 20 bp, Artificial Sequence
  Description of Artificial Sequence: Synthetic oligonucleotide
  Target: LAMA2; (+) strand; PAM type: NRG; PAM sequence: AGG
tctatatgttccccaaagca

SEQ ID NO: 156064 - DNA, 20 bp, Artificial Sequence
  Description of Artificial Sequence: Synthetic oligonucleotide
  Target: LAMA2; (+) strand; PAM type: NRG; PAM sequence: TAG
tatgttccccaaagcaaggc

SEQ ID NO: 156065 - DNA, 20 bp, Artificial Sequence
  Description of Artificial Sequence: Synthetic oligonucleotide
  Target: LAMA2; (+) strand; PAM type: NRG; PAM sequence: TAG
gaacatctatttattatatc

SEQ ID NO: 156066 - DNA, 20 bp, Artificial Sequence
  Description of Artificial Sequence: Synthetic oligonucleotide
  Target: LAMA2; (+) strand; PAM type: NRG; PAM sequence: TAG
attatatctagcacaaaaca

SEQ ID NO: 156067 - DNA, 20 bp, Artificial Sequence
  Description of Artificial Sequence: Synthetic oligonucleotide
  Target: LAMA2; (+) strand; PAM type: NRG; PAM sequence: AAG
tagcacaaaacatagaaaca

SEQ ID NO: 156068 - DNA, 20 bp, Artificial Sequence
  Description of Artificial Sequence: Synthetic oligonucleotide
  Target: LAMA2; (+) strand; PAM type: NRG; PAM sequence: AAG
cacaaaacatagaaacaaag

SEQ ID NO: 156069 - DNA, 20 bp, Artificial Sequence
  Description of Artificial Sequence: Synthetic oligonucleotide
  Target: LAMA2; (+) strand; PAM type: NRG; PAM sequence: AGG
acaaaacatagaaacaaaga

SEQ ID NO: 156070 - DNA, 20 bp, Artificial Sequence
  Description of Artificial Sequence: Synthetic oligonucleotide
  Target: LAMA2; (+) strand; PAM type: NRG; PAM sequence: TAG
acatagaaacaaagaaggca

SEQ ID NO: 156071 - DNA, 20 bp, Artificial Sequence
  Description of Artificial Sequence: Synthetic oligonucleotide
  Target: LAMA2; (+) strand; PAM type: NRG; PAM sequence: AGG
catagaaacaaagaaggcat

SEQ ID NO: 156072 - DNA, 20 bp, Artificial Sequence
  Description of Artificial Sequence: Synthetic oligonucleotide
  Target: LAMA2; (+) strand; PAM type: NRG; PAM sequence: TAG
attatgctttactgaacaca

SEQ ID NO: 156073 - DNA, 20 bp, Artificial Sequence
  Description of Artificial Sequence: Synthetic oligonucleotide
  Target: LAMA2; (+) strand; PAM type: NRG; PAM sequence: AGG
ttatgctttactgaacacat

SEQ ID NO: 156074 - DNA, 20 bp, Artificial Sequence
  Description of Artificial Sequence: Synthetic oligonucleotide
  Target: LAMA2; (+) strand; PAM type: NRG; PAM sequence: TAG
attgctaccaatcgtttaaa

SEQ ID NO: 156075 - DNA, 20 bp, Artificial Sequence
  Description of Artificial Sequence: Synthetic oligonucleotide
  Target: LAMA2; (+) strand; PAM type: NRG; PAM sequence: TAG
taaatagttgccttatttct

SEQ ID NO: 156076 - DNA, 20 bp, Artificial Sequence
  Description of Artificial Sequence: Synthetic oligonucleotide
  Target: LAMA2; (+) strand; PAM type: NRG; PAM sequence: TAG
tgccttatttcttagacaaa

SEQ ID NO: 156077 - DNA, 20 bp, Artificial Sequence
  Description of Artificial Sequence: Synthetic oligonucleotide
  Target: LAMA2; (+) strand; PAM type: NRG; PAM sequence: TGG
caaatagtaactgaaatgta

SEQ ID NO: 156078 - DNA, 20 bp, Artificial Sequence
  Description of Artificial Sequence: Synthetic oligonucleotide
  Target: LAMA2; (+) strand; PAM type: NRG; PAM sequence: GAG
aatagtaactgaaatgtatg

SEQ ID NO: 156079 - DNA, 20 bp, Artificial Sequence
  Description of Artificial Sequence: Synthetic oligonucleotide
  Target: LAMA2; (+) strand; PAM type: NRG; PAM sequence: TGG
ggagcattcatgcatatatt

SEQ ID NO: 156080 - DNA, 20 bp, Artificial Sequence
  Description of Artificial Sequence: Synthetic oligonucleotide
  Target: LAMA2; (+) strand; PAM type: NRG; PAM sequence: AAG
gcatatatttggaatgtatt

SEQ ID NO: 156081 - DNA, 20 bp, Artificial Sequence
  Description of Artificial Sequence: Synthetic oligonucleotide
  Target: LAMA2; (+) strand; PAM type: NRG; PAM sequence: TGG
taagtgttcatgtgtatacc

SEQ ID NO: 156082 - DNA, 20 bp, Artificial Sequence
  Description of Artificial Sequence: Synthetic oligonucleotide
  Target: LAMA2; (+) strand; PAM type: NRG; PAM sequence: CAG
gttcatgtgtatacctggcg

SEQ ID NO: 156083 - DNA, 20 bp, Artificial Sequence
  Description of Artificial Sequence: Synthetic oligonucleotide
  Target: LAMA2; (+) strand; PAM type: NRG; PAM sequence: GAG
tcatgtgtatacctggcgca

SEQ ID NO: 156084 - DNA, 20 bp, Artificial Sequence
  Description of Artificial Sequence: Synthetic oligonucleotide
  Target: LAMA2; (+) strand; PAM type: NRG; PAM sequence: CAG
tatctgatttgattttccca

SEQ ID NO: 156085 - DNA, 20 bp, Artificial Sequence
  Description of Artificial Sequence: Synthetic oligonucleotide
  Target: LAMA2; (+) strand; PAM type: NRG; PAM sequence: AAG
gattttcccacagtgccatg

SEQ ID NO: 156086 - DNA, 20 bp, Artificial Sequence
  Description of Artificial Sequence: Synthetic oligonucleotide
  Target: LAMA2; (+) strand; PAM type: NRG; PAM sequence: TAG
ttatcattatcactattata

SEQ ID NO: 156087 - DNA, 20 bp, Artificial Sequence
  Description of Artificial Sequence: Synthetic oligonucleotide
  Target: LAMA2; (+) strand; PAM type: NRG; PAM sequence: CAG
tatcactattatatagtaaa

SEQ ID NO: 156088 - DNA, 20 bp, Artificial Sequence
  Description of Artificial Sequence: Synthetic oligonucleotide
  Target: LAMA2; (+) strand; PAM type: NRG; PAM sequence: TGG
ataaaaatgtgtctatgact

SEQ ID NO: 156089 - DNA, 20 bp, Artificial Sequence
  Description of Artificial Sequence: Synthetic oligonucleotide
  Target: LAMA2; (+) strand; PAM type: NRG; PAM sequence: GAG
aaaaatgtgtctatgacttg

SEQ ID NO: 156090 - DNA, 20 bp, Artificial Sequence
  Description of Artificial Sequence: Synthetic oligonucleotide
  Target: LAMA2; (+) strand; PAM type: NRG; PAM sequence: TGG
tgtgtctatgacttggagaa

SEQ ID NO: 156091 - DNA, 20 bp, Artificial Sequence
  Description of Artificial Sequence: Synthetic oligonucleotide
  Target: LAMA2; (+) strand; PAM type: NRG; PAM sequence: TGG
tgttttacaatattacattc

SEQ ID NO: 156092 - DNA, 20 bp, Artificial Sequence
  Description of Artificial Sequence: Synthetic oligonucleotide
  Target: LAMA2; (+) strand; PAM type: NRG; PAM sequence: TAG
atgttgacattgaattgttc

SEQ ID NO: 156093 - DNA, 20 bp, Artificial Sequence
  Description of Artificial Sequence: Synthetic oligonucleotide
  Target: LAMA2; (+) strand; PAM type: NRG; PAM sequence: AGG
tgttgacattgaattgttct

SEQ ID NO: 156094 - DNA, 20 bp, Artificial Sequence
  Description of Artificial Sequence: Synthetic oligonucleotide
  Target: LAMA2; (+) strand; PAM type: NRG; PAM sequence: AAG
ttgaattgttctaggctgct

SEQ ID NO: 156095 - DNA, 20 bp, Artificial Sequence
  Description of Artificial Sequence: Synthetic oligonucleotide
  Target: LAMA2; (+) strand; PAM type: NRG; PAM sequence: AGG
tgaattgttctaggctgcta

SEQ ID NO: 156096 - DNA, 20 bp, Artificial Sequence
  Description of Artificial Sequence: Synthetic oligonucleotide
  Target: LAMA2; (+) strand; PAM type: NRG; PAM sequence: CAG
attgttctaggctgctaagg

SEQ ID NO: 156097 - DNA, 20 bp, Artificial Sequence
  Description of Artificial Sequence: Synthetic oligonucleotide
  Target: LAMA2; (+) strand; PAM type: NRG; PAM sequence: CAG
ggctgctaaggcagcactgt

SEQ ID NO: 156098 - DNA, 20 bp, Artificial Sequence
  Description of Artificial Sequence: Synthetic oligonucleotide
  Target: LAMA2; (+) strand; PAM type: NRG; PAM sequence: AAG
tgctaaggcagcactgtcag

SEQ ID NO: 156099 - DNA, 20 bp, Artificial Sequence
  Description of Artificial Sequence: Synthetic oligonucleotide
  Target: LAMA2; (+) strand; PAM type: NRG; PAM sequence: TAG
gtcagaagccacgttttttc

SEQ ID NO: 156100 - DNA, 20 bp, Artificial Sequence
  Description of Artificial Sequence: Synthetic oligonucleotide
  Target: LAMA2; (+) strand; PAM type: NRG; PAM sequence: AGG
tcagaagccacgttttttct

SEQ ID NO: 156101 - DNA, 20 bp, Artificial Sequence
  Description of Artificial Sequence: Synthetic oligonucleotide
  Target: LAMA2; (+) strand; PAM type: NRG; PAM sequence: TAG
cactttattcctttgtcctt

SEQ ID NO: 156102 - DNA, 20 bp, Artificial Sequence
  Description of Artificial Sequence: Synthetic oligonucleotide
  Target: LAMA2; (+) strand; PAM type: NRG; PAM sequence: TAG
ttttacattgatgattaaaa

SEQ ID NO: 156103 - DNA, 20 bp, Artificial Sequence
  Description of Artificial Sequence: Synthetic oligonucleotide
  Target: LAMA2; (+) strand; PAM type: NRG; PAM sequence: GAG
acattgatgattaaaatagt

SEQ ID NO: 156104 - DNA, 20 bp, Artificial Sequence
  Description of Artificial Sequence: Synthetic oligonucleotide
  Target: LAMA2; (+) strand; PAM type: NRG; PAM sequence: AAG
tttttaaataaaaaccaact

SEQ ID NO: 156105 - DNA, 20 bp, Artificial Sequence
  Description of Artificial Sequence: Synthetic oligonucleotide
  Target: LAMA2; (+) strand; PAM type: NRG; PAM sequence: TGG
gttttttattatttattatt

SEQ ID NO: 156106 - DNA, 20 bp, Artificial Sequence
  Description of Artificial Sequence: Synthetic oligonucleotide
  Target: LAMA2; (+) strand; PAM type: NRG; PAM sequence: GAG
tttttattatttattatttg

SEQ ID NO: 156107 - DNA, 20 bp, Artificial Sequence
  Description of Artificial Sequence: Synthetic oligonucleotide
  Target: LAMA2; (+) strand; PAM type: NRG; PAM sequence: AGG
ttttattatttattatttgg

SEQ ID NO: 156108 - DNA, 20 bp, Artificial Sequence
  Description of Artificial Sequence: Synthetic oligonucleotide
  Target: LAMA2; (+) strand; PAM type: NRG; PAM sequence: TAG
atgccctccaaaatatcatt

SEQ ID NO: 156109 - DNA, 20 bp, Artificial Sequence
  Description of Artificial Sequence: Synthetic oligonucleotide
  Target: LAMA2; (+) strand; PAM type: NRG; PAM sequence: TAG
aaatatcatttagtgcatct

SEQ ID NO: 156110 - DNA, 20 bp, Artificial Sequence
  Description of Artificial Sequence: Synthetic oligonucleotide
  Target: LAMA2; (+) strand; PAM type: NRG; PAM sequence: AAG
taaaacaatttaactgcttg

SEQ ID NO: 156111 - DNA, 20 bp, Artificial Sequence
  Description of Artificial Sequence: Synthetic oligonucleotide
  Target: LAMA2; (+) strand; PAM type: NRG; PAM sequence: CAG
aactgcttgaagaaaatgtc

SEQ ID NO: 156112 - DNA, 20 bp, Artificial Sequence
  Description of Artificial Sequence: Synthetic oligonucleotide
  Target: LAMA2; (+) strand; PAM type: NRG; PAM sequence: TGG
aaaatgtccagcttctgaaa

SEQ ID NO: 156113 - DNA, 20 bp, Artificial Sequence
  Description of Artificial Sequence: Synthetic oligonucleotide
  Target: LAMA2; (+) strand; PAM type: NRG; PAM sequence: TAG
cttctgaaatggcatgccat

SEQ ID NO: 156114 - DNA, 20 bp, Artificial Sequence
  Description of Artificial Sequence: Synthetic oligonucleotide
  Target: LAMA2; (+) strand; PAM type: NRG; PAM sequence: TAG
aatggcatgccattagatat

SEQ ID NO: 156115 - DNA, 20 bp, Artificial Sequence
  Description of Artificial Sequence: Synthetic oligonucleotide
  Target: LAMA2; (+) strand; PAM type: NRG; PAM sequence: TAG
aaatgtcttcaacctctatg

SEQ ID NO: 156116 - DNA, 20 bp, Artificial Sequence
  Description of Artificial Sequence: Synthetic oligonucleotide
  Target: LAMA2; (+) strand; PAM type: NRG; PAM sequence: TAG
ctatgtagttactatcaata

SEQ ID NO: 156117 - DNA, 20 bp, Artificial Sequence
  Description of Artificial Sequence: Synthetic oligonucleotide
  Target: LAMA2; (+) strand; PAM type: NRG; PAM sequence: TGG
atatagccatgcaatatata

SEQ ID NO: 156118 - DNA, 20 bp, Artificial Sequence
  Description of Artificial Sequence: Synthetic oligonucleotide
  Target: LAMA2; (+) strand; PAM type: NRG; PAM sequence: GAG
atagccatgcaatatatatg

SEQ ID NO: 156119 - DNA, 20 bp, Artificial Sequence
  Description of Artificial Sequence: Synthetic oligonucleotide
  Target: LAMA2; (+) strand; PAM type: NRG; PAM sequence: AAG
agttccaaatacctttcaaa

SEQ ID NO: 156120 - DNA, 20 bp, Artificial Sequence
  Description of Artificial Sequence: Synthetic oligonucleotide
  Target: LAMA2; (+) strand; PAM type: NRG; PAM sequence: CAG
ttcaaaaagtaatgttgata

SEQ ID NO: 156121 - DNA, 20 bp, Artificial Sequence
  Description of Artificial Sequence: Synthetic oligonucleotide
  Target: LAMA2; (+) strand; PAM type: NRG; PAM sequence: TAG
aaaaagtaatgttgatacag

SEQ ID NO: 156122 - DNA, 20 bp, Artificial Sequence
  Description of Artificial Sequence: Synthetic oligonucleotide
  Target: LAMA2; (+) strand; PAM type: NRG; PAM sequence: AAG
gattgaaactgcattatacg

SEQ ID NO: 156123 - DNA, 20 bp, Artificial Sequence
  Description of Artificial Sequence: Synthetic oligonucleotide
  Target: LAMA2; (+) strand; PAM type: NRG; PAM sequence: CAG
tatacgaagttctttccttt

SEQ ID NO: 156124 - DNA, 20 bp, Artificial Sequence
  Description of Artificial Sequence: Synthetic oligonucleotide
  Target: LAMA2; (+) strand; PAM type: NRG; PAM sequence: TAG
gcacaataacctgaaaaata

SEQ ID NO: 156125 - DNA, 20 bp, Artificial Sequence
  Description of Artificial Sequence: Synthetic oligonucleotide
  Target: LAMA2; (+) strand; PAM type: NRG; PAM sequence: AAG
aaaatatagctgtctattta

SEQ ID NO: 156126 - DNA, 20 bp, Artificial Sequence
  Description of Artificial Sequence: Synthetic oligonucleotide
  Target: LAMA2; (+) strand; PAM type: NRG; PAM sequence: AAG
atatagctgtctatttaaag

SEQ ID NO: 156127 - DNA, 20 bp, Artificial Sequence
  Description of Artificial Sequence: Synthetic oligonucleotide
  Target: LAMA2; (+) strand; PAM type: NRG; PAM sequence: TGG
aaagaagacattttcttgtt

SEQ ID NO: 156128 - DNA, 20 bp, Artificial Sequence
  Description of Artificial Sequence: Synthetic oligonucleotide
  Target: LAMA2; (+) strand; PAM type: NRG; PAM sequence: CAG
gaagacattttcttgtttgg

SEQ ID NO: 156129 - DNA, 20 bp, Artificial Sequence
  Description of Artificial Sequence: Synthetic oligonucleotide
  Target: LAMA2; (+) strand; PAM type: NRG; PAM sequence: CAG
ggcagaatattatcatcata

SEQ ID NO: 156130 - DNA, 20 bp, Artificial Sequence
  Description of Artificial Sequence: Synthetic oligonucleotide
  Target: LAMA2; (+) strand; PAM type: NRG; PAM sequence: TGG
catacagcatatgtacaata

SEQ ID NO: 156131 - DNA, 20 bp, Artificial Sequence
  Description of Artificial Sequence: Synthetic oligonucleotide
  Target: LAMA2; (+) strand; PAM type: NRG; PAM sequence: TAG
taatttgtgtcgatatgtgc

SEQ ID NO: 156132 - DNA, 20 bp, Artificial Sequence
  Description of Artificial Sequence: Synthetic oligonucleotide
  Target: LAMA2; (+) strand; PAM type: NRG; PAM sequence: AGG
aatttgtgtcgatatgtgct

SEQ ID NO: 156133 - DNA, 20 bp, Artificial Sequence
  Description of Artificial Sequence: Synthetic oligonucleotide
  Target: LAMA2; (+) strand; PAM type: NRG; PAM sequence: TAG
gtgtcgatatgtgctaggct

SEQ ID NO: 156134 - DNA, 20 bp, Artificial Sequence
  Description of Artificial Sequence: Synthetic oligonucleotide
  Target: LAMA2; (+) strand; PAM type: NRG; PAM sequence: AAG
aggcttagaaaactcacttt

SEQ ID NO: 156135 - DNA, 20 bp, Artificial Sequence
  Description of Artificial Sequence: Synthetic oligonucleotide
  Target: LAMA2; (+) strand; PAM type: NRG; PAM sequence: TGG
aagttttactaaatttattt

SEQ ID NO: 156136 - DNA, 20 bp, Artificial Sequence
  Description of Artificial Sequence: Synthetic oligonucleotide
  Target: LAMA2; (+) strand; PAM type: NRG; PAM sequence: GAG
gttttactaaatttattttg

SEQ ID NO: 156137 - DNA, 20 bp, Artificial Sequence
  Description of Artificial Sequence: Synthetic oligonucleotide
  Target: LAMA2; (+) strand; PAM type: NRG; PAM sequence: AAG
tttgacatgatttatattct

SEQ ID NO: 156138 - DNA, 20 bp, Artificial Sequence
  Description of Artificial Sequence: Synthetic oligonucleotide
  Target: LAMA2; (+) strand; PAM type: NRG; PAM sequence: AGG
ttgacatgatttatattcta

SEQ ID NO: 156139 - DNA, 20 bp, Artificial Sequence
  Description of Artificial Sequence: Synthetic oligonucleotide
  Target: LAMA2; (+) strand; PAM type: NRG; PAM sequence: GAG
gacatgatttatattctaag

SEQ ID NO: 156140 - DNA, 20 bp, Artificial Sequence
  Description of Artificial Sequence: Synthetic oligonucleotide
  Target: LAMA2; (+) strand; PAM type: NRG; PAM sequence: CAG
tttatattctaaggagatct

SEQ ID NO: 156141 - DNA, 20 bp, Artificial Sequence
  Description of Artificial Sequence: Synthetic oligonucleotide
  Target: LAMA2; (+) strand; PAM type: NRG; PAM sequence: TAG
cctgcttaaatgacattaca

SEQ ID NO: 156142 - DNA, 20 bp, Artificial Sequence
  Description of Artificial Sequence: Synthetic oligonucleotide
  Target: LAMA2; (+) strand; PAM type: NRG; PAM sequence: TAG
cttaaatgacattacataga

SEQ ID NO: 156143 - DNA, 20 bp, Artificial Sequence
  Description of Artificial Sequence: Synthetic oligonucleotide
  Target: LAMA2; (+) strand; PAM type: NRG; PAM sequence: AAG
aatgacattacatagataga

SEQ ID NO: 156144 - DNA, 20 bp, Artificial Sequence
  Description of Artificial Sequence: Synthetic oligonucleotide
  Target: LAMA2; (+) strand; PAM type: NRG; PAM sequence: AGG
atgacattacatagatagaa

SEQ ID NO: 156145 - DNA, 20 bp, Artificial Sequence
  Description of Artificial Sequence: Synthetic oligonucleotide
  Target: LAMA2; (+) strand; PAM type: NRG; PAM sequence: TAG
aaaggtatatattcttatta

SEQ ID NO: 156146 - DNA, 20 bp, Artificial Sequence
  Description of Artificial Sequence: Synthetic oligonucleotide
  Target: LAMA2; (+) strand; PAM type: NRG; PAM sequence: CAG
ggtatatattcttattatag

SEQ ID NO: 156147 - DNA, 20 bp, Artificial Sequence
  Description of Artificial Sequence: Synthetic oligonucleotide
  Target: LAMA2; (+) strand; PAM type: NRG; PAM sequence: CAG
cttattatagcagtgtctgc

SEQ ID NO: 156148 - DNA, 20 bp, Artificial Sequence
  Description of Artificial Sequence: Synthetic oligonucleotide
  Target: LAMA2; (+) strand; PAM type: NRG; PAM sequence: AGG
ttattatagcagtgtctgcc

SEQ ID NO: 156149 - DNA, 20 bp, Artificial Sequence
  Description of Artificial Sequence: Synthetic oligonucleotide
  Target: LAMA2; (+) strand; PAM type: NRG; PAM sequence: GGG
tattatagcagtgtctgcca

SEQ ID NO: 156150 - DNA, 20 bp, Artificial Sequence
  Description of Artificial Sequence: Synthetic oligonucleotide
  Target: LAMA2; (+) strand; PAM type: NRG; PAM sequence: CAG
agcagtgtctgccagggctg

SEQ ID NO: 156151 - DNA, 20 bp, Artificial Sequence
  Description of Artificial Sequence: Synthetic oligonucleotide
  Target: LAMA2; (+) strand; PAM type: NRG; PAM sequence: TAG
cagggctgcagtcctgttgt

SEQ ID NO: 156152 - DNA, 20 bp, Artificial Sequence
  Description of Artificial Sequence: Synthetic oligonucleotide
  Target: LAMA2; (+) strand; PAM type: NRG; PAM sequence: AAG
ggctgcagtcctgttgttag

SEQ ID NO: 156153 - DNA, 20 bp, Artificial Sequence
  Description of Artificial Sequence: Synthetic oligonucleotide
  Target: LAMA2; (+) strand; PAM type: NRG; PAM sequence: AGG
gctgcagtcctgttgttaga

SEQ ID NO: 156154 - DNA, 20 bp, Artificial Sequence
  Description of Artificial Sequence: Synthetic oligonucleotide
  Target: LAMA2; (+) strand; PAM type: NRG; PAM sequence: CAG
tcctgttgttagaaggctgt

SEQ ID NO: 156155 - DNA, 20 bp, Artificial Sequence
  Description of Artificial Sequence: Synthetic oligonucleotide
  Target: LAMA2; (+) strand; PAM type: NRG; PAM sequence: AAG
gctgtcagaattttaaatgt

SEQ ID NO: 156156 - DNA, 20 bp, Artificial Sequence
  Description of Artificial Sequence: Synthetic oligonucleotide
  Target: LAMA2; (+) strand; PAM type: NRG; PAM sequence: CAG
aaatgtaagccttcctttcc

SEQ ID NO: 156157 - DNA, 20 bp, Artificial Sequence
  Description of Artificial Sequence: Synthetic oligonucleotide
  Target: LAMA2; (+) strand; PAM type: NRG; PAM sequence: AGG
aatgtaagccttcctttccc

SEQ ID NO: 156158 - DNA, 20 bp, Artificial Sequence
  Description of Artificial Sequence: Synthetic oligonucleotide
  Target: LAMA2; (+) strand; PAM type: NRG; PAM sequence: AAG
ctaactcctattaatttctg

SEQ ID NO: 156159 - DNA, 20 bp, Artificial Sequence
  Description of Artificial Sequence: Synthetic oligonucleotide
  Target: LAMA2; (+) strand; PAM type: NRG; PAM sequence: TGG
ctattaatttctgaagactg

SEQ ID NO: 156160 - DNA, 20 bp, Artificial Sequence
  Description of Artificial Sequence: Synthetic oligonucleotide
  Target: LAMA2; (+) strand; PAM type: NRG; PAM sequence: GGG
tattaatttctgaagactgt

SEQ ID NO: 156161 - DNA, 20 bp, Artificial Sequence
  Description of Artificial Sequence: Synthetic oligonucleotide
  Target: LAMA2; (+) strand; PAM type: NRG; PAM sequence: GGG
attaatttctgaagactgtg

SEQ ID NO: 156162 - DNA, 20 bp, Artificial Sequence
  Description of Artificial Sequence: Synthetic oligonucleotide
  Target: LAMA2; (+) strand; PAM type: NRG; PAM sequence: TAG
tgtggggccatcctatatct

SEQ ID NO: 156163 - DNA, 20 bp, Artificial Sequence
  Description of Artificial Sequence: Synthetic oligonucleotide
  Target: LAMA2; (+) strand; PAM type: NRG; PAM sequence: TAG
ctatatcttagaacaaaata

SEQ ID NO: 156164 - DNA, 20 bp, Artificial Sequence
  Description of Artificial Sequence: Synthetic oligonucleotide
  Target: LAMA2; (+) strand; PAM type: NRG; PAM sequence: TAG
ttatttcaaaattataataa

SEQ ID NO: 156165 - DNA, 20 bp, Artificial Sequence
  Description of Artificial Sequence: Synthetic oligonucleotide
  Target: LAMA2; (+) strand; PAM type: NRG; PAM sequence: TGG
caaaattataataatagcaa

SEQ ID NO: 156166 - DNA, 20 bp, Artificial Sequence
  Description of Artificial Sequence: Synthetic oligonucleotide
  Target: LAMA2; (+) strand; PAM type: NRG; PAM sequence: TGG
tggatttcaaattaaaattc

SEQ ID NO: 156167 - DNA, 20 bp, Artificial Sequence
  Description of Artificial Sequence: Synthetic oligonucleotide
  Target: LAMA2; (+) strand; PAM type: NRG; PAM sequence: TAG
tttcaaattaaaattctggc

SEQ ID NO: 156168 - DNA, 20 bp, Artificial Sequence
  Description of Artificial Sequence: Synthetic oligonucleotide
  Target: LAMA2; (+) strand; PAM type: NRG; PAM sequence: CAG
attctggctagtgaatccct

SEQ ID NO: 156169 - DNA, 20 bp, Artificial Sequence
  Description of Artificial Sequence: Synthetic oligonucleotide
  Target: LAMA2; (+) strand; PAM type: NRG; PAM sequence: AGG
ttctggctagtgaatccctc

SEQ ID NO: 156170 - DNA, 20 bp, Artificial Sequence
  Description of Artificial Sequence: Synthetic oligonucleotide
  Target: LAMA2; (+) strand; PAM type: NRG; PAM sequence: TAG
attgactgatttgtatgttg

SEQ ID NO: 156171 - DNA, 20 bp, Artificial Sequence
  Description of Artificial Sequence: Synthetic oligonucleotide
  Target: LAMA2; (+) strand; PAM type: NRG; PAM sequence: AGG
ttgactgatttgtatgttgt

SEQ ID NO: 156172 - DNA, 20 bp, Artificial Sequence
  Description of Artificial Sequence: Synthetic oligonucleotide
  Target: LAMA2; (+) strand; PAM type: NRG; PAM sequence: AAG
gctaaataatgccctcctcc

SEQ ID NO: 156173 - DNA, 20 bp, Artificial Sequence
  Description of Artificial Sequence: Synthetic oligonucleotide
  Target: LAMA2; (+) strand; PAM type: NRG; PAM sequence: TAG
gccctcctccaagataccca

SEQ ID NO: 156174 - DNA, 20 bp, Artificial Sequence
  Description of Artificial Sequence: Synthetic oligonucleotide
  Target: LAMA2; (+) strand; PAM type: NRG; PAM sequence: CAG
gatacccatagctgaatttc

SEQ ID NO: 156175 - DNA, 20 bp, Artificial Sequence
  Description of Artificial Sequence: Synthetic oligonucleotide
  Target: LAMA2; (+) strand; PAM type: NRG; PAM sequence: TGG
taaatatgttccctcttaca

SEQ ID NO: 156176 - DNA, 20 bp, Artificial Sequence
  Description of Artificial Sequence: Synthetic oligonucleotide
  Target: LAMA2; (+) strand; PAM type: NRG; PAM sequence: AAG
tgttccctcttacatggcaa

SEQ ID NO: 156177 - DNA, 20 bp, Artificial Sequence
  Description of Artificial Sequence: Synthetic oligonucleotide
  Target: LAMA2; (+) strand; PAM type: NRG; PAM sequence: AGG
gttccctcttacatggcaaa

SEQ ID NO: 156178 - DNA, 20 bp, Artificial Sequence
  Description of Artificial Sequence: Synthetic oligonucleotide
  Target: LAMA2; (+) strand; PAM type: NRG; PAM sequence: GGG
ttccctcttacatggcaaaa

SEQ ID NO: 156179 - DNA, 20 bp, Artificial Sequence
  Description of Artificial Sequence: Synthetic oligonucleotide
  Target: LAMA2; (+) strand; PAM type: NRG; PAM sequence: AAG
gggactttgcaaatgtgact

SEQ ID NO: 156180 - DNA, 20 bp, Artificial Sequence
  Description of Artificial Sequence: Synthetic oligonucleotide
  Target: LAMA2; (+) strand; PAM type: NRG; PAM sequence: AAG
ttgcaaatgtgactaagttt

SEQ ID NO: 156181 - DNA, 20 bp, Artificial Sequence
  Description of Artificial Sequence: Synthetic oligonucleotide
  Target: LAMA2; (+) strand; PAM type: NRG; PAM sequence: AAG
tgactaagtttaagaacctt

SEQ ID NO: 156182 - DNA, 20 bp, Artificial Sequence
  Description of Artificial Sequence: Synthetic oligonucleotide
  Target: LAMA2; (+) strand; PAM type: NRG; PAM sequence: AGG
gactaagtttaagaacctta

SEQ ID NO: 156183 - DNA, 20 bp, Artificial Sequence
  Description of Artificial Sequence: Synthetic oligonucleotide
  Target: LAMA2; (+) strand; PAM type: NRG; PAM sequence: TGG
taagtttaagaaccttaagg

SEQ ID NO: 156184 - DNA, 20 bp, Artificial Sequence
  Description of Artificial Sequence: Synthetic oligonucleotide
  Target: LAMA2; (+) strand; PAM type: NRG; PAM sequence: GGG
aagtttaagaaccttaaggt

SEQ ID NO: 156185 - DNA, 20 bp, Artificial Sequence
  Description of Artificial Sequence: Synthetic oligonucleotide
  Target: LAMA2; (+) strand; PAM type: NRG; PAM sequence: AAG
tttaagaaccttaaggtggg

SEQ ID NO: 156186 - DNA, 20 bp, Artificial Sequence
  Description of Artificial Sequence: Synthetic oligonucleotide
  Target: LAMA2; (+) strand; PAM type: NRG; PAM sequence: CAG
gaagatgatcctgcgttatc

SEQ ID NO: 156187 - DNA, 20 bp, Artificial Sequence
  Description of Artificial Sequence: Synthetic oligonucleotide
  Target: LAMA2; (+) strand; PAM type: NRG; PAM sequence: AGG
aagatgatcctgcgttatcc

SEQ ID NO: 156188 - DNA, 20 bp, Artificial Sequence
  Description of Artificial Sequence: Synthetic oligonucleotide
  Target: LAMA2; (+) strand; PAM type: NRG; PAM sequence: TGG
atgatcctgcgttatccagg

SEQ ID NO: 156189 - DNA, 20 bp, Artificial Sequence
  Description of Artificial Sequence: Synthetic oligonucleotide
  Target: LAMA2; (+) strand; PAM type: NRG; PAM sequence: CAG
ttatccaggtggaccgaatc

SEQ ID NO: 156190 - DNA, 20 bp, Artificial Sequence
  Description of Artificial Sequence: Synthetic oligonucleotide
  Target: LAMA2; (+) strand; PAM type: NRG; PAM sequence: GAG
tggaccgaatccagtcacat

SEQ ID NO: 156191 - DNA, 20 bp, Artificial Sequence
  Description of Artificial Sequence: Synthetic oligonucleotide
  Target: LAMA2; (+) strand; PAM type: NRG; PAM sequence: AAG
ccagtcacatgagaccttaa

SEQ ID NO: 156192 - DNA, 20 bp, Artificial Sequence
  Description of Artificial Sequence: Synthetic oligonucleotide
  Target: LAMA2; (+) strand; PAM type: NRG; PAM sequence: TAG
gtcacatgagaccttaaaag

SEQ ID NO: 156193 - DNA, 20 bp, Artificial Sequence
  Description of Artificial Sequence: Synthetic oligonucleotide
  Target: LAMA2; (+) strand; PAM type: NRG; PAM sequence: AAG
acatgagaccttaaaagtag

SEQ ID NO: 156194 - DNA, 20 bp, Artificial Sequence
  Description of Artificial Sequence: Synthetic oligonucleotide
  Target: LAMA2; (+) strand; PAM type: NRG; PAM sequence: GAG
atgagaccttaaaagtagaa

SEQ ID NO: 156195 - DNA, 20 bp, Artificial Sequence
  Description of Artificial Sequence: Synthetic oligonucleotide
  Target: LAMA2; (+) strand; PAM type: NRG; PAM sequence: AGG
tgagaccttaaaagtagaag

SEQ ID NO: 156196 - DNA, 20 bp, Artificial Sequence
  Description of Artificial Sequence: Synthetic oligonucleotide
  Target: LAMA2; (+) strand; PAM type: NRG; PAM sequence: GGG
gagaccttaaaagtagaaga

SEQ ID NO: 156197 - DNA, 20 bp, Artificial Sequence
  Description of Artificial Sequence: Synthetic oligonucleotide
  Target: LAMA2; (+) strand; PAM type: NRG; PAM sequence: GGG
agaccttaaaagtagaagag

SEQ ID NO: 156198 - DNA, 20 bp, Artificial Sequence
  Description of Artificial Sequence: Synthetic oligonucleotide
  Target: LAMA2; (+) strand; PAM type: NRG; PAM sequence: GGG
gaccttaaaagtagaagagg

SEQ ID NO: 156199 - DNA, 20 bp, Artificial Sequence
  Description of Artificial Sequence: Synthetic oligonucleotide
  Target: LAMA2; (+) strand; PAM type: NRG; PAM sequence: CAG
ttaaaagtagaagagggggt

SEQ ID NO: 156200 - DNA, 20 bp, Artificial Sequence
  Description of Artificial Sequence: Synthetic oligonucleotide
  Target: LAMA2; (+) strand; PAM type: NRG; PAM sequence: GAG
aaaagtagaagagggggtca

SEQ ID NO: 156201 - DNA, 20 bp, Artificial Sequence
  Description of Artificial Sequence: Synthetic oligonucleotide
  Target: LAMA2; (+) strand; PAM type: NRG; PAM sequence: TGG
gggtcagagtgatgaaacaa

SEQ ID NO: 156202 - DNA, 20 bp, Artificial Sequence
  Description of Artificial Sequence: Synthetic oligonucleotide
  Target: LAMA2; (+) strand; PAM type: NRG; PAM sequence: AAG
tcagagtgatgaaacaatgg

SEQ ID NO: 156203 - DNA, 20 bp, Artificial Sequence
  Description of Artificial Sequence: Synthetic oligonucleotide
  Target: LAMA2; (+) strand; PAM type: NRG; PAM sequence: AAG
gagtgatgaaacaatggaag

SEQ ID NO: 156204 - DNA, 20 bp, Artificial Sequence
  Description of Artificial Sequence: Synthetic oligonucleotide
  Target: LAMA2; (+) strand; PAM type: NRG; PAM sequence: GAG
gtgatgaaacaatggaagaa

SEQ ID NO: 156205 - DNA, 20 bp, Artificial Sequence
  Description of Artificial Sequence: Synthetic oligonucleotide
  Target: LAMA2; (+) strand; PAM type: NRG; PAM sequence: AGG
tgatgaaacaatggaagaag

SEQ ID NO: 156206 - DNA, 20 bp, Artificial Sequence
  Description of Artificial Sequence: Synthetic oligonucleotide
  Target: LAMA2; (+) strand; PAM type: NRG; PAM sequence: AAG
tgaaacaatggaagaagagg

SEQ ID NO: 156207 - DNA, 20 bp, Artificial Sequence
  Description of Artificial Sequence: Synthetic oligonucleotide
  Target: LAMA2; (+) strand; PAM type: NRG; PAM sequence: AGG
gaaacaatggaagaagagga

SEQ ID NO: 156208 - DNA, 20 bp, Artificial Sequence
  Description of Artificial Sequence: Synthetic oligonucleotide
  Target: LAMA2; (+) strand; PAM type: NRG; PAM sequence: GAG
aacaatggaagaagaggaag

SEQ ID NO: 156209 - DNA, 20 bp, Artificial Sequence
  Description of Artificial Sequence: Synthetic oligonucleotide
  Target: LAMA2; (+) strand; PAM type: NRG; PAM sequence: AAG
aatggaagaagaggaaggag

SEQ ID NO: 156210 - DNA, 20 bp, Artificial Sequence
  Description of Artificial Sequence: Synthetic oligonucleotide
  Target: LAMA2; (+) strand; PAM type: NRG; PAM sequence: AAG
gaagaggaaggagaagtttg

SEQ ID NO: 156211 - DNA, 20 bp, Artificial Sequence
  Description of Artificial Sequence: Synthetic oligonucleotide
  Target: LAMA2; (+) strand; PAM type: NRG; PAM sequence: TGG
aatatttcattcatcatttc

SEQ ID NO: 156212 - DNA, 20 bp, Artificial Sequence
  Description of Artificial Sequence: Synthetic oligonucleotide
  Target: LAMA2; (+) strand; PAM type: NRG; PAM sequence: AAG
attcatcatttctggcttta

SEQ ID NO: 156213 - DNA, 20 bp, Artificial Sequence
  Description of Artificial Sequence: Synthetic oligonucleotide
  Target: LAMA2; (+) strand; PAM type: NRG; PAM sequence: TGG
atcatttctggctttaaaga

SEQ ID NO: 156214 - DNA, 20 bp, Artificial Sequence
  Description of Artificial Sequence: Synthetic oligonucleotide
  Target: LAMA2; (+) strand; PAM type: NRG; PAM sequence: GAG
catttctggctttaaagatg

SEQ ID NO: 156215 - DNA, 20 bp, Artificial Sequence
  Description of Artificial Sequence: Synthetic oligonucleotide
  Target: LAMA2; (+) strand; PAM type: NRG; PAM sequence: GAG
tttctggctttaaagatgga

SEQ ID NO: 156216 - DNA, 20 bp, Artificial Sequence
  Description of Artificial Sequence: Synthetic oligonucleotide
  Target: LAMA2; (+) strand; PAM type: NRG; PAM sequence: AAG
gatggagagtcccttgaacc

SEQ ID NO: 156217 - DNA, 20 bp, Artificial Sequence
  Description of Artificial Sequence: Synthetic oligonucleotide
  Target: LAMA2; (+) strand; PAM type: NRG; PAM sequence: AGG
atggagagtcccttgaacca

SEQ ID NO: 156218 - DNA, 20 bp, Artificial Sequence
  Description of Artificial Sequence: Synthetic oligonucleotide
  Target: LAMA2; (+) strand; PAM type: NRG; PAM sequence: TAG
caaggaatgtgaatgacctc

SEQ ID NO: 156219 - DNA, 20 bp, Artificial Sequence
  Description of Artificial Sequence: Synthetic oligonucleotide
  Target: LAMA2; (+) strand; PAM type: NRG; PAM sequence: TGG
tgtgaatgacctctagaacc

SEQ ID NO: 156220 - DNA, 20 bp, Artificial Sequence
  Description of Artificial Sequence: Synthetic oligonucleotide
  Target: LAMA2; (+) strand; PAM type: NRG; PAM sequence: AAG
atgacctctagaacctggaa

SEQ ID NO: 156221 - DNA, 20 bp, Artificial Sequence
  Description of Artificial Sequence: Synthetic oligonucleotide
  Target: LAMA2; (+) strand; PAM type: NRG; PAM sequence: GAG
gacctctagaacctggaaaa

SEQ ID NO: 156222 - DNA, 20 bp, Artificial Sequence
  Description of Artificial Sequence: Synthetic oligonucleotide
  Target: LAMA2; (+) strand; PAM type: NRG; PAM sequence: TGG
tagaacctggaaaagagcat

SEQ ID NO: 156223 - DNA, 20 bp, Artificial Sequence
  Description of Artificial Sequence: Synthetic oligonucleotide
  Target: LAMA2; (+) strand; PAM type: NRG; PAM sequence: CAG
aaagagcattggctgacaaa

SEQ ID NO: 156224 - DNA, 20 bp, Artificial Sequence
  Description of Artificial Sequence: Synthetic oligonucleotide
  Target: LAMA2; (+) strand; PAM type: NRG; PAM sequence: AAG
agcattggctgacaaacagc

SEQ ID NO: 156225 - DNA, 20 bp, Artificial Sequence
  Description of Artificial Sequence: Synthetic oligonucleotide
  Target: LAMA2; (+) strand; PAM type: NRG; PAM sequence: AGG
gcattggctgacaaacagca

SEQ ID NO: 156226 - DNA, 20 bp, Artificial Sequence
  Description of Artificial Sequence: Synthetic oligonucleotide
  Target: LAMA2; (+) strand; PAM type: NRG; PAM sequence: TGG
gctgacaaacagcaaggaaa

SEQ ID NO: 156227 - DNA, 20 bp, Artificial Sequence
  Description of Artificial Sequence: Synthetic oligonucleotide
  Target: LAMA2; (+) strand; PAM type: NRG; PAM sequence: GGG
ctgacaaacagcaaggaaat

SEQ ID NO: 156228 - DNA, 20 bp, Artificial Sequence
  Description of Artificial Sequence: Synthetic oligonucleotide
  Target: LAMA2; (+) strand; PAM type: NRG; PAM sequence: CAG
cagcaaggaaatgggaacct

SEQ ID NO: 156229 - DNA, 20 bp, Artificial Sequence
  Description of Artificial Sequence: Synthetic oligonucleotide
  Target: LAMA2; (+) strand; PAM type: NRG; PAM sequence: AAG
aacctcagttccacaaccac

SEQ ID NO: 156230 - DNA, 20 bp, Artificial Sequence
  Description of Artificial Sequence: Synthetic oligonucleotide
  Target: LAMA2; (+) strand; PAM type: NRG; PAM sequence: AAG
tgccaacaacctgaatgaac

SEQ ID NO: 156231 - DNA, 20 bp, Artificial Sequence
  Description of Artificial Sequence: Synthetic oligonucleotide
  Target: LAMA2; (+) strand; PAM type: NRG; PAM sequence: AGG
gccaacaacctgaatgaaca

SEQ ID NO: 156232 - DNA, 20 bp, Artificial Sequence
  Description of Artificial Sequence: Synthetic oligonucleotide
  Target: LAMA2; (+) strand; PAM type: NRG; PAM sequence: GAG
caacaacctgaatgaacaag

SEQ ID NO: 156233 - DNA, 20 bp, Artificial Sequence
  Description of Artificial Sequence: Synthetic oligonucleotide
  Target: LAMA2; (+) strand; PAM type: NRG; PAM sequence: TAG
aacctgaatgaacaaggaga

SEQ ID NO: 156234 - DNA, 20 bp, Artificial Sequence
  Description of Artificial Sequence: Synthetic oligonucleotide
  Target: LAMA2; (+) strand; PAM type: NRG; PAM sequence: TAG
caaggagatagattctcctc

SEQ ID NO: 156235 - DNA, 20 bp, Artificial Sequence
  Description of Artificial Sequence: Synthetic oligonucleotide
  Target: LAMA2; (+) strand; PAM type: NRG; PAM sequence: GAG
aggagatagattctcctcta

SEQ ID NO: 156236 - DNA, 20 bp, Artificial Sequence
  Description of Artificial Sequence: Synthetic oligonucleotide
  Target: LAMA2; (+) strand; PAM type: NRG; PAM sequence: CAG
agattctcctctagagccac

SEQ ID NO: 156237 - DNA, 20 bp, Artificial Sequence
  Description of Artificial Sequence: Synthetic oligonucleotide
  Target: LAMA2; (+) strand; PAM type: NRG; PAM sequence: AAG
tctcctctagagccaccaga

SEQ ID NO: 156238 - DNA, 20 bp, Artificial Sequence
  Description of Artificial Sequence: Synthetic oligonucleotide
  Target: LAMA2; (+) strand; PAM type: NRG; PAM sequence: AGG
ctcctctagagccaccagaa

SEQ ID NO: 156239 - DNA, 20 bp, Artificial Sequence
  Description of Artificial Sequence: Synthetic oligonucleotide
  Target: LAMA2; (+) strand; PAM type: NRG; PAM sequence: TAG
ccatgccgacaccatcattt

SEQ ID NO: 156240 - DNA, 20 bp, Artificial Sequence
  Description of Artificial Sequence: Synthetic oligonucleotide
  Target: LAMA2; (+) strand; PAM type: NRG; PAM sequence: TAG
caccatcattttagtcattt

SEQ ID NO: 156241 - DNA, 20 bp, Artificial Sequence
  Description of Artificial Sequence: Synthetic oligonucleotide
  Target: LAMA2; (+) strand; PAM type: NRG; PAM sequence: AAG
cattttagtcattttagcta

SEQ ID NO: 156242 - DNA, 20 bp, Artificial Sequence
  Description of Artificial Sequence: Synthetic oligonucleotide
  Target: LAMA2; (+) strand; PAM type: NRG; PAM sequence: AGG
attttagtcattttagctaa

SEQ ID NO: 156243 - DNA, 20 bp, Artificial Sequence
  Description of Artificial Sequence: Synthetic oligonucleotide
  Target: LAMA2; (+) strand; PAM type: NRG; PAM sequence: GAG
tttagtcattttagctaaag

SEQ ID NO: 156244 - DNA, 20 bp, Artificial Sequence
  Description of Artificial Sequence: Synthetic oligonucleotide
  Target: LAMA2; (+) strand; PAM type: NRG; PAM sequence: TGG
tagctaaaggagacccatat

SEQ ID NO: 156245 - DNA, 20 bp, Artificial Sequence
  Description of Artificial Sequence: Synthetic oligonucleotide
  Target: LAMA2; (+) strand; PAM type: NRG; PAM sequence: CAG
catattggaatattcgccta

SEQ ID NO: 156246 - DNA, 20 bp, Artificial Sequence
  Description of Artificial Sequence: Synthetic oligonucleotide
  Target: LAMA2; (+) strand; PAM type: NRG; PAM sequence: AAG
ctacagaactgtattccaac

SEQ ID NO: 156247 - DNA, 20 bp, Artificial Sequence
  Description of Artificial Sequence: Synthetic oligonucleotide
  Target: LAMA2; (+) strand; PAM type: NRG; PAM sequence: AGG
tacagaactgtattccaaca

SEQ ID NO: 156248 - DNA, 20 bp, Artificial Sequence
  Description of Artificial Sequence: Synthetic oligonucleotide
  Target: LAMA2; (+) strand; PAM type: NRG; PAM sequence: TGG
tccaacaaggatgcatatgt

SEQ ID NO: 156249 - DNA, 20 bp, Artificial Sequence
  Description of Artificial Sequence: Synthetic oligonucleotide
  Target: LAMA2; (+) strand; PAM type: NRG; PAM sequence: CAG
tatgttggaatattcaccta

SEQ ID NO: 156250 - DNA, 20 bp, Artificial Sequence
  Description of Artificial Sequence: Synthetic oligonucleotide
  Target: LAMA2; (+) strand; PAM type: NRG; PAM sequence: GAG
atattcacctacagaaccat

SEQ ID NO: 156251 - DNA, 20 bp, Artificial Sequence
  Description of Artificial Sequence: Synthetic oligonucleotide
  Target: LAMA2; (+) strand; PAM type: NRG; PAM sequence: AAG
ttgtgttgctttcaattgct

SEQ ID NO: 156252 - DNA, 20 bp, Artificial Sequence
  Description of Artificial Sequence: Synthetic oligonucleotide
  Target: LAMA2; (+) strand; PAM type: NRG; PAM sequence: CGG
ttcaattgctaagtttgtta

SEQ ID NO: 156253 - DNA, 20 bp, Artificial Sequence
  Description of Artificial Sequence: Synthetic oligonucleotide
  Target: LAMA2; (+) strand; PAM type: NRG; PAM sequence: TAG
aattgctaagtttgttacgg

SEQ ID NO: 156254 - DNA, 20 bp, Artificial Sequence
  Description of Artificial Sequence: Synthetic oligonucleotide
  Target: LAMA2; (+) strand; PAM type: NRG; PAM sequence: TAG
taagtttgttacggtagcaa

SEQ ID NO: 156255 - DNA, 20 bp, Artificial Sequence
  Description of Artificial Sequence: Synthetic oligonucleotide
  Target: LAMA2; (+) strand; PAM type: NRG; PAM sequence: AGG
aagtttgttacggtagcaat

SEQ ID NO: 156256 - DNA, 20 bp, Artificial Sequence
  Description of Artificial Sequence: Synthetic oligonucleotide
  Target: LAMA2; (+) strand; PAM type: NRG; PAM sequence: CAG
taggaaactaatgcaatgta

SEQ ID NO: 156257 - DNA, 20 bp, Artificial Sequence
  Description of Artificial Sequence: Synthetic oligonucleotide
  Target: LAMA2; (+) strand; PAM type: NRG; PAM sequence: CAG
cagttgacccttgcacaatg

SEQ ID NO: 156258 - DNA, 20 bp, Artificial Sequence
  Description of Artificial Sequence: Synthetic oligonucleotide
  Target: LAMA2; (+) strand; PAM type: NRG; PAM sequence: AGG
agttgacccttgcacaatgc

SEQ ID NO: 156259 - DNA, 20 bp, Artificial Sequence
  Description of Artificial Sequence: Synthetic oligonucleotide
  Target: LAMA2; (+) strand; PAM type: NRG; PAM sequence: GGG
gttgacccttgcacaatgca

SEQ ID NO: 156260 - DNA, 20 bp, Artificial Sequence
  Description of Artificial Sequence: Synthetic oligonucleotide
  Target: LAMA2; (+) strand; PAM type: NRG; PAM sequence: TAG
cccttgcacaatgcagggat

SEQ ID NO: 156261 - DNA, 20 bp, Artificial Sequence
  Description of Artificial Sequence: Synthetic oligonucleotide
  Target: LAMA2; (+) strand; PAM type: NRG; PAM sequence: AGG
ccttgcacaatgcagggatt

SEQ ID NO: 156262 - DNA, 20 bp, Artificial Sequence
  Description of Artificial Sequence: Synthetic oligonucleotide
  Target: LAMA2; (+) strand; PAM type: NRG; PAM sequence: GGG
cttgcacaatgcagggatta

SEQ ID NO: 156263 - DNA, 20 bp, Artificial Sequence
  Description of Artificial Sequence: Synthetic oligonucleotide
  Target: LAMA2; (+) strand; PAM type: NRG; PAM sequence: CAG
tagggatgctgacctctaca

SEQ ID NO: 156264 - DNA, 20 bp, Artificial Sequence
  Description of Artificial Sequence: Synthetic oligonucleotide
  Target: LAMA2; (+) strand; PAM type: NRG; PAM sequence: TAG
gaaaatttgtttataatttt

SEQ ID NO: 156265 - DNA, 20 bp, Artificial Sequence
  Description of Artificial Sequence: Synthetic oligonucleotide
  Target: LAMA2; (+) strand; PAM type: NRG; PAM sequence: AAG
tccctaaaaacataactact

SEQ ID NO: 156266 - DNA, 20 bp, Artificial Sequence
  Description of Artificial Sequence: Synthetic oligonucleotide
  Target: LAMA2; (+) strand; PAM type: NRG; PAM sequence: GAG
cctaaaaacataactactaa

SEQ ID NO: 156267 - DNA, 20 bp, Artificial Sequence
  Description of Artificial Sequence: Synthetic oligonucleotide
  Target: LAMA2; (+) strand; PAM type: NRG; PAM sequence: CAG
actaagagtctactgttgaa

SEQ ID NO: 156268 - DNA, 20 bp, Artificial Sequence
  Description of Artificial Sequence: Synthetic oligonucleotide
  Target: LAMA2; (+) strand; PAM type: NRG; PAM sequence: AAG
aagagtctactgttgaacag

SEQ ID NO: 156269 - DNA, 20 bp, Artificial Sequence
  Description of Artificial Sequence: Synthetic oligonucleotide
  Target: LAMA2; (+) strand; PAM type: NRG; PAM sequence: AAG
agaagccttactgataacat

SEQ ID NO: 156270 - DNA, 20 bp, Artificial Sequence
  Description of Artificial Sequence: Synthetic oligonucleotide
  Target: LAMA2; (+) strand; PAM type: NRG; PAM sequence: AAG
tatgctgtattcttataata

SEQ ID NO: 156271 - DNA, 20 bp, Artificial Sequence
  Description of Artificial Sequence: Synthetic oligonucleotide
  Target: LAMA2; (+) strand; PAM type: NRG; PAM sequence: TAG
attcttataataaagtgtgt

SEQ ID NO: 156272 - DNA, 20 bp, Artificial Sequence
  Description of Artificial Sequence: Synthetic oligonucleotide
  Target: LAMA2; (+) strand; PAM type: NRG; PAM sequence: GAG
tcttataataaagtgtgtta

SEQ ID NO: 156273 - DNA, 20 bp, Artificial Sequence
  Description of Artificial Sequence: Synthetic oligonucleotide
  Target: LAMA2; (+) strand; PAM type: NRG; PAM sequence: GAG
ttataataaagtgtgttaga

SEQ ID NO: 156274 - DNA, 20 bp, Artificial Sequence
  Description of Artificial Sequence: Synthetic oligonucleotide
  Target: LAMA2; (+) strand; PAM type: NRG; PAM sequence: AAG
ataaagtgtgttagagagaa

SEQ ID NO: 156275 - DNA, 20 bp, Artificial Sequence
  Description of Artificial Sequence: Synthetic oligonucleotide
  Target: LAMA2; (+) strand; PAM type: NRG; PAM sequence: AAG
tagagagaaaagaaaatact

SEQ ID NO: 156276 - DNA, 20 bp, Artificial Sequence
  Description of Artificial Sequence: Synthetic oligonucleotide
  Target: LAMA2; (+) strand; PAM type: NRG; PAM sequence: AAG
gaaaatactaagaaaatcat

SEQ ID NO: 156277 - DNA, 20 bp, Artificial Sequence
  Description of Artificial Sequence: Synthetic oligonucleotide
  Target: LAMA2; (+) strand; PAM type: NRG; PAM sequence: AGG
aaaatactaagaaaatcata

SEQ ID NO: 156278 - DNA, 20 bp, Artificial Sequence
  Description of Artificial Sequence: Synthetic oligonucleotide
  Target: LAMA2; (+) strand; PAM type: NRG; PAM sequence: AAG
atactaagaaaatcataagg

SEQ ID NO: 156279 - DNA, 20 bp, Artificial Sequence
  Description of Artificial Sequence: Synthetic oligonucleotide
  Target: LAMA2; (+) strand; PAM type: NRG; PAM sequence: AAG
aaaatatatttgtgttaatc

SEQ ID NO: 156280 - DNA, 20 bp, Artificial Sequence
  Description of Artificial Sequence: Synthetic oligonucleotide
  Target: LAMA2; (+) strand; PAM type: NRG; PAM sequence: AAG
tatttgtgttaatcaagtga

SEQ ID NO: 156281 - DNA, 20 bp, Artificial Sequence
  Description of Artificial Sequence: Synthetic oligonucleotide
  Target: LAMA2; (+) strand; PAM type: NRG; PAM sequence: AAG
agtgaaagttgatcatctta

SEQ ID NO: 156282 - DNA, 20 bp, Artificial Sequence
  Description of Artificial Sequence: Synthetic oligonucleotide
  Target: LAMA2; (+) strand; PAM type: NRG; PAM sequence: AGG
gtgaaagttgatcatcttaa

SEQ ID NO: 156283 - DNA, 20 bp, Artificial Sequence
  Description of Artificial Sequence: Synthetic oligonucleotide
  Target: LAMA2; (+) strand; PAM type: NRG; PAM sequence: AAG
tgcatcatcttcatgttgaa

SEQ ID NO: 156284 - DNA, 20 bp, Artificial Sequence
  Description of Artificial Sequence: Synthetic oligonucleotide
  Target: LAMA2; (+) strand; PAM type: NRG; PAM sequence: AGG
gcatcatcttcatgttgaaa

SEQ ID NO: 156285 - DNA, 20 bp, Artificial Sequence
  Description of Artificial Sequence: Synthetic oligonucleotide
  Target: LAMA2; (+) strand; PAM type: NRG; PAM sequence: AAG
atcttcatgttgaaaaggct

SEQ ID NO: 156286 - DNA, 20 bp, Artificial Sequence
  Description of Artificial Sequence: Synthetic oligonucleotide
  Target: LAMA2; (+) strand; PAM type: NRG; PAM sequence: AGG
tcttcatgttgaaaaggcta

SEQ ID NO: 156287 - DNA, 20 bp, Artificial Sequence
  Description of Artificial Sequence: Synthetic oligonucleotide
  Target: LAMA2; (+) strand; PAM type: NRG; PAM sequence: GAG
ttcatgttgaaaaggctaag

SEQ ID NO: 156288 - DNA, 20 bp, Artificial Sequence
  Description of Artificial Sequence: Synthetic oligonucleotide
  Target: LAMA2; (+) strand; PAM type: NRG; PAM sequence: AGG
tcatgttgaaaaggctaagg

SEQ ID NO: 156289 - DNA, 20 bp, Artificial Sequence
  Description of Artificial Sequence: Synthetic oligonucleotide
  Target: LAMA2; (+) strand; PAM type: NRG; PAM sequence: GAG
atgttgaaaaggctaaggag

SEQ ID NO: 156290 - DNA, 20 bp, Artificial Sequence
  Description of Artificial Sequence: Synthetic oligonucleotide
  Target: LAMA2; (+) strand; PAM type: NRG; PAM sequence: AGG
tgttgaaaaggctaaggagg

SEQ ID NO: 156291 - DNA, 20 bp, Artificial Sequence
  Description of Artificial Sequence: Synthetic oligonucleotide
  Target: LAMA2; (+) strand; PAM type: NRG; PAM sequence: AAG
tgaaaaggctaaggaggagg

SEQ ID NO: 156292 - DNA, 20 bp, Artificial Sequence
  Description of Artificial Sequence: Synthetic oligonucleotide
  Target: LAMA2; (+) strand; PAM type: NRG; PAM sequence: AAG
aaaggctaaggaggaggaag

SEQ ID NO: 156293 - DNA, 20 bp, Artificial Sequence
  Description of Artificial Sequence: Synthetic oligonucleotide
  Target: LAMA2; (+) strand; PAM type: NRG; PAM sequence: GAG
aggctaaggaggaggaagaa

SEQ ID NO: 156294 - DNA, 20 bp, Artificial Sequence
  Description of Artificial Sequence: Synthetic oligonucleotide
  Target: LAMA2; (+) strand; PAM type: NRG; PAM sequence: AGG
ggctaaggaggaggaagaag

SEQ ID NO: 156295 - DNA, 20 bp, Artificial Sequence
  Description of Artificial Sequence: Synthetic oligonucleotide
  Target: LAMA2; (+) strand; PAM type: NRG; PAM sequence: GAG
ctaaggaggaggaagaagag

SEQ ID NO: 156296 - DNA, 20 bp, Artificial Sequence
  Description of Artificial Sequence: Synthetic oligonucleotide
  Target: LAMA2; (+) strand; PAM type: NRG; PAM sequence: AGG
taaggaggaggaagaagagg

SEQ ID NO: 156297 - DNA, 20 bp, Artificial Sequence
  Description of Artificial Sequence: Synthetic oligonucleotide
  Target: LAMA2; (+) strand; PAM type: NRG; PAM sequence: GGG
aaggaggaggaagaagagga

SEQ ID NO: 156298 - DNA, 20 bp, Artificial Sequence
  Description of Artificial Sequence: Synthetic oligonucleotide
  Target: LAMA2; (+) strand; PAM type: NRG; PAM sequence: GGG
aggaggaggaagaagaggag

SEQ ID NO: 156299 - DNA, 20 bp, Artificial Sequence
  Description of Artificial Sequence: Synthetic oligonucleotide
  Target: LAMA2; (+) strand; PAM type: NRG; PAM sequence: TGG
ggaggaagaagaggaggggt

SEQ ID NO: 156300 - DNA, 20 bp, Artificial Sequence
  Description of Artificial Sequence: Synthetic oligonucleotide
  Target: LAMA2; (+) strand; PAM type: NRG; PAM sequence: CAG
aggggttggtcttgctgtct

SEQ ID NO: 156301 - DNA, 20 bp, Artificial Sequence
  Description of Artificial Sequence: Synthetic oligonucleotide
  Target: LAMA2; (+) strand; PAM type: NRG; PAM sequence: AGG
ggggttggtcttgctgtctc

SEQ ID NO: 156302 - DNA, 20 bp, Artificial Sequence
  Description of Artificial Sequence: Synthetic oligonucleotide
  Target: LAMA2; (+) strand; PAM type: NRG; PAM sequence: GGG
gggttggtcttgctgtctca

SEQ ID NO: 156303 - DNA, 20 bp, Artificial Sequence
  Description of Artificial Sequence: Synthetic oligonucleotide
  Target: LAMA2; (+) strand; PAM type: NRG; PAM sequence: GGG
ggttggtcttgctgtctcag

SEQ ID NO: 156304 - DNA, 20 bp, Artificial Sequence
  Description of Artificial Sequence: Synthetic oligonucleotide
  Target: LAMA2; (+) strand; PAM type: NRG; PAM sequence: GAG
ttggtcttgctgtctcaggg

SEQ ID NO: 156305 - DNA, 20 bp, Artificial Sequence
  Description of Artificial Sequence: Synthetic oligonucleotide
  Target: LAMA2; (+) strand; PAM type: NRG; PAM sequence: AGG
tggtcttgctgtctcagggg

SEQ ID NO: 156306 - DNA, 20 bp, Artificial Sequence
  Description of Artificial Sequence: Synthetic oligonucleotide
  Target: LAMA2; (+) strand; PAM type: NRG; PAM sequence: CAG
tcttgctgtctcaggggagg

SEQ ID NO: 156307 - DNA, 20 bp, Artificial Sequence
  Description of Artificial Sequence: Synthetic oligonucleotide
  Target: LAMA2; (+) strand; PAM type: NRG; PAM sequence: GAG
ttgctgtctcaggggaggca

SEQ ID NO: 156308 - DNA, 20 bp, Artificial Sequence
  Description of Artificial Sequence: Synthetic oligonucleotide
  Target: LAMA2; (+) strand; PAM type: NRG; PAM sequence: CAG
tgtctcaggggaggcagaga

SEQ ID NO: 156309 - DNA, 20 bp, Artificial Sequence
  Description of Artificial Sequence: Synthetic oligonucleotide
  Target: LAMA2; (+) strand; PAM type: NRG; PAM sequence: AAG
ctcaggggaggcagagacag

SEQ ID NO: 156310 - DNA, 20 bp, Artificial Sequence
  Description of Artificial Sequence: Synthetic oligonucleotide
  Target: LAMA2; (+) strand; PAM type: NRG; PAM sequence: TGG
gaagaaaatccgcgtataaa

SEQ ID NO: 156311 - DNA, 20 bp, Artificial Sequence
  Description of Artificial Sequence: Synthetic oligonucleotide
  Target: LAMA2; (+) strand; PAM type: NRG; PAM sequence: CGG
aaatccgcgtataaatggac

SEQ ID NO: 156312 - DNA, 20 bp, Artificial Sequence
  Description of Artificial Sequence: Synthetic oligonucleotide
  Target: LAMA2; (+) strand; PAM type: NRG; PAM sequence: CAG
ataaatggaccggacttgca

SEQ ID NO: 156313 - DNA, 20 bp, Artificial Sequence
  Description of Artificial Sequence: Synthetic oligonucleotide
  Target: LAMA2; (+) strand; PAM type: NRG; PAM sequence: CAG
cagttcaaacctgtgttgtt

SEQ ID NO: 156314 - DNA, 20 bp, Artificial Sequence
  Description of Artificial Sequence: Synthetic oligonucleotide
  Target: LAMA2; (+) strand; PAM type: NRG; PAM sequence: AGG
agttcaaacctgtgttgttc

SEQ ID NO: 156315 - DNA, 20 bp, Artificial Sequence
  Description of Artificial Sequence: Synthetic oligonucleotide
  Target: LAMA2; (+) strand; PAM type: NRG; PAM sequence: AAG
tcaggtgtcaactgtatatg

SEQ ID NO: 156316 - DNA, 20 bp, Artificial Sequence
  Description of Artificial Sequence: Synthetic oligonucleotide
  Target: LAMA2; (+) strand; PAM type: NRG; PAM sequence: AGG
caggtgtcaactgtatatga

SEQ ID NO: 156317 - DNA, 20 bp, Artificial Sequence
  Description of Artificial Sequence: Synthetic oligonucleotide
  Target: LAMA2; (+) strand; PAM type: NRG; PAM sequence: CAG
tgaaggctttcttctttaaa

SEQ ID NO: 156318 - DNA, 20 bp, Artificial Sequence
  Description of Artificial Sequence: Synthetic oligonucleotide
  Target: LAMA2; (+) strand; PAM type: NRG; PAM sequence: AAG
ggctttcttctttaaacaga

SEQ ID NO: 156319 - DNA, 20 bp, Artificial Sequence
  Description of Artificial Sequence: Synthetic oligonucleotide
  Target: LAMA2; (+) strand; PAM type: NRG; PAM sequence: AGG
gctttcttctttaaacagaa

SEQ ID NO: 156320 - DNA, 20 bp, Artificial Sequence
  Description of Artificial Sequence: Synthetic oligonucleotide
  Target: LAMA2; (+) strand; PAM type: NRG; PAM sequence: AAG
ttcttctttaaacagaaagg

SEQ ID NO: 156321 - DNA, 20 bp, Artificial Sequence
  Description of Artificial Sequence: Synthetic oligonucleotide
  Target: LAMA2; (+) strand; PAM type: NRG; PAM sequence: AAG
aaaggaagtattttgtgccc

SEQ ID NO: 156322 - DNA, 20 bp, Artificial Sequence
  Description of Artificial Sequence: Synthetic oligonucleotide
  Target: LAMA2; (+) strand; PAM type: NRG; PAM sequence: TGG
agtattttgtgcccaagatt

SEQ ID NO: 156323 - DNA, 20 bp, Artificial Sequence
  Description of Artificial Sequence: Synthetic oligonucleotide
  Target: LAMA2; (+) strand; PAM type: NRG; PAM sequence: GAG
tattttgtgcccaagatttg

SEQ ID NO: 156324 - DNA, 20 bp, Artificial Sequence
  Description of Artificial Sequence: Synthetic oligonucleotide
  Target: LAMA2; (+) strand; PAM type: NRG; PAM sequence: AAG
ttgtgcccaagatttggaga

SEQ ID NO: 156325 - DNA, 20 bp, Artificial Sequence
  Description of Artificial Sequence: Synthetic oligonucleotide
  Target: LAMA2; (+) strand; PAM type: NRG; PAM sequence: TGG
ccaagatttggagaaagcaa

SEQ ID NO: 156326 - DNA, 20 bp, Artificial Sequence
  Description of Artificial Sequence: Synthetic oligonucleotide
  Target: LAMA2; (+) strand; PAM type: NRG; PAM sequence: GGG
caagatttggagaaagcaat

SEQ ID NO: 156327 - DNA, 20 bp, Artificial Sequence
  Description of Artificial Sequence: Synthetic oligonucleotide
  Target: LAMA2; (+) strand; PAM type: NRG; PAM sequence: TAG
gcaatgggataaaaatatca

SEQ ID NO: 156328 - DNA, 20 bp, Artificial Sequence
  Description of Artificial Sequence: Synthetic oligonucleotide
  Target: LAMA2; (+) strand; PAM type: NRG; PAM sequence: GAG
aatgggataaaaatatcata

SEQ ID NO: 156329 - DNA, 20 bp, Artificial Sequence
  Description of Artificial Sequence: Synthetic oligonucleotide
  Target: LAMA2; (+) strand; PAM type: NRG; PAM sequence: TGG
aaaatatcatagagatttta

SEQ ID NO: 156330 - DNA, 20 bp, Artificial Sequence
  Description of Artificial Sequence: Synthetic oligonucleotide
  Target: LAMA2; (+) strand; PAM type: NRG; PAM sequence: AAG
ttttccttttccccttcact

SEQ ID NO: 156331 - DNA, 20 bp, Artificial Sequence
  Description of Artificial Sequence: Synthetic oligonucleotide
  Target: LAMA2; (+) strand; PAM type: NRG; PAM sequence: AGG
tttccttttccccttcacta

SEQ ID NO: 156332 - DNA, 20 bp, Artificial Sequence
  Description of Artificial Sequence: Synthetic oligonucleotide
  Target: LAMA2; (+) strand; PAM type: NRG; PAM sequence: GGG
ttccttttccccttcactaa

SEQ ID NO: 156333 - DNA, 20 bp, Artificial Sequence
  Description of Artificial Sequence: Synthetic oligonucleotide
  Target: LAMA2; (+) strand; PAM type: NRG; PAM sequence: TGG
cactaagggtcttgaaaaac

SEQ ID NO: 156334 - DNA, 20 bp, Artificial Sequence
  Description of Artificial Sequence: Synthetic oligonucleotide
  Target: LAMA2; (+) strand; PAM type: NRG; PAM sequence: CAG
actggtctgaaactccgctc

SEQ ID NO: 156335 - DNA, 20 bp, Artificial Sequence
  Description of Artificial Sequence: Synthetic oligonucleotide
  Target: LAMA2; (+) strand; PAM type: NRG; PAM sequence: TAG
ggtctgaaactccgctccag

SEQ ID NO: 156336 - DNA, 20 bp, Artificial Sequence
  Description of Artificial Sequence: Synthetic oligonucleotide
  Target: LAMA2; (+) strand; PAM type: NRG; PAM sequence: GAG
tctgaaactccgctccagta

SEQ ID NO: 156337 - DNA, 20 bp, Artificial Sequence
  Description of Artificial Sequence: Synthetic oligonucleotide
  Target: LAMA2; (+) strand; PAM type: NRG; PAM sequence: AAG
ctccgctccagtagagcaaa

SEQ ID NO: 156338 - DNA, 20 bp, Artificial Sequence
  Description of Artificial Sequence: Synthetic oligonucleotide
  Target: LAMA2; (+) strand; PAM type: NRG; PAM sequence: AAG
cgctccagtagagcaaaaag

SEQ ID NO: 156339 - DNA, 20 bp, Artificial Sequence
  Description of Artificial Sequence: Synthetic oligonucleotide
  Target: LAMA2; (+) strand; PAM type: NRG; PAM sequence: AAG
agagcaaaaagaagaactga

SEQ ID NO: 156340 - DNA, 20 bp, Artificial Sequence
  Description of Artificial Sequence: Synthetic oligonucleotide
  Target: LAMA2; (+) strand; PAM type: NRG; PAM sequence: AAG
aaaaagaagaactgaaagtt

SEQ ID NO: 156341 - DNA, 20 bp, Artificial Sequence
  Description of Artificial Sequence: Synthetic oligonucleotide
  Target: LAMA2; (+) strand; PAM type: NRG; PAM sequence: AAG
aagaagaactgaaagttaag

SEQ ID NO: 156342 - DNA, 20 bp, Artificial Sequence
  Description of Artificial Sequence: Synthetic oligonucleotide
  Target: LAMA2; (+) strand; PAM type: NRG; PAM sequence: GAG
atttttgtgaaaaatgttgt

SEQ ID NO: 156343 - DNA, 20 bp, Artificial Sequence
  Description of Artificial Sequence: Synthetic oligonucleotide
  Target: LAMA2; (+) strand; PAM type: NRG; PAM sequence: CAG
ttgtgagacaaattttgaca

SEQ ID NO: 156344 - DNA, 20 bp, Artificial Sequence
  Description of Artificial Sequence: Synthetic oligonucleotide
  Target: LAMA2; (+) strand; PAM type: NRG; PAM sequence: AGG
tgtgagacaaattttgacac

SEQ ID NO: 156345 - DNA, 20 bp, Artificial Sequence
  Description of Artificial Sequence: Synthetic oligonucleotide
  Target: LAMA2; (+) strand; PAM type: NRG; PAM sequence: GGG
gtgagacaaattttgacaca

SEQ ID NO: 156346 - DNA, 20 bp, Artificial Sequence
  Description of Artificial Sequence: Synthetic oligonucleotide
  Target: LAMA2; (+) strand; PAM type: NRG; PAM sequence: GAG
acaaattttgacacagggtt

SEQ ID NO: 156347 - DNA, 20 bp, Artificial Sequence
  Description of Artificial Sequence: Synthetic oligonucleotide
  Target: LAMA2; (+) strand; PAM type: NRG; PAM sequence: AGG
caaattttgacacagggttg

SEQ ID NO: 156348 - DNA, 20 bp, Artificial Sequence
  Description of Artificial Sequence: Synthetic oligonucleotide
  Target: LAMA2; (+) strand; PAM type: NRG; PAM sequence: AAG
ctttttttccgcatctgacc

SEQ ID NO: 156349 - DNA, 20 bp, Artificial Sequence
  Description of Artificial Sequence: Synthetic oligonucleotide
  Target: LAMA2; (+) strand; PAM type: NRG; PAM sequence: AGG
tttttttccgcatctgacca

SEQ ID NO: 156350 - DNA, 20 bp, Artificial Sequence
  Description of Artificial Sequence: Synthetic oligonucleotide
  Target: LAMA2; (+) strand; PAM type: NRG; PAM sequence: GGG
ttttttccgcatctgaccaa

SEQ ID NO: 156351 - DNA, 20 bp, Artificial Sequence
  Description of Artificial Sequence: Synthetic oligonucleotide
  Target: LAMA2; (+) strand; PAM type: NRG; PAM sequence: CAG
tttccgcatctgaccaaggg

SEQ ID NO: 156352 - DNA, 20 bp, Artificial Sequence
  Description of Artificial Sequence: Synthetic oligonucleotide
  Target: LAMA2; (+) strand; PAM type: NRG; PAM sequence: AGG
ttccgcatctgaccaagggc

SEQ ID NO: 156353 - DNA, 20 bp, Artificial Sequence
  Description of Artificial Sequence: Synthetic oligonucleotide
  Target: LAMA2; (+) strand; PAM type: NRG; PAM sequence: AAG
agggcaggcttgatatcctg

SEQ ID NO: 156354 - DNA, 20 bp, Artificial Sequence
  Description of Artificial Sequence: Synthetic oligonucleotide
  Target: LAMA2; (+) strand; PAM type: NRG; PAM sequence: AGG
gggcaggcttgatatcctga

SEQ ID NO: 156355 - DNA, 20 bp, Artificial Sequence
  Description of Artificial Sequence: Synthetic oligonucleotide
  Target: LAMA2; (+) strand; PAM type: NRG; PAM sequence: AAG
ggcttgatatcctgaaggtt

SEQ ID NO: 156356 - DNA, 20 bp, Artificial Sequence
  Description of Artificial Sequence: Synthetic oligonucleotide
  Target: LAMA2; (+) strand; PAM type: NRG; PAM sequence: GAG
cttgatatcctgaaggttaa

SEQ ID NO: 156357 - DNA, 20 bp, Artificial Sequence
  Description of Artificial Sequence: Synthetic oligonucleotide
  Target: LAMA2; (+) strand; PAM type: NRG; PAM sequence: CGG
gatatcctgaaggttaagag

SEQ ID NO: 156358 - DNA, 20 bp, Artificial Sequence
  Description of Artificial Sequence: Synthetic oligonucleotide
  Target: LAMA2; (+) strand; PAM type: NRG; PAM sequence: AAG
gttaagagcggctttgcctg

SEQ ID NO: 156359 - DNA, 20 bp, Artificial Sequence
  Description of Artificial Sequence: Synthetic oligonucleotide
  Target: LAMA2; (+) strand; PAM type: NRG; PAM sequence: AAG
gagcggctttgcctgaagca

SEQ ID NO: 156360 - DNA, 20 bp, Artificial Sequence
  Description of Artificial Sequence: Synthetic oligonucleotide
  Target: LAMA2; (+) strand; PAM type: NRG; PAM sequence: TGG
ctgaagcaaagttctcacta

SEQ ID NO: 156361 - DNA, 20 bp, Artificial Sequence
  Description of Artificial Sequence: Synthetic oligonucleotide
  Target: LAMA2; (+) strand; PAM type: NRG; PAM sequence: GGG
tgaagcaaagttctcactat

SEQ ID NO: 156362 - DNA, 20 bp, Artificial Sequence
  Description of Artificial Sequence: Synthetic oligonucleotide
  Target: LAMA2; (+) strand; PAM type: NRG; PAM sequence: AAG
agcaaagttctcactatggg

SEQ ID NO: 156363 - DNA, 20 bp, Artificial Sequence
  Description of Artificial Sequence: Synthetic oligonucleotide
  Target: LAMA2; (+) strand; PAM type: NRG; PAM sequence: CAG
gttctcactatgggaagttg

SEQ ID NO: 156364 - DNA, 20 bp, Artificial Sequence
  Description of Artificial Sequence: Synthetic oligonucleotide
  Target: LAMA2; (+) strand; PAM type: NRG; PAM sequence: GAG
cactatgggaagttgcagcc

SEQ ID NO: 156365 - DNA, 20 bp, Artificial Sequence
  Description of Artificial Sequence: Synthetic oligonucleotide
  Target: LAMA2; (+) strand; PAM type: NRG; PAM sequence: TAG
tatgggaagttgcagccgag

SEQ ID NO: 156366 - DNA, 20 bp, Artificial Sequence
  Description of Artificial Sequence: Synthetic oligonucleotide
  Target: LAMA2; (+) strand; PAM type: NRG; PAM sequence: AAG
gaagttgcagccgagtagtg

SEQ ID NO: 156367 - DNA, 20 bp, Artificial Sequence
  Description of Artificial Sequence: Synthetic oligonucleotide
  Target: LAMA2; (+) strand; PAM type: NRG; PAM sequence: GAG
agttgcagccgagtagtgaa

SEQ ID NO: 156368 - DNA, 20 bp, Artificial Sequence
  Description of Artificial Sequence: Synthetic oligonucleotide
  Target: LAMA2; (+) strand; PAM type: NRG; PAM sequence: TGG
gtagtgaagagttatcttga

SEQ ID NO: 156369 - DNA, 20 bp, Artificial Sequence
  Description of Artificial Sequence: Synthetic oligonucleotide
  Target: LAMA2; (+) strand; PAM type: NRG; PAM sequence: GGG
tagtgaagagttatcttgat

SEQ ID NO: 156370 - DNA, 20 bp, Artificial Sequence
  Description of Artificial Sequence: Synthetic oligonucleotide
  Target: LAMA2; (+) strand; PAM type: NRG; PAM sequence: GAG
gtgaagagttatcttgatgg

SEQ ID NO: 156371 - DNA, 20 bp, Artificial Sequence
  Description of Artificial Sequence: Synthetic oligonucleotide
  Target: LAMA2; (+) strand; PAM type: NRG; PAM sequence: AGG
tgaagagttatcttgatggg

SEQ ID NO: 156372 - DNA, 20 bp, Artificial Sequence
  Description of Artificial Sequence: Synthetic oligonucleotide
  Target: LAMA2; (+) strand; PAM type: NRG; PAM sequence: CGG
gagttatcttgatgggaggc

SEQ ID NO: 156373 - DNA, 20 bp, Artificial Sequence
  Description of Artificial Sequence: Synthetic oligonucleotide
  Target: LAMA2; (+) strand; PAM type: NRG; PAM sequence: TGG
aggccggaacaaatttgctt

SEQ ID NO: 156374 - DNA, 20 bp, Artificial Sequence
  Description of Artificial Sequence: Synthetic oligonucleotide
  Target: LAMA2; (+) strand; PAM type: NRG; PAM sequence: GAG
gccggaacaaatttgctttg

SEQ ID NO: 156375 - DNA, 20 bp, Artificial Sequence
  Description of Artificial Sequence: Synthetic oligonucleotide
  Target: LAMA2; (+) strand; PAM type: NRG; PAM sequence: AAG
aaatttgctttggagacgta

SEQ ID NO: 156376 - DNA, 20 bp, Artificial Sequence
  Description of Artificial Sequence: Synthetic oligonucleotide
  Target: LAMA2; (+) strand; PAM type: NRG; PAM sequence: AGG
aatttgctttggagacgtaa

SEQ ID NO: 156377 - DNA, 20 bp, Artificial Sequence
  Description of Artificial Sequence: Synthetic oligonucleotide
  Target: LAMA2; (+) strand; PAM type: NRG; PAM sequence: GGG
atttgctttggagacgtaaa

SEQ ID NO: 156378 - DNA, 20 bp, Artificial Sequence
  Description of Artificial Sequence: Synthetic oligonucleotide
  Target: LAMA2; (+) strand; PAM type: NRG; PAM sequence: AAG
ttggagacgtaaagggaact

SEQ ID NO: 156379 - DNA, 20 bp, Artificial Sequence
  Description of Artificial Sequence: Synthetic oligonucleotide
  Target: LAMA2; (+) strand; PAM type: NRG; PAM sequence: TGG
gaactaagaactattcttac

SEQ ID NO: 156380 - DNA, 20 bp, Artificial Sequence
  Description of Artificial Sequence: Synthetic oligonucleotide
  Target: LAMA2; (+) strand; PAM type: NRG; PAM sequence: GAG
ttcttactggactccaatat

SEQ ID NO: 156381 - DNA, 20 bp, Artificial Sequence
  Description of Artificial Sequence: Synthetic oligonucleotide
  Target: LAMA2; (+) strand; PAM type: NRG; PAM sequence: TGG
gagactttatttctatccat

SEQ ID NO: 156382 - DNA, 20 bp, Artificial Sequence
  Description of Artificial Sequence: Synthetic oligonucleotide
  Target: LAMA2; (+) strand; PAM type: NRG; PAM sequence: AAG
atttctatccattggtttgc

SEQ ID NO: 156383 - DNA, 20 bp, Artificial Sequence
  Description of Artificial Sequence: Synthetic oligonucleotide
  Target: LAMA2; (+) strand; PAM type: NRG; PAM sequence: AGG
tttctatccattggtttgca

SEQ ID NO: 156384 - DNA, 20 bp, Artificial Sequence
  Description of Artificial Sequence: Synthetic oligonucleotide
  Target: LAMA2; (+) strand; PAM type: NRG; PAM sequence: TGG
atccattggtttgcaaggcc

SEQ ID NO: 156385 - DNA, 20 bp, Artificial Sequence
  Description of Artificial Sequence: Synthetic oligonucleotide
  Target: LAMA2; (+) strand; PAM type: NRG; PAM sequence: GAG
ccattggtttgcaaggcctg

SEQ ID NO: 156386 - DNA, 20 bp, Artificial Sequence
  Description of Artificial Sequence: Synthetic oligonucleotide
  Target: LAMA2; (+) strand; PAM type: NRG; PAM sequence: TAG
aggcctggagatatatgcat

SEQ ID NO: 156387 - DNA, 20 bp, Artificial Sequence
  Description of Artificial Sequence: Synthetic oligonucleotide
  Target: LAMA2; (+) strand; PAM type: NRG; PAM sequence: AAG
agatatatgcattagataaa

SEQ ID NO: 156388 - DNA, 20 bp, Artificial Sequence
  Description of Artificial Sequence: Synthetic oligonucleotide
  Target: LAMA2; (+) strand; PAM type: NRG; PAM sequence: TAG
aaaaagactgtatttgtaat

SEQ ID NO: 156389 - DNA, 20 bp, Artificial Sequence
  Description of Artificial Sequence: Synthetic oligonucleotide
  Target: LAMA2; (+) strand; PAM type: NRG; PAM sequence: AAG
gactgtatttgtaattagaa

SEQ ID NO: 156390 - DNA, 20 bp, Artificial Sequence
  Description of Artificial Sequence: Synthetic oligonucleotide
  Target: LAMA2; (+) strand; PAM type: NRG; PAM sequence: CAG
tttgtaattagaaaagcctc

SEQ ID NO: 156391 - DNA, 20 bp, Artificial Sequence
  Description of Artificial Sequence: Synthetic oligonucleotide
  Target: LAMA2; (+) strand; PAM type: NRG; PAM sequence: TAG
tgtctacataataccacaca

SEQ ID NO: 156392 - DNA, 20 bp, Artificial Sequence
  Description of Artificial Sequence: Synthetic oligonucleotide
  Target: LAMA2; (+) strand; PAM type: NRG; PAM sequence: AAG
cacatagatgaaaatccaaa

SEQ ID NO: 156393 - DNA, 20 bp, Artificial Sequence
  Description of Artificial Sequence: Synthetic oligonucleotide
  Target: LAMA2; (+) strand; PAM type: NRG; PAM sequence: TAG
ttataataattcttccaatc

SEQ ID NO: 156394 - DNA, 20 bp, Artificial Sequence
  Description of Artificial Sequence: Synthetic oligonucleotide
  Target: LAMA2; (+) strand; PAM type: NRG; PAM sequence: TAG
ccaatctagttgttgttata

SEQ ID NO: 156395 - DNA, 20 bp, Artificial Sequence
  Description of Artificial Sequence: Synthetic oligonucleotide
  Target: LAMA2; (+) strand; PAM type: NRG; PAM sequence: AAG
atctagttgttgttatatag

SEQ ID NO: 156396 - DNA, 20 bp, Artificial Sequence
  Description of Artificial Sequence: Synthetic oligonucleotide
  Target: LAMA2; (+) strand; PAM type: NRG; PAM sequence: CAG
gttgttatatagaagcccct

SEQ ID NO: 156397 - DNA, 20 bp, Artificial Sequence
  Description of Artificial Sequence: Synthetic oligonucleotide
  Target: LAMA2; (+) strand; PAM type: NRG; PAM sequence: GAG
tgttatatagaagcccctca

SEQ ID NO: 156398 - DNA, 20 bp, Artificial Sequence
  Description of Artificial Sequence: Synthetic oligonucleotide
  Target: LAMA2; (+) strand; PAM type: NRG; PAM sequence: AGG
gttatatagaagcccctcag

SEQ ID NO: 156399 - DNA, 20 bp, Artificial Sequence
  Description of Artificial Sequence: Synthetic oligonucleotide
  Target: LAMA2; (+) strand; PAM type: NRG; PAM sequence: GGG
ttatatagaagcccctcaga

SEQ ID NO: 156400 - DNA, 20 bp, Artificial Sequence
  Description of Artificial Sequence: Synthetic oligonucleotide
  Target: LAMA2; (+) strand; PAM type: NRG; PAM sequence: GAG
cccattttgctgaatttctt

SEQ ID NO: 156401 - DNA, 20 bp, Artificial Sequence
  Description of Artificial Sequence: Synthetic oligonucleotide
  Target: LAMA2; (+) strand; PAM type: NRG; PAM sequence: CAG
tgagttttttacttatatca

SEQ ID NO: 156402 - DNA, 20 bp, Artificial Sequence
  Description of Artificial Sequence: Synthetic oligonucleotide
  Target: LAMA2; (+) strand; PAM type: NRG; PAM sequence: CAG
ttttacttatatcacagaat

SEQ ID NO: 156403 - DNA, 20 bp, Artificial Sequence
  Description of Artificial Sequence: Synthetic oligonucleotide
  Target: LAMA2; (+) strand; PAM type: NRG; PAM sequence: AGG
tttacttatatcacagaatc

SEQ ID NO: 156404 - DNA, 20 bp, Artificial Sequence
  Description of Artificial Sequence: Synthetic oligonucleotide
  Target: LAMA2; (+) strand; PAM type: NRG; PAM sequence: AAG
tcacagaatcaggatgttca

SEQ ID NO: 156405 - DNA, 20 bp, Artificial Sequence
  Description of Artificial Sequence: Synthetic oligonucleotide
  Target: LAMA2; (+) strand; PAM type: NRG; PAM sequence: AAG
aggatgttcaaagtataaca

SEQ ID NO: 156406 - DNA, 20 bp, Artificial Sequence
  Description of Artificial Sequence: Synthetic oligonucleotide
  Target: LAMA2; (+) strand; PAM type: NRG; PAM sequence: GAG
gttcaaagtataacaaagat

SEQ ID NO: 156407 - DNA, 20 bp, Artificial Sequence
  Description of Artificial Sequence: Synthetic oligonucleotide
  Target: LAMA2; (+) strand; PAM type: NRG; PAM sequence: AAG
caaagtataacaaagatgag

SEQ ID NO: 156408 - DNA, 20 bp, Artificial Sequence
  Description of Artificial Sequence: Synthetic oligonucleotide
  Target: LAMA2; (+) strand; PAM type: NRG; PAM sequence: AAG
gtataacaaagatgagaagt

SEQ ID NO: 156409 - DNA, 20 bp, Artificial Sequence
  Description of Artificial Sequence: Synthetic oligonucleotide
  Target: LAMA2; (+) strand; PAM type: NRG; PAM sequence: AAG
gatgagaagtaagttgaaaa

SEQ ID NO: 156410 - DNA, 20 bp, Artificial Sequence
  Description of Artificial Sequence: Synthetic oligonucleotide
  Target: LAMA2; (+) strand; PAM type: NRG; PAM sequence: TAG
taagttgaaaaaagaattat

SEQ ID NO: 156411 - DNA, 20 bp, Artificial Sequence
  Description of Artificial Sequence: Synthetic oligonucleotide
  Target: LAMA2; (+) strand; PAM type: NRG; PAM sequence: TGG
ctaccatatacatgttatct

SEQ ID NO: 156412 - DNA, 20 bp, Artificial Sequence
  Description of Artificial Sequence: Synthetic oligonucleotide
  Target: LAMA2; (+) strand; PAM type: NRG; PAM sequence: TGG
tatacatgttatcttggaat

SEQ ID NO: 156413 - DNA, 20 bp, Artificial Sequence
  Description of Artificial Sequence: Synthetic oligonucleotide
  Target: LAMA2; (+) strand; PAM type: NRG; PAM sequence: AAG
aattggaattttttcataat

SEQ ID NO: 156414 - DNA, 20 bp, Artificial Sequence
  Description of Artificial Sequence: Synthetic oligonucleotide
  Target: LAMA2; (+) strand; PAM type: NRG; PAM sequence: TAG
tttcataataagaaatccat

SEQ ID NO: 156415 - DNA, 20 bp, Artificial Sequence
  Description of Artificial Sequence: Synthetic oligonucleotide
  Target: LAMA2; (+) strand; PAM type: NRG; PAM sequence: CAG
gaaatccattagcataaata

SEQ ID NO: 156416 - DNA, 20 bp, Artificial Sequence
  Description of Artificial Sequence: Synthetic oligonucleotide
  Target: LAMA2; (+) strand; PAM type: NRG; PAM sequence: AAG
aaatacagtttaaattgaat

SEQ ID NO: 156417 - DNA, 20 bp, Artificial Sequence
  Description of Artificial Sequence: Synthetic oligonucleotide
  Target: LAMA2; (+) strand; PAM type: NRG; PAM sequence: TGG
ttaaaaacaaaatatttatt

SEQ ID NO: 156418 - DNA, 20 bp, Artificial Sequence
  Description of Artificial Sequence: Synthetic oligonucleotide
  Target: LAMA2; (+) strand; PAM type: NRG; PAM sequence: GGG
taaaaacaaaatatttattt

SEQ ID NO: 156419 - DNA, 20 bp, Artificial Sequence
  Description of Artificial Sequence: Synthetic oligonucleotide
  Target: LAMA2; (+) strand; PAM type: NRG; PAM sequence: GGG
aaaaacaaaatatttatttg

SEQ ID NO: 156420 - DNA, 20 bp, Artificial Sequence
  Description of Artificial Sequence: Synthetic oligonucleotide
  Target: LAMA2; (+) strand; PAM type: NRG; PAM sequence: GGG
aaaacaaaatatttatttgg

SEQ ID NO: 156421 - DNA, 20 bp, Artificial Sequence
  Description of Artificial Sequence: Synthetic oligonucleotide
  Target: LAMA2; (+) strand; PAM type: NRG; PAM sequence: TAG
ttgggggtacattttataaa

SEQ ID NO: 156422 - DNA, 20 bp, Artificial Sequence
  Description of Artificial Sequence: Synthetic oligonucleotide
  Target: LAMA2; (+) strand; PAM type: NRG; PAM sequence: AAG
aaactgcatttttgaaatgt

SEQ ID NO: 156423 - DNA, 20 bp, Artificial Sequence
  Description of Artificial Sequence: Synthetic oligonucleotide
  Target: LAMA2; (+) strand; PAM type: NRG; PAM sequence: TAG
aatgtaagccatattgatgc

SEQ ID NO: 156424 - DNA, 20 bp, Artificial Sequence
  Description of Artificial Sequence: Synthetic oligonucleotide
  Target: LAMA2; (+) strand; PAM type: NRG; PAM sequence: AAG
taagccatattgatgctagt

SEQ ID NO: 156425 - DNA, 20 bp, Artificial Sequence
  Description of Artificial Sequence: Synthetic oligonucleotide
  Target: LAMA2; (+) strand; PAM type: NRG; PAM sequence: TAG
gtatgtacttttatgttatt

SEQ ID NO: 156426 - DNA, 20 bp, Artificial Sequence
  Description of Artificial Sequence: Synthetic oligonucleotide
  Target: LAMA2; (+) strand; PAM type: NRG; PAM sequence: CGG
agaaaatttaattacacgta

SEQ ID NO: 156427 - DNA, 20 bp, Artificial Sequence
  Description of Artificial Sequence: Synthetic oligonucleotide
  Target: LAMA2; (+) strand; PAM type: NRG; PAM sequence: AAG
aattacacgtacggtgtttc

SEQ ID NO: 156428 - DNA, 20 bp, Artificial Sequence
  Description of Artificial Sequence: Synthetic oligonucleotide
  Target: LAMA2; (+) strand; PAM type: NRG; PAM sequence: TAG
acggtgtttcaagtattcaa

SEQ ID NO: 156429 - DNA, 20 bp, Artificial Sequence
  Description of Artificial Sequence: Synthetic oligonucleotide
  Target: LAMA2; (+) strand; PAM type: NRG; PAM sequence: TAG
tattcaatagataaaccacc

SEQ ID NO: 156430 - DNA, 20 bp, Artificial Sequence
  Description of Artificial Sequence: Synthetic oligonucleotide
  Target: LAMA2; (+) strand; PAM type: NRG; PAM sequence: AGG
attcaatagataaaccacct

SEQ ID NO: 156431 - DNA, 20 bp, Artificial Sequence
  Description of Artificial Sequence: Synthetic oligonucleotide
  Target: LAMA2; (+) strand; PAM type: NRG; PAM sequence: CAG
taaaccacctaggaatataa

SEQ ID NO: 156432 - DNA, 20 bp, Artificial Sequence
  Description of Artificial Sequence: Synthetic oligonucleotide
  Target: LAMA2; (+) strand; PAM type: NRG; PAM sequence: AGG
aaaccacctaggaatataac

SEQ ID NO: 156433 - DNA, 20 bp, Artificial Sequence
  Description of Artificial Sequence: Synthetic oligonucleotide
  Target: LAMA2; (+) strand; PAM type: NRG; PAM sequence: GGG
aaccacctaggaatataaca

SEQ ID NO: 156434 - DNA, 20 bp, Artificial Sequence
  Description of Artificial Sequence: Synthetic oligonucleotide
  Target: LAMA2; (+) strand; PAM type: NRG; PAM sequence: GGG
accacctaggaatataacag

SEQ ID NO: 156435 - DNA, 20 bp, Artificial Sequence
  Description of Artificial Sequence: Synthetic oligonucleotide
  Target: LAMA2; (+) strand; PAM type: NRG; PAM sequence: GGG
ccacctaggaatataacagg

SEQ ID NO: 156436 - DNA, 20 bp, Artificial Sequence
  Description of Artificial Sequence: Synthetic oligonucleotide
  Target: LAMA2; (+) strand; PAM type: NRG; PAM sequence: TAG
actctgtgtctttatgaaac

SEQ ID NO: 156437 - DNA, 20 bp, Artificial Sequence
  Description of Artificial Sequence: Synthetic oligonucleotide
  Target: LAMA2; (+) strand; PAM type: NRG; PAM sequence: AAG
tgtctttatgaaactagata

SEQ ID NO: 156438 - DNA, 20 bp, Artificial Sequence
  Description of Artificial Sequence: Synthetic oligonucleotide
  Target: LAMA2; (+) strand; PAM type: NRG; PAM sequence: AAG
ttatgaaactagataaagca

SEQ ID NO: 156439 - DNA, 20 bp, Artificial Sequence
  Description of Artificial Sequence: Synthetic oligonucleotide
  Target: LAMA2; (+) strand; PAM type: NRG; PAM sequence: CAG
agaaaaatctgtcaattact

SEQ ID NO: 156440 - DNA, 20 bp, Artificial Sequence
  Description of Artificial Sequence: Synthetic oligonucleotide
  Target: LAMA2; (+) strand; PAM type: NRG; PAM sequence: CAG
aaatctgtcaattactcagc

SEQ ID NO: 156441 - DNA, 20 bp, Artificial Sequence
  Description of Artificial Sequence: Synthetic oligonucleotide
  Target: LAMA2; (+) strand; PAM type: NRG; PAM sequence: TAG
ttactcagccagtttcatct

SEQ ID NO: 156442 - DNA, 20 bp, Artificial Sequence
  Description of Artificial Sequence: Synthetic oligonucleotide
  Target: LAMA2; (+) strand; PAM type: NRG; PAM sequence: TAG
ctcagccagtttcatcttag

SEQ ID NO: 156443 - DNA, 20 bp, Artificial Sequence
  Description of Artificial Sequence: Synthetic oligonucleotide
  Target: LAMA2; (+) strand; PAM type: NRG; PAM sequence: GAG
ttagtagcctactgtaaatt

SEQ ID NO: 156444 - DNA, 20 bp, Artificial Sequence
  Description of Artificial Sequence: Synthetic oligonucleotide
  Target: LAMA2; (+) strand; PAM type: NRG; PAM sequence: AGG
tagtagcctactgtaaattg

SEQ ID NO: 156445 - DNA, 20 bp, Artificial Sequence
  Description of Artificial Sequence: Synthetic oligonucleotide
  Target: LAMA2; (+) strand; PAM type: NRG; PAM sequence: GAG
aaattgaggtctatgttttt

SEQ ID NO: 156446 - DNA, 20 bp, Artificial Sequence
  Description of Artificial Sequence: Synthetic oligonucleotide
  Target: LAMA2; (+) strand; PAM type: NRG; PAM sequence: TAG
gtttttgagtgaatgaaatc

SEQ ID NO: 156447 - DNA, 20 bp, Artificial Sequence
  Description of Artificial Sequence: Synthetic oligonucleotide
  Target: LAMA2; (+) strand; PAM type: NRG; PAM sequence: AAG
tgaatgaaatctagtaaatt

SEQ ID NO: 156448 - DNA, 20 bp, Artificial Sequence
  Description of Artificial Sequence: Synthetic oligonucleotide
  Target: LAMA2; (+) strand; PAM type: NRG; PAM sequence: CAG
atctagtaaattaagttcac

SEQ ID NO: 156449 - DNA, 20 bp, Artificial Sequence
  Description of Artificial Sequence: Synthetic oligonucleotide
  Target: LAMA2; (+) strand; PAM type: NRG; PAM sequence: AGG
tctagtaaattaagttcacc

SEQ ID NO: 156450 - DNA, 20 bp, Artificial Sequence
  Description of Artificial Sequence: Synthetic oligonucleotide
  Target: LAMA2; (+) strand; PAM type: NRG; PAM sequence: TAG
aagttcaccaggtcttattc

SEQ ID NO: 156451 - DNA, 20 bp, Artificial Sequence
  Description of Artificial Sequence: Synthetic oligonucleotide
  Target: LAMA2; (+) strand; PAM type: NRG; PAM sequence: TAG
ggtcttattctagtttattt

SEQ ID NO: 156452 - DNA, 20 bp, Artificial Sequence
  Description of Artificial Sequence: Synthetic oligonucleotide
  Target: LAMA2; (+) strand; PAM type: NRG; PAM sequence: TGG
ttattctagtttattttaga

SEQ ID NO: 156453 - DNA, 20 bp, Artificial Sequence
  Description of Artificial Sequence: Synthetic oligonucleotide
  Target: LAMA2; (+) strand; PAM type: NRG; PAM sequence: AAG
tggaaatgtatgatttttaa

SEQ ID NO: 156454 - DNA, 20 bp, Artificial Sequence
  Description of Artificial Sequence: Synthetic oligonucleotide
  Target: LAMA2; (+) strand; PAM type: NRG; PAM sequence: TGG
aaatgtatgatttttaaaag

SEQ ID NO: 156455 - DNA, 20 bp, Artificial Sequence
  Description of Artificial Sequence: Synthetic oligonucleotide
  Target: LAMA2; (+) strand; PAM type: NRG; PAM sequence: GGG
aatgtatgatttttaaaagt

SEQ ID NO: 156456 - DNA, 20 bp, Artificial Sequence
  Description of Artificial Sequence: Synthetic oligonucleotide
  Target: LAMA2; (+) strand; PAM type: NRG; PAM sequence: GAG
tgtatgatttttaaaagtgg

SEQ ID NO: 156457 - DNA, 20 bp, Artificial Sequence
  Description of Artificial Sequence: Synthetic oligonucleotide
  Target: LAMA2; (+) strand; PAM type: NRG; PAM sequence: AAG
acacatatttctgaaatgtt

SEQ ID NO: 156458 - DNA, 20 bp, Artificial Sequence
  Description of Artificial Sequence: Synthetic oligonucleotide
  Target: LAMA2; (+) strand; PAM type: NRG; PAM sequence: AAG
catatttctgaaatgttaag

SEQ ID NO: 156459 - DNA, 20 bp, Artificial Sequence
  Description of Artificial Sequence: Synthetic oligonucleotide
  Target: LAMA2; (+) strand; PAM type: NRG; PAM sequence: AAG
tttataattcaaacctgtac

SEQ ID NO: 156460 - DNA, 20 bp, Artificial Sequence
  Description of Artificial Sequence: Synthetic oligonucleotide
  Target: LAMA2; (+) strand; PAM type: NRG; PAM sequence: TAG
ttcaaacctgtacaagaact

SEQ ID NO: 156461 - DNA, 20 bp, Artificial Sequence
  Description of Artificial Sequence: Synthetic oligonucleotide
  Target: LAMA2; (+) strand; PAM type: NRG; PAM sequence: GAG
agaacttagtttgcctatct

SEQ ID NO: 156462 - DNA, 20 bp, Artificial Sequence
  Description of Artificial Sequence: Synthetic oligonucleotide
  Target: LAMA2; (+) strand; PAM type: NRG; PAM sequence: TAG
tgagcaaattttacattcac

SEQ ID NO: 156463 - DNA, 20 bp, Artificial Sequence
  Description of Artificial Sequence: Synthetic oligonucleotide
  Target: LAMA2; (+) strand; PAM type: NRG; PAM sequence: AAG
actagtgaatgcccatgtga

SEQ ID NO: 156464 - DNA, 20 bp, Artificial Sequence
  Description of Artificial Sequence: Synthetic oligonucleotide
  Target: LAMA2; (+) strand; PAM type: NRG; PAM sequence: AAG
tgaatgcccatgtgaaagac

SEQ ID NO: 156465 - DNA, 20 bp, Artificial Sequence
  Description of Artificial Sequence: Synthetic oligonucleotide
  Target: LAMA2; (+) strand; PAM type: NRG; PAM sequence: CAG
atgcccatgtgaaagacaag

SEQ ID NO: 156466 - DNA, 20 bp, Artificial Sequence
  Description of Artificial Sequence: Synthetic oligonucleotide
  Target: LAMA2; (+) strand; PAM type: NRG; PAM sequence: AGG
tgcccatgtgaaagacaagc

SEQ ID NO: 156467 - DNA, 20 bp, Artificial Sequence
  Description of Artificial Sequence: Synthetic oligonucleotide
  Target: LAMA2; (+) strand; PAM type: NRG; PAM sequence: CAG
aaagacaagcaggaaacttc

SEQ ID NO: 156468 - DNA, 20 bp, Artificial Sequence
  Description of Artificial Sequence: Synthetic oligonucleotide
  Target: LAMA2; (+) strand; PAM type: NRG; PAM sequence: AGG
aagacaagcaggaaacttcc

SEQ ID NO: 156469 - DNA, 20 bp, Artificial Sequence
  Description of Artificial Sequence: Synthetic oligonucleotide
  Target: LAMA2; (+) strand; PAM type: NRG; PAM sequence: GGG
agacaagcaggaaacttcca

SEQ ID NO: 156470 - DNA, 20 bp, Artificial Sequence
  Description of Artificial Sequence: Synthetic oligonucleotide
  Target: LAMA2; (+) strand; PAM type: NRG; PAM sequence: GGG
gacaagcaggaaacttccag

SEQ ID NO: 156471 - DNA, 20 bp, Artificial Sequence
  Description of Artificial Sequence: Synthetic oligonucleotide
  Target: LAMA2; (+) strand; PAM type: NRG; PAM sequence: AAG
gcaggaaacttccaggggcc

SEQ ID NO: 156472 - DNA, 20 bp, Artificial Sequence
  Description of Artificial Sequence: Synthetic oligonucleotide
  Target: LAMA2; (+) strand; PAM type: NRG; PAM sequence: AGG
caggaaacttccaggggcca

SEQ ID NO: 156473 - DNA, 20 bp, Artificial Sequence
  Description of Artificial Sequence: Synthetic oligonucleotide
  Target: LAMA2; (+) strand; PAM type: NRG; PAM sequence: GGG
aggaaacttccaggggccaa

SEQ ID NO: 156474 - DNA, 20 bp, Artificial Sequence
  Description of Artificial Sequence: Synthetic oligonucleotide
  Target: LAMA2; (+) strand; PAM type: NRG; PAM sequence: GGG
ggaaacttccaggggccaag

SEQ ID NO: 156475 - DNA, 20 bp, Artificial Sequence
  Description of Artificial Sequence: Synthetic oligonucleotide
  Target: LAMA2; (+) strand; PAM type: NRG; PAM sequence: TAG
cttccaggggccaaggggct

SEQ ID NO: 156476 - DNA, 20 bp, Artificial Sequence
  Description of Artificial Sequence: Synthetic oligonucleotide
  Target: LAMA2; (+) strand; PAM type: NRG; PAM sequence: TGG
gggcttagaaccaactgaac

SEQ ID NO: 156477 - DNA, 20 bp, Artificial Sequence
  Description of Artificial Sequence: Synthetic oligonucleotide
  Target: LAMA2; (+) strand; PAM type: NRG; PAM sequence: TAG
aactggtacaaaataaacat

SEQ ID NO: 156478 - DNA, 20 bp, Artificial Sequence
  Description of Artificial Sequence: Synthetic oligonucleotide
  Target: LAMA2; (+) strand; PAM type: NRG; PAM sequence: AGG
actggtacaaaataaacatt

SEQ ID NO: 156479 - DNA, 20 bp, Artificial Sequence
  Description of Artificial Sequence: Synthetic oligonucleotide
  Target: LAMA2; (+) strand; PAM type: NRG; PAM sequence: CAG
aaaataaacattaggtattt

SEQ ID NO: 156480 - DNA, 20 bp, Artificial Sequence
  Description of Artificial Sequence: Synthetic oligonucleotide
  Target: LAMA2; (+) strand; PAM type: NRG; PAM sequence: TAG
acattaggtatttcagtacg

SEQ ID NO: 156481 - DNA, 20 bp, Artificial Sequence
  Description of Artificial Sequence: Synthetic oligonucleotide
  Target: LAMA2; (+) strand; PAM type: NRG; PAM sequence: GAG
attaggtatttcagtacgta

SEQ ID NO: 156482 - DNA, 20 bp, Artificial Sequence
  Description of Artificial Sequence: Synthetic oligonucleotide
  Target: LAMA2; (+) strand; PAM type: NRG; PAM sequence: TGG
atttcagtacgtagagtttg

SEQ ID NO: 156483 - DNA, 20 bp, Artificial Sequence
  Description of Artificial Sequence: Synthetic oligonucleotide
  Target: LAMA2; (+) strand; PAM type: NRG; PAM sequence: AAG
acgtagagtttgtggacaaa

SEQ ID NO: 156484 - DNA, 20 bp, Artificial Sequence
  Description of Artificial Sequence: Synthetic oligonucleotide
  Target: LAMA2; (+) strand; PAM type: NRG; PAM sequence: TAG
gagtttgtggacaaaaagaa

SEQ ID NO: 156485 - DNA, 20 bp, Artificial Sequence
  Description of Artificial Sequence: Synthetic oligonucleotide
  Target: LAMA2; (+) strand; PAM type: NRG; PAM sequence: AGG
agtttgtggacaaaaagaat

SEQ ID NO: 156486 - DNA, 20 bp, Artificial Sequence
  Description of Artificial Sequence: Synthetic oligonucleotide
  Target: LAMA2; (+) strand; PAM type: NRG; PAM sequence: TAG
cttaccaattactatgctac

SEQ ID NO: 156487 - DNA, 20 bp, Artificial Sequence
  Description of Artificial Sequence: Synthetic oligonucleotide
  Target: LAMA2; (+) strand; PAM type: NRG; PAM sequence: AAG
tatccaattttgcttttacc

SEQ ID NO: 156488 - DNA, 20 bp, Artificial Sequence
  Description of Artificial Sequence: Synthetic oligonucleotide
  Target: LAMA2; (+) strand; PAM type: NRG; PAM sequence: TAG
attttgcttttaccaagcct

SEQ ID NO: 156489 - DNA, 20 bp, Artificial Sequence
  Description of Artificial Sequence: Synthetic oligonucleotide
  Target: LAMA2; (+) strand; PAM type: NRG; PAM sequence: AAG
ttttaccaagccttagtgaa

SEQ ID NO: 156490 - DNA, 20 bp, Artificial Sequence
  Description of Artificial Sequence: Synthetic oligonucleotide
  Target: LAMA2; (+) strand; PAM type: NRG; PAM sequence: AAG
aaaagtgaatgaattctaac

SEQ ID NO: 156491 - DNA, 20 bp, Artificial Sequence
  Description of Artificial Sequence: Synthetic oligonucleotide
  Target: LAMA2; (+) strand; PAM type: NRG; PAM sequence: AAG
agtgaatgaattctaacaag

SEQ ID NO: 156492 - DNA, 20 bp, Artificial Sequence
  Description of Artificial Sequence: Synthetic oligonucleotide
  Target: LAMA2; (+) strand; PAM type: NRG; PAM sequence: AAG
aattctaacaagaagactca

SEQ ID NO: 156493 - DNA, 20 bp, Artificial Sequence
  Description of Artificial Sequence: Synthetic oligonucleotide
  Target: LAMA2; (+) strand; PAM type: NRG; PAM sequence: TGG
acaagaagactcaaagacac

SEQ ID NO: 156494 - DNA, 20 bp, Artificial Sequence
  Description of Artificial Sequence: Synthetic oligonucleotide
  Target: LAMA2; (+) strand; PAM type: NRG; PAM sequence: TGG
ctcccttcacttattctgca

SEQ ID NO: 156495 - DNA, 20 bp, Artificial Sequence
  Description of Artificial Sequence: Synthetic oligonucleotide
  Target: LAMA2; (+) strand; PAM type: NRG; PAM sequence: CAG
cttcacttattctgcatggt

SEQ ID NO: 156496 - DNA, 20 bp, Artificial Sequence
  Description of Artificial Sequence: Synthetic oligonucleotide
  Target: LAMA2; (+) strand; PAM type: NRG; PAM sequence: AAG
catggtcagcacctcttcaa

SEQ ID NO: 156497 - DNA, 20 bp, Artificial Sequence
  Description of Artificial Sequence: Synthetic oligonucleotide
  Target: LAMA2; (+) strand; PAM type: NRG; PAM sequence: TGG
cttcaaaagaccaataataa

SEQ ID NO: 156498 - DNA, 20 bp, Artificial Sequence
  Description of Artificial Sequence: Synthetic oligonucleotide
  Target: LAMA2; (+) strand; PAM type: NRG; PAM sequence: AAG
caataataatggtcccctac

SEQ ID NO: 156499 - DNA, 20 bp, Artificial Sequence
  Description of Artificial Sequence: Synthetic oligonucleotide
  Target: LAMA2; (+) strand; PAM type: NRG; PAM sequence: AAG
taataatggtcccctacaag

SEQ ID NO: 156500 - DNA, 20 bp, Artificial Sequence
  Description of Artificial Sequence: Synthetic oligonucleotide
  Target: LAMA2; (+) strand; PAM type: NRG; PAM sequence: AAG
caattgctcctctgatgtga

SEQ ID NO: 156501 - DNA, 20 bp, Artificial Sequence
  Description of Artificial Sequence: Synthetic oligonucleotide
  Target: LAMA2; (+) strand; PAM type: NRG; PAM sequence: AAG
ctctgatgtgaaagcatatg

SEQ ID NO: 156502 - DNA, 20 bp, Artificial Sequence
  Description of Artificial Sequence: Synthetic oligonucleotide
  Target: LAMA2; (+) strand; PAM type: NRG; PAM sequence: AAG
tgaaagcatatgaagaaaat

SEQ ID NO: 156503 - DNA, 20 bp, Artificial Sequence
  Description of Artificial Sequence: Synthetic oligonucleotide
  Target: LAMA2; (+) strand; PAM type: NRG; PAM sequence: AAG
atgaagaaaataagtgtcca

SEQ ID NO: 156504 - DNA, 20 bp, Artificial Sequence
  Description of Artificial Sequence: Synthetic oligonucleotide
  Target: LAMA2; (+) strand; PAM type: NRG; PAM sequence: GAG
ataaatatttgcaccccttt

SEQ ID NO: 156505 - DNA, 20 bp, Artificial Sequence
  Description of Artificial Sequence: Synthetic oligonucleotide
  Target: LAMA2; (+) strand; PAM type: NRG; PAM sequence: GAG
aaatatttgcacccctttga

SEQ ID NO: 156506 - DNA, 20 bp, Artificial Sequence
  Description of Artificial Sequence: Synthetic oligonucleotide
  Target: LAMA2; (+) strand; PAM type: NRG; PAM sequence: GAG
ttgcacccctttgagagtat

SEQ ID NO: 156507 - DNA, 20 bp, Artificial Sequence
  Description of Artificial Sequence: Synthetic oligonucleotide
  Target: LAMA2; (+) strand; PAM type: NRG; PAM sequence: AAG
acccctttgagagtatgaga

SEQ ID NO: 156508 - DNA, 20 bp, Artificial Sequence
  Description of Artificial Sequence: Synthetic oligonucleotide
  Target: LAMA2; (+) strand; PAM type: NRG; PAM sequence: TAG
gtgttttatgttgtgattga

SEQ ID NO: 156509 - DNA, 20 bp, Artificial Sequence
  Description of Artificial Sequence: Synthetic oligonucleotide
  Target: LAMA2; (+) strand; PAM type: NRG; PAM sequence: AGG
tgttttatgttgtgattgat

SEQ ID NO: 156510 - DNA, 20 bp, Artificial Sequence
  Description of Artificial Sequence: Synthetic oligonucleotide
  Target: LAMA2; (+) strand; PAM type: NRG; PAM sequence: TGG
gattgataggacaactttca

SEQ ID NO: 156511 - DNA, 20 bp, Artificial Sequence
  Description of Artificial Sequence: Synthetic oligonucleotide
  Target: LAMA2; (+) strand; PAM type: NRG; PAM sequence: TAG
catggcccactttgaactct

SEQ ID NO: 156512 - DNA, 20 bp, Artificial Sequence
  Description of Artificial Sequence: Synthetic oligonucleotide
  Target: LAMA2; (+) strand; PAM type: NRG; PAM sequence: CAG
ggcccactttgaactcttag

SEQ ID NO: 156513 - DNA, 20 bp, Artificial Sequence
  Description of Artificial Sequence: Synthetic oligonucleotide
  Target: LAMA2; (+) strand; PAM type: NRG; PAM sequence: AGG
gcccactttgaactcttagc

SEQ ID NO: 156514 - DNA, 20 bp, Artificial Sequence
  Description of Artificial Sequence: Synthetic oligonucleotide
  Target: LAMA2; (+) strand; PAM type: NRG; PAM sequence: TGG
tgaactcttagcaggaactt

SEQ ID NO: 156515 - DNA, 20 bp, Artificial Sequence
  Description of Artificial Sequence: Synthetic oligonucleotide
  Target: LAMA2; (+) strand; PAM type: NRG; PAM sequence: GAG
caggaactttggaatgtcct

SEQ ID NO: 156516 - DNA, 20 bp, Artificial Sequence
  Description of Artificial Sequence: Synthetic oligonucleotide
  Target: LAMA2; (+) strand; PAM type: NRG; PAM sequence: AGG
aggaactttggaatgtcctg

SEQ ID NO: 156517 - DNA, 20 bp, Artificial Sequence
  Description of Artificial Sequence: Synthetic oligonucleotide
  Target: LAMA2; (+) strand; PAM type: NRG; PAM sequence: GGG
ggaactttggaatgtcctga

SEQ ID NO: 156518 - DNA, 20 bp, Artificial Sequence
  Description of Artificial Sequence: Synthetic oligonucleotide
  Target: LAMA2; (+) strand; PAM type: NRG; PAM sequence: TGG
agggtctgtctgcctttgta

SEQ ID NO: 156519 - DNA, 20 bp, Artificial Sequence
  Description of Artificial Sequence: Synthetic oligonucleotide
  Target: LAMA2; (+) strand; PAM type: NRG; PAM sequence: CAG
gtctgtctgcctttgtatgg

SEQ ID NO: 156520 - DNA, 20 bp, Artificial Sequence
  Description of Artificial Sequence: Synthetic oligonucleotide
  Target: LAMA2; (+) strand; PAM type: NRG; PAM sequence: AGG
tctgtctgcctttgtatggc

SEQ ID NO: 156521 - DNA, 20 bp, Artificial Sequence
  Description of Artificial Sequence: Synthetic oligonucleotide
  Target: LAMA2; (+) strand; PAM type: NRG; PAM sequence: TAG
tggcaggaactctgttttct

SEQ ID NO: 156522 - DNA, 20 bp, Artificial Sequence
  Description of Artificial Sequence: Synthetic oligonucleotide
  Target: LAMA2; (+) strand; PAM type: NRG; PAM sequence: TAG
aactctgttttcttagaaaa

SEQ ID NO: 156523 - DNA, 20 bp, Artificial Sequence
  Description of Artificial Sequence: Synthetic oligonucleotide
  Target: LAMA2; (+) strand; PAM type: NRG; PAM sequence: AAG
tgttttcttagaaaatagta

SEQ ID NO: 156524 - DNA, 20 bp, Artificial Sequence
  Description of Artificial Sequence: Synthetic oligonucleotide
  Target: LAMA2; (+) strand; PAM type: NRG; PAM sequence: CAG
tcttagaaaatagtaaagaa

SEQ ID NO: 156525 - DNA, 20 bp, Artificial Sequence
  Description of Artificial Sequence: Synthetic oligonucleotide
  Target: LAMA2; (+) strand; PAM type: NRG; PAM sequence: AAG
gtttgtactcctttgttcta

SEQ ID NO: 156526 - DNA, 20 bp, Artificial Sequence
  Description of Artificial Sequence: Synthetic oligonucleotide
  Target: LAMA2; (+) strand; PAM type: NRG; PAM sequence: AGG
tttgtactcctttgttctaa

SEQ ID NO: 156527 - DNA, 20 bp, Artificial Sequence
  Description of Artificial Sequence: Synthetic oligonucleotide
  Target: LAMA2; (+) strand; PAM type: NRG; PAM sequence: GGG
ttgtactcctttgttctaaa

SEQ ID NO: 156528 - DNA, 20 bp, Artificial Sequence
  Description of Artificial Sequence: Synthetic oligonucleotide
  Target: LAMA2; (+) strand; PAM type: NRG; PAM sequence: TAG
tttgttctaaagggtaccta

SEQ ID NO: 156529 - DNA, 20 bp, Artificial Sequence
  Description of Artificial Sequence: Synthetic oligonucleotide
  Target: LAMA2; (+) strand; PAM type: NRG; PAM sequence: TGG
taaagggtacctatagttta

SEQ ID NO: 156530 - DNA, 20 bp, Artificial Sequence
  Description of Artificial Sequence: Synthetic oligonucleotide
  Target: LAMA2; (+) strand; PAM type: NRG; PAM sequence: GGG
aaagggtacctatagtttat

SEQ ID NO: 156531 - DNA, 20 bp, Artificial Sequence
  Description of Artificial Sequence: Synthetic oligonucleotide
  Target: LAMA2; (+) strand; PAM type: NRG; PAM sequence: TGG
tacctatagtttatgggaat

SEQ ID NO: 156532 - DNA, 20 bp, Artificial Sequence
  Description of Artificial Sequence: Synthetic oligonucleotide
  Target: LAMA2; (+) strand; PAM type: NRG; PAM sequence: GGG
acctatagtttatgggaatt

SEQ ID NO: 156533 - DNA, 20 bp, Artificial Sequence
  Description of Artificial Sequence: Synthetic oligonucleotide
  Target: LAMA2; (+) strand; PAM type: NRG; PAM sequence: GGG
cctatagtttatgggaattg

SEQ ID NO: 156534 - DNA, 20 bp, Artificial Sequence
  Description of Artificial Sequence: Synthetic oligonucleotide
  Target: LAMA2; (+) strand; PAM type: NRG; PAM sequence: TAG
tttatgggaattggggaact

SEQ ID NO: 156535 - DNA, 20 bp, Artificial Sequence
  Description of Artificial Sequence: Synthetic oligonucleotide
  Target: LAMA2; (+) strand; PAM type: NRG; PAM sequence: TAG
atgggaattggggaacttag

SEQ ID NO: 156536 - DNA, 20 bp, Artificial Sequence
  Description of Artificial Sequence: Synthetic oligonucleotide
  Target: LAMA2; (+) strand; PAM type: NRG; PAM sequence: CAG
tgtttctcataaaaaatgct

SEQ ID NO: 156537 - DNA, 20 bp, Artificial Sequence
  Description of Artificial Sequence: Synthetic oligonucleotide
  Target: LAMA2; (+) strand; PAM type: NRG; PAM sequence: TGG
aaaaaatgctcagctttatt

SEQ ID NO: 156538 - DNA, 20 bp, Artificial Sequence
  Description of Artificial Sequence: Synthetic oligonucleotide
  Target: LAMA2; (+) strand; PAM type: NRG; PAM sequence: TGG
tcagctttatttggaaactt

SEQ ID NO: 156539 - DNA, 20 bp, Artificial Sequence
  Description of Artificial Sequence: Synthetic oligonucleotide
  Target: LAMA2; (+) strand; PAM type: NRG; PAM sequence: TGG
tcttcttctccttcctcttt

SEQ ID NO: 156540 - DNA, 20 bp, Artificial Sequence
  Description of Artificial Sequence: Synthetic oligonucleotide
  Target: LAMA2; (+) strand; PAM type: NRG; PAM sequence: GGG
cttcttctccttcctctttt

SEQ ID NO: 156541 - DNA, 20 bp, Artificial Sequence
  Description of Artificial Sequence: Synthetic oligonucleotide
  Target: LAMA2; (+) strand; PAM type: NRG; PAM sequence: AAG
ccttcctcttttgggttaaa

SEQ ID NO: 156542 - DNA, 20 bp, Artificial Sequence
  Description of Artificial Sequence: Synthetic oligonucleotide
  Target: LAMA2; (+) strand; PAM type: NRG; PAM sequence: AGG
cttcctcttttgggttaaaa

SEQ ID NO: 156543 - DNA, 20 bp, Artificial Sequence
  Description of Artificial Sequence: Synthetic oligonucleotide
  Target: LAMA2; (+) strand; PAM type: NRG; PAM sequence: CAG
cttttgggttaaaaaggcca

SEQ ID NO: 156544 - DNA, 20 bp, Artificial Sequence
  Description of Artificial Sequence: Synthetic oligonucleotide
  Target: LAMA2; (+) strand; PAM type: NRG; PAM sequence: CAG
tatatgtgtgatgaaatgtg

SEQ ID NO: 156545 - DNA, 20 bp, Artificial Sequence
  Description of Artificial Sequence: Synthetic oligonucleotide
  Target: LAMA2; (+) strand; PAM type: NRG; PAM sequence: AAG
tgaaatgtgcagactctgcc

SEQ ID NO: 156546 - DNA, 20 bp, Artificial Sequence
  Description of Artificial Sequence: Synthetic oligonucleotide
  Target: LAMA2; (+) strand; PAM type: NRG; PAM sequence: AGG
gaaatgtgcagactctgcca

SEQ ID NO: 156547 - DNA, 20 bp, Artificial Sequence
  Description of Artificial Sequence: Synthetic oligonucleotide
  Target: LAMA2; (+) strand; PAM type: NRG; PAM sequence: AAG
ttctaatgatttatctactc

SEQ ID NO: 156548 - DNA, 20 bp, Artificial Sequence
  Description of Artificial Sequence: Synthetic oligonucleotide
  Target: LAMA2; (+) strand; PAM type: NRG; PAM sequence: AAG
atttatctactcaagataaa

SEQ ID NO: 156549 - DNA, 20 bp, Artificial Sequence
  Description of Artificial Sequence: Synthetic oligonucleotide
  Target: LAMA2; (+) strand; PAM type: NRG; PAM sequence: AAG
actcaagataaaaagaaata

SEQ ID NO: 156550 - DNA, 20 bp, Artificial Sequence
  Description of Artificial Sequence: Synthetic oligonucleotide
  Target: LAMA2; (+) strand; PAM type: NRG; PAM sequence: AAG
agataaaaagaaataaagtg

SEQ ID NO: 156551 - DNA, 20 bp, Artificial Sequence
  Description of Artificial Sequence: Synthetic oligonucleotide
  Target: LAMA2; (+) strand; PAM type: NRG; PAM sequence: AAG
tgtgcaatgtacttacttga

SEQ ID NO: 156552 - DNA, 20 bp, Artificial Sequence
  Description of Artificial Sequence: Synthetic oligonucleotide
  Target: LAMA2; (+) strand; PAM type: NRG; PAM sequence: CAG
gcaatgtacttacttgaaag

SEQ ID NO: 156553 - DNA, 20 bp, Artificial Sequence
  Description of Artificial Sequence: Synthetic oligonucleotide
  Target: LAMA2; (+) strand; PAM type: NRG; PAM sequence: AAG
tgtacttacttgaaagcagt

SEQ ID NO: 156554 - DNA, 20 bp, Artificial Sequence
  Description of Artificial Sequence: Synthetic oligonucleotide
  Target: LAMA2; (+) strand; PAM type: NRG; PAM sequence: TAG
aaagcagtaagttctcatgt

SEQ ID NO: 156555 - DNA, 20 bp, Artificial Sequence
  Description of Artificial Sequence: Synthetic oligonucleotide
  Target: LAMA2; (+) strand; PAM type: NRG; PAM sequence: AAG
tgttagaaaatttccctatt

SEQ ID NO: 156556 - DNA, 20 bp, Artificial Sequence
  Description of Artificial Sequence: Synthetic oligonucleotide
  Target: LAMA2; (+) strand; PAM type: NRG; PAM sequence: AAG
agaaaatttccctattaagc

SEQ ID NO: 156557 - DNA, 20 bp, Artificial Sequence
  Description of Artificial Sequence: Synthetic oligonucleotide
  Target: LAMA2; (+) strand; PAM type: NRG; PAM sequence: AAG
aaatcttgaacacttcatta

SEQ ID NO: 156558 - DNA, 20 bp, Artificial Sequence
  Description of Artificial Sequence: Synthetic oligonucleotide
  Target: LAMA2; (+) strand; PAM type: NRG; PAM sequence: AAG
tctgatttttattatcattt

SEQ ID NO: 156559 - DNA, 20 bp, Artificial Sequence
  Description of Artificial Sequence: Synthetic oligonucleotide
  Target: LAMA2; (+) strand; PAM type: NRG; PAM sequence: CAG
atttttattatcatttaagt

SEQ ID NO: 156560 - DNA, 20 bp, Artificial Sequence
  Description of Artificial Sequence: Synthetic oligonucleotide
  Target: LAMA2; (+) strand; PAM type: NRG; PAM sequence: AGG
tttttattatcatttaagtc

SEQ ID NO: 156561 - DNA, 20 bp, Artificial Sequence
  Description of Artificial Sequence: Synthetic oligonucleotide
  Target: LAMA2; (+) strand; PAM type: NRG; PAM sequence: GGG
ttttattatcatttaagtca

SEQ ID NO: 156562 - DNA, 20 bp, Artificial Sequence
  Description of Artificial Sequence: Synthetic oligonucleotide
  Target: LAMA2; (+) strand; PAM type: NRG; PAM sequence: TAG
tcatttaagtcagggaattt

SEQ ID NO: 156563 - DNA, 20 bp, Artificial Sequence
  Description of Artificial Sequence: Synthetic oligonucleotide
  Target: LAMA2; (+) strand; PAM type: NRG; PAM sequence: TAG
tataaaactgtacatatgta

SEQ ID NO: 156564 - DNA, 20 bp, Artificial Sequence
  Description of Artificial Sequence: Synthetic oligonucleotide
  Target: LAMA2; (+) strand; PAM type: NRG; PAM sequence: TAG
ctccaaaatgtgttaaacat

SEQ ID NO: 156565 - DNA, 20 bp, Artificial Sequence
  Description of Artificial Sequence: Synthetic oligonucleotide
  Target: LAMA2; (+) strand; PAM type: NRG; PAM sequence: CAG
aatctcaaaatactgtaaca

SEQ ID NO: 156566 - DNA, 20 bp, Artificial Sequence
  Description of Artificial Sequence: Synthetic oligonucleotide
  Target: LAMA2; (+) strand; PAM type: NRG; PAM sequence: GAG
atactgtaacacagtaaaat

SEQ ID NO: 156567 - DNA, 20 bp, Artificial Sequence
  Description of Artificial Sequence: Synthetic oligonucleotide
  Target: LAMA2; (+) strand; PAM type: NRG; PAM sequence: AAG
tgtaacacagtaaaatgagc

SEQ ID NO: 156568 - DNA, 20 bp, Artificial Sequence
  Description of Artificial Sequence: Synthetic oligonucleotide
  Target: LAMA2; (+) strand; PAM type: NRG; PAM sequence: CAG
gaaaatttttgaaatttgca

SEQ ID NO: 156569 - DNA, 20 bp, Artificial Sequence
  Description of Artificial Sequence: Synthetic oligonucleotide
  Target: LAMA2; (+) strand; PAM type: NRG; PAM sequence: TAG
aatttttgaaatttgcacag

SEQ ID NO: 156570 - DNA, 20 bp, Artificial Sequence
  Description of Artificial Sequence: Synthetic oligonucleotide
  Target: LAMA2; (+) strand; PAM type: NRG; PAM sequence: GAG
tttttgaaatttgcacagta

SEQ ID NO: 156571 - DNA, 20 bp, Artificial Sequence
  Description of Artificial Sequence: Synthetic oligonucleotide
  Target: LAMA2; (+) strand; PAM type: NRG; PAM sequence: GAG
cgatgctgttaatgttcacc

SEQ ID NO: 156572 - DNA, 20 bp, Artificial Sequence
  Description of Artificial Sequence: Synthetic oligonucleotide
  Target: LAMA2; (+) strand; PAM type: NRG; PAM sequence: AGG
gatgctgttaatgttcaccg

SEQ ID NO: 156573 - DNA, 20 bp, Artificial Sequence
  Description of Artificial Sequence: Synthetic oligonucleotide
  Target: LAMA2; (+) strand; PAM type: NRG; PAM sequence: AAG
cgaggtaaataatttgtcca

SEQ ID NO: 156574 - DNA, 20 bp, Artificial Sequence
  Description of Artificial Sequence: Synthetic oligonucleotide
  Target: LAMA2; (+) strand; PAM type: NRG; PAM sequence: GAG
gtccaaagttctatttctgt

SEQ ID NO: 156575 - DNA, 20 bp, Artificial Sequence
  Description of Artificial Sequence: Synthetic oligonucleotide
  Target: LAMA2; (+) strand; PAM type: NRG; PAM sequence: GAG
tttctgtgagatactcaact

SEQ ID NO: 156576 - DNA, 20 bp, Artificial Sequence
  Description of Artificial Sequence: Synthetic oligonucleotide
  Target: LAMA2; (+) strand; PAM type: NRG; PAM sequence: CAG
actcaactgagacataatct

SEQ ID NO: 156577 - DNA, 20 bp, Artificial Sequence
  Description of Artificial Sequence: Synthetic oligonucleotide
  Target: LAMA2; (+) strand; PAM type: NRG; PAM sequence: TGG
cactttcatattctatattt

SEQ ID NO: 156578 - DNA, 20 bp, Artificial Sequence
  Description of Artificial Sequence: Synthetic oligonucleotide
  Target: LAMA2; (+) strand; PAM type: NRG; PAM sequence: AAG
ttggttttcattttgttctt

SEQ ID NO: 156579 - DNA, 20 bp, Artificial Sequence
  Description of Artificial Sequence: Synthetic oligonucleotide
  Target: LAMA2; (+) strand; PAM type: NRG; PAM sequence: AAG
tcattttgttcttaagaaac

SEQ ID NO: 156580 - DNA, 20 bp, Artificial Sequence
  Description of Artificial Sequence: Synthetic oligonucleotide
  Target: LAMA2; (+) strand; PAM type: NRG; PAM sequence: TGG
tatttttaaaatgaaacatc

SEQ ID NO: 156581 - DNA, 20 bp, Artificial Sequence
  Description of Artificial Sequence: Synthetic oligonucleotide
  Target: LAMA2; (+) strand; PAM type: NRG; PAM sequence: CGG
taaaatgaaacatctggttt

SEQ ID NO: 156582 - DNA, 20 bp, Artificial Sequence
  Description of Artificial Sequence: Synthetic oligonucleotide
  Target: LAMA2; (+) strand; PAM type: NRG; PAM sequence: CAG
aatgaaacatctggtttcgg

SEQ ID NO: 156583 - DNA, 20 bp, Artificial Sequence
  Description of Artificial Sequence: Synthetic oligonucleotide
  Target: LAMA2; (+) strand; PAM type: NRG; PAM sequence: TGG
acatctggtttcggcagtgc

SEQ ID NO: 156584 - DNA, 20 bp, Artificial Sequence
  Description of Artificial Sequence: Synthetic oligonucleotide
  Target: LAMA2; (+) strand; PAM type: NRG; PAM sequence: CAG
cggcagtgctggctaatgct

SEQ ID NO: 156585 - DNA, 20 bp, Artificial Sequence
  Description of Artificial Sequence: Synthetic oligonucleotide
  Target: LAMA2; (+) strand; PAM type: NRG; PAM sequence: AAG
tgaatatctgaatacgtttt

SEQ ID NO: 156586 - DNA, 20 bp, Artificial Sequence
  Description of Artificial Sequence: Synthetic oligonucleotide
  Target: LAMA2; (+) strand; PAM type: NRG; PAM sequence: GAG
aatatctgaatacgttttaa

SEQ ID NO: 156587 - DNA, 20 bp, Artificial Sequence
  Description of Artificial Sequence: Synthetic oligonucleotide
  Target: LAMA2; (+) strand; PAM type: NRG; PAM sequence: CAG
ctttgttatgtttcattttg

SEQ ID NO: 156588 - DNA, 20 bp, Artificial Sequence
  Description of Artificial Sequence: Synthetic oligonucleotide
  Target: LAMA2; (+) strand; PAM type: NRG; PAM sequence: AGG
tttgttatgtttcattttgc

SEQ ID NO: 156589 - DNA, 20 bp, Artificial Sequence
  Description of Artificial Sequence: Synthetic oligonucleotide
  Target: LAMA2; (+) strand; PAM type: NRG; PAM sequence: AAG
gtttcattttgcaggtgcca

SEQ ID NO: 156590 - DNA, 20 bp, Artificial Sequence
  Description of Artificial Sequence: Synthetic oligonucleotide
  Target: LAMA2; (+) strand; PAM type: NRG; PAM sequence: CAG
cacaaatatttcacctcatt

SEQ ID NO: 156591 - DNA, 20 bp, Artificial Sequence
  Description of Artificial Sequence: Synthetic oligonucleotide
  Target: LAMA2; (+) strand; PAM type: NRG; PAM sequence: CAG
ttcacctcattcagatattc

SEQ ID NO: 156592 - DNA, 20 bp, Artificial Sequence
  Description of Artificial Sequence: Synthetic oligonucleotide
  Target: LAMA2; (+) strand; PAM type: NRG; PAM sequence: AGG
tcacctcattcagatattcc

SEQ ID NO: 156593 - DNA, 20 bp, Artificial Sequence
  Description of Artificial Sequence: Synthetic oligonucleotide
  Target: LAMA2; (+) strand; PAM type: NRG; PAM sequence: TAG
cctcattcagatattccagg

SEQ ID NO: 156594 - DNA, 20 bp, Artificial Sequence
  Description of Artificial Sequence: Synthetic oligonucleotide
  Target: LAMA2; (+) strand; PAM type: NRG; PAM sequence: AAG
attcagatattccaggtagt

SEQ ID NO: 156595 - DNA, 20 bp, Artificial Sequence
  Description of Artificial Sequence: Synthetic oligonucleotide
  Target: LAMA2; (+) strand; PAM type: NRG; PAM sequence: AGG
ttcagatattccaggtagta

SEQ ID NO: 156596 - DNA, 20 bp, Artificial Sequence
  Description of Artificial Sequence: Synthetic oligonucleotide
  Target: LAMA2; (+) strand; PAM type: NRG; PAM sequence: GAG
agtaaggctgatatttttat

SEQ ID NO: 156597 - DNA, 20 bp, Artificial Sequence
  Description of Artificial Sequence: Synthetic oligonucleotide
  Target: LAMA2; (+) strand; PAM type: NRG; PAM sequence: AAG
tcatctgacaaaattaattt

SEQ ID NO: 156598 - DNA, 20 bp, Artificial Sequence
  Description of Artificial Sequence: Synthetic oligonucleotide
  Target: LAMA2; (+) strand; PAM type: NRG; PAM sequence: TAG
aagaataaataacattgaaa

SEQ ID NO: 156599 - DNA, 20 bp, Artificial Sequence
  Description of Artificial Sequence: Synthetic oligonucleotide
  Target: LAMA2; (+) strand; PAM type: NRG; PAM sequence: AAG
ataaataacattgaaatagt

SEQ ID NO: 156600 - DNA, 20 bp, Artificial Sequence
  Description of Artificial Sequence: Synthetic oligonucleotide
  Target: LAMA2; (+) strand; PAM type: NRG; PAM sequence: TAG
aataacattgaaatagtaag

SEQ ID NO: 156601 - DNA, 20 bp, Artificial Sequence
  Description of Artificial Sequence: Synthetic oligonucleotide
  Target: LAMA2; (+) strand; PAM type: NRG; PAM sequence: TGG
atagtaagtagcatgtattt

SEQ ID NO: 156602 - DNA, 20 bp, Artificial Sequence
  Description of Artificial Sequence: Synthetic oligonucleotide
  Target: LAMA2; (+) strand; PAM type: NRG; PAM sequence: TAG
tctattcttccatgttttaa

SEQ ID NO: 156603 - DNA, 20 bp, Artificial Sequence
  Description of Artificial Sequence: Synthetic oligonucleotide
  Target: LAMA2; (+) strand; PAM type: NRG; PAM sequence: AAG
atgcacactcacacacatat

SEQ ID NO: 156604 - DNA, 20 bp, Artificial Sequence
  Description of Artificial Sequence: Synthetic oligonucleotide
  Target: LAMA2; (+) strand; PAM type: NRG; PAM sequence: AAG
tatttttcctcatcttatac

SEQ ID NO: 156605 - DNA, 20 bp, Artificial Sequence
  Description of Artificial Sequence: Synthetic oligonucleotide
  Target: LAMA2; (+) strand; PAM type: NRG; PAM sequence: TGG
ttttcctcatcttatacaag

SEQ ID NO: 156606 - DNA, 20 bp, Artificial Sequence
  Description of Artificial Sequence: Synthetic oligonucleotide
  Target: LAMA2; (+) strand; PAM type: NRG; PAM sequence: AAG
aaacatactatacacattat

SEQ ID NO: 156607 - DNA, 20 bp, Artificial Sequence
  Description of Artificial Sequence: Synthetic oligonucleotide
  Target: LAMA2; (+) strand; PAM type: NRG; PAM sequence: GAG
acatactatacacattataa

SEQ ID NO: 156608 - DNA, 20 bp, Artificial Sequence
  Description of Artificial Sequence: Synthetic oligonucleotide
  Target: LAMA2; (+) strand; PAM type: NRG; PAM sequence: CAG
ctatacacattataagagca

SEQ ID NO: 156609 - DNA, 20 bp, Artificial Sequence
  Description of Artificial Sequence: Synthetic oligonucleotide
  Target: LAMA2; (+) strand; PAM type: NRG; PAM sequence: AAG
tttttatgtaatataatttg

SEQ ID NO: 156610 - DNA, 20 bp, Artificial Sequence
  Description of Artificial Sequence: Synthetic oligonucleotide
  Target: LAMA2; (+) strand; PAM type: NRG; PAM sequence: TGG
atttgaagttaattccatat

SEQ ID NO: 156611 - DNA, 20 bp, Artificial Sequence
  Description of Artificial Sequence: Synthetic oligonucleotide
  Target: LAMA2; (+) strand; PAM type: NRG; PAM sequence: TAG
gaagttaattccatattgga

SEQ ID NO: 156612 - DNA, 20 bp, Artificial Sequence
  Description of Artificial Sequence: Synthetic oligonucleotide
  Target: LAMA2; (+) strand; PAM type: NRG; PAM sequence: AAG
agtttcttcattatatgtgt

SEQ ID NO: 156613 - DNA, 20 bp, Artificial Sequence
  Description of Artificial Sequence: Synthetic oligonucleotide
  Target: LAMA2; (+) strand; PAM type: NRG; PAM sequence: CAG
tgaatgcactcaaacgtgtt

SEQ ID NO: 156614 - DNA, 20 bp, Artificial Sequence
  Description of Artificial Sequence: Synthetic oligonucleotide
  Target: LAMA2; (+) strand; PAM type: NRG; PAM sequence: CAG
actcaaacgtgttcagcaat

SEQ ID NO: 156615 - DNA, 20 bp, Artificial Sequence
  Description of Artificial Sequence: Synthetic oligonucleotide
  Target: LAMA2; (+) strand; PAM type: NRG; PAM sequence: CAG
aacgtgttcagcaatcagca

SEQ ID NO: 156616 - DNA, 20 bp, Artificial Sequence
  Description of Artificial Sequence: Synthetic oligonucleotide
  Target: LAMA2; (+) strand; PAM type: NRG; PAM sequence: GAG
cgtgttcagcaatcagcaca

SEQ ID NO: 156617 - DNA, 20 bp, Artificial Sequence
  Description of Artificial Sequence: Synthetic oligonucleotide
  Target: LAMA2; (+) strand; PAM type: NRG; PAM sequence: AGG
gtgttcagcaatcagcacag

SEQ ID NO: 156618 - DNA, 20 bp, Artificial Sequence
  Description of Artificial Sequence: Synthetic oligonucleotide
  Target: LAMA2; (+) strand; PAM type: NRG; PAM sequence: TAG
cagaggttaaacattgactc

SEQ ID NO: 156619 - DNA, 20 bp, Artificial Sequence
  Description of Artificial Sequence: Synthetic oligonucleotide
  Target: LAMA2; (+) strand; PAM type: NRG; PAM sequence: TAG
ttaaacattgactctagtac

SEQ ID NO: 156620 - DNA, 20 bp, Artificial Sequence
  Description of Artificial Sequence: Synthetic oligonucleotide
  Target: LAMA2; (+) strand; PAM type: NRG; PAM sequence: AAG
gactctagtactagactgtg

SEQ ID NO: 156621 - DNA, 20 bp, Artificial Sequence
  Description of Artificial Sequence: Synthetic oligonucleotide
  Target: LAMA2; (+) strand; PAM type: NRG; PAM sequence: AGG
actctagtactagactgtga

SEQ ID NO: 156622 - DNA, 20 bp, Artificial Sequence
  Description of Artificial Sequence: Synthetic oligonucleotide
  Target: LAMA2; (+) strand; PAM type: NRG; PAM sequence: AAG
ccatctttgtaaccttgaac

SEQ ID NO: 156623 - DNA, 20 bp, Artificial Sequence
  Description of Artificial Sequence: Synthetic oligonucleotide
  Target: LAMA2; (+) strand; PAM type: NRG; PAM sequence: AAG
taaccttgaacaagttatgt

SEQ ID NO: 156624 - DNA, 20 bp, Artificial Sequence
  Description of Artificial Sequence: Synthetic oligonucleotide
  Target: LAMA2; (+) strand; PAM type: NRG; PAM sequence: CAG
catctttaaaatcaatgtaa

SEQ ID NO: 156625 - DNA, 20 bp, Artificial Sequence
  Description of Artificial Sequence: Synthetic oligonucleotide
  Target: LAMA2; (+) strand; PAM type: NRG; PAM sequence: AAG
aaaatcaatgtaacagttat

SEQ ID NO: 156626 - DNA, 20 bp, Artificial Sequence
  Description of Artificial Sequence: Synthetic oligonucleotide
  Target: LAMA2; (+) strand; PAM type: NRG; PAM sequence: AAG
ttataagattcttaccacat

SEQ ID NO: 156627 - DNA, 20 bp, Artificial Sequence
  Description of Artificial Sequence: Synthetic oligonucleotide
  Target: LAMA2; (+) strand; PAM type: NRG; PAM sequence: AGG
tataagattcttaccacata

SEQ ID NO: 156628 - DNA, 20 bp, Artificial Sequence
  Description of Artificial Sequence: Synthetic oligonucleotide
  Target: LAMA2; (+) strand; PAM type: NRG; PAM sequence: TGG
ttaccacataaggttgtgtg

SEQ ID NO: 156629 - DNA, 20 bp, Artificial Sequence
  Description of Artificial Sequence: Synthetic oligonucleotide
  Target: LAMA2; (+) strand; PAM type: NRG; PAM sequence: GAG
aaggttgtgtgtggtgtttt

SEQ ID NO: 156630 - DNA, 20 bp, Artificial Sequence
  Description of Artificial Sequence: Synthetic oligonucleotide
  Target: LAMA2; (+) strand; PAM type: NRG; PAM sequence: AAG
gtaatgaatgaacatatcca

SEQ ID NO: 156631 - DNA, 20 bp, Artificial Sequence
  Description of Artificial Sequence: Synthetic oligonucleotide
  Target: LAMA2; (+) strand; PAM type: NRG; PAM sequence: TAG
acatatccaaagccacattg

SEQ ID NO: 156632 - DNA, 20 bp, Artificial Sequence
  Description of Artificial Sequence: Synthetic oligonucleotide
  Target: LAMA2; (+) strand; PAM type: NRG; PAM sequence: GAG
atatccaaagccacattgta

SEQ ID NO: 156633 - DNA, 20 bp, Artificial Sequence
  Description of Artificial Sequence: Synthetic oligonucleotide
  Target: LAMA2; (+) strand; PAM type: NRG; PAM sequence: TAG
aagccacattgtagagtgct

SEQ ID NO: 156634 - DNA, 20 bp, Artificial Sequence
  Description of Artificial Sequence: Synthetic oligonucleotide
  Target: LAMA2; (+) strand; PAM type: NRG; PAM sequence: AAG
tagagtgcttagcacttgca

SEQ ID NO: 156635 - DNA, 20 bp, Artificial Sequence
  Description of Artificial Sequence: Synthetic oligonucleotide
  Target: LAMA2; (+) strand; PAM type: NRG; PAM sequence: CAG
gcacttgcaaagcataatgt

SEQ ID NO: 156636 - DNA, 20 bp, Artificial Sequence
  Description of Artificial Sequence: Synthetic oligonucleotide
  Target: LAMA2; (+) strand; PAM type: NRG; PAM sequence: GAG
gcaaagcataatgtcagtgt

SEQ ID NO: 156637 - DNA, 20 bp, Artificial Sequence
  Description of Artificial Sequence: Synthetic oligonucleotide
  Target: LAMA2; (+) strand; PAM type: NRG; PAM sequence: TGG
ttaattgcaacccctattga

SEQ ID NO: 156638 - DNA, 20 bp, Artificial Sequence
  Description of Artificial Sequence: Synthetic oligonucleotide
  Target: LAMA2; (+) strand; PAM type: NRG; PAM sequence: CGG
aacccctattgatggacgta

SEQ ID NO: 156639 - DNA, 20 bp, Artificial Sequence
  Description of Artificial Sequence: Synthetic oligonucleotide
  Target: LAMA2; (+) strand; PAM type: NRG; PAM sequence: TGG
gttgttgttgttgttgttgt

SEQ ID NO: 156640 - DNA, 20 bp, Artificial Sequence
  Description of Artificial Sequence: Synthetic oligonucleotide
  Target: LAMA2; (+) strand; PAM type: NRG; PAM sequence: GAG
tgttgttgttgttgttgttg

SEQ ID NO: 156641 - DNA, 20 bp, Artificial Sequence
  Description of Artificial Sequence: Synthetic oligonucleotide
  Target: LAMA2; (+) strand; PAM type: NRG; PAM sequence: TGG
gttgttgttgttgttggaga

SEQ ID NO: 156642 - DNA, 20 bp, Artificial Sequence
  Description of Artificial Sequence: Synthetic oligonucleotide
  Target: LAMA2; (+) strand; PAM type: NRG; PAM sequence: GAG
tgttgttgttgttggagatg

SEQ ID NO: 156643 - DNA, 20 bp, Artificial Sequence
  Description of Artificial Sequence: Synthetic oligonucleotide
  Target: LAMA2; (+) strand; PAM type: NRG; PAM sequence: CAG
tggagtcttgctctatcacc

SEQ ID NO: 156644 - DNA, 20 bp, Artificial Sequence
  Description of Artificial Sequence: Synthetic oligonucleotide
  Target: LAMA2; (+) strand; PAM type: NRG; PAM sequence: AGG
ggagtcttgctctatcaccc

SEQ ID NO: 156645 - DNA, 20 bp, Artificial Sequence
  Description of Artificial Sequence: Synthetic oligonucleotide
  Target: LAMA2; (+) strand; PAM type: NRG; PAM sequence: TGG
tcttgctctatcacccaggc

SEQ ID NO: 156646 - DNA, 20 bp, Artificial Sequence
  Description of Artificial Sequence: Synthetic oligonucleotide
  Target: LAMA2; (+) strand; PAM type: NRG; PAM sequence: GAG
ttgctctatcacccaggctg

SEQ ID NO: 156647 - DNA, 20 bp, Artificial Sequence
  Description of Artificial Sequence: Synthetic oligonucleotide
  Target: LAMA2; (+) strand; PAM type: NRG; PAM sequence: CAG
ctatcacccaggctggagtg

SEQ ID NO: 156648 - DNA, 20 bp, Artificial Sequence
  Description of Artificial Sequence: Synthetic oligonucleotide
  Target: LAMA2; (+) strand; PAM type: NRG; PAM sequence: TGG
tcacccaggctggagtgcag

SEQ ID NO: 156649 - DNA, 20 bp, Artificial Sequence
  Description of Artificial Sequence: Synthetic oligonucleotide
  Target: LAMA2; (+) strand; PAM type: NRG; PAM sequence: CGG
ggagtgcagtggtgtgatct

SEQ ID NO: 156650 - DNA, 20 bp, Artificial Sequence
  Description of Artificial Sequence: Synthetic oligonucleotide
  Target: LAMA2; (+) strand; PAM type: NRG; PAM sequence: CGG
tcactgcaacctccacctcc

SEQ ID NO: 156651 - DNA, 20 bp, Artificial Sequence
  Description of Artificial Sequence: Synthetic oligonucleotide
  Target: LAMA2; (+) strand; PAM type: NRG; PAM sequence: GGG
cactgcaacctccacctccc

SEQ ID NO: 156652 - DNA, 20 bp, Artificial Sequence
  Description of Artificial Sequence: Synthetic oligonucleotide
  Target: LAMA2; (+) strand; PAM type: NRG; PAM sequence: AAG
aacctccacctcccgggttc

SEQ ID NO: 156653 - DNA, 20 bp, Artificial Sequence
  Description of Artificial Sequence: Synthetic oligonucleotide
  Target: LAMA2; (+) strand; PAM type: NRG; PAM sequence: CAG
gttcaagtgattctctgcct

SEQ ID NO: 156654 - DNA, 20 bp, Artificial Sequence
  Description of Artificial Sequence: Synthetic oligonucleotide
  Target: LAMA2; (+) strand; PAM type: NRG; PAM sequence: GAG
attctctgcctcagcctccc

SEQ ID NO: 156655 - DNA, 20 bp, Artificial Sequence
  Description of Artificial Sequence: Synthetic oligonucleotide
  Target: LAMA2; (+) strand; PAM type: NRG; PAM sequence: TAG
ctctgcctcagcctcccgag

SEQ ID NO: 156656 - DNA, 20 bp, Artificial Sequence
  Description of Artificial Sequence: Synthetic oligonucleotide
  Target: LAMA2; (+) strand; PAM type: NRG; PAM sequence: TGG
gcctcagcctcccgagtagc

SEQ ID NO: 156657 - DNA, 20 bp, Artificial Sequence
  Description of Artificial Sequence: Synthetic oligonucleotide
  Target: LAMA2; (+) strand; PAM type: NRG; PAM sequence: GGG
cctcagcctcccgagtagct

SEQ ID NO: 156658 - DNA, 20 bp, Artificial Sequence
  Description of Artificial Sequence: Synthetic oligonucleotide
  Target: LAMA2; (+) strand; PAM type: NRG; PAM sequence: CAG
ctcccgagtagctgggatta

SEQ ID NO: 156659 - DNA, 20 bp, Artificial Sequence
  Description of Artificial Sequence: Synthetic oligonucleotide
  Target: LAMA2; (+) strand; PAM type: NRG; PAM sequence: AGG
tcccgagtagctgggattac

SEQ ID NO: 156660 - DNA, 20 bp, Artificial Sequence
  Description of Artificial Sequence: Synthetic oligonucleotide
  Target: LAMA2; (+) strand; PAM type: NRG; PAM sequence: CAG
caggtgcttgccaccatgcc

SEQ ID NO: 156661 - DNA, 20 bp, Artificial Sequence
  Description of Artificial Sequence: Synthetic oligonucleotide
  Target: LAMA2; (+) strand; PAM type: NRG; PAM sequence: TAG
ccagctaatttttgtatttt

SEQ ID NO: 156662 - DNA, 20 bp, Artificial Sequence
  Description of Artificial Sequence: Synthetic oligonucleotide
  Target: LAMA2; (+) strand; PAM type: NRG; PAM sequence: TAG
gctaatttttgtatttttag

SEQ ID NO: 156663 - DNA, 20 bp, Artificial Sequence
  Description of Artificial Sequence: Synthetic oligonucleotide
  Target: LAMA2; (+) strand; PAM type: NRG; PAM sequence: GAG
taatttttgtatttttagta

SEQ ID NO: 156664 - DNA, 20 bp, Artificial Sequence
  Description of Artificial Sequence: Synthetic oligonucleotide
  Target: LAMA2; (+) strand; PAM type: NRG; PAM sequence: CAG
ttttgtatttttagtagaga

SEQ ID NO: 156665 - DNA, 20 bp, Artificial Sequence
  Description of Artificial Sequence: Synthetic oligonucleotide
  Target: LAMA2; (+) strand; PAM type: NRG; PAM sequence: AGG
tttgtatttttagtagagac

SEQ ID NO: 156666 - DNA, 20 bp, Artificial Sequence
  Description of Artificial Sequence: Synthetic oligonucleotide
  Target: LAMA2; (+) strand; PAM type: NRG; PAM sequence: GGG
ttgtatttttagtagagaca

SEQ ID NO: 156667 - DNA, 20 bp, Artificial Sequence
  Description of Artificial Sequence: Synthetic oligonucleotide
  Target: LAMA2; (+) strand; PAM type: NRG; PAM sequence: TGG
gagacagggtttcaccatct

SEQ ID NO: 156668 - DNA, 20 bp, Artificial Sequence
  Description of Artificial Sequence: Synthetic oligonucleotide
  Target: LAMA2; (+) strand; PAM type: NRG; PAM sequence: CAG
cagggtttcaccatcttggc

SEQ ID NO: 156669 - DNA, 20 bp, Artificial Sequence
  Description of Artificial Sequence: Synthetic oligonucleotide
  Target: LAMA2; (+) strand; PAM type: NRG; PAM sequence: AGG
agggtttcaccatcttggcc

SEQ ID NO: 156670 - DNA, 20 bp, Artificial Sequence
  Description of Artificial Sequence: Synthetic oligonucleotide
  Target: LAMA2; (+) strand; PAM type: NRG; PAM sequence: TGG
tttcaccatcttggccaggc

SEQ ID NO: 156671 - DNA, 20 bp, Artificial Sequence
  Description of Artificial Sequence: Synthetic oligonucleotide
  Target: LAMA2; (+) strand; PAM type: NRG; PAM sequence: GAG
tcttgaactcctgaactcat

SEQ ID NO: 156672 - DNA, 20 bp, Artificial Sequence
  Description of Artificial Sequence: Synthetic oligonucleotide
  Target: LAMA2; (+) strand; PAM type: NRG; PAM sequence: CAG
aactcatgagtcacccttct

SEQ ID NO: 156673 - DNA, 20 bp, Artificial Sequence
  Description of Artificial Sequence: Synthetic oligonucleotide
  Target: LAMA2; (+) strand; PAM type: NRG; PAM sequence: AAG
tcacccttctcagcctccca

SEQ ID NO: 156674 - DNA, 20 bp, Artificial Sequence
  Description of Artificial Sequence: Synthetic oligonucleotide
  Target: LAMA2; (+) strand; PAM type: NRG; PAM sequence: TGG
ttctcagcctcccaaagtgc

SEQ ID NO: 156675 - DNA, 20 bp, Artificial Sequence
  Description of Artificial Sequence: Synthetic oligonucleotide
  Target: LAMA2; (+) strand; PAM type: NRG; PAM sequence: GGG
tctcagcctcccaaagtgct

SEQ ID NO: 156676 - DNA, 20 bp, Artificial Sequence
  Description of Artificial Sequence: Synthetic oligonucleotide
  Target: LAMA2; (+) strand; PAM type: NRG; PAM sequence: AAG
tcccaaagtgctgggattgc

SEQ ID NO: 156677 - DNA, 20 bp, Artificial Sequence
  Description of Artificial Sequence: Synthetic oligonucleotide
  Target: LAMA2; (+) strand; PAM type: NRG; PAM sequence: CAG
ctgggattgcaagcgtgttt

SEQ ID NO: 156678 - DNA, 20 bp, Artificial Sequence
  Description of Artificial Sequence: Synthetic oligonucleotide
  Target: LAMA2; (+) strand; PAM type: NRG; PAM sequence: TAG
tgcaagcgtgtttcagtgaa

SEQ ID NO: 156679 - DNA, 20 bp, Artificial Sequence
  Description of Artificial Sequence: Synthetic oligonucleotide
  Target: LAMA2; (+) strand; PAM type: NRG; PAM sequence: CAG
tcagtgaatagccatgtgcc

SEQ ID NO: 156680 - DNA, 20 bp, Artificial Sequence
  Description of Artificial Sequence: Synthetic oligonucleotide
  Target: LAMA2; (+) strand; PAM type: NRG; PAM sequence: TGG
cacatgcacccttataactg

SEQ ID NO: 156681 - DNA, 20 bp, Artificial Sequence
  Description of Artificial Sequence: Synthetic oligonucleotide
  Target: LAMA2; (+) strand; PAM type: NRG; PAM sequence: GGG
acatgcacccttataactgt

SEQ ID NO: 156682 - DNA, 20 bp, Artificial Sequence
  Description of Artificial Sequence: Synthetic oligonucleotide
  Target: LAMA2; (+) strand; PAM type: NRG; PAM sequence: AAG
aactgtgggataaatctctg

SEQ ID NO: 156683 - DNA, 20 bp, Artificial Sequence
  Description of Artificial Sequence: Synthetic oligonucleotide
  Target: LAMA2; (+) strand; PAM type: NRG; PAM sequence: AGG
actgtgggataaatctctga

SEQ ID NO: 156684 - DNA, 20 bp, Artificial Sequence
  Description of Artificial Sequence: Synthetic oligonucleotide
  Target: LAMA2; (+) strand; PAM type: NRG; PAM sequence: AAG
aaggtgaaactgctatgtca

SEQ ID NO: 156685 - DNA, 20 bp, Artificial Sequence
  Description of Artificial Sequence: Synthetic oligonucleotide
  Target: LAMA2; (+) strand; PAM type: NRG; PAM sequence: CAG
atatgcatttataattttaa

SEQ ID NO: 156686 - DNA, 20 bp, Artificial Sequence
  Description of Artificial Sequence: Synthetic oligonucleotide
  Target: LAMA2; (+) strand; PAM type: NRG; PAM sequence: TAG
caaattgaacccatatattt

SEQ ID NO: 156687 - DNA, 20 bp, Artificial Sequence
  Description of Artificial Sequence: Synthetic oligonucleotide
  Target: LAMA2; (+) strand; PAM type: NRG; PAM sequence: GAG
acatgctaccaccaatgcat

SEQ ID NO: 156688 - DNA, 20 bp, Artificial Sequence
  Description of Artificial Sequence: Synthetic oligonucleotide
  Target: LAMA2; (+) strand; PAM type: NRG; PAM sequence: GAG
atgctaccaccaatgcatga

SEQ ID NO: 156689 - DNA, 20 bp, Artificial Sequence
  Description of Artificial Sequence: Synthetic oligonucleotide
  Target: LAMA2; (+) strand; PAM type: NRG; PAM sequence: TAG
ttccctaaacccctctctaa

SEQ ID NO: 156690 - DNA, 20 bp, Artificial Sequence
  Description of Artificial Sequence: Synthetic oligonucleotide
  Target: LAMA2; (+) strand; PAM type: NRG; PAM sequence: GAG
ccctaaacccctctctaata

SEQ ID NO: 156691 - DNA, 20 bp, Artificial Sequence
  Description of Artificial Sequence: Synthetic oligonucleotide
  Target: LAMA2; (+) strand; PAM type: NRG; PAM sequence: TGG
agagtatattatcaaacttt

SEQ ID NO: 156692 - DNA, 20 bp, Artificial Sequence
  Description of Artificial Sequence: Synthetic oligonucleotide
  Target: LAMA2; (+) strand; PAM type: NRG; PAM sequence: GGG
gagtatattatcaaactttt

SEQ ID NO: 156693 - DNA, 20 bp, Artificial Sequence
  Description of Artificial Sequence: Synthetic oligonucleotide
  Target: LAMA2; (+) strand; PAM type: NRG; PAM sequence: TGG
ttatcaaacttttgggtctt

SEQ ID NO: 156694 - DNA, 20 bp, Artificial Sequence
  Description of Artificial Sequence: Synthetic oligonucleotide
  Target: LAMA2; (+) strand; PAM type: NRG; PAM sequence: TGG
ttgggtctttggcaatccaa

SEQ ID NO: 156695 - DNA, 20 bp, Artificial Sequence
  Description of Artificial Sequence: Synthetic oligonucleotide
  Target: LAMA2; (+) strand; PAM type: NRG; PAM sequence: GGG
tgggtctttggcaatccaat

SEQ ID NO: 156696 - DNA, 20 bp, Artificial Sequence
  Description of Artificial Sequence: Synthetic oligonucleotide
  Target: LAMA2; (+) strand; PAM type: NRG; PAM sequence: TGG
atgggtgaaaaatgacattt

SEQ ID NO: 156697 - DNA, 20 bp, Artificial Sequence
  Description of Artificial Sequence: Synthetic oligonucleotide
  Target: LAMA2; (+) strand; PAM type: NRG; PAM sequence: GGG
tgggtgaaaaatgacatttt

SEQ ID NO: 156698 - DNA, 20 bp, Artificial Sequence
  Description of Artificial Sequence: Synthetic oligonucleotide
  Target: LAMA2; (+) strand; PAM type: NRG; PAM sequence: TGG
tgaaaaatgacattttgggc

SEQ ID NO: 156699 - DNA, 20 bp, Artificial Sequence
  Description of Artificial Sequence: Synthetic oligonucleotide
  Target: LAMA2; (+) strand; PAM type: NRG; PAM sequence: GGG
gaaaaatgacattttgggct

SEQ ID NO: 156700 - DNA, 20 bp, Artificial Sequence
  Description of Artificial Sequence: Synthetic oligonucleotide
  Target: LAMA2; (+) strand; PAM type: NRG; PAM sequence: TGG
atgacattttgggctgggtg

SEQ ID NO: 156701 - DNA, 20 bp, Artificial Sequence
  Description of Artificial Sequence: Synthetic oligonucleotide
  Target: LAMA2; (+) strand; PAM type: NRG; PAM sequence: TGG
acattttgggctgggtgtgg

SEQ ID NO: 156702 - DNA, 20 bp, Artificial Sequence
  Description of Artificial Sequence: Synthetic oligonucleotide
  Target: LAMA2; (+) strand; PAM type: NRG; PAM sequence: TGG
cgcctgtaatctcaccactt

SEQ ID NO: 156703 - DNA, 20 bp, Artificial Sequence
  Description of Artificial Sequence: Synthetic oligonucleotide
  Target: LAMA2; (+) strand; PAM type: NRG; PAM sequence: GGG
gcctgtaatctcaccacttt

SEQ ID NO: 156704 - DNA, 20 bp, Artificial Sequence
  Description of Artificial Sequence: Synthetic oligonucleotide
  Target: LAMA2; (+) strand; PAM type: NRG; PAM sequence: GAG
ctgtaatctcaccactttgg

SEQ ID NO: 156705 - DNA, 20 bp, Artificial Sequence
  Description of Artificial Sequence: Synthetic oligonucleotide
  Target: LAMA2; (+) strand; PAM type: NRG; PAM sequence: AGG
tgtaatctcaccactttggg

SEQ ID NO: 156706 - DNA, 20 bp, Artificial Sequence
  Description of Artificial Sequence: Synthetic oligonucleotide
  Target: LAMA2; (+) strand; PAM type: NRG; PAM sequence: GAG
tctcaccactttgggaggct

SEQ ID NO: 156707 - DNA, 20 bp, Artificial Sequence
  Description of Artificial Sequence: Synthetic oligonucleotide
  Target: LAMA2; (+) strand; PAM type: NRG; PAM sequence: AGG
ctcaccactttgggaggctg

SEQ ID NO: 156708 - DNA, 20 bp, Artificial Sequence
  Description of Artificial Sequence: Synthetic oligonucleotide
  Target: LAMA2; (+) strand; PAM type: NRG; PAM sequence: CAG
accactttgggaggctgagg

SEQ ID NO: 156709 - DNA, 20 bp, Artificial Sequence
  Description of Artificial Sequence: Synthetic oligonucleotide
  Target: LAMA2; (+) strand; PAM type: NRG; PAM sequence: AGG
ccactttgggaggctgaggc

SEQ ID NO: 156710 - DNA, 20 bp, Artificial Sequence
  Description of Artificial Sequence: Synthetic oligonucleotide
  Target: LAMA2; (+) strand; PAM type: NRG; PAM sequence: GAG
gctgaggcaggcgaatccct

SEQ ID NO: 156711 - DNA, 20 bp, Artificial Sequence
  Description of Artificial Sequence: Synthetic oligonucleotide
  Target: LAMA2; (+) strand; PAM type: NRG; PAM sequence: AGG
ctgaggcaggcgaatccctg

SEQ ID NO: 156712 - DNA, 20 bp, Artificial Sequence
  Description of Artificial Sequence: Synthetic oligonucleotide
  Target: LAMA2; (+) strand; PAM type: NRG; PAM sequence: GAG
aggcgaatccctgaggccat

SEQ ID NO: 156713 - DNA, 20 bp, Artificial Sequence
  Description of Artificial Sequence: Synthetic oligonucleotide
  Target: LAMA2; (+) strand; PAM type: NRG; PAM sequence: GAG
atccctgaggccatgagttc

SEQ ID NO: 156714 - DNA, 20 bp, Artificial Sequence
  Description of Artificial Sequence: Synthetic oligonucleotide
  Target: LAMA2; (+) strand; PAM type: NRG; PAM sequence: TGG
ccatgagttcgagacctgcc

SEQ ID NO: 156715 - DNA, 20 bp, Artificial Sequence
  Description of Artificial Sequence: Synthetic oligonucleotide
  Target: LAMA2; (+) strand; PAM type: NRG; PAM sequence: TGG
cgagacctgcctggccaaca

SEQ ID NO: 156716 - DNA, 20 bp, Artificial Sequence
  Description of Artificial Sequence: Synthetic oligonucleotide
  Target: LAMA2; (+) strand; PAM type: NRG; PAM sequence: AAG
aaaatacaaaaaaaaaaaaa

SEQ ID NO: 156717 - DNA, 20 bp, Artificial Sequence
  Description of Artificial Sequence: Synthetic oligonucleotide
  Target: LAMA2; (+) strand; PAM type: NRG; PAM sequence: CAG
tacaaaaaaaaaaaaaaagc

SEQ ID NO: 156718 - DNA, 20 bp, Artificial Sequence
  Description of Artificial Sequence: Synthetic oligonucleotide
  Target: LAMA2; (+) strand; PAM type: NRG; PAM sequence: AGG
acaaaaaaaaaaaaaaagcc

SEQ ID NO: 156719 - DNA, 20 bp, Artificial Sequence
  Description of Artificial Sequence: Synthetic oligonucleotide
  Target: LAMA2; (+) strand; PAM type: NRG; PAM sequence: TGG
aaaaaaaaaaaagccaggca

SEQ ID NO: 156720 - DNA, 20 bp, Artificial Sequence
  Description of Artificial Sequence: Synthetic oligonucleotide
  Target: LAMA2; (+) strand; PAM type: NRG; PAM sequence: TGG
aaaaaaaaagccaggcatgg

SEQ ID NO: 156721 - DNA, 20 bp, Artificial Sequence
  Description of Artificial Sequence: Synthetic oligonucleotide
  Target: LAMA2; (+) strand; PAM type: NRG; PAM sequence: CAG
gtggtgcacacctataattc

SEQ ID NO: 156722 - DNA, 20 bp, Artificial Sequence
  Description of Artificial Sequence: Synthetic oligonucleotide
  Target: LAMA2; (+) strand; PAM type: NRG; PAM sequence: TGG
cacctataattccagctact

SEQ ID NO: 156723 - DNA, 20 bp, Artificial Sequence
  Description of Artificial Sequence: Synthetic oligonucleotide
  Target: LAMA2; (+) strand; PAM type: NRG; PAM sequence: GGG
acctataattccagctactt

SEQ ID NO: 156724 - DNA, 20 bp, Artificial Sequence
  Description of Artificial Sequence: Synthetic oligonucleotide
  Target: LAMA2; (+) strand; PAM type: NRG; PAM sequence: GAG
ctataattccagctacttgg

SEQ ID NO: 156725 - DNA, 20 bp, Artificial Sequence
  Description of Artificial Sequence: Synthetic oligonucleotide
  Target: LAMA2; (+) strand; PAM type: NRG; PAM sequence: AGG
tataattccagctacttggg

SEQ ID NO: 156726 - DNA, 20 bp, Artificial Sequence
  Description of Artificial Sequence: Synthetic oligonucleotide
  Target: LAMA2; (+) strand; PAM type: NRG; PAM sequence: GAG
ttccagctacttgggaggct

SEQ ID NO: 156727 - DNA, 20 bp, Artificial Sequence
  Description of Artificial Sequence: Synthetic oligonucleotide
  Target: LAMA2; (+) strand; PAM type: NRG; PAM sequence: AGG
tccagctacttgggaggctg

SEQ ID NO: 156728 - DNA, 20 bp, Artificial Sequence
  Description of Artificial Sequence: Synthetic oligonucleotide
  Target: LAMA2; (+) strand; PAM type: NRG; PAM sequence: GAG
tacttgggaggctgaggcat

SEQ ID NO: 156729 - DNA, 20 bp, Artificial Sequence
  Description of Artificial Sequence: Synthetic oligonucleotide
  Target: LAMA2; (+) strand; PAM type: NRG; PAM sequence: TGG
atcacttaattgcttgaacc

SEQ ID NO: 156730 - DNA, 20 bp, Artificial Sequence
  Description of Artificial Sequence: Synthetic oligonucleotide
  Target: LAMA2; (+) strand; PAM type: NRG; PAM sequence: GGG
tcacttaattgcttgaacct

SEQ ID NO: 156731 - DNA, 20 bp, Artificial Sequence
  Description of Artificial Sequence: Synthetic oligonucleotide
  Target: LAMA2; (+) strand; PAM type: NRG; PAM sequence: GAG
acttaattgcttgaacctgg

SEQ ID NO: 156732 - DNA, 20 bp, Artificial Sequence
  Description of Artificial Sequence: Synthetic oligonucleotide
  Target: LAMA2; (+) strand; PAM type: NRG; PAM sequence: CAG
aattgcttgaacctgggaga

SEQ ID NO: 156733 - DNA, 20 bp, Artificial Sequence
  Description of Artificial Sequence: Synthetic oligonucleotide
  Target: LAMA2; (+) strand; PAM type: NRG; PAM sequence: GAG
ttgcttgaacctgggagaca

SEQ ID NO: 156734 - DNA, 20 bp, Artificial Sequence
  Description of Artificial Sequence: Synthetic oligonucleotide
  Target: LAMA2; (+) strand; PAM type: NRG; PAM sequence: AGG
tgcttgaacctgggagacag

SEQ ID NO: 156735 - DNA, 20 bp, Artificial Sequence
  Description of Artificial Sequence: Synthetic oligonucleotide
  Target: LAMA2; (+) strand; PAM type: NRG; PAM sequence: CAG
aacctgggagacagaggttg

SEQ ID NO: 156736 - DNA, 20 bp, Artificial Sequence
  Description of Artificial Sequence: Synthetic oligonucleotide
  Target: LAMA2; (+) strand; PAM type: NRG; PAM sequence: GAG
tgggagacagaggttgcagt

SEQ ID NO: 156737 - DNA, 20 bp, Artificial Sequence
  Description of Artificial Sequence: Synthetic oligonucleotide
  Target: LAMA2; (+) strand; PAM type: NRG; PAM sequence: AAG
gacagaggttgcagtgagcc

SEQ ID NO: 156738 - DNA, 20 bp, Artificial Sequence
  Description of Artificial Sequence: Synthetic oligonucleotide
  Target: LAMA2; (+) strand; PAM type: NRG; PAM sequence: TAG
gaggttgcagtgagccaaga

SEQ ID NO: 156739 - DNA, 20 bp, Artificial Sequence
  Description of Artificial Sequence: Synthetic oligonucleotide
  Target: LAMA2; (+) strand; PAM type: NRG; PAM sequence: CAG
aagatagtgccattgcactc

SEQ ID NO: 156740 - DNA, 20 bp, Artificial Sequence
  Description of Artificial Sequence: Synthetic oligonucleotide
  Target: LAMA2; (+) strand; PAM type: NRG; PAM sequence: TGG
agtgccattgcactccagac

SEQ ID NO: 156741 - DNA, 20 bp, Artificial Sequence
  Description of Artificial Sequence: Synthetic oligonucleotide
  Target: LAMA2; (+) strand; PAM type: NRG; PAM sequence: GGG
gtgccattgcactccagact

SEQ ID NO: 156742 - DNA, 20 bp, Artificial Sequence
  Description of Artificial Sequence: Synthetic oligonucleotide
  Target: LAMA2; (+) strand; PAM type: NRG; PAM sequence: CAG
ttgcactccagactgggcaa

SEQ ID NO: 156743 - DNA, 20 bp, Artificial Sequence
  Description of Artificial Sequence: Synthetic oligonucleotide
  Target: LAMA2; (+) strand; PAM type: NRG; PAM sequence: GAG
gcactccagactgggcaaca

SEQ ID NO: 156744 - DNA, 20 bp, Artificial Sequence
  Description of Artificial Sequence: Synthetic oligonucleotide
  Target: LAMA2; (+) strand; PAM type: NRG; PAM sequence: AAG
tccagactgggcaacagagc

SEQ ID NO: 156745 - DNA, 20 bp, Artificial Sequence
  Description of Artificial Sequence: Synthetic oligonucleotide
  Target: LAMA2; (+) strand; PAM type: NRG; PAM sequence: AAG
ctccatctcaaaaaaaaaaa

SEQ ID NO: 156746 - DNA, 20 bp, Artificial Sequence
  Description of Artificial Sequence: Synthetic oligonucleotide
  Target: LAMA2; (+) strand; PAM type: NRG; PAM sequence: AGG
tccatctcaaaaaaaaaaaa

SEQ ID NO: 156747 - DNA, 20 bp, Artificial Sequence
  Description of Artificial Sequence: Synthetic oligonucleotide
  Target: LAMA2; (+) strand; PAM type: NRG; PAM sequence: AAG
atctcaaaaaaaaaaaaagg

SEQ ID NO: 156748 - DNA, 20 bp, Artificial Sequence
  Description of Artificial Sequence: Synthetic oligonucleotide
  Target: LAMA2; (+) strand; PAM type: NRG; PAM sequence: GAG
ctcaaaaaaaaaaaaaggaa

SEQ ID NO: 156749 - DNA, 20 bp, Artificial Sequence
  Description of Artificial Sequence: Synthetic oligonucleotide
  Target: LAMA2; (+) strand; PAM type: NRG; PAM sequence: GAG
caaaaaaaaaaaaaggaaga

SEQ ID NO: 156750 - DNA, 20 bp, Artificial Sequence
  Description of Artificial Sequence: Synthetic oligonucleotide
  Target: LAMA2; (+) strand; PAM type: NRG; PAM sequence: AAG
aattatatttttttccacac

SEQ ID NO: 156751 - DNA, 20 bp, Artificial Sequence
  Description of Artificial Sequence: Synthetic oligonucleotide
  Target: LAMA2; (+) strand; PAM type: NRG; PAM sequence: AAG
ttctgaacttactgaatccc

SEQ ID NO: 156752 - DNA, 20 bp, Artificial Sequence
  Description of Artificial Sequence: Synthetic oligonucleotide
  Target: LAMA2; (+) strand; PAM type: NRG; PAM sequence: TAG
tactgaatcccaagaataat

SEQ ID NO: 156753 - DNA, 20 bp, Artificial Sequence
  Description of Artificial Sequence: Synthetic oligonucleotide
  Target: LAMA2; (+) strand; PAM type: NRG; PAM sequence: AGG
actgaatcccaagaataatt

SEQ ID NO: 156754 - DNA, 20 bp, Artificial Sequence
  Description of Artificial Sequence: Synthetic oligonucleotide
  Target: LAMA2; (+) strand; PAM type: NRG; PAM sequence: GAG
tgaatcccaagaataattag

SEQ ID NO: 156755 - DNA, 20 bp, Artificial Sequence
  Description of Artificial Sequence: Synthetic oligonucleotide
  Target: LAMA2; (+) strand; PAM type: NRG; PAM sequence: GAG
aatcccaagaataattagga

SEQ ID NO: 156756 - DNA, 20 bp, Artificial Sequence
  Description of Artificial Sequence: Synthetic oligonucleotide
  Target: LAMA2; (+) strand; PAM type: NRG; PAM sequence: AGG
atcccaagaataattaggag

SEQ ID NO: 156757 - DNA, 20 bp, Artificial Sequence
  Description of Artificial Sequence: Synthetic oligonucleotide
  Target: LAMA2; (+) strand; PAM type: NRG; PAM sequence: AAG
aagaataattaggagaggaa

SEQ ID NO: 156758 - DNA, 20 bp, Artificial Sequence
  Description of Artificial Sequence: Synthetic oligonucleotide
  Target: LAMA2; (+) strand; PAM type: NRG; PAM sequence: TAG
attctatctgcctgttacta

SEQ ID NO: 156759 - DNA, 20 bp, Artificial Sequence
  Description of Artificial Sequence: Synthetic oligonucleotide
  Target: LAMA2; (+) strand; PAM type: NRG; PAM sequence: AAG
gcctgttactatagaacatg

SEQ ID NO: 156760 - DNA, 20 bp, Artificial Sequence
  Description of Artificial Sequence: Synthetic oligonucleotide
  Target: LAMA2; (+) strand; PAM type: NRG; PAM sequence: TGG
ttactatagaacatgaagaa

SEQ ID NO: 156761 - DNA, 20 bp, Artificial Sequence
  Description of Artificial Sequence: Synthetic oligonucleotide
  Target: LAMA2; (+) strand; PAM type: NRG; PAM sequence: GGG
tactatagaacatgaagaat

SEQ ID NO: 156762 - DNA, 20 bp, Artificial Sequence
  Description of Artificial Sequence: Synthetic oligonucleotide
  Target: LAMA2; (+) strand; PAM type: NRG; PAM sequence: AAG
tttctttttaaaacccttca

SEQ ID NO: 156763 - DNA, 20 bp, Artificial Sequence
  Description of Artificial Sequence: Synthetic oligonucleotide
  Target: LAMA2; (+) strand; PAM type: NRG; PAM sequence: TAG
ctttttaaaacccttcaaag

SEQ ID NO: 156764 - DNA, 20 bp, Artificial Sequence
  Description of Artificial Sequence: Synthetic oligonucleotide
  Target: LAMA2; (+) strand; PAM type: NRG; PAM sequence: AGG
tttttaaaacccttcaaagt

SEQ ID NO: 156765 - DNA, 20 bp, Artificial Sequence
  Description of Artificial Sequence: Synthetic oligonucleotide
  Target: LAMA2; (+) strand; PAM type: NRG; PAM sequence: TAG
taggtattttcatgcccttt

SEQ ID NO: 156766 - DNA, 20 bp, Artificial Sequence
  Description of Artificial Sequence: Synthetic oligonucleotide
  Target: LAMA2; (+) strand; PAM type: NRG; PAM sequence: CAG
acataacataacgtataatt

SEQ ID NO: 156767 - DNA, 20 bp, Artificial Sequence
  Description of Artificial Sequence: Synthetic oligonucleotide
  Target: LAMA2; (+) strand; PAM type: NRG; PAM sequence: GAG
ataacataacgtataattca

SEQ ID NO: 156768 - DNA, 20 bp, Artificial Sequence
  Description of Artificial Sequence: Synthetic oligonucleotide
  Target: LAMA2; (+) strand; PAM type: NRG; PAM sequence: CAG
ttaattttcccaaaatcaca

SEQ ID NO: 156769 - DNA, 20 bp, Artificial Sequence
  Description of Artificial Sequence: Synthetic oligonucleotide
  Target: LAMA2; (+) strand; PAM type: NRG; PAM sequence: TAG
aaaatcacacagcaaatata

SEQ ID NO: 156770 - DNA, 20 bp, Artificial Sequence
  Description of Artificial Sequence: Synthetic oligonucleotide
  Target: LAMA2; (+) strand; PAM type: NRG; PAM sequence: TAG
gcaaatatatagactacaat

SEQ ID NO: 156771 - DNA, 20 bp, Artificial Sequence
  Description of Artificial Sequence: Synthetic oligonucleotide
  Target: LAMA2; (+) strand; PAM type: NRG; PAM sequence: AAG
atatatagactacaattaga

SEQ ID NO: 156772 - DNA, 20 bp, Artificial Sequence
  Description of Artificial Sequence: Synthetic oligonucleotide
  Target: LAMA2; (+) strand; PAM type: NRG; PAM sequence: TGG
tatagactacaattagaaag

SEQ ID NO: 156773 - DNA, 20 bp, Artificial Sequence
  Description of Artificial Sequence: Synthetic oligonucleotide
  Target: LAMA2; (+) strand; PAM type: NRG; PAM sequence: GGG
atagactacaattagaaagt

SEQ ID NO: 156774 - DNA, 20 bp, Artificial Sequence
  Description of Artificial Sequence: Synthetic oligonucleotide
  Target: LAMA2; (+) strand; PAM type: NRG; PAM sequence: AAG
actacaattagaaagtgggt

SEQ ID NO: 156775 - DNA, 20 bp, Artificial Sequence
  Description of Artificial Sequence: Synthetic oligonucleotide
  Target: LAMA2; (+) strand; PAM type: NRG; PAM sequence: TAG
aaacatatacttttgcatta

SEQ ID NO: 156776 - DNA, 20 bp, Artificial Sequence
  Description of Artificial Sequence: Synthetic oligonucleotide
  Target: LAMA2; (+) strand; PAM type: NRG; PAM sequence: GAG
tatagtcacatgaaaccact

SEQ ID NO: 156777 - DNA, 20 bp, Artificial Sequence
  Description of Artificial Sequence: Synthetic oligonucleotide
  Target: LAMA2; (+) strand; PAM type: NRG; PAM sequence: GAG
gtgtgtgtgtgtgtgtgtgt

SEQ ID NO: 156778 - DNA, 20 bp, Artificial Sequence
  Description of Artificial Sequence: Synthetic oligonucleotide
  Target: LAMA2; (+) strand; PAM type: NRG; PAM sequence: GAG
gtgtgtgtgtgtgtgtgtga

SEQ ID NO: 156779 - DNA, 20 bp, Artificial Sequence
  Description of Artificial Sequence: Synthetic oligonucleotide
  Target: LAMA2; (+) strand; PAM type: NRG; PAM sequence: GAG
gtgtgtgtgtgtgtgtgaga

SEQ ID NO: 156780 - DNA, 20 bp, Artificial Sequence
  Description of Artificial Sequence: Synthetic oligonucleotide
  Target: LAMA2; (+) strand; PAM type: NRG; PAM sequence: GAG
gtgtgtgtgtgtgtgagaga

SEQ ID NO: 156781 - DNA, 20 bp, Artificial Sequence
  Description of Artificial Sequence: Synthetic oligonucleotide
  Target: LAMA2; (+) strand; PAM type: NRG; PAM sequence: GAG
gtgtgtgtgtgtgagagaga

SEQ ID NO: 156782 - DNA, 20 bp, Artificial Sequence
  Description of Artificial Sequence: Synthetic oligonucleotide
  Target: LAMA2; (+) strand; PAM type: NRG; PAM sequence: GAG
gtgtgtgtgtgagagagaga

SEQ ID NO: 156783 - DNA, 20 bp, Artificial Sequence
  Description of Artificial Sequence: Synthetic oligonucleotide
  Target: LAMA2; (+) strand; PAM type: NRG; PAM sequence: GAG
gtgtgtgtgagagagagaga

SEQ ID NO: 156784 - DNA, 20 bp, Artificial Sequence
  Description of Artificial Sequence: Synthetic oligonucleotide
  Target: LAMA2; (+) strand; PAM type: NRG; PAM sequence: GAG
gtgtgtgagagagagagaga

SEQ ID NO: 156785 - DNA, 20 bp, Artificial Sequence
  Description of Artificial Sequence: Synthetic oligonucleotide
  Target: LAMA2; (+) strand; PAM type: NRG; PAM sequence: GAG
gtgtgagagagagagagaga

SEQ ID NO: 156786 - DNA, 20 bp, Artificial Sequence
  Description of Artificial Sequence: Synthetic oligonucleotide
  Target: LAMA2; (+) strand; PAM type: NRG; PAM sequence: GAG
gtgagagagagagagagaga

SEQ ID NO: 156787 - DNA, 20 bp, Artificial Sequence
  Description of Artificial Sequence: Synthetic oligonucleotide
  Target: LAMA2; (+) strand; PAM type: NRG; PAM sequence: GAG
gagagagagagagagagaga

SEQ ID NO: 156788 - DNA, 20 bp, Artificial Sequence
  Description of Artificial Sequence: Synthetic oligonucleotide
  Target: LAMA2; (+) strand; PAM type: NRG; PAM sequence: GAG
gagagagagagagagagaga

SEQ ID NO: 156789 - DNA, 20 bp, Artificial Sequence
  Description of Artificial Sequence: Synthetic oligonucleotide
  Target: LAMA2; (+) strand; PAM type: NRG; PAM sequence: GAG
gagagagagagagagagaga

SEQ ID NO: 156790 - DNA, 20 bp, Artificial Sequence
  Description of Artificial Sequence: Synthetic oligonucleotide
  Target: LAMA2; (+) strand; PAM type: NRG; PAM sequence: AAG
gagagagagagagagagaga

SEQ ID NO: 156791 - DNA, 20 bp, Artificial Sequence
  Description of Artificial Sequence: Synthetic oligonucleotide
  Target: LAMA2; (+) strand; PAM type: NRG; PAM sequence: AAG
gagagagagagagaaagccc

SEQ ID NO: 156792 - DNA, 20 bp, Artificial Sequence
  Description of Artificial Sequence: Synthetic oligonucleotide
  Target: LAMA2; (+) strand; PAM type: NRG; PAM sequence: GAG
gagagagagagaaagcccaa

SEQ ID NO: 156793 - DNA, 20 bp, Artificial Sequence
  Description of Artificial Sequence: Synthetic oligonucleotide
  Target: LAMA2; (+) strand; PAM type: NRG; PAM sequence: GAG
gagagagaaagcccaagagt

SEQ ID NO: 156794 - DNA, 20 bp, Artificial Sequence
  Description of Artificial Sequence: Synthetic oligonucleotide
  Target: LAMA2; (+) strand; PAM type: NRG; PAM sequence: GAG
gagagaaagcccaagagtga

SEQ ID NO: 156795 - DNA, 20 bp, Artificial Sequence
  Description of Artificial Sequence: Synthetic oligonucleotide
  Target: LAMA2; (+) strand; PAM type: NRG; PAM sequence: GAG
caagagtgagagtttgtctt

SEQ ID NO: 156796 - DNA, 20 bp, Artificial Sequence
  Description of Artificial Sequence: Synthetic oligonucleotide
  Target: LAMA2; (+) strand; PAM type: NRG; PAM sequence: AGG
aagagtgagagtttgtcttg

SEQ ID NO: 156797 - DNA, 20 bp, Artificial Sequence
  Description of Artificial Sequence: Synthetic oligonucleotide
  Target: LAMA2; (+) strand; PAM type: NRG; PAM sequence: GAG
gagtgagagtttgtcttgag

SEQ ID NO: 156798 - DNA, 20 bp, Artificial Sequence
  Description of Artificial Sequence: Synthetic oligonucleotide
  Target: LAMA2; (+) strand; PAM type: NRG; PAM sequence: AAG
tgagagtttgtcttgaggag

SEQ ID NO: 156799 - DNA, 20 bp, Artificial Sequence
  Description of Artificial Sequence: Synthetic oligonucleotide
  Target: LAMA2; (+) strand; PAM type: NRG; PAM sequence: AAG
tcttgaggagaagtgtttaa

SEQ ID NO: 156800 - DNA, 20 bp, Artificial Sequence
  Description of Artificial Sequence: Synthetic oligonucleotide
  Target: LAMA2; (+) strand; PAM type: NRG; PAM sequence: AGG
cttgaggagaagtgtttaaa

SEQ ID NO: 156801 - DNA, 20 bp, Artificial Sequence
  Description of Artificial Sequence: Synthetic oligonucleotide
  Target: LAMA2; (+) strand; PAM type: NRG; PAM sequence: AAG
ttaaaaggaatatataaatc

SEQ ID NO: 156802 - DNA, 20 bp, Artificial Sequence
  Description of Artificial Sequence: Synthetic oligonucleotide
  Target: LAMA2; (+) strand; PAM type: NRG; PAM sequence: AGG
taaaaggaatatataaatca

SEQ ID NO: 156803 - DNA, 20 bp, Artificial Sequence
  Description of Artificial Sequence: Synthetic oligonucleotide
  Target: LAMA2; (+) strand; PAM type: NRG; PAM sequence: TAG
tataaatcaaggatgcacta

SEQ ID NO: 156804 - DNA, 20 bp, Artificial Sequence
  Description of Artificial Sequence: Synthetic oligonucleotide
  Target: LAMA2; (+) strand; PAM type: NRG; PAM sequence: AAG
gatgcactatagtatcacca

SEQ ID NO: 156805 - DNA, 20 bp, Artificial Sequence
  Description of Artificial Sequence: Synthetic oligonucleotide
  Target: LAMA2; (+) strand; PAM type: NRG; PAM sequence: CAG
ctatagtatcaccaaagtaa

SEQ ID NO: 156806 - DNA, 20 bp, Artificial Sequence
  Description of Artificial Sequence: Synthetic oligonucleotide
  Target: LAMA2; (+) strand; PAM type: NRG; PAM sequence: TAG
acttgaacaatttaacctct

SEQ ID NO: 156807 - DNA, 20 bp, Artificial Sequence
  Description of Artificial Sequence: Synthetic oligonucleotide
  Target: LAMA2; (+) strand; PAM type: NRG; PAM sequence: GAG
ttgaacaatttaacctctta

SEQ ID NO: 156808 - DNA, 20 bp, Artificial Sequence
  Description of Artificial Sequence: Synthetic oligonucleotide
  Target: LAMA2; (+) strand; PAM type: NRG; PAM sequence: TAG
cgattgctccatctatacaa

SEQ ID NO: 156809 - DNA, 20 bp, Artificial Sequence
  Description of Artificial Sequence: Synthetic oligonucleotide
  Target: LAMA2; (+) strand; PAM type: NRG; PAM sequence: CGG
aacctacattatacaatttc

SEQ ID NO: 156810 - DNA, 20 bp, Artificial Sequence
  Description of Artificial Sequence: Synthetic oligonucleotide
  Target: LAMA2; (+) strand; PAM type: NRG; PAM sequence: GAG
cctacattatacaatttccg

SEQ ID NO: 156811 - DNA, 20 bp, Artificial Sequence
  Description of Artificial Sequence: Synthetic oligonucleotide
  Target: LAMA2; (+) strand; PAM type: NRG; PAM sequence: GAG
acaatttccggagattaaat

SEQ ID NO: 156812 - DNA, 20 bp, Artificial Sequence
  Description of Artificial Sequence: Synthetic oligonucleotide
  Target: LAMA2; (+) strand; PAM type: NRG; PAM sequence: AGG
caatttccggagattaaatg

SEQ ID NO: 156813 - DNA, 20 bp, Artificial Sequence
  Description of Artificial Sequence: Synthetic oligonucleotide
  Target: LAMA2; (+) strand; PAM type: NRG; PAM sequence: AAG
ccggagattaaatgaggata

SEQ ID NO: 156814 - DNA, 20 bp, Artificial Sequence
  Description of Artificial Sequence: Synthetic oligonucleotide
  Target: LAMA2; (+) strand; PAM type: NRG; PAM sequence: GAG
ggagattaaatgaggataaa

SEQ ID NO: 156815 - DNA, 20 bp, Artificial Sequence
  Description of Artificial Sequence: Synthetic oligonucleotide
  Target: LAMA2; (+) strand; PAM type: NRG; PAM sequence: AAG
agagtacttttgaaattcta

SEQ ID NO: 156816 - DNA, 20 bp, Artificial Sequence
  Description of Artificial Sequence: Synthetic oligonucleotide
  Target: LAMA2; (+) strand; PAM type: NRG; PAM sequence: TAG
ctaaagttccatgaaaatgt

SEQ ID NO: 156817 - DNA, 20 bp, Artificial Sequence
  Description of Artificial Sequence: Synthetic oligonucleotide
  Target: LAMA2; (+) strand; PAM type: NRG; PAM sequence: TGG
atgttagctttgattacata

SEQ ID NO: 156818 - DNA, 20 bp, Artificial Sequence
  Description of Artificial Sequence: Synthetic oligonucleotide
  Target: LAMA2; (+) strand; PAM type: NRG; PAM sequence: CAG
agctttgattacatatggtt

SEQ ID NO: 156819 - DNA, 20 bp, Artificial Sequence
  Description of Artificial Sequence: Synthetic oligonucleotide
  Target: LAMA2; (+) strand; PAM type: NRG; PAM sequence: TGG
attacatatggttcagcaat

SEQ ID NO: 156820 - DNA, 20 bp, Artificial Sequence
  Description of Artificial Sequence: Synthetic oligonucleotide
  Target: LAMA2; (+) strand; PAM type: NRG; PAM sequence: GGG
ttacatatggttcagcaatt

SEQ ID NO: 156821 - DNA, 20 bp, Artificial Sequence
  Description of Artificial Sequence: Synthetic oligonucleotide
  Target: LAMA2; (+) strand; PAM type: NRG; PAM sequence: GAG
attgggtctccttatttttt

SEQ ID NO: 156822 - DNA, 20 bp, Artificial Sequence
  Description of Artificial Sequence: Synthetic oligonucleotide
  Target: LAMA2; (+) strand; PAM type: NRG; PAM sequence: TAG
ttttttttttgtattatctg

SEQ ID NO: 156823 - DNA, 20 bp, Artificial Sequence
  Description of Artificial Sequence: Synthetic oligonucleotide
  Target: LAMA2; (+) strand; PAM type: NRG; PAM sequence: CAG
agcttgctaaaataacatac

SEQ ID NO: 156824 - DNA, 20 bp, Artificial Sequence
  Description of Artificial Sequence: Synthetic oligonucleotide
  Target: LAMA2; (+) strand; PAM type: NRG; PAM sequence: CAG
gttttcaaattttaaaaatc

SEQ ID NO: 156825 - DNA, 20 bp, Artificial Sequence
  Description of Artificial Sequence: Synthetic oligonucleotide
  Target: LAMA2; (+) strand; PAM type: NRG; PAM sequence: TGG
atcatactgatttgttgcca

SEQ ID NO: 156826 - DNA, 20 bp, Artificial Sequence
  Description of Artificial Sequence: Synthetic oligonucleotide
  Target: LAMA2; (+) strand; PAM type: NRG; PAM sequence: TAG
actgatttgttgccatggta

SEQ ID NO: 156827 - DNA, 20 bp, Artificial Sequence
  Description of Artificial Sequence: Synthetic oligonucleotide
  Target: LAMA2; (+) strand; PAM type: NRG; PAM sequence: TAG
gatttgttgccatggtatag

SEQ ID NO: 156828 - DNA, 20 bp, Artificial Sequence
  Description of Artificial Sequence: Synthetic oligonucleotide
  Target: LAMA2; (+) strand; PAM type: NRG; PAM sequence: CAG
tgttgccatggtatagtagt

SEQ ID NO: 156829 - DNA, 20 bp, Artificial Sequence
  Description of Artificial Sequence: Synthetic oligonucleotide
  Target: LAMA2; (+) strand; PAM type: NRG; PAM sequence: GAG
ttgccatggtatagtagtca

SEQ ID NO: 156830 - DNA, 20 bp, Artificial Sequence
  Description of Artificial Sequence: Synthetic oligonucleotide
  Target: LAMA2; (+) strand; PAM type: NRG; PAM sequence: TGG
gtagtcagagaatcttgctc

SEQ ID NO: 156831 - DNA, 20 bp, Artificial Sequence
  Description of Artificial Sequence: Synthetic oligonucleotide
  Target: LAMA2; (+) strand; PAM type: NRG; PAM sequence: GGG
tagtcagagaatcttgctct

SEQ ID NO: 156832 - DNA, 20 bp, Artificial Sequence
  Description of Artificial Sequence: Synthetic oligonucleotide
  Target: LAMA2; (+) strand; PAM type: NRG; PAM sequence: CAG
tcagagaatcttgctctggg

SEQ ID NO: 156833 - DNA, 20 bp, Artificial Sequence
  Description of Artificial Sequence: Synthetic oligonucleotide
  Target: LAMA2; (+) strand; PAM type: NRG; PAM sequence: TGG
tctgggcagttacaatattt

SEQ ID NO: 156834 - DNA, 20 bp, Artificial Sequence
  Description of Artificial Sequence: Synthetic oligonucleotide
  Target: LAMA2; (+) strand; PAM type: NRG; PAM sequence: GAG
tgggcagttacaatattttg

SEQ ID NO: 156835 - DNA, 20 bp, Artificial Sequence
  Description of Artificial Sequence: Synthetic oligonucleotide
  Target: LAMA2; (+) strand; PAM type: NRG; PAM sequence: TAG
ttggagattgttttacataa

SEQ ID NO: 156836 - DNA, 20 bp, Artificial Sequence
  Description of Artificial Sequence: Synthetic oligonucleotide
  Target: LAMA2; (+) strand; PAM type: NRG; PAM sequence: CAG
ttacataatagcaacaataa

SEQ ID NO: 156837 - DNA, 20 bp, Artificial Sequence
  Description of Artificial Sequence: Synthetic oligonucleotide
  Target: LAMA2; (+) strand; PAM type: NRG; PAM sequence: AGG
tacataatagcaacaataac

SEQ ID NO: 156838 - DNA, 20 bp, Artificial Sequence
  Description of Artificial Sequence: Synthetic oligonucleotide
  Target: LAMA2; (+) strand; PAM type: NRG; PAM sequence: TAG
caaaatgtcaaatactattc

SEQ ID NO: 156839 - DNA, 20 bp, Artificial Sequence
  Description of Artificial Sequence: Synthetic oligonucleotide
  Target: LAMA2; (+) strand; PAM type: NRG; PAM sequence: GAG
aatcatcacaacaacgctat

SEQ ID NO: 156840 - DNA, 20 bp, Artificial Sequence
  Description of Artificial Sequence: Synthetic oligonucleotide
  Target: LAMA2; (+) strand; PAM type: NRG; PAM sequence: AGG
atcatcacaacaacgctatg

SEQ ID NO: 156841 - DNA, 20 bp, Artificial Sequence
  Description of Artificial Sequence: Synthetic oligonucleotide
  Target: LAMA2; (+) strand; PAM type: NRG; PAM sequence: TAG
atcacaacaacgctatgagg

SEQ ID NO: 156842 - DNA, 20 bp, Artificial Sequence
  Description of Artificial Sequence: Synthetic oligonucleotide
  Target: LAMA2; (+) strand; PAM type: NRG; PAM sequence: TGG
tattgttttgatttccctga

SEQ ID NO: 156843 - DNA, 20 bp, Artificial Sequence
  Description of Artificial Sequence: Synthetic oligonucleotide
  Target: LAMA2; (+) strand; PAM type: NRG; PAM sequence: GAG
ttgttttgatttccctgatg

SEQ ID NO: 156844 - DNA, 20 bp, Artificial Sequence
  Description of Artificial Sequence: Synthetic oligonucleotide
  Target: LAMA2; (+) strand; PAM type: NRG; PAM sequence: AAG
cctgatggagacttgacaca

SEQ ID NO: 156845 - DNA, 20 bp, Artificial Sequence
  Description of Artificial Sequence: Synthetic oligonucleotide
  Target: LAMA2; (+) strand; PAM type: NRG; PAM sequence: GAG
tgatggagacttgacacaaa

SEQ ID NO: 156846 - DNA, 20 bp, Artificial Sequence
  Description of Artificial Sequence: Synthetic oligonucleotide
  Target: LAMA2; (+) strand; PAM type: NRG; PAM sequence: GAG
atggagacttgacacaaaga

SEQ ID NO: 156847 - DNA, 20 bp, Artificial Sequence
  Description of Artificial Sequence: Synthetic oligonucleotide
  Target: LAMA2; (+) strand; PAM type: NRG; PAM sequence: AAG
acttgacacaaagagagact

SEQ ID NO: 156848 - DNA, 20 bp, Artificial Sequence
  Description of Artificial Sequence: Synthetic oligonucleotide
  Target: LAMA2; (+) strand; PAM type: NRG; PAM sequence: CAG
taattcactcctgtcacaca

SEQ ID NO: 156849 - DNA, 20 bp, Artificial Sequence
  Description of Artificial Sequence: Synthetic oligonucleotide
  Target: LAMA2; (+) strand; PAM type: NRG; PAM sequence: AAG
tcctgtcacacacagctaaa

SEQ ID NO: 156850 - DNA, 20 bp, Artificial Sequence
  Description of Artificial Sequence: Synthetic oligonucleotide
  Target: LAMA2; (+) strand; PAM type: NRG; PAM sequence: TGG
tgtcacacacagctaaaaag

SEQ ID NO: 156851 - DNA, 20 bp, Artificial Sequence
  Description of Artificial Sequence: Synthetic oligonucleotide
  Target: LAMA2; (+) strand; PAM type: NRG; PAM sequence: CAG
cacacacagctaaaaagtgg

SEQ ID NO: 156852 - DNA, 20 bp, Artificial Sequence
  Description of Artificial Sequence: Synthetic oligonucleotide
  Target: LAMA2; (+) strand; PAM type: NRG; PAM sequence: GAG
cacacagctaaaaagtggca

SEQ ID NO: 156853 - DNA, 20 bp, Artificial Sequence
  Description of Artificial Sequence: Synthetic oligonucleotide
  Target: LAMA2; (+) strand; PAM type: NRG; PAM sequence: GAG
agctaaaaagtggcagagct

SEQ ID NO: 156854 - DNA, 20 bp, Artificial Sequence
  Description of Artificial Sequence: Synthetic oligonucleotide
  Target: LAMA2; (+) strand; PAM type: NRG; PAM sequence: CAG
cagagctgagtgttttgccc

SEQ ID NO: 156855 - DNA, 20 bp, Artificial Sequence
  Description of Artificial Sequence: Synthetic oligonucleotide
  Target: LAMA2; (+) strand; PAM type: NRG; PAM sequence: AGG
agagctgagtgttttgcccc

SEQ ID NO: 156856 - DNA, 20 bp, Artificial Sequence
  Description of Artificial Sequence: Synthetic oligonucleotide
  Target: LAMA2; (+) strand; PAM type: NRG; PAM sequence: TAG
gctgagtgttttgccccagg

SEQ ID NO: 156857 - DNA, 20 bp, Artificial Sequence
  Description of Artificial Sequence: Synthetic oligonucleotide
  Target: LAMA2; (+) strand; PAM type: NRG; PAM sequence: CAG
gtgttttgccccaggtagtc

SEQ ID NO: 156858 - DNA, 20 bp, Artificial Sequence
  Description of Artificial Sequence: Synthetic oligonucleotide
  Target: LAMA2; (+) strand; PAM type: NRG; PAM sequence: TAG
tgccccaggtagtccagttc

SEQ ID NO: 156859 - DNA, 20 bp, Artificial Sequence
  Description of Artificial Sequence: Synthetic oligonucleotide
  Target: LAMA2; (+) strand; PAM type: NRG; PAM sequence: AAG
cttcctaatactatctgtac

SEQ ID NO: 156860 - DNA, 20 bp, Artificial Sequence
  Description of Artificial Sequence: Synthetic oligonucleotide
  Target: LAMA2; (+) strand; PAM type: NRG; PAM sequence: AAG
tgtattgctgtaccctatat

SEQ ID NO: 156861 - DNA, 20 bp, Artificial Sequence
  Description of Artificial Sequence: Synthetic oligonucleotide
  Target: LAMA2; (+) strand; PAM type: NRG; PAM sequence: TAG
gctgtaccctatataagctt

SEQ ID NO: 156862 - DNA, 20 bp, Artificial Sequence
  Description of Artificial Sequence: Synthetic oligonucleotide
  Target: LAMA2; (+) strand; PAM type: NRG; PAM sequence: CAG
aagctttagctctaaaattg

SEQ ID NO: 156863 - DNA, 20 bp, Artificial Sequence
  Description of Artificial Sequence: Synthetic oligonucleotide
  Target: LAMA2; (+) strand; PAM type: NRG; PAM sequence: GAG
gctttagctctaaaattgca

SEQ ID NO: 156864 - DNA, 20 bp, Artificial Sequence
  Description of Artificial Sequence: Synthetic oligonucleotide
  Target: LAMA2; (+) strand; PAM type: NRG; PAM sequence: CAG
ttagctctaaaattgcagag

SEQ ID NO: 156865 - DNA, 20 bp, Artificial Sequence
  Description of Artificial Sequence: Synthetic oligonucleotide
  Target: LAMA2; (+) strand; PAM type: NRG; PAM sequence: AGG
tagctctaaaattgcagagc

SEQ ID NO: 156866 - DNA, 20 bp, Artificial Sequence
  Description of Artificial Sequence: Synthetic oligonucleotide
  Target: LAMA2; (+) strand; PAM type: NRG; PAM sequence: AAG
ctctaaaattgcagagcagg

SEQ ID NO: 156867 - DNA, 20 bp, Artificial Sequence
  Description of Artificial Sequence: Synthetic oligonucleotide
  Target: LAMA2; (+) strand; PAM type: NRG; PAM sequence: CAG
taaaattgcagagcaggaag

SEQ ID NO: 156868 - DNA, 20 bp, Artificial Sequence
  Description of Artificial Sequence: Synthetic oligonucleotide
  Target: LAMA2; (+) strand; PAM type: NRG; PAM sequence: AGG
aaaattgcagagcaggaagc

SEQ ID NO: 156869 - DNA, 20 bp, Artificial Sequence
  Description of Artificial Sequence: Synthetic oligonucleotide
  Target: LAMA2; (+) strand; PAM type: NRG; PAM sequence: TGG
attgcagagcaggaagcagg

SEQ ID NO: 156870 - DNA, 20 bp, Artificial Sequence
  Description of Artificial Sequence: Synthetic oligonucleotide
  Target: LAMA2; (+) strand; PAM type: NRG; PAM sequence: AAG
gagcaggaagcaggtggata

SEQ ID NO: 156871 - DNA, 20 bp, Artificial Sequence
  Description of Artificial Sequence: Synthetic oligonucleotide
  Target: LAMA2; (+) strand; PAM type: NRG; PAM sequence: TAG
gctattctattaccctacaa

SEQ ID NO: 156872 - DNA, 20 bp, Artificial Sequence
  Description of Artificial Sequence: Synthetic oligonucleotide
  Target: LAMA2; (+) strand; PAM type: NRG; PAM sequence: CAG
ttaccctacaatagaaattt

SEQ ID NO: 156873 - DNA, 20 bp, Artificial Sequence
  Description of Artificial Sequence: Synthetic oligonucleotide
  Target: LAMA2; (+) strand; PAM type: NRG; PAM sequence: TGG
ccctacaatagaaatttcag

SEQ ID NO: 156874 - DNA, 20 bp, Artificial Sequence
  Description of Artificial Sequence: Synthetic oligonucleotide
  Target: LAMA2; (+) strand; PAM type: NRG; PAM sequence: TGG
ataacccactgttaataaac

SEQ ID NO: 156875 - DNA, 20 bp, Artificial Sequence
  Description of Artificial Sequence: Synthetic oligonucleotide
  Target: LAMA2; (+) strand; PAM type: NRG; PAM sequence: TGG
ccactgttaataaactggca

SEQ ID NO: 156876 - DNA, 20 bp, Artificial Sequence
  Description of Artificial Sequence: Synthetic oligonucleotide
  Target: LAMA2; (+) strand; PAM type: NRG; PAM sequence: CAG
tggtgcaattgcatgtttcc

SEQ ID NO: 156877 - DNA, 20 bp, Artificial Sequence
  Description of Artificial Sequence: Synthetic oligonucleotide
  Target: LAMA2; (+) strand; PAM type: NRG; PAM sequence: GAG
gcaattgcatgtttcccagt

SEQ ID NO: 156878 - DNA, 20 bp, Artificial Sequence
  Description of Artificial Sequence: Synthetic oligonucleotide
  Target: LAMA2; (+) strand; PAM type: NRG; PAM sequence: CAG
tgcatgtttcccagtgagat

SEQ ID NO: 156879 - DNA, 20 bp, Artificial Sequence
  Description of Artificial Sequence: Synthetic oligonucleotide
  Target: LAMA2; (+) strand; PAM type: NRG; PAM sequence: TAG
tttcccagtgagatcagatc

SEQ ID NO: 156880 - DNA, 20 bp, Artificial Sequence
  Description of Artificial Sequence: Synthetic oligonucleotide
  Target: LAMA2; (+) strand; PAM type: NRG; PAM sequence: CAG
tcagatctagtccaatgtct

SEQ ID NO: 156881 - DNA, 20 bp, Artificial Sequence
  Description of Artificial Sequence: Synthetic oligonucleotide
  Target: LAMA2; (+) strand; PAM type: NRG; PAM sequence: CAG
gatctagtccaatgtctcag

SEQ ID NO: 156882 - DNA, 20 bp, Artificial Sequence
  Description of Artificial Sequence: Synthetic oligonucleotide
  Target: LAMA2; (+) strand; PAM type: NRG; PAM sequence: TAG
gtccaatgtctcagcagata

SEQ ID NO: 156883 - DNA, 20 bp, Artificial Sequence
  Description of Artificial Sequence: Synthetic oligonucleotide
  Target: LAMA2; (+) strand; PAM type: NRG; PAM sequence: AGG
tccaatgtctcagcagatat

SEQ ID NO: 156884 - DNA, 20 bp, Artificial Sequence
  Description of Artificial Sequence: Synthetic oligonucleotide
  Target: LAMA2; (+) strand; PAM type: NRG; PAM sequence: CAG
gaattccttttctatcaccc

SEQ ID NO: 156885 - DNA, 20 bp, Artificial Sequence
  Description of Artificial Sequence: Synthetic oligonucleotide
  Target: LAMA2; (+) strand; PAM type: NRG; PAM sequence: CAG
tccttttctatcaccccaga

SEQ ID NO: 156886 - DNA, 20 bp, Artificial Sequence
  Description of Artificial Sequence: Synthetic oligonucleotide
  Target: LAMA2; (+) strand; PAM type: NRG; PAM sequence: AGG
ccttttctatcaccccagac

SEQ ID NO: 156887 - DNA, 20 bp, Artificial Sequence
  Description of Artificial Sequence: Synthetic oligonucleotide
  Target: LAMA2; (+) strand; PAM type: NRG; PAM sequence: TGG
tttctatcaccccagacagg

SEQ ID NO: 156888 - DNA, 20 bp, Artificial Sequence
  Description of Artificial Sequence: Synthetic oligonucleotide
  Target: LAMA2; (+) strand; PAM type: NRG; PAM sequence: CAG
gatctctactcatgtatctt

SEQ ID NO: 156889 - DNA, 20 bp, Artificial Sequence
  Description of Artificial Sequence: Synthetic oligonucleotide
  Target: LAMA2; (+) strand; PAM type: NRG; PAM sequence: GAG
tctctactcatgtatcttca

SEQ ID NO: 156890 - DNA, 20 bp, Artificial Sequence
  Description of Artificial Sequence: Synthetic oligonucleotide
  Target: LAMA2; (+) strand; PAM type: NRG; PAM sequence: TGG
ctcatgtatcttcagagaaa

SEQ ID NO: 156891 - DNA, 20 bp, Artificial Sequence
  Description of Artificial Sequence: Synthetic oligonucleotide
  Target: LAMA2; (+) strand; PAM type: NRG; PAM sequence: AAG
agagaaatggataccctaca

SEQ ID NO: 156892 - DNA, 20 bp, Artificial Sequence
  Description of Artificial Sequence: Synthetic oligonucleotide
  Target: LAMA2; (+) strand; PAM type: NRG; PAM sequence: CAG
gaaatggataccctacaaag

SEQ ID NO: 156893 - DNA, 20 bp, Artificial Sequence
  Description of Artificial Sequence: Synthetic oligonucleotide
  Target: LAMA2; (+) strand; PAM type: NRG; PAM sequence: CAG
gcagcacattccattttcaa

SEQ ID NO: 156894 - DNA, 20 bp, Artificial Sequence
  Description of Artificial Sequence: Synthetic oligonucleotide
  Target: LAMA2; (+) strand; PAM type: NRG; PAM sequence: TAG
cattccattttcaacagctc

SEQ ID NO: 156895 - DNA, 20 bp, Artificial Sequence
  Description of Artificial Sequence: Synthetic oligonucleotide
  Target: LAMA2; (+) strand; PAM type: NRG; PAM sequence: TAG
attattttatttatttattt

SEQ ID NO: 156896 - DNA, 20 bp, Artificial Sequence
  Description of Artificial Sequence: Synthetic oligonucleotide
  Target: LAMA2; (+) strand; PAM type: NRG; PAM sequence: AAG
ttatttatttattttagatg

SEQ ID NO: 156897 - DNA, 20 bp, Artificial Sequence
  Description of Artificial Sequence: Synthetic oligonucleotide
  Target: LAMA2; (+) strand; PAM type: NRG; PAM sequence: AAG
gaagttctgctgtgttgtcc

SEQ ID NO: 156898 - DNA, 20 bp, Artificial Sequence
  Description of Artificial Sequence: Synthetic oligonucleotide
  Target: LAMA2; (+) strand; PAM type: NRG; PAM sequence: TGG
ttctgctgtgttgtccaagc

SEQ ID NO: 156899 - DNA, 20 bp, Artificial Sequence
  Description of Artificial Sequence: Synthetic oligonucleotide
  Target: LAMA2; (+) strand; PAM type: NRG; PAM sequence: TGG
ccaagctggtctcaaacccc

SEQ ID NO: 156900 - DNA, 20 bp, Artificial Sequence
  Description of Artificial Sequence: Synthetic oligonucleotide
  Target: LAMA2; (+) strand; PAM type: NRG; PAM sequence: GGG
caagctggtctcaaacccct

SEQ ID NO: 156901 - DNA, 20 bp, Artificial Sequence
  Description of Artificial Sequence: Synthetic oligonucleotide
  Target: LAMA2; (+) strand; PAM type: NRG; PAM sequence: AAG
ggtctcaaacccctgggctc

SEQ ID NO: 156902 - DNA, 20 bp, Artificial Sequence
  Description of Artificial Sequence: Synthetic oligonucleotide
  Target: LAMA2; (+) strand; PAM type: NRG; PAM sequence: CAG
ctcaagcaatcctcctgcct

SEQ ID NO: 156903 - DNA, 20 bp, Artificial Sequence
  Description of Artificial Sequence: Synthetic oligonucleotide
  Target: LAMA2; (+) strand; PAM type: NRG; PAM sequence: AAG
tcctcctgcctcagcctccc

SEQ ID NO: 156904 - DNA, 20 bp, Artificial Sequence
  Description of Artificial Sequence: Synthetic oligonucleotide
  Target: LAMA2; (+) strand; PAM type: NRG; PAM sequence: TAG
tcctgcctcagcctcccaag

SEQ ID NO: 156905 - DNA, 20 bp, Artificial Sequence
  Description of Artificial Sequence: Synthetic oligonucleotide
  Target: LAMA2; (+) strand; PAM type: NRG; PAM sequence: TGG
gcctcagcctcccaagtagc

SEQ ID NO: 156906 - DNA, 20 bp, Artificial Sequence
  Description of Artificial Sequence: Synthetic oligonucleotide
  Target: LAMA2; (+) strand; PAM type: NRG; PAM sequence: TAG
ctcccaagtagctggaatta

SEQ ID NO: 156907 - DNA, 20 bp, Artificial Sequence
  Description of Artificial Sequence: Synthetic oligonucleotide
  Target: LAMA2; (+) strand; PAM type: NRG; PAM sequence: TAG
tagttgtgtgccactgcatc

SEQ ID NO: 156908 - DNA, 20 bp, Artificial Sequence
  Description of Artificial Sequence: Synthetic oligonucleotide
  Target: LAMA2; (+) strand; PAM type: NRG; PAM sequence: CAG
tgtgccactgcatctagctc

SEQ ID NO: 156909 - DNA, 20 bp, Artificial Sequence
  Description of Artificial Sequence: Synthetic oligonucleotide
  Target: LAMA2; (+) strand; PAM type: NRG; PAM sequence: TAG
ctgcatctagctccagattt

SEQ ID NO: 156910 - DNA, 20 bp, Artificial Sequence
  Description of Artificial Sequence: Synthetic oligonucleotide
  Target: LAMA2; (+) strand; PAM type: NRG; PAM sequence: AAG
catctagctccagattttag

SEQ ID NO: 156911 - DNA, 20 bp, Artificial Sequence
  Description of Artificial Sequence: Synthetic oligonucleotide
  Target: LAMA2; (+) strand; PAM type: NRG; PAM sequence: CAG
tttagaagttaattcttaca

SEQ ID NO: 156912 - DNA, 20 bp, Artificial Sequence
  Description of Artificial Sequence: Synthetic oligonucleotide
  Target: LAMA2; (+) strand; PAM type: NRG; PAM sequence: AGG
ttagaagttaattcttacac

SEQ ID NO: 156913 - DNA, 20 bp, Artificial Sequence
  Description of Artificial Sequence: Synthetic oligonucleotide
  Target: LAMA2; (+) strand; PAM type: NRG; PAM sequence: GGG
tagaagttaattcttacaca

SEQ ID NO: 156914 - DNA, 20 bp, Artificial Sequence
  Description of Artificial Sequence: Synthetic oligonucleotide
  Target: LAMA2; (+) strand; PAM type: NRG; PAM sequence: TGG
aattcttacacagggttttc

SEQ ID NO: 156915 - DNA, 20 bp, Artificial Sequence
  Description of Artificial Sequence: Synthetic oligonucleotide
  Target: LAMA2; (+) strand; PAM type: NRG; PAM sequence: GAG
ttcttacacagggttttctg

SEQ ID NO: 156916 - DNA, 20 bp, Artificial Sequence
  Description of Artificial Sequence: Synthetic oligonucleotide
  Target: LAMA2; (+) strand; PAM type: NRG; PAM sequence: AGG
tcttacacagggttttctgg

SEQ ID NO: 156917 - DNA, 20 bp, Artificial Sequence
  Description of Artificial Sequence: Synthetic oligonucleotide
  Target: LAMA2; (+) strand; PAM type: NRG; PAM sequence: GGG
cttacacagggttttctgga

SEQ ID NO: 156918 - DNA, 20 bp, Artificial Sequence
  Description of Artificial Sequence: Synthetic oligonucleotide
  Target: LAMA2; (+) strand; PAM type: NRG; PAM sequence: CAG
cacagggttttctggaggga

SEQ ID NO: 156919 - DNA, 20 bp, Artificial Sequence
  Description of Artificial Sequence: Synthetic oligonucleotide
  Target: LAMA2; (+) strand; PAM type: NRG; PAM sequence: TAG
ttctggagggacagaactaa

SEQ ID NO: 156920 - DNA, 20 bp, Artificial Sequence
  Description of Artificial Sequence: Synthetic oligonucleotide
  Target: LAMA2; (+) strand; PAM type: NRG; PAM sequence: AGG
tctggagggacagaactaat

SEQ ID NO: 156921 - DNA, 20 bp, Artificial Sequence
  Description of Artificial Sequence: Synthetic oligonucleotide
  Target: LAMA2; (+) strand; PAM type: NRG; PAM sequence: AAG
ataggattgatgtatatatg

SEQ ID NO: 156922 - DNA, 20 bp, Artificial Sequence
  Description of Artificial Sequence: Synthetic oligonucleotide
  Target: LAMA2; (+) strand; PAM type: NRG; PAM sequence: AGG
taggattgatgtatatatga

SEQ ID NO: 156923 - DNA, 20 bp, Artificial Sequence
  Description of Artificial Sequence: Synthetic oligonucleotide
  Target: LAMA2; (+) strand; PAM type: NRG; PAM sequence: GGG
aggattgatgtatatatgaa

SEQ ID NO: 156924 - DNA, 20 bp, Artificial Sequence
  Description of Artificial Sequence: Synthetic oligonucleotide
  Target: LAMA2; (+) strand; PAM type: NRG; PAM sequence: GGG
ggattgatgtatatatgaag

SEQ ID NO: 156925 - DNA, 20 bp, Artificial Sequence
  Description of Artificial Sequence: Synthetic oligonucleotide
  Target: LAMA2; (+) strand; PAM type: NRG; PAM sequence: GAG
attgatgtatatatgaaggg

SEQ ID NO: 156926 - DNA, 20 bp, Artificial Sequence
  Description of Artificial Sequence: Synthetic oligonucleotide
  Target: LAMA2; (+) strand; PAM type: NRG; PAM sequence: TAG
atatatgaaggggagtttgt

SEQ ID NO: 156927 - DNA, 20 bp, Artificial Sequence
  Description of Artificial Sequence: Synthetic oligonucleotide
  Target: LAMA2; (+) strand; PAM type: NRG; PAM sequence: AGG
tatatgaaggggagtttgtt

SEQ ID NO: 156928 - DNA, 20 bp, Artificial Sequence
  Description of Artificial Sequence: Synthetic oligonucleotide
  Target: LAMA2; (+) strand; PAM type: NRG; PAM sequence: GAG
tatgaaggggagtttgttag

SEQ ID NO: 156929 - DNA, 20 bp, Artificial Sequence
  Description of Artificial Sequence: Synthetic oligonucleotide
  Target: LAMA2; (+) strand; PAM type: NRG; PAM sequence: TGG
ggggagtttgttaggagaat

SEQ ID NO: 156930 - DNA, 20 bp, Artificial Sequence
  Description of Artificial Sequence: Synthetic oligonucleotide
  Target: LAMA2; (+) strand; PAM type: NRG; PAM sequence: AAG
gaattggctcacatgatcac

SEQ ID NO: 156931 - DNA, 20 bp, Artificial Sequence
  Description of Artificial Sequence: Synthetic oligonucleotide
  Target: LAMA2; (+) strand; PAM type: NRG; PAM sequence: AGG
aattggctcacatgatcaca

SEQ ID NO: 156932 - DNA, 20 bp, Artificial Sequence
  Description of Artificial Sequence: Synthetic oligonucleotide
  Target: LAMA2; (+) strand; PAM type: NRG; PAM sequence: AAG
gctcacatgatcacaaggtg

SEQ ID NO: 156933 - DNA, 20 bp, Artificial Sequence
  Description of Artificial Sequence: Synthetic oligonucleotide
  Target: LAMA2; (+) strand; PAM type: NRG; PAM sequence: TAG
cacaaggtgaagtcccacaa

SEQ ID NO: 156934 - DNA, 20 bp, Artificial Sequence
  Description of Artificial Sequence: Synthetic oligonucleotide
  Target: LAMA2; (+) strand; PAM type: NRG; PAM sequence: AGG
acaaggtgaagtcccacaat

SEQ ID NO: 156935 - DNA, 20 bp, Artificial Sequence
  Description of Artificial Sequence: Synthetic oligonucleotide
  Target: LAMA2; (+) strand; PAM type: NRG; PAM sequence: AAG
tcccacaataggccatctgc

SEQ ID NO: 156936 - DNA, 20 bp, Artificial Sequence
  Description of Artificial Sequence: Synthetic oligonucleotide
  Target: LAMA2; (+) strand; PAM type: NRG; PAM sequence: GAG
caataggccatctgcaagct

SEQ ID NO: 156937 - DNA, 20 bp, Artificial Sequence
  Description of Artificial Sequence: Synthetic oligonucleotide
  Target: LAMA2; (+) strand; PAM type: NRG; PAM sequence: TAG
taggccatctgcaagctgag

SEQ ID NO: 156938 - DNA, 20 bp, Artificial Sequence
  Description of Artificial Sequence: Synthetic oligonucleotide
  Target: LAMA2; (+) strand; PAM type: NRG; PAM sequence: AAG
ccatctgcaagctgagtagc

SEQ ID NO: 156939 - DNA, 20 bp, Artificial Sequence
  Description of Artificial Sequence: Synthetic oligonucleotide
  Target: LAMA2; (+) strand; PAM type: NRG; PAM sequence: AAG
ctgcaagctgagtagcaaga

SEQ ID NO: 156940 - DNA, 20 bp, Artificial Sequence
  Description of Artificial Sequence: Synthetic oligonucleotide
  Target: LAMA2; (+) strand; PAM type: NRG; PAM sequence: CAG
aagctgagtagcaagaaagc

SEQ ID NO: 156941 - DNA, 20 bp, Artificial Sequence
  Description of Artificial Sequence: Synthetic oligonucleotide
  Target: LAMA2; (+) strand; PAM type: NRG; PAM sequence: CAG
aagaaagccagttcgattcc

SEQ ID NO: 156942 - DNA, 20 bp, Artificial Sequence
  Description of Artificial Sequence: Synthetic oligonucleotide
  Target: LAMA2; (+) strand; PAM type: NRG; PAM sequence: TAG
gattcccagaacctcaaaat

SEQ ID NO: 156943 - DNA, 20 bp, Artificial Sequence
  Description of Artificial Sequence: Synthetic oligonucleotide
  Target: LAMA2; (+) strand; PAM type: NRG; PAM sequence: AGG
attcccagaacctcaaaatt

SEQ ID NO: 156944 - DNA, 20 bp, Artificial Sequence
  Description of Artificial Sequence: Synthetic oligonucleotide
  Target: LAMA2; (+) strand; PAM type: NRG; PAM sequence: GGG
ttcccagaacctcaaaatta

SEQ ID NO: 156945 - DNA, 20 bp, Artificial Sequence
  Description of Artificial Sequence: Synthetic oligonucleotide
  Target: LAMA2; (+) strand; PAM type: NRG; PAM sequence: AAG
ccagaacctcaaaattaggg

SEQ ID NO: 156946 - DNA, 20 bp, Artificial Sequence
  Description of Artificial Sequence: Synthetic oligonucleotide
  Target: LAMA2; (+) strand; PAM type: NRG; PAM sequence: CAG
aacctcaaaattagggaagc

SEQ ID NO: 156947 - DNA, 20 bp, Artificial Sequence
  Description of Artificial Sequence: Synthetic oligonucleotide
  Target: LAMA2; (+) strand; PAM type: NRG; PAM sequence: CGG
ctcaaaattagggaagccag

SEQ ID NO: 156948 - DNA, 20 bp, Artificial Sequence
  Description of Artificial Sequence: Synthetic oligonucleotide
  Target: LAMA2; (+) strand; PAM type: NRG; PAM sequence: CAG
aattagggaagccagcggtg

SEQ ID NO: 156949 - DNA, 20 bp, Artificial Sequence
  Description of Artificial Sequence: Synthetic oligonucleotide
  Target: LAMA2; (+) strand; PAM type: NRG; PAM sequence: CAG
gaagccagcggtgcagcctt

SEQ ID NO: 156950 - DNA, 20 bp, Artificial Sequence
  Description of Artificial Sequence: Synthetic oligonucleotide
  Target: LAMA2; (+) strand; PAM type: NRG; PAM sequence: TGG
gcggtgcagccttcagtctg

SEQ ID NO: 156951 - DNA, 20 bp, Artificial Sequence
  Description of Artificial Sequence: Synthetic oligonucleotide
  Target: LAMA2; (+) strand; PAM type: NRG; PAM sequence: AAG
cagccttcagtctgtggccg

SEQ ID NO: 156952 - DNA, 20 bp, Artificial Sequence
  Description of Artificial Sequence: Synthetic oligonucleotide
  Target: LAMA2; (+) strand; PAM type: NRG; PAM sequence: AGG
agccttcagtctgtggccga

SEQ ID NO: 156953 - DNA, 20 bp, Artificial Sequence
  Description of Artificial Sequence: Synthetic oligonucleotide
  Target: LAMA2; (+) strand; PAM type: NRG; PAM sequence: GAG
cagtctgtggccgaaggccc

SEQ ID NO: 156954 - DNA, 20 bp, Artificial Sequence
  Description of Artificial Sequence: Synthetic oligonucleotide
  Target: LAMA2; (+) strand; PAM type: NRG; PAM sequence: GAG
gtctgtggccgaaggcccga

SEQ ID NO: 156955 - DNA, 20 bp, Artificial Sequence
  Description of Artificial Sequence: Synthetic oligonucleotide
  Target: LAMA2; (+) strand; PAM type: NRG; PAM sequence: TGG
gccgaaggcccgagagcccg

SEQ ID NO: 156956 - DNA, 20 bp, Artificial Sequence
  Description of Artificial Sequence: Synthetic oligonucleotide
  Target: LAMA2; (+) strand; PAM type: NRG; PAM sequence: TGG
gagagcccgtggcaaattac

SEQ ID NO: 156957 - DNA, 20 bp, Artificial Sequence
  Description of Artificial Sequence: Synthetic oligonucleotide
  Target: LAMA2; (+) strand; PAM type: NRG; PAM sequence: AAG
ccgtggcaaattactggtgt

SEQ ID NO: 156958 - DNA, 20 bp, Artificial Sequence
  Description of Artificial Sequence: Synthetic oligonucleotide
  Target: LAMA2; (+) strand; PAM type: NRG; PAM sequence: AAG
caaattactggtgtaagtgc

SEQ ID NO: 156959 - DNA, 20 bp, Artificial Sequence
  Description of Artificial Sequence: Synthetic oligonucleotide
  Target: LAMA2; (+) strand; PAM type: NRG; PAM sequence: AGG
aaattactggtgtaagtgca

SEQ ID NO: 156960 - DNA, 20 bp, Artificial Sequence
  Description of Artificial Sequence: Synthetic oligonucleotide
  Target: LAMA2; (+) strand; PAM type: NRG; PAM sequence: GGG
aattactggtgtaagtgcaa

SEQ ID NO: 156961 - DNA, 20 bp, Artificial Sequence
  Description of Artificial Sequence: Synthetic oligonucleotide
  Target: LAMA2; (+) strand; PAM type: NRG; PAM sequence: AAG
gtgtaagtgcaagggtccaa

SEQ ID NO: 156962 - DNA, 20 bp, Artificial Sequence
  Description of Artificial Sequence: Synthetic oligonucleotide
  Target: LAMA2; (+) strand; PAM type: NRG; PAM sequence: TGG
ggtccaaaagctgaaaaact

SEQ ID NO: 156963 - DNA, 20 bp, Artificial Sequence
  Description of Artificial Sequence: Synthetic oligonucleotide
  Target: LAMA2; (+) strand; PAM type: NRG; PAM sequence: AAG
aaacttggaatctgatgttc

SEQ ID NO: 156964 - DNA, 20 bp, Artificial Sequence
  Description of Artificial Sequence: Synthetic oligonucleotide
  Target: LAMA2; (+) strand; PAM type: NRG; PAM sequence: AGG
aacttggaatctgatgttca

SEQ ID NO: 156965 - DNA, 20 bp, Artificial Sequence
  Description of Artificial Sequence: Synthetic oligonucleotide
  Target: LAMA2; (+) strand; PAM type: NRG; PAM sequence: GGG
acttggaatctgatgttcaa

SEQ ID NO: 156966 - DNA, 20 bp, Artificial Sequence
  Description of Artificial Sequence: Synthetic oligonucleotide
  Target: LAMA2; (+) strand; PAM type: NRG; PAM sequence: CAG
tggaatctgatgttcaaggg

SEQ ID NO: 156967 - DNA, 20 bp, Artificial Sequence
  Description of Artificial Sequence: Synthetic oligonucleotide
  Target: LAMA2; (+) strand; PAM type: NRG; PAM sequence: AGG
ggaatctgatgttcaagggc

SEQ ID NO: 156968 - DNA, 20 bp, Artificial Sequence
  Description of Artificial Sequence: Synthetic oligonucleotide
  Target: LAMA2; (+) strand; PAM type: NRG; PAM sequence: AAG
atctgatgttcaagggcagg

SEQ ID NO: 156969 - DNA, 20 bp, Artificial Sequence
  Description of Artificial Sequence: Synthetic oligonucleotide
  Target: LAMA2; (+) strand; PAM type: NRG; PAM sequence: CGG
gttcaagggcaggaagcatc

SEQ ID NO: 156970 - DNA, 20 bp, Artificial Sequence
  Description of Artificial Sequence: Synthetic oligonucleotide
  Target: LAMA2; (+) strand; PAM type: NRG; PAM sequence: TAG
agggcaggaagcatccggca

SEQ ID NO: 156971 - DNA, 20 bp, Artificial Sequence
  Description of Artificial Sequence: Synthetic oligonucleotide
  Target: LAMA2; (+) strand; PAM type: NRG; PAM sequence: AGG
gggcaggaagcatccggcat

SEQ ID NO: 156972 - DNA, 20 bp, Artificial Sequence
  Description of Artificial Sequence: Synthetic oligonucleotide
  Target: LAMA2; (+) strand; PAM type: NRG; PAM sequence: GAG
gcaggaagcatccggcatag

SEQ ID NO: 156973 - DNA, 20 bp, Artificial Sequence
  Description of Artificial Sequence: Synthetic oligonucleotide
  Target: LAMA2; (+) strand; PAM type: NRG; PAM sequence: AAG
gaagcatccggcataggaga

SEQ ID NO: 156974 - DNA, 20 bp, Artificial Sequence
  Description of Artificial Sequence: Synthetic oligonucleotide
  Target: LAMA2; (+) strand; PAM type: NRG; PAM sequence: AAG
tccggcataggagaaagatg

SEQ ID NO: 156975 - DNA, 20 bp, Artificial Sequence
  Description of Artificial Sequence: Synthetic oligonucleotide
  Target: LAMA2; (+) strand; PAM type: NRG; PAM sequence: TAG
cataggagaaagatgaagac

SEQ ID NO: 156976 - DNA, 20 bp, Artificial Sequence
  Description of Artificial Sequence: Synthetic oligonucleotide
  Target: LAMA2; (+) strand; PAM type: NRG; PAM sequence: AAG
aggagaaagatgaagactag

SEQ ID NO: 156977 - DNA, 20 bp, Artificial Sequence
  Description of Artificial Sequence: Synthetic oligonucleotide
  Target: LAMA2; (+) strand; PAM type: NRG; PAM sequence: TAG
actagaagactgcgcaattc

SEQ ID NO: 156978 - DNA, 20 bp, Artificial Sequence
  Description of Artificial Sequence: Synthetic oligonucleotide
  Target: LAMA2; (+) strand; PAM type: NRG; PAM sequence: TAG
ttctcctgcctgctttatcc

SEQ ID NO: 156979 - DNA, 20 bp, Artificial Sequence
  Description of Artificial Sequence: Synthetic oligonucleotide
  Target: LAMA2; (+) strand; PAM type: NRG; PAM sequence: TGG
ctgctttatcctagccacgc

SEQ ID NO: 156980 - DNA, 20 bp, Artificial Sequence
  Description of Artificial Sequence: Synthetic oligonucleotide
  Target: LAMA2; (+) strand; PAM type: NRG; PAM sequence: CAG
ctttatcctagccacgctgg

SEQ ID NO: 156981 - DNA, 20 bp, Artificial Sequence
  Description of Artificial Sequence: Synthetic oligonucleotide
  Target: LAMA2; (+) strand; PAM type: NRG; PAM sequence: TGG
cacgctggcagctgattaaa

SEQ ID NO: 156982 - DNA, 20 bp, Artificial Sequence
  Description of Artificial Sequence: Synthetic oligonucleotide
  Target: LAMA2; (+) strand; PAM type: NRG; PAM sequence: CAG
ctgattaaatggtgcctacc

SEQ ID NO: 156983 - DNA, 20 bp, Artificial Sequence
  Description of Artificial Sequence: Synthetic oligonucleotide
  Target: LAMA2; (+) strand; PAM type: NRG; PAM sequence: GAG
aaatggtgcctacccagaat

SEQ ID NO: 156984 - DNA, 20 bp, Artificial Sequence
  Description of Artificial Sequence: Synthetic oligonucleotide
  Target: LAMA2; (+) strand; PAM type: NRG; PAM sequence: AGG
aatggtgcctacccagaatg

SEQ ID NO: 156985 - DNA, 20 bp, Artificial Sequence
  Description of Artificial Sequence: Synthetic oligonucleotide
  Target: LAMA2; (+) strand; PAM type: NRG; PAM sequence: GGG
atggtgcctacccagaatga

SEQ ID NO: 156986 - DNA, 20 bp, Artificial Sequence
  Description of Artificial Sequence: Synthetic oligonucleotide
  Target: LAMA2; (+) strand; PAM type: NRG; PAM sequence: TGG
gtgcctacccagaatgaggg

SEQ ID NO: 156987 - DNA, 20 bp, Artificial Sequence
  Description of Artificial Sequence: Synthetic oligonucleotide
  Target: LAMA2; (+) strand; PAM type: NRG; PAM sequence: CAG
gagggtggttctgtctttcc

SEQ ID NO: 156988 - DNA, 20 bp, Artificial Sequence
  Description of Artificial Sequence: Synthetic oligonucleotide
  Target: LAMA2; (+) strand; PAM type: NRG; PAM sequence: TGG
actcaaatgttaatctcctt

SEQ ID NO: 156989 - DNA, 20 bp, Artificial Sequence
  Description of Artificial Sequence: Synthetic oligonucleotide
  Target: LAMA2; (+) strand; PAM type: NRG; PAM sequence: CAG
ctcctttggcaacaccctca

SEQ ID NO: 156990 - DNA, 20 bp, Artificial Sequence
  Description of Artificial Sequence: Synthetic oligonucleotide
  Target: LAMA2; (+) strand; PAM type: NRG; PAM sequence: CAG
aacaccctcacagacacact

SEQ ID NO: 156991 - DNA, 20 bp, Artificial Sequence
  Description of Artificial Sequence: Synthetic oligonucleotide
  Target: LAMA2; (+) strand; PAM type: NRG; PAM sequence: AGG
acaccctcacagacacactc

SEQ ID NO: 156992 - DNA, 20 bp, Artificial Sequence
  Description of Artificial Sequence: Synthetic oligonucleotide
  Target: LAMA2; (+) strand; PAM type: NRG; PAM sequence: CAG
gtacaatactttgcatactt

SEQ ID NO: 156993 - DNA, 20 bp, Artificial Sequence
  Description of Artificial Sequence: Synthetic oligonucleotide
  Target: LAMA2; (+) strand; PAM type: NRG; PAM sequence: AAG
atactttgcatacttcagtc

SEQ ID NO: 156994 - DNA, 20 bp, Artificial Sequence
  Description of Artificial Sequence: Synthetic oligonucleotide
  Target: LAMA2; (+) strand; PAM type: NRG; PAM sequence: TAG
ctttgcatacttcagtcaag

SEQ ID NO: 156995 - DNA, 20 bp, Artificial Sequence
  Description of Artificial Sequence: Synthetic oligonucleotide
  Target: LAMA2; (+) strand; PAM type: NRG; PAM sequence: CAG
gcatacttcagtcaagtaga

SEQ ID NO: 156996 - DNA, 20 bp, Artificial Sequence
  Description of Artificial Sequence: Synthetic oligonucleotide
  Target: LAMA2; (+) strand; PAM type: NRG; PAM sequence: CAG
ttctccaacgctttctcata

SEQ ID NO: 156997 - DNA, 20 bp, Artificial Sequence
  Description of Artificial Sequence: Synthetic oligonucleotide
  Target: LAMA2; (+) strand; PAM type: NRG; PAM sequence: AGG
tctccaacgctttctcatac

SEQ ID NO: 156998 - DNA, 20 bp, Artificial Sequence
  Description of Artificial Sequence: Synthetic oligonucleotide
  Target: LAMA2; (+) strand; PAM type: NRG; PAM sequence: CAG
ttctatttctccactatgaa

SEQ ID NO: 156999 - DNA, 20 bp, Artificial Sequence
  Description of Artificial Sequence: Synthetic oligonucleotide
  Target: LAMA2; (+) strand; PAM type: NRG; PAM sequence: GAG
atttctccactatgaacagt

SEQ ID NO: 157000 - DNA, 20 bp, Artificial Sequence
  Description of Artificial Sequence: Synthetic oligonucleotide
  Target: LAMA2; (+) strand; PAM type: NRG; PAM sequence: TGG
gaacagtgagattttttttc

SEQ ID NO: 157001 - DNA, 20 bp, Artificial Sequence
  Description of Artificial Sequence: Synthetic oligonucleotide
  Target: LAMA2; (+) strand; PAM type: NRG; PAM sequence: TAG
tttttttctggtatacttga

SEQ ID NO: 157002 - DNA, 20 bp, Artificial Sequence
  Description of Artificial Sequence: Synthetic oligonucleotide
  Target: LAMA2; (+) strand; PAM type: NRG; PAM sequence: AGG
ttttttctggtatacttgat

SEQ ID NO: 157003 - DNA, 20 bp, Artificial Sequence
  Description of Artificial Sequence: Synthetic oligonucleotide
  Target: LAMA2; (+) strand; PAM type: NRG; PAM sequence: AAG
gataggccttcaaatgttcc

SEQ ID NO: 157004 - DNA, 20 bp, Artificial Sequence
  Description of Artificial Sequence: Synthetic oligonucleotide
  Target: LAMA2; (+) strand; PAM type: NRG; PAM sequence: AAG
aaaacaatcatgcttttcct

SEQ ID NO: 157005 - DNA, 20 bp, Artificial Sequence
  Description of Artificial Sequence: Synthetic oligonucleotide
  Target: LAMA2; (+) strand; PAM type: NRG; PAM sequence: CAG
acctttccaaaccttttgtt

SEQ ID NO: 157006 - DNA, 20 bp, Artificial Sequence
  Description of Artificial Sequence: Synthetic oligonucleotide
  Target: LAMA2; (+) strand; PAM type: NRG; PAM sequence: TGG
caaaccttttgttcagctgt

SEQ ID NO: 157007 - DNA, 20 bp, Artificial Sequence
  Description of Artificial Sequence: Synthetic oligonucleotide
  Target: LAMA2; (+) strand; PAM type: NRG; PAM sequence: GGG
aaaccttttgttcagctgtt

SEQ ID NO: 157008 - DNA, 20 bp, Artificial Sequence
  Description of Artificial Sequence: Synthetic oligonucleotide
  Target: LAMA2; (+) strand; PAM type: NRG; PAM sequence: TGG
tgttgggaccatcaacatcc

SEQ ID NO: 157009 - DNA, 20 bp, Artificial Sequence
  Description of Artificial Sequence: Synthetic oligonucleotide
  Target: LAMA2; (+) strand; PAM type: NRG; PAM sequence: TGG
acatcctggtcacacctcta

SEQ ID NO: 157010 - DNA, 20 bp, Artificial Sequence
  Description of Artificial Sequence: Synthetic oligonucleotide
  Target: LAMA2; (+) strand; PAM type: NRG; PAM sequence: AAG
tggtcacacctctatggatg

SEQ ID NO: 157011 - DNA, 20 bp, Artificial Sequence
  Description of Artificial Sequence: Synthetic oligonucleotide
  Target: LAMA2; (+) strand; PAM type: NRG; PAM sequence: TGG
ttgtcaactactctcttaaa

SEQ ID NO: 157012 - DNA, 20 bp, Artificial Sequence
  Description of Artificial Sequence: Synthetic oligonucleotide
  Target: LAMA2; (+) strand; PAM type: NRG; PAM sequence: TGG
tcaactactctcttaaatgg

SEQ ID NO: 157013 - DNA, 20 bp, Artificial Sequence
  Description of Artificial Sequence: Synthetic oligonucleotide
  Target: LAMA2; (+) strand; PAM type: NRG; PAM sequence: CAG
gtggtgtcatgaattgatca

SEQ ID NO: 157014 - DNA, 20 bp, Artificial Sequence
  Description of Artificial Sequence: Synthetic oligonucleotide
  Target: LAMA2; (+) strand; PAM type: NRG; PAM sequence: TGG
atgaattgatcacagtgctc

SEQ ID NO: 157015 - DNA, 20 bp, Artificial Sequence
  Description of Artificial Sequence: Synthetic oligonucleotide
  Target: LAMA2; (+) strand; PAM type: NRG; PAM sequence: TAG
tgctctggatgtgctctgac

SEQ ID NO: 157016 - DNA, 20 bp, Artificial Sequence
  Description of Artificial Sequence: Synthetic oligonucleotide
  Target: LAMA2; (+) strand; PAM type: NRG; PAM sequence: TGG
tgactagctatgactgctcc

SEQ ID NO: 157017 - DNA, 20 bp, Artificial Sequence
  Description of Artificial Sequence: Synthetic oligonucleotide
  Target: LAMA2; (+) strand; PAM type: NRG; PAM sequence: CAG
cactatgtgtcttcctaata

SEQ ID NO: 157018 - DNA, 20 bp, Artificial Sequence
  Description of Artificial Sequence: Synthetic oligonucleotide
  Target: LAMA2; (+) strand; PAM type: NRG; PAM sequence: GAG
ctatgtgtcttcctaataca

SEQ ID NO: 157019 - DNA, 20 bp, Artificial Sequence
  Description of Artificial Sequence: Synthetic oligonucleotide
  Target: LAMA2; (+) strand; PAM type: NRG; PAM sequence: GAG
atgtgtcttcctaatacaga

SEQ ID NO: 157020 - DNA, 20 bp, Artificial Sequence
  Description of Artificial Sequence: Synthetic oligonucleotide
  Target: LAMA2; (+) strand; PAM type: NRG; PAM sequence: AAG
aaatgcatttataacttata

SEQ ID NO: 157021 - DNA, 20 bp, Artificial Sequence
  Description of Artificial Sequence: Synthetic oligonucleotide
  Target: LAMA2; (+) strand; PAM type: NRG; PAM sequence: TAG
acttataaagtatatattac

SEQ ID NO: 157022 - DNA, 20 bp, Artificial Sequence
  Description of Artificial Sequence: Synthetic oligonucleotide
  Target: LAMA2; (+) strand; PAM type: NRG; PAM sequence: AGG
cttataaagtatatattact

SEQ ID NO: 157023 - DNA, 20 bp, Artificial Sequence
  Description of Artificial Sequence: Synthetic oligonucleotide
  Target: LAMA2; (+) strand; PAM type: NRG; PAM sequence: TAG
aagtatatattactaggtgc

SEQ ID NO: 157024 - DNA, 20 bp, Artificial Sequence
  Description of Artificial Sequence: Synthetic oligonucleotide
  Target: LAMA2; (+) strand; PAM type: NRG; PAM sequence: CAG
tacactattatcctaatata

SEQ ID NO: 157025 - DNA, 20 bp, Artificial Sequence
  Description of Artificial Sequence: Synthetic oligonucleotide
  Target: LAMA2; (+) strand; PAM type: NRG; PAM sequence: AAG
actattatcctaatatacag

SEQ ID NO: 157026 - DNA, 20 bp, Artificial Sequence
  Description of Artificial Sequence: Synthetic oligonucleotide
  Target: LAMA2; (+) strand; PAM type: NRG; PAM sequence: TGG
ttatcctaatatacagaagc

SEQ ID NO: 157027 - DNA, 20 bp, Artificial Sequence
  Description of Artificial Sequence: Synthetic oligonucleotide
  Target: LAMA2; (+) strand; PAM type: NRG; PAM sequence: GGG
tatcctaatatacagaagct

SEQ ID NO: 157028 - DNA, 20 bp, Artificial Sequence
  Description of Artificial Sequence: Synthetic oligonucleotide
  Target: LAMA2; (+) strand; PAM type: NRG; PAM sequence: AAG
taatatacagaagctgggaa

SEQ ID NO: 157029 - DNA, 20 bp, Artificial Sequence
  Description of Artificial Sequence: Synthetic oligonucleotide
  Target: LAMA2; (+) strand; PAM type: NRG; PAM sequence: TAG
agctgggaaaagtaatgcca

SEQ ID NO: 157030 - DNA, 20 bp, Artificial Sequence
  Description of Artificial Sequence: Synthetic oligonucleotide
  Target: LAMA2; (+) strand; PAM type: NRG; PAM sequence: GAG
ctgggaaaagtaatgccata

SEQ ID NO: 157031 - DNA, 20 bp, Artificial Sequence
  Description of Artificial Sequence: Synthetic oligonucleotide
  Target: LAMA2; (+) strand; PAM type: NRG; PAM sequence: AAG
atttatgtgtgtaaatgtct

SEQ ID NO: 157032 - DNA, 20 bp, Artificial Sequence
  Description of Artificial Sequence: Synthetic oligonucleotide
  Target: LAMA2; (+) strand; PAM type: NRG; PAM sequence: CAG
tgatttttctccttcaactg

SEQ ID NO: 157033 - DNA, 20 bp, Artificial Sequence
  Description of Artificial Sequence: Synthetic oligonucleotide
  Target: LAMA2; (+) strand; PAM type: NRG; PAM sequence: AAG
atcaaacttcccaaacacta

SEQ ID NO: 157034 - DNA, 20 bp, Artificial Sequence
  Description of Artificial Sequence: Synthetic oligonucleotide
  Target: LAMA2; (+) strand; PAM type: NRG; PAM sequence: TGG
ttttaaaacaaatgcatttg

SEQ ID NO: 157035 - DNA, 20 bp, Artificial Sequence
  Description of Artificial Sequence: Synthetic oligonucleotide
  Target: LAMA2; (+) strand; PAM type: NRG; PAM sequence: CAG
caaatgcatttgtggttcac

SEQ ID NO: 157036 - DNA, 20 bp, Artificial Sequence
  Description of Artificial Sequence: Synthetic oligonucleotide
  Target: LAMA2; (+) strand; PAM type: NRG; PAM sequence: CAG
atttgtggttcaccagtctg

SEQ ID NO: 157037 - DNA, 20 bp, Artificial Sequence
  Description of Artificial Sequence: Synthetic oligonucleotide
  Target: LAMA2; (+) strand; PAM type: NRG; PAM sequence: CAG
tggttcaccagtctgcagta

SEQ ID NO: 157038 - DNA, 20 bp, Artificial Sequence
  Description of Artificial Sequence: Synthetic oligonucleotide
  Target: LAMA2; (+) strand; PAM type: NRG; PAM sequence: AAG
tcaccagtctgcagtacagt

SEQ ID NO: 157039 - DNA, 20 bp, Artificial Sequence
  Description of Artificial Sequence: Synthetic oligonucleotide
  Target: LAMA2; (+) strand; PAM type: NRG; PAM sequence: TAG
gcagtacagtaagcttttta

SEQ ID NO: 157040 - DNA, 20 bp, Artificial Sequence
  Description of Artificial Sequence: Synthetic oligonucleotide
  Target: LAMA2; (+) strand; PAM type: NRG; PAM sequence: AGG
cagtacagtaagctttttat

SEQ ID NO: 157041 - DNA, 20 bp, Artificial Sequence
  Description of Artificial Sequence: Synthetic oligonucleotide
  Target: LAMA2; (+) strand; PAM type: NRG; PAM sequence: AAG
acagtaagctttttataggt

SEQ ID NO: 157042 - DNA, 20 bp, Artificial Sequence
  Description of Artificial Sequence: Synthetic oligonucleotide
  Target: LAMA2; (+) strand; PAM type: NRG; PAM sequence: CAG
ttataggtaagctcaaatca

SEQ ID NO: 157043 - DNA, 20 bp, Artificial Sequence
  Description of Artificial Sequence: Synthetic oligonucleotide
  Target: LAMA2; (+) strand; PAM type: NRG; PAM sequence: AAG
ggtaagctcaaatcacagaa

SEQ ID NO: 157044 - DNA, 20 bp, Artificial Sequence
  Description of Artificial Sequence: Synthetic oligonucleotide
  Target: LAMA2; (+) strand; PAM type: NRG; PAM sequence: TAG
aaatcacagaaaagctcaaa

SEQ ID NO: 157045 - DNA, 20 bp, Artificial Sequence
  Description of Artificial Sequence: Synthetic oligonucleotide
  Target: LAMA2; (+) strand; PAM type: NRG; PAM sequence: TAG
tcaaatagatacatctcctt

SEQ ID NO: 157046 - DNA, 20 bp, Artificial Sequence
  Description of Artificial Sequence: Synthetic oligonucleotide
  Target: LAMA2; (+) strand; PAM type: NRG; PAM sequence: TAG
catctcctttagcctatttt

SEQ ID NO: 157047 - DNA, 20 bp, Artificial Sequence
  Description of Artificial Sequence: Synthetic oligonucleotide
  Target: LAMA2; (+) strand; PAM type: NRG; PAM sequence: AGG
atctcctttagcctattttt

SEQ ID NO: 157048 - DNA, 20 bp, Artificial Sequence
  Description of Artificial Sequence: Synthetic oligonucleotide
  Target: LAMA2; (+) strand; PAM type: NRG; PAM sequence: AAG
gcctatttttaggactgata

SEQ ID NO: 157049 - DNA, 20 bp, Artificial Sequence
  Description of Artificial Sequence: Synthetic oligonucleotide
  Target: LAMA2; (+) strand; PAM type: NRG; PAM sequence: AAG
tttttaggactgataaagct

SEQ ID NO: 157050 - DNA, 20 bp, Artificial Sequence
  Description of Artificial Sequence: Synthetic oligonucleotide
  Target: LAMA2; (+) strand; PAM type: NRG; PAM sequence: CAG
aggactgataaagctaagaa

SEQ ID NO: 157051 - DNA, 20 bp, Artificial Sequence
  Description of Artificial Sequence: Synthetic oligonucleotide
  Target: LAMA2; (+) strand; PAM type: NRG; PAM sequence: GAG
gactgataaagctaagaaca

SEQ ID NO: 157052 - DNA, 20 bp, Artificial Sequence
  Description of Artificial Sequence: Synthetic oligonucleotide
  Target: LAMA2; (+) strand; PAM type: NRG; PAM sequence: AAG
taagaacagagaaaccaata

SEQ ID NO: 157053 - DNA, 20 bp, Artificial Sequence
  Description of Artificial Sequence: Synthetic oligonucleotide
  Target: LAMA2; (+) strand; PAM type: NRG; PAM sequence: TGG
ataaagacatattttaatga

SEQ ID NO: 157054 - DNA, 20 bp, Artificial Sequence
  Description of Artificial Sequence: Synthetic oligonucleotide
  Target: LAMA2; (+) strand; PAM type: NRG; PAM sequence: CAG
aagacatattttaatgatgg

SEQ ID NO: 157055 - DNA, 20 bp, Artificial Sequence
  Description of Artificial Sequence: Synthetic oligonucleotide
  Target: LAMA2; (+) strand; PAM type: NRG; PAM sequence: AGG
agacatattttaatgatggc

SEQ ID NO: 157056 - DNA, 20 bp, Artificial Sequence
  Description of Artificial Sequence: Synthetic oligonucleotide
  Target: LAMA2; (+) strand; PAM type: NRG; PAM sequence: GGG
gacatattttaatgatggca

SEQ ID NO: 157057 - DNA, 20 bp, Artificial Sequence
  Description of Artificial Sequence: Synthetic oligonucleotide
  Target: LAMA2; (+) strand; PAM type: NRG; PAM sequence: TGG
aatgatggcagggtatctca

SEQ ID NO: 157058 - DNA, 20 bp, Artificial Sequence
  Description of Artificial Sequence: Synthetic oligonucleotide
  Target: LAMA2; (+) strand; PAM type: NRG; PAM sequence: GGG
atgatggcagggtatctcat

SEQ ID NO: 157059 - DNA, 20 bp, Artificial Sequence
  Description of Artificial Sequence: Synthetic oligonucleotide
  Target: LAMA2; (+) strand; PAM type: NRG; PAM sequence: GGG
tgatggcagggtatctcatg

SEQ ID NO: 157060 - DNA, 20 bp, Artificial Sequence
  Description of Artificial Sequence: Synthetic oligonucleotide
  Target: LAMA2; (+) strand; PAM type: NRG; PAM sequence: TAG
tggcagggtatctcatgggg

SEQ ID NO: 157061 - DNA, 20 bp, Artificial Sequence
  Description of Artificial Sequence: Synthetic oligonucleotide
  Target: LAMA2; (+) strand; PAM type: NRG; PAM sequence: CAG
ggggtagtacaaatttatcc

SEQ ID NO: 157062 - DNA, 20 bp, Artificial Sequence
  Description of Artificial Sequence: Synthetic oligonucleotide
  Target: LAMA2; (+) strand; PAM type: NRG; PAM sequence: AAG
tctctatgtgtaatacattg

SEQ ID NO: 157063 - DNA, 20 bp, Artificial Sequence
  Description of Artificial Sequence: Synthetic oligonucleotide
  Target: LAMA2; (+) strand; PAM type: NRG; PAM sequence: TGG
taatacattgaagtgatata

SEQ ID NO: 157064 - DNA, 20 bp, Artificial Sequence
  Description of Artificial Sequence: Synthetic oligonucleotide
  Target: LAMA2; (+) strand; PAM type: NRG; PAM sequence: CAG
tgttgaatgtgattaaaatt

SEQ ID NO: 157065 - DNA, 20 bp, Artificial Sequence
  Description of Artificial Sequence: Synthetic oligonucleotide
  Target: LAMA2; (+) strand; PAM type: NRG; PAM sequence: CAG
tgaatgtgattaaaattcag

SEQ ID NO: 157066 - DNA, 20 bp, Artificial Sequence
  Description of Artificial Sequence: Synthetic oligonucleotide
  Target: LAMA2; (+) strand; PAM type: NRG; PAM sequence: AAG
aattcagcagatacttatgc

SEQ ID NO: 157067 - DNA, 20 bp, Artificial Sequence
  Description of Artificial Sequence: Synthetic oligonucleotide
  Target: LAMA2; (+) strand; PAM type: NRG; PAM sequence: AAG
atgcaagatctactatctat

SEQ ID NO: 157068 - DNA, 20 bp, Artificial Sequence
  Description of Artificial Sequence: Synthetic oligonucleotide
  Target: LAMA2; (+) strand; PAM type: NRG; PAM sequence: TAG
gatgcttatgcaaaattcca

SEQ ID NO: 157069 - DNA, 20 bp, Artificial Sequence
  Description of Artificial Sequence: Synthetic oligonucleotide
  Target: LAMA2; (+) strand; PAM type: NRG; PAM sequence: AGG
atgcttatgcaaaattccat

SEQ ID NO: 157070 - DNA, 20 bp, Artificial Sequence
  Description of Artificial Sequence: Synthetic oligonucleotide
  Target: LAMA2; (+) strand; PAM type: NRG; PAM sequence: GGG
tgcttatgcaaaattccata

SEQ ID NO: 157071 - DNA, 20 bp, Artificial Sequence
  Description of Artificial Sequence: Synthetic oligonucleotide
  Target: LAMA2; (+) strand; PAM type: NRG; PAM sequence: AAG
aaattccatagggaaacatt

SEQ ID NO: 157072 - DNA, 20 bp, Artificial Sequence
  Description of Artificial Sequence: Synthetic oligonucleotide
  Target: LAMA2; (+) strand; PAM type: NRG; PAM sequence: TGG
gacgtgaataaaatctgaat

SEQ ID NO: 157073 - DNA, 20 bp, Artificial Sequence
  Description of Artificial Sequence: Synthetic oligonucleotide
  Target: LAMA2; (+) strand; PAM type: NRG; PAM sequence: GGG
acgtgaataaaatctgaatt

SEQ ID NO: 157074 - DNA, 20 bp, Artificial Sequence
  Description of Artificial Sequence: Synthetic oligonucleotide
  Target: LAMA2; (+) strand; PAM type: NRG; PAM sequence: TGG
tatgatctctccccaaaacg

SEQ ID NO: 157075 - DNA, 20 bp, Artificial Sequence
  Description of Artificial Sequence: Synthetic oligonucleotide
  Target: LAMA2; (+) strand; PAM type: NRG; PAM sequence: GGG
atgatctctccccaaaacgt

SEQ ID NO: 157076 - DNA, 20 bp, Artificial Sequence
  Description of Artificial Sequence: Synthetic oligonucleotide
  Target: LAMA2; (+) strand; PAM type: NRG; PAM sequence: AAG
ccccaaaacgtgggattttc

SEQ ID NO: 157077 - DNA, 20 bp, Artificial Sequence
  Description of Artificial Sequence: Synthetic oligonucleotide
  Target: LAMA2; (+) strand; PAM type: NRG; PAM sequence: TAG
gtgggattttcaagtgcatt

SEQ ID NO: 157078 - DNA, 20 bp, Artificial Sequence
  Description of Artificial Sequence: Synthetic oligonucleotide
  Target: LAMA2; (+) strand; PAM type: NRG; PAM sequence: TAG
agaattatgaaataaaccac

SEQ ID NO: 157079 - DNA, 20 bp, Artificial Sequence
  Description of Artificial Sequence: Synthetic oligonucleotide
  Target: LAMA2; (+) strand; PAM type: NRG; PAM sequence: AGG
gaattatgaaataaaccact

SEQ ID NO: 157080 - DNA, 20 bp, Artificial Sequence
  Description of Artificial Sequence: Synthetic oligonucleotide
  Target: LAMA2; (+) strand; PAM type: NRG; PAM sequence: TAG
gaaataaaccactaggtttt

SEQ ID NO: 157081 - DNA, 20 bp, Artificial Sequence
  Description of Artificial Sequence: Synthetic oligonucleotide
  Target: LAMA2; (+) strand; PAM type: NRG; PAM sequence: CAG
tttttagtgtgaaatgttta

SEQ ID NO: 157082 - DNA, 20 bp, Artificial Sequence
  Description of Artificial Sequence: Synthetic oligonucleotide
  Target: LAMA2; (+) strand; PAM type: NRG; PAM sequence: CAG
gaaaactatacttattaaaa

SEQ ID NO: 157083 - DNA, 20 bp, Artificial Sequence
  Description of Artificial Sequence: Synthetic oligonucleotide
  Target: LAMA2; (+) strand; PAM type: NRG; PAM sequence: TAG
attgaatacatgttatgtgc

SEQ ID NO: 157084 - DNA, 20 bp, Artificial Sequence
  Description of Artificial Sequence: Synthetic oligonucleotide
  Target: LAMA2; (+) strand; PAM type: NRG; PAM sequence: AGG
ttgaatacatgttatgtgct

SEQ ID NO: 157085 - DNA, 20 bp, Artificial Sequence
  Description of Artificial Sequence: Synthetic oligonucleotide
  Target: LAMA2; (+) strand; PAM type: NRG; PAM sequence: AAG
catgttatgtgctaggtacc

SEQ ID NO: 157086 - DNA, 20 bp, Artificial Sequence
  Description of Artificial Sequence: Synthetic oligonucleotide
  Target: LAMA2; (+) strand; PAM type: NRG; PAM sequence: TGG
gttatgtgctaggtaccaag

SEQ ID NO: 157087 - DNA, 20 bp, Artificial Sequence
  Description of Artificial Sequence: Synthetic oligonucleotide
  Target: LAMA2; (+) strand; PAM type: NRG; PAM sequence: GGG
ttatgtgctaggtaccaagt

SEQ ID NO: 157088 - DNA, 20 bp, Artificial Sequence
  Description of Artificial Sequence: Synthetic oligonucleotide
  Target: LAMA2; (+) strand; PAM type: NRG; PAM sequence: GGG
tatgtgctaggtaccaagtg

SEQ ID NO: 157089 - DNA, 20 bp, Artificial Sequence
  Description of Artificial Sequence: Synthetic oligonucleotide
  Target: LAMA2; (+) strand; PAM type: NRG; PAM sequence: GAG
tgtgctaggtaccaagtggg

SEQ ID NO: 157090 - DNA, 20 bp, Artificial Sequence
  Description of Artificial Sequence: Synthetic oligonucleotide
  Target: LAMA2; (+) strand; PAM type: NRG; PAM sequence: AAG
ttattttctcatttcatcct

SEQ ID NO: 157091 - DNA, 20 bp, Artificial Sequence
  Description of Artificial Sequence: Synthetic oligonucleotide
  Target: LAMA2; (+) strand; PAM type: NRG; PAM sequence: GAG
attttctcatttcatcctaa

SEQ ID NO: 157092 - DNA, 20 bp, Artificial Sequence
  Description of Artificial Sequence: Synthetic oligonucleotide
  Target: LAMA2; (+) strand; PAM type: NRG; PAM sequence: CGG
ttcatcctaagagcaaactt

SEQ ID NO: 157093 - DNA, 20 bp, Artificial Sequence
  Description of Artificial Sequence: Synthetic oligonucleotide
  Target: LAMA2; (+) strand; PAM type: NRG; PAM sequence: GAG
catcctaagagcaaacttcg

SEQ ID NO: 157094 - DNA, 20 bp, Artificial Sequence
  Description of Artificial Sequence: Synthetic oligonucleotide
  Target: LAMA2; (+) strand; PAM type: NRG; PAM sequence: AGG
atcctaagagcaaacttcgg

SEQ ID NO: 157095 - DNA, 20 bp, Artificial Sequence
  Description of Artificial Sequence: Synthetic oligonucleotide
  Target: LAMA2; (+) strand; PAM type: NRG; PAM sequence: TAG
ctaagagcaaacttcggagg

SEQ ID NO: 157096 - DNA, 20 bp, Artificial Sequence
  Description of Artificial Sequence: Synthetic oligonucleotide
  Target: LAMA2; (+) strand; PAM type: NRG; PAM sequence: AGG
taagagcaaacttcggaggt

SEQ ID NO: 157097 - DNA, 20 bp, Artificial Sequence
  Description of Artificial Sequence: Synthetic oligonucleotide
  Target: LAMA2; (+) strand; PAM type: NRG; PAM sequence: TAG
aggtgtgattcgtctcattt

SEQ ID NO: 157098 - DNA, 20 bp, Artificial Sequence
  Description of Artificial Sequence: Synthetic oligonucleotide
  Target: LAMA2; (+) strand; PAM type: NRG; PAM sequence: AAG
aaaattcactgatgctctga

SEQ ID NO: 157099 - DNA, 20 bp, Artificial Sequence
  Description of Artificial Sequence: Synthetic oligonucleotide
  Target: LAMA2; (+) strand; PAM type: NRG; PAM sequence: AAG
aaagcaaaattaactttccc

SEQ ID NO: 157100 - DNA, 20 bp, Artificial Sequence
  Description of Artificial Sequence: Synthetic oligonucleotide
  Target: LAMA2; (+) strand; PAM type: NRG; PAM sequence: AGG
aagcaaaattaactttccca

SEQ ID NO: 157101 - DNA, 20 bp, Artificial Sequence
  Description of Artificial Sequence: Synthetic oligonucleotide
  Target: LAMA2; (+) strand; PAM type: NRG; PAM sequence: GGG
agcaaaattaactttcccaa

SEQ ID NO: 157102 - DNA, 20 bp, Artificial Sequence
  Description of Artificial Sequence: Synthetic oligonucleotide
  Target: LAMA2; (+) strand; PAM type: NRG; PAM sequence: TAG
taactttcccaagggccttg

SEQ ID NO: 157103 - DNA, 20 bp, Artificial Sequence
  Description of Artificial Sequence: Synthetic oligonucleotide
  Target: LAMA2; (+) strand; PAM type: NRG; PAM sequence: AAG
caagggccttgtagtgctta

SEQ ID NO: 157104 - DNA, 20 bp, Artificial Sequence
  Description of Artificial Sequence: Synthetic oligonucleotide
  Target: LAMA2; (+) strand; PAM type: NRG; PAM sequence: AGG
aagggccttgtagtgcttaa

SEQ ID NO: 157105 - DNA, 20 bp, Artificial Sequence
  Description of Artificial Sequence: Synthetic oligonucleotide
  Target: LAMA2; (+) strand; PAM type: NRG; PAM sequence: CAG
ggccttgtagtgcttaaagg

SEQ ID NO: 157106 - DNA, 20 bp, Artificial Sequence
  Description of Artificial Sequence: Synthetic oligonucleotide
  Target: LAMA2; (+) strand; PAM type: NRG; PAM sequence: CAG
gcagaatcaaaatccacaac

SEQ ID NO: 157107 - DNA, 20 bp, Artificial Sequence
  Description of Artificial Sequence: Synthetic oligonucleotide
  Target: LAMA2; (+) strand; PAM type: NRG; PAM sequence: TGG
tcaaaatccacaaccagctc

SEQ ID NO: 157108 - DNA, 20 bp, Artificial Sequence
  Description of Artificial Sequence: Synthetic oligonucleotide
  Target: LAMA2; (+) strand; PAM type: NRG; PAM sequence: CAG
aaccagctctggaaaatctc

SEQ ID NO: 157109 - DNA, 20 bp, Artificial Sequence
  Description of Artificial Sequence: Synthetic oligonucleotide
  Target: LAMA2; (+) strand; PAM type: NRG; PAM sequence: GAG
tctggaaaatctccagaaat

SEQ ID NO: 157110 - DNA, 20 bp, Artificial Sequence
  Description of Artificial Sequence: Synthetic oligonucleotide
  Target: LAMA2; (+) strand; PAM type: NRG; PAM sequence: CAG
atatatgactccaatattaa

SEQ ID NO: 157111 - DNA, 20 bp, Artificial Sequence
  Description of Artificial Sequence: Synthetic oligonucleotide
  Target: LAMA2; (+) strand; PAM type: NRG; PAM sequence: TGG
aaccctttacctgtttattt

SEQ ID NO: 157112 - DNA, 20 bp, Artificial Sequence
  Description of Artificial Sequence: Synthetic oligonucleotide
  Target: LAMA2; (+) strand; PAM type: NRG; PAM sequence: AAG
cctttacctgtttattttgg

SEQ ID NO: 157113 - DNA, 20 bp, Artificial Sequence
  Description of Artificial Sequence: Synthetic oligonucleotide
  Target: LAMA2; (+) strand; PAM type: NRG; PAM sequence: AAG
ttacctgtttattttggaag

SEQ ID NO: 157114 - DNA, 20 bp, Artificial Sequence
  Description of Artificial Sequence: Synthetic oligonucleotide
  Target: LAMA2; (+) strand; PAM type: NRG; PAM sequence: TGG
ttaccctgttgattctcctc

SEQ ID NO: 157115 - DNA, 20 bp, Artificial Sequence
  Description of Artificial Sequence: Synthetic oligonucleotide
  Target: LAMA2; (+) strand; PAM type: NRG; PAM sequence: GAG
accctgttgattctcctctg

SEQ ID NO: 157116 - DNA, 20 bp, Artificial Sequence
  Description of Artificial Sequence: Synthetic oligonucleotide
  Target: LAMA2; (+) strand; PAM type: NRG; PAM sequence: TAG
ttctcctctggagtgtgact

SEQ ID NO: 157117 - DNA, 20 bp, Artificial Sequence
  Description of Artificial Sequence: Synthetic oligonucleotide
  Target: LAMA2; (+) strand; PAM type: NRG; PAM sequence: TGG
cttagtatccattgcacctt

SEQ ID NO: 157118 - DNA, 20 bp, Artificial Sequence
  Description of Artificial Sequence: Synthetic oligonucleotide
  Target: LAMA2; (+) strand; PAM type: NRG; PAM sequence: GGG
ttagtatccattgcaccttt

SEQ ID NO: 157119 - DNA, 20 bp, Artificial Sequence
  Description of Artificial Sequence: Synthetic oligonucleotide
  Target: LAMA2; (+) strand; PAM type: NRG; PAM sequence: AAG
caaccactttctactgctgt

SEQ ID NO: 157120 - DNA, 20 bp, Artificial Sequence
  Description of Artificial Sequence: Synthetic oligonucleotide
  Target: LAMA2; (+) strand; PAM type: NRG; PAM sequence: AAG
cactttctactgctgtaaga

SEQ ID NO: 157121 - DNA, 20 bp, Artificial Sequence
  Description of Artificial Sequence: Synthetic oligonucleotide
  Target: LAMA2; (+) strand; PAM type: NRG; PAM sequence: CAG
ctgtaagaaagaatcacctg

SEQ ID NO: 157122 - DNA, 20 bp, Artificial Sequence
  Description of Artificial Sequence: Synthetic oligonucleotide
  Target: LAMA2; (+) strand; PAM type: NRG; PAM sequence: GAG
gtaagaaagaatcacctgca

SEQ ID NO: 157123 - DNA, 20 bp, Artificial Sequence
  Description of Artificial Sequence: Synthetic oligonucleotide
  Target: LAMA2; (+) strand; PAM type: NRG; PAM sequence: GAG
cacctgcagagttcacgaat

SEQ ID NO: 157124 - DNA, 20 bp, Artificial Sequence
  Description of Artificial Sequence: Synthetic oligonucleotide
  Target: LAMA2; (+) strand; PAM type: NRG; PAM sequence: AGG
acctgcagagttcacgaatg

SEQ ID NO: 157125 - DNA, 20 bp, Artificial Sequence
  Description of Artificial Sequence: Synthetic oligonucleotide
  Target: LAMA2; (+) strand; PAM type: NRG; PAM sequence: GGG
cctgcagagttcacgaatga

SEQ ID NO: 157126 - DNA, 20 bp, Artificial Sequence
  Description of Artificial Sequence: Synthetic oligonucleotide
  Target: LAMA2; (+) strand; PAM type: NRG; PAM sequence: AAG
gcagagttcacgaatgaggg

SEQ ID NO: 157127 - DNA, 20 bp, Artificial Sequence
  Description of Artificial Sequence: Synthetic oligonucleotide
  Target: LAMA2; (+) strand; PAM type: NRG; PAM sequence: GAG
agagttcacgaatgagggaa

SEQ ID NO: 157128 - DNA, 20 bp, Artificial Sequence
  Description of Artificial Sequence: Synthetic oligonucleotide
  Target: LAMA2; (+) strand; PAM type: NRG; PAM sequence: AAG
acgaatgagggaagagtgaa

SEQ ID NO: 157129 - DNA, 20 bp, Artificial Sequence
  Description of Artificial Sequence: Synthetic oligonucleotide
  Target: LAMA2; (+) strand; PAM type: NRG; PAM sequence: AGG
cgaatgagggaagagtgaaa

SEQ ID NO: 157130 - DNA, 20 bp, Artificial Sequence
  Description of Artificial Sequence: Synthetic oligonucleotide
  Target: LAMA2; (+) strand; PAM type: NRG; PAM sequence: GGG
gaatgagggaagagtgaaaa

SEQ ID NO: 157131 - DNA, 20 bp, Artificial Sequence
  Description of Artificial Sequence: Synthetic oligonucleotide
  Target: LAMA2; (+) strand; PAM type: NRG; PAM sequence: TAG
agggaagagtgaaaagggaa

SEQ ID NO: 157132 - DNA, 20 bp, Artificial Sequence
  Description of Artificial Sequence: Synthetic oligonucleotide
  Target: LAMA2; (+) strand; PAM type: NRG; PAM sequence: TGG
gaagagtgaaaagggaatag

SEQ ID NO: 157133 - DNA, 20 bp, Artificial Sequence
  Description of Artificial Sequence: Synthetic oligonucleotide
  Target: LAMA2; (+) strand; PAM type: NRG; PAM sequence: CAG
gagtgaaaagggaatagtgg

SEQ ID NO: 157134 - DNA, 20 bp, Artificial Sequence
  Description of Artificial Sequence: Synthetic oligonucleotide
  Target: LAMA2; (+) strand; PAM type: NRG; PAM sequence: TGG
agtggcagatcaataccact

SEQ ID NO: 157135 - DNA, 20 bp, Artificial Sequence
  Description of Artificial Sequence: Synthetic oligonucleotide
  Target: LAMA2; (+) strand; PAM type: NRG; PAM sequence: TAG
cacttggcatcacatcaaaa

SEQ ID NO: 157136 - DNA, 20 bp, Artificial Sequence
  Description of Artificial Sequence: Synthetic oligonucleotide
  Target: LAMA2; (+) strand; PAM type: NRG; PAM sequence: AAG
tcacatcaaaatagtattcc

SEQ ID NO: 157137 - DNA, 20 bp, Artificial Sequence
  Description of Artificial Sequence: Synthetic oligonucleotide
  Target: LAMA2; (+) strand; PAM type: NRG; PAM sequence: AGG
cacatcaaaatagtattcca

SEQ ID NO: 157138 - DNA, 20 bp, Artificial Sequence
  Description of Artificial Sequence: Synthetic oligonucleotide
  Target: LAMA2; (+) strand; PAM type: NRG; PAM sequence: TGG
tcaaaatagtattccaaggt

SEQ ID NO: 157139 - DNA, 20 bp, Artificial Sequence
  Description of Artificial Sequence: Synthetic oligonucleotide
  Target: LAMA2; (+) strand; PAM type: NRG; PAM sequence: TGG
gtattccaaggttggtgttc

SEQ ID NO: 157140 - DNA, 20 bp, Artificial Sequence
  Description of Artificial Sequence: Synthetic oligonucleotide
  Target: LAMA2; (+) strand; PAM type: NRG; PAM sequence: TGG
tgttctggcttctgcttttc

SEQ ID NO: 157141 - DNA, 20 bp, Artificial Sequence
  Description of Artificial Sequence: Synthetic oligonucleotide
  Target: LAMA2; (+) strand; PAM type: NRG; PAM sequence: GGG
gttctggcttctgcttttct

SEQ ID NO: 157142 - DNA, 20 bp, Artificial Sequence
  Description of Artificial Sequence: Synthetic oligonucleotide
  Target: LAMA2; (+) strand; PAM type: NRG; PAM sequence: TAG
aaattcattcaactcatatt

SEQ ID NO: 157143 - DNA, 20 bp, Artificial Sequence
  Description of Artificial Sequence: Synthetic oligonucleotide
  Target: LAMA2; (+) strand; PAM type: NRG; PAM sequence: TAG
tcaactcatatttagcactt

SEQ ID NO: 157144 - DNA, 20 bp, Artificial Sequence
  Description of Artificial Sequence: Synthetic oligonucleotide
  Target: LAMA2; (+) strand; PAM type: NRG; PAM sequence: AGG
caactcatatttagcacttt

SEQ ID NO: 157145 - DNA, 20 bp, Artificial Sequence
  Description of Artificial Sequence: Synthetic oligonucleotide
  Target: LAMA2; (+) strand; PAM type: NRG; PAM sequence: CAG
ttagcactttaggccatatc

SEQ ID NO: 157146 - DNA, 20 bp, Artificial Sequence
  Description of Artificial Sequence: Synthetic oligonucleotide
  Target: LAMA2; (+) strand; PAM type: NRG; PAM sequence: AGG
tagcactttaggccatatcc

SEQ ID NO: 157147 - DNA, 20 bp, Artificial Sequence
  Description of Artificial Sequence: Synthetic oligonucleotide
  Target: LAMA2; (+) strand; PAM type: NRG; PAM sequence: GGG
agcactttaggccatatcca

SEQ ID NO: 157148 - DNA, 20 bp, Artificial Sequence
  Description of Artificial Sequence: Synthetic oligonucleotide
  Target: LAMA2; (+) strand; PAM type: NRG; PAM sequence: TGG
ttaggccatatccagggttg

SEQ ID NO: 157149 - DNA, 20 bp, Artificial Sequence
  Description of Artificial Sequence: Synthetic oligonucleotide
  Target: LAMA2; (+) strand; PAM type: NRG; PAM sequence: AAG
ggccatatccagggttgtgg

SEQ ID NO: 157150 - DNA, 20 bp, Artificial Sequence
  Description of Artificial Sequence: Synthetic oligonucleotide
  Target: LAMA2; (+) strand; PAM type: NRG; PAM sequence: AGG
gccatatccagggttgtgga

SEQ ID NO: 157151 - DNA, 20 bp, Artificial Sequence
  Description of Artificial Sequence: Synthetic oligonucleotide
  Target: LAMA2; (+) strand; PAM type: NRG; PAM sequence: AAG
gggttgtggaaggtgtacgt

SEQ ID NO: 157152 - DNA, 20 bp, Artificial Sequence
  Description of Artificial Sequence: Synthetic oligonucleotide
  Target: LAMA2; (+) strand; PAM type: NRG; PAM sequence: GAG
ggaaggtgtacgtaagcaat

SEQ ID NO: 157153 - DNA, 20 bp, Artificial Sequence
  Description of Artificial Sequence: Synthetic oligonucleotide
  Target: LAMA2; (+) strand; PAM type: NRG; PAM sequence: AGG
gaaggtgtacgtaagcaatg

SEQ ID NO: 157154 - DNA, 20 bp, Artificial Sequence
  Description of Artificial Sequence: Synthetic oligonucleotide
  Target: LAMA2; (+) strand; PAM type: NRG; PAM sequence: AAG
aagcaatgaggattgcctac

SEQ ID NO: 157155 - DNA, 20 bp, Artificial Sequence
  Description of Artificial Sequence: Synthetic oligonucleotide
  Target: LAMA2; (+) strand; PAM type: NRG; PAM sequence: AGG
agcaatgaggattgcctaca

SEQ ID NO: 157156 - DNA, 20 bp, Artificial Sequence
  Description of Artificial Sequence: Synthetic oligonucleotide
  Target: LAMA2; (+) strand; PAM type: NRG; PAM sequence: AAG
atgaggattgcctacaaggc

SEQ ID NO: 157157 - DNA, 20 bp, Artificial Sequence
  Description of Artificial Sequence: Synthetic oligonucleotide
  Target: LAMA2; (+) strand; PAM type: NRG; PAM sequence: GAG
gattgcctacaaggcaagat

SEQ ID NO: 157158 - DNA, 20 bp, Artificial Sequence
  Description of Artificial Sequence: Synthetic oligonucleotide
  Target: LAMA2; (+) strand; PAM type: NRG; PAM sequence: CAG
tattgttcctccctttgcaa

SEQ ID NO: 157159 - DNA, 20 bp, Artificial Sequence
  Description of Artificial Sequence: Synthetic oligonucleotide
  Target: LAMA2; (+) strand; PAM type: NRG; PAM sequence: AAG
tgttcctccctttgcaacag

SEQ ID NO: 157160 - DNA, 20 bp, Artificial Sequence
  Description of Artificial Sequence: Synthetic oligonucleotide
  Target: LAMA2; (+) strand; PAM type: NRG; PAM sequence: TAG
tcctccctttgcaacagaag

SEQ ID NO: 157161 - DNA, 20 bp, Artificial Sequence
  Description of Artificial Sequence: Synthetic oligonucleotide
  Target: LAMA2; (+) strand; PAM type: NRG; PAM sequence: AAG
ccctttgcaacagaagtaga

SEQ ID NO: 157162 - DNA, 20 bp, Artificial Sequence
  Description of Artificial Sequence: Synthetic oligonucleotide
  Target: LAMA2; (+) strand; PAM type: NRG; PAM sequence: AGG
cctttgcaacagaagtagaa

SEQ ID NO: 157163 - DNA, 20 bp, Artificial Sequence
  Description of Artificial Sequence: Synthetic oligonucleotide
  Target: LAMA2; (+) strand; PAM type: NRG; PAM sequence: GGG
ctttgcaacagaagtagaaa

SEQ ID NO: 157164 - DNA, 20 bp, Artificial Sequence
  Description of Artificial Sequence: Synthetic oligonucleotide
  Target: LAMA2; (+) strand; PAM type: NRG; PAM sequence: TAG
aagtagaaagggccatacca

SEQ ID NO: 157165 - DNA, 20 bp, Artificial Sequence
  Description of Artificial Sequence: Synthetic oligonucleotide
  Target: LAMA2; (+) strand; PAM type: NRG; PAM sequence: AAG
caacatgatgaatatcctta

SEQ ID NO: 157166 - DNA, 20 bp, Artificial Sequence
  Description of Artificial Sequence: Synthetic oligonucleotide
  Target: LAMA2; (+) strand; PAM type: NRG; PAM sequence: AAG
tccttaaagacaaaatcttt

SEQ ID NO: 157167 - DNA, 20 bp, Artificial Sequence
  Description of Artificial Sequence: Synthetic oligonucleotide
  Target: LAMA2; (+) strand; PAM type: NRG; PAM sequence: CAG
ttaaagacaaaatctttaag

SEQ ID NO: 157168 - DNA, 20 bp, Artificial Sequence
  Description of Artificial Sequence: Synthetic oligonucleotide
  Target: LAMA2; (+) strand; PAM type: NRG; PAM sequence: AAG
agacaaaatctttaagcagt

SEQ ID NO: 157169 - DNA, 20 bp, Artificial Sequence
  Description of Artificial Sequence: Synthetic oligonucleotide
  Target: LAMA2; (+) strand; PAM type: NRG; PAM sequence: AAG
aatctttaagcagtaagtga

SEQ ID NO: 157170 - DNA, 20 bp, Artificial Sequence
  Description of Artificial Sequence: Synthetic oligonucleotide
  Target: LAMA2; (+) strand; PAM type: NRG; PAM sequence: AGG
atctttaagcagtaagtgaa

SEQ ID NO: 157171 - DNA, 20 bp, Artificial Sequence
  Description of Artificial Sequence: Synthetic oligonucleotide
  Target: LAMA2; (+) strand; PAM type: NRG; PAM sequence: AAG
aactacaattctcatttaaa

SEQ ID NO: 157172 - DNA, 20 bp, Artificial Sequence
  Description of Artificial Sequence: Synthetic oligonucleotide
  Target: LAMA2; (+) strand; PAM type: NRG; PAM sequence: AAG
ttgttacataaattttccac

SEQ ID NO: 157173 - DNA, 20 bp, Artificial Sequence
  Description of Artificial Sequence: Synthetic oligonucleotide
  Target: LAMA2; (+) strand; PAM type: NRG; PAM sequence: AGG
tgttacataaattttccaca

SEQ ID NO: 157174 - DNA, 20 bp, Artificial Sequence
  Description of Artificial Sequence: Synthetic oligonucleotide
  Target: LAMA2; (+) strand; PAM type: NRG; PAM sequence: TAG
atttgttatctatttgacaa

SEQ ID NO: 157175 - DNA, 20 bp, Artificial Sequence
  Description of Artificial Sequence: Synthetic oligonucleotide
  Target: LAMA2; (+) strand; PAM type: NRG; PAM sequence: AAG
gttatctatttgacaatagc

SEQ ID NO: 157176 - DNA, 20 bp, Artificial Sequence
  Description of Artificial Sequence: Synthetic oligonucleotide
  Target: LAMA2; (+) strand; PAM type: NRG; PAM sequence: TAG
atagcaagcctgtttctctt

SEQ ID NO: 157177 - DNA, 20 bp, Artificial Sequence
  Description of Artificial Sequence: Synthetic oligonucleotide
  Target: LAMA2; (+) strand; PAM type: NRG; PAM sequence: AAG
gcctgtttctctttagctta

SEQ ID NO: 157178 - DNA, 20 bp, Artificial Sequence
  Description of Artificial Sequence: Synthetic oligonucleotide
  Target: LAMA2; (+) strand; PAM type: NRG; PAM sequence: AGG
cctgtttctctttagcttaa

SEQ ID NO: 157179 - DNA, 20 bp, Artificial Sequence
  Description of Artificial Sequence: Synthetic oligonucleotide
  Target: LAMA2; (+) strand; PAM type: NRG; PAM sequence: TGG
ctctttagcttaaaggaact

SEQ ID NO: 157180 - DNA, 20 bp, Artificial Sequence
  Description of Artificial Sequence: Synthetic oligonucleotide
  Target: LAMA2; (+) strand; PAM type: NRG; PAM sequence: CAG
attttttctgttattttaat

SEQ ID NO: 157181 - DNA, 20 bp, Artificial Sequence
  Description of Artificial Sequence: Synthetic oligonucleotide
  Target: LAMA2; (+) strand; PAM type: NRG; PAM sequence: GAG
gcattgatgttgtatattat

SEQ ID NO: 157182 - DNA, 20 bp, Artificial Sequence
  Description of Artificial Sequence: Synthetic oligonucleotide
  Target: LAMA2; (+) strand; PAM type: NRG; PAM sequence: TGG
tgttgtatattatgagcgtg

SEQ ID NO: 157183 - DNA, 20 bp, Artificial Sequence
  Description of Artificial Sequence: Synthetic oligonucleotide
  Target: LAMA2; (+) strand; PAM type: NRG; PAM sequence: TGG
cgtgtggctttttgttttct

SEQ ID NO: 157184 - DNA, 20 bp, Artificial Sequence
  Description of Artificial Sequence: Synthetic oligonucleotide
  Target: LAMA2; (+) strand; PAM type: NRG; PAM sequence: CAG
gtggctttttgttttcttgg

SEQ ID NO: 157185 - DNA, 20 bp, Artificial Sequence
  Description of Artificial Sequence: Synthetic oligonucleotide
  Target: LAMA2; (+) strand; PAM type: NRG; PAM sequence: GAG
ggctttttgttttcttggca

SEQ ID NO: 157186 - DNA, 20 bp, Artificial Sequence
  Description of Artificial Sequence: Synthetic oligonucleotide
  Target: LAMA2; (+) strand; PAM type: NRG; PAM sequence: TAG
cttgaaaaaattttgaaccc

SEQ ID NO: 157187 - DNA, 20 bp, Artificial Sequence
  Description of Artificial Sequence: Synthetic oligonucleotide
  Target: LAMA2; (+) strand; PAM type: NRG; PAM sequence: AAG
aattttgaaccctagtcaat

SEQ ID NO: 157188 - DNA, 20 bp, Artificial Sequence
  Description of Artificial Sequence: Synthetic oligonucleotide
  Target: LAMA2; (+) strand; PAM type: NRG; PAM sequence: TGG
taatataaaactataactta

SEQ ID NO: 157189 - DNA, 20 bp, Artificial Sequence
  Description of Artificial Sequence: Synthetic oligonucleotide
  Target: LAMA2; (+) strand; PAM type: NRG; PAM sequence: TAG
taacttatggtttatttgat

SEQ ID NO: 157190 - DNA, 20 bp, Artificial Sequence
  Description of Artificial Sequence: Synthetic oligonucleotide
  Target: LAMA2; (+) strand; PAM type: NRG; PAM sequence: TGG
attagatcaatgtttaatta

SEQ ID NO: 157191 - DNA, 20 bp, Artificial Sequence
  Description of Artificial Sequence: Synthetic oligonucleotide
  Target: LAMA2; (+) strand; PAM type: NRG; PAM sequence: TAG
tatttacacacaaattaatc

SEQ ID NO: 157192 - DNA, 20 bp, Artificial Sequence
  Description of Artificial Sequence: Synthetic oligonucleotide
  Target: LAMA2; (+) strand; PAM type: NRG; PAM sequence: TAG
acacaaattaatctagccca

SEQ ID NO: 157193 - DNA, 20 bp, Artificial Sequence
  Description of Artificial Sequence: Synthetic oligonucleotide
  Target: LAMA2; (+) strand; PAM type: NRG; PAM sequence: AAG
attaatctagcccatagtaa

SEQ ID NO: 157194 - DNA, 20 bp, Artificial Sequence
  Description of Artificial Sequence: Synthetic oligonucleotide
  Target: LAMA2; (+) strand; PAM type: NRG; PAM sequence: TGG
gcccatagtaaaagtgctaa

SEQ ID NO: 157195 - DNA, 20 bp, Artificial Sequence
  Description of Artificial Sequence: Synthetic oligonucleotide
  Target: LAMA2; (+) strand; PAM type: NRG; PAM sequence: AAG
ggaatgtttcatccaaacat

SEQ ID NO: 157196 - DNA, 20 bp, Artificial Sequence
  Description of Artificial Sequence: Synthetic oligonucleotide
  Target: LAMA2; (+) strand; PAM type: NRG; PAM sequence: TAG
tgtttcatccaaacataagt

SEQ ID NO: 157197 - DNA, 20 bp, Artificial Sequence
  Description of Artificial Sequence: Synthetic oligonucleotide
  Target: LAMA2; (+) strand; PAM type: NRG; PAM sequence: TGG
tccaaacataagttagtaaa

SEQ ID NO: 157198 - DNA, 20 bp, Artificial Sequence
  Description of Artificial Sequence: Synthetic oligonucleotide
  Target: LAMA2; (+) strand; PAM type: NRG; PAM sequence: CAG
gttagtaaatggaaaacaaa

SEQ ID NO: 157199 - DNA, 20 bp, Artificial Sequence
  Description of Artificial Sequence: Synthetic oligonucleotide
  Target: LAMA2; (+) strand; PAM type: NRG; PAM sequence: AAG
gaaaacaaacagctgttgca

SEQ ID NO: 157200 - DNA, 20 bp, Artificial Sequence
  Description of Artificial Sequence: Synthetic oligonucleotide
  Target: LAMA2; (+) strand; PAM type: NRG; PAM sequence: TGG
tgttgcaaagaccctgtttt

SEQ ID NO: 157201 - DNA, 20 bp, Artificial Sequence
  Description of Artificial Sequence: Synthetic oligonucleotide
  Target: LAMA2; (+) strand; PAM type: NRG; PAM sequence: GGG
gttgcaaagaccctgttttt

SEQ ID NO: 157202 - DNA, 20 bp, Artificial Sequence
  Description of Artificial Sequence: Synthetic oligonucleotide
  Target: LAMA2; (+) strand; PAM type: NRG; PAM sequence: TGG
aaagaccctgtttttgggtc

SEQ ID NO: 157203 - DNA, 20 bp, Artificial Sequence
  Description of Artificial Sequence: Synthetic oligonucleotide
  Target: LAMA2; (+) strand; PAM type: NRG; PAM sequence: GGG
aagaccctgtttttgggtct

SEQ ID NO: 157204 - DNA, 20 bp, Artificial Sequence
  Description of Artificial Sequence: Synthetic oligonucleotide
  Target: LAMA2; (+) strand; PAM type: NRG; PAM sequence: CAG
gtttttgggtctgggcctaa

SEQ ID NO: 157205 - DNA, 20 bp, Artificial Sequence
  Description of Artificial Sequence: Synthetic oligonucleotide
  Target: LAMA2; (+) strand; PAM type: NRG; PAM sequence: AAG
ggtctgggcctaacagcacg

SEQ ID NO: 157206 - DNA, 20 bp, Artificial Sequence
  Description of Artificial Sequence: Synthetic oligonucleotide
  Target: LAMA2; (+) strand; PAM type: NRG; PAM sequence: CAG
cctaacagcacgaagcactt

SEQ ID NO: 157207 - DNA, 20 bp, Artificial Sequence
  Description of Artificial Sequence: Synthetic oligonucleotide
  Target: LAMA2; (+) strand; PAM type: NRG; PAM sequence: GAG
taacagcacgaagcacttca

SEQ ID NO: 157208 - DNA, 20 bp, Artificial Sequence
  Description of Artificial Sequence: Synthetic oligonucleotide
  Target: LAMA2; (+) strand; PAM type: NRG; PAM sequence: GAG
accatttactcacatctgtt

SEQ ID NO: 157209 - DNA, 20 bp, Artificial Sequence
  Description of Artificial Sequence: Synthetic oligonucleotide
  Target: LAMA2; (+) strand; PAM type: NRG; PAM sequence: AAG
agattgtactatttcaactc

SEQ ID NO: 157210 - DNA, 20 bp, Artificial Sequence
  Description of Artificial Sequence: Synthetic oligonucleotide
  Target: LAMA2; (+) strand; PAM type: NRG; PAM sequence: CAG
atttcaactcaagatttgat

SEQ ID NO: 157211 - DNA, 20 bp, Artificial Sequence
  Description of Artificial Sequence: Synthetic oligonucleotide
  Target: LAMA2; (+) strand; PAM type: NRG; PAM sequence: AAG
tttgatcagtgtatgtcata

SEQ ID NO: 157212 - DNA, 20 bp, Artificial Sequence
  Description of Artificial Sequence: Synthetic oligonucleotide
  Target: LAMA2; (+) strand; PAM type: NRG; PAM sequence: AAG
agtgtatgtcataaagtaac

SEQ ID NO: 157213 - DNA, 20 bp, Artificial Sequence
  Description of Artificial Sequence: Synthetic oligonucleotide
  Target: LAMA2; (+) strand; PAM type: NRG; PAM sequence: TAG
gtatgtcataaagtaacaag

SEQ ID NO: 157214 - DNA, 20 bp, Artificial Sequence
  Description of Artificial Sequence: Synthetic oligonucleotide
  Target: LAMA2; (+) strand; PAM type: NRG; PAM sequence: AAG
aaagtaacaagtagtacgct

SEQ ID NO: 157215 - DNA, 20 bp, Artificial Sequence
  Description of Artificial Sequence: Synthetic oligonucleotide
  Target: LAMA2; (+) strand; PAM type: NRG; PAM sequence: CAG
taacaagtagtacgctaagt

SEQ ID NO: 157216 - DNA, 20 bp, Artificial Sequence
  Description of Artificial Sequence: Synthetic oligonucleotide
  Target: LAMA2; (+) strand; PAM type: NRG; PAM sequence: AAG
acgctaagtcagaaaactta

SEQ ID NO: 157217 - DNA, 20 bp, Artificial Sequence
  Description of Artificial Sequence: Synthetic oligonucleotide
  Target: LAMA2; (+) strand; PAM type: NRG; PAM sequence: AGG
cgctaagtcagaaaacttaa

SEQ ID NO: 157218 - DNA, 20 bp, Artificial Sequence
  Description of Artificial Sequence: Synthetic oligonucleotide
  Target: LAMA2; (+) strand; PAM type: NRG; PAM sequence: TGG
ttaaatactcatttcctata

SEQ ID NO: 157219 - DNA, 20 bp, Artificial Sequence
  Description of Artificial Sequence: Synthetic oligonucleotide
  Target: LAMA2; (+) strand; PAM type: NRG; PAM sequence: AAG
atatggaatgttgcctttct

SEQ ID NO: 157220 - DNA, 20 bp, Artificial Sequence
  Description of Artificial Sequence: Synthetic oligonucleotide
  Target: LAMA2; (+) strand; PAM type: NRG; PAM sequence: TAG
atgttttgcaaatctattca

SEQ ID NO: 157221 - DNA, 20 bp, Artificial Sequence
  Description of Artificial Sequence: Synthetic oligonucleotide
  Target: LAMA2; (+) strand; PAM type: NRG; PAM sequence: AGG
tgttttgcaaatctattcat

SEQ ID NO: 157222 - DNA, 20 bp, Artificial Sequence
  Description of Artificial Sequence: Synthetic oligonucleotide
  Target: LAMA2; (+) strand; PAM type: NRG; PAM sequence: GAG
ttttgcaaatctattcatag

SEQ ID NO: 157223 - DNA, 20 bp, Artificial Sequence
  Description of Artificial Sequence: Synthetic oligonucleotide
  Target: LAMA2; (+) strand; PAM type: NRG; PAM sequence: AAG
cataggagatttatattttc

SEQ ID NO: 157224 - DNA, 20 bp, Artificial Sequence
  Description of Artificial Sequence: Synthetic oligonucleotide
  Target: LAMA2; (+) strand; PAM type: NRG; PAM sequence: TGG
tattttcaagtgtgctcaaa

SEQ ID NO: 157225 - DNA, 20 bp, Artificial Sequence
  Description of Artificial Sequence: Synthetic oligonucleotide
  Target: LAMA2; (+) strand; PAM type: NRG; PAM sequence: TGG
gtgctcaaatggatctgtgt

SEQ ID NO: 157226 - DNA, 20 bp, Artificial Sequence
  Description of Artificial Sequence: Synthetic oligonucleotide
  Target: LAMA2; (+) strand; PAM type: NRG; PAM sequence: GGG
tgctcaaatggatctgtgtt

SEQ ID NO: 157227 - DNA, 20 bp, Artificial Sequence
  Description of Artificial Sequence: Synthetic oligonucleotide
  Target: LAMA2; (+) strand; PAM type: NRG; PAM sequence: GGG
gctcaaatggatctgtgttg

SEQ ID NO: 157228 - DNA, 20 bp, Artificial Sequence
  Description of Artificial Sequence: Synthetic oligonucleotide
  Target: LAMA2; (+) strand; PAM type: NRG; PAM sequence: AAG
aaatggatctgtgttgggga

SEQ ID NO: 157229 - DNA, 20 bp, Artificial Sequence
  Description of Artificial Sequence: Synthetic oligonucleotide
  Target: LAMA2; (+) strand; PAM type: NRG; PAM sequence: AAG
tggggaaagatacgtgaaat

SEQ ID NO: 157230 - DNA, 20 bp, Artificial Sequence
  Description of Artificial Sequence: Synthetic oligonucleotide
  Target: LAMA2; (+) strand; PAM type: NRG; PAM sequence: AAG
tacgtgaaataagaaaataa

SEQ ID NO: 157231 - DNA, 20 bp, Artificial Sequence
  Description of Artificial Sequence: Synthetic oligonucleotide
  Target: LAMA2; (+) strand; PAM type: NRG; PAM sequence: TGG
gtctgcctaccacattttgt

SEQ ID NO: 157232 - DNA, 20 bp, Artificial Sequence
  Description of Artificial Sequence: Synthetic oligonucleotide
  Target: LAMA2; (+) strand; PAM type: NRG; PAM sequence: GAG
tgttggacttcttgttatat

SEQ ID NO: 157233 - DNA, 20 bp, Artificial Sequence
  Description of Artificial Sequence: Synthetic oligonucleotide
  Target: LAMA2; (+) strand; PAM type: NRG; PAM sequence: TGG
tatgagaactcctaattgtc

SEQ ID NO: 157234 - DNA, 20 bp, Artificial Sequence
  Description of Artificial Sequence: Synthetic oligonucleotide
  Target: LAMA2; (+) strand; PAM type: NRG; PAM sequence: CAG
aattgtctggttttcaattg

SEQ ID NO: 157235 - DNA, 20 bp, Artificial Sequence
  Description of Artificial Sequence: Synthetic oligonucleotide
  Target: LAMA2; (+) strand; PAM type: NRG; PAM sequence: AAG
tggttttcaattgcagccaa

SEQ ID NO: 157236 - DNA, 20 bp, Artificial Sequence
  Description of Artificial Sequence: Synthetic oligonucleotide
  Target: LAMA2; (+) strand; PAM type: NRG; PAM sequence: TAG
attctatttactttgaatta

SEQ ID NO: 157237 - DNA, 20 bp, Artificial Sequence
  Description of Artificial Sequence: Synthetic oligonucleotide
  Target: LAMA2; (+) strand; PAM type: NRG; PAM sequence: GAG
atttactttgaattatagct

SEQ ID NO: 157238 - DNA, 20 bp, Artificial Sequence
  Description of Artificial Sequence: Synthetic oligonucleotide
  Target: LAMA2; (+) strand; PAM type: NRG; PAM sequence: TGG
ttgaattatagctgagtaca

SEQ ID NO: 157239 - DNA, 20 bp, Artificial Sequence
  Description of Artificial Sequence: Synthetic oligonucleotide
  Target: LAMA2; (+) strand; PAM type: NRG; PAM sequence: AAG
attatagctgagtacatgga

SEQ ID NO: 157240 - DNA, 20 bp, Artificial Sequence
  Description of Artificial Sequence: Synthetic oligonucleotide
  Target: LAMA2; (+) strand; PAM type: NRG; PAM sequence: TGG
gagtacatggaaagtataat

SEQ ID NO: 157241 - DNA, 20 bp, Artificial Sequence
  Description of Artificial Sequence: Synthetic oligonucleotide
  Target: LAMA2; (+) strand; PAM type: NRG; PAM sequence: GGG
agtacatggaaagtataatt

SEQ ID NO: 157242 - DNA, 20 bp, Artificial Sequence
  Description of Artificial Sequence: Synthetic oligonucleotide
  Target: LAMA2; (+) strand; PAM type: NRG; PAM sequence: CAG
ttgggccttactttgttaca

SEQ ID NO: 157243 - DNA, 20 bp, Artificial Sequence
  Description of Artificial Sequence: Synthetic oligonucleotide
  Target: LAMA2; (+) strand; PAM type: NRG; PAM sequence: CAG
ggccttactttgttacacag

SEQ ID NO: 157244 - DNA, 20 bp, Artificial Sequence
  Description of Artificial Sequence: Synthetic oligonucleotide
  Target: LAMA2; (+) strand; PAM type: NRG; PAM sequence: AAG
agcagacaaaacatatgctc

SEQ ID NO: 157245 - DNA, 20 bp, Artificial Sequence
  Description of Artificial Sequence: Synthetic oligonucleotide
  Target: LAMA2; (+) strand; PAM type: NRG; PAM sequence: TAG
gacaaaacatatgctcaaga

SEQ ID NO: 157246 - DNA, 20 bp, Artificial Sequence
  Description of Artificial Sequence: Synthetic oligonucleotide
  Target: LAMA2; (+) strand; PAM type: NRG; PAM sequence: AGG
acaaaacatatgctcaagat

SEQ ID NO: 157247 - DNA, 20 bp, Artificial Sequence
  Description of Artificial Sequence: Synthetic oligonucleotide
  Target: LAMA2; (+) strand; PAM type: NRG; PAM sequence: CAG
aacatatgctcaagataggt

SEQ ID NO: 157248 - DNA, 20 bp, Artificial Sequence
  Description of Artificial Sequence: Synthetic oligonucleotide
  Target: LAMA2; (+) strand; PAM type: NRG; PAM sequence: CAG
aagataggtcagtgctattc

SEQ ID NO: 157249 - DNA, 20 bp, Artificial Sequence
  Description of Artificial Sequence: Synthetic oligonucleotide
  Target: LAMA2; (+) strand; PAM type: NRG; PAM sequence: GAG
attttaacaaaaatttgtat

SEQ ID NO: 157250 - DNA, 20 bp, Artificial Sequence
  Description of Artificial Sequence: Synthetic oligonucleotide
  Target: LAMA2; (+) strand; PAM type: NRG; PAM sequence: TGG
tttgtatgagaaattcatgt

SEQ ID NO: 157251 - DNA, 20 bp, Artificial Sequence
  Description of Artificial Sequence: Synthetic oligonucleotide
  Target: LAMA2; (+) strand; PAM type: NRG; PAM sequence: CAG
tcctctctatatgcctttca

SEQ ID NO: 157252 - DNA, 20 bp, Artificial Sequence
  Description of Artificial Sequence: Synthetic oligonucleotide
  Target: LAMA2; (+) strand; PAM type: NRG; PAM sequence: TGG
acactataatgaatatctct

SEQ ID NO: 157253 - DNA, 20 bp, Artificial Sequence
  Description of Artificial Sequence: Synthetic oligonucleotide
  Target: LAMA2; (+) strand; PAM type: NRG; PAM sequence: AAG
tatctcttggccttaacgat

SEQ ID NO: 157254 - DNA, 20 bp, Artificial Sequence
  Description of Artificial Sequence: Synthetic oligonucleotide
  Target: LAMA2; (+) strand; PAM type: NRG; PAM sequence: TAG
cactgtatataaatattgtc

SEQ ID NO: 157255 - DNA, 20 bp, Artificial Sequence
  Description of Artificial Sequence: Synthetic oligonucleotide
  Target: LAMA2; (+) strand; PAM type: NRG; PAM sequence: AGG
actgtatataaatattgtct

SEQ ID NO: 157256 - DNA, 20 bp, Artificial Sequence
  Description of Artificial Sequence: Synthetic oligonucleotide
  Target: LAMA2; (+) strand; PAM type: NRG; PAM sequence: GAG
ttgtctaggctgtattttat

SEQ ID NO: 157257 - DNA, 20 bp, Artificial Sequence
  Description of Artificial Sequence: Synthetic oligonucleotide
  Target: LAMA2; (+) strand; PAM type: NRG; PAM sequence: TGG
ggctgtattttatgagaatg

SEQ ID NO: 157258 - DNA, 20 bp, Artificial Sequence
  Description of Artificial Sequence: Synthetic oligonucleotide
  Target: LAMA2; (+) strand; PAM type: NRG; PAM sequence: GAG
ctgtattttatgagaatgtg

SEQ ID NO: 157259 - DNA, 20 bp, Artificial Sequence
  Description of Artificial Sequence: Synthetic oligonucleotide
  Target: LAMA2; (+) strand; PAM type: NRG; PAM sequence: TAG
atgtggagttatatgaaatg

SEQ ID NO: 157260 - DNA, 20 bp, Artificial Sequence
  Description of Artificial Sequence: Synthetic oligonucleotide
  Target: LAMA2; (+) strand; PAM type: NRG; PAM sequence: AGG
tgtggagttatatgaaatgt

SEQ ID NO: 157261 - DNA, 20 bp, Artificial Sequence
  Description of Artificial Sequence: Synthetic oligonucleotide
  Target: LAMA2; (+) strand; PAM type: NRG; PAM sequence: AAG
ggagttatatgaaatgtagg

SEQ ID NO: 157262 - DNA, 20 bp, Artificial Sequence
  Description of Artificial Sequence: Synthetic oligonucleotide
  Target: LAMA2; (+) strand; PAM type: NRG; PAM sequence: GAG
aatgtaggaagaaaaaatat

SEQ ID NO: 157263 - DNA, 20 bp, Artificial Sequence
  Description of Artificial Sequence: Synthetic oligonucleotide
  Target: LAMA2; (+) strand; PAM type: NRG; PAM sequence: GAG
taggaagaaaaaatatgagt

SEQ ID NO: 157264 - DNA, 20 bp, Artificial Sequence
  Description of Artificial Sequence: Synthetic oligonucleotide
  Target: LAMA2; (+) strand; PAM type: NRG; PAM sequence: GAG
atatgagtgagtaatcctgt

SEQ ID NO: 157265 - DNA, 20 bp, Artificial Sequence
  Description of Artificial Sequence: Synthetic oligonucleotide
  Target: LAMA2; (+) strand; PAM type: NRG; PAM sequence: CAG
tgagtgagtaatcctgtgag

SEQ ID NO: 157266 - DNA, 20 bp, Artificial Sequence
  Description of Artificial Sequence: Synthetic oligonucleotide
  Target: LAMA2; (+) strand; PAM type: NRG; PAM sequence: TGG
gtgagtaatcctgtgagcag

SEQ ID NO: 157267 - DNA, 20 bp, Artificial Sequence
  Description of Artificial Sequence: Synthetic oligonucleotide
  Target: LAMA2; (+) strand; PAM type: NRG; PAM sequence: CGG
gtaatcctgtgagcagtgga

SEQ ID NO: 157268 - DNA, 20 bp, Artificial Sequence
  Description of Artificial Sequence: Synthetic oligonucleotide
  Target: LAMA2; (+) strand; PAM type: NRG; PAM sequence: GGG
taatcctgtgagcagtggac

SEQ ID NO: 157269 - DNA, 20 bp, Artificial Sequence
  Description of Artificial Sequence: Synthetic oligonucleotide
  Target: LAMA2; (+) strand; PAM type: NRG; PAM sequence: GAG
ctgtgagcagtggacgggct

SEQ ID NO: 157270 - DNA, 20 bp, Artificial Sequence
  Description of Artificial Sequence: Synthetic oligonucleotide
  Target: LAMA2; (+) strand; PAM type: NRG; PAM sequence: TAG
cagtggacgggctgagcttc

SEQ ID NO: 157271 - DNA, 20 bp, Artificial Sequence
  Description of Artificial Sequence: Synthetic oligonucleotide
  Target: LAMA2; (+) strand; PAM type: NRG; PAM sequence: AGG
agtggacgggctgagcttct

SEQ ID NO: 157272 - DNA, 20 bp, Artificial Sequence
  Description of Artificial Sequence: Synthetic oligonucleotide
  Target: LAMA2; (+) strand; PAM type: NRG; PAM sequence: AAG
tgagcttctaggacactgat

SEQ ID NO: 157273 - DNA, 20 bp, Artificial Sequence
  Description of Artificial Sequence: Synthetic oligonucleotide
  Target: LAMA2; (+) strand; PAM type: NRG; PAM sequence: CAG
ctaggacactgataagcaat

SEQ ID NO: 157274 - DNA, 20 bp, Artificial Sequence
  Description of Artificial Sequence: Synthetic oligonucleotide
  Target: LAMA2; (+) strand; PAM type: NRG; PAM sequence: TAG
cactgataagcaatcagtgt

SEQ ID NO: 157275 - DNA, 20 bp, Artificial Sequence
  Description of Artificial Sequence: Synthetic oligonucleotide
  Target: LAMA2; (+) strand; PAM type: NRG; PAM sequence: GAG
aatcagtgttagttacactt

SEQ ID NO: 157276 - DNA, 20 bp, Artificial Sequence
  Description of Artificial Sequence: Synthetic oligonucleotide
  Target: LAMA2; (+) strand; PAM type: NRG; PAM sequence: AGG
atcagtgttagttacacttg

SEQ ID NO: 157277 - DNA, 20 bp, Artificial Sequence
  Description of Artificial Sequence: Synthetic oligonucleotide
  Target: LAMA2; (+) strand; PAM type: NRG; PAM sequence: CAG
agtgttagttacacttgagg

SEQ ID NO: 157278 - DNA, 20 bp, Artificial Sequence
  Description of Artificial Sequence: Synthetic oligonucleotide
  Target: LAMA2; (+) strand; PAM type: NRG; PAM sequence: TGG
tacacttgaggcagtatctc

SEQ ID NO: 157279 - DNA, 20 bp, Artificial Sequence
  Description of Artificial Sequence: Synthetic oligonucleotide
  Target: LAMA2; (+) strand; PAM type: NRG; PAM sequence: TGG
acttgaggcagtatctctgg

SEQ ID NO: 157280 - DNA, 20 bp, Artificial Sequence
  Description of Artificial Sequence: Synthetic oligonucleotide
  Target: LAMA2; (+) strand; PAM type: NRG; PAM sequence: CAG
gtatctctggtggtctgttc

SEQ ID NO: 157281 - DNA, 20 bp, Artificial Sequence
  Description of Artificial Sequence: Synthetic oligonucleotide
  Target: LAMA2; (+) strand; PAM type: NRG; PAM sequence: TAG
ctttttatacttctgcaatt

SEQ ID NO: 157282 - DNA, 20 bp, Artificial Sequence
  Description of Artificial Sequence: Synthetic oligonucleotide
  Target: LAMA2; (+) strand; PAM type: NRG; PAM sequence: AGG
tttttatacttctgcaattt

SEQ ID NO: 157283 - DNA, 20 bp, Artificial Sequence
  Description of Artificial Sequence: Synthetic oligonucleotide
  Target: LAMA2; (+) strand; PAM type: NRG; PAM sequence: CAG
gcaatttaggtcacccaata

SEQ ID NO: 157284 - DNA, 20 bp, Artificial Sequence
  Description of Artificial Sequence: Synthetic oligonucleotide
  Target: LAMA2; (+) strand; PAM type: NRG; PAM sequence: AGG
caatttaggtcacccaatac

SEQ ID NO: 157285 - DNA, 20 bp, Artificial Sequence
  Description of Artificial Sequence: Synthetic oligonucleotide
  Target: LAMA2; (+) strand; PAM type: NRG; PAM sequence: CAG
cccaatacaggttatcttat

SEQ ID NO: 157286 - DNA, 20 bp, Artificial Sequence
  Description of Artificial Sequence: Synthetic oligonucleotide
  Target: LAMA2; (+) strand; PAM type: NRG; PAM sequence: AGG
ccaatacaggttatcttatc

SEQ ID NO: 157287 - DNA, 20 bp, Artificial Sequence
  Description of Artificial Sequence: Synthetic oligonucleotide
  Target: LAMA2; (+) strand; PAM type: NRG; PAM sequence: TAG
ttatcaggttaaactgattg

SEQ ID NO: 157288 - DNA, 20 bp, Artificial Sequence
  Description of Artificial Sequence: Synthetic oligonucleotide
  Target: LAMA2; (+) strand; PAM type: NRG; PAM sequence: TGG
tcaggttaaactgattgtag

SEQ ID NO: 157289 - DNA, 20 bp, Artificial Sequence
  Description of Artificial Sequence: Synthetic oligonucleotide
  Target: LAMA2; (+) strand; PAM type: NRG; PAM sequence: AAG
ttgtagtggtcacattgaaa

SEQ ID NO: 157290 - DNA, 20 bp, Artificial Sequence
  Description of Artificial Sequence: Synthetic oligonucleotide
  Target: LAMA2; (+) strand; PAM type: NRG; PAM sequence: CAG
gaaaaaaaaaatcccaaatt

SEQ ID NO: 157291 - DNA, 20 bp, Artificial Sequence
  Description of Artificial Sequence: Synthetic oligonucleotide
  Target: LAMA2; (+) strand; PAM type: NRG; PAM sequence: AGG
aaaaaaaaaatcccaaattc

SEQ ID NO: 157292 - DNA, 20 bp, Artificial Sequence
  Description of Artificial Sequence: Synthetic oligonucleotide
  Target: LAMA2; (+) strand; PAM type: NRG; PAM sequence: CAG
aattcaggacttttcccaac

SEQ ID NO: 157293 - DNA, 20 bp, Artificial Sequence
  Description of Artificial Sequence: Synthetic oligonucleotide
  Target: LAMA2; (+) strand; PAM type: NRG; PAM sequence: AAG
tctaattaatgcacgtgtga

SEQ ID NO: 157294 - DNA, 20 bp, Artificial Sequence
  Description of Artificial Sequence: Synthetic oligonucleotide
  Target: LAMA2; (+) strand; PAM type: NRG; PAM sequence: AGG
ctaattaatgcacgtgtgaa

SEQ ID NO: 157295 - DNA, 20 bp, Artificial Sequence
  Description of Artificial Sequence: Synthetic oligonucleotide
  Target: LAMA2; (+) strand; PAM type: NRG; PAM sequence: TAG
aatgcacgtgtgaaaggaca

SEQ ID NO: 157296 - DNA, 20 bp, Artificial Sequence
  Description of Artificial Sequence: Synthetic oligonucleotide
  Target: LAMA2; (+) strand; PAM type: NRG; PAM sequence: AAG
aaggacatagttattgtgaa

SEQ ID NO: 157297 - DNA, 20 bp, Artificial Sequence
  Description of Artificial Sequence: Synthetic oligonucleotide
  Target: LAMA2; (+) strand; PAM type: NRG; PAM sequence: CAG
gaaaagaaatgctatcaaaa

SEQ ID NO: 157298 - DNA, 20 bp, Artificial Sequence
  Description of Artificial Sequence: Synthetic oligonucleotide
  Target: LAMA2; (+) strand; PAM type: NRG; PAM sequence: TGG
atgctatcaaaacagtctaa

SEQ ID NO: 157299 - DNA, 20 bp, Artificial Sequence
  Description of Artificial Sequence: Synthetic oligonucleotide
  Target: LAMA2; (+) strand; PAM type: NRG; PAM sequence: AAG
caaaacagtctaatggctac

SEQ ID NO: 157300 - DNA, 20 bp, Artificial Sequence
  Description of Artificial Sequence: Synthetic oligonucleotide
  Target: LAMA2; (+) strand; PAM type: NRG; PAM sequence: AAG
aacagtctaatggctacaag

SEQ ID NO: 157301 - DNA, 20 bp, Artificial Sequence
  Description of Artificial Sequence: Synthetic oligonucleotide
  Target: LAMA2; (+) strand; PAM type: NRG; PAM sequence: AAG
ctaatggctacaagaagaaa

SEQ ID NO: 157302 - DNA, 20 bp, Artificial Sequence
  Description of Artificial Sequence: Synthetic oligonucleotide
  Target: LAMA2; (+) strand; PAM type: NRG; PAM sequence: AAG
ggctacaagaagaaaaagaa

SEQ ID NO: 157303 - DNA, 20 bp, Artificial Sequence
  Description of Artificial Sequence: Synthetic oligonucleotide
  Target: LAMA2; (+) strand; PAM type: NRG; PAM sequence: AAG
tacaagaagaaaaagaaaag

SEQ ID NO: 157304 - DNA, 20 bp, Artificial Sequence
  Description of Artificial Sequence: Synthetic oligonucleotide
  Target: LAMA2; (+) strand; PAM type: NRG; PAM sequence: AAG
aagaagaaaaagaaaagaag

SEQ ID NO: 157305 - DNA, 20 bp, Artificial Sequence
  Description of Artificial Sequence: Synthetic oligonucleotide
  Target: LAMA2; (+) strand; PAM type: NRG; PAM sequence: AAG
aagaaaaagaaaagaagaag

SEQ ID NO: 157306 - DNA, 20 bp, Artificial Sequence
  Description of Artificial Sequence: Synthetic oligonucleotide
  Target: LAMA2; (+) strand; PAM type: NRG; PAM sequence: AAG
aaaaagaaaagaagaagaag

SEQ ID NO: 157307 - DNA, 20 bp, Artificial Sequence
  Description of Artificial Sequence: Synthetic oligonucleotide
  Target: LAMA2; (+) strand; PAM type: NRG; PAM sequence: AGG
aaaagaaaagaagaagaaga

SEQ ID NO: 157308 - DNA, 20 bp, Artificial Sequence
  Description of Artificial Sequence: Synthetic oligonucleotide
  Target: LAMA2; (+) strand; PAM type: NRG; PAM sequence: GAG
aagaaaagaagaagaagaag

SEQ ID NO: 157309 - DNA, 20 bp, Artificial Sequence
  Description of Artificial Sequence: Synthetic oligonucleotide
  Target: LAMA2; (+) strand; PAM type: NRG; PAM sequence: AGG
agaaaagaagaagaagaagg

SEQ ID NO: 157310 - DNA, 20 bp, Artificial Sequence
  Description of Artificial Sequence: Synthetic oligonucleotide
  Target: LAMA2; (+) strand; PAM type: NRG; PAM sequence: GAG
aaaagaagaagaagaaggag

SEQ ID NO: 157311 - DNA, 20 bp, Artificial Sequence
  Description of Artificial Sequence: Synthetic oligonucleotide
  Target: LAMA2; (+) strand; PAM type: NRG; PAM sequence: AGG
aaagaagaagaagaaggagg

SEQ ID NO: 157312 - DNA, 20 bp, Artificial Sequence
  Description of Artificial Sequence: Synthetic oligonucleotide
  Target: LAMA2; (+) strand; PAM type: NRG; PAM sequence: AAG
gaagaagaagaaggaggagg

SEQ ID NO: 157313 - DNA, 20 bp, Artificial Sequence
  Description of Artificial Sequence: Synthetic oligonucleotide
  Target: LAMA2; (+) strand; PAM type: NRG; PAM sequence: GAG
agaagaagaaggaggaggaa

SEQ ID NO: 157314 - DNA, 20 bp, Artificial Sequence
  Description of Artificial Sequence: Synthetic oligonucleotide
  Target: LAMA2; (+) strand; PAM type: NRG; PAM sequence: AGG
gaagaagaaggaggaggaag

SEQ ID NO: 157315 - DNA, 20 bp, Artificial Sequence
  Description of Artificial Sequence: Synthetic oligonucleotide
  Target: LAMA2; (+) strand; PAM type: NRG; PAM sequence: GAG
agaagaaggaggaggaagag

SEQ ID NO: 157316 - DNA, 20 bp, Artificial Sequence
  Description of Artificial Sequence: Synthetic oligonucleotide
  Target: LAMA2; (+) strand; PAM type: NRG; PAM sequence: AAG
agaaggaggaggaagaggag

SEQ ID NO: 157317 - DNA, 20 bp, Artificial Sequence
  Description of Artificial Sequence: Synthetic oligonucleotide
  Target: LAMA2; (+) strand; PAM type: NRG; PAM sequence: AGG
gaaggaggaggaagaggaga

SEQ ID NO: 157318 - DNA, 20 bp, Artificial Sequence
  Description of Artificial Sequence: Synthetic oligonucleotide
  Target: LAMA2; (+) strand; PAM type: NRG; PAM sequence: GAG
aggaggaggaagaggagaag

SEQ ID NO: 157319 - DNA, 20 bp, Artificial Sequence
  Description of Artificial Sequence: Synthetic oligonucleotide
  Target: LAMA2; (+) strand; PAM type: NRG; PAM sequence: AAG
aggaagaggagaaggagatg

SEQ ID NO: 157320 - DNA, 20 bp, Artificial Sequence
  Description of Artificial Sequence: Synthetic oligonucleotide
  Target: LAMA2; (+) strand; PAM type: NRG; PAM sequence: AAG
aagaggagaaggagatgaag

SEQ ID NO: 157321 - DNA, 20 bp, Artificial Sequence
  Description of Artificial Sequence: Synthetic oligonucleotide
  Target: LAMA2; (+) strand; PAM type: NRG; PAM sequence: AAG
ggagaaggagatgaagaaga

SEQ ID NO: 157322 - DNA, 20 bp, Artificial Sequence
  Description of Artificial Sequence: Synthetic oligonucleotide
  Target: LAMA2; (+) strand; PAM type: NRG; PAM sequence: AAG
aggagatgaagaagaaagct

SEQ ID NO: 157323 - DNA, 20 bp, Artificial Sequence
  Description of Artificial Sequence: Synthetic oligonucleotide
  Target: LAMA2; (+) strand; PAM type: NRG; PAM sequence: AGG
ggagatgaagaagaaagcta

SEQ ID NO: 157324 - DNA, 20 bp, Artificial Sequence
  Description of Artificial Sequence: Synthetic oligonucleotide
  Target: LAMA2; (+) strand; PAM type: NRG; PAM sequence: GAG
agatgaagaagaaagctaag

SEQ ID NO: 157325 - DNA, 20 bp, Artificial Sequence
  Description of Artificial Sequence: Synthetic oligonucleotide
  Target: LAMA2; (+) strand; PAM type: NRG; PAM sequence: AAG
tgaagaagaaagctaaggag

SEQ ID NO: 157326 - DNA, 20 bp, Artificial Sequence
  Description of Artificial Sequence: Synthetic oligonucleotide
  Target: LAMA2; (+) strand; PAM type: NRG; PAM sequence: TGG
gaagaaagctaaggagaaga

SEQ ID NO: 157327 - DNA, 20 bp, Artificial Sequence
  Description of Artificial Sequence: Synthetic oligonucleotide
  Target: LAMA2; (+) strand; PAM type: NRG; PAM sequence: GGG
aagaaagctaaggagaagat

SEQ ID NO: 157328 - DNA, 20 bp, Artificial Sequence
  Description of Artificial Sequence: Synthetic oligonucleotide
  Target: LAMA2; (+) strand; PAM type: NRG; PAM sequence: CAG
gctaaggagaagatgggtaa

SEQ ID NO: 157329 - DNA, 20 bp, Artificial Sequence
  Description of Artificial Sequence: Synthetic oligonucleotide
  Target: LAMA2; (+) strand; PAM type: NRG; PAM sequence: AGG
ctaaggagaagatgggtaac

SEQ ID NO: 157330 - DNA, 20 bp, Artificial Sequence
  Description of Artificial Sequence: Synthetic oligonucleotide
  Target: LAMA2; (+) strand; PAM type: NRG; PAM sequence: AAG
aagatgggtaacaggaaaaa

SEQ ID NO: 157331 - DNA, 20 bp, Artificial Sequence
  Description of Artificial Sequence: Synthetic oligonucleotide
  Target: LAMA2; (+) strand; PAM type: NRG; PAM sequence: GAG
gatgggtaacaggaaaaaaa

SEQ ID NO: 157332 - DNA, 20 bp, Artificial Sequence
  Description of Artificial Sequence: Synthetic oligonucleotide
  Target: LAMA2; (+) strand; PAM type: NRG; PAM sequence: AGG
atgggtaacaggaaaaaaag

SEQ ID NO: 157333 - DNA, 20 bp, Artificial Sequence
  Description of Artificial Sequence: Synthetic oligonucleotide
  Target: LAMA2; (+) strand; PAM type: NRG; PAM sequence: GGG
tgggtaacaggaaaaaaaga

SEQ ID NO: 157334 - DNA, 20 bp, Artificial Sequence
  Description of Artificial Sequence: Synthetic oligonucleotide
  Target: LAMA2; (+) strand; PAM type: NRG; PAM sequence: CAG
gtaacaggaaaaaaagaggg

SEQ ID NO: 157335 - DNA, 20 bp, Artificial Sequence
  Description of Artificial Sequence: Synthetic oligonucleotide
  Target: LAMA2; (+) strand; PAM type: NRG; PAM sequence: AGG
taacaggaaaaaaagagggc

SEQ ID NO: 157336 - DNA, 20 bp, Artificial Sequence
  Description of Artificial Sequence: Synthetic oligonucleotide
  Target: LAMA2; (+) strand; PAM type: NRG; PAM sequence: AAG
ggaaaaaaagagggcaggaa

SEQ ID NO: 157337 - DNA, 20 bp, Artificial Sequence
  Description of Artificial Sequence: Synthetic oligonucleotide
  Target: LAMA2; (+) strand; PAM type: NRG; PAM sequence: CAG
aaaaaagagggcaggaaaag

SEQ ID NO: 157338 - DNA, 20 bp, Artificial Sequence
  Description of Artificial Sequence: Synthetic oligonucleotide
  Target: LAMA2; (+) strand; PAM type: NRG; PAM sequence: TAG
aagagggcaggaaaagcaga

SEQ ID NO: 157339 - DNA, 20 bp, Artificial Sequence
  Description of Artificial Sequence: Synthetic oligonucleotide
  Target: LAMA2; (+) strand; PAM type: NRG; PAM sequence: AGG
agagggcaggaaaagcagat

SEQ ID NO: 157340 - DNA, 20 bp, Artificial Sequence
  Description of Artificial Sequence: Synthetic oligonucleotide
  Target: LAMA2; (+) strand; PAM type: NRG; PAM sequence: AAG
gggcaggaaaagcagatagg

SEQ ID NO: 157341 - DNA, 20 bp, Artificial Sequence
  Description of Artificial Sequence: Synthetic oligonucleotide
  Target: LAMA2; (+) strand; PAM type: NRG; PAM sequence: AGG
ggcaggaaaagcagatagga

SEQ ID NO: 157342 - DNA, 20 bp, Artificial Sequence
  Description of Artificial Sequence: Synthetic oligonucleotide
  Target: LAMA2; (+) strand; PAM type: NRG; PAM sequence: AAG
agcagataggaaggaaaaaa

SEQ ID NO: 157343 - DNA, 20 bp, Artificial Sequence
  Description of Artificial Sequence: Synthetic oligonucleotide
  Target: LAMA2; (+) strand; PAM type: NRG; PAM sequence: AGG
gcagataggaaggaaaaaaa

SEQ ID NO: 157344 - DNA, 20 bp, Artificial Sequence
  Description of Artificial Sequence: Synthetic oligonucleotide
  Target: LAMA2; (+) strand; PAM type: NRG; PAM sequence: TGG
gataggaaggaaaaaaaagg

SEQ ID NO: 157345 - DNA, 20 bp, Artificial Sequence
  Description of Artificial Sequence: Synthetic oligonucleotide
  Target: LAMA2; (+) strand; PAM type: NRG; PAM sequence: AAG
aggaaggaaaaaaaaggtgg

SEQ ID NO: 157346 - DNA, 20 bp, Artificial Sequence
  Description of Artificial Sequence: Synthetic oligonucleotide
  Target: LAMA2; (+) strand; PAM type: NRG; PAM sequence: GAG
gaaggaaaaaaaaggtggaa

SEQ ID NO: 157347 - DNA, 20 bp, Artificial Sequence
  Description of Artificial Sequence: Synthetic oligonucleotide
  Target: LAMA2; (+) strand; PAM type: NRG; PAM sequence: GAG
aggaaaaaaaaggtggaaga

SEQ ID NO: 157348 - DNA, 20 bp, Artificial Sequence
  Description of Artificial Sequence: Synthetic oligonucleotide
  Target: LAMA2; (+) strand; PAM type: NRG; PAM sequence: CAG
gtggaagagagaaatgaatg

SEQ ID NO: 157349 - DNA, 20 bp, Artificial Sequence
  Description of Artificial Sequence: Synthetic oligonucleotide
  Target: LAMA2; (+) strand; PAM type: NRG; PAM sequence: AGG
tggaagagagaaatgaatgc

SEQ ID NO: 157350 - DNA, 20 bp, Artificial Sequence
  Description of Artificial Sequence: Synthetic oligonucleotide
  Target: LAMA2; (+) strand; PAM type: NRG; PAM sequence: CAG
aagagagaaatgaatgcagg

SEQ ID NO: 157351 - DNA, 20 bp, Artificial Sequence
  Description of Artificial Sequence: Synthetic oligonucleotide
  Target: LAMA2; (+) strand; PAM type: NRG; PAM sequence: AGG
agagagaaatgaatgcaggc

SEQ ID NO: 157352 - DNA, 20 bp, Artificial Sequence
  Description of Artificial Sequence: Synthetic oligonucleotide
  Target: LAMA2; (+) strand; PAM type: NRG; PAM sequence: CAG
gagaaatgaatgcaggcagg

SEQ ID NO: 157353 - DNA, 20 bp, Artificial Sequence
  Description of Artificial Sequence: Synthetic oligonucleotide
  Target: LAMA2; (+) strand; PAM type: NRG; PAM sequence: AGG
agaaatgaatgcaggcaggc

SEQ ID NO: 157354 - DNA, 20 bp, Artificial Sequence
  Description of Artificial Sequence: Synthetic oligonucleotide
  Target: LAMA2; (+) strand; PAM type: NRG; PAM sequence: GAG
gcaggcaggatgttttcctc

SEQ ID NO: 157355 - DNA, 20 bp, Artificial Sequence
  Description of Artificial Sequence: Synthetic oligonucleotide
  Target: LAMA2; (+) strand; PAM type: NRG; PAM sequence: AGG
caggcaggatgttttcctcg

SEQ ID NO: 157356 - DNA, 20 bp, Artificial Sequence
  Description of Artificial Sequence: Synthetic oligonucleotide
  Target: LAMA2; (+) strand; PAM type: NRG; PAM sequence: TGG
ggttttttatttatatcccc

SEQ ID NO: 157357 - DNA, 20 bp, Artificial Sequence
  Description of Artificial Sequence: Synthetic oligonucleotide
  Target: LAMA2; (+) strand; PAM type: NRG; PAM sequence: CAG
atcccctggactgcataact

SEQ ID NO: 157358 - DNA, 20 bp, Artificial Sequence
  Description of Artificial Sequence: Synthetic oligonucleotide
  Target: LAMA2; (+) strand; PAM type: NRG; PAM sequence: TAG
cccttctaaaccaacttttc

SEQ ID NO: 157359 - DNA, 20 bp, Artificial Sequence
  Description of Artificial Sequence: Synthetic oligonucleotide
  Target: LAMA2; (+) strand; PAM type: NRG; PAM sequence: TGG
ctgttcgacacctacaactc

SEQ ID NO: 157360 - DNA, 20 bp, Artificial Sequence
  Description of Artificial Sequence: Synthetic oligonucleotide
  Target: LAMA2; (+) strand; PAM type: NRG; PAM sequence: AAG
tggttcattttctatgcatt

SEQ ID NO: 157361 - DNA, 20 bp, Artificial Sequence
  Description of Artificial Sequence: Synthetic oligonucleotide
  Target: LAMA2; (+) strand; PAM type: NRG; PAM sequence: AGG
ggttcattttctatgcatta

SEQ ID NO: 157362 - DNA, 20 bp, Artificial Sequence
  Description of Artificial Sequence: Synthetic oligonucleotide
  Target: LAMA2; (+) strand; PAM type: NRG; PAM sequence: GAG
gttctattctaataattatc

SEQ ID NO: 157363 - DNA, 20 bp, Artificial Sequence
  Description of Artificial Sequence: Synthetic oligonucleotide
  Target: LAMA2; (+) strand; PAM type: NRG; PAM sequence: AAG
taataattatcgagctttta

SEQ ID NO: 157364 - DNA, 20 bp, Artificial Sequence
  Description of Artificial Sequence: Synthetic oligonucleotide
  Target: LAMA2; (+) strand; PAM type: NRG; PAM sequence: AAG
taattatcgagcttttaaag

SEQ ID NO: 157365 - DNA, 20 bp, Artificial Sequence
  Description of Artificial Sequence: Synthetic oligonucleotide
  Target: LAMA2; (+) strand; PAM type: NRG; PAM sequence: GAG
attatcgagcttttaaagaa

SEQ ID NO: 157366 - DNA, 20 bp, Artificial Sequence
  Description of Artificial Sequence: Synthetic oligonucleotide
  Target: LAMA2; (+) strand; PAM type: NRG; PAM sequence: AAG
tcaaatttatacatacactg

SEQ ID NO: 157367 - DNA, 20 bp, Artificial Sequence
  Description of Artificial Sequence: Synthetic oligonucleotide
  Target: LAMA2; (+) strand; PAM type: NRG; PAM sequence: AGG
caaatttatacatacactga

SEQ ID NO: 157368 - DNA, 20 bp, Artificial Sequence
  Description of Artificial Sequence: Synthetic oligonucleotide
  Target: LAMA2; (+) strand; PAM type: NRG; PAM sequence: AAG
aaggaaataacaaaaccttg

SEQ ID NO: 157369 - DNA, 20 bp, Artificial Sequence
  Description of Artificial Sequence: Synthetic oligonucleotide
  Target: LAMA2; (+) strand; PAM type: NRG; PAM sequence: AAG
aaacactgtttctatgataa

SEQ ID NO: 157370 - DNA, 20 bp, Artificial Sequence
  Description of Artificial Sequence: Synthetic oligonucleotide
  Target: LAMA2; (+) strand; PAM type: NRG; PAM sequence: GAG
acactgtttctatgataaaa

SEQ ID NO: 157371 - DNA, 20 bp, Artificial Sequence
  Description of Artificial Sequence: Synthetic oligonucleotide
  Target: LAMA2; (+) strand; PAM type: NRG; PAM sequence: GAG
actgtttctatgataaaaga

SEQ ID NO: 157372 - DNA, 20 bp, Artificial Sequence
  Description of Artificial Sequence: Synthetic oligonucleotide
  Target: LAMA2; (+) strand; PAM type: NRG; PAM sequence: TAG
ataaaagagagctctacaaa

SEQ ID NO: 157373 - DNA, 20 bp, Artificial Sequence
  Description of Artificial Sequence: Synthetic oligonucleotide
  Target: LAMA2; (+) strand; PAM type: NRG; PAM sequence: TGG
tgcatgaataaacacttcta

SEQ ID NO: 157374 - DNA, 20 bp, Artificial Sequence
  Description of Artificial Sequence: Synthetic oligonucleotide
  Target: LAMA2; (+) strand; PAM type: NRG; PAM sequence: GGG
gcatgaataaacacttctat

SEQ ID NO: 157375 - DNA, 20 bp, Artificial Sequence
  Description of Artificial Sequence: Synthetic oligonucleotide
  Target: LAMA2; (+) strand; PAM type: NRG; PAM sequence: GAG
atgaataaacacttctatgg

SEQ ID NO: 157376 - DNA, 20 bp, Artificial Sequence
  Description of Artificial Sequence: Synthetic oligonucleotide
  Target: LAMA2; (+) strand; PAM type: NRG; PAM sequence: AGG
tgaataaacacttctatggg

SEQ ID NO: 157377 - DNA, 20 bp, Artificial Sequence
  Description of Artificial Sequence: Synthetic oligonucleotide
  Target: LAMA2; (+) strand; PAM type: NRG; PAM sequence: GGG
gaataaacacttctatggga

SEQ ID NO: 157378 - DNA, 20 bp, Artificial Sequence
  Description of Artificial Sequence: Synthetic oligonucleotide
  Target: LAMA2; (+) strand; PAM type: NRG; PAM sequence: CAG
ctatgggagggatacctttt

SEQ ID NO: 157379 - DNA, 20 bp, Artificial Sequence
  Description of Artificial Sequence: Synthetic oligonucleotide
  Target: LAMA2; (+) strand; PAM type: NRG; PAM sequence: GAG
atgggagggataccttttca

SEQ ID NO: 157380 - DNA, 20 bp, Artificial Sequence
  Description of Artificial Sequence: Synthetic oligonucleotide
  Target: LAMA2; (+) strand; PAM type: NRG; PAM sequence: AAG
gggataccttttcagagttt

SEQ ID NO: 157381 - DNA, 20 bp, Artificial Sequence
  Description of Artificial Sequence: Synthetic oligonucleotide
  Target: LAMA2; (+) strand; PAM type: NRG; PAM sequence: AGG
ggataccttttcagagttta

SEQ ID NO: 157382 - DNA, 20 bp, Artificial Sequence
  Description of Artificial Sequence: Synthetic oligonucleotide
  Target: LAMA2; (+) strand; PAM type: NRG; PAM sequence: CGG
ttttcagagtttaaggctcg

SEQ ID NO: 157383 - DNA, 20 bp, Artificial Sequence
  Description of Artificial Sequence: Synthetic oligonucleotide
  Target: LAMA2; (+) strand; PAM type: NRG; PAM sequence: GGG
tttcagagtttaaggctcgc

SEQ ID NO: 157384 - DNA, 20 bp, Artificial Sequence
  Description of Artificial Sequence: Synthetic oligonucleotide
  Target: LAMA2; (+) strand; PAM type: NRG; PAM sequence: TGG
agtttaaggctcgcgggctt

SEQ ID NO: 157385 - DNA, 20 bp, Artificial Sequence
  Description of Artificial Sequence: Synthetic oligonucleotide
  Target: LAMA2; (+) strand; PAM type: NRG; PAM sequence: GGG
gtttaaggctcgcgggcttt

SEQ ID NO: 157386 - DNA, 20 bp, Artificial Sequence
  Description of Artificial Sequence: Synthetic oligonucleotide
  Target: LAMA2; (+) strand; PAM type: NRG; PAM sequence: AAG
gctcgcgggctttgggatct

SEQ ID NO: 157387 - DNA, 20 bp, Artificial Sequence
  Description of Artificial Sequence: Synthetic oligonucleotide
  Target: LAMA2; (+) strand; PAM type: NRG; PAM sequence: AAG
cgcgggctttgggatctaag

SEQ ID NO: 157388 - DNA, 20 bp, Artificial Sequence
  Description of Artificial Sequence: Synthetic oligonucleotide
  Target: LAMA2; (+) strand; PAM type: NRG; PAM sequence: TGG
gccctgtttgtgatcctaaa

SEQ ID NO: 157389 - DNA, 20 bp, Artificial Sequence
  Description of Artificial Sequence: Synthetic oligonucleotide
  Target: LAMA2; (+) strand; PAM type: NRG; PAM sequence: CAG
tgatcctaaatggaaattga

SEQ ID NO: 157390 - DNA, 20 bp, Artificial Sequence
  Description of Artificial Sequence: Synthetic oligonucleotide
  Target: LAMA2; (+) strand; PAM type: NRG; PAM sequence: CAG
tatgtttaatttatcctgct

SEQ ID NO: 157391 - DNA, 20 bp, Artificial Sequence
  Description of Artificial Sequence: Synthetic oligonucleotide
  Target: LAMA2; (+) strand; PAM type: NRG; PAM sequence: AAG
ttatcctgctcagtattata

SEQ ID NO: 157392 - DNA, 20 bp, Artificial Sequence
  Description of Artificial Sequence: Synthetic oligonucleotide
  Target: LAMA2; (+) strand; PAM type: NRG; PAM sequence: TGG
ccctcctgaaatatttgctc

SEQ ID NO: 157393 - DNA, 20 bp, Artificial Sequence
  Description of Artificial Sequence: Synthetic oligonucleotide
  Target: LAMA2; (+) strand; PAM type: NRG; PAM sequence: AAG
cctgaaatatttgctctggt

SEQ ID NO: 157394 - DNA, 20 bp, Artificial Sequence
  Description of Artificial Sequence: Synthetic oligonucleotide
  Target: LAMA2; (+) strand; PAM type: NRG; PAM sequence: AAG
atatttgctctggtaagcaa

SEQ ID NO: 157395 - DNA, 20 bp, Artificial Sequence
  Description of Artificial Sequence: Synthetic oligonucleotide
  Target: LAMA2; (+) strand; PAM type: NRG; PAM sequence: TAG
tggtaagcaaaagcaaatat

SEQ ID NO: 157396 - DNA, 20 bp, Artificial Sequence
  Description of Artificial Sequence: Synthetic oligonucleotide
  Target: LAMA2; (+) strand; PAM type: NRG; PAM sequence: AGG
ggtaagcaaaagcaaatatt

SEQ ID NO: 157397 - DNA, 20 bp, Artificial Sequence
  Description of Artificial Sequence: Synthetic oligonucleotide
  Target: LAMA2; (+) strand; PAM type: NRG; PAM sequence: TAG
attaggttttacactccatt

SEQ ID NO: 157398 - DNA, 20 bp, Artificial Sequence
  Description of Artificial Sequence: Synthetic oligonucleotide
  Target: LAMA2; (+) strand; PAM type: NRG; PAM sequence: CAG
cactccatttagtgaaataa

SEQ ID NO: 157399 - DNA, 20 bp, Artificial Sequence
  Description of Artificial Sequence: Synthetic oligonucleotide
  Target: LAMA2; (+) strand; PAM type: NRG; PAM sequence: CAG
cagtgatgataatctgacat

SEQ ID NO: 157400 - DNA, 20 bp, Artificial Sequence
  Description of Artificial Sequence: Synthetic oligonucleotide
  Target: LAMA2; (+) strand; PAM type: NRG; PAM sequence: GAG
gtgatgataatctgacatca

SEQ ID NO: 157401 - DNA, 20 bp, Artificial Sequence
  Description of Artificial Sequence: Synthetic oligonucleotide
  Target: LAMA2; (+) strand; PAM type: NRG; PAM sequence: CAG
catcagagaaccaaatgttc

SEQ ID NO: 157402 - DNA, 20 bp, Artificial Sequence
  Description of Artificial Sequence: Synthetic oligonucleotide
  Target: LAMA2; (+) strand; PAM type: NRG; PAM sequence: AGG
atcagagaaccaaatgttcc

SEQ ID NO: 157403 - DNA, 20 bp, Artificial Sequence
  Description of Artificial Sequence: Synthetic oligonucleotide
  Target: LAMA2; (+) strand; PAM type: NRG; PAM sequence: AAG
ttccaggcttatttcatgaa

SEQ ID NO: 157404 - DNA, 20 bp, Artificial Sequence
  Description of Artificial Sequence: Synthetic oligonucleotide
  Target: LAMA2; (+) strand; PAM type: NRG; PAM sequence: AGG
tccaggcttatttcatgaaa

SEQ ID NO: 157405 - DNA, 20 bp, Artificial Sequence
  Description of Artificial Sequence: Synthetic oligonucleotide
  Target: LAMA2; (+) strand; PAM type: NRG; PAM sequence: CAG
catgaaaaggatttcctctc

SEQ ID NO: 157406 - DNA, 20 bp, Artificial Sequence
  Description of Artificial Sequence: Synthetic oligonucleotide
  Target: LAMA2; (+) strand; PAM type: NRG; PAM sequence: TAG
tccagaaacattatcctcaa

SEQ ID NO: 157407 - DNA, 20 bp, Artificial Sequence
  Description of Artificial Sequence: Synthetic oligonucleotide
  Target: LAMA2; (+) strand; PAM type: NRG; PAM sequence: AGG
ccagaaacattatcctcaat

SEQ ID NO: 157408 - DNA, 20 bp, Artificial Sequence
  Description of Artificial Sequence: Synthetic oligonucleotide
  Target: LAMA2; (+) strand; PAM type: NRG; PAM sequence: GAG
ttcctcaattcatatttctt

SEQ ID NO: 157409 - DNA, 20 bp, Artificial Sequence
  Description of Artificial Sequence: Synthetic oligonucleotide
  Target: LAMA2; (+) strand; PAM type: NRG; PAM sequence: GAG
aattcatatttcttgagatt

SEQ ID NO: 157410 - DNA, 20 bp, Artificial Sequence
  Description of Artificial Sequence: Synthetic oligonucleotide
  Target: LAMA2; (+) strand; PAM type: NRG; PAM sequence: GAG
ttcatatttcttgagattga

SEQ ID NO: 157411 - DNA, 20 bp, Artificial Sequence
  Description of Artificial Sequence: Synthetic oligonucleotide
  Target: LAMA2; (+) strand; PAM type: NRG; PAM sequence: AGG
tcatatttcttgagattgag

SEQ ID NO: 157412 - DNA, 20 bp, Artificial Sequence
  Description of Artificial Sequence: Synthetic oligonucleotide
  Target: LAMA2; (+) strand; PAM type: NRG; PAM sequence: GGG
catatttcttgagattgaga

SEQ ID NO: 157413 - DNA, 20 bp, Artificial Sequence
  Description of Artificial Sequence: Synthetic oligonucleotide
  Target: LAMA2; (+) strand; PAM type: NRG; PAM sequence: AAG
gagattgagagggaaaaaaa

SEQ ID NO: 157414 - DNA, 20 bp, Artificial Sequence
  Description of Artificial Sequence: Synthetic oligonucleotide
  Target: LAMA2; (+) strand; PAM type: NRG; PAM sequence: GAG
gattgagagggaaaaaaaaa

SEQ ID NO: 157415 - DNA, 20 bp, Artificial Sequence
  Description of Artificial Sequence: Synthetic oligonucleotide
  Target: LAMA2; (+) strand; PAM type: NRG; PAM sequence: AGG
attgagagggaaaaaaaaag

SEQ ID NO: 157416 - DNA, 20 bp, Artificial Sequence
  Description of Artificial Sequence: Synthetic oligonucleotide
  Target: LAMA2; (+) strand; PAM type: NRG; PAM sequence: CAG
agagggaaaaaaaaagaggc

SEQ ID NO: 157417 - DNA, 20 bp, Artificial Sequence
  Description of Artificial Sequence: Synthetic oligonucleotide
  Target: LAMA2; (+) strand; PAM type: NRG; PAM sequence: AAG
aaaaaaagaggccagaccac

SEQ ID NO: 157418 - DNA, 20 bp, Artificial Sequence
  Description of Artificial Sequence: Synthetic oligonucleotide
  Target: LAMA2; (+) strand; PAM type: NRG; PAM sequence: TAG
aaaagaggccagaccacaag

SEQ ID NO: 157419 - DNA, 20 bp, Artificial Sequence
  Description of Artificial Sequence: Synthetic oligonucleotide
  Target: LAMA2; (+) strand; PAM type: NRG; PAM sequence: AAG
tactgctaaattcttttatg

SEQ ID NO: 157420 - DNA, 20 bp, Artificial Sequence
  Description of Artificial Sequence: Synthetic oligonucleotide
  Target: LAMA2; (+) strand; PAM type: NRG; PAM sequence: TAG
ctaaattcttttatgaagct

SEQ ID NO: 157421 - DNA, 20 bp, Artificial Sequence
  Description of Artificial Sequence: Synthetic oligonucleotide
  Target: LAMA2; (+) strand; PAM type: NRG; PAM sequence: TAG
tagttttatgaattaccttt

SEQ ID NO: 157422 - DNA, 20 bp, Artificial Sequence
  Description of Artificial Sequence: Synthetic oligonucleotide
  Target: LAMA2; (+) strand; PAM type: NRG; PAM sequence: CAG
aattaccttttagccttctc

SEQ ID NO: 157423 - DNA, 20 bp, Artificial Sequence
  Description of Artificial Sequence: Synthetic oligonucleotide
  Target: LAMA2; (+) strand; PAM type: NRG; PAM sequence: TGG
tttagccttctccagtcatg

SEQ ID NO: 157424 - DNA, 20 bp, Artificial Sequence
  Description of Artificial Sequence: Synthetic oligonucleotide
  Target: LAMA2; (+) strand; PAM type: NRG; PAM sequence: GGG
ttagccttctccagtcatgt

SEQ ID NO: 157425 - DNA, 20 bp, Artificial Sequence
  Description of Artificial Sequence: Synthetic oligonucleotide
  Target: LAMA2; (+) strand; PAM type: NRG; PAM sequence: TAG
tgtattgttatttgtgacat

SEQ ID NO: 157426 - DNA, 20 bp, Artificial Sequence
  Description of Artificial Sequence: Synthetic oligonucleotide
  Target: LAMA2; (+) strand; PAM type: NRG; PAM sequence: AGG
gtattgttatttgtgacatt

SEQ ID NO: 157427 - DNA, 20 bp, Artificial Sequence
  Description of Artificial Sequence: Synthetic oligonucleotide
  Target: LAMA2; (+) strand; PAM type: NRG; PAM sequence: TAG
acattaggttatatattgca

SEQ ID NO: 157428 - DNA, 20 bp, Artificial Sequence
  Description of Artificial Sequence: Synthetic oligonucleotide
  Target: LAMA2; (+) strand; PAM type: NRG; PAM sequence: AAG
ctataatattacttgcaaac

SEQ ID NO: 157429 - DNA, 20 bp, Artificial Sequence
  Description of Artificial Sequence: Synthetic oligonucleotide
  Target: LAMA2; (+) strand; PAM type: NRG; PAM sequence: TGG
aatattacttgcaaacaagc

SEQ ID NO: 157430 - DNA, 20 bp, Artificial Sequence
  Description of Artificial Sequence: Synthetic oligonucleotide
  Target: LAMA2; (+) strand; PAM type: NRG; PAM sequence: AAG
caagctggtttttccccctg

SEQ ID NO: 157431 - DNA, 20 bp, Artificial Sequence
  Description of Artificial Sequence: Synthetic oligonucleotide
  Target: LAMA2; (+) strand; PAM type: NRG; PAM sequence: AGG
aagctggtttttccccctga

SEQ ID NO: 157432 - DNA, 20 bp, Artificial Sequence
  Description of Artificial Sequence: Synthetic oligonucleotide
  Target: LAMA2; (+) strand; PAM type: NRG; PAM sequence: TAG
ctggtttttccccctgaagg

SEQ ID NO: 157433 - DNA, 20 bp, Artificial Sequence
  Description of Artificial Sequence: Synthetic oligonucleotide
  Target: LAMA2; (+) strand; PAM type: NRG; PAM sequence: CAG
ccctgaaggtagaattaaaa

SEQ ID NO: 157434 - DNA, 20 bp, Artificial Sequence
  Description of Artificial Sequence: Synthetic oligonucleotide
  Target: LAMA2; (+) strand; PAM type: NRG; PAM sequence: AGG
cctgaaggtagaattaaaac

SEQ ID NO: 157435 - DNA, 20 bp, Artificial Sequence
  Description of Artificial Sequence: Synthetic oligonucleotide
  Target: LAMA2; (+) strand; PAM type: NRG; PAM sequence: TGG
agaattaaaacaggtactca

SEQ ID NO: 157436 - DNA, 20 bp, Artificial Sequence
  Description of Artificial Sequence: Synthetic oligonucleotide
  Target: LAMA2; (+) strand; PAM type: NRG; PAM sequence: GGG
gaattaaaacaggtactcat

SEQ ID NO: 157437 - DNA, 20 bp, Artificial Sequence
  Description of Artificial Sequence: Synthetic oligonucleotide
  Target: LAMA2; (+) strand; PAM type: NRG; PAM sequence: CAG
aaacaggtactcatgggaaa

SEQ ID NO: 157438 - DNA, 20 bp, Artificial Sequence
  Description of Artificial Sequence: Synthetic oligonucleotide
  Target: LAMA2; (+) strand; PAM type: NRG; PAM sequence: TGG
ttgtgttcttcttttcttaa

SEQ ID NO: 157439 - DNA, 20 bp, Artificial Sequence
  Description of Artificial Sequence: Synthetic oligonucleotide
  Target: LAMA2; (+) strand; PAM type: NRG; PAM sequence: GGG
tgtgttcttcttttcttaat

SEQ ID NO: 157440 - DNA, 20 bp, Artificial Sequence
  Description of Artificial Sequence: Synthetic oligonucleotide
  Target: LAMA2; (+) strand; PAM type: NRG; PAM sequence: GGG
gtgttcttcttttcttaatg

SEQ ID NO: 157441 - DNA, 20 bp, Artificial Sequence
  Description of Artificial Sequence: Synthetic oligonucleotide
  Target: LAMA2; (+) strand; PAM type: NRG; PAM sequence: AAG
cttcttttcttaatggggtg

SEQ ID NO: 157442 - DNA, 20 bp, Artificial Sequence
  Description of Artificial Sequence: Synthetic oligonucleotide
  Target: LAMA2; (+) strand; PAM type: NRG; PAM sequence: AAG
ttcttaatggggtgaagctg

SEQ ID NO: 157443 - DNA, 20 bp, Artificial Sequence
  Description of Artificial Sequence: Synthetic oligonucleotide
  Target: LAMA2; (+) strand; PAM type: NRG; PAM sequence: CAG
aatggggtgaagctgaagaa

SEQ ID NO: 157444 - DNA, 20 bp, Artificial Sequence
  Description of Artificial Sequence: Synthetic oligonucleotide
  Target: LAMA2; (+) strand; PAM type: NRG; PAM sequence: AGG
atggggtgaagctgaagaac

SEQ ID NO: 157445 - DNA, 20 bp, Artificial Sequence
  Description of Artificial Sequence: Synthetic oligonucleotide
  Target: LAMA2; (+) strand; PAM type: NRG; PAM sequence: AAG
ggtgaagctgaagaacagga

SEQ ID NO: 157446 - DNA, 20 bp, Artificial Sequence
  Description of Artificial Sequence: Synthetic oligonucleotide
  Target: LAMA2; (+) strand; PAM type: NRG; PAM sequence: TGG
ctgaagaacaggaaagtgaa

SEQ ID NO: 157447 - DNA, 20 bp, Artificial Sequence
  Description of Artificial Sequence: Synthetic oligonucleotide
  Target: LAMA2; (+) strand; PAM type: NRG; PAM sequence: TAG
gaacaggaaagtgaatggct

SEQ ID NO: 157448 - DNA, 20 bp, Artificial Sequence
  Description of Artificial Sequence: Synthetic oligonucleotide
  Target: LAMA2; (+) strand; PAM type: NRG; PAM sequence: TAG
ggaaagtgaatggcttagcc

SEQ ID NO: 157449 - DNA, 20 bp, Artificial Sequence
  Description of Artificial Sequence: Synthetic oligonucleotide
  Target: LAMA2; (+) strand; PAM type: NRG; PAM sequence: CAG
gcttagcctagaaccatctc

SEQ ID NO: 157450 - DNA, 20 bp, Artificial Sequence
  Description of Artificial Sequence: Synthetic oligonucleotide
  Target: LAMA2; (+) strand; PAM type: NRG; PAM sequence: AGG
cttagcctagaaccatctcc

SEQ ID NO: 157451 - DNA, 20 bp, Artificial Sequence
  Description of Artificial Sequence: Synthetic oligonucleotide
  Target: LAMA2; (+) strand; PAM type: NRG; PAM sequence: TGG
cctagaaccatctccaggaa

SEQ ID NO: 157452 - DNA, 20 bp, Artificial Sequence
  Description of Artificial Sequence: Synthetic oligonucleotide
  Target: LAMA2; (+) strand; PAM type: NRG; PAM sequence: GAG
tagaaccatctccaggaatg

SEQ ID NO: 157453 - DNA, 20 bp, Artificial Sequence
  Description of Artificial Sequence: Synthetic oligonucleotide
  Target: LAMA2; (+) strand; PAM type: NRG; PAM sequence: AGG
agaaccatctccaggaatgg

SEQ ID NO: 157454 - DNA, 20 bp, Artificial Sequence
  Description of Artificial Sequence: Synthetic oligonucleotide
  Target: LAMA2; (+) strand; PAM type: NRG; PAM sequence: CAG
tggaggtaaattttttcctg

SEQ ID NO: 157455 - DNA, 20 bp, Artificial Sequence
  Description of Artificial Sequence: Synthetic oligonucleotide
  Target: LAMA2; (+) strand; PAM type: NRG; PAM sequence: AAG
ttgatatctgaatctccctg

SEQ ID NO: 157456 - DNA, 20 bp, Artificial Sequence
  Description of Artificial Sequence: Synthetic oligonucleotide
  Target: LAMA2; (+) strand; PAM type: NRG; PAM sequence: GAG
gatatctgaatctccctgaa

SEQ ID NO: 157457 - DNA, 20 bp, Artificial Sequence
  Description of Artificial Sequence: Synthetic oligonucleotide
  Target: LAMA2; (+) strand; PAM type: NRG; PAM sequence: TAG
tccctgaagagaatttgcct

SEQ ID NO: 157458 - DNA, 20 bp, Artificial Sequence
  Description of Artificial Sequence: Synthetic oligonucleotide
  Target: LAMA2; (+) strand; PAM type: NRG; PAM sequence: TAG
ctgaagagaatttgccttag

SEQ ID NO: 157459 - DNA, 20 bp, Artificial Sequence
  Description of Artificial Sequence: Synthetic oligonucleotide
  Target: LAMA2; (+) strand; PAM type: NRG; PAM sequence: TGG
agaatttgccttagtagata

SEQ ID NO: 157460 - DNA, 20 bp, Artificial Sequence
  Description of Artificial Sequence: Synthetic oligonucleotide
  Target: LAMA2; (+) strand; PAM type: NRG; PAM sequence: GAG
aatttgccttagtagatatg

SEQ ID NO: 157461 - DNA, 20 bp, Artificial Sequence
  Description of Artificial Sequence: Synthetic oligonucleotide
  Target: LAMA2; (+) strand; PAM type: NRG; PAM sequence: AAG
tgccttagtagatatggaga

SEQ ID NO: 157462 - DNA, 20 bp, Artificial Sequence
  Description of Artificial Sequence: Synthetic oligonucleotide
  Target: LAMA2; (+) strand; PAM type: NRG; PAM sequence: GAG
ccttagtagatatggagaaa

SEQ ID NO: 157463 - DNA, 20 bp, Artificial Sequence
  Description of Artificial Sequence: Synthetic oligonucleotide
  Target: LAMA2; (+) strand; PAM type: NRG; PAM sequence: AGG
cttagtagatatggagaaag

SEQ ID NO: 157464 - DNA, 20 bp, Artificial Sequence
  Description of Artificial Sequence: Synthetic oligonucleotide
  Target: LAMA2; (+) strand; PAM type: NRG; PAM sequence: GGG
ttagtagatatggagaaaga

SEQ ID NO: 157465 - DNA, 20 bp, Artificial Sequence
  Description of Artificial Sequence: Synthetic oligonucleotide
  Target: LAMA2; (+) strand; PAM type: NRG; PAM sequence: AAG
agatatggagaaagagggaa

SEQ ID NO: 157466 - DNA, 20 bp, Artificial Sequence
  Description of Artificial Sequence: Synthetic oligonucleotide
  Target: LAMA2; (+) strand; PAM type: NRG; PAM sequence: AGG
gatatggagaaagagggaaa

SEQ ID NO: 157467 - DNA, 20 bp, Artificial Sequence
  Description of Artificial Sequence: Synthetic oligonucleotide
  Target: LAMA2; (+) strand; PAM type: NRG; PAM sequence: AAG
ggagaaagagggaaaaggcc

SEQ ID NO: 157468 - DNA, 20 bp, Artificial Sequence
  Description of Artificial Sequence: Synthetic oligonucleotide
  Target: LAMA2; (+) strand; PAM type: NRG; PAM sequence: TGG
gagggaaaaggccaagcctt

SEQ ID NO: 157469 - DNA, 20 bp, Artificial Sequence
  Description of Artificial Sequence: Synthetic oligonucleotide
  Target: LAMA2; (+) strand; PAM type: NRG; PAM sequence: GAG
gggaaaaggccaagcctttg

SEQ ID NO: 157470 - DNA, 20 bp, Artificial Sequence
  Description of Artificial Sequence: Synthetic oligonucleotide
  Target: LAMA2; (+) strand; PAM type: NRG; PAM sequence: TGG
ctttggagacccttatgaaa

SEQ ID NO: 157471 - DNA, 20 bp, Artificial Sequence
  Description of Artificial Sequence: Synthetic oligonucleotide
  Target: LAMA2; (+) strand; PAM type: NRG; PAM sequence: AAG
cactttctctttgtattgaa

SEQ ID NO: 157472 - DNA, 20 bp, Artificial Sequence
  Description of Artificial Sequence: Synthetic oligonucleotide
  Target: LAMA2; (+) strand; PAM type: NRG; PAM sequence: GAG
ctttctctttgtattgaaaa

SEQ ID NO: 157473 - DNA, 20 bp, Artificial Sequence
  Description of Artificial Sequence: Synthetic oligonucleotide
  Target: LAMA2; (+) strand; PAM type: NRG; PAM sequence: TAG
agagatataattttcatccc

SEQ ID NO: 157474 - DNA, 20 bp, Artificial Sequence
  Description of Artificial Sequence: Synthetic oligonucleotide
  Target: LAMA2; (+) strand; PAM type: NRG; PAM sequence: TAG
attttcatccctagtaaata

SEQ ID NO: 157475 - DNA, 20 bp, Artificial Sequence
  Description of Artificial Sequence: Synthetic oligonucleotide
  Target: LAMA2; (+) strand; PAM type: NRG; PAM sequence: CAG
taaatatagtcgaatccatc

SEQ ID NO: 157476 - DNA, 20 bp, Artificial Sequence
  Description of Artificial Sequence: Synthetic oligonucleotide
  Target: LAMA2; (+) strand; PAM type: NRG; PAM sequence: AAG
tcgaatccatccagtaatat

SEQ ID NO: 157477 - DNA, 20 bp, Artificial Sequence
  Description of Artificial Sequence: Synthetic oligonucleotide
  Target: LAMA2; (+) strand; PAM type: NRG; PAM sequence: AAG
gtaatataagaattgcctca

SEQ ID NO: 157478 - DNA, 20 bp, Artificial Sequence
  Description of Artificial Sequence: Synthetic oligonucleotide
  Target: LAMA2; (+) strand; PAM type: NRG; PAM sequence: TGG
attgcacttactcctacctg

SEQ ID NO: 157479 - DNA, 20 bp, Artificial Sequence
  Description of Artificial Sequence: Synthetic oligonucleotide
  Target: LAMA2; (+) strand; PAM type: NRG; PAM sequence: TAG
tgtggaaaaccatatttctc

SEQ ID NO: 157480 - DNA, 20 bp, Artificial Sequence
  Description of Artificial Sequence: Synthetic oligonucleotide
  Target: LAMA2; (+) strand; PAM type: NRG; PAM sequence: AAG
aaaaccatatttctctagcc

SEQ ID NO: 157481 - DNA, 20 bp, Artificial Sequence
  Description of Artificial Sequence: Synthetic oligonucleotide
  Target: LAMA2; (+) strand; PAM type: NRG; PAM sequence: GAG
aaccatatttctctagccaa

SEQ ID NO: 157482 - DNA, 20 bp, Artificial Sequence
  Description of Artificial Sequence: Synthetic oligonucleotide
  Target: LAMA2; (+) strand; PAM type: NRG; PAM sequence: CAG
tctagccaagagaacaatga

SEQ ID NO: 157483 - DNA, 20 bp, Artificial Sequence
  Description of Artificial Sequence: Synthetic oligonucleotide
  Target: LAMA2; (+) strand; PAM type: NRG; PAM sequence: TAG
ccaagagaacaatgacagat

SEQ ID NO: 157484 - DNA, 20 bp, Artificial Sequence
  Description of Artificial Sequence: Synthetic oligonucleotide
  Target: LAMA2; (+) strand; PAM type: NRG; PAM sequence: TAG
atgacagattagttcctaaa

SEQ ID NO: 157485 - DNA, 20 bp, Artificial Sequence
  Description of Artificial Sequence: Synthetic oligonucleotide
  Target: LAMA2; (+) strand; PAM type: NRG; PAM sequence: CAG
acagattagttcctaaatag

SEQ ID NO: 157486 - DNA, 20 bp, Artificial Sequence
  Description of Artificial Sequence: Synthetic oligonucleotide
  Target: LAMA2; (+) strand; PAM type: NRG; PAM sequence: AGG
cagattagttcctaaatagc

SEQ ID NO: 157487 - DNA, 20 bp, Artificial Sequence
  Description of Artificial Sequence: Synthetic oligonucleotide
  Target: LAMA2; (+) strand; PAM type: NRG; PAM sequence: GAG
gattagttcctaaatagcag

SEQ ID NO: 157488 - DNA, 20 bp, Artificial Sequence
  Description of Artificial Sequence: Synthetic oligonucleotide
  Target: LAMA2; (+) strand; PAM type: NRG; PAM sequence: TGG
gagaaaatgaaatgttctat

SEQ ID NO: 157489 - DNA, 20 bp, Artificial Sequence
  Description of Artificial Sequence: Synthetic oligonucleotide
  Target: LAMA2; (+) strand; PAM type: NRG; PAM sequence: CAG
tgttctattggctgaacaca

SEQ ID NO: 157490 - DNA, 20 bp, Artificial Sequence
  Description of Artificial Sequence: Synthetic oligonucleotide
  Target: LAMA2; (+) strand; PAM type: NRG; PAM sequence: CAG
cacacagtgctctgtaaaat

SEQ ID NO: 157491 - DNA, 20 bp, Artificial Sequence
  Description of Artificial Sequence: Synthetic oligonucleotide
  Target: LAMA2; (+) strand; PAM type: NRG; PAM sequence: GAG
cacagtgctctgtaaaatca

SEQ ID NO: 157492 - DNA, 20 bp, Artificial Sequence
  Description of Artificial Sequence: Synthetic oligonucleotide
  Target: LAMA2; (+) strand; PAM type: NRG; PAM sequence: AAG
cccaaaatgaactaatttga

SEQ ID NO: 157493 - DNA, 20 bp, Artificial Sequence
  Description of Artificial Sequence: Synthetic oligonucleotide
  Target: LAMA2; (+) strand; PAM type: NRG; PAM sequence: AAG
gaactaatttgaaagtctca

SEQ ID NO: 157494 - DNA, 20 bp, Artificial Sequence
  Description of Artificial Sequence: Synthetic oligonucleotide
  Target: LAMA2; (+) strand; PAM type: NRG; PAM sequence: AAG
aaagatgttcaattttatga

SEQ ID NO: 157495 - DNA, 20 bp, Artificial Sequence
  Description of Artificial Sequence: Synthetic oligonucleotide
  Target: LAMA2; (+) strand; PAM type: NRG; PAM sequence: GAG
gactcgtaaaattaataaat

SEQ ID NO: 157496 - DNA, 20 bp, Artificial Sequence
  Description of Artificial Sequence: Synthetic oligonucleotide
  Target: LAMA2; (+) strand; PAM type: NRG; PAM sequence: AAG
aattaataaatgagtctgca

SEQ ID NO: 157497 - DNA, 20 bp, Artificial Sequence
  Description of Artificial Sequence: Synthetic oligonucleotide
  Target: LAMA2; (+) strand; PAM type: NRG; PAM sequence: TGG
gtctgcaaagtccaaaaatg

SEQ ID NO: 157498 - DNA, 20 bp, Artificial Sequence
  Description of Artificial Sequence: Synthetic oligonucleotide
  Target: LAMA2; (+) strand; PAM type: NRG; PAM sequence: CAG
tccaaaaatgtggaaaatta

SEQ ID NO: 157499 - DNA, 20 bp, Artificial Sequence
  Description of Artificial Sequence: Synthetic oligonucleotide
  Target: LAMA2; (+) strand; PAM type: NRG; PAM sequence: CAG
tggaaaattacagttatttg

SEQ ID NO: 157500 - DNA, 20 bp, Artificial Sequence
  Description of Artificial Sequence: Synthetic oligonucleotide
  Target: LAMA2; (+) strand; PAM type: NRG; PAM sequence: AAG
tgcagtacgtataacttacc

SEQ ID NO: 157501 - DNA, 20 bp, Artificial Sequence
  Description of Artificial Sequence: Synthetic oligonucleotide
  Target: LAMA2; (+) strand; PAM type: NRG; PAM sequence: TAG
caagaccacttatattttgt

SEQ ID NO: 157502 - DNA, 20 bp, Artificial Sequence
  Description of Artificial Sequence: Synthetic oligonucleotide
  Target: LAMA2; (+) strand; PAM type: NRG; PAM sequence: TGG
aatttttcaatgaatgttaa

SEQ ID NO: 157503 - DNA, 20 bp, Artificial Sequence
  Description of Artificial Sequence: Synthetic oligonucleotide
  Target: LAMA2; (+) strand; PAM type: NRG; PAM sequence: TAG
aatggatgaatttttttata

SEQ ID NO: 157504 - DNA, 20 bp, Artificial Sequence
  Description of Artificial Sequence: Synthetic oligonucleotide
  Target: LAMA2; (+) strand; PAM type: NRG; PAM sequence: GAG
tggatgaatttttttatata

SEQ ID NO: 157505 - DNA, 20 bp, Artificial Sequence
  Description of Artificial Sequence: Synthetic oligonucleotide
  Target: LAMA2; (+) strand; PAM type: NRG; PAM sequence: TGG
tatatagagttctccctgtt

SEQ ID NO: 157506 - DNA, 20 bp, Artificial Sequence
  Description of Artificial Sequence: Synthetic oligonucleotide
  Target: LAMA2; (+) strand; PAM type: NRG; PAM sequence: TAG
tctccctgtttggaatcttt

SEQ ID NO: 157507 - DNA, 20 bp, Artificial Sequence
  Description of Artificial Sequence: Synthetic oligonucleotide
  Target: LAMA2; (+) strand; PAM type: NRG; PAM sequence: TGG
tttagttcccttatttactg

SEQ ID NO: 157508 - DNA, 20 bp, Artificial Sequence
  Description of Artificial Sequence: Synthetic oligonucleotide
  Target: LAMA2; (+) strand; PAM type: NRG; PAM sequence: CAG
ggttgccactgactctgcat

SEQ ID NO: 157509 - DNA, 20 bp, Artificial Sequence
  Description of Artificial Sequence: Synthetic oligonucleotide
  Target: LAMA2; (+) strand; PAM type: NRG; PAM sequence: AGG
gttgccactgactctgcatc

SEQ ID NO: 157510 - DNA, 20 bp, Artificial Sequence
  Description of Artificial Sequence: Synthetic oligonucleotide
  Target: LAMA2; (+) strand; PAM type: NRG; PAM sequence: TGG
actgactctgcatcaggctt

SEQ ID NO: 157511 - DNA, 20 bp, Artificial Sequence
  Description of Artificial Sequence: Synthetic oligonucleotide
  Target: LAMA2; (+) strand; PAM type: NRG; PAM sequence: TAG
ctaaaaaactgttttttctt

SEQ ID NO: 157512 - DNA, 20 bp, Artificial Sequence
  Description of Artificial Sequence: Synthetic oligonucleotide
  Target: LAMA2; (+) strand; PAM type: NRG; PAM sequence: TAG
tttttctttagtcttcttac

SEQ ID NO: 157513 - DNA, 20 bp, Artificial Sequence
  Description of Artificial Sequence: Synthetic oligonucleotide
  Target: LAMA2; (+) strand; PAM type: NRG; PAM sequence: CAG
tcttcttactagtcaaatat

SEQ ID NO: 157514 - DNA, 20 bp, Artificial Sequence
  Description of Artificial Sequence: Synthetic oligonucleotide
  Target: LAMA2; (+) strand; PAM type: NRG; PAM sequence: AAG
aaatatcagctaaacaaaca

SEQ ID NO: 157515 - DNA, 20 bp, Artificial Sequence
  Description of Artificial Sequence: Synthetic oligonucleotide
  Target: LAMA2; (+) strand; PAM type: NRG; PAM sequence: AAG
gctaaacaaacaaagaaaat

SEQ ID NO: 157516 - DNA, 20 bp, Artificial Sequence
  Description of Artificial Sequence: Synthetic oligonucleotide
  Target: LAMA2; (+) strand; PAM type: NRG; PAM sequence: TGG
aaagaaaataagtgtttgaa

SEQ ID NO: 157517 - DNA, 20 bp, Artificial Sequence
  Description of Artificial Sequence: Synthetic oligonucleotide
  Target: LAMA2; (+) strand; PAM type: NRG; PAM sequence: CAG
aaaataagtgtttgaatggt

SEQ ID NO: 157518 - DNA, 20 bp, Artificial Sequence
  Description of Artificial Sequence: Synthetic oligonucleotide
  Target: LAMA2; (+) strand; PAM type: NRG; PAM sequence: GAG
aataagtgtttgaatggtca

SEQ ID NO: 157519 - DNA, 20 bp, Artificial Sequence
  Description of Artificial Sequence: Synthetic oligonucleotide
  Target: LAMA2; (+) strand; PAM type: NRG; PAM sequence: AAG
ttgaatggtcagagaactat

SEQ ID NO: 157520 - DNA, 20 bp, Artificial Sequence
  Description of Artificial Sequence: Synthetic oligonucleotide
  Target: LAMA2; (+) strand; PAM type: NRG; PAM sequence: GAG
ggtcagagaactataagaat

SEQ ID NO: 157521 - DNA, 20 bp, Artificial Sequence
  Description of Artificial Sequence: Synthetic oligonucleotide
  Target: LAMA2; (+) strand; PAM type: NRG; PAM sequence: TGG
aactataagaatgagaattc

SEQ ID NO: 157522 - DNA, 20 bp, Artificial Sequence
  Description of Artificial Sequence: Synthetic oligonucleotide
  Target: LAMA2; (+) strand; PAM type: NRG; PAM sequence: CAG
tataagaatgagaattctgg

SEQ ID NO: 157523 - DNA, 20 bp, Artificial Sequence
  Description of Artificial Sequence: Synthetic oligonucleotide
  Target: LAMA2; (+) strand; PAM type: NRG; PAM sequence: AGG
ataagaatgagaattctggc

SEQ ID NO: 157524 - DNA, 20 bp, Artificial Sequence
  Description of Artificial Sequence: Synthetic oligonucleotide
  Target: LAMA2; (+) strand; PAM type: NRG; PAM sequence: AAG
aaattcatttttaaaaatcc

SEQ ID NO: 157525 - DNA, 20 bp, Artificial Sequence
  Description of Artificial Sequence: Synthetic oligonucleotide
  Target: LAMA2; (+) strand; PAM type: NRG; PAM sequence: CAG
atttttaaaaatccaagtaa

SEQ ID NO: 157526 - DNA, 20 bp, Artificial Sequence
  Description of Artificial Sequence: Synthetic oligonucleotide
  Target: LAMA2; (+) strand; PAM type: NRG; PAM sequence: TGG
taaaaatccaagtaacagaa

SEQ ID NO: 157527 - DNA, 20 bp, Artificial Sequence
  Description of Artificial Sequence: Synthetic oligonucleotide
  Target: LAMA2; (+) strand; PAM type: NRG; PAM sequence: AAG
acagaatggataaatataaa

SEQ ID NO: 157528 - DNA, 20 bp, Artificial Sequence
  Description of Artificial Sequence: Synthetic oligonucleotide
  Target: LAMA2; (+) strand; PAM type: NRG; PAM sequence: GAG
agaatggataaatataaaaa

SEQ ID NO: 157529 - DNA, 20 bp, Artificial Sequence
  Description of Artificial Sequence: Synthetic oligonucleotide
  Target: LAMA2; (+) strand; PAM type: NRG; PAM sequence: AGG
gaatggataaatataaaaag

SEQ ID NO: 157530 - DNA, 20 bp, Artificial Sequence
  Description of Artificial Sequence: Synthetic oligonucleotide
  Target: LAMA2; (+) strand; PAM type: NRG; PAM sequence: TAG
ggataaatataaaaagaggc

SEQ ID NO: 157531 - DNA, 20 bp, Artificial Sequence
  Description of Artificial Sequence: Synthetic oligonucleotide
  Target: LAMA2; (+) strand; PAM type: NRG; PAM sequence: CAG
aatataaaaagaggctagat

SEQ ID NO: 157532 - DNA, 20 bp, Artificial Sequence
  Description of Artificial Sequence: Synthetic oligonucleotide
  Target: LAMA2; (+) strand; PAM type: NRG; PAM sequence: CAG
gaggctagatcagacatacc

SEQ ID NO: 157533 - DNA, 20 bp, Artificial Sequence
  Description of Artificial Sequence: Synthetic oligonucleotide
  Target: LAMA2; (+) strand; PAM type: NRG; PAM sequence: CAG
cagacatacccagacattct

SEQ ID NO: 157534 - DNA, 20 bp, Artificial Sequence
  Description of Artificial Sequence: Synthetic oligonucleotide
  Target: LAMA2; (+) strand; PAM type: NRG; PAM sequence: CAG
atacccagacattctcagtt

SEQ ID NO: 157535 - DNA, 20 bp, Artificial Sequence
  Description of Artificial Sequence: Synthetic oligonucleotide
  Target: LAMA2; (+) strand; PAM type: NRG; PAM sequence: TAG
ttctcagttcagaatgttca

SEQ ID NO: 157536 - DNA, 20 bp, Artificial Sequence
  Description of Artificial Sequence: Synthetic oligonucleotide
  Target: LAMA2; (+) strand; PAM type: NRG; PAM sequence: TAG
gcgtattcataattttttca

SEQ ID NO: 157537 - DNA, 20 bp, Artificial Sequence
  Description of Artificial Sequence: Synthetic oligonucleotide
  Target: LAMA2; (+) strand; PAM type: NRG; PAM sequence: CAG
catagtgcctccttgaccaa

SEQ ID NO: 157538 - DNA, 20 bp, Artificial Sequence
  Description of Artificial Sequence: Synthetic oligonucleotide
  Target: LAMA2; (+) strand; PAM type: NRG; PAM sequence: AAG
cctccttgaccaacagaaat

SEQ ID NO: 157539 - DNA, 20 bp, Artificial Sequence
  Description of Artificial Sequence: Synthetic oligonucleotide
  Target: LAMA2; (+) strand; PAM type: NRG; PAM sequence: CAG
tgaccaacagaaataagcca

SEQ ID NO: 157540 - DNA, 20 bp, Artificial Sequence
  Description of Artificial Sequence: Synthetic oligonucleotide
  Target: LAMA2; (+) strand; PAM type: NRG; PAM sequence: AAG
aagccacagttctatttctt

SEQ ID NO: 157541 - DNA, 20 bp, Artificial Sequence
  Description of Artificial Sequence: Synthetic oligonucleotide
  Target: LAMA2; (+) strand; PAM type: NRG; PAM sequence: TAG
ccacagttctatttcttaag

SEQ ID NO: 157542 - DNA, 20 bp, Artificial Sequence
  Description of Artificial Sequence: Synthetic oligonucleotide
  Target: LAMA2; (+) strand; PAM type: NRG; PAM sequence: TAG
agttctatttcttaagtagt

SEQ ID NO: 157543 - DNA, 20 bp, Artificial Sequence
  Description of Artificial Sequence: Synthetic oligonucleotide
  Target: LAMA2; (+) strand; PAM type: NRG; PAM sequence: TAG
atattcatgttttaacaacc

SEQ ID NO: 157544 - DNA, 20 bp, Artificial Sequence
  Description of Artificial Sequence: Synthetic oligonucleotide
  Target: LAMA2; (+) strand; PAM type: NRG; PAM sequence: AAG
caacctagcaattgtttaaa

SEQ ID NO: 157545 - DNA, 20 bp, Artificial Sequence
  Description of Artificial Sequence: Synthetic oligonucleotide
  Target: LAMA2; (+) strand; PAM type: NRG; PAM sequence: TGG
gcaattgtttaaaaagaaaa

SEQ ID NO: 157546 - DNA, 20 bp, Artificial Sequence
  Description of Artificial Sequence: Synthetic oligonucleotide
  Target: LAMA2; (+) strand; PAM type: NRG; PAM sequence: CAG
ttgtttaaaaagaaaatgga

SEQ ID NO: 157547 - DNA, 20 bp, Artificial Sequence
  Description of Artificial Sequence: Synthetic oligonucleotide
  Target: LAMA2; (+) strand; PAM type: NRG; PAM sequence: CAG
taatttttttcataaataac

SEQ ID NO: 157548 - DNA, 20 bp, Artificial Sequence
  Description of Artificial Sequence: Synthetic oligonucleotide
  Target: LAMA2; (+) strand; PAM type: NRG; PAM sequence: TGG
taaccagaatcacttactga

SEQ ID NO: 157549 - DNA, 20 bp, Artificial Sequence
  Description of Artificial Sequence: Synthetic oligonucleotide
  Target: LAMA2; (+) strand; PAM type: NRG; PAM sequence: GGG
aaccagaatcacttactgat

SEQ ID NO: 157550 - DNA, 20 bp, Artificial Sequence
  Description of Artificial Sequence: Synthetic oligonucleotide
  Target: LAMA2; (+) strand; PAM type: NRG; PAM sequence: TGG
aatcacttactgatgggatg

SEQ ID NO: 157551 - DNA, 20 bp, Artificial Sequence
  Description of Artificial Sequence: Synthetic oligonucleotide
  Target: LAMA2; (+) strand; PAM type: NRG; PAM sequence: TGG
ctgatgggatgtggtacctt

SEQ ID NO: 157552 - DNA, 20 bp, Artificial Sequence
  Description of Artificial Sequence: Synthetic oligonucleotide
  Target: LAMA2; (+) strand; PAM type: NRG; PAM sequence: GGG
tgatgggatgtggtaccttt

SEQ ID NO: 157553 - DNA, 20 bp, Artificial Sequence
  Description of Artificial Sequence: Synthetic oligonucleotide
  Target: LAMA2; (+) strand; PAM type: NRG; PAM sequence: GGG
gatgggatgtggtacctttg

SEQ ID NO: 157554 - DNA, 20 bp, Artificial Sequence
  Description of Artificial Sequence: Synthetic oligonucleotide
  Target: LAMA2; (+) strand; PAM type: NRG; PAM sequence: TAG
gggatgtggtacctttgggg

SEQ ID NO: 157555 - DNA, 20 bp, Artificial Sequence
  Description of Artificial Sequence: Synthetic oligonucleotide
  Target: LAMA2; (+) strand; PAM type: NRG; PAM sequence: GAG
gtatataccttctcaaactt

SEQ ID NO: 157556 - DNA, 20 bp, Artificial Sequence
  Description of Artificial Sequence: Synthetic oligonucleotide
  Target: LAMA2; (+) strand; PAM type: NRG; PAM sequence: CAG
accttctcaaacttgagtat

SEQ ID NO: 157557 - DNA, 20 bp, Artificial Sequence
  Description of Artificial Sequence: Synthetic oligonucleotide
  Target: LAMA2; (+) strand; PAM type: NRG; PAM sequence: TGG
ctcaaacttgagtatcagat

SEQ ID NO: 157558 - DNA, 20 bp, Artificial Sequence
  Description of Artificial Sequence: Synthetic oligonucleotide
  Target: LAMA2; (+) strand; PAM type: NRG; PAM sequence: CAG
tttccacattgacttttgtg

SEQ ID NO: 157559 - DNA, 20 bp, Artificial Sequence
  Description of Artificial Sequence: Synthetic oligonucleotide
  Target: LAMA2; (+) strand; PAM type: NRG; PAM sequence: CAG
gcagttcttgcttttaatta

SEQ ID NO: 157560 - DNA, 20 bp, Artificial Sequence
  Description of Artificial Sequence: Synthetic oligonucleotide
  Target: LAMA2; (+) strand; PAM type: NRG; PAM sequence: AAG
tctgaaaacctttcttaata

SEQ ID NO: 157561 - DNA, 20 bp, Artificial Sequence
  Description of Artificial Sequence: Synthetic oligonucleotide
  Target: LAMA2; (+) strand; PAM type: NRG; PAM sequence: AAG
cctttcttaataaagatata

SEQ ID NO: 157562 - DNA, 20 bp, Artificial Sequence
  Description of Artificial Sequence: Synthetic oligonucleotide
  Target: LAMA2; (+) strand; PAM type: NRG; PAM sequence: TGG
ttcttaataaagatataaag

SEQ ID NO: 157563 - DNA, 20 bp, Artificial Sequence
  Description of Artificial Sequence: Synthetic oligonucleotide
  Target: LAMA2; (+) strand; PAM type: NRG; PAM sequence: AAG
taaagatataaagtggccta

SEQ ID NO: 157564 - DNA, 20 bp, Artificial Sequence
  Description of Artificial Sequence: Synthetic oligonucleotide
  Target: LAMA2; (+) strand; PAM type: NRG; PAM sequence: AAG
tataaagtggcctaaagtac

SEQ ID NO: 157565 - DNA, 20 bp, Artificial Sequence
  Description of Artificial Sequence: Synthetic oligonucleotide
  Target: LAMA2; (+) strand; PAM type: NRG; PAM sequence: AAG
aagtggcctaaagtacaagt

SEQ ID NO: 157566 - DNA, 20 bp, Artificial Sequence
  Description of Artificial Sequence: Synthetic oligonucleotide
  Target: LAMA2; (+) strand; PAM type: NRG; PAM sequence: CAG
tggcctaaagtacaagtaag

SEQ ID NO: 157567 - DNA, 20 bp, Artificial Sequence
  Description of Artificial Sequence: Synthetic oligonucleotide
  Target: LAMA2; (+) strand; PAM type: NRG; PAM sequence: TGG
agtacaagtaagcagaaaca

SEQ ID NO: 157568 - DNA, 20 bp, Artificial Sequence
  Description of Artificial Sequence: Synthetic oligonucleotide
  Target: LAMA2; (+) strand; PAM type: NRG; PAM sequence: GAG
gaaacatggctcaaaatgtt

SEQ ID NO: 157569 - DNA, 20 bp, Artificial Sequence
  Description of Artificial Sequence: Synthetic oligonucleotide
  Target: LAMA2; (+) strand; PAM type: NRG; PAM sequence: AAG
aaaatgttgagaacattctt

SEQ ID NO: 157570 - DNA, 20 bp, Artificial Sequence
  Description of Artificial Sequence: Synthetic oligonucleotide
  Target: LAMA2; (+) strand; PAM type: NRG; PAM sequence: TGG
atgttgagaacattcttaag

SEQ ID NO: 157571 - DNA, 20 bp, Artificial Sequence
  Description of Artificial Sequence: Synthetic oligonucleotide
  Target: LAMA2; (+) strand; PAM type: NRG; PAM sequence: TAG
gaacattcttaagtggaata

SEQ ID NO: 157572 - DNA, 20 bp, Artificial Sequence
  Description of Artificial Sequence: Synthetic oligonucleotide
  Target: LAMA2; (+) strand; PAM type: NRG; PAM sequence: AAG
agtggaatatagcatgttct

SEQ ID NO: 157573 - DNA, 20 bp, Artificial Sequence
  Description of Artificial Sequence: Synthetic oligonucleotide
  Target: LAMA2; (+) strand; PAM type: NRG; PAM sequence: AGG
gtggaatatagcatgttcta

SEQ ID NO: 157574 - DNA, 20 bp, Artificial Sequence
  Description of Artificial Sequence: Synthetic oligonucleotide
  Target: LAMA2; (+) strand; PAM type: NRG; PAM sequence: TAG
acttgtgaaccaccttgaat

SEQ ID NO: 157575 - DNA, 20 bp, Artificial Sequence
  Description of Artificial Sequence: Synthetic oligonucleotide
  Target: LAMA2; (+) strand; PAM type: NRG; PAM sequence: CAG
ccaccttgaattagttattg

SEQ ID NO: 157576 - DNA, 20 bp, Artificial Sequence
  Description of Artificial Sequence: Synthetic oligonucleotide
  Target: LAMA2; (+) strand; PAM type: NRG; PAM sequence: CAG
ttagttattgcagtgcccaa

SEQ ID NO: 157577 - DNA, 20 bp, Artificial Sequence
  Description of Artificial Sequence: Synthetic oligonucleotide
  Target: LAMA2; (+) strand; PAM type: NRG; PAM sequence: TAG
tgcagtgcccaacagatatt

SEQ ID NO: 157578 - DNA, 20 bp, Artificial Sequence
  Description of Artificial Sequence: Synthetic oligonucleotide
  Target: LAMA2; (+) strand; PAM type: NRG; PAM sequence: GAG
atattccactgtgcctttgt

SEQ ID NO: 157579 - DNA, 20 bp, Artificial Sequence
  Description of Artificial Sequence: Synthetic oligonucleotide
  Target: LAMA2; (+) strand; PAM type: NRG; PAM sequence: CAG
gtgcctttgtgagttcactg

SEQ ID NO: 157580 - DNA, 20 bp, Artificial Sequence
  Description of Artificial Sequence: Synthetic oligonucleotide
  Target: LAMA2; (+) strand; PAM type: NRG; PAM sequence: TGG
gtgagttcactgcagcaccc

SEQ ID NO: 157581 - DNA, 20 bp, Artificial Sequence
  Description of Artificial Sequence: Synthetic oligonucleotide
  Target: LAMA2; (+) strand; PAM type: NRG; PAM sequence: GGG
tgagttcactgcagcaccct

SEQ ID NO: 157582 - DNA, 20 bp, Artificial Sequence
  Description of Artificial Sequence: Synthetic oligonucleotide
  Target: LAMA2; (+) strand; PAM type: NRG; PAM sequence: GGG
gagttcactgcagcaccctg

SEQ ID NO: 157583 - DNA, 20 bp, Artificial Sequence
  Description of Artificial Sequence: Synthetic oligonucleotide
  Target: LAMA2; (+) strand; PAM type: NRG; PAM sequence: CAG
ccctggggcacctctacaca

SEQ ID NO: 157584 - DNA, 20 bp, Artificial Sequence
  Description of Artificial Sequence: Synthetic oligonucleotide
  Target: LAMA2; (+) strand; PAM type: NRG; PAM sequence: CAG
ctacacacagtttgtgaaca

SEQ ID NO: 157585 - DNA, 20 bp, Artificial Sequence
  Description of Artificial Sequence: Synthetic oligonucleotide
  Target: LAMA2; (+) strand; PAM type: NRG; PAM sequence: AGG
tacacacagtttgtgaacac

SEQ ID NO: 157586 - DNA, 20 bp, Artificial Sequence
  Description of Artificial Sequence: Synthetic oligonucleotide
  Target: LAMA2; (+) strand; PAM type: NRG; PAM sequence: GGG
acacacagtttgtgaacaca

SEQ ID NO: 157587 - DNA, 20 bp, Artificial Sequence
  Description of Artificial Sequence: Synthetic oligonucleotide
  Target: LAMA2; (+) strand; PAM type: NRG; PAM sequence: GGG
cacacagtttgtgaacacag

SEQ ID NO: 157588 - DNA, 20 bp, Artificial Sequence
  Description of Artificial Sequence: Synthetic oligonucleotide
  Target: LAMA2; (+) strand; PAM type: NRG; PAM sequence: TAG
acagtttgtgaacacagggg

SEQ ID NO: 157589 - DNA, 20 bp, Artificial Sequence
  Description of Artificial Sequence: Synthetic oligonucleotide
  Target: LAMA2; (+) strand; PAM type: NRG; PAM sequence: TAG
tttgtgaacacaggggtaga

SEQ ID NO: 157590 - DNA, 20 bp, Artificial Sequence
  Description of Artificial Sequence: Synthetic oligonucleotide
  Target: LAMA2; (+) strand; PAM type: NRG; PAM sequence: TAG
acacaggggtagatagatcc

SEQ ID NO: 157591 - DNA, 20 bp, Artificial Sequence
  Description of Artificial Sequence: Synthetic oligonucleotide
  Target: LAMA2; (+) strand; PAM type: NRG; PAM sequence: GAG
acaggggtagatagatccta

SEQ ID NO: 157592 - DNA, 20 bp, Artificial Sequence
  Description of Artificial Sequence: Synthetic oligonucleotide
  Target: LAMA2; (+) strand; PAM type: NRG; PAM sequence: AGG
caggggtagatagatcctag

SEQ ID NO: 157593 - DNA, 20 bp, Artificial Sequence
  Description of Artificial Sequence: Synthetic oligonucleotide
  Target: LAMA2; (+) strand; PAM type: NRG; PAM sequence: CGG
ctagaggcattgaaactaca

SEQ ID NO: 157594 - DNA, 20 bp, Artificial Sequence
  Description of Artificial Sequence: Synthetic oligonucleotide
  Target: LAMA2; (+) strand; PAM type: NRG; PAM sequence: TAG
cacggaaacttgaatgacgt

SEQ ID NO: 157595 - DNA, 20 bp, Artificial Sequence
  Description of Artificial Sequence: Synthetic oligonucleotide
  Target: LAMA2; (+) strand; PAM type: NRG; PAM sequence: AGG
acggaaacttgaatgacgtt

SEQ ID NO: 157596 - DNA, 20 bp, Artificial Sequence
  Description of Artificial Sequence: Synthetic oligonucleotide
  Target: LAMA2; (+) strand; PAM type: NRG; PAM sequence: GGG
cggaaacttgaatgacgtta

SEQ ID NO: 157597 - DNA, 20 bp, Artificial Sequence
  Description of Artificial Sequence: Synthetic oligonucleotide
  Target: LAMA2; (+) strand; PAM type: NRG; PAM sequence: CAG
ttgaatgacgttagggatcc

SEQ ID NO: 157598 - DNA, 20 bp, Artificial Sequence
  Description of Artificial Sequence: Synthetic oligonucleotide
  Target: LAMA2; (+) strand; PAM type: NRG; PAM sequence: GAG
gaatgacgttagggatccca

SEQ ID NO: 157599 - DNA, 20 bp, Artificial Sequence
  Description of Artificial Sequence: Synthetic oligonucleotide
  Target: LAMA2; (+) strand; PAM type: NRG; PAM sequence: TGG
gttagggatcccagagccac

SEQ ID NO: 157600 - DNA, 20 bp, Artificial Sequence
  Description of Artificial Sequence: Synthetic oligonucleotide
  Target: LAMA2; (+) strand; PAM type: NRG; PAM sequence: GGG
ttagggatcccagagccact

SEQ ID NO: 157601 - DNA, 20 bp, Artificial Sequence
  Description of Artificial Sequence: Synthetic oligonucleotide
  Target: LAMA2; (+) strand; PAM type: NRG; PAM sequence: GGG
tagggatcccagagccactg

SEQ ID NO: 157602 - DNA, 20 bp, Artificial Sequence
  Description of Artificial Sequence: Synthetic oligonucleotide
  Target: LAMA2; (+) strand; PAM type: NRG; PAM sequence: TAG
agccactggggaatcttcat

SEQ ID NO: 157603 - DNA, 20 bp, Artificial Sequence
  Description of Artificial Sequence: Synthetic oligonucleotide
  Target: LAMA2; (+) strand; PAM type: NRG; PAM sequence: AGG
gccactggggaatcttcatt

SEQ ID NO: 157604 - DNA, 20 bp, Artificial Sequence
  Description of Artificial Sequence: Synthetic oligonucleotide
  Target: LAMA2; (+) strand; PAM type: NRG; PAM sequence: GGG
ccactggggaatcttcatta

SEQ ID NO: 157605 - DNA, 20 bp, Artificial Sequence
  Description of Artificial Sequence: Synthetic oligonucleotide
  Target: LAMA2; (+) strand; PAM type: NRG; PAM sequence: AAG
ctggggaatcttcattaggg

SEQ ID NO: 157606 - DNA, 20 bp, Artificial Sequence
  Description of Artificial Sequence: Synthetic oligonucleotide
  Target: LAMA2; (+) strand; PAM type: NRG; PAM sequence: TAG
aagtgcaacaacatatgaaa

SEQ ID NO: 157607 - DNA, 20 bp, Artificial Sequence
  Description of Artificial Sequence: Synthetic oligonucleotide
  Target: LAMA2; (+) strand; PAM type: NRG; PAM sequence: AAG
tttccctatcaaaaaaactg

SEQ ID NO: 157608 - DNA, 20 bp, Artificial Sequence
  Description of Artificial Sequence: Synthetic oligonucleotide
  Target: LAMA2; (+) strand; PAM type: NRG; PAM sequence: CAG
cctatcaaaaaaactgaagt

SEQ ID NO: 157609 - DNA, 20 bp, Artificial Sequence
  Description of Artificial Sequence: Synthetic oligonucleotide
  Target: LAMA2; (+) strand; PAM type: NRG; PAM sequence: GAG
tatcaaaaaaactgaagtca

SEQ ID NO: 157610 - DNA, 20 bp, Artificial Sequence
  Description of Artificial Sequence: Synthetic oligonucleotide
  Target: LAMA2; (+) strand; PAM type: NRG; PAM sequence: GAG
tcaaaaaaactgaagtcaga

SEQ ID NO: 157611 - DNA, 20 bp, Artificial Sequence
  Description of Artificial Sequence: Synthetic oligonucleotide
  Target: LAMA2; (+) strand; PAM type: NRG; PAM sequence: CAG
tgaagtcagagagatgaatt

SEQ ID NO: 157612 - DNA, 20 bp, Artificial Sequence
  Description of Artificial Sequence: Synthetic oligonucleotide
  Target: LAMA2; (+) strand; PAM type: NRG; PAM sequence: GAG
gatgaattcagatgcttgat

SEQ ID NO: 157613 - DNA, 20 bp, Artificial Sequence
  Description of Artificial Sequence: Synthetic oligonucleotide
  Target: LAMA2; (+) strand; PAM type: NRG; PAM sequence: TGG
atgcttgatgagaacctact

SEQ ID NO: 157614 - DNA, 20 bp, Artificial Sequence
  Description of Artificial Sequence: Synthetic oligonucleotide
  Target: LAMA2; (+) strand; PAM type: NRG; PAM sequence: TGG
gatgagaacctacttggtaa

SEQ ID NO: 157615 - DNA, 20 bp, Artificial Sequence
  Description of Artificial Sequence: Synthetic oligonucleotide
  Target: LAMA2; (+) strand; PAM type: NRG; PAM sequence: AAG
cctacttggtaatggatttg

SEQ ID NO: 157616 - DNA, 20 bp, Artificial Sequence
  Description of Artificial Sequence: Synthetic oligonucleotide
  Target: LAMA2; (+) strand; PAM type: NRG; PAM sequence: AGG
ctacttggtaatggatttga

SEQ ID NO: 157617 - DNA, 20 bp, Artificial Sequence
  Description of Artificial Sequence: Synthetic oligonucleotide
  Target: LAMA2; (+) strand; PAM type: NRG; PAM sequence: GAG
acttggtaatggatttgaag

SEQ ID NO: 157618 - DNA, 20 bp, Artificial Sequence
  Description of Artificial Sequence: Synthetic oligonucleotide
  Target: LAMA2; (+) strand; PAM type: NRG; PAM sequence: GAG
ttggtaatggatttgaagga

SEQ ID NO: 157619 - DNA, 20 bp, Artificial Sequence
  Description of Artificial Sequence: Synthetic oligonucleotide
  Target: LAMA2; (+) strand; PAM type: NRG; PAM sequence: GAG
ggtaatggatttgaaggaga

SEQ ID NO: 157620 - DNA, 20 bp, Artificial Sequence
  Description of Artificial Sequence: Synthetic oligonucleotide
  Target: LAMA2; (+) strand; PAM type: NRG; PAM sequence: TAG
ttgaaggagagagtaaacgt

SEQ ID NO: 157621 - DNA, 20 bp, Artificial Sequence
  Description of Artificial Sequence: Synthetic oligonucleotide
  Target: LAMA2; (+) strand; PAM type: NRG; PAM sequence: AGG
tgaaggagagagtaaacgtt

SEQ ID NO: 157622 - DNA, 20 bp, Artificial Sequence
  Description of Artificial Sequence: Synthetic oligonucleotide
  Target: LAMA2; (+) strand; PAM type: NRG; PAM sequence: AAG
gagtaaacgttaggatactg

SEQ ID NO: 157623 - DNA, 20 bp, Artificial Sequence
  Description of Artificial Sequence: Synthetic oligonucleotide
  Target: LAMA2; (+) strand; PAM type: NRG; PAM sequence: AGG
agtaaacgttaggatactga

SEQ ID NO: 157624 - DNA, 20 bp, Artificial Sequence
  Description of Artificial Sequence: Synthetic oligonucleotide
  Target: LAMA2; (+) strand; PAM type: NRG; PAM sequence: GGG
gtaaacgttaggatactgaa

SEQ ID NO: 157625 - DNA, 20 bp, Artificial Sequence
  Description of Artificial Sequence: Synthetic oligonucleotide
  Target: LAMA2; (+) strand; PAM type: NRG; PAM sequence: AAG
taggatactgaagggattct

SEQ ID NO: 157626 - DNA, 20 bp, Artificial Sequence
  Description of Artificial Sequence: Synthetic oligonucleotide
  Target: LAMA2; (+) strand; PAM type: NRG; PAM sequence: GAG
ggatactgaagggattctaa

SEQ ID NO: 157627 - DNA, 20 bp, Artificial Sequence
  Description of Artificial Sequence: Synthetic oligonucleotide
  Target: LAMA2; (+) strand; PAM type: NRG; PAM sequence: GAG
atactgaagggattctaaga

SEQ ID NO: 157628 - DNA, 20 bp, Artificial Sequence
  Description of Artificial Sequence: Synthetic oligonucleotide
  Target: LAMA2; (+) strand; PAM type: NRG; PAM sequence: CAG
gaagggattctaagagagtg

SEQ ID NO: 157629 - DNA, 20 bp, Artificial Sequence
  Description of Artificial Sequence: Synthetic oligonucleotide
  Target: LAMA2; (+) strand; PAM type: NRG; PAM sequence: AAG
gggattctaagagagtgcag

SEQ ID NO: 157630 - DNA, 20 bp, Artificial Sequence
  Description of Artificial Sequence: Synthetic oligonucleotide
  Target: LAMA2; (+) strand; PAM type: NRG; PAM sequence: GAG
ttctaagagagtgcagaagc

SEQ ID NO: 157631 - DNA, 20 bp, Artificial Sequence
  Description of Artificial Sequence: Synthetic oligonucleotide
  Target: LAMA2; (+) strand; PAM type: NRG; PAM sequence: AGG
tctaagagagtgcagaagcg

SEQ ID NO: 157632 - DNA, 20 bp, Artificial Sequence
  Description of Artificial Sequence: Synthetic oligonucleotide
  Target: LAMA2; (+) strand; PAM type: NRG; PAM sequence: GGG
ctaagagagtgcagaagcga

SEQ ID NO: 157633 - DNA, 20 bp, Artificial Sequence
  Description of Artificial Sequence: Synthetic oligonucleotide
  Target: LAMA2; (+) strand; PAM type: NRG; PAM sequence: AAG
gagagtgcagaagcgagggc

SEQ ID NO: 157634 - DNA, 20 bp, Artificial Sequence
  Description of Artificial Sequence: Synthetic oligonucleotide
  Target: LAMA2; (+) strand; PAM type: NRG; PAM sequence: AGG
agagtgcagaagcgagggca

SEQ ID NO: 157635 - DNA, 20 bp, Artificial Sequence
  Description of Artificial Sequence: Synthetic oligonucleotide
  Target: LAMA2; (+) strand; PAM type: NRG; PAM sequence: GAG
agtgcagaagcgagggcaag

SEQ ID NO: 157636 - DNA, 20 bp, Artificial Sequence
  Description of Artificial Sequence: Synthetic oligonucleotide
  Target: LAMA2; (+) strand; PAM type: NRG; PAM sequence: AGG
gtgcagaagcgagggcaagg

SEQ ID NO: 157637 - DNA, 20 bp, Artificial Sequence
  Description of Artificial Sequence: Synthetic oligonucleotide
  Target: LAMA2; (+) strand; PAM type: NRG; PAM sequence: AAG
gggcaaggaggcacaaaacg

SEQ ID NO: 157638 - DNA, 20 bp, Artificial Sequence
  Description of Artificial Sequence: Synthetic oligonucleotide
  Target: LAMA2; (+) strand; PAM type: NRG; PAM sequence: AGG
ggcaaggaggcacaaaacga

SEQ ID NO: 157639 - DNA, 20 bp, Artificial Sequence
  Description of Artificial Sequence: Synthetic oligonucleotide
  Target: LAMA2; (+) strand; PAM type: NRG; PAM sequence: CGG
aaggaggcacaaaacgaagg

SEQ ID NO: 157640 - DNA, 20 bp, Artificial Sequence
  Description of Artificial Sequence: Synthetic oligonucleotide
  Target: LAMA2; (+) strand; PAM type: NRG; PAM sequence: TGG
cacaaaacgaaggcggcacc

SEQ ID NO: 157641 - DNA, 20 bp, Artificial Sequence
  Description of Artificial Sequence: Synthetic oligonucleotide
  Target: LAMA2; (+) strand; PAM type: NRG; PAM sequence: TGG
cgaaggcggcacctggaaca

SEQ ID NO: 157642 - DNA, 20 bp, Artificial Sequence
  Description of Artificial Sequence: Synthetic oligonucleotide
  Target: LAMA2; (+) strand; PAM type: NRG; PAM sequence: GAG
aaggcggcacctggaacatg

SEQ ID NO: 157643 - DNA, 20 bp, Artificial Sequence
  Description of Artificial Sequence: Synthetic oligonucleotide
  Target: LAMA2; (+) strand; PAM type: NRG; PAM sequence: AGG
aggcggcacctggaacatgg

SEQ ID NO: 157644 - DNA, 20 bp, Artificial Sequence
  Description of Artificial Sequence: Synthetic oligonucleotide
  Target: LAMA2; (+) strand; PAM type: NRG; PAM sequence: GAG
gcggcacctggaacatggag

SEQ ID NO: 157645 - DNA, 20 bp, Artificial Sequence
  Description of Artificial Sequence: Synthetic oligonucleotide
  Target: LAMA2; (+) strand; PAM type: NRG; PAM sequence: TGG
gcacctggaacatggaggag

SEQ ID NO: 157646 - DNA, 20 bp, Artificial Sequence
  Description of Artificial Sequence: Synthetic oligonucleotide
  Target: LAMA2; (+) strand; PAM type: NRG; PAM sequence: CAG
ctggaacatggaggagtgga

SEQ ID NO: 157647 - DNA, 20 bp, Artificial Sequence
  Description of Artificial Sequence: Synthetic oligonucleotide
  Target: LAMA2; (+) strand; PAM type: NRG; PAM sequence: TGG
aacatggaggagtggacaga

SEQ ID NO: 157648 - DNA, 20 bp, Artificial Sequence
  Description of Artificial Sequence: Synthetic oligonucleotide
  Target: LAMA2; (+) strand; PAM type: NRG; PAM sequence: GAG
catggaggagtggacagatg

SEQ ID NO: 157649 - DNA, 20 bp, Artificial Sequence
  Description of Artificial Sequence: Synthetic oligonucleotide
  Target: LAMA2; (+) strand; PAM type: NRG; PAM sequence: AAG
ggaggagtggacagatggag

SEQ ID NO: 157650 - DNA, 20 bp, Artificial Sequence
  Description of Artificial Sequence: Synthetic oligonucleotide
  Target: LAMA2; (+) strand; PAM type: NRG; PAM sequence: GAG
aggagtggacagatggagaa

SEQ ID NO: 157651 - DNA, 20 bp, Artificial Sequence
  Description of Artificial Sequence: Synthetic oligonucleotide
  Target: LAMA2; (+) strand; PAM type: NRG; PAM sequence: AGG
ggagtggacagatggagaag

SEQ ID NO: 157652 - DNA, 20 bp, Artificial Sequence
  Description of Artificial Sequence: Synthetic oligonucleotide
  Target: LAMA2; (+) strand; PAM type: NRG; PAM sequence: CAG
gtggacagatggagaagagg

SEQ ID NO: 157653 - DNA, 20 bp, Artificial Sequence
  Description of Artificial Sequence: Synthetic oligonucleotide
  Target: LAMA2; (+) strand; PAM type: NRG; PAM sequence: GAG
ggacagatggagaagaggca

SEQ ID NO: 157654 - DNA, 20 bp, Artificial Sequence
  Description of Artificial Sequence: Synthetic oligonucleotide
  Target: LAMA2; (+) strand; PAM type: NRG; PAM sequence: AAG
ggcagagaattctttatcta

SEQ ID NO: 157655 - DNA, 20 bp, Artificial Sequence
  Description of Artificial Sequence: Synthetic oligonucleotide
  Target: LAMA2; (+) strand; PAM type: NRG; PAM sequence: AAG
gagaattctttatctaaagc

SEQ ID NO: 157656 - DNA, 20 bp, Artificial Sequence
  Description of Artificial Sequence: Synthetic oligonucleotide
  Target: LAMA2; (+) strand; PAM type: NRG; PAM sequence: GAG
gaattctttatctaaagcaa

SEQ ID NO: 157657 - DNA, 20 bp, Artificial Sequence
  Description of Artificial Sequence: Synthetic oligonucleotide
  Target: LAMA2; (+) strand; PAM type: NRG; PAM sequence: AGG
aattctttatctaaagcaag

SEQ ID NO: 157658 - DNA, 20 bp, Artificial Sequence
  Description of Artificial Sequence: Synthetic oligonucleotide
  Target: LAMA2; (+) strand; PAM type: NRG; PAM sequence: AAG
ctttatctaaagcaagagga

SEQ ID NO: 157659 - DNA, 20 bp, Artificial Sequence
  Description of Artificial Sequence: Synthetic oligonucleotide
  Target: LAMA2; (+) strand; PAM type: NRG; PAM sequence: AGG
tttatctaaagcaagaggaa

SEQ ID NO: 157660 - DNA, 20 bp, Artificial Sequence
  Description of Artificial Sequence: Synthetic oligonucleotide
  Target: LAMA2; (+) strand; PAM type: NRG; PAM sequence: GGG
ttatctaaagcaagaggaaa

SEQ ID NO: 157661 - DNA, 20 bp, Artificial Sequence
  Description of Artificial Sequence: Synthetic oligonucleotide
  Target: LAMA2; (+) strand; PAM type: NRG; PAM sequence: CAG
aggaaagggcaacgtatact

SEQ ID NO: 157662 - DNA, 20 bp, Artificial Sequence
  Description of Artificial Sequence: Synthetic oligonucleotide
  Target: LAMA2; (+) strand; PAM type: NRG; PAM sequence: AAG
gtatactcagaatattctca

SEQ ID NO: 157663 - DNA, 20 bp, Artificial Sequence
  Description of Artificial Sequence: Synthetic oligonucleotide
  Target: LAMA2; (+) strand; PAM type: NRG; PAM sequence: TAG
aaagctttttccctgaataa

SEQ ID NO: 157664 - DNA, 20 bp, Artificial Sequence
  Description of Artificial Sequence: Synthetic oligonucleotide
  Target: LAMA2; (+) strand; PAM type: NRG; PAM sequence: CAG
ccctgaataatagcatcctt

SEQ ID NO: 157665 - DNA, 20 bp, Artificial Sequence
  Description of Artificial Sequence: Synthetic oligonucleotide
  Target: LAMA2; (+) strand; PAM type: NRG; PAM sequence: AAG
aataatagcatccttcagaa

SEQ ID NO: 157666 - DNA, 20 bp, Artificial Sequence
  Description of Artificial Sequence: Synthetic oligonucleotide
  Target: LAMA2; (+) strand; PAM type: NRG; PAM sequence: AAG
aatagcatccttcagaaaag

SEQ ID NO: 157667 - DNA, 20 bp, Artificial Sequence
  Description of Artificial Sequence: Synthetic oligonucleotide
  Target: LAMA2; (+) strand; PAM type: NRG; PAM sequence: AAG
cttgtaactgactcattgca

SEQ ID NO: 157668 - DNA, 20 bp, Artificial Sequence
  Description of Artificial Sequence: Synthetic oligonucleotide
  Target: LAMA2; (+) strand; PAM type: NRG; PAM sequence: TGG
ttgcaaagtctcttacacaa

SEQ ID NO: 157669 - DNA, 20 bp, Artificial Sequence
  Description of Artificial Sequence: Synthetic oligonucleotide
  Target: LAMA2; (+) strand; PAM type: NRG; PAM sequence: TGG
acacaatggtatgtactctt

SEQ ID NO: 157670 - DNA, 20 bp, Artificial Sequence
  Description of Artificial Sequence: Synthetic oligonucleotide
  Target: LAMA2; (+) strand; PAM type: NRG; PAM sequence: GGG
cacaatggtatgtactcttt

SEQ ID NO: 157671 - DNA, 20 bp, Artificial Sequence
  Description of Artificial Sequence: Synthetic oligonucleotide
  Target: LAMA2; (+) strand; PAM type: NRG; PAM sequence: GGG
acaatggtatgtactctttg

SEQ ID NO: 157672 - DNA, 20 bp, Artificial Sequence
  Description of Artificial Sequence: Synthetic oligonucleotide
  Target: LAMA2; (+) strand; PAM type: NRG; PAM sequence: AAG
atggtatgtactctttgggg

SEQ ID NO: 157673 - DNA, 20 bp, Artificial Sequence
  Description of Artificial Sequence: Synthetic oligonucleotide
  Target: LAMA2; (+) strand; PAM type: NRG; PAM sequence: TGG
ctctttggggaagacacaac

SEQ ID NO: 157674 - DNA, 20 bp, Artificial Sequence
  Description of Artificial Sequence: Synthetic oligonucleotide
  Target: LAMA2; (+) strand; PAM type: NRG; PAM sequence: CAG
gacacaactggaaacaacac

SEQ ID NO: 157675 - DNA, 20 bp, Artificial Sequence
  Description of Artificial Sequence: Synthetic oligonucleotide
  Target: LAMA2; (+) strand; PAM type: NRG; PAM sequence: AGG
acacaactggaaacaacacc

SEQ ID NO: 157676 - DNA, 20 bp, Artificial Sequence
  Description of Artificial Sequence: Synthetic oligonucleotide
  Target: LAMA2; (+) strand; PAM type: NRG; PAM sequence: AAG
actggaaacaacaccaggaa

SEQ ID NO: 157677 - DNA, 20 bp, Artificial Sequence
  Description of Artificial Sequence: Synthetic oligonucleotide
  Target: LAMA2; (+) strand; PAM type: NRG; PAM sequence: CAG
ccaggaaaagcttgatttta

SEQ ID NO: 157678 - DNA, 20 bp, Artificial Sequence
  Description of Artificial Sequence: Synthetic oligonucleotide
  Target: LAMA2; (+) strand; PAM type: NRG; PAM sequence: TGG
aagcttgattttacagctta

SEQ ID NO: 157679 - DNA, 20 bp, Artificial Sequence
  Description of Artificial Sequence: Synthetic oligonucleotide
  Target: LAMA2; (+) strand; PAM type: NRG; PAM sequence: AAG
ttgattttacagcttatgga

SEQ ID NO: 157680 - DNA, 20 bp, Artificial Sequence
  Description of Artificial Sequence: Synthetic oligonucleotide
  Target: LAMA2; (+) strand; PAM type: NRG; PAM sequence: TGG
tacagcttatggaaagattg

SEQ ID NO: 157681 - DNA, 20 bp, Artificial Sequence
  Description of Artificial Sequence: Synthetic oligonucleotide
  Target: LAMA2; (+) strand; PAM type: NRG; PAM sequence: GAG
cagcttatggaaagattgtg

SEQ ID NO: 157682 - DNA, 20 bp, Artificial Sequence
  Description of Artificial Sequence: Synthetic oligonucleotide
  Target: LAMA2; (+) strand; PAM type: NRG; PAM sequence: AAG
atggaaagattgtggagttg

SEQ ID NO: 157683 - DNA, 20 bp, Artificial Sequence
  Description of Artificial Sequence: Synthetic oligonucleotide
  Target: LAMA2; (+) strand; PAM type: NRG; PAM sequence: AGG
tggaaagattgtggagttga

SEQ ID NO: 157684 - DNA, 20 bp, Artificial Sequence
  Description of Artificial Sequence: Synthetic oligonucleotide
  Target: LAMA2; (+) strand; PAM type: NRG; PAM sequence: TAG
ttgtggagttgaaggaaaaa

SEQ ID NO: 157685 - DNA, 20 bp, Artificial Sequence
  Description of Artificial Sequence: Synthetic oligonucleotide
  Target: LAMA2; (+) strand; PAM type: NRG; PAM sequence: AAG
tggagttgaaggaaaaatag

SEQ ID NO: 157686 - DNA, 20 bp, Artificial Sequence
  Description of Artificial Sequence: Synthetic oligonucleotide
  Target: LAMA2; (+) strand; PAM type: NRG; PAM sequence: AGG
ggagttgaaggaaaaataga

SEQ ID NO: 157687 - DNA, 20 bp, Artificial Sequence
  Description of Artificial Sequence: Synthetic oligonucleotide
  Target: LAMA2; (+) strand; PAM type: NRG; PAM sequence: AAG
ttgaaggaaaaatagaagga

SEQ ID NO: 157688 - DNA, 20 bp, Artificial Sequence
  Description of Artificial Sequence: Synthetic oligonucleotide
  Target: LAMA2; (+) strand; PAM type: NRG; PAM sequence: AAG
agaaggaaagaaattttaaa

SEQ ID NO: 157689 - DNA, 20 bp, Artificial Sequence
  Description of Artificial Sequence: Synthetic oligonucleotide
  Target: LAMA2; (+) strand; PAM type: NRG; PAM sequence: AAG
aaagaaattttaaaaagaat

SEQ ID NO: 157690 - DNA, 20 bp, Artificial Sequence
  Description of Artificial Sequence: Synthetic oligonucleotide
  Target: LAMA2; (+) strand; PAM type: NRG; PAM sequence: TAG
aaagaataagttaatattcc

SEQ ID NO: 157691 - DNA, 20 bp, Artificial Sequence
  Description of Artificial Sequence: Synthetic oligonucleotide
  Target: LAMA2; (+) strand; PAM type: NRG; PAM sequence: AGG
aagaataagttaatattcct

SEQ ID NO: 157692 - DNA, 20 bp, Artificial Sequence
  Description of Artificial Sequence: Synthetic oligonucleotide
  Target: LAMA2; (+) strand; PAM type: NRG; PAM sequence: GGG
agaataagttaatattccta

SEQ ID NO: 157693 - DNA, 20 bp, Artificial Sequence
  Description of Artificial Sequence: Synthetic oligonucleotide
  Target: LAMA2; (+) strand; PAM type: NRG; PAM sequence: GGG
gaataagttaatattcctag

SEQ ID NO: 157694 - DNA, 20 bp, Artificial Sequence
  Description of Artificial Sequence: Synthetic oligonucleotide
  Target: LAMA2; (+) strand; PAM type: NRG; PAM sequence: CAG
ggggtgcatcctctaaattg

SEQ ID NO: 157695 - DNA, 20 bp, Artificial Sequence
  Description of Artificial Sequence: Synthetic oligonucleotide
  Target: LAMA2; (+) strand; PAM type: NRG; PAM sequence: GAG
ggtgcatcctctaaattgca

SEQ ID NO: 157696 - DNA, 20 bp, Artificial Sequence
  Description of Artificial Sequence: Synthetic oligonucleotide
  Target: LAMA2; (+) strand; PAM type: NRG; PAM sequence: AAG
aaattgcagagtgatatctt

SEQ ID NO: 157697 - DNA, 20 bp, Artificial Sequence
  Description of Artificial Sequence: Synthetic oligonucleotide
  Target: LAMA2; (+) strand; PAM type: NRG; PAM sequence: AAG
atatcttaagcaatcctttt

SEQ ID NO: 157698 - DNA, 20 bp, Artificial Sequence
  Description of Artificial Sequence: Synthetic oligonucleotide
  Target: LAMA2; (+) strand; PAM type: NRG; PAM sequence: AAG
aatccttttaagaattactt

SEQ ID NO: 157699 - DNA, 20 bp, Artificial Sequence
  Description of Artificial Sequence: Synthetic oligonucleotide
  Target: LAMA2; (+) strand; PAM type: NRG; PAM sequence: GAG
tccttttaagaattacttaa

SEQ ID NO: 157700 - DNA, 20 bp, Artificial Sequence
  Description of Artificial Sequence: Synthetic oligonucleotide
  Target: LAMA2; (+) strand; PAM type: NRG; PAM sequence: GAG
taagaattacttaagagcct

SEQ ID NO: 157701 - DNA, 20 bp, Artificial Sequence
  Description of Artificial Sequence: Synthetic oligonucleotide
  Target: LAMA2; (+) strand; PAM type: NRG; PAM sequence: TGG
attacttaagagcctgagcg

SEQ ID NO: 157702 - DNA, 20 bp, Artificial Sequence
  Description of Artificial Sequence: Synthetic oligonucleotide
  Target: LAMA2; (+) strand; PAM type: NRG; PAM sequence: TGG
acttaagagcctgagcgtgg

SEQ ID NO: 157703 - DNA, 20 bp, Artificial Sequence
  Description of Artificial Sequence: Synthetic oligonucleotide
  Target: LAMA2; (+) strand; PAM type: NRG; PAM sequence: CAG
gtggctcacacctgtaatcc

SEQ ID NO: 157704 - DNA, 20 bp, Artificial Sequence
  Description of Artificial Sequence: Synthetic oligonucleotide
  Target: LAMA2; (+) strand; PAM type: NRG; PAM sequence: TGG
cacctgtaatcccagcactt

SEQ ID NO: 157705 - DNA, 20 bp, Artificial Sequence
  Description of Artificial Sequence: Synthetic oligonucleotide
  Target: LAMA2; (+) strand; PAM type: NRG; PAM sequence: GGG
acctgtaatcccagcacttt

SEQ ID NO: 157706 - DNA, 20 bp, Artificial Sequence
  Description of Artificial Sequence: Synthetic oligonucleotide
  Target: LAMA2; (+) strand; PAM type: NRG; PAM sequence: GAG
ctgtaatcccagcactttgg

SEQ ID NO: 157707 - DNA, 20 bp, Artificial Sequence
  Description of Artificial Sequence: Synthetic oligonucleotide
  Target: LAMA2; (+) strand; PAM type: NRG; PAM sequence: CGG
aatcccagcactttgggaga

SEQ ID NO: 157708 - DNA, 20 bp, Artificial Sequence
  Description of Artificial Sequence: Synthetic oligonucleotide
  Target: LAMA2; (+) strand; PAM type: NRG; PAM sequence: GAG
tcccagcactttgggagacg

SEQ ID NO: 157709 - DNA, 20 bp, Artificial Sequence
  Description of Artificial Sequence: Synthetic oligonucleotide
  Target: LAMA2; (+) strand; PAM type: NRG; PAM sequence: AGG
cccagcactttgggagacgg

SEQ ID NO: 157710 - DNA, 20 bp, Artificial Sequence
  Description of Artificial Sequence: Synthetic oligonucleotide
  Target: LAMA2; (+) strand; PAM type: NRG; PAM sequence: GAG
gcactttgggagacggaggt

SEQ ID NO: 157711 - DNA, 20 bp, Artificial Sequence
  Description of Artificial Sequence: Synthetic oligonucleotide
  Target: LAMA2; (+) strand; PAM type: NRG; PAM sequence: TAG
ctttgggagacggaggtgag

SEQ ID NO: 157712 - DNA, 20 bp, Artificial Sequence
  Description of Artificial Sequence: Synthetic oligonucleotide
  Target: LAMA2; (+) strand; PAM type: NRG; PAM sequence: GAG
cggaggtgagtagattgctt

SEQ ID NO: 157713 - DNA, 20 bp, Artificial Sequence
  Description of Artificial Sequence: Synthetic oligonucleotide
  Target: LAMA2; (+) strand; PAM type: NRG; PAM sequence: AGG
ggaggtgagtagattgcttg

SEQ ID NO: 157714 - DNA, 20 bp, Artificial Sequence
  Description of Artificial Sequence: Synthetic oligonucleotide
  Target: LAMA2; (+) strand; PAM type: NRG; PAM sequence: TAG
gtgagtagattgcttgaggt

SEQ ID NO: 157715 - DNA, 20 bp, Artificial Sequence
  Description of Artificial Sequence: Synthetic oligonucleotide
  Target: LAMA2; (+) strand; PAM type: NRG; PAM sequence: AGG
tgagtagattgcttgaggtt

SEQ ID NO: 157716 - DNA, 20 bp, Artificial Sequence
  Description of Artificial Sequence: Synthetic oligonucleotide
  Target: LAMA2; (+) strand; PAM type: NRG; PAM sequence: GAG
agtagattgcttgaggttag

SEQ ID NO: 157717 - DNA, 20 bp, Artificial Sequence
  Description of Artificial Sequence: Synthetic oligonucleotide
  Target: LAMA2; (+) strand; PAM type: NRG; PAM sequence: AAG
ttgcttgaggttaggagttc

SEQ ID NO: 157718 - DNA, 20 bp, Artificial Sequence
  Description of Artificial Sequence: Synthetic oligonucleotide
  Target: LAMA2; (+) strand; PAM type: NRG; PAM sequence: CAG
tgaggttaggagttcaagac

SEQ ID NO: 157719 - DNA, 20 bp, Artificial Sequence
  Description of Artificial Sequence: Synthetic oligonucleotide
  Target: LAMA2; (+) strand; PAM type: NRG; PAM sequence: TGG
ttaggagttcaagaccagcc

SEQ ID NO: 157720 - DNA, 20 bp, Artificial Sequence
  Description of Artificial Sequence: Synthetic oligonucleotide
  Target: LAMA2; (+) strand; PAM type: NRG; PAM sequence: TGG
caagaccagcctggccaaca

SEQ ID NO: 157721 - DNA, 20 bp, Artificial Sequence
  Description of Artificial Sequence: Synthetic oligonucleotide
  Target: LAMA2; (+) strand; PAM type: NRG; PAM sequence: CAG
aaaaaatacaaaaaattatg

SEQ ID NO: 157722 - DNA, 20 bp, Artificial Sequence
  Description of Artificial Sequence: Synthetic oligonucleotide
  Target: LAMA2; (+) strand; PAM type: NRG; PAM sequence: TGG
aaaaaattatgcagtcatga

SEQ ID NO: 157723 - DNA, 20 bp, Artificial Sequence
  Description of Artificial Sequence: Synthetic oligonucleotide
  Target: LAMA2; (+) strand; PAM type: NRG; PAM sequence: TAG
gtcatgatggcacacacctg

SEQ ID NO: 157724 - DNA, 20 bp, Artificial Sequence
  Description of Artificial Sequence: Synthetic oligonucleotide
  Target: LAMA2; (+) strand; PAM type: NRG; PAM sequence: CAG
atggcacacacctgtagtcc

SEQ ID NO: 157725 - DNA, 20 bp, Artificial Sequence
  Description of Artificial Sequence: Synthetic oligonucleotide
  Target: LAMA2; (+) strand; PAM type: NRG; PAM sequence: CGG
cacctgtagtcccagatact

SEQ ID NO: 157726 - DNA, 20 bp, Artificial Sequence
  Description of Artificial Sequence: Synthetic oligonucleotide
  Target: LAMA2; (+) strand; PAM type: NRG; PAM sequence: GGG
acctgtagtcccagatactc

SEQ ID NO: 157727 - DNA, 20 bp, Artificial Sequence
  Description of Artificial Sequence: Synthetic oligonucleotide
  Target: LAMA2; (+) strand; PAM type: NRG; PAM sequence: GAG
ctgtagtcccagatactcgg

SEQ ID NO: 157728 - DNA, 20 bp, Artificial Sequence
  Description of Artificial Sequence: Synthetic oligonucleotide
  Target: LAMA2; (+) strand; PAM type: NRG; PAM sequence: AGG
tgtagtcccagatactcggg

SEQ ID NO: 157729 - DNA, 20 bp, Artificial Sequence
  Description of Artificial Sequence: Synthetic oligonucleotide
  Target: LAMA2; (+) strand; PAM type: NRG; PAM sequence: GAG
tcccagatactcgggaggct

SEQ ID NO: 157730 - DNA, 20 bp, Artificial Sequence
  Description of Artificial Sequence: Synthetic oligonucleotide
  Target: LAMA2; (+) strand; PAM type: NRG; PAM sequence: AGG
cccagatactcgggaggctg

SEQ ID NO: 157731 - DNA, 20 bp, Artificial Sequence
  Description of Artificial Sequence: Synthetic oligonucleotide
  Target: LAMA2; (+) strand; PAM type: NRG; PAM sequence: AAG
tactcgggaggctgaggcac

SEQ ID NO: 157732 - DNA, 20 bp, Artificial Sequence
  Description of Artificial Sequence: Synthetic oligonucleotide
  Target: LAMA2; (+) strand; PAM type: NRG; PAM sequence: AAG
ctgaggcacaagaactgctt

SEQ ID NO: 157733 - DNA, 20 bp, Artificial Sequence
  Description of Artificial Sequence: Synthetic oligonucleotide
  Target: LAMA2; (+) strand; PAM type: NRG; PAM sequence: TGG
gcacaagaactgcttaagcc

SEQ ID NO: 157734 - DNA, 20 bp, Artificial Sequence
  Description of Artificial Sequence: Synthetic oligonucleotide
  Target: LAMA2; (+) strand; PAM type: NRG; PAM sequence: GGG
cacaagaactgcttaagcct

SEQ ID NO: 157735 - DNA, 20 bp, Artificial Sequence
  Description of Artificial Sequence: Synthetic oligonucleotide
  Target: LAMA2; (+) strand; PAM type: NRG; PAM sequence: GAG
caagaactgcttaagcctgg

SEQ ID NO: 157736 - DNA, 20 bp, Artificial Sequence
  Description of Artificial Sequence: Synthetic oligonucleotide
  Target: LAMA2; (+) strand; PAM type: NRG; PAM sequence: AGG
aagaactgcttaagcctggg

SEQ ID NO: 157737 - DNA, 20 bp, Artificial Sequence
  Description of Artificial Sequence: Synthetic oligonucleotide
  Target: LAMA2; (+) strand; PAM type: NRG; PAM sequence: GAG
gaactgcttaagcctgggag

SEQ ID NO: 157738 - DNA, 20 bp, Artificial Sequence
  Description of Artificial Sequence: Synthetic oligonucleotide
  Target: LAMA2; (+) strand; PAM type: NRG; PAM sequence: AGG
aactgcttaagcctgggagg

SEQ ID NO: 157739 - DNA, 20 bp, Artificial Sequence
  Description of Artificial Sequence: Synthetic oligonucleotide
  Target: LAMA2; (+) strand; PAM type: NRG; PAM sequence: GAG
ctgcttaagcctgggaggag

SEQ ID NO: 157740 - DNA, 20 bp, Artificial Sequence
  Description of Artificial Sequence: Synthetic oligonucleotide
  Target: LAMA2; (+) strand; PAM type: NRG; PAM sequence: AGG
tgcttaagcctgggaggagg

SEQ ID NO: 157741 - DNA, 20 bp, Artificial Sequence
  Description of Artificial Sequence: Synthetic oligonucleotide
  Target: LAMA2; (+) strand; PAM type: NRG; PAM sequence: CAG
agcctgggaggaggaggttg

SEQ ID NO: 157742 - DNA, 20 bp, Artificial Sequence
  Description of Artificial Sequence: Synthetic oligonucleotide
  Target: LAMA2; (+) strand; PAM type: NRG; PAM sequence: GAG
tgggaggaggaggttgcagt

SEQ ID NO: 157743 - DNA, 20 bp, Artificial Sequence
  Description of Artificial Sequence: Synthetic oligonucleotide
  Target: LAMA2; (+) strand; PAM type: NRG; PAM sequence: AAG
ggaggaggttgcagtgagct

SEQ ID NO: 157744 - DNA, 20 bp, Artificial Sequence
  Description of Artificial Sequence: Synthetic oligonucleotide
  Target: LAMA2; (+) strand; PAM type: NRG; PAM sequence: TGG
gaggttgcagtgagctaaga

SEQ ID NO: 157745 - DNA, 20 bp, Artificial Sequence
  Description of Artificial Sequence: Synthetic oligonucleotide
  Target: LAMA2; (+) strand; PAM type: NRG; PAM sequence: CAG
aagatggtgccactccacat

SEQ ID NO: 157746 - DNA, 20 bp, Artificial Sequence
  Description of Artificial Sequence: Synthetic oligonucleotide
  Target: LAMA2; (+) strand; PAM type: NRG; PAM sequence: CAG
ctccacatcagcctgaatga

SEQ ID NO: 157747 - DNA, 20 bp, Artificial Sequence
  Description of Artificial Sequence: Synthetic oligonucleotide
  Target: LAMA2; (+) strand; PAM type: NRG; PAM sequence: GAG
ccacatcagcctgaatgaca

SEQ ID NO: 157748 - DNA, 20 bp, Artificial Sequence
  Description of Artificial Sequence: Synthetic oligonucleotide
  Target: LAMA2; (+) strand; PAM type: NRG; PAM sequence: AAG
atcagcctgaatgacagagc

SEQ ID NO: 157749 - DNA, 20 bp, Artificial Sequence
  Description of Artificial Sequence: Synthetic oligonucleotide
  Target: LAMA2; (+) strand; PAM type: NRG; PAM sequence: TAG
tgaatgacagagcaagactc

SEQ ID NO: 157750 - DNA, 20 bp, Artificial Sequence
  Description of Artificial Sequence: Synthetic oligonucleotide
  Target: LAMA2; (+) strand; PAM type: NRG; PAM sequence: AGG
gaatgacagagcaagactct

SEQ ID NO: 157751 - DNA, 20 bp, Artificial Sequence
  Description of Artificial Sequence: Synthetic oligonucleotide
  Target: LAMA2; (+) strand; PAM type: NRG; PAM sequence: AAG
agactctaggtcaaaaaata

SEQ ID NO: 157752 - DNA, 20 bp, Artificial Sequence
  Description of Artificial Sequence: Synthetic oligonucleotide
  Target: LAMA2; (+) strand; PAM type: NRG; PAM sequence: AAG
tctaggtcaaaaaataaaga

SEQ ID NO: 157753 - DNA, 20 bp, Artificial Sequence
  Description of Artificial Sequence: Synthetic oligonucleotide
  Target: LAMA2; (+) strand; PAM type: NRG; PAM sequence: CAG
ggtcaaaaaataaagaaaga

SEQ ID NO: 157754 - DNA, 20 bp, Artificial Sequence
  Description of Artificial Sequence: Synthetic oligonucleotide
  Target: LAMA2; (+) strand; PAM type: NRG; PAM sequence: AAG
aaagaaagacagaattactt

SEQ ID NO: 157755 - DNA, 20 bp, Artificial Sequence
  Description of Artificial Sequence: Synthetic oligonucleotide
  Target: LAMA2; (+) strand; PAM type: NRG; PAM sequence: AAG
aaagacagaattacttaagt

SEQ ID NO: 157756 - DNA, 20 bp, Artificial Sequence
  Description of Artificial Sequence: Synthetic oligonucleotide
  Target: LAMA2; (+) strand; PAM type: NRG; PAM sequence: TGG
taagtaagtacttgactaac

SEQ ID NO: 157757 - DNA, 20 bp, Artificial Sequence
  Description of Artificial Sequence: Synthetic oligonucleotide
  Target: LAMA2; (+) strand; PAM type: NRG; PAM sequence: TAG
tgatcataaacgcatacctt

SEQ ID NO: 157758 - DNA, 20 bp, Artificial Sequence
  Description of Artificial Sequence: Synthetic oligonucleotide
  Target: LAMA2; (+) strand; PAM type: NRG; PAM sequence: AGG
gatcataaacgcataccttt

SEQ ID NO: 157759 - DNA, 20 bp, Artificial Sequence
  Description of Artificial Sequence: Synthetic oligonucleotide
  Target: LAMA2; (+) strand; PAM type: NRG; PAM sequence: GGG
atcataaacgcataccttta

SEQ ID NO: 157760 - DNA, 20 bp, Artificial Sequence
  Description of Artificial Sequence: Synthetic oligonucleotide
  Target: LAMA2; (+) strand; PAM type: NRG; PAM sequence: AAG
tacctttagggtaaatgaaa

SEQ ID NO: 157761 - DNA, 20 bp, Artificial Sequence
  Description of Artificial Sequence: Synthetic oligonucleotide
  Target: LAMA2; (+) strand; PAM type: NRG; PAM sequence: TGG
tgattctaatattgtgtaaa

SEQ ID NO: 157762 - DNA, 20 bp, Artificial Sequence
  Description of Artificial Sequence: Synthetic oligonucleotide
  Target: LAMA2; (+) strand; PAM type: NRG; PAM sequence: GGG
gattctaatattgtgtaaat

SEQ ID NO: 157763 - DNA, 20 bp, Artificial Sequence
  Description of Artificial Sequence: Synthetic oligonucleotide
  Target: LAMA2; (+) strand; PAM type: NRG; PAM sequence: TGG
attgtgtaaatgggtaactg

SEQ ID NO: 157764 - DNA, 20 bp, Artificial Sequence
  Description of Artificial Sequence: Synthetic oligonucleotide
  Target: LAMA2; (+) strand; PAM type: NRG; PAM sequence: TGG
gtaaatgggtaactgtggct

SEQ ID NO: 157765 - DNA, 20 bp, Artificial Sequence
  Description of Artificial Sequence: Synthetic oligonucleotide
  Target: LAMA2; (+) strand; PAM type: NRG; PAM sequence: GGG
taaatgggtaactgtggctt

SEQ ID NO: 157766 - DNA, 20 bp, Artificial Sequence
  Description of Artificial Sequence: Synthetic oligonucleotide
  Target: LAMA2; (+) strand; PAM type: NRG; PAM sequence: TAG
tggcttgggaaaaaaacatc

SEQ ID NO: 157767 - DNA, 20 bp, Artificial Sequence
  Description of Artificial Sequence: Synthetic oligonucleotide
  Target: LAMA2; (+) strand; PAM type: NRG; PAM sequence: CAG
gggaaaaaaacatctagtaa

SEQ ID NO: 157768 - DNA, 20 bp, Artificial Sequence
  Description of Artificial Sequence: Synthetic oligonucleotide
  Target: LAMA2; (+) strand; PAM type: NRG; PAM sequence: TGG
tatcctgaaaattgtttaaa

SEQ ID NO: 157769 - DNA, 20 bp, Artificial Sequence
  Description of Artificial Sequence: Synthetic oligonucleotide
  Target: LAMA2; (+) strand; PAM type: NRG; PAM sequence: TGG
cgtgtttcacacaacttaaa

SEQ ID NO: 157770 - DNA, 20 bp, Artificial Sequence
  Description of Artificial Sequence: Synthetic oligonucleotide
  Target: LAMA2; (+) strand; PAM type: NRG; PAM sequence: AAG
gtttcacacaacttaaatgg

SEQ ID NO: 157771 - DNA, 20 bp, Artificial Sequence
  Description of Artificial Sequence: Synthetic oligonucleotide
  Target: LAMA2; (+) strand; PAM type: NRG; PAM sequence: CAG
caacttaaatggaagtaaaa

SEQ ID NO: 157772 - DNA, 20 bp, Artificial Sequence
  Description of Artificial Sequence: Synthetic oligonucleotide
  Target: LAMA2; (+) strand; PAM type: NRG; PAM sequence: CAG
gcttcgctcatgacaatttt

SEQ ID NO: 157773 - DNA, 20 bp, Artificial Sequence
  Description of Artificial Sequence: Synthetic oligonucleotide
  Target: LAMA2; (+) strand; PAM type: NRG; PAM sequence: AGG
cttcgctcatgacaattttc

SEQ ID NO: 157774 - DNA, 20 bp, Artificial Sequence
  Description of Artificial Sequence: Synthetic oligonucleotide
  Target: LAMA2; (+) strand; PAM type: NRG; PAM sequence: TGG
ttcaaaatacgttgtaataa

SEQ ID NO: 157775 - DNA, 20 bp, Artificial Sequence
  Description of Artificial Sequence: Synthetic oligonucleotide
  Target: LAMA2; (+) strand; PAM type: NRG; PAM sequence: GAG
gttgtaataatggcaaacat

SEQ ID NO: 157776 - DNA, 20 bp, Artificial Sequence
  Description of Artificial Sequence: Synthetic oligonucleotide
  Target: LAMA2; (+) strand; PAM type: NRG; PAM sequence: CAG
ataatggcaaacatgagtat

SEQ ID NO: 157777 - DNA, 20 bp, Artificial Sequence
  Description of Artificial Sequence: Synthetic oligonucleotide
  Target: LAMA2; (+) strand; PAM type: NRG; PAM sequence: GAG
aatggcaaacatgagtatca

SEQ ID NO: 157778 - DNA, 20 bp, Artificial Sequence
  Description of Artificial Sequence: Synthetic oligonucleotide
  Target: LAMA2; (+) strand; PAM type: NRG; PAM sequence: AAG
tgagtatcagagatacacaa

SEQ ID NO: 157779 - DNA, 20 bp, Artificial Sequence
  Description of Artificial Sequence: Synthetic oligonucleotide
  Target: LAMA2; (+) strand; PAM type: NRG; PAM sequence: GAG
agtatcagagatacacaaaa

SEQ ID NO: 157780 - DNA, 20 bp, Artificial Sequence
  Description of Artificial Sequence: Synthetic oligonucleotide
  Target: LAMA2; (+) strand; PAM type: NRG; PAM sequence: TAG
cagagatacacaaaagagtt

SEQ ID NO: 157781 - DNA, 20 bp, Artificial Sequence
  Description of Artificial Sequence: Synthetic oligonucleotide
  Target: LAMA2; (+) strand; PAM type: NRG; PAM sequence: GAG
aaaatcattttatgaaatat

SEQ ID NO: 157782 - DNA, 20 bp, Artificial Sequence
  Description of Artificial Sequence: Synthetic oligonucleotide
  Target: LAMA2; (+) strand; PAM type: NRG; PAM sequence: TAG
actattatcgctattattat

SEQ ID NO: 157783 - DNA, 20 bp, Artificial Sequence
  Description of Artificial Sequence: Synthetic oligonucleotide
  Target: LAMA2; (+) strand; PAM type: NRG; PAM sequence: CAG
tcgctattattattagccct

SEQ ID NO: 157784 - DNA, 20 bp, Artificial Sequence
  Description of Artificial Sequence: Synthetic oligonucleotide
  Target: LAMA2; (+) strand; PAM type: NRG; PAM sequence: CAG
ctattattattagccctcag

SEQ ID NO: 157785 - DNA, 20 bp, Artificial Sequence
  Description of Artificial Sequence: Synthetic oligonucleotide
  Target: LAMA2; (+) strand; PAM type: NRG; PAM sequence: TAG
attattagccctcagcagaa

SEQ ID NO: 157786 - DNA, 20 bp, Artificial Sequence
  Description of Artificial Sequence: Synthetic oligonucleotide
  Target: LAMA2; (+) strand; PAM type: NRG; PAM sequence: AGG
ttattagccctcagcagaat

SEQ ID NO: 157787 - DNA, 20 bp, Artificial Sequence
  Description of Artificial Sequence: Synthetic oligonucleotide
  Target: LAMA2; (+) strand; PAM type: NRG; PAM sequence: GGG
tattagccctcagcagaata

SEQ ID NO: 157788 - DNA, 20 bp, Artificial Sequence
  Description of Artificial Sequence: Synthetic oligonucleotide
  Target: LAMA2; (+) strand; PAM type: NRG; PAM sequence: TAG
ggtaaattatttctattcct

SEQ ID NO: 157789 - DNA, 20 bp, Artificial Sequence
  Description of Artificial Sequence: Synthetic oligonucleotide
  Target: LAMA2; (+) strand; PAM type: NRG; PAM sequence: GAG
atattatcgctgacctgcat

SEQ ID NO: 157790 - DNA, 20 bp, Artificial Sequence
  Description of Artificial Sequence: Synthetic oligonucleotide
  Target: LAMA2; (+) strand; PAM type: NRG; PAM sequence: AGG
tattatcgctgacctgcatg

SEQ ID NO: 157791 - DNA, 20 bp, Artificial Sequence
  Description of Artificial Sequence: Synthetic oligonucleotide
  Target: LAMA2; (+) strand; PAM type: NRG; PAM sequence: GAG
ttatcgctgacctgcatgag

SEQ ID NO: 157792 - DNA, 20 bp, Artificial Sequence
  Description of Artificial Sequence: Synthetic oligonucleotide
  Target: LAMA2; (+) strand; PAM type: NRG; PAM sequence: TAG
cacctctaattcctctctca

SEQ ID NO: 157793 - DNA, 20 bp, Artificial Sequence
  Description of Artificial Sequence: Synthetic oligonucleotide
  Target: LAMA2; (+) strand; PAM type: NRG; PAM sequence: TAG
attcctctctcatagtattt

SEQ ID NO: 157794 - DNA, 20 bp, Artificial Sequence
  Description of Artificial Sequence: Synthetic oligonucleotide
  Target: LAMA2; (+) strand; PAM type: NRG; PAM sequence: CAG
catagtattttagtttatgt

SEQ ID NO: 157795 - DNA, 20 bp, Artificial Sequence
  Description of Artificial Sequence: Synthetic oligonucleotide
  Target: LAMA2; (+) strand; PAM type: NRG; PAM sequence: AGG
atagtattttagtttatgtc

SEQ ID NO: 157796 - DNA, 20 bp, Artificial Sequence
  Description of Artificial Sequence: Synthetic oligonucleotide
  Target: LAMA2; (+) strand; PAM type: NRG; PAM sequence: GGG
tagtattttagtttatgtca

SEQ ID NO: 157797 - DNA, 20 bp, Artificial Sequence
  Description of Artificial Sequence: Synthetic oligonucleotide
  Target: LAMA2; (+) strand; PAM type: NRG; PAM sequence: CGG
tgtcagggatccccaactcc

SEQ ID NO: 157798 - DNA, 20 bp, Artificial Sequence
  Description of Artificial Sequence: Synthetic oligonucleotide
  Target: LAMA2; (+) strand; PAM type: NRG; PAM sequence: GGG
gtcagggatccccaactccc

SEQ ID NO: 157799 - DNA, 20 bp, Artificial Sequence
  Description of Artificial Sequence: Synthetic oligonucleotide
  Target: LAMA2; (+) strand; PAM type: NRG; PAM sequence: CAG
tccccaactcccgggctata

SEQ ID NO: 157800 - DNA, 20 bp, Artificial Sequence
  Description of Artificial Sequence: Synthetic oligonucleotide
  Target: LAMA2; (+) strand; PAM type: NRG; PAM sequence: AGG
ccccaactcccgggctatac

SEQ ID NO: 157801 - DNA, 20 bp, Artificial Sequence
  Description of Artificial Sequence: Synthetic oligonucleotide
  Target: LAMA2; (+) strand; PAM type: NRG; PAM sequence: TGG
tcccgggctatacaggtctg

SEQ ID NO: 157802 - DNA, 20 bp, Artificial Sequence
  Description of Artificial Sequence: Synthetic oligonucleotide
  Target: LAMA2; (+) strand; PAM type: NRG; PAM sequence: AAG
atacaggtctgtggcctgtt

SEQ ID NO: 157803 - DNA, 20 bp, Artificial Sequence
  Description of Artificial Sequence: Synthetic oligonucleotide
  Target: LAMA2; (+) strand; PAM type: NRG; PAM sequence: TGG
gtctgtggcctgttaagaat

SEQ ID NO: 157804 - DNA, 20 bp, Artificial Sequence
  Description of Artificial Sequence: Synthetic oligonucleotide
  Target: LAMA2; (+) strand; PAM type: NRG; PAM sequence: GGG
tctgtggcctgttaagaatt

SEQ ID NO: 157805 - DNA, 20 bp, Artificial Sequence
  Description of Artificial Sequence: Synthetic oligonucleotide
  Target: LAMA2; (+) strand; PAM type: NRG; PAM sequence: CGG
gtggcctgttaagaattggg

SEQ ID NO: 157806 - DNA, 20 bp, Artificial Sequence
  Description of Artificial Sequence: Synthetic oligonucleotide
  Target: LAMA2; (+) strand; PAM type: NRG; PAM sequence: CAG
ttaagaattgggcggcacaa

SEQ ID NO: 157807 - DNA, 20 bp, Artificial Sequence
  Description of Artificial Sequence: Synthetic oligonucleotide
  Target: LAMA2; (+) strand; PAM type: NRG; PAM sequence: AGG
taagaattgggcggcacaac

SEQ ID NO: 157808 - DNA, 20 bp, Artificial Sequence
  Description of Artificial Sequence: Synthetic oligonucleotide
  Target: LAMA2; (+) strand; PAM type: NRG; PAM sequence: GAG
agaattgggcggcacaacag

SEQ ID NO: 157809 - DNA, 20 bp, Artificial Sequence
  Description of Artificial Sequence: Synthetic oligonucleotide
  Target: LAMA2; (+) strand; PAM type: NRG; PAM sequence: AGG
gaattgggcggcacaacagg

SEQ ID NO: 157810 - DNA, 20 bp, Artificial Sequence
  Description of Artificial Sequence: Synthetic oligonucleotide
  Target: LAMA2; (+) strand; PAM type: NRG; PAM sequence: AAG
tgggcggcacaacaggaggt

SEQ ID NO: 157811 - DNA, 20 bp, Artificial Sequence
  Description of Artificial Sequence: Synthetic oligonucleotide
  Target: LAMA2; (+) strand; PAM type: NRG; PAM sequence: CAG
gcacaacaggaggtaagcat

SEQ ID NO: 157812 - DNA, 20 bp, Artificial Sequence
  Description of Artificial Sequence: Synthetic oligonucleotide
  Target: LAMA2; (+) strand; PAM type: NRG; PAM sequence: AGG
cacaacaggaggtaagcatc

SEQ ID NO: 157813 - DNA, 20 bp, Artificial Sequence
  Description of Artificial Sequence: Synthetic oligonucleotide
  Target: LAMA2; (+) strand; PAM type: NRG; PAM sequence: AAG
acaggaggtaagcatcaggc

SEQ ID NO: 157814 - DNA, 20 bp, Artificial Sequence
  Description of Artificial Sequence: Synthetic oligonucleotide
  Target: LAMA2; (+) strand; PAM type: NRG; PAM sequence: GAG
gaggtaagcatcaggcaagt

SEQ ID NO: 157815 - DNA, 20 bp, Artificial Sequence
  Description of Artificial Sequence: Synthetic oligonucleotide
  Target: LAMA2; (+) strand; PAM type: NRG; PAM sequence: GAG
gcaagtgagcatcactgcct

SEQ ID NO: 157816 - DNA, 20 bp, Artificial Sequence
  Description of Artificial Sequence: Synthetic oligonucleotide
  Target: LAMA2; (+) strand; PAM type: NRG; PAM sequence: CAG
gcctgagctctaccgcctgt

SEQ ID NO: 157817 - DNA, 20 bp, Artificial Sequence
  Description of Artificial Sequence: Synthetic oligonucleotide
  Target: LAMA2; (+) strand; PAM type: NRG; PAM sequence: CAG
agctctaccgcctgtcagat

SEQ ID NO: 157818 - DNA, 20 bp, Artificial Sequence
  Description of Artificial Sequence: Synthetic oligonucleotide
  Target: LAMA2; (+) strand; PAM type: NRG; PAM sequence: CGG
tctaccgcctgtcagatcag

SEQ ID NO: 157819 - DNA, 20 bp, Artificial Sequence
  Description of Artificial Sequence: Synthetic oligonucleotide
  Target: LAMA2; (+) strand; PAM type: NRG; PAM sequence: TGG
accgcctgtcagatcagcgg

SEQ ID NO: 157820 - DNA, 20 bp, Artificial Sequence
  Description of Artificial Sequence: Synthetic oligonucleotide
  Target: LAMA2; (+) strand; PAM type: NRG; PAM sequence: TAG
tgtcagatcagcggtggtat

SEQ ID NO: 157821 - DNA, 20 bp, Artificial Sequence
  Description of Artificial Sequence: Synthetic oligonucleotide
  Target: LAMA2; (+) strand; PAM type: NRG; PAM sequence: CAG
gcggtggtattagattctca

SEQ ID NO: 157822 - DNA, 20 bp, Artificial Sequence
  Description of Artificial Sequence: Synthetic oligonucleotide
  Target: LAMA2; (+) strand; PAM type: NRG; PAM sequence: AGG
cggtggtattagattctcac

SEQ ID NO: 157823 - DNA, 20 bp, Artificial Sequence
  Description of Artificial Sequence: Synthetic oligonucleotide
  Target: LAMA2; (+) strand; PAM type: NRG; PAM sequence: GAG
gtggtattagattctcacag

SEQ ID NO: 157824 - DNA, 20 bp, Artificial Sequence
  Description of Artificial Sequence: Synthetic oligonucleotide
  Target: LAMA2; (+) strand; PAM type: NRG; PAM sequence: CAG
gtattagattctcacaggag

SEQ ID NO: 157825 - DNA, 20 bp, Artificial Sequence
  Description of Artificial Sequence: Synthetic oligonucleotide
  Target: LAMA2; (+) strand; PAM type: NRG; PAM sequence: AGG
tattagattctcacaggagc

SEQ ID NO: 157826 - DNA, 20 bp, Artificial Sequence
  Description of Artificial Sequence: Synthetic oligonucleotide
  Target: LAMA2; (+) strand; PAM type: NRG; PAM sequence: GAG
ttattgtgaactgcgcatgc

SEQ ID NO: 157827 - DNA, 20 bp, Artificial Sequence
  Description of Artificial Sequence: Synthetic oligonucleotide
  Target: LAMA2; (+) strand; PAM type: NRG; PAM sequence: AGG
tattgtgaactgcgcatgcg

SEQ ID NO: 157828 - DNA, 20 bp, Artificial Sequence
  Description of Artificial Sequence: Synthetic oligonucleotide
  Target: LAMA2; (+) strand; PAM type: NRG; PAM sequence: GGG
attgtgaactgcgcatgcga

SEQ ID NO: 157829 - DNA, 20 bp, Artificial Sequence
  Description of Artificial Sequence: Synthetic oligonucleotide
  Target: LAMA2; (+) strand; PAM type: NRG; PAM sequence: TAG
aactgcgcatgcgagggatc

SEQ ID NO: 157830 - DNA, 20 bp, Artificial Sequence
  Description of Artificial Sequence: Synthetic oligonucleotide
  Target: LAMA2; (+) strand; PAM type: NRG; PAM sequence: AGG
actgcgcatgcgagggatct

SEQ ID NO: 157831 - DNA, 20 bp, Artificial Sequence
  Description of Artificial Sequence: Synthetic oligonucleotide
  Target: LAMA2; (+) strand; PAM type: NRG; PAM sequence: GAG
ctaggctgcacgctccttat

SEQ ID NO: 157832 - DNA, 20 bp, Artificial Sequence
  Description of Artificial Sequence: Synthetic oligonucleotide
  Target: LAMA2; (+) strand; PAM type: NRG; PAM sequence: TGG
taatgcccgatgatctgatg

SEQ ID NO: 157833 - DNA, 20 bp, Artificial Sequence
  Description of Artificial Sequence: Synthetic oligonucleotide
  Target: LAMA2; (+) strand; PAM type: NRG; PAM sequence: CAG
cccgatgatctgatgtggaa

SEQ ID NO: 157834 - DNA, 20 bp, Artificial Sequence
  Description of Artificial Sequence: Synthetic oligonucleotide
  Target: LAMA2; (+) strand; PAM type: NRG; PAM sequence: TGG
aaacccctcctctgtgtcca

SEQ ID NO: 157835 - DNA, 20 bp, Artificial Sequence
  Description of Artificial Sequence: Synthetic oligonucleotide
  Target: LAMA2; (+) strand; PAM type: NRG; PAM sequence: AAG
aacccatgcctgatgccaaa

SEQ ID NO: 157836 - DNA, 20 bp, Artificial Sequence
  Description of Artificial Sequence: Synthetic oligonucleotide
  Target: LAMA2; (+) strand; PAM type: NRG; PAM sequence: AGG
acccatgcctgatgccaaaa

SEQ ID NO: 157837 - DNA, 20 bp, Artificial Sequence
  Description of Artificial Sequence: Synthetic oligonucleotide
  Target: LAMA2; (+) strand; PAM type: NRG; PAM sequence: TGG
catgcctgatgccaaaaagg

SEQ ID NO: 157838 - DNA, 20 bp, Artificial Sequence
  Description of Artificial Sequence: Synthetic oligonucleotide
  Target: LAMA2; (+) strand; PAM type: NRG; PAM sequence: GGG
atgcctgatgccaaaaaggt

SEQ ID NO: 157839 - DNA, 20 bp, Artificial Sequence
  Description of Artificial Sequence: Synthetic oligonucleotide
  Target: LAMA2; (+) strand; PAM type: NRG; PAM sequence: GGG
tgcctgatgccaaaaaggtg

SEQ ID NO: 157840 - DNA, 20 bp, Artificial Sequence
  Description of Artificial Sequence: Synthetic oligonucleotide
  Target: LAMA2; (+) strand; PAM type: NRG; PAM sequence: GAG
cctgatgccaaaaaggtggg

SEQ ID NO: 157841 - DNA, 20 bp, Artificial Sequence
  Description of Artificial Sequence: Synthetic oligonucleotide
  Target: LAMA2; (+) strand; PAM type: NRG; PAM sequence: AAG
aaaaaggtggggagtgctgc

SEQ ID NO: 157842 - DNA, 20 bp, Artificial Sequence
  Description of Artificial Sequence: Synthetic oligonucleotide
  Target: LAMA2; (+) strand; PAM type: NRG; PAM sequence: TAG
atatgtgactttattataaa

SEQ ID NO: 157843 - DNA, 20 bp, Artificial Sequence
  Description of Artificial Sequence: Synthetic oligonucleotide
  Target: LAMA2; (+) strand; PAM type: NRG; PAM sequence: AGG
tatgtgactttattataaat

SEQ ID NO: 157844 - DNA, 20 bp, Artificial Sequence
  Description of Artificial Sequence: Synthetic oligonucleotide
  Target: LAMA2; (+) strand; PAM type: NRG; PAM sequence: TAG
aataggtatgaaaaacacat

SEQ ID NO: 157845 - DNA, 20 bp, Artificial Sequence
  Description of Artificial Sequence: Synthetic oligonucleotide
  Target: LAMA2; (+) strand; PAM type: NRG; PAM sequence: AAG
gaaaaacacattagcaaatc

SEQ ID NO: 157846 - DNA, 20 bp, Artificial Sequence
  Description of Artificial Sequence: Synthetic oligonucleotide
  Target: LAMA2; (+) strand; PAM type: NRG; PAM sequence: TAG
cattagcaaatcaagtatca

SEQ ID NO: 157847 - DNA, 20 bp, Artificial Sequence
  Description of Artificial Sequence: Synthetic oligonucleotide
  Target: LAMA2; (+) strand; PAM type: NRG; PAM sequence: AGG
attagcaaatcaagtatcat

SEQ ID NO: 157848 - DNA, 20 bp, Artificial Sequence
  Description of Artificial Sequence: Synthetic oligonucleotide
  Target: LAMA2; (+) strand; PAM type: NRG; PAM sequence: TAG
atctttttctacttcatcta

SEQ ID NO: 157849 - DNA, 20 bp, Artificial Sequence
  Description of Artificial Sequence: Synthetic oligonucleotide
  Target: LAMA2; (+) strand; PAM type: NRG; PAM sequence: CAG
tacttcatctatagtcgtaa

SEQ ID NO: 157850 - DNA, 20 bp, Artificial Sequence
  Description of Artificial Sequence: Synthetic oligonucleotide
  Target: LAMA2; (+) strand; PAM type: NRG; PAM sequence: TGG
gactctttttattgacaaaa

SEQ ID NO: 157851 - DNA, 20 bp, Artificial Sequence
  Description of Artificial Sequence: Synthetic oligonucleotide
  Target: LAMA2; (+) strand; PAM type: NRG; PAM sequence: GAG
attcaaaatgtattttattt

SEQ ID NO: 157852 - DNA, 20 bp, Artificial Sequence
  Description of Artificial Sequence: Synthetic oligonucleotide
  Target: LAMA2; (+) strand; PAM type: NRG; PAM sequence: TGG
gtattttatttgagcatatg

SEQ ID NO: 157853 - DNA, 20 bp, Artificial Sequence
  Description of Artificial Sequence: Synthetic oligonucleotide
  Target: LAMA2; (+) strand; PAM type: NRG; PAM sequence: AAG
atgtggtgatttcatatatt

SEQ ID NO: 157854 - DNA, 20 bp, Artificial Sequence
  Description of Artificial Sequence: Synthetic oligonucleotide
  Target: LAMA2; (+) strand; PAM type: NRG; PAM sequence: TAG
tgatatttttctttcctttt

SEQ ID NO: 157855 - DNA, 20 bp, Artificial Sequence
  Description of Artificial Sequence: Synthetic oligonucleotide
  Target: LAMA2; (+) strand; PAM type: NRG; PAM sequence: GAG
atatttttctttccttttta

SEQ ID NO: 157856 - DNA, 20 bp, Artificial Sequence
  Description of Artificial Sequence: Synthetic oligonucleotide
  Target: LAMA2; (+) strand; PAM type: NRG; PAM sequence: AAG
tttttctttcctttttagag

SEQ ID NO: 157857 - DNA, 20 bp, Artificial Sequence
  Description of Artificial Sequence: Synthetic oligonucleotide
  Target: LAMA2; (+) strand; PAM type: NRG; PAM sequence: AAG
tttttagagaagccatattc

SEQ ID NO: 157858 - DNA, 20 bp, Artificial Sequence
  Description of Artificial Sequence: Synthetic oligonucleotide
  Target: LAMA2; (+) strand; PAM type: NRG; PAM sequence: TAG
gaagccatattcaagaaaaa

SEQ ID NO: 157859 - DNA, 20 bp, Artificial Sequence
  Description of Artificial Sequence: Synthetic oligonucleotide
  Target: LAMA2; (+) strand; PAM type: NRG; PAM sequence: TAG
caaattttaaataatcaaaa

SEQ ID NO: 157860 - DNA, 20 bp, Artificial Sequence
  Description of Artificial Sequence: Synthetic oligonucleotide
  Target: LAMA2; (+) strand; PAM type: NRG; PAM sequence: AAG
aataatcaaaatagatttga

SEQ ID NO: 157861 - DNA, 20 bp, Artificial Sequence
  Description of Artificial Sequence: Synthetic oligonucleotide
  Target: LAMA2; (+) strand; PAM type: NRG; PAM sequence: TGG
gatttgaaagctcaaaattt

SEQ ID NO: 157862 - DNA, 20 bp, Artificial Sequence
  Description of Artificial Sequence: Synthetic oligonucleotide
  Target: LAMA2; (+) strand; PAM type: NRG; PAM sequence: TAG
ctcaaaattttggaacatta

SEQ ID NO: 157863 - DNA, 20 bp, Artificial Sequence
  Description of Artificial Sequence: Synthetic oligonucleotide
  Target: LAMA2; (+) strand; PAM type: NRG; PAM sequence: AGG
tcaaaattttggaacattat

SEQ ID NO: 157864 - DNA, 20 bp, Artificial Sequence
  Description of Artificial Sequence: Synthetic oligonucleotide
  Target: LAMA2; (+) strand; PAM type: NRG; PAM sequence: TAG
ttcaaacgtatttattaatt

SEQ ID NO: 157865 - DNA, 20 bp, Artificial Sequence
  Description of Artificial Sequence: Synthetic oligonucleotide
  Target: LAMA2; (+) strand; PAM type: NRG; PAM sequence: TAG
ttaatttagaaaattctaaa

SEQ ID NO: 157866 - DNA, 20 bp, Artificial Sequence
  Description of Artificial Sequence: Synthetic oligonucleotide
  Target: LAMA2; (+) strand; PAM type: NRG; PAM sequence: CAG
ttagaaaattctaaatagtt

SEQ ID NO: 157867 - DNA, 20 bp, Artificial Sequence
  Description of Artificial Sequence: Synthetic oligonucleotide
  Target: LAMA2; (+) strand; PAM type: NRG; PAM sequence: TAG
ttttttttctcctgcctttc

SEQ ID NO: 157868 - DNA, 20 bp, Artificial Sequence
  Description of Artificial Sequence: Synthetic oligonucleotide
  Target: LAMA2; (+) strand; PAM type: NRG; PAM sequence: GAG
ctttctagaatccttttatt

SEQ ID NO: 157869 - DNA, 20 bp, Artificial Sequence
  Description of Artificial Sequence: Synthetic oligonucleotide
  Target: LAMA2; (+) strand; PAM type: NRG; PAM sequence: TAG
ccttttattgagaaaatgtg

SEQ ID NO: 157870 - DNA, 20 bp, Artificial Sequence
  Description of Artificial Sequence: Synthetic oligonucleotide
  Target: LAMA2; (+) strand; PAM type: NRG; PAM sequence: AAG
gaaaatgtgtagctgatctg

SEQ ID NO: 157871 - DNA, 20 bp, Artificial Sequence
  Description of Artificial Sequence: Synthetic oligonucleotide
  Target: LAMA2; (+) strand; PAM type: NRG; PAM sequence: AAG
aatgtgtagctgatctgaag

SEQ ID NO: 157872 - DNA, 20 bp, Artificial Sequence
  Description of Artificial Sequence: Synthetic oligonucleotide
  Target: LAMA2; (+) strand; PAM type: NRG; PAM sequence: TAG
attttgaatgtttatcttaa

SEQ ID NO: 157873 - DNA, 20 bp, Artificial Sequence
  Description of Artificial Sequence: Synthetic oligonucleotide
  Target: LAMA2; (+) strand; PAM type: NRG; PAM sequence: TAG
agaacctaaaatcttccaca

SEQ ID NO: 157874 - DNA, 20 bp, Artificial Sequence
  Description of Artificial Sequence: Synthetic oligonucleotide
  Target: LAMA2; (+) strand; PAM type: NRG; PAM sequence: AGG
gaacctaaaatcttccacat

SEQ ID NO: 157875 - DNA, 20 bp, Artificial Sequence
  Description of Artificial Sequence: Synthetic oligonucleotide
  Target: LAMA2; (+) strand; PAM type: NRG; PAM sequence: AAG
tcattactcacaataatgcc

SEQ ID NO: 157876 - DNA, 20 bp, Artificial Sequence
  Description of Artificial Sequence: Synthetic oligonucleotide
  Target: LAMA2; (+) strand; PAM type: NRG; PAM sequence: TAG
cacaataatgccaagtgctg

SEQ ID NO: 157877 - DNA, 20 bp, Artificial Sequence
  Description of Artificial Sequence: Synthetic oligonucleotide
  Target: LAMA2; (+) strand; PAM type: NRG; PAM sequence: CAG
taatgccaagtgctgtagtc

SEQ ID NO: 157878 - DNA, 20 bp, Artificial Sequence
  Description of Artificial Sequence: Synthetic oligonucleotide
  Target: LAMA2; (+) strand; PAM type: NRG; PAM sequence: AGG
aatgccaagtgctgtagtcc

SEQ ID NO: 157879 - DNA, 20 bp, Artificial Sequence
  Description of Artificial Sequence: Synthetic oligonucleotide
  Target: LAMA2; (+) strand; PAM type: NRG; PAM sequence: CAG
gccaagtgctgtagtccagg

SEQ ID NO: 157880 - DNA, 20 bp, Artificial Sequence
  Description of Artificial Sequence: Synthetic oligonucleotide
  Target: LAMA2; (+) strand; PAM type: NRG; PAM sequence: AAG
tttattattttatatgtgaa

SEQ ID NO: 157881 - DNA, 20 bp, Artificial Sequence
  Description of Artificial Sequence: Synthetic oligonucleotide
  Target: LAMA2; (+) strand; PAM type: NRG; PAM sequence: AAG
atgtgaaaagacattcgaat

SEQ ID NO: 157882 - DNA, 20 bp, Artificial Sequence
  Description of Artificial Sequence: Synthetic oligonucleotide
  Target: LAMA2; (+) strand; PAM type: NRG; PAM sequence: AGG
tgtgaaaagacattcgaata

SEQ ID NO: 157883 - DNA, 20 bp, Artificial Sequence
  Description of Artificial Sequence: Synthetic oligonucleotide
  Target: LAMA2; (+) strand; PAM type: NRG; PAM sequence: CAG
attcgaataaggccatttct

SEQ ID NO: 157884 - DNA, 20 bp, Artificial Sequence
  Description of Artificial Sequence: Synthetic oligonucleotide
  Target: LAMA2; (+) strand; PAM type: NRG; PAM sequence: TGG
cgaataaggccatttctcag

SEQ ID NO: 157885 - DNA, 20 bp, Artificial Sequence
  Description of Artificial Sequence: Synthetic oligonucleotide
  Target: LAMA2; (+) strand; PAM type: NRG; PAM sequence: TAG
aaggccatttctcagtggat

SEQ ID NO: 157886 - DNA, 20 bp, Artificial Sequence
  Description of Artificial Sequence: Synthetic oligonucleotide
  Target: LAMA2; (+) strand; PAM type: NRG; PAM sequence: AGG
aggccatttctcagtggatt

SEQ ID NO: 157887 - DNA, 20 bp, Artificial Sequence
  Description of Artificial Sequence: Synthetic oligonucleotide
  Target: LAMA2; (+) strand; PAM type: NRG; PAM sequence: GGG
ggccatttctcagtggatta

SEQ ID NO: 157888 - DNA, 20 bp, Artificial Sequence
  Description of Artificial Sequence: Synthetic oligonucleotide
  Target: LAMA2; (+) strand; PAM type: NRG; PAM sequence: GGG
gccatttctcagtggattag

SEQ ID NO: 157889 - DNA, 20 bp, Artificial Sequence
  Description of Artificial Sequence: Synthetic oligonucleotide
  Target: LAMA2; (+) strand; PAM type: NRG; PAM sequence: CAG
tctcagtggattaggggaat

SEQ ID NO: 157890 - DNA, 20 bp, Artificial Sequence
  Description of Artificial Sequence: Synthetic oligonucleotide
  Target: LAMA2; (+) strand; PAM type: NRG; PAM sequence: GAG
tcagtggattaggggaatca

SEQ ID NO: 157891 - DNA, 20 bp, Artificial Sequence
  Description of Artificial Sequence: Synthetic oligonucleotide
  Target: LAMA2; (+) strand; PAM type: NRG; PAM sequence: AAG
aatcagagttttctgaattt

SEQ ID NO: 157892 - DNA, 20 bp, Artificial Sequence
  Description of Artificial Sequence: Synthetic oligonucleotide
  Target: LAMA2; (+) strand; PAM type: NRG; PAM sequence: TAG
ttctgaatttaagttcctta

SEQ ID NO: 157893 - DNA, 20 bp, Artificial Sequence
  Description of Artificial Sequence: Synthetic oligonucleotide
  Target: LAMA2; (+) strand; PAM type: NRG; PAM sequence: GAG
ctgaatttaagttccttata

SEQ ID NO: 157894 - DNA, 20 bp, Artificial Sequence
  Description of Artificial Sequence: Synthetic oligonucleotide
  Target: LAMA2; (+) strand; PAM type: NRG; PAM sequence: GAG
cttatagagccccatgtaat

SEQ ID NO: 157895 - DNA, 20 bp, Artificial Sequence
  Description of Artificial Sequence: Synthetic oligonucleotide
  Target: LAMA2; (+) strand; PAM type: NRG; PAM sequence: TAG
agccccatgtaatgagctct

SEQ ID NO: 157896 - DNA, 20 bp, Artificial Sequence
  Description of Artificial Sequence: Synthetic oligonucleotide
  Target: LAMA2; (+) strand; PAM type: NRG; PAM sequence: AAG
cccatgtaatgagctcttag

SEQ ID NO: 157897 - DNA, 20 bp, Artificial Sequence
  Description of Artificial Sequence: Synthetic oligonucleotide
  Target: LAMA2; (+) strand; PAM type: NRG; PAM sequence: CAG
tgagctcttagaagacattg

SEQ ID NO: 157898 - DNA, 20 bp, Artificial Sequence
  Description of Artificial Sequence: Synthetic oligonucleotide
  Target: LAMA2; (+) strand; PAM type: NRG; PAM sequence: GAG
agctcttagaagacattgca

SEQ ID NO: 157899 - DNA, 20 bp, Artificial Sequence
  Description of Artificial Sequence: Synthetic oligonucleotide
  Target: LAMA2; (+) strand; PAM type: NRG; PAM sequence: CAG
aatttaaaatcctgtttaat

SEQ ID NO: 157900 - DNA, 20 bp, Artificial Sequence
  Description of Artificial Sequence: Synthetic oligonucleotide
  Target: LAMA2; (+) strand; PAM type: NRG; PAM sequence: TAG
aaatcctgtttaatcagccg

SEQ ID NO: 157901 - DNA, 20 bp, Artificial Sequence
  Description of Artificial Sequence: Synthetic oligonucleotide
  Target: LAMA2; (+) strand; PAM type: NRG; PAM sequence: GAG
cctgtttaatcagccgtagc

SEQ ID NO: 157902 - DNA, 20 bp, Artificial Sequence
  Description of Artificial Sequence: Synthetic oligonucleotide
  Target: LAMA2; (+) strand; PAM type: NRG; PAM sequence: TGG
gagctatgtgccattctctg

SEQ ID NO: 157903 - DNA, 20 bp, Artificial Sequence
  Description of Artificial Sequence: Synthetic oligonucleotide
  Target: LAMA2; (+) strand; PAM type: NRG; PAM sequence: AAG
gccattctctgtggaacact

SEQ ID NO: 157904 - DNA, 20 bp, Artificial Sequence
  Description of Artificial Sequence: Synthetic oligonucleotide
  Target: LAMA2; (+) strand; PAM type: NRG; PAM sequence: GAG
cattctctgtggaacactaa

SEQ ID NO: 157905 - DNA, 20 bp, Artificial Sequence
  Description of Artificial Sequence: Synthetic oligonucleotide
  Target: LAMA2; (+) strand; PAM type: NRG; PAM sequence: AGG
attctctgtggaacactaag

SEQ ID NO: 157906 - DNA, 20 bp, Artificial Sequence
  Description of Artificial Sequence: Synthetic oligonucleotide
  Target: LAMA2; (+) strand; PAM type: NRG; PAM sequence: CAG
tgtggaacactaagaggaat

SEQ ID NO: 157907 - DNA, 20 bp, Artificial Sequence
  Description of Artificial Sequence: Synthetic oligonucleotide
  Target: LAMA2; (+) strand; PAM type: NRG; PAM sequence: AGG
gtggaacactaagaggaatc

SEQ ID NO: 157908 - DNA, 20 bp, Artificial Sequence
  Description of Artificial Sequence: Synthetic oligonucleotide
  Target: LAMA2; (+) strand; PAM type: NRG; PAM sequence: GGG
tggaacactaagaggaatca

SEQ ID NO: 157909 - DNA, 20 bp, Artificial Sequence
  Description of Artificial Sequence: Synthetic oligonucleotide
  Target: LAMA2; (+) strand; PAM type: NRG; PAM sequence: CAG
agggttcttcctcctccatc

SEQ ID NO: 157910 - DNA, 20 bp, Artificial Sequence
  Description of Artificial Sequence: Synthetic oligonucleotide
  Target: LAMA2; (+) strand; PAM type: NRG; PAM sequence: CAG
ccatccagtacattcccaac

SEQ ID NO: 157911 - DNA, 20 bp, Artificial Sequence
  Description of Artificial Sequence: Synthetic oligonucleotide
  Target: LAMA2; (+) strand; PAM type: NRG; PAM sequence: AGG
catccagtacattcccaacc

SEQ ID NO: 157912 - DNA, 20 bp, Artificial Sequence
  Description of Artificial Sequence: Synthetic oligonucleotide
  Target: LAMA2; (+) strand; PAM type: NRG; PAM sequence: TGG
cccaaccaggaattgctgtc

SEQ ID NO: 157913 - DNA, 20 bp, Artificial Sequence
  Description of Artificial Sequence: Synthetic oligonucleotide
  Target: LAMA2; (+) strand; PAM type: NRG; PAM sequence: CAG
accaggaattgctgtctggt

SEQ ID NO: 157914 - DNA, 20 bp, Artificial Sequence
  Description of Artificial Sequence: Synthetic oligonucleotide
  Target: LAMA2; (+) strand; PAM type: NRG; PAM sequence: AGG
ccaggaattgctgtctggtc

SEQ ID NO: 157915 - DNA, 20 bp, Artificial Sequence
  Description of Artificial Sequence: Synthetic oligonucleotide
  Target: LAMA2; (+) strand; PAM type: NRG; PAM sequence: GGG
caggaattgctgtctggtca

SEQ ID NO: 157916 - DNA, 20 bp, Artificial Sequence
  Description of Artificial Sequence: Synthetic oligonucleotide
  Target: LAMA2; (+) strand; PAM type: NRG; PAM sequence: TGG
aattgctgtctggtcagggt

SEQ ID NO: 157917 - DNA, 20 bp, Artificial Sequence
  Description of Artificial Sequence: Synthetic oligonucleotide
  Target: LAMA2; (+) strand; PAM type: NRG; PAM sequence: AAG
ctggtcagggttggacgtga

SEQ ID NO: 157918 - DNA, 20 bp, Artificial Sequence
  Description of Artificial Sequence: Synthetic oligonucleotide
  Target: LAMA2; (+) strand; PAM type: NRG; PAM sequence: AGG
tggtcagggttggacgtgaa

SEQ ID NO: 157919 - DNA, 20 bp, Artificial Sequence
  Description of Artificial Sequence: Synthetic oligonucleotide
  Target: LAMA2; (+) strand; PAM type: NRG; PAM sequence: TAG
gggttggacgtgaaaggcca

SEQ ID NO: 157920 - DNA, 20 bp, Artificial Sequence
  Description of Artificial Sequence: Synthetic oligonucleotide
  Target: LAMA2; (+) strand; PAM type: NRG; PAM sequence: GAG
gttggacgtgaaaggccata

SEQ ID NO: 157921 - DNA, 20 bp, Artificial Sequence
  Description of Artificial Sequence: Synthetic oligonucleotide
  Target: LAMA2; (+) strand; PAM type: NRG; PAM sequence: GAG
tggacgtgaaaggccataga

SEQ ID NO: 157922 - DNA, 20 bp, Artificial Sequence
  Description of Artificial Sequence: Synthetic oligonucleotide
  Target: LAMA2; (+) strand; PAM type: NRG; PAM sequence: AAG
catagagagccaaccctgcg

SEQ ID NO: 157923 - DNA, 20 bp, Artificial Sequence
  Description of Artificial Sequence: Synthetic oligonucleotide
  Target: LAMA2; (+) strand; PAM type: NRG; PAM sequence: AAG
agagccaaccctgcgaagcc

SEQ ID NO: 157924 - DNA, 20 bp, Artificial Sequence
  Description of Artificial Sequence: Synthetic oligonucleotide
  Target: LAMA2; (+) strand; PAM type: NRG; PAM sequence: CAG
gaagccaagtctctgcatgt

SEQ ID NO: 157925 - DNA, 20 bp, Artificial Sequence
  Description of Artificial Sequence: Synthetic oligonucleotide
  Target: LAMA2; (+) strand; PAM type: NRG; PAM sequence: CAG
caagtctctgcatgtcagca

SEQ ID NO: 157926 - DNA, 20 bp, Artificial Sequence
  Description of Artificial Sequence: Synthetic oligonucleotide
  Target: LAMA2; (+) strand; PAM type: NRG; PAM sequence: GAG
agtctctgcatgtcagcaca

SEQ ID NO: 157927 - DNA, 20 bp, Artificial Sequence
  Description of Artificial Sequence: Synthetic oligonucleotide
  Target: LAMA2; (+) strand; PAM type: NRG; PAM sequence: AAG
tctgcatgtcagcacagagc

SEQ ID NO: 157928 - DNA, 20 bp, Artificial Sequence
  Description of Artificial Sequence: Synthetic oligonucleotide
  Target: LAMA2; (+) strand; PAM type: NRG; PAM sequence: CAG
gcatgtcagcacagagcaag

SEQ ID NO: 157929 - DNA, 20 bp, Artificial Sequence
  Description of Artificial Sequence: Synthetic oligonucleotide
  Target: LAMA2; (+) strand; PAM type: NRG; PAM sequence: CAG
tgtcagcacagagcaagcag

SEQ ID NO: 157930 - DNA, 20 bp, Artificial Sequence
  Description of Artificial Sequence: Synthetic oligonucleotide
  Target: LAMA2; (+) strand; PAM type: NRG; PAM sequence: CAG
acagagcaagcagcagaata

SEQ ID NO: 157931 - DNA, 20 bp, Artificial Sequence
  Description of Artificial Sequence: Synthetic oligonucleotide
  Target: LAMA2; (+) strand; PAM type: NRG; PAM sequence: CAG
agcagcagaatacagatcat

SEQ ID NO: 157932 - DNA, 20 bp, Artificial Sequence
  Description of Artificial Sequence: Synthetic oligonucleotide
  Target: LAMA2; (+) strand; PAM type: NRG; PAM sequence: CAG
tttatgaatatctctattta

SEQ ID NO: 157933 - DNA, 20 bp, Artificial Sequence
  Description of Artificial Sequence: Synthetic oligonucleotide
  Target: LAMA2; (+) strand; PAM type: NRG; PAM sequence: TGG
aatatctctatttacagtgc

SEQ ID NO: 157934 - DNA, 20 bp, Artificial Sequence
  Description of Artificial Sequence: Synthetic oligonucleotide
  Target: LAMA2; (+) strand; PAM type: NRG; PAM sequence: GAG
tatctctatttacagtgctg

SEQ ID NO: 157935 - DNA, 20 bp, Artificial Sequence
  Description of Artificial Sequence: Synthetic oligonucleotide
  Target: LAMA2; (+) strand; PAM type: NRG; PAM sequence: TGG
ctctatttacagtgctggag

SEQ ID NO: 157936 - DNA, 20 bp, Artificial Sequence
  Description of Artificial Sequence: Synthetic oligonucleotide
  Target: LAMA2; (+) strand; PAM type: NRG; PAM sequence: AAG
ctggagtggaattttaaaaa

SEQ ID NO: 157937 - DNA, 20 bp, Artificial Sequence
  Description of Artificial Sequence: Synthetic oligonucleotide
  Target: LAMA2; (+) strand; PAM type: NRG; PAM sequence: AGG
tggagtggaattttaaaaaa

SEQ ID NO: 157938 - DNA, 20 bp, Artificial Sequence
  Description of Artificial Sequence: Synthetic oligonucleotide
  Target: LAMA2; (+) strand; PAM type: NRG; PAM sequence: CAG
gaattttaaaaaaaggattg

SEQ ID NO: 157939 - DNA, 20 bp, Artificial Sequence
  Description of Artificial Sequence: Synthetic oligonucleotide
  Target: LAMA2; (+) strand; PAM type: NRG; PAM sequence: CAG
tgcattgaatctgtcactca

SEQ ID NO: 157940 - DNA, 20 bp, Artificial Sequence
  Description of Artificial Sequence: Synthetic oligonucleotide
  Target: LAMA2; (+) strand; PAM type: NRG; PAM sequence: AAG
atttttttctgaatttctac

SEQ ID NO: 157941 - DNA, 20 bp, Artificial Sequence
  Description of Artificial Sequence: Synthetic oligonucleotide
  Target: LAMA2; (+) strand; PAM type: NRG; PAM sequence: AGG
tttttttctgaatttctaca

SEQ ID NO: 157942 - DNA, 20 bp, Artificial Sequence
  Description of Artificial Sequence: Synthetic oligonucleotide
  Target: LAMA2; (+) strand; PAM type: NRG; PAM sequence: CAG
tacaaggtgactgtcaatgt

SEQ ID NO: 157943 - DNA, 20 bp, Artificial Sequence
  Description of Artificial Sequence: Synthetic oligonucleotide
  Target: LAMA2; (+) strand; PAM type: NRG; PAM sequence: AAG
tgtcagaaaatgtaaacctc

SEQ ID NO: 157944 - DNA, 20 bp, Artificial Sequence
  Description of Artificial Sequence: Synthetic oligonucleotide
  Target: LAMA2; (+) strand; PAM type: NRG; PAM sequence: TGG
aacctcaagtgtacattgca

SEQ ID NO: 157945 - DNA, 20 bp, Artificial Sequence
  Description of Artificial Sequence: Synthetic oligonucleotide
  Target: LAMA2; (+) strand; PAM type: NRG; PAM sequence: GGG
acctcaagtgtacattgcat

SEQ ID NO: 157946 - DNA, 20 bp, Artificial Sequence
  Description of Artificial Sequence: Synthetic oligonucleotide
  Target: LAMA2; (+) strand; PAM type: NRG; PAM sequence: GGG
cctcaagtgtacattgcatg

SEQ ID NO: 157947 - DNA, 20 bp, Artificial Sequence
  Description of Artificial Sequence: Synthetic oligonucleotide
  Target: LAMA2; (+) strand; PAM type: NRG; PAM sequence: TGG
agtgtacattgcatggggct

SEQ ID NO: 157948 - DNA, 20 bp, Artificial Sequence
  Description of Artificial Sequence: Synthetic oligonucleotide
  Target: LAMA2; (+) strand; PAM type: NRG; PAM sequence: TAG
atggggcttggcatgtatat

SEQ ID NO: 157949 - DNA, 20 bp, Artificial Sequence
  Description of Artificial Sequence: Synthetic oligonucleotide
  Target: LAMA2; (+) strand; PAM type: NRG; PAM sequence: AAG
ggcttggcatgtatattaga

SEQ ID NO: 157950 - DNA, 20 bp, Artificial Sequence
  Description of Artificial Sequence: Synthetic oligonucleotide
  Target: LAMA2; (+) strand; PAM type: NRG; PAM sequence: AAG
tggcatgtatattagaaaga

SEQ ID NO: 157951 - DNA, 20 bp, Artificial Sequence
  Description of Artificial Sequence: Synthetic oligonucleotide
  Target: LAMA2; (+) strand; PAM type: NRG; PAM sequence: AAG
catgtatattagaaagaaag

SEQ ID NO: 157952 - DNA, 20 bp, Artificial Sequence
  Description of Artificial Sequence: Synthetic oligonucleotide
  Target: LAMA2; (+) strand; PAM type: NRG; PAM sequence: AAG
aaagaagtttgcttaatgaa

SEQ ID NO: 157953 - DNA, 20 bp, Artificial Sequence
  Description of Artificial Sequence: Synthetic oligonucleotide
  Target: LAMA2; (+) strand; PAM type: NRG; PAM sequence: GAG
agaagtttgcttaatgaaaa

SEQ ID NO: 157954 - DNA, 20 bp, Artificial Sequence
  Description of Artificial Sequence: Synthetic oligonucleotide
  Target: LAMA2; (+) strand; PAM type: NRG; PAM sequence: AGG
gaagtttgcttaatgaaaag

SEQ ID NO: 157955 - DNA, 20 bp, Artificial Sequence
  Description of Artificial Sequence: Synthetic oligonucleotide
  Target: LAMA2; (+) strand; PAM type: NRG; PAM sequence: AAG
ggataatatttattcaaact

SEQ ID NO: 157956 - DNA, 20 bp, Artificial Sequence
  Description of Artificial Sequence: Synthetic oligonucleotide
  Target: LAMA2; (+) strand; PAM type: NRG; PAM sequence: CAG
actaagcctatttaattgca

SEQ ID NO: 157957 - DNA, 20 bp, Artificial Sequence
  Description of Artificial Sequence: Synthetic oligonucleotide
  Target: LAMA2; (+) strand; PAM type: NRG; PAM sequence: GAG
taagcctatttaattgcaca

SEQ ID NO: 157958 - DNA, 20 bp, Artificial Sequence
  Description of Artificial Sequence: Synthetic oligonucleotide
  Target: LAMA2; (+) strand; PAM type: NRG; PAM sequence: AGG
aagcctatttaattgcacag

SEQ ID NO: 157959 - DNA, 20 bp, Artificial Sequence
  Description of Artificial Sequence: Synthetic oligonucleotide
  Target: LAMA2; (+) strand; PAM type: NRG; PAM sequence: AAG
ctatttaattgcacagagga

SEQ ID NO: 157960 - DNA, 20 bp, Artificial Sequence
  Description of Artificial Sequence: Synthetic oligonucleotide
  Target: LAMA2; (+) strand; PAM type: NRG; PAM sequence: CAG
ctttgaccaataacatttct

SEQ ID NO: 157961 - DNA, 20 bp, Artificial Sequence
  Description of Artificial Sequence: Synthetic oligonucleotide
  Target: LAMA2; (+) strand; PAM type: NRG; PAM sequence: TAG
accaataacatttctcagct

SEQ ID NO: 157962 - DNA, 20 bp, Artificial Sequence
  Description of Artificial Sequence: Synthetic oligonucleotide
  Target: LAMA2; (+) strand; PAM type: NRG; PAM sequence: TGG
acatttctcagcttagtgta

SEQ ID NO: 157963 - DNA, 20 bp, Artificial Sequence
  Description of Artificial Sequence: Synthetic oligonucleotide
  Target: LAMA2; (+) strand; PAM type: NRG; PAM sequence: GGG
catttctcagcttagtgtat

SEQ ID NO: 157964 - DNA, 20 bp, Artificial Sequence
  Description of Artificial Sequence: Synthetic oligonucleotide
  Target: LAMA2; (+) strand; PAM type: NRG; PAM sequence: AAG
cttagtgtatgggctatgta

SEQ ID NO: 157965 - DNA, 20 bp, Artificial Sequence
  Description of Artificial Sequence: Synthetic oligonucleotide
  Target: LAMA2; (+) strand; PAM type: NRG; PAM sequence: TGG
tatgtaaagtgcctgtcaaa

SEQ ID NO: 157966 - DNA, 20 bp, Artificial Sequence
  Description of Artificial Sequence: Synthetic oligonucleotide
  Target: LAMA2; (+) strand; PAM type: NRG; PAM sequence: GAG
tgtaaagtgcctgtcaaatg

SEQ ID NO: 157967 - DNA, 20 bp, Artificial Sequence
  Description of Artificial Sequence: Synthetic oligonucleotide
  Target: LAMA2; (+) strand; PAM type: NRG; PAM sequence: AGG
gtaaagtgcctgtcaaatgg

SEQ ID NO: 157968 - DNA, 20 bp, Artificial Sequence
  Description of Artificial Sequence: Synthetic oligonucleotide
  Target: LAMA2; (+) strand; PAM type: NRG; PAM sequence: GGG
taaagtgcctgtcaaatgga

SEQ ID NO: 157969 - DNA, 20 bp, Artificial Sequence
  Description of Artificial Sequence: Synthetic oligonucleotide
  Target: LAMA2; (+) strand; PAM type: NRG; PAM sequence: AAG
tggagggatgtctttgttga

SEQ ID NO: 157970 - DNA, 20 bp, Artificial Sequence
  Description of Artificial Sequence: Synthetic oligonucleotide
  Target: LAMA2; (+) strand; PAM type: NRG; PAM sequence: CAG
atgtctttgttgaaagaatc

SEQ ID NO: 157971 - DNA, 20 bp, Artificial Sequence
  Description of Artificial Sequence: Synthetic oligonucleotide
  Target: LAMA2; (+) strand; PAM type: NRG; PAM sequence: CAG
gttgaaagaatccagactca

SEQ ID NO: 157972 - DNA, 20 bp, Artificial Sequence
  Description of Artificial Sequence: Synthetic oligonucleotide
  Target: LAMA2; (+) strand; PAM type: NRG; PAM sequence: AAG
aaagaatccagactcacaga

SEQ ID NO: 157973 - DNA, 20 bp, Artificial Sequence
  Description of Artificial Sequence: Synthetic oligonucleotide
  Target: LAMA2; (+) strand; PAM type: NRG; PAM sequence: GAG
aatccagactcacagaaagt

SEQ ID NO: 157974 - DNA, 20 bp, Artificial Sequence
  Description of Artificial Sequence: Synthetic oligonucleotide
  Target: LAMA2; (+) strand; PAM type: NRG; PAM sequence: TGG
acagaaagtgagtgactttc

SEQ ID NO: 157975 - DNA, 20 bp, Artificial Sequence
  Description of Artificial Sequence: Synthetic oligonucleotide
  Target: LAMA2; (+) strand; PAM type: NRG; PAM sequence: CAG
aaagtgagtgactttctggt

SEQ ID NO: 157976 - DNA, 20 bp, Artificial Sequence
  Description of Artificial Sequence: Synthetic oligonucleotide
  Target: LAMA2; (+) strand; PAM type: NRG; PAM sequence: TGG
tgagtgactttctggtcaga

SEQ ID NO: 157977 - DNA, 20 bp, Artificial Sequence
  Description of Artificial Sequence: Synthetic oligonucleotide
  Target: LAMA2; (+) strand; PAM type: NRG; PAM sequence: TAG
tgactttctggtcagatggt

SEQ ID NO: 157978 - DNA, 20 bp, Artificial Sequence
  Description of Artificial Sequence: Synthetic oligonucleotide
  Target: LAMA2; (+) strand; PAM type: NRG; PAM sequence: AAG
gaactctcccaattttgaca

SEQ ID NO: 157979 - DNA, 20 bp, Artificial Sequence
  Description of Artificial Sequence: Synthetic oligonucleotide
  Target: LAMA2; (+) strand; PAM type: NRG; PAM sequence: TGG
gacaaagatcgttctctgtt

SEQ ID NO: 157980 - DNA, 20 bp, Artificial Sequence
  Description of Artificial Sequence: Synthetic oligonucleotide
  Target: LAMA2; (+) strand; PAM type: NRG; PAM sequence: GGG
acaaagatcgttctctgttt

SEQ ID NO: 157981 - DNA, 20 bp, Artificial Sequence
  Description of Artificial Sequence: Synthetic oligonucleotide
  Target: LAMA2; (+) strand; PAM type: NRG; PAM sequence: AAG
ttctctgtttgggatttgta

SEQ ID NO: 157982 - DNA, 20 bp, Artificial Sequence
  Description of Artificial Sequence: Synthetic oligonucleotide
  Target: LAMA2; (+) strand; PAM type: NRG; PAM sequence: TAG
gatttgtaaagctcaaactg

SEQ ID NO: 157983 - DNA, 20 bp, Artificial Sequence
  Description of Artificial Sequence: Synthetic oligonucleotide
  Target: LAMA2; (+) strand; PAM type: NRG; PAM sequence: AAG
taaagctcaaactgtagact

SEQ ID NO: 157984 - DNA, 20 bp, Artificial Sequence
  Description of Artificial Sequence: Synthetic oligonucleotide
  Target: LAMA2; (+) strand; PAM type: NRG; PAM sequence: CAG
actgtagactaagatgatga

SEQ ID NO: 157985 - DNA, 20 bp, Artificial Sequence
  Description of Artificial Sequence: Synthetic oligonucleotide
  Target: LAMA2; (+) strand; PAM type: NRG; PAM sequence: AGG
ctgtagactaagatgatgac

SEQ ID NO: 157986 - DNA, 20 bp, Artificial Sequence
  Description of Artificial Sequence: Synthetic oligonucleotide
  Target: LAMA2; (+) strand; PAM type: NRG; PAM sequence: GAG
gtagactaagatgatgacag

SEQ ID NO: 157987 - DNA, 20 bp, Artificial Sequence
  Description of Artificial Sequence: Synthetic oligonucleotide
  Target: LAMA2; (+) strand; PAM type: NRG; PAM sequence: AGG
tagactaagatgatgacagg

SEQ ID NO: 157988 - DNA, 20 bp, Artificial Sequence
  Description of Artificial Sequence: Synthetic oligonucleotide
  Target: LAMA2; (+) strand; PAM type: NRG; PAM sequence: TGG
tgacaggaggatctgctgtt

SEQ ID NO: 157989 - DNA, 20 bp, Artificial Sequence
  Description of Artificial Sequence: Synthetic oligonucleotide
  Target: LAMA2; (+) strand; PAM type: NRG; PAM sequence: TGG
ggatctgctgtttggcttca

SEQ ID NO: 157990 - DNA, 20 bp, Artificial Sequence
  Description of Artificial Sequence: Synthetic oligonucleotide
  Target: LAMA2; (+) strand; PAM type: NRG; PAM sequence: CAG
tcatggaacttaacctattt

SEQ ID NO: 157991 - DNA, 20 bp, Artificial Sequence
  Description of Artificial Sequence: Synthetic oligonucleotide
  Target: LAMA2; (+) strand; PAM type: NRG; PAM sequence: AAG
ggaacttaacctatttcagc

SEQ ID NO: 157992 - DNA, 20 bp, Artificial Sequence
  Description of Artificial Sequence: Synthetic oligonucleotide
  Target: LAMA2; (+) strand; PAM type: NRG; PAM sequence: TGG
tttcagcaagcctgcaatac

SEQ ID NO: 157993 - DNA, 20 bp, Artificial Sequence
  Description of Artificial Sequence: Synthetic oligonucleotide
  Target: LAMA2; (+) strand; PAM type: NRG; PAM sequence: GGG
ttcagcaagcctgcaatact

SEQ ID NO: 157994 - DNA, 20 bp, Artificial Sequence
  Description of Artificial Sequence: Synthetic oligonucleotide
  Target: LAMA2; (+) strand; PAM type: NRG; PAM sequence: GGG
tcagcaagcctgcaatactg

SEQ ID NO: 157995 - DNA, 20 bp, Artificial Sequence
  Description of Artificial Sequence: Synthetic oligonucleotide
  Target: LAMA2; (+) strand; PAM type: NRG; PAM sequence: CAG
acatatatttatgtttatgt

SEQ ID NO: 157996 - DNA, 20 bp, Artificial Sequence
  Description of Artificial Sequence: Synthetic oligonucleotide
  Target: LAMA2; (+) strand; PAM type: NRG; PAM sequence: AGG
catatatttatgtttatgtc

SEQ ID NO: 157997 - DNA, 20 bp, Artificial Sequence
  Description of Artificial Sequence: Synthetic oligonucleotide
  Target: LAMA2; (+) strand; PAM type: NRG; PAM sequence: CAG
ttatgtttatgtcaggcttg

SEQ ID NO: 157998 - DNA, 20 bp, Artificial Sequence
  Description of Artificial Sequence: Synthetic oligonucleotide
  Target: LAMA2; (+) strand; PAM type: NRG; PAM sequence: TGG
tatgtcaggcttgcagttga

SEQ ID NO: 157999 - DNA, 20 bp, Artificial Sequence
  Description of Artificial Sequence: Synthetic oligonucleotide
  Target: LAMA2; (+) strand; PAM type: NRG; PAM sequence: GGG
atgtcaggcttgcagttgat

SEQ ID NO: 158000 - DNA, 20 bp, Artificial Sequence
  Description of Artificial Sequence: Synthetic oligonucleotide
  Target: LAMA2; (+) strand; PAM type: NRG; PAM sequence: AAG
caggcttgcagttgatgggt

SEQ ID NO: 158001 - DNA, 20 bp, Artificial Sequence
  Description of Artificial Sequence: Synthetic oligonucleotide
  Target: LAMA2; (+) strand; PAM type: NRG; PAM sequence: AGG
aggcttgcagttgatgggta

SEQ ID NO: 158002 - DNA, 20 bp, Artificial Sequence
  Description of Artificial Sequence: Synthetic oligonucleotide
  Target: LAMA2; (+) strand; PAM type: NRG; PAM sequence: AAG
ttgatgggtaaggttcataa

SEQ ID NO: 158003 - DNA, 20 bp, Artificial Sequence
  Description of Artificial Sequence: Synthetic oligonucleotide
  Target: LAMA2; (+) strand; PAM type: NRG; PAM sequence: AGG
tgatgggtaaggttcataaa

SEQ ID NO: 158004 - DNA, 20 bp, Artificial Sequence
  Description of Artificial Sequence: Synthetic oligonucleotide
  Target: LAMA2; (+) strand; PAM type: NRG; PAM sequence: CAG
atcattcccactccgtactc

SEQ ID NO: 158005 - DNA, 20 bp, Artificial Sequence
  Description of Artificial Sequence: Synthetic oligonucleotide
  Target: LAMA2; (+) strand; PAM type: NRG; PAM sequence: TAG
gtcttgcaaatactgcccta

SEQ ID NO: 158006 - DNA, 20 bp, Artificial Sequence
  Description of Artificial Sequence: Synthetic oligonucleotide
  Target: LAMA2; (+) strand; PAM type: NRG; PAM sequence: CAG
acaataaaattcgtatacaa

SEQ ID NO: 158007 - DNA, 20 bp, Artificial Sequence
  Description of Artificial Sequence: Synthetic oligonucleotide
  Target: LAMA2; (+) strand; PAM type: NRG; PAM sequence: AAG
taaaattcgtatacaacagt

SEQ ID NO: 158008 - DNA, 20 bp, Artificial Sequence
  Description of Artificial Sequence: Synthetic oligonucleotide
  Target: LAMA2; (+) strand; PAM type: NRG; PAM sequence: TAG
gtaagtaaaatatgatttaa

SEQ ID NO: 158009 - DNA, 20 bp, Artificial Sequence
  Description of Artificial Sequence: Synthetic oligonucleotide
  Target: LAMA2; (+) strand; PAM type: NRG; PAM sequence: TAG
attatgcatcttctgtcttg

SEQ ID NO: 158010 - DNA, 20 bp, Artificial Sequence
  Description of Artificial Sequence: Synthetic oligonucleotide
  Target: LAMA2; (+) strand; PAM type: NRG; PAM sequence: CAG
atcttctgtcttgtagctcc

SEQ ID NO: 158011 - DNA, 20 bp, Artificial Sequence
  Description of Artificial Sequence: Synthetic oligonucleotide
  Target: LAMA2; (+) strand; PAM type: NRG; PAM sequence: CAG
ttctgtcttgtagctcccag

SEQ ID NO: 158012 - DNA, 20 bp, Artificial Sequence
  Description of Artificial Sequence: Synthetic oligonucleotide
  Target: LAMA2; (+) strand; PAM type: NRG; PAM sequence: TAG
tgtcttgtagctcccagcag

SEQ ID NO: 158013 - DNA, 20 bp, Artificial Sequence
  Description of Artificial Sequence: Synthetic oligonucleotide
  Target: LAMA2; (+) strand; PAM type: NRG; PAM sequence: AGG
gtcttgtagctcccagcagt

SEQ ID NO: 158014 - DNA, 20 bp, Artificial Sequence
  Description of Artificial Sequence: Synthetic oligonucleotide
  Target: LAMA2; (+) strand; PAM type: NRG; PAM sequence: GAG
cttgtagctcccagcagtag

SEQ ID NO: 158015 - DNA, 20 bp, Artificial Sequence
  Description of Artificial Sequence: Synthetic oligonucleotide
  Target: LAMA2; (+) strand; PAM type: NRG; PAM sequence: AGG
ttgtagctcccagcagtagg

SEQ ID NO: 158016 - DNA, 20 bp, Artificial Sequence
  Description of Artificial Sequence: Synthetic oligonucleotide
  Target: LAMA2; (+) strand; PAM type: NRG; PAM sequence: CAG
agctcccagcagtaggagga

SEQ ID NO: 158017 - DNA, 20 bp, Artificial Sequence
  Description of Artificial Sequence: Synthetic oligonucleotide
  Target: LAMA2; (+) strand; PAM type: NRG; PAM sequence: AAG
taccatatcatatgaccttg

SEQ ID NO: 158018 - DNA, 20 bp, Artificial Sequence
  Description of Artificial Sequence: Synthetic oligonucleotide
  Target: LAMA2; (+) strand; PAM type: NRG; PAM sequence: AAG
catatcatatgaccttgaag

SEQ ID NO: 158019 - DNA, 20 bp, Artificial Sequence
  Description of Artificial Sequence: Synthetic oligonucleotide
  Target: LAMA2; (+) strand; PAM type: NRG; PAM sequence: GAG
tatcatatgaccttgaagaa

SEQ ID NO: 158020 - DNA, 20 bp, Artificial Sequence
  Description of Artificial Sequence: Synthetic oligonucleotide
  Target: LAMA2; (+) strand; PAM type: NRG; PAM sequence: AGG
atcatatgaccttgaagaag

SEQ ID NO: 158021 - DNA, 20 bp, Artificial Sequence
  Description of Artificial Sequence: Synthetic oligonucleotide
  Target: LAMA2; (+) strand; PAM type: NRG; PAM sequence: AAG
atatgaccttgaagaagagg

SEQ ID NO: 158022 - DNA, 20 bp, Artificial Sequence
  Description of Artificial Sequence: Synthetic oligonucleotide
  Target: LAMA2; (+) strand; PAM type: NRG; PAM sequence: AAG
tgaccttgaagaagaggaag

SEQ ID NO: 158023 - DNA, 20 bp, Artificial Sequence
  Description of Artificial Sequence: Synthetic oligonucleotide
  Target: LAMA2; (+) strand; PAM type: NRG; PAM sequence: CAG
tgaagaagaggaagaagata

SEQ ID NO: 158024 - DNA, 20 bp, Artificial Sequence
  Description of Artificial Sequence: Synthetic oligonucleotide
  Target: LAMA2; (+) strand; PAM type: NRG; PAM sequence: CAG
aagatacagaacgtgttctc

SEQ ID NO: 158025 - DNA, 20 bp, Artificial Sequence
  Description of Artificial Sequence: Synthetic oligonucleotide
  Target: LAMA2; (+) strand; PAM type: NRG; PAM sequence: TAG
tctccagcttatgattatct

SEQ ID NO: 158026 - DNA, 20 bp, Artificial Sequence
  Description of Artificial Sequence: Synthetic oligonucleotide
  Target: LAMA2; (+) strand; PAM type: NRG; PAM sequence: GAG
tccagcttatgattatctta

SEQ ID NO: 158027 - DNA, 20 bp, Artificial Sequence
  Description of Artificial Sequence: Synthetic oligonucleotide
  Target: LAMA2; (+) strand; PAM type: NRG; PAM sequence: AGG
ccagcttatgattatcttag

SEQ ID NO: 158028 - DNA, 20 bp, Artificial Sequence
  Description of Artificial Sequence: Synthetic oligonucleotide
  Target: LAMA2; (+) strand; PAM type: NRG; PAM sequence: TAG
gcttatgattatcttagagg

SEQ ID NO: 158029 - DNA, 20 bp, Artificial Sequence
  Description of Artificial Sequence: Synthetic oligonucleotide
  Target: LAMA2; (+) strand; PAM type: NRG; PAM sequence: GAG
ttatgattatcttagaggta

SEQ ID NO: 158030 - DNA, 20 bp, Artificial Sequence
  Description of Artificial Sequence: Synthetic oligonucleotide
  Target: LAMA2; (+) strand; PAM type: NRG; PAM sequence: GAG
tatcttagaggtagagtact

SEQ ID NO: 158031 - DNA, 20 bp, Artificial Sequence
  Description of Artificial Sequence: Synthetic oligonucleotide
  Target: LAMA2; (+) strand; PAM type: NRG; PAM sequence: GAG
tcttagaggtagagtactga

SEQ ID NO: 158032 - DNA, 20 bp, Artificial Sequence
  Description of Artificial Sequence: Synthetic oligonucleotide
  Target: LAMA2; (+) strand; PAM type: NRG; PAM sequence: AAG
gttacttcctgatgttactt

SEQ ID NO: 158033 - DNA, 20 bp, Artificial Sequence
  Description of Artificial Sequence: Synthetic oligonucleotide
  Target: LAMA2; (+) strand; PAM type: NRG; PAM sequence: AGG
ttacttcctgatgttactta

SEQ ID NO: 158034 - DNA, 20 bp, Artificial Sequence
  Description of Artificial Sequence: Synthetic oligonucleotide
  Target: LAMA2; (+) strand; PAM type: NRG; PAM sequence: CAG
ctgatgttacttaaggttac

SEQ ID NO: 158035 - DNA, 20 bp, Artificial Sequence
  Description of Artificial Sequence: Synthetic oligonucleotide
  Target: LAMA2; (+) strand; PAM type: NRG; PAM sequence: TGG
tactgtattttttacctgcc

SEQ ID NO: 158036 - DNA, 20 bp, Artificial Sequence
  Description of Artificial Sequence: Synthetic oligonucleotide
  Target: LAMA2; (+) strand; PAM type: NRG; PAM sequence: CAG
cctggtttgacactgactta

SEQ ID NO: 158037 - DNA, 20 bp, Artificial Sequence
  Description of Artificial Sequence: Synthetic oligonucleotide
  Target: LAMA2; (+) strand; PAM type: NRG; PAM sequence: AGG
ctggtttgacactgacttac

SEQ ID NO: 158038 - DNA, 20 bp, Artificial Sequence
  Description of Artificial Sequence: Synthetic oligonucleotide
  Target: LAMA2; (+) strand; PAM type: NRG; PAM sequence: TAG
tactaaaaaaaaatatacct

SEQ ID NO: 158039 - DNA, 20 bp, Artificial Sequence
  Description of Artificial Sequence: Synthetic oligonucleotide
  Target: LAMA2; (+) strand; PAM type: NRG; PAM sequence: AGG
actaaaaaaaaatatacctt

SEQ ID NO: 158040 - DNA, 20 bp, Artificial Sequence
  Description of Artificial Sequence: Synthetic oligonucleotide
  Target: LAMA2; (+) strand; PAM type: NRG; PAM sequence: GAG
taaaaaaaaatataccttag

SEQ ID NO: 158041 - DNA, 20 bp, Artificial Sequence
  Description of Artificial Sequence: Synthetic oligonucleotide
  Target: LAMA2; (+) strand; PAM type: NRG; PAM sequence: GAG
ccactcttttgtttcactct

SEQ ID NO: 158042 - DNA, 20 bp, Artificial Sequence
  Description of Artificial Sequence: Synthetic oligonucleotide
  Target: LAMA2; (+) strand; PAM type: NRG; PAM sequence: TAG
gtttcactctgagacatatc

SEQ ID NO: 158043 - DNA, 20 bp, Artificial Sequence
  Description of Artificial Sequence: Synthetic oligonucleotide
  Target: LAMA2; (+) strand; PAM type: NRG; PAM sequence: AAG
tcactctgagacatatctag

SEQ ID NO: 158044 - DNA, 20 bp, Artificial Sequence
  Description of Artificial Sequence: Synthetic oligonucleotide
  Target: LAMA2; (+) strand; PAM type: NRG; PAM sequence: GAG
tgagacatatctagaagatt

SEQ ID NO: 158045 - DNA, 20 bp, Artificial Sequence
  Description of Artificial Sequence: Synthetic oligonucleotide
  Target: LAMA2; (+) strand; PAM type: NRG; PAM sequence: TGG
agaagattgagtatatttgt

SEQ ID NO: 158046 - DNA, 20 bp, Artificial Sequence
  Description of Artificial Sequence: Synthetic oligonucleotide
  Target: LAMA2; (+) strand; PAM type: NRG; PAM sequence: GGG
gaagattgagtatatttgtt

SEQ ID NO: 158047 - DNA, 20 bp, Artificial Sequence
  Description of Artificial Sequence: Synthetic oligonucleotide
  Target: LAMA2; (+) strand; PAM type: NRG; PAM sequence: AAG
tttgttgggtttgaatgata

SEQ ID NO: 158048 - DNA, 20 bp, Artificial Sequence
  Description of Artificial Sequence: Synthetic oligonucleotide
  Target: LAMA2; (+) strand; PAM type: NRG; PAM sequence: AGG
ttgttgggtttgaatgataa

SEQ ID NO: 158049 - DNA, 20 bp, Artificial Sequence
  Description of Artificial Sequence: Synthetic oligonucleotide
  Target: LAMA2; (+) strand; PAM type: NRG; PAM sequence: GAG
gttgggtttgaatgataaag

SEQ ID NO: 158050 - DNA, 20 bp, Artificial Sequence
  Description of Artificial Sequence: Synthetic oligonucleotide
  Target: LAMA2; (+) strand; PAM type: NRG; PAM sequence: TAG
tgaatgataaaggagaactt

SEQ ID NO: 158051 - DNA, 20 bp, Artificial Sequence
  Description of Artificial Sequence: Synthetic oligonucleotide
  Target: LAMA2; (+) strand; PAM type: NRG; PAM sequence: CAG
gataaaggagaactttagac

SEQ ID NO: 158052 - DNA, 20 bp, Artificial Sequence
  Description of Artificial Sequence: Synthetic oligonucleotide
  Target: LAMA2; (+) strand; PAM type: NRG; PAM sequence: AAG
tgaaattaaatttcaaacat

SEQ ID NO: 158053 - DNA, 20 bp, Artificial Sequence
  Description of Artificial Sequence: Synthetic oligonucleotide
  Target: LAMA2; (+) strand; PAM type: NRG; PAM sequence: AGG
gaaattaaatttcaaacata

SEQ ID NO: 158054 - DNA, 20 bp, Artificial Sequence
  Description of Artificial Sequence: Synthetic oligonucleotide
  Target: LAMA2; (+) strand; PAM type: NRG; PAM sequence: AAG
ccaaaatttaaatattatga

SEQ ID NO: 158055 - DNA, 20 bp, Artificial Sequence
  Description of Artificial Sequence: Synthetic oligonucleotide
  Target: LAMA2; (+) strand; PAM type: NRG; PAM sequence: TAG
ttaaatattatgaaagtgtt

SEQ ID NO: 158056 - DNA, 20 bp, Artificial Sequence
  Description of Artificial Sequence: Synthetic oligonucleotide
  Target: LAMA2; (+) strand; PAM type: NRG; PAM sequence: AGG
taaatattatgaaagtgttt

SEQ ID NO: 158057 - DNA, 20 bp, Artificial Sequence
  Description of Artificial Sequence: Synthetic oligonucleotide
  Target: LAMA2; (+) strand; PAM type: NRG; PAM sequence: TGG
taggtacatgctaatttaca

SEQ ID NO: 158058 - DNA, 20 bp, Artificial Sequence
  Description of Artificial Sequence: Synthetic oligonucleotide
  Target: LAMA2; (+) strand; PAM type: NRG; PAM sequence: CAG
ttcctgttttctcttgcttc

SEQ ID NO: 158059 - DNA, 20 bp, Artificial Sequence
  Description of Artificial Sequence: Synthetic oligonucleotide
  Target: LAMA2; (+) strand; PAM type: NRG; PAM sequence: TAG
tgttttctcttgcttccaga

SEQ ID NO: 158060 - DNA, 20 bp, Artificial Sequence
  Description of Artificial Sequence: Synthetic oligonucleotide
  Target: LAMA2; (+) strand; PAM type: NRG; PAM sequence: TAG
gtctactcccttgtttatat

SEQ ID NO: 158061 - DNA, 20 bp, Artificial Sequence
  Description of Artificial Sequence: Synthetic oligonucleotide
  Target: LAMA2; (+) strand; PAM type: NRG; PAM sequence: CAG
ttagataaaataaaatgaaa

SEQ ID NO: 158062 - DNA, 20 bp, Artificial Sequence
  Description of Artificial Sequence: Synthetic oligonucleotide
  Target: LAMA2; (+) strand; PAM type: NRG; PAM sequence: AGG
tagataaaataaaatgaaac

SEQ ID NO: 158063 - DNA, 20 bp, Artificial Sequence
  Description of Artificial Sequence: Synthetic oligonucleotide
  Target: LAMA2; (+) strand; PAM type: NRG; PAM sequence: TAG
aaacaggaaacttgtttatt

SEQ ID NO: 158064 - DNA, 20 bp, Artificial Sequence
  Description of Artificial Sequence: Synthetic oligonucleotide
  Target: LAMA2; (+) strand; PAM type: NRG; PAM sequence: TAG
gaaacttgtttatttagcta

SEQ ID NO: 158065 - DNA, 20 bp, Artificial Sequence
  Description of Artificial Sequence: Synthetic oligonucleotide
  Target: LAMA2; (+) strand; PAM type: NRG; PAM sequence: CAG
ctatagttaaatcttgactt

SEQ ID NO: 158066 - DNA, 20 bp, Artificial Sequence
  Description of Artificial Sequence: Synthetic oligonucleotide
  Target: LAMA2; (+) strand; PAM type: NRG; PAM sequence: TAG
ttgacttcagaatcctgttt

SEQ ID NO: 158067 - DNA, 20 bp, Artificial Sequence
  Description of Artificial Sequence: Synthetic oligonucleotide
  Target: LAMA2; (+) strand; PAM type: NRG; PAM sequence: AGG
tgacttcagaatcctgtttt

SEQ ID NO: 158068 - DNA, 20 bp, Artificial Sequence
  Description of Artificial Sequence: Synthetic oligonucleotide
  Target: LAMA2; (+) strand; PAM type: NRG; PAM sequence: AAG
ttcagaatcctgttttaggt

SEQ ID NO: 158069 - DNA, 20 bp, Artificial Sequence
  Description of Artificial Sequence: Synthetic oligonucleotide
  Target: LAMA2; (+) strand; PAM type: NRG; PAM sequence: AAG
gaatcctgttttaggtaaga

SEQ ID NO: 158070 - DNA, 20 bp, Artificial Sequence
  Description of Artificial Sequence: Synthetic oligonucleotide
  Target: LAMA2; (+) strand; PAM type: NRG; PAM sequence: AGG
aatcctgttttaggtaagaa

SEQ ID NO: 158071 - DNA, 20 bp, Artificial Sequence
  Description of Artificial Sequence: Synthetic oligonucleotide
  Target: LAMA2; (+) strand; PAM type: NRG; PAM sequence: CAG
tgttttaggtaagaaaggta

SEQ ID NO: 158072 - DNA, 20 bp, Artificial Sequence
  Description of Artificial Sequence: Synthetic oligonucleotide
  Target: LAMA2; (+) strand; PAM type: NRG; PAM sequence: AGG
gttttaggtaagaaaggtac

SEQ ID NO: 158073 - DNA, 20 bp, Artificial Sequence
  Description of Artificial Sequence: Synthetic oligonucleotide
  Target: LAMA2; (+) strand; PAM type: NRG; PAM sequence: GAG
tttaggtaagaaaggtacag

SEQ ID NO: 158074 - DNA, 20 bp, Artificial Sequence
  Description of Artificial Sequence: Synthetic oligonucleotide
  Target: LAMA2; (+) strand; PAM type: NRG; PAM sequence: AAG
gtacaggagaaactgctttc

SEQ ID NO: 158075 - DNA, 20 bp, Artificial Sequence
  Description of Artificial Sequence: Synthetic oligonucleotide
  Target: LAMA2; (+) strand; PAM type: NRG; PAM sequence: AAG
gaaactgctttcaagatttg

SEQ ID NO: 158076 - DNA, 20 bp, Artificial Sequence
  Description of Artificial Sequence: Synthetic oligonucleotide
  Target: LAMA2; (+) strand; PAM type: NRG; PAM sequence: AGG
aaactgctttcaagatttga

SEQ ID NO: 158077 - DNA, 20 bp, Artificial Sequence
  Description of Artificial Sequence: Synthetic oligonucleotide
  Target: LAMA2; (+) strand; PAM type: NRG; PAM sequence: GGG
aactgctttcaagatttgaa

SEQ ID NO: 158078 - DNA, 20 bp, Artificial Sequence
  Description of Artificial Sequence: Synthetic oligonucleotide
  Target: LAMA2; (+) strand; PAM type: NRG; PAM sequence: TAG
tttcaagatttgaagggcca

SEQ ID NO: 158079 - DNA, 20 bp, Artificial Sequence
  Description of Artificial Sequence: Synthetic oligonucleotide
  Target: LAMA2; (+) strand; PAM type: NRG; PAM sequence: AGG
ttcaagatttgaagggccat

SEQ ID NO: 158080 - DNA, 20 bp, Artificial Sequence
  Description of Artificial Sequence: Synthetic oligonucleotide
  Target: LAMA2; (+) strand; PAM type: NRG; PAM sequence: AAG
aggcaacttcaaaatgctca

SEQ ID NO: 158081 - DNA, 20 bp, Artificial Sequence
  Description of Artificial Sequence: Synthetic oligonucleotide
  Target: LAMA2; (+) strand; PAM type: NRG; PAM sequence: AAG
ttcaaaatgctcaaagcctg

SEQ ID NO: 158082 - DNA, 20 bp, Artificial Sequence
  Description of Artificial Sequence: Synthetic oligonucleotide
  Target: LAMA2; (+) strand; PAM type: NRG; PAM sequence: TAG
ctcaaagcctgaagtttcct

SEQ ID NO: 158083 - DNA, 20 bp, Artificial Sequence
  Description of Artificial Sequence: Synthetic oligonucleotide
  Target: LAMA2; (+) strand; PAM type: NRG; PAM sequence: GAG
caaagcctgaagtttcctta

SEQ ID NO: 158084 - DNA, 20 bp, Artificial Sequence
  Description of Artificial Sequence: Synthetic oligonucleotide
  Target: LAMA2; (+) strand; PAM type: NRG; PAM sequence: AGG
aaagcctgaagtttccttag

SEQ ID NO: 158085 - DNA, 20 bp, Artificial Sequence
  Description of Artificial Sequence: Synthetic oligonucleotide
  Target: LAMA2; (+) strand; PAM type: NRG; PAM sequence: CAG
ccttgacactgatacgtatt

SEQ ID NO: 158086 - DNA, 20 bp, Artificial Sequence
  Description of Artificial Sequence: Synthetic oligonucleotide
  Target: LAMA2; (+) strand; PAM type: NRG; PAM sequence: GAG
ttgacactgatacgtattca

SEQ ID NO: 158087 - DNA, 20 bp, Artificial Sequence
  Description of Artificial Sequence: Synthetic oligonucleotide
  Target: LAMA2; (+) strand; PAM type: NRG; PAM sequence: AGG
tgacactgatacgtattcag

SEQ ID NO: 158088 - DNA, 20 bp, Artificial Sequence
  Description of Artificial Sequence: Synthetic oligonucleotide
  Target: LAMA2; (+) strand; PAM type: NRG; PAM sequence: TGG
tgcatgttcattattccaaa

SEQ ID NO: 158089 - DNA, 20 bp, Artificial Sequence
  Description of Artificial Sequence: Synthetic oligonucleotide
  Target: LAMA2; (+) strand; PAM type: NRG; PAM sequence: GGG
gcatgttcattattccaaat

SEQ ID NO: 158090 - DNA, 20 bp, Artificial Sequence
  Description of Artificial Sequence: Synthetic oligonucleotide
  Target: LAMA2; (+) strand; PAM type: NRG; PAM sequence: TAG
tgttcattattccaaatggg

SEQ ID NO: 158091 - DNA, 20 bp, Artificial Sequence
  Description of Artificial Sequence: Synthetic oligonucleotide
  Target: LAMA2; (+) strand; PAM type: NRG; PAM sequence: TAG
caaatgggtagatgttaatt

SEQ ID NO: 158092 - DNA, 20 bp, Artificial Sequence
  Description of Artificial Sequence: Synthetic oligonucleotide
  Target: LAMA2; (+) strand; PAM type: NRG; PAM sequence: CAG
ggtagatgttaatttagcac

SEQ ID NO: 158093 - DNA, 20 bp, Artificial Sequence
  Description of Artificial Sequence: Synthetic oligonucleotide
  Target: LAMA2; (+) strand; PAM type: NRG; PAM sequence: AGG
gtagatgttaatttagcacc

SEQ ID NO: 158094 - DNA, 20 bp, Artificial Sequence
  Description of Artificial Sequence: Synthetic oligonucleotide
  Target: LAMA2; (+) strand; PAM type: NRG; PAM sequence: TGG
gaaaaattcttttctcaaaa

SEQ ID NO: 158095 - DNA, 20 bp, Artificial Sequence
  Description of Artificial Sequence: Synthetic oligonucleotide
  Target: LAMA2; (+) strand; PAM type: NRG; PAM sequence: CAG
ttctcaaaatggacattttc

SEQ ID NO: 158096 - DNA, 20 bp, Artificial Sequence
  Description of Artificial Sequence: Synthetic oligonucleotide
  Target: LAMA2; (+) strand; PAM type: NRG; PAM sequence: TGG
aaatggacattttccagtat

SEQ ID NO: 158097 - DNA, 20 bp, Artificial Sequence
  Description of Artificial Sequence: Synthetic oligonucleotide
  Target: LAMA2; (+) strand; PAM type: NRG; PAM sequence: AAG
acattttccagtattggatg

SEQ ID NO: 158098 - DNA, 20 bp, Artificial Sequence
  Description of Artificial Sequence: Synthetic oligonucleotide
  Target: LAMA2; (+) strand; PAM type: NRG; PAM sequence: TGG
ttttccagtattggatgaag

SEQ ID NO: 158099 - DNA, 20 bp, Artificial Sequence
  Description of Artificial Sequence: Synthetic oligonucleotide
  Target: LAMA2; (+) strand; PAM type: NRG; PAM sequence: TGG
tatatatatatatatatata

SEQ ID NO: 158100 - DNA, 20 bp, Artificial Sequence
  Description of Artificial Sequence: Synthetic oligonucleotide
  Target: LAMA2; (+) strand; PAM type: NRG; PAM sequence: TAG
atatatatatatatggcaac

SEQ ID NO: 158101 - DNA, 20 bp, Artificial Sequence
  Description of Artificial Sequence: Synthetic oligonucleotide
  Target: LAMA2; (+) strand; PAM type: NRG; PAM sequence: TGG
tggcaactagatgtatactt

SEQ ID NO: 158102 - DNA, 20 bp, Artificial Sequence
  Description of Artificial Sequence: Synthetic oligonucleotide
  Target: LAMA2; (+) strand; PAM type: NRG; PAM sequence: AAG
gtatactttggaattccttt

SEQ ID NO: 158103 - DNA, 20 bp, Artificial Sequence
  Description of Artificial Sequence: Synthetic oligonucleotide
  Target: LAMA2; (+) strand; PAM type: NRG; PAM sequence: AGG
tatactttggaattccttta

SEQ ID NO: 158104 - DNA, 20 bp, Artificial Sequence
  Description of Artificial Sequence: Synthetic oligonucleotide
  Target: LAMA2; (+) strand; PAM type: NRG; PAM sequence: AAG
tggaattcctttaaggtgaa

SEQ ID NO: 158105 - DNA, 20 bp, Artificial Sequence
  Description of Artificial Sequence: Synthetic oligonucleotide
  Target: LAMA2; (+) strand; PAM type: NRG; PAM sequence: GAG
gaattcctttaaggtgaaaa

SEQ ID NO: 158106 - DNA, 20 bp, Artificial Sequence
  Description of Artificial Sequence: Synthetic oligonucleotide
  Target: LAMA2; (+) strand; PAM type: NRG; PAM sequence: AAG
aaaagagttctctaaatgta

SEQ ID NO: 158107 - DNA, 20 bp, Artificial Sequence
  Description of Artificial Sequence: Synthetic oligonucleotide
  Target: LAMA2; (+) strand; PAM type: NRG; PAM sequence: GAG
ttctctaaatgtaaagtgtt

SEQ ID NO: 158108 - DNA, 20 bp, Artificial Sequence
  Description of Artificial Sequence: Synthetic oligonucleotide
  Target: LAMA2; (+) strand; PAM type: NRG; PAM sequence: TAG
aagtgttgagtgaaattatt

SEQ ID NO: 158109 - DNA, 20 bp, Artificial Sequence
  Description of Artificial Sequence: Synthetic oligonucleotide
  Target: LAMA2; (+) strand; PAM type: NRG; PAM sequence: AAG
agcattcatgtgaatgaact

SEQ ID NO: 158110 - DNA, 20 bp, Artificial Sequence
  Description of Artificial Sequence: Synthetic oligonucleotide
  Target: LAMA2; (+) strand; PAM type: NRG; PAM sequence: AAG
tcatgtgaatgaactaagac

SEQ ID NO: 158111 - DNA, 20 bp, Artificial Sequence
  Description of Artificial Sequence: Synthetic oligonucleotide
  Target: LAMA2; (+) strand; PAM type: NRG; PAM sequence: AAG
tgtgaatgaactaagacaag

SEQ ID NO: 158112 - DNA, 20 bp, Artificial Sequence
  Description of Artificial Sequence: Synthetic oligonucleotide
  Target: LAMA2; (+) strand; PAM type: NRG; PAM sequence: AGG
gtgaatgaactaagacaaga

SEQ ID NO: 158113 - DNA, 20 bp, Artificial Sequence
  Description of Artificial Sequence: Synthetic oligonucleotide
  Target: LAMA2; (+) strand; PAM type: NRG; PAM sequence: AAG
taagacaagaaggattacct

SEQ ID NO: 158114 - DNA, 20 bp, Artificial Sequence
  Description of Artificial Sequence: Synthetic oligonucleotide
  Target: LAMA2; (+) strand; PAM type: NRG; PAM sequence: TAG
gaaggattacctaagtgtca

SEQ ID NO: 158115 - DNA, 20 bp, Artificial Sequence
  Description of Artificial Sequence: Synthetic oligonucleotide
  Target: LAMA2; (+) strand; PAM type: NRG; PAM sequence: AGG
aaggattacctaagtgtcat

SEQ ID NO: 158116 - DNA, 20 bp, Artificial Sequence
  Description of Artificial Sequence: Synthetic oligonucleotide
  Target: LAMA2; (+) strand; PAM type: NRG; PAM sequence: TAG
aggtcattcaatatactcct

SEQ ID NO: 158117 - DNA, 20 bp, Artificial Sequence
  Description of Artificial Sequence: Synthetic oligonucleotide
  Target: LAMA2; (+) strand; PAM type: NRG; PAM sequence: GAG
agatgccattgtcctatttt

SEQ ID NO: 158118 - DNA, 20 bp, Artificial Sequence
  Description of Artificial Sequence: Synthetic oligonucleotide
  Target: LAMA2; (+) strand; PAM type: NRG; PAM sequence: TAG
cattgtcctattttgagaat

SEQ ID NO: 158119 - DNA, 20 bp, Artificial Sequence
  Description of Artificial Sequence: Synthetic oligonucleotide
  Target: LAMA2; (+) strand; PAM type: NRG; PAM sequence: CAG
ctattttgagaattagactg

SEQ ID NO: 158120 - DNA, 20 bp, Artificial Sequence
  Description of Artificial Sequence: Synthetic oligonucleotide
  Target: LAMA2; (+) strand; PAM type: NRG; PAM sequence: TAG
gttgtttgttttttcccatg

SEQ ID NO: 158121 - DNA, 20 bp, Artificial Sequence
  Description of Artificial Sequence: Synthetic oligonucleotide
  Target: LAMA2; (+) strand; PAM type: NRG; PAM sequence: AAG
tttgttttttcccatgtagt

SEQ ID NO: 158122 - DNA, 20 bp, Artificial Sequence
  Description of Artificial Sequence: Synthetic oligonucleotide
  Target: LAMA2; (+) strand; PAM type: NRG; PAM sequence: TAG
agtaagttcctttaaaataa

SEQ ID NO: 158123 - DNA, 20 bp, Artificial Sequence
  Description of Artificial Sequence: Synthetic oligonucleotide
  Target: LAMA2; (+) strand; PAM type: NRG; PAM sequence: CAG
tttaaaataatagcttaatt

SEQ ID NO: 158124 - DNA, 20 bp, Artificial Sequence
  Description of Artificial Sequence: Synthetic oligonucleotide
  Target: LAMA2; (+) strand; PAM type: NRG; PAM sequence: AAG
taatagcttaattcagtttt

SEQ ID NO: 158125 - DNA, 20 bp, Artificial Sequence
  Description of Artificial Sequence: Synthetic oligonucleotide
  Target: LAMA2; (+) strand; PAM type: NRG; PAM sequence: CAG
acacaacccacatccatcta

SEQ ID NO: 158126 - DNA, 20 bp, Artificial Sequence
  Description of Artificial Sequence: Synthetic oligonucleotide
  Target: LAMA2; (+) strand; PAM type: NRG; PAM sequence: AAG
tcgtgcacttttttcaattc

SEQ ID NO: 158127 - DNA, 20 bp, Artificial Sequence
  Description of Artificial Sequence: Synthetic oligonucleotide
  Target: LAMA2; (+) strand; PAM type: NRG; PAM sequence: AGG
cgtgcacttttttcaattca

SEQ ID NO: 158128 - DNA, 20 bp, Artificial Sequence
  Description of Artificial Sequence: Synthetic oligonucleotide
  Target: LAMA2; (+) strand; PAM type: NRG; PAM sequence: GAG
gtaatcacatatatgtttat

SEQ ID NO: 158129 - DNA, 20 bp, Artificial Sequence
  Description of Artificial Sequence: Synthetic oligonucleotide
  Target: LAMA2; (+) strand; PAM type: NRG; PAM sequence: CAG
catatatgtttatgagttgt

SEQ ID NO: 158130 - DNA, 20 bp, Artificial Sequence
  Description of Artificial Sequence: Synthetic oligonucleotide
  Target: LAMA2; (+) strand; PAM type: NRG; PAM sequence: AGG
atatatgtttatgagttgtc

SEQ ID NO: 158131 - DNA, 20 bp, Artificial Sequence
  Description of Artificial Sequence: Synthetic oligonucleotide
  Target: LAMA2; (+) strand; PAM type: NRG; PAM sequence: TAG
tatgtttatgagttgtcagg

SEQ ID NO: 158132 - DNA, 20 bp, Artificial Sequence
  Description of Artificial Sequence: Synthetic oligonucleotide
  Target: LAMA2; (+) strand; PAM type: NRG; PAM sequence: TAG
ttgtcaggtagctattattt

SEQ ID NO: 158133 - DNA, 20 bp, Artificial Sequence
  Description of Artificial Sequence: Synthetic oligonucleotide
  Target: LAMA2; (+) strand; PAM type: NRG; PAM sequence: CAG
gtagctattattttagttaa

SEQ ID NO: 158134 - DNA, 20 bp, Artificial Sequence
  Description of Artificial Sequence: Synthetic oligonucleotide
  Target: LAMA2; (+) strand; PAM type: NRG; PAM sequence: AGG
tagctattattttagttaac

SEQ ID NO: 158135 - DNA, 20 bp, Artificial Sequence
  Description of Artificial Sequence: Synthetic oligonucleotide
  Target: LAMA2; (+) strand; PAM type: NRG; PAM sequence: GGG
agctattattttagttaaca

SEQ ID NO: 158136 - DNA, 20 bp, Artificial Sequence
  Description of Artificial Sequence: Synthetic oligonucleotide
  Target: LAMA2; (+) strand; PAM type: NRG; PAM sequence: AAG
attttagttaacagggaact

SEQ ID NO: 158137 - DNA, 20 bp, Artificial Sequence
  Description of Artificial Sequence: Synthetic oligonucleotide
  Target: LAMA2; (+) strand; PAM type: NRG; PAM sequence: AGG
ttttagttaacagggaacta

SEQ ID NO: 158138 - DNA, 20 bp, Artificial Sequence
  Description of Artificial Sequence: Synthetic oligonucleotide
  Target: LAMA2; (+) strand; PAM type: NRG; PAM sequence: AAG
aactaaggtcatgccaaacc

SEQ ID NO: 158139 - DNA, 20 bp, Artificial Sequence
  Description of Artificial Sequence: Synthetic oligonucleotide
  Target: LAMA2; (+) strand; PAM type: NRG; PAM sequence: AAG
taaggtcatgccaaaccaag

SEQ ID NO: 158140 - DNA, 20 bp, Artificial Sequence
  Description of Artificial Sequence: Synthetic oligonucleotide
  Target: LAMA2; (+) strand; PAM type: NRG; PAM sequence: TGG
catatgcttcataatgcatt

SEQ ID NO: 158141 - DNA, 20 bp, Artificial Sequence
  Description of Artificial Sequence: Synthetic oligonucleotide
  Target: LAMA2; (+) strand; PAM type: NRG; PAM sequence: AAG
gcttcataatgcatttggct

SEQ ID NO: 158142 - DNA, 20 bp, Artificial Sequence
  Description of Artificial Sequence: Synthetic oligonucleotide
  Target: LAMA2; (+) strand; PAM type: NRG; PAM sequence: AGG
cttcataatgcatttggcta

SEQ ID NO: 158143 - DNA, 20 bp, Artificial Sequence
  Description of Artificial Sequence: Synthetic oligonucleotide
  Target: LAMA2; (+) strand; PAM type: NRG; PAM sequence: CAG
caaatatattccctgaatga

SEQ ID NO: 158144 - DNA, 20 bp, Artificial Sequence
  Description of Artificial Sequence: Synthetic oligonucleotide
  Target: LAMA2; (+) strand; PAM type: NRG; PAM sequence: AGG
aaatatattccctgaatgac

SEQ ID NO: 158145 - DNA, 20 bp, Artificial Sequence
  Description of Artificial Sequence: Synthetic oligonucleotide
  Target: LAMA2; (+) strand; PAM type: NRG; PAM sequence: GGG
aatatattccctgaatgaca

SEQ ID NO: 158146 - DNA, 20 bp, Artificial Sequence
  Description of Artificial Sequence: Synthetic oligonucleotide
  Target: LAMA2; (+) strand; PAM type: NRG; PAM sequence: AAG
tattccctgaatgacaggga

SEQ ID NO: 158147 - DNA, 20 bp, Artificial Sequence
  Description of Artificial Sequence: Synthetic oligonucleotide
  Target: LAMA2; (+) strand; PAM type: NRG; PAM sequence: AAG
gaaagccaacctgaaaataa

SEQ ID NO: 158148 - DNA, 20 bp, Artificial Sequence
  Description of Artificial Sequence: Synthetic oligonucleotide
  Target: LAMA2; (+) strand; PAM type: NRG; PAM sequence: AAG
cctgaaaataaaagtctact

SEQ ID NO: 158149 - DNA, 20 bp, Artificial Sequence
  Description of Artificial Sequence: Synthetic oligonucleotide
  Target: LAMA2; (+) strand; PAM type: NRG; PAM sequence: AGG
ctgaaaataaaagtctacta

SEQ ID NO: 158150 - DNA, 20 bp, Artificial Sequence
  Description of Artificial Sequence: Synthetic oligonucleotide
  Target: LAMA2; (+) strand; PAM type: NRG; PAM sequence: CGG
aaataaaagtctactaaggc

SEQ ID NO: 158151 - DNA, 20 bp, Artificial Sequence
  Description of Artificial Sequence: Synthetic oligonucleotide
  Target: LAMA2; (+) strand; PAM type: NRG; PAM sequence: GGG
aataaaagtctactaaggcc

SEQ ID NO: 158152 - DNA, 20 bp, Artificial Sequence
  Description of Artificial Sequence: Synthetic oligonucleotide
  Target: LAMA2; (+) strand; PAM type: NRG; PAM sequence: TGG
aagtctactaaggccgggtg

SEQ ID NO: 158153 - DNA, 20 bp, Artificial Sequence
  Description of Artificial Sequence: Synthetic oligonucleotide
  Target: LAMA2; (+) strand; PAM type: NRG; PAM sequence: TGG
tctactaaggccgggtgtgg

SEQ ID NO: 158154 - DNA, 20 bp, Artificial Sequence
  Description of Artificial Sequence: Synthetic oligonucleotide
  Target: LAMA2; (+) strand; PAM type: NRG; PAM sequence: TAG
gtggctcatgtctgtaatcc

SEQ ID NO: 158155 - DNA, 20 bp, Artificial Sequence
  Description of Artificial Sequence: Synthetic oligonucleotide
  Target: LAMA2; (+) strand; PAM type: NRG; PAM sequence: TGG
tgtctgtaatcctagcactt

SEQ ID NO: 158156 - DNA, 20 bp, Artificial Sequence
  Description of Artificial Sequence: Synthetic oligonucleotide
  Target: LAMA2; (+) strand; PAM type: NRG; PAM sequence: GGG
gtctgtaatcctagcacttt

SEQ ID NO: 158157 - DNA, 20 bp, Artificial Sequence
  Description of Artificial Sequence: Synthetic oligonucleotide
  Target: LAMA2; (+) strand; PAM type: NRG; PAM sequence: GAG
ctgtaatcctagcactttgg

SEQ ID NO: 158158 - DNA, 20 bp, Artificial Sequence
  Description of Artificial Sequence: Synthetic oligonucleotide
  Target: LAMA2; (+) strand; PAM type: NRG; PAM sequence: AGG
tgtaatcctagcactttggg

SEQ ID NO: 158159 - DNA, 20 bp, Artificial Sequence
  Description of Artificial Sequence: Synthetic oligonucleotide
  Target: LAMA2; (+) strand; PAM type: NRG; PAM sequence: GAG
tcctagcactttgggaggct

SEQ ID NO: 158160 - DNA, 20 bp, Artificial Sequence
  Description of Artificial Sequence: Synthetic oligonucleotide
  Target: LAMA2; (+) strand; PAM type: NRG; PAM sequence: AGG
cctagcactttgggaggctg

SEQ ID NO: 158161 - DNA, 20 bp, Artificial Sequence
  Description of Artificial Sequence: Synthetic oligonucleotide
  Target: LAMA2; (+) strand; PAM type: NRG; PAM sequence: CAG
agcactttgggaggctgagg

SEQ ID NO: 158162 - DNA, 20 bp, Artificial Sequence
  Description of Artificial Sequence: Synthetic oligonucleotide
  Target: LAMA2; (+) strand; PAM type: NRG; PAM sequence: AGG
gcactttgggaggctgaggc

SEQ ID NO: 158163 - DNA, 20 bp, Artificial Sequence
  Description of Artificial Sequence: Synthetic oligonucleotide
  Target: LAMA2; (+) strand; PAM type: NRG; PAM sequence: TGG
ctttgggaggctgaggcagg

SEQ ID NO: 158164 - DNA, 20 bp, Artificial Sequence
  Description of Artificial Sequence: Synthetic oligonucleotide
  Target: LAMA2; (+) strand; PAM type: NRG; PAM sequence: CAG
gcaggtggatcacctgatgt

SEQ ID NO: 158165 - DNA, 20 bp, Artificial Sequence
  Description of Artificial Sequence: Synthetic oligonucleotide
  Target: LAMA2; (+) strand; PAM type: NRG; PAM sequence: AGG
caggtggatcacctgatgtc

SEQ ID NO: 158166 - DNA, 20 bp, Artificial Sequence
  Description of Artificial Sequence: Synthetic oligonucleotide
  Target: LAMA2; (+) strand; PAM type: NRG; PAM sequence: GAG
ggtggatcacctgatgtcag

SEQ ID NO: 158167 - DNA, 20 bp, Artificial Sequence
  Description of Artificial Sequence: Synthetic oligonucleotide
  Target: LAMA2; (+) strand; PAM type: NRG; PAM sequence: GAG
tcacctgatgtcaggagttt

SEQ ID NO: 158168 - DNA, 20 bp, Artificial Sequence
  Description of Artificial Sequence: Synthetic oligonucleotide
  Target: LAMA2; (+) strand; PAM type: NRG; PAM sequence: CAG
tgatgtcaggagtttgagac

SEQ ID NO: 158169 - DNA, 20 bp, Artificial Sequence
  Description of Artificial Sequence: Synthetic oligonucleotide
  Target: LAMA2; (+) strand; PAM type: NRG; PAM sequence: TGG
tcaggagtttgagaccagac

SEQ ID NO: 158170 - DNA, 20 bp, Artificial Sequence
  Description of Artificial Sequence: Synthetic oligonucleotide
  Target: LAMA2; (+) strand; PAM type: NRG; PAM sequence: TGG
tgagaccagactggccaaca

SEQ ID NO: 158171 - DNA, 20 bp, Artificial Sequence
  Description of Artificial Sequence: Synthetic oligonucleotide
  Target: LAMA2; (+) strand; PAM type: NRG; PAM sequence: TAG
cttctacaaatgcaaaaaat

SEQ ID NO: 158172 - DNA, 20 bp, Artificial Sequence
  Description of Artificial Sequence: Synthetic oligonucleotide
  Target: LAMA2; (+) strand; PAM type: NRG; PAM sequence: CAG
tacaaatgcaaaaaattagc

SEQ ID NO: 158173 - DNA, 20 bp, Artificial Sequence
  Description of Artificial Sequence: Synthetic oligonucleotide
  Target: LAMA2; (+) strand; PAM type: NRG; PAM sequence: AGG
acaaatgcaaaaaattagcc

SEQ ID NO: 158174 - DNA, 20 bp, Artificial Sequence
  Description of Artificial Sequence: Synthetic oligonucleotide
  Target: LAMA2; (+) strand; PAM type: NRG; PAM sequence: TGG
tgcaaaaaattagccaggct

SEQ ID NO: 158175 - DNA, 20 bp, Artificial Sequence
  Description of Artificial Sequence: Synthetic oligonucleotide
  Target: LAMA2; (+) strand; PAM type: NRG; PAM sequence: TGG
aaaaaattagccaggcttgg

SEQ ID NO: 158176 - DNA, 20 bp, Artificial Sequence
  Description of Artificial Sequence: Synthetic oligonucleotide
  Target: LAMA2; (+) strand; PAM type: NRG; PAM sequence: CAG
aaattagccaggcttggtgg

SEQ ID NO: 158177 - DNA, 20 bp, Artificial Sequence
  Description of Artificial Sequence: Synthetic oligonucleotide
  Target: LAMA2; (+) strand; PAM type: NRG; PAM sequence: AGG
aattagccaggcttggtggc

SEQ ID NO: 158178 - DNA, 20 bp, Artificial Sequence
  Description of Artificial Sequence: Synthetic oligonucleotide
  Target: LAMA2; (+) strand; PAM type: NRG; PAM sequence: CAG
gtggcaggcgcctgtaatct

SEQ ID NO: 158179 - DNA, 20 bp, Artificial Sequence
  Description of Artificial Sequence: Synthetic oligonucleotide
  Target: LAMA2; (+) strand; PAM type: NRG; PAM sequence: TGG
gcctgtaatctcagctatta

SEQ ID NO: 158180 - DNA, 20 bp, Artificial Sequence
  Description of Artificial Sequence: Synthetic oligonucleotide
  Target: LAMA2; (+) strand; PAM type: NRG; PAM sequence: GAG
ctgtaatctcagctattatg

SEQ ID NO: 158181 - DNA, 20 bp, Artificial Sequence
  Description of Artificial Sequence: Synthetic oligonucleotide
  Target: LAMA2; (+) strand; PAM type: NRG; PAM sequence: AGG
tgtaatctcagctattatgg

SEQ ID NO: 158182 - DNA, 20 bp, Artificial Sequence
  Description of Artificial Sequence: Synthetic oligonucleotide
  Target: LAMA2; (+) strand; PAM type: NRG; PAM sequence: GAG
tctcagctattatggaggct

SEQ ID NO: 158183 - DNA, 20 bp, Artificial Sequence
  Description of Artificial Sequence: Synthetic oligonucleotide
  Target: LAMA2; (+) strand; PAM type: NRG; PAM sequence: AGG
ctcagctattatggaggctg

SEQ ID NO: 158184 - DNA, 20 bp, Artificial Sequence
  Description of Artificial Sequence: Synthetic oligonucleotide
  Target: LAMA2; (+) strand; PAM type: NRG; PAM sequence: GAG
tattatggaggctgaggcat

SEQ ID NO: 158185 - DNA, 20 bp, Artificial Sequence
  Description of Artificial Sequence: Synthetic oligonucleotide
  Target: LAMA2; (+) strand; PAM type: NRG; PAM sequence: TGG
gcatgagaatcgcttgaacc

SEQ ID NO: 158186 - DNA, 20 bp, Artificial Sequence
  Description of Artificial Sequence: Synthetic oligonucleotide
  Target: LAMA2; (+) strand; PAM type: NRG; PAM sequence: GGG
catgagaatcgcttgaacct

SEQ ID NO: 158187 - DNA, 20 bp, Artificial Sequence
  Description of Artificial Sequence: Synthetic oligonucleotide
  Target: LAMA2; (+) strand; PAM type: NRG; PAM sequence: GAG
tgagaatcgcttgaacctgg

SEQ ID NO: 158188 - DNA, 20 bp, Artificial Sequence
  Description of Artificial Sequence: Synthetic oligonucleotide
  Target: LAMA2; (+) strand; PAM type: NRG; PAM sequence: AGG
gagaatcgcttgaacctggg

SEQ ID NO: 158189 - DNA, 20 bp, Artificial Sequence
  Description of Artificial Sequence: Synthetic oligonucleotide
  Target: LAMA2; (+) strand; PAM type: NRG; PAM sequence: CAG
tcgcttgaacctgggaggca

SEQ ID NO: 158190 - DNA, 20 bp, Artificial Sequence
  Description of Artificial Sequence: Synthetic oligonucleotide
  Target: LAMA2; (+) strand; PAM type: NRG; PAM sequence: AGG
cgcttgaacctgggaggcac

SEQ ID NO: 158191 - DNA, 20 bp, Artificial Sequence
  Description of Artificial Sequence: Synthetic oligonucleotide
  Target: LAMA2; (+) strand; PAM type: NRG; PAM sequence: TGG
ttgaacctgggaggcacagg

SEQ ID NO: 158192 - DNA, 20 bp, Artificial Sequence
  Description of Artificial Sequence: Synthetic oligonucleotide
  Target: LAMA2; (+) strand; PAM type: NRG; PAM sequence: CAG
aacctgggaggcacaggtgg

SEQ ID NO: 158193 - DNA, 20 bp, Artificial Sequence
  Description of Artificial Sequence: Synthetic oligonucleotide
  Target: LAMA2; (+) strand; PAM type: NRG; PAM sequence: GAG
tgggaggcacaggtggcagc

SEQ ID NO: 158194 - DNA, 20 bp, Artificial Sequence
  Description of Artificial Sequence: Synthetic oligonucleotide
  Target: LAMA2; (+) strand; PAM type: NRG; PAM sequence: GAG
ggcacaggtggcagcgagcc

SEQ ID NO: 158195 - DNA, 20 bp, Artificial Sequence
  Description of Artificial Sequence: Synthetic oligonucleotide
  Target: LAMA2; (+) strand; PAM type: NRG; PAM sequence: CAG
gagatcgcgccgttgcactc

SEQ ID NO: 158196 - DNA, 20 bp, Artificial Sequence
  Description of Artificial Sequence: Synthetic oligonucleotide
  Target: LAMA2; (+) strand; PAM type: NRG; PAM sequence: TGG
cgcgccgttgcactccagcc

SEQ ID NO: 158197 - DNA, 20 bp, Artificial Sequence
  Description of Artificial Sequence: Synthetic oligonucleotide
  Target: LAMA2; (+) strand; PAM type: NRG; PAM sequence: GGG
gcgccgttgcactccagcct

SEQ ID NO: 158198 - DNA, 20 bp, Artificial Sequence
  Description of Artificial Sequence: Synthetic oligonucleotide
  Target: LAMA2; (+) strand; PAM type: NRG; PAM sequence: GGG
cgccgttgcactccagcctg

SEQ ID NO: 158199 - DNA, 20 bp, Artificial Sequence
  Description of Artificial Sequence: Synthetic oligonucleotide
  Target: LAMA2; (+) strand; PAM type: NRG; PAM sequence: GGG
gccgttgcactccagcctgg

SEQ ID NO: 158200 - DNA, 20 bp, Artificial Sequence
  Description of Artificial Sequence: Synthetic oligonucleotide
  Target: LAMA2; (+) strand; PAM type: NRG; PAM sequence: TAG
ttgcactccagcctggggga

SEQ ID NO: 158201 - DNA, 20 bp, Artificial Sequence
  Description of Artificial Sequence: Synthetic oligonucleotide
  Target: LAMA2; (+) strand; PAM type: NRG; PAM sequence: GAG
gcactccagcctgggggata

SEQ ID NO: 158202 - DNA, 20 bp, Artificial Sequence
  Description of Artificial Sequence: Synthetic oligonucleotide
  Target: LAMA2; (+) strand; PAM type: NRG; PAM sequence: GAG
tccagcctgggggatagagc

SEQ ID NO: 158203 - DNA, 20 bp, Artificial Sequence
  Description of Artificial Sequence: Synthetic oligonucleotide
  Target: LAMA2; (+) strand; PAM type: NRG; PAM sequence: AAG
aaaataaacataaattttta

SEQ ID NO: 158204 - DNA, 20 bp, Artificial Sequence
  Description of Artificial Sequence: Synthetic oligonucleotide
  Target: LAMA2; (+) strand; PAM type: NRG; PAM sequence: AAG
acataaatttttaaagttaa

SEQ ID NO: 158205 - DNA, 20 bp, Artificial Sequence
  Description of Artificial Sequence: Synthetic oligonucleotide
  Target: LAMA2; (+) strand; PAM type: NRG; PAM sequence: GAG
tttaaagttaaaagtctatt

SEQ ID NO: 158206 - DNA, 20 bp, Artificial Sequence
  Description of Artificial Sequence: Synthetic oligonucleotide
  Target: LAMA2; (+) strand; PAM type: NRG; PAM sequence: AGG
ttaaagttaaaagtctattg

SEQ ID NO: 158207 - DNA, 20 bp, Artificial Sequence
  Description of Artificial Sequence: Synthetic oligonucleotide
  Target: LAMA2; (+) strand; PAM type: NRG; PAM sequence: GGG
taaagttaaaagtctattga

SEQ ID NO: 158208 - DNA, 20 bp, Artificial Sequence
  Description of Artificial Sequence: Synthetic oligonucleotide
  Target: LAMA2; (+) strand; PAM type: NRG; PAM sequence: TGG
agttaaaagtctattgaggg

SEQ ID NO: 158209 - DNA, 20 bp, Artificial Sequence
  Description of Artificial Sequence: Synthetic oligonucleotide
  Target: LAMA2; (+) strand; PAM type: NRG; PAM sequence: GAG
ttaaaagtctattgagggtg

SEQ ID NO: 158210 - DNA, 20 bp, Artificial Sequence
  Description of Artificial Sequence: Synthetic oligonucleotide
  Target: LAMA2; (+) strand; PAM type: NRG; PAM sequence: AGG
taaaagtctattgagggtgg

SEQ ID NO: 158211 - DNA, 20 bp, Artificial Sequence
  Description of Artificial Sequence: Synthetic oligonucleotide
  Target: LAMA2; (+) strand; PAM type: NRG; PAM sequence: TAG
gagggtggaggatacaaata

SEQ ID NO: 158212 - DNA, 20 bp, Artificial Sequence
  Description of Artificial Sequence: Synthetic oligonucleotide
  Target: LAMA2; (+) strand; PAM type: NRG; PAM sequence: CAG
acacttttgtaccctctttt

SEQ ID NO: 158213 - DNA, 20 bp, Artificial Sequence
  Description of Artificial Sequence: Synthetic oligonucleotide
  Target: LAMA2; (+) strand; PAM type: NRG; PAM sequence: TAG
atttcttttttttccccctt

SEQ ID NO: 158214 - DNA, 20 bp, Artificial Sequence
  Description of Artificial Sequence: Synthetic oligonucleotide
  Target: LAMA2; (+) strand; PAM type: NRG; PAM sequence: AGG
tttcttttttttcccccttt

SEQ ID NO: 158215 - DNA, 20 bp, Artificial Sequence
  Description of Artificial Sequence: Synthetic oligonucleotide
  Target: LAMA2; (+) strand; PAM type: NRG; PAM sequence: GGG
ttcttttttttcccccttta

SEQ ID NO: 158216 - DNA, 20 bp, Artificial Sequence
  Description of Artificial Sequence: Synthetic oligonucleotide
  Target: LAMA2; (+) strand; PAM type: NRG; PAM sequence: GAG
cccctttagggtaatgactt

SEQ ID NO: 158217 - DNA, 20 bp, Artificial Sequence
  Description of Artificial Sequence: Synthetic oligonucleotide
  Target: LAMA2; (+) strand; PAM type: NRG; PAM sequence: CAG
tagggtaatgacttgagcat

SEQ ID NO: 158218 - DNA, 20 bp, Artificial Sequence
  Description of Artificial Sequence: Synthetic oligonucleotide
  Target: LAMA2; (+) strand; PAM type: NRG; PAM sequence: CAG
taatgacttgagcatcagca

SEQ ID NO: 158219 - DNA, 20 bp, Artificial Sequence
  Description of Artificial Sequence: Synthetic oligonucleotide
  Target: LAMA2; (+) strand; PAM type: NRG; PAM sequence: AAG
cttgagcatcagcacagccc

SEQ ID NO: 158220 - DNA, 20 bp, Artificial Sequence
  Description of Artificial Sequence: Synthetic oligonucleotide
  Target: LAMA2; (+) strand; PAM type: NRG; PAM sequence: GAG
gcatcagcacagcccaagat

SEQ ID NO: 158221 - DNA, 20 bp, Artificial Sequence
  Description of Artificial Sequence: Synthetic oligonucleotide
  Target: LAMA2; (+) strand; PAM type: NRG; PAM sequence: AGG
catcagcacagcccaagatg

SEQ ID NO: 158222 - DNA, 20 bp, Artificial Sequence
  Description of Artificial Sequence: Synthetic oligonucleotide
  Target: LAMA2; (+) strand; PAM type: NRG; PAM sequence: AAG
ggtgtacctgcacccatctg

SEQ ID NO: 158223 - DNA, 20 bp, Artificial Sequence
  Description of Artificial Sequence: Synthetic oligonucleotide
  Target: LAMA2; (+) strand; PAM type: NRG; PAM sequence: AAG
tactaatgtattgttactta

SEQ ID NO: 158224 - DNA, 20 bp, Artificial Sequence
  Description of Artificial Sequence: Synthetic oligonucleotide
  Target: LAMA2; (+) strand; PAM type: NRG; PAM sequence: AAG
taatgtattgttacttaaag

SEQ ID NO: 158225 - DNA, 20 bp, Artificial Sequence
  Description of Artificial Sequence: Synthetic oligonucleotide
  Target: LAMA2; (+) strand; PAM type: NRG; PAM sequence: TGG
gaagaatcatttaccataca

SEQ ID NO: 158226 - DNA, 20 bp, Artificial Sequence
  Description of Artificial Sequence: Synthetic oligonucleotide
  Target: LAMA2; (+) strand; PAM type: NRG; PAM sequence: CAG
catacatggcacacattttc

SEQ ID NO: 158227 - DNA, 20 bp, Artificial Sequence
  Description of Artificial Sequence: Synthetic oligonucleotide
  Target: LAMA2; (+) strand; PAM type: NRG; PAM sequence: TAG
ggcacacattttccagtccg

SEQ ID NO: 158228 - DNA, 20 bp, Artificial Sequence
  Description of Artificial Sequence: Synthetic oligonucleotide
  Target: LAMA2; (+) strand; PAM type: NRG; PAM sequence: AAG
cacattttccagtccgtaga

SEQ ID NO: 158229 - DNA, 20 bp, Artificial Sequence
  Description of Artificial Sequence: Synthetic oligonucleotide
  Target: LAMA2; (+) strand; PAM type: NRG; PAM sequence: AGG
acattttccagtccgtagaa

SEQ ID NO: 158230 - DNA, 20 bp, Artificial Sequence
  Description of Artificial Sequence: Synthetic oligonucleotide
  Target: LAMA2; (+) strand; PAM type: NRG; PAM sequence: CAG
ccgtagaaaggaatttatga

SEQ ID NO: 158231 - DNA, 20 bp, Artificial Sequence
  Description of Artificial Sequence: Synthetic oligonucleotide
  Target: LAMA2; (+) strand; PAM type: NRG; PAM sequence: AAG
tgacagtgcttgcgaatttg

SEQ ID NO: 158232 - DNA, 20 bp, Artificial Sequence
  Description of Artificial Sequence: Synthetic oligonucleotide
  Target: LAMA2; (+) strand; PAM type: NRG; PAM sequence: GAG
acagtgcttgcgaatttgaa

SEQ ID NO: 158233 - DNA, 20 bp, Artificial Sequence
  Description of Artificial Sequence: Synthetic oligonucleotide
  Target: LAMA2; (+) strand; PAM type: NRG; PAM sequence: GAG
agtgcttgcgaatttgaaga

SEQ ID NO: 158234 - DNA, 20 bp, Artificial Sequence
  Description of Artificial Sequence: Synthetic oligonucleotide
  Target: LAMA2; (+) strand; PAM type: NRG; PAM sequence: CAG
gtcctcctacaaatcacata

SEQ ID NO: 158235 - DNA, 20 bp, Artificial Sequence
  Description of Artificial Sequence: Synthetic oligonucleotide
  Target: LAMA2; (+) strand; PAM type: NRG; PAM sequence: TGG
ctacaaatcacatacagctt

SEQ ID NO: 158236 - DNA, 20 bp, Artificial Sequence
  Description of Artificial Sequence: Synthetic oligonucleotide
  Target: LAMA2; (+) strand; PAM type: NRG; PAM sequence: GGG
tacaaatcacatacagcttt

SEQ ID NO: 158237 - DNA, 20 bp, Artificial Sequence
  Description of Artificial Sequence: Synthetic oligonucleotide
  Target: LAMA2; (+) strand; PAM type: NRG; PAM sequence: TGG
aatcacatacagctttggga

SEQ ID NO: 158238 - DNA, 20 bp, Artificial Sequence
  Description of Artificial Sequence: Synthetic oligonucleotide
  Target: LAMA2; (+) strand; PAM type: NRG; PAM sequence: CAG
tttgggatggatgccatctt

SEQ ID NO: 158239 - DNA, 20 bp, Artificial Sequence
  Description of Artificial Sequence: Synthetic oligonucleotide
  Target: LAMA2; (+) strand; PAM type: NRG; PAM sequence: AGG
ttgggatggatgccatcttc

SEQ ID NO: 158240 - DNA, 20 bp, Artificial Sequence
  Description of Artificial Sequence: Synthetic oligonucleotide
  Target: LAMA2; (+) strand; PAM type: NRG; PAM sequence: AAG
tgccatcttcaggtaaaatc

SEQ ID NO: 158241 - DNA, 20 bp, Artificial Sequence
  Description of Artificial Sequence: Synthetic oligonucleotide
  Target: LAMA2; (+) strand; PAM type: NRG; PAM sequence: CAG
tcaggtaaaatcaagaactg

SEQ ID NO: 158242 - DNA, 20 bp, Artificial Sequence
  Description of Artificial Sequence: Synthetic oligonucleotide
  Target: LAMA2; (+) strand; PAM type: NRG; PAM sequence: TGG
caacgttcacacatttactt

SEQ ID NO: 158243 - DNA, 20 bp, Artificial Sequence
  Description of Artificial Sequence: Synthetic oligonucleotide
  Target: LAMA2; (+) strand; PAM type: NRG; PAM sequence: GGG
aacgttcacacatttacttt

SEQ ID NO: 158244 - DNA, 20 bp, Artificial Sequence
  Description of Artificial Sequence: Synthetic oligonucleotide
  Target: LAMA2; (+) strand; PAM type: NRG; PAM sequence: GGG
acgttcacacatttactttg

SEQ ID NO: 158245 - DNA, 20 bp, Artificial Sequence
  Description of Artificial Sequence: Synthetic oligonucleotide
  Target: LAMA2; (+) strand; PAM type: NRG; PAM sequence: AAG
cacacatttactttggggcc

SEQ ID NO: 158246 - DNA, 20 bp, Artificial Sequence
  Description of Artificial Sequence: Synthetic oligonucleotide
  Target: LAMA2; (+) strand; PAM type: NRG; PAM sequence: AGG
acacatttactttggggcca

SEQ ID NO: 158247 - DNA, 20 bp, Artificial Sequence
  Description of Artificial Sequence: Synthetic oligonucleotide
  Target: LAMA2; (+) strand; PAM type: NRG; PAM sequence: CAG
tttactttggggccaaggtg

SEQ ID NO: 158248 - DNA, 20 bp, Artificial Sequence
  Description of Artificial Sequence: Synthetic oligonucleotide
  Target: LAMA2; (+) strand; PAM type: NRG; PAM sequence: AGG
ttactttggggccaaggtgc

SEQ ID NO: 158249 - DNA, 20 bp, Artificial Sequence
  Description of Artificial Sequence: Synthetic oligonucleotide
  Target: LAMA2; (+) strand; PAM type: NRG; PAM sequence: GAG
actttggggccaaggtgcag

SEQ ID NO: 158250 - DNA, 20 bp, Artificial Sequence
  Description of Artificial Sequence: Synthetic oligonucleotide
  Target: LAMA2; (+) strand; PAM type: NRG; PAM sequence: CAG
ccaaggtgcaggagccgccc

SEQ ID NO: 158251 - DNA, 20 bp, Artificial Sequence
  Description of Artificial Sequence: Synthetic oligonucleotide
  Target: LAMA2; (+) strand; PAM type: NRG; PAM sequence: AGG
caaggtgcaggagccgcccc

SEQ ID NO: 158252 - DNA, 20 bp, Artificial Sequence
  Description of Artificial Sequence: Synthetic oligonucleotide
  Target: LAMA2; (+) strand; PAM type: NRG; PAM sequence: GAG
aggtgcaggagccgccccag

SEQ ID NO: 158253 - DNA, 20 bp, Artificial Sequence
  Description of Artificial Sequence: Synthetic oligonucleotide
  Target: LAMA2; (+) strand; PAM type: NRG; PAM sequence: AAG
gccccaggagtgaatttttt

SEQ ID NO: 158254 - DNA, 20 bp, Artificial Sequence
  Description of Artificial Sequence: Synthetic oligonucleotide
  Target: LAMA2; (+) strand; PAM type: NRG; PAM sequence: AGG
ccccaggagtgaatttttta

SEQ ID NO: 158255 - DNA, 20 bp, Artificial Sequence
  Description of Artificial Sequence: Synthetic oligonucleotide
  Target: LAMA2; (+) strand; PAM type: NRG; PAM sequence: TAG
agtgaattttttaaggcacc

SEQ ID NO: 158256 - DNA, 20 bp, Artificial Sequence
  Description of Artificial Sequence: Synthetic oligonucleotide
  Target: LAMA2; (+) strand; PAM type: NRG; PAM sequence: AGG
gtgaattttttaaggcacct

SEQ ID NO: 158257 - DNA, 20 bp, Artificial Sequence
  Description of Artificial Sequence: Synthetic oligonucleotide
  Target: LAMA2; (+) strand; PAM type: NRG; PAM sequence: AAG
cctaggatttgctgtcttca

SEQ ID NO: 158258 - DNA, 20 bp, Artificial Sequence
  Description of Artificial Sequence: Synthetic oligonucleotide
  Target: LAMA2; (+) strand; PAM type: NRG; PAM sequence: GAG
taggatttgctgtcttcaaa

SEQ ID NO: 158259 - DNA, 20 bp, Artificial Sequence
  Description of Artificial Sequence: Synthetic oligonucleotide
  Target: LAMA2; (+) strand; PAM type: NRG; PAM sequence: CAG
gatttgctgtcttcaaagag

SEQ ID NO: 158260 - DNA, 20 bp, Artificial Sequence
  Description of Artificial Sequence: Synthetic oligonucleotide
  Target: LAMA2; (+) strand; PAM type: NRG; PAM sequence: AAG
gctgtcttcaaagagcagat

SEQ ID NO: 158261 - DNA, 20 bp, Artificial Sequence
  Description of Artificial Sequence: Synthetic oligonucleotide
  Target: LAMA2; (+) strand; PAM type: NRG; PAM sequence: CGG
cttcaaagagcagataagaa

SEQ ID NO: 158262 - DNA, 20 bp, Artificial Sequence
  Description of Artificial Sequence: Synthetic oligonucleotide
  Target: LAMA2; (+) strand; PAM type: NRG; PAM sequence: GAG
tcaaagagcagataagaacg

SEQ ID NO: 158263 - DNA, 20 bp, Artificial Sequence
  Description of Artificial Sequence: Synthetic oligonucleotide
  Target: LAMA2; (+) strand; PAM type: NRG; PAM sequence: TAG
agcagataagaacggagccc

SEQ ID NO: 158264 - DNA, 20 bp, Artificial Sequence
  Description of Artificial Sequence: Synthetic oligonucleotide
  Target: LAMA2; (+) strand; PAM type: NRG; PAM sequence: AAG
acggagccctagttttctga

SEQ ID NO: 158265 - DNA, 20 bp, Artificial Sequence
  Description of Artificial Sequence: Synthetic oligonucleotide
  Target: LAMA2; (+) strand; PAM type: NRG; PAM sequence: CAG
atttttctcttaaaccttta

SEQ ID NO: 158266 - DNA, 20 bp, Artificial Sequence
  Description of Artificial Sequence: Synthetic oligonucleotide
  Target: LAMA2; (+) strand; PAM type: NRG; PAM sequence: CAG
cctttacagttttaaatatg

SEQ ID NO: 158267 - DNA, 20 bp, Artificial Sequence
  Description of Artificial Sequence: Synthetic oligonucleotide
  Target: LAMA2; (+) strand; PAM type: NRG; PAM sequence: CGG
tatgcagaataaatttgtct

SEQ ID NO: 158268 - DNA, 20 bp, Artificial Sequence
  Description of Artificial Sequence: Synthetic oligonucleotide
  Target: LAMA2; (+) strand; PAM type: NRG; PAM sequence: CAG
gatgattctttcacaattgt

SEQ ID NO: 158269 - DNA, 20 bp, Artificial Sequence
  Description of Artificial Sequence: Synthetic oligonucleotide
  Target: LAMA2; (+) strand; PAM type: NRG; PAM sequence: GAG
tcaataacgattcctatatt

SEQ ID NO: 158270 - DNA, 20 bp, Artificial Sequence
  Description of Artificial Sequence: Synthetic oligonucleotide
  Target: LAMA2; (+) strand; PAM type: NRG; PAM sequence: TGG
tatattgagaaatgttatat

SEQ ID NO: 158271 - DNA, 20 bp, Artificial Sequence
  Description of Artificial Sequence: Synthetic oligonucleotide
  Target: LAMA2; (+) strand; PAM type: NRG; PAM sequence: AAG
aaatgttatattggaaaata

SEQ ID NO: 158272 - DNA, 20 bp, Artificial Sequence
  Description of Artificial Sequence: Synthetic oligonucleotide
  Target: LAMA2; (+) strand; PAM type: NRG; PAM sequence: TGG
aaataaagtctcctttatga

SEQ ID NO: 158273 - DNA, 20 bp, Artificial Sequence
  Description of Artificial Sequence: Synthetic oligonucleotide
  Target: LAMA2; (+) strand; PAM type: NRG; PAM sequence: TAG
gtctcctttatgatggctca

SEQ ID NO: 158274 - DNA, 20 bp, Artificial Sequence
  Description of Artificial Sequence: Synthetic oligonucleotide
  Target: LAMA2; (+) strand; PAM type: NRG; PAM sequence: TGG
ctttatgatggctcatagcg

SEQ ID NO: 158275 - DNA, 20 bp, Artificial Sequence
  Description of Artificial Sequence: Synthetic oligonucleotide
  Target: LAMA2; (+) strand; PAM type: NRG; PAM sequence: GGG
tttatgatggctcatagcgt

SEQ ID NO: 158276 - DNA, 20 bp, Artificial Sequence
  Description of Artificial Sequence: Synthetic oligonucleotide
  Target: LAMA2; (+) strand; PAM type: NRG; PAM sequence: AAG
atgatggctcatagcgtggg

SEQ ID NO: 158277 - DNA, 20 bp, Artificial Sequence
  Description of Artificial Sequence: Synthetic oligonucleotide
  Target: LAMA2; (+) strand; PAM type: NRG; PAM sequence: AAG
tcatagcgtgggaagctaaa

SEQ ID NO: 158278 - DNA, 20 bp, Artificial Sequence
  Description of Artificial Sequence: Synthetic oligonucleotide
  Target: LAMA2; (+) strand; PAM type: NRG; PAM sequence: CAG
agctaaaaagatataaattc

SEQ ID NO: 158279 - DNA, 20 bp, Artificial Sequence
  Description of Artificial Sequence: Synthetic oligonucleotide
  Target: LAMA2; (+) strand; PAM type: NRG; PAM sequence: AGG
gctaaaaagatataaattcc

SEQ ID NO: 158280 - DNA, 20 bp, Artificial Sequence
  Description of Artificial Sequence: Synthetic oligonucleotide
  Target: LAMA2; (+) strand; PAM type: NRG; PAM sequence: GGG
ctaaaaagatataaattcca

SEQ ID NO: 158281 - DNA, 20 bp, Artificial Sequence
  Description of Artificial Sequence: Synthetic oligonucleotide
  Target: LAMA2; (+) strand; PAM type: NRG; PAM sequence: TGG
aattccagggcacccctatt

SEQ ID NO: 158282 - DNA, 20 bp, Artificial Sequence
  Description of Artificial Sequence: Synthetic oligonucleotide
  Target: LAMA2; (+) strand; PAM type: NRG; PAM sequence: AAG
ccagggcacccctatttgga

SEQ ID NO: 158283 - DNA, 20 bp, Artificial Sequence
  Description of Artificial Sequence: Synthetic oligonucleotide
  Target: LAMA2; (+) strand; PAM type: NRG; PAM sequence: TGG
gggcacccctatttggaaag

SEQ ID NO: 158284 - DNA, 20 bp, Artificial Sequence
  Description of Artificial Sequence: Synthetic oligonucleotide
  Target: LAMA2; (+) strand; PAM type: NRG; PAM sequence: CAG
gtttttaaaatatttccttc

SEQ ID NO: 158285 - DNA, 20 bp, Artificial Sequence
  Description of Artificial Sequence: Synthetic oligonucleotide
  Target: LAMA2; (+) strand; PAM type: NRG; PAM sequence: TAG
tttaaaatatttccttccag

SEQ ID NO: 158286 - DNA, 20 bp, Artificial Sequence
  Description of Artificial Sequence: Synthetic oligonucleotide
  Target: LAMA2; (+) strand; PAM type: NRG; PAM sequence: TAG
tccttccagtagttgttaac

SEQ ID NO: 158287 - DNA, 20 bp, Artificial Sequence
  Description of Artificial Sequence: Synthetic oligonucleotide
  Target: LAMA2; (+) strand; PAM type: NRG; PAM sequence: TGG
agtagttgttaactagtttc

SEQ ID NO: 158288 - DNA, 20 bp, Artificial Sequence
  Description of Artificial Sequence: Synthetic oligonucleotide
  Target: LAMA2; (+) strand; PAM type: NRG; PAM sequence: TAG
ttaactagtttctggcttaa

SEQ ID NO: 158289 - DNA, 20 bp, Artificial Sequence
  Description of Artificial Sequence: Synthetic oligonucleotide
  Target: LAMA2; (+) strand; PAM type: NRG; PAM sequence: TAG
gtttctggcttaatagtata

SEQ ID NO: 158290 - DNA, 20 bp, Artificial Sequence
  Description of Artificial Sequence: Synthetic oligonucleotide
  Target: LAMA2; (+) strand; PAM type: NRG; PAM sequence: AAG
aatagtatatagattgtaat

SEQ ID NO: 158291 - DNA, 20 bp, Artificial Sequence
  Description of Artificial Sequence: Synthetic oligonucleotide
  Target: LAMA2; (+) strand; PAM type: NRG; PAM sequence: AAG
tatatagattgtaataagaa

SEQ ID NO: 158292 - DNA, 20 bp, Artificial Sequence
  Description of Artificial Sequence: Synthetic oligonucleotide
  Target: LAMA2; (+) strand; PAM type: NRG; PAM sequence: AAG
tagattgtaataagaaaagt

SEQ ID NO: 158293 - DNA, 20 bp, Artificial Sequence
  Description of Artificial Sequence: Synthetic oligonucleotide
  Target: LAMA2; (+) strand; PAM type: NRG; PAM sequence: AAG
aaaagtaagtcttttcattt

SEQ ID NO: 158294 - DNA, 20 bp, Artificial Sequence
  Description of Artificial Sequence: Synthetic oligonucleotide
  Target: LAMA2; (+) strand; PAM type: NRG; PAM sequence: AAG
atctcactataaaacacttt

SEQ ID NO: 158295 - DNA, 20 bp, Artificial Sequence
  Description of Artificial Sequence: Synthetic oligonucleotide
  Target: LAMA2; (+) strand; PAM type: NRG; PAM sequence: CAG
aaaacactttaagactataa

SEQ ID NO: 158296 - DNA, 20 bp, Artificial Sequence
  Description of Artificial Sequence: Synthetic oligonucleotide
  Target: LAMA2; (+) strand; PAM type: NRG; PAM sequence: TGG
ttaagactataacagccata

SEQ ID NO: 158297 - DNA, 20 bp, Artificial Sequence
  Description of Artificial Sequence: Synthetic oligonucleotide
  Target: LAMA2; (+) strand; PAM type: NRG; PAM sequence: AAG
tataacagccatatggtata

SEQ ID NO: 158298 - DNA, 20 bp, Artificial Sequence
  Description of Artificial Sequence: Synthetic oligonucleotide
  Target: LAMA2; (+) strand; PAM type: NRG; PAM sequence: AGG
ataacagccatatggtataa

SEQ ID NO: 158299 - DNA, 20 bp, Artificial Sequence
  Description of Artificial Sequence: Synthetic oligonucleotide
  Target: LAMA2; (+) strand; PAM type: NRG; PAM sequence: AAG
cagccatatggtataaagga

SEQ ID NO: 158300 - DNA, 20 bp, Artificial Sequence
  Description of Artificial Sequence: Synthetic oligonucleotide
  Target: LAMA2; (+) strand; PAM type: NRG; PAM sequence: TGG
aaaggaaagaatatgaactt

SEQ ID NO: 158301 - DNA, 20 bp, Artificial Sequence
  Description of Artificial Sequence: Synthetic oligonucleotide
  Target: LAMA2; (+) strand; PAM type: NRG; PAM sequence: GAG
aggaaagaatatgaactttg

SEQ ID NO: 158302 - DNA, 20 bp, Artificial Sequence
  Description of Artificial Sequence: Synthetic oligonucleotide
  Target: LAMA2; (+) strand; PAM type: NRG; PAM sequence: TAG
aactttggagccaaactgaa

SEQ ID NO: 158303 - DNA, 20 bp, Artificial Sequence
  Description of Artificial Sequence: Synthetic oligonucleotide
  Target: LAMA2; (+) strand; PAM type: NRG; PAM sequence: AAG
aaactgaatagaaattcaat

SEQ ID NO: 158304 - DNA, 20 bp, Artificial Sequence
  Description of Artificial Sequence: Synthetic oligonucleotide
  Target: LAMA2; (+) strand; PAM type: NRG; PAM sequence: TGG
cttattttatgtgtgacctt

SEQ ID NO: 158305 - DNA, 20 bp, Artificial Sequence
  Description of Artificial Sequence: Synthetic oligonucleotide
  Target: LAMA2; (+) strand; PAM type: NRG; PAM sequence: AAG
ttttatgtgtgacctttggc

SEQ ID NO: 158306 - DNA, 20 bp, Artificial Sequence
  Description of Artificial Sequence: Synthetic oligonucleotide
  Target: LAMA2; (+) strand; PAM type: NRG; PAM sequence: AAG
gtgacctttggcaagtgatt

SEQ ID NO: 158307 - DNA, 20 bp, Artificial Sequence
  Description of Artificial Sequence: Synthetic oligonucleotide
  Target: LAMA2; (+) strand; PAM type: NRG; PAM sequence: GAG
ttggcaagtgattaagcctt

SEQ ID NO: 158308 - DNA, 20 bp, Artificial Sequence
  Description of Artificial Sequence: Synthetic oligonucleotide
  Target: LAMA2; (+) strand; PAM type: NRG; PAM sequence: AGG
tggcaagtgattaagccttg

SEQ ID NO: 158309 - DNA, 20 bp, Artificial Sequence
  Description of Artificial Sequence: Synthetic oligonucleotide
  Target: LAMA2; (+) strand; PAM type: NRG; PAM sequence: CAG
ccttgaggaacgtttctttt

SEQ ID NO: 158310 - DNA, 20 bp, Artificial Sequence
  Description of Artificial Sequence: Synthetic oligonucleotide
  Target: LAMA2; (+) strand; PAM type: NRG; PAM sequence: AAG
gaacgtttcttttcagtgta

SEQ ID NO: 158311 - DNA, 20 bp, Artificial Sequence
  Description of Artificial Sequence: Synthetic oligonucleotide
  Target: LAMA2; (+) strand; PAM type: NRG; PAM sequence: TGG
cgtttcttttcagtgtaaag

SEQ ID NO: 158312 - DNA, 20 bp, Artificial Sequence
  Description of Artificial Sequence: Synthetic oligonucleotide
  Target: LAMA2; (+) strand; PAM type: NRG; PAM sequence: TAG
ttttcagtgtaaagtggata

SEQ ID NO: 158313 - DNA, 20 bp, Artificial Sequence
  Description of Artificial Sequence: Synthetic oligonucleotide
  Target: LAMA2; (+) strand; PAM type: NRG; PAM sequence: CAG
atatagtaatgcctactttt

SEQ ID NO: 158314 - DNA, 20 bp, Artificial Sequence
  Description of Artificial Sequence: Synthetic oligonucleotide
  Target: LAMA2; (+) strand; PAM type: NRG; PAM sequence: AGG
tatagtaatgcctacttttc

SEQ ID NO: 158315 - DNA, 20 bp, Artificial Sequence
  Description of Artificial Sequence: Synthetic oligonucleotide
  Target: LAMA2; (+) strand; PAM type: NRG; PAM sequence: GGG
atagtaatgcctacttttca

SEQ ID NO: 158316 - DNA, 20 bp, Artificial Sequence
  Description of Artificial Sequence: Synthetic oligonucleotide
  Target: LAMA2; (+) strand; PAM type: NRG; PAM sequence: TAG
ttaacatgatatgtgatcat

SEQ ID NO: 158317 - DNA, 20 bp, Artificial Sequence
  Description of Artificial Sequence: Synthetic oligonucleotide
  Target: LAMA2; (+) strand; PAM type: NRG; PAM sequence: AGG
taacatgatatgtgatcatt

SEQ ID NO: 158318 - DNA, 20 bp, Artificial Sequence
  Description of Artificial Sequence: Synthetic oligonucleotide
  Target: LAMA2; (+) strand; PAM type: NRG; PAM sequence: AAG
atgatatgtgatcattagga

SEQ ID NO: 158319 - DNA, 20 bp, Artificial Sequence
  Description of Artificial Sequence: Synthetic oligonucleotide
  Target: LAMA2; (+) strand; PAM type: NRG; PAM sequence: TAG
ttaggaaagtactcatcacc

SEQ ID NO: 158320 - DNA, 20 bp, Artificial Sequence
  Description of Artificial Sequence: Synthetic oligonucleotide
  Target: LAMA2; (+) strand; PAM type: NRG; PAM sequence: CAG
ctcatcacctagaacacttt

SEQ ID NO: 158321 - DNA, 20 bp, Artificial Sequence
  Description of Artificial Sequence: Synthetic oligonucleotide
  Target: LAMA2; (+) strand; PAM type: NRG; PAM sequence: AAG
tccccgccccctttttttaa

SEQ ID NO: 158322 - DNA, 20 bp, Artificial Sequence
  Description of Artificial Sequence: Synthetic oligonucleotide
  Target: LAMA2; (+) strand; PAM type: NRG; PAM sequence: GAG
cccgccccctttttttaaaa

SEQ ID NO: 158323 - DNA, 20 bp, Artificial Sequence
  Description of Artificial Sequence: Synthetic oligonucleotide
  Target: LAMA2; (+) strand; PAM type: NRG; PAM sequence: CGG
tgacttgaaccaaatatgct

SEQ ID NO: 158324 - DNA, 20 bp, Artificial Sequence
  Description of Artificial Sequence: Synthetic oligonucleotide
  Target: LAMA2; (+) strand; PAM type: NRG; PAM sequence: GGG
gacttgaaccaaatatgctc

SEQ ID NO: 158325 - DNA, 20 bp, Artificial Sequence
  Description of Artificial Sequence: Synthetic oligonucleotide
  Target: LAMA2; (+) strand; PAM type: NRG; PAM sequence: AAG
cgggtctgattaactgctgt

SEQ ID NO: 158326 - DNA, 20 bp, Artificial Sequence
  Description of Artificial Sequence: Synthetic oligonucleotide
  Target: LAMA2; (+) strand; PAM type: NRG; PAM sequence: AGG
gggtctgattaactgctgta

SEQ ID NO: 158327 - DNA, 20 bp, Artificial Sequence
  Description of Artificial Sequence: Synthetic oligonucleotide
  Target: LAMA2; (+) strand; PAM type: NRG; PAM sequence: CGG
tctgattaactgctgtaagg

SEQ ID NO: 158328 - DNA, 20 bp, Artificial Sequence
  Description of Artificial Sequence: Synthetic oligonucleotide
  Target: LAMA2; (+) strand; PAM type: NRG; PAM sequence: CAG
acaatgacatttttatctga

SEQ ID NO: 158329 - DNA, 20 bp, Artificial Sequence
  Description of Artificial Sequence: Synthetic oligonucleotide
  Target: LAMA2; (+) strand; PAM type: NRG; PAM sequence: GAG
aacttcaactgtgtctgaat

SEQ ID NO: 158330 - DNA, 20 bp, Artificial Sequence
  Description of Artificial Sequence: Synthetic oligonucleotide
  Target: LAMA2; (+) strand; PAM type: NRG; PAM sequence: AAG
actctaataataaataacac

SEQ ID NO: 158331 - DNA, 20 bp, Artificial Sequence
  Description of Artificial Sequence: Synthetic oligonucleotide
  Target: LAMA2; (+) strand; PAM type: NRG; PAM sequence: AGG
ctctaataataaataacaca

SEQ ID NO: 158332 - DNA, 20 bp, Artificial Sequence
  Description of Artificial Sequence: Synthetic oligonucleotide
  Target: LAMA2; (+) strand; PAM type: NRG; PAM sequence: TAG
ataaataacacaaggtgtca

SEQ ID NO: 158333 - DNA, 20 bp, Artificial Sequence
  Description of Artificial Sequence: Synthetic oligonucleotide
  Target: LAMA2; (+) strand; PAM type: NRG; PAM sequence: AGG
taaataacacaaggtgtcat

SEQ ID NO: 158334 - DNA, 20 bp, Artificial Sequence
  Description of Artificial Sequence: Synthetic oligonucleotide
  Target: LAMA2; (+) strand; PAM type: NRG; PAM sequence: CAG
ataggaacttccttctaaat

SEQ ID NO: 158335 - DNA, 20 bp, Artificial Sequence
  Description of Artificial Sequence: Synthetic oligonucleotide
  Target: LAMA2; (+) strand; PAM type: NRG; PAM sequence: AGG
taggaacttccttctaaatc

SEQ ID NO: 158336 - DNA, 20 bp, Artificial Sequence
  Description of Artificial Sequence: Synthetic oligonucleotide
  Target: LAMA2; (+) strand; PAM type: NRG; PAM sequence: AAG
acttccttctaaatcaggtt

SEQ ID NO: 158337 - DNA, 20 bp, Artificial Sequence
  Description of Artificial Sequence: Synthetic oligonucleotide
  Target: LAMA2; (+) strand; PAM type: NRG; PAM sequence: TAG
ccttctaaatcaggttaagt

SEQ ID NO: 158338 - DNA, 20 bp, Artificial Sequence
  Description of Artificial Sequence: Synthetic oligonucleotide
  Target: LAMA2; (+) strand; PAM type: NRG; PAM sequence: CAG
tagacattcaaatgtgaccc

SEQ ID NO: 158339 - DNA, 20 bp, Artificial Sequence
  Description of Artificial Sequence: Synthetic oligonucleotide
  Target: LAMA2; (+) strand; PAM type: NRG; PAM sequence: CGG
gtgaccccagcctgacaacc

SEQ ID NO: 158340 - DNA, 20 bp, Artificial Sequence
  Description of Artificial Sequence: Synthetic oligonucleotide
  Target: LAMA2; (+) strand; PAM type: NRG; PAM sequence: AAG
acccggtatacctttaatga

SEQ ID NO: 158341 - DNA, 20 bp, Artificial Sequence
  Description of Artificial Sequence: Synthetic oligonucleotide
  Target: LAMA2; (+) strand; PAM type: NRG; PAM sequence: TGG
gaaagcaatgtctccaatat

SEQ ID NO: 158342 - DNA, 20 bp, Artificial Sequence
  Description of Artificial Sequence: Synthetic oligonucleotide
  Target: LAMA2; (+) strand; PAM type: NRG; PAM sequence: GAG
aagcaatgtctccaatattg

SEQ ID NO: 158343 - DNA, 20 bp, Artificial Sequence
  Description of Artificial Sequence: Synthetic oligonucleotide
  Target: LAMA2; (+) strand; PAM type: NRG; PAM sequence: TAG
catcatttccctgtgctgcc

SEQ ID NO: 158344 - DNA, 20 bp, Artificial Sequence
  Description of Artificial Sequence: Synthetic oligonucleotide
  Target: LAMA2; (+) strand; PAM type: NRG; PAM sequence: TGG
ctgcctagtttgcctttcac

SEQ ID NO: 158345 - DNA, 20 bp, Artificial Sequence
  Description of Artificial Sequence: Synthetic oligonucleotide
  Target: LAMA2; (+) strand; PAM type: NRG; PAM sequence: TAG
tcactggtaatatttcaact

SEQ ID NO: 158346 - DNA, 20 bp, Artificial Sequence
  Description of Artificial Sequence: Synthetic oligonucleotide
  Target: LAMA2; (+) strand; PAM type: NRG; PAM sequence: AAG
atcatcattaccatttccca

SEQ ID NO: 158347 - DNA, 20 bp, Artificial Sequence
  Description of Artificial Sequence: Synthetic oligonucleotide
  Target: LAMA2; (+) strand; PAM type: NRG; PAM sequence: AGG
tcatcattaccatttcccaa

SEQ ID NO: 158348 - DNA, 20 bp, Artificial Sequence
  Description of Artificial Sequence: Synthetic oligonucleotide
  Target: LAMA2; (+) strand; PAM type: NRG; PAM sequence: GAG
atcattaccatttcccaaag

SEQ ID NO: 158349 - DNA, 20 bp, Artificial Sequence
  Description of Artificial Sequence: Synthetic oligonucleotide
  Target: LAMA2; (+) strand; PAM type: NRG; PAM sequence: GAG
cattaccatttcccaaagga

SEQ ID NO: 158350 - DNA, 20 bp, Artificial Sequence
  Description of Artificial Sequence: Synthetic oligonucleotide
  Target: LAMA2; (+) strand; PAM type: NRG; PAM sequence: CAG
tttcccaaaggagagaactg

SEQ ID NO: 158351 - DNA, 20 bp, Artificial Sequence
  Description of Artificial Sequence: Synthetic oligonucleotide
  Target: LAMA2; (+) strand; PAM type: NRG; PAM sequence: CAG
gagaactgcagaatcataaa

SEQ ID NO: 158352 - DNA, 20 bp, Artificial Sequence
  Description of Artificial Sequence: Synthetic oligonucleotide
  Target: LAMA2; (+) strand; PAM type: NRG; PAM sequence: TAG
aacaatgtacctcttttgca

SEQ ID NO: 158353 - DNA, 20 bp, Artificial Sequence
  Description of Artificial Sequence: Synthetic oligonucleotide
  Target: LAMA2; (+) strand; PAM type: NRG; PAM sequence: AGG
acaatgtacctcttttgcat

SEQ ID NO: 158354 - DNA, 20 bp, Artificial Sequence
  Description of Artificial Sequence: Synthetic oligonucleotide
  Target: LAMA2; (+) strand; PAM type: NRG; PAM sequence: TAG
ttttgcataggcaattcttc

SEQ ID NO: 158355 - DNA, 20 bp, Artificial Sequence
  Description of Artificial Sequence: Synthetic oligonucleotide
  Target: LAMA2; (+) strand; PAM type: NRG; PAM sequence: AAG
tgcataggcaattcttctag

SEQ ID NO: 158356 - DNA, 20 bp, Artificial Sequence
  Description of Artificial Sequence: Synthetic oligonucleotide
  Target: LAMA2; (+) strand; PAM type: NRG; PAM sequence: TGG
taggcaattcttctagaagc

SEQ ID NO: 158357 - DNA, 20 bp, Artificial Sequence
  Description of Artificial Sequence: Synthetic oligonucleotide
  Target: LAMA2; (+) strand; PAM type: NRG; PAM sequence: GGG
aggcaattcttctagaagct

SEQ ID NO: 158358 - DNA, 20 bp, Artificial Sequence
  Description of Artificial Sequence: Synthetic oligonucleotide
  Target: LAMA2; (+) strand; PAM type: NRG; PAM sequence: TGG
gaagctgggttaaaatgcca

SEQ ID NO: 158359 - DNA, 20 bp, Artificial Sequence
  Description of Artificial Sequence: Synthetic oligonucleotide
  Target: LAMA2; (+) strand; PAM type: NRG; PAM sequence: GAG
agctgggttaaaatgccatg

SEQ ID NO: 158360 - DNA, 20 bp, Artificial Sequence
  Description of Artificial Sequence: Synthetic oligonucleotide
  Target: LAMA2; (+) strand; PAM type: NRG; PAM sequence: GAG
ggttaaaatgccatggagat

SEQ ID NO: 158361 - DNA, 20 bp, Artificial Sequence
  Description of Artificial Sequence: Synthetic oligonucleotide
  Target: LAMA2; (+) strand; PAM type: NRG; PAM sequence: AAG
taaaatgccatggagatgag

SEQ ID NO: 158362 - DNA, 20 bp, Artificial Sequence
  Description of Artificial Sequence: Synthetic oligonucleotide
  Target: LAMA2; (+) strand; PAM type: NRG; PAM sequence: CAG
aatgccatggagatgagaag

SEQ ID NO: 158363 - DNA, 20 bp, Artificial Sequence
  Description of Artificial Sequence: Synthetic oligonucleotide
  Target: LAMA2; (+) strand; PAM type: NRG; PAM sequence: TAG
tggagatgagaagcagcact

SEQ ID NO: 158364 - DNA, 20 bp, Artificial Sequence
  Description of Artificial Sequence: Synthetic oligonucleotide
  Target: LAMA2; (+) strand; PAM type: NRG; PAM sequence: AGG
ggagatgagaagcagcactt

SEQ ID NO: 158365 - DNA, 20 bp, Artificial Sequence
  Description of Artificial Sequence: Synthetic oligonucleotide
  Target: LAMA2; (+) strand; PAM type: NRG; PAM sequence: TAG
ttaattatgtttttcacatt

SEQ ID NO: 158366 - DNA, 20 bp, Artificial Sequence
  Description of Artificial Sequence: Synthetic oligonucleotide
  Target: LAMA2; (+) strand; PAM type: NRG; PAM sequence: TAG
tgtttttcacatttagcaaa

SEQ ID NO: 158367 - DNA, 20 bp, Artificial Sequence
  Description of Artificial Sequence: Synthetic oligonucleotide
  Target: LAMA2; (+) strand; PAM type: NRG; PAM sequence: GAG
tttttcacatttagcaaata

SEQ ID NO: 158368 - DNA, 20 bp, Artificial Sequence
  Description of Artificial Sequence: Synthetic oligonucleotide
  Target: LAMA2; (+) strand; PAM type: NRG; PAM sequence: AGG
ttttcacatttagcaaatag

SEQ ID NO: 158369 - DNA, 20 bp, Artificial Sequence
  Description of Artificial Sequence: Synthetic oligonucleotide
  Target: LAMA2; (+) strand; PAM type: NRG; PAM sequence: CAG
aggttgtcatgatgtttaaa

SEQ ID NO: 158370 - DNA, 20 bp, Artificial Sequence
  Description of Artificial Sequence: Synthetic oligonucleotide
  Target: LAMA2; (+) strand; PAM type: NRG; PAM sequence: AAG
catgatgtttaaacagtaca

SEQ ID NO: 158371 - DNA, 20 bp, Artificial Sequence
  Description of Artificial Sequence: Synthetic oligonucleotide
  Target: LAMA2; (+) strand; PAM type: NRG; PAM sequence: GAG
tttaaacagtacaaagaaat

SEQ ID NO: 158372 - DNA, 20 bp, Artificial Sequence
  Description of Artificial Sequence: Synthetic oligonucleotide
  Target: LAMA2; (+) strand; PAM type: NRG; PAM sequence: CAG
gtacaaagaaatgagtcctc

SEQ ID NO: 158373 - DNA, 20 bp, Artificial Sequence
  Description of Artificial Sequence: Synthetic oligonucleotide
  Target: LAMA2; (+) strand; PAM type: NRG; PAM sequence: AAG
gacaaccaaattgacaaaaa

SEQ ID NO: 158374 - DNA, 20 bp, Artificial Sequence
  Description of Artificial Sequence: Synthetic oligonucleotide
  Target: LAMA2; (+) strand; PAM type: NRG; PAM sequence: TGG
aaattgacaaaaaaagtgtc

SEQ ID NO: 158375 - DNA, 20 bp, Artificial Sequence
  Description of Artificial Sequence: Synthetic oligonucleotide
  Target: LAMA2; (+) strand; PAM type: NRG; PAM sequence: GGG
aattgacaaaaaaagtgtct

SEQ ID NO: 158376 - DNA, 20 bp, Artificial Sequence
  Description of Artificial Sequence: Synthetic oligonucleotide
  Target: LAMA2; (+) strand; PAM type: NRG; PAM sequence: GGG
attgacaaaaaaagtgtctg

SEQ ID NO: 158377 - DNA, 20 bp, Artificial Sequence
  Description of Artificial Sequence: Synthetic oligonucleotide
  Target: LAMA2; (+) strand; PAM type: NRG; PAM sequence: GGG
ttgacaaaaaaagtgtctgg

SEQ ID NO: 158378 - DNA, 20 bp, Artificial Sequence
  Description of Artificial Sequence: Synthetic oligonucleotide
  Target: LAMA2; (+) strand; PAM type: NRG; PAM sequence: GGG
tgacaaaaaaagtgtctggg

SEQ ID NO: 158379 - DNA, 20 bp, Artificial Sequence
  Description of Artificial Sequence: Synthetic oligonucleotide
  Target: LAMA2; (+) strand; PAM type: NRG; PAM sequence: CAG
gggggcttatatatttttgt

SEQ ID NO: 158380 - DNA, 20 bp, Artificial Sequence
  Description of Artificial Sequence: Synthetic oligonucleotide
  Target: LAMA2; (+) strand; PAM type: NRG; PAM sequence: CAG
tttttgtcagcattgctttt

SEQ ID NO: 158381 - DNA, 20 bp, Artificial Sequence
  Description of Artificial Sequence: Synthetic oligonucleotide
  Target: LAMA2; (+) strand; PAM type: NRG; PAM sequence: AGG
ttttgtcagcattgcttttc

SEQ ID NO: 158382 - DNA, 20 bp, Artificial Sequence
  Description of Artificial Sequence: Synthetic oligonucleotide
  Target: LAMA2; (+) strand; PAM type: NRG; PAM sequence: TAG
gtcagcattgcttttcaggc

SEQ ID NO: 158383 - DNA, 20 bp, Artificial Sequence
  Description of Artificial Sequence: Synthetic oligonucleotide
  Target: LAMA2; (+) strand; PAM type: NRG; PAM sequence: AAG
ttttcaggctagttaataca

SEQ ID NO: 158384 - DNA, 20 bp, Artificial Sequence
  Description of Artificial Sequence: Synthetic oligonucleotide
  Target: LAMA2; (+) strand; PAM type: NRG; PAM sequence: TGG
catttccccctgatttatgt

SEQ ID NO: 158385 - DNA, 20 bp, Artificial Sequence
  Description of Artificial Sequence: Synthetic oligonucleotide
  Target: LAMA2; (+) strand; PAM type: NRG; PAM sequence: CAG
tccccctgatttatgttgga

SEQ ID NO: 158386 - DNA, 20 bp, Artificial Sequence
  Description of Artificial Sequence: Synthetic oligonucleotide
  Target: LAMA2; (+) strand; PAM type: NRG; PAM sequence: CAG
tgatttatgttggacagttt

SEQ ID NO: 158387 - DNA, 20 bp, Artificial Sequence
  Description of Artificial Sequence: Synthetic oligonucleotide
  Target: LAMA2; (+) strand; PAM type: NRG; PAM sequence: TGG
tctacccgtcttaaaatcac

SEQ ID NO: 158388 - DNA, 20 bp, Artificial Sequence
  Description of Artificial Sequence: Synthetic oligonucleotide
  Target: LAMA2; (+) strand; PAM type: NRG; PAM sequence: CAG
aaaatcactggtttcatttg

SEQ ID NO: 158389 - DNA, 20 bp, Artificial Sequence
  Description of Artificial Sequence: Synthetic oligonucleotide
  Target: LAMA2; (+) strand; PAM type: NRG; PAM sequence: GAG
ggtttcatttgcagtcttct

SEQ ID NO: 158390 - DNA, 20 bp, Artificial Sequence
  Description of Artificial Sequence: Synthetic oligonucleotide
  Target: LAMA2; (+) strand; PAM type: NRG; PAM sequence: AGG
gtttcatttgcagtcttctg

SEQ ID NO: 158391 - DNA, 20 bp, Artificial Sequence
  Description of Artificial Sequence: Synthetic oligonucleotide
  Target: LAMA2; (+) strand; PAM type: NRG; PAM sequence: CAG
tcttctgaggtttcgccata

SEQ ID NO: 158392 - DNA, 20 bp, Artificial Sequence
  Description of Artificial Sequence: Synthetic oligonucleotide
  Target: LAMA2; (+) strand; PAM type: NRG; PAM sequence: AGG
cttctgaggtttcgccatac

SEQ ID NO: 158393 - DNA, 20 bp, Artificial Sequence
  Description of Artificial Sequence: Synthetic oligonucleotide
  Target: LAMA2; (+) strand; PAM type: NRG; PAM sequence: GAG
tctgaggtttcgccatacag

SEQ ID NO: 158394 - DNA, 20 bp, Artificial Sequence
  Description of Artificial Sequence: Synthetic oligonucleotide
  Target: LAMA2; (+) strand; PAM type: NRG; PAM sequence: AGG
ctgaggtttcgccatacagg

SEQ ID NO: 158395 - DNA, 20 bp, Artificial Sequence
  Description of Artificial Sequence: Synthetic oligonucleotide
  Target: LAMA2; (+) strand; PAM type: NRG; PAM sequence: CAG
atacaggaggaatgcattca

SEQ ID NO: 158396 - DNA, 20 bp, Artificial Sequence
  Description of Artificial Sequence: Synthetic oligonucleotide
  Target: LAMA2; (+) strand; PAM type: NRG; PAM sequence: CGG
ggaggaatgcattcacagcg

SEQ ID NO: 158397 - DNA, 20 bp, Artificial Sequence
  Description of Artificial Sequence: Synthetic oligonucleotide
  Target: LAMA2; (+) strand; PAM type: NRG; PAM sequence: AAG
gcggctctgtgaaatgacac

SEQ ID NO: 158398 - DNA, 20 bp, Artificial Sequence
  Description of Artificial Sequence: Synthetic oligonucleotide
  Target: LAMA2; (+) strand; PAM type: NRG; PAM sequence: GAG
ggctctgtgaaatgacacaa

SEQ ID NO: 158399 - DNA, 20 bp, Artificial Sequence
  Description of Artificial Sequence: Synthetic oligonucleotide
  Target: LAMA2; (+) strand; PAM type: NRG; PAM sequence: AAG
aatgacacaagagctaatcc

SEQ ID NO: 158400 - DNA, 20 bp, Artificial Sequence
  Description of Artificial Sequence: Synthetic oligonucleotide
  Target: LAMA2; (+) strand; PAM type: NRG; PAM sequence: TAG
gacacaagagctaatccaag

SEQ ID NO: 158401 - DNA, 20 bp, Artificial Sequence
  Description of Artificial Sequence: Synthetic oligonucleotide
  Target: LAMA2; (+) strand; PAM type: NRG; PAM sequence: AGG
acacaagagctaatccaagt

SEQ ID NO: 158402 - DNA, 20 bp, Artificial Sequence
  Description of Artificial Sequence: Synthetic oligonucleotide
  Target: LAMA2; (+) strand; PAM type: NRG; PAM sequence: TGG
caagagctaatccaagtagg

SEQ ID NO: 158403 - DNA, 20 bp, Artificial Sequence
  Description of Artificial Sequence: Synthetic oligonucleotide
  Target: LAMA2; (+) strand; PAM type: NRG; PAM sequence: AAG
tctgtcacctacattaccta

SEQ ID NO: 158404 - DNA, 20 bp, Artificial Sequence
  Description of Artificial Sequence: Synthetic oligonucleotide
  Target: LAMA2; (+) strand; PAM type: NRG; PAM sequence: TGG
ctacattacctaaagcactg

SEQ ID NO: 158405 - DNA, 20 bp, Artificial Sequence
  Description of Artificial Sequence: Synthetic oligonucleotide
  Target: LAMA2; (+) strand; PAM type: NRG; PAM sequence: AAG
ctaaagcactgtggttcaat

SEQ ID NO: 158406 - DNA, 20 bp, Artificial Sequence
  Description of Artificial Sequence: Synthetic oligonucleotide
  Target: LAMA2; (+) strand; PAM type: NRG; PAM sequence: AAG
cactgtggttcaataagtaa

SEQ ID NO: 158407 - DNA, 20 bp, Artificial Sequence
  Description of Artificial Sequence: Synthetic oligonucleotide
  Target: LAMA2; (+) strand; PAM type: NRG; PAM sequence: CAG
atttgaaactcctacccact

SEQ ID NO: 158408 - DNA, 20 bp, Artificial Sequence
  Description of Artificial Sequence: Synthetic oligonucleotide
  Target: LAMA2; (+) strand; PAM type: NRG; PAM sequence: AGG
tttgaaactcctacccactc

SEQ ID NO: 158409 - DNA, 20 bp, Artificial Sequence
  Description of Artificial Sequence: Synthetic oligonucleotide
  Target: LAMA2; (+) strand; PAM type: NRG; PAM sequence: GAG
aaactcctacccactcaggt

SEQ ID NO: 158410 - DNA, 20 bp, Artificial Sequence
  Description of Artificial Sequence: Synthetic oligonucleotide
  Target: LAMA2; (+) strand; PAM type: NRG; PAM sequence: AAG
tacccactcaggtgagctga

SEQ ID NO: 158411 - DNA, 20 bp, Artificial Sequence
  Description of Artificial Sequence: Synthetic oligonucleotide
  Target: LAMA2; (+) strand; PAM type: NRG; PAM sequence: CGG
cactcaggtgagctgaaagt

SEQ ID NO: 158412 - DNA, 20 bp, Artificial Sequence
  Description of Artificial Sequence: Synthetic oligonucleotide
  Target: LAMA2; (+) strand; PAM type: NRG; PAM sequence: TGG
gctgaaagtcggcatgaatc

SEQ ID NO: 158413 - DNA, 20 bp, Artificial Sequence
  Description of Artificial Sequence: Synthetic oligonucleotide
  Target: LAMA2; (+) strand; PAM type: NRG; PAM sequence: GAG
tgaaagtcggcatgaatctg

SEQ ID NO: 158414 - DNA, 20 bp, Artificial Sequence
  Description of Artificial Sequence: Synthetic oligonucleotide
  Target: LAMA2; (+) strand; PAM type: NRG; PAM sequence: CAG
agtcggcatgaatctggagt

SEQ ID NO: 158415 - DNA, 20 bp, Artificial Sequence
  Description of Artificial Sequence: Synthetic oligonucleotide
  Target: LAMA2; (+) strand; PAM type: NRG; PAM sequence: CAG
ggcatgaatctggagtcagt

SEQ ID NO: 158416 - DNA, 20 bp, Artificial Sequence
  Description of Artificial Sequence: Synthetic oligonucleotide
  Target: LAMA2; (+) strand; PAM type: NRG; PAM sequence: AAG
tgaatctggagtcagtcagt

SEQ ID NO: 158417 - DNA, 20 bp, Artificial Sequence
  Description of Artificial Sequence: Synthetic oligonucleotide
  Target: LAMA2; (+) strand; PAM type: NRG; PAM sequence: TAG
atattttatctttgatctac

SEQ ID NO: 158418 - DNA, 20 bp, Artificial Sequence
  Description of Artificial Sequence: Synthetic oligonucleotide
  Target: LAMA2; (+) strand; PAM type: NRG; PAM sequence: TAG
ttttatctttgatctactag

SEQ ID NO: 158419 - DNA, 20 bp, Artificial Sequence
  Description of Artificial Sequence: Synthetic oligonucleotide
  Target: LAMA2; (+) strand; PAM type: NRG; PAM sequence: GAG
ctttgatctactagtagatt

SEQ ID NO: 158420 - DNA, 20 bp, Artificial Sequence
  Description of Artificial Sequence: Synthetic oligonucleotide
  Target: LAMA2; (+) strand; PAM type: NRG; PAM sequence: CAG
tgatttcaacttgtcttgca

SEQ ID NO: 158421 - DNA, 20 bp, Artificial Sequence
  Description of Artificial Sequence: Synthetic oligonucleotide
  Target: LAMA2; (+) strand; PAM type: NRG; PAM sequence: TAG
tttcaacttgtcttgcacag

SEQ ID NO: 158422 - DNA, 20 bp, Artificial Sequence
  Description of Artificial Sequence: Synthetic oligonucleotide
  Target: LAMA2; (+) strand; PAM type: NRG; PAM sequence: AGG
ttcaacttgtcttgcacagt

SEQ ID NO: 158423 - DNA, 20 bp, Artificial Sequence
  Description of Artificial Sequence: Synthetic oligonucleotide
  Target: LAMA2; (+) strand; PAM type: NRG; PAM sequence: TGG
tgcacagtaggctttcgact

SEQ ID NO: 158424 - DNA, 20 bp, Artificial Sequence
  Description of Artificial Sequence: Synthetic oligonucleotide
  Target: LAMA2; (+) strand; PAM type: NRG; PAM sequence: AAG
ttggtatactgtttgtgtac

SEQ ID NO: 158425 - DNA, 20 bp, Artificial Sequence
  Description of Artificial Sequence: Synthetic oligonucleotide
  Target: LAMA2; (+) strand; PAM type: NRG; PAM sequence: AAG
tactgtttgtgtacaagcac

SEQ ID NO: 158426 - DNA, 20 bp, Artificial Sequence
  Description of Artificial Sequence: Synthetic oligonucleotide
  Target: LAMA2; (+) strand; PAM type: NRG; PAM sequence: AAG
gtacaagcacaagtaaattg

SEQ ID NO: 158427 - DNA, 20 bp, Artificial Sequence
  Description of Artificial Sequence: Synthetic oligonucleotide
  Target: LAMA2; (+) strand; PAM type: NRG; PAM sequence: CAG
gctcaacaaaaattcatatt

SEQ ID NO: 158428 - DNA, 20 bp, Artificial Sequence
  Description of Artificial Sequence: Synthetic oligonucleotide
  Target: LAMA2; (+) strand; PAM type: NRG; PAM sequence: CAG
ttcatattcagacttattta

SEQ ID NO: 158429 - DNA, 20 bp, Artificial Sequence
  Description of Artificial Sequence: Synthetic oligonucleotide
  Target: LAMA2; (+) strand; PAM type: NRG; PAM sequence: TGG
atattcagacttatttacag

SEQ ID NO: 158430 - DNA, 20 bp, Artificial Sequence
  Description of Artificial Sequence: Synthetic oligonucleotide
  Target: LAMA2; (+) strand; PAM type: NRG; PAM sequence: TGG
ttacagtggatttacttcca

SEQ ID NO: 158431 - DNA, 20 bp, Artificial Sequence
  Description of Artificial Sequence: Synthetic oligonucleotide
  Target: LAMA2; (+) strand; PAM type: NRG; PAM sequence: CAG
cagtggatttacttccatgg

SEQ ID NO: 158432 - DNA, 20 bp, Artificial Sequence
  Description of Artificial Sequence: Synthetic oligonucleotide
  Target: LAMA2; (+) strand; PAM type: NRG; PAM sequence: CAG
tacttccatggcagttcttt

SEQ ID NO: 158433 - DNA, 20 bp, Artificial Sequence
  Description of Artificial Sequence: Synthetic oligonucleotide
  Target: LAMA2; (+) strand; PAM type: NRG; PAM sequence: TGG
atggcagttctttcagcaaa

SEQ ID NO: 158434 - DNA, 20 bp, Artificial Sequence
  Description of Artificial Sequence: Synthetic oligonucleotide
  Target: LAMA2; (+) strand; PAM type: NRG; PAM sequence: GGG
tggcagttctttcagcaaat

SEQ ID NO: 158435 - DNA, 20 bp, Artificial Sequence
  Description of Artificial Sequence: Synthetic oligonucleotide
  Target: LAMA2; (+) strand; PAM type: NRG; PAM sequence: TAG
gttctttcagcaaatgggct

SEQ ID NO: 158436 - DNA, 20 bp, Artificial Sequence
  Description of Artificial Sequence: Synthetic oligonucleotide
  Target: LAMA2; (+) strand; PAM type: NRG; PAM sequence: AGG
ttctttcagcaaatgggctt

SEQ ID NO: 158437 - DNA, 20 bp, Artificial Sequence
  Description of Artificial Sequence: Synthetic oligonucleotide
  Target: LAMA2; (+) strand; PAM type: NRG; PAM sequence: CAG
caaatgggcttaggttcctc

SEQ ID NO: 158438 - DNA, 20 bp, Artificial Sequence
  Description of Artificial Sequence: Synthetic oligonucleotide
  Target: LAMA2; (+) strand; PAM type: NRG; PAM sequence: TAG
tgggcttaggttcctccagt

SEQ ID NO: 158439 - DNA, 20 bp, Artificial Sequence
  Description of Artificial Sequence: Synthetic oligonucleotide
  Target: LAMA2; (+) strand; PAM type: NRG; PAM sequence: TAG
cctccagttagttatatgat

SEQ ID NO: 158440 - DNA, 20 bp, Artificial Sequence
  Description of Artificial Sequence: Synthetic oligonucleotide
  Target: LAMA2; (+) strand; PAM type: NRG; PAM sequence: TGG
cagttagttatatgattaga

SEQ ID NO: 158441 - DNA, 20 bp, Artificial Sequence
  Description of Artificial Sequence: Synthetic oligonucleotide
  Target: LAMA2; (+) strand; PAM type: NRG; PAM sequence: CAG
gattagatggaattgtataa

SEQ ID NO: 158442 - DNA, 20 bp, Artificial Sequence
  Description of Artificial Sequence: Synthetic oligonucleotide
  Target: LAMA2; (+) strand; PAM type: NRG; PAM sequence: AAG
tagatggaattgtataacag

SEQ ID NO: 158443 - DNA, 20 bp, Artificial Sequence
  Description of Artificial Sequence: Synthetic oligonucleotide
  Target: LAMA2; (+) strand; PAM type: NRG; PAM sequence: AGG
agatggaattgtataacaga

SEQ ID NO: 158444 - DNA, 20 bp, Artificial Sequence
  Description of Artificial Sequence: Synthetic oligonucleotide
  Target: LAMA2; (+) strand; PAM type: NRG; PAM sequence: GAG
atggaattgtataacagaag

SEQ ID NO: 158445 - DNA, 20 bp, Artificial Sequence
  Description of Artificial Sequence: Synthetic oligonucleotide
  Target: LAMA2; (+) strand; PAM type: NRG; PAM sequence: TGG
ttgtataacagaaggagaac

SEQ ID NO: 158446 - DNA, 20 bp, Artificial Sequence
  Description of Artificial Sequence: Synthetic oligonucleotide
  Target: LAMA2; (+) strand; PAM type: NRG; PAM sequence: CGG
acagaaggagaactggactg

SEQ ID NO: 158447 - DNA, 20 bp, Artificial Sequence
  Description of Artificial Sequence: Synthetic oligonucleotide
  Target: LAMA2; (+) strand; PAM type: NRG; PAM sequence: GGG
cagaaggagaactggactgc

SEQ ID NO: 158448 - DNA, 20 bp, Artificial Sequence
  Description of Artificial Sequence: Synthetic oligonucleotide
  Target: LAMA2; (+) strand; PAM type: NRG; PAM sequence: AAG
ggagaactggactgcgggtc

SEQ ID NO: 158449 - DNA, 20 bp, Artificial Sequence
  Description of Artificial Sequence: Synthetic oligonucleotide
  Target: LAMA2; (+) strand; PAM type: NRG; PAM sequence: CAG
tttgacttttgttttcaact

SEQ ID NO: 158450 - DNA, 20 bp, Artificial Sequence
  Description of Artificial Sequence: Synthetic oligonucleotide
  Target: LAMA2; (+) strand; PAM type: NRG; PAM sequence: TAG
ttttcaactcagctatttaa

SEQ ID NO: 158451 - DNA, 20 bp, Artificial Sequence
  Description of Artificial Sequence: Synthetic oligonucleotide
  Target: LAMA2; (+) strand; PAM type: NRG; PAM sequence: AAG
tatttaatagttgtaaacat

SEQ ID NO: 158452 - DNA, 20 bp, Artificial Sequence
  Description of Artificial Sequence: Synthetic oligonucleotide
  Target: LAMA2; (+) strand; PAM type: NRG; PAM sequence: TGG
aatagttgtaaacataagta

SEQ ID NO: 158453 - DNA, 20 bp, Artificial Sequence
  Description of Artificial Sequence: Synthetic oligonucleotide
  Target: LAMA2; (+) strand; PAM type: NRG; PAM sequence: TGG
aagtatggctttgacctctt

SEQ ID NO: 158454 - DNA, 20 bp, Artificial Sequence
  Description of Artificial Sequence: Synthetic oligonucleotide
  Target: LAMA2; (+) strand; PAM type: NRG; PAM sequence: AAG
aatcacttcatctgtaaaat

SEQ ID NO: 158455 - DNA, 20 bp, Artificial Sequence
  Description of Artificial Sequence: Synthetic oligonucleotide
  Target: LAMA2; (+) strand; PAM type: NRG; PAM sequence: AGG
atcacttcatctgtaaaata

SEQ ID NO: 158456 - DNA, 20 bp, Artificial Sequence
  Description of Artificial Sequence: Synthetic oligonucleotide
  Target: LAMA2; (+) strand; PAM type: NRG; PAM sequence: GAG
cacttcatctgtaaaataag

SEQ ID NO: 158457 - DNA, 20 bp, Artificial Sequence
  Description of Artificial Sequence: Synthetic oligonucleotide
  Target: LAMA2; (+) strand; PAM type: NRG; PAM sequence: AGG
acttcatctgtaaaataagg

SEQ ID NO: 158458 - DNA, 20 bp, Artificial Sequence
  Description of Artificial Sequence: Synthetic oligonucleotide
  Target: LAMA2; (+) strand; PAM type: NRG; PAM sequence: GAG
ttcatctgtaaaataaggag

SEQ ID NO: 158459 - DNA, 20 bp, Artificial Sequence
  Description of Artificial Sequence: Synthetic oligonucleotide
  Target: LAMA2; (+) strand; PAM type: NRG; PAM sequence: AGG
tcatctgtaaaataaggagg

SEQ ID NO: 158460 - DNA, 20 bp, Artificial Sequence
  Description of Artificial Sequence: Synthetic oligonucleotide
  Target: LAMA2; (+) strand; PAM type: NRG; PAM sequence: CAG
gaggaggacaattgctctgc

SEQ ID NO: 158461 - DNA, 20 bp, Artificial Sequence
  Description of Artificial Sequence: Synthetic oligonucleotide
  Target: LAMA2; (+) strand; PAM type: NRG; PAM sequence: AAG
attgctctgccagcttcaaa

SEQ ID NO: 158462 - DNA, 20 bp, Artificial Sequence
  Description of Artificial Sequence: Synthetic oligonucleotide
  Target: LAMA2; (+) strand; PAM type: NRG; PAM sequence: AAG
cagcttcaaaaagtcaccgc

SEQ ID NO: 158463 - DNA, 20 bp, Artificial Sequence
  Description of Artificial Sequence: Synthetic oligonucleotide
  Target: LAMA2; (+) strand; PAM type: NRG; PAM sequence: TAG
agtcaccgcaagaattgaat

SEQ ID NO: 158464 - DNA, 20 bp, Artificial Sequence
  Description of Artificial Sequence: Synthetic oligonucleotide
  Target: LAMA2; (+) strand; PAM type: NRG; PAM sequence: GAG
tcaccgcaagaattgaatta

SEQ ID NO: 158465 - DNA, 20 bp, Artificial Sequence
  Description of Artificial Sequence: Synthetic oligonucleotide
  Target: LAMA2; (+) strand; PAM type: NRG; PAM sequence: GAG
accgcaagaattgaattaga

SEQ ID NO: 158466 - DNA, 20 bp, Artificial Sequence
  Description of Artificial Sequence: Synthetic oligonucleotide
  Target: LAMA2; (+) strand; PAM type: NRG; PAM sequence: AAG
attgaattagagagctgcaa

SEQ ID NO: 158467 - DNA, 20 bp, Artificial Sequence
  Description of Artificial Sequence: Synthetic oligonucleotide
  Target: LAMA2; (+) strand; PAM type: NRG; PAM sequence: TGG
tagagagctgcaaaagcact

SEQ ID NO: 158468 - DNA, 20 bp, Artificial Sequence
  Description of Artificial Sequence: Synthetic oligonucleotide
  Target: LAMA2; (+) strand; PAM type: NRG; PAM sequence: TAG
gagctgcaaaagcacttggc

SEQ ID NO: 158469 - DNA, 20 bp, Artificial Sequence
  Description of Artificial Sequence: Synthetic oligonucleotide
  Target: LAMA2; (+) strand; PAM type: NRG; PAM sequence: TGG
ctgcaaaagcacttggctag

SEQ ID NO: 158470 - DNA, 20 bp, Artificial Sequence
  Description of Artificial Sequence: Synthetic oligonucleotide
  Target: LAMA2; (+) strand; PAM type: NRG; PAM sequence: CAG
gcacttggctagtggtaacc

SEQ ID NO: 158471 - DNA, 20 bp, Artificial Sequence
  Description of Artificial Sequence: Synthetic oligonucleotide
  Target: LAMA2; (+) strand; PAM type: NRG; PAM sequence: AAG
taacccagcacacaaatatg

SEQ ID NO: 158472 - DNA, 20 bp, Artificial Sequence
  Description of Artificial Sequence: Synthetic oligonucleotide
  Target: LAMA2; (+) strand; PAM type: NRG; PAM sequence: AAG
atcttatctacttcatccca

SEQ ID NO: 158473 - DNA, 20 bp, Artificial Sequence
  Description of Artificial Sequence: Synthetic oligonucleotide
  Target: LAMA2; (+) strand; PAM type: NRG; PAM sequence: AGG
tcttatctacttcatcccaa

SEQ ID NO: 158474 - DNA, 20 bp, Artificial Sequence
  Description of Artificial Sequence: Synthetic oligonucleotide
  Target: LAMA2; (+) strand; PAM type: NRG; PAM sequence: AAG
cattttctccaaataccatt

SEQ ID NO: 158475 - DNA, 20 bp, Artificial Sequence
  Description of Artificial Sequence: Synthetic oligonucleotide
  Target: LAMA2; (+) strand; PAM type: NRG; PAM sequence: TAG
ctccaaataccattaagact

SEQ ID NO: 158476 - DNA, 20 bp, Artificial Sequence
  Description of Artificial Sequence: Synthetic oligonucleotide
  Target: LAMA2; (+) strand; PAM type: NRG; PAM sequence: GAG
ccaaataccattaagactta

SEQ ID NO: 158477 - DNA, 20 bp, Artificial Sequence
  Description of Artificial Sequence: Synthetic oligonucleotide
  Target: LAMA2; (+) strand; PAM type: NRG; PAM sequence: AAG
ttaagacttagagacctcta

SEQ ID NO: 158478 - DNA, 20 bp, Artificial Sequence
  Description of Artificial Sequence: Synthetic oligonucleotide
  Target: LAMA2; (+) strand; PAM type: NRG; PAM sequence: AAG
gacttagagacctctaaaga

SEQ ID NO: 158479 - DNA, 20 bp, Artificial Sequence
  Description of Artificial Sequence: Synthetic oligonucleotide
  Target: LAMA2; (+) strand; PAM type: NRG; PAM sequence: AGG
acttagagacctctaaagaa

SEQ ID NO: 158480 - DNA, 20 bp, Artificial Sequence
  Description of Artificial Sequence: Synthetic oligonucleotide
  Target: LAMA2; (+) strand; PAM type: NRG; PAM sequence: TGG
ctctaaagaaaggcacatac

SEQ ID NO: 158481 - DNA, 20 bp, Artificial Sequence
  Description of Artificial Sequence: Synthetic oligonucleotide
  Target: LAMA2; (+) strand; PAM type: NRG; PAM sequence: CAG
tggcatttccatacatatga

SEQ ID NO: 158482 - DNA, 20 bp, Artificial Sequence
  Description of Artificial Sequence: Synthetic oligonucleotide
  Target: LAMA2; (+) strand; PAM type: NRG; PAM sequence: CAG
ttcttactatcatttttatc

SEQ ID NO: 158483 - DNA, 20 bp, Artificial Sequence
  Description of Artificial Sequence: Synthetic oligonucleotide
  Target: LAMA2; (+) strand; PAM type: NRG; PAM sequence: GAG
tcatttttatccagaatgct

SEQ ID NO: 158484 - DNA, 20 bp, Artificial Sequence
  Description of Artificial Sequence: Synthetic oligonucleotide
  Target: LAMA2; (+) strand; PAM type: NRG; PAM sequence: TAG
tccagaatgctgagacccat

SEQ ID NO: 158485 - DNA, 20 bp, Artificial Sequence
  Description of Artificial Sequence: Synthetic oligonucleotide
  Target: LAMA2; (+) strand; PAM type: NRG; PAM sequence: TAG
tttcttctcgctgtcttcac

SEQ ID NO: 158486 - DNA, 20 bp, Artificial Sequence
  Description of Artificial Sequence: Synthetic oligonucleotide
  Target: LAMA2; (+) strand; PAM type: NRG; PAM sequence: AGG
ttcttctcgctgtcttcact

SEQ ID NO: 158487 - DNA, 20 bp, Artificial Sequence
  Description of Artificial Sequence: Synthetic oligonucleotide
  Target: LAMA2; (+) strand; PAM type: NRG; PAM sequence: AAG
ttctcgctgtcttcactagg

SEQ ID NO: 158488 - DNA, 20 bp, Artificial Sequence
  Description of Artificial Sequence: Synthetic oligonucleotide
  Target: LAMA2; (+) strand; PAM type: NRG; PAM sequence: AAG
ctgtcttcactaggaagatg

SEQ ID NO: 158489 - DNA, 20 bp, Artificial Sequence
  Description of Artificial Sequence: Synthetic oligonucleotide
  Target: LAMA2; (+) strand; PAM type: NRG; PAM sequence: AGG
tgtcttcactaggaagatga

SEQ ID NO: 158490 - DNA, 20 bp, Artificial Sequence
  Description of Artificial Sequence: Synthetic oligonucleotide
  Target: LAMA2; (+) strand; PAM type: NRG; PAM sequence: AAG
cactaggaagatgaaggcac

SEQ ID NO: 158491 - DNA, 20 bp, Artificial Sequence
  Description of Artificial Sequence: Synthetic oligonucleotide
  Target: LAMA2; (+) strand; PAM type: NRG; PAM sequence: TAG
taggaagatgaaggcacaag

SEQ ID NO: 158492 - DNA, 20 bp, Artificial Sequence
  Description of Artificial Sequence: Synthetic oligonucleotide
  Target: LAMA2; (+) strand; PAM type: NRG; PAM sequence: AAG
aaactcttcattcttctttt

SEQ ID NO: 158493 - DNA, 20 bp, Artificial Sequence
  Description of Artificial Sequence: Synthetic oligonucleotide
  Target: LAMA2; (+) strand; PAM type: NRG; PAM sequence: AAG
cattcttcttttaagaatat

SEQ ID NO: 158494 - DNA, 20 bp, Artificial Sequence
  Description of Artificial Sequence: Synthetic oligonucleotide
  Target: LAMA2; (+) strand; PAM type: NRG; PAM sequence: GAG
ttcttcttttaagaatataa

SEQ ID NO: 158495 - DNA, 20 bp, Artificial Sequence
  Description of Artificial Sequence: Synthetic oligonucleotide
  Target: LAMA2; (+) strand; PAM type: NRG; PAM sequence: AAG
ctttcacctttaaattatcc

SEQ ID NO: 158496 - DNA, 20 bp, Artificial Sequence
  Description of Artificial Sequence: Synthetic oligonucleotide
  Target: LAMA2; (+) strand; PAM type: NRG; PAM sequence: TGG
cctttaaattatccaagact

SEQ ID NO: 158497 - DNA, 20 bp, Artificial Sequence
  Description of Artificial Sequence: Synthetic oligonucleotide
  Target: LAMA2; (+) strand; PAM type: NRG; PAM sequence: TAG
aattatccaagacttggatt

SEQ ID NO: 158498 - DNA, 20 bp, Artificial Sequence
  Description of Artificial Sequence: Synthetic oligonucleotide
  Target: LAMA2; (+) strand; PAM type: NRG; PAM sequence: TGG
cttggatttagtaacatcct

SEQ ID NO: 158499 - DNA, 20 bp, Artificial Sequence
  Description of Artificial Sequence: Synthetic oligonucleotide
  Target: LAMA2; (+) strand; PAM type: NRG; PAM sequence: AAG
acatccttggtctttaaatc

SEQ ID NO: 158500 - DNA, 20 bp, Artificial Sequence
  Description of Artificial Sequence: Synthetic oligonucleotide
  Target: LAMA2; (+) strand; PAM type: NRG; PAM sequence: AAG
ccttggtctttaaatcaaga

SEQ ID NO: 158501 - DNA, 20 bp, Artificial Sequence
  Description of Artificial Sequence: Synthetic oligonucleotide
  Target: LAMA2; (+) strand; PAM type: NRG; PAM sequence: AGG
cttggtctttaaatcaagaa

SEQ ID NO: 158502 - DNA, 20 bp, Artificial Sequence
  Description of Artificial Sequence: Synthetic oligonucleotide
  Target: LAMA2; (+) strand; PAM type: NRG; PAM sequence: AAG
aatcaagaaaggcttttatg

SEQ ID NO: 158503 - DNA, 20 bp, Artificial Sequence
  Description of Artificial Sequence: Synthetic oligonucleotide
  Target: LAMA2; (+) strand; PAM type: NRG; PAM sequence: TAG
cttttatgaagcacctatat

SEQ ID NO: 158504 - DNA, 20 bp, Artificial Sequence
  Description of Artificial Sequence: Synthetic oligonucleotide
  Target: LAMA2; (+) strand; PAM type: NRG; PAM sequence: TAG
tgaagcacctatattagata

SEQ ID NO: 158505 - DNA, 20 bp, Artificial Sequence
  Description of Artificial Sequence: Synthetic oligonucleotide
  Target: LAMA2; (+) strand; PAM type: NRG; PAM sequence: AAG
tagatatagaactctgcaca

SEQ ID NO: 158506 - DNA, 20 bp, Artificial Sequence
  Description of Artificial Sequence: Synthetic oligonucleotide
  Target: LAMA2; (+) strand; PAM type: NRG; PAM sequence: CAG
tgtattttcctctaacttta

SEQ ID NO: 158507 - DNA, 20 bp, Artificial Sequence
  Description of Artificial Sequence: Synthetic oligonucleotide
  Target: LAMA2; (+) strand; PAM type: NRG; PAM sequence: TAG
attttcctctaactttacag

SEQ ID NO: 158508 - DNA, 20 bp, Artificial Sequence
  Description of Artificial Sequence: Synthetic oligonucleotide
  Target: LAMA2; (+) strand; PAM type: NRG; PAM sequence: TAG
tctaactttacagtagacat

SEQ ID NO: 158509 - DNA, 20 bp, Artificial Sequence
  Description of Artificial Sequence: Synthetic oligonucleotide
  Target: LAMA2; (+) strand; PAM type: NRG; PAM sequence: TAG
aactttacagtagacattag

SEQ ID NO: 158510 - DNA, 20 bp, Artificial Sequence
  Description of Artificial Sequence: Synthetic oligonucleotide
  Target: LAMA2; (+) strand; PAM type: NRG; PAM sequence: GAG
ctttacagtagacattagta

SEQ ID NO: 158511 - DNA, 20 bp, Artificial Sequence
  Description of Artificial Sequence: Synthetic oligonucleotide
  Target: LAMA2; (+) strand; PAM type: NRG; PAM sequence: TAG
caaatttccaatctcatcta

SEQ ID NO: 158512 - DNA, 20 bp, Artificial Sequence
  Description of Artificial Sequence: Synthetic oligonucleotide
  Target: LAMA2; (+) strand; PAM type: NRG; PAM sequence: AGG
aaatttccaatctcatctat

SEQ ID NO: 158513 - DNA, 20 bp, Artificial Sequence
  Description of Artificial Sequence: Synthetic oligonucleotide
  Target: LAMA2; (+) strand; PAM type: NRG; PAM sequence: GGG
aatttccaatctcatctata

SEQ ID NO: 158514 - DNA, 20 bp, Artificial Sequence
  Description of Artificial Sequence: Synthetic oligonucleotide
  Target: LAMA2; (+) strand; PAM type: NRG; PAM sequence: GGG
atttccaatctcatctatag

SEQ ID NO: 158515 - DNA, 20 bp, Artificial Sequence
  Description of Artificial Sequence: Synthetic oligonucleotide
  Target: LAMA2; (+) strand; PAM type: NRG; PAM sequence: TGG
atattgcatttctctaatcc

SEQ ID NO: 158516 - DNA, 20 bp, Artificial Sequence
  Description of Artificial Sequence: Synthetic oligonucleotide
  Target: LAMA2; (+) strand; PAM type: NRG; PAM sequence: GAG
attgcatttctctaatcctg

SEQ ID NO: 158517 - DNA, 20 bp, Artificial Sequence
  Description of Artificial Sequence: Synthetic oligonucleotide
  Target: LAMA2; (+) strand; PAM type: NRG; PAM sequence: AGG
ttgcatttctctaatcctgg

SEQ ID NO: 158518 - DNA, 20 bp, Artificial Sequence
  Description of Artificial Sequence: Synthetic oligonucleotide
  Target: LAMA2; (+) strand; PAM type: NRG; PAM sequence: GGG
tgcatttctctaatcctgga

SEQ ID NO: 158519 - DNA, 20 bp, Artificial Sequence
  Description of Artificial Sequence: Synthetic oligonucleotide
  Target: LAMA2; (+) strand; PAM type: NRG; PAM sequence: TAG
atttctctaatcctggaggg

SEQ ID NO: 158520 - DNA, 20 bp, Artificial Sequence
  Description of Artificial Sequence: Synthetic oligonucleotide
  Target: LAMA2; (+) strand; PAM type: NRG; PAM sequence: TGG
ggtagatgtgtcacatgact

SEQ ID NO: 158521 - DNA, 20 bp, Artificial Sequence
  Description of Artificial Sequence: Synthetic oligonucleotide
  Target: LAMA2; (+) strand; PAM type: NRG; PAM sequence: TAG
atgtgtcacatgacttggtt

SEQ ID NO: 158522 - DNA, 20 bp, Artificial Sequence
  Description of Artificial Sequence: Synthetic oligonucleotide
  Target: LAMA2; (+) strand; PAM type: NRG; PAM sequence: TGG
ttggtttagccaatgaaatg

SEQ ID NO: 158523 - DNA, 20 bp, Artificial Sequence
  Description of Artificial Sequence: Synthetic oligonucleotide
  Target: LAMA2; (+) strand; PAM type: NRG; PAM sequence: TAG
gtttagccaatgaaatgtgg

SEQ ID NO: 158524 - DNA, 20 bp, Artificial Sequence
  Description of Artificial Sequence: Synthetic oligonucleotide
  Target: LAMA2; (+) strand; PAM type: NRG; PAM sequence: GAG
gatgtatttttttttttcct

SEQ ID NO: 158525 - DNA, 20 bp, Artificial Sequence
  Description of Artificial Sequence: Synthetic oligonucleotide
  Target: LAMA2; (+) strand; PAM type: NRG; PAM sequence: AGG
atgtatttttttttttcctg

SEQ ID NO: 158526 - DNA, 20 bp, Artificial Sequence
  Description of Artificial Sequence: Synthetic oligonucleotide
  Target: LAMA2; (+) strand; PAM type: NRG; PAM sequence: GAG
aaacattgaatttccaatgt

SEQ ID NO: 158527 - DNA, 20 bp, Artificial Sequence
  Description of Artificial Sequence: Synthetic oligonucleotide
  Target: LAMA2; (+) strand; PAM type: NRG; PAM sequence: CAG
ttccaatgtgagactctctg

SEQ ID NO: 158528 - DNA, 20 bp, Artificial Sequence
  Description of Artificial Sequence: Synthetic oligonucleotide
  Target: LAMA2; (+) strand; PAM type: NRG; PAM sequence: CAG
gagactctctgcagcttact

SEQ ID NO: 158529 - DNA, 20 bp, Artificial Sequence
  Description of Artificial Sequence: Synthetic oligonucleotide
  Target: LAMA2; (+) strand; PAM type: NRG; PAM sequence: CAG
tctgcagcttactcagcaat

SEQ ID NO: 158530 - DNA, 20 bp, Artificial Sequence
  Description of Artificial Sequence: Synthetic oligonucleotide
  Target: LAMA2; (+) strand; PAM type: NRG; PAM sequence: AAG
gcagcttactcagcaatcag

SEQ ID NO: 158531 - DNA, 20 bp, Artificial Sequence
  Description of Artificial Sequence: Synthetic oligonucleotide
  Target: LAMA2; (+) strand; PAM type: NRG; PAM sequence: CAG
gcaatcagaagattaaaaaa

SEQ ID NO: 158532 - DNA, 20 bp, Artificial Sequence
  Description of Artificial Sequence: Synthetic oligonucleotide
  Target: LAMA2; (+) strand; PAM type: NRG; PAM sequence: TGG
cagaagattaaaaaacagcc

SEQ ID NO: 158533 - DNA, 20 bp, Artificial Sequence
  Description of Artificial Sequence: Synthetic oligonucleotide
  Target: LAMA2; (+) strand; PAM type: NRG; PAM sequence: GGG
agaagattaaaaaacagcct

SEQ ID NO: 158534 - DNA, 20 bp, Artificial Sequence
  Description of Artificial Sequence: Synthetic oligonucleotide
  Target: LAMA2; (+) strand; PAM type: NRG; PAM sequence: GGG
gaagattaaaaaacagcctg

SEQ ID NO: 158535 - DNA, 20 bp, Artificial Sequence
  Description of Artificial Sequence: Synthetic oligonucleotide
  Target: LAMA2; (+) strand; PAM type: NRG; PAM sequence: CGG
attaaaaaacagcctggggc

SEQ ID NO: 158536 - DNA, 20 bp, Artificial Sequence
  Description of Artificial Sequence: Synthetic oligonucleotide
  Target: LAMA2; (+) strand; PAM type: NRG; PAM sequence: GGG
ttaaaaaacagcctggggcc

SEQ ID NO: 158537 - DNA, 20 bp, Artificial Sequence
  Description of Artificial Sequence: Synthetic oligonucleotide
  Target: LAMA2; (+) strand; PAM type: NRG; PAM sequence: CGG
aaacagcctggggccgggca

SEQ ID NO: 158538 - DNA, 20 bp, Artificial Sequence
  Description of Artificial Sequence: Synthetic oligonucleotide
  Target: LAMA2; (+) strand; PAM type: NRG; PAM sequence: TGG
cagcctggggccgggcacgg

SEQ ID NO: 158539 - DNA, 20 bp, Artificial Sequence
  Description of Artificial Sequence: Synthetic oligonucleotide
  Target: LAMA2; (+) strand; PAM type: NRG; PAM sequence: CAG
gtggctcatgcctgtaatcc

SEQ ID NO: 158540 - DNA, 20 bp, Artificial Sequence
  Description of Artificial Sequence: Synthetic oligonucleotide
  Target: LAMA2; (+) strand; PAM type: NRG; PAM sequence: TGG
tgcctgtaatcccagcaatt

SEQ ID NO: 158541 - DNA, 20 bp, Artificial Sequence
  Description of Artificial Sequence: Synthetic oligonucleotide
  Target: LAMA2; (+) strand; PAM type: NRG; PAM sequence: GGG
gcctgtaatcccagcaattt

SEQ ID NO: 158542 - DNA, 20 bp, Artificial Sequence
  Description of Artificial Sequence: Synthetic oligonucleotide
  Target: LAMA2; (+) strand; PAM type: NRG; PAM sequence: GAG
ctgtaatcccagcaatttgg

SEQ ID NO: 158543 - DNA, 20 bp, Artificial Sequence
  Description of Artificial Sequence: Synthetic oligonucleotide
  Target: LAMA2; (+) strand; PAM type: NRG; PAM sequence: AGG
tgtaatcccagcaatttggg

SEQ ID NO: 158544 - DNA, 20 bp, Artificial Sequence
  Description of Artificial Sequence: Synthetic oligonucleotide
  Target: LAMA2; (+) strand; PAM type: NRG; PAM sequence: GAG
tcccagcaatttgggaggct

SEQ ID NO: 158545 - DNA, 20 bp, Artificial Sequence
  Description of Artificial Sequence: Synthetic oligonucleotide
  Target: LAMA2; (+) strand; PAM type: NRG; PAM sequence: AGG
cccagcaatttgggaggctg

SEQ ID NO: 158546 - DNA, 20 bp, Artificial Sequence
  Description of Artificial Sequence: Synthetic oligonucleotide
  Target: LAMA2; (+) strand; PAM type: NRG; PAM sequence: CAG
agcaatttgggaggctgagg

SEQ ID NO: 158547 - DNA, 20 bp, Artificial Sequence
  Description of Artificial Sequence: Synthetic oligonucleotide
  Target: LAMA2; (+) strand; PAM type: NRG; PAM sequence: AGG
gcaatttgggaggctgaggc

SEQ ID NO: 158548 - DNA, 20 bp, Artificial Sequence
  Description of Artificial Sequence: Synthetic oligonucleotide
  Target: LAMA2; (+) strand; PAM type: NRG; PAM sequence: CAG
atttgggaggctgaggcagg

SEQ ID NO: 158549 - DNA, 20 bp, Artificial Sequence
  Description of Artificial Sequence: Synthetic oligonucleotide
  Target: LAMA2; (+) strand; PAM type: NRG; PAM sequence: GAG
ggctgaggcaggcagatcac

SEQ ID NO: 158550 - DNA, 20 bp, Artificial Sequence
  Description of Artificial Sequence: Synthetic oligonucleotide
  Target: LAMA2; (+) strand; PAM type: NRG; PAM sequence: AGG
gctgaggcaggcagatcacg

SEQ ID NO: 158551 - DNA, 20 bp, Artificial Sequence
  Description of Artificial Sequence: Synthetic oligonucleotide
  Target: LAMA2; (+) strand; PAM type: NRG; PAM sequence: CAG
aggcaggcagatcacgaggt

SEQ ID NO: 158552 - DNA, 20 bp, Artificial Sequence
  Description of Artificial Sequence: Synthetic oligonucleotide
  Target: LAMA2; (+) strand; PAM type: NRG; PAM sequence: GAG
gatcacgaggtcagttgttc

SEQ ID NO: 158553 - DNA, 20 bp, Artificial Sequence
  Description of Artificial Sequence: Synthetic oligonucleotide
  Target: LAMA2; (+) strand; PAM type: NRG; PAM sequence: CAG
cgaggtcagttgttcgagac

SEQ ID NO: 158554 - DNA, 20 bp, Artificial Sequence
  Description of Artificial Sequence: Synthetic oligonucleotide
  Target: LAMA2; (+) strand; PAM type: NRG; PAM sequence: TGG
cgagaccagcctgaccaaca

SEQ ID NO: 158555 - DNA, 20 bp, Artificial Sequence
  Description of Artificial Sequence: Synthetic oligonucleotide
  Target: LAMA2; (+) strand; PAM type: NRG; PAM sequence: TAG
tctactaaaaataccaaaat

SEQ ID NO: 158556 - DNA, 20 bp, Artificial Sequence
  Description of Artificial Sequence: Synthetic oligonucleotide
  Target: LAMA2; (+) strand; PAM type: NRG; PAM sequence: CAG
ctaaaaataccaaaattagc

SEQ ID NO: 158557 - DNA, 20 bp, Artificial Sequence
  Description of Artificial Sequence: Synthetic oligonucleotide
  Target: LAMA2; (+) strand; PAM type: NRG; PAM sequence: TGG
ataccaaaattagccagaca

SEQ ID NO: 158558 - DNA, 20 bp, Artificial Sequence
  Description of Artificial Sequence: Synthetic oligonucleotide
  Target: LAMA2; (+) strand; PAM type: NRG; PAM sequence: TGG
ccaaaattagccagacatgg

SEQ ID NO: 158559 - DNA, 20 bp, Artificial Sequence
  Description of Artificial Sequence: Synthetic oligonucleotide
  Target: LAMA2; (+) strand; PAM type: NRG; PAM sequence: CAG
ccagacatggtggcacgtgt

SEQ ID NO: 158560 - DNA, 20 bp, Artificial Sequence
  Description of Artificial Sequence: Synthetic oligonucleotide
  Target: LAMA2; (+) strand; PAM type: NRG; PAM sequence: CAG
gtggcacgtgtcagtaatcc

SEQ ID NO: 158561 - DNA, 20 bp, Artificial Sequence
  Description of Artificial Sequence: Synthetic oligonucleotide
  Target: LAMA2; (+) strand; PAM type: NRG; PAM sequence: CAG
tgtcagtaatcccagctact

SEQ ID NO: 158562 - DNA, 20 bp, Artificial Sequence
  Description of Artificial Sequence: Synthetic oligonucleotide
  Target: LAMA2; (+) strand; PAM type: NRG; PAM sequence: AGG
gtcagtaatcccagctactc

SEQ ID NO: 158563 - DNA, 20 bp, Artificial Sequence
  Description of Artificial Sequence: Synthetic oligonucleotide
  Target: LAMA2; (+) strand; PAM type: NRG; PAM sequence: GAG
cagtaatcccagctactcag

SEQ ID NO: 158564 - DNA, 20 bp, Artificial Sequence
  Description of Artificial Sequence: Synthetic oligonucleotide
  Target: LAMA2; (+) strand; PAM type: NRG; PAM sequence: AGG
agtaatcccagctactcagg

SEQ ID NO: 158565 - DNA, 20 bp, Artificial Sequence
  Description of Artificial Sequence: Synthetic oligonucleotide
  Target: LAMA2; (+) strand; PAM type: NRG; PAM sequence: GAG
tcccagctactcaggaggct

SEQ ID NO: 158566 - DNA, 20 bp, Artificial Sequence
  Description of Artificial Sequence: Synthetic oligonucleotide
  Target: LAMA2; (+) strand; PAM type: NRG; PAM sequence: AGG
cccagctactcaggaggctg

SEQ ID NO: 158567 - DNA, 20 bp, Artificial Sequence
  Description of Artificial Sequence: Synthetic oligonucleotide
  Target: LAMA2; (+) strand; PAM type: NRG; PAM sequence: CAG
agctactcaggaggctgagg

SEQ ID NO: 158568 - DNA, 20 bp, Artificial Sequence
  Description of Artificial Sequence: Synthetic oligonucleotide
  Target: LAMA2; (+) strand; PAM type: NRG; PAM sequence: TAG
tactcaggaggctgaggcag

SEQ ID NO: 158569 - DNA, 20 bp, Artificial Sequence
  Description of Artificial Sequence: Synthetic oligonucleotide
  Target: LAMA2; (+) strand; PAM type: NRG; PAM sequence: CGG
gcagtagaatcacttgaacc

SEQ ID NO: 158570 - DNA, 20 bp, Artificial Sequence
  Description of Artificial Sequence: Synthetic oligonucleotide
  Target: LAMA2; (+) strand; PAM type: NRG; PAM sequence: GGG
cagtagaatcacttgaaccc

SEQ ID NO: 158571 - DNA, 20 bp, Artificial Sequence
  Description of Artificial Sequence: Synthetic oligonucleotide
  Target: LAMA2; (+) strand; PAM type: NRG; PAM sequence: TGG
aatcacttgaacccgggatg

SEQ ID NO: 158572 - DNA, 20 bp, Artificial Sequence
  Description of Artificial Sequence: Synthetic oligonucleotide
  Target: LAMA2; (+) strand; PAM type: NRG; PAM sequence: GAG
tcacttgaacccgggatgtg

SEQ ID NO: 158573 - DNA, 20 bp, Artificial Sequence
  Description of Artificial Sequence: Synthetic oligonucleotide
  Target: LAMA2; (+) strand; PAM type: NRG; PAM sequence: AGG
cacttgaacccgggatgtgg

SEQ ID NO: 158574 - DNA, 20 bp, Artificial Sequence
  Description of Artificial Sequence: Synthetic oligonucleotide
  Target: LAMA2; (+) strand; PAM type: NRG; PAM sequence: CAG
aacccgggatgtggaggttg

SEQ ID NO: 158575 - DNA, 20 bp, Artificial Sequence
  Description of Artificial Sequence: Synthetic oligonucleotide
  Target: LAMA2; (+) strand; PAM type: NRG; PAM sequence: GAG
cgggatgtggaggttgcagt

SEQ ID NO: 158576 - DNA, 20 bp, Artificial Sequence
  Description of Artificial Sequence: Synthetic oligonucleotide
  Target: LAMA2; (+) strand; PAM type: NRG; PAM sequence: GAG
tgtggaggttgcagtgagcc

SEQ ID NO: 158577 - DNA, 20 bp, Artificial Sequence
  Description of Artificial Sequence: Synthetic oligonucleotide
  Target: LAMA2; (+) strand; PAM type: NRG; PAM sequence: CAG
gagatcgcgccattgcactc

SEQ ID NO: 158578 - DNA, 20 bp, Artificial Sequence
  Description of Artificial Sequence: Synthetic oligonucleotide
  Target: LAMA2; (+) strand; PAM type: NRG; PAM sequence: TGG
cgcgccattgcactccagcc

SEQ ID NO: 158579 - DNA, 20 bp, Artificial Sequence
  Description of Artificial Sequence: Synthetic oligonucleotide
  Target: LAMA2; (+) strand; PAM type: NRG; PAM sequence: GGG
gcgccattgcactccagcct

SEQ ID NO: 158580 - DNA, 20 bp, Artificial Sequence
  Description of Artificial Sequence: Synthetic oligonucleotide
  Target: LAMA2; (+) strand; PAM type: NRG; PAM sequence: CAG
ttgcactccagcctgggtga

SEQ ID NO: 158581 - DNA, 20 bp, Artificial Sequence
  Description of Artificial Sequence: Synthetic oligonucleotide
  Target: LAMA2; (+) strand; PAM type: NRG; PAM sequence: GAG
gcactccagcctgggtgaca

SEQ ID NO: 158582 - DNA, 20 bp, Artificial Sequence
  Description of Artificial Sequence: Synthetic oligonucleotide
  Target: LAMA2; (+) strand; PAM type: NRG; PAM sequence: AGG
cactccagcctgggtgacag

SEQ ID NO: 158583 - DNA, 20 bp, Artificial Sequence
  Description of Artificial Sequence: Synthetic oligonucleotide
  Target: LAMA2; (+) strand; PAM type: NRG; PAM sequence: GGG
actccagcctgggtgacaga

SEQ ID NO: 158584 - DNA, 20 bp, Artificial Sequence
  Description of Artificial Sequence: Synthetic oligonucleotide
  Target: LAMA2; (+) strand; PAM type: NRG; PAM sequence: GAG
tccagcctgggtgacagagg

SEQ ID NO: 158585 - DNA, 20 bp, Artificial Sequence
  Description of Artificial Sequence: Synthetic oligonucleotide
  Target: LAMA2; (+) strand; PAM type: NRG; PAM sequence: AAG
aaaaaaaaaaaaaaaaaaaa

SEQ ID NO: 158586 - DNA, 20 bp, Artificial Sequence
  Description of Artificial Sequence: Synthetic oligonucleotide
  Target: LAMA2; (+) strand; PAM type: NRG; PAM sequence: TGG
aaaaaaaaaaaaaaaaagcc

SEQ ID NO: 158587 - DNA, 20 bp, Artificial Sequence
  Description of Artificial Sequence: Synthetic oligonucleotide
  Target: LAMA2; (+) strand; PAM type: NRG; PAM sequence: TAG
aaaagcctggaatactgatt

SEQ ID NO: 158588 - DNA, 20 bp, Artificial Sequence
  Description of Artificial Sequence: Synthetic oligonucleotide
  Target: LAMA2; (+) strand; PAM type: NRG; PAM sequence: CAG
tggaatactgatttagcaca

SEQ ID NO: 158589 - DNA, 20 bp, Artificial Sequence
  Description of Artificial Sequence: Synthetic oligonucleotide
  Target: LAMA2; (+) strand; PAM type: NRG; PAM sequence: GAG
gaatactgatttagcacaca

SEQ ID NO: 158590 - DNA, 20 bp, Artificial Sequence
  Description of Artificial Sequence: Synthetic oligonucleotide
  Target: LAMA2; (+) strand; PAM type: NRG; PAM sequence: AGG
aatactgatttagcacacag

SEQ ID NO: 158591 - DNA, 20 bp, Artificial Sequence
  Description of Artificial Sequence: Synthetic oligonucleotide
  Target: LAMA2; (+) strand; PAM type: NRG; PAM sequence: CAG
ctgatttagcacacagaggt

SEQ ID NO: 158592 - DNA, 20 bp, Artificial Sequence
  Description of Artificial Sequence: Synthetic oligonucleotide
  Target: LAMA2; (+) strand; PAM type: NRG; PAM sequence: CAG
acagaggtcagctgccctaa

SEQ ID NO: 158593 - DNA, 20 bp, Artificial Sequence
  Description of Artificial Sequence: Synthetic oligonucleotide
  Target: LAMA2; (+) strand; PAM type: NRG; PAM sequence: CAG
cagctgccctaacagtcacc

SEQ ID NO: 158594 - DNA, 20 bp, Artificial Sequence
  Description of Artificial Sequence: Synthetic oligonucleotide
  Target: LAMA2; (+) strand; PAM type: NRG; PAM sequence: AGG
agctgccctaacagtcaccc

SEQ ID NO: 158595 - DNA, 20 bp, Artificial Sequence
  Description of Artificial Sequence: Synthetic oligonucleotide
  Target: LAMA2; (+) strand; PAM type: NRG; PAM sequence: TAG
ctaacagtcacccaggcctg

SEQ ID NO: 158596 - DNA, 20 bp, Artificial Sequence
  Description of Artificial Sequence: Synthetic oligonucleotide
  Target: LAMA2; (+) strand; PAM type: NRG; PAM sequence: GAG
aacagtcacccaggcctgta

SEQ ID NO: 158597 - DNA, 20 bp, Artificial Sequence
  Description of Artificial Sequence: Synthetic oligonucleotide
  Target: LAMA2; (+) strand; PAM type: NRG; PAM sequence: AGG
acagtcacccaggcctgtag

SEQ ID NO: 158598 - DNA, 20 bp, Artificial Sequence
  Description of Artificial Sequence: Synthetic oligonucleotide
  Target: LAMA2; (+) strand; PAM type: NRG; PAM sequence: GAG
gcctgtagaggattttacat

SEQ ID NO: 158599 - DNA, 20 bp, Artificial Sequence
  Description of Artificial Sequence: Synthetic oligonucleotide
  Target: LAMA2; (+) strand; PAM type: NRG; PAM sequence: AAG
gtagaggattttacatgagt

SEQ ID NO: 158600 - DNA, 20 bp, Artificial Sequence
  Description of Artificial Sequence: Synthetic oligonucleotide
  Target: LAMA2; (+) strand; PAM type: NRG; PAM sequence: AAG
gtaagcctttgttttctgtt

SEQ ID NO: 158601 - DNA, 20 bp, Artificial Sequence
  Description of Artificial Sequence: Synthetic oligonucleotide
  Target: LAMA2; (+) strand; PAM type: NRG; PAM sequence: GAG
ttgttttctgttaagccatt

SEQ ID NO: 158602 - DNA, 20 bp, Artificial Sequence
  Description of Artificial Sequence: Synthetic oligonucleotide
  Target: LAMA2; (+) strand; PAM type: NRG; PAM sequence: TGG
ctgttaagccattgagattt

SEQ ID NO: 158603 - DNA, 20 bp, Artificial Sequence
  Description of Artificial Sequence: Synthetic oligonucleotide
  Target: LAMA2; (+) strand; PAM type: NRG; PAM sequence: GAG
gttaagccattgagattttg

SEQ ID NO: 158604 - DNA, 20 bp, Artificial Sequence
  Description of Artificial Sequence: Synthetic oligonucleotide
  Target: LAMA2; (+) strand; PAM type: NRG; PAM sequence: CAG
agattttggagttgttacca

SEQ ID NO: 158605 - DNA, 20 bp, Artificial Sequence
  Description of Artificial Sequence: Synthetic oligonucleotide
  Target: LAMA2; (+) strand; PAM type: NRG; PAM sequence: GAG
gttgttaccacagcataacc

SEQ ID NO: 158606 - DNA, 20 bp, Artificial Sequence
  Description of Artificial Sequence: Synthetic oligonucleotide
  Target: LAMA2; (+) strand; PAM type: NRG; PAM sequence: GAG
ttcatcacgatataactcat

SEQ ID NO: 158607 - DNA, 20 bp, Artificial Sequence
  Description of Artificial Sequence: Synthetic oligonucleotide
  Target: LAMA2; (+) strand; PAM type: NRG; PAM sequence: CAG
gtattgcttgaaaataaata

SEQ ID NO: 158608 - DNA, 20 bp, Artificial Sequence
  Description of Artificial Sequence: Synthetic oligonucleotide
  Target: LAMA2; (+) strand; PAM type: NRG; PAM sequence: AAG
aataaatacagaatcttttc

SEQ ID NO: 158609 - DNA, 20 bp, Artificial Sequence
  Description of Artificial Sequence: Synthetic oligonucleotide
  Target: LAMA2; (+) strand; PAM type: NRG; PAM sequence: AGG
ataaatacagaatcttttca

SEQ ID NO: 158610 - DNA, 20 bp, Artificial Sequence
  Description of Artificial Sequence: Synthetic oligonucleotide
  Target: LAMA2; (+) strand; PAM type: NRG; PAM sequence: AAG
atacagaatcttttcaaggc

SEQ ID NO: 158611 - DNA, 20 bp, Artificial Sequence
  Description of Artificial Sequence: Synthetic oligonucleotide
  Target: LAMA2; (+) strand; PAM type: NRG; PAM sequence: TAG
agatatttttacacaacttt

SEQ ID NO: 158612 - DNA, 20 bp, Artificial Sequence
  Description of Artificial Sequence: Synthetic oligonucleotide
  Target: LAMA2; (+) strand; PAM type: NRG; PAM sequence: CGG
aacttttagtgtaaattttg

SEQ ID NO: 158613 - DNA, 20 bp, Artificial Sequence
  Description of Artificial Sequence: Synthetic oligonucleotide
  Target: LAMA2; (+) strand; PAM type: NRG; PAM sequence: TGG
ttagtgtaaattttgcggtt

SEQ ID NO: 158614 - DNA, 20 bp, Artificial Sequence
  Description of Artificial Sequence: Synthetic oligonucleotide
  Target: LAMA2; (+) strand; PAM type: NRG; PAM sequence: GGG
tagtgtaaattttgcggttt

SEQ ID NO: 158615 - DNA, 20 bp, Artificial Sequence
  Description of Artificial Sequence: Synthetic oligonucleotide
  Target: LAMA2; (+) strand; PAM type: NRG; PAM sequence: AAG
tttgcggtttgggatcaaaa

SEQ ID NO: 158616 - DNA, 20 bp, Artificial Sequence
  Description of Artificial Sequence: Synthetic oligonucleotide
  Target: LAMA2; (+) strand; PAM type: NRG; PAM sequence: CAG
tgggatcaaaaaagattata

SEQ ID NO: 158617 - DNA, 20 bp, Artificial Sequence
  Description of Artificial Sequence: Synthetic oligonucleotide
  Target: LAMA2; (+) strand; PAM type: NRG; PAM sequence: TAG
aatttatataataaataatc

SEQ ID NO: 158618 - DNA, 20 bp, Artificial Sequence
  Description of Artificial Sequence: Synthetic oligonucleotide
  Target: LAMA2; (+) strand; PAM type: NRG; PAM sequence: AAG
gaaaaattcctttgtaaaca

SEQ ID NO: 158619 - DNA, 20 bp, Artificial Sequence
  Description of Artificial Sequence: Synthetic oligonucleotide
  Target: LAMA2; (+) strand; PAM type: NRG; PAM sequence: AGG
aaaaattcctttgtaaacaa

SEQ ID NO: 158620 - DNA, 20 bp, Artificial Sequence
  Description of Artificial Sequence: Synthetic oligonucleotide
  Target: LAMA2; (+) strand; PAM type: NRG; PAM sequence: GAG
aaattcctttgtaaacaaag

SEQ ID NO: 158621 - DNA, 20 bp, Artificial Sequence
  Description of Artificial Sequence: Synthetic oligonucleotide
  Target: LAMA2; (+) strand; PAM type: NRG; PAM sequence: TAG
aaaggagtctttgataatca

SEQ ID NO: 158622 - DNA, 20 bp, Artificial Sequence
  Description of Artificial Sequence: Synthetic oligonucleotide
  Target: LAMA2; (+) strand; PAM type: NRG; PAM sequence: TAG
gtctttgataatcatagaaa

SEQ ID NO: 158623 - DNA, 20 bp, Artificial Sequence
  Description of Artificial Sequence: Synthetic oligonucleotide
  Target: LAMA2; (+) strand; PAM type: NRG; PAM sequence: TAG
aatcatagaaatagtattga

SEQ ID NO: 158624 - DNA, 20 bp, Artificial Sequence
  Description of Artificial Sequence: Synthetic oligonucleotide
  Target: LAMA2; (+) strand; PAM type: NRG; PAM sequence: AGG
atcatagaaatagtattgat

SEQ ID NO: 158625 - DNA, 20 bp, Artificial Sequence
  Description of Artificial Sequence: Synthetic oligonucleotide
  Target: LAMA2; (+) strand; PAM type: NRG; PAM sequence: CAG
aaatagtattgataggtaca

SEQ ID NO: 158626 - DNA, 20 bp, Artificial Sequence
  Description of Artificial Sequence: Synthetic oligonucleotide
  Target: LAMA2; (+) strand; PAM type: NRG; PAM sequence: AAG
cagtatacctctgccttctg

SEQ ID NO: 158627 - DNA, 20 bp, Artificial Sequence
  Description of Artificial Sequence: Synthetic oligonucleotide
  Target: LAMA2; (+) strand; PAM type: NRG; PAM sequence: TGG
gccttctgaagttaatgatt

SEQ ID NO: 158628 - DNA, 20 bp, Artificial Sequence
  Description of Artificial Sequence: Synthetic oligonucleotide
  Target: LAMA2; (+) strand; PAM type: NRG; PAM sequence: GGG
ccttctgaagttaatgattt

SEQ ID NO: 158629 - DNA, 20 bp, Artificial Sequence
  Description of Artificial Sequence: Synthetic oligonucleotide
  Target: LAMA2; (+) strand; PAM type: NRG; PAM sequence: AAG
atttgggtaactacattttg

SEQ ID NO: 158630 - DNA, 20 bp, Artificial Sequence
  Description of Artificial Sequence: Synthetic oligonucleotide
  Target: LAMA2; (+) strand; PAM type: NRG; PAM sequence: TAG
agacattttactgataacac

SEQ ID NO: 158631 - DNA, 20 bp, Artificial Sequence
  Description of Artificial Sequence: Synthetic oligonucleotide
  Target: LAMA2; (+) strand; PAM type: NRG; PAM sequence: AGG
gacattttactgataacact

SEQ ID NO: 158632 - DNA, 20 bp, Artificial Sequence
  Description of Artificial Sequence: Synthetic oligonucleotide
  Target: LAMA2; (+) strand; PAM type: NRG; PAM sequence: AAG
tgataacactaggacttaaa

SEQ ID NO: 158633 - DNA, 20 bp, Artificial Sequence
  Description of Artificial Sequence: Synthetic oligonucleotide
  Target: LAMA2; (+) strand; PAM type: NRG; PAM sequence: CAG
aggacttaaaaagatttttg

SEQ ID NO: 158634 - DNA, 20 bp, Artificial Sequence
  Description of Artificial Sequence: Synthetic oligonucleotide
  Target: LAMA2; (+) strand; PAM type: NRG; PAM sequence: TGG
aaagatttttgcagctcact

SEQ ID NO: 158635 - DNA, 20 bp, Artificial Sequence
  Description of Artificial Sequence: Synthetic oligonucleotide
  Target: LAMA2; (+) strand; PAM type: NRG; PAM sequence: CGG
tttgcagctcacttggcatc

SEQ ID NO: 158636 - DNA, 20 bp, Artificial Sequence
  Description of Artificial Sequence: Synthetic oligonucleotide
  Target: LAMA2; (+) strand; PAM type: NRG; PAM sequence: TGG
ctcacttggcatccggccat

SEQ ID NO: 158637 - DNA, 20 bp, Artificial Sequence
  Description of Artificial Sequence: Synthetic oligonucleotide
  Target: LAMA2; (+) strand; PAM type: NRG; PAM sequence: AAG
cttggcatccggccattggt

SEQ ID NO: 158638 - DNA, 20 bp, Artificial Sequence
  Description of Artificial Sequence: Synthetic oligonucleotide
  Target: LAMA2; (+) strand; PAM type: NRG; PAM sequence: GAG
tggcatccggccattggtaa

SEQ ID NO: 158639 - DNA, 20 bp, Artificial Sequence
  Description of Artificial Sequence: Synthetic oligonucleotide
  Target: LAMA2; (+) strand; PAM type: NRG; PAM sequence: AGG
ggcatccggccattggtaag

SEQ ID NO: 158640 - DNA, 20 bp, Artificial Sequence
  Description of Artificial Sequence: Synthetic oligonucleotide
  Target: LAMA2; (+) strand; PAM type: NRG; PAM sequence: CAG
ccggccattggtaagaggtg

SEQ ID NO: 158641 - DNA, 20 bp, Artificial Sequence
  Description of Artificial Sequence: Synthetic oligonucleotide
  Target: LAMA2; (+) strand; PAM type: NRG; PAM sequence: AAG
acctcccaatgctattccat

SEQ ID NO: 158642 - DNA, 20 bp, Artificial Sequence
  Description of Artificial Sequence: Synthetic oligonucleotide
  Target: LAMA2; (+) strand; PAM type: NRG; PAM sequence: TGG
caatgctattccataagtgt

SEQ ID NO: 158643 - DNA, 20 bp, Artificial Sequence
  Description of Artificial Sequence: Synthetic oligonucleotide
  Target: LAMA2; (+) strand; PAM type: NRG; PAM sequence: CAG
ccataagtgttggattcgtt

SEQ ID NO: 158644 - DNA, 20 bp, Artificial Sequence
  Description of Artificial Sequence: Synthetic oligonucleotide
  Target: LAMA2; (+) strand; PAM type: NRG; PAM sequence: GAG
tcagtctgcaaatatttact

SEQ ID NO: 158645 - DNA, 20 bp, Artificial Sequence
  Description of Artificial Sequence: Synthetic oligonucleotide
  Target: LAMA2; (+) strand; PAM type: NRG; PAM sequence: CAG
atgattatctctgtaaatct

SEQ ID NO: 158646 - DNA, 20 bp, Artificial Sequence
  Description of Artificial Sequence: Synthetic oligonucleotide
  Target: LAMA2; (+) strand; PAM type: NRG; PAM sequence: TGG
tcagttcctcttgtatacaa

SEQ ID NO: 158647 - DNA, 20 bp, Artificial Sequence
  Description of Artificial Sequence: Synthetic oligonucleotide
  Target: LAMA2; (+) strand; PAM type: NRG; PAM sequence: CAG
gttcctcttgtatacaatgg

SEQ ID NO: 158648 - DNA, 20 bp, Artificial Sequence
  Description of Artificial Sequence: Synthetic oligonucleotide
  Target: LAMA2; (+) strand; PAM type: NRG; PAM sequence: TGG
aacaatgtctaaatttcaat

SEQ ID NO: 158649 - DNA, 20 bp, Artificial Sequence
  Description of Artificial Sequence: Synthetic oligonucleotide
  Target: LAMA2; (+) strand; PAM type: NRG; PAM sequence: AAG
ctaaatttcaattggcaatt

SEQ ID NO: 158650 - DNA, 20 bp, Artificial Sequence
  Description of Artificial Sequence: Synthetic oligonucleotide
  Target: LAMA2; (+) strand; PAM type: NRG; PAM sequence: AAG
gtgaaaacataatgtatgtt

SEQ ID NO: 158651 - DNA, 20 bp, Artificial Sequence
  Description of Artificial Sequence: Synthetic oligonucleotide
  Target: LAMA2; (+) strand; PAM type: NRG; PAM sequence: TAG
tgtatgttaagcacctgaaa

SEQ ID NO: 158652 - DNA, 20 bp, Artificial Sequence
  Description of Artificial Sequence: Synthetic oligonucleotide
  Target: LAMA2; (+) strand; PAM type: NRG; PAM sequence: TGG
aaatagtatctaacatatgt

SEQ ID NO: 158653 - DNA, 20 bp, Artificial Sequence
  Description of Artificial Sequence: Synthetic oligonucleotide
  Target: LAMA2; (+) strand; PAM type: NRG; PAM sequence: GGG
aatagtatctaacatatgtt

SEQ ID NO: 158654 - DNA, 20 bp, Artificial Sequence
  Description of Artificial Sequence: Synthetic oligonucleotide
  Target: LAMA2; (+) strand; PAM type: NRG; PAM sequence: GAG
tagtatctaacatatgttgg

SEQ ID NO: 158655 - DNA, 20 bp, Artificial Sequence
  Description of Artificial Sequence: Synthetic oligonucleotide
  Target: LAMA2; (+) strand; PAM type: NRG; PAM sequence: AGG
agtatctaacatatgttggg

SEQ ID NO: 158656 - DNA, 20 bp, Artificial Sequence
  Description of Artificial Sequence: Synthetic oligonucleotide
  Target: LAMA2; (+) strand; PAM type: NRG; PAM sequence: CAG
acatatgttgggaggcaatg

SEQ ID NO: 158657 - DNA, 20 bp, Artificial Sequence
  Description of Artificial Sequence: Synthetic oligonucleotide
  Target: LAMA2; (+) strand; PAM type: NRG; PAM sequence: AGG
catatgttgggaggcaatgc

SEQ ID NO: 158658 - DNA, 20 bp, Artificial Sequence
  Description of Artificial Sequence: Synthetic oligonucleotide
  Target: LAMA2; (+) strand; PAM type: NRG; PAM sequence: GGG
atatgttgggaggcaatgca

SEQ ID NO: 158659 - DNA, 20 bp, Artificial Sequence
  Description of Artificial Sequence: Synthetic oligonucleotide
  Target: LAMA2; (+) strand; PAM type: NRG; PAM sequence: AAG
gggaggcaatgcagggtaac

SEQ ID NO: 158660 - DNA, 20 bp, Artificial Sequence
  Description of Artificial Sequence: Synthetic oligonucleotide
  Target: LAMA2; (+) strand; PAM type: NRG; PAM sequence: AGG
ggaggcaatgcagggtaaca

SEQ ID NO: 158661 - DNA, 20 bp, Artificial Sequence
  Description of Artificial Sequence: Synthetic oligonucleotide
  Target: LAMA2; (+) strand; PAM type: NRG; PAM sequence: GAG
aggcaatgcagggtaacaag

SEQ ID NO: 158662 - DNA, 20 bp, Artificial Sequence
  Description of Artificial Sequence: Synthetic oligonucleotide
  Target: LAMA2; (+) strand; PAM type: NRG; PAM sequence: TGG
cagggtaacaaggagatctt

SEQ ID NO: 158663 - DNA, 20 bp, Artificial Sequence
  Description of Artificial Sequence: Synthetic oligonucleotide
  Target: LAMA2; (+) strand; PAM type: NRG; PAM sequence: TGG
aacaaggagatctttggttt

SEQ ID NO: 158664 - DNA, 20 bp, Artificial Sequence
  Description of Artificial Sequence: Synthetic oligonucleotide
  Target: LAMA2; (+) strand; PAM type: NRG; PAM sequence: GAG
caaggagatctttggttttg

SEQ ID NO: 158665 - DNA, 20 bp, Artificial Sequence
  Description of Artificial Sequence: Synthetic oligonucleotide
  Target: LAMA2; (+) strand; PAM type: NRG; PAM sequence: TGG
tttggttttggagtcatgct

SEQ ID NO: 158666 - DNA, 20 bp, Artificial Sequence
  Description of Artificial Sequence: Synthetic oligonucleotide
  Target: LAMA2; (+) strand; PAM type: NRG; PAM sequence: GGG
ttggttttggagtcatgctt

SEQ ID NO: 158667 - DNA, 20 bp, Artificial Sequence
  Description of Artificial Sequence: Synthetic oligonucleotide
  Target: LAMA2; (+) strand; PAM type: NRG; PAM sequence: TGG
tatgctgcaccctttgctaa

SEQ ID NO: 158668 - DNA, 20 bp, Artificial Sequence
  Description of Artificial Sequence: Synthetic oligonucleotide
  Target: LAMA2; (+) strand; PAM type: NRG; PAM sequence: TGG
ctttgctaatggtattatgt

SEQ ID NO: 158669 - DNA, 20 bp, Artificial Sequence
  Description of Artificial Sequence: Synthetic oligonucleotide
  Target: LAMA2; (+) strand; PAM type: NRG; PAM sequence: AAG
ctaatggtattatgttggac

SEQ ID NO: 158670 - DNA, 20 bp, Artificial Sequence
  Description of Artificial Sequence: Synthetic oligonucleotide
  Target: LAMA2; (+) strand; PAM type: NRG; PAM sequence: AGG
taatggtattatgttggaca

SEQ ID NO: 158671 - DNA, 20 bp, Artificial Sequence
  Description of Artificial Sequence: Synthetic oligonucleotide
  Target: LAMA2; (+) strand; PAM type: NRG; PAM sequence: GAG
acaaggctctttactcctct

SEQ ID NO: 158672 - DNA, 20 bp, Artificial Sequence
  Description of Artificial Sequence: Synthetic oligonucleotide
  Target: LAMA2; (+) strand; PAM type: NRG; PAM sequence: CAG
ctctttactcctctgagcct

SEQ ID NO: 158673 - DNA, 20 bp, Artificial Sequence
  Description of Artificial Sequence: Synthetic oligonucleotide
  Target: LAMA2; (+) strand; PAM type: NRG; PAM sequence: TAG
tcttcatttgtaaatgtgaa

SEQ ID NO: 158674 - DNA, 20 bp, Artificial Sequence
  Description of Artificial Sequence: Synthetic oligonucleotide
  Target: LAMA2; (+) strand; PAM type: NRG; PAM sequence: TGG
tttgtaaatgtgaatagaca

SEQ ID NO: 158675 - DNA, 20 bp, Artificial Sequence
  Description of Artificial Sequence: Synthetic oligonucleotide
  Target: LAMA2; (+) strand; PAM type: NRG; PAM sequence: GGG
ttgtaaatgtgaatagacat

SEQ ID NO: 158676 - DNA, 20 bp, Artificial Sequence
  Description of Artificial Sequence: Synthetic oligonucleotide
  Target: LAMA2; (+) strand; PAM type: NRG; PAM sequence: CAG
acttaaatgaaatgtctttc

SEQ ID NO: 158677 - DNA, 20 bp, Artificial Sequence
  Description of Artificial Sequence: Synthetic oligonucleotide
  Target: LAMA2; (+) strand; PAM type: NRG; PAM sequence: TAG
tgtctttccagcctgtatca

SEQ ID NO: 158678 - DNA, 20 bp, Artificial Sequence
  Description of Artificial Sequence: Synthetic oligonucleotide
  Target: LAMA2; (+) strand; PAM type: NRG; PAM sequence: CAG
ccagcctgtatcatagtaca

SEQ ID NO: 158679 - DNA, 20 bp, Artificial Sequence
  Description of Artificial Sequence: Synthetic oligonucleotide
  Target: LAMA2; (+) strand; PAM type: NRG; PAM sequence: TAG
gtatcatagtacacagaaaa

SEQ ID NO: 158680 - DNA, 20 bp, Artificial Sequence
  Description of Artificial Sequence: Synthetic oligonucleotide
  Target: LAMA2; (+) strand; PAM type: NRG; PAM sequence: TAG
tcatagtacacagaaaatag

SEQ ID NO: 158681 - DNA, 20 bp, Artificial Sequence
  Description of Artificial Sequence: Synthetic oligonucleotide
  Target: LAMA2; (+) strand; PAM type: NRG; PAM sequence: CAG
agtacacagaaaatagtaga

SEQ ID NO: 158682 - DNA, 20 bp, Artificial Sequence
  Description of Artificial Sequence: Synthetic oligonucleotide
  Target: LAMA2; (+) strand; PAM type: NRG; PAM sequence: AAG
cacagaaaatagtagacagt

SEQ ID NO: 158683 - DNA, 20 bp, Artificial Sequence
  Description of Artificial Sequence: Synthetic oligonucleotide
  Target: LAMA2; (+) strand; PAM type: NRG; PAM sequence: TAG
agaaaatagtagacagtaag

SEQ ID NO: 158684 - DNA, 20 bp, Artificial Sequence
  Description of Artificial Sequence: Synthetic oligonucleotide
  Target: LAMA2; (+) strand; PAM type: NRG; PAM sequence: AAG
agtaagtagtaactattaaa

SEQ ID NO: 158685 - DNA, 20 bp, Artificial Sequence
  Description of Artificial Sequence: Synthetic oligonucleotide
  Target: LAMA2; (+) strand; PAM type: NRG; PAM sequence: CAG
aagtagtaactattaaaaag

SEQ ID NO: 158686 - DNA, 20 bp, Artificial Sequence
  Description of Artificial Sequence: Synthetic oligonucleotide
  Target: LAMA2; (+) strand; PAM type: NRG; PAM sequence: TAG
ctattaaaaagcagtcattc

SEQ ID NO: 158687 - DNA, 20 bp, Artificial Sequence
  Description of Artificial Sequence: Synthetic oligonucleotide
  Target: LAMA2; (+) strand; PAM type: NRG; PAM sequence: AGG
tattaaaaagcagtcattct

SEQ ID NO: 158688 - DNA, 20 bp, Artificial Sequence
  Description of Artificial Sequence: Synthetic oligonucleotide
  Target: LAMA2; (+) strand; PAM type: NRG; PAM sequence: TAG
aaaaagcagtcattctaggc

SEQ ID NO: 158689 - DNA, 20 bp, Artificial Sequence
  Description of Artificial Sequence: Synthetic oligonucleotide
  Target: LAMA2; (+) strand; PAM type: NRG; PAM sequence: AGG
aaaagcagtcattctaggct

SEQ ID NO: 158690 - DNA, 20 bp, Artificial Sequence
  Description of Artificial Sequence: Synthetic oligonucleotide
  Target: LAMA2; (+) strand; PAM type: NRG; PAM sequence: AAG
gtcattctaggctaggctat

SEQ ID NO: 158691 - DNA, 20 bp, Artificial Sequence
  Description of Artificial Sequence: Synthetic oligonucleotide
  Target: LAMA2; (+) strand; PAM type: NRG; PAM sequence: AGG
tcattctaggctaggctata

SEQ ID NO: 158692 - DNA, 20 bp, Artificial Sequence
  Description of Artificial Sequence: Synthetic oligonucleotide
  Target: LAMA2; (+) strand; PAM type: NRG; PAM sequence: AAG
ggctaggctataaggataca

SEQ ID NO: 158693 - DNA, 20 bp, Artificial Sequence
  Description of Artificial Sequence: Synthetic oligonucleotide
  Target: LAMA2; (+) strand; PAM type: NRG; PAM sequence: AGG
gctaggctataaggatacaa

SEQ ID NO: 158694 - DNA, 20 bp, Artificial Sequence
  Description of Artificial Sequence: Synthetic oligonucleotide
  Target: LAMA2; (+) strand; PAM type: NRG; PAM sequence: TGG
aggctataaggatacaaagg

SEQ ID NO: 158695 - DNA, 20 bp, Artificial Sequence
  Description of Artificial Sequence: Synthetic oligonucleotide
  Target: LAMA2; (+) strand; PAM type: NRG; PAM sequence: CAG
aaggtggacaaatgatcatt

SEQ ID NO: 158696 - DNA, 20 bp, Artificial Sequence
  Description of Artificial Sequence: Synthetic oligonucleotide
  Target: LAMA2; (+) strand; PAM type: NRG; PAM sequence: AAG
acaaatgatcattcagttca

SEQ ID NO: 158697 - DNA, 20 bp, Artificial Sequence
  Description of Artificial Sequence: Synthetic oligonucleotide
  Target: LAMA2; (+) strand; PAM type: NRG; PAM sequence: AAG
aatgatcattcagttcaaag

SEQ ID NO: 158698 - DNA, 20 bp, Artificial Sequence
  Description of Artificial Sequence: Synthetic oligonucleotide
  Target: LAMA2; (+) strand; PAM type: NRG; PAM sequence: AGG
atgatcattcagttcaaaga

SEQ ID NO: 158699 - DNA, 20 bp, Artificial Sequence
  Description of Artificial Sequence: Synthetic oligonucleotide
  Target: LAMA2; (+) strand; PAM type: NRG; PAM sequence: CAG
agttcaaagaaggcattgta

SEQ ID NO: 158700 - DNA, 20 bp, Artificial Sequence
  Description of Artificial Sequence: Synthetic oligonucleotide
  Target: LAMA2; (+) strand; PAM type: NRG; PAM sequence: TAG
tcaaagaaggcattgtacag

SEQ ID NO: 158701 - DNA, 20 bp, Artificial Sequence
  Description of Artificial Sequence: Synthetic oligonucleotide
  Target: LAMA2; (+) strand; PAM type: NRG; PAM sequence: GAG
aaagaaggcattgtacagta

SEQ ID NO: 158702 - DNA, 20 bp, Artificial Sequence
  Description of Artificial Sequence: Synthetic oligonucleotide
  Target: LAMA2; (+) strand; PAM type: NRG; PAM sequence: AAG
gaaggcattgtacagtagag

SEQ ID NO: 158703 - DNA, 20 bp, Artificial Sequence
  Description of Artificial Sequence: Synthetic oligonucleotide
  Target: LAMA2; (+) strand; PAM type: NRG; PAM sequence: CAG
gcattgtacagtagagaaga

SEQ ID NO: 158704 - DNA, 20 bp, Artificial Sequence
  Description of Artificial Sequence: Synthetic oligonucleotide
  Target: LAMA2; (+) strand; PAM type: NRG; PAM sequence: TAG
tacatttatgataatataaa

SEQ ID NO: 158705 - DNA, 20 bp, Artificial Sequence
  Description of Artificial Sequence: Synthetic oligonucleotide
  Target: LAMA2; (+) strand; PAM type: NRG; PAM sequence: CAG
ttatgataatataaatagtg

SEQ ID NO: 158706 - DNA, 20 bp, Artificial Sequence
  Description of Artificial Sequence: Synthetic oligonucleotide
  Target: LAMA2; (+) strand; PAM type: NRG; PAM sequence: AAG
tgataatataaatagtgcag

SEQ ID NO: 158707 - DNA, 20 bp, Artificial Sequence
  Description of Artificial Sequence: Synthetic oligonucleotide
  Target: LAMA2; (+) strand; PAM type: NRG; PAM sequence: AAG
taatataaatagtgcagaag

SEQ ID NO: 158708 - DNA, 20 bp, Artificial Sequence
  Description of Artificial Sequence: Synthetic oligonucleotide
  Target: LAMA2; (+) strand; PAM type: NRG; PAM sequence: TAG
gtgtgcacaatgcatataaa

SEQ ID NO: 158709 - DNA, 20 bp, Artificial Sequence
  Description of Artificial Sequence: Synthetic oligonucleotide
  Target: LAMA2; (+) strand; PAM type: NRG; PAM sequence: CAG
cacaatgcatataaatagtg

SEQ ID NO: 158710 - DNA, 20 bp, Artificial Sequence
  Description of Artificial Sequence: Synthetic oligonucleotide
  Target: LAMA2; (+) strand; PAM type: NRG; PAM sequence: AAG
aatgcatataaatagtgcag

SEQ ID NO: 158711 - DNA, 20 bp, Artificial Sequence
  Description of Artificial Sequence: Synthetic oligonucleotide
  Target: LAMA2; (+) strand; PAM type: NRG; PAM sequence: AAG
gcatataaatagtgcagaag

SEQ ID NO: 158712 - DNA, 20 bp, Artificial Sequence
  Description of Artificial Sequence: Synthetic oligonucleotide
  Target: LAMA2; (+) strand; PAM type: NRG; PAM sequence: CAG
tagtgcagaagaagtgtgcg

SEQ ID NO: 158713 - DNA, 20 bp, Artificial Sequence
  Description of Artificial Sequence: Synthetic oligonucleotide
  Target: LAMA2; (+) strand; PAM type: NRG; PAM sequence: TGG
gaagtgtgcgcagtgcatac

SEQ ID NO: 158714 - DNA, 20 bp, Artificial Sequence
  Description of Artificial Sequence: Synthetic oligonucleotide
  Target: LAMA2; (+) strand; PAM type: NRG; PAM sequence: TAG
gtgtgcgcagtgcatactgg

SEQ ID NO: 158715 - DNA, 20 bp, Artificial Sequence
  Description of Artificial Sequence: Synthetic oligonucleotide
  Target: LAMA2; (+) strand; PAM type: NRG; PAM sequence: AAG
cagtgcatactggtagaact

SEQ ID NO: 158716 - DNA, 20 bp, Artificial Sequence
  Description of Artificial Sequence: Synthetic oligonucleotide
  Target: LAMA2; (+) strand; PAM type: NRG; PAM sequence: AAG
tgcatactggtagaactaag

SEQ ID NO: 158717 - DNA, 20 bp, Artificial Sequence
  Description of Artificial Sequence: Synthetic oligonucleotide
  Target: LAMA2; (+) strand; PAM type: NRG; PAM sequence: AGG
gcatactggtagaactaaga

SEQ ID NO: 158718 - DNA, 20 bp, Artificial Sequence
  Description of Artificial Sequence: Synthetic oligonucleotide
  Target: LAMA2; (+) strand; PAM type: NRG; PAM sequence: AAG
tactggtagaactaagaagg

SEQ ID NO: 158719 - DNA, 20 bp, Artificial Sequence
  Description of Artificial Sequence: Synthetic oligonucleotide
  Target: LAMA2; (+) strand; PAM type: NRG; PAM sequence: TAG
gaagcaatgaattcttgtgt

SEQ ID NO: 158720 - DNA, 20 bp, Artificial Sequence
  Description of Artificial Sequence: Synthetic oligonucleotide
  Target: LAMA2; (+) strand; PAM type: NRG; PAM sequence: TAG
tttaatacacttttaataaa

SEQ ID NO: 158721 - DNA, 20 bp, Artificial Sequence
  Description of Artificial Sequence: Synthetic oligonucleotide
  Target: LAMA2; (+) strand; PAM type: NRG; PAM sequence: AAG
cttttaataaatagctgcaa

SEQ ID NO: 158722 - DNA, 20 bp, Artificial Sequence
  Description of Artificial Sequence: Synthetic oligonucleotide
  Target: LAMA2; (+) strand; PAM type: NRG; PAM sequence: CAG
ataaatagctgcaaaagtat

SEQ ID NO: 158723 - DNA, 20 bp, Artificial Sequence
  Description of Artificial Sequence: Synthetic oligonucleotide
  Target: LAMA2; (+) strand; PAM type: NRG; PAM sequence: CAG
gcaaaagtatcagtttctgt

SEQ ID NO: 158724 - DNA, 20 bp, Artificial Sequence
  Description of Artificial Sequence: Synthetic oligonucleotide
  Target: LAMA2; (+) strand; PAM type: NRG; PAM sequence: TGG
gttactgctcttactcgatg

SEQ ID NO: 158725 - DNA, 20 bp, Artificial Sequence
  Description of Artificial Sequence: Synthetic oligonucleotide
  Target: LAMA2; (+) strand; PAM type: NRG; PAM sequence: GGG
ttactgctcttactcgatgt

SEQ ID NO: 158726 - DNA, 20 bp, Artificial Sequence
  Description of Artificial Sequence: Synthetic oligonucleotide
  Target: LAMA2; (+) strand; PAM type: NRG; PAM sequence: AAG
tgtgggattgaaaatgttta

SEQ ID NO: 158727 - DNA, 20 bp, Artificial Sequence
  Description of Artificial Sequence: Synthetic oligonucleotide
  Target: LAMA2; (+) strand; PAM type: NRG; PAM sequence: TAG
tatataaaaaacaaattata

SEQ ID NO: 158728 - DNA, 20 bp, Artificial Sequence
  Description of Artificial Sequence: Synthetic oligonucleotide
  Target: LAMA2; (+) strand; PAM type: NRG; PAM sequence: TAG
tatatatatatatatatata

SEQ ID NO: 158729 - DNA, 20 bp, Artificial Sequence
  Description of Artificial Sequence: Synthetic oligonucleotide
  Target: LAMA2; (+) strand; PAM type: NRG; PAM sequence: TGG
atatatatatatatatatag

SEQ ID NO: 158730 - DNA, 20 bp, Artificial Sequence
  Description of Artificial Sequence: Synthetic oligonucleotide
  Target: LAMA2; (+) strand; PAM type: NRG; PAM sequence: GGG
tatatatatatatatatagt

SEQ ID NO: 158731 - DNA, 20 bp, Artificial Sequence
  Description of Artificial Sequence: Synthetic oligonucleotide
  Target: LAMA2; (+) strand; PAM type: NRG; PAM sequence: TAG
atatatatatatatagtggg

SEQ ID NO: 158732 - DNA, 20 bp, Artificial Sequence
  Description of Artificial Sequence: Synthetic oligonucleotide
  Target: LAMA2; (+) strand; PAM type: NRG; PAM sequence: AAG
tatatatagtgggtagaaaa

SEQ ID NO: 158733 - DNA, 20 bp, Artificial Sequence
  Description of Artificial Sequence: Synthetic oligonucleotide
  Target: LAMA2; (+) strand; PAM type: NRG; PAM sequence: AAG
aaaaagacaattgtaacatc

SEQ ID NO: 158734 - DNA, 20 bp, Artificial Sequence
  Description of Artificial Sequence: Synthetic oligonucleotide
  Target: LAMA2; (+) strand; PAM type: NRG; PAM sequence: AGG
aaaagacaattgtaacatca

SEQ ID NO: 158735 - DNA, 20 bp, Artificial Sequence
  Description of Artificial Sequence: Synthetic oligonucleotide
  Target: LAMA2; (+) strand; PAM type: NRG; PAM sequence: GGG
aaagacaattgtaacatcaa

SEQ ID NO: 158736 - DNA, 20 bp, Artificial Sequence
  Description of Artificial Sequence: Synthetic oligonucleotide
  Target: LAMA2; (+) strand; PAM type: NRG; PAM sequence: AAG
agggtatttttgttgtttta

SEQ ID NO: 158737 - DNA, 20 bp, Artificial Sequence
  Description of Artificial Sequence: Synthetic oligonucleotide
  Target: LAMA2; (+) strand; PAM type: NRG; PAM sequence: TGG
taaagtgtcatgttttgtgc

SEQ ID NO: 158738 - DNA, 20 bp, Artificial Sequence
  Description of Artificial Sequence: Synthetic oligonucleotide
  Target: LAMA2; (+) strand; PAM type: NRG; PAM sequence: TAG
atgttttgtgctggttgttt

SEQ ID NO: 158739 - DNA, 20 bp, Artificial Sequence
  Description of Artificial Sequence: Synthetic oligonucleotide
  Target: LAMA2; (+) strand; PAM type: NRG; PAM sequence: TAG
ctggttgttttagtgtaata

SEQ ID NO: 158740 - DNA, 20 bp, Artificial Sequence
  Description of Artificial Sequence: Synthetic oligonucleotide
  Target: LAMA2; (+) strand; PAM type: NRG; PAM sequence: TGG
taatatagcatatcttactc

SEQ ID NO: 158741 - DNA, 20 bp, Artificial Sequence
  Description of Artificial Sequence: Synthetic oligonucleotide
  Target: LAMA2; (+) strand; PAM type: NRG; PAM sequence: TGG
tatagcatatcttactctgg

SEQ ID NO: 158742 - DNA, 20 bp, Artificial Sequence
  Description of Artificial Sequence: Synthetic oligonucleotide
  Target: LAMA2; (+) strand; PAM type: NRG; PAM sequence: GGG
atagcatatcttactctggt

SEQ ID NO: 158743 - DNA, 20 bp, Artificial Sequence
  Description of Artificial Sequence: Synthetic oligonucleotide
  Target: LAMA2; (+) strand; PAM type: NRG; PAM sequence: TAG
tcttactctggtgggaaatg

SEQ ID NO: 158744 - DNA, 20 bp, Artificial Sequence
  Description of Artificial Sequence: Synthetic oligonucleotide
  Target: LAMA2; (+) strand; PAM type: NRG; PAM sequence: GAG
tgtagtaaaacaaaaatatt

SEQ ID NO: 158745 - DNA, 20 bp, Artificial Sequence
  Description of Artificial Sequence: Synthetic oligonucleotide
  Target: LAMA2; (+) strand; PAM type: NRG; PAM sequence: AAG
aaatattgagaacaatcttt

SEQ ID NO: 158746 - DNA, 20 bp, Artificial Sequence
  Description of Artificial Sequence: Synthetic oligonucleotide
  Target: LAMA2; (+) strand; PAM type: NRG; PAM sequence: AGG
aatattgagaacaatcttta

SEQ ID NO: 158747 - DNA, 20 bp, Artificial Sequence
  Description of Artificial Sequence: Synthetic oligonucleotide
  Target: LAMA2; (+) strand; PAM type: NRG; PAM sequence: CAG
attgagaacaatctttaagg

SEQ ID NO: 158748 - DNA, 20 bp, Artificial Sequence
  Description of Artificial Sequence: Synthetic oligonucleotide
  Target: LAMA2; (+) strand; PAM type: NRG; PAM sequence: AAG
acaatctttaaggcagcacc

SEQ ID NO: 158749 - DNA, 20 bp, Artificial Sequence
  Description of Artificial Sequence: Synthetic oligonucleotide
  Target: LAMA2; (+) strand; PAM type: NRG; PAM sequence: TAG
ccaagacaacgtttctgaaa

SEQ ID NO: 158750 - DNA, 20 bp, Artificial Sequence
  Description of Artificial Sequence: Synthetic oligonucleotide
  Target: LAMA2; (+) strand; PAM type: NRG; PAM sequence: TAG
aatagttccaatattattca

SEQ ID NO: 158751 - DNA, 20 bp, Artificial Sequence
  Description of Artificial Sequence: Synthetic oligonucleotide
  Target: LAMA2; (+) strand; PAM type: NRG; PAM sequence: TGG
agttccaatattattcatag

SEQ ID NO: 158752 - DNA, 20 bp, Artificial Sequence
  Description of Artificial Sequence: Synthetic oligonucleotide
  Target: LAMA2; (+) strand; PAM type: NRG; PAM sequence: AAG
atcatcttttctgtattttc

SEQ ID NO: 158753 - DNA, 20 bp, Artificial Sequence
  Description of Artificial Sequence: Synthetic oligonucleotide
  Target: LAMA2; (+) strand; PAM type: NRG; PAM sequence: AGG
tcatcttttctgtattttca

SEQ ID NO: 158754 - DNA, 20 bp, Artificial Sequence
  Description of Artificial Sequence: Synthetic oligonucleotide
  Target: LAMA2; (+) strand; PAM type: NRG; PAM sequence: AAG
tattttcaaggcataaaaat

SEQ ID NO: 158755 - DNA, 20 bp, Artificial Sequence
  Description of Artificial Sequence: Synthetic oligonucleotide
  Target: LAMA2; (+) strand; PAM type: NRG; PAM sequence: GAG
ttttcaaggcataaaaataa

SEQ ID NO: 158756 - DNA, 20 bp, Artificial Sequence
  Description of Artificial Sequence: Synthetic oligonucleotide
  Target: LAMA2; (+) strand; PAM type: NRG; PAM sequence: AGG
tttcaaggcataaaaataag

SEQ ID NO: 158757 - DNA, 20 bp, Artificial Sequence
  Description of Artificial Sequence: Synthetic oligonucleotide
  Target: LAMA2; (+) strand; PAM type: NRG; PAM sequence: GGG
ttcaaggcataaaaataaga

SEQ ID NO: 158758 - DNA, 20 bp, Artificial Sequence
  Description of Artificial Sequence: Synthetic oligonucleotide
  Target: LAMA2; (+) strand; PAM type: NRG; PAM sequence: AAG
aaggcataaaaataagaggg

SEQ ID NO: 158759 - DNA, 20 bp, Artificial Sequence
  Description of Artificial Sequence: Synthetic oligonucleotide
  Target: LAMA2; (+) strand; PAM type: NRG; PAM sequence: GAG
ggcataaaaataagagggaa

SEQ ID NO: 158760 - DNA, 20 bp, Artificial Sequence
  Description of Artificial Sequence: Synthetic oligonucleotide
  Target: LAMA2; (+) strand; PAM type: NRG; PAM sequence: CAG
taaaaataagagggaagagt

SEQ ID NO: 158761 - DNA, 20 bp, Artificial Sequence
  Description of Artificial Sequence: Synthetic oligonucleotide
  Target: LAMA2; (+) strand; PAM type: NRG; PAM sequence: AAG
taagagggaagagtcagcta

SEQ ID NO: 158762 - DNA, 20 bp, Artificial Sequence
  Description of Artificial Sequence: Synthetic oligonucleotide
  Target: LAMA2; (+) strand; PAM type: NRG; PAM sequence: TAG
gtcagctaaagcatttgact

SEQ ID NO: 158763 - DNA, 20 bp, Artificial Sequence
  Description of Artificial Sequence: Synthetic oligonucleotide
  Target: LAMA2; (+) strand; PAM type: NRG; PAM sequence: TAG
cttagttgacaattctttga

SEQ ID NO: 158764 - DNA, 20 bp, Artificial Sequence
  Description of Artificial Sequence: Synthetic oligonucleotide
  Target: LAMA2; (+) strand; PAM type: NRG; PAM sequence: TAG
gctcatgcatctctaaaatt

SEQ ID NO: 158765 - DNA, 20 bp, Artificial Sequence
  Description of Artificial Sequence: Synthetic oligonucleotide
  Target: LAMA2; (+) strand; PAM type: NRG; PAM sequence: CAG
attatgtatttaaatgaatg

SEQ ID NO: 158766 - DNA, 20 bp, Artificial Sequence
  Description of Artificial Sequence: Synthetic oligonucleotide
  Target: LAMA2; (+) strand; PAM type: NRG; PAM sequence: AAG
aatgaatgcagcttgatatc

SEQ ID NO: 158767 - DNA, 20 bp, Artificial Sequence
  Description of Artificial Sequence: Synthetic oligonucleotide
  Target: LAMA2; (+) strand; PAM type: NRG; PAM sequence: GAG
tgaatgcagcttgatatcaa

SEQ ID NO: 158768 - DNA, 20 bp, Artificial Sequence
  Description of Artificial Sequence: Synthetic oligonucleotide
  Target: LAMA2; (+) strand; PAM type: NRG; PAM sequence: AAG
tcaagagaatgaccatactg

SEQ ID NO: 158769 - DNA, 20 bp, Artificial Sequence
  Description of Artificial Sequence: Synthetic oligonucleotide
  Target: LAMA2; (+) strand; PAM type: NRG; PAM sequence: AGG
caagagaatgaccatactga

SEQ ID NO: 158770 - DNA, 20 bp, Artificial Sequence
  Description of Artificial Sequence: Synthetic oligonucleotide
  Target: LAMA2; (+) strand; PAM type: NRG; PAM sequence: GGG
aagagaatgaccatactgaa

SEQ ID NO: 158771 - DNA, 20 bp, Artificial Sequence
  Description of Artificial Sequence: Synthetic oligonucleotide
  Target: LAMA2; (+) strand; PAM type: NRG; PAM sequence: GGG
agagaatgaccatactgaag

SEQ ID NO: 158772 - DNA, 20 bp, Artificial Sequence
  Description of Artificial Sequence: Synthetic oligonucleotide
  Target: LAMA2; (+) strand; PAM type: NRG; PAM sequence: CAG
ggggaaaaaaaaataaactg

SEQ ID NO: 158773 - DNA, 20 bp, Artificial Sequence
  Description of Artificial Sequence: Synthetic oligonucleotide
  Target: LAMA2; (+) strand; PAM type: NRG; PAM sequence: GAG
taaactgcagccttcttcat

SEQ ID NO: 158774 - DNA, 20 bp, Artificial Sequence
  Description of Artificial Sequence: Synthetic oligonucleotide
  Target: LAMA2; (+) strand; PAM type: NRG; PAM sequence: TAG
ttaaaatcccatttaacaaa

SEQ ID NO: 158775 - DNA, 20 bp, Artificial Sequence
  Description of Artificial Sequence: Synthetic oligonucleotide
  Target: LAMA2; (+) strand; PAM type: NRG; PAM sequence: CAG
aaatcccatttaacaaatag

SEQ ID NO: 158776 - DNA, 20 bp, Artificial Sequence
  Description of Artificial Sequence: Synthetic oligonucleotide
  Target: LAMA2; (+) strand; PAM type: NRG; PAM sequence: TGG
tagcagaacctaatgaacat

SEQ ID NO: 158777 - DNA, 20 bp, Artificial Sequence
  Description of Artificial Sequence: Synthetic oligonucleotide
  Target: LAMA2; (+) strand; PAM type: NRG; PAM sequence: GGG
agcagaacctaatgaacatt

SEQ ID NO: 158778 - DNA, 20 bp, Artificial Sequence
  Description of Artificial Sequence: Synthetic oligonucleotide
  Target: LAMA2; (+) strand; PAM type: NRG; PAM sequence: CAG
taatgaacattgggattgct

SEQ ID NO: 158779 - DNA, 20 bp, Artificial Sequence
  Description of Artificial Sequence: Synthetic oligonucleotide
  Target: LAMA2; (+) strand; PAM type: NRG; PAM sequence: GAG
gaacattgggattgctcagt

SEQ ID NO: 158780 - DNA, 20 bp, Artificial Sequence
  Description of Artificial Sequence: Synthetic oligonucleotide
  Target: LAMA2; (+) strand; PAM type: NRG; PAM sequence: TGG
ttgctcagtgagtactaatg

SEQ ID NO: 158781 - DNA, 20 bp, Artificial Sequence
  Description of Artificial Sequence: Synthetic oligonucleotide
  Target: LAMA2; (+) strand; PAM type: NRG; PAM sequence: TGG
gtactaatgtggaatattac

SEQ ID NO: 158782 - DNA, 20 bp, Artificial Sequence
  Description of Artificial Sequence: Synthetic oligonucleotide
  Target: LAMA2; (+) strand; PAM type: NRG; PAM sequence: GGG
tactaatgtggaatattact

SEQ ID NO: 158783 - DNA, 20 bp, Artificial Sequence
  Description of Artificial Sequence: Synthetic oligonucleotide
  Target: LAMA2; (+) strand; PAM type: NRG; PAM sequence: AAG
aatgtggaatattactggga

SEQ ID NO: 158784 - DNA, 20 bp, Artificial Sequence
  Description of Artificial Sequence: Synthetic oligonucleotide
  Target: LAMA2; (+) strand; PAM type: NRG; PAM sequence: GAG
tattactgggaaagatgttt

SEQ ID NO: 158785 - DNA, 20 bp, Artificial Sequence
  Description of Artificial Sequence: Synthetic oligonucleotide
  Target: LAMA2; (+) strand; PAM type: NRG; PAM sequence: AAG
ggaaagatgtttgagtgttg

SEQ ID NO: 158786 - DNA, 20 bp, Artificial Sequence
  Description of Artificial Sequence: Synthetic oligonucleotide
  Target: LAMA2; (+) strand; PAM type: NRG; PAM sequence: TAG
ttgagtgttgaagtttctca

SEQ ID NO: 158787 - DNA, 20 bp, Artificial Sequence
  Description of Artificial Sequence: Synthetic oligonucleotide
  Target: LAMA2; (+) strand; PAM type: NRG; PAM sequence: CAG
tgttgaagtttctcatagct

SEQ ID NO: 158788 - DNA, 20 bp, Artificial Sequence
  Description of Artificial Sequence: Synthetic oligonucleotide
  Target: LAMA2; (+) strand; PAM type: NRG; PAM sequence: TGG
aagtttctcatagctcagaa

SEQ ID NO: 158789 - DNA, 20 bp, Artificial Sequence
  Description of Artificial Sequence: Synthetic oligonucleotide
  Target: LAMA2; (+) strand; PAM type: NRG; PAM sequence: CAG
catagctcagaatggttaca

SEQ ID NO: 158790 - DNA, 20 bp, Artificial Sequence
  Description of Artificial Sequence: Synthetic oligonucleotide
  Target: LAMA2; (+) strand; PAM type: NRG; PAM sequence: AAG
tcagaatggttacacagatt

SEQ ID NO: 158791 - DNA, 20 bp, Artificial Sequence
  Description of Artificial Sequence: Synthetic oligonucleotide
  Target: LAMA2; (+) strand; PAM type: NRG; PAM sequence: AGG
cagaatggttacacagatta

SEQ ID NO: 158792 - DNA, 20 bp, Artificial Sequence
  Description of Artificial Sequence: Synthetic oligonucleotide
  Target: LAMA2; (+) strand; PAM type: NRG; PAM sequence: GAG
gaatggttacacagattaag

SEQ ID NO: 158793 - DNA, 20 bp, Artificial Sequence
  Description of Artificial Sequence: Synthetic oligonucleotide
  Target: LAMA2; (+) strand; PAM type: NRG; PAM sequence: GAG
atggttacacagattaagga

SEQ ID NO: 158794 - DNA, 20 bp, Artificial Sequence
  Description of Artificial Sequence: Synthetic oligonucleotide
  Target: LAMA2; (+) strand; PAM type: NRG; PAM sequence: AGG
tggttacacagattaaggag

SEQ ID NO: 158795 - DNA, 20 bp, Artificial Sequence
  Description of Artificial Sequence: Synthetic oligonucleotide
  Target: LAMA2; (+) strand; PAM type: NRG; PAM sequence: AAG
gaggaatgtctgttgttcaa

SEQ ID NO: 158796 - DNA, 20 bp, Artificial Sequence
  Description of Artificial Sequence: Synthetic oligonucleotide
  Target: LAMA2; (+) strand; PAM type: NRG; PAM sequence: CAG
aaaagacaaatgaaatttgt

SEQ ID NO: 158797 - DNA, 20 bp, Artificial Sequence
  Description of Artificial Sequence: Synthetic oligonucleotide
  Target: LAMA2; (+) strand; PAM type: NRG; PAM sequence: AAG
ttttttaaaactgtttctta

SEQ ID NO: 158798 - DNA, 20 bp, Artificial Sequence
  Description of Artificial Sequence: Synthetic oligonucleotide
  Target: LAMA2; (+) strand; PAM type: NRG; PAM sequence: TAG
tttaaaactgtttcttaaag

SEQ ID NO: 158799 - DNA, 20 bp, Artificial Sequence
  Description of Artificial Sequence: Synthetic oligonucleotide
  Target: LAMA2; (+) strand; PAM type: NRG; PAM sequence: CAG
ttcttctattttgaaatttc

SEQ ID NO: 158800 - DNA, 20 bp, Artificial Sequence
  Description of Artificial Sequence: Synthetic oligonucleotide
  Target: LAMA2; (+) strand; PAM type: NRG; PAM sequence: AAG
atttccagaactctttgttt

SEQ ID NO: 158801 - DNA, 20 bp, Artificial Sequence
  Description of Artificial Sequence: Synthetic oligonucleotide
  Target: LAMA2; (+) strand; PAM type: NRG; PAM sequence: GAG
tttgcatgtcaattttatat

SEQ ID NO: 158802 - DNA, 20 bp, Artificial Sequence
  Description of Artificial Sequence: Synthetic oligonucleotide
  Target: LAMA2; (+) strand; PAM type: NRG; PAM sequence: TGG
aattttatatgagaaattct

SEQ ID NO: 158803 - DNA, 20 bp, Artificial Sequence
  Description of Artificial Sequence: Synthetic oligonucleotide
  Target: LAMA2; (+) strand; PAM type: NRG; PAM sequence: TAG
agaaattcttggactgtatc

SEQ ID NO: 158804 - DNA, 20 bp, Artificial Sequence
  Description of Artificial Sequence: Synthetic oligonucleotide
  Target: LAMA2; (+) strand; PAM type: NRG; PAM sequence: CAG
tcttggactgtatctagata

SEQ ID NO: 158805 - DNA, 20 bp, Artificial Sequence
  Description of Artificial Sequence: Synthetic oligonucleotide
  Target: LAMA2; (+) strand; PAM type: NRG; PAM sequence: TAG
cagttaatcaatctgctgtt

SEQ ID NO: 158806 - DNA, 20 bp, Artificial Sequence
  Description of Artificial Sequence: Synthetic oligonucleotide
  Target: LAMA2; (+) strand; PAM type: NRG; PAM sequence: TGG
atctgctgtttagtaaattg

SEQ ID NO: 158807 - DNA, 20 bp, Artificial Sequence
  Description of Artificial Sequence: Synthetic oligonucleotide
  Target: LAMA2; (+) strand; PAM type: NRG; PAM sequence: TAG
tctattgtatgataatcaac

SEQ ID NO: 158808 - DNA, 20 bp, Artificial Sequence
  Description of Artificial Sequence: Synthetic oligonucleotide
  Target: LAMA2; (+) strand; PAM type: NRG; PAM sequence: AAG
tcatctaattctgaaattaa

SEQ ID NO: 158809 - DNA, 20 bp, Artificial Sequence
  Description of Artificial Sequence: Synthetic oligonucleotide
  Target: LAMA2; (+) strand; PAM type: NRG; PAM sequence: AGG
catctaattctgaaattaaa

SEQ ID NO: 158810 - DNA, 20 bp, Artificial Sequence
  Description of Artificial Sequence: Synthetic oligonucleotide
  Target: LAMA2; (+) strand; PAM type: NRG; PAM sequence: CAG
aattctgaaattaaaaggat

SEQ ID NO: 158811 - DNA, 20 bp, Artificial Sequence
  Description of Artificial Sequence: Synthetic oligonucleotide
  Target: LAMA2; (+) strand; PAM type: NRG; PAM sequence: TAG
aattaaaaggatcagaatta

SEQ ID NO: 158812 - DNA, 20 bp, Artificial Sequence
  Description of Artificial Sequence: Synthetic oligonucleotide
  Target: LAMA2; (+) strand; PAM type: NRG; PAM sequence: AGG
attaaaaggatcagaattat

SEQ ID NO: 158813 - DNA, 20 bp, Artificial Sequence
  Description of Artificial Sequence: Synthetic oligonucleotide
  Target: LAMA2; (+) strand; PAM type: NRG; PAM sequence: AAG
atcagaattataggtttatc

SEQ ID NO: 158814 - DNA, 20 bp, Artificial Sequence
  Description of Artificial Sequence: Synthetic oligonucleotide
  Target: LAMA2; (+) strand; PAM type: NRG; PAM sequence: CAG
attataggtttatcaagtga

SEQ ID NO: 158815 - DNA, 20 bp, Artificial Sequence
  Description of Artificial Sequence: Synthetic oligonucleotide
  Target: LAMA2; (+) strand; PAM type: NRG; PAM sequence: CAG
aagtgacagtccattaattc

SEQ ID NO: 158816 - DNA, 20 bp, Artificial Sequence
  Description of Artificial Sequence: Synthetic oligonucleotide
  Target: LAMA2; (+) strand; PAM type: NRG; PAM sequence: AGG
agtgacagtccattaattcc

SEQ ID NO: 158817 - DNA, 20 bp, Artificial Sequence
  Description of Artificial Sequence: Synthetic oligonucleotide
  Target: LAMA2; (+) strand; PAM type: NRG; PAM sequence: CAG
gacagtccattaattccagg

SEQ ID NO: 158818 - DNA, 20 bp, Artificial Sequence
  Description of Artificial Sequence: Synthetic oligonucleotide
  Target: LAMA2; (+) strand; PAM type: NRG; PAM sequence: TAG
gtccattaattccaggcagt

SEQ ID NO: 158819 - DNA, 20 bp, Artificial Sequence
  Description of Artificial Sequence: Synthetic oligonucleotide
  Target: LAMA2; (+) strand; PAM type: NRG; PAM sequence: CAG
gttagatttcacaatacatt

SEQ ID NO: 158820 - DNA, 20 bp, Artificial Sequence
  Description of Artificial Sequence: Synthetic oligonucleotide
  Target: LAMA2; (+) strand; PAM type: NRG; PAM sequence: AGG
ttagatttcacaatacattc

SEQ ID NO: 158821 - DNA, 20 bp, Artificial Sequence
  Description of Artificial Sequence: Synthetic oligonucleotide
  Target: LAMA2; (+) strand; PAM type: NRG; PAM sequence: GAG
atttcacaatacattcaggc

SEQ ID NO: 158822 - DNA, 20 bp, Artificial Sequence
  Description of Artificial Sequence: Synthetic oligonucleotide
  Target: LAMA2; (+) strand; PAM type: NRG; PAM sequence: TGG
caatacattcaggcgagttc

SEQ ID NO: 158823 - DNA, 20 bp, Artificial Sequence
  Description of Artificial Sequence: Synthetic oligonucleotide
  Target: LAMA2; (+) strand; PAM type: NRG; PAM sequence: TGG
ttcaggcgagttctggtctc

SEQ ID NO: 158824 - DNA, 20 bp, Artificial Sequence
  Description of Artificial Sequence: Synthetic oligonucleotide
  Target: LAMA2; (+) strand; PAM type: NRG; PAM sequence: AAG
gagttctggtctctggcctc

SEQ ID NO: 158825 - DNA, 20 bp, Artificial Sequence
  Description of Artificial Sequence: Synthetic oligonucleotide
  Target: LAMA2; (+) strand; PAM type: NRG; PAM sequence: CAG
gcctcaagttctaatgataa

SEQ ID NO: 158826 - DNA, 20 bp, Artificial Sequence
  Description of Artificial Sequence: Synthetic oligonucleotide
  Target: LAMA2; (+) strand; PAM type: NRG; PAM sequence: AAG
tcttctatgtcaaatcaaac

SEQ ID NO: 158827 - DNA, 20 bp, Artificial Sequence
  Description of Artificial Sequence: Synthetic oligonucleotide
  Target: LAMA2; (+) strand; PAM type: NRG; PAM sequence: TGG
gattttattcatctgaaatg

SEQ ID NO: 158828 - DNA, 20 bp, Artificial Sequence
  Description of Artificial Sequence: Synthetic oligonucleotide
  Target: LAMA2; (+) strand; PAM type: NRG; PAM sequence: TAG
ttattcatctgaaatgtggc

SEQ ID NO: 158829 - DNA, 20 bp, Artificial Sequence
  Description of Artificial Sequence: Synthetic oligonucleotide
  Target: LAMA2; (+) strand; PAM type: NRG; PAM sequence: TAG
ttcatctgaaatgtggctag

SEQ ID NO: 158830 - DNA, 20 bp, Artificial Sequence
  Description of Artificial Sequence: Synthetic oligonucleotide
  Target: LAMA2; (+) strand; PAM type: NRG; PAM sequence: TGG
ctttattgtatcctttgcca

SEQ ID NO: 158831 - DNA, 20 bp, Artificial Sequence
  Description of Artificial Sequence: Synthetic oligonucleotide
  Target: LAMA2; (+) strand; PAM type: NRG; PAM sequence: GAG
ttattgtatcctttgccatg

SEQ ID NO: 158832 - DNA, 20 bp, Artificial Sequence
  Description of Artificial Sequence: Synthetic oligonucleotide
  Target: LAMA2; (+) strand; PAM type: NRG; PAM sequence: TAG
tcctttgccatggagtttgt

SEQ ID NO: 158833 - DNA, 20 bp, Artificial Sequence
  Description of Artificial Sequence: Synthetic oligonucleotide
  Target: LAMA2; (+) strand; PAM type: NRG; PAM sequence: TAG
ttgttagtcattgtttgtaa

SEQ ID NO: 158834 - DNA, 20 bp, Artificial Sequence
  Description of Artificial Sequence: Synthetic oligonucleotide
  Target: LAMA2; (+) strand; PAM type: NRG; PAM sequence: AAG
catctattcatttattattt

SEQ ID NO: 158835 - DNA, 20 bp, Artificial Sequence
  Description of Artificial Sequence: Synthetic oligonucleotide
  Target: LAMA2; (+) strand; PAM type: NRG; PAM sequence: TAG
tcatttattatttaagtatt

SEQ ID NO: 158836 - DNA, 20 bp, Artificial Sequence
  Description of Artificial Sequence: Synthetic oligonucleotide
  Target: LAMA2; (+) strand; PAM type: NRG; PAM sequence: CAG
ttattatttaagtatttagt

SEQ ID NO: 158837 - DNA, 20 bp, Artificial Sequence
  Description of Artificial Sequence: Synthetic oligonucleotide
  Target: LAMA2; (+) strand; PAM type: NRG; PAM sequence: AAG
tcaattcacccattcgacaa

SEQ ID NO: 158838 - DNA, 20 bp, Artificial Sequence
  Description of Artificial Sequence: Synthetic oligonucleotide
  Target: LAMA2; (+) strand; PAM type: NRG; PAM sequence: TGG
ctactgaacatgaacatgta

SEQ ID NO: 158839 - DNA, 20 bp, Artificial Sequence
  Description of Artificial Sequence: Synthetic oligonucleotide
  Target: LAMA2; (+) strand; PAM type: NRG; PAM sequence: GAG
actgaacatgaacatgtatg

SEQ ID NO: 158840 - DNA, 20 bp, Artificial Sequence
  Description of Artificial Sequence: Synthetic oligonucleotide
  Target: LAMA2; (+) strand; PAM type: NRG; PAM sequence: TAG
agatgatcatcctgcatata

SEQ ID NO: 158841 - DNA, 20 bp, Artificial Sequence
  Description of Artificial Sequence: Synthetic oligonucleotide
  Target: LAMA2; (+) strand; PAM type: NRG; PAM sequence: TGG
gatcatcctgcatatataga

SEQ ID NO: 158842 - DNA, 20 bp, Artificial Sequence
  Description of Artificial Sequence: Synthetic oligonucleotide
  Target: LAMA2; (+) strand; PAM type: NRG; PAM sequence: AAG
atcctgcatatatagatggc

SEQ ID NO: 158843 - DNA, 20 bp, Artificial Sequence
  Description of Artificial Sequence: Synthetic oligonucleotide
  Target: LAMA2; (+) strand; PAM type: NRG; PAM sequence: TAG
tgcatatatagatggcaaga

SEQ ID NO: 158844 - DNA, 20 bp, Artificial Sequence
  Description of Artificial Sequence: Synthetic oligonucleotide
  Target: LAMA2; (+) strand; PAM type: NRG; PAM sequence: AGG
gcatatatagatggcaagat

SEQ ID NO: 158845 - DNA, 20 bp, Artificial Sequence
  Description of Artificial Sequence: Synthetic oligonucleotide
  Target: LAMA2; (+) strand; PAM type: NRG; PAM sequence: AAG
caagataggtttctgttctc

SEQ ID NO: 158846 - DNA, 20 bp, Artificial Sequence
  Description of Artificial Sequence: Synthetic oligonucleotide
  Target: LAMA2; (+) strand; PAM type: NRG; PAM sequence: AGG
aagataggtttctgttctca

SEQ ID NO: 158847 - DNA, 20 bp, Artificial Sequence
  Description of Artificial Sequence: Synthetic oligonucleotide
  Target: LAMA2; (+) strand; PAM type: NRG; PAM sequence: GAG
gataggtttctgttctcaag

SEQ ID NO: 158848 - DNA, 20 bp, Artificial Sequence
  Description of Artificial Sequence: Synthetic oligonucleotide
  Target: LAMA2; (+) strand; PAM type: NRG; PAM sequence: TAG
aggtttctgttctcaaggag

SEQ ID NO: 158849 - DNA, 20 bp, Artificial Sequence
  Description of Artificial Sequence: Synthetic oligonucleotide
  Target: LAMA2; (+) strand; PAM type: NRG; PAM sequence: AAG
gttctcaaggagtagcccat

SEQ ID NO: 158850 - DNA, 20 bp, Artificial Sequence
  Description of Artificial Sequence: Synthetic oligonucleotide
  Target: LAMA2; (+) strand; PAM type: NRG; PAM sequence: AAG
ccataagctcatgccaacat

SEQ ID NO: 158851 - DNA, 20 bp, Artificial Sequence
  Description of Artificial Sequence: Synthetic oligonucleotide
  Target: LAMA2; (+) strand; PAM type: NRG; PAM sequence: TGG
gctcatgccaacataagtac

SEQ ID NO: 158852 - DNA, 20 bp, Artificial Sequence
  Description of Artificial Sequence: Synthetic oligonucleotide
  Target: LAMA2; (+) strand; PAM type: NRG; PAM sequence: TAG
gccaacataagtactggctt

SEQ ID NO: 158853 - DNA, 20 bp, Artificial Sequence
  Description of Artificial Sequence: Synthetic oligonucleotide
  Target: LAMA2; (+) strand; PAM type: NRG; PAM sequence: AAG
cttcaaaaccccgttgtgtt

SEQ ID NO: 158854 - DNA, 20 bp, Artificial Sequence
  Description of Artificial Sequence: Synthetic oligonucleotide
  Target: LAMA2; (+) strand; PAM type: NRG; PAM sequence: AGG
ttcaaaaccccgttgtgtta

SEQ ID NO: 158855 - DNA, 20 bp, Artificial Sequence
  Description of Artificial Sequence: Synthetic oligonucleotide
  Target: LAMA2; (+) strand; PAM type: NRG; PAM sequence: GAG
caaaaccccgttgtgttaag

SEQ ID NO: 158856 - DNA, 20 bp, Artificial Sequence
  Description of Artificial Sequence: Synthetic oligonucleotide
  Target: LAMA2; (+) strand; PAM type: NRG; PAM sequence: CAG
gttgtgttaaggagacttat

SEQ ID NO: 158857 - DNA, 20 bp, Artificial Sequence
  Description of Artificial Sequence: Synthetic oligonucleotide
  Target: LAMA2; (+) strand; PAM type: NRG; PAM sequence: AGG
ttgtgttaaggagacttatc

SEQ ID NO: 158858 - DNA, 20 bp, Artificial Sequence
  Description of Artificial Sequence: Synthetic oligonucleotide
  Target: LAMA2; (+) strand; PAM type: NRG; PAM sequence: CAG
ttaaggagacttatcaggcc

SEQ ID NO: 158859 - DNA, 20 bp, Artificial Sequence
  Description of Artificial Sequence: Synthetic oligonucleotide
  Target: LAMA2; (+) strand; PAM type: NRG; PAM sequence: TAG
aggcccagaaattctgtttc

SEQ ID NO: 158860 - DNA, 20 bp, Artificial Sequence
  Description of Artificial Sequence: Synthetic oligonucleotide
  Target: LAMA2; (+) strand; PAM type: NRG; PAM sequence: AAG
gtttctagatatatatccaa

SEQ ID NO: 158861 - DNA, 20 bp, Artificial Sequence
  Description of Artificial Sequence: Synthetic oligonucleotide
  Target: LAMA2; (+) strand; PAM type: NRG; PAM sequence: TAG
atatccaaaagaactgaaaa

SEQ ID NO: 158862 - DNA, 20 bp, Artificial Sequence
  Description of Artificial Sequence: Synthetic oligonucleotide
  Target: LAMA2; (+) strand; PAM type: NRG; PAM sequence: AGG
tatccaaaagaactgaaaat

SEQ ID NO: 158863 - DNA, 20 bp, Artificial Sequence
  Description of Artificial Sequence: Synthetic oligonucleotide
  Target: LAMA2; (+) strand; PAM type: NRG; PAM sequence: TAG
tatgtgttcatgaatatgaa

SEQ ID NO: 158864 - DNA, 20 bp, Artificial Sequence
  Description of Artificial Sequence: Synthetic oligonucleotide
  Target: LAMA2; (+) strand; PAM type: NRG; PAM sequence: TAG
aatagcaatattatttatga

SEQ ID NO: 158865 - DNA, 20 bp, Artificial Sequence
  Description of Artificial Sequence: Synthetic oligonucleotide
  Target: LAMA2; (+) strand; PAM type: NRG; PAM sequence: AAG
atattatttatgatagctcg

SEQ ID NO: 158866 - DNA, 20 bp, Artificial Sequence
  Description of Artificial Sequence: Synthetic oligonucleotide
  Target: LAMA2; (+) strand; PAM type: NRG; PAM sequence: AGG
tattatttatgatagctcga

SEQ ID NO: 158867 - DNA, 20 bp, Artificial Sequence
  Description of Artificial Sequence: Synthetic oligonucleotide
  Target: LAMA2; (+) strand; PAM type: NRG; PAM sequence: TAG
tatttatgatagctcgaagg

SEQ ID NO: 158868 - DNA, 20 bp, Artificial Sequence
  Description of Artificial Sequence: Synthetic oligonucleotide
  Target: LAMA2; (+) strand; PAM type: NRG; PAM sequence: TGG
atgaatgaataaacaaaatg

SEQ ID NO: 158869 - DNA, 20 bp, Artificial Sequence
  Description of Artificial Sequence: Synthetic oligonucleotide
  Target: LAMA2; (+) strand; PAM type: NRG; PAM sequence: CAG
caaaatgtggcatgtacatg

SEQ ID NO: 158870 - DNA, 20 bp, Artificial Sequence
  Description of Artificial Sequence: Synthetic oligonucleotide
  Target: LAMA2; (+) strand; PAM type: NRG; PAM sequence: TAG
catgtacatgcagtgaacat

SEQ ID NO: 158871 - DNA, 20 bp, Artificial Sequence
  Description of Artificial Sequence: Synthetic oligonucleotide
  Target: LAMA2; (+) strand; PAM type: NRG; PAM sequence: AAG
cagtgaacattagtcattaa

SEQ ID NO: 158872 - DNA, 20 bp, Artificial Sequence
  Description of Artificial Sequence: Synthetic oligonucleotide
  Target: LAMA2; (+) strand; PAM type: NRG; PAM sequence: AGG
agtgaacattagtcattaaa

SEQ ID NO: 158873 - DNA, 20 bp, Artificial Sequence
  Description of Artificial Sequence: Synthetic oligonucleotide
  Target: LAMA2; (+) strand; PAM type: NRG; PAM sequence: AAG
tactgatacatgctgcaatg

SEQ ID NO: 158874 - DNA, 20 bp, Artificial Sequence
  Description of Artificial Sequence: Synthetic oligonucleotide
  Target: LAMA2; (+) strand; PAM type: NRG; PAM sequence: TAG
catgctgcaatgaagttatc

SEQ ID NO: 158875 - DNA, 20 bp, Artificial Sequence
  Description of Artificial Sequence: Synthetic oligonucleotide
  Target: LAMA2; (+) strand; PAM type: NRG; PAM sequence: TAG
tgcaatgaagttatctagaa

SEQ ID NO: 158876 - DNA, 20 bp, Artificial Sequence
  Description of Artificial Sequence: Synthetic oligonucleotide
  Target: LAMA2; (+) strand; PAM type: NRG; PAM sequence: AGG
gcaatgaagttatctagaat

SEQ ID NO: 158877 - DNA, 20 bp, Artificial Sequence
  Description of Artificial Sequence: Synthetic oligonucleotide
  Target: LAMA2; (+) strand; PAM type: NRG; PAM sequence: TAG
atctagaataggtaacttca

SEQ ID NO: 158878 - DNA, 20 bp, Artificial Sequence
  Description of Artificial Sequence: Synthetic oligonucleotide
  Target: LAMA2; (+) strand; PAM type: NRG; PAM sequence: AAG
aggtaacttcatagcaacaa

SEQ ID NO: 158879 - DNA, 20 bp, Artificial Sequence
  Description of Artificial Sequence: Synthetic oligonucleotide
  Target: LAMA2; (+) strand; PAM type: NRG; PAM sequence: CAG
taacttcatagcaacaaaag

SEQ ID NO: 158880 - DNA, 20 bp, Artificial Sequence
  Description of Artificial Sequence: Synthetic oligonucleotide
  Target: LAMA2; (+) strand; PAM type: NRG; PAM sequence: TAG
tagcaacaaaagcagattgt

SEQ ID NO: 158881 - DNA, 20 bp, Artificial Sequence
  Description of Artificial Sequence: Synthetic oligonucleotide
  Target: LAMA2; (+) strand; PAM type: NRG; PAM sequence: CAG
aaaagcagattgttagttta

SEQ ID NO: 158882 - DNA, 20 bp, Artificial Sequence
  Description of Artificial Sequence: Synthetic oligonucleotide
  Target: LAMA2; (+) strand; PAM type: NRG; PAM sequence: AGG
aaagcagattgttagtttac

SEQ ID NO: 158883 - DNA, 20 bp, Artificial Sequence
  Description of Artificial Sequence: Synthetic oligonucleotide
  Target: LAMA2; (+) strand; PAM type: NRG; PAM sequence: GGG
aagcagattgttagtttaca

SEQ ID NO: 158884 - DNA, 20 bp, Artificial Sequence
  Description of Artificial Sequence: Synthetic oligonucleotide
  Target: LAMA2; (+) strand; PAM type: NRG; PAM sequence: GGG
agcagattgttagtttacag

SEQ ID NO: 158885 - DNA, 20 bp, Artificial Sequence
  Description of Artificial Sequence: Synthetic oligonucleotide
  Target: LAMA2; (+) strand; PAM type: NRG; PAM sequence: TAG
gattgttagtttacaggggt

SEQ ID NO: 158886 - DNA, 20 bp, Artificial Sequence
  Description of Artificial Sequence: Synthetic oligonucleotide
  Target: LAMA2; (+) strand; PAM type: NRG; PAM sequence: GAG
ttgttagtttacaggggtta

SEQ ID NO: 158887 - DNA, 20 bp, Artificial Sequence
  Description of Artificial Sequence: Synthetic oligonucleotide
  Target: LAMA2; (+) strand; PAM type: NRG; PAM sequence: AGG
tgttagtttacaggggttag

SEQ ID NO: 158888 - DNA, 20 bp, Artificial Sequence
  Description of Artificial Sequence: Synthetic oligonucleotide
  Target: LAMA2; (+) strand; PAM type: NRG; PAM sequence: AAG
tagtttacaggggttagagg

SEQ ID NO: 158889 - DNA, 20 bp, Artificial Sequence
  Description of Artificial Sequence: Synthetic oligonucleotide
  Target: LAMA2; (+) strand; PAM type: NRG; PAM sequence: GAG
gtttacaggggttagaggaa

SEQ ID NO: 158890 - DNA, 20 bp, Artificial Sequence
  Description of Artificial Sequence: Synthetic oligonucleotide
  Target: LAMA2; (+) strand; PAM type: NRG; PAM sequence: AGG
tttacaggggttagaggaag

SEQ ID NO: 158891 - DNA, 20 bp, Artificial Sequence
  Description of Artificial Sequence: Synthetic oligonucleotide
  Target: LAMA2; (+) strand; PAM type: NRG; PAM sequence: GGG
ttacaggggttagaggaaga

SEQ ID NO: 158892 - DNA, 20 bp, Artificial Sequence
  Description of Artificial Sequence: Synthetic oligonucleotide
  Target: LAMA2; (+) strand; PAM type: NRG; PAM sequence: GGG
tacaggggttagaggaagag

SEQ ID NO: 158893 - DNA, 20 bp, Artificial Sequence
  Description of Artificial Sequence: Synthetic oligonucleotide
  Target: LAMA2; (+) strand; PAM type: NRG; PAM sequence: AAG
gggttagaggaagaggggaa

SEQ ID NO: 158894 - DNA, 20 bp, Artificial Sequence
  Description of Artificial Sequence: Synthetic oligonucleotide
  Target: LAMA2; (+) strand; PAM type: NRG; PAM sequence: GAG
gttagaggaagaggggaaaa

SEQ ID NO: 158895 - DNA, 20 bp, Artificial Sequence
  Description of Artificial Sequence: Synthetic oligonucleotide
  Target: LAMA2; (+) strand; PAM type: NRG; PAM sequence: TGG
aaaagagaatgactgcctaa

SEQ ID NO: 158896 - DNA, 20 bp, Artificial Sequence
  Description of Artificial Sequence: Synthetic oligonucleotide
  Target: LAMA2; (+) strand; PAM type: NRG; PAM sequence: TGG
aatgactgcctaatggattc

SEQ ID NO: 158897 - DNA, 20 bp, Artificial Sequence
  Description of Artificial Sequence: Synthetic oligonucleotide
  Target: LAMA2; (+) strand; PAM type: NRG; PAM sequence: GGG
atgactgcctaatggattct

SEQ ID NO: 158898 - DNA, 20 bp, Artificial Sequence
  Description of Artificial Sequence: Synthetic oligonucleotide
  Target: LAMA2; (+) strand; PAM type: NRG; PAM sequence: TGG
atggattctgggttttcttt

SEQ ID NO: 158899 - DNA, 20 bp, Artificial Sequence
  Description of Artificial Sequence: Synthetic oligonucleotide
  Target: LAMA2; (+) strand; PAM type: NRG; PAM sequence: GGG
tggattctgggttttctttt

SEQ ID NO: 158900 - DNA, 20 bp, Artificial Sequence
  Description of Artificial Sequence: Synthetic oligonucleotide
  Target: LAMA2; (+) strand; PAM type: NRG; PAM sequence: TAG
tttgggctgataaaatgtct

SEQ ID NO: 158901 - DNA, 20 bp, Artificial Sequence
  Description of Artificial Sequence: Synthetic oligonucleotide
  Target: LAMA2; (+) strand; PAM type: NRG; PAM sequence: TAG
ctgataaaatgtcttagaat

SEQ ID NO: 158902 - DNA, 20 bp, Artificial Sequence
  Description of Artificial Sequence: Synthetic oligonucleotide
  Target: LAMA2; (+) strand; PAM type: NRG; PAM sequence: TAG
ttagaattagatatatgtcg

SEQ ID NO: 158903 - DNA, 20 bp, Artificial Sequence
  Description of Artificial Sequence: Synthetic oligonucleotide
  Target: LAMA2; (+) strand; PAM type: NRG; PAM sequence: CAG
attgtaaatgtactaaatca

SEQ ID NO: 158904 - DNA, 20 bp, Artificial Sequence
  Description of Artificial Sequence: Synthetic oligonucleotide
  Target: LAMA2; (+) strand; PAM type: NRG; PAM sequence: TAG
tttattttttaaattttaaa

SEQ ID NO: 158905 - DNA, 20 bp, Artificial Sequence
  Description of Artificial Sequence: Synthetic oligonucleotide
  Target: LAMA2; (+) strand; PAM type: NRG; PAM sequence: AGG
ttattttttaaattttaaat

SEQ ID NO: 158906 - DNA, 20 bp, Artificial Sequence
  Description of Artificial Sequence: Synthetic oligonucleotide
  Target: LAMA2; (+) strand; PAM type: NRG; PAM sequence: AAG
tcatcctaccccaaatgtca

SEQ ID NO: 158907 - DNA, 20 bp, Artificial Sequence
  Description of Artificial Sequence: Synthetic oligonucleotide
  Target: LAMA2; (+) strand; PAM type: NRG; PAM sequence: AAG
atttcatctaaactaatgac

SEQ ID NO: 158908 - DNA, 20 bp, Artificial Sequence
  Description of Artificial Sequence: Synthetic oligonucleotide
  Target: LAMA2; (+) strand; PAM type: NRG; PAM sequence: AAG
atctaaactaatgacaagaa

SEQ ID NO: 158909 - DNA, 20 bp, Artificial Sequence
  Description of Artificial Sequence: Synthetic oligonucleotide
  Target: LAMA2; (+) strand; PAM type: NRG; PAM sequence: CAG
gacactgcatttttcattga

SEQ ID NO: 158910 - DNA, 20 bp, Artificial Sequence
  Description of Artificial Sequence: Synthetic oligonucleotide
  Target: LAMA2; (+) strand; PAM type: NRG; PAM sequence: AGG
acactgcatttttcattgac

SEQ ID NO: 158911 - DNA, 20 bp, Artificial Sequence
  Description of Artificial Sequence: Synthetic oligonucleotide
  Target: LAMA2; (+) strand; PAM type: NRG; PAM sequence: GGG
cactgcatttttcattgaca

SEQ ID NO: 158912 - DNA, 20 bp, Artificial Sequence
  Description of Artificial Sequence: Synthetic oligonucleotide
  Target: LAMA2; (+) strand; PAM type: NRG; PAM sequence: CAG
ttttcattgacagggttcct

SEQ ID NO: 158913 - DNA, 20 bp, Artificial Sequence
  Description of Artificial Sequence: Synthetic oligonucleotide
  Target: LAMA2; (+) strand; PAM type: NRG; PAM sequence: GAG
cattgacagggttcctcagt

SEQ ID NO: 158914 - DNA, 20 bp, Artificial Sequence
  Description of Artificial Sequence: Synthetic oligonucleotide
  Target: LAMA2; (+) strand; PAM type: NRG; PAM sequence: AGG
attgacagggttcctcagtg

SEQ ID NO: 158915 - DNA, 20 bp, Artificial Sequence
  Description of Artificial Sequence: Synthetic oligonucleotide
  Target: LAMA2; (+) strand; PAM type: NRG; PAM sequence: GGG
ttgacagggttcctcagtga

SEQ ID NO: 158916 - DNA, 20 bp, Artificial Sequence
  Description of Artificial Sequence: Synthetic oligonucleotide
  Target: LAMA2; (+) strand; PAM type: NRG; PAM sequence: GGG
tgacagggttcctcagtgag

SEQ ID NO: 158917 - DNA, 20 bp, Artificial Sequence
  Description of Artificial Sequence: Synthetic oligonucleotide
  Target: LAMA2; (+) strand; PAM type: NRG; PAM sequence: GGG
gacagggttcctcagtgagg

SEQ ID NO: 158918 - DNA, 20 bp, Artificial Sequence
  Description of Artificial Sequence: Synthetic oligonucleotide
  Target: LAMA2; (+) strand; PAM type: NRG; PAM sequence: GGG
acagggttcctcagtgaggg

SEQ ID NO: 158919 - DNA, 20 bp, Artificial Sequence
  Description of Artificial Sequence: Synthetic oligonucleotide
  Target: LAMA2; (+) strand; PAM type: NRG; PAM sequence: AAG
tcctcagtgaggggggaaaa

SEQ ID NO: 158920 - DNA, 20 bp, Artificial Sequence
  Description of Artificial Sequence: Synthetic oligonucleotide
  Target: LAMA2; (+) strand; PAM type: NRG; PAM sequence: TAG
cacatgtaacctaaacacta

SEQ ID NO: 158921 - DNA, 20 bp, Artificial Sequence
  Description of Artificial Sequence: Synthetic oligonucleotide
  Target: LAMA2; (+) strand; PAM type: NRG; PAM sequence: AGG
acatgtaacctaaacactat

SEQ ID NO: 158922 - DNA, 20 bp, Artificial Sequence
  Description of Artificial Sequence: Synthetic oligonucleotide
  Target: LAMA2; (+) strand; PAM type: NRG; PAM sequence: CAG
gtaacctaaacactatagga

SEQ ID NO: 158923 - DNA, 20 bp, Artificial Sequence
  Description of Artificial Sequence: Synthetic oligonucleotide
  Target: LAMA2; (+) strand; PAM type: NRG; PAM sequence: TAG
acagtgatatttgcctaatc

SEQ ID NO: 158924 - DNA, 20 bp, Artificial Sequence
  Description of Artificial Sequence: Synthetic oligonucleotide
  Target: LAMA2; (+) strand; PAM type: NRG; PAM sequence: CAG
cctaatctagaaccttctac

SEQ ID NO: 158925 - DNA, 20 bp, Artificial Sequence
  Description of Artificial Sequence: Synthetic oligonucleotide
  Target: LAMA2; (+) strand; PAM type: NRG; PAM sequence: AGG
ctaatctagaaccttctacc

SEQ ID NO: 158926 - DNA, 20 bp, Artificial Sequence
  Description of Artificial Sequence: Synthetic oligonucleotide
  Target: LAMA2; (+) strand; PAM type: NRG; PAM sequence: AAG
aaccttctaccaggttgtcc

SEQ ID NO: 158927 - DNA, 20 bp, Artificial Sequence
  Description of Artificial Sequence: Synthetic oligonucleotide
  Target: LAMA2; (+) strand; PAM type: NRG; PAM sequence: TAG
ggttgtccaagatgtgcccc

SEQ ID NO: 158928 - DNA, 20 bp, Artificial Sequence
  Description of Artificial Sequence: Synthetic oligonucleotide
  Target: LAMA2; (+) strand; PAM type: NRG; PAM sequence: GAG
ttgtccaagatgtgccccta

SEQ ID NO: 158929 - DNA, 20 bp, Artificial Sequence
  Description of Artificial Sequence: Synthetic oligonucleotide
  Target: LAMA2; (+) strand; PAM type: NRG; PAM sequence: TAG
agatgtgcccctagagaata

SEQ ID NO: 158930 - DNA, 20 bp, Artificial Sequence
  Description of Artificial Sequence: Synthetic oligonucleotide
  Target: LAMA2; (+) strand; PAM type: NRG; PAM sequence: TAG
agaatatagcactcaattaa

SEQ ID NO: 158931 - DNA, 20 bp, Artificial Sequence
  Description of Artificial Sequence: Synthetic oligonucleotide
  Target: LAMA2; (+) strand; PAM type: NRG; PAM sequence: TGG
tagcactcaattaatagtgt

SEQ ID NO: 158932 - DNA, 20 bp, Artificial Sequence
  Description of Artificial Sequence: Synthetic oligonucleotide
  Target: LAMA2; (+) strand; PAM type: NRG; PAM sequence: GAG
ctcaattaatagtgttggat

SEQ ID NO: 158933 - DNA, 20 bp, Artificial Sequence
  Description of Artificial Sequence: Synthetic oligonucleotide
  Target: LAMA2; (+) strand; PAM type: NRG; PAM sequence: CAG
gtgttggatgagtttattta

SEQ ID NO: 158934 - DNA, 20 bp, Artificial Sequence
  Description of Artificial Sequence: Synthetic oligonucleotide
  Target: LAMA2; (+) strand; PAM type: NRG; PAM sequence: AGG
tgttggatgagtttatttac

SEQ ID NO: 158935 - DNA, 20 bp, Artificial Sequence
  Description of Artificial Sequence: Synthetic oligonucleotide
  Target: LAMA2; (+) strand; PAM type: NRG; PAM sequence: AAG
gatgagtttatttacaggta

SEQ ID NO: 158936 - DNA, 20 bp, Artificial Sequence
  Description of Artificial Sequence: Synthetic oligonucleotide
  Target: LAMA2; (+) strand; PAM type: NRG; PAM sequence: TAG
aaagataattgccttgtgtt

SEQ ID NO: 158937 - DNA, 20 bp, Artificial Sequence
  Description of Artificial Sequence: Synthetic oligonucleotide
  Target: LAMA2; (+) strand; PAM type: NRG; PAM sequence: GAG
agataattgccttgtgttta

SEQ ID NO: 158938 - DNA, 20 bp, Artificial Sequence
  Description of Artificial Sequence: Synthetic oligonucleotide
  Target: LAMA2; (+) strand; PAM type: NRG; PAM sequence: AGG
gataattgccttgtgtttag

SEQ ID NO: 158939 - DNA, 20 bp, Artificial Sequence
  Description of Artificial Sequence: Synthetic oligonucleotide
  Target: LAMA2; (+) strand; PAM type: NRG; PAM sequence: GGG
ataattgccttgtgtttaga

SEQ ID NO: 158940 - DNA, 20 bp, Artificial Sequence
  Description of Artificial Sequence: Synthetic oligonucleotide
  Target: LAMA2; (+) strand; PAM type: NRG; PAM sequence: TGG
tgtgtttagagggtgccatc

SEQ ID NO: 158941 - DNA, 20 bp, Artificial Sequence
  Description of Artificial Sequence: Synthetic oligonucleotide
  Target: LAMA2; (+) strand; PAM type: NRG; PAM sequence: CAG
agagggtgccatctggcact

SEQ ID NO: 158942 - DNA, 20 bp, Artificial Sequence
  Description of Artificial Sequence: Synthetic oligonucleotide
  Target: LAMA2; (+) strand; PAM type: NRG; PAM sequence: CAG
gggtgccatctggcactcag

SEQ ID NO: 158943 - DNA, 20 bp, Artificial Sequence
  Description of Artificial Sequence: Synthetic oligonucleotide
  Target: LAMA2; (+) strand; PAM type: NRG; PAM sequence: CAG
gccatctggcactcagcagc

SEQ ID NO: 158944 - DNA, 20 bp, Artificial Sequence
  Description of Artificial Sequence: Synthetic oligonucleotide
  Target: LAMA2; (+) strand; PAM type: NRG; PAM sequence: AGG
ccatctggcactcagcagcc

SEQ ID NO: 158945 - DNA, 20 bp, Artificial Sequence
  Description of Artificial Sequence: Synthetic oligonucleotide
  Target: LAMA2; (+) strand; PAM type: NRG; PAM sequence: TGG
tccatccaactgcctatatc

SEQ ID NO: 158946 - DNA, 20 bp, Artificial Sequence
  Description of Artificial Sequence: Synthetic oligonucleotide
  Target: LAMA2; (+) strand; PAM type: NRG; PAM sequence: CAG
ctgcctatatctggtgattt

SEQ ID NO: 158947 - DNA, 20 bp, Artificial Sequence
  Description of Artificial Sequence: Synthetic oligonucleotide
  Target: LAMA2; (+) strand; PAM type: NRG; PAM sequence: AGG
tgcctatatctggtgatttc

SEQ ID NO: 158948 - DNA, 20 bp, Artificial Sequence
  Description of Artificial Sequence: Synthetic oligonucleotide
  Target: LAMA2; (+) strand; PAM type: NRG; PAM sequence: GGG
gcctatatctggtgatttca

SEQ ID NO: 158949 - DNA, 20 bp, Artificial Sequence
  Description of Artificial Sequence: Synthetic oligonucleotide
  Target: LAMA2; (+) strand; PAM type: NRG; PAM sequence: GAG
tctgcttcctgatcatatat

SEQ ID NO: 158950 - DNA, 20 bp, Artificial Sequence
  Description of Artificial Sequence: Synthetic oligonucleotide
  Target: LAMA2; (+) strand; PAM type: NRG; PAM sequence: AAG
atgagctcatacatattcaa

SEQ ID NO: 158951 - DNA, 20 bp, Artificial Sequence
  Description of Artificial Sequence: Synthetic oligonucleotide
  Target: LAMA2; (+) strand; PAM type: NRG; PAM sequence: AAG
acatattcaaaagtactgtc

SEQ ID NO: 158952 - DNA, 20 bp, Artificial Sequence
  Description of Artificial Sequence: Synthetic oligonucleotide
  Target: LAMA2; (+) strand; PAM type: NRG; PAM sequence: TAG
caaaagtactgtcaagtgtc

SEQ ID NO: 158953 - DNA, 20 bp, Artificial Sequence
  Description of Artificial Sequence: Synthetic oligonucleotide
  Target: LAMA2; (+) strand; PAM type: NRG; PAM sequence: AGG
aaaagtactgtcaagtgtct

SEQ ID NO: 158954 - DNA, 20 bp, Artificial Sequence
  Description of Artificial Sequence: Synthetic oligonucleotide
  Target: LAMA2; (+) strand; PAM type: NRG; PAM sequence: TAG
tactgtcaagtgtctaggat

SEQ ID NO: 158955 - DNA, 20 bp, Artificial Sequence
  Description of Artificial Sequence: Synthetic oligonucleotide
  Target: LAMA2; (+) strand; PAM type: NRG; PAM sequence: AAG
tcaagtgtctaggattagca

SEQ ID NO: 158956 - DNA, 20 bp, Artificial Sequence
  Description of Artificial Sequence: Synthetic oligonucleotide
  Target: LAMA2; (+) strand; PAM type: NRG; PAM sequence: TGG
agtgtctaggattagcaaag

SEQ ID NO: 158957 - DNA, 20 bp, Artificial Sequence
  Description of Artificial Sequence: Synthetic oligonucleotide
  Target: LAMA2; (+) strand; PAM type: NRG; PAM sequence: GGG
gtgtctaggattagcaaagt

SEQ ID NO: 158958 - DNA, 20 bp, Artificial Sequence
  Description of Artificial Sequence: Synthetic oligonucleotide
  Target: LAMA2; (+) strand; PAM type: NRG; PAM sequence: GGG
tgtctaggattagcaaagtg

SEQ ID NO: 158959 - DNA, 20 bp, Artificial Sequence
  Description of Artificial Sequence: Synthetic oligonucleotide
  Target: LAMA2; (+) strand; PAM type: NRG; PAM sequence: GGG
gtctaggattagcaaagtgg

SEQ ID NO: 158960 - DNA, 20 bp, Artificial Sequence
  Description of Artificial Sequence: Synthetic oligonucleotide
  Target: LAMA2; (+) strand; PAM type: NRG; PAM sequence: AAG
gattagcaaagtgggggtaa

SEQ ID NO: 158961 - DNA, 20 bp, Artificial Sequence
  Description of Artificial Sequence: Synthetic oligonucleotide
  Target: LAMA2; (+) strand; PAM type: NRG; PAM sequence: TAG
ggtaaaagcaatgaaaattt

SEQ ID NO: 158962 - DNA, 20 bp, Artificial Sequence
  Description of Artificial Sequence: Synthetic oligonucleotide
  Target: LAMA2; (+) strand; PAM type: NRG; PAM sequence: AAG
tttagaaatctattgctgaa

SEQ ID NO: 158963 - DNA, 20 bp, Artificial Sequence
  Description of Artificial Sequence: Synthetic oligonucleotide
  Target: LAMA2; (+) strand; PAM type: NRG; PAM sequence: TGG
ttgctgaaaagcttacaatt

SEQ ID NO: 158964 - DNA, 20 bp, Artificial Sequence
  Description of Artificial Sequence: Synthetic oligonucleotide
  Target: LAMA2; (+) strand; PAM type: NRG; PAM sequence: AAG
aaaagcttacaatttggata

SEQ ID NO: 158965 - DNA, 20 bp, Artificial Sequence
  Description of Artificial Sequence: Synthetic oligonucleotide
  Target: LAMA2; (+) strand; PAM type: NRG; PAM sequence: AAG
gataaagatcatcacttttg

SEQ ID NO: 158966 - DNA, 20 bp, Artificial Sequence
  Description of Artificial Sequence: Synthetic oligonucleotide
  Target: LAMA2; (+) strand; PAM type: NRG; PAM sequence: GAG
atatgtttacaccttgtaat

SEQ ID NO: 158967 - DNA, 20 bp, Artificial Sequence
  Description of Artificial Sequence: Synthetic oligonucleotide
  Target: LAMA2; (+) strand; PAM type: NRG; PAM sequence: TAG
acaccttgtaatgagccttt

SEQ ID NO: 158968 - DNA, 20 bp, Artificial Sequence
  Description of Artificial Sequence: Synthetic oligonucleotide
  Target: LAMA2; (+) strand; PAM type: NRG; PAM sequence: TGG
agccttttagctttgctctc

SEQ ID NO: 158969 - DNA, 20 bp, Artificial Sequence
  Description of Artificial Sequence: Synthetic oligonucleotide
  Target: LAMA2; (+) strand; PAM type: NRG; PAM sequence: CAG
tggcttgattcccaaattcc

SEQ ID NO: 158970 - DNA, 20 bp, Artificial Sequence
  Description of Artificial Sequence: Synthetic oligonucleotide
  Target: LAMA2; (+) strand; PAM type: NRG; PAM sequence: AAG
cattgattcccaaatctaac

SEQ ID NO: 158971 - DNA, 20 bp, Artificial Sequence
  Description of Artificial Sequence: Synthetic oligonucleotide
  Target: LAMA2; (+) strand; PAM type: NRG; PAM sequence: TGG
cccaaatctaacaagttatt

SEQ ID NO: 158972 - DNA, 20 bp, Artificial Sequence
  Description of Artificial Sequence: Synthetic oligonucleotide
  Target: LAMA2; (+) strand; PAM type: NRG; PAM sequence: GAG
aaaaatctaccatcactcct

SEQ ID NO: 158973 - DNA, 20 bp, Artificial Sequence
  Description of Artificial Sequence: Synthetic oligonucleotide
  Target: LAMA2; (+) strand; PAM type: NRG; PAM sequence: AAG
atctaccatcactcctgaga

SEQ ID NO: 158974 - DNA, 20 bp, Artificial Sequence
  Description of Artificial Sequence: Synthetic oligonucleotide
  Target: LAMA2; (+) strand; PAM type: NRG; PAM sequence: AGG
tctaccatcactcctgagaa

SEQ ID NO: 158975 - DNA, 20 bp, Artificial Sequence
  Description of Artificial Sequence: Synthetic oligonucleotide
  Target: LAMA2; (+) strand; PAM type: NRG; PAM sequence: CAG
gagaaaggaactgaaaaatg

SEQ ID NO: 158976 - DNA, 20 bp, Artificial Sequence
  Description of Artificial Sequence: Synthetic oligonucleotide
  Target: LAMA2; (+) strand; PAM type: NRG; PAM sequence: AGG
agaaaggaactgaaaaatgc

SEQ ID NO: 158977 - DNA, 20 bp, Artificial Sequence
  Description of Artificial Sequence: Synthetic oligonucleotide
  Target: LAMA2; (+) strand; PAM type: NRG; PAM sequence: TAG
gaactgaaaaatgcaggcca

SEQ ID NO: 158978 - DNA, 20 bp, Artificial Sequence
  Description of Artificial Sequence: Synthetic oligonucleotide
  Target: LAMA2; (+) strand; PAM type: NRG; PAM sequence: GAG
tgaaaaatgcaggccatagc

SEQ ID NO: 158979 - DNA, 20 bp, Artificial Sequence
  Description of Artificial Sequence: Synthetic oligonucleotide
  Target: LAMA2; (+) strand; PAM type: NRG; PAM sequence: CAG
atgcaggccatagcgagaat

SEQ ID NO: 158980 - DNA, 20 bp, Artificial Sequence
  Description of Artificial Sequence: Synthetic oligonucleotide
  Target: LAMA2; (+) strand; PAM type: NRG; PAM sequence: TGG
aatcagttgcttctttctta

SEQ ID NO: 158981 - DNA, 20 bp, Artificial Sequence
  Description of Artificial Sequence: Synthetic oligonucleotide
  Target: LAMA2; (+) strand; PAM type: NRG; PAM sequence: AAG
tgcttctttcttatggttac

SEQ ID NO: 158982 - DNA, 20 bp, Artificial Sequence
  Description of Artificial Sequence: Synthetic oligonucleotide
  Target: LAMA2; (+) strand; PAM type: NRG; PAM sequence: CGG
atatgctataaaatgtctat

SEQ ID NO: 158983 - DNA, 20 bp, Artificial Sequence
  Description of Artificial Sequence: Synthetic oligonucleotide
  Target: LAMA2; (+) strand; PAM type: NRG; PAM sequence: GAG
tttaaaactgtgattattat

SEQ ID NO: 158984 - DNA, 20 bp, Artificial Sequence
  Description of Artificial Sequence: Synthetic oligonucleotide
  Target: LAMA2; (+) strand; PAM type: NRG; PAM sequence: TAG
ctgtgattattatgagtcaa

SEQ ID NO: 158985 - DNA, 20 bp, Artificial Sequence
  Description of Artificial Sequence: Synthetic oligonucleotide
  Target: LAMA2; (+) strand; PAM type: NRG; PAM sequence: TAG
tgattattatgagtcaatag

SEQ ID NO: 158986 - DNA, 20 bp, Artificial Sequence
  Description of Artificial Sequence: Synthetic oligonucleotide
  Target: LAMA2; (+) strand; PAM type: NRG; PAM sequence: TAG
gtcatttaattatgtgctct

SEQ ID NO: 158987 - DNA, 20 bp, Artificial Sequence
  Description of Artificial Sequence: Synthetic oligonucleotide
  Target: LAMA2; (+) strand; PAM type: NRG; PAM sequence: GAG
catttaattatgtgctctta

SEQ ID NO: 158988 - DNA, 20 bp, Artificial Sequence
  Description of Artificial Sequence: Synthetic oligonucleotide
  Target: LAMA2; (+) strand; PAM type: NRG; PAM sequence: TGG
tttcatgcactaaaatgatt

SEQ ID NO: 158989 - DNA, 20 bp, Artificial Sequence
  Description of Artificial Sequence: Synthetic oligonucleotide
  Target: LAMA2; (+) strand; PAM type: NRG; PAM sequence: GAG
tcatgcactaaaatgatttg

SEQ ID NO: 158990 - DNA, 20 bp, Artificial Sequence
  Description of Artificial Sequence: Synthetic oligonucleotide
  Target: LAMA2; (+) strand; PAM type: NRG; PAM sequence: TAG
aaatgatttggagatacaaa

SEQ ID NO: 158991 - DNA, 20 bp, Artificial Sequence
  Description of Artificial Sequence: Synthetic oligonucleotide
  Target: LAMA2; (+) strand; PAM type: NRG; PAM sequence: AAG
ttggagatacaaatagtgaa

SEQ ID NO: 158992 - DNA, 20 bp, Artificial Sequence
  Description of Artificial Sequence: Synthetic oligonucleotide
  Target: LAMA2; (+) strand; PAM type: NRG; PAM sequence: TAG
atatttcttgtaatgttttg

SEQ ID NO: 158993 - DNA, 20 bp, Artificial Sequence
  Description of Artificial Sequence: Synthetic oligonucleotide
  Target: LAMA2; (+) strand; PAM type: NRG; PAM sequence: TGG
gttttgtagtaatttttatt

SEQ ID NO: 158994 - DNA, 20 bp, Artificial Sequence
  Description of Artificial Sequence: Synthetic oligonucleotide
  Target: LAMA2; (+) strand; PAM type: NRG; PAM sequence: CAG
taatttttatttggtttcaa

SEQ ID NO: 158995 - DNA, 20 bp, Artificial Sequence
  Description of Artificial Sequence: Synthetic oligonucleotide
  Target: LAMA2; (+) strand; PAM type: NRG; PAM sequence: TAG
gtttcaacagtcaatgaaaa

SEQ ID NO: 158996 - DNA, 20 bp, Artificial Sequence
  Description of Artificial Sequence: Synthetic oligonucleotide
  Target: LAMA2; (+) strand; PAM type: NRG; PAM sequence: AGG
tttcaacagtcaatgaaaat

SEQ ID NO: 158997 - DNA, 20 bp, Artificial Sequence
  Description of Artificial Sequence: Synthetic oligonucleotide
  Target: LAMA2; (+) strand; PAM type: NRG; PAM sequence: TAG
aaataggttaataaaatgtc

SEQ ID NO: 158998 - DNA, 20 bp, Artificial Sequence
  Description of Artificial Sequence: Synthetic oligonucleotide
  Target: LAMA2; (+) strand; PAM type: NRG; PAM sequence: AAG
tgtgtgttacatattatacc

SEQ ID NO: 158999 - DNA, 20 bp, Artificial Sequence
  Description of Artificial Sequence: Synthetic oligonucleotide
  Target: LAMA2; (+) strand; PAM type: NRG; PAM sequence: AAG
gtgttacatattataccaag

SEQ ID NO: 159000 - DNA, 20 bp, Artificial Sequence
  Description of Artificial Sequence: Synthetic oligonucleotide
  Target: LAMA2; (+) strand; PAM type: NRG; PAM sequence: AAG
tattcatttccttttaaatc

SEQ ID NO: 159001 - DNA, 20 bp, Artificial Sequence
  Description of Artificial Sequence: Synthetic oligonucleotide
  Target: LAMA2; (+) strand; PAM type: NRG; PAM sequence: TGG
ttccttttaaatcaagctca

SEQ ID NO: 159002 - DNA, 20 bp, Artificial Sequence
  Description of Artificial Sequence: Synthetic oligonucleotide
  Target: LAMA2; (+) strand; PAM type: NRG; PAM sequence: TGG
taaatcaagctcatggtgta

SEQ ID NO: 159003 - DNA, 20 bp, Artificial Sequence
  Description of Artificial Sequence: Synthetic oligonucleotide
  Target: LAMA2; (+) strand; PAM type: NRG; PAM sequence: TAG
attatattatctccattgta

SEQ ID NO: 159004 - DNA, 20 bp, Artificial Sequence
  Description of Artificial Sequence: Synthetic oligonucleotide
  Target: LAMA2; (+) strand; PAM type: NRG; PAM sequence: AAG
atattatctccattgtatag

SEQ ID NO: 159005 - DNA, 20 bp, Artificial Sequence
  Description of Artificial Sequence: Synthetic oligonucleotide
  Target: LAMA2; (+) strand; PAM type: NRG; PAM sequence: GAG
attgtatagaagaaaaaatt

SEQ ID NO: 159006 - DNA, 20 bp, Artificial Sequence
  Description of Artificial Sequence: Synthetic oligonucleotide
  Target: LAMA2; (+) strand; PAM type: NRG; PAM sequence: AGG
ttgtatagaagaaaaaattg

SEQ ID NO: 159007 - DNA, 20 bp, Artificial Sequence
  Description of Artificial Sequence: Synthetic oligonucleotide
  Target: LAMA2; (+) strand; PAM type: NRG; PAM sequence: TAG
tagaagaaaaaattgaggcc

SEQ ID NO: 159008 - DNA, 20 bp, Artificial Sequence
  Description of Artificial Sequence: Synthetic oligonucleotide
  Target: LAMA2; (+) strand; PAM type: NRG; PAM sequence: AAG
agaaaaaattgaggcctaga

SEQ ID NO: 159009 - DNA, 20 bp, Artificial Sequence
  Description of Artificial Sequence: Synthetic oligonucleotide
  Target: LAMA2; (+) strand; PAM type: NRG; PAM sequence: AAG
aattgaggcctagaaagaat

SEQ ID NO: 159010 - DNA, 20 bp, Artificial Sequence
  Description of Artificial Sequence: Synthetic oligonucleotide
  Target: LAMA2; (+) strand; PAM type: NRG; PAM sequence: TAG
aagaataagttattttcttc

SEQ ID NO: 159011 - DNA, 20 bp, Artificial Sequence
  Description of Artificial Sequence: Synthetic oligonucleotide
  Target: LAMA2; (+) strand; PAM type: NRG; PAM sequence: AGG
agaataagttattttcttct

SEQ ID NO: 159012 - DNA, 20 bp, Artificial Sequence
  Description of Artificial Sequence: Synthetic oligonucleotide
  Target: LAMA2; (+) strand; PAM type: NRG; PAM sequence: AAG
gttattttcttctaggccac

SEQ ID NO: 159013 - DNA, 20 bp, Artificial Sequence
  Description of Artificial Sequence: Synthetic oligonucleotide
  Target: LAMA2; (+) strand; PAM type: NRG; PAM sequence: AGG
ttattttcttctaggccaca

SEQ ID NO: 159014 - DNA, 20 bp, Artificial Sequence
  Description of Artificial Sequence: Synthetic oligonucleotide
  Target: LAMA2; (+) strand; PAM type: NRG; PAM sequence: TGG
tttcttctaggccacaaggc

SEQ ID NO: 159015 - DNA, 20 bp, Artificial Sequence
  Description of Artificial Sequence: Synthetic oligonucleotide
  Target: LAMA2; (+) strand; PAM type: NRG; PAM sequence: CAG
gccacaaggctggtaaatat

SEQ ID NO: 159016 - DNA, 20 bp, Artificial Sequence
  Description of Artificial Sequence: Synthetic oligonucleotide
  Target: LAMA2; (+) strand; PAM type: NRG; PAM sequence: GAG
cacaaggctggtaaatatca

SEQ ID NO: 159017 - DNA, 20 bp, Artificial Sequence
  Description of Artificial Sequence: Synthetic oligonucleotide
  Target: LAMA2; (+) strand; PAM type: NRG; PAM sequence: CAG
aggctggtaaatatcagaga

SEQ ID NO: 159018 - DNA, 20 bp, Artificial Sequence
  Description of Artificial Sequence: Synthetic oligonucleotide
  Target: LAMA2; (+) strand; PAM type: NRG; PAM sequence: AGG
ggctggtaaatatcagagac

SEQ ID NO: 159019 - DNA, 20 bp, Artificial Sequence
  Description of Artificial Sequence: Synthetic oligonucleotide
  Target: LAMA2; (+) strand; PAM type: NRG; PAM sequence: TGG
cagagacaggatataaatct

SEQ ID NO: 159020 - DNA, 20 bp, Artificial Sequence
  Description of Artificial Sequence: Synthetic oligonucleotide
  Target: LAMA2; (+) strand; PAM type: NRG; PAM sequence: AAG
aaactgtattcttaataatt

SEQ ID NO: 159021 - DNA, 20 bp, Artificial Sequence
  Description of Artificial Sequence: Synthetic oligonucleotide
  Target: LAMA2; (+) strand; PAM type: NRG; PAM sequence: AAG
ttcttaataattaagctttt

SEQ ID NO: 159022 - DNA, 20 bp, Artificial Sequence
  Description of Artificial Sequence: Synthetic oligonucleotide
  Target: LAMA2; (+) strand; PAM type: NRG; PAM sequence: TAG
gatgtccttttacacaaaaa

SEQ ID NO: 159023 - DNA, 20 bp, Artificial Sequence
  Description of Artificial Sequence: Synthetic oligonucleotide
  Target: LAMA2; (+) strand; PAM type: NRG; PAM sequence: AGG
atgtccttttacacaaaaat

SEQ ID NO: 159024 - DNA, 20 bp, Artificial Sequence
  Description of Artificial Sequence: Synthetic oligonucleotide
  Target: LAMA2; (+) strand; PAM type: NRG; PAM sequence: AAG
cttttacacaaaaataggaa

SEQ ID NO: 159025 - DNA, 20 bp, Artificial Sequence
  Description of Artificial Sequence: Synthetic oligonucleotide
  Target: LAMA2; (+) strand; PAM type: NRG; PAM sequence: AAG
tacacaaaaataggaaaagc

SEQ ID NO: 159026 - DNA, 20 bp, Artificial Sequence
  Description of Artificial Sequence: Synthetic oligonucleotide
  Target: LAMA2; (+) strand; PAM type: NRG; PAM sequence: AAG
caaaaataggaaaagcaagt

SEQ ID NO: 159027 - DNA, 20 bp, Artificial Sequence
  Description of Artificial Sequence: Synthetic oligonucleotide
  Target: LAMA2; (+) strand; PAM type: NRG; PAM sequence: TAG
ttatttaaaatgtgaatgca

SEQ ID NO: 159028 - DNA, 20 bp, Artificial Sequence
  Description of Artificial Sequence: Synthetic oligonucleotide
  Target: LAMA2; (+) strand; PAM type: NRG; PAM sequence: AAG
ttaaaatgtgaatgcatagt

SEQ ID NO: 159029 - DNA, 20 bp, Artificial Sequence
  Description of Artificial Sequence: Synthetic oligonucleotide
  Target: LAMA2; (+) strand; PAM type: NRG; PAM sequence: AAG
atgtgaatgcatagtaagaa

SEQ ID NO: 159030 - DNA, 20 bp, Artificial Sequence
  Description of Artificial Sequence: Synthetic oligonucleotide
  Target: LAMA2; (+) strand; PAM type: NRG; PAM sequence: CAG
gaaaagaaatatgtgtgtga

SEQ ID NO: 159031 - DNA, 20 bp, Artificial Sequence
  Description of Artificial Sequence: Synthetic oligonucleotide
  Target: LAMA2; (+) strand; PAM type: NRG; PAM sequence: TGG
tttttttccaattttccatt

SEQ ID NO: 159032 - DNA, 20 bp, Artificial Sequence
  Description of Artificial Sequence: Synthetic oligonucleotide
  Target: LAMA2; (+) strand; PAM type: NRG; PAM sequence: CAG
aattttccatttggccaaac

SEQ ID NO: 159033 - DNA, 20 bp, Artificial Sequence
  Description of Artificial Sequence: Synthetic oligonucleotide
  Target: LAMA2; (+) strand; PAM type: NRG; PAM sequence: GAG
cagcttttctctaaaataat

SEQ ID NO: 159034 - DNA, 20 bp, Artificial Sequence
  Description of Artificial Sequence: Synthetic oligonucleotide
  Target: LAMA2; (+) strand; PAM type: NRG; PAM sequence: CAG
aatcactctgctaaaatcac

SEQ ID NO: 159035 - DNA, 20 bp, Artificial Sequence
  Description of Artificial Sequence: Synthetic oligonucleotide
  Target: LAMA2; (+) strand; PAM type: NRG; PAM sequence: AAG
aaaatcaccagattgtacaa

SEQ ID NO: 159036 - DNA, 20 bp, Artificial Sequence
  Description of Artificial Sequence: Synthetic oligonucleotide
  Target: LAMA2; (+) strand; PAM type: NRG; PAM sequence: AAG
acaaaagtaccaataaaatg

SEQ ID NO: 159037 - DNA, 20 bp, Artificial Sequence
  Description of Artificial Sequence: Synthetic oligonucleotide
  Target: LAMA2; (+) strand; PAM type: NRG; PAM sequence: AGG
caaaagtaccaataaaatga

SEQ ID NO: 159038 - DNA, 20 bp, Artificial Sequence
  Description of Artificial Sequence: Synthetic oligonucleotide
  Target: LAMA2; (+) strand; PAM type: NRG; PAM sequence: TAG
taccaataaaatgaaggcca

SEQ ID NO: 159039 - DNA, 20 bp, Artificial Sequence
  Description of Artificial Sequence: Synthetic oligonucleotide
  Target: LAMA2; (+) strand; PAM type: NRG; PAM sequence: CAG
taaaatgaaggccatagata

SEQ ID NO: 159040 - DNA, 20 bp, Artificial Sequence
  Description of Artificial Sequence: Synthetic oligonucleotide
  Target: LAMA2; (+) strand; PAM type: NRG; PAM sequence: GAG
aaatgaaggccatagataca

SEQ ID NO: 159041 - DNA, 20 bp, Artificial Sequence
  Description of Artificial Sequence: Synthetic oligonucleotide
  Target: LAMA2; (+) strand; PAM type: NRG; PAM sequence: TGG
gccatagatacagagaacaa

SEQ ID NO: 159042 - DNA, 20 bp, Artificial Sequence
  Description of Artificial Sequence: Synthetic oligonucleotide
  Target: LAMA2; (+) strand; PAM type: NRG; PAM sequence: TAG
agagaacaatggatttaatt

SEQ ID NO: 159043 - DNA, 20 bp, Artificial Sequence
  Description of Artificial Sequence: Synthetic oligonucleotide
  Target: LAMA2; (+) strand; PAM type: NRG; PAM sequence: AGG
gagaacaatggatttaattt

SEQ ID NO: 159044 - DNA, 20 bp, Artificial Sequence
  Description of Artificial Sequence: Synthetic oligonucleotide
  Target: LAMA2; (+) strand; PAM type: NRG; PAM sequence: CAG
tttaggccaaaaacaaattc

SEQ ID NO: 159045 - DNA, 20 bp, Artificial Sequence
  Description of Artificial Sequence: Synthetic oligonucleotide
  Target: LAMA2; (+) strand; PAM type: NRG; PAM sequence: GAG
taggccaaaaacaaattcca

SEQ ID NO: 159046 - DNA, 20 bp, Artificial Sequence
  Description of Artificial Sequence: Synthetic oligonucleotide
  Target: LAMA2; (+) strand; PAM type: NRG; PAM sequence: AAG
caaattccagagatcattct

SEQ ID NO: 159047 - DNA, 20 bp, Artificial Sequence
  Description of Artificial Sequence: Synthetic oligonucleotide
  Target: LAMA2; (+) strand; PAM type: NRG; PAM sequence: CAG
ttccagagatcattctaagt

SEQ ID NO: 159048 - DNA, 20 bp, Artificial Sequence
  Description of Artificial Sequence: Synthetic oligonucleotide
  Target: LAMA2; (+) strand; PAM type: NRG; PAM sequence: GAG
tcattctaagtcagtcaact

SEQ ID NO: 159049 - DNA, 20 bp, Artificial Sequence
  Description of Artificial Sequence: Synthetic oligonucleotide
  Target: LAMA2; (+) strand; PAM type: NRG; PAM sequence: GAG
gtcagtcaactgagcacttt

SEQ ID NO: 159050 - DNA, 20 bp, Artificial Sequence
  Description of Artificial Sequence: Synthetic oligonucleotide
  Target: LAMA2; (+) strand; PAM type: NRG; PAM sequence: AAG
gtcaactgagcactttgaga

SEQ ID NO: 159051 - DNA, 20 bp, Artificial Sequence
  Description of Artificial Sequence: Synthetic oligonucleotide
  Target: LAMA2; (+) strand; PAM type: NRG; PAM sequence: TAG
ctgagcactttgagaaagtt

SEQ ID NO: 159052 - DNA, 20 bp, Artificial Sequence
  Description of Artificial Sequence: Synthetic oligonucleotide
  Target: LAMA2; (+) strand; PAM type: NRG; PAM sequence: AAG
agcttataccaactacaaac

SEQ ID NO: 159053 - DNA, 20 bp, Artificial Sequence
  Description of Artificial Sequence: Synthetic oligonucleotide
  Target: LAMA2; (+) strand; PAM type: NRG; PAM sequence: CAG
ttataccaactacaaacaag

SEQ ID NO: 159054 - DNA, 20 bp, Artificial Sequence
  Description of Artificial Sequence: Synthetic oligonucleotide
  Target: LAMA2; (+) strand; PAM type: NRG; PAM sequence: AAG
aaacaagcagatttatctct

SEQ ID NO: 159055 - DNA, 20 bp, Artificial Sequence
  Description of Artificial Sequence: Synthetic oligonucleotide
  Target: LAMA2; (+) strand; PAM type: NRG; PAM sequence: AAG
gcagatttatctctaagaaa

SEQ ID NO: 159056 - DNA, 20 bp, Artificial Sequence
  Description of Artificial Sequence: Synthetic oligonucleotide
  Target: LAMA2; (+) strand; PAM type: NRG; PAM sequence: AAG
catcttttatttcaatttaa

SEQ ID NO: 159057 - DNA, 20 bp, Artificial Sequence
  Description of Artificial Sequence: Synthetic oligonucleotide
  Target: LAMA2; (+) strand; PAM type: NRG; PAM sequence: AAG
tttatttcaatttaaaagct

SEQ ID NO: 159058 - DNA, 20 bp, Artificial Sequence
  Description of Artificial Sequence: Synthetic oligonucleotide
  Target: LAMA2; (+) strand; PAM type: NRG; PAM sequence: TGG
tttcaatttaaaagctaaga

SEQ ID NO: 159059 - DNA, 20 bp, Artificial Sequence
  Description of Artificial Sequence: Synthetic oligonucleotide
  Target: LAMA2; (+) strand; PAM type: NRG; PAM sequence: AAG
tacttctgctttccttgttt

SEQ ID NO: 159060 - DNA, 20 bp, Artificial Sequence
  Description of Artificial Sequence: Synthetic oligonucleotide
  Target: LAMA2; (+) strand; PAM type: NRG; PAM sequence: AAG
tttccttgtttaagcactaa

SEQ ID NO: 159061 - DNA, 20 bp, Artificial Sequence
  Description of Artificial Sequence: Synthetic oligonucleotide
  Target: LAMA2; (+) strand; PAM type: NRG; PAM sequence: AAG
tttaagcactaaaagaaatc

SEQ ID NO: 159062 - DNA, 20 bp, Artificial Sequence
  Description of Artificial Sequence: Synthetic oligonucleotide
  Target: LAMA2; (+) strand; PAM type: NRG; PAM sequence: CAG
aagcactaaaagaaatcaag

SEQ ID NO: 159063 - DNA, 20 bp, Artificial Sequence
  Description of Artificial Sequence: Synthetic oligonucleotide
  Target: LAMA2; (+) strand; PAM type: NRG; PAM sequence: TGG
aaaagaaatcaagcagtcat

SEQ ID NO: 159064 - DNA, 20 bp, Artificial Sequence
  Description of Artificial Sequence: Synthetic oligonucleotide
  Target: LAMA2; (+) strand; PAM type: NRG; PAM sequence: AAG
tggaatgttttcttttttaa

SEQ ID NO: 159065 - DNA, 20 bp, Artificial Sequence
  Description of Artificial Sequence: Synthetic oligonucleotide
  Target: LAMA2; (+) strand; PAM type: NRG; PAM sequence: TAG
aaaatgaaaatcaaaacaca

SEQ ID NO: 159066 - DNA, 20 bp, Artificial Sequence
  Description of Artificial Sequence: Synthetic oligonucleotide
  Target: LAMA2; (+) strand; PAM type: NRG; PAM sequence: AAG
gaaaatcaaaacacatagcc

SEQ ID NO: 159067 - DNA, 20 bp, Artificial Sequence
  Description of Artificial Sequence: Synthetic oligonucleotide
  Target: LAMA2; (+) strand; PAM type: NRG; PAM sequence: GAG
aaatcaaaacacatagccaa

SEQ ID NO: 159068 - DNA, 20 bp, Artificial Sequence
  Description of Artificial Sequence: Synthetic oligonucleotide
  Target: LAMA2; (+) strand; PAM type: NRG; PAM sequence: AAG
aaaacacatagccaagagcc

SEQ ID NO: 159069 - DNA, 20 bp, Artificial Sequence
  Description of Artificial Sequence: Synthetic oligonucleotide
  Target: LAMA2; (+) strand; PAM type: NRG; PAM sequence: GAG
aacacatagccaagagccaa

SEQ ID NO: 159070 - DNA, 20 bp, Artificial Sequence
  Description of Artificial Sequence: Synthetic oligonucleotide
  Target: LAMA2; (+) strand; PAM type: NRG; PAM sequence: GAG
atagccaagagccaagagac

SEQ ID NO: 159071 - DNA, 20 bp, Artificial Sequence
  Description of Artificial Sequence: Synthetic oligonucleotide
  Target: LAMA2; (+) strand; PAM type: NRG; PAM sequence: AGG
tagccaagagccaagagacg

SEQ ID NO: 159072 - DNA, 20 bp, Artificial Sequence
  Description of Artificial Sequence: Synthetic oligonucleotide
  Target: LAMA2; (+) strand; PAM type: NRG; PAM sequence: AAG
ccaagagccaagagacgagg

SEQ ID NO: 159073 - DNA, 20 bp, Artificial Sequence
  Description of Artificial Sequence: Synthetic oligonucleotide
  Target: LAMA2; (+) strand; PAM type: NRG; PAM sequence: CAG
agaacattctcatatctttt

SEQ ID NO: 159074 - DNA, 20 bp, Artificial Sequence
  Description of Artificial Sequence: Synthetic oligonucleotide
  Target: LAMA2; (+) strand; PAM type: NRG; PAM sequence: TGG
tctcatatcttttcagcatt

SEQ ID NO: 159075 - DNA, 20 bp, Artificial Sequence
  Description of Artificial Sequence: Synthetic oligonucleotide
  Target: LAMA2; (+) strand; PAM type: NRG; PAM sequence: GAG
tcatatcttttcagcatttg

SEQ ID NO: 159076 - DNA, 20 bp, Artificial Sequence
  Description of Artificial Sequence: Synthetic oligonucleotide
  Target: LAMA2; (+) strand; PAM type: NRG; PAM sequence: AGG
catatcttttcagcatttgg

SEQ ID NO: 159077 - DNA, 20 bp, Artificial Sequence
  Description of Artificial Sequence: Synthetic oligonucleotide
  Target: LAMA2; (+) strand; PAM type: NRG; PAM sequence: TGG
atcttttcagcatttggagg

SEQ ID NO: 159078 - DNA, 20 bp, Artificial Sequence
  Description of Artificial Sequence: Synthetic oligonucleotide
  Target: LAMA2; (+) strand; PAM type: NRG; PAM sequence: TGG
ttttcagcatttggaggtgg

SEQ ID NO: 159079 - DNA, 20 bp, Artificial Sequence
  Description of Artificial Sequence: Synthetic oligonucleotide
  Target: LAMA2; (+) strand; PAM type: NRG; PAM sequence: GAG
ttggaggtggtggtgattgt

SEQ ID NO: 159080 - DNA, 20 bp, Artificial Sequence
  Description of Artificial Sequence: Synthetic oligonucleotide
  Target: LAMA2; (+) strand; PAM type: NRG; PAM sequence: TAG
ggtggtgattgtgagcactt

SEQ ID NO: 159081 - DNA, 20 bp, Artificial Sequence
  Description of Artificial Sequence: Synthetic oligonucleotide
  Target: LAMA2; (+) strand; PAM type: NRG; PAM sequence: GAG
gattgtgagcactttagact

SEQ ID NO: 159082 - DNA, 20 bp, Artificial Sequence
  Description of Artificial Sequence: Synthetic oligonucleotide
  Target: LAMA2; (+) strand; PAM type: NRG; PAM sequence: AAG
caacttgacctaatatgaca

SEQ ID NO: 159083 - DNA, 20 bp, Artificial Sequence
  Description of Artificial Sequence: Synthetic oligonucleotide
  Target: LAMA2; (+) strand; PAM type: NRG; PAM sequence: AGG
aacttgacctaatatgacaa

SEQ ID NO: 159084 - DNA, 20 bp, Artificial Sequence
  Description of Artificial Sequence: Synthetic oligonucleotide
  Target: LAMA2; (+) strand; PAM type: NRG; PAM sequence: CAG
gacctaatatgacaaaggac

SEQ ID NO: 159085 - DNA, 20 bp, Artificial Sequence
  Description of Artificial Sequence: Synthetic oligonucleotide
  Target: LAMA2; (+) strand; PAM type: NRG; PAM sequence: GAG
cctaatatgacaaaggacca

SEQ ID NO: 159086 - DNA, 20 bp, Artificial Sequence
  Description of Artificial Sequence: Synthetic oligonucleotide
  Target: LAMA2; (+) strand; PAM type: NRG; PAM sequence: TGG
tgacaaaggaccagagcttt

SEQ ID NO: 159087 - DNA, 20 bp, Artificial Sequence
  Description of Artificial Sequence: Synthetic oligonucleotide
  Target: LAMA2; (+) strand; PAM type: NRG; PAM sequence: TGG
aggaccagagcttttggtta

SEQ ID NO: 159088 - DNA, 20 bp, Artificial Sequence
  Description of Artificial Sequence: Synthetic oligonucleotide
  Target: LAMA2; (+) strand; PAM type: NRG; PAM sequence: CAG
cttttggttatggtattcat

SEQ ID NO: 159089 - DNA, 20 bp, Artificial Sequence
  Description of Artificial Sequence: Synthetic oligonucleotide
  Target: LAMA2; (+) strand; PAM type: NRG; PAM sequence: CAG
tattcatcagcttcctttct

SEQ ID NO: 159090 - DNA, 20 bp, Artificial Sequence
  Description of Artificial Sequence: Synthetic oligonucleotide
  Target: LAMA2; (+) strand; PAM type: NRG; PAM sequence: TGG
cctttctcagcatgcataat

SEQ ID NO: 159091 - DNA, 20 bp, Artificial Sequence
  Description of Artificial Sequence: Synthetic oligonucleotide
  Target: LAMA2; (+) strand; PAM type: NRG; PAM sequence: CAG
ttgttgctgtacgattccta

SEQ ID NO: 159092 - DNA, 20 bp, Artificial Sequence
  Description of Artificial Sequence: Synthetic oligonucleotide
  Target: LAMA2; (+) strand; PAM type: NRG; PAM sequence: AAG
cctacagctgtataatacct

SEQ ID NO: 159093 - DNA, 20 bp, Artificial Sequence
  Description of Artificial Sequence: Synthetic oligonucleotide
  Target: LAMA2; (+) strand; PAM type: NRG; PAM sequence: TAG
atctcttttttcctctgcca

SEQ ID NO: 159094 - DNA, 20 bp, Artificial Sequence
  Description of Artificial Sequence: Synthetic oligonucleotide
  Target: LAMA2; (+) strand; PAM type: NRG; PAM sequence: AGG
tctcttttttcctctgccat

SEQ ID NO: 159095 - DNA, 20 bp, Artificial Sequence
  Description of Artificial Sequence: Synthetic oligonucleotide
  Target: LAMA2; (+) strand; PAM type: NRG; PAM sequence: GAG
tttttcctctgccataggtt

SEQ ID NO: 159096 - DNA, 20 bp, Artificial Sequence
  Description of Artificial Sequence: Synthetic oligonucleotide
  Target: LAMA2; (+) strand; PAM type: NRG; PAM sequence: TGG
gctgtctcctatcctactga

SEQ ID NO: 159097 - DNA, 20 bp, Artificial Sequence
  Description of Artificial Sequence: Synthetic oligonucleotide
  Target: LAMA2; (+) strand; PAM type: NRG; PAM sequence: AAG
gtctcctatcctactgatgg

SEQ ID NO: 159098 - DNA, 20 bp, Artificial Sequence
  Description of Artificial Sequence: Synthetic oligonucleotide
  Target: LAMA2; (+) strand; PAM type: NRG; PAM sequence: CAG
tcctactgatggaagcattg

SEQ ID NO: 159099 - DNA, 20 bp, Artificial Sequence
  Description of Artificial Sequence: Synthetic oligonucleotide
  Target: LAMA2; (+) strand; PAM type: NRG; PAM sequence: CAG
tactgatggaagcattgcag

SEQ ID NO: 159100 - DNA, 20 bp, Artificial Sequence
  Description of Artificial Sequence: Synthetic oligonucleotide
  Target: LAMA2; (+) strand; PAM type: NRG; PAM sequence: TAG
tggaagcattgcagcagctg

SEQ ID NO: 159101 - DNA, 20 bp, Artificial Sequence
  Description of Artificial Sequence: Synthetic oligonucleotide
  Target: LAMA2; (+) strand; PAM type: NRG; PAM sequence: AAG
aagcattgcagcagctgtag

SEQ ID NO: 159102 - DNA, 20 bp, Artificial Sequence
  Description of Artificial Sequence: Synthetic oligonucleotide
  Target: LAMA2; (+) strand; PAM type: NRG; PAM sequence: CAG
cagcagctgtagaagtgtgt

SEQ ID NO: 159103 - DNA, 20 bp, Artificial Sequence
  Description of Artificial Sequence: Synthetic oligonucleotide
  Target: LAMA2; (+) strand; PAM type: NRG; PAM sequence: CAG
agaagtgtgtcagtgcccac

SEQ ID NO: 159104 - DNA, 20 bp, Artificial Sequence
  Description of Artificial Sequence: Synthetic oligonucleotide
  Target: LAMA2; (+) strand; PAM type: NRG; PAM sequence: AGG
gaagtgtgtcagtgcccacc

SEQ ID NO: 159105 - DNA, 20 bp, Artificial Sequence
  Description of Artificial Sequence: Synthetic oligonucleotide
  Target: LAMA2; (+) strand; PAM type: NRG; PAM sequence: GGG
aagtgtgtcagtgcccacca

SEQ ID NO: 159106 - DNA, 20 bp, Artificial Sequence
  Description of Artificial Sequence: Synthetic oligonucleotide
  Target: LAMA2; (+) strand; PAM type: NRG; PAM sequence: TGG
cagtgcccaccagggtatac

SEQ ID NO: 159107 - DNA, 20 bp, Artificial Sequence
  Description of Artificial Sequence: Synthetic oligonucleotide
  Target: LAMA2; (+) strand; PAM type: NRG; PAM sequence: AAG
gtatactggctcctcttgtg

SEQ ID NO: 159108 - DNA, 20 bp, Artificial Sequence
  Description of Artificial Sequence: Synthetic oligonucleotide
  Target: LAMA2; (+) strand; PAM type: NRG; PAM sequence: AAG
actggctcctcttgtgaagt

SEQ ID NO: 159109 - DNA, 20 bp, Artificial Sequence
  Description of Artificial Sequence: Synthetic oligonucleotide
  Target: LAMA2; (+) strand; PAM type: NRG; PAM sequence: AAG
ctcttgtgaagtaagcttgc

SEQ ID NO: 159110 - DNA, 20 bp, Artificial Sequence
  Description of Artificial Sequence: Synthetic oligonucleotide
  Target: LAMA2; (+) strand; PAM type: NRG; PAM sequence: TAG
agcttgcaagaatgtatcct

SEQ ID NO: 159111 - DNA, 20 bp, Artificial Sequence
  Description of Artificial Sequence: Synthetic oligonucleotide
  Target: LAMA2; (+) strand; PAM type: NRG; PAM sequence: AAG
atgtatccttagtgctttca

SEQ ID NO: 159112 - DNA, 20 bp, Artificial Sequence
  Description of Artificial Sequence: Synthetic oligonucleotide
  Target: LAMA2; (+) strand; PAM type: NRG; PAM sequence: AAG
tttcaataacctattctaat

SEQ ID NO: 159113 - DNA, 20 bp, Artificial Sequence
  Description of Artificial Sequence: Synthetic oligonucleotide
  Target: LAMA2; (+) strand; PAM type: NRG; PAM sequence: GAG
tcaataacctattctaataa

SEQ ID NO: 159114 - DNA, 20 bp, Artificial Sequence
  Description of Artificial Sequence: Synthetic oligonucleotide
  Target: LAMA2; (+) strand; PAM type: NRG; PAM sequence: AAG
aaaacttgaatatctaccaa

SEQ ID NO: 159115 - DNA, 20 bp, Artificial Sequence
  Description of Artificial Sequence: Synthetic oligonucleotide
  Target: LAMA2; (+) strand; PAM type: NRG; PAM sequence: TGG
tgaatatctaccaaaagctg

SEQ ID NO: 159116 - DNA, 20 bp, Artificial Sequence
  Description of Artificial Sequence: Synthetic oligonucleotide
  Target: LAMA2; (+) strand; PAM type: NRG; PAM sequence: TAG
caaaagctgtggctttcaat

SEQ ID NO: 159117 - DNA, 20 bp, Artificial Sequence
  Description of Artificial Sequence: Synthetic oligonucleotide
  Target: LAMA2; (+) strand; PAM type: NRG; PAM sequence: GAG
aaagctgtggctttcaatta

SEQ ID NO: 159118 - DNA, 20 bp, Artificial Sequence
  Description of Artificial Sequence: Synthetic oligonucleotide
  Target: LAMA2; (+) strand; PAM type: NRG; PAM sequence: GAG
ttttgtaactctttctctct

SEQ ID NO: 159119 - DNA, 20 bp, Artificial Sequence
  Description of Artificial Sequence: Synthetic oligonucleotide
  Target: LAMA2; (+) strand; PAM type: NRG; PAM sequence: TGG
atatttgatctattgtatgc

SEQ ID NO: 159120 - DNA, 20 bp, Artificial Sequence
  Description of Artificial Sequence: Synthetic oligonucleotide
  Target: LAMA2; (+) strand; PAM type: NRG; PAM sequence: TGG
ttgatctattgtatgctgga

SEQ ID NO: 159121 - DNA, 20 bp, Artificial Sequence
  Description of Artificial Sequence: Synthetic oligonucleotide
  Target: LAMA2; (+) strand; PAM type: NRG; PAM sequence: TAG
atctattgtatgctggatgg

SEQ ID NO: 159122 - DNA, 20 bp, Artificial Sequence
  Description of Artificial Sequence: Synthetic oligonucleotide
  Target: LAMA2; (+) strand; PAM type: NRG; PAM sequence: CAG
tattgtatgctggatggtag

SEQ ID NO: 159123 - DNA, 20 bp, Artificial Sequence
  Description of Artificial Sequence: Synthetic oligonucleotide
  Target: LAMA2; (+) strand; PAM type: NRG; PAM sequence: TAG
tatgctggatggtagcagaa

SEQ ID NO: 159124 - DNA, 20 bp, Artificial Sequence
  Description of Artificial Sequence: Synthetic oligonucleotide
  Target: LAMA2; (+) strand; PAM type: NRG; PAM sequence: TAG
tcataatgttatccaaaatt

SEQ ID NO: 159125 - DNA, 20 bp, Artificial Sequence
  Description of Artificial Sequence: Synthetic oligonucleotide
  Target: LAMA2; (+) strand; PAM type: NRG; PAM sequence: AAG
ttttcctctacttcatttct

SEQ ID NO: 159126 - DNA, 20 bp, Artificial Sequence
  Description of Artificial Sequence: Synthetic oligonucleotide
  Target: LAMA2; (+) strand; PAM type: NRG; PAM sequence: AAG
aaccaaatcacaatcatctg

SEQ ID NO: 159127 - DNA, 20 bp, Artificial Sequence
  Description of Artificial Sequence: Synthetic oligonucleotide
  Target: LAMA2; (+) strand; PAM type: NRG; PAM sequence: CAG
catctgaagcatataatctt

SEQ ID NO: 159128 - DNA, 20 bp, Artificial Sequence
  Description of Artificial Sequence: Synthetic oligonucleotide
  Target: LAMA2; (+) strand; PAM type: NRG; PAM sequence: AAG
catataatcttcagaatgtc

SEQ ID NO: 159129 - DNA, 20 bp, Artificial Sequence
  Description of Artificial Sequence: Synthetic oligonucleotide
  Target: LAMA2; (+) strand; PAM type: NRG; PAM sequence: TGG
aatgtcaagaatataatata

SEQ ID NO: 159130 - DNA, 20 bp, Artificial Sequence
  Description of Artificial Sequence: Synthetic oligonucleotide
  Target: LAMA2; (+) strand; PAM type: NRG; PAM sequence: TAG
atggaaaaaataccttgata

SEQ ID NO: 159131 - DNA, 20 bp, Artificial Sequence
  Description of Artificial Sequence: Synthetic oligonucleotide
  Target: LAMA2; (+) strand; PAM type: NRG; PAM sequence: CAG
ttgatatagaaaactgccta

SEQ ID NO: 159132 - DNA, 20 bp, Artificial Sequence
  Description of Artificial Sequence: Synthetic oligonucleotide
  Target: LAMA2; (+) strand; PAM type: NRG; PAM sequence: AGG
tgatatagaaaactgcctac

SEQ ID NO: 159133 - DNA, 20 bp, Artificial Sequence
  Description of Artificial Sequence: Synthetic oligonucleotide
  Target: LAMA2; (+) strand; PAM type: NRG; PAM sequence: TAG
ctacaggtctttgatttgtt

SEQ ID NO: 159134 - DNA, 20 bp, Artificial Sequence
  Description of Artificial Sequence: Synthetic oligonucleotide
  Target: LAMA2; (+) strand; PAM type: NRG; PAM sequence: GAG
ttgtttagcacctaatgttt

SEQ ID NO: 159135 - DNA, 20 bp, Artificial Sequence
  Description of Artificial Sequence: Synthetic oligonucleotide
  Target: LAMA2; (+) strand; PAM type: NRG; PAM sequence: TAG
ttattgttgtctcaatatcc

SEQ ID NO: 159136 - DNA, 20 bp, Artificial Sequence
  Description of Artificial Sequence: Synthetic oligonucleotide
  Target: LAMA2; (+) strand; PAM type: NRG; PAM sequence: AAG
caatatcctagatttataat

SEQ ID NO: 159137 - DNA, 20 bp, Artificial Sequence
  Description of Artificial Sequence: Synthetic oligonucleotide
  Target: LAMA2; (+) strand; PAM type: NRG; PAM sequence: TGG
tagatttataataagattaa

SEQ ID NO: 159138 - DNA, 20 bp, Artificial Sequence
  Description of Artificial Sequence: Synthetic oligonucleotide
  Target: LAMA2; (+) strand; PAM type: NRG; PAM sequence: CAG
atggttcttacttaataccg

SEQ ID NO: 159139 - DNA, 20 bp, Artificial Sequence
  Description of Artificial Sequence: Synthetic oligonucleotide
  Target: LAMA2; (+) strand; PAM type: NRG; PAM sequence: AAG
ataccgcagtgtgtcatcct

SEQ ID NO: 159140 - DNA, 20 bp, Artificial Sequence
  Description of Artificial Sequence: Synthetic oligonucleotide
  Target: LAMA2; (+) strand; PAM type: NRG; PAM sequence: AGG
taccgcagtgtgtcatccta

SEQ ID NO: 159141 - DNA, 20 bp, Artificial Sequence
  Description of Artificial Sequence: Synthetic oligonucleotide
  Target: LAMA2; (+) strand; PAM type: NRG; PAM sequence: CAG
tctgtgtattttcttttaca

SEQ ID NO: 159142 - DNA, 20 bp, Artificial Sequence
  Description of Artificial Sequence: Synthetic oligonucleotide
  Target: LAMA2; (+) strand; PAM type: NRG; PAM sequence: TGG
ttttcttttacacagaaaac

SEQ ID NO: 159143 - DNA, 20 bp, Artificial Sequence
  Description of Artificial Sequence: Synthetic oligonucleotide
  Target: LAMA2; (+) strand; PAM type: NRG; PAM sequence: TGG
acagaaaactggtgtgaaac

SEQ ID NO: 159144 - DNA, 20 bp, Artificial Sequence
  Description of Artificial Sequence: Synthetic oligonucleotide
  Target: LAMA2; (+) strand; PAM type: NRG; PAM sequence: TGG
aactggttttacttgaaacc

SEQ ID NO: 159145 - DNA, 20 bp, Artificial Sequence
  Description of Artificial Sequence: Synthetic oligonucleotide
  Target: LAMA2; (+) strand; PAM type: NRG; PAM sequence: CAG
tgtgaacactatttccttga

SEQ ID NO: 159146 - DNA, 20 bp, Artificial Sequence
  Description of Artificial Sequence: Synthetic oligonucleotide
  Target: LAMA2; (+) strand; PAM type: NRG; PAM sequence: GAG
tgaacactatttccttgaca

SEQ ID NO: 159147 - DNA, 20 bp, Artificial Sequence
  Description of Artificial Sequence: Synthetic oligonucleotide
  Target: LAMA2; (+) strand; PAM type: NRG; PAM sequence: TGG
tatttccttgacagagcgca

SEQ ID NO: 159148 - DNA, 20 bp, Artificial Sequence
  Description of Artificial Sequence: Synthetic oligonucleotide
  Target: LAMA2; (+) strand; PAM type: NRG; PAM sequence: TAG
tccttgacagagcgcatggc

SEQ ID NO: 159149 - DNA, 20 bp, Artificial Sequence
  Description of Artificial Sequence: Synthetic oligonucleotide
  Target: LAMA2; (+) strand; PAM type: NRG; PAM sequence: CAG
ttgacagagcgcatggctag

SEQ ID NO: 159150 - DNA, 20 bp, Artificial Sequence
  Description of Artificial Sequence: Synthetic oligonucleotide
  Target: LAMA2; (+) strand; PAM type: NRG; PAM sequence: TAG
gcgcatggctagcagataaa

SEQ ID NO: 159151 - DNA, 20 bp, Artificial Sequence
  Description of Artificial Sequence: Synthetic oligonucleotide
  Target: LAMA2; (+) strand; PAM type: NRG; PAM sequence: AGG
cgcatggctagcagataaat

SEQ ID NO: 159152 - DNA, 20 bp, Artificial Sequence
  Description of Artificial Sequence: Synthetic oligonucleotide
  Target: LAMA2; (+) strand; PAM type: NRG; PAM sequence: GAG
catggctagcagataaatag

SEQ ID NO: 159153 - DNA, 20 bp, Artificial Sequence
  Description of Artificial Sequence: Synthetic oligonucleotide
  Target: LAMA2; (+) strand; PAM type: NRG; PAM sequence: TAG
ctagcagataaataggagct

SEQ ID NO: 159154 - DNA, 20 bp, Artificial Sequence
  Description of Artificial Sequence: Synthetic oligonucleotide
  Target: LAMA2; (+) strand; PAM type: NRG; PAM sequence: TGG
ggagcttagtttctttaaaa

SEQ ID NO: 159155 - DNA, 20 bp, Artificial Sequence
  Description of Artificial Sequence: Synthetic oligonucleotide
  Target: LAMA2; (+) strand; PAM type: NRG; PAM sequence: AAG
ttctttaaaatggtgccttt

SEQ ID NO: 159156 - DNA, 20 bp, Artificial Sequence
  Description of Artificial Sequence: Synthetic oligonucleotide
  Target: LAMA2; (+) strand; PAM type: NRG; PAM sequence: AGG
tctttaaaatggtgccttta

SEQ ID NO: 159157 - DNA, 20 bp, Artificial Sequence
  Description of Artificial Sequence: Synthetic oligonucleotide
  Target: LAMA2; (+) strand; PAM type: NRG; PAM sequence: GAG
gtgcctttaaggaatcattt

SEQ ID NO: 159158 - DNA, 20 bp, Artificial Sequence
  Description of Artificial Sequence: Synthetic oligonucleotide
  Target: LAMA2; (+) strand; PAM type: NRG; PAM sequence: GAG
aggaatcatttgagtgtact

SEQ ID NO: 159159 - DNA, 20 bp, Artificial Sequence
  Description of Artificial Sequence: Synthetic oligonucleotide
  Target: LAMA2; (+) strand; PAM type: NRG; PAM sequence: CAG
tgtactgagatgttccactt

SEQ ID NO: 159160 - DNA, 20 bp, Artificial Sequence
  Description of Artificial Sequence: Synthetic oligonucleotide
  Target: LAMA2; (+) strand; PAM type: NRG; PAM sequence: TAG
ctacctcattatgccattta

SEQ ID NO: 159161 - DNA, 20 bp, Artificial Sequence
  Description of Artificial Sequence: Synthetic oligonucleotide
  Target: LAMA2; (+) strand; PAM type: NRG; PAM sequence: TAG
tgccatttatagaaatactc

SEQ ID NO: 159162 - DNA, 20 bp, Artificial Sequence
  Description of Artificial Sequence: Synthetic oligonucleotide
  Target: LAMA2; (+) strand; PAM type: NRG; PAM sequence: AGG
gccatttatagaaatactct

SEQ ID NO: 159163 - DNA, 20 bp, Artificial Sequence
  Description of Artificial Sequence: Synthetic oligonucleotide
  Target: LAMA2; (+) strand; PAM type: NRG; PAM sequence: CAG
tactctaggcattgctttgt

SEQ ID NO: 159164 - DNA, 20 bp, Artificial Sequence
  Description of Artificial Sequence: Synthetic oligonucleotide
  Target: LAMA2; (+) strand; PAM type: NRG; PAM sequence: TAG
tttaaaataatgcatacatc

SEQ ID NO: 159165 - DNA, 20 bp, Artificial Sequence
  Description of Artificial Sequence: Synthetic oligonucleotide
  Target: LAMA2; (+) strand; PAM type: NRG; PAM sequence: GAG
taaaataatgcatacatcta

SEQ ID NO: 159166 - DNA, 20 bp, Artificial Sequence
  Description of Artificial Sequence: Synthetic oligonucleotide
  Target: LAMA2; (+) strand; PAM type: NRG; PAM sequence: TAG
acatctagagatacgcatta

SEQ ID NO: 159167 - DNA, 20 bp, Artificial Sequence
  Description of Artificial Sequence: Synthetic oligonucleotide
  Target: LAMA2; (+) strand; PAM type: NRG; PAM sequence: CAG
cattatagtcatattcatga

SEQ ID NO: 159168 - DNA, 20 bp, Artificial Sequence
  Description of Artificial Sequence: Synthetic oligonucleotide
  Target: LAMA2; (+) strand; PAM type: NRG; PAM sequence: GAG
cagctgtgtttcctttaact

SEQ ID NO: 159169 - DNA, 20 bp, Artificial Sequence
  Description of Artificial Sequence: Synthetic oligonucleotide
  Target: LAMA2; (+) strand; PAM type: NRG; PAM sequence: CAG
gtgtttcctttaactgagct

SEQ ID NO: 159170 - DNA, 20 bp, Artificial Sequence
  Description of Artificial Sequence: Synthetic oligonucleotide
  Target: LAMA2; (+) strand; PAM type: NRG; PAM sequence: TAG
tgagctcagattcacctttc

SEQ ID NO: 159171 - DNA, 20 bp, Artificial Sequence
  Description of Artificial Sequence: Synthetic oligonucleotide
  Target: LAMA2; (+) strand; PAM type: NRG; PAM sequence: TAG
cacctttctagaaataaaac

SEQ ID NO: 159172 - DNA, 20 bp, Artificial Sequence
  Description of Artificial Sequence: Synthetic oligonucleotide
  Target: LAMA2; (+) strand; PAM type: NRG; PAM sequence: TAG
ataaaactagatataactta

SEQ ID NO: 159173 - DNA, 20 bp, Artificial Sequence
  Description of Artificial Sequence: Synthetic oligonucleotide
  Target: LAMA2; (+) strand; PAM type: NRG; PAM sequence: AAG
aaactagatataacttatag

SEQ ID NO: 159174 - DNA, 20 bp, Artificial Sequence
  Description of Artificial Sequence: Synthetic oligonucleotide
  Target: LAMA2; (+) strand; PAM type: NRG; PAM sequence: TAG
ttgcttttccaaaattcatg

SEQ ID NO: 159175 - DNA, 20 bp, Artificial Sequence
  Description of Artificial Sequence: Synthetic oligonucleotide
  Target: LAMA2; (+) strand; PAM type: NRG; PAM sequence: GAG
tttccaaaattcatgtagat

SEQ ID NO: 159176 - DNA, 20 bp, Artificial Sequence
  Description of Artificial Sequence: Synthetic oligonucleotide
  Target: LAMA2; (+) strand; PAM type: NRG; PAM sequence: GAG
tccaaaattcatgtagatga

SEQ ID NO: 159177 - DNA, 20 bp, Artificial Sequence
  Description of Artificial Sequence: Synthetic oligonucleotide
  Target: LAMA2; (+) strand; PAM type: NRG; PAM sequence: TGG
agatgagagaaaaataatta

SEQ ID NO: 159178 - DNA, 20 bp, Artificial Sequence
  Description of Artificial Sequence: Synthetic oligonucleotide
  Target: LAMA2; (+) strand; PAM type: NRG; PAM sequence: TAG
aaataattatggatatcaat

SEQ ID NO: 159179 - DNA, 20 bp, Artificial Sequence
  Description of Artificial Sequence: Synthetic oligonucleotide
  Target: LAMA2; (+) strand; PAM type: NRG; PAM sequence: AAG
cacaatgtatttgatgaaac

SEQ ID NO: 159180 - DNA, 20 bp, Artificial Sequence
  Description of Artificial Sequence: Synthetic oligonucleotide
  Target: LAMA2; (+) strand; PAM type: NRG; PAM sequence: GAG
caatgtatttgatgaaacaa

SEQ ID NO: 159181 - DNA, 20 bp, Artificial Sequence
  Description of Artificial Sequence: Synthetic oligonucleotide
  Target: LAMA2; (+) strand; PAM type: NRG; PAM sequence: AAG
tccaaactatttgaactttt

SEQ ID NO: 159182 - DNA, 20 bp, Artificial Sequence
  Description of Artificial Sequence: Synthetic oligonucleotide
  Target: LAMA2; (+) strand; PAM type: NRG; PAM sequence: TGG
ttttaagatcctctctcaat

SEQ ID NO: 159183 - DNA, 20 bp, Artificial Sequence
  Description of Artificial Sequence: Synthetic oligonucleotide
  Target: LAMA2; (+) strand; PAM type: NRG; PAM sequence: AAG
cttaattctactcttgtttt

SEQ ID NO: 159184 - DNA, 20 bp, Artificial Sequence
  Description of Artificial Sequence: Synthetic oligonucleotide
  Target: LAMA2; (+) strand; PAM type: NRG; PAM sequence: AGG
ttaattctactcttgtttta

SEQ ID NO: 159185 - DNA, 20 bp, Artificial Sequence
  Description of Artificial Sequence: Synthetic oligonucleotide
  Target: LAMA2; (+) strand; PAM type: NRG; PAM sequence: AAG
ttatcttttatacaaattct

SEQ ID NO: 159186 - DNA, 20 bp, Artificial Sequence
  Description of Artificial Sequence: Synthetic oligonucleotide
  Target: LAMA2; (+) strand; PAM type: NRG; PAM sequence: TGG
gaatattacaattgcttaat

SEQ ID NO: 159187 - DNA, 20 bp, Artificial Sequence
  Description of Artificial Sequence: Synthetic oligonucleotide
  Target: LAMA2; (+) strand; PAM type: NRG; PAM sequence: TAG
tgcttaattggctatgcttt

SEQ ID NO: 159188 - DNA, 20 bp, Artificial Sequence
  Description of Artificial Sequence: Synthetic oligonucleotide
  Target: LAMA2; (+) strand; PAM type: NRG; PAM sequence: TAG
aaaatattttcaatacattc

SEQ ID NO: 159189 - DNA, 20 bp, Artificial Sequence
  Description of Artificial Sequence: Synthetic oligonucleotide
  Target: LAMA2; (+) strand; PAM type: NRG; PAM sequence: AAG
tacctgtataaattattaat

SEQ ID NO: 159190 - DNA, 20 bp, Artificial Sequence
  Description of Artificial Sequence: Synthetic oligonucleotide
  Target: LAMA2; (+) strand; PAM type: NRG; PAM sequence: TAG
taatccctgtcctatctgtt

SEQ ID NO: 159191 - DNA, 20 bp, Artificial Sequence
  Description of Artificial Sequence: Synthetic oligonucleotide
  Target: LAMA2; (+) strand; PAM type: NRG; PAM sequence: AGG
aatccctgtcctatctgttt

SEQ ID NO: 159192 - DNA, 20 bp, Artificial Sequence
  Description of Artificial Sequence: Synthetic oligonucleotide
  Target: LAMA2; (+) strand; PAM type: NRG; PAM sequence: GGG
atccctgtcctatctgttta

SEQ ID NO: 159193 - DNA, 20 bp, Artificial Sequence
  Description of Artificial Sequence: Synthetic oligonucleotide
  Target: LAMA2; (+) strand; PAM type: NRG; PAM sequence: GAG
ccctgtcctatctgtttagg

SEQ ID NO: 159194 - DNA, 20 bp, Artificial Sequence
  Description of Artificial Sequence: Synthetic oligonucleotide
  Target: LAMA2; (+) strand; PAM type: NRG; PAM sequence: TGG
caataaatatctatgaaaaa

SEQ ID NO: 159195 - DNA, 20 bp, Artificial Sequence
  Description of Artificial Sequence: Synthetic oligonucleotide
  Target: LAMA2; (+) strand; PAM type: NRG; PAM sequence: GGG
aataaatatctatgaaaaat

SEQ ID NO: 159196 - DNA, 20 bp, Artificial Sequence
  Description of Artificial Sequence: Synthetic oligonucleotide
  Target: LAMA2; (+) strand; PAM type: NRG; PAM sequence: CAG
atctatgaaaaatgggatct

SEQ ID NO: 159197 - DNA, 20 bp, Artificial Sequence
  Description of Artificial Sequence: Synthetic oligonucleotide
  Target: LAMA2; (+) strand; PAM type: NRG; PAM sequence: AAG
gatctcagcactgtataatt

SEQ ID NO: 159198 - DNA, 20 bp, Artificial Sequence
  Description of Artificial Sequence: Synthetic oligonucleotide
  Target: LAMA2; (+) strand; PAM type: NRG; PAM sequence: AGG
atctcagcactgtataatta

SEQ ID NO: 159199 - DNA, 20 bp, Artificial Sequence
  Description of Artificial Sequence: Synthetic oligonucleotide
  Target: LAMA2; (+) strand; PAM type: NRG; PAM sequence: GGG
tctcagcactgtataattaa

SEQ ID NO: 159200 - DNA, 20 bp, Artificial Sequence
  Description of Artificial Sequence: Synthetic oligonucleotide
  Target: LAMA2; (+) strand; PAM type: NRG; PAM sequence: GAG
tcagcactgtataattaagg

SEQ ID NO: 159201 - DNA, 20 bp, Artificial Sequence
  Description of Artificial Sequence: Synthetic oligonucleotide
  Target: LAMA2; (+) strand; PAM type: NRG; PAM sequence: GAG
agcactgtataattaaggga

SEQ ID NO: 159202 - DNA, 20 bp, Artificial Sequence
  Description of Artificial Sequence: Synthetic oligonucleotide
  Target: LAMA2; (+) strand; PAM type: NRG; PAM sequence: AGG
gcactgtataattaagggag

SEQ ID NO: 159203 - DNA, 20 bp, Artificial Sequence
  Description of Artificial Sequence: Synthetic oligonucleotide
  Target: LAMA2; (+) strand; PAM type: NRG; PAM sequence: CAG
taagggagaggtatgtgcta

SEQ ID NO: 159204 - DNA, 20 bp, Artificial Sequence
  Description of Artificial Sequence: Synthetic oligonucleotide
  Target: LAMA2; (+) strand; PAM type: NRG; PAM sequence: AAG
atacatgcaataatcattca

SEQ ID NO: 159205 - DNA, 20 bp, Artificial Sequence
  Description of Artificial Sequence: Synthetic oligonucleotide
  Target: LAMA2; (+) strand; PAM type: NRG; PAM sequence: AGG
tacatgcaataatcattcaa

SEQ ID NO: 159206 - DNA, 20 bp, Artificial Sequence
  Description of Artificial Sequence: Synthetic oligonucleotide
  Target: LAMA2; (+) strand; PAM type: NRG; PAM sequence: GGG
acatgcaataatcattcaaa

SEQ ID NO: 159207 - DNA, 20 bp, Artificial Sequence
  Description of Artificial Sequence: Synthetic oligonucleotide
  Target: LAMA2; (+) strand; PAM type: NRG; PAM sequence: GAG
caataatcattcaaagggat

SEQ ID NO: 159208 - DNA, 20 bp, Artificial Sequence
  Description of Artificial Sequence: Synthetic oligonucleotide
  Target: LAMA2; (+) strand; PAM type: NRG; PAM sequence: CAG
ttcaaagggatgagctactg

SEQ ID NO: 159209 - DNA, 20 bp, Artificial Sequence
  Description of Artificial Sequence: Synthetic oligonucleotide
  Target: LAMA2; (+) strand; PAM type: NRG; PAM sequence: TGG
aaagggatgagctactgcag

SEQ ID NO: 159210 - DNA, 20 bp, Artificial Sequence
  Description of Artificial Sequence: Synthetic oligonucleotide
  Target: LAMA2; (+) strand; PAM type: NRG; PAM sequence: GAG
agggatgagctactgcagtg

SEQ ID NO: 159211 - DNA, 20 bp, Artificial Sequence
  Description of Artificial Sequence: Synthetic oligonucleotide
  Target: LAMA2; (+) strand; PAM type: NRG; PAM sequence: GAG
ggatgagctactgcagtgga

SEQ ID NO: 159212 - DNA, 20 bp, Artificial Sequence
  Description of Artificial Sequence: Synthetic oligonucleotide
  Target: LAMA2; (+) strand; PAM type: NRG; PAM sequence: GAG
atgagctactgcagtggaga

SEQ ID NO: 159213 - DNA, 20 bp, Artificial Sequence
  Description of Artificial Sequence: Synthetic oligonucleotide
  Target: LAMA2; (+) strand; PAM type: NRG; PAM sequence: AAG
ctgcagtggagagagatgca

SEQ ID NO: 159214 - DNA, 20 bp, Artificial Sequence
  Description of Artificial Sequence: Synthetic oligonucleotide
  Target: LAMA2; (+) strand; PAM type: NRG; PAM sequence: TGG
gagagagatgcaaagtgtcc

SEQ ID NO: 159215 - DNA, 20 bp, Artificial Sequence
  Description of Artificial Sequence: Synthetic oligonucleotide
  Target: LAMA2; (+) strand; PAM type: NRG; PAM sequence: GAG
gagagatgcaaagtgtcctg

SEQ ID NO: 159216 - DNA, 20 bp, Artificial Sequence
  Description of Artificial Sequence: Synthetic oligonucleotide
  Target: LAMA2; (+) strand; PAM type: NRG; PAM sequence: TGG
agatgcaaagtgtcctggag

SEQ ID NO: 159217 - DNA, 20 bp, Artificial Sequence
  Description of Artificial Sequence: Synthetic oligonucleotide
  Target: LAMA2; (+) strand; PAM type: NRG; PAM sequence: GAG
atgcaaagtgtcctggagtg

SEQ ID NO: 159218 - DNA, 20 bp, Artificial Sequence
  Description of Artificial Sequence: Synthetic oligonucleotide
  Target: LAMA2; (+) strand; PAM type: NRG; PAM sequence: TGG
ggagtggagaaatcttaaat

SEQ ID NO: 159219 - DNA, 20 bp, Artificial Sequence
  Description of Artificial Sequence: Synthetic oligonucleotide
  Target: LAMA2; (+) strand; PAM type: NRG; PAM sequence: TGG
ttaaattggatgctaaataa

SEQ ID NO: 159220 - DNA, 20 bp, Artificial Sequence
  Description of Artificial Sequence: Synthetic oligonucleotide
  Target: LAMA2; (+) strand; PAM type: NRG; PAM sequence: CAG
tggatgctaaataatggtaa

SEQ ID NO: 159221 - DNA, 20 bp, Artificial Sequence
  Description of Artificial Sequence: Synthetic oligonucleotide
  Target: LAMA2; (+) strand; PAM type: NRG; PAM sequence: TAG
tgctaaataatggtaacaga

SEQ ID NO: 159222 - DNA, 20 bp, Artificial Sequence
  Description of Artificial Sequence: Synthetic oligonucleotide
  Target: LAMA2; (+) strand; PAM type: NRG; PAM sequence: TAG
aaataatggtaacagataga

SEQ ID NO: 159223 - DNA, 20 bp, Artificial Sequence
  Description of Artificial Sequence: Synthetic oligonucleotide
  Target: LAMA2; (+) strand; PAM type: NRG; PAM sequence: AAG
taatggtaacagatagatag

SEQ ID NO: 159224 - DNA, 20 bp, Artificial Sequence
  Description of Artificial Sequence: Synthetic oligonucleotide
  Target: LAMA2; (+) strand; PAM type: NRG; PAM sequence: GAG
acagatagatagaagcattt

SEQ ID NO: 159225 - DNA, 20 bp, Artificial Sequence
  Description of Artificial Sequence: Synthetic oligonucleotide
  Target: LAMA2; (+) strand; PAM type: NRG; PAM sequence: AAG
gcatttgagtgtgaaaaaaa

SEQ ID NO: 159226 - DNA, 20 bp, Artificial Sequence
  Description of Artificial Sequence: Synthetic oligonucleotide
  Target: LAMA2; (+) strand; PAM type: NRG; PAM sequence: AGG
catttgagtgtgaaaaaaaa

SEQ ID NO: 159227 - DNA, 20 bp, Artificial Sequence
  Description of Artificial Sequence: Synthetic oligonucleotide
  Target: LAMA2; (+) strand; PAM type: NRG; PAM sequence: GAG
tttgagtgtgaaaaaaaaag

SEQ ID NO: 159228 - DNA, 20 bp, Artificial Sequence
  Description of Artificial Sequence: Synthetic oligonucleotide
  Target: LAMA2; (+) strand; PAM type: NRG; PAM sequence: GAG
tgagtgtgaaaaaaaaagga

SEQ ID NO: 159229 - DNA, 20 bp, Artificial Sequence
  Description of Artificial Sequence: Synthetic oligonucleotide
  Target: LAMA2; (+) strand; PAM type: NRG; PAM sequence: AAG
aaaaaaaggagagataataa

SEQ ID NO: 159230 - DNA, 20 bp, Artificial Sequence
  Description of Artificial Sequence: Synthetic oligonucleotide
  Target: LAMA2; (+) strand; PAM type: NRG; PAM sequence: AAG
aattactttgtaatccataa

SEQ ID NO: 159231 - DNA, 20 bp, Artificial Sequence
  Description of Artificial Sequence: Synthetic oligonucleotide
  Target: LAMA2; (+) strand; PAM type: NRG; PAM sequence: AAG
taaaagaacttaattgaatc

SEQ ID NO: 159232 - DNA, 20 bp, Artificial Sequence
  Description of Artificial Sequence: Synthetic oligonucleotide
  Target: LAMA2; (+) strand; PAM type: NRG; PAM sequence: GAG
aaagaacttaattgaatcaa

SEQ ID NO: 159233 - DNA, 20 bp, Artificial Sequence
  Description of Artificial Sequence: Synthetic oligonucleotide
  Target: LAMA2; (+) strand; PAM type: NRG; PAM sequence: TGG
aatcaagagacaatgaattt

SEQ ID NO: 159234 - DNA, 20 bp, Artificial Sequence
  Description of Artificial Sequence: Synthetic oligonucleotide
  Target: LAMA2; (+) strand; PAM type: NRG; PAM sequence: TGG
gacaatgaattttggaactt

SEQ ID NO: 159235 - DNA, 20 bp, Artificial Sequence
  Description of Artificial Sequence: Synthetic oligonucleotide
  Target: LAMA2; (+) strand; PAM type: NRG; PAM sequence: CAG
tccctaaattcactattatt

SEQ ID NO: 159236 - DNA, 20 bp, Artificial Sequence
  Description of Artificial Sequence: Synthetic oligonucleotide
  Target: LAMA2; (+) strand; PAM type: NRG; PAM sequence: AAG
atttcatttgcttttcaatt

SEQ ID NO: 159237 - DNA, 20 bp, Artificial Sequence
  Description of Artificial Sequence: Synthetic oligonucleotide
  Target: LAMA2; (+) strand; PAM type: NRG; PAM sequence: TAG
atttgcttttcaattaagtg

SEQ ID NO: 159238 - DNA, 20 bp, Artificial Sequence
  Description of Artificial Sequence: Synthetic oligonucleotide
  Target: LAMA2; (+) strand; PAM type: NRG; PAM sequence: AAG
ttcaattaagtgtagtttgt

SEQ ID NO: 159239 - DNA, 20 bp, Artificial Sequence
  Description of Artificial Sequence: Synthetic oligonucleotide
  Target: LAMA2; (+) strand; PAM type: NRG; PAM sequence: AGG
tcaattaagtgtagtttgta

SEQ ID NO: 159240 - DNA, 20 bp, Artificial Sequence
  Description of Artificial Sequence: Synthetic oligonucleotide
  Target: LAMA2; (+) strand; PAM type: NRG; PAM sequence: CAG
ttaagtgtagtttgtaaggc

SEQ ID NO: 159241 - DNA, 20 bp, Artificial Sequence
  Description of Artificial Sequence: Synthetic oligonucleotide
  Target: LAMA2; (+) strand; PAM type: NRG; PAM sequence: TAG
gtttgtaaggccagtcattc

SEQ ID NO: 159242 - DNA, 20 bp, Artificial Sequence
  Description of Artificial Sequence: Synthetic oligonucleotide
  Target: LAMA2; (+) strand; PAM type: NRG; PAM sequence: TGG
ccttgttatcactaatatcc

SEQ ID NO: 159243 - DNA, 20 bp, Artificial Sequence
  Description of Artificial Sequence: Synthetic oligonucleotide
  Target: LAMA2; (+) strand; PAM type: NRG; PAM sequence: GGG
cttgttatcactaatatcct

SEQ ID NO: 159244 - DNA, 20 bp, Artificial Sequence
  Description of Artificial Sequence: Synthetic oligonucleotide
  Target: LAMA2; (+) strand; PAM type: NRG; PAM sequence: AAG
aatatcctgggatcccttaa

SEQ ID NO: 159245 - DNA, 20 bp, Artificial Sequence
  Description of Artificial Sequence: Synthetic oligonucleotide
  Target: LAMA2; (+) strand; PAM type: NRG; PAM sequence: GAG
cctgggatcccttaaaagct

SEQ ID NO: 159246 - DNA, 20 bp, Artificial Sequence
  Description of Artificial Sequence: Synthetic oligonucleotide
  Target: LAMA2; (+) strand; PAM type: NRG; PAM sequence: AAG
taaaagctgagtaaacgcca

SEQ ID NO: 159247 - DNA, 20 bp, Artificial Sequence
  Description of Artificial Sequence: Synthetic oligonucleotide
  Target: LAMA2; (+) strand; PAM type: NRG; PAM sequence: CAG
gaccattaatgtcttaattc

SEQ ID NO: 159248 - DNA, 20 bp, Artificial Sequence
  Description of Artificial Sequence: Synthetic oligonucleotide
  Target: LAMA2; (+) strand; PAM type: NRG; PAM sequence: GAG
tgtcttaattccagcttgct

SEQ ID NO: 159249 - DNA, 20 bp, Artificial Sequence
  Description of Artificial Sequence: Synthetic oligonucleotide
  Target: LAMA2; (+) strand; PAM type: NRG; PAM sequence: TGG
tccagcttgctgagaacctc

SEQ ID NO: 159250 - DNA, 20 bp, Artificial Sequence
  Description of Artificial Sequence: Synthetic oligonucleotide
  Target: LAMA2; (+) strand; PAM type: NRG; PAM sequence: AAG
ctgagaacctctggccaaaa

SEQ ID NO: 159251 - DNA, 20 bp, Artificial Sequence
  Description of Artificial Sequence: Synthetic oligonucleotide
  Target: LAMA2; (+) strand; PAM type: NRG; PAM sequence: AGG
tgagaacctctggccaaaaa

SEQ ID NO: 159252 - DNA, 20 bp, Artificial Sequence
  Description of Artificial Sequence: Synthetic oligonucleotide
  Target: LAMA2; (+) strand; PAM type: NRG; PAM sequence: TAG
aggatcaaatgactccattg

SEQ ID NO: 159253 - DNA, 20 bp, Artificial Sequence
  Description of Artificial Sequence: Synthetic oligonucleotide
  Target: LAMA2; (+) strand; PAM type: NRG; PAM sequence: TGG
acattctcttttacttcatt

SEQ ID NO: 159254 - DNA, 20 bp, Artificial Sequence
  Description of Artificial Sequence: Synthetic oligonucleotide
  Target: LAMA2; (+) strand; PAM type: NRG; PAM sequence: GGG
cattctcttttacttcattt

SEQ ID NO: 159255 - DNA, 20 bp, Artificial Sequence
  Description of Artificial Sequence: Synthetic oligonucleotide
  Target: LAMA2; (+) strand; PAM type: NRG; PAM sequence: GGG
attctcttttacttcatttg

SEQ ID NO: 159256 - DNA, 20 bp, Artificial Sequence
  Description of Artificial Sequence: Synthetic oligonucleotide
  Target: LAMA2; (+) strand; PAM type: NRG; PAM sequence: TAG
ttttacttcatttggggcca

SEQ ID NO: 159257 - DNA, 20 bp, Artificial Sequence
  Description of Artificial Sequence: Synthetic oligonucleotide
  Target: LAMA2; (+) strand; PAM type: NRG; PAM sequence: CAG
ttggggccatagtgttgatt

SEQ ID NO: 159258 - DNA, 20 bp, Artificial Sequence
  Description of Artificial Sequence: Synthetic oligonucleotide
  Target: LAMA2; (+) strand; PAM type: NRG; PAM sequence: AGG
tggggccatagtgttgattc

SEQ ID NO: 159259 - DNA, 20 bp, Artificial Sequence
  Description of Artificial Sequence: Synthetic oligonucleotide
  Target: LAMA2; (+) strand; PAM type: NRG; PAM sequence: AAG
tttctacttgacttcttgtg

SEQ ID NO: 159260 - DNA, 20 bp, Artificial Sequence
  Description of Artificial Sequence: Synthetic oligonucleotide
  Target: LAMA2; (+) strand; PAM type: NRG; PAM sequence: CAG
acttcttgtgaagtgttctg

SEQ ID NO: 159261 - DNA, 20 bp, Artificial Sequence
  Description of Artificial Sequence: Synthetic oligonucleotide
  Target: LAMA2; (+) strand; PAM type: NRG; PAM sequence: TAG
caaaaattttcttactttca

SEQ ID NO: 159262 - DNA, 20 bp, Artificial Sequence
  Description of Artificial Sequence: Synthetic oligonucleotide
  Target: LAMA2; (+) strand; PAM type: NRG; PAM sequence: TAG
ctttcatagtgctgtcatca

SEQ ID NO: 159263 - DNA, 20 bp, Artificial Sequence
  Description of Artificial Sequence: Synthetic oligonucleotide
  Target: LAMA2; (+) strand; PAM type: NRG; PAM sequence: CAG
tcatcatagatttcacttga

SEQ ID NO: 159264 - DNA, 20 bp, Artificial Sequence
  Description of Artificial Sequence: Synthetic oligonucleotide
  Target: LAMA2; (+) strand; PAM type: NRG; PAM sequence: GAG
atagatttcacttgacagat

SEQ ID NO: 159265 - DNA, 20 bp, Artificial Sequence
  Description of Artificial Sequence: Synthetic oligonucleotide
  Target: LAMA2; (+) strand; PAM type: NRG; PAM sequence: CAG
atttcacttgacagatgaga

SEQ ID NO: 159266 - DNA, 20 bp, Artificial Sequence
  Description of Artificial Sequence: Synthetic oligonucleotide
  Target: LAMA2; (+) strand; PAM type: NRG; PAM sequence: AGG
tttcacttgacagatgagac

SEQ ID NO: 159267 - DNA, 20 bp, Artificial Sequence
  Description of Artificial Sequence: Synthetic oligonucleotide
  Target: LAMA2; (+) strand; PAM type: NRG; PAM sequence: GGG
ttcacttgacagatgagaca

SEQ ID NO: 159268 - DNA, 20 bp, Artificial Sequence
  Description of Artificial Sequence: Synthetic oligonucleotide
  Target: LAMA2; (+) strand; PAM type: NRG; PAM sequence: GGG
tcacttgacagatgagacag

SEQ ID NO: 159269 - DNA, 20 bp, Artificial Sequence
  Description of Artificial Sequence: Synthetic oligonucleotide
  Target: LAMA2; (+) strand; PAM type: NRG; PAM sequence: AAG
acaggggatatactattaaa

SEQ ID NO: 159270 - DNA, 20 bp, Artificial Sequence
  Description of Artificial Sequence: Synthetic oligonucleotide
  Target: LAMA2; (+) strand; PAM type: NRG; PAM sequence: GAG
aggggatatactattaaaaa

SEQ ID NO: 159271 - DNA, 20 bp, Artificial Sequence
  Description of Artificial Sequence: Synthetic oligonucleotide
  Target: LAMA2; (+) strand; PAM type: NRG; PAM sequence: CAG
aaaagagtgttatgcaatct

SEQ ID NO: 159272 - DNA, 20 bp, Artificial Sequence
  Description of Artificial Sequence: Synthetic oligonucleotide
  Target: LAMA2; (+) strand; PAM type: NRG; PAM sequence: TAG
aaataatattaaccacctca

SEQ ID NO: 159273 - DNA, 20 bp, Artificial Sequence
  Description of Artificial Sequence: Synthetic oligonucleotide
  Target: LAMA2; (+) strand; PAM type: NRG; PAM sequence: TAG
tgtttgttcgtactttcatt

SEQ ID NO: 159274 - DNA, 20 bp, Artificial Sequence
  Description of Artificial Sequence: Synthetic oligonucleotide
  Target: LAMA2; (+) strand; PAM type: NRG; PAM sequence: TAG
cgtactttcatttagctgac

SEQ ID NO: 159275 - DNA, 20 bp, Artificial Sequence
  Description of Artificial Sequence: Synthetic oligonucleotide
  Target: LAMA2; (+) strand; PAM type: NRG; PAM sequence: GAG
ttagctgactagtatttgat

SEQ ID NO: 159276 - DNA, 20 bp, Artificial Sequence
  Description of Artificial Sequence: Synthetic oligonucleotide
  Target: LAMA2; (+) strand; PAM type: NRG; PAM sequence: GAG
atttgatgagcgtgtatttt

SEQ ID NO: 159277 - DNA, 20 bp, Artificial Sequence
  Description of Artificial Sequence: Synthetic oligonucleotide
  Target: LAMA2; (+) strand; PAM type: NRG; PAM sequence: AAG
gcgtgtattttgagacaaac

SEQ ID NO: 159278 - DNA, 20 bp, Artificial Sequence
  Description of Artificial Sequence: Synthetic oligonucleotide
  Target: LAMA2; (+) strand; PAM type: NRG; PAM sequence: CAG
gagacaaacaagaccctaca

SEQ ID NO: 159279 - DNA, 20 bp, Artificial Sequence
  Description of Artificial Sequence: Synthetic oligonucleotide
  Target: LAMA2; (+) strand; PAM type: NRG; PAM sequence: AGG
agacaaacaagaccctacac

SEQ ID NO: 159280 - DNA, 20 bp, Artificial Sequence
  Description of Artificial Sequence: Synthetic oligonucleotide
  Target: LAMA2; (+) strand; PAM type: NRG; PAM sequence: GGG
gacaaacaagaccctacaca

SEQ ID NO: 159281 - DNA, 20 bp, Artificial Sequence
  Description of Artificial Sequence: Synthetic oligonucleotide
  Target: LAMA2; (+) strand; PAM type: NRG; PAM sequence: TAG
aagaccctacacagggaaaa

SEQ ID NO: 159282 - DNA, 20 bp, Artificial Sequence
  Description of Artificial Sequence: Synthetic oligonucleotide
  Target: LAMA2; (+) strand; PAM type: NRG; PAM sequence: CAG
aaatagtgccattaacaata

SEQ ID NO: 159283 - DNA, 20 bp, Artificial Sequence
  Description of Artificial Sequence: Synthetic oligonucleotide
  Target: LAMA2; (+) strand; PAM type: NRG; PAM sequence: AAG
cagatattgtccctgtcccc

SEQ ID NO: 159284 - DNA, 20 bp, Artificial Sequence
  Description of Artificial Sequence: Synthetic oligonucleotide
  Target: LAMA2; (+) strand; PAM type: NRG; PAM sequence: AGG
agatattgtccctgtcccca

SEQ ID NO: 159285 - DNA, 20 bp, Artificial Sequence
  Description of Artificial Sequence: Synthetic oligonucleotide
  Target: LAMA2; (+) strand; PAM type: NRG; PAM sequence: GAG
gtccccaaggacgttgcact

SEQ ID NO: 159286 - DNA, 20 bp, Artificial Sequence
  Description of Artificial Sequence: Synthetic oligonucleotide
  Target: LAMA2; (+) strand; PAM type: NRG; PAM sequence: TGG
cccaaggacgttgcactgag

SEQ ID NO: 159287 - DNA, 20 bp, Artificial Sequence
  Description of Artificial Sequence: Synthetic oligonucleotide
  Target: LAMA2; (+) strand; PAM type: NRG; PAM sequence: TGG
aaggacgttgcactgagtgg

SEQ ID NO: 159288 - DNA, 20 bp, Artificial Sequence
  Description of Artificial Sequence: Synthetic oligonucleotide
  Target: LAMA2; (+) strand; PAM type: NRG; PAM sequence: CAG
tggtggcattaacgatatgc

SEQ ID NO: 159289 - DNA, 20 bp, Artificial Sequence
  Description of Artificial Sequence: Synthetic oligonucleotide
  Target: LAMA2; (+) strand; PAM type: NRG; PAM sequence: AAG
ggcattaacgatatgccaga

SEQ ID NO: 159290 - DNA, 20 bp, Artificial Sequence
  Description of Artificial Sequence: Synthetic oligonucleotide
  Target: LAMA2; (+) strand; PAM type: NRG; PAM sequence: TAG
acgatatgccagaaagcaaa

SEQ ID NO: 159291 - DNA, 20 bp, Artificial Sequence
  Description of Artificial Sequence: Synthetic oligonucleotide
  Target: LAMA2; (+) strand; PAM type: NRG; PAM sequence: AAG
taaacgtgacaaattctatg

SEQ ID NO: 159292 - DNA, 20 bp, Artificial Sequence
  Description of Artificial Sequence: Synthetic oligonucleotide
  Target: LAMA2; (+) strand; PAM type: NRG; PAM sequence: AGG
aaacgtgacaaattctatga

SEQ ID NO: 159293 - DNA, 20 bp, Artificial Sequence
  Description of Artificial Sequence: Synthetic oligonucleotide
  Target: LAMA2; (+) strand; PAM type: NRG; PAM sequence: CAG
aattctatgaaggaaataaa

SEQ ID NO: 159294 - DNA, 20 bp, Artificial Sequence
  Description of Artificial Sequence: Synthetic oligonucleotide
  Target: LAMA2; (+) strand; PAM type: NRG; PAM sequence: AGG
attctatgaaggaaataaac

SEQ ID NO: 159295 - DNA, 20 bp, Artificial Sequence
  Description of Artificial Sequence: Synthetic oligonucleotide
  Target: LAMA2; (+) strand; PAM type: NRG; PAM sequence: GGG
ttctatgaaggaaataaaca

SEQ ID NO: 159296 - DNA, 20 bp, Artificial Sequence
  Description of Artificial Sequence: Synthetic oligonucleotide
  Target: LAMA2; (+) strand; PAM type: NRG; PAM sequence: CAG
aataaacagggtgaaataaa

SEQ ID NO: 159297 - DNA, 20 bp, Artificial Sequence
  Description of Artificial Sequence: Synthetic oligonucleotide
  Target: LAMA2; (+) strand; PAM type: NRG; PAM sequence: AGG
ataaacagggtgaaataaac

SEQ ID NO: 159298 - DNA, 20 bp, Artificial Sequence
  Description of Artificial Sequence: Synthetic oligonucleotide
  Target: LAMA2; (+) strand; PAM type: NRG; PAM sequence: GGG
taaacagggtgaaataaaca

SEQ ID NO: 159299 - DNA, 20 bp, Artificial Sequence
  Description of Artificial Sequence: Synthetic oligonucleotide
  Target: LAMA2; (+) strand; PAM type: NRG; PAM sequence: AAG
ataaacagggttctatgata

SEQ ID NO: 159300 - DNA, 20 bp, Artificial Sequence
  Description of Artificial Sequence: Synthetic oligonucleotide
  Target: LAMA2; (+) strand; PAM type: NRG; PAM sequence: AAG
ttctatgataaagttactgc

SEQ ID NO: 159301 - DNA, 20 bp, Artificial Sequence
  Description of Artificial Sequence: Synthetic oligonucleotide
  Target: LAMA2; (+) strand; PAM type: NRG; PAM sequence: TGG
tatgataaagttactgcaag

SEQ ID NO: 159302 - DNA, 20 bp, Artificial Sequence
  Description of Artificial Sequence: Synthetic oligonucleotide
  Target: LAMA2; (+) strand; PAM type: NRG; PAM sequence: AAG
ttactgcaagtggttgtatg

SEQ ID NO: 159303 - DNA, 20 bp, Artificial Sequence
  Description of Artificial Sequence: Synthetic oligonucleotide
  Target: LAMA2; (+) strand; PAM type: NRG; PAM sequence: AGG
tactgcaagtggttgtatga

SEQ ID NO: 159304 - DNA, 20 bp, Artificial Sequence
  Description of Artificial Sequence: Synthetic oligonucleotide
  Target: LAMA2; (+) strand; PAM type: NRG; PAM sequence: TAG
gcaagtggttgtatgaaggt

SEQ ID NO: 159305 - DNA, 20 bp, Artificial Sequence
  Description of Artificial Sequence: Synthetic oligonucleotide
  Target: LAMA2; (+) strand; PAM type: NRG; PAM sequence: AAG
gtggttgtatgaaggttaga

SEQ ID NO: 159306 - DNA, 20 bp, Artificial Sequence
  Description of Artificial Sequence: Synthetic oligonucleotide
  Target: LAMA2; (+) strand; PAM type: NRG; PAM sequence: AAG
ttagaaagtctactttgtaa

SEQ ID NO: 159307 - DNA, 20 bp, Artificial Sequence
  Description of Artificial Sequence: Synthetic oligonucleotide
  Target: LAMA2; (+) strand; PAM type: NRG; PAM sequence: CAG
tctactttgtaaaagtttgt

SEQ ID NO: 159308 - DNA, 20 bp, Artificial Sequence
  Description of Artificial Sequence: Synthetic oligonucleotide
  Target: LAMA2; (+) strand; PAM type: NRG; PAM sequence: AGG
ctactttgtaaaagtttgtc

SEQ ID NO: 159309 - DNA, 20 bp, Artificial Sequence
  Description of Artificial Sequence: Synthetic oligonucleotide
  Target: LAMA2; (+) strand; PAM type: NRG; PAM sequence: AAG
tttgtaaaagtttgtcagga

SEQ ID NO: 159310 - DNA, 20 bp, Artificial Sequence
  Description of Artificial Sequence: Synthetic oligonucleotide
  Target: LAMA2; (+) strand; PAM type: NRG; PAM sequence: AGG
ttgtaaaagtttgtcaggaa

SEQ ID NO: 159311 - DNA, 20 bp, Artificial Sequence
  Description of Artificial Sequence: Synthetic oligonucleotide
  Target: LAMA2; (+) strand; PAM type: NRG; PAM sequence: GAG
tttgtcaggaaaggcttcct

SEQ ID NO: 159312 - DNA, 20 bp, Artificial Sequence
  Description of Artificial Sequence: Synthetic oligonucleotide
  Target: LAMA2; (+) strand; PAM type: NRG; PAM sequence: AGG
ttgtcaggaaaggcttcctg

SEQ ID NO: 159313 - DNA, 20 bp, Artificial Sequence
  Description of Artificial Sequence: Synthetic oligonucleotide
  Target: LAMA2; (+) strand; PAM type: NRG; PAM sequence: TGG
tcaggaaaggcttcctgagg

SEQ ID NO: 159314 - DNA, 20 bp, Artificial Sequence
  Description of Artificial Sequence: Synthetic oligonucleotide
  Target: LAMA2; (+) strand; PAM type: NRG; PAM sequence: CAG
aaggcttcctgaggtggtga

SEQ ID NO: 159315 - DNA, 20 bp, Artificial Sequence
  Description of Artificial Sequence: Synthetic oligonucleotide
  Target: LAMA2; (+) strand; PAM type: NRG; PAM sequence: GAG
gaggtggtgacagctaaatc

SEQ ID NO: 159316 - DNA, 20 bp, Artificial Sequence
  Description of Artificial Sequence: Synthetic oligonucleotide
  Target: LAMA2; (+) strand; PAM type: NRG; PAM sequence: AAG
gacagctaaatcgagtgttg

SEQ ID NO: 159317 - DNA, 20 bp, Artificial Sequence
  Description of Artificial Sequence: Synthetic oligonucleotide
  Target: LAMA2; (+) strand; PAM type: NRG; PAM sequence: GAG
taaatcgagtgttgaagaat

SEQ ID NO: 159318 - DNA, 20 bp, Artificial Sequence
  Description of Artificial Sequence: Synthetic oligonucleotide
  Target: LAMA2; (+) strand; PAM type: NRG; PAM sequence: GAG
aatcgagtgttgaagaatga

SEQ ID NO: 159319 - DNA, 20 bp, Artificial Sequence
  Description of Artificial Sequence: Synthetic oligonucleotide
  Target: LAMA2; (+) strand; PAM type: NRG; PAM sequence: AGG
atcgagtgttgaagaatgag

SEQ ID NO: 159320 - DNA, 20 bp, Artificial Sequence
  Description of Artificial Sequence: Synthetic oligonucleotide
  Target: LAMA2; (+) strand; PAM type: NRG; PAM sequence: GGG
tcgagtgttgaagaatgaga

SEQ ID NO: 159321 - DNA, 20 bp, Artificial Sequence
  Description of Artificial Sequence: Synthetic oligonucleotide
  Target: LAMA2; (+) strand; PAM type: NRG; PAM sequence: CAG
gagggacaacgatgtaaaac

SEQ ID NO: 159322 - DNA, 20 bp, Artificial Sequence
  Description of Artificial Sequence: Synthetic oligonucleotide
  Target: LAMA2; (+) strand; PAM type: NRG; PAM sequence: AAG
acgatgtaaaaccagctgct

SEQ ID NO: 159323 - DNA, 20 bp, Artificial Sequence
  Description of Artificial Sequence: Synthetic oligonucleotide
  Target: LAMA2; (+) strand; PAM type: NRG; PAM sequence: AGG
cgatgtaaaaccagctgcta

SEQ ID NO: 159324 - DNA, 20 bp, Artificial Sequence
  Description of Artificial Sequence: Synthetic oligonucleotide
  Target: LAMA2; (+) strand; PAM type: NRG; PAM sequence: AAG
tgtaaaaccagctgctaagg

SEQ ID NO: 159325 - DNA, 20 bp, Artificial Sequence
  Description of Artificial Sequence: Synthetic oligonucleotide
  Target: LAMA2; (+) strand; PAM type: NRG; PAM sequence: CAG
aaaaccagctgctaaggaag

SEQ ID NO: 159326 - DNA, 20 bp, Artificial Sequence
  Description of Artificial Sequence: Synthetic oligonucleotide
  Target: LAMA2; (+) strand; PAM type: NRG; PAM sequence: TAG
cagctgctaaggaagcagca

SEQ ID NO: 159327 - DNA, 20 bp, Artificial Sequence
  Description of Artificial Sequence: Synthetic oligonucleotide
  Target: LAMA2; (+) strand; PAM type: NRG; PAM sequence: TGG
taaggaagcagcatagatcg

SEQ ID NO: 159328 - DNA, 20 bp, Artificial Sequence
  Description of Artificial Sequence: Synthetic oligonucleotide
  Target: LAMA2; (+) strand; PAM type: NRG; PAM sequence: GAG
aggaagcagcatagatcgtg

SEQ ID NO: 159329 - DNA, 20 bp, Artificial Sequence
  Description of Artificial Sequence: Synthetic oligonucleotide
  Target: LAMA2; (+) strand; PAM type: NRG; PAM sequence: AAG
gcatagatcgtggagtctgt

SEQ ID NO: 159330 - DNA, 20 bp, Artificial Sequence
  Description of Artificial Sequence: Synthetic oligonucleotide
  Target: LAMA2; (+) strand; PAM type: NRG; PAM sequence: AGG
catagatcgtggagtctgta

SEQ ID NO: 159331 - DNA, 20 bp, Artificial Sequence
  Description of Artificial Sequence: Synthetic oligonucleotide
  Target: LAMA2; (+) strand; PAM type: NRG; PAM sequence: TGG
atcgtggagtctgtaaggac

SEQ ID NO: 159332 - DNA, 20 bp, Artificial Sequence
  Description of Artificial Sequence: Synthetic oligonucleotide
  Target: LAMA2; (+) strand; PAM type: NRG; PAM sequence: AAG
tggagtctgtaaggactgga

SEQ ID NO: 159333 - DNA, 20 bp, Artificial Sequence
  Description of Artificial Sequence: Synthetic oligonucleotide
  Target: LAMA2; (+) strand; PAM type: NRG; PAM sequence: AAG
agtctgtaaggactggaaag

SEQ ID NO: 159334 - DNA, 20 bp, Artificial Sequence
  Description of Artificial Sequence: Synthetic oligonucleotide
  Target: LAMA2; (+) strand; PAM type: NRG; PAM sequence: AGG
gtctgtaaggactggaaaga

SEQ ID NO: 159335 - DNA, 20 bp, Artificial Sequence
  Description of Artificial Sequence: Synthetic oligonucleotide
  Target: LAMA2; (+) strand; PAM type: NRG; PAM sequence: GAG
ctgtaaggactggaaagaag

SEQ ID NO: 159336 - DNA, 20 bp, Artificial Sequence
  Description of Artificial Sequence: Synthetic oligonucleotide
  Target: LAMA2; (+) strand; PAM type: NRG; PAM sequence: TGG
aggactggaaagaaggagcg

SEQ ID NO: 159337 - DNA, 20 bp, Artificial Sequence
  Description of Artificial Sequence: Synthetic oligonucleotide
  Target: LAMA2; (+) strand; PAM type: NRG; PAM sequence: TGG
ctggaaagaaggagcgtggc

SEQ ID NO: 159338 - DNA, 20 bp, Artificial Sequence
  Description of Artificial Sequence: Synthetic oligonucleotide
  Target: LAMA2; (+) strand; PAM type: NRG; PAM sequence: GAG
ggaaagaaggagcgtggctg

SEQ ID NO: 159339 - DNA, 20 bp, Artificial Sequence
  Description of Artificial Sequence: Synthetic oligonucleotide
  Target: LAMA2; (+) strand; PAM type: NRG; PAM sequence: AAG
gagcgtggctggagccttgt

SEQ ID NO: 159340 - DNA, 20 bp, Artificial Sequence
  Description of Artificial Sequence: Synthetic oligonucleotide
  Target: LAMA2; (+) strand; PAM type: NRG; PAM sequence: AAG
gtggctggagccttgtaagc

SEQ ID NO: 159341 - DNA, 20 bp, Artificial Sequence
  Description of Artificial Sequence: Synthetic oligonucleotide
  Target: LAMA2; (+) strand; PAM type: NRG; PAM sequence: AGG
tggctggagccttgtaagca

SEQ ID NO: 159342 - DNA, 20 bp, Artificial Sequence
  Description of Artificial Sequence: Synthetic oligonucleotide
  Target: LAMA2; (+) strand; PAM type: NRG; PAM sequence: GGG
ggctggagccttgtaagcaa

SEQ ID NO: 159343 - DNA, 20 bp, Artificial Sequence
  Description of Artificial Sequence: Synthetic oligonucleotide
  Target: LAMA2; (+) strand; PAM type: NRG; PAM sequence: GGG
gctggagccttgtaagcaag

SEQ ID NO: 159344 - DNA, 20 bp, Artificial Sequence
  Description of Artificial Sequence: Synthetic oligonucleotide
  Target: LAMA2; (+) strand; PAM type: NRG; PAM sequence: AAG
agccttgtaagcaaggggaa

SEQ ID NO: 159345 - DNA, 20 bp, Artificial Sequence
  Description of Artificial Sequence: Synthetic oligonucleotide
  Target: LAMA2; (+) strand; PAM type: NRG; PAM sequence: TGG
cttgtaagcaaggggaaaag

SEQ ID NO: 159346 - DNA, 20 bp, Artificial Sequence
  Description of Artificial Sequence: Synthetic oligonucleotide
  Target: LAMA2; (+) strand; PAM type: NRG; PAM sequence: GGG
ttgtaagcaaggggaaaagt

SEQ ID NO: 159347 - DNA, 20 bp, Artificial Sequence
  Description of Artificial Sequence: Synthetic oligonucleotide
  Target: LAMA2; (+) strand; PAM type: NRG; PAM sequence: AAG
agcaaggggaaaagtgggac

SEQ ID NO: 159348 - DNA, 20 bp, Artificial Sequence
  Description of Artificial Sequence: Synthetic oligonucleotide
  Target: LAMA2; (+) strand; PAM type: NRG; PAM sequence: AAG
aaggggaaaagtgggacaag

SEQ ID NO: 159349 - DNA, 20 bp, Artificial Sequence
  Description of Artificial Sequence: Synthetic oligonucleotide
  Target: LAMA2; (+) strand; PAM type: NRG; PAM sequence: TGG
aaagtgggacaagaagtgat

SEQ ID NO: 159350 - DNA, 20 bp, Artificial Sequence
  Description of Artificial Sequence: Synthetic oligonucleotide
  Target: LAMA2; (+) strand; PAM type: NRG; PAM sequence: AAG
gggacaagaagtgattggaa

SEQ ID NO: 159351 - DNA, 20 bp, Artificial Sequence
  Description of Artificial Sequence: Synthetic oligonucleotide
  Target: LAMA2; (+) strand; PAM type: NRG; PAM sequence: AAG
caagaagtgattggaaaagc

SEQ ID NO: 159352 - DNA, 20 bp, Artificial Sequence
  Description of Artificial Sequence: Synthetic oligonucleotide
  Target: LAMA2; (+) strand; PAM type: NRG; PAM sequence: AGG
aagaagtgattggaaaagca

SEQ ID NO: 159353 - DNA, 20 bp, Artificial Sequence
  Description of Artificial Sequence: Synthetic oligonucleotide
  Target: LAMA2; (+) strand; PAM type: NRG; PAM sequence: GAG
gattggaaaagcaaggccat

SEQ ID NO: 159354 - DNA, 20 bp, Artificial Sequence
  Description of Artificial Sequence: Synthetic oligonucleotide
  Target: LAMA2; (+) strand; PAM type: NRG; PAM sequence: AGG
attggaaaagcaaggccatg

SEQ ID NO: 159355 - DNA, 20 bp, Artificial Sequence
  Description of Artificial Sequence: Synthetic oligonucleotide
  Target: LAMA2; (+) strand; PAM type: NRG; PAM sequence: GAG
tggaaaagcaaggccatgag

SEQ ID NO: 159356 - DNA, 20 bp, Artificial Sequence
  Description of Artificial Sequence: Synthetic oligonucleotide
  Target: LAMA2; (+) strand; PAM type: NRG; PAM sequence: AAG
aggagatttgcacatatgat

SEQ ID NO: 159357 - DNA, 20 bp, Artificial Sequence
  Description of Artificial Sequence: Synthetic oligonucleotide
  Target: LAMA2; (+) strand; PAM type: NRG; PAM sequence: GAG
ttgcacatatgataagaaat

SEQ ID NO: 159358 - DNA, 20 bp, Artificial Sequence
  Description of Artificial Sequence: Synthetic oligonucleotide
  Target: LAMA2; (+) strand; PAM type: NRG; PAM sequence: TGG
aaatgagcattttattctca

SEQ ID NO: 159359 - DNA, 20 bp, Artificial Sequence
  Description of Artificial Sequence: Synthetic oligonucleotide
  Target: LAMA2; (+) strand; PAM type: NRG; PAM sequence: TGG
agcattttattctcatggca

SEQ ID NO: 159360 - DNA, 20 bp, Artificial Sequence
  Description of Artificial Sequence: Synthetic oligonucleotide
  Target: LAMA2; (+) strand; PAM type: NRG; PAM sequence: AAG
atggcatggaacatcattac

SEQ ID NO: 159361 - DNA, 20 bp, Artificial Sequence
  Description of Artificial Sequence: Synthetic oligonucleotide
  Target: LAMA2; (+) strand; PAM type: NRG; PAM sequence: CAG
gaacatcattacaagccttt

SEQ ID NO: 159362 - DNA, 20 bp, Artificial Sequence
  Description of Artificial Sequence: Synthetic oligonucleotide
  Target: LAMA2; (+) strand; PAM type: NRG; PAM sequence: CAG
catcattacaagcctttcag

SEQ ID NO: 159363 - DNA, 20 bp, Artificial Sequence
  Description of Artificial Sequence: Synthetic oligonucleotide
  Target: LAMA2; (+) strand; PAM type: NRG; PAM sequence: GAG
tcattacaagcctttcagca

SEQ ID NO: 159364 - DNA, 20 bp, Artificial Sequence
  Description of Artificial Sequence: Synthetic oligonucleotide
  Target: LAMA2; (+) strand; PAM type: NRG; PAM sequence: TAG
ttacaagcctttcagcagag

SEQ ID NO: 159365 - DNA, 20 bp, Artificial Sequence
  Description of Artificial Sequence: Synthetic oligonucleotide
  Target: LAMA2; (+) strand; PAM type: NRG; PAM sequence: TGG
caagcctttcagcagagtag

SEQ ID NO: 159366 - DNA, 20 bp, Artificial Sequence
  Description of Artificial Sequence: Synthetic oligonucleotide
  Target: LAMA2; (+) strand; PAM type: NRG; PAM sequence: GAG
agcctttcagcagagtagtg

SEQ ID NO: 159367 - DNA, 20 bp, Artificial Sequence
  Description of Artificial Sequence: Synthetic oligonucleotide
  Target: LAMA2; (+) strand; PAM type: NRG; PAM sequence: TAG
ctttcagcagagtagtggag

SEQ ID NO: 159368 - DNA, 20 bp, Artificial Sequence
  Description of Artificial Sequence: Synthetic oligonucleotide
  Target: LAMA2; (+) strand; PAM type: NRG; PAM sequence: TGG
tgtaatctgatttacatttt

SEQ ID NO: 159369 - DNA, 20 bp, Artificial Sequence
  Description of Artificial Sequence: Synthetic oligonucleotide
  Target: LAMA2; (+) strand; PAM type: NRG; PAM sequence: GGG
gtaatctgatttacattttt

SEQ ID NO: 159370 - DNA, 20 bp, Artificial Sequence
  Description of Artificial Sequence: Synthetic oligonucleotide
  Target: LAMA2; (+) strand; PAM type: NRG; PAM sequence: TGG
tgatttacatttttgggttt

SEQ ID NO: 159371 - DNA, 20 bp, Artificial Sequence
  Description of Artificial Sequence: Synthetic oligonucleotide
  Target: LAMA2; (+) strand; PAM type: NRG; PAM sequence: GGG
gatttacatttttgggtttt

SEQ ID NO: 159372 - DNA, 20 bp, Artificial Sequence
  Description of Artificial Sequence: Synthetic oligonucleotide
  Target: LAMA2; (+) strand; PAM type: NRG; PAM sequence: GGG
atttacatttttgggttttg

SEQ ID NO: 159373 - DNA, 20 bp, Artificial Sequence
  Description of Artificial Sequence: Synthetic oligonucleotide
  Target: LAMA2; (+) strand; PAM type: NRG; PAM sequence: GAG
tggggtgttttttgttgttt

SEQ ID NO: 159374 - DNA, 20 bp, Artificial Sequence
  Description of Artificial Sequence: Synthetic oligonucleotide
  Target: LAMA2; (+) strand; PAM type: NRG; PAM sequence: CAG
gtgttttttgttgtttgaga

SEQ ID NO: 159375 - DNA, 20 bp, Artificial Sequence
  Description of Artificial Sequence: Synthetic oligonucleotide
  Target: LAMA2; (+) strand; PAM type: NRG; PAM sequence: AGG
tgttttttgttgtttgagac

SEQ ID NO: 159376 - DNA, 20 bp, Artificial Sequence
  Description of Artificial Sequence: Synthetic oligonucleotide
  Target: LAMA2; (+) strand; PAM type: NRG; PAM sequence: GGG
gttttttgttgtttgagaca

SEQ ID NO: 159377 - DNA, 20 bp, Artificial Sequence
  Description of Artificial Sequence: Synthetic oligonucleotide
  Target: LAMA2; (+) strand; PAM type: NRG; PAM sequence: TAG
cagggtcttgctctgtcacc

SEQ ID NO: 159378 - DNA, 20 bp, Artificial Sequence
  Description of Artificial Sequence: Synthetic oligonucleotide
  Target: LAMA2; (+) strand; PAM type: NRG; PAM sequence: AGG
agggtcttgctctgtcacct

SEQ ID NO: 159379 - DNA, 20 bp, Artificial Sequence
  Description of Artificial Sequence: Synthetic oligonucleotide
  Target: LAMA2; (+) strand; PAM type: NRG; PAM sequence: TGG
tcttgctctgtcacctaggc

SEQ ID NO: 159380 - DNA, 20 bp, Artificial Sequence
  Description of Artificial Sequence: Synthetic oligonucleotide
  Target: LAMA2; (+) strand; PAM type: NRG; PAM sequence: GAG
ttgctctgtcacctaggctg

SEQ ID NO: 159381 - DNA, 20 bp, Artificial Sequence
  Description of Artificial Sequence: Synthetic oligonucleotide
  Target: LAMA2; (+) strand; PAM type: NRG; PAM sequence: CAG
ctgtcacctaggctggagtg

SEQ ID NO: 159382 - DNA, 20 bp, Artificial Sequence
  Description of Artificial Sequence: Synthetic oligonucleotide
  Target: LAMA2; (+) strand; PAM type: NRG; PAM sequence: TAG
ggagtgcagtgatgctgtca

SEQ ID NO: 159383 - DNA, 20 bp, Artificial Sequence
  Description of Artificial Sequence: Synthetic oligonucleotide
  Target: LAMA2; (+) strand; PAM type: NRG; PAM sequence: CAG
gatgctgtcatagcttgctg

SEQ ID NO: 159384 - DNA, 20 bp, Artificial Sequence
  Description of Artificial Sequence: Synthetic oligonucleotide
  Target: LAMA2; (+) strand; PAM type: NRG; PAM sequence: GAG
tgctgcagcctcaaactcct

SEQ ID NO: 159385 - DNA, 20 bp, Artificial Sequence
  Description of Artificial Sequence: Synthetic oligonucleotide
  Target: LAMA2; (+) strand; PAM type: NRG; PAM sequence: AAG
agcctcaaactcctgagctc

SEQ ID NO: 159386 - DNA, 20 bp, Artificial Sequence
  Description of Artificial Sequence: Synthetic oligonucleotide
  Target: LAMA2; (+) strand; PAM type: NRG; PAM sequence: CAG
ctcaagtgatcctcctgcct

SEQ ID NO: 159387 - DNA, 20 bp, Artificial Sequence
  Description of Artificial Sequence: Synthetic oligonucleotide
  Target: LAMA2; (+) strand; PAM type: NRG; PAM sequence: GAG
tcctcctgcctcagcctcct

SEQ ID NO: 159388 - DNA, 20 bp, Artificial Sequence
  Description of Artificial Sequence: Synthetic oligonucleotide
  Target: LAMA2; (+) strand; PAM type: NRG; PAM sequence: TAG
tcctgcctcagcctcctgag

SEQ ID NO: 159389 - DNA, 20 bp, Artificial Sequence
  Description of Artificial Sequence: Synthetic oligonucleotide
  Target: LAMA2; (+) strand; PAM type: NRG; PAM sequence: TGG
gcctcagcctcctgagtagc

SEQ ID NO: 159390 - DNA, 20 bp, Artificial Sequence
  Description of Artificial Sequence: Synthetic oligonucleotide
  Target: LAMA2; (+) strand; PAM type: NRG; PAM sequence: GGG
cctcagcctcctgagtagct

SEQ ID NO: 159391 - DNA, 20 bp, Artificial Sequence
  Description of Artificial Sequence: Synthetic oligonucleotide
  Target: LAMA2; (+) strand; PAM type: NRG; PAM sequence: CAG
ctcctgagtagctgggacta

SEQ ID NO: 159392 - DNA, 20 bp, Artificial Sequence
  Description of Artificial Sequence: Synthetic oligonucleotide
  Target: LAMA2; (+) strand; PAM type: NRG; PAM sequence: AGG
tcctgagtagctgggactac

SEQ ID NO: 159393 - DNA, 20 bp, Artificial Sequence
  Description of Artificial Sequence: Synthetic oligonucleotide
  Target: LAMA2; (+) strand; PAM type: NRG; PAM sequence: CAG
caggtgtataccaccatgcc

SEQ ID NO: 159394 - DNA, 20 bp, Artificial Sequence
  Description of Artificial Sequence: Synthetic oligonucleotide
  Target: LAMA2; (+) strand; PAM type: NRG; PAM sequence: TAG
tttttttttgtttgttttaa

SEQ ID NO: 159395 - DNA, 20 bp, Artificial Sequence
  Description of Artificial Sequence: Synthetic oligonucleotide
  Target: LAMA2; (+) strand; PAM type: NRG; PAM sequence: GAG
tttttttgtttgttttaata

SEQ ID NO: 159396 - DNA, 20 bp, Artificial Sequence
  Description of Artificial Sequence: Synthetic oligonucleotide
  Target: LAMA2; (+) strand; PAM type: NRG; PAM sequence: AAG
ttgtttgttttaatagagac

SEQ ID NO: 159397 - DNA, 20 bp, Artificial Sequence
  Description of Artificial Sequence: Synthetic oligonucleotide
  Target: LAMA2; (+) strand; PAM type: NRG; PAM sequence: CAG
caagatctcaatatgttgca

SEQ ID NO: 159398 - DNA, 20 bp, Artificial Sequence
  Description of Artificial Sequence: Synthetic oligonucleotide
  Target: LAMA2; (+) strand; PAM type: NRG; PAM sequence: AGG
aagatctcaatatgttgcac

SEQ ID NO: 159399 - DNA, 20 bp, Artificial Sequence
  Description of Artificial Sequence: Synthetic oligonucleotide
  Target: LAMA2; (+) strand; PAM type: NRG; PAM sequence: GAG
caggctgatctcgaactcct

SEQ ID NO: 159400 - DNA, 20 bp, Artificial Sequence
  Description of Artificial Sequence: Synthetic oligonucleotide
  Target: LAMA2; (+) strand; PAM type: NRG; PAM sequence: AAG
gatctcgaactcctgagctc

SEQ ID NO: 159401 - DNA, 20 bp, Artificial Sequence
  Description of Artificial Sequence: Synthetic oligonucleotide
  Target: LAMA2; (+) strand; PAM type: NRG; PAM sequence: CAG
ctcaagcaatcctcccacct

SEQ ID NO: 159402 - DNA, 20 bp, Artificial Sequence
  Description of Artificial Sequence: Synthetic oligonucleotide
  Target: LAMA2; (+) strand; PAM type: NRG; PAM sequence: AAG
cctcccacctcagcctccca

SEQ ID NO: 159403 - DNA, 20 bp, Artificial Sequence
  Description of Artificial Sequence: Synthetic oligonucleotide
  Target: LAMA2; (+) strand; PAM type: NRG; PAM sequence: TGG
acctcagcctcccaaagttc

SEQ ID NO: 159404 - DNA, 20 bp, Artificial Sequence
  Description of Artificial Sequence: Synthetic oligonucleotide
  Target: LAMA2; (+) strand; PAM type: NRG; PAM sequence: GGG
cctcagcctcccaaagttct

SEQ ID NO: 159405 - DNA, 20 bp, Artificial Sequence
  Description of Artificial Sequence: Synthetic oligonucleotide
  Target: LAMA2; (+) strand; PAM type: NRG; PAM sequence: GGG
ctcagcctcccaaagttctg

SEQ ID NO: 159406 - DNA, 20 bp, Artificial Sequence
  Description of Artificial Sequence: Synthetic oligonucleotide
  Target: LAMA2; (+) strand; PAM type: NRG; PAM sequence: CAG
ctcccaaagttctggggtta

SEQ ID NO: 159407 - DNA, 20 bp, Artificial Sequence
  Description of Artificial Sequence: Synthetic oligonucleotide
  Target: LAMA2; (+) strand; PAM type: NRG; PAM sequence: AGG
tcccaaagttctggggttac

SEQ ID NO: 159408 - DNA, 20 bp, Artificial Sequence
  Description of Artificial Sequence: Synthetic oligonucleotide
  Target: LAMA2; (+) strand; PAM type: NRG; PAM sequence: TGG
aagttctggggttacaggca

SEQ ID NO: 159409 - DNA, 20 bp, Artificial Sequence
  Description of Artificial Sequence: Synthetic oligonucleotide
  Target: LAMA2; (+) strand; PAM type: NRG; PAM sequence: GGG
agttctggggttacaggcat

SEQ ID NO: 159410 - DNA, 20 bp, Artificial Sequence
  Description of Artificial Sequence: Synthetic oligonucleotide
  Target: LAMA2; (+) strand; PAM type: NRG; PAM sequence: CAG
caggcatgggccaacgcacc

SEQ ID NO: 159411 - DNA, 20 bp, Artificial Sequence
  Description of Artificial Sequence: Synthetic oligonucleotide
  Target: LAMA2; (+) strand; PAM type: NRG; PAM sequence: GAG
tgggccaacgcacccagcct

SEQ ID NO: 159412 - DNA, 20 bp, Artificial Sequence
  Description of Artificial Sequence: Synthetic oligonucleotide
  Target: LAMA2; (+) strand; PAM type: NRG; PAM sequence: AAG
gcctgagttacatttttttg

SEQ ID NO: 159413 - DNA, 20 bp, Artificial Sequence
  Description of Artificial Sequence: Synthetic oligonucleotide
  Target: LAMA2; (+) strand; PAM type: NRG; PAM sequence: AAG
tgagttacatttttttgaag

SEQ ID NO: 159414 - DNA, 20 bp, Artificial Sequence
  Description of Artificial Sequence: Synthetic oligonucleotide
  Target: LAMA2; (+) strand; PAM type: NRG; PAM sequence: AGG
gagttacatttttttgaaga

SEQ ID NO: 159415 - DNA, 20 bp, Artificial Sequence
  Description of Artificial Sequence: Synthetic oligonucleotide
  Target: LAMA2; (+) strand; PAM type: NRG; PAM sequence: TGG
tttttttgaagaaggcatta

SEQ ID NO: 159416 - DNA, 20 bp, Artificial Sequence
  Description of Artificial Sequence: Synthetic oligonucleotide
  Target: LAMA2; (+) strand; PAM type: NRG; PAM sequence: CAG
tgaagaaggcattatggcta

SEQ ID NO: 159417 - DNA, 20 bp, Artificial Sequence
  Description of Artificial Sequence: Synthetic oligonucleotide
  Target: LAMA2; (+) strand; PAM type: NRG; PAM sequence: TAG
agaaggcattatggctacag

SEQ ID NO: 159418 - DNA, 20 bp, Artificial Sequence
  Description of Artificial Sequence: Synthetic oligonucleotide
  Target: LAMA2; (+) strand; PAM type: NRG; PAM sequence: AGG
gaaggcattatggctacagt

SEQ ID NO: 159419 - DNA, 20 bp, Artificial Sequence
  Description of Artificial Sequence: Synthetic oligonucleotide
  Target: LAMA2; (+) strand; PAM type: NRG; PAM sequence: AAG
ggcattatggctacagtagg

SEQ ID NO: 159420 - DNA, 20 bp, Artificial Sequence
  Description of Artificial Sequence: Synthetic oligonucleotide
  Target: LAMA2; (+) strand; PAM type: NRG; PAM sequence: TAG
acagtaggaagaatgtgtct

SEQ ID NO: 159421 - DNA, 20 bp, Artificial Sequence
  Description of Artificial Sequence: Synthetic oligonucleotide
  Target: LAMA2; (+) strand; PAM type: NRG; PAM sequence: AGG
cagtaggaagaatgtgtctt

SEQ ID NO: 159422 - DNA, 20 bp, Artificial Sequence
  Description of Artificial Sequence: Synthetic oligonucleotide
  Target: LAMA2; (+) strand; PAM type: NRG; PAM sequence: GAG
gtaggaagaatgtgtcttag

SEQ ID NO: 159423 - DNA, 20 bp, Artificial Sequence
  Description of Artificial Sequence: Synthetic oligonucleotide
  Target: LAMA2; (+) strand; PAM type: NRG; PAM sequence: AGG
taggaagaatgtgtcttagg

SEQ ID NO: 159424 - DNA, 20 bp, Artificial Sequence
  Description of Artificial Sequence: Synthetic oligonucleotide
  Target: LAMA2; (+) strand; PAM type: NRG; PAM sequence: GGG
aggaagaatgtgtcttagga

SEQ ID NO: 159425 - DNA, 20 bp, Artificial Sequence
  Description of Artificial Sequence: Synthetic oligonucleotide
  Target: LAMA2; (+) strand; PAM type: NRG; PAM sequence: TAG
tcttaggagggcatgaataa

SEQ ID NO: 159426 - DNA, 20 bp, Artificial Sequence
  Description of Artificial Sequence: Synthetic oligonucleotide
  Target: LAMA2; (+) strand; PAM type: NRG; PAM sequence: AGG
cttaggagggcatgaataat

SEQ ID NO: 159427 - DNA, 20 bp, Artificial Sequence
  Description of Artificial Sequence: Synthetic oligonucleotide
  Target: LAMA2; (+) strand; PAM type: NRG; PAM sequence: AAG
aggagggcatgaataatagg

SEQ ID NO: 159428 - DNA, 20 bp, Artificial Sequence
  Description of Artificial Sequence: Synthetic oligonucleotide
  Target: LAMA2; (+) strand; PAM type: NRG; PAM sequence: AGG
ggagggcatgaataatagga

SEQ ID NO: 159429 - DNA, 20 bp, Artificial Sequence
  Description of Artificial Sequence: Synthetic oligonucleotide
  Target: LAMA2; (+) strand; PAM type: NRG; PAM sequence: GAG
agggcatgaataataggaag

SEQ ID NO: 159430 - DNA, 20 bp, Artificial Sequence
  Description of Artificial Sequence: Synthetic oligonucleotide
  Target: LAMA2; (+) strand; PAM type: NRG; PAM sequence: AAG
gcatgaataataggaaggag

SEQ ID NO: 159431 - DNA, 20 bp, Artificial Sequence
  Description of Artificial Sequence: Synthetic oligonucleotide
  Target: LAMA2; (+) strand; PAM type: NRG; PAM sequence: AGG
catgaataataggaaggaga

SEQ ID NO: 159432 - DNA, 20 bp, Artificial Sequence
  Description of Artificial Sequence: Synthetic oligonucleotide
  Target: LAMA2; (+) strand; PAM type: NRG; PAM sequence: GGG
atgaataataggaaggagaa

SEQ ID NO: 159433 - DNA, 20 bp, Artificial Sequence
  Description of Artificial Sequence: Synthetic oligonucleotide
  Target: LAMA2; (+) strand; PAM type: NRG; PAM sequence: TAG
gaaggagaagggttaatatg

SEQ ID NO: 159434 - DNA, 20 bp, Artificial Sequence
  Description of Artificial Sequence: Synthetic oligonucleotide
  Target: LAMA2; (+) strand; PAM type: NRG; PAM sequence: CAG
gaagggttaatatgtagttg

SEQ ID NO: 159435 - DNA, 20 bp, Artificial Sequence
  Description of Artificial Sequence: Synthetic oligonucleotide
  Target: LAMA2; (+) strand; PAM type: NRG; PAM sequence: TGG
gggttaatatgtagttgcag

SEQ ID NO: 159436 - DNA, 20 bp, Artificial Sequence
  Description of Artificial Sequence: Synthetic oligonucleotide
  Target: LAMA2; (+) strand; PAM type: NRG; PAM sequence: CAG
tatgtagttgcagtggaaca

SEQ ID NO: 159437 - DNA, 20 bp, Artificial Sequence
  Description of Artificial Sequence: Synthetic oligonucleotide
  Target: LAMA2; (+) strand; PAM type: NRG; PAM sequence: CAG
gcagtggaacacagcaatga

SEQ ID NO: 159438 - DNA, 20 bp, Artificial Sequence
  Description of Artificial Sequence: Synthetic oligonucleotide
  Target: LAMA2; (+) strand; PAM type: NRG; PAM sequence: TAG
gtggaacacagcaatgacag

SEQ ID NO: 159439 - DNA, 20 bp, Artificial Sequence
  Description of Artificial Sequence: Synthetic oligonucleotide
  Target: LAMA2; (+) strand; PAM type: NRG; PAM sequence: TAG
gcaatgacagtagttgctgt

SEQ ID NO: 159440 - DNA, 20 bp, Artificial Sequence
  Description of Artificial Sequence: Synthetic oligonucleotide
  Target: LAMA2; (+) strand; PAM type: NRG; PAM sequence: AGG
caatgacagtagttgctgtt

SEQ ID NO: 159441 - DNA, 20 bp, Artificial Sequence
  Description of Artificial Sequence: Synthetic oligonucleotide
  Target: LAMA2; (+) strand; PAM type: NRG; PAM sequence: TGG
agtagttgctgttaggatca

SEQ ID NO: 159442 - DNA, 20 bp, Artificial Sequence
  Description of Artificial Sequence: Synthetic oligonucleotide
  Target: LAMA2; (+) strand; PAM type: NRG; PAM sequence: CAG
agttgctgttaggatcatgg

SEQ ID NO: 159443 - DNA, 20 bp, Artificial Sequence
  Description of Artificial Sequence: Synthetic oligonucleotide
  Target: LAMA2; (+) strand; PAM type: NRG; PAM sequence: AGG
gttgctgttaggatcatggc

SEQ ID NO: 159444 - DNA, 20 bp, Artificial Sequence
  Description of Artificial Sequence: Synthetic oligonucleotide
  Target: LAMA2; (+) strand; PAM type: NRG; PAM sequence: GGG
ttgctgttaggatcatggca

SEQ ID NO: 159445 - DNA, 20 bp, Artificial Sequence
  Description of Artificial Sequence: Synthetic oligonucleotide
  Target: LAMA2; (+) strand; PAM type: NRG; PAM sequence: AAG
atcatggcagggaatataaa

SEQ ID NO: 159446 - DNA, 20 bp, Artificial Sequence
  Description of Artificial Sequence: Synthetic oligonucleotide
  Target: LAMA2; (+) strand; PAM type: NRG; PAM sequence: GAG
catggcagggaatataaaaa

SEQ ID NO: 159447 - DNA, 20 bp, Artificial Sequence
  Description of Artificial Sequence: Synthetic oligonucleotide
  Target: LAMA2; (+) strand; PAM type: NRG; PAM sequence: TAG
gcagggaatataaaaagagt

SEQ ID NO: 159448 - DNA, 20 bp, Artificial Sequence
  Description of Artificial Sequence: Synthetic oligonucleotide
  Target: LAMA2; (+) strand; PAM type: NRG; PAM sequence: TAG
atattctatatatattttga

SEQ ID NO: 159449 - DNA, 20 bp, Artificial Sequence
  Description of Artificial Sequence: Synthetic oligonucleotide
  Target: LAMA2; (+) strand; PAM type: NRG; PAM sequence: TAG
ttctatatatattttgatag

SEQ ID NO: 159450 - DNA, 20 bp, Artificial Sequence
  Description of Artificial Sequence: Synthetic oligonucleotide
  Target: LAMA2; (+) strand; PAM type: NRG; PAM sequence: TAG
tattttgatagtagaacaaa

SEQ ID NO: 159451 - DNA, 20 bp, Artificial Sequence
  Description of Artificial Sequence: Synthetic oligonucleotide
  Target: LAMA2; (+) strand; PAM type: NRG; PAM sequence: AGG
attttgatagtagaacaaat

SEQ ID NO: 159452 - DNA, 20 bp, Artificial Sequence
  Description of Artificial Sequence: Synthetic oligonucleotide
  Target: LAMA2; (+) strand; PAM type: NRG; PAM sequence: GAG
caaataggacttactgattc

SEQ ID NO: 159453 - DNA, 20 bp, Artificial Sequence
  Description of Artificial Sequence: Synthetic oligonucleotide
  Target: LAMA2; (+) strand; PAM type: NRG; PAM sequence: CAG
actgattcgagactgtatgt

SEQ ID NO: 159454 - DNA, 20 bp, Artificial Sequence
  Description of Artificial Sequence: Synthetic oligonucleotide
  Target: LAMA2; (+) strand; PAM type: NRG; PAM sequence: AGG
ctgattcgagactgtatgtc

SEQ ID NO: 159455 - DNA, 20 bp, Artificial Sequence
  Description of Artificial Sequence: Synthetic oligonucleotide
  Target: LAMA2; (+) strand; PAM type: NRG; PAM sequence: GGG
tgattcgagactgtatgtca

SEQ ID NO: 159456 - DNA, 20 bp, Artificial Sequence
  Description of Artificial Sequence: Synthetic oligonucleotide
  Target: LAMA2; (+) strand; PAM type: NRG; PAM sequence: GGG
gattcgagactgtatgtcag

SEQ ID NO: 159457 - DNA, 20 bp, Artificial Sequence
  Description of Artificial Sequence: Synthetic oligonucleotide
  Target: LAMA2; (+) strand; PAM type: NRG; PAM sequence: GAG
ttcgagactgtatgtcaggg

SEQ ID NO: 159458 - DNA, 20 bp, Artificial Sequence
  Description of Artificial Sequence: Synthetic oligonucleotide
  Target: LAMA2; (+) strand; PAM type: NRG; PAM sequence: GAG
cgagactgtatgtcagggga

SEQ ID NO: 159459 - DNA, 20 bp, Artificial Sequence
  Description of Artificial Sequence: Synthetic oligonucleotide
  Target: LAMA2; (+) strand; PAM type: NRG; PAM sequence: AAG
gtatgtcaggggagagatta

SEQ ID NO: 159460 - DNA, 20 bp, Artificial Sequence
  Description of Artificial Sequence: Synthetic oligonucleotide
  Target: LAMA2; (+) strand; PAM type: NRG; PAM sequence: AAG
ggggagagattaaagaaata

SEQ ID NO: 159461 - DNA, 20 bp, Artificial Sequence
  Description of Artificial Sequence: Synthetic oligonucleotide
  Target: LAMA2; (+) strand; PAM type: NRG; PAM sequence: GAG
ggagagattaaagaaataaa

SEQ ID NO: 159462 - DNA, 20 bp, Artificial Sequence
  Description of Artificial Sequence: Synthetic oligonucleotide
  Target: LAMA2; (+) strand; PAM type: NRG; PAM sequence: AAG
attaaagaaataaagagttt

SEQ ID NO: 159463 - DNA, 20 bp, Artificial Sequence
  Description of Artificial Sequence: Synthetic oligonucleotide
  Target: LAMA2; (+) strand; PAM type: NRG; PAM sequence: GAG
gaaataaagagtttaagaat

SEQ ID NO: 159464 - DNA, 20 bp, Artificial Sequence
  Description of Artificial Sequence: Synthetic oligonucleotide
  Target: LAMA2; (+) strand; PAM type: NRG; PAM sequence: TAG
aagagtttaagaatgagtca

SEQ ID NO: 159465 - DNA, 20 bp, Artificial Sequence
  Description of Artificial Sequence: Synthetic oligonucleotide
  Target: LAMA2; (+) strand; PAM type: NRG; PAM sequence: CAG
aagaatgagtcatagatgac

SEQ ID NO: 159466 - DNA, 20 bp, Artificial Sequence
  Description of Artificial Sequence: Synthetic oligonucleotide
  Target: LAMA2; (+) strand; PAM type: NRG; PAM sequence: CAG
gaccagtttgaatgattgat

SEQ ID NO: 159467 - DNA, 20 bp, Artificial Sequence
  Description of Artificial Sequence: Synthetic oligonucleotide
  Target: LAMA2; (+) strand; PAM type: NRG; PAM sequence: TGG
agtttgaatgattgatcagt

SEQ ID NO: 159468 - DNA, 20 bp, Artificial Sequence
  Description of Artificial Sequence: Synthetic oligonucleotide
  Target: LAMA2; (+) strand; PAM type: NRG; PAM sequence: TGG
aatgattgatcagttggttg

SEQ ID NO: 159469 - DNA, 20 bp, Artificial Sequence
  Description of Artificial Sequence: Synthetic oligonucleotide
  Target: LAMA2; (+) strand; PAM type: NRG; PAM sequence: GAG
tggttgtggtgtcatttact

SEQ ID NO: 159470 - DNA, 20 bp, Artificial Sequence
  Description of Artificial Sequence: Synthetic oligonucleotide
  Target: LAMA2; (+) strand; PAM type: NRG; PAM sequence: GAG
gtggtgtcatttactgagct

SEQ ID NO: 159471 - DNA, 20 bp, Artificial Sequence
  Description of Artificial Sequence: Synthetic oligonucleotide
  Target: LAMA2; (+) strand; PAM type: NRG; PAM sequence: AGG
tggtgtcatttactgagctg

SEQ ID NO: 159472 - DNA, 20 bp, Artificial Sequence
  Description of Artificial Sequence: Synthetic oligonucleotide
  Target: LAMA2; (+) strand; PAM type: NRG; PAM sequence: TAG
tcatttactgagctgaggaa

SEQ ID NO: 159473 - DNA, 20 bp, Artificial Sequence
  Description of Artificial Sequence: Synthetic oligonucleotide
  Target: LAMA2; (+) strand; PAM type: NRG; PAM sequence: TGG
ttactgagctgaggaatagt

SEQ ID NO: 159474 - DNA, 20 bp, Artificial Sequence
  Description of Artificial Sequence: Synthetic oligonucleotide
  Target: LAMA2; (+) strand; PAM type: NRG; PAM sequence: TGG
tgaggaatagttggtgtgtg

SEQ ID NO: 159475 - DNA, 20 bp, Artificial Sequence
  Description of Artificial Sequence: Synthetic oligonucleotide
  Target: LAMA2; (+) strand; PAM type: NRG; PAM sequence: GGG
gaggaatagttggtgtgtgt

SEQ ID NO: 159476 - DNA, 20 bp, Artificial Sequence
  Description of Artificial Sequence: Synthetic oligonucleotide
  Target: LAMA2; (+) strand; PAM type: NRG; PAM sequence: GGG
aggaatagttggtgtgtgtg

SEQ ID NO: 159477 - DNA, 20 bp, Artificial Sequence
  Description of Artificial Sequence: Synthetic oligonucleotide
  Target: LAMA2; (+) strand; PAM type: NRG; PAM sequence: GGG
ggaatagttggtgtgtgtgg

SEQ ID NO: 159478 - DNA, 20 bp, Artificial Sequence
  Description of Artificial Sequence: Synthetic oligonucleotide
  Target: LAMA2; (+) strand; PAM type: NRG; PAM sequence: GGG
gaatagttggtgtgtgtggg

SEQ ID NO: 159479 - DNA, 20 bp, Artificial Sequence
  Description of Artificial Sequence: Synthetic oligonucleotide
  Target: LAMA2; (+) strand; PAM type: NRG; PAM sequence: GGG
aatagttggtgtgtgtgggg

SEQ ID NO: 159480 - DNA, 20 bp, Artificial Sequence
  Description of Artificial Sequence: Synthetic oligonucleotide
  Target: LAMA2; (+) strand; PAM type: NRG; PAM sequence: TGG
agttggtgtgtgtggggggg

SEQ ID NO: 159481 - DNA, 20 bp, Artificial Sequence
  Description of Artificial Sequence: Synthetic oligonucleotide
  Target: LAMA2; (+) strand; PAM type: NRG; PAM sequence: GGG
gttggtgtgtgtgggggggt

SEQ ID NO: 159482 - DNA, 20 bp, Artificial Sequence
  Description of Artificial Sequence: Synthetic oligonucleotide
  Target: LAMA2; (+) strand; PAM type: NRG; PAM sequence: GGG
ttggtgtgtgtgggggggtg

SEQ ID NO: 159483 - DNA, 20 bp, Artificial Sequence
  Description of Artificial Sequence: Synthetic oligonucleotide
  Target: LAMA2; (+) strand; PAM type: NRG; PAM sequence: GGG
tggtgtgtgtgggggggtgg

SEQ ID NO: 159484 - DNA, 20 bp, Artificial Sequence
  Description of Artificial Sequence: Synthetic oligonucleotide
  Target: LAMA2; (+) strand; PAM type: NRG; PAM sequence: TGG
tgtgtgggggggtgggggca

SEQ ID NO: 159485 - DNA, 20 bp, Artificial Sequence
  Description of Artificial Sequence: Synthetic oligonucleotide
  Target: LAMA2; (+) strand; PAM type: NRG; PAM sequence: TAG
gggtgggggcatggaatcca

SEQ ID NO: 159486 - DNA, 20 bp, Artificial Sequence
  Description of Artificial Sequence: Synthetic oligonucleotide
  Target: LAMA2; (+) strand; PAM type: NRG; PAM sequence: CAG
ggggcatggaatccatagtc

SEQ ID NO: 159487 - DNA, 20 bp, Artificial Sequence
  Description of Artificial Sequence: Synthetic oligonucleotide
  Target: LAMA2; (+) strand; PAM type: NRG; PAM sequence: TAG
atggaatccatagtccagtt

SEQ ID NO: 159488 - DNA, 20 bp, Artificial Sequence
  Description of Artificial Sequence: Synthetic oligonucleotide
  Target: LAMA2; (+) strand; PAM type: NRG; PAM sequence: AAG
ttcgatttgaaaacgctgtg

SEQ ID NO: 159489 - DNA, 20 bp, Artificial Sequence
  Description of Artificial Sequence: Synthetic oligonucleotide
  Target: LAMA2; (+) strand; PAM type: NRG; PAM sequence: CAG
caatgtgtatttataatatt

SEQ ID NO: 159490 - DNA, 20 bp, Artificial Sequence
  Description of Artificial Sequence: Synthetic oligonucleotide
  Target: LAMA2; (+) strand; PAM type: NRG; PAM sequence: AGG
aatgtgtatttataatattc

SEQ ID NO: 159491 - DNA, 20 bp, Artificial Sequence
  Description of Artificial Sequence: Synthetic oligonucleotide
  Target: LAMA2; (+) strand; PAM type: NRG; PAM sequence: CAG
taatattcaggtcttaaatt

SEQ ID NO: 159492 - DNA, 20 bp, Artificial Sequence
  Description of Artificial Sequence: Synthetic oligonucleotide
  Target: LAMA2; (+) strand; PAM type: NRG; PAM sequence: TGG
ttaaattcagcatgtctgtc

SEQ ID NO: 159493 - DNA, 20 bp, Artificial Sequence
  Description of Artificial Sequence: Synthetic oligonucleotide
  Target: LAMA2; (+) strand; PAM type: NRG; PAM sequence: TAG
ttcagcatgtctgtctggtc

SEQ ID NO: 159494 - DNA, 20 bp, Artificial Sequence
  Description of Artificial Sequence: Synthetic oligonucleotide
  Target: LAMA2; (+) strand; PAM type: NRG; PAM sequence: GAG
cagcatgtctgtctggtcta

SEQ ID NO: 159495 - DNA, 20 bp, Artificial Sequence
  Description of Artificial Sequence: Synthetic oligonucleotide
  Target: LAMA2; (+) strand; PAM type: NRG; PAM sequence: TGG
ctggtctagagatatgtttt

SEQ ID NO: 159496 - DNA, 20 bp, Artificial Sequence
  Description of Artificial Sequence: Synthetic oligonucleotide
  Target: LAMA2; (+) strand; PAM type: NRG; PAM sequence: AAG
gtctagagatatgtttttgg

SEQ ID NO: 159497 - DNA, 20 bp, Artificial Sequence
  Description of Artificial Sequence: Synthetic oligonucleotide
  Target: LAMA2; (+) strand; PAM type: NRG; PAM sequence: AGG
tctagagatatgtttttgga

SEQ ID NO: 159498 - DNA, 20 bp, Artificial Sequence
  Description of Artificial Sequence: Synthetic oligonucleotide
  Target: LAMA2; (+) strand; PAM type: NRG; PAM sequence: TGG
ttggaaggcgtcataaacta

SEQ ID NO: 159499 - DNA, 20 bp, Artificial Sequence
  Description of Artificial Sequence: Synthetic oligonucleotide
  Target: LAMA2; (+) strand; PAM type: NRG; PAM sequence: CAG
tggaactgaataaaattacc

SEQ ID NO: 159500 - DNA, 20 bp, Artificial Sequence
  Description of Artificial Sequence: Synthetic oligonucleotide
  Target: LAMA2; (+) strand; PAM type: NRG; PAM sequence: AGG
ggaactgaataaaattaccc

SEQ ID NO: 159501 - DNA, 20 bp, Artificial Sequence
  Description of Artificial Sequence: Synthetic oligonucleotide
  Target: LAMA2; (+) strand; PAM type: NRG; PAM sequence: GAG
aactgaataaaattacccag

SEQ ID NO: 159502 - DNA, 20 bp, Artificial Sequence
  Description of Artificial Sequence: Synthetic oligonucleotide
  Target: LAMA2; (+) strand; PAM type: NRG; PAM sequence: AAG
gaataaaattacccaggaga

SEQ ID NO: 159503 - DNA, 20 bp, Artificial Sequence
  Description of Artificial Sequence: Synthetic oligonucleotide
  Target: LAMA2; (+) strand; PAM type: NRG; PAM sequence: AAG
aaagtgcaattgatttaaaa

SEQ ID NO: 159504 - DNA, 20 bp, Artificial Sequence
  Description of Artificial Sequence: Synthetic oligonucleotide
  Target: LAMA2; (+) strand; PAM type: NRG; PAM sequence: GAG
agtgcaattgatttaaaaaa

SEQ ID NO: 159505 - DNA, 20 bp, Artificial Sequence
  Description of Artificial Sequence: Synthetic oligonucleotide
  Target: LAMA2; (+) strand; PAM type: NRG; PAM sequence: GAG
tgcaattgatttaaaaaaga

SEQ ID NO: 159506 - DNA, 20 bp, Artificial Sequence
  Description of Artificial Sequence: Synthetic oligonucleotide
  Target: LAMA2; (+) strand; PAM type: NRG; PAM sequence: TAG
atttaaaaaagagagaaaaa

SEQ ID NO: 159507 - DNA, 20 bp, Artificial Sequence
  Description of Artificial Sequence: Synthetic oligonucleotide
  Target: LAMA2; (+) strand; PAM type: NRG; PAM sequence: CAG
aaaaagagagaaaaatagcc

SEQ ID NO: 159508 - DNA, 20 bp, Artificial Sequence
  Description of Artificial Sequence: Synthetic oligonucleotide
  Target: LAMA2; (+) strand; PAM type: NRG; PAM sequence: AAG
agagaaaaatagcccagccc

SEQ ID NO: 159509 - DNA, 20 bp, Artificial Sequence
  Description of Artificial Sequence: Synthetic oligonucleotide
  Target: LAMA2; (+) strand; PAM type: NRG; PAM sequence: GAG
aatagcccagcccaagccct

SEQ ID NO: 159510 - DNA, 20 bp, Artificial Sequence
  Description of Artificial Sequence: Synthetic oligonucleotide
  Target: LAMA2; (+) strand; PAM type: NRG; PAM sequence: AGG
atagcccagcccaagccctg

SEQ ID NO: 159511 - DNA, 20 bp, Artificial Sequence
  Description of Artificial Sequence: Synthetic oligonucleotide
  Target: LAMA2; (+) strand; PAM type: NRG; PAM sequence: GAG
agcccagcccaagccctgag

SEQ ID NO: 159512 - DNA, 20 bp, Artificial Sequence
  Description of Artificial Sequence: Synthetic oligonucleotide
  Target: LAMA2; (+) strand; PAM type: NRG; PAM sequence: AAG
cctgaggagctcctgacgtt

SEQ ID NO: 159513 - DNA, 20 bp, Artificial Sequence
  Description of Artificial Sequence: Synthetic oligonucleotide
  Target: LAMA2; (+) strand; PAM type: NRG; PAM sequence: AAG
gaggagctcctgacgttaag

SEQ ID NO: 159514 - DNA, 20 bp, Artificial Sequence
  Description of Artificial Sequence: Synthetic oligonucleotide
  Target: LAMA2; (+) strand; PAM type: NRG; PAM sequence: CAG
gagctcctgacgttaagaag

SEQ ID NO: 159515 - DNA, 20 bp, Artificial Sequence
  Description of Artificial Sequence: Synthetic oligonucleotide
  Target: LAMA2; (+) strand; PAM type: NRG; PAM sequence: AGG
agctcctgacgttaagaagc

SEQ ID NO: 159516 - DNA, 20 bp, Artificial Sequence
  Description of Artificial Sequence: Synthetic oligonucleotide
  Target: LAMA2; (+) strand; PAM type: NRG; PAM sequence: GGG
gctcctgacgttaagaagca

SEQ ID NO: 159517 - DNA, 20 bp, Artificial Sequence
  Description of Artificial Sequence: Synthetic oligonucleotide
  Target: LAMA2; (+) strand; PAM type: NRG; PAM sequence: AAG
gacgttaagaagcagggtca

SEQ ID NO: 159518 - DNA, 20 bp, Artificial Sequence
  Description of Artificial Sequence: Synthetic oligonucleotide
  Target: LAMA2; (+) strand; PAM type: NRG; PAM sequence: CAG
gttaagaagcagggtcaaag

SEQ ID NO: 159519 - DNA, 20 bp, Artificial Sequence
  Description of Artificial Sequence: Synthetic oligonucleotide
  Target: LAMA2; (+) strand; PAM type: NRG; PAM sequence: GAG
taagaagcagggtcaaagca

SEQ ID NO: 159520 - DNA, 20 bp, Artificial Sequence
  Description of Artificial Sequence: Synthetic oligonucleotide
  Target: LAMA2; (+) strand; PAM type: NRG; PAM sequence: AGG
aagaagcagggtcaaagcag

SEQ ID NO: 159521 - DNA, 20 bp, Artificial Sequence
  Description of Artificial Sequence: Synthetic oligonucleotide
  Target: LAMA2; (+) strand; PAM type: NRG; PAM sequence: GAG
gaagcagggtcaaagcagag

SEQ ID NO: 159522 - DNA, 20 bp, Artificial Sequence
  Description of Artificial Sequence: Synthetic oligonucleotide
  Target: LAMA2; (+) strand; PAM type: NRG; PAM sequence: CAG
cagggtcaaagcagaggaga

SEQ ID NO: 159523 - DNA, 20 bp, Artificial Sequence
  Description of Artificial Sequence: Synthetic oligonucleotide
  Target: LAMA2; (+) strand; PAM type: NRG; PAM sequence: AAG
tcaaagcagaggagacagca

SEQ ID NO: 159524 - DNA, 20 bp, Artificial Sequence
  Description of Artificial Sequence: Synthetic oligonucleotide
  Target: LAMA2; (+) strand; PAM type: NRG; PAM sequence: TAG
gagacagcaaagaaatatgc

SEQ ID NO: 159525 - DNA, 20 bp, Artificial Sequence
  Description of Artificial Sequence: Synthetic oligonucleotide
  Target: LAMA2; (+) strand; PAM type: NRG; PAM sequence: TGG
aaagaaatatgctagaaatt

SEQ ID NO: 159526 - DNA, 20 bp, Artificial Sequence
  Description of Artificial Sequence: Synthetic oligonucleotide
  Target: LAMA2; (+) strand; PAM type: NRG; PAM sequence: GGG
aagaaatatgctagaaattt

SEQ ID NO: 159527 - DNA, 20 bp, Artificial Sequence
  Description of Artificial Sequence: Synthetic oligonucleotide
  Target: LAMA2; (+) strand; PAM type: NRG; PAM sequence: AAG
aaatatgctagaaatttggg

SEQ ID NO: 159528 - DNA, 20 bp, Artificial Sequence
  Description of Artificial Sequence: Synthetic oligonucleotide
  Target: LAMA2; (+) strand; PAM type: NRG; PAM sequence: AAG
ttgggaagtgtgatgtcatg

SEQ ID NO: 159529 - DNA, 20 bp, Artificial Sequence
  Description of Artificial Sequence: Synthetic oligonucleotide
  Target: LAMA2; (+) strand; PAM type: NRG; PAM sequence: GAG
aagtgtgatgtcatgaagtt

SEQ ID NO: 159530 - DNA, 20 bp, Artificial Sequence
  Description of Artificial Sequence: Synthetic oligonucleotide
  Target: LAMA2; (+) strand; PAM type: NRG; PAM sequence: AAG
tgatgtcatgaagttgagaa

SEQ ID NO: 159531 - DNA, 20 bp, Artificial Sequence
  Description of Artificial Sequence: Synthetic oligonucleotide
  Target: LAMA2; (+) strand; PAM type: NRG; PAM sequence: TGG
gaagttgagaaaagaaattg

SEQ ID NO: 159532 - DNA, 20 bp, Artificial Sequence
  Description of Artificial Sequence: Synthetic oligonucleotide
  Target: LAMA2; (+) strand; PAM type: NRG; PAM sequence: GGG
aagttgagaaaagaaattgt

SEQ ID NO: 159533 - DNA, 20 bp, Artificial Sequence
  Description of Artificial Sequence: Synthetic oligonucleotide
  Target: LAMA2; (+) strand; PAM type: NRG; PAM sequence: GAG
gttgagaaaagaaattgtgg

SEQ ID NO: 159534 - DNA, 20 bp, Artificial Sequence
  Description of Artificial Sequence: Synthetic oligonucleotide
  Target: LAMA2; (+) strand; PAM type: NRG; PAM sequence: AGG
ttgagaaaagaaattgtggg

SEQ ID NO: 159535 - DNA, 20 bp, Artificial Sequence
  Description of Artificial Sequence: Synthetic oligonucleotide
  Target: LAMA2; (+) strand; PAM type: NRG; PAM sequence: AAG
aaaagaaattgtgggaggaa

SEQ ID NO: 159536 - DNA, 20 bp, Artificial Sequence
  Description of Artificial Sequence: Synthetic oligonucleotide
  Target: LAMA2; (+) strand; PAM type: NRG; PAM sequence: AGG
aaagaaattgtgggaggaaa

SEQ ID NO: 159537 - DNA, 20 bp, Artificial Sequence
  Description of Artificial Sequence: Synthetic oligonucleotide
  Target: LAMA2; (+) strand; PAM type: NRG; PAM sequence: GAG
agaaattgtgggaggaaaag

SEQ ID NO: 159538 - DNA, 20 bp, Artificial Sequence
  Description of Artificial Sequence: Synthetic oligonucleotide
  Target: LAMA2; (+) strand; PAM type: NRG; PAM sequence: CAG
attgtgggaggaaaaggagt

SEQ ID NO: 159539 - DNA, 20 bp, Artificial Sequence
  Description of Artificial Sequence: Synthetic oligonucleotide
  Target: LAMA2; (+) strand; PAM type: NRG; PAM sequence: TAG
tgggaggaaaaggagtcagc

SEQ ID NO: 159540 - DNA, 20 bp, Artificial Sequence
  Description of Artificial Sequence: Synthetic oligonucleotide
  Target: LAMA2; (+) strand; PAM type: NRG; PAM sequence: AGG
gggaggaaaaggagtcagct

SEQ ID NO: 159541 - DNA, 20 bp, Artificial Sequence
  Description of Artificial Sequence: Synthetic oligonucleotide
  Target: LAMA2; (+) strand; PAM type: NRG; PAM sequence: AAG
aaaaggagtcagctaggccc

SEQ ID NO: 159542 - DNA, 20 bp, Artificial Sequence
  Description of Artificial Sequence: Synthetic oligonucleotide
  Target: LAMA2; (+) strand; PAM type: NRG; PAM sequence: AGG
aaaggagtcagctaggccca

SEQ ID NO: 159543 - DNA, 20 bp, Artificial Sequence
  Description of Artificial Sequence: Synthetic oligonucleotide
  Target: LAMA2; (+) strand; PAM type: NRG; PAM sequence: AAG
gctaggcccaaggctgatga

SEQ ID NO: 159544 - DNA, 20 bp, Artificial Sequence
  Description of Artificial Sequence: Synthetic oligonucleotide
  Target: LAMA2; (+) strand; PAM type: NRG; PAM sequence: AGG
ctaggcccaaggctgatgaa

SEQ ID NO: 159545 - DNA, 20 bp, Artificial Sequence
  Description of Artificial Sequence: Synthetic oligonucleotide
  Target: LAMA2; (+) strand; PAM type: NRG; PAM sequence: TGG
gcccaaggctgatgaaaggt

SEQ ID NO: 159546 - DNA, 20 bp, Artificial Sequence
  Description of Artificial Sequence: Synthetic oligonucleotide
  Target: LAMA2; (+) strand; PAM type: NRG; PAM sequence: CAG
ggttggataaaatgcaattg

SEQ ID NO: 159547 - DNA, 20 bp, Artificial Sequence
  Description of Artificial Sequence: Synthetic oligonucleotide
  Target: LAMA2; (+) strand; PAM type: NRG; PAM sequence: TGG
gcagaattgtccatcgaatt

SEQ ID NO: 159548 - DNA, 20 bp, Artificial Sequence
  Description of Artificial Sequence: Synthetic oligonucleotide
  Target: LAMA2; (+) strand; PAM type: NRG; PAM sequence: TGG
gtccatcgaatttggctgca

SEQ ID NO: 159549 - DNA, 20 bp, Artificial Sequence
  Description of Artificial Sequence: Synthetic oligonucleotide
  Target: LAMA2; (+) strand; PAM type: NRG; PAM sequence: TGG
gaatttggctgcatggaatt

SEQ ID NO: 159550 - DNA, 20 bp, Artificial Sequence
  Description of Artificial Sequence: Synthetic oligonucleotide
  Target: LAMA2; (+) strand; PAM type: NRG; PAM sequence: AAG
gctgcatggaatttggtgac

SEQ ID NO: 159551 - DNA, 20 bp, Artificial Sequence
  Description of Artificial Sequence: Synthetic oligonucleotide
  Target: LAMA2; (+) strand; PAM type: NRG; PAM sequence: AGG
ctgcatggaatttggtgaca

SEQ ID NO: 159552 - DNA, 20 bp, Artificial Sequence
  Description of Artificial Sequence: Synthetic oligonucleotide
  Target: LAMA2; (+) strand; PAM type: NRG; PAM sequence: AAG
tggaatttggtgacaaggac

SEQ ID NO: 159553 - DNA, 20 bp, Artificial Sequence
  Description of Artificial Sequence: Synthetic oligonucleotide
  Target: LAMA2; (+) strand; PAM type: NRG; PAM sequence: GAG
gaatttggtgacaaggacaa

SEQ ID NO: 159554 - DNA, 20 bp, Artificial Sequence
  Description of Artificial Sequence: Synthetic oligonucleotide
  Target: LAMA2; (+) strand; PAM type: NRG; PAM sequence: CAG
tttggtgacaaggacaagag

SEQ ID NO: 159555 - DNA, 20 bp, Artificial Sequence
  Description of Artificial Sequence: Synthetic oligonucleotide
  Target: LAMA2; (+) strand; PAM type: NRG; PAM sequence: GAG
ggacaagagcagttttaatt

SEQ ID NO: 159556 - DNA, 20 bp, Artificial Sequence
  Description of Artificial Sequence: Synthetic oligonucleotide
  Target: LAMA2; (+) strand; PAM type: NRG; PAM sequence: GAG
acaagagcagttttaattga

SEQ ID NO: 159557 - DNA, 20 bp, Artificial Sequence
  Description of Artificial Sequence: Synthetic oligonucleotide
  Target: LAMA2; (+) strand; PAM type: NRG; PAM sequence: AGG
caagagcagttttaattgag

SEQ ID NO: 159558 - DNA, 20 bp, Artificial Sequence
  Description of Artificial Sequence: Synthetic oligonucleotide
  Target: LAMA2; (+) strand; PAM type: NRG; PAM sequence: TGG
gagcagttttaattgagagg

SEQ ID NO: 159559 - DNA, 20 bp, Artificial Sequence
  Description of Artificial Sequence: Synthetic oligonucleotide
  Target: LAMA2; (+) strand; PAM type: NRG; PAM sequence: CAG
tgagaggtggtgacacaaaa

SEQ ID NO: 159560 - DNA, 20 bp, Artificial Sequence
  Description of Artificial Sequence: Synthetic oligonucleotide
  Target: LAMA2; (+) strand; PAM type: NRG; PAM sequence: TAG
ggtggtgacacaaaacagat

SEQ ID NO: 159561 - DNA, 20 bp, Artificial Sequence
  Description of Artificial Sequence: Synthetic oligonucleotide
  Target: LAMA2; (+) strand; PAM type: NRG; PAM sequence: TGG
tgacacaaaacagattagaa

SEQ ID NO: 159562 - DNA, 20 bp, Artificial Sequence
  Description of Artificial Sequence: Synthetic oligonucleotide
  Target: LAMA2; (+) strand; PAM type: NRG; PAM sequence: AAG
aaacagattagaatggaatg

SEQ ID NO: 159563 - DNA, 20 bp, Artificial Sequence
  Description of Artificial Sequence: Synthetic oligonucleotide
  Target: LAMA2; (+) strand; PAM type: NRG; PAM sequence: AAG
gaatggaatgaagtgtgaaa

SEQ ID NO: 159564 - DNA, 20 bp, Artificial Sequence
  Description of Artificial Sequence: Synthetic oligonucleotide
  Target: LAMA2; (+) strand; PAM type: NRG; PAM sequence: GAG
atggaatgaagtgtgaaaaa

SEQ ID NO: 159565 - DNA, 20 bp, Artificial Sequence
  Description of Artificial Sequence: Synthetic oligonucleotide
  Target: LAMA2; (+) strand; PAM type: NRG; PAM sequence: AGG
tggaatgaagtgtgaaaaag

SEQ ID NO: 159566 - DNA, 20 bp, Artificial Sequence
  Description of Artificial Sequence: Synthetic oligonucleotide
  Target: LAMA2; (+) strand; PAM type: NRG; PAM sequence: GAG
atgaagtgtgaaaaagaggt

SEQ ID NO: 159567 - DNA, 20 bp, Artificial Sequence
  Description of Artificial Sequence: Synthetic oligonucleotide
  Target: LAMA2; (+) strand; PAM type: NRG; PAM sequence: AGG
tgaagtgtgaaaaagaggtg

SEQ ID NO: 159568 - DNA, 20 bp, Artificial Sequence
  Description of Artificial Sequence: Synthetic oligonucleotide
  Target: LAMA2; (+) strand; PAM type: NRG; PAM sequence: AAG
tgaggaatataatacttgtt

SEQ ID NO: 159569 - DNA, 20 bp, Artificial Sequence
  Description of Artificial Sequence: Synthetic oligonucleotide
  Target: LAMA2; (+) strand; PAM type: NRG; PAM sequence: GAG
aggaatataatacttgttaa

SEQ ID NO: 159570 - DNA, 20 bp, Artificial Sequence
  Description of Artificial Sequence: Synthetic oligonucleotide
  Target: LAMA2; (+) strand; PAM type: NRG; PAM sequence: TAG
aatataatacttgttaagag

SEQ ID NO: 159571 - DNA, 20 bp, Artificial Sequence
  Description of Artificial Sequence: Synthetic oligonucleotide
  Target: LAMA2; (+) strand; PAM type: NRG; PAM sequence: AAG
ttaagagtagtgttactgaa

SEQ ID NO: 159572 - DNA, 20 bp, Artificial Sequence
  Description of Artificial Sequence: Synthetic oligonucleotide
  Target: LAMA2; (+) strand; PAM type: NRG; PAM sequence: TAG
tgttactgaaaagaaaaaca

SEQ ID NO: 159573 - DNA, 20 bp, Artificial Sequence
  Description of Artificial Sequence: Synthetic oligonucleotide
  Target: LAMA2; (+) strand; PAM type: NRG; PAM sequence: TAG
aaaagaaaaacatagatgac

SEQ ID NO: 159574 - DNA, 20 bp, Artificial Sequence
  Description of Artificial Sequence: Synthetic oligonucleotide
  Target: LAMA2; (+) strand; PAM type: NRG; PAM sequence: AAG
aaaaacatagatgactagaa

SEQ ID NO: 159575 - DNA, 20 bp, Artificial Sequence
  Description of Artificial Sequence: Synthetic oligonucleotide
  Target: LAMA2; (+) strand; PAM type: NRG; PAM sequence: GAG
gatgactagaaaagttatat

SEQ ID NO: 159576 - DNA, 20 bp, Artificial Sequence
  Description of Artificial Sequence: Synthetic oligonucleotide
  Target: LAMA2; (+) strand; PAM type: NRG; PAM sequence: AGG
atgactagaaaagttatatg

SEQ ID NO: 159577 - DNA, 20 bp, Artificial Sequence
  Description of Artificial Sequence: Synthetic oligonucleotide
  Target: LAMA2; (+) strand; PAM type: NRG; PAM sequence: AAG
tagaaaagttatatgaggct

SEQ ID NO: 159578 - DNA, 20 bp, Artificial Sequence
  Description of Artificial Sequence: Synthetic oligonucleotide
  Target: LAMA2; (+) strand; PAM type: NRG; PAM sequence: GAG
gaaaagttatatgaggctaa

SEQ ID NO: 159579 - DNA, 20 bp, Artificial Sequence
  Description of Artificial Sequence: Synthetic oligonucleotide
  Target: LAMA2; (+) strand; PAM type: NRG; PAM sequence: AGG
aaaagttatatgaggctaag

SEQ ID NO: 159580 - DNA, 20 bp, Artificial Sequence
  Description of Artificial Sequence: Synthetic oligonucleotide
  Target: LAMA2; (+) strand; PAM type: NRG; PAM sequence: CAG
gttatatgaggctaagagga

SEQ ID NO: 159581 - DNA, 20 bp, Artificial Sequence
  Description of Artificial Sequence: Synthetic oligonucleotide
  Target: LAMA2; (+) strand; PAM type: NRG; PAM sequence: TGG
tgtgttttgtttatttttga

SEQ ID NO: 159582 - DNA, 20 bp, Artificial Sequence
  Description of Artificial Sequence: Synthetic oligonucleotide
  Target: LAMA2; (+) strand; PAM type: NRG; PAM sequence: GAG
tgttttgtttatttttgatg

SEQ ID NO: 159583 - DNA, 20 bp, Artificial Sequence
  Description of Artificial Sequence: Synthetic oligonucleotide
  Target: LAMA2; (+) strand; PAM type: NRG; PAM sequence: TAG
tttatttttgatggagacac

SEQ ID NO: 159584 - DNA, 20 bp, Artificial Sequence
  Description of Artificial Sequence: Synthetic oligonucleotide
  Target: LAMA2; (+) strand; PAM type: NRG; PAM sequence: TAG
atcatatttttttgtgctga

SEQ ID NO: 159585 - DNA, 20 bp, Artificial Sequence
  Description of Artificial Sequence: Synthetic oligonucleotide
  Target: LAMA2; (+) strand; PAM type: NRG; PAM sequence: CAG
ttgtgctgatagtaatgacc

SEQ ID NO: 159586 - DNA, 20 bp, Artificial Sequence
  Description of Artificial Sequence: Synthetic oligonucleotide
  Target: LAMA2; (+) strand; PAM type: NRG; PAM sequence: TAG
tgctgatagtaatgacccag

SEQ ID NO: 159587 - DNA, 20 bp, Artificial Sequence
  Description of Artificial Sequence: Synthetic oligonucleotide
  Target: LAMA2; (+) strand; PAM type: NRG; PAM sequence: AAG
tgatagtaatgacccagtag

SEQ ID NO: 159588 - DNA, 20 bp, Artificial Sequence
  Description of Artificial Sequence: Synthetic oligonucleotide
  Target: LAMA2; (+) strand; PAM type: NRG; PAM sequence: AGG
gatagtaatgacccagtaga

SEQ ID NO: 159589 - DNA, 20 bp, Artificial Sequence
  Description of Artificial Sequence: Synthetic oligonucleotide
  Target: LAMA2; (+) strand; PAM type: NRG; PAM sequence: GGG
atagtaatgacccagtagaa

SEQ ID NO: 159590 - DNA, 20 bp, Artificial Sequence
  Description of Artificial Sequence: Synthetic oligonucleotide
  Target: LAMA2; (+) strand; PAM type: NRG; PAM sequence: AAG
taatgacccagtagaaggga

SEQ ID NO: 159591 - DNA, 20 bp, Artificial Sequence
  Description of Artificial Sequence: Synthetic oligonucleotide
  Target: LAMA2; (+) strand; PAM type: NRG; PAM sequence: CAG
gaaagttattactaatccat

SEQ ID NO: 159592 - DNA, 20 bp, Artificial Sequence
  Description of Artificial Sequence: Synthetic oligonucleotide
  Target: LAMA2; (+) strand; PAM type: NRG; PAM sequence: GAG
aagttattactaatccatca

SEQ ID NO: 159593 - DNA, 20 bp, Artificial Sequence
  Description of Artificial Sequence: Synthetic oligonucleotide
  Target: LAMA2; (+) strand; PAM type: NRG; PAM sequence: GAG
gttattactaatccatcaga

SEQ ID NO: 159594 - DNA, 20 bp, Artificial Sequence
  Description of Artificial Sequence: Synthetic oligonucleotide
  Target: LAMA2; (+) strand; PAM type: NRG; PAM sequence: GAG
tattactaatccatcagaga

SEQ ID NO: 159595 - DNA, 20 bp, Artificial Sequence
  Description of Artificial Sequence: Synthetic oligonucleotide
  Target: LAMA2; (+) strand; PAM type: NRG; PAM sequence: GAG
catcagagagagtgaatatt

SEQ ID NO: 159596 - DNA, 20 bp, Artificial Sequence
  Description of Artificial Sequence: Synthetic oligonucleotide
  Target: LAMA2; (+) strand; PAM type: NRG; PAM sequence: AAG
cagagagagtgaatattgag

SEQ ID NO: 159597 - DNA, 20 bp, Artificial Sequence
  Description of Artificial Sequence: Synthetic oligonucleotide
  Target: LAMA2; (+) strand; PAM type: NRG; PAM sequence: CAG
agtgaatattgagaagataa

SEQ ID NO: 159598 - DNA, 20 bp, Artificial Sequence
  Description of Artificial Sequence: Synthetic oligonucleotide
  Target: LAMA2; (+) strand; PAM type: NRG; PAM sequence: TGG
attgagaagataacagatgc

SEQ ID NO: 159599 - DNA, 20 bp, Artificial Sequence
  Description of Artificial Sequence: Synthetic oligonucleotide
  Target: LAMA2; (+) strand; PAM type: NRG; PAM sequence: CAG
aagataacagatgctggaat

SEQ ID NO: 159600 - DNA, 20 bp, Artificial Sequence
  Description of Artificial Sequence: Synthetic oligonucleotide
  Target: LAMA2; (+) strand; PAM type: NRG; PAM sequence: AAG
agatgctggaatcagatgac

SEQ ID NO: 159601 - DNA, 20 bp, Artificial Sequence
  Description of Artificial Sequence: Synthetic oligonucleotide
  Target: LAMA2; (+) strand; PAM type: NRG; PAM sequence: TGG
tgctggaatcagatgacaag

SEQ ID NO: 159602 - DNA, 20 bp, Artificial Sequence
  Description of Artificial Sequence: Synthetic oligonucleotide
  Target: LAMA2; (+) strand; PAM type: NRG; PAM sequence: GAG
ctggaatcagatgacaagtg

SEQ ID NO: 159603 - DNA, 20 bp, Artificial Sequence
  Description of Artificial Sequence: Synthetic oligonucleotide
  Target: LAMA2; (+) strand; PAM type: NRG; PAM sequence: TAG
caagtggagtaatatttctt

SEQ ID NO: 159604 - DNA, 20 bp, Artificial Sequence
  Description of Artificial Sequence: Synthetic oligonucleotide
  Target: LAMA2; (+) strand; PAM type: NRG; PAM sequence: AGG
aagtggagtaatatttcttt

SEQ ID NO: 159605 - DNA, 20 bp, Artificial Sequence
  Description of Artificial Sequence: Synthetic oligonucleotide
  Target: LAMA2; (+) strand; PAM type: NRG; PAM sequence: GAG
gtggagtaatatttctttag

SEQ ID NO: 159606 - DNA, 20 bp, Artificial Sequence
  Description of Artificial Sequence: Synthetic oligonucleotide
  Target: LAMA2; (+) strand; PAM type: NRG; PAM sequence: AGG
tggagtaatatttctttagg

SEQ ID NO: 159607 - DNA, 20 bp, Artificial Sequence
  Description of Artificial Sequence: Synthetic oligonucleotide
  Target: LAMA2; (+) strand; PAM type: NRG; PAM sequence: AAG
agtaatatttctttaggagg

SEQ ID NO: 159608 - DNA, 20 bp, Artificial Sequence
  Description of Artificial Sequence: Synthetic oligonucleotide
  Target: LAMA2; (+) strand; PAM type: NRG; PAM sequence: AGG
gtaatatttctttaggagga

SEQ ID NO: 159609 - DNA, 20 bp, Artificial Sequence
  Description of Artificial Sequence: Synthetic oligonucleotide
  Target: LAMA2; (+) strand; PAM type: NRG; PAM sequence: TGG
cattccccacatcacttgtt

SEQ ID NO: 159610 - DNA, 20 bp, Artificial Sequence
  Description of Artificial Sequence: Synthetic oligonucleotide
  Target: LAMA2; (+) strand; PAM type: NRG; PAM sequence: TGG
cccacatcacttgtttggaa

SEQ ID NO: 159611 - DNA, 20 bp, Artificial Sequence
  Description of Artificial Sequence: Synthetic oligonucleotide
  Target: LAMA2; (+) strand; PAM type: NRG; PAM sequence: GGG
ccacatcacttgtttggaat

SEQ ID NO: 159612 - DNA, 20 bp, Artificial Sequence
  Description of Artificial Sequence: Synthetic oligonucleotide
  Target: LAMA2; (+) strand; PAM type: NRG; PAM sequence: TGG
acttgtttggaatgggaata

SEQ ID NO: 159613 - DNA, 20 bp, Artificial Sequence
  Description of Artificial Sequence: Synthetic oligonucleotide
  Target: LAMA2; (+) strand; PAM type: NRG; PAM sequence: AAG
tggaatgggaatatggcaac

SEQ ID NO: 159614 - DNA, 20 bp, Artificial Sequence
  Description of Artificial Sequence: Synthetic oligonucleotide
  Target: LAMA2; (+) strand; PAM type: NRG; PAM sequence: AGG
ggaatgggaatatggcaaca

SEQ ID NO: 159615 - DNA, 20 bp, Artificial Sequence
  Description of Artificial Sequence: Synthetic oligonucleotide
  Target: LAMA2; (+) strand; PAM type: NRG; PAM sequence: TGG
gggaatatggcaacaaggtt

SEQ ID NO: 159616 - DNA, 20 bp, Artificial Sequence
  Description of Artificial Sequence: Synthetic oligonucleotide
  Target: LAMA2; (+) strand; PAM type: NRG; PAM sequence: GAG
gaatatggcaacaaggtttg

SEQ ID NO: 159617 - DNA, 20 bp, Artificial Sequence
  Description of Artificial Sequence: Synthetic oligonucleotide
  Target: LAMA2; (+) strand; PAM type: NRG; PAM sequence: TAG
aaggtttggagatatatgct

SEQ ID NO: 159618 - DNA, 20 bp, Artificial Sequence
  Description of Artificial Sequence: Synthetic oligonucleotide
  Target: LAMA2; (+) strand; PAM type: NRG; PAM sequence: TGG
gagatatatgcttagatctc

SEQ ID NO: 159619 - DNA, 20 bp, Artificial Sequence
  Description of Artificial Sequence: Synthetic oligonucleotide
  Target: LAMA2; (+) strand; PAM type: NRG; PAM sequence: TAG
gcttagatctctggacttgt

SEQ ID NO: 159620 - DNA, 20 bp, Artificial Sequence
  Description of Artificial Sequence: Synthetic oligonucleotide
  Target: LAMA2; (+) strand; PAM type: NRG; PAM sequence: AAG
tctctggacttgttagtgca

SEQ ID NO: 159621 - DNA, 20 bp, Artificial Sequence
  Description of Artificial Sequence: Synthetic oligonucleotide
  Target: LAMA2; (+) strand; PAM type: NRG; PAM sequence: AGG
ctctggacttgttagtgcaa

SEQ ID NO: 159622 - DNA, 20 bp, Artificial Sequence
  Description of Artificial Sequence: Synthetic oligonucleotide
  Target: LAMA2; (+) strand; PAM type: NRG; PAM sequence: CAG
tggacttgttagtgcaaagg

SEQ ID NO: 159623 - DNA, 20 bp, Artificial Sequence
  Description of Artificial Sequence: Synthetic oligonucleotide
  Target: LAMA2; (+) strand; PAM type: NRG; PAM sequence: GAG
cagctttaatttttttctgt

SEQ ID NO: 159624 - DNA, 20 bp, Artificial Sequence
  Description of Artificial Sequence: Synthetic oligonucleotide
  Target: LAMA2; (+) strand; PAM type: NRG; PAM sequence: AAG
aatttttttctgtgagtaat

SEQ ID NO: 159625 - DNA, 20 bp, Artificial Sequence
  Description of Artificial Sequence: Synthetic oligonucleotide
  Target: LAMA2; (+) strand; PAM type: NRG; PAM sequence: TGG
gagtaataagttaaaatcac

SEQ ID NO: 159626 - DNA, 20 bp, Artificial Sequence
  Description of Artificial Sequence: Synthetic oligonucleotide
  Target: LAMA2; (+) strand; PAM type: NRG; PAM sequence: AAG
aagttaaaatcactggctaa

SEQ ID NO: 159627 - DNA, 20 bp, Artificial Sequence
  Description of Artificial Sequence: Synthetic oligonucleotide
  Target: LAMA2; (+) strand; PAM type: NRG; PAM sequence: GAG
gttaaaatcactggctaaaa

SEQ ID NO: 159628 - DNA, 20 bp, Artificial Sequence
  Description of Artificial Sequence: Synthetic oligonucleotide
  Target: LAMA2; (+) strand; PAM type: NRG; PAM sequence: GAG
taaaatcactggctaaaaga

SEQ ID NO: 159629 - DNA, 20 bp, Artificial Sequence
  Description of Artificial Sequence: Synthetic oligonucleotide
  Target: LAMA2; (+) strand; PAM type: NRG; PAM sequence: AGG
aaaatcactggctaaaagag

SEQ ID NO: 159630 - DNA, 20 bp, Artificial Sequence
  Description of Artificial Sequence: Synthetic oligonucleotide
  Target: LAMA2; (+) strand; PAM type: NRG; PAM sequence: AAG
actggctaaaagagaggtgt

SEQ ID NO: 159631 - DNA, 20 bp, Artificial Sequence
  Description of Artificial Sequence: Synthetic oligonucleotide
  Target: LAMA2; (+) strand; PAM type: NRG; PAM sequence: AGG
ctggctaaaagagaggtgta

SEQ ID NO: 159632 - DNA, 20 bp, Artificial Sequence
  Description of Artificial Sequence: Synthetic oligonucleotide
  Target: LAMA2; (+) strand; PAM type: NRG; PAM sequence: GAG
ggctaaaagagaggtgtaag

SEQ ID NO: 159633 - DNA, 20 bp, Artificial Sequence
  Description of Artificial Sequence: Synthetic oligonucleotide
  Target: LAMA2; (+) strand; PAM type: NRG; PAM sequence: TGG
aaaagagaggtgtaaggagt

SEQ ID NO: 159634 - DNA, 20 bp, Artificial Sequence
  Description of Artificial Sequence: Synthetic oligonucleotide
  Target: LAMA2; (+) strand; PAM type: NRG; PAM sequence: GGG
aaagagaggtgtaaggagtt

SEQ ID NO: 159635 - DNA, 20 bp, Artificial Sequence
  Description of Artificial Sequence: Synthetic oligonucleotide
  Target: LAMA2; (+) strand; PAM type: NRG; PAM sequence: AAG
gagaggtgtaaggagttggg

SEQ ID NO: 159636 - DNA, 20 bp, Artificial Sequence
  Description of Artificial Sequence: Synthetic oligonucleotide
  Target: LAMA2; (+) strand; PAM type: NRG; PAM sequence: AAG
gtaaggagttgggaagtttg

SEQ ID NO: 159637 - DNA, 20 bp, Artificial Sequence
  Description of Artificial Sequence: Synthetic oligonucleotide
  Target: LAMA2; (+) strand; PAM type: NRG; PAM sequence: AAG
ggagttgggaagtttgaaga

SEQ ID NO: 159638 - DNA, 20 bp, Artificial Sequence
  Description of Artificial Sequence: Synthetic oligonucleotide
  Target: LAMA2; (+) strand; PAM type: NRG; PAM sequence: AAG
gttgggaagtttgaagaaag

SEQ ID NO: 159639 - DNA, 20 bp, Artificial Sequence
  Description of Artificial Sequence: Synthetic oligonucleotide
  Target: LAMA2; (+) strand; PAM type: NRG; PAM sequence: TGG
aagtttgaagaaagaagacg

SEQ ID NO: 159640 - DNA, 20 bp, Artificial Sequence
  Description of Artificial Sequence: Synthetic oligonucleotide
  Target: LAMA2; (+) strand; PAM type: NRG; PAM sequence: GAG
gaagaaagaagacgtggtat

SEQ ID NO: 159641 - DNA, 20 bp, Artificial Sequence
  Description of Artificial Sequence: Synthetic oligonucleotide
  Target: LAMA2; (+) strand; PAM type: NRG; PAM sequence: CAG
tggtatgagtactgcatttg

SEQ ID NO: 159642 - DNA, 20 bp, Artificial Sequence
  Description of Artificial Sequence: Synthetic oligonucleotide
  Target: LAMA2; (+) strand; PAM type: NRG; PAM sequence: GAG
gtatgagtactgcatttgca

SEQ ID NO: 159643 - DNA, 20 bp, Artificial Sequence
  Description of Artificial Sequence: Synthetic oligonucleotide
  Target: LAMA2; (+) strand; PAM type: NRG; PAM sequence: AAG
acaaaacaaaaaaacttatt

SEQ ID NO: 159644 - DNA, 20 bp, Artificial Sequence
  Description of Artificial Sequence: Synthetic oligonucleotide
  Target: LAMA2; (+) strand; PAM type: NRG; PAM sequence: AGG
caaaacaaaaaaacttatta

SEQ ID NO: 159645 - DNA, 20 bp, Artificial Sequence
  Description of Artificial Sequence: Synthetic oligonucleotide
  Target: LAMA2; (+) strand; PAM type: NRG; PAM sequence: CAG
catgaatatctgtctgaaaa

SEQ ID NO: 159646 - DNA, 20 bp, Artificial Sequence
  Description of Artificial Sequence: Synthetic oligonucleotide
  Target: LAMA2; (+) strand; PAM type: NRG; PAM sequence: TAG
gaatatctgtctgaaaacag

SEQ ID NO: 159647 - DNA, 20 bp, Artificial Sequence
  Description of Artificial Sequence: Synthetic oligonucleotide
  Target: LAMA2; (+) strand; PAM type: NRG; PAM sequence: TAG
tctgtctgaaaacagtagat

SEQ ID NO: 159648 - DNA, 20 bp, Artificial Sequence
  Description of Artificial Sequence: Synthetic oligonucleotide
  Target: LAMA2; (+) strand; PAM type: NRG; PAM sequence: TAG
tctacccccttatgaatatg

SEQ ID NO: 159649 - DNA, 20 bp, Artificial Sequence
  Description of Artificial Sequence: Synthetic oligonucleotide
  Target: LAMA2; (+) strand; PAM type: NRG; PAM sequence: CAG
ttatgaatatgtagcttcac

SEQ ID NO: 159650 - DNA, 20 bp, Artificial Sequence
  Description of Artificial Sequence: Synthetic oligonucleotide
  Target: LAMA2; (+) strand; PAM type: NRG; PAM sequence: CAG
gcttttaaaaatgtatatta

SEQ ID NO: 159651 - DNA, 20 bp, Artificial Sequence
  Description of Artificial Sequence: Synthetic oligonucleotide
  Target: LAMA2; (+) strand; PAM type: NRG; PAM sequence: AAG
tttaaaaatgtatattacag

SEQ ID NO: 159652 - DNA, 20 bp, Artificial Sequence
  Description of Artificial Sequence: Synthetic oligonucleotide
  Target: LAMA2; (+) strand; PAM type: NRG; PAM sequence: AGG
ttaaaaatgtatattacaga

SEQ ID NO: 159653 - DNA, 20 bp, Artificial Sequence
  Description of Artificial Sequence: Synthetic oligonucleotide
  Target: LAMA2; (+) strand; PAM type: NRG; PAM sequence: TAG
aatcacttctataatgaatc

SEQ ID NO: 159654 - DNA, 20 bp, Artificial Sequence
  Description of Artificial Sequence: Synthetic oligonucleotide
  Target: LAMA2; (+) strand; PAM type: NRG; PAM sequence: AGG
atcacttctataatgaatct

SEQ ID NO: 159655 - DNA, 20 bp, Artificial Sequence
  Description of Artificial Sequence: Synthetic oligonucleotide
  Target: LAMA2; (+) strand; PAM type: NRG; PAM sequence: GGG
tcacttctataatgaatcta

SEQ ID NO: 159656 - DNA, 20 bp, Artificial Sequence
  Description of Artificial Sequence: Synthetic oligonucleotide
  Target: LAMA2; (+) strand; PAM type: NRG; PAM sequence: GAG
acttctataatgaatctagg

SEQ ID NO: 159657 - DNA, 20 bp, Artificial Sequence
  Description of Artificial Sequence: Synthetic oligonucleotide
  Target: LAMA2; (+) strand; PAM type: NRG; PAM sequence: AGG
cttctataatgaatctaggg

SEQ ID NO: 159658 - DNA, 20 bp, Artificial Sequence
  Description of Artificial Sequence: Synthetic oligonucleotide
  Target: LAMA2; (+) strand; PAM type: NRG; PAM sequence: TGG
tagggaggcaaaaaatgtaa

SEQ ID NO: 159659 - DNA, 20 bp, Artificial Sequence
  Description of Artificial Sequence: Synthetic oligonucleotide
  Target: LAMA2; (+) strand; PAM type: NRG; PAM sequence: GGG
agggaggcaaaaaatgtaat

SEQ ID NO: 159660 - DNA, 20 bp, Artificial Sequence
  Description of Artificial Sequence: Synthetic oligonucleotide
  Target: LAMA2; (+) strand; PAM type: NRG; PAM sequence: GGG
gggaggcaaaaaatgtaatg

SEQ ID NO: 159661 - DNA, 20 bp, Artificial Sequence
  Description of Artificial Sequence: Synthetic oligonucleotide
  Target: LAMA2; (+) strand; PAM type: NRG; PAM sequence: GAG
gaggcaaaaaatgtaatggg

SEQ ID NO: 159662 - DNA, 20 bp, Artificial Sequence
  Description of Artificial Sequence: Synthetic oligonucleotide
  Target: LAMA2; (+) strand; PAM type: NRG; PAM sequence: TGG
aaaaatgtaatggggagaaa

SEQ ID NO: 159663 - DNA, 20 bp, Artificial Sequence
  Description of Artificial Sequence: Synthetic oligonucleotide
  Target: LAMA2; (+) strand; PAM type: NRG; PAM sequence: GGG
aaaatgtaatggggagaaat

SEQ ID NO: 159664 - DNA, 20 bp, Artificial Sequence
  Description of Artificial Sequence: Synthetic oligonucleotide
  Target: LAMA2; (+) strand; PAM type: NRG; PAM sequence: AAG
atgtaatggggagaaatggg

SEQ ID NO: 159665 - DNA, 20 bp, Artificial Sequence
  Description of Artificial Sequence: Synthetic oligonucleotide
  Target: LAMA2; (+) strand; PAM type: NRG; PAM sequence: AGG
tgtaatggggagaaatggga

SEQ ID NO: 159666 - DNA, 20 bp, Artificial Sequence
  Description of Artificial Sequence: Synthetic oligonucleotide
  Target: LAMA2; (+) strand; PAM type: NRG; PAM sequence: GGG
gtaatggggagaaatgggaa

SEQ ID NO: 159667 - DNA, 20 bp, Artificial Sequence
  Description of Artificial Sequence: Synthetic oligonucleotide
  Target: LAMA2; (+) strand; PAM type: NRG; PAM sequence: TGG
gaaatgggaagggatttaat

SEQ ID NO: 159668 - DNA, 20 bp, Artificial Sequence
  Description of Artificial Sequence: Synthetic oligonucleotide
  Target: LAMA2; (+) strand; PAM type: NRG; PAM sequence: GGG
aaatgggaagggatttaatt

SEQ ID NO: 159669 - DNA, 20 bp, Artificial Sequence
  Description of Artificial Sequence: Synthetic oligonucleotide
  Target: LAMA2; (+) strand; PAM type: NRG; PAM sequence: GAG
atgggaagggatttaattgg

SEQ ID NO: 159670 - DNA, 20 bp, Artificial Sequence
  Description of Artificial Sequence: Synthetic oligonucleotide
  Target: LAMA2; (+) strand; PAM type: NRG; PAM sequence: TGG
agggatttaattgggagaaa

SEQ ID NO: 159671 - DNA, 20 bp, Artificial Sequence
  Description of Artificial Sequence: Synthetic oligonucleotide
  Target: LAMA2; (+) strand; PAM type: NRG; PAM sequence: CGG
ttaattgggagaaatggaaa

SEQ ID NO: 159672 - DNA, 20 bp, Artificial Sequence
  Description of Artificial Sequence: Synthetic oligonucleotide
  Target: LAMA2; (+) strand; PAM type: NRG; PAM sequence: CAG
tgggagaaatggaaacggaa

SEQ ID NO: 159673 - DNA, 20 bp, Artificial Sequence
  Description of Artificial Sequence: Synthetic oligonucleotide
  Target: LAMA2; (+) strand; PAM type: NRG; PAM sequence: AGG
gggagaaatggaaacggaac

SEQ ID NO: 159674 - DNA, 20 bp, Artificial Sequence
  Description of Artificial Sequence: Synthetic oligonucleotide
  Target: LAMA2; (+) strand; PAM type: NRG; PAM sequence: TAG
gaaatggaaacggaacagga

SEQ ID NO: 159675 - DNA, 20 bp, Artificial Sequence
  Description of Artificial Sequence: Synthetic oligonucleotide
  Target: LAMA2; (+) strand; PAM type: NRG; PAM sequence: TGG
ggatagaaatttgacaattt

SEQ ID NO: 159676 - DNA, 20 bp, Artificial Sequence
  Description of Artificial Sequence: Synthetic oligonucleotide
  Target: LAMA2; (+) strand; PAM type: NRG; PAM sequence: GGG
gatagaaatttgacaatttt

SEQ ID NO: 159677 - DNA, 20 bp, Artificial Sequence
  Description of Artificial Sequence: Synthetic oligonucleotide
  Target: LAMA2; (+) strand; PAM type: NRG; PAM sequence: TGG
gaaatttgacaattttgggt

SEQ ID NO: 159678 - DNA, 20 bp, Artificial Sequence
  Description of Artificial Sequence: Synthetic oligonucleotide
  Target: LAMA2; (+) strand; PAM type: NRG; PAM sequence: TGG
tgacaattttgggttggttg

SEQ ID NO: 159679 - DNA, 20 bp, Artificial Sequence
  Description of Artificial Sequence: Synthetic oligonucleotide
  Target: LAMA2; (+) strand; PAM type: NRG; PAM sequence: GGG
gacaattttgggttggttgt

SEQ ID NO: 159680 - DNA, 20 bp, Artificial Sequence
  Description of Artificial Sequence: Synthetic oligonucleotide
  Target: LAMA2; (+) strand; PAM type: NRG; PAM sequence: GGG
acaattttgggttggttgtg

SEQ ID NO: 159681 - DNA, 20 bp, Artificial Sequence
  Description of Artificial Sequence: Synthetic oligonucleotide
  Target: LAMA2; (+) strand; PAM type: NRG; PAM sequence: GGG
caattttgggttggttgtgg

SEQ ID NO: 159682 - DNA, 20 bp, Artificial Sequence
  Description of Artificial Sequence: Synthetic oligonucleotide
  Target: LAMA2; (+) strand; PAM type: NRG; PAM sequence: GAG
ggttgtgggggttgaaaaat

SEQ ID NO: 159683 - DNA, 20 bp, Artificial Sequence
  Description of Artificial Sequence: Synthetic oligonucleotide
  Target: LAMA2; (+) strand; PAM type: NRG; PAM sequence: TGG
ggttgaaaaatgagaacaca

SEQ ID NO: 159684 - DNA, 20 bp, Artificial Sequence
  Description of Artificial Sequence: Synthetic oligonucleotide
  Target: LAMA2; (+) strand; PAM type: NRG; PAM sequence: CAG
aaaatgagaacacatggaca

SEQ ID NO: 159685 - DNA, 20 bp, Artificial Sequence
  Description of Artificial Sequence: Synthetic oligonucleotide
  Target: LAMA2; (+) strand; PAM type: NRG; PAM sequence: AGG
aaatgagaacacatggacac

SEQ ID NO: 159686 - DNA, 20 bp, Artificial Sequence
  Description of Artificial Sequence: Synthetic oligonucleotide
  Target: LAMA2; (+) strand; PAM type: NRG; PAM sequence: GGG
aatgagaacacatggacaca

SEQ ID NO: 159687 - DNA, 20 bp, Artificial Sequence
  Description of Artificial Sequence: Synthetic oligonucleotide
  Target: LAMA2; (+) strand; PAM type: NRG; PAM sequence: GAG
tgagaacacatggacacagg

SEQ ID NO: 159688 - DNA, 20 bp, Artificial Sequence
  Description of Artificial Sequence: Synthetic oligonucleotide
  Target: LAMA2; (+) strand; PAM type: NRG; PAM sequence: AGG
gagaacacatggacacaggg

SEQ ID NO: 159689 - DNA, 20 bp, Artificial Sequence
  Description of Artificial Sequence: Synthetic oligonucleotide
  Target: LAMA2; (+) strand; PAM type: NRG; PAM sequence: GGG
agaacacatggacacaggga

SEQ ID NO: 159690 - DNA, 20 bp, Artificial Sequence
  Description of Artificial Sequence: Synthetic oligonucleotide
  Target: LAMA2; (+) strand; PAM type: NRG; PAM sequence: GGG
gaacacatggacacagggag

SEQ ID NO: 159691 - DNA, 20 bp, Artificial Sequence
  Description of Artificial Sequence: Synthetic oligonucleotide
  Target: LAMA2; (+) strand; PAM type: NRG; PAM sequence: TGG
gggaggggaacattatacac

SEQ ID NO: 159692 - DNA, 20 bp, Artificial Sequence
  Description of Artificial Sequence: Synthetic oligonucleotide
  Target: LAMA2; (+) strand; PAM type: NRG; PAM sequence: GGG
ggaggggaacattatacact

SEQ ID NO: 159693 - DNA, 20 bp, Artificial Sequence
  Description of Artificial Sequence: Synthetic oligonucleotide
  Target: LAMA2; (+) strand; PAM type: NRG; PAM sequence: GGG
gaggggaacattatacactg

SEQ ID NO: 159694 - DNA, 20 bp, Artificial Sequence
  Description of Artificial Sequence: Synthetic oligonucleotide
  Target: LAMA2; (+) strand; PAM type: NRG; PAM sequence: CGG
cattatacactggggcctgt

SEQ ID NO: 159695 - DNA, 20 bp, Artificial Sequence
  Description of Artificial Sequence: Synthetic oligonucleotide
  Target: LAMA2; (+) strand; PAM type: NRG; PAM sequence: GAG
ttatacactggggcctgtcg

SEQ ID NO: 159696 - DNA, 20 bp, Artificial Sequence
  Description of Artificial Sequence: Synthetic oligonucleotide
  Target: LAMA2; (+) strand; PAM type: NRG; PAM sequence: AGG
tatacactggggcctgtcgg

SEQ ID NO: 159697 - DNA, 20 bp, Artificial Sequence
  Description of Artificial Sequence: Synthetic oligonucleotide
  Target: LAMA2; (+) strand; PAM type: NRG; PAM sequence: GGG
atacactggggcctgtcgga

SEQ ID NO: 159698 - DNA, 20 bp, Artificial Sequence
  Description of Artificial Sequence: Synthetic oligonucleotide
  Target: LAMA2; (+) strand; PAM type: NRG; PAM sequence: TGG
cactggggcctgtcggaggg

SEQ ID NO: 159699 - DNA, 20 bp, Artificial Sequence
  Description of Artificial Sequence: Synthetic oligonucleotide
  Target: LAMA2; (+) strand; PAM type: NRG; PAM sequence: GGG
actggggcctgtcggagggt

SEQ ID NO: 159700 - DNA, 20 bp, Artificial Sequence
  Description of Artificial Sequence: Synthetic oligonucleotide
  Target: LAMA2; (+) strand; PAM type: NRG; PAM sequence: GGG
ctggggcctgtcggagggtg

SEQ ID NO: 159701 - DNA, 20 bp, Artificial Sequence
  Description of Artificial Sequence: Synthetic oligonucleotide
  Target: LAMA2; (+) strand; PAM type: NRG; PAM sequence: GGG
tggggcctgtcggagggtgg

SEQ ID NO: 159702 - DNA, 20 bp, Artificial Sequence
  Description of Artificial Sequence: Synthetic oligonucleotide
  Target: LAMA2; (+) strand; PAM type: NRG; PAM sequence: GGG
ggggcctgtcggagggtggg

SEQ ID NO: 159703 - DNA, 20 bp, Artificial Sequence
  Description of Artificial Sequence: Synthetic oligonucleotide
  Target: LAMA2; (+) strand; PAM type: NRG; PAM sequence: TAG
cctgtcggagggtggggggc

SEQ ID NO: 159704 - DNA, 20 bp, Artificial Sequence
  Description of Artificial Sequence: Synthetic oligonucleotide
  Target: LAMA2; (+) strand; PAM type: NRG; PAM sequence: AGG
ctgtcggagggtggggggct

SEQ ID NO: 159705 - DNA, 20 bp, Artificial Sequence
  Description of Artificial Sequence: Synthetic oligonucleotide
  Target: LAMA2; (+) strand; PAM type: NRG; PAM sequence: GGG
tgtcggagggtggggggcta

SEQ ID NO: 159706 - DNA, 20 bp, Artificial Sequence
  Description of Artificial Sequence: Synthetic oligonucleotide
  Target: LAMA2; (+) strand; PAM type: NRG; PAM sequence: GGG
gtcggagggtggggggctag

SEQ ID NO: 159707 - DNA, 20 bp, Artificial Sequence
  Description of Artificial Sequence: Synthetic oligonucleotide
  Target: LAMA2; (+) strand; PAM type: NRG; PAM sequence: AAG
ggagggtggggggctagggg

SEQ ID NO: 159708 - DNA, 20 bp, Artificial Sequence
  Description of Artificial Sequence: Synthetic oligonucleotide
  Target: LAMA2; (+) strand; PAM type: NRG; PAM sequence: AGG
gagggtggggggctagggga

SEQ ID NO: 159709 - DNA, 20 bp, Artificial Sequence
  Description of Artificial Sequence: Synthetic oligonucleotide
  Target: LAMA2; (+) strand; PAM type: NRG; PAM sequence: TAG
gtggggggctaggggaagga

SEQ ID NO: 159710 - DNA, 20 bp, Artificial Sequence
  Description of Artificial Sequence: Synthetic oligonucleotide
  Target: LAMA2; (+) strand; PAM type: NRG; PAM sequence: TAG
ggctaggggaaggatagcat

SEQ ID NO: 159711 - DNA, 20 bp, Artificial Sequence
  Description of Artificial Sequence: Synthetic oligonucleotide
  Target: LAMA2; (+) strand; PAM type: NRG; PAM sequence: AGG
gctaggggaaggatagcatt

SEQ ID NO: 159712 - DNA, 20 bp, Artificial Sequence
  Description of Artificial Sequence: Synthetic oligonucleotide
  Target: LAMA2; (+) strand; PAM type: NRG; PAM sequence: GAG
taggggaaggatagcattag

SEQ ID NO: 159713 - DNA, 20 bp, Artificial Sequence
  Description of Artificial Sequence: Synthetic oligonucleotide
  Target: LAMA2; (+) strand; PAM type: NRG; PAM sequence: TAG
attaggagaaatatctaatg

SEQ ID NO: 159714 - DNA, 20 bp, Artificial Sequence
  Description of Artificial Sequence: Synthetic oligonucleotide
  Target: LAMA2; (+) strand; PAM type: NRG; PAM sequence: TGG
gaaatatctaatgtagatga

SEQ ID NO: 159715 - DNA, 20 bp, Artificial Sequence
  Description of Artificial Sequence: Synthetic oligonucleotide
  Target: LAMA2; (+) strand; PAM type: NRG; PAM sequence: GGG
aaatatctaatgtagatgat

SEQ ID NO: 159716 - DNA, 20 bp, Artificial Sequence
  Description of Artificial Sequence: Synthetic oligonucleotide
  Target: LAMA2; (+) strand; PAM type: NRG; PAM sequence: TGG
taatgtagatgatgggttga

SEQ ID NO: 159717 - DNA, 20 bp, Artificial Sequence
  Description of Artificial Sequence: Synthetic oligonucleotide
  Target: LAMA2; (+) strand; PAM type: NRG; PAM sequence: GGG
aatgtagatgatgggttgat

SEQ ID NO: 159718 - DNA, 20 bp, Artificial Sequence
  Description of Artificial Sequence: Synthetic oligonucleotide
  Target: LAMA2; (+) strand; PAM type: NRG; PAM sequence: CAG
agatgatgggttgatgggtt

SEQ ID NO: 159719 - DNA, 20 bp, Artificial Sequence
  Description of Artificial Sequence: Synthetic oligonucleotide
  Target: LAMA2; (+) strand; PAM type: NRG; PAM sequence: AGG
gatgatgggttgatgggttc

SEQ ID NO: 159720 - DNA, 20 bp, Artificial Sequence
  Description of Artificial Sequence: Synthetic oligonucleotide
  Target: LAMA2; (+) strand; PAM type: NRG; PAM sequence: TGG
atgggttcaggaaaccacca

SEQ ID NO: 159721 - DNA, 20 bp, Artificial Sequence
  Description of Artificial Sequence: Synthetic oligonucleotide
  Target: LAMA2; (+) strand; PAM type: NRG; PAM sequence: CAG
cacgttctgcacatgtatcc

SEQ ID NO: 159722 - DNA, 20 bp, Artificial Sequence
  Description of Artificial Sequence: Synthetic oligonucleotide
  Target: LAMA2; (+) strand; PAM type: NRG; PAM sequence: AAG
cacatgtatcccagaactta

SEQ ID NO: 159723 - DNA, 20 bp, Artificial Sequence
  Description of Artificial Sequence: Synthetic oligonucleotide
  Target: LAMA2; (+) strand; PAM type: NRG; PAM sequence: TGG
aacaaatttgacactttttt

SEQ ID NO: 159724 - DNA, 20 bp, Artificial Sequence
  Description of Artificial Sequence: Synthetic oligonucleotide
  Target: LAMA2; (+) strand; PAM type: NRG; PAM sequence: AAG
tttttggtactgttcaaatt

SEQ ID NO: 159725 - DNA, 20 bp, Artificial Sequence
  Description of Artificial Sequence: Synthetic oligonucleotide
  Target: LAMA2; (+) strand; PAM type: NRG; PAM sequence: AGG
ttttggtactgttcaaatta

SEQ ID NO: 159726 - DNA, 20 bp, Artificial Sequence
  Description of Artificial Sequence: Synthetic oligonucleotide
  Target: LAMA2; (+) strand; PAM type: NRG; PAM sequence: GGG
tttggtactgttcaaattaa

SEQ ID NO: 159727 - DNA, 20 bp, Artificial Sequence
  Description of Artificial Sequence: Synthetic oligonucleotide
  Target: LAMA2; (+) strand; PAM type: NRG; PAM sequence: GGG
ttggtactgttcaaattaag

SEQ ID NO: 159728 - DNA, 20 bp, Artificial Sequence
  Description of Artificial Sequence: Synthetic oligonucleotide
  Target: LAMA2; (+) strand; PAM type: NRG; PAM sequence: AAG
tactgttcaaattaagggga

SEQ ID NO: 159729 - DNA, 20 bp, Artificial Sequence
  Description of Artificial Sequence: Synthetic oligonucleotide
  Target: LAMA2; (+) strand; PAM type: NRG; PAM sequence: CAG
agttcattttattttatttt

SEQ ID NO: 159730 - DNA, 20 bp, Artificial Sequence
  Description of Artificial Sequence: Synthetic oligonucleotide
  Target: LAMA2; (+) strand; PAM type: NRG; PAM sequence: AAG
ttattttattttcagatata

SEQ ID NO: 159731 - DNA, 20 bp, Artificial Sequence
  Description of Artificial Sequence: Synthetic oligonucleotide
  Target: LAMA2; (+) strand; PAM type: NRG; PAM sequence: CAG
tattttcagatataaagtat

SEQ ID NO: 159732 - DNA, 20 bp, Artificial Sequence
  Description of Artificial Sequence: Synthetic oligonucleotide
  Target: LAMA2; (+) strand; PAM type: NRG; PAM sequence: GAG
cattattgatgttcaaattt

SEQ ID NO: 159733 - DNA, 20 bp, Artificial Sequence
  Description of Artificial Sequence: Synthetic oligonucleotide
  Target: LAMA2; (+) strand; PAM type: NRG; PAM sequence: GAG
ttattgatgttcaaatttga

SEQ ID NO: 159734 - DNA, 20 bp, Artificial Sequence
  Description of Artificial Sequence: Synthetic oligonucleotide
  Target: LAMA2; (+) strand; PAM type: NRG; PAM sequence: GAG
tttgagagtcctcatatcct

SEQ ID NO: 159735 - DNA, 20 bp, Artificial Sequence
  Description of Artificial Sequence: Synthetic oligonucleotide
  Target: LAMA2; (+) strand; PAM type: NRG; PAM sequence: AGG
ttgagagtcctcatatcctg

SEQ ID NO: 159736 - DNA, 20 bp, Artificial Sequence
  Description of Artificial Sequence: Synthetic oligonucleotide
  Target: LAMA2; (+) strand; PAM type: NRG; PAM sequence: CAG
agagtcctcatatcctgagg

SEQ ID NO: 159737 - DNA, 20 bp, Artificial Sequence
  Description of Artificial Sequence: Synthetic oligonucleotide
  Target: LAMA2; (+) strand; PAM type: NRG; PAM sequence: AAG
gtcctcatatcctgaggcag

SEQ ID NO: 159738 - DNA, 20 bp, Artificial Sequence
  Description of Artificial Sequence: Synthetic oligonucleotide
  Target: LAMA2; (+) strand; PAM type: NRG; PAM sequence: AGG
tcctcatatcctgaggcaga

SEQ ID NO: 159739 - DNA, 20 bp, Artificial Sequence
  Description of Artificial Sequence: Synthetic oligonucleotide
  Target: LAMA2; (+) strand; PAM type: NRG; PAM sequence: CGG
aggcagaaggaacatttcca

SEQ ID NO: 159740 - DNA, 20 bp, Artificial Sequence
  Description of Artificial Sequence: Synthetic oligonucleotide
  Target: LAMA2; (+) strand; PAM type: NRG; PAM sequence: GAG
gcagaaggaacatttccacg

SEQ ID NO: 159741 - DNA, 20 bp, Artificial Sequence
  Description of Artificial Sequence: Synthetic oligonucleotide
  Target: LAMA2; (+) strand; PAM type: NRG; PAM sequence: CAG
ttctatatcctttattactt

SEQ ID NO: 159742 - DNA, 20 bp, Artificial Sequence
  Description of Artificial Sequence: Synthetic oligonucleotide
  Target: LAMA2; (+) strand; PAM type: NRG; PAM sequence: TGG
tatatcctttattacttcag

SEQ ID NO: 159743 - DNA, 20 bp, Artificial Sequence
  Description of Artificial Sequence: Synthetic oligonucleotide
  Target: LAMA2; (+) strand; PAM type: NRG; PAM sequence: TGG
cttctgttttctttttcaac

SEQ ID NO: 159744 - DNA, 20 bp, Artificial Sequence
  Description of Artificial Sequence: Synthetic oligonucleotide
  Target: LAMA2; (+) strand; PAM type: NRG; PAM sequence: AAG
gttttctttttcaactggaa

SEQ ID NO: 159745 - DNA, 20 bp, Artificial Sequence
  Description of Artificial Sequence: Synthetic oligonucleotide
  Target: LAMA2; (+) strand; PAM type: NRG; PAM sequence: AAG
ttctttttcaactggaaaag

SEQ ID NO: 159746 - DNA, 20 bp, Artificial Sequence
  Description of Artificial Sequence: Synthetic oligonucleotide
  Target: LAMA2; (+) strand; PAM type: NRG; PAM sequence: AGG
tctttttcaactggaaaaga

SEQ ID NO: 159747 - DNA, 20 bp, Artificial Sequence
  Description of Artificial Sequence: Synthetic oligonucleotide
  Target: LAMA2; (+) strand; PAM type: NRG; PAM sequence: GGG
ctttttcaactggaaaagaa

SEQ ID NO: 159748 - DNA, 20 bp, Artificial Sequence
  Description of Artificial Sequence: Synthetic oligonucleotide
  Target: LAMA2; (+) strand; PAM type: NRG; PAM sequence: CAG
tgatgttgtactcgaccatc

SEQ ID NO: 159749 - DNA, 20 bp, Artificial Sequence
  Description of Artificial Sequence: Synthetic oligonucleotide
  Target: LAMA2; (+) strand; PAM type: NRG; PAM sequence: TAG
tactcgaccatccagaaata

SEQ ID NO: 159750 - DNA, 20 bp, Artificial Sequence
  Description of Artificial Sequence: Synthetic oligonucleotide
  Target: LAMA2; (+) strand; PAM type: NRG; PAM sequence: AAG
aaatatagtaaataacccac

SEQ ID NO: 159751 - DNA, 20 bp, Artificial Sequence
  Description of Artificial Sequence: Synthetic oligonucleotide
  Target: LAMA2; (+) strand; PAM type: NRG; PAM sequence: TGG
cccacaagatgcaatttcac

SEQ ID NO: 159752 - DNA, 20 bp, Artificial Sequence
  Description of Artificial Sequence: Synthetic oligonucleotide
  Target: LAMA2; (+) strand; PAM type: NRG; PAM sequence: GAG
cacaagatgcaatttcactg

SEQ ID NO: 159753 - DNA, 20 bp, Artificial Sequence
  Description of Artificial Sequence: Synthetic oligonucleotide
  Target: LAMA2; (+) strand; PAM type: NRG; PAM sequence: AGG
acaagatgcaatttcactgg

SEQ ID NO: 159754 - DNA, 20 bp, Artificial Sequence
  Description of Artificial Sequence: Synthetic oligonucleotide
  Target: LAMA2; (+) strand; PAM type: NRG; PAM sequence: GGG
caagatgcaatttcactgga

SEQ ID NO: 159755 - DNA, 20 bp, Artificial Sequence
  Description of Artificial Sequence: Synthetic oligonucleotide
  Target: LAMA2; (+) strand; PAM type: NRG; PAM sequence: AAG
tttcactggagggtgatcat

SEQ ID NO: 159756 - DNA, 20 bp, Artificial Sequence
  Description of Artificial Sequence: Synthetic oligonucleotide
  Target: LAMA2; (+) strand; PAM type: NRG; PAM sequence: TAG
ggagggtgatcataagctct

SEQ ID NO: 159757 - DNA, 20 bp, Artificial Sequence
  Description of Artificial Sequence: Synthetic oligonucleotide
  Target: LAMA2; (+) strand; PAM type: NRG; PAM sequence: GAG
agggtgatcataagctctta

SEQ ID NO: 159758 - DNA, 20 bp, Artificial Sequence
  Description of Artificial Sequence: Synthetic oligonucleotide
  Target: LAMA2; (+) strand; PAM type: NRG; PAM sequence: AGG
gggtgatcataagctcttag

SEQ ID NO: 159759 - DNA, 20 bp, Artificial Sequence
  Description of Artificial Sequence: Synthetic oligonucleotide
  Target: LAMA2; (+) strand; PAM type: NRG; PAM sequence: GGG
ggtgatcataagctcttaga

SEQ ID NO: 159760 - DNA, 20 bp, Artificial Sequence
  Description of Artificial Sequence: Synthetic oligonucleotide
  Target: LAMA2; (+) strand; PAM type: NRG; PAM sequence: CAG
gatcataagctcttagaggg

SEQ ID NO: 159761 - DNA, 20 bp, Artificial Sequence
  Description of Artificial Sequence: Synthetic oligonucleotide
  Target: LAMA2; (+) strand; PAM type: NRG; PAM sequence: CAG
cataagctcttagagggcag

SEQ ID NO: 159762 - DNA, 20 bp, Artificial Sequence
  Description of Artificial Sequence: Synthetic oligonucleotide
  Target: LAMA2; (+) strand; PAM type: NRG; PAM sequence: TAG
tttgcatctcatccattttg

SEQ ID NO: 159763 - DNA, 20 bp, Artificial Sequence
  Description of Artificial Sequence: Synthetic oligonucleotide
  Target: LAMA2; (+) strand; PAM type: NRG; PAM sequence: CAG
ccattttgtagtaatcccca

SEQ ID NO: 159764 - DNA, 20 bp, Artificial Sequence
  Description of Artificial Sequence: Synthetic oligonucleotide
  Target: LAMA2; (+) strand; PAM type: NRG; PAM sequence: TGG
tttgtagtaatccccacaga

SEQ ID NO: 159765 - DNA, 20 bp, Artificial Sequence
  Description of Artificial Sequence: Synthetic oligonucleotide
  Target: LAMA2; (+) strand; PAM type: NRG; PAM sequence: AAG
cacagatggaaaacttaatt

SEQ ID NO: 159766 - DNA, 20 bp, Artificial Sequence
  Description of Artificial Sequence: Synthetic oligonucleotide
  Target: LAMA2; (+) strand; PAM type: NRG; PAM sequence: AGG
acagatggaaaacttaatta

SEQ ID NO: 159767 - DNA, 20 bp, Artificial Sequence
  Description of Artificial Sequence: Synthetic oligonucleotide
  Target: LAMA2; (+) strand; PAM type: NRG; PAM sequence: TGG
gaaaacttaattaaggatga

SEQ ID NO: 159768 - DNA, 20 bp, Artificial Sequence
  Description of Artificial Sequence: Synthetic oligonucleotide
  Target: LAMA2; (+) strand; PAM type: NRG; PAM sequence: GGG
aaaacttaattaaggatgat

SEQ ID NO: 159769 - DNA, 20 bp, Artificial Sequence
  Description of Artificial Sequence: Synthetic oligonucleotide
  Target: LAMA2; (+) strand; PAM type: NRG; PAM sequence: GGG
aaacttaattaaggatgatg

SEQ ID NO: 159770 - DNA, 20 bp, Artificial Sequence
  Description of Artificial Sequence: Synthetic oligonucleotide
  Target: LAMA2; (+) strand; PAM type: NRG; PAM sequence: TAG
attaaggatgatggggaact

SEQ ID NO: 159771 - DNA, 20 bp, Artificial Sequence
  Description of Artificial Sequence: Synthetic oligonucleotide
  Target: LAMA2; (+) strand; PAM type: NRG; PAM sequence: GAG
taaggatgatggggaactta

SEQ ID NO: 159772 - DNA, 20 bp, Artificial Sequence
  Description of Artificial Sequence: Synthetic oligonucleotide
  Target: LAMA2; (+) strand; PAM type: NRG; PAM sequence: CAG
ggatgatggggaacttagag

SEQ ID NO: 159773 - DNA, 20 bp, Artificial Sequence
  Description of Artificial Sequence: Synthetic oligonucleotide
  Target: LAMA2; (+) strand; PAM type: NRG; PAM sequence: AGG
gatgatggggaacttagagc

SEQ ID NO: 159774 - DNA, 20 bp, Artificial Sequence
  Description of Artificial Sequence: Synthetic oligonucleotide
  Target: LAMA2; (+) strand; PAM type: NRG; PAM sequence: CAG
acttagagcaggcactgaca

SEQ ID NO: 159775 - DNA, 20 bp, Artificial Sequence
  Description of Artificial Sequence: Synthetic oligonucleotide
  Target: LAMA2; (+) strand; PAM type: NRG; PAM sequence: AGG
cttagagcaggcactgacac

SEQ ID NO: 159776 - DNA, 20 bp, Artificial Sequence
  Description of Artificial Sequence: Synthetic oligonucleotide
  Target: LAMA2; (+) strand; PAM type: NRG; PAM sequence: GGG
ttagagcaggcactgacaca

SEQ ID NO: 159777 - DNA, 20 bp, Artificial Sequence
  Description of Artificial Sequence: Synthetic oligonucleotide
  Target: LAMA2; (+) strand; PAM type: NRG; PAM sequence: AAG
ggcactgacacagggaatct

SEQ ID NO: 159778 - DNA, 20 bp, Artificial Sequence
  Description of Artificial Sequence: Synthetic oligonucleotide
  Target: LAMA2; (+) strand; PAM type: NRG; PAM sequence: CAG
ctaaaataccctgttttaat

SEQ ID NO: 159779 - DNA, 20 bp, Artificial Sequence
  Description of Artificial Sequence: Synthetic oligonucleotide
  Target: LAMA2; (+) strand; PAM type: NRG; PAM sequence: CAG
accctgttttaatcagaatt

SEQ ID NO: 159780 - DNA, 20 bp, Artificial Sequence
  Description of Artificial Sequence: Synthetic oligonucleotide
  Target: LAMA2; (+) strand; PAM type: NRG; PAM sequence: AAG
aattcagtttttatataata

SEQ ID NO: 159781 - DNA, 20 bp, Artificial Sequence
  Description of Artificial Sequence: Synthetic oligonucleotide
  Target: LAMA2; (+) strand; PAM type: NRG; PAM sequence: AAG
aagtgtttcacattttaaac

SEQ ID NO: 159782 - DNA, 20 bp, Artificial Sequence
  Description of Artificial Sequence: Synthetic oligonucleotide
  Target: LAMA2; (+) strand; PAM type: NRG; PAM sequence: AGG
agtgtttcacattttaaaca

SEQ ID NO: 159783 - DNA, 20 bp, Artificial Sequence
  Description of Artificial Sequence: Synthetic oligonucleotide
  Target: LAMA2; (+) strand; PAM type: NRG; PAM sequence: AAG
aaacaaggaatgaaaaatac

SEQ ID NO: 159784 - DNA, 20 bp, Artificial Sequence
  Description of Artificial Sequence: Synthetic oligonucleotide
  Target: LAMA2; (+) strand; PAM type: NRG; PAM sequence: AAG
aggaatgaaaaatacaagca

SEQ ID NO: 159785 - DNA, 20 bp, Artificial Sequence
  Description of Artificial Sequence: Synthetic oligonucleotide
  Target: LAMA2; (+) strand; PAM type: NRG; PAM sequence: CAG
gaaaaatacaagcaaagtta

SEQ ID NO: 159786 - DNA, 20 bp, Artificial Sequence
  Description of Artificial Sequence: Synthetic oligonucleotide
  Target: LAMA2; (+) strand; PAM type: NRG; PAM sequence: AAG
aaatacaagcaaagttacag

SEQ ID NO: 159787 - DNA, 20 bp, Artificial Sequence
  Description of Artificial Sequence: Synthetic oligonucleotide
  Target: LAMA2; (+) strand; PAM type: NRG; PAM sequence: AAG
acagaagaatgccataaaat

SEQ ID NO: 159788 - DNA, 20 bp, Artificial Sequence
  Description of Artificial Sequence: Synthetic oligonucleotide
  Target: LAMA2; (+) strand; PAM type: NRG; PAM sequence: AAG
atgccataaaataagctatc

SEQ ID NO: 159789 - DNA, 20 bp, Artificial Sequence
  Description of Artificial Sequence: Synthetic oligonucleotide
  Target: LAMA2; (+) strand; PAM type: NRG; PAM sequence: GAG
aaataagctatcaagaatgt

SEQ ID NO: 159790 - DNA, 20 bp, Artificial Sequence
  Description of Artificial Sequence: Synthetic oligonucleotide
  Target: LAMA2; (+) strand; PAM type: NRG; PAM sequence: GAG
taaactttttgtgtaaattt

SEQ ID NO: 159791 - DNA, 20 bp, Artificial Sequence
  Description of Artificial Sequence: Synthetic oligonucleotide
  Target: LAMA2; (+) strand; PAM type: NRG; PAM sequence: AAG
ctttttgtgtaaatttgaga

SEQ ID NO: 159792 - DNA, 20 bp, Artificial Sequence
  Description of Artificial Sequence: Synthetic oligonucleotide
  Target: LAMA2; (+) strand; PAM type: NRG; PAM sequence: TAG
gtaaatttgagaaagcataa

SEQ ID NO: 159793 - DNA, 20 bp, Artificial Sequence
  Description of Artificial Sequence: Synthetic oligonucleotide
  Target: LAMA2; (+) strand; PAM type: NRG; PAM sequence: AGG
taaatttgagaaagcataat

SEQ ID NO: 159794 - DNA, 20 bp, Artificial Sequence
  Description of Artificial Sequence: Synthetic oligonucleotide
  Target: LAMA2; (+) strand; PAM type: NRG; PAM sequence: TGG
tttgagaaagcataatagga

SEQ ID NO: 159795 - DNA, 20 bp, Artificial Sequence
  Description of Artificial Sequence: Synthetic oligonucleotide
  Target: LAMA2; (+) strand; PAM type: NRG; PAM sequence: GAG
tgagaaagcataataggatg

SEQ ID NO: 159796 - DNA, 20 bp, Artificial Sequence
  Description of Artificial Sequence: Synthetic oligonucleotide
  Target: LAMA2; (+) strand; PAM type: NRG; PAM sequence: AGG
gagaaagcataataggatgg

SEQ ID NO: 159797 - DNA, 20 bp, Artificial Sequence
  Description of Artificial Sequence: Synthetic oligonucleotide
  Target: LAMA2; (+) strand; PAM type: NRG; PAM sequence: TAG
ataataggatggaggaaatt

SEQ ID NO: 159798 - DNA, 20 bp, Artificial Sequence
  Description of Artificial Sequence: Synthetic oligonucleotide
  Target: LAMA2; (+) strand; PAM type: NRG; PAM sequence: TAG
atacatgaattatatatgtg

SEQ ID NO: 159799 - DNA, 20 bp, Artificial Sequence
  Description of Artificial Sequence: Synthetic oligonucleotide
  Target: LAMA2; (+) strand; PAM type: NRG; PAM sequence: TAG
aattatatatgtgtagaaat

SEQ ID NO: 159800 - DNA, 20 bp, Artificial Sequence
  Description of Artificial Sequence: Synthetic oligonucleotide
  Target: LAMA2; (+) strand; PAM type: NRG; PAM sequence: TGG
gtagaaattagctgtgtatg

SEQ ID NO: 159801 - DNA, 20 bp, Artificial Sequence
  Description of Artificial Sequence: Synthetic oligonucleotide
  Target: LAMA2; (+) strand; PAM type: NRG; PAM sequence: AAG
ctgtgtatgtggtcaaatat

SEQ ID NO: 159802 - DNA, 20 bp, Artificial Sequence
  Description of Artificial Sequence: Synthetic oligonucleotide
  Target: LAMA2; (+) strand; PAM type: NRG; PAM sequence: TGG
tatgtggtcaaatataagtg

SEQ ID NO: 159803 - DNA, 20 bp, Artificial Sequence
  Description of Artificial Sequence: Synthetic oligonucleotide
  Target: LAMA2; (+) strand; PAM type: NRG; PAM sequence: GGG
atgtggtcaaatataagtgt

SEQ ID NO: 159804 - DNA, 20 bp, Artificial Sequence
  Description of Artificial Sequence: Synthetic oligonucleotide
  Target: LAMA2; (+) strand; PAM type: NRG; PAM sequence: AAG
ctttcttccaaatcatgtca

SEQ ID NO: 159805 - DNA, 20 bp, Artificial Sequence
  Description of Artificial Sequence: Synthetic oligonucleotide
  Target: LAMA2; (+) strand; PAM type: NRG; PAM sequence: TGG
aaatcatgtcaaagattttc

SEQ ID NO: 159806 - DNA, 20 bp, Artificial Sequence
  Description of Artificial Sequence: Synthetic oligonucleotide
  Target: LAMA2; (+) strand; PAM type: NRG; PAM sequence: AAG
tttctggaaatgatgacgtt

SEQ ID NO: 159807 - DNA, 20 bp, Artificial Sequence
  Description of Artificial Sequence: Synthetic oligonucleotide
  Target: LAMA2; (+) strand; PAM type: NRG; PAM sequence: AGG
ttctggaaatgatgacgtta

SEQ ID NO: 159808 - DNA, 20 bp, Artificial Sequence
  Description of Artificial Sequence: Synthetic oligonucleotide
  Target: LAMA2; (+) strand; PAM type: NRG; PAM sequence: GGG
tctggaaatgatgacgttaa

SEQ ID NO: 159809 - DNA, 20 bp, Artificial Sequence
  Description of Artificial Sequence: Synthetic oligonucleotide
  Target: LAMA2; (+) strand; PAM type: NRG; PAM sequence: TAG
atgatgacgttaagggcaat

SEQ ID NO: 159810 - DNA, 20 bp, Artificial Sequence
  Description of Artificial Sequence: Synthetic oligonucleotide
  Target: LAMA2; (+) strand; PAM type: NRG; PAM sequence: TGG
cgttaagggcaattagtata

SEQ ID NO: 159811 - DNA, 20 bp, Artificial Sequence
  Description of Artificial Sequence: Synthetic oligonucleotide
  Target: LAMA2; (+) strand; PAM type: NRG; PAM sequence: GGG
gttaagggcaattagtatat

SEQ ID NO: 159812 - DNA, 20 bp, Artificial Sequence
  Description of Artificial Sequence: Synthetic oligonucleotide
  Target: LAMA2; (+) strand; PAM type: NRG; PAM sequence: AAG
agggcaattagtatatgggc

SEQ ID NO: 159813 - DNA, 20 bp, Artificial Sequence
  Description of Artificial Sequence: Synthetic oligonucleotide
  Target: LAMA2; (+) strand; PAM type: NRG; PAM sequence: CAG
atgggcaagtgaacacattc

SEQ ID NO: 159814 - DNA, 20 bp, Artificial Sequence
  Description of Artificial Sequence: Synthetic oligonucleotide
  Target: LAMA2; (+) strand; PAM type: NRG; PAM sequence: GAG
gggcaagtgaacacattcca

SEQ ID NO: 159815 - DNA, 20 bp, Artificial Sequence
  Description of Artificial Sequence: Synthetic oligonucleotide
  Target: LAMA2; (+) strand; PAM type: NRG; PAM sequence: TGG
tccagagaatcaaaattgct

SEQ ID NO: 159816 - DNA, 20 bp, Artificial Sequence
  Description of Artificial Sequence: Synthetic oligonucleotide
  Target: LAMA2; (+) strand; PAM type: NRG; PAM sequence: GGG
ccagagaatcaaaattgctt

SEQ ID NO: 159817 - DNA, 20 bp, Artificial Sequence
  Description of Artificial Sequence: Synthetic oligonucleotide
  Target: LAMA2; (+) strand; PAM type: NRG; PAM sequence: CGG
aaaattgcttgggatgacat

SEQ ID NO: 159818 - DNA, 20 bp, Artificial Sequence
  Description of Artificial Sequence: Synthetic oligonucleotide
  Target: LAMA2; (+) strand; PAM type: NRG; PAM sequence: GGG
aaattgcttgggatgacatc

SEQ ID NO: 159819 - DNA, 20 bp, Artificial Sequence
  Description of Artificial Sequence: Synthetic oligonucleotide
  Target: LAMA2; (+) strand; PAM type: NRG; PAM sequence: TAG
gatgacatcgggtactctct

SEQ ID NO: 159820 - DNA, 20 bp, Artificial Sequence
  Description of Artificial Sequence: Synthetic oligonucleotide
  Target: LAMA2; (+) strand; PAM type: NRG; PAM sequence: AGG
atgacatcgggtactctctt

SEQ ID NO: 159821 - DNA, 20 bp, Artificial Sequence
  Description of Artificial Sequence: Synthetic oligonucleotide
  Target: LAMA2; (+) strand; PAM type: NRG; PAM sequence: AAG
atcgggtactctcttaggct

SEQ ID NO: 159822 - DNA, 20 bp, Artificial Sequence
  Description of Artificial Sequence: Synthetic oligonucleotide
  Target: LAMA2; (+) strand; PAM type: NRG; PAM sequence: GAG
ttaggctaagactatatgat

SEQ ID NO: 159823 - DNA, 20 bp, Artificial Sequence
  Description of Artificial Sequence: Synthetic oligonucleotide
  Target: LAMA2; (+) strand; PAM type: NRG; PAM sequence: CAG
tatgatgagtccttttatat

SEQ ID NO: 159824 - DNA, 20 bp, Artificial Sequence
  Description of Artificial Sequence: Synthetic oligonucleotide
  Target: LAMA2; (+) strand; PAM type: NRG; PAM sequence: CAG
tatatcagctgcctttttta

SEQ ID NO: 159825 - DNA, 20 bp, Artificial Sequence
  Description of Artificial Sequence: Synthetic oligonucleotide
  Target: LAMA2; (+) strand; PAM type: NRG; PAM sequence: GAG
ctgtctgtgcttttttcttt

SEQ ID NO: 159826 - DNA, 20 bp, Artificial Sequence
  Description of Artificial Sequence: Synthetic oligonucleotide
  Target: LAMA2; (+) strand; PAM type: NRG; PAM sequence: CAG
tctgctttattttaccattt

SEQ ID NO: 159827 - DNA, 20 bp, Artificial Sequence
  Description of Artificial Sequence: Synthetic oligonucleotide
  Target: LAMA2; (+) strand; PAM type: NRG; PAM sequence: AAG
gctttattttaccatttcag

SEQ ID NO: 159828 - DNA, 20 bp, Artificial Sequence
  Description of Artificial Sequence: Synthetic oligonucleotide
  Target: LAMA2; (+) strand; PAM type: NRG; PAM sequence: AAG
accatttcagaagaaacacc

SEQ ID NO: 159829 - DNA, 20 bp, Artificial Sequence
  Description of Artificial Sequence: Synthetic oligonucleotide
  Target: LAMA2; (+) strand; PAM type: NRG; PAM sequence: AAG
tcatacctgccaataacact

SEQ ID NO: 159830 - DNA, 20 bp, Artificial Sequence
  Description of Artificial Sequence: Synthetic oligonucleotide
  Target: LAMA2; (+) strand; PAM type: NRG; PAM sequence: AGG
catacctgccaataacacta

SEQ ID NO: 159831 - DNA, 20 bp, Artificial Sequence
  Description of Artificial Sequence: Synthetic oligonucleotide
  Target: LAMA2; (+) strand; PAM type: NRG; PAM sequence: CAG
cctgccaataacactaaggt

SEQ ID NO: 159832 - DNA, 20 bp, Artificial Sequence
  Description of Artificial Sequence: Synthetic oligonucleotide
  Target: LAMA2; (+) strand; PAM type: NRG; PAM sequence: AAG
ataacactaaggtcagtgca

SEQ ID NO: 159833 - DNA, 20 bp, Artificial Sequence
  Description of Artificial Sequence: Synthetic oligonucleotide
  Target: LAMA2; (+) strand; PAM type: NRG; PAM sequence: CAG
ctaaggtcagtgcaaagccc

SEQ ID NO: 159834 - DNA, 20 bp, Artificial Sequence
  Description of Artificial Sequence: Synthetic oligonucleotide
  Target: LAMA2; (+) strand; PAM type: NRG; PAM sequence: CAG
tcagtgcaaagccccagtgt

SEQ ID NO: 159835 - DNA, 20 bp, Artificial Sequence
  Description of Artificial Sequence: Synthetic oligonucleotide
  Target: LAMA2; (+) strand; PAM type: NRG; PAM sequence: AGG
cagtgcaaagccccagtgtc

SEQ ID NO: 159836 - DNA, 20 bp, Artificial Sequence
  Description of Artificial Sequence: Synthetic oligonucleotide
  Target: LAMA2; (+) strand; PAM type: NRG; PAM sequence: GAG
gtgcaaagccccagtgtcag

SEQ ID NO: 159837 - DNA, 20 bp, Artificial Sequence
  Description of Artificial Sequence: Synthetic oligonucleotide
  Target: LAMA2; (+) strand; PAM type: NRG; PAM sequence: AGG
tgcaaagccccagtgtcagg

SEQ ID NO: 159838 - DNA, 20 bp, Artificial Sequence
  Description of Artificial Sequence: Synthetic oligonucleotide
  Target: LAMA2; (+) strand; PAM type: NRG; PAM sequence: TAG
agccccagtgtcaggaggaa

SEQ ID NO: 159839 - DNA, 20 bp, Artificial Sequence
  Description of Artificial Sequence: Synthetic oligonucleotide
  Target: LAMA2; (+) strand; PAM type: NRG; PAM sequence: TGG
ctgttgcaatgtttcaataa

SEQ ID NO: 159840 - DNA, 20 bp, Artificial Sequence
  Description of Artificial Sequence: Synthetic oligonucleotide
  Target: LAMA2; (+) strand; PAM type: NRG; PAM sequence: AAG
aataatggcaatgctttgac

SEQ ID NO: 159841 - DNA, 20 bp, Artificial Sequence
  Description of Artificial Sequence: Synthetic oligonucleotide
  Target: LAMA2; (+) strand; PAM type: NRG; PAM sequence: GAG
ctttgacaagcacatttgat

SEQ ID NO: 159842 - DNA, 20 bp, Artificial Sequence
  Description of Artificial Sequence: Synthetic oligonucleotide
  Target: LAMA2; (+) strand; PAM type: NRG; PAM sequence: CAG
tacctgttattttctgttat

SEQ ID NO: 159843 - DNA, 20 bp, Artificial Sequence
  Description of Artificial Sequence: Synthetic oligonucleotide
  Target: LAMA2; (+) strand; PAM type: NRG; PAM sequence: AAG
acctttttgttttaatctcc

SEQ ID NO: 159844 - DNA, 20 bp, Artificial Sequence
  Description of Artificial Sequence: Synthetic oligonucleotide
  Target: LAMA2; (+) strand; PAM type: NRG; PAM sequence: AAG
ttaatctccaagactgacta

SEQ ID NO: 159845 - DNA, 20 bp, Artificial Sequence
  Description of Artificial Sequence: Synthetic oligonucleotide
  Target: LAMA2; (+) strand; PAM type: NRG; PAM sequence: CAG
ctaaagccttatctttctct

SEQ ID NO: 159846 - DNA, 20 bp, Artificial Sequence
  Description of Artificial Sequence: Synthetic oligonucleotide
  Target: LAMA2; (+) strand; PAM type: NRG; PAM sequence: TGG
tatctttctctcagtcttgt

SEQ ID NO: 159847 - DNA, 20 bp, Artificial Sequence
  Description of Artificial Sequence: Synthetic oligonucleotide
  Target: LAMA2; (+) strand; PAM type: NRG; PAM sequence: TAG
ttctctcagtcttgttggcc

SEQ ID NO: 159848 - DNA, 20 bp, Artificial Sequence
  Description of Artificial Sequence: Synthetic oligonucleotide
  Target: LAMA2; (+) strand; PAM type: NRG; PAM sequence: AGG
tctctcagtcttgttggcct

SEQ ID NO: 159849 - DNA, 20 bp, Artificial Sequence
  Description of Artificial Sequence: Synthetic oligonucleotide
  Target: LAMA2; (+) strand; PAM type: NRG; PAM sequence: CAG
cagtcttgttggcctaggca

SEQ ID NO: 159850 - DNA, 20 bp, Artificial Sequence
  Description of Artificial Sequence: Synthetic oligonucleotide
  Target: LAMA2; (+) strand; PAM type: NRG; PAM sequence: AGG
agtcttgttggcctaggcac

SEQ ID NO: 159851 - DNA, 20 bp, Artificial Sequence
  Description of Artificial Sequence: Synthetic oligonucleotide
  Target: LAMA2; (+) strand; PAM type: NRG; PAM sequence: GAG
ttgttggcctaggcacaggc

SEQ ID NO: 159852 - DNA, 20 bp, Artificial Sequence
  Description of Artificial Sequence: Synthetic oligonucleotide
  Target: LAMA2; (+) strand; PAM type: NRG; PAM sequence: CGG
cctaggcacaggcgagttaa

SEQ ID NO: 159853 - DNA, 20 bp, Artificial Sequence
  Description of Artificial Sequence: Synthetic oligonucleotide
  Target: LAMA2; (+) strand; PAM type: NRG; PAM sequence: TGG
cgagttaacggcactatttt

SEQ ID NO: 159854 - DNA, 20 bp, Artificial Sequence
  Description of Artificial Sequence: Synthetic oligonucleotide
  Target: LAMA2; (+) strand; PAM type: NRG; PAM sequence: TGG
gttaacggcactatttttgg

SEQ ID NO: 159855 - DNA, 20 bp, Artificial Sequence
  Description of Artificial Sequence: Synthetic oligonucleotide
  Target: LAMA2; (+) strand; PAM type: NRG; PAM sequence: GAG
ctatttttggtggcatctgt

SEQ ID NO: 159856 - DNA, 20 bp, Artificial Sequence
  Description of Artificial Sequence: Synthetic oligonucleotide
  Target: LAMA2; (+) strand; PAM type: NRG; PAM sequence: CAG
gtggcatctgtgagccatgt

SEQ ID NO: 159857 - DNA, 20 bp, Artificial Sequence
  Description of Artificial Sequence: Synthetic oligonucleotide
  Target: LAMA2; (+) strand; PAM type: NRG; PAM sequence: TGG
tgtgagccatgtcagtgctt

SEQ ID NO: 159858 - DNA, 20 bp, Artificial Sequence
  Description of Artificial Sequence: Synthetic oligonucleotide
  Target: LAMA2; (+) strand; PAM type: NRG; PAM sequence: CGG
atgtcagtgctttggtcatg

SEQ ID NO: 159859 - DNA, 20 bp, Artificial Sequence
  Description of Artificial Sequence: Synthetic oligonucleotide
  Target: LAMA2; (+) strand; PAM type: NRG; PAM sequence: GAG
gtcagtgctttggtcatgcg

SEQ ID NO: 159860 - DNA, 20 bp, Artificial Sequence
  Description of Artificial Sequence: Synthetic oligonucleotide
  Target: LAMA2; (+) strand; PAM type: NRG; PAM sequence: TGG
gagtcctgtgatgacgtcac

SEQ ID NO: 159861 - DNA, 20 bp, Artificial Sequence
  Description of Artificial Sequence: Synthetic oligonucleotide
  Target: LAMA2; (+) strand; PAM type: NRG; PAM sequence: GAG
gtcctgtgatgacgtcactg

SEQ ID NO: 159862 - DNA, 20 bp, Artificial Sequence
  Description of Artificial Sequence: Synthetic oligonucleotide
  Target: LAMA2; (+) strand; PAM type: NRG; PAM sequence: TGG
tgacgtcactggagaatgcc

SEQ ID NO: 159863 - DNA, 20 bp, Artificial Sequence
  Description of Artificial Sequence: Synthetic oligonucleotide
  Target: LAMA2; (+) strand; PAM type: NRG; PAM sequence: AAG
gtcactggagaatgcctggt

SEQ ID NO: 159864 - DNA, 20 bp, Artificial Sequence
  Description of Artificial Sequence: Synthetic oligonucleotide
  Target: LAMA2; (+) strand; PAM type: NRG; PAM sequence: TGG
ctggtaagtgctctcttctt

SEQ ID NO: 159865 - DNA, 20 bp, Artificial Sequence
  Description of Artificial Sequence: Synthetic oligonucleotide
  Target: LAMA2; (+) strand; PAM type: NRG; PAM sequence: GGG
tggtaagtgctctcttcttt

SEQ ID NO: 159866 - DNA, 20 bp, Artificial Sequence
  Description of Artificial Sequence: Synthetic oligonucleotide
  Target: LAMA2; (+) strand; PAM type: NRG; PAM sequence: GGG
ggtaagtgctctcttctttg

SEQ ID NO: 159867 - DNA, 20 bp, Artificial Sequence
  Description of Artificial Sequence: Synthetic oligonucleotide
  Target: LAMA2; (+) strand; PAM type: NRG; PAM sequence: AAG
ctttggggatgctgattgac

SEQ ID NO: 159868 - DNA, 20 bp, Artificial Sequence
  Description of Artificial Sequence: Synthetic oligonucleotide
  Target: LAMA2; (+) strand; PAM type: NRG; PAM sequence: AGG
tttggggatgctgattgaca

SEQ ID NO: 159869 - DNA, 20 bp, Artificial Sequence
  Description of Artificial Sequence: Synthetic oligonucleotide
  Target: LAMA2; (+) strand; PAM type: NRG; PAM sequence: CAG
caaggctgaaatcacctcga

SEQ ID NO: 159870 - DNA, 20 bp, Artificial Sequence
  Description of Artificial Sequence: Synthetic oligonucleotide
  Target: LAMA2; (+) strand; PAM type: NRG; PAM sequence: CAG
cctcgacagatgctacaatt

SEQ ID NO: 159871 - DNA, 20 bp, Artificial Sequence
  Description of Artificial Sequence: Synthetic oligonucleotide
  Target: LAMA2; (+) strand; PAM type: NRG; PAM sequence: TGG
ctacaattcagctactaccc

SEQ ID NO: 159872 - DNA, 20 bp, Artificial Sequence
  Description of Artificial Sequence: Synthetic oligonucleotide
  Target: LAMA2; (+) strand; PAM type: NRG; PAM sequence: GGG
tacaattcagctactaccct

SEQ ID NO: 159873 - DNA, 20 bp, Artificial Sequence
  Description of Artificial Sequence: Synthetic oligonucleotide
  Target: LAMA2; (+) strand; PAM type: NRG; PAM sequence: GGG
acaattcagctactaccctg

SEQ ID NO: 159874 - DNA, 20 bp, Artificial Sequence
  Description of Artificial Sequence: Synthetic oligonucleotide
  Target: LAMA2; (+) strand; PAM type: NRG; PAM sequence: GAG
cctggggaccttaaacactt

SEQ ID NO: 159875 - DNA, 20 bp, Artificial Sequence
  Description of Artificial Sequence: Synthetic oligonucleotide
  Target: LAMA2; (+) strand; PAM type: NRG; PAM sequence: AAG
ggaccttaaacacttgagtc

SEQ ID NO: 159876 - DNA, 20 bp, Artificial Sequence
  Description of Artificial Sequence: Synthetic oligonucleotide
  Target: LAMA2; (+) strand; PAM type: NRG; PAM sequence: AAG
ccttaaacacttgagtcaag

SEQ ID NO: 159877 - DNA, 20 bp, Artificial Sequence
  Description of Artificial Sequence: Synthetic oligonucleotide
  Target: LAMA2; (+) strand; PAM type: NRG; PAM sequence: AAG
agtcaagaagtgctttgaca

SEQ ID NO: 159878 - DNA, 20 bp, Artificial Sequence
  Description of Artificial Sequence: Synthetic oligonucleotide
  Target: LAMA2; (+) strand; PAM type: NRG; PAM sequence: TGG
atctttgtattgaactgaat

SEQ ID NO: 159879 - DNA, 20 bp, Artificial Sequence
  Description of Artificial Sequence: Synthetic oligonucleotide
  Target: LAMA2; (+) strand; PAM type: NRG; PAM sequence: GAG
tattgaactgaattggaact

SEQ ID NO: 159880 - DNA, 20 bp, Artificial Sequence
  Description of Artificial Sequence: Synthetic oligonucleotide
  Target: LAMA2; (+) strand; PAM type: NRG; PAM sequence: GAG
gtgatctccctaatgaatat

SEQ ID NO: 159881 - DNA, 20 bp, Artificial Sequence
  Description of Artificial Sequence: Synthetic oligonucleotide
  Target: LAMA2; (+) strand; PAM type: NRG; PAM sequence: AGG
tgatctccctaatgaatatg

SEQ ID NO: 159882 - DNA, 20 bp, Artificial Sequence
  Description of Artificial Sequence: Synthetic oligonucleotide
  Target: LAMA2; (+) strand; PAM type: NRG; PAM sequence: AAG
tctccctaatgaatatgagg

SEQ ID NO: 159883 - DNA, 20 bp, Artificial Sequence
  Description of Artificial Sequence: Synthetic oligonucleotide
  Target: LAMA2; (+) strand; PAM type: NRG; PAM sequence: AAG
gtgtttattcatattaaatc

SEQ ID NO: 159884 - DNA, 20 bp, Artificial Sequence
  Description of Artificial Sequence: Synthetic oligonucleotide
  Target: LAMA2; (+) strand; PAM type: NRG; PAM sequence: TAG
tattaaatcaagaattaaat

SEQ ID NO: 159885 - DNA, 20 bp, Artificial Sequence
  Description of Artificial Sequence: Synthetic oligonucleotide
  Target: LAMA2; (+) strand; PAM type: NRG; PAM sequence: CAG
atcaagaattaaattagaat

SEQ ID NO: 159886 - DNA, 20 bp, Artificial Sequence
  Description of Artificial Sequence: Synthetic oligonucleotide
  Target: LAMA2; (+) strand; PAM type: NRG; PAM sequence: AAG
agaatcagatatatttttat

SEQ ID NO: 159887 - DNA, 20 bp, Artificial Sequence
  Description of Artificial Sequence: Synthetic oligonucleotide
  Target: LAMA2; (+) strand; PAM type: NRG; PAM sequence: AGG
gaatcagatatatttttata

SEQ ID NO: 159888 - DNA, 20 bp, Artificial Sequence
  Description of Artificial Sequence: Synthetic oligonucleotide
  Target: LAMA2; (+) strand; PAM type: NRG; PAM sequence: TGG
tataaggcataacttctgat

SEQ ID NO: 159889 - DNA, 20 bp, Artificial Sequence
  Description of Artificial Sequence: Synthetic oligonucleotide
  Target: LAMA2; (+) strand; PAM type: NRG; PAM sequence: AAG
aaggcataacttctgattgg

SEQ ID NO: 159890 - DNA, 20 bp, Artificial Sequence
  Description of Artificial Sequence: Synthetic oligonucleotide
  Target: LAMA2; (+) strand; PAM type: NRG; PAM sequence: TGG
ataactaccatgaatatata

SEQ ID NO: 159891 - DNA, 20 bp, Artificial Sequence
  Description of Artificial Sequence: Synthetic oligonucleotide
  Target: LAMA2; (+) strand; PAM type: NRG; PAM sequence: AAG
ttcttccataaatctatgaa

SEQ ID NO: 159892 - DNA, 20 bp, Artificial Sequence
  Description of Artificial Sequence: Synthetic oligonucleotide
  Target: LAMA2; (+) strand; PAM type: NRG; PAM sequence: CAG
ccataaatctatgaaaagta

SEQ ID NO: 159893 - DNA, 20 bp, Artificial Sequence
  Description of Artificial Sequence: Synthetic oligonucleotide
  Target: LAMA2; (+) strand; PAM type: NRG; PAM sequence: TAG
agtacagtgtacttttaaaa

SEQ ID NO: 159894 - DNA, 20 bp, Artificial Sequence
  Description of Artificial Sequence: Synthetic oligonucleotide
  Target: LAMA2; (+) strand; PAM type: NRG; PAM sequence: AAG
ttatatccccataatatgaa

SEQ ID NO: 159895 - DNA, 20 bp, Artificial Sequence
  Description of Artificial Sequence: Synthetic oligonucleotide
  Target: LAMA2; (+) strand; PAM type: NRG; PAM sequence: TAG
agtgtaaaatataaccttta

SEQ ID NO: 159896 - DNA, 20 bp, Artificial Sequence
  Description of Artificial Sequence: Synthetic oligonucleotide
  Target: LAMA2; (+) strand; PAM type: NRG; PAM sequence: AAG
cctttatagtaaacataatt

SEQ ID NO: 159897 - DNA, 20 bp, Artificial Sequence
  Description of Artificial Sequence: Synthetic oligonucleotide
  Target: LAMA2; (+) strand; PAM type: NRG; PAM sequence: TAG
tcataatttaactaaatgca

SEQ ID NO: 159898 - DNA, 20 bp, Artificial Sequence
  Description of Artificial Sequence: Synthetic oligonucleotide
  Target: LAMA2; (+) strand; PAM type: NRG; PAM sequence: TAG
taaatgcatagtgtcatttg

SEQ ID NO: 159899 - DNA, 20 bp, Artificial Sequence
  Description of Artificial Sequence: Synthetic oligonucleotide
  Target: LAMA2; (+) strand; PAM type: NRG; PAM sequence: CAG
aatatgtaatacatattcac

SEQ ID NO: 159900 - DNA, 20 bp, Artificial Sequence
  Description of Artificial Sequence: Synthetic oligonucleotide
  Target: LAMA2; (+) strand; PAM type: NRG; PAM sequence: GAG
tatgtaatacatattcacca

SEQ ID NO: 159901 - DNA, 20 bp, Artificial Sequence
  Description of Artificial Sequence: Synthetic oligonucleotide
  Target: LAMA2; (+) strand; PAM type: NRG; PAM sequence: AAG
gctgcttctcctttgcaatt

SEQ ID NO: 159902 - DNA, 20 bp, Artificial Sequence
  Description of Artificial Sequence: Synthetic oligonucleotide
  Target: LAMA2; (+) strand; PAM type: NRG; PAM sequence: AAG
tctcctttgcaattaagtct

SEQ ID NO: 159903 - DNA, 20 bp, Artificial Sequence
  Description of Artificial Sequence: Synthetic oligonucleotide
  Target: LAMA2; (+) strand; PAM type: NRG; PAM sequence: CAG
aattaagtctaagctttaac

SEQ ID NO: 159904 - DNA, 20 bp, Artificial Sequence
  Description of Artificial Sequence: Synthetic oligonucleotide
  Target: LAMA2; (+) strand; PAM type: NRG; PAM sequence: TAG
tctaagctttaaccagaaaa

SEQ ID NO: 159905 - DNA, 20 bp, Artificial Sequence
  Description of Artificial Sequence: Synthetic oligonucleotide
  Target: LAMA2; (+) strand; PAM type: NRG; PAM sequence: AGG
ctaagctttaaccagaaaat

SEQ ID NO: 159906 - DNA, 20 bp, Artificial Sequence
  Description of Artificial Sequence: Synthetic oligonucleotide
  Target: LAMA2; (+) strand; PAM type: NRG; PAM sequence: AAG
accagaaaataggctttaca

SEQ ID NO: 159907 - DNA, 20 bp, Artificial Sequence
  Description of Artificial Sequence: Synthetic oligonucleotide
  Target: LAMA2; (+) strand; PAM type: NRG; PAM sequence: AAG
aataggctttacaaagtgca

SEQ ID NO: 159908 - DNA, 20 bp, Artificial Sequence
  Description of Artificial Sequence: Synthetic oligonucleotide
  Target: LAMA2; (+) strand; PAM type: NRG; PAM sequence: AAG
aaagcactttccatcctgct

SEQ ID NO: 159909 - DNA, 20 bp, Artificial Sequence
  Description of Artificial Sequence: Synthetic oligonucleotide
  Target: LAMA2; (+) strand; PAM type: NRG; PAM sequence: TAG
tccatcctgctaagaaacct

SEQ ID NO: 159910 - DNA, 20 bp, Artificial Sequence
  Description of Artificial Sequence: Synthetic oligonucleotide
  Target: LAMA2; (+) strand; PAM type: NRG; PAM sequence: AGG
ccatcctgctaagaaacctt

SEQ ID NO: 159911 - DNA, 20 bp, Artificial Sequence
  Description of Artificial Sequence: Synthetic oligonucleotide
  Target: LAMA2; (+) strand; PAM type: NRG; PAM sequence: TGG
ctgctaagaaaccttaggat

SEQ ID NO: 159912 - DNA, 20 bp, Artificial Sequence
  Description of Artificial Sequence: Synthetic oligonucleotide
  Target: LAMA2; (+) strand; PAM type: NRG; PAM sequence: GAG
gctaagaaaccttaggattg

SEQ ID NO: 159913 - DNA, 20 bp, Artificial Sequence
  Description of Artificial Sequence: Synthetic oligonucleotide
  Target: LAMA2; (+) strand; PAM type: NRG; PAM sequence: TAG
gattggagaattacactgaa

SEQ ID NO: 159914 - DNA, 20 bp, Artificial Sequence
  Description of Artificial Sequence: Synthetic oligonucleotide
  Target: LAMA2; (+) strand; PAM type: NRG; PAM sequence: AAG
tagaccattctgattaactc

SEQ ID NO: 159915 - DNA, 20 bp, Artificial Sequence
  Description of Artificial Sequence: Synthetic oligonucleotide
  Target: LAMA2; (+) strand; PAM type: NRG; PAM sequence: AGG
agaccattctgattaactca

SEQ ID NO: 159916 - DNA, 20 bp, Artificial Sequence
  Description of Artificial Sequence: Synthetic oligonucleotide
  Target: LAMA2; (+) strand; PAM type: NRG; PAM sequence: GGG
gaccattctgattaactcaa

SEQ ID NO: 159917 - DNA, 20 bp, Artificial Sequence
  Description of Artificial Sequence: Synthetic oligonucleotide
  Target: LAMA2; (+) strand; PAM type: NRG; PAM sequence: TAG
tgattaactcaagggcacat

SEQ ID NO: 159918 - DNA, 20 bp, Artificial Sequence
  Description of Artificial Sequence: Synthetic oligonucleotide
  Target: LAMA2; (+) strand; PAM type: NRG; PAM sequence: TGG
tagttttatattgtctgaca

SEQ ID NO: 159919 - DNA, 20 bp, Artificial Sequence
  Description of Artificial Sequence: Synthetic oligonucleotide
  Target: LAMA2; (+) strand; PAM type: NRG; PAM sequence: AAG
atattgtctgacatggcatg

SEQ ID NO: 159920 - DNA, 20 bp, Artificial Sequence
  Description of Artificial Sequence: Synthetic oligonucleotide
  Target: LAMA2; (+) strand; PAM type: NRG; PAM sequence: TAG
aacaacacttctcctttcat

SEQ ID NO: 159921 - DNA, 20 bp, Artificial Sequence
  Description of Artificial Sequence: Synthetic oligonucleotide
  Target: LAMA2; (+) strand; PAM type: NRG; PAM sequence: CAG
ttctcctttcattagtcttg

SEQ ID NO: 159922 - DNA, 20 bp, Artificial Sequence
  Description of Artificial Sequence: Synthetic oligonucleotide
  Target: LAMA2; (+) strand; PAM type: NRG; PAM sequence: TGG
tgcagaaacacaatttaaaa

SEQ ID NO: 159923 - DNA, 20 bp, Artificial Sequence
  Description of Artificial Sequence: Synthetic oligonucleotide
  Target: LAMA2; (+) strand; PAM type: NRG; PAM sequence: AAG
aatttaaaatggtgccaatt

SEQ ID NO: 159924 - DNA, 20 bp, Artificial Sequence
  Description of Artificial Sequence: Synthetic oligonucleotide
  Target: LAMA2; (+) strand; PAM type: NRG; PAM sequence: AGG
atttaaaatggtgccaatta

SEQ ID NO: 159925 - DNA, 20 bp, Artificial Sequence
  Description of Artificial Sequence: Synthetic oligonucleotide
  Target: LAMA2; (+) strand; PAM type: NRG; PAM sequence: GAG
ttaaaatggtgccaattaag

SEQ ID NO: 159926 - DNA, 20 bp, Artificial Sequence
  Description of Artificial Sequence: Synthetic oligonucleotide
  Target: LAMA2; (+) strand; PAM type: NRG; PAM sequence: AGG
taaaatggtgccaattaagg

SEQ ID NO: 159927 - DNA, 20 bp, Artificial Sequence
  Description of Artificial Sequence: Synthetic oligonucleotide
  Target: LAMA2; (+) strand; PAM type: NRG; PAM sequence: AAG
attatactctcatttccctg

SEQ ID NO: 159928 - DNA, 20 bp, Artificial Sequence
  Description of Artificial Sequence: Synthetic oligonucleotide
  Target: LAMA2; (+) strand; PAM type: NRG; PAM sequence: AAG
ctcatttccctgaagaattt

SEQ ID NO: 159929 - DNA, 20 bp, Artificial Sequence
  Description of Artificial Sequence: Synthetic oligonucleotide
  Target: LAMA2; (+) strand; PAM type: NRG; PAM sequence: AGG
tcatttccctgaagaattta

SEQ ID NO: 159930 - DNA, 20 bp, Artificial Sequence
  Description of Artificial Sequence: Synthetic oligonucleotide
  Target: LAMA2; (+) strand; PAM type: NRG; PAM sequence: CGG
tttccctgaagaatttaagg

SEQ ID NO: 159931 - DNA, 20 bp, Artificial Sequence
  Description of Artificial Sequence: Synthetic oligonucleotide
  Target: LAMA2; (+) strand; PAM type: NRG; PAM sequence: AAG
cccatttctcttctacttaa

SEQ ID NO: 159932 - DNA, 20 bp, Artificial Sequence
  Description of Artificial Sequence: Synthetic oligonucleotide
  Target: LAMA2; (+) strand; PAM type: NRG; PAM sequence: TGG
ctcttctacttaaaagcttc

SEQ ID NO: 159933 - DNA, 20 bp, Artificial Sequence
  Description of Artificial Sequence: Synthetic oligonucleotide
  Target: LAMA2; (+) strand; PAM type: NRG; PAM sequence: GGG
tcttctacttaaaagcttct

SEQ ID NO: 159934 - DNA, 20 bp, Artificial Sequence
  Description of Artificial Sequence: Synthetic oligonucleotide
  Target: LAMA2; (+) strand; PAM type: NRG; PAM sequence: CAG
aaaaatccaaaatgaaaatt

SEQ ID NO: 159935 - DNA, 20 bp, Artificial Sequence
  Description of Artificial Sequence: Synthetic oligonucleotide
  Target: LAMA2; (+) strand; PAM type: NRG; PAM sequence: AGG
aaaatccaaaatgaaaattc

SEQ ID NO: 159936 - DNA, 20 bp, Artificial Sequence
  Description of Artificial Sequence: Synthetic oligonucleotide
  Target: LAMA2; (+) strand; PAM type: NRG; PAM sequence: GGG
aaatccaaaatgaaaattca

SEQ ID NO: 159937 - DNA, 20 bp, Artificial Sequence
  Description of Artificial Sequence: Synthetic oligonucleotide
  Target: LAMA2; (+) strand; PAM type: NRG; PAM sequence: CAG
aaaattcagggcttttgttt

SEQ ID NO: 159938 - DNA, 20 bp, Artificial Sequence
  Description of Artificial Sequence: Synthetic oligonucleotide
  Target: LAMA2; (+) strand; PAM type: NRG; PAM sequence: TGG
gcttttgtttcagtgtaatt

SEQ ID NO: 159939 - DNA, 20 bp, Artificial Sequence
  Description of Artificial Sequence: Synthetic oligonucleotide
  Target: LAMA2; (+) strand; PAM type: NRG; PAM sequence: TAG
tttcagtgtaatttggcatt

SEQ ID NO: 159940 - DNA, 20 bp, Artificial Sequence
  Description of Artificial Sequence: Synthetic oligonucleotide
  Target: LAMA2; (+) strand; PAM type: NRG; PAM sequence: AGG
ttcagtgtaatttggcattt

SEQ ID NO: 159941 - DNA, 20 bp, Artificial Sequence
  Description of Artificial Sequence: Synthetic oligonucleotide
  Target: LAMA2; (+) strand; PAM type: NRG; PAM sequence: AAG
tctttcccttttctctatat

SEQ ID NO: 159942 - DNA, 20 bp, Artificial Sequence
  Description of Artificial Sequence: Synthetic oligonucleotide
  Target: LAMA2; (+) strand; PAM type: NRG; PAM sequence: AAG
tttaattgcattgcattatg

SEQ ID NO: 159943 - DNA, 20 bp, Artificial Sequence
  Description of Artificial Sequence: Synthetic oligonucleotide
  Target: LAMA2; (+) strand; PAM type: NRG; PAM sequence: GAG
tgcattgcattatgaagcat

SEQ ID NO: 159944 - DNA, 20 bp, Artificial Sequence
  Description of Artificial Sequence: Synthetic oligonucleotide
  Target: LAMA2; (+) strand; PAM type: NRG; PAM sequence: GAG
cattgcattatgaagcatga

SEQ ID NO: 159945 - DNA, 20 bp, Artificial Sequence
  Description of Artificial Sequence: Synthetic oligonucleotide
  Target: LAMA2; (+) strand; PAM type: NRG; PAM sequence: TGG
agcatgagagccttaatttg

SEQ ID NO: 159946 - DNA, 20 bp, Artificial Sequence
  Description of Artificial Sequence: Synthetic oligonucleotide
  Target: LAMA2; (+) strand; PAM type: NRG; PAM sequence: CAG
gagagccttaatttgtggat

SEQ ID NO: 159947 - DNA, 20 bp, Artificial Sequence
  Description of Artificial Sequence: Synthetic oligonucleotide
  Target: LAMA2; (+) strand; PAM type: NRG; PAM sequence: TGG
agccttaatttgtggatcag

SEQ ID NO: 159948 - DNA, 20 bp, Artificial Sequence
  Description of Artificial Sequence: Synthetic oligonucleotide
  Target: LAMA2; (+) strand; PAM type: NRG; PAM sequence: TAG
tgaaatgacatttttatgaa

SEQ ID NO: 159949 - DNA, 20 bp, Artificial Sequence
  Description of Artificial Sequence: Synthetic oligonucleotide
  Target: LAMA2; (+) strand; PAM type: NRG; PAM sequence: AAG
atgacatttttatgaataga

SEQ ID NO: 159950 - DNA, 20 bp, Artificial Sequence
  Description of Artificial Sequence: Synthetic oligonucleotide
  Target: LAMA2; (+) strand; PAM type: NRG; PAM sequence: AAG
tttttatgaatagaaagact

SEQ ID NO: 159951 - DNA, 20 bp, Artificial Sequence
  Description of Artificial Sequence: Synthetic oligonucleotide
  Target: LAMA2; (+) strand; PAM type: NRG; PAM sequence: AAG
tttcattttaattatgccat

SEQ ID NO: 159952 - DNA, 20 bp, Artificial Sequence
  Description of Artificial Sequence: Synthetic oligonucleotide
  Target: LAMA2; (+) strand; PAM type: NRG; PAM sequence: TGG
aagtcttttaaaatgtactt

SEQ ID NO: 159953 - DNA, 20 bp, Artificial Sequence
  Description of Artificial Sequence: Synthetic oligonucleotide
  Target: LAMA2; (+) strand; PAM type: NRG; PAM sequence: GGG
agtcttttaaaatgtacttt

SEQ ID NO: 159954 - DNA, 20 bp, Artificial Sequence
  Description of Artificial Sequence: Synthetic oligonucleotide
  Target: LAMA2; (+) strand; PAM type: NRG; PAM sequence: TGG
atgtactttgggaaaaatat

SEQ ID NO: 159955 - DNA, 20 bp, Artificial Sequence
  Description of Artificial Sequence: Synthetic oligonucleotide
  Target: LAMA2; (+) strand; PAM type: NRG; PAM sequence: GGG
tgtactttgggaaaaatatt

SEQ ID NO: 159956 - DNA, 20 bp, Artificial Sequence
  Description of Artificial Sequence: Synthetic oligonucleotide
  Target: LAMA2; (+) strand; PAM type: NRG; PAM sequence: CAG
ttaaacacttcactaacatg

SEQ ID NO: 159957 - DNA, 20 bp, Artificial Sequence
  Description of Artificial Sequence: Synthetic oligonucleotide
  Target: LAMA2; (+) strand; PAM type: NRG; PAM sequence: TAG
aacacttcactaacatgcag

SEQ ID NO: 159958 - DNA, 20 bp, Artificial Sequence
  Description of Artificial Sequence: Synthetic oligonucleotide
  Target: LAMA2; (+) strand; PAM type: NRG; PAM sequence: AGG
acacttcactaacatgcagt

SEQ ID NO: 159959 - DNA, 20 bp, Artificial Sequence
  Description of Artificial Sequence: Synthetic oligonucleotide
  Target: LAMA2; (+) strand; PAM type: NRG; PAM sequence: CAG
atgcagtaggaaataatact

SEQ ID NO: 159960 - DNA, 20 bp, Artificial Sequence
  Description of Artificial Sequence: Synthetic oligonucleotide
  Target: LAMA2; (+) strand; PAM type: NRG; PAM sequence: TGG
tactcagcccaaaactgaca

SEQ ID NO: 159961 - DNA, 20 bp, Artificial Sequence
  Description of Artificial Sequence: Synthetic oligonucleotide
  Target: LAMA2; (+) strand; PAM type: NRG; PAM sequence: AAG
ggaattgttttacttaccct

SEQ ID NO: 159962 - DNA, 20 bp, Artificial Sequence
  Description of Artificial Sequence: Synthetic oligonucleotide
  Target: LAMA2; (+) strand; PAM type: NRG; PAM sequence: AAG
attgttttacttaccctaag

SEQ ID NO: 159963 - DNA, 20 bp, Artificial Sequence
  Description of Artificial Sequence: Synthetic oligonucleotide
  Target: LAMA2; (+) strand; PAM type: NRG; PAM sequence: AAG
taccctaagaagacaaaaat

SEQ ID NO: 159964 - DNA, 20 bp, Artificial Sequence
  Description of Artificial Sequence: Synthetic oligonucleotide
  Target: LAMA2; (+) strand; PAM type: NRG; PAM sequence: TAG
caaactcatgatgttccata

SEQ ID NO: 159965 - DNA, 20 bp, Artificial Sequence
  Description of Artificial Sequence: Synthetic oligonucleotide
  Target: LAMA2; (+) strand; PAM type: NRG; PAM sequence: TAG
gtcatatttcatgaattcat

SEQ ID NO: 159966 - DNA, 20 bp, Artificial Sequence
  Description of Artificial Sequence: Synthetic oligonucleotide
  Target: LAMA2; (+) strand; PAM type: NRG; PAM sequence: AGG
tcatatttcatgaattcatt

SEQ ID NO: 159967 - DNA, 20 bp, Artificial Sequence
  Description of Artificial Sequence: Synthetic oligonucleotide
  Target: LAMA2; (+) strand; PAM type: NRG; PAM sequence: TAG
aattttcatgctgaattcat

SEQ ID NO: 159968 - DNA, 20 bp, Artificial Sequence
  Description of Artificial Sequence: Synthetic oligonucleotide
  Target: LAMA2; (+) strand; PAM type: NRG; PAM sequence: AGG
attttcatgctgaattcatt

SEQ ID NO: 159969 - DNA, 20 bp, Artificial Sequence
  Description of Artificial Sequence: Synthetic oligonucleotide
  Target: LAMA2; (+) strand; PAM type: NRG; PAM sequence: AAG
tgctgaattcattaggatga

SEQ ID NO: 159970 - DNA, 20 bp, Artificial Sequence
  Description of Artificial Sequence: Synthetic oligonucleotide
  Target: LAMA2; (+) strand; PAM type: NRG; PAM sequence: TAG
tcattaggatgaaagcaaat

SEQ ID NO: 159971 - DNA, 20 bp, Artificial Sequence
  Description of Artificial Sequence: Synthetic oligonucleotide
  Target: LAMA2; (+) strand; PAM type: NRG; PAM sequence: TAG
tgatgtgatatttctaaaac

SEQ ID NO: 159972 - DNA, 20 bp, Artificial Sequence
  Description of Artificial Sequence: Synthetic oligonucleotide
  Target: LAMA2; (+) strand; PAM type: NRG; PAM sequence: AAG
tgtgatatttctaaaactag

SEQ ID NO: 159973 - DNA, 20 bp, Artificial Sequence
  Description of Artificial Sequence: Synthetic oligonucleotide
  Target: LAMA2; (+) strand; PAM type: NRG; PAM sequence: CAG
gccttttttaactaataaaa

SEQ ID NO: 159974 - DNA, 20 bp, Artificial Sequence
  Description of Artificial Sequence: Synthetic oligonucleotide
  Target: LAMA2; (+) strand; PAM type: NRG; PAM sequence: CAG
actaataaaacagtgtcatt

SEQ ID NO: 159975 - DNA, 20 bp, Artificial Sequence
  Description of Artificial Sequence: Synthetic oligonucleotide
  Target: LAMA2; (+) strand; PAM type: NRG; PAM sequence: GAG
gtgtcattcagcataatttt

SEQ ID NO: 159976 - DNA, 20 bp, Artificial Sequence
  Description of Artificial Sequence: Synthetic oligonucleotide
  Target: LAMA2; (+) strand; PAM type: NRG; PAM sequence: GAG
gtcattcagcataattttga

SEQ ID NO: 159977 - DNA, 20 bp, Artificial Sequence
  Description of Artificial Sequence: Synthetic oligonucleotide
  Target: LAMA2; (+) strand; PAM type: NRG; PAM sequence: AAG
attcagcataattttgagag

SEQ ID NO: 159978 - DNA, 20 bp, Artificial Sequence
  Description of Artificial Sequence: Synthetic oligonucleotide
  Target: LAMA2; (+) strand; PAM type: NRG; PAM sequence: AGG
ttcagcataattttgagaga

SEQ ID NO: 159979 - DNA, 20 bp, Artificial Sequence
  Description of Artificial Sequence: Synthetic oligonucleotide
  Target: LAMA2; (+) strand; PAM type: NRG; PAM sequence: AAG
agcataattttgagagaagg

SEQ ID NO: 159980 - DNA, 20 bp, Artificial Sequence
  Description of Artificial Sequence: Synthetic oligonucleotide
  Target: LAMA2; (+) strand; PAM type: NRG; PAM sequence: AGG
gcataattttgagagaagga

SEQ ID NO: 159981 - DNA, 20 bp, Artificial Sequence
  Description of Artificial Sequence: Synthetic oligonucleotide
  Target: LAMA2; (+) strand; PAM type: NRG; PAM sequence: GGG
cataattttgagagaaggaa

SEQ ID NO: 159982 - DNA, 20 bp, Artificial Sequence
  Description of Artificial Sequence: Synthetic oligonucleotide
  Target: LAMA2; (+) strand; PAM type: NRG; PAM sequence: GAG
taattttgagagaaggaagg

SEQ ID NO: 159983 - DNA, 20 bp, Artificial Sequence
  Description of Artificial Sequence: Synthetic oligonucleotide
  Target: LAMA2; (+) strand; PAM type: NRG; PAM sequence: GAG
attttgagagaaggaaggga

SEQ ID NO: 159984 - DNA, 20 bp, Artificial Sequence
  Description of Artificial Sequence: Synthetic oligonucleotide
  Target: LAMA2; (+) strand; PAM type: NRG; PAM sequence: CAG
gagagaaggaagggagagaa

SEQ ID NO: 159985 - DNA, 20 bp, Artificial Sequence
  Description of Artificial Sequence: Synthetic oligonucleotide
  Target: LAMA2; (+) strand; PAM type: NRG; PAM sequence: TAG
cagaccctactaatgatgcc

SEQ ID NO: 159986 - DNA, 20 bp, Artificial Sequence
  Description of Artificial Sequence: Synthetic oligonucleotide
  Target: LAMA2; (+) strand; PAM type: NRG; PAM sequence: CAG
tactgattttgtttcatgaa

SEQ ID NO: 159987 - DNA, 20 bp, Artificial Sequence
  Description of Artificial Sequence: Synthetic oligonucleotide
  Target: LAMA2; (+) strand; PAM type: NRG; PAM sequence: AGG
actgattttgtttcatgaac

SEQ ID NO: 159988 - DNA, 20 bp, Artificial Sequence
  Description of Artificial Sequence: Synthetic oligonucleotide
  Target: LAMA2; (+) strand; PAM type: NRG; PAM sequence: GGG
ctgattttgtttcatgaaca

SEQ ID NO: 159989 - DNA, 20 bp, Artificial Sequence
  Description of Artificial Sequence: Synthetic oligonucleotide
  Target: LAMA2; (+) strand; PAM type: NRG; PAM sequence: GAG
gattttgtttcatgaacagg

SEQ ID NO: 159990 - DNA, 20 bp, Artificial Sequence
  Description of Artificial Sequence: Synthetic oligonucleotide
  Target: LAMA2; (+) strand; PAM type: NRG; PAM sequence: TAG
ttgtttcatgaacagggaga

SEQ ID NO: 159991 - DNA, 20 bp, Artificial Sequence
  Description of Artificial Sequence: Synthetic oligonucleotide
  Target: LAMA2; (+) strand; PAM type: NRG; PAM sequence: AGG
tgtttcatgaacagggagat

SEQ ID NO: 159992 - DNA, 20 bp, Artificial Sequence
  Description of Artificial Sequence: Synthetic oligonucleotide
  Target: LAMA2; (+) strand; PAM type: NRG; PAM sequence: GAG
tttcatgaacagggagatag

SEQ ID NO: 159993 - DNA, 20 bp, Artificial Sequence
  Description of Artificial Sequence: Synthetic oligonucleotide
  Target: LAMA2; (+) strand; PAM type: NRG; PAM sequence: AGG
ttcatgaacagggagatagg

SEQ ID NO: 159994 - DNA, 20 bp, Artificial Sequence
  Description of Artificial Sequence: Synthetic oligonucleotide
  Target: LAMA2; (+) strand; PAM type: NRG; PAM sequence: CAG
aggaggtctccttcaaataa

SEQ ID NO: 159995 - DNA, 20 bp, Artificial Sequence
  Description of Artificial Sequence: Synthetic oligonucleotide
  Target: LAMA2; (+) strand; PAM type: NRG; PAM sequence: GAG
gaggtctccttcaaataaca

SEQ ID NO: 159996 - DNA, 20 bp, Artificial Sequence
  Description of Artificial Sequence: Synthetic oligonucleotide
  Target: LAMA2; (+) strand; PAM type: NRG; PAM sequence: GAG
tcaaataacagagcgatctt

SEQ ID NO: 159997 - DNA, 20 bp, Artificial Sequence
  Description of Artificial Sequence: Synthetic oligonucleotide
  Target: LAMA2; (+) strand; PAM type: NRG; PAM sequence: AGG
caaataacagagcgatcttg

SEQ ID NO: 159998 - DNA, 20 bp, Artificial Sequence
  Description of Artificial Sequence: Synthetic oligonucleotide
  Target: LAMA2; (+) strand; PAM type: NRG; PAM sequence: CAG
acagagcgatcttgaggaaa

SEQ ID NO: 159999 - DNA, 20 bp, Artificial Sequence
  Description of Artificial Sequence: Synthetic oligonucleotide
  Target: LAMA2; (+) strand; PAM type: NRG; PAM sequence: TGG
gagcgatcttgaggaaacag

SEQ ID NO: 160000 - DNA, 20 bp, Artificial Sequence
  Description of Artificial Sequence: Synthetic oligonucleotide
  Target: LAMA2; (+) strand; PAM type: NRG; PAM sequence: AAG
cagtggacatcttgatgata

SEQ ID NO: 160001 - DNA, 20 bp, Artificial Sequence
  Description of Artificial Sequence: Synthetic oligonucleotide
  Target: LAMA2; (+) strand; PAM type: NRG; PAM sequence: CAG
ggacatcttgatgataaaga

SEQ ID NO: 160002 - DNA, 20 bp, Artificial Sequence
  Description of Artificial Sequence: Synthetic oligonucleotide
  Target: LAMA2; (+) strand; PAM type: NRG; PAM sequence: TGG
ttgatgataaagacagaatc

SEQ ID NO: 160003 - DNA, 20 bp, Artificial Sequence
  Description of Artificial Sequence: Synthetic oligonucleotide
  Target: LAMA2; (+) strand; PAM type: NRG; PAM sequence: TAG
gtttcctgaattttccatca

SEQ ID NO: 160004 - DNA, 20 bp, Artificial Sequence
  Description of Artificial Sequence: Synthetic oligonucleotide
  Target: LAMA2; (+) strand; PAM type: NRG; PAM sequence: TAG
cctgaattttccatcatagc

SEQ ID NO: 160005 - DNA, 20 bp, Artificial Sequence
  Description of Artificial Sequence: Synthetic oligonucleotide
  Target: LAMA2; (+) strand; PAM type: NRG; PAM sequence: TAG
tttccatcatagctagtaaa

SEQ ID NO: 160006 - DNA, 20 bp, Artificial Sequence
  Description of Artificial Sequence: Synthetic oligonucleotide
  Target: LAMA2; (+) strand; PAM type: NRG; PAM sequence: AGG
ttccatcatagctagtaaat

SEQ ID NO: 160007 - DNA, 20 bp, Artificial Sequence
  Description of Artificial Sequence: Synthetic oligonucleotide
  Target: LAMA2; (+) strand; PAM type: NRG; PAM sequence: TAG
ctagtaaataggtgatcatg

SEQ ID NO: 160008 - DNA, 20 bp, Artificial Sequence
  Description of Artificial Sequence: Synthetic oligonucleotide
  Target: LAMA2; (+) strand; PAM type: NRG; PAM sequence: AGG
tagtaaataggtgatcatgt

SEQ ID NO: 160009 - DNA, 20 bp, Artificial Sequence
  Description of Artificial Sequence: Synthetic oligonucleotide
  Target: LAMA2; (+) strand; PAM type: NRG; PAM sequence: AAG
tgtaggatatactgactttc

SEQ ID NO: 160010 - DNA, 20 bp, Artificial Sequence
  Description of Artificial Sequence: Synthetic oligonucleotide
  Target: LAMA2; (+) strand; PAM type: NRG; PAM sequence: AAG
ccaaaattgtattgataact

SEQ ID NO: 160011 - DNA, 20 bp, Artificial Sequence
  Description of Artificial Sequence: Synthetic oligonucleotide
  Target: LAMA2; (+) strand; PAM type: NRG; PAM sequence: GAG
aagtgctgatattccatttt

SEQ ID NO: 160012 - DNA, 20 bp, Artificial Sequence
  Description of Artificial Sequence: Synthetic oligonucleotide
  Target: LAMA2; (+) strand; PAM type: NRG; PAM sequence: TGG
gatattccattttgagtata

SEQ ID NO: 160013 - DNA, 20 bp, Artificial Sequence
  Description of Artificial Sequence: Synthetic oligonucleotide
  Target: LAMA2; (+) strand; PAM type: NRG; PAM sequence: GGG
atattccattttgagtatat

SEQ ID NO: 160014 - DNA, 20 bp, Artificial Sequence
  Description of Artificial Sequence: Synthetic oligonucleotide
  Target: LAMA2; (+) strand; PAM type: NRG; PAM sequence: AAG
gggttctgatacaatacaca

SEQ ID NO: 160015 - DNA, 20 bp, Artificial Sequence
  Description of Artificial Sequence: Synthetic oligonucleotide
  Target: LAMA2; (+) strand; PAM type: NRG; PAM sequence: GAG
gttctgatacaatacacaaa

SEQ ID NO: 160016 - DNA, 20 bp, Artificial Sequence
  Description of Artificial Sequence: Synthetic oligonucleotide
  Target: LAMA2; (+) strand; PAM type: NRG; PAM sequence: AGG
ttctgatacaatacacaaag

SEQ ID NO: 160017 - DNA, 20 bp, Artificial Sequence
  Description of Artificial Sequence: Synthetic oligonucleotide
  Target: LAMA2; (+) strand; PAM type: NRG; PAM sequence: GAG
ctgatacaatacacaaagag

SEQ ID NO: 160018 - DNA, 20 bp, Artificial Sequence
  Description of Artificial Sequence: Synthetic oligonucleotide
  Target: LAMA2; (+) strand; PAM type: NRG; PAM sequence: AAG
atatttgaatgttgctcatc

SEQ ID NO: 160019 - DNA, 20 bp, Artificial Sequence
  Description of Artificial Sequence: Synthetic oligonucleotide
  Target: LAMA2; (+) strand; PAM type: NRG; PAM sequence: AGG
tatttgaatgttgctcatca

SEQ ID NO: 160020 - DNA, 20 bp, Artificial Sequence
  Description of Artificial Sequence: Synthetic oligonucleotide
  Target: LAMA2; (+) strand; PAM type: NRG; PAM sequence: GGG
atttgaatgttgctcatcaa

SEQ ID NO: 160021 - DNA, 20 bp, Artificial Sequence
  Description of Artificial Sequence: Synthetic oligonucleotide
  Target: LAMA2; (+) strand; PAM type: NRG; PAM sequence: CAG
tcaagggcattcttactgtt

SEQ ID NO: 160022 - DNA, 20 bp, Artificial Sequence
  Description of Artificial Sequence: Synthetic oligonucleotide
  Target: LAMA2; (+) strand; PAM type: NRG; PAM sequence: TAG
gttcagctgaccctgcattt

SEQ ID NO: 160023 - DNA, 20 bp, Artificial Sequence
  Description of Artificial Sequence: Synthetic oligonucleotide
  Target: LAMA2; (+) strand; PAM type: NRG; PAM sequence: TGG
agcttcttgtttatttttca

SEQ ID NO: 160024 - DNA, 20 bp, Artificial Sequence
  Description of Artificial Sequence: Synthetic oligonucleotide
  Target: LAMA2; (+) strand; PAM type: NRG; PAM sequence: CAG
tatttttcatggttttaacc

SEQ ID NO: 160025 - DNA, 20 bp, Artificial Sequence
  Description of Artificial Sequence: Synthetic oligonucleotide
  Target: LAMA2; (+) strand; PAM type: NRG; PAM sequence: AAG
catggttttaacccagcatt

SEQ ID NO: 160026 - DNA, 20 bp, Artificial Sequence
  Description of Artificial Sequence: Synthetic oligonucleotide
  Target: LAMA2; (+) strand; PAM type: NRG; PAM sequence: TAG
ggttttaacccagcattaag

SEQ ID NO: 160027 - DNA, 20 bp, Artificial Sequence
  Description of Artificial Sequence: Synthetic oligonucleotide
  Target: LAMA2; (+) strand; PAM type: NRG; PAM sequence: TGG
taacccagcattaagtagca

SEQ ID NO: 160028 - DNA, 20 bp, Artificial Sequence
  Description of Artificial Sequence: Synthetic oligonucleotide
  Target: LAMA2; (+) strand; PAM type: NRG; PAM sequence: TAG
gcattaagtagcatggtttt

SEQ ID NO: 160029 - DNA, 20 bp, Artificial Sequence
  Description of Artificial Sequence: Synthetic oligonucleotide
  Target: LAMA2; (+) strand; PAM type: NRG; PAM sequence: AAG
aataaatttataaatttata

SEQ ID NO: 160030 - DNA, 20 bp, Artificial Sequence
  Description of Artificial Sequence: Synthetic oligonucleotide
  Target: LAMA2; (+) strand; PAM type: NRG; PAM sequence: TGG
aattatctgaaaaatatttt

SEQ ID NO: 160031 - DNA, 20 bp, Artificial Sequence
  Description of Artificial Sequence: Synthetic oligonucleotide
  Target: LAMA2; (+) strand; PAM type: NRG; PAM sequence: CAG
ctgaaaaatatttttggcac

SEQ ID NO: 160032 - DNA, 20 bp, Artificial Sequence
  Description of Artificial Sequence: Synthetic oligonucleotide
  Target: LAMA2; (+) strand; PAM type: NRG; PAM sequence: TAG
caaaatctaaacttctgcaa

SEQ ID NO: 160033 - DNA, 20 bp, Artificial Sequence
  Description of Artificial Sequence: Synthetic oligonucleotide
  Target: LAMA2; (+) strand; PAM type: NRG; PAM sequence: TAG
tctaaacttctgcaatagtg

SEQ ID NO: 160034 - DNA, 20 bp, Artificial Sequence
  Description of Artificial Sequence: Synthetic oligonucleotide
  Target: LAMA2; (+) strand; PAM type: NRG; PAM sequence: AGG
ctaaacttctgcaatagtgt

SEQ ID NO: 160035 - DNA, 20 bp, Artificial Sequence
  Description of Artificial Sequence: Synthetic oligonucleotide
  Target: LAMA2; (+) strand; PAM type: NRG; PAM sequence: AAG
tagtgtaggtctatatttaa

SEQ ID NO: 160036 - DNA, 20 bp, Artificial Sequence
  Description of Artificial Sequence: Synthetic oligonucleotide
  Target: LAMA2; (+) strand; PAM type: NRG; PAM sequence: AAG
ttaaaagacattttaactca

SEQ ID NO: 160037 - DNA, 20 bp, Artificial Sequence
  Description of Artificial Sequence: Synthetic oligonucleotide
  Target: LAMA2; (+) strand; PAM type: NRG; PAM sequence: AAG
tttaactcaaagtccatttg

SEQ ID NO: 160038 - DNA, 20 bp, Artificial Sequence
  Description of Artificial Sequence: Synthetic oligonucleotide
  Target: LAMA2; (+) strand; PAM type: NRG; PAM sequence: AAG
actcaaagtccatttgaagt

SEQ ID NO: 160039 - DNA, 20 bp, Artificial Sequence
  Description of Artificial Sequence: Synthetic oligonucleotide
  Target: LAMA2; (+) strand; PAM type: NRG; PAM sequence: CAG
aaagtccatttgaagtaagc

SEQ ID NO: 160040 - DNA, 20 bp, Artificial Sequence
  Description of Artificial Sequence: Synthetic oligonucleotide
  Target: LAMA2; (+) strand; PAM type: NRG; PAM sequence: AGG
aagtccatttgaagtaagcc

SEQ ID NO: 160041 - DNA, 20 bp, Artificial Sequence
  Description of Artificial Sequence: Synthetic oligonucleotide
  Target: LAMA2; (+) strand; PAM type: NRG; PAM sequence: AAG
tccatttgaagtaagccagg

SEQ ID NO: 160042 - DNA, 20 bp, Artificial Sequence
  Description of Artificial Sequence: Synthetic oligonucleotide
  Target: LAMA2; (+) strand; PAM type: NRG; PAM sequence: TGG
aggaagtattcaatgtcaca

SEQ ID NO: 160043 - DNA, 20 bp, Artificial Sequence
  Description of Artificial Sequence: Synthetic oligonucleotide
  Target: LAMA2; (+) strand; PAM type: NRG; PAM sequence: GGG
ggaagtattcaatgtcacat

SEQ ID NO: 160044 - DNA, 20 bp, Artificial Sequence
  Description of Artificial Sequence: Synthetic oligonucleotide
  Target: LAMA2; (+) strand; PAM type: NRG; PAM sequence: AAG
agtattcaatgtcacatggg

SEQ ID NO: 160045 - DNA, 20 bp, Artificial Sequence
  Description of Artificial Sequence: Synthetic oligonucleotide
  Target: LAMA2; (+) strand; PAM type: NRG; PAM sequence: TAG
ttcatgcttgcttcttctca

SEQ ID NO: 160046 - DNA, 20 bp, Artificial Sequence
  Description of Artificial Sequence: Synthetic oligonucleotide
  Target: LAMA2; (+) strand; PAM type: NRG; PAM sequence: TGG
gcttcttctcatagttcttg

SEQ ID NO: 160047 - DNA, 20 bp, Artificial Sequence
  Description of Artificial Sequence: Synthetic oligonucleotide
  Target: LAMA2; (+) strand; PAM type: NRG; PAM sequence: GAG
gttcttgtggtatgtaatgt

SEQ ID NO: 160048 - DNA, 20 bp, Artificial Sequence
  Description of Artificial Sequence: Synthetic oligonucleotide
  Target: LAMA2; (+) strand; PAM type: NRG; PAM sequence: AAG
aatgtgagcaaaattttgta

SEQ ID NO: 160049 - DNA, 20 bp, Artificial Sequence
  Description of Artificial Sequence: Synthetic oligonucleotide
  Target: LAMA2; (+) strand; PAM type: NRG; PAM sequence: CAG
tttgtaaagcactttcgtaa

SEQ ID NO: 160050 - DNA, 20 bp, Artificial Sequence
  Description of Artificial Sequence: Synthetic oligonucleotide
  Target: LAMA2; (+) strand; PAM type: NRG; PAM sequence: AGG
ttgtaaagcactttcgtaac

SEQ ID NO: 160051 - DNA, 20 bp, Artificial Sequence
  Description of Artificial Sequence: Synthetic oligonucleotide
  Target: LAMA2; (+) strand; PAM type: NRG; PAM sequence: CAG
tgtaaaaataaccaatccat

SEQ ID NO: 160052 - DNA, 20 bp, Artificial Sequence
  Description of Artificial Sequence: Synthetic oligonucleotide
  Target: LAMA2; (+) strand; PAM type: NRG; PAM sequence: GAG
taaaaataaccaatccatca

SEQ ID NO: 160053 - DNA, 20 bp, Artificial Sequence
  Description of Artificial Sequence: Synthetic oligonucleotide
  Target: LAMA2; (+) strand; PAM type: NRG; PAM sequence: AAG
ataaccaatccatcagagtg

SEQ ID NO: 160054 - DNA, 20 bp, Artificial Sequence
  Description of Artificial Sequence: Synthetic oligonucleotide
  Target: LAMA2; (+) strand; PAM type: NRG; PAM sequence: TAG
ttttttttatttccattata

SEQ ID NO: 160055 - DNA, 20 bp, Artificial Sequence
  Description of Artificial Sequence: Synthetic oligonucleotide
  Target: LAMA2; (+) strand; PAM type: NRG; PAM sequence: AGG
tttttttatttccattatat

SEQ ID NO: 160056 - DNA, 20 bp, Artificial Sequence
  Description of Artificial Sequence: Synthetic oligonucleotide
  Target: LAMA2; (+) strand; PAM type: NRG; PAM sequence: CAG
attatataggttgtctgatg

SEQ ID NO: 160057 - DNA, 20 bp, Artificial Sequence
  Description of Artificial Sequence: Synthetic oligonucleotide
  Target: LAMA2; (+) strand; PAM type: NRG; PAM sequence: TGG
ggttgtctgatgcagttttc

SEQ ID NO: 160058 - DNA, 20 bp, Artificial Sequence
  Description of Artificial Sequence: Synthetic oligonucleotide
  Target: LAMA2; (+) strand; PAM type: NRG; PAM sequence: GAG
tttccactacaaaaatactt

SEQ ID NO: 160059 - DNA, 20 bp, Artificial Sequence
  Description of Artificial Sequence: Synthetic oligonucleotide
  Target: LAMA2; (+) strand; PAM type: NRG; PAM sequence: AAG
tacaaaaatacttgagtttt

SEQ ID NO: 160060 - DNA, 20 bp, Artificial Sequence
  Description of Artificial Sequence: Synthetic oligonucleotide
  Target: LAMA2; (+) strand; PAM type: NRG; PAM sequence: TAG
tatttgatgaaacgtgacat

SEQ ID NO: 160061 - DNA, 20 bp, Artificial Sequence
  Description of Artificial Sequence: Synthetic oligonucleotide
  Target: LAMA2; (+) strand; PAM type: NRG; PAM sequence: AAG
aacgtgacattagaaaatgt

SEQ ID NO: 160062 - DNA, 20 bp, Artificial Sequence
  Description of Artificial Sequence: Synthetic oligonucleotide
  Target: LAMA2; (+) strand; PAM type: NRG; PAM sequence: TGG
ttgtcttttaaatcaataat

SEQ ID NO: 160063 - DNA, 20 bp, Artificial Sequence
  Description of Artificial Sequence: Synthetic oligonucleotide
  Target: LAMA2; (+) strand; PAM type: NRG; PAM sequence: AAG
aaaaaccctctcaattatgc

SEQ ID NO: 160064 - DNA, 20 bp, Artificial Sequence
  Description of Artificial Sequence: Synthetic oligonucleotide
  Target: LAMA2; (+) strand; PAM type: NRG; PAM sequence: CAG
tctcaattatgcaagatttt

SEQ ID NO: 160065 - DNA, 20 bp, Artificial Sequence
  Description of Artificial Sequence: Synthetic oligonucleotide
  Target: LAMA2; (+) strand; PAM type: NRG; PAM sequence: TAG
caagattttcagttgaatgt

SEQ ID NO: 160066 - DNA, 20 bp, Artificial Sequence
  Description of Artificial Sequence: Synthetic oligonucleotide
  Target: LAMA2; (+) strand; PAM type: NRG; PAM sequence: AAG
ataccattttcaacatgttt

SEQ ID NO: 160067 - DNA, 20 bp, Artificial Sequence
  Description of Artificial Sequence: Synthetic oligonucleotide
  Target: LAMA2; (+) strand; PAM type: NRG; PAM sequence: AGG
taccattttcaacatgttta

SEQ ID NO: 160068 - DNA, 20 bp, Artificial Sequence
  Description of Artificial Sequence: Synthetic oligonucleotide
  Target: LAMA2; (+) strand; PAM type: NRG; PAM sequence: AAG
ttcaattttttaaaaccctt

SEQ ID NO: 160069 - DNA, 20 bp, Artificial Sequence
  Description of Artificial Sequence: Synthetic oligonucleotide
  Target: LAMA2; (+) strand; PAM type: NRG; PAM sequence: AAG
ttaaaacccttaagtatttg

SEQ ID NO: 160070 - DNA, 20 bp, Artificial Sequence
  Description of Artificial Sequence: Synthetic oligonucleotide
  Target: LAMA2; (+) strand; PAM type: NRG; PAM sequence: TAG
agtatttgaagacataattt

SEQ ID NO: 160071 - DNA, 20 bp, Artificial Sequence
  Description of Artificial Sequence: Synthetic oligonucleotide
  Target: LAMA2; (+) strand; PAM type: NRG; PAM sequence: CAG
agacataattttagttgtat

SEQ ID NO: 160072 - DNA, 20 bp, Artificial Sequence
  Description of Artificial Sequence: Synthetic oligonucleotide
  Target: LAMA2; (+) strand; PAM type: NRG; PAM sequence: GAG
ataattttagttgtatcagt

SEQ ID NO: 160073 - DNA, 20 bp, Artificial Sequence
  Description of Artificial Sequence: Synthetic oligonucleotide
  Target: LAMA2; (+) strand; PAM type: NRG; PAM sequence: AAG
aaataattttacaaaaaaac

SEQ ID NO: 160074 - DNA, 20 bp, Artificial Sequence
  Description of Artificial Sequence: Synthetic oligonucleotide
  Target: LAMA2; (+) strand; PAM type: NRG; PAM sequence: CAG
caaaaaaacaagcaattctt

SEQ ID NO: 160075 - DNA, 20 bp, Artificial Sequence
  Description of Artificial Sequence: Synthetic oligonucleotide
  Target: LAMA2; (+) strand; PAM type: NRG; PAM sequence: TAG
aacaagcaattcttcagtaa

SEQ ID NO: 160076 - DNA, 20 bp, Artificial Sequence
  Description of Artificial Sequence: Synthetic oligonucleotide
  Target: LAMA2; (+) strand; PAM type: NRG; PAM sequence: TAG
gcaattcttcagtaatagct

SEQ ID NO: 160077 - DNA, 20 bp, Artificial Sequence
  Description of Artificial Sequence: Synthetic oligonucleotide
  Target: LAMA2; (+) strand; PAM type: NRG; PAM sequence: TAG
tcttcagtaatagcttagtt

SEQ ID NO: 160078 - DNA, 20 bp, Artificial Sequence
  Description of Artificial Sequence: Synthetic oligonucleotide
  Target: LAMA2; (+) strand; PAM type: NRG; PAM sequence: AAG
tagctaaacttaaaaattga

SEQ ID NO: 160079 - DNA, 20 bp, Artificial Sequence
  Description of Artificial Sequence: Synthetic oligonucleotide
  Target: LAMA2; (+) strand; PAM type: NRG; PAM sequence: AGG
agctaaacttaaaaattgaa

SEQ ID NO: 160080 - DNA, 20 bp, Artificial Sequence
  Description of Artificial Sequence: Synthetic oligonucleotide
  Target: LAMA2; (+) strand; PAM type: NRG; PAM sequence: AAG
taaacttaaaaattgaaagg

SEQ ID NO: 160081 - DNA, 20 bp, Artificial Sequence
  Description of Artificial Sequence: Synthetic oligonucleotide
  Target: LAMA2; (+) strand; PAM type: NRG; PAM sequence: CGG
aagtaaaacaaaaatcaaat

SEQ ID NO: 160082 - DNA, 20 bp, Artificial Sequence
  Description of Artificial Sequence: Synthetic oligonucleotide
  Target: LAMA2; (+) strand; PAM type: NRG; PAM sequence: GGG
agtaaaacaaaaatcaaatc

SEQ ID NO: 160083 - DNA, 20 bp, Artificial Sequence
  Description of Artificial Sequence: Synthetic oligonucleotide
  Target: LAMA2; (+) strand; PAM type: NRG; PAM sequence: GGG
gtaaaacaaaaatcaaatcg

SEQ ID NO: 160084 - DNA, 20 bp, Artificial Sequence
  Description of Artificial Sequence: Synthetic oligonucleotide
  Target: LAMA2; (+) strand; PAM type: NRG; PAM sequence: TGG
ggaaaaaatctttcttcaaa

SEQ ID NO: 160085 - DNA, 20 bp, Artificial Sequence
  Description of Artificial Sequence: Synthetic oligonucleotide
  Target: LAMA2; (+) strand; PAM type: NRG; PAM sequence: AAG
tcccaatatactgcattatt

SEQ ID NO: 160086 - DNA, 20 bp, Artificial Sequence
  Description of Artificial Sequence: Synthetic oligonucleotide
  Target: LAMA2; (+) strand; PAM type: NRG; PAM sequence: AGG
cccaatatactgcattatta

SEQ ID NO: 160087 - DNA, 20 bp, Artificial Sequence
  Description of Artificial Sequence: Synthetic oligonucleotide
  Target: LAMA2; (+) strand; PAM type: NRG; PAM sequence: TAG
attattaaggcaactattca

SEQ ID NO: 160088 - DNA, 20 bp, Artificial Sequence
  Description of Artificial Sequence: Synthetic oligonucleotide
  Target: LAMA2; (+) strand; PAM type: NRG; PAM sequence: AAG
taaggcaactattcatagtg

SEQ ID NO: 160089 - DNA, 20 bp, Artificial Sequence
  Description of Artificial Sequence: Synthetic oligonucleotide
  Target: LAMA2; (+) strand; PAM type: NRG; PAM sequence: AAG
ccttaatgctatcttttaaa

SEQ ID NO: 160090 - DNA, 20 bp, Artificial Sequence
  Description of Artificial Sequence: Synthetic oligonucleotide
  Target: LAMA2; (+) strand; PAM type: NRG; PAM sequence: GAG
gttttgttaaaaataaattt

SEQ ID NO: 160091 - DNA, 20 bp, Artificial Sequence
  Description of Artificial Sequence: Synthetic oligonucleotide
  Target: LAMA2; (+) strand; PAM type: NRG; PAM sequence: AAG
tgttaaaaataaatttgaga

SEQ ID NO: 160092 - DNA, 20 bp, Artificial Sequence
  Description of Artificial Sequence: Synthetic oligonucleotide
  Target: LAMA2; (+) strand; PAM type: NRG; PAM sequence: TAG
agaaagaattttaaataact

SEQ ID NO: 160093 - DNA, 20 bp, Artificial Sequence
  Description of Artificial Sequence: Synthetic oligonucleotide
  Target: LAMA2; (+) strand; PAM type: NRG; PAM sequence: GAG
aaagaattttaaataactta

SEQ ID NO: 160094 - DNA, 20 bp, Artificial Sequence
  Description of Artificial Sequence: Synthetic oligonucleotide
  Target: LAMA2; (+) strand; PAM type: NRG; PAM sequence: AAG
attttaaataacttagagaa

SEQ ID NO: 160095 - DNA, 20 bp, Artificial Sequence
  Description of Artificial Sequence: Synthetic oligonucleotide
  Target: LAMA2; (+) strand; PAM type: NRG; PAM sequence: CAG
agcctgttttcaaatatcac

SEQ ID NO: 160096 - DNA, 20 bp, Artificial Sequence
  Description of Artificial Sequence: Synthetic oligonucleotide
  Target: LAMA2; (+) strand; PAM type: NRG; PAM sequence: CAG
tcaaatatcaccagttacta

SEQ ID NO: 160097 - DNA, 20 bp, Artificial Sequence
  Description of Artificial Sequence: Synthetic oligonucleotide
  Target: LAMA2; (+) strand; PAM type: NRG; PAM sequence: TAG
cagaaatacatatccacatt

SEQ ID NO: 160098 - DNA, 20 bp, Artificial Sequence
  Description of Artificial Sequence: Synthetic oligonucleotide
  Target: LAMA2; (+) strand; PAM type: NRG; PAM sequence: TGG
ccacatttagttgatgaaat

SEQ ID NO: 160099 - DNA, 20 bp, Artificial Sequence
  Description of Artificial Sequence: Synthetic oligonucleotide
  Target: LAMA2; (+) strand; PAM type: NRG; PAM sequence: GAG
ttttctccatgtttaattat

SEQ ID NO: 160100 - DNA, 20 bp, Artificial Sequence
  Description of Artificial Sequence: Synthetic oligonucleotide
  Target: LAMA2; (+) strand; PAM type: NRG; PAM sequence: AAG
tccatgtttaattatgagtc

SEQ ID NO: 160101 - DNA, 20 bp, Artificial Sequence
  Description of Artificial Sequence: Synthetic oligonucleotide
  Target: LAMA2; (+) strand; PAM type: NRG; PAM sequence: AAG
tgtttaattatgagtcaagc

SEQ ID NO: 160102 - DNA, 20 bp, Artificial Sequence
  Description of Artificial Sequence: Synthetic oligonucleotide
  Target: LAMA2; (+) strand; PAM type: NRG; PAM sequence: CAG
tgagtcaagcaagcttctca

SEQ ID NO: 160103 - DNA, 20 bp, Artificial Sequence
  Description of Artificial Sequence: Synthetic oligonucleotide
  Target: LAMA2; (+) strand; PAM type: NRG; PAM sequence: CAG
agcttctcacagatgtaata

SEQ ID NO: 160104 - DNA, 20 bp, Artificial Sequence
  Description of Artificial Sequence: Synthetic oligonucleotide
  Target: LAMA2; (+) strand; PAM type: NRG; PAM sequence: TAG
ttctcacagatgtaatacag

SEQ ID NO: 160105 - DNA, 20 bp, Artificial Sequence
  Description of Artificial Sequence: Synthetic oligonucleotide
  Target: LAMA2; (+) strand; PAM type: NRG; PAM sequence: CAG
tagtgcattgtccaaaccat

SEQ ID NO: 160106 - DNA, 20 bp, Artificial Sequence
  Description of Artificial Sequence: Synthetic oligonucleotide
  Target: LAMA2; (+) strand; PAM type: NRG; PAM sequence: GAG
gtgcattgtccaaaccatca

SEQ ID NO: 160107 - DNA, 20 bp, Artificial Sequence
  Description of Artificial Sequence: Synthetic oligonucleotide
  Target: LAMA2; (+) strand; PAM type: NRG; PAM sequence: GAG
ccaaaccatcagagtccact

SEQ ID NO: 160108 - DNA, 20 bp, Artificial Sequence
  Description of Artificial Sequence: Synthetic oligonucleotide
  Target: LAMA2; (+) strand; PAM type: NRG; PAM sequence: AGG
caaaccatcagagtccactg

SEQ ID NO: 160109 - DNA, 20 bp, Artificial Sequence
  Description of Artificial Sequence: Synthetic oligonucleotide
  Target: LAMA2; (+) strand; PAM type: NRG; PAM sequence: GAG
tgaggccaaaattcatgtct

SEQ ID NO: 160110 - DNA, 20 bp, Artificial Sequence
  Description of Artificial Sequence: Synthetic oligonucleotide
  Target: LAMA2; (+) strand; PAM type: NRG; PAM sequence: AAG
ccaaaattcatgtctgagct

SEQ ID NO: 160111 - DNA, 20 bp, Artificial Sequence
  Description of Artificial Sequence: Synthetic oligonucleotide
  Target: LAMA2; (+) strand; PAM type: NRG; PAM sequence: GAG
aaaattcatgtctgagctaa

SEQ ID NO: 160112 - DNA, 20 bp, Artificial Sequence
  Description of Artificial Sequence: Synthetic oligonucleotide
  Target: LAMA2; (+) strand; PAM type: NRG; PAM sequence: AGG
aaattcatgtctgagctaag

SEQ ID NO: 160113 - DNA, 20 bp, Artificial Sequence
  Description of Artificial Sequence: Synthetic oligonucleotide
  Target: LAMA2; (+) strand; PAM type: NRG; PAM sequence: TAG
atgtctgagctaagaggcca

SEQ ID NO: 160114 - DNA, 20 bp, Artificial Sequence
  Description of Artificial Sequence: Synthetic oligonucleotide
  Target: LAMA2; (+) strand; PAM type: NRG; PAM sequence: CGG
gagctaagaggccatagccc

SEQ ID NO: 160115 - DNA, 20 bp, Artificial Sequence
  Description of Artificial Sequence: Synthetic oligonucleotide
  Target: LAMA2; (+) strand; PAM type: NRG; PAM sequence: GAG
gctaagaggccatagccccg

SEQ ID NO: 160116 - DNA, 20 bp, Artificial Sequence
  Description of Artificial Sequence: Synthetic oligonucleotide
  Target: LAMA2; (+) strand; PAM type: NRG; PAM sequence: AGG
ctaagaggccatagccccgg

SEQ ID NO: 160117 - DNA, 20 bp, Artificial Sequence
  Description of Artificial Sequence: Synthetic oligonucleotide
  Target: LAMA2; (+) strand; PAM type: NRG; PAM sequence: TAG
ccccggaggatttctatgat

SEQ ID NO: 160118 - DNA, 20 bp, Artificial Sequence
  Description of Artificial Sequence: Synthetic oligonucleotide
  Target: LAMA2; (+) strand; PAM type: NRG; PAM sequence: CAG
aggatttctatgattagcca

SEQ ID NO: 160119 - DNA, 20 bp, Artificial Sequence
  Description of Artificial Sequence: Synthetic oligonucleotide
  Target: LAMA2; (+) strand; PAM type: NRG; PAM sequence: CAG
agccacagttcccattaaat

SEQ ID NO: 160120 - DNA, 20 bp, Artificial Sequence
  Description of Artificial Sequence: Synthetic oligonucleotide
  Target: LAMA2; (+) strand; PAM type: NRG; PAM sequence: AAG
cccattaaatcagcaatttc

SEQ ID NO: 160121 - DNA, 20 bp, Artificial Sequence
  Description of Artificial Sequence: Synthetic oligonucleotide
  Target: LAMA2; (+) strand; PAM type: NRG; PAM sequence: TAG
ctgaacaattgatttttacc

SEQ ID NO: 160122 - DNA, 20 bp, Artificial Sequence
  Description of Artificial Sequence: Synthetic oligonucleotide
  Target: LAMA2; (+) strand; PAM type: NRG; PAM sequence: CAG
aattgatttttacctagaat

SEQ ID NO: 160123 - DNA, 20 bp, Artificial Sequence
  Description of Artificial Sequence: Synthetic oligonucleotide
  Target: LAMA2; (+) strand; PAM type: NRG; PAM sequence: TAG
ttccattaaacatatgttat

SEQ ID NO: 160124 - DNA, 20 bp, Artificial Sequence
  Description of Artificial Sequence: Synthetic oligonucleotide
  Target: LAMA2; (+) strand; PAM type: NRG; PAM sequence: AAG
gcaatatcatgtattttctt

SEQ ID NO: 160125 - DNA, 20 bp, Artificial Sequence
  Description of Artificial Sequence: Synthetic oligonucleotide
  Target: LAMA2; (+) strand; PAM type: NRG; PAM sequence: AGG
caatatcatgtattttctta

SEQ ID NO: 160126 - DNA, 20 bp, Artificial Sequence
  Description of Artificial Sequence: Synthetic oligonucleotide
  Target: LAMA2; (+) strand; PAM type: NRG; PAM sequence: AAG
gtattttcttaaggaaaata

SEQ ID NO: 160127 - DNA, 20 bp, Artificial Sequence
  Description of Artificial Sequence: Synthetic oligonucleotide
  Target: LAMA2; (+) strand; PAM type: NRG; PAM sequence: AAG
aggaaaataaagaaaaaatg

SEQ ID NO: 160128 - DNA, 20 bp, Artificial Sequence
  Description of Artificial Sequence: Synthetic oligonucleotide
  Target: LAMA2; (+) strand; PAM type: NRG; PAM sequence: AAG
aaataaagaaaaaatgaagt

SEQ ID NO: 160129 - DNA, 20 bp, Artificial Sequence
  Description of Artificial Sequence: Synthetic oligonucleotide
  Target: LAMA2; (+) strand; PAM type: NRG; PAM sequence: AAG
aatttcaatcatctttttgt

SEQ ID NO: 160130 - DNA, 20 bp, Artificial Sequence
  Description of Artificial Sequence: Synthetic oligonucleotide
  Target: LAMA2; (+) strand; PAM type: NRG; PAM sequence: AAG
gaaactactgtgttgtttat

SEQ ID NO: 160131 - DNA, 20 bp, Artificial Sequence
  Description of Artificial Sequence: Synthetic oligonucleotide
  Target: LAMA2; (+) strand; PAM type: NRG; PAM sequence: TAG
ctactgtgttgtttataagc

SEQ ID NO: 160132 - DNA, 20 bp, Artificial Sequence
  Description of Artificial Sequence: Synthetic oligonucleotide
  Target: LAMA2; (+) strand; PAM type: NRG; PAM sequence: TGG
gtaaaattgaccatttaaca

SEQ ID NO: 160133 - DNA, 20 bp, Artificial Sequence
  Description of Artificial Sequence: Synthetic oligonucleotide
  Target: LAMA2; (+) strand; PAM type: NRG; PAM sequence: TGG
catggaaaaattattcttgc

SEQ ID NO: 160134 - DNA, 20 bp, Artificial Sequence
  Description of Artificial Sequence: Synthetic oligonucleotide
  Target: LAMA2; (+) strand; PAM type: NRG; PAM sequence: CAG
ggaaaaattattcttgctgg

SEQ ID NO: 160135 - DNA, 20 bp, Artificial Sequence
  Description of Artificial Sequence: Synthetic oligonucleotide
  Target: LAMA2; (+) strand; PAM type: NRG; PAM sequence: AGG
gaaaaattattcttgctggc

SEQ ID NO: 160136 - DNA, 20 bp, Artificial Sequence
  Description of Artificial Sequence: Synthetic oligonucleotide
  Target: LAMA2; (+) strand; PAM type: NRG; PAM sequence: GGG
aaaaattattcttgctggca

SEQ ID NO: 160137 - DNA, 20 bp, Artificial Sequence
  Description of Artificial Sequence: Synthetic oligonucleotide
  Target: LAMA2; (+) strand; PAM type: NRG; PAM sequence: GAG
aaattattcttgctggcagg

SEQ ID NO: 160138 - DNA, 20 bp, Artificial Sequence
  Description of Artificial Sequence: Synthetic oligonucleotide
  Target: LAMA2; (+) strand; PAM type: NRG; PAM sequence: CAG
ttattcttgctggcagggag

SEQ ID NO: 160139 - DNA, 20 bp, Artificial Sequence
  Description of Artificial Sequence: Synthetic oligonucleotide
  Target: LAMA2; (+) strand; PAM type: NRG; PAM sequence: TAG
ggagcagactaatgacttcg

SEQ ID NO: 160140 - DNA, 20 bp, Artificial Sequence
  Description of Artificial Sequence: Synthetic oligonucleotide
  Target: LAMA2; (+) strand; PAM type: NRG; PAM sequence: TGG
tgacttcgtagacctatttt

SEQ ID NO: 160141 - DNA, 20 bp, Artificial Sequence
  Description of Artificial Sequence: Synthetic oligonucleotide
  Target: LAMA2; (+) strand; PAM type: NRG; PAM sequence: CAG
tctgatgctcatttctttct

SEQ ID NO: 160142 - DNA, 20 bp, Artificial Sequence
  Description of Artificial Sequence: Synthetic oligonucleotide
  Target: LAMA2; (+) strand; PAM type: NRG; PAM sequence: AAG
catttctttctcagaactgt

SEQ ID NO: 160143 - DNA, 20 bp, Artificial Sequence
  Description of Artificial Sequence: Synthetic oligonucleotide
  Target: LAMA2; (+) strand; PAM type: NRG; PAM sequence: AGG
atttctttctcagaactgta

SEQ ID NO: 160144 - DNA, 20 bp, Artificial Sequence
  Description of Artificial Sequence: Synthetic oligonucleotide
  Target: LAMA2; (+) strand; PAM type: NRG; PAM sequence: CAG
tcagaactgtaaggatcaca

SEQ ID NO: 160145 - DNA, 20 bp, Artificial Sequence
  Description of Artificial Sequence: Synthetic oligonucleotide
  Target: LAMA2; (+) strand; PAM type: NRG; PAM sequence: AGG
cagaactgtaaggatcacac

SEQ ID NO: 160146 - DNA, 20 bp, Artificial Sequence
  Description of Artificial Sequence: Synthetic oligonucleotide
  Target: LAMA2; (+) strand; PAM type: NRG; PAM sequence: TGG
aactgtaaggatcacacagg

SEQ ID NO: 160147 - DNA, 20 bp, Artificial Sequence
  Description of Artificial Sequence: Synthetic oligonucleotide
  Target: LAMA2; (+) strand; PAM type: NRG; PAM sequence: TGG
tattgtgataaatgtcttcc

SEQ ID NO: 160148 - DNA, 20 bp, Artificial Sequence
  Description of Artificial Sequence: Synthetic oligonucleotide
  Target: LAMA2; (+) strand; PAM type: NRG; PAM sequence: TGG
aaatgtcttcctggtttcta

SEQ ID NO: 160149 - DNA, 20 bp, Artificial Sequence
  Description of Artificial Sequence: Synthetic oligonucleotide
  Target: LAMA2; (+) strand; PAM type: NRG; PAM sequence: GAG
gtcttcctggtttctatggc

SEQ ID NO: 160150 - DNA, 20 bp, Artificial Sequence
  Description of Artificial Sequence: Synthetic oligonucleotide
  Target: LAMA2; (+) strand; PAM type: NRG; PAM sequence: AAG
tttctatggcgagcctacta

SEQ ID NO: 160151 - DNA, 20 bp, Artificial Sequence
  Description of Artificial Sequence: Synthetic oligonucleotide
  Target: LAMA2; (+) strand; PAM type: NRG; PAM sequence: AGG
ttctatggcgagcctactaa

SEQ ID NO: 160152 - DNA, 20 bp, Artificial Sequence
  Description of Artificial Sequence: Synthetic oligonucleotide
  Target: LAMA2; (+) strand; PAM type: NRG; PAM sequence: AAG
gcctactaaaggaacctctg

SEQ ID NO: 160153 - DNA, 20 bp, Artificial Sequence
  Description of Artificial Sequence: Synthetic oligonucleotide
  Target: LAMA2; (+) strand; PAM type: NRG; PAM sequence: AAG
cactcaatatcccatccaat

SEQ ID NO: 160154 - DNA, 20 bp, Artificial Sequence
  Description of Artificial Sequence: Synthetic oligonucleotide
  Target: LAMA2; (+) strand; PAM type: NRG; PAM sequence: AAG
caatatcccatccaataagt

SEQ ID NO: 160155 - DNA, 20 bp, Artificial Sequence
  Description of Artificial Sequence: Synthetic oligonucleotide
  Target: LAMA2; (+) strand; PAM type: NRG; PAM sequence: AAG
aacaaacttaccccatgaat

SEQ ID NO: 160156 - DNA, 20 bp, Artificial Sequence
  Description of Artificial Sequence: Synthetic oligonucleotide
  Target: LAMA2; (+) strand; PAM type: NRG; PAM sequence: CAG
acttaccccatgaataagct

SEQ ID NO: 160157 - DNA, 20 bp, Artificial Sequence
  Description of Artificial Sequence: Synthetic oligonucleotide
  Target: LAMA2; (+) strand; PAM type: NRG; PAM sequence: AAG
agctcagcatccatttctgc

SEQ ID NO: 160158 - DNA, 20 bp, Artificial Sequence
  Description of Artificial Sequence: Synthetic oligonucleotide
  Target: LAMA2; (+) strand; PAM type: NRG; PAM sequence: TAG
ttctgcaagtacacttttca

SEQ ID NO: 160159 - DNA, 20 bp, Artificial Sequence
  Description of Artificial Sequence: Synthetic oligonucleotide
  Target: LAMA2; (+) strand; PAM type: NRG; PAM sequence: CAG
atgtaaataaataataaaca

SEQ ID NO: 160160 - DNA, 20 bp, Artificial Sequence
  Description of Artificial Sequence: Synthetic oligonucleotide
  Target: LAMA2; (+) strand; PAM type: NRG; PAM sequence: CAG
aacacagacatgaatttttt

SEQ ID NO: 160161 - DNA, 20 bp, Artificial Sequence
  Description of Artificial Sequence: Synthetic oligonucleotide
  Target: LAMA2; (+) strand; PAM type: NRG; PAM sequence: AGG
acacagacatgaattttttc

SEQ ID NO: 160162 - DNA, 20 bp, Artificial Sequence
  Description of Artificial Sequence: Synthetic oligonucleotide
  Target: LAMA2; (+) strand; PAM type: NRG; PAM sequence: AAG
atatgaattttttcaaacct

SEQ ID NO: 160163 - DNA, 20 bp, Artificial Sequence
  Description of Artificial Sequence: Synthetic oligonucleotide
  Target: LAMA2; (+) strand; PAM type: NRG; PAM sequence: GAG
cctaagatatttaaaactat

SEQ ID NO: 160164 - DNA, 20 bp, Artificial Sequence
  Description of Artificial Sequence: Synthetic oligonucleotide
  Target: LAMA2; (+) strand; PAM type: NRG; PAM sequence: AGG
ctaagatatttaaaactatg

SEQ ID NO: 160165 - DNA, 20 bp, Artificial Sequence
  Description of Artificial Sequence: Synthetic oligonucleotide
  Target: LAMA2; (+) strand; PAM type: NRG; PAM sequence: AAG
ttaaaactatgaggatttct

SEQ ID NO: 160166 - DNA, 20 bp, Artificial Sequence
  Description of Artificial Sequence: Synthetic oligonucleotide
  Target: LAMA2; (+) strand; PAM type: NRG; PAM sequence: TAG
ctaagaatttgtaatttttt

SEQ ID NO: 160167 - DNA, 20 bp, Artificial Sequence
  Description of Artificial Sequence: Synthetic oligonucleotide
  Target: LAMA2; (+) strand; PAM type: NRG; PAM sequence: TAG
atttgtaatttttttagctc

SEQ ID NO: 160168 - DNA, 20 bp, Artificial Sequence
  Description of Artificial Sequence: Synthetic oligonucleotide
  Target: LAMA2; (+) strand; PAM type: NRG; PAM sequence: TGG
aatttttttagctctagttt

SEQ ID NO: 160169 - DNA, 20 bp, Artificial Sequence
  Description of Artificial Sequence: Synthetic oligonucleotide
  Target: LAMA2; (+) strand; PAM type: NRG; PAM sequence: AAG
gttttggtgatttaatttct

SEQ ID NO: 160170 - DNA, 20 bp, Artificial Sequence
  Description of Artificial Sequence: Synthetic oligonucleotide
  Target: LAMA2; (+) strand; PAM type: NRG; PAM sequence: GAG
tttggtgatttaatttctaa

SEQ ID NO: 160171 - DNA, 20 bp, Artificial Sequence
  Description of Artificial Sequence: Synthetic oligonucleotide
  Target: LAMA2; (+) strand; PAM type: NRG; PAM sequence: TAG
ggtgatttaatttctaagag

SEQ ID NO: 160172 - DNA, 20 bp, Artificial Sequence
  Description of Artificial Sequence: Synthetic oligonucleotide
  Target: LAMA2; (+) strand; PAM type: NRG; PAM sequence: TAG
ttctaagagtagaactcaaa

SEQ ID NO: 160173 - DNA, 20 bp, Artificial Sequence
  Description of Artificial Sequence: Synthetic oligonucleotide
  Target: LAMA2; (+) strand; PAM type: NRG; PAM sequence: AAG
gaatttctacaccaattcca

SEQ ID NO: 160174 - DNA, 20 bp, Artificial Sequence
  Description of Artificial Sequence: Synthetic oligonucleotide
  Target: LAMA2; (+) strand; PAM type: NRG; PAM sequence: CAG
tgcatgtacacacctacaca

SEQ ID NO: 160175 - DNA, 20 bp, Artificial Sequence
  Description of Artificial Sequence: Synthetic oligonucleotide
  Target: LAMA2; (+) strand; PAM type: NRG; PAM sequence: AAG
ccatcttcataccttaataa

SEQ ID NO: 160176 - DNA, 20 bp, Artificial Sequence
  Description of Artificial Sequence: Synthetic oligonucleotide
  Target: LAMA2; (+) strand; PAM type: NRG; PAM sequence: AGG
catcttcataccttaataaa

SEQ ID NO: 160177 - DNA, 20 bp, Artificial Sequence
  Description of Artificial Sequence: Synthetic oligonucleotide
  Target: LAMA2; (+) strand; PAM type: NRG; PAM sequence: CAG
ttaataaaaggatataaata

SEQ ID NO: 160178 - DNA, 20 bp, Artificial Sequence
  Description of Artificial Sequence: Synthetic oligonucleotide
  Target: LAMA2; (+) strand; PAM type: NRG; PAM sequence: TGG
ggatataaatacagctaatt

SEQ ID NO: 160179 - DNA, 20 bp, Artificial Sequence
  Description of Artificial Sequence: Synthetic oligonucleotide
  Target: LAMA2; (+) strand; PAM type: NRG; PAM sequence: GGG
gatataaatacagctaattt

SEQ ID NO: 160180 - DNA, 20 bp, Artificial Sequence
  Description of Artificial Sequence: Synthetic oligonucleotide
  Target: LAMA2; (+) strand; PAM type: NRG; PAM sequence: TGG
cactatttttttgtgaatct

SEQ ID NO: 160181 - DNA, 20 bp, Artificial Sequence
  Description of Artificial Sequence: Synthetic oligonucleotide
  Target: LAMA2; (+) strand; PAM type: NRG; PAM sequence: GGG
actatttttttgtgaatctt

SEQ ID NO: 160182 - DNA, 20 bp, Artificial Sequence
  Description of Artificial Sequence: Synthetic oligonucleotide
  Target: LAMA2; (+) strand; PAM type: NRG; PAM sequence: AAG
tttttttgtgaatcttgggc

SEQ ID NO: 160183 - DNA, 20 bp, Artificial Sequence
  Description of Artificial Sequence: Synthetic oligonucleotide
  Target: LAMA2; (+) strand; PAM type: NRG; PAM sequence: AAG
caagtcgtaaacctctcaaa

SEQ ID NO: 160184 - DNA, 20 bp, Artificial Sequence
  Description of Artificial Sequence: Synthetic oligonucleotide
  Target: LAMA2; (+) strand; PAM type: NRG; PAM sequence: AAG
acctctcaaaaagtaaaatg

SEQ ID NO: 160185 - DNA, 20 bp, Artificial Sequence
  Description of Artificial Sequence: Synthetic oligonucleotide
  Target: LAMA2; (+) strand; PAM type: NRG; PAM sequence: AGG
cctctcaaaaagtaaaatga

SEQ ID NO: 160186 - DNA, 20 bp, Artificial Sequence
  Description of Artificial Sequence: Synthetic oligonucleotide
  Target: LAMA2; (+) strand; PAM type: NRG; PAM sequence: GGG
ctctcaaaaagtaaaatgaa

SEQ ID NO: 160187 - DNA, 20 bp, Artificial Sequence
  Description of Artificial Sequence: Synthetic oligonucleotide
  Target: LAMA2; (+) strand; PAM type: NRG; PAM sequence: AAG
gactgatttaactgactttt

SEQ ID NO: 160188 - DNA, 20 bp, Artificial Sequence
  Description of Artificial Sequence: Synthetic oligonucleotide
  Target: LAMA2; (+) strand; PAM type: NRG; PAM sequence: TAG
cccattctatcccttctttt

SEQ ID NO: 160189 - DNA, 20 bp, Artificial Sequence
  Description of Artificial Sequence: Synthetic oligonucleotide
  Target: LAMA2; (+) strand; PAM type: NRG; PAM sequence: TAG
agaaaaattcgttgttcacc

SEQ ID NO: 160190 - DNA, 20 bp, Artificial Sequence
  Description of Artificial Sequence: Synthetic oligonucleotide
  Target: LAMA2; (+) strand; PAM type: NRG; PAM sequence: TAG
cacctagaacaaccacctct

SEQ ID NO: 160191 - DNA, 20 bp, Artificial Sequence
  Description of Artificial Sequence: Synthetic oligonucleotide
  Target: LAMA2; (+) strand; PAM type: NRG; PAM sequence: GAG
cctagaacaaccacctctta

SEQ ID NO: 160192 - DNA, 20 bp, Artificial Sequence
  Description of Artificial Sequence: Synthetic oligonucleotide
  Target: LAMA2; (+) strand; PAM type: NRG; PAM sequence: CAG
agaacaaccacctcttagag

SEQ ID NO: 160193 - DNA, 20 bp, Artificial Sequence
  Description of Artificial Sequence: Synthetic oligonucleotide
  Target: LAMA2; (+) strand; PAM type: NRG; PAM sequence: AAG
ttaaaaaaacaaacaacaac

SEQ ID NO: 160194 - DNA, 20 bp, Artificial Sequence
  Description of Artificial Sequence: Synthetic oligonucleotide
  Target: LAMA2; (+) strand; PAM type: NRG; PAM sequence: AAG
aaaaacaaacaacaacaaga

SEQ ID NO: 160195 - DNA, 20 bp, Artificial Sequence
  Description of Artificial Sequence: Synthetic oligonucleotide
  Target: LAMA2; (+) strand; PAM type: NRG; PAM sequence: TAG
ttcctcatttccttaccttt

SEQ ID NO: 160196 - DNA, 20 bp, Artificial Sequence
  Description of Artificial Sequence: Synthetic oligonucleotide
  Target: LAMA2; (+) strand; PAM type: NRG; PAM sequence: GAG
cctcatttccttacctttta

SEQ ID NO: 160197 - DNA, 20 bp, Artificial Sequence
  Description of Artificial Sequence: Synthetic oligonucleotide
  Target: LAMA2; (+) strand; PAM type: NRG; PAM sequence: AGG
ctcatttccttaccttttag

SEQ ID NO: 160198 - DNA, 20 bp, Artificial Sequence
  Description of Artificial Sequence: Synthetic oligonucleotide
  Target: LAMA2; (+) strand; PAM type: NRG; PAM sequence: CAG
ttttagaggaatgctatatc

SEQ ID NO: 160199 - DNA, 20 bp, Artificial Sequence
  Description of Artificial Sequence: Synthetic oligonucleotide
  Target: LAMA2; (+) strand; PAM type: NRG; PAM sequence: CAG
tgcttgaattcacattccct

SEQ ID NO: 160200 - DNA, 20 bp, Artificial Sequence
  Description of Artificial Sequence: Synthetic oligonucleotide
  Target: LAMA2; (+) strand; PAM type: NRG; PAM sequence: AGG
gcttgaattcacattccctc

SEQ ID NO: 160201 - DNA, 20 bp, Artificial Sequence
  Description of Artificial Sequence: Synthetic oligonucleotide
  Target: LAMA2; (+) strand; PAM type: NRG; PAM sequence: GGG
cttgaattcacattccctca

SEQ ID NO: 160202 - DNA, 20 bp, Artificial Sequence
  Description of Artificial Sequence: Synthetic oligonucleotide
  Target: LAMA2; (+) strand; PAM type: NRG; PAM sequence: CAG
gaattcacattccctcaggg

SEQ ID NO: 160203 - DNA, 20 bp, Artificial Sequence
  Description of Artificial Sequence: Synthetic oligonucleotide
  Target: LAMA2; (+) strand; PAM type: NRG; PAM sequence: CAG
tccctcagggcagcctctct

SEQ ID NO: 160204 - DNA, 20 bp, Artificial Sequence
  Description of Artificial Sequence: Synthetic oligonucleotide
  Target: LAMA2; (+) strand; PAM type: NRG; PAM sequence: CAG
gggcagcctctctcagtaaa

SEQ ID NO: 160205 - DNA, 20 bp, Artificial Sequence
  Description of Artificial Sequence: Synthetic oligonucleotide
  Target: LAMA2; (+) strand; PAM type: NRG; PAM sequence: AAG
gcctctctcagtaaacagct

SEQ ID NO: 160206 - DNA, 20 bp, Artificial Sequence
  Description of Artificial Sequence: Synthetic oligonucleotide
  Target: LAMA2; (+) strand; PAM type: NRG; PAM sequence: TGG
atgttgttttgtttttaaat

SEQ ID NO: 160207 - DNA, 20 bp, Artificial Sequence
  Description of Artificial Sequence: Synthetic oligonucleotide
  Target: LAMA2; (+) strand; PAM type: NRG; PAM sequence: GGG
tgttgttttgtttttaaatt

SEQ ID NO: 160208 - DNA, 20 bp, Artificial Sequence
  Description of Artificial Sequence: Synthetic oligonucleotide
  Target: LAMA2; (+) strand; PAM type: NRG; PAM sequence: GAG
tttttttttttttttttttt

SEQ ID NO: 160209 - DNA, 20 bp, Artificial Sequence
  Description of Artificial Sequence: Synthetic oligonucleotide
  Target: LAMA2; (+) strand; PAM type: NRG; PAM sequence: CAG
ttttttttttttttttgaga

SEQ ID NO: 160210 - DNA, 20 bp, Artificial Sequence
  Description of Artificial Sequence: Synthetic oligonucleotide
  Target: LAMA2; (+) strand; PAM type: NRG; PAM sequence: GAG
ttttttttttttttgagaca

SEQ ID NO: 160211 - DNA, 20 bp, Artificial Sequence
  Description of Artificial Sequence: Synthetic oligonucleotide
  Target: LAMA2; (+) strand; PAM type: NRG; PAM sequence: CAG
cagagtctcgctctgttgcc

SEQ ID NO: 160212 - DNA, 20 bp, Artificial Sequence
  Description of Artificial Sequence: Synthetic oligonucleotide
  Target: LAMA2; (+) strand; PAM type: NRG; PAM sequence: AGG
agagtctcgctctgttgccc

SEQ ID NO: 160213 - DNA, 20 bp, Artificial Sequence
  Description of Artificial Sequence: Synthetic oligonucleotide
  Target: LAMA2; (+) strand; PAM type: NRG; PAM sequence: TAG
tctcgctctgttgcccaggc

SEQ ID NO: 160214 - DNA, 20 bp, Artificial Sequence
  Description of Artificial Sequence: Synthetic oligonucleotide
  Target: LAMA2; (+) strand; PAM type: NRG; PAM sequence: GAG
tcgctctgttgcccaggcta

SEQ ID NO: 160215 - DNA, 20 bp, Artificial Sequence
  Description of Artificial Sequence: Synthetic oligonucleotide
  Target: LAMA2; (+) strand; PAM type: NRG; PAM sequence: CAG
ctgttgcccaggctagagtg

SEQ ID NO: 160216 - DNA, 20 bp, Artificial Sequence
  Description of Artificial Sequence: Synthetic oligonucleotide
  Target: LAMA2; (+) strand; PAM type: NRG; PAM sequence: TGG
ttgcccaggctagagtgcag

SEQ ID NO: 160217 - DNA, 20 bp, Artificial Sequence
  Description of Artificial Sequence: Synthetic oligonucleotide
  Target: LAMA2; (+) strand; PAM type: NRG; PAM sequence: TGG
agagtgcagtggtgcaatct

SEQ ID NO: 160218 - DNA, 20 bp, Artificial Sequence
  Description of Artificial Sequence: Synthetic oligonucleotide
  Target: LAMA2; (+) strand; PAM type: NRG; PAM sequence: AAG
gtgcaatcttggctcactgc

SEQ ID NO: 160219 - DNA, 20 bp, Artificial Sequence
  Description of Artificial Sequence: Synthetic oligonucleotide
  Target: LAMA2; (+) strand; PAM type: NRG; PAM sequence: CGG
tcactgcaagctctgcctcc

SEQ ID NO: 160220 - DNA, 20 bp, Artificial Sequence
  Description of Artificial Sequence: Synthetic oligonucleotide
  Target: LAMA2; (+) strand; PAM type: NRG; PAM sequence: GGG
cactgcaagctctgcctccc

SEQ ID NO: 160221 - DNA, 20 bp, Artificial Sequence
  Description of Artificial Sequence: Synthetic oligonucleotide
  Target: LAMA2; (+) strand; PAM type: NRG; PAM sequence: AAG
aagctctgcctcccgggttc

SEQ ID NO: 160222 - DNA, 20 bp, Artificial Sequence
  Description of Artificial Sequence: Synthetic oligonucleotide
  Target: LAMA2; (+) strand; PAM type: NRG; PAM sequence: CAG
ttcaagccattctcctgcct

SEQ ID NO: 160223 - DNA, 20 bp, Artificial Sequence
  Description of Artificial Sequence: Synthetic oligonucleotide
  Target: LAMA2; (+) strand; PAM type: NRG; PAM sequence: TGG
agccattctcctgcctcagc

SEQ ID NO: 160224 - DNA, 20 bp, Artificial Sequence
  Description of Artificial Sequence: Synthetic oligonucleotide
  Target: LAMA2; (+) strand; PAM type: NRG; PAM sequence: CAG
ctcctgcctcagctggacta

SEQ ID NO: 160225 - DNA, 20 bp, Artificial Sequence
  Description of Artificial Sequence: Synthetic oligonucleotide
  Target: LAMA2; (+) strand; PAM type: NRG; PAM sequence: AGG
tcctgcctcagctggactac

SEQ ID NO: 160226 - DNA, 20 bp, Artificial Sequence
  Description of Artificial Sequence: Synthetic oligonucleotide
  Target: LAMA2; (+) strand; PAM type: NRG; PAM sequence: AAG
aatcaacaatttttactcaa

SEQ ID NO: 160227 - DNA, 20 bp, Artificial Sequence
  Description of Artificial Sequence: Synthetic oligonucleotide
  Target: LAMA2; (+) strand; PAM type: NRG; PAM sequence: AAG
ataactatacttttaaataa

SEQ ID NO: 160228 - DNA, 20 bp, Artificial Sequence
  Description of Artificial Sequence: Synthetic oligonucleotide
  Target: LAMA2; (+) strand; PAM type: NRG; PAM sequence: AGG
taactatacttttaaataaa

SEQ ID NO: 160229 - DNA, 20 bp, Artificial Sequence
  Description of Artificial Sequence: Synthetic oligonucleotide
  Target: LAMA2; (+) strand; PAM type: NRG; PAM sequence: AAG
taaaaggaaattattttctg

SEQ ID NO: 160230 - DNA, 20 bp, Artificial Sequence
  Description of Artificial Sequence: Synthetic oligonucleotide
  Target: LAMA2; (+) strand; PAM type: NRG; PAM sequence: AAG
ttttctgaagaactctctta

SEQ ID NO: 160231 - DNA, 20 bp, Artificial Sequence
  Description of Artificial Sequence: Synthetic oligonucleotide
  Target: LAMA2; (+) strand; PAM type: NRG; PAM sequence: AGG
tttctgaagaactctcttaa

SEQ ID NO: 160232 - DNA, 20 bp, Artificial Sequence
  Description of Artificial Sequence: Synthetic oligonucleotide
  Target: LAMA2; (+) strand; PAM type: NRG; PAM sequence: GAG
tgaagaactctcttaaaggt

SEQ ID NO: 160233 - DNA, 20 bp, Artificial Sequence
  Description of Artificial Sequence: Synthetic oligonucleotide
  Target: LAMA2; (+) strand; PAM type: NRG; PAM sequence: TAG
aactctcttaaaggtgagct

SEQ ID NO: 160234 - DNA, 20 bp, Artificial Sequence
  Description of Artificial Sequence: Synthetic oligonucleotide
  Target: LAMA2; (+) strand; PAM type: NRG; PAM sequence: AAG
aggtgagcttagtgcttaat

SEQ ID NO: 160235 - DNA, 20 bp, Artificial Sequence
  Description of Artificial Sequence: Synthetic oligonucleotide
  Target: LAMA2; (+) strand; PAM type: NRG; PAM sequence: AGG
ggtgagcttagtgcttaata

SEQ ID NO: 160236 - DNA, 20 bp, Artificial Sequence
  Description of Artificial Sequence: Synthetic oligonucleotide
  Target: LAMA2; (+) strand; PAM type: NRG; PAM sequence: CAG
atatcgtattgtacactttc

SEQ ID NO: 160237 - DNA, 20 bp, Artificial Sequence
  Description of Artificial Sequence: Synthetic oligonucleotide
  Target: LAMA2; (+) strand; PAM type: NRG; PAM sequence: TAG
gtacactttccagctatctc

SEQ ID NO: 160238 - DNA, 20 bp, Artificial Sequence
  Description of Artificial Sequence: Synthetic oligonucleotide
  Target: LAMA2; (+) strand; PAM type: NRG; PAM sequence: AGG
tacactttccagctatctct

SEQ ID NO: 160239 - DNA, 20 bp, Artificial Sequence
  Description of Artificial Sequence: Synthetic oligonucleotide
  Target: LAMA2; (+) strand; PAM type: NRG; PAM sequence: CAG
aggcactgtgacaacactga

SEQ ID NO: 160240 - DNA, 20 bp, Artificial Sequence
  Description of Artificial Sequence: Synthetic oligonucleotide
  Target: LAMA2; (+) strand; PAM type: NRG; PAM sequence: GAG
gcactgtgacaacactgaca

SEQ ID NO: 160241 - DNA, 20 bp, Artificial Sequence
  Description of Artificial Sequence: Synthetic oligonucleotide
  Target: LAMA2; (+) strand; PAM type: NRG; PAM sequence: AAG
aaaaattttcaatgatcttt

SEQ ID NO: 160242 - DNA, 20 bp, Artificial Sequence
  Description of Artificial Sequence: Synthetic oligonucleotide
  Target: LAMA2; (+) strand; PAM type: NRG; PAM sequence: AGG
aaaattttcaatgatcttta

SEQ ID NO: 160243 - DNA, 20 bp, Artificial Sequence
  Description of Artificial Sequence: Synthetic oligonucleotide
  Target: LAMA2; (+) strand; PAM type: NRG; PAM sequence: GGG
aaattttcaatgatctttaa

SEQ ID NO: 160244 - DNA, 20 bp, Artificial Sequence
  Description of Artificial Sequence: Synthetic oligonucleotide
  Target: LAMA2; (+) strand; PAM type: NRG; PAM sequence: CAG
gatctttaagggaaatctgt

SEQ ID NO: 160245 - DNA, 20 bp, Artificial Sequence
  Description of Artificial Sequence: Synthetic oligonucleotide
  Target: LAMA2; (+) strand; PAM type: NRG; PAM sequence: TAG
taagggaaatctgtcagcta

SEQ ID NO: 160246 - DNA, 20 bp, Artificial Sequence
  Description of Artificial Sequence: Synthetic oligonucleotide
  Target: LAMA2; (+) strand; PAM type: NRG; PAM sequence: TAG
agctatagtcttttaatgtg

SEQ ID NO: 160247 - DNA, 20 bp, Artificial Sequence
  Description of Artificial Sequence: Synthetic oligonucleotide
  Target: LAMA2; (+) strand; PAM type: NRG; PAM sequence: AAG
tttaatgtgtagatgtgatc

SEQ ID NO: 160248 - DNA, 20 bp, Artificial Sequence
  Description of Artificial Sequence: Synthetic oligonucleotide
  Target: LAMA2; (+) strand; PAM type: NRG; PAM sequence: TAG
aatgtgtagatgtgatcaag

SEQ ID NO: 160249 - DNA, 20 bp, Artificial Sequence
  Description of Artificial Sequence: Synthetic oligonucleotide
  Target: LAMA2; (+) strand; PAM type: NRG; PAM sequence: AGG
atgtgtagatgtgatcaagt

SEQ ID NO: 160250 - DNA, 20 bp, Artificial Sequence
  Description of Artificial Sequence: Synthetic oligonucleotide
  Target: LAMA2; (+) strand; PAM type: NRG; PAM sequence: CAG
tcatacttcaaactcttacc

SEQ ID NO: 160251 - DNA, 20 bp, Artificial Sequence
  Description of Artificial Sequence: Synthetic oligonucleotide
  Target: LAMA2; (+) strand; PAM type: NRG; PAM sequence: TGG
cagaatgcgcctaattaaaa

SEQ ID NO: 160252 - DNA, 20 bp, Artificial Sequence
  Description of Artificial Sequence: Synthetic oligonucleotide
  Target: LAMA2; (+) strand; PAM type: NRG; PAM sequence: TAG
taattaaaatggtcttttgt

SEQ ID NO: 160253 - DNA, 20 bp, Artificial Sequence
  Description of Artificial Sequence: Synthetic oligonucleotide
  Target: LAMA2; (+) strand; PAM type: NRG; PAM sequence: AAG
ttagattcaatgaatactat

SEQ ID NO: 160254 - DNA, 20 bp, Artificial Sequence
  Description of Artificial Sequence: Synthetic oligonucleotide
  Target: LAMA2; (+) strand; PAM type: NRG; PAM sequence: AAG
tcaatgaatactataagcta

SEQ ID NO: 160255 - DNA, 20 bp, Artificial Sequence
  Description of Artificial Sequence: Synthetic oligonucleotide
  Target: LAMA2; (+) strand; PAM type: NRG; PAM sequence: GAG
tactataagctaaagacttt

SEQ ID NO: 160256 - DNA, 20 bp, Artificial Sequence
  Description of Artificial Sequence: Synthetic oligonucleotide
  Target: LAMA2; (+) strand; PAM type: NRG; PAM sequence: AAG
tttgagataattctaacatt

SEQ ID NO: 160257 - DNA, 20 bp, Artificial Sequence
  Description of Artificial Sequence: Synthetic oligonucleotide
  Target: LAMA2; (+) strand; PAM type: NRG; PAM sequence: CAG
tcccaatgaccttctttact

SEQ ID NO: 160258 - DNA, 20 bp, Artificial Sequence
  Description of Artificial Sequence: Synthetic oligonucleotide
  Target: LAMA2; (+) strand; PAM type: NRG; PAM sequence: TGG
tttttaccttactcattgtt

SEQ ID NO: 160259 - DNA, 20 bp, Artificial Sequence
  Description of Artificial Sequence: Synthetic oligonucleotide
  Target: LAMA2; (+) strand; PAM type: NRG; PAM sequence: AAG
accttactcattgtttggaa

SEQ ID NO: 160260 - DNA, 20 bp, Artificial Sequence
  Description of Artificial Sequence: Synthetic oligonucleotide
  Target: LAMA2; (+) strand; PAM type: NRG; PAM sequence: AAG
ttactcattgtttggaaaag

SEQ ID NO: 160261 - DNA, 20 bp, Artificial Sequence
  Description of Artificial Sequence: Synthetic oligonucleotide
  Target: LAMA2; (+) strand; PAM type: NRG; PAM sequence: GAG
actcattgtttggaaaagaa

SEQ ID NO: 160262 - DNA, 20 bp, Artificial Sequence
  Description of Artificial Sequence: Synthetic oligonucleotide
  Target: LAMA2; (+) strand; PAM type: NRG; PAM sequence: AAG
attgtttggaaaagaagaga

SEQ ID NO: 160263 - DNA, 20 bp, Artificial Sequence
  Description of Artificial Sequence: Synthetic oligonucleotide
  Target: LAMA2; (+) strand; PAM type: NRG; PAM sequence: AAG
aaagcactactatttaataa

SEQ ID NO: 160264 - DNA, 20 bp, Artificial Sequence
  Description of Artificial Sequence: Synthetic oligonucleotide
  Target: LAMA2; (+) strand; PAM type: NRG; PAM sequence: CAG
gcactactatttaataaaag

SEQ ID NO: 160265 - DNA, 20 bp, Artificial Sequence
  Description of Artificial Sequence: Synthetic oligonucleotide
  Target: LAMA2; (+) strand; PAM type: NRG; PAM sequence: TAG
aaaagcagactactatattc

SEQ ID NO: 160266 - DNA, 20 bp, Artificial Sequence
  Description of Artificial Sequence: Synthetic oligonucleotide
  Target: LAMA2; (+) strand; PAM type: NRG; PAM sequence: AGG
aaagcagactactatattct

SEQ ID NO: 160267 - DNA, 20 bp, Artificial Sequence
  Description of Artificial Sequence: Synthetic oligonucleotide
  Target: LAMA2; (+) strand; PAM type: NRG; PAM sequence: TGG
tctaggccaaacactgtatt

SEQ ID NO: 160268 - DNA, 20 bp, Artificial Sequence
  Description of Artificial Sequence: Synthetic oligonucleotide
  Target: LAMA2; (+) strand; PAM type: NRG; PAM sequence: CAG
tttcaccttcaactataact

SEQ ID NO: 160269 - DNA, 20 bp, Artificial Sequence
  Description of Artificial Sequence: Synthetic oligonucleotide
  Target: LAMA2; (+) strand; PAM type: NRG; PAM sequence: AAG
accttcaactataactcagt

SEQ ID NO: 160270 - DNA, 20 bp, Artificial Sequence
  Description of Artificial Sequence: Synthetic oligonucleotide
  Target: LAMA2; (+) strand; PAM type: NRG; PAM sequence: AGG
ccttcaactataactcagta

SEQ ID NO: 160271 - DNA, 20 bp, Artificial Sequence
  Description of Artificial Sequence: Synthetic oligonucleotide
  Target: LAMA2; (+) strand; PAM type: NRG; PAM sequence: TAG
tcaactataactcagtaagg

SEQ ID NO: 160272 - DNA, 20 bp, Artificial Sequence
  Description of Artificial Sequence: Synthetic oligonucleotide
  Target: LAMA2; (+) strand; PAM type: NRG; PAM sequence: TAG
atattattatcctcattgta

SEQ ID NO: 160273 - DNA, 20 bp, Artificial Sequence
  Description of Artificial Sequence: Synthetic oligonucleotide
  Target: LAMA2; (+) strand; PAM type: NRG; PAM sequence: AAG
ttatcctcattgtatagatt

SEQ ID NO: 160274 - DNA, 20 bp, Artificial Sequence
  Description of Artificial Sequence: Synthetic oligonucleotide
  Target: LAMA2; (+) strand; PAM type: NRG; PAM sequence: AAG
attgtatagattaagaaatg

SEQ ID NO: 160275 - DNA, 20 bp, Artificial Sequence
  Description of Artificial Sequence: Synthetic oligonucleotide
  Target: LAMA2; (+) strand; PAM type: NRG; PAM sequence: AGG
ttgtatagattaagaaatga

SEQ ID NO: 160276 - DNA, 20 bp, Artificial Sequence
  Description of Artificial Sequence: Synthetic oligonucleotide
  Target: LAMA2; (+) strand; PAM type: NRG; PAM sequence: TAG
gattaagaaatgaaggccat

SEQ ID NO: 160277 - DNA, 20 bp, Artificial Sequence
  Description of Artificial Sequence: Synthetic oligonucleotide
  Target: LAMA2; (+) strand; PAM type: NRG; PAM sequence: TAG
taagaaatgaaggccattag

SEQ ID NO: 160278 - DNA, 20 bp, Artificial Sequence
  Description of Artificial Sequence: Synthetic oligonucleotide
  Target: LAMA2; (+) strand; PAM type: NRG; PAM sequence: TGG
gaaggccattagtagaaaaa

SEQ ID NO: 160279 - DNA, 20 bp, Artificial Sequence
  Description of Artificial Sequence: Synthetic oligonucleotide
  Target: LAMA2; (+) strand; PAM type: NRG; PAM sequence: TGG
tggcattatgatgccaattc

SEQ ID NO: 160280 - DNA, 20 bp, Artificial Sequence
  Description of Artificial Sequence: Synthetic oligonucleotide
  Target: LAMA2; (+) strand; PAM type: NRG; PAM sequence: GAG
gcattatgatgccaattctg

SEQ ID NO: 160281 - DNA, 20 bp, Artificial Sequence
  Description of Artificial Sequence: Synthetic oligonucleotide
  Target: LAMA2; (+) strand; PAM type: NRG; PAM sequence: CAG
tatgatgccaattctggagc

SEQ ID NO: 160282 - DNA, 20 bp, Artificial Sequence
  Description of Artificial Sequence: Synthetic oligonucleotide
  Target: LAMA2; (+) strand; PAM type: NRG; PAM sequence: TGG
aattctggagccagactctt

SEQ ID NO: 160283 - DNA, 20 bp, Artificial Sequence
  Description of Artificial Sequence: Synthetic oligonucleotide
  Target: LAMA2; (+) strand; PAM type: NRG; PAM sequence: TGG
agactctttggtttaaatgc

SEQ ID NO: 160284 - DNA, 20 bp, Artificial Sequence
  Description of Artificial Sequence: Synthetic oligonucleotide
  Target: LAMA2; (+) strand; PAM type: NRG; PAM sequence: GGG
gactctttggtttaaatgct

SEQ ID NO: 160285 - DNA, 20 bp, Artificial Sequence
  Description of Artificial Sequence: Synthetic oligonucleotide
  Target: LAMA2; (+) strand; PAM type: NRG; PAM sequence: CAG
atgctgggttccatactttc

SEQ ID NO: 160286 - DNA, 20 bp, Artificial Sequence
  Description of Artificial Sequence: Synthetic oligonucleotide
  Target: LAMA2; (+) strand; PAM type: NRG; PAM sequence: TAG
actttccagctgtgccactt

SEQ ID NO: 160287 - DNA, 20 bp, Artificial Sequence
  Description of Artificial Sequence: Synthetic oligonucleotide
  Target: LAMA2; (+) strand; PAM type: NRG; PAM sequence: AGG
ctttccagctgtgccacttt

SEQ ID NO: 160288 - DNA, 20 bp, Artificial Sequence
  Description of Artificial Sequence: Synthetic oligonucleotide
  Target: LAMA2; (+) strand; PAM type: NRG; PAM sequence: AAG
ccagctgtgccactttaggc

SEQ ID NO: 160289 - DNA, 20 bp, Artificial Sequence
  Description of Artificial Sequence: Synthetic oligonucleotide
  Target: LAMA2; (+) strand; PAM type: NRG; PAM sequence: TAG
tgcctcaattttgtcatcat

SEQ ID NO: 160290 - DNA, 20 bp, Artificial Sequence
  Description of Artificial Sequence: Synthetic oligonucleotide
  Target: LAMA2; (+) strand; PAM type: NRG; PAM sequence: TAG
tttgtcatcattagttataa

SEQ ID NO: 160291 - DNA, 20 bp, Artificial Sequence
  Description of Artificial Sequence: Synthetic oligonucleotide
  Target: LAMA2; (+) strand; PAM type: NRG; PAM sequence: AGG
ttgtcatcattagttataat

SEQ ID NO: 160292 - DNA, 20 bp, Artificial Sequence
  Description of Artificial Sequence: Synthetic oligonucleotide
  Target: LAMA2; (+) strand; PAM type: NRG; PAM sequence: TAG
tagttataataggactctca

SEQ ID NO: 160293 - DNA, 20 bp, Artificial Sequence
  Description of Artificial Sequence: Synthetic oligonucleotide
  Target: LAMA2; (+) strand; PAM type: NRG; PAM sequence: AGG
agttataataggactctcat

SEQ ID NO: 160294 - DNA, 20 bp, Artificial Sequence
  Description of Artificial Sequence: Synthetic oligonucleotide
  Target: LAMA2; (+) strand; PAM type: NRG; PAM sequence: GGG
gttataataggactctcata

SEQ ID NO: 160295 - DNA, 20 bp, Artificial Sequence
  Description of Artificial Sequence: Synthetic oligonucleotide
  Target: LAMA2; (+) strand; PAM type: NRG; PAM sequence: TGG
ggactctcatagggttgatg

SEQ ID NO: 160296 - DNA, 20 bp, Artificial Sequence
  Description of Artificial Sequence: Synthetic oligonucleotide
  Target: LAMA2; (+) strand; PAM type: NRG; PAM sequence: GGG
gactctcatagggttgatgt

SEQ ID NO: 160297 - DNA, 20 bp, Artificial Sequence
  Description of Artificial Sequence: Synthetic oligonucleotide
  Target: LAMA2; (+) strand; PAM type: NRG; PAM sequence: AAG
ctcatagggttgatgtggga

SEQ ID NO: 160298 - DNA, 20 bp, Artificial Sequence
  Description of Artificial Sequence: Synthetic oligonucleotide
  Target: LAMA2; (+) strand; PAM type: NRG; PAM sequence: TGG
taaaccacctaaactgtgac

SEQ ID NO: 160299 - DNA, 20 bp, Artificial Sequence
  Description of Artificial Sequence: Synthetic oligonucleotide
  Target: LAMA2; (+) strand; PAM type: NRG; PAM sequence: AAG
ggatatgatgaacccaatct

SEQ ID NO: 160300 - DNA, 20 bp, Artificial Sequence
  Description of Artificial Sequence: Synthetic oligonucleotide
  Target: LAMA2; (+) strand; PAM type: NRG; PAM sequence: GAG
atatgatgaacccaatctaa

SEQ ID NO: 160301 - DNA, 20 bp, Artificial Sequence
  Description of Artificial Sequence: Synthetic oligonucleotide
  Target: LAMA2; (+) strand; PAM type: NRG; PAM sequence: CAG
ctgattgttattaacctgct

SEQ ID NO: 160302 - DNA, 20 bp, Artificial Sequence
  Description of Artificial Sequence: Synthetic oligonucleotide
  Target: LAMA2; (+) strand; PAM type: NRG; PAM sequence: GAG
gattgttattaacctgctca

SEQ ID NO: 160303 - DNA, 20 bp, Artificial Sequence
  Description of Artificial Sequence: Synthetic oligonucleotide
  Target: LAMA2; (+) strand; PAM type: NRG; PAM sequence: AAG
ttaacctgctcagagtcata

SEQ ID NO: 160304 - DNA, 20 bp, Artificial Sequence
  Description of Artificial Sequence: Synthetic oligonucleotide
  Target: LAMA2; (+) strand; PAM type: NRG; PAM sequence: AAG
ctcagagtcataaagtatta

SEQ ID NO: 160305 - DNA, 20 bp, Artificial Sequence
  Description of Artificial Sequence: Synthetic oligonucleotide
  Target: LAMA2; (+) strand; PAM type: NRG; PAM sequence: CAG
gtcataaagtattaaagtat

SEQ ID NO: 160306 - DNA, 20 bp, Artificial Sequence
  Description of Artificial Sequence: Synthetic oligonucleotide
  Target: LAMA2; (+) strand; PAM type: NRG; PAM sequence: GAG
cataaagtattaaagtatca

SEQ ID NO: 160307 - DNA, 20 bp, Artificial Sequence
  Description of Artificial Sequence: Synthetic oligonucleotide
  Target: LAMA2; (+) strand; PAM type: NRG; PAM sequence: TGG
aagtattaaagtatcagagt

SEQ ID NO: 160308 - DNA, 20 bp, Artificial Sequence
  Description of Artificial Sequence: Synthetic oligonucleotide
  Target: LAMA2; (+) strand; PAM type: NRG; PAM sequence: TAG
aagtatcagagttggaattt

SEQ ID NO: 160309 - DNA, 20 bp, Artificial Sequence
  Description of Artificial Sequence: Synthetic oligonucleotide
  Target: LAMA2; (+) strand; PAM type: NRG; PAM sequence: CGG
atgtgctttccaaatctcta

SEQ ID NO: 160310 - DNA, 20 bp, Artificial Sequence
  Description of Artificial Sequence: Synthetic oligonucleotide
  Target: LAMA2; (+) strand; PAM type: NRG; PAM sequence: AAG
aatctctacggtctacaatg

SEQ ID NO: 160311 - DNA, 20 bp, Artificial Sequence
  Description of Artificial Sequence: Synthetic oligonucleotide
  Target: LAMA2; (+) strand; PAM type: NRG; PAM sequence: AAG
aaaaatacacactgcatttt

SEQ ID NO: 160312 - DNA, 20 bp, Artificial Sequence
  Description of Artificial Sequence: Synthetic oligonucleotide
  Target: LAMA2; (+) strand; PAM type: NRG; PAM sequence: AAG
attttaagtgataacactaa

SEQ ID NO: 160313 - DNA, 20 bp, Artificial Sequence
  Description of Artificial Sequence: Synthetic oligonucleotide
  Target: LAMA2; (+) strand; PAM type: NRG; PAM sequence: CAG
ttaagtgataacactaaaag

SEQ ID NO: 160314 - DNA, 20 bp, Artificial Sequence
  Description of Artificial Sequence: Synthetic oligonucleotide
  Target: LAMA2; (+) strand; PAM type: NRG; PAM sequence: TGG
aaaagcagtaattaattcat

SEQ ID NO: 160315 - DNA, 20 bp, Artificial Sequence
  Description of Artificial Sequence: Synthetic oligonucleotide
  Target: LAMA2; (+) strand; PAM type: NRG; PAM sequence: AAG
cagtaattaattcattggat

SEQ ID NO: 160316 - DNA, 20 bp, Artificial Sequence
  Description of Artificial Sequence: Synthetic oligonucleotide
  Target: LAMA2; (+) strand; PAM type: NRG; PAM sequence: TAG
attggataagtcaatttatc

SEQ ID NO: 160317 - DNA, 20 bp, Artificial Sequence
  Description of Artificial Sequence: Synthetic oligonucleotide
  Target: LAMA2; (+) strand; PAM type: NRG; PAM sequence: AAG
gataagtcaatttatctagc

SEQ ID NO: 160318 - DNA, 20 bp, Artificial Sequence
  Description of Artificial Sequence: Synthetic oligonucleotide
  Target: LAMA2; (+) strand; PAM type: NRG; PAM sequence: AGG
ataagtcaatttatctagca

SEQ ID NO: 160319 - DNA, 20 bp, Artificial Sequence
  Description of Artificial Sequence: Synthetic oligonucleotide
  Target: LAMA2; (+) strand; PAM type: NRG; PAM sequence: GAG
aatttatctagcaaggtttt

SEQ ID NO: 160320 - DNA, 20 bp, Artificial Sequence
  Description of Artificial Sequence: Synthetic oligonucleotide
  Target: LAMA2; (+) strand; PAM type: NRG; PAM sequence: AAG
tagcaaggttttgagaaaat

SEQ ID NO: 160321 - DNA, 20 bp, Artificial Sequence
  Description of Artificial Sequence: Synthetic oligonucleotide
  Target: LAMA2; (+) strand; PAM type: NRG; PAM sequence: TGG
gttttgagaaaataagacat

SEQ ID NO: 160322 - DNA, 20 bp, Artificial Sequence
  Description of Artificial Sequence: Synthetic oligonucleotide
  Target: LAMA2; (+) strand; PAM type: NRG; PAM sequence: CAG
aataagacattggtttaatg

SEQ ID NO: 160323 - DNA, 20 bp, Artificial Sequence
  Description of Artificial Sequence: Synthetic oligonucleotide
  Target: LAMA2; (+) strand; PAM type: NRG; PAM sequence: AGG
ataagacattggtttaatgc

SEQ ID NO: 160324 - DNA, 20 bp, Artificial Sequence
  Description of Artificial Sequence: Synthetic oligonucleotide
  Target: LAMA2; (+) strand; PAM type: NRG; PAM sequence: GGG
taagacattggtttaatgca

SEQ ID NO: 160325 - DNA, 20 bp, Artificial Sequence
  Description of Artificial Sequence: Synthetic oligonucleotide
  Target: LAMA2; (+) strand; PAM type: NRG; PAM sequence: GGG
aagacattggtttaatgcag

SEQ ID NO: 160326 - DNA, 20 bp, Artificial Sequence
  Description of Artificial Sequence: Synthetic oligonucleotide
  Target: LAMA2; (+) strand; PAM type: NRG; PAM sequence: TAG
caggggtcctcaaccatcta

SEQ ID NO: 160327 - DNA, 20 bp, Artificial Sequence
  Description of Artificial Sequence: Synthetic oligonucleotide
  Target: LAMA2; (+) strand; PAM type: NRG; PAM sequence: TAG
ctcaaccatctatagcctgt

SEQ ID NO: 160328 - DNA, 20 bp, Artificial Sequence
  Description of Artificial Sequence: Synthetic oligonucleotide
  Target: LAMA2; (+) strand; PAM type: NRG; PAM sequence: AGG
tcaaccatctatagcctgtt

SEQ ID NO: 160329 - DNA, 20 bp, Artificial Sequence
  Description of Artificial Sequence: Synthetic oligonucleotide
  Target: LAMA2; (+) strand; PAM type: NRG; PAM sequence: CGG
atctatagcctgttaggaac

SEQ ID NO: 160330 - DNA, 20 bp, Artificial Sequence
  Description of Artificial Sequence: Synthetic oligonucleotide
  Target: LAMA2; (+) strand; PAM type: NRG; PAM sequence: GGG
tctatagcctgttaggaacc

SEQ ID NO: 160331 - DNA, 20 bp, Artificial Sequence
  Description of Artificial Sequence: Synthetic oligonucleotide
  Target: LAMA2; (+) strand; PAM type: NRG; PAM sequence: TAG
ctgttaggaaccgggctgcc

SEQ ID NO: 160332 - DNA, 20 bp, Artificial Sequence
  Description of Artificial Sequence: Synthetic oligonucleotide
  Target: LAMA2; (+) strand; PAM type: NRG; PAM sequence: CAG
ttaggaaccgggctgcctag

SEQ ID NO: 160333 - DNA, 20 bp, Artificial Sequence
  Description of Artificial Sequence: Synthetic oligonucleotide
  Target: LAMA2; (+) strand; PAM type: NRG; PAM sequence: AGG
taggaaccgggctgcctagc

SEQ ID NO: 160334 - DNA, 20 bp, Artificial Sequence
  Description of Artificial Sequence: Synthetic oligonucleotide
  Target: LAMA2; (+) strand; PAM type: NRG; PAM sequence: AAG
gaaccgggctgcctagcagg

SEQ ID NO: 160335 - DNA, 20 bp, Artificial Sequence
  Description of Artificial Sequence: Synthetic oligonucleotide
  Target: LAMA2; (+) strand; PAM type: NRG; PAM sequence: GAG
cgggctgcctagcaggaagt

SEQ ID NO: 160336 - DNA, 20 bp, Artificial Sequence
  Description of Artificial Sequence: Synthetic oligonucleotide
  Target: LAMA2; (+) strand; PAM type: NRG; PAM sequence: TGG
gctgcctagcaggaagtgag

SEQ ID NO: 160337 - DNA, 20 bp, Artificial Sequence
  Description of Artificial Sequence: Synthetic oligonucleotide
  Target: LAMA2; (+) strand; PAM type: NRG; PAM sequence: TGG
cctagcaggaagtgagtggt

SEQ ID NO: 160338 - DNA, 20 bp, Artificial Sequence
  Description of Artificial Sequence: Synthetic oligonucleotide
  Target: LAMA2; (+) strand; PAM type: NRG; PAM sequence: GAG
agtggttggcattaccacct

SEQ ID NO: 160339 - DNA, 20 bp, Artificial Sequence
  Description of Artificial Sequence: Synthetic oligonucleotide
  Target: LAMA2; (+) strand; PAM type: NRG; PAM sequence: CAG
ttggcattaccacctgagct

SEQ ID NO: 160340 - DNA, 20 bp, Artificial Sequence
  Description of Artificial Sequence: Synthetic oligonucleotide
  Target: LAMA2; (+) strand; PAM type: NRG; PAM sequence: CAG
acctgagctcagcctcctaa

SEQ ID NO: 160341 - DNA, 20 bp, Artificial Sequence
  Description of Artificial Sequence: Synthetic oligonucleotide
  Target: LAMA2; (+) strand; PAM type: NRG; PAM sequence: CAG
agctcagcctcctaacagat

SEQ ID NO: 160342 - DNA, 20 bp, Artificial Sequence
  Description of Artificial Sequence: Synthetic oligonucleotide
  Target: LAMA2; (+) strand; PAM type: NRG; PAM sequence: AGG
gctcagcctcctaacagatc

SEQ ID NO: 160343 - DNA, 20 bp, Artificial Sequence
  Description of Artificial Sequence: Synthetic oligonucleotide
  Target: LAMA2; (+) strand; PAM type: NRG; PAM sequence: CAG
cagcctcctaacagatcagg

SEQ ID NO: 160344 - DNA, 20 bp, Artificial Sequence
  Description of Artificial Sequence: Synthetic oligonucleotide
  Target: LAMA2; (+) strand; PAM type: NRG; PAM sequence: AGG
agcctcctaacagatcaggc

SEQ ID NO: 160345 - DNA, 20 bp, Artificial Sequence
  Description of Artificial Sequence: Synthetic oligonucleotide
  Target: LAMA2; (+) strand; PAM type: NRG; PAM sequence: TAG
ctaacagatcaggcaggcat

SEQ ID NO: 160346 - DNA, 20 bp, Artificial Sequence
  Description of Artificial Sequence: Synthetic oligonucleotide
  Target: LAMA2; (+) strand; PAM type: NRG; PAM sequence: TAG
aggcaggcattagattctca

SEQ ID NO: 160347 - DNA, 20 bp, Artificial Sequence
  Description of Artificial Sequence: Synthetic oligonucleotide
  Target: LAMA2; (+) strand; PAM type: NRG; PAM sequence: AAG
caggcattagattctcatag

SEQ ID NO: 160348 - DNA, 20 bp, Artificial Sequence
  Description of Artificial Sequence: Synthetic oligonucleotide
  Target: LAMA2; (+) strand; PAM type: NRG; PAM sequence: GAG
ctattgcgaactgcacctgc

SEQ ID NO: 160349 - DNA, 20 bp, Artificial Sequence
  Description of Artificial Sequence: Synthetic oligonucleotide
  Target: LAMA2; (+) strand; PAM type: NRG; PAM sequence: AGG
tattgcgaactgcacctgcg

SEQ ID NO: 160350 - DNA, 20 bp, Artificial Sequence
  Description of Artificial Sequence: Synthetic oligonucleotide
  Target: LAMA2; (+) strand; PAM type: NRG; PAM sequence: GGG
attgcgaactgcacctgcga

SEQ ID NO: 160351 - DNA, 20 bp, Artificial Sequence
  Description of Artificial Sequence: Synthetic oligonucleotide
  Target: LAMA2; (+) strand; PAM type: NRG; PAM sequence: TAG
aactgcacctgcgagggatc

SEQ ID NO: 160352 - DNA, 20 bp, Artificial Sequence
  Description of Artificial Sequence: Synthetic oligonucleotide
  Target: LAMA2; (+) strand; PAM type: NRG; PAM sequence: GAG
ctagcttgtatgctccttat

SEQ ID NO: 160353 - DNA, 20 bp, Artificial Sequence
  Description of Artificial Sequence: Synthetic oligonucleotide
  Target: LAMA2; (+) strand; PAM type: NRG; PAM sequence: GAG
agcttgtatgctccttatga

SEQ ID NO: 160354 - DNA, 20 bp, Artificial Sequence
  Description of Artificial Sequence: Synthetic oligonucleotide
  Target: LAMA2; (+) strand; PAM type: NRG; PAM sequence: TGG
tgatgcctgatgatctgacg

SEQ ID NO: 160355 - DNA, 20 bp, Artificial Sequence
  Description of Artificial Sequence: Synthetic oligonucleotide
  Target: LAMA2; (+) strand; PAM type: NRG; PAM sequence: CAG
cctgatgatctgacgtggaa

SEQ ID NO: 160356 - DNA, 20 bp, Artificial Sequence
  Description of Artificial Sequence: Synthetic oligonucleotide
  Target: LAMA2; (+) strand; PAM type: NRG; PAM sequence: TGG
aaactcctcccctgcatctg

SEQ ID NO: 160357 - DNA, 20 bp, Artificial Sequence
  Description of Artificial Sequence: Synthetic oligonucleotide
  Target: LAMA2; (+) strand; PAM type: NRG; PAM sequence: AAG
ggaaaaattgtctccaacaa

SEQ ID NO: 160358 - DNA, 20 bp, Artificial Sequence
  Description of Artificial Sequence: Synthetic oligonucleotide
  Target: LAMA2; (+) strand; PAM type: NRG; PAM sequence: AAG
aaaattgtctccaacaaaag

SEQ ID NO: 160359 - DNA, 20 bp, Artificial Sequence
  Description of Artificial Sequence: Synthetic oligonucleotide
  Target: LAMA2; (+) strand; PAM type: NRG; PAM sequence: TGG
tctccaacaaaagaagtacc

SEQ ID NO: 160360 - DNA, 20 bp, Artificial Sequence
  Description of Artificial Sequence: Synthetic oligonucleotide
  Target: LAMA2; (+) strand; PAM type: NRG; PAM sequence: TGG
gtacctggtgccaaaaattt

SEQ ID NO: 160361 - DNA, 20 bp, Artificial Sequence
  Description of Artificial Sequence: Synthetic oligonucleotide
  Target: LAMA2; (+) strand; PAM type: NRG; PAM sequence: GGG
tacctggtgccaaaaatttt

SEQ ID NO: 160362 - DNA, 20 bp, Artificial Sequence
  Description of Artificial Sequence: Synthetic oligonucleotide
  Target: LAMA2; (+) strand; PAM type: NRG; PAM sequence: GGG
acctggtgccaaaaattttg

SEQ ID NO: 160363 - DNA, 20 bp, Artificial Sequence
  Description of Artificial Sequence: Synthetic oligonucleotide
  Target: LAMA2; (+) strand; PAM type: NRG; PAM sequence: TGG
ccaaaaattttggggaccac

SEQ ID NO: 160364 - DNA, 20 bp, Artificial Sequence
  Description of Artificial Sequence: Synthetic oligonucleotide
  Target: LAMA2; (+) strand; PAM type: NRG; PAM sequence: TAG
gaccactggttaatgtatgt

SEQ ID NO: 160365 - DNA, 20 bp, Artificial Sequence
  Description of Artificial Sequence: Synthetic oligonucleotide
  Target: LAMA2; (+) strand; PAM type: NRG; PAM sequence: CAG
ggttaatgtatgttagtgat

SEQ ID NO: 160366 - DNA, 20 bp, Artificial Sequence
  Description of Artificial Sequence: Synthetic oligonucleotide
  Target: LAMA2; (+) strand; PAM type: NRG; PAM sequence: CAG
gttagtgatcagaacatttc

SEQ ID NO: 160367 - DNA, 20 bp, Artificial Sequence
  Description of Artificial Sequence: Synthetic oligonucleotide
  Target: LAMA2; (+) strand; PAM type: NRG; PAM sequence: AGG
ttagtgatcagaacatttcc

SEQ ID NO: 160368 - DNA, 20 bp, Artificial Sequence
  Description of Artificial Sequence: Synthetic oligonucleotide
  Target: LAMA2; (+) strand; PAM type: NRG; PAM sequence: GGG
tagtgatcagaacatttcca

SEQ ID NO: 160369 - DNA, 20 bp, Artificial Sequence
  Description of Artificial Sequence: Synthetic oligonucleotide
  Target: LAMA2; (+) strand; PAM type: NRG; PAM sequence: AAG
tcagaacatttccagggcct

SEQ ID NO: 160370 - DNA, 20 bp, Artificial Sequence
  Description of Artificial Sequence: Synthetic oligonucleotide
  Target: LAMA2; (+) strand; PAM type: NRG; PAM sequence: AGG
cagaacatttccagggccta

SEQ ID NO: 160371 - DNA, 20 bp, Artificial Sequence
  Description of Artificial Sequence: Synthetic oligonucleotide
  Target: LAMA2; (+) strand; PAM type: NRG; PAM sequence: GAG
atttccagggcctaaggcat

SEQ ID NO: 160372 - DNA, 20 bp, Artificial Sequence
  Description of Artificial Sequence: Synthetic oligonucleotide
  Target: LAMA2; (+) strand; PAM type: NRG; PAM sequence: TGG
gcctaaggcatgagcctgaa

SEQ ID NO: 160373 - DNA, 20 bp, Artificial Sequence
  Description of Artificial Sequence: Synthetic oligonucleotide
  Target: LAMA2; (+) strand; PAM type: NRG; PAM sequence: GGG
cctaaggcatgagcctgaat

SEQ ID NO: 160374 - DNA, 20 bp, Artificial Sequence
  Description of Artificial Sequence: Synthetic oligonucleotide
  Target: LAMA2; (+) strand; PAM type: NRG; PAM sequence: AAG
cctgaatgggctcaaaactg

SEQ ID NO: 160375 - DNA, 20 bp, Artificial Sequence
  Description of Artificial Sequence: Synthetic oligonucleotide
  Target: LAMA2; (+) strand; PAM type: NRG; PAM sequence: AAG
ctgaagattctttaacaacc

SEQ ID NO: 160376 - DNA, 20 bp, Artificial Sequence
  Description of Artificial Sequence: Synthetic oligonucleotide
  Target: LAMA2; (+) strand; PAM type: NRG; PAM sequence: AGG
tgaagattctttaacaacca

SEQ ID NO: 160377 - DNA, 20 bp, Artificial Sequence
  Description of Artificial Sequence: Synthetic oligonucleotide
  Target: LAMA2; (+) strand; PAM type: NRG; PAM sequence: TAG
tctttaacaaccaaggatgt

SEQ ID NO: 160378 - DNA, 20 bp, Artificial Sequence
  Description of Artificial Sequence: Synthetic oligonucleotide
  Target: LAMA2; (+) strand; PAM type: NRG; PAM sequence: GAG
tttaacaaccaaggatgtta

SEQ ID NO: 160379 - DNA, 20 bp, Artificial Sequence
  Description of Artificial Sequence: Synthetic oligonucleotide
  Target: LAMA2; (+) strand; PAM type: NRG; PAM sequence: AAG
aacaaccaaggatgttagag

SEQ ID NO: 160380 - DNA, 20 bp, Artificial Sequence
  Description of Artificial Sequence: Synthetic oligonucleotide
  Target: LAMA2; (+) strand; PAM type: NRG; PAM sequence: GAG
caaccaaggatgttagagaa

SEQ ID NO: 160381 - DNA, 20 bp, Artificial Sequence
  Description of Artificial Sequence: Synthetic oligonucleotide
  Target: LAMA2; (+) strand; PAM type: NRG; PAM sequence: AGG
aaccaaggatgttagagaag

SEQ ID NO: 160382 - DNA, 20 bp, Artificial Sequence
  Description of Artificial Sequence: Synthetic oligonucleotide
  Target: LAMA2; (+) strand; PAM type: NRG; PAM sequence: AAG
caaggatgttagagaagagg

SEQ ID NO: 160383 - DNA, 20 bp, Artificial Sequence
  Description of Artificial Sequence: Synthetic oligonucleotide
  Target: LAMA2; (+) strand; PAM type: NRG; PAM sequence: AAG
ggatgttagagaagaggaag

SEQ ID NO: 160384 - DNA, 20 bp, Artificial Sequence
  Description of Artificial Sequence: Synthetic oligonucleotide
  Target: LAMA2; (+) strand; PAM type: NRG; PAM sequence: AGG
gatgttagagaagaggaaga

SEQ ID NO: 160385 - DNA, 20 bp, Artificial Sequence
  Description of Artificial Sequence: Synthetic oligonucleotide
  Target: LAMA2; (+) strand; PAM type: NRG; PAM sequence: AAG
ttagagaagaggaagaaggc

SEQ ID NO: 160386 - DNA, 20 bp, Artificial Sequence
  Description of Artificial Sequence: Synthetic oligonucleotide
  Target: LAMA2; (+) strand; PAM type: NRG; PAM sequence: GAG
agagaagaggaagaaggcaa

SEQ ID NO: 160387 - DNA, 20 bp, Artificial Sequence
  Description of Artificial Sequence: Synthetic oligonucleotide
  Target: LAMA2; (+) strand; PAM type: NRG; PAM sequence: GAG
agaagaggaagaaggcaaga

SEQ ID NO: 160388 - DNA, 20 bp, Artificial Sequence
  Description of Artificial Sequence: Synthetic oligonucleotide
  Target: LAMA2; (+) strand; PAM type: NRG; PAM sequence: TGG
aaggcaagagagaaacctgt

SEQ ID NO: 160389 - DNA, 20 bp, Artificial Sequence
  Description of Artificial Sequence: Synthetic oligonucleotide
  Target: LAMA2; (+) strand; PAM type: NRG; PAM sequence: TAG
ctgttggaaaataattacta

SEQ ID NO: 160390 - DNA, 20 bp, Artificial Sequence
  Description of Artificial Sequence: Synthetic oligonucleotide
  Target: LAMA2; (+) strand; PAM type: NRG; PAM sequence: AGG
tgttggaaaataattactat

SEQ ID NO: 160391 - DNA, 20 bp, Artificial Sequence
  Description of Artificial Sequence: Synthetic oligonucleotide
  Target: LAMA2; (+) strand; PAM type: NRG; PAM sequence: GAG
ttggaaaataattactatag

SEQ ID NO: 160392 - DNA, 20 bp, Artificial Sequence
  Description of Artificial Sequence: Synthetic oligonucleotide
  Target: LAMA2; (+) strand; PAM type: NRG; PAM sequence: AAG
aatatattccttcataatta

SEQ ID NO: 160393 - DNA, 20 bp, Artificial Sequence
  Description of Artificial Sequence: Synthetic oligonucleotide
  Target: LAMA2; (+) strand; PAM type: NRG; PAM sequence: AGG
atatattccttcataattaa

SEQ ID NO: 160394 - DNA, 20 bp, Artificial Sequence
  Description of Artificial Sequence: Synthetic oligonucleotide
  Target: LAMA2; (+) strand; PAM type: NRG; PAM sequence: AAG
ttcataattaaaggctactc

SEQ ID NO: 160395 - DNA, 20 bp, Artificial Sequence
  Description of Artificial Sequence: Synthetic oligonucleotide
  Target: LAMA2; (+) strand; PAM type: NRG; PAM sequence: TAG
aaggctactcaagcctatga

SEQ ID NO: 160396 - DNA, 20 bp, Artificial Sequence
  Description of Artificial Sequence: Synthetic oligonucleotide
  Target: LAMA2; (+) strand; PAM type: NRG; PAM sequence: TGG
atgacacaaaacctgcactt

SEQ ID NO: 160397 - DNA, 20 bp, Artificial Sequence
  Description of Artificial Sequence: Synthetic oligonucleotide
  Target: LAMA2; (+) strand; PAM type: NRG; PAM sequence: AAG
tgcactttggtatatatgcg

SEQ ID NO: 160398 - DNA, 20 bp, Artificial Sequence
  Description of Artificial Sequence: Synthetic oligonucleotide
  Target: LAMA2; (+) strand; PAM type: NRG; PAM sequence: AGG
gcactttggtatatatgcga

SEQ ID NO: 160399 - DNA, 20 bp, Artificial Sequence
  Description of Artificial Sequence: Synthetic oligonucleotide
  Target: LAMA2; (+) strand; PAM type: NRG; PAM sequence: GGG
cactttggtatatatgcgaa

SEQ ID NO: 160400 - DNA, 20 bp, Artificial Sequence
  Description of Artificial Sequence: Synthetic oligonucleotide
  Target: LAMA2; (+) strand; PAM type: NRG; PAM sequence: TAG
ttggtatatatgcgaagggt

SEQ ID NO: 160401 - DNA, 20 bp, Artificial Sequence
  Description of Artificial Sequence: Synthetic oligonucleotide
  Target: LAMA2; (+) strand; PAM type: NRG; PAM sequence: TGG
cgaagggttagatcacccaa

SEQ ID NO: 160402 - DNA, 20 bp, Artificial Sequence
  Description of Artificial Sequence: Synthetic oligonucleotide
  Target: LAMA2; (+) strand; PAM type: NRG; PAM sequence: AAG
agggttagatcacccaatgg

SEQ ID NO: 160403 - DNA, 20 bp, Artificial Sequence
  Description of Artificial Sequence: Synthetic oligonucleotide
  Target: LAMA2; (+) strand; PAM type: NRG; PAM sequence: TGG
gaagacctacttgtttgcca

SEQ ID NO: 160404 - DNA, 20 bp, Artificial Sequence
  Description of Artificial Sequence: Synthetic oligonucleotide
  Target: LAMA2; (+) strand; PAM type: NRG; PAM sequence: TGG
acttgtttgccatggctgaa

SEQ ID NO: 160405 - DNA, 20 bp, Artificial Sequence
  Description of Artificial Sequence: Synthetic oligonucleotide
  Target: LAMA2; (+) strand; PAM type: NRG; PAM sequence: GAG
ttcacgactaacttgcattt

SEQ ID NO: 160406 - DNA, 20 bp, Artificial Sequence
  Description of Artificial Sequence: Synthetic oligonucleotide
  Target: LAMA2; (+) strand; PAM type: NRG; PAM sequence: AGG
tcacgactaacttgcatttg

SEQ ID NO: 160407 - DNA, 20 bp, Artificial Sequence
  Description of Artificial Sequence: Synthetic oligonucleotide
  Target: LAMA2; (+) strand; PAM type: NRG; PAM sequence: AAG
gactaacttgcatttgagga

SEQ ID NO: 160408 - DNA, 20 bp, Artificial Sequence
  Description of Artificial Sequence: Synthetic oligonucleotide
  Target: LAMA2; (+) strand; PAM type: NRG; PAM sequence: CAG
taacttgcatttgaggaaag

SEQ ID NO: 160409 - DNA, 20 bp, Artificial Sequence
  Description of Artificial Sequence: Synthetic oligonucleotide
  Target: LAMA2; (+) strand; PAM type: NRG; PAM sequence: AAG
cttgcatttgaggaaagcag

SEQ ID NO: 160410 - DNA, 20 bp, Artificial Sequence
  Description of Artificial Sequence: Synthetic oligonucleotide
  Target: LAMA2; (+) strand; PAM type: NRG; PAM sequence: TGG
gaaagcagaagtattgcatc

SEQ ID NO: 160411 - DNA, 20 bp, Artificial Sequence
  Description of Artificial Sequence: Synthetic oligonucleotide
  Target: LAMA2; (+) strand; PAM type: NRG; PAM sequence: CAG
ctcgtattgcatctccttct

SEQ ID NO: 160412 - DNA, 20 bp, Artificial Sequence
  Description of Artificial Sequence: Synthetic oligonucleotide
  Target: LAMA2; (+) strand; PAM type: NRG; PAM sequence: AAG
attgcatctccttctcagcc

SEQ ID NO: 160413 - DNA, 20 bp, Artificial Sequence
  Description of Artificial Sequence: Synthetic oligonucleotide
  Target: LAMA2; (+) strand; PAM type: NRG; PAM sequence: GAG
cttctcagccaagatgtcat

SEQ ID NO: 160414 - DNA, 20 bp, Artificial Sequence
  Description of Artificial Sequence: Synthetic oligonucleotide
  Target: LAMA2; (+) strand; PAM type: NRG; PAM sequence: TAG
agccaagatgtcatgagcat

SEQ ID NO: 160415 - DNA, 20 bp, Artificial Sequence
  Description of Artificial Sequence: Synthetic oligonucleotide
  Target: LAMA2; (+) strand; PAM type: NRG; PAM sequence: CAG
cattagcaccactatcaatc

SEQ ID NO: 160416 - DNA, 20 bp, Artificial Sequence
  Description of Artificial Sequence: Synthetic oligonucleotide
  Target: LAMA2; (+) strand; PAM type: NRG; PAM sequence: CAG
tagcaccactatcaatccag

SEQ ID NO: 160417 - DNA, 20 bp, Artificial Sequence
  Description of Artificial Sequence: Synthetic oligonucleotide
  Target: LAMA2; (+) strand; PAM type: NRG; PAM sequence: GAG
gcaccactatcaatccagca

SEQ ID NO: 160418 - DNA, 20 bp, Artificial Sequence
  Description of Artificial Sequence: Synthetic oligonucleotide
  Target: LAMA2; (+) strand; PAM type: NRG; PAM sequence: TGG
cactatcaatccagcagagc

SEQ ID NO: 160419 - DNA, 20 bp, Artificial Sequence
  Description of Artificial Sequence: Synthetic oligonucleotide
  Target: LAMA2; (+) strand; PAM type: NRG; PAM sequence: CAG
ccattgcatcatgtgaattc

SEQ ID NO: 160420 - DNA, 20 bp, Artificial Sequence
  Description of Artificial Sequence: Synthetic oligonucleotide
  Target: LAMA2; (+) strand; PAM type: NRG; PAM sequence: TAG
aattccagctgaatacatat

SEQ ID NO: 160421 - DNA, 20 bp, Artificial Sequence
  Description of Artificial Sequence: Synthetic oligonucleotide
  Target: LAMA2; (+) strand; PAM type: NRG; PAM sequence: GAG
ttagaattatataattgatt

SEQ ID NO: 160422 - DNA, 20 bp, Artificial Sequence
  Description of Artificial Sequence: Synthetic oligonucleotide
  Target: LAMA2; (+) strand; PAM type: NRG; PAM sequence: TGG
gattgagtatgcaaacccta

SEQ ID NO: 160423 - DNA, 20 bp, Artificial Sequence
  Description of Artificial Sequence: Synthetic oligonucleotide
  Target: LAMA2; (+) strand; PAM type: NRG; PAM sequence: AAG
aaccctatggatttaccctc

SEQ ID NO: 160424 - DNA, 20 bp, Artificial Sequence
  Description of Artificial Sequence: Synthetic oligonucleotide
  Target: LAMA2; (+) strand; PAM type: NRG; PAM sequence: CAG
gaccaacattactataaatg

SEQ ID NO: 160425 - DNA, 20 bp, Artificial Sequence
  Description of Artificial Sequence: Synthetic oligonucleotide
  Target: LAMA2; (+) strand; PAM type: NRG; PAM sequence: GAG
ccaacattactataaatgca

SEQ ID NO: 160426 - DNA, 20 bp, Artificial Sequence
  Description of Artificial Sequence: Synthetic oligonucleotide
  Target: LAMA2; (+) strand; PAM type: NRG; PAM sequence: AGG
caacattactataaatgcag

SEQ ID NO: 160427 - DNA, 20 bp, Artificial Sequence
  Description of Artificial Sequence: Synthetic oligonucleotide
  Target: LAMA2; (+) strand; PAM type: NRG; PAM sequence: TAG
tataaatgcagaggaaacat

SEQ ID NO: 160428 - DNA, 20 bp, Artificial Sequence
  Description of Artificial Sequence: Synthetic oligonucleotide
  Target: LAMA2; (+) strand; PAM type: NRG; PAM sequence: AGG
ataaatgcagaggaaacatt

SEQ ID NO: 160429 - DNA, 20 bp, Artificial Sequence
  Description of Artificial Sequence: Synthetic oligonucleotide
  Target: LAMA2; (+) strand; PAM type: NRG; PAM sequence: GGG
taaatgcagaggaaacatta

SEQ ID NO: 160430 - DNA, 20 bp, Artificial Sequence
  Description of Artificial Sequence: Synthetic oligonucleotide
  Target: LAMA2; (+) strand; PAM type: NRG; PAM sequence: GAG
aatgcagaggaaacattagg

SEQ ID NO: 160431 - DNA, 20 bp, Artificial Sequence
  Description of Artificial Sequence: Synthetic oligonucleotide
  Target: LAMA2; (+) strand; PAM type: NRG; PAM sequence: TGG
attagggagataattttgct

SEQ ID NO: 160432 - DNA, 20 bp, Artificial Sequence
  Description of Artificial Sequence: Synthetic oligonucleotide
  Target: LAMA2; (+) strand; PAM type: NRG; PAM sequence: TAG
taattttgcttggataatta

SEQ ID NO: 160433 - DNA, 20 bp, Artificial Sequence
  Description of Artificial Sequence: Synthetic oligonucleotide
  Target: LAMA2; (+) strand; PAM type: NRG; PAM sequence: AGG
aattttgcttggataattat

SEQ ID NO: 160434 - DNA, 20 bp, Artificial Sequence
  Description of Artificial Sequence: Synthetic oligonucleotide
  Target: LAMA2; (+) strand; PAM type: NRG; PAM sequence: TGG
ttatttgttgtgcatttact

SEQ ID NO: 160435 - DNA, 20 bp, Artificial Sequence
  Description of Artificial Sequence: Synthetic oligonucleotide
  Target: LAMA2; (+) strand; PAM type: NRG; PAM sequence: TGG
ttgtgcatttacttggataa

SEQ ID NO: 160436 - DNA, 20 bp, Artificial Sequence
  Description of Artificial Sequence: Synthetic oligonucleotide
  Target: LAMA2; (+) strand; PAM type: NRG; PAM sequence: GGG
tgtgcatttacttggataat

SEQ ID NO: 160437 - DNA, 20 bp, Artificial Sequence
  Description of Artificial Sequence: Synthetic oligonucleotide
  Target: LAMA2; (+) strand; PAM type: NRG; PAM sequence: AAG
tctaattgttgttcctgaaa

SEQ ID NO: 160438 - DNA, 20 bp, Artificial Sequence
  Description of Artificial Sequence: Synthetic oligonucleotide
  Target: LAMA2; (+) strand; PAM type: NRG; PAM sequence: AAG
attgttgttcctgaaaaaga

SEQ ID NO: 160439 - DNA, 20 bp, Artificial Sequence
  Description of Artificial Sequence: Synthetic oligonucleotide
  Target: LAMA2; (+) strand; PAM type: NRG; PAM sequence: AAG
ttgttcctgaaaaagaaaga

SEQ ID NO: 160440 - DNA, 20 bp, Artificial Sequence
  Description of Artificial Sequence: Synthetic oligonucleotide
  Target: LAMA2; (+) strand; PAM type: NRG; PAM sequence: AAG
gaaaaagaaagaaagtctgc

SEQ ID NO: 160441 - DNA, 20 bp, Artificial Sequence
  Description of Artificial Sequence: Synthetic oligonucleotide
  Target: LAMA2; (+) strand; PAM type: NRG; PAM sequence: CAG
agcattaaaacacaatccat

SEQ ID NO: 160442 - DNA, 20 bp, Artificial Sequence
  Description of Artificial Sequence: Synthetic oligonucleotide
  Target: LAMA2; (+) strand; PAM type: NRG; PAM sequence: AAG
aacacaatccatcagtgcca

SEQ ID NO: 160443 - DNA, 20 bp, Artificial Sequence
  Description of Artificial Sequence: Synthetic oligonucleotide
  Target: LAMA2; (+) strand; PAM type: NRG; PAM sequence: AGG
acacaatccatcagtgccaa

SEQ ID NO: 160444 - DNA, 20 bp, Artificial Sequence
  Description of Artificial Sequence: Synthetic oligonucleotide
  Target: LAMA2; (+) strand; PAM type: NRG; PAM sequence: GGG
cacaatccatcagtgccaaa

SEQ ID NO: 160445 - DNA, 20 bp, Artificial Sequence
  Description of Artificial Sequence: Synthetic oligonucleotide
  Target: LAMA2; (+) strand; PAM type: NRG; PAM sequence: TGG
tccatcagtgccaaagggat

SEQ ID NO: 160446 - DNA, 20 bp, Artificial Sequence
  Description of Artificial Sequence: Synthetic oligonucleotide
  Target: LAMA2; (+) strand; PAM type: NRG; PAM sequence: GGG
ccatcagtgccaaagggatt

SEQ ID NO: 160447 - DNA, 20 bp, Artificial Sequence
  Description of Artificial Sequence: Synthetic oligonucleotide
  Target: LAMA2; (+) strand; PAM type: NRG; PAM sequence: CAG
tgccaaagggattgggtttc

SEQ ID NO: 160448 - DNA, 20 bp, Artificial Sequence
  Description of Artificial Sequence: Synthetic oligonucleotide
  Target: LAMA2; (+) strand; PAM type: NRG; PAM sequence: AAG
ccaataatattatttcctaa

SEQ ID NO: 160449 - DNA, 20 bp, Artificial Sequence
  Description of Artificial Sequence: Synthetic oligonucleotide
  Target: LAMA2; (+) strand; PAM type: NRG; PAM sequence: TGG
aaaagatgtatattctaatt

SEQ ID NO: 160450 - DNA, 20 bp, Artificial Sequence
  Description of Artificial Sequence: Synthetic oligonucleotide
  Target: LAMA2; (+) strand; PAM type: NRG; PAM sequence: CAG
ttttaaaaatgcatataaca

SEQ ID NO: 160451 - DNA, 20 bp, Artificial Sequence
  Description of Artificial Sequence: Synthetic oligonucleotide
  Target: LAMA2; (+) strand; PAM type: NRG; PAM sequence: CAG
taacacagtgataacaatac

SEQ ID NO: 160452 - DNA, 20 bp, Artificial Sequence
  Description of Artificial Sequence: Synthetic oligonucleotide
  Target: LAMA2; (+) strand; PAM type: NRG; PAM sequence: AAG
ataacaataccagtaacacc

SEQ ID NO: 160453 - DNA, 20 bp, Artificial Sequence
  Description of Artificial Sequence: Synthetic oligonucleotide
  Target: LAMA2; (+) strand; PAM type: NRG; PAM sequence: TAG
attttcaaaatgttttcact

SEQ ID NO: 160454 - DNA, 20 bp, Artificial Sequence
  Description of Artificial Sequence: Synthetic oligonucleotide
  Target: LAMA2; (+) strand; PAM type: NRG; PAM sequence: GAG
tttcaaaatgttttcactta

SEQ ID NO: 160455 - DNA, 20 bp, Artificial Sequence
  Description of Artificial Sequence: Synthetic oligonucleotide
  Target: LAMA2; (+) strand; PAM type: NRG; PAM sequence: AAG
aaaatgttttcacttagagt

SEQ ID NO: 160456 - DNA, 20 bp, Artificial Sequence
  Description of Artificial Sequence: Synthetic oligonucleotide
  Target: LAMA2; (+) strand; PAM type: NRG; PAM sequence: TAG
agtaagcaattaataattat

SEQ ID NO: 160457 - DNA, 20 bp, Artificial Sequence
  Description of Artificial Sequence: Synthetic oligonucleotide
  Target: LAMA2; (+) strand; PAM type: NRG; PAM sequence: TAG
ttaatataaaatattaaaat

SEQ ID NO: 160458 - DNA, 20 bp, Artificial Sequence
  Description of Artificial Sequence: Synthetic oligonucleotide
  Target: LAMA2; (+) strand; PAM type: NRG; PAM sequence: TAG
ctaaataataattttacttc

SEQ ID NO: 160459 - DNA, 20 bp, Artificial Sequence
  Description of Artificial Sequence: Synthetic oligonucleotide
  Target: LAMA2; (+) strand; PAM type: NRG; PAM sequence: CAG
aataataattttacttctag

SEQ ID NO: 160460 - DNA, 20 bp, Artificial Sequence
  Description of Artificial Sequence: Synthetic oligonucleotide
  Target: LAMA2; (+) strand; PAM type: NRG; PAM sequence: TAG
aataattttacttctagcag

SEQ ID NO: 160461 - DNA, 20 bp, Artificial Sequence
  Description of Artificial Sequence: Synthetic oligonucleotide
  Target: LAMA2; (+) strand; PAM type: NRG; PAM sequence: TGG
tttacttctagcagtagaat

SEQ ID NO: 160462 - DNA, 20 bp, Artificial Sequence
  Description of Artificial Sequence: Synthetic oligonucleotide
  Target: LAMA2; (+) strand; PAM type: NRG; PAM sequence: GGG
ttacttctagcagtagaatt

SEQ ID NO: 160463 - DNA, 20 bp, Artificial Sequence
  Description of Artificial Sequence: Synthetic oligonucleotide
  Target: LAMA2; (+) strand; PAM type: NRG; PAM sequence: TAG
tctagcagtagaattgggac

SEQ ID NO: 160464 - DNA, 20 bp, Artificial Sequence
  Description of Artificial Sequence: Synthetic oligonucleotide
  Target: LAMA2; (+) strand; PAM type: NRG; PAM sequence: TAG
cagtagaattgggactagaa

SEQ ID NO: 160465 - DNA, 20 bp, Artificial Sequence
  Description of Artificial Sequence: Synthetic oligonucleotide
  Target: LAMA2; (+) strand; PAM type: NRG; PAM sequence: CAG
tagcaatttattttaaattc

SEQ ID NO: 160466 - DNA, 20 bp, Artificial Sequence
  Description of Artificial Sequence: Synthetic oligonucleotide
  Target: LAMA2; (+) strand; PAM type: NRG; PAM sequence: TGG
ttaaattccagctttcaatg

SEQ ID NO: 160467 - DNA, 20 bp, Artificial Sequence
  Description of Artificial Sequence: Synthetic oligonucleotide
  Target: LAMA2; (+) strand; PAM type: NRG; PAM sequence: AAG
tttcaatgtggtattttaac

SEQ ID NO: 160468 - DNA, 20 bp, Artificial Sequence
  Description of Artificial Sequence: Synthetic oligonucleotide
  Target: LAMA2; (+) strand; PAM type: NRG; PAM sequence: TAG
caatgtggtattttaacaag

SEQ ID NO: 160469 - DNA, 20 bp, Artificial Sequence
  Description of Artificial Sequence: Synthetic oligonucleotide
  Target: LAMA2; (+) strand; PAM type: NRG; PAM sequence: AAG
gtggtattttaacaagtaga

SEQ ID NO: 160470 - DNA, 20 bp, Artificial Sequence
  Description of Artificial Sequence: Synthetic oligonucleotide
  Target: LAMA2; (+) strand; PAM type: NRG; PAM sequence: GAG
ggtattttaacaagtagaaa

SEQ ID NO: 160471 - DNA, 20 bp, Artificial Sequence
  Description of Artificial Sequence: Synthetic oligonucleotide
  Target: LAMA2; (+) strand; PAM type: NRG; PAM sequence: GAG
tattttaacaagtagaaaga

SEQ ID NO: 160472 - DNA, 20 bp, Artificial Sequence
  Description of Artificial Sequence: Synthetic oligonucleotide
  Target: LAMA2; (+) strand; PAM type: NRG; PAM sequence: AGG
attttaacaagtagaaagag

SEQ ID NO: 160473 - DNA, 20 bp, Artificial Sequence
  Description of Artificial Sequence: Synthetic oligonucleotide
  Target: LAMA2; (+) strand; PAM type: NRG; PAM sequence: GGG
ttttaacaagtagaaagaga

SEQ ID NO: 160474 - DNA, 20 bp, Artificial Sequence
  Description of Artificial Sequence: Synthetic oligonucleotide
  Target: LAMA2; (+) strand; PAM type: NRG; PAM sequence: CAG
taacaagtagaaagagaggg

SEQ ID NO: 160475 - DNA, 20 bp, Artificial Sequence
  Description of Artificial Sequence: Synthetic oligonucleotide
  Target: LAMA2; (+) strand; PAM type: NRG; PAM sequence: TAG
gagggcagtgataattcact

SEQ ID NO: 160476 - DNA, 20 bp, Artificial Sequence
  Description of Artificial Sequence: Synthetic oligonucleotide
  Target: LAMA2; (+) strand; PAM type: NRG; PAM sequence: TAG
ttcacttagtttataaatcc

SEQ ID NO: 160477 - DNA, 20 bp, Artificial Sequence
  Description of Artificial Sequence: Synthetic oligonucleotide
  Target: LAMA2; (+) strand; PAM type: NRG; PAM sequence: AAG
acttagtttataaatcctag

SEQ ID NO: 160478 - DNA, 20 bp, Artificial Sequence
  Description of Artificial Sequence: Synthetic oligonucleotide
  Target: LAMA2; (+) strand; PAM type: NRG; PAM sequence: GAG
ataaatcctagaagttttgt

SEQ ID NO: 160479 - DNA, 20 bp, Artificial Sequence
  Description of Artificial Sequence: Synthetic oligonucleotide
  Target: LAMA2; (+) strand; PAM type: NRG; PAM sequence: GAG
aaatcctagaagttttgtga

SEQ ID NO: 160480 - DNA, 20 bp, Artificial Sequence
  Description of Artificial Sequence: Synthetic oligonucleotide
  Target: LAMA2; (+) strand; PAM type: NRG; PAM sequence: AGG
aatcctagaagttttgtgag

SEQ ID NO: 160481 - DNA, 20 bp, Artificial Sequence
  Description of Artificial Sequence: Synthetic oligonucleotide
  Target: LAMA2; (+) strand; PAM type: NRG; PAM sequence: GGG
atcctagaagttttgtgaga

SEQ ID NO: 160482 - DNA, 20 bp, Artificial Sequence
  Description of Artificial Sequence: Synthetic oligonucleotide
  Target: LAMA2; (+) strand; PAM type: NRG; PAM sequence: TAG
aattttacatttaaaacaac

SEQ ID NO: 160483 - DNA, 20 bp, Artificial Sequence
  Description of Artificial Sequence: Synthetic oligonucleotide
  Target: LAMA2; (+) strand; PAM type: NRG; PAM sequence: TGG
aaacaactagaaaattatca

SEQ ID NO: 160484 - DNA, 20 bp, Artificial Sequence
  Description of Artificial Sequence: Synthetic oligonucleotide
  Target: LAMA2; (+) strand; PAM type: NRG; PAM sequence: TAG
actagaaaattatcatggtt

SEQ ID NO: 160485 - DNA, 20 bp, Artificial Sequence
  Description of Artificial Sequence: Synthetic oligonucleotide
  Target: LAMA2; (+) strand; PAM type: NRG; PAM sequence: GAG
tttagttgcacaactgtgat

SEQ ID NO: 160486 - DNA, 20 bp, Artificial Sequence
  Description of Artificial Sequence: Synthetic oligonucleotide
  Target: LAMA2; (+) strand; PAM type: NRG; PAM sequence: AAG
taaaaaaaaaatcactaaac

SEQ ID NO: 160487 - DNA, 20 bp, Artificial Sequence
  Description of Artificial Sequence: Synthetic oligonucleotide
  Target: LAMA2; (+) strand; PAM type: NRG; PAM sequence: TAG
aaacaagacacttaatgacc

SEQ ID NO: 160488 - DNA, 20 bp, Artificial Sequence
  Description of Artificial Sequence: Synthetic oligonucleotide
  Target: LAMA2; (+) strand; PAM type: NRG; PAM sequence: AGG
aacaagacacttaatgacct

SEQ ID NO: 160489 - DNA, 20 bp, Artificial Sequence
  Description of Artificial Sequence: Synthetic oligonucleotide
  Target: LAMA2; (+) strand; PAM type: NRG; PAM sequence: GGG
acaagacacttaatgaccta

SEQ ID NO: 160490 - DNA, 20 bp, Artificial Sequence
  Description of Artificial Sequence: Synthetic oligonucleotide
  Target: LAMA2; (+) strand; PAM type: NRG; PAM sequence: GAG
aaacattactgttataatgt

SEQ ID NO: 160491 - DNA, 20 bp, Artificial Sequence
  Description of Artificial Sequence: Synthetic oligonucleotide
  Target: LAMA2; (+) strand; PAM type: NRG; PAM sequence: TAG
attactgttataatgtgagc

SEQ ID NO: 160492 - DNA, 20 bp, Artificial Sequence
  Description of Artificial Sequence: Synthetic oligonucleotide
  Target: LAMA2; (+) strand; PAM type: NRG; PAM sequence: GAG
taatgtgagctagaaactct

SEQ ID NO: 160493 - DNA, 20 bp, Artificial Sequence
  Description of Artificial Sequence: Synthetic oligonucleotide
  Target: LAMA2; (+) strand; PAM type: NRG; PAM sequence: AAG
aatatttgcatacaatcctg

SEQ ID NO: 160494 - DNA, 20 bp, Artificial Sequence
  Description of Artificial Sequence: Synthetic oligonucleotide
  Target: LAMA2; (+) strand; PAM type: NRG; PAM sequence: GAG
ttgcatacaatcctgaagac

SEQ ID NO: 160495 - DNA, 20 bp, Artificial Sequence
  Description of Artificial Sequence: Synthetic oligonucleotide
  Target: LAMA2; (+) strand; PAM type: NRG; PAM sequence: CAG
agacgagattttaatttcca

SEQ ID NO: 160496 - DNA, 20 bp, Artificial Sequence
  Description of Artificial Sequence: Synthetic oligonucleotide
  Target: LAMA2; (+) strand; PAM type: NRG; PAM sequence: AGG
gacgagattttaatttccac

SEQ ID NO: 160497 - DNA, 20 bp, Artificial Sequence
  Description of Artificial Sequence: Synthetic oligonucleotide
  Target: LAMA2; (+) strand; PAM type: NRG; PAM sequence: CAG
tttaatttccacaggttatt

SEQ ID NO: 160498 - DNA, 20 bp, Artificial Sequence
  Description of Artificial Sequence: Synthetic oligonucleotide
  Target: LAMA2; (+) strand; PAM type: NRG; PAM sequence: GAG
taatttccacaggttattca

SEQ ID NO: 160499 - DNA, 20 bp, Artificial Sequence
  Description of Artificial Sequence: Synthetic oligonucleotide
  Target: LAMA2; (+) strand; PAM type: NRG; PAM sequence: AAG
gttattcagagaaaaaaaaa

SEQ ID NO: 160500 - DNA, 20 bp, Artificial Sequence
  Description of Artificial Sequence: Synthetic oligonucleotide
  Target: LAMA2; (+) strand; PAM type: NRG; PAM sequence: AGG
ttattcagagaaaaaaaaaa

SEQ ID NO: 160501 - DNA, 20 bp, Artificial Sequence
  Description of Artificial Sequence: Synthetic oligonucleotide
  Target: LAMA2; (+) strand; PAM type: NRG; PAM sequence: GGG
tattcagagaaaaaaaaaaa

SEQ ID NO: 160502 - DNA, 20 bp, Artificial Sequence
  Description of Artificial Sequence: Synthetic oligonucleotide
  Target: LAMA2; (+) strand; PAM type: NRG; PAM sequence: GAG
ttcagagaaaaaaaaaaagg

SEQ ID NO: 160503 - DNA, 20 bp, Artificial Sequence
  Description of Artificial Sequence: Synthetic oligonucleotide
  Target: LAMA2; (+) strand; PAM type: NRG; PAM sequence: AAG
gaaaaaaaaaaagggagcta

SEQ ID NO: 160504 - DNA, 20 bp, Artificial Sequence
  Description of Artificial Sequence: Synthetic oligonucleotide
  Target: LAMA2; (+) strand; PAM type: NRG; PAM sequence: AGG
aaaaaaaaaaagggagctaa

SEQ ID NO: 160505 - DNA, 20 bp, Artificial Sequence
  Description of Artificial Sequence: Synthetic oligonucleotide
  Target: LAMA2; (+) strand; PAM type: NRG; PAM sequence: TGG
aaaggttgacgcaaccttca

SEQ ID NO: 160506 - DNA, 20 bp, Artificial Sequence
  Description of Artificial Sequence: Synthetic oligonucleotide
  Target: LAMA2; (+) strand; PAM type: NRG; PAM sequence: GGG
aaggttgacgcaaccttcat

SEQ ID NO: 160507 - DNA, 20 bp, Artificial Sequence
  Description of Artificial Sequence: Synthetic oligonucleotide
  Target: LAMA2; (+) strand; PAM type: NRG; PAM sequence: AAG
gttgacgcaaccttcatggg

SEQ ID NO: 160508 - DNA, 20 bp, Artificial Sequence
  Description of Artificial Sequence: Synthetic oligonucleotide
  Target: LAMA2; (+) strand; PAM type: NRG; PAM sequence: AAG
caaccttcatgggaagtcta

SEQ ID NO: 160509 - DNA, 20 bp, Artificial Sequence
  Description of Artificial Sequence: Synthetic oligonucleotide
  Target: LAMA2; (+) strand; PAM type: NRG; PAM sequence: TAG
ttcatgggaagtctaaagct

SEQ ID NO: 160510 - DNA, 20 bp, Artificial Sequence
  Description of Artificial Sequence: Synthetic oligonucleotide
  Target: LAMA2; (+) strand; PAM type: NRG; PAM sequence: TAG
ggaagtctaaagcttagtga

SEQ ID NO: 160511 - DNA, 20 bp, Artificial Sequence
  Description of Artificial Sequence: Synthetic oligonucleotide
  Target: LAMA2; (+) strand; PAM type: NRG; PAM sequence: TGG
gcttagtgatagttttacct

SEQ ID NO: 160512 - DNA, 20 bp, Artificial Sequence
  Description of Artificial Sequence: Synthetic oligonucleotide
  Target: LAMA2; (+) strand; PAM type: NRG; PAM sequence: TGG
tgatttatctatttaatccc

SEQ ID NO: 160513 - DNA, 20 bp, Artificial Sequence
  Description of Artificial Sequence: Synthetic oligonucleotide
  Target: LAMA2; (+) strand; PAM type: NRG; PAM sequence: TAG
atccctggtcataaatctta

SEQ ID NO: 160514 - DNA, 20 bp, Artificial Sequence
  Description of Artificial Sequence: Synthetic oligonucleotide
  Target: LAMA2; (+) strand; PAM type: NRG; PAM sequence: AAG
tcataaatcttatagatcac

SEQ ID NO: 160515 - DNA, 20 bp, Artificial Sequence
  Description of Artificial Sequence: Synthetic oligonucleotide
  Target: LAMA2; (+) strand; PAM type: NRG; PAM sequence: TGG
cttatagatcacaagcattt

SEQ ID NO: 160516 - DNA, 20 bp, Artificial Sequence
  Description of Artificial Sequence: Synthetic oligonucleotide
  Target: LAMA2; (+) strand; PAM type: NRG; PAM sequence: TAG
cattttggctccaaatttct

SEQ ID NO: 160517 - DNA, 20 bp, Artificial Sequence
  Description of Artificial Sequence: Synthetic oligonucleotide
  Target: LAMA2; (+) strand; PAM type: NRG; PAM sequence: AAG
gctaaataaatcaaatatgt

SEQ ID NO: 160518 - DNA, 20 bp, Artificial Sequence
  Description of Artificial Sequence: Synthetic oligonucleotide
  Target: LAMA2; (+) strand; PAM type: NRG; PAM sequence: AAG
aaataaatcaaatatgtaag

SEQ ID NO: 160519 - DNA, 20 bp, Artificial Sequence
  Description of Artificial Sequence: Synthetic oligonucleotide
  Target: LAMA2; (+) strand; PAM type: NRG; PAM sequence: TAG
aaatcaaatatgtaagaaga

SEQ ID NO: 160520 - DNA, 20 bp, Artificial Sequence
  Description of Artificial Sequence: Synthetic oligonucleotide
  Target: LAMA2; (+) strand; PAM type: NRG; PAM sequence: GAG
atcaaatatgtaagaagata

SEQ ID NO: 160521 - DNA, 20 bp, Artificial Sequence
  Description of Artificial Sequence: Synthetic oligonucleotide
  Target: LAMA2; (+) strand; PAM type: NRG; PAM sequence: TAG
aatatgtaagaagatagaga

SEQ ID NO: 160522 - DNA, 20 bp, Artificial Sequence
  Description of Artificial Sequence: Synthetic oligonucleotide
  Target: LAMA2; (+) strand; PAM type: NRG; PAM sequence: TGG
gtaagaagatagagatagat

SEQ ID NO: 160523 - DNA, 20 bp, Artificial Sequence
  Description of Artificial Sequence: Synthetic oligonucleotide
  Target: LAMA2; (+) strand; PAM type: NRG; PAM sequence: CAG
attattatgatgtatgaata

SEQ ID NO: 160524 - DNA, 20 bp, Artificial Sequence
  Description of Artificial Sequence: Synthetic oligonucleotide
  Target: LAMA2; (+) strand; PAM type: NRG; PAM sequence: GAG
tattatgatgtatgaataca

SEQ ID NO: 160525 - DNA, 20 bp, Artificial Sequence
  Description of Artificial Sequence: Synthetic oligonucleotide
  Target: LAMA2; (+) strand; PAM type: NRG; PAM sequence: AAG
tatgatgtatgaatacagag

SEQ ID NO: 160526 - DNA, 20 bp, Artificial Sequence
  Description of Artificial Sequence: Synthetic oligonucleotide
  Target: LAMA2; (+) strand; PAM type: NRG; PAM sequence: TGG
tcaacttcatcaactattta

SEQ ID NO: 160527 - DNA, 20 bp, Artificial Sequence
  Description of Artificial Sequence: Synthetic oligonucleotide
  Target: LAMA2; (+) strand; PAM type: NRG; PAM sequence: TGG
tttatggtgatcactatgct

SEQ ID NO: 160528 - DNA, 20 bp, Artificial Sequence
  Description of Artificial Sequence: Synthetic oligonucleotide
  Target: LAMA2; (+) strand; PAM type: NRG; PAM sequence: TAG
tcttgttgatgtatatattc

SEQ ID NO: 160529 - DNA, 20 bp, Artificial Sequence
  Description of Artificial Sequence: Synthetic oligonucleotide
  Target: LAMA2; (+) strand; PAM type: NRG; PAM sequence: TAG
tgatgtatatattctagcta

SEQ ID NO: 160530 - DNA, 20 bp, Artificial Sequence
  Description of Artificial Sequence: Synthetic oligonucleotide
  Target: LAMA2; (+) strand; PAM type: NRG; PAM sequence: AGG
gatgtatatattctagctat

SEQ ID NO: 160531 - DNA, 20 bp, Artificial Sequence
  Description of Artificial Sequence: Synthetic oligonucleotide
  Target: LAMA2; (+) strand; PAM type: NRG; PAM sequence: TAG
ttctagctataggttgtaac

SEQ ID NO: 160532 - DNA, 20 bp, Artificial Sequence
  Description of Artificial Sequence: Synthetic oligonucleotide
  Target: LAMA2; (+) strand; PAM type: NRG; PAM sequence: AGG
tctagctataggttgtaact

SEQ ID NO: 160533 - DNA, 20 bp, Artificial Sequence
  Description of Artificial Sequence: Synthetic oligonucleotide
  Target: LAMA2; (+) strand; PAM type: NRG; PAM sequence: CAG
agctataggttgtaactagg

SEQ ID NO: 160534 - DNA, 20 bp, Artificial Sequence
  Description of Artificial Sequence: Synthetic oligonucleotide
  Target: LAMA2; (+) strand; PAM type: NRG; PAM sequence: AAG
aggttgtaactaggcagtaa

SEQ ID NO: 160535 - DNA, 20 bp, Artificial Sequence
  Description of Artificial Sequence: Synthetic oligonucleotide
  Target: LAMA2; (+) strand; PAM type: NRG; PAM sequence: TGG
actaggcagtaaaagttatc

SEQ ID NO: 160536 - DNA, 20 bp, Artificial Sequence
  Description of Artificial Sequence: Synthetic oligonucleotide
  Target: LAMA2; (+) strand; PAM type: NRG; PAM sequence: GAG
taggcagtaaaagttatctg

SEQ ID NO: 160537 - DNA, 20 bp, Artificial Sequence
  Description of Artificial Sequence: Synthetic oligonucleotide
  Target: LAMA2; (+) strand; PAM type: NRG; PAM sequence: GAG
ggcagtaaaagttatctgga

SEQ ID NO: 160538 - DNA, 20 bp, Artificial Sequence
  Description of Artificial Sequence: Synthetic oligonucleotide
  Target: LAMA2; (+) strand; PAM type: NRG; PAM sequence: AAG
agtaaaagttatctggagag

SEQ ID NO: 160539 - DNA, 20 bp, Artificial Sequence
  Description of Artificial Sequence: Synthetic oligonucleotide
  Target: LAMA2; (+) strand; PAM type: NRG; PAM sequence: TGG
tgtttatattctttaatttc

SEQ ID NO: 160540 - DNA, 20 bp, Artificial Sequence
  Description of Artificial Sequence: Synthetic oligonucleotide
  Target: LAMA2; (+) strand; PAM type: NRG; PAM sequence: TAG
ctttaatttctggcatcaca

SEQ ID NO: 160541 - DNA, 20 bp, Artificial Sequence
  Description of Artificial Sequence: Synthetic oligonucleotide
  Target: LAMA2; (+) strand; PAM type: NRG; PAM sequence: TAG
ttctggcatcacatagctta

SEQ ID NO: 160542 - DNA, 20 bp, Artificial Sequence
  Description of Artificial Sequence: Synthetic oligonucleotide
  Target: LAMA2; (+) strand; PAM type: NRG; PAM sequence: AGG
tctggcatcacatagcttat

SEQ ID NO: 160543 - DNA, 20 bp, Artificial Sequence
  Description of Artificial Sequence: Synthetic oligonucleotide
  Target: LAMA2; (+) strand; PAM type: NRG; PAM sequence: AAG
ataggttaaataaaatatga

SEQ ID NO: 160544 - DNA, 20 bp, Artificial Sequence
  Description of Artificial Sequence: Synthetic oligonucleotide
  Target: LAMA2; (+) strand; PAM type: NRG; PAM sequence: GAG
aggttaaataaaatatgaaa

SEQ ID NO: 160545 - DNA, 20 bp, Artificial Sequence
  Description of Artificial Sequence: Synthetic oligonucleotide
  Target: LAMA2; (+) strand; PAM type: NRG; PAM sequence: TAG
aatctctgcctttgaatact

SEQ ID NO: 160546 - DNA, 20 bp, Artificial Sequence
  Description of Artificial Sequence: Synthetic oligonucleotide
  Target: LAMA2; (+) strand; PAM type: NRG; PAM sequence: AGG
atctctgcctttgaatactt

SEQ ID NO: 160547 - DNA, 20 bp, Artificial Sequence
  Description of Artificial Sequence: Synthetic oligonucleotide
  Target: LAMA2; (+) strand; PAM type: NRG; PAM sequence: AAG
ttgaatatataatattattg

SEQ ID NO: 160548 - DNA, 20 bp, Artificial Sequence
  Description of Artificial Sequence: Synthetic oligonucleotide
  Target: LAMA2; (+) strand; PAM type: NRG; PAM sequence: TAG
taatattattgaagttgtta

SEQ ID NO: 160549 - DNA, 20 bp, Artificial Sequence
  Description of Artificial Sequence: Synthetic oligonucleotide
  Target: LAMA2; (+) strand; PAM type: NRG; PAM sequence: CAG
aagttgttatagattttcat

SEQ ID NO: 160550 - DNA, 20 bp, Artificial Sequence
  Description of Artificial Sequence: Synthetic oligonucleotide
  Target: LAMA2; (+) strand; PAM type: NRG; PAM sequence: TGG
tatataataaaatatattat

SEQ ID NO: 160551 - DNA, 20 bp, Artificial Sequence
  Description of Artificial Sequence: Synthetic oligonucleotide
  Target: LAMA2; (+) strand; PAM type: NRG; PAM sequence: AAG
ataaaatatattattggcac

SEQ ID NO: 160552 - DNA, 20 bp, Artificial Sequence
  Description of Artificial Sequence: Synthetic oligonucleotide
  Target: LAMA2; (+) strand; PAM type: NRG; PAM sequence: AGG
taaaatatattattggcaca

SEQ ID NO: 160553 - DNA, 20 bp, Artificial Sequence
  Description of Artificial Sequence: Synthetic oligonucleotide
  Target: LAMA2; (+) strand; PAM type: NRG; PAM sequence: TGG
atatattattggcacaaggc

SEQ ID NO: 160554 - DNA, 20 bp, Artificial Sequence
  Description of Artificial Sequence: Synthetic oligonucleotide
  Target: LAMA2; (+) strand; PAM type: NRG; PAM sequence: CAG
attattggcacaaggctgga

SEQ ID NO: 160555 - DNA, 20 bp, Artificial Sequence
  Description of Artificial Sequence: Synthetic oligonucleotide
  Target: LAMA2; (+) strand; PAM type: NRG; PAM sequence: GAG
tattggcacaaggctggaca

SEQ ID NO: 160556 - DNA, 20 bp, Artificial Sequence
  Description of Artificial Sequence: Synthetic oligonucleotide
  Target: LAMA2; (+) strand; PAM type: NRG; PAM sequence: TAG
ggcacaaggctggacagaga

SEQ ID NO: 160557 - DNA, 20 bp, Artificial Sequence
  Description of Artificial Sequence: Synthetic oligonucleotide
  Target: LAMA2; (+) strand; PAM type: NRG; PAM sequence: AGG
gcacaaggctggacagagat

SEQ ID NO: 160558 - DNA, 20 bp, Artificial Sequence
  Description of Artificial Sequence: Synthetic oligonucleotide
  Target: LAMA2; (+) strand; PAM type: NRG; PAM sequence: AAG
gacagagataggacctcaat

SEQ ID NO: 160559 - DNA, 20 bp, Artificial Sequence
  Description of Artificial Sequence: Synthetic oligonucleotide
  Target: LAMA2; (+) strand; PAM type: NRG; PAM sequence: TGG
aatatcactgtaaatactac

SEQ ID NO: 160560 - DNA, 20 bp, Artificial Sequence
  Description of Artificial Sequence: Synthetic oligonucleotide
  Target: LAMA2; (+) strand; PAM type: NRG; PAM sequence: TGG
gtaaatactactggtttgtg

SEQ ID NO: 160561 - DNA, 20 bp, Artificial Sequence
  Description of Artificial Sequence: Synthetic oligonucleotide
  Target: LAMA2; (+) strand; PAM type: NRG; PAM sequence: GGG
taaatactactggtttgtgt

SEQ ID NO: 160562 - DNA, 20 bp, Artificial Sequence
  Description of Artificial Sequence: Synthetic oligonucleotide
  Target: LAMA2; (+) strand; PAM type: NRG; PAM sequence: CAG
tactactggtttgtgtgggt

SEQ ID NO: 160563 - DNA, 20 bp, Artificial Sequence
  Description of Artificial Sequence: Synthetic oligonucleotide
  Target: LAMA2; (+) strand; PAM type: NRG; PAM sequence: AGG
actactggtttgtgtgggtc

SEQ ID NO: 160564 - DNA, 20 bp, Artificial Sequence
  Description of Artificial Sequence: Synthetic oligonucleotide
  Target: LAMA2; (+) strand; PAM type: NRG; PAM sequence: AAG
ggtcaggaatgctgaaattt

SEQ ID NO: 160565 - DNA, 20 bp, Artificial Sequence
  Description of Artificial Sequence: Synthetic oligonucleotide
  Target: LAMA2; (+) strand; PAM type: NRG; PAM sequence: AAG
gctgaaatttaagtttttga

SEQ ID NO: 160566 - DNA, 20 bp, Artificial Sequence
  Description of Artificial Sequence: Synthetic oligonucleotide
  Target: LAMA2; (+) strand; PAM type: NRG; PAM sequence: GAG
aaagaatgaaactcaaattt

SEQ ID NO: 160567 - DNA, 20 bp, Artificial Sequence
  Description of Artificial Sequence: Synthetic oligonucleotide
  Target: LAMA2; (+) strand; PAM type: NRG; PAM sequence: TGG
ctcaaatttgagttgacctt

SEQ ID NO: 160568 - DNA, 20 bp, Artificial Sequence
  Description of Artificial Sequence: Synthetic oligonucleotide
  Target: LAMA2; (+) strand; PAM type: NRG; PAM sequence: GGG
tcaaatttgagttgaccttt

SEQ ID NO: 160569 - DNA, 20 bp, Artificial Sequence
  Description of Artificial Sequence: Synthetic oligonucleotide
  Target: LAMA2; (+) strand; PAM type: NRG; PAM sequence: AAG
gttgacctttgggctcactc

SEQ ID NO: 160570 - DNA, 20 bp, Artificial Sequence
  Description of Artificial Sequence: Synthetic oligonucleotide
  Target: LAMA2; (+) strand; PAM type: NRG; PAM sequence: GAG
tgacctttgggctcactcaa

SEQ ID NO: 160571 - DNA, 20 bp, Artificial Sequence
  Description of Artificial Sequence: Synthetic oligonucleotide
  Target: LAMA2; (+) strand; PAM type: NRG; PAM sequence: TAG
gcacgttgttaaaattaata

SEQ ID NO: 160572 - DNA, 20 bp, Artificial Sequence
  Description of Artificial Sequence: Synthetic oligonucleotide
  Target: LAMA2; (+) strand; PAM type: NRG; PAM sequence: GAG
acgttgttaaaattaatata

SEQ ID NO: 160573 - DNA, 20 bp, Artificial Sequence
  Description of Artificial Sequence: Synthetic oligonucleotide
  Target: LAMA2; (+) strand; PAM type: NRG; PAM sequence: AAG
aatatagagaaatgtattcc

SEQ ID NO: 160574 - DNA, 20 bp, Artificial Sequence
  Description of Artificial Sequence: Synthetic oligonucleotide
  Target: LAMA2; (+) strand; PAM type: NRG; PAM sequence: TAG
agaaatgtattccaagacaa

SEQ ID NO: 160575 - DNA, 20 bp, Artificial Sequence
  Description of Artificial Sequence: Synthetic oligonucleotide
  Target: LAMA2; (+) strand; PAM type: NRG; PAM sequence: AGG
gaaatgtattccaagacaat

SEQ ID NO: 160576 - DNA, 20 bp, Artificial Sequence
  Description of Artificial Sequence: Synthetic oligonucleotide
  Target: LAMA2; (+) strand; PAM type: NRG; PAM sequence: AAG
ccaagacaataggtaaattt

SEQ ID NO: 160577 - DNA, 20 bp, Artificial Sequence
  Description of Artificial Sequence: Synthetic oligonucleotide
  Target: LAMA2; (+) strand; PAM type: NRG; PAM sequence: AGG
caagacaataggtaaattta

SEQ ID NO: 160578 - DNA, 20 bp, Artificial Sequence
  Description of Artificial Sequence: Synthetic oligonucleotide
  Target: LAMA2; (+) strand; PAM type: NRG; PAM sequence: CAG
atttaaggaaacaatcaatt

SEQ ID NO: 160579 - DNA, 20 bp, Artificial Sequence
  Description of Artificial Sequence: Synthetic oligonucleotide
  Target: LAMA2; (+) strand; PAM type: NRG; PAM sequence: TAG
atcaattcagccatattctc

SEQ ID NO: 160580 - DNA, 20 bp, Artificial Sequence
  Description of Artificial Sequence: Synthetic oligonucleotide
  Target: LAMA2; (+) strand; PAM type: NRG; PAM sequence: GAG
gccatattctctagaaaatt

SEQ ID NO: 160581 - DNA, 20 bp, Artificial Sequence
  Description of Artificial Sequence: Synthetic oligonucleotide
  Target: LAMA2; (+) strand; PAM type: NRG; PAM sequence: TAG
ctagaaaattgagaatgctc

SEQ ID NO: 160582 - DNA, 20 bp, Artificial Sequence
  Description of Artificial Sequence: Synthetic oligonucleotide
  Target: LAMA2; (+) strand; PAM type: NRG; PAM sequence: TAG
tgagaatgctctagatgttt

SEQ ID NO: 160583 - DNA, 20 bp, Artificial Sequence
  Description of Artificial Sequence: Synthetic oligonucleotide
  Target: LAMA2; (+) strand; PAM type: NRG; PAM sequence: TGG
cacattgttttatgtgcaca

SEQ ID NO: 160584 - DNA, 20 bp, Artificial Sequence
  Description of Artificial Sequence: Synthetic oligonucleotide
  Target: LAMA2; (+) strand; PAM type: NRG; PAM sequence: GGG
acattgttttatgtgcacat

SEQ ID NO: 160585 - DNA, 20 bp, Artificial Sequence
  Description of Artificial Sequence: Synthetic oligonucleotide
  Target: LAMA2; (+) strand; PAM type: NRG; PAM sequence: GAG
attgttttatgtgcacatgg

SEQ ID NO: 160586 - DNA, 20 bp, Artificial Sequence
  Description of Artificial Sequence: Synthetic oligonucleotide
  Target: LAMA2; (+) strand; PAM type: NRG; PAM sequence: TGG
gtgcacatgggagattatga

SEQ ID NO: 160587 - DNA, 20 bp, Artificial Sequence
  Description of Artificial Sequence: Synthetic oligonucleotide
  Target: LAMA2; (+) strand; PAM type: NRG; PAM sequence: GGG
tgcacatgggagattatgat

SEQ ID NO: 160588 - DNA, 20 bp, Artificial Sequence
  Description of Artificial Sequence: Synthetic oligonucleotide
  Target: LAMA2; (+) strand; PAM type: NRG; PAM sequence: TGG
gagattatgatgggtcttcc

SEQ ID NO: 160589 - DNA, 20 bp, Artificial Sequence
  Description of Artificial Sequence: Synthetic oligonucleotide
  Target: LAMA2; (+) strand; PAM type: NRG; PAM sequence: AAG
cttcctggttccatatgcca

SEQ ID NO: 160590 - DNA, 20 bp, Artificial Sequence
  Description of Artificial Sequence: Synthetic oligonucleotide
  Target: LAMA2; (+) strand; PAM type: NRG; PAM sequence: AGG
ttcctggttccatatgccaa

SEQ ID NO: 160591 - DNA, 20 bp, Artificial Sequence
  Description of Artificial Sequence: Synthetic oligonucleotide
  Target: LAMA2; (+) strand; PAM type: NRG; PAM sequence: AAG
tatgccaaaggaaaaaacta

SEQ ID NO: 160592 - DNA, 20 bp, Artificial Sequence
  Description of Artificial Sequence: Synthetic oligonucleotide
  Target: LAMA2; (+) strand; PAM type: NRG; PAM sequence: CAG
caaaggaaaaaactaaagtt

SEQ ID NO: 160593 - DNA, 20 bp, Artificial Sequence
  Description of Artificial Sequence: Synthetic oligonucleotide
  Target: LAMA2; (+) strand; PAM type: NRG; PAM sequence: GAG
aaggaaaaaactaaagttca

SEQ ID NO: 160594 - DNA, 20 bp, Artificial Sequence
  Description of Artificial Sequence: Synthetic oligonucleotide
  Target: LAMA2; (+) strand; PAM type: NRG; PAM sequence: AAG
aactaaagttcagagaaatt

SEQ ID NO: 160595 - DNA, 20 bp, Artificial Sequence
  Description of Artificial Sequence: Synthetic oligonucleotide
  Target: LAMA2; (+) strand; PAM type: NRG; PAM sequence: TAG
agagaaattaagtgccttga

SEQ ID NO: 160596 - DNA, 20 bp, Artificial Sequence
  Description of Artificial Sequence: Synthetic oligonucleotide
  Target: LAMA2; (+) strand; PAM type: NRG; PAM sequence: CAG
gtgccttgatagtgattata

SEQ ID NO: 160597 - DNA, 20 bp, Artificial Sequence
  Description of Artificial Sequence: Synthetic oligonucleotide
  Target: LAMA2; (+) strand; PAM type: NRG; PAM sequence: TGG
gtgattatacagcttgcttg

SEQ ID NO: 160598 - DNA, 20 bp, Artificial Sequence
  Description of Artificial Sequence: Synthetic oligonucleotide
  Target: LAMA2; (+) strand; PAM type: NRG; PAM sequence: CAG
attatacagcttgcttgtgg

SEQ ID NO: 160599 - DNA, 20 bp, Artificial Sequence
  Description of Artificial Sequence: Synthetic oligonucleotide
  Target: LAMA2; (+) strand; PAM type: NRG; PAM sequence: TGG
gcttgtggcagaaccaatat

SEQ ID NO: 160600 - DNA, 20 bp, Artificial Sequence
  Description of Artificial Sequence: Synthetic oligonucleotide
  Target: LAMA2; (+) strand; PAM type: NRG; PAM sequence: TGG
cctctctgtgcttcttccaa

SEQ ID NO: 160601 - DNA, 20 bp, Artificial Sequence
  Description of Artificial Sequence: Synthetic oligonucleotide
  Target: LAMA2; (+) strand; PAM type: NRG; PAM sequence: GGG
ctctctgtgcttcttccaat

SEQ ID NO: 160602 - DNA, 20 bp, Artificial Sequence
  Description of Artificial Sequence: Synthetic oligonucleotide
  Target: LAMA2; (+) strand; PAM type: NRG; PAM sequence: GGG
tctctgtgcttcttccaatg

SEQ ID NO: 160603 - DNA, 20 bp, Artificial Sequence
  Description of Artificial Sequence: Synthetic oligonucleotide
  Target: LAMA2; (+) strand; PAM type: NRG; PAM sequence: CAG
tgcttcttccaatggggcta

SEQ ID NO: 160604 - DNA, 20 bp, Artificial Sequence
  Description of Artificial Sequence: Synthetic oligonucleotide
  Target: LAMA2; (+) strand; PAM type: NRG; PAM sequence: TAG
ttccaatggggctacagtaa

SEQ ID NO: 160605 - DNA, 20 bp, Artificial Sequence
  Description of Artificial Sequence: Synthetic oligonucleotide
  Target: LAMA2; (+) strand; PAM type: NRG; PAM sequence: CAG
tacagtaatagaaacaatta

SEQ ID NO: 160606 - DNA, 20 bp, Artificial Sequence
  Description of Artificial Sequence: Synthetic oligonucleotide
  Target: LAMA2; (+) strand; PAM type: NRG; PAM sequence: AAG
acaattacagaaacattgaa

SEQ ID NO: 160607 - DNA, 20 bp, Artificial Sequence
  Description of Artificial Sequence: Synthetic oligonucleotide
  Target: LAMA2; (+) strand; PAM type: NRG; PAM sequence: AAG
attacagaaacattgaaaag

SEQ ID NO: 160608 - DNA, 20 bp, Artificial Sequence
  Description of Artificial Sequence: Synthetic oligonucleotide
  Target: LAMA2; (+) strand; PAM type: NRG; PAM sequence: TAG
aagaagcaaaaaaaaatcaa

SEQ ID NO: 160609 - DNA, 20 bp, Artificial Sequence
  Description of Artificial Sequence: Synthetic oligonucleotide
  Target: LAMA2; (+) strand; PAM type: NRG; PAM sequence: CAG
aaatcaatagaatttaatgt

SEQ ID NO: 160610 - DNA, 20 bp, Artificial Sequence
  Description of Artificial Sequence: Synthetic oligonucleotide
  Target: LAMA2; (+) strand; PAM type: NRG; PAM sequence: CAG
taaatgttcactgtaaaaat

SEQ ID NO: 160611 - DNA, 20 bp, Artificial Sequence
  Description of Artificial Sequence: Synthetic oligonucleotide
  Target: LAMA2; (+) strand; PAM type: NRG; PAM sequence: TGG
atcagtaaatcttcactgtt

SEQ ID NO: 160612 - DNA, 20 bp, Artificial Sequence
  Description of Artificial Sequence: Synthetic oligonucleotide
  Target: LAMA2; (+) strand; PAM type: NRG; PAM sequence: AAG
gtaaatcttcactgtttggc

SEQ ID NO: 160613 - DNA, 20 bp, Artificial Sequence
  Description of Artificial Sequence: Synthetic oligonucleotide
  Target: LAMA2; (+) strand; PAM type: NRG; PAM sequence: GAG
aaatcttcactgtttggcaa

SEQ ID NO: 160614 - DNA, 20 bp, Artificial Sequence
  Description of Artificial Sequence: Synthetic oligonucleotide
  Target: LAMA2; (+) strand; PAM type: NRG; PAM sequence: TAG
gttatgttaattatgctaca

SEQ ID NO: 160615 - DNA, 20 bp, Artificial Sequence
  Description of Artificial Sequence: Synthetic oligonucleotide
  Target: LAMA2; (+) strand; PAM type: NRG; PAM sequence: CAG
ttaattatgctacatagtta

SEQ ID NO: 160616 - DNA, 20 bp, Artificial Sequence
  Description of Artificial Sequence: Synthetic oligonucleotide
  Target: LAMA2; (+) strand; PAM type: NRG; PAM sequence: CAG
catagttacagttatattaa

SEQ ID NO: 160617 - DNA, 20 bp, Artificial Sequence
  Description of Artificial Sequence: Synthetic oligonucleotide
  Target: LAMA2; (+) strand; PAM type: NRG; PAM sequence: AAG
attaacagctatgttaatat

SEQ ID NO: 160618 - DNA, 20 bp, Artificial Sequence
  Description of Artificial Sequence: Synthetic oligonucleotide
  Target: LAMA2; (+) strand; PAM type: NRG; PAM sequence: AGG
ttaacagctatgttaatata

SEQ ID NO: 160619 - DNA, 20 bp, Artificial Sequence
  Description of Artificial Sequence: Synthetic oligonucleotide
  Target: LAMA2; (+) strand; PAM type: NRG; PAM sequence: GGG
taacagctatgttaatataa

SEQ ID NO: 160620 - DNA, 20 bp, Artificial Sequence
  Description of Artificial Sequence: Synthetic oligonucleotide
  Target: LAMA2; (+) strand; PAM type: NRG; PAM sequence: TAG
gctatgttaatataagggac

SEQ ID NO: 160621 - DNA, 20 bp, Artificial Sequence
  Description of Artificial Sequence: Synthetic oligonucleotide
  Target: LAMA2; (+) strand; PAM type: NRG; PAM sequence: GAG
tatgttaatataagggacta

SEQ ID NO: 160622 - DNA, 20 bp, Artificial Sequence
  Description of Artificial Sequence: Synthetic oligonucleotide
  Target: LAMA2; (+) strand; PAM type: NRG; PAM sequence: CAG
gttaatataagggactagag

SEQ ID NO: 160623 - DNA, 20 bp, Artificial Sequence
  Description of Artificial Sequence: Synthetic oligonucleotide
  Target: LAMA2; (+) strand; PAM type: NRG; PAM sequence: AGG
ttaatataagggactagagc

SEQ ID NO: 160624 - DNA, 20 bp, Artificial Sequence
  Description of Artificial Sequence: Synthetic oligonucleotide
  Target: LAMA2; (+) strand; PAM type: NRG; PAM sequence: GAG
ataagggactagagcaggat

SEQ ID NO: 160625 - DNA, 20 bp, Artificial Sequence
  Description of Artificial Sequence: Synthetic oligonucleotide
  Target: LAMA2; (+) strand; PAM type: NRG; PAM sequence: CAG
agagcaggatgagaaaactg

SEQ ID NO: 160626 - DNA, 20 bp, Artificial Sequence
  Description of Artificial Sequence: Synthetic oligonucleotide
  Target: LAMA2; (+) strand; PAM type: NRG; PAM sequence: AAG
aatttgtaaaaaaaaaaaaa

SEQ ID NO: 160627 - DNA, 20 bp, Artificial Sequence
  Description of Artificial Sequence: Synthetic oligonucleotide
  Target: LAMA2; (+) strand; PAM type: NRG; PAM sequence: AGG
atttgtaaaaaaaaaaaaaa

SEQ ID NO: 160628 - DNA, 20 bp, Artificial Sequence
  Description of Artificial Sequence: Synthetic oligonucleotide
  Target: LAMA2; (+) strand; PAM type: NRG; PAM sequence: AAG
taaaaaaaaaaaaaaaggca

SEQ ID NO: 160629 - DNA, 20 bp, Artificial Sequence
  Description of Artificial Sequence: Synthetic oligonucleotide
  Target: LAMA2; (+) strand; PAM type: NRG; PAM sequence: AAG
aagttttttaaaaaattaat

SEQ ID NO: 160630 - DNA, 20 bp, Artificial Sequence
  Description of Artificial Sequence: Synthetic oligonucleotide
  Target: LAMA2; (+) strand; PAM type: NRG; PAM sequence: TGG
gtcgtatctataatttatta

SEQ ID NO: 160631 - DNA, 20 bp, Artificial Sequence
  Description of Artificial Sequence: Synthetic oligonucleotide
  Target: LAMA2; (+) strand; PAM type: NRG; PAM sequence: CAG
aatatgctttcatacttttt

SEQ ID NO: 160632 - DNA, 20 bp, Artificial Sequence
  Description of Artificial Sequence: Synthetic oligonucleotide
  Target: LAMA2; (+) strand; PAM type: NRG; PAM sequence: AAG
ttcatactttttcagtataa

SEQ ID NO: 160633 - DNA, 20 bp, Artificial Sequence
  Description of Artificial Sequence: Synthetic oligonucleotide
  Target: LAMA2; (+) strand; PAM type: NRG; PAM sequence: AGG
tcatactttttcagtataaa

SEQ ID NO: 160634 - DNA, 20 bp, Artificial Sequence
  Description of Artificial Sequence: Synthetic oligonucleotide
  Target: LAMA2; (+) strand; PAM type: NRG; PAM sequence: GGG
catactttttcagtataaaa

SEQ ID NO: 160635 - DNA, 20 bp, Artificial Sequence
  Description of Artificial Sequence: Synthetic oligonucleotide
  Target: LAMA2; (+) strand; PAM type: NRG; PAM sequence: CAG
aatcatattattccattttg

SEQ ID NO: 160636 - DNA, 20 bp, Artificial Sequence
  Description of Artificial Sequence: Synthetic oligonucleotide
  Target: LAMA2; (+) strand; PAM type: NRG; PAM sequence: TGG
tattattccattttgcagaa

SEQ ID NO: 160637 - DNA, 20 bp, Artificial Sequence
  Description of Artificial Sequence: Synthetic oligonucleotide
  Target: LAMA2; (+) strand; PAM type: NRG; PAM sequence: GGG
attattccattttgcagaat

SEQ ID NO: 160638 - DNA, 20 bp, Artificial Sequence
  Description of Artificial Sequence: Synthetic oligonucleotide
  Target: LAMA2; (+) strand; PAM type: NRG; PAM sequence: CAG
ccattttgcagaatgggaaa

SEQ ID NO: 160639 - DNA, 20 bp, Artificial Sequence
  Description of Artificial Sequence: Synthetic oligonucleotide
  Target: LAMA2; (+) strand; PAM type: NRG; PAM sequence: AGG
cattttgcagaatgggaaac

SEQ ID NO: 160640 - DNA, 20 bp, Artificial Sequence
  Description of Artificial Sequence: Synthetic oligonucleotide
  Target: LAMA2; (+) strand; PAM type: NRG; PAM sequence: TAG
tgcagaatgggaaacaggtt

SEQ ID NO: 160641 - DNA, 20 bp, Artificial Sequence
  Description of Artificial Sequence: Synthetic oligonucleotide
  Target: LAMA2; (+) strand; PAM type: NRG; PAM sequence: GAG
cagaatgggaaacaggttta

SEQ ID NO: 160642 - DNA, 20 bp, Artificial Sequence
  Description of Artificial Sequence: Synthetic oligonucleotide
  Target: LAMA2; (+) strand; PAM type: NRG; PAM sequence: AAG
ttagagaaatatatcgttca

SEQ ID NO: 160643 - DNA, 20 bp, Artificial Sequence
  Description of Artificial Sequence: Synthetic oligonucleotide
  Target: LAMA2; (+) strand; PAM type: NRG; PAM sequence: TAG
atatcgttcaaagacatact

SEQ ID NO: 160644 - DNA, 20 bp, Artificial Sequence
  Description of Artificial Sequence: Synthetic oligonucleotide
  Target: LAMA2; (+) strand; PAM type: NRG; PAM sequence: AAG
acatacttagaaaataaatc

SEQ ID NO: 160645 - DNA, 20 bp, Artificial Sequence
  Description of Artificial Sequence: Synthetic oligonucleotide
  Target: LAMA2; (+) strand; PAM type: NRG; PAM sequence: AAG
aaaataaatcaagtctaatt

SEQ ID NO: 160646 - DNA, 20 bp, Artificial Sequence
  Description of Artificial Sequence: Synthetic oligonucleotide
  Target: LAMA2; (+) strand; PAM type: NRG; PAM sequence: TGG
ctaattaagaaatgcaattg

SEQ ID NO: 160647 - DNA, 20 bp, Artificial Sequence
  Description of Artificial Sequence: Synthetic oligonucleotide
  Target: LAMA2; (+) strand; PAM type: NRG; PAM sequence: GAG
aattaagaaatgcaattgtg

SEQ ID NO: 160648 - DNA, 20 bp, Artificial Sequence
  Description of Artificial Sequence: Synthetic oligonucleotide
  Target: LAMA2; (+) strand; PAM type: NRG; PAM sequence: CAG
tgcaattgtggagattaaat

SEQ ID NO: 160649 - DNA, 20 bp, Artificial Sequence
  Description of Artificial Sequence: Synthetic oligonucleotide
  Target: LAMA2; (+) strand; PAM type: NRG; PAM sequence: TAG
ggagattaaatcagatttca

SEQ ID NO: 160650 - DNA, 20 bp, Artificial Sequence
  Description of Artificial Sequence: Synthetic oligonucleotide
  Target: LAMA2; (+) strand; PAM type: NRG; PAM sequence: AAG
atcagatttcatagtactta

SEQ ID NO: 160651 - DNA, 20 bp, Artificial Sequence
  Description of Artificial Sequence: Synthetic oligonucleotide
  Target: LAMA2; (+) strand; PAM type: NRG; PAM sequence: AGG
tcagatttcatagtacttaa

SEQ ID NO: 160652 - DNA, 20 bp, Artificial Sequence
  Description of Artificial Sequence: Synthetic oligonucleotide
  Target: LAMA2; (+) strand; PAM type: NRG; PAM sequence: AAG
atagtacttaaaggtaatta

SEQ ID NO: 160653 - DNA, 20 bp, Artificial Sequence
  Description of Artificial Sequence: Synthetic oligonucleotide
  Target: LAMA2; (+) strand; PAM type: NRG; PAM sequence: AAG
ttaaaggtaattaaagaaat

SEQ ID NO: 160654 - DNA, 20 bp, Artificial Sequence
  Description of Artificial Sequence: Synthetic oligonucleotide
  Target: LAMA2; (+) strand; PAM type: NRG; PAM sequence: GAG
gtttgcttaatgattctcct

SEQ ID NO: 160655 - DNA, 20 bp, Artificial Sequence
  Description of Artificial Sequence: Synthetic oligonucleotide
  Target: LAMA2; (+) strand; PAM type: NRG; PAM sequence: AAG
ttaatgattctcctgagaat

SEQ ID NO: 160656 - DNA, 20 bp, Artificial Sequence
  Description of Artificial Sequence: Synthetic oligonucleotide
  Target: LAMA2; (+) strand; PAM type: NRG; PAM sequence: TAG
atgattctcctgagaataag

SEQ ID NO: 160657 - DNA, 20 bp, Artificial Sequence
  Description of Artificial Sequence: Synthetic oligonucleotide
  Target: LAMA2; (+) strand; PAM type: NRG; PAM sequence: AGG
tgattctcctgagaataagt

SEQ ID NO: 160658 - DNA, 20 bp, Artificial Sequence
  Description of Artificial Sequence: Synthetic oligonucleotide
  Target: LAMA2; (+) strand; PAM type: NRG; PAM sequence: GAG
attctcctgagaataagtag

SEQ ID NO: 160659 - DNA, 20 bp, Artificial Sequence
  Description of Artificial Sequence: Synthetic oligonucleotide
  Target: LAMA2; (+) strand; PAM type: NRG; PAM sequence: GAG
tctcctgagaataagtagga

SEQ ID NO: 160660 - DNA, 20 bp, Artificial Sequence
  Description of Artificial Sequence: Synthetic oligonucleotide
  Target: LAMA2; (+) strand; PAM type: NRG; PAM sequence: AAG
taggagagatcattgaactg

SEQ ID NO: 160661 - DNA, 20 bp, Artificial Sequence
  Description of Artificial Sequence: Synthetic oligonucleotide
  Target: LAMA2; (+) strand; PAM type: NRG; PAM sequence: AAG
gagagatcattgaactgaag

SEQ ID NO: 160662 - DNA, 20 bp, Artificial Sequence
  Description of Artificial Sequence: Synthetic oligonucleotide
  Target: LAMA2; (+) strand; PAM type: NRG; PAM sequence: TAG
gaactgaagaagaaaatact

SEQ ID NO: 160663 - DNA, 20 bp, Artificial Sequence
  Description of Artificial Sequence: Synthetic oligonucleotide
  Target: LAMA2; (+) strand; PAM type: NRG; PAM sequence: CAG
aagaaaatacttagaaactt

SEQ ID NO: 160664 - DNA, 20 bp, Artificial Sequence
  Description of Artificial Sequence: Synthetic oligonucleotide
  Target: LAMA2; (+) strand; PAM type: NRG; PAM sequence: AAG
acgctaacaccaaaatcatg

SEQ ID NO: 160665 - DNA, 20 bp, Artificial Sequence
  Description of Artificial Sequence: Synthetic oligonucleotide
  Target: LAMA2; (+) strand; PAM type: NRG; PAM sequence: CAG
tctttttctcctcttcctct

SEQ ID NO: 160666 - DNA, 20 bp, Artificial Sequence
  Description of Artificial Sequence: Synthetic oligonucleotide
  Target: LAMA2; (+) strand; PAM type: NRG; PAM sequence: CAG
tctcagtccctgcccctttt

SEQ ID NO: 160667 - DNA, 20 bp, Artificial Sequence
  Description of Artificial Sequence: Synthetic oligonucleotide
  Target: LAMA2; (+) strand; PAM type: NRG; PAM sequence: CAG
attctcattaccctcatctc

SEQ ID NO: 160668 - DNA, 20 bp, Artificial Sequence
  Description of Artificial Sequence: Synthetic oligonucleotide
  Target: LAMA2; (+) strand; PAM type: NRG; PAM sequence: TAG
gcttctccactgacattgtg

SEQ ID NO: 160669 - DNA, 20 bp, Artificial Sequence
  Description of Artificial Sequence: Synthetic oligonucleotide
  Target: LAMA2; (+) strand; PAM type: NRG; PAM sequence: TGG
cattgtgtagccactcaaaa

SEQ ID NO: 160670 - DNA, 20 bp, Artificial Sequence
  Description of Artificial Sequence: Synthetic oligonucleotide
  Target: LAMA2; (+) strand; PAM type: NRG; PAM sequence: AAG
cttatcctacccaactgttc

SEQ ID NO: 160671 - DNA, 20 bp, Artificial Sequence
  Description of Artificial Sequence: Synthetic oligonucleotide
  Target: LAMA2; (+) strand; PAM type: NRG; PAM sequence: TAG
caactgttcaagataataat

SEQ ID NO: 160672 - DNA, 20 bp, Artificial Sequence
  Description of Artificial Sequence: Synthetic oligonucleotide
  Target: LAMA2; (+) strand; PAM type: NRG; PAM sequence: AAG
tcaagataataattagttga

SEQ ID NO: 160673 - DNA, 20 bp, Artificial Sequence
  Description of Artificial Sequence: Synthetic oligonucleotide
  Target: LAMA2; (+) strand; PAM type: NRG; PAM sequence: AGG
caagataataattagttgaa

SEQ ID NO: 160674 - DNA, 20 bp, Artificial Sequence
  Description of Artificial Sequence: Synthetic oligonucleotide
  Target: LAMA2; (+) strand; PAM type: NRG; PAM sequence: GAG
agataataattagttgaaag

SEQ ID NO: 160675 - DNA, 20 bp, Artificial Sequence
  Description of Artificial Sequence: Synthetic oligonucleotide
  Target: LAMA2; (+) strand; PAM type: NRG; PAM sequence: CAG
ccctgttgtgtatgcaaata

SEQ ID NO: 160676 - DNA, 20 bp, Artificial Sequence
  Description of Artificial Sequence: Synthetic oligonucleotide
  Target: LAMA2; (+) strand; PAM type: NRG; PAM sequence: TGG
tgattttctaaccctaatga

SEQ ID NO: 160677 - DNA, 20 bp, Artificial Sequence
  Description of Artificial Sequence: Synthetic oligonucleotide
  Target: LAMA2; (+) strand; PAM type: NRG; PAM sequence: AAG
ttttctaaccctaatgatgg

SEQ ID NO: 160678 - DNA, 20 bp, Artificial Sequence
  Description of Artificial Sequence: Synthetic oligonucleotide
  Target: LAMA2; (+) strand; PAM type: NRG; PAM sequence: AAG
taattttatacccatgatta

SEQ ID NO: 160679 - DNA, 20 bp, Artificial Sequence
  Description of Artificial Sequence: Synthetic oligonucleotide
  Target: LAMA2; (+) strand; PAM type: NRG; PAM sequence: AGG
aattttatacccatgattaa

SEQ ID NO: 160680 - DNA, 20 bp, Artificial Sequence
  Description of Artificial Sequence: Synthetic oligonucleotide
  Target: LAMA2; (+) strand; PAM type: NRG; PAM sequence: GAG
ttttatacccatgattaaag

SEQ ID NO: 160681 - DNA, 20 bp, Artificial Sequence
  Description of Artificial Sequence: Synthetic oligonucleotide
  Target: LAMA2; (+) strand; PAM type: NRG; PAM sequence: AAG
tttatatcacatacaatccc

SEQ ID NO: 160682 - DNA, 20 bp, Artificial Sequence
  Description of Artificial Sequence: Synthetic oligonucleotide
  Target: LAMA2; (+) strand; PAM type: NRG; PAM sequence: AAG
atatcacatacaatcccaag

SEQ ID NO: 160683 - DNA, 20 bp, Artificial Sequence
  Description of Artificial Sequence: Synthetic oligonucleotide
  Target: LAMA2; (+) strand; PAM type: NRG; PAM sequence: CAG
attttatttcaaatgcatga

SEQ ID NO: 160684 - DNA, 20 bp, Artificial Sequence
  Description of Artificial Sequence: Synthetic oligonucleotide
  Target: LAMA2; (+) strand; PAM type: NRG; PAM sequence: AAG
tttcaaatgcatgacagtta

SEQ ID NO: 160685 - DNA, 20 bp, Artificial Sequence
  Description of Artificial Sequence: Synthetic oligonucleotide
  Target: LAMA2; (+) strand; PAM type: NRG; PAM sequence: TAG
atatgtgtttaattttattt

SEQ ID NO: 160686 - DNA, 20 bp, Artificial Sequence
  Description of Artificial Sequence: Synthetic oligonucleotide
  Target: LAMA2; (+) strand; PAM type: NRG; PAM sequence: GAG
atgtgtttaattttatttta

SEQ ID NO: 160687 - DNA, 20 bp, Artificial Sequence
  Description of Artificial Sequence: Synthetic oligonucleotide
  Target: LAMA2; (+) strand; PAM type: NRG; PAM sequence: TGG
ttaattttattttagagtat

SEQ ID NO: 160688 - DNA, 20 bp, Artificial Sequence
  Description of Artificial Sequence: Synthetic oligonucleotide
  Target: LAMA2; (+) strand; PAM type: NRG; PAM sequence: TGG
agtattggattaactctctg

SEQ ID NO: 160689 - DNA, 20 bp, Artificial Sequence
  Description of Artificial Sequence: Synthetic oligonucleotide
  Target: LAMA2; (+) strand; PAM type: NRG; PAM sequence: GGG
gtattggattaactctctgt

SEQ ID NO: 160690 - DNA, 20 bp, Artificial Sequence
  Description of Artificial Sequence: Synthetic oligonucleotide
  Target: LAMA2; (+) strand; PAM type: NRG; PAM sequence: GAG
attggattaactctctgtgg

SEQ ID NO: 160691 - DNA, 20 bp, Artificial Sequence
  Description of Artificial Sequence: Synthetic oligonucleotide
  Target: LAMA2; (+) strand; PAM type: NRG; PAM sequence: TAG
tctgtgggagcatttaacgt

SEQ ID NO: 160692 - DNA, 20 bp, Artificial Sequence
  Description of Artificial Sequence: Synthetic oligonucleotide
  Target: LAMA2; (+) strand; PAM type: NRG; PAM sequence: CAG
ttaacgttagaactgaattt

SEQ ID NO: 160693 - DNA, 20 bp, Artificial Sequence
  Description of Artificial Sequence: Synthetic oligonucleotide
  Target: LAMA2; (+) strand; PAM type: NRG; PAM sequence: AGG
taacgttagaactgaatttc

SEQ ID NO: 160694 - DNA, 20 bp, Artificial Sequence
  Description of Artificial Sequence: Synthetic oligonucleotide
  Target: LAMA2; (+) strand; PAM type: NRG; PAM sequence: CAG
gaactgaatttcaggaccca

SEQ ID NO: 160695 - DNA, 20 bp, Artificial Sequence
  Description of Artificial Sequence: Synthetic oligonucleotide
  Target: LAMA2; (+) strand; PAM type: NRG; PAM sequence: AAG
ctgaatttcaggacccacag

SEQ ID NO: 160696 - DNA, 20 bp, Artificial Sequence
  Description of Artificial Sequence: Synthetic oligonucleotide
  Target: LAMA2; (+) strand; PAM type: NRG; PAM sequence: AGG
tgaatttcaggacccacaga

SEQ ID NO: 160697 - DNA, 20 bp, Artificial Sequence
  Description of Artificial Sequence: Synthetic oligonucleotide
  Target: LAMA2; (+) strand; PAM type: NRG; PAM sequence: CAG
aggacccacagaaggaccca

SEQ ID NO: 160698 - DNA, 20 bp, Artificial Sequence
  Description of Artificial Sequence: Synthetic oligonucleotide
  Target: LAMA2; (+) strand; PAM type: NRG; PAM sequence: AAG
acccacagaaggacccacag

SEQ ID NO: 160699 - DNA, 20 bp, Artificial Sequence
  Description of Artificial Sequence: Synthetic oligonucleotide
  Target: LAMA2; (+) strand; PAM type: NRG; PAM sequence: AAG
cacagaaggacccacagaag

SEQ ID NO: 160700 - DNA, 20 bp, Artificial Sequence
  Description of Artificial Sequence: Synthetic oligonucleotide
  Target: LAMA2; (+) strand; PAM type: NRG; PAM sequence: CAG
tttccctaatgtctgataat

SEQ ID NO: 160701 - DNA, 20 bp, Artificial Sequence
  Description of Artificial Sequence: Synthetic oligonucleotide
  Target: LAMA2; (+) strand; PAM type: NRG; PAM sequence: AGG
ttccctaatgtctgataatc

SEQ ID NO: 160702 - DNA, 20 bp, Artificial Sequence
  Description of Artificial Sequence: Synthetic oligonucleotide
  Target: LAMA2; (+) strand; PAM type: NRG; PAM sequence: GAG
tctgataatcaggaattgtt

SEQ ID NO: 160703 - DNA, 20 bp, Artificial Sequence
  Description of Artificial Sequence: Synthetic oligonucleotide
  Target: LAMA2; (+) strand; PAM type: NRG; PAM sequence: GAG
ggaattgttgagcttctatt

SEQ ID NO: 160704 - DNA, 20 bp, Artificial Sequence
  Description of Artificial Sequence: Synthetic oligonucleotide
  Target: LAMA2; (+) strand; PAM type: NRG; PAM sequence: TGG
ttgagcaattgttttgcttt

SEQ ID NO: 160705 - DNA, 20 bp, Artificial Sequence
  Description of Artificial Sequence: Synthetic oligonucleotide
  Target: LAMA2; (+) strand; PAM type: NRG; PAM sequence: TGG
attgttttgcttttggcttc

SEQ ID NO: 160706 - DNA, 20 bp, Artificial Sequence
  Description of Artificial Sequence: Synthetic oligonucleotide
  Target: LAMA2; (+) strand; PAM type: NRG; PAM sequence: TAG
ttgattgttcccttttgcat

SEQ ID NO: 160707 - DNA, 20 bp, Artificial Sequence
  Description of Artificial Sequence: Synthetic oligonucleotide
  Target: LAMA2; (+) strand; PAM type: NRG; PAM sequence: AAG
attagctgtgaaaaacctca

SEQ ID NO: 160708 - DNA, 20 bp, Artificial Sequence
  Description of Artificial Sequence: Synthetic oligonucleotide
  Target: LAMA2; (+) strand; PAM type: NRG; PAM sequence: AAG
tgaattctaaatacaccctt

SEQ ID NO: 160709 - DNA, 20 bp, Artificial Sequence
  Description of Artificial Sequence: Synthetic oligonucleotide
  Target: LAMA2; (+) strand; PAM type: NRG; PAM sequence: TAG
ccttaagtttatcttttttt

SEQ ID NO: 160710 - DNA, 20 bp, Artificial Sequence
  Description of Artificial Sequence: Synthetic oligonucleotide
  Target: LAMA2; (+) strand; PAM type: NRG; PAM sequence: CAG
tcttaatgcacatattttga

SEQ ID NO: 160711 - DNA, 20 bp, Artificial Sequence
  Description of Artificial Sequence: Synthetic oligonucleotide
  Target: LAMA2; (+) strand; PAM type: NRG; PAM sequence: TAG
aatgcacatattttgacaga

SEQ ID NO: 160712 - DNA, 20 bp, Artificial Sequence
  Description of Artificial Sequence: Synthetic oligonucleotide
  Target: LAMA2; (+) strand; PAM type: NRG; PAM sequence: TAG
agatagaattaaattctttt

SEQ ID NO: 160713 - DNA, 20 bp, Artificial Sequence
  Description of Artificial Sequence: Synthetic oligonucleotide
  Target: LAMA2; (+) strand; PAM type: NRG; PAM sequence: AAG
aattaaattctttttagaac

SEQ ID NO: 160714 - DNA, 20 bp, Artificial Sequence
  Description of Artificial Sequence: Synthetic oligonucleotide
  Target: LAMA2; (+) strand; PAM type: NRG; PAM sequence: AGG
attaaattctttttagaaca

SEQ ID NO: 160715 - DNA, 20 bp, Artificial Sequence
  Description of Artificial Sequence: Synthetic oligonucleotide
  Target: LAMA2; (+) strand; PAM type: NRG; PAM sequence: TAG
ttcacatacataaacatata

SEQ ID NO: 160716 - DNA, 20 bp, Artificial Sequence
  Description of Artificial Sequence: Synthetic oligonucleotide
  Target: LAMA2; (+) strand; PAM type: NRG; PAM sequence: TAG
acatatatagattgttgaca

SEQ ID NO: 160717 - DNA, 20 bp, Artificial Sequence
  Description of Artificial Sequence: Synthetic oligonucleotide
  Target: LAMA2; (+) strand; PAM type: NRG; PAM sequence: AAG
atacatatatacatgcttat

SEQ ID NO: 160718 - DNA, 20 bp, Artificial Sequence
  Description of Artificial Sequence: Synthetic oligonucleotide
  Target: LAMA2; (+) strand; PAM type: NRG; PAM sequence: TAG
catatatacatgcttataag

SEQ ID NO: 160719 - DNA, 20 bp, Artificial Sequence
  Description of Artificial Sequence: Synthetic oligonucleotide
  Target: LAMA2; (+) strand; PAM type: NRG; PAM sequence: AAG
taagtagattataaaaataa

SEQ ID NO: 160720 - DNA, 20 bp, Artificial Sequence
  Description of Artificial Sequence: Synthetic oligonucleotide
  Target: LAMA2; (+) strand; PAM type: NRG; PAM sequence: CAG
taaaaataaaagtatatatt

SEQ ID NO: 160721 - DNA, 20 bp, Artificial Sequence
  Description of Artificial Sequence: Synthetic oligonucleotide
  Target: LAMA2; (+) strand; PAM type: NRG; PAM sequence: AAG
aaagtatatattcagccatt

SEQ ID NO: 160722 - DNA, 20 bp, Artificial Sequence
  Description of Artificial Sequence: Synthetic oligonucleotide
  Target: LAMA2; (+) strand; PAM type: NRG; PAM sequence: GAG
agtatatattcagccattaa

SEQ ID NO: 160723 - DNA, 20 bp, Artificial Sequence
  Description of Artificial Sequence: Synthetic oligonucleotide
  Target: LAMA2; (+) strand; PAM type: NRG; PAM sequence: AGG
gtatatattcagccattaag

SEQ ID NO: 160724 - DNA, 20 bp, Artificial Sequence
  Description of Artificial Sequence: Synthetic oligonucleotide
  Target: LAMA2; (+) strand; PAM type: NRG; PAM sequence: GGG
tatatattcagccattaaga

SEQ ID NO: 160725 - DNA, 20 bp, Artificial Sequence
  Description of Artificial Sequence: Synthetic oligonucleotide
  Target: LAMA2; (+) strand; PAM type: NRG; PAM sequence: CAG
agagggattattttcatgtc

SEQ ID NO: 160726 - DNA, 20 bp, Artificial Sequence
  Description of Artificial Sequence: Synthetic oligonucleotide
  Target: LAMA2; (+) strand; PAM type: NRG; PAM sequence: TGG
tttcatgtccagctttttat

SEQ ID NO: 160727 - DNA, 20 bp, Artificial Sequence
  Description of Artificial Sequence: Synthetic oligonucleotide
  Target: LAMA2; (+) strand; PAM type: NRG; PAM sequence: CAG
tttattggttatcccaataa

SEQ ID NO: 160728 - DNA, 20 bp, Artificial Sequence
  Description of Artificial Sequence: Synthetic oligonucleotide
  Target: LAMA2; (+) strand; PAM type: NRG; PAM sequence: TGG
ttcccctcctcccctatttg

SEQ ID NO: 160729 - DNA, 20 bp, Artificial Sequence
  Description of Artificial Sequence: Synthetic oligonucleotide
  Target: LAMA2; (+) strand; PAM type: NRG; PAM sequence: TGG
tggaaaatgcccgctgctct

SEQ ID NO: 160730 - DNA, 20 bp, Artificial Sequence
  Description of Artificial Sequence: Synthetic oligonucleotide
  Target: LAMA2; (+) strand; PAM type: NRG; PAM sequence: TGG
tggctttcttgtgtttcctg

SEQ ID NO: 160731 - DNA, 20 bp, Artificial Sequence
  Description of Artificial Sequence: Synthetic oligonucleotide
  Target: LAMA2; (+) strand; PAM type: NRG; PAM sequence: TGG
ttcttgtgtttcctgtggcg

SEQ ID NO: 160732 - DNA, 20 bp, Artificial Sequence
  Description of Artificial Sequence: Synthetic oligonucleotide
  Target: LAMA2; (+) strand; PAM type: NRG; PAM sequence: TGG
gtgtttcctgtggcgtggtt

SEQ ID NO: 160733 - DNA, 20 bp, Artificial Sequence
  Description of Artificial Sequence: Synthetic oligonucleotide
  Target: LAMA2; (+) strand; PAM type: NRG; PAM sequence: CGG
gtggcgtggtttggataatc

SEQ ID NO: 160734 - DNA, 20 bp, Artificial Sequence
  Description of Artificial Sequence: Synthetic oligonucleotide
  Target: LAMA2; (+) strand; PAM type: NRG; PAM sequence: GGG
tggcgtggtttggataatcc

SEQ ID NO: 160735 - DNA, 20 bp, Artificial Sequence
  Description of Artificial Sequence: Synthetic oligonucleotide
  Target: LAMA2; (+) strand; PAM type: NRG; PAM sequence: AAG
ggtttggataatccgggatg

SEQ ID NO: 160736 - DNA, 20 bp, Artificial Sequence
  Description of Artificial Sequence: Synthetic oligonucleotide
  Target: LAMA2; (+) strand; PAM type: NRG; PAM sequence: TGG
ggatgaagaacattttctgc

SEQ ID NO: 160737 - DNA, 20 bp, Artificial Sequence
  Description of Artificial Sequence: Synthetic oligonucleotide
  Target: LAMA2; (+) strand; PAM type: NRG; PAM sequence: TGG
aagaacattttctgctggtg

SEQ ID NO: 160738 - DNA, 20 bp, Artificial Sequence
  Description of Artificial Sequence: Synthetic oligonucleotide
  Target: LAMA2; (+) strand; PAM type: NRG; PAM sequence: GAG
gaacattttctgctggtgtg

SEQ ID NO: 160739 - DNA, 20 bp, Artificial Sequence
  Description of Artificial Sequence: Synthetic oligonucleotide
  Target: LAMA2; (+) strand; PAM type: NRG; PAM sequence: TAG
attttctgctggtgtggagc

SEQ ID NO: 160740 - DNA, 20 bp, Artificial Sequence
  Description of Artificial Sequence: Synthetic oligonucleotide
  Target: LAMA2; (+) strand; PAM type: NRG; PAM sequence: TAG
ctggtgtggagctagccaaa

SEQ ID NO: 160741 - DNA, 20 bp, Artificial Sequence
  Description of Artificial Sequence: Synthetic oligonucleotide
  Target: LAMA2; (+) strand; PAM type: NRG; PAM sequence: GAG
ggtgtggagctagccaaata

SEQ ID NO: 160742 - DNA, 20 bp, Artificial Sequence
  Description of Artificial Sequence: Synthetic oligonucleotide
  Target: LAMA2; (+) strand; PAM type: NRG; PAM sequence: TGG
agagttaaatgacataatct

SEQ ID NO: 160743 - DNA, 20 bp, Artificial Sequence
  Description of Artificial Sequence: Synthetic oligonucleotide
  Target: LAMA2; (+) strand; PAM type: NRG; PAM sequence: GAG
acataatcttggaatcactt

SEQ ID NO: 160744 - DNA, 20 bp, Artificial Sequence
  Description of Artificial Sequence: Synthetic oligonucleotide
  Target: LAMA2; (+) strand; PAM type: NRG; PAM sequence: AGG
cataatcttggaatcacttg

SEQ ID NO: 160745 - DNA, 20 bp, Artificial Sequence
  Description of Artificial Sequence: Synthetic oligonucleotide
  Target: LAMA2; (+) strand; PAM type: NRG; PAM sequence: CGG
acaatttcctctttgtgtca

SEQ ID NO: 160746 - DNA, 20 bp, Artificial Sequence
  Description of Artificial Sequence: Synthetic oligonucleotide
  Target: LAMA2; (+) strand; PAM type: NRG; PAM sequence: TAG
tctttgtgtcacggaacaat

SEQ ID NO: 160747 - DNA, 20 bp, Artificial Sequence
  Description of Artificial Sequence: Synthetic oligonucleotide
  Target: LAMA2; (+) strand; PAM type: NRG; PAM sequence: TGG
gaacaattagcttcatgtct

SEQ ID NO: 160748 - DNA, 20 bp, Artificial Sequence
  Description of Artificial Sequence: Synthetic oligonucleotide
  Target: LAMA2; (+) strand; PAM type: NRG; PAM sequence: TAG
cttcatgtcttggccaaaat

SEQ ID NO: 160749 - DNA, 20 bp, Artificial Sequence
  Description of Artificial Sequence: Synthetic oligonucleotide
  Target: LAMA2; (+) strand; PAM type: NRG; PAM sequence: AAG
tcttggccaaaattagtgct

SEQ ID NO: 160750 - DNA, 20 bp, Artificial Sequence
  Description of Artificial Sequence: Synthetic oligonucleotide
  Target: LAMA2; (+) strand; PAM type: NRG; PAM sequence: AAG
gctaagtgactgcatttgcc

SEQ ID NO: 160751 - DNA, 20 bp, Artificial Sequence
  Description of Artificial Sequence: Synthetic oligonucleotide
  Target: LAMA2; (+) strand; PAM type: NRG; PAM sequence: AGG
ctaagtgactgcatttgcca

SEQ ID NO: 160752 - DNA, 20 bp, Artificial Sequence
  Description of Artificial Sequence: Synthetic oligonucleotide
  Target: LAMA2; (+) strand; PAM type: NRG; PAM sequence: TAG
atttgccaaggcaaattctg

SEQ ID NO: 160753 - DNA, 20 bp, Artificial Sequence
  Description of Artificial Sequence: Synthetic oligonucleotide
  Target: LAMA2; (+) strand; PAM type: NRG; PAM sequence: TAG
ttgaatgccatcttctgcca

SEQ ID NO: 160754 - DNA, 20 bp, Artificial Sequence
  Description of Artificial Sequence: Synthetic oligonucleotide
  Target: LAMA2; (+) strand; PAM type: NRG; PAM sequence: CAG
catagctgtaactgcaatta

SEQ ID NO: 160755 - DNA, 20 bp, Artificial Sequence
  Description of Artificial Sequence: Synthetic oligonucleotide
  Target: LAMA2; (+) strand; PAM type: NRG; PAM sequence: AAG
gtaactgcaattacagcaat

SEQ ID NO: 160756 - DNA, 20 bp, Artificial Sequence
  Description of Artificial Sequence: Synthetic oligonucleotide
  Target: LAMA2; (+) strand; PAM type: NRG; PAM sequence: GAG
aactgcaattacagcaataa

SEQ ID NO: 160757 - DNA, 20 bp, Artificial Sequence
  Description of Artificial Sequence: Synthetic oligonucleotide
  Target: LAMA2; (+) strand; PAM type: NRG; PAM sequence: GAG
ctgcaattacagcaataaga

SEQ ID NO: 160758 - DNA, 20 bp, Artificial Sequence
  Description of Artificial Sequence: Synthetic oligonucleotide
  Target: LAMA2; (+) strand; PAM type: NRG; PAM sequence: CAG
gcaataagagagtgaatctt

SEQ ID NO: 160759 - DNA, 20 bp, Artificial Sequence
  Description of Artificial Sequence: Synthetic oligonucleotide
  Target: LAMA2; (+) strand; PAM type: NRG; PAM sequence: AAG
tcttcagtttatgttgttga

SEQ ID NO: 160760 - DNA, 20 bp, Artificial Sequence
  Description of Artificial Sequence: Synthetic oligonucleotide
  Target: LAMA2; (+) strand; PAM type: NRG; PAM sequence: AAG
atgttgttgaaagaatatca

SEQ ID NO: 160761 - DNA, 20 bp, Artificial Sequence
  Description of Artificial Sequence: Synthetic oligonucleotide
  Target: LAMA2; (+) strand; PAM type: NRG; PAM sequence: CAG
agaatatcaaagcacaaata

SEQ ID NO: 160762 - DNA, 20 bp, Artificial Sequence
  Description of Artificial Sequence: Synthetic oligonucleotide
  Target: LAMA2; (+) strand; PAM type: NRG; PAM sequence: GAG
caaatacagatatattttat

SEQ ID NO: 160763 - DNA, 20 bp, Artificial Sequence
  Description of Artificial Sequence: Synthetic oligonucleotide
  Target: LAMA2; (+) strand; PAM type: NRG; PAM sequence: AAG
tacagatatattttatgaga

SEQ ID NO: 160764 - DNA, 20 bp, Artificial Sequence
  Description of Artificial Sequence: Synthetic oligonucleotide
  Target: LAMA2; (+) strand; PAM type: NRG; PAM sequence: TGG
ttttatgagaaagttttatt

SEQ ID NO: 160765 - DNA, 20 bp, Artificial Sequence
  Description of Artificial Sequence: Synthetic oligonucleotide
  Target: LAMA2; (+) strand; PAM type: NRG; PAM sequence: GAG
ttatttggatgcgttatgtc

SEQ ID NO: 160766 - DNA, 20 bp, Artificial Sequence
  Description of Artificial Sequence: Synthetic oligonucleotide
  Target: LAMA2; (+) strand; PAM type: NRG; PAM sequence: TAG
atgtcgagtatctatattac

SEQ ID NO: 160767 - DNA, 20 bp, Artificial Sequence
  Description of Artificial Sequence: Synthetic oligonucleotide
  Target: LAMA2; (+) strand; PAM type: NRG; PAM sequence: CAG
taaacttacttaattcttac

SEQ ID NO: 160768 - DNA, 20 bp, Artificial Sequence
  Description of Artificial Sequence: Synthetic oligonucleotide
  Target: LAMA2; (+) strand; PAM type: NRG; PAM sequence: TAG
acttacttaattcttaccag

SEQ ID NO: 160769 - DNA, 20 bp, Artificial Sequence
  Description of Artificial Sequence: Synthetic oligonucleotide
  Target: LAMA2; (+) strand; PAM type: NRG; PAM sequence: AGG
cttacttaattcttaccagt

SEQ ID NO: 160770 - DNA, 20 bp, Artificial Sequence
  Description of Artificial Sequence: Synthetic oligonucleotide
  Target: LAMA2; (+) strand; PAM type: NRG; PAM sequence: TGG
cagtaggtttcaatgacaat

SEQ ID NO: 160771 - DNA, 20 bp, Artificial Sequence
  Description of Artificial Sequence: Synthetic oligonucleotide
  Target: LAMA2; (+) strand; PAM type: NRG; PAM sequence: TAG
gtttcaatgacaattggtta

SEQ ID NO: 160772 - DNA, 20 bp, Artificial Sequence
  Description of Artificial Sequence: Synthetic oligonucleotide
  Target: LAMA2; (+) strand; PAM type: NRG; PAM sequence: AGG
tttcaatgacaattggttat

SEQ ID NO: 160773 - DNA, 20 bp, Artificial Sequence
  Description of Artificial Sequence: Synthetic oligonucleotide
  Target: LAMA2; (+) strand; PAM type: NRG; PAM sequence: AAG
caatgacaattggttatagg

SEQ ID NO: 160774 - DNA, 20 bp, Artificial Sequence
  Description of Artificial Sequence: Synthetic oligonucleotide
  Target: LAMA2; (+) strand; PAM type: NRG; PAM sequence: AAG
tgacaattggttataggaag

SEQ ID NO: 160775 - DNA, 20 bp, Artificial Sequence
  Description of Artificial Sequence: Synthetic oligonucleotide
  Target: LAMA2; (+) strand; PAM type: NRG; PAM sequence: GAG
acaattggttataggaagaa

SEQ ID NO: 160776 - DNA, 20 bp, Artificial Sequence
  Description of Artificial Sequence: Synthetic oligonucleotide
  Target: LAMA2; (+) strand; PAM type: NRG; PAM sequence: AAG
gaagaagagaatatcacatt

SEQ ID NO: 160777 - DNA, 20 bp, Artificial Sequence
  Description of Artificial Sequence: Synthetic oligonucleotide
  Target: LAMA2; (+) strand; PAM type: NRG; PAM sequence: AAG
aatatcacattaagaatcta

SEQ ID NO: 160778 - DNA, 20 bp, Artificial Sequence
  Description of Artificial Sequence: Synthetic oligonucleotide
  Target: LAMA2; (+) strand; PAM type: NRG; PAM sequence: TAG
acattaagaatctaaagtcc

SEQ ID NO: 160779 - DNA, 20 bp, Artificial Sequence
  Description of Artificial Sequence: Synthetic oligonucleotide
  Target: LAMA2; (+) strand; PAM type: NRG; PAM sequence: TGG
gatcccatactaaattctcc

SEQ ID NO: 160780 - DNA, 20 bp, Artificial Sequence
  Description of Artificial Sequence: Synthetic oligonucleotide
  Target: LAMA2; (+) strand; PAM type: NRG; PAM sequence: TGG
ggaaattttgtatatgacct

SEQ ID NO: 160781 - DNA, 20 bp, Artificial Sequence
  Description of Artificial Sequence: Synthetic oligonucleotide
  Target: LAMA2; (+) strand; PAM type: NRG; PAM sequence: AAG
ttttgtatatgaccttggtt

SEQ ID NO: 160782 - DNA, 20 bp, Artificial Sequence
  Description of Artificial Sequence: Synthetic oligonucleotide
  Target: LAMA2; (+) strand; PAM type: NRG; PAM sequence: CAG
aaaactgtgcctgccctaac

SEQ ID NO: 160783 - DNA, 20 bp, Artificial Sequence
  Description of Artificial Sequence: Synthetic oligonucleotide
  Target: LAMA2; (+) strand; PAM type: NRG; PAM sequence: TAG
tgcctgccctaaccagctca

SEQ ID NO: 160784 - DNA, 20 bp, Artificial Sequence
  Description of Artificial Sequence: Synthetic oligonucleotide
  Target: LAMA2; (+) strand; PAM type: NRG; PAM sequence: AGG
gcctgccctaaccagctcat

SEQ ID NO: 160785 - DNA, 20 bp, Artificial Sequence
  Description of Artificial Sequence: Synthetic oligonucleotide
  Target: LAMA2; (+) strand; PAM type: NRG; PAM sequence: AAG
aaaatgtgataaaattgtaa

SEQ ID NO: 160786 - DNA, 20 bp, Artificial Sequence
  Description of Artificial Sequence: Synthetic oligonucleotide
  Target: LAMA2; (+) strand; PAM type: NRG; PAM sequence: AAG
gtaaaagtattctgaactgt

SEQ ID NO: 160787 - DNA, 20 bp, Artificial Sequence
  Description of Artificial Sequence: Synthetic oligonucleotide
  Target: LAMA2; (+) strand; PAM type: NRG; PAM sequence: AGG
taaaagtattctgaactgta

SEQ ID NO: 160788 - DNA, 20 bp, Artificial Sequence
  Description of Artificial Sequence: Synthetic oligonucleotide
  Target: LAMA2; (+) strand; PAM type: NRG; PAM sequence: GAG
aaagtattctgaactgtaag

SEQ ID NO: 160789 - DNA, 20 bp, Artificial Sequence
  Description of Artificial Sequence: Synthetic oligonucleotide
  Target: LAMA2; (+) strand; PAM type: NRG; PAM sequence: TAG
tattctgaactgtaaggagc

SEQ ID NO: 160790 - DNA, 20 bp, Artificial Sequence
  Description of Artificial Sequence: Synthetic oligonucleotide
  Target: LAMA2; (+) strand; PAM type: NRG; PAM sequence: AAG
gcctaatttttttctcgaaa

SEQ ID NO: 160791 - DNA, 20 bp, Artificial Sequence
  Description of Artificial Sequence: Synthetic oligonucleotide
  Target: LAMA2; (+) strand; PAM type: NRG; PAM sequence: CAG
gaaaaagtgttgatttttgt

SEQ ID NO: 160792 - DNA, 20 bp, Artificial Sequence
  Description of Artificial Sequence: Synthetic oligonucleotide
  Target: LAMA2; (+) strand; PAM type: NRG; PAM sequence: GAG
aagtgttgatttttgtcagt

SEQ ID NO: 160793 - DNA, 20 bp, Artificial Sequence
  Description of Artificial Sequence: Synthetic oligonucleotide
  Target: LAMA2; (+) strand; PAM type: NRG; PAM sequence: TGG
tgagcaccttttacttatgt

SEQ ID NO: 160794 - DNA, 20 bp, Artificial Sequence
  Description of Artificial Sequence: Synthetic oligonucleotide
  Target: LAMA2; (+) strand; PAM type: NRG; PAM sequence: GAG
gttggttttaactgacatgt

SEQ ID NO: 160795 - DNA, 20 bp, Artificial Sequence
  Description of Artificial Sequence: Synthetic oligonucleotide
  Target: LAMA2; (+) strand; PAM type: NRG; PAM sequence: AAG
actgacatgtgagtgtattt

SEQ ID NO: 160796 - DNA, 20 bp, Artificial Sequence
  Description of Artificial Sequence: Synthetic oligonucleotide
  Target: LAMA2; (+) strand; PAM type: NRG; PAM sequence: TAG
tctgaaatctattttatgaa

SEQ ID NO: 160797 - DNA, 20 bp, Artificial Sequence
  Description of Artificial Sequence: Synthetic oligonucleotide
  Target: LAMA2; (+) strand; PAM type: NRG; PAM sequence: AAG
ctattttatgaatagcttta

SEQ ID NO: 160798 - DNA, 20 bp, Artificial Sequence
  Description of Artificial Sequence: Synthetic oligonucleotide
  Target: LAMA2; (+) strand; PAM type: NRG; PAM sequence: AAG
atgaatagctttaaagtgtc

SEQ ID NO: 160799 - DNA, 20 bp, Artificial Sequence
  Description of Artificial Sequence: Synthetic oligonucleotide
  Target: LAMA2; (+) strand; PAM type: NRG; PAM sequence: AGG
tgaatagctttaaagtgtca

SEQ ID NO: 160800 - DNA, 20 bp, Artificial Sequence
  Description of Artificial Sequence: Synthetic oligonucleotide
  Target: LAMA2; (+) strand; PAM type: NRG; PAM sequence: CAG
tagctttaaagtgtcaaggc

SEQ ID NO: 160801 - DNA, 20 bp, Artificial Sequence
  Description of Artificial Sequence: Synthetic oligonucleotide
  Target: LAMA2; (+) strand; PAM type: NRG; PAM sequence: AGG
agctttaaagtgtcaaggcc

SEQ ID NO: 160802 - DNA, 20 bp, Artificial Sequence
  Description of Artificial Sequence: Synthetic oligonucleotide
  Target: LAMA2; (+) strand; PAM type: NRG; PAM sequence: TGG
agtgtcaaggccaggtgcaa

SEQ ID NO: 160803 - DNA, 20 bp, Artificial Sequence
  Description of Artificial Sequence: Synthetic oligonucleotide
  Target: LAMA2; (+) strand; PAM type: NRG; PAM sequence: TAG
atggctcatgcctgtaatcc

SEQ ID NO: 160804 - DNA, 20 bp, Artificial Sequence
  Description of Artificial Sequence: Synthetic oligonucleotide
  Target: LAMA2; (+) strand; PAM type: NRG; PAM sequence: TGG
tgcctgtaatcctagcactt

SEQ ID NO: 160805 - DNA, 20 bp, Artificial Sequence
  Description of Artificial Sequence: Synthetic oligonucleotide
  Target: LAMA2; (+) strand; PAM type: NRG; PAM sequence: GGG
gcctgtaatcctagcacttt

SEQ ID NO: 160806 - DNA, 20 bp, Artificial Sequence
  Description of Artificial Sequence: Synthetic oligonucleotide
  Target: LAMA2; (+) strand; PAM type: NRG; PAM sequence: GAG
ctgtaatcctagcactttgg

SEQ ID NO: 160807 - DNA, 20 bp, Artificial Sequence
  Description of Artificial Sequence: Synthetic oligonucleotide
  Target: LAMA2; (+) strand; PAM type: NRG; PAM sequence: AGG
tgtaatcctagcactttggg

SEQ ID NO: 160808 - DNA, 20 bp, Artificial Sequence
  Description of Artificial Sequence: Synthetic oligonucleotide
  Target: LAMA2; (+) strand; PAM type: NRG; PAM sequence: AAG
tcctagcactttgggaggcc

SEQ ID NO: 160809 - DNA, 20 bp, Artificial Sequence
  Description of Artificial Sequence: Synthetic oligonucleotide
  Target: LAMA2; (+) strand; PAM type: NRG; PAM sequence: AGG
cctagcactttgggaggcca

SEQ ID NO: 160810 - DNA, 20 bp, Artificial Sequence
  Description of Artificial Sequence: Synthetic oligonucleotide
  Target: LAMA2; (+) strand; PAM type: NRG; PAM sequence: CAG
agcactttgggaggccaagg

SEQ ID NO: 160811 - DNA, 20 bp, Artificial Sequence
  Description of Artificial Sequence: Synthetic oligonucleotide
  Target: LAMA2; (+) strand; PAM type: NRG; PAM sequence: AGG
gcactttgggaggccaaggc

SEQ ID NO: 160812 - DNA, 20 bp, Artificial Sequence
  Description of Artificial Sequence: Synthetic oligonucleotide
  Target: LAMA2; (+) strand; PAM type: NRG; PAM sequence: TGG
ctttgggaggccaaggcagg

SEQ ID NO: 160813 - DNA, 20 bp, Artificial Sequence
  Description of Artificial Sequence: Synthetic oligonucleotide
  Target: LAMA2; (+) strand; PAM type: NRG; PAM sequence: GAG
ccaaggcaggtggatcactt

SEQ ID NO: 160814 - DNA, 20 bp, Artificial Sequence
  Description of Artificial Sequence: Synthetic oligonucleotide
  Target: LAMA2; (+) strand; PAM type: NRG; PAM sequence: AGG
caaggcaggtggatcacttg

SEQ ID NO: 160815 - DNA, 20 bp, Artificial Sequence
  Description of Artificial Sequence: Synthetic oligonucleotide
  Target: LAMA2; (+) strand; PAM type: NRG; PAM sequence: CAG
gcaggtggatcacttgaggt

SEQ ID NO: 160816 - DNA, 20 bp, Artificial Sequence
  Description of Artificial Sequence: Synthetic oligonucleotide
  Target: LAMA2; (+) strand; PAM type: NRG; PAM sequence: AGG
caggtggatcacttgaggtc

SEQ ID NO: 160817 - DNA, 20 bp, Artificial Sequence
  Description of Artificial Sequence: Synthetic oligonucleotide
  Target: LAMA2; (+) strand; PAM type: NRG; PAM sequence: GAG
ggtggatcacttgaggtcag

SEQ ID NO: 160818 - DNA, 20 bp, Artificial Sequence
  Description of Artificial Sequence: Synthetic oligonucleotide
  Target: LAMA2; (+) strand; PAM type: NRG; PAM sequence: AAG
tcacttgaggtcaggagttc

SEQ ID NO: 160819 - DNA, 20 bp, Artificial Sequence
  Description of Artificial Sequence: Synthetic oligonucleotide
  Target: LAMA2; (+) strand; PAM type: NRG; PAM sequence: CAG
tgaggtcaggagttcaagac

SEQ ID NO: 160820 - DNA, 20 bp, Artificial Sequence
  Description of Artificial Sequence: Synthetic oligonucleotide
  Target: LAMA2; (+) strand; PAM type: NRG; PAM sequence: CGG
tcaggagttcaagaccagcc

SEQ ID NO: 160821 - DNA, 20 bp, Artificial Sequence
  Description of Artificial Sequence: Synthetic oligonucleotide
  Target: LAMA2; (+) strand; PAM type: NRG; PAM sequence: TGG
caagaccagcccggccaata

SEQ ID NO: 160822 - DNA, 20 bp, Artificial Sequence
  Description of Artificial Sequence: Synthetic oligonucleotide
  Target: LAMA2; (+) strand; PAM type: NRG; PAM sequence: GAG
accagcccggccaatatggt

SEQ ID NO: 160823 - DNA, 20 bp, Artificial Sequence
  Description of Artificial Sequence: Synthetic oligonucleotide
  Target: LAMA2; (+) strand; PAM type: NRG; PAM sequence: TGG
ttctactaaaaatacaaaaa

SEQ ID NO: 160824 - DNA, 20 bp, Artificial Sequence
  Description of Artificial Sequence: Synthetic oligonucleotide
  Target: LAMA2; (+) strand; PAM type: NRG; PAM sequence: GGG
tctactaaaaatacaaaaat

SEQ ID NO: 160825 - DNA, 20 bp, Artificial Sequence
  Description of Artificial Sequence: Synthetic oligonucleotide
  Target: LAMA2; (+) strand; PAM type: NRG; PAM sequence: CAG
ctaaaaatacaaaaatgggc

SEQ ID NO: 160826 - DNA, 20 bp, Artificial Sequence
  Description of Artificial Sequence: Synthetic oligonucleotide
  Target: LAMA2; (+) strand; PAM type: NRG; PAM sequence: AGG
taaaaatacaaaaatgggcc

SEQ ID NO: 160827 - DNA, 20 bp, Artificial Sequence
  Description of Artificial Sequence: Synthetic oligonucleotide
  Target: LAMA2; (+) strand; PAM type: NRG; PAM sequence: TGG
atacaaaaatgggccaggcc

SEQ ID NO: 160828 - DNA, 20 bp, Artificial Sequence
  Description of Artificial Sequence: Synthetic oligonucleotide
  Target: LAMA2; (+) strand; PAM type: NRG; PAM sequence: TAG
caaaaatgggccaggcctgg

SEQ ID NO: 160829 - DNA, 20 bp, Artificial Sequence
  Description of Artificial Sequence: Synthetic oligonucleotide
  Target: LAMA2; (+) strand; PAM type: NRG; PAM sequence: CAG
gtagcacctgcctgcaatcc

SEQ ID NO: 160830 - DNA, 20 bp, Artificial Sequence
  Description of Artificial Sequence: Synthetic oligonucleotide
  Target: LAMA2; (+) strand; PAM type: NRG; PAM sequence: CAG
tgcctgcaatcccagctact

SEQ ID NO: 160831 - DNA, 20 bp, Artificial Sequence
  Description of Artificial Sequence: Synthetic oligonucleotide
  Target: LAMA2; (+) strand; PAM type: NRG; PAM sequence: AGG
gcctgcaatcccagctactc

SEQ ID NO: 160832 - DNA, 20 bp, Artificial Sequence
  Description of Artificial Sequence: Synthetic oligonucleotide
  Target: LAMA2; (+) strand; PAM type: NRG; PAM sequence: GAG
ctgcaatcccagctactcag

SEQ ID NO: 160833 - DNA, 20 bp, Artificial Sequence
  Description of Artificial Sequence: Synthetic oligonucleotide
  Target: LAMA2; (+) strand; PAM type: NRG; PAM sequence: AGG
tgcaatcccagctactcagg

SEQ ID NO: 160834 - DNA, 20 bp, Artificial Sequence
  Description of Artificial Sequence: Synthetic oligonucleotide
  Target: LAMA2; (+) strand; PAM type: NRG; PAM sequence: GAG
tcccagctactcaggaggct

SEQ ID NO: 160835 - DNA, 20 bp, Artificial Sequence
  Description of Artificial Sequence: Synthetic oligonucleotide
  Target: LAMA2; (+) strand; PAM type: NRG; PAM sequence: TAG
tactcaggaggctgagacac

SEQ ID NO: 160836 - DNA, 20 bp, Artificial Sequence
  Description of Artificial Sequence: Synthetic oligonucleotide
  Target: LAMA2; (+) strand; PAM type: NRG; PAM sequence: CAG
acactagaatcgcttgaacc

SEQ ID NO: 160837 - DNA, 20 bp, Artificial Sequence
  Description of Artificial Sequence: Synthetic oligonucleotide
  Target: LAMA2; (+) strand; PAM type: NRG; PAM sequence: TAG
ctagaatcgcttgaacccag

SEQ ID NO: 160838 - DNA, 20 bp, Artificial Sequence
  Description of Artificial Sequence: Synthetic oligonucleotide
  Target: LAMA2; (+) strand; PAM type: NRG; PAM sequence: AGG
tagaatcgcttgaacccagt

SEQ ID NO: 160839 - DNA, 20 bp, Artificial Sequence
  Description of Artificial Sequence: Synthetic oligonucleotide
  Target: LAMA2; (+) strand; PAM type: NRG; PAM sequence: CAG
aatcgcttgaacccagtagg

SEQ ID NO: 160840 - DNA, 20 bp, Artificial Sequence
  Description of Artificial Sequence: Synthetic oligonucleotide
  Target: LAMA2; (+) strand; PAM type: NRG; PAM sequence: AGG
atcgcttgaacccagtaggc

SEQ ID NO: 160841 - DNA, 20 bp, Artificial Sequence
  Description of Artificial Sequence: Synthetic oligonucleotide
  Target: LAMA2; (+) strand; PAM type: NRG; PAM sequence: GGG
tcgcttgaacccagtaggca

SEQ ID NO: 160842 - DNA, 20 bp, Artificial Sequence
  Description of Artificial Sequence: Synthetic oligonucleotide
  Target: LAMA2; (+) strand; PAM type: NRG; PAM sequence: GGG
cgcttgaacccagtaggcag

SEQ ID NO: 160843 - DNA, 20 bp, Artificial Sequence
  Description of Artificial Sequence: Synthetic oligonucleotide
  Target: LAMA2; (+) strand; PAM type: NRG; PAM sequence: CAG
aacccagtaggcaggggttt

SEQ ID NO: 160844 - DNA, 20 bp, Artificial Sequence
  Description of Artificial Sequence: Synthetic oligonucleotide
  Target: LAMA2; (+) strand; PAM type: NRG; PAM sequence: GAG
cagtaggcaggggtttcagt

SEQ ID NO: 160845 - DNA, 20 bp, Artificial Sequence
  Description of Artificial Sequence: Synthetic oligonucleotide
  Target: LAMA2; (+) strand; PAM type: NRG; PAM sequence: AAG
ggcaggggtttcagtgagcc

SEQ ID NO: 160846 - DNA, 20 bp, Artificial Sequence
  Description of Artificial Sequence: Synthetic oligonucleotide
  Target: LAMA2; (+) strand; PAM type: NRG; PAM sequence: CAG
aagattgcaccactgcactc

SEQ ID NO: 160847 - DNA, 20 bp, Artificial Sequence
  Description of Artificial Sequence: Synthetic oligonucleotide
  Target: LAMA2; (+) strand; PAM type: NRG; PAM sequence: TGG
tgcaccactgcactccagtc

SEQ ID NO: 160848 - DNA, 20 bp, Artificial Sequence
  Description of Artificial Sequence: Synthetic oligonucleotide
  Target: LAMA2; (+) strand; PAM type: NRG; PAM sequence: GGG
gcaccactgcactccagtct

SEQ ID NO: 160849 - DNA, 20 bp, Artificial Sequence
  Description of Artificial Sequence: Synthetic oligonucleotide
  Target: LAMA2; (+) strand; PAM type: NRG; PAM sequence: CAG
ctgcactccagtctgggcaa

SEQ ID NO: 160850 - DNA, 20 bp, Artificial Sequence
  Description of Artificial Sequence: Synthetic oligonucleotide
  Target: LAMA2; (+) strand; PAM type: NRG; PAM sequence: GAG
gcactccagtctgggcaaca

SEQ ID NO: 160851 - DNA, 20 bp, Artificial Sequence
  Description of Artificial Sequence: Synthetic oligonucleotide
  Target: LAMA2; (+) strand; PAM type: NRG; PAM sequence: AAG
tccagtctgggcaacagagc

SEQ ID NO: 160852 - DNA, 20 bp, Artificial Sequence
  Description of Artificial Sequence: Synthetic oligonucleotide
  Target: LAMA2; (+) strand; PAM type: NRG; PAM sequence: CAG
taaaatatttttaaaaatgt

SEQ ID NO: 160853 - DNA, 20 bp, Artificial Sequence
  Description of Artificial Sequence: Synthetic oligonucleotide
  Target: LAMA2; (+) strand; PAM type: NRG; PAM sequence: AAG
aatatttttaaaaatgtcag

SEQ ID NO: 160854 - DNA, 20 bp, Artificial Sequence
  Description of Artificial Sequence: Synthetic oligonucleotide
  Target: LAMA2; (+) strand; PAM type: NRG; PAM sequence: AAG
ccttgtcaaccaccattgac

SEQ ID NO: 160855 - DNA, 20 bp, Artificial Sequence
  Description of Artificial Sequence: Synthetic oligonucleotide
  Target: LAMA2; (+) strand; PAM type: NRG; PAM sequence: GAG
ttgtcaaccaccattgacaa

SEQ ID NO: 160856 - DNA, 20 bp, Artificial Sequence
  Description of Artificial Sequence: Synthetic oligonucleotide
  Target: LAMA2; (+) strand; PAM type: NRG; PAM sequence: TAG
agagttatgataaactgatt

SEQ ID NO: 160857 - DNA, 20 bp, Artificial Sequence
  Description of Artificial Sequence: Synthetic oligonucleotide
  Target: LAMA2; (+) strand; PAM type: NRG; PAM sequence: AGG
gagttatgataaactgattt

SEQ ID NO: 160858 - DNA, 20 bp, Artificial Sequence
  Description of Artificial Sequence: Synthetic oligonucleotide
  Target: LAMA2; (+) strand; PAM type: NRG; PAM sequence: TGG
ttaggattataaaaaacaat

SEQ ID NO: 160859 - DNA, 20 bp, Artificial Sequence
  Description of Artificial Sequence: Synthetic oligonucleotide
  Target: LAMA2; (+) strand; PAM type: NRG; PAM sequence: TGG
attataaaaaacaattggta

SEQ ID NO: 160860 - DNA, 20 bp, Artificial Sequence
  Description of Artificial Sequence: Synthetic oligonucleotide
  Target: LAMA2; (+) strand; PAM type: NRG; PAM sequence: CAG
tggtatggttttctttcaat

SEQ ID NO: 160861 - DNA, 20 bp, Artificial Sequence
  Description of Artificial Sequence: Synthetic oligonucleotide
  Target: LAMA2; (+) strand; PAM type: NRG; PAM sequence: TAG
tggttttctttcaatcagtg

SEQ ID NO: 160862 - DNA, 20 bp, Artificial Sequence
  Description of Artificial Sequence: Synthetic oligonucleotide
  Target: LAMA2; (+) strand; PAM type: NRG; PAM sequence: CAG
tttcaatcagtgtagtccca

SEQ ID NO: 160863 - DNA, 20 bp, Artificial Sequence
  Description of Artificial Sequence: Synthetic oligonucleotide
  Target: LAMA2; (+) strand; PAM type: NRG; PAM sequence: GAG
tcaatcagtgtagtcccaca

SEQ ID NO: 160864 - DNA, 20 bp, Artificial Sequence
  Description of Artificial Sequence: Synthetic oligonucleotide
  Target: LAMA2; (+) strand; PAM type: NRG; PAM sequence: AGG
caatcagtgtagtcccacag

SEQ ID NO: 160865 - DNA, 20 bp, Artificial Sequence
  Description of Artificial Sequence: Synthetic oligonucleotide
  Target: LAMA2; (+) strand; PAM type: NRG; PAM sequence: TGG
tcagtgtagtcccacagagg

SEQ ID NO: 160866 - DNA, 20 bp, Artificial Sequence
  Description of Artificial Sequence: Synthetic oligonucleotide
  Target: LAMA2; (+) strand; PAM type: NRG; PAM sequence: GGG
cagtgtagtcccacagaggt

SEQ ID NO: 160867 - DNA, 20 bp, Artificial Sequence
  Description of Artificial Sequence: Synthetic oligonucleotide
  Target: LAMA2; (+) strand; PAM type: NRG; PAM sequence: CAG
tcccacagaggtgggaaacc

SEQ ID NO: 160868 - DNA, 20 bp, Artificial Sequence
  Description of Artificial Sequence: Synthetic oligonucleotide
  Target: LAMA2; (+) strand; PAM type: NRG; PAM sequence: TGG
ggtgggaaacccagtgcttc

SEQ ID NO: 160869 - DNA, 20 bp, Artificial Sequence
  Description of Artificial Sequence: Synthetic oligonucleotide
  Target: LAMA2; (+) strand; PAM type: NRG; PAM sequence: TGG
ggaaacccagtgcttctggt

SEQ ID NO: 160870 - DNA, 20 bp, Artificial Sequence
  Description of Artificial Sequence: Synthetic oligonucleotide
  Target: LAMA2; (+) strand; PAM type: NRG; PAM sequence: GAG
aaacccagtgcttctggttg

SEQ ID NO: 160871 - DNA, 20 bp, Artificial Sequence
  Description of Artificial Sequence: Synthetic oligonucleotide
  Target: LAMA2; (+) strand; PAM type: NRG; PAM sequence: CAG
ccagtgcttctggttggagt

SEQ ID NO: 160872 - DNA, 20 bp, Artificial Sequence
  Description of Artificial Sequence: Synthetic oligonucleotide
  Target: LAMA2; (+) strand; PAM type: NRG; PAM sequence: CAG
tctggttggagtcagtttct

SEQ ID NO: 160873 - DNA, 20 bp, Artificial Sequence
  Description of Artificial Sequence: Synthetic oligonucleotide
  Target: LAMA2; (+) strand; PAM type: NRG; PAM sequence: TAG
ggttggagtcagtttctcag

SEQ ID NO: 160874 - DNA, 20 bp, Artificial Sequence
  Description of Artificial Sequence: Synthetic oligonucleotide
  Target: LAMA2; (+) strand; PAM type: NRG; PAM sequence: GAG
tcagtttctcagtagatgat

SEQ ID NO: 160875 - DNA, 20 bp, Artificial Sequence
  Description of Artificial Sequence: Synthetic oligonucleotide
  Target: LAMA2; (+) strand; PAM type: NRG; PAM sequence: TAG
tttctcagtagatgatgaga

SEQ ID NO: 160876 - DNA, 20 bp, Artificial Sequence
  Description of Artificial Sequence: Synthetic oligonucleotide
  Target: LAMA2; (+) strand; PAM type: NRG; PAM sequence: CAG
agtagatgatgagatagtta

SEQ ID NO: 160877 - DNA, 20 bp, Artificial Sequence
  Description of Artificial Sequence: Synthetic oligonucleotide
  Target: LAMA2; (+) strand; PAM type: NRG; PAM sequence: AAG
ttacagaatgccaattttca

SEQ ID NO: 160878 - DNA, 20 bp, Artificial Sequence
  Description of Artificial Sequence: Synthetic oligonucleotide
  Target: LAMA2; (+) strand; PAM type: NRG; PAM sequence: AAG
cagaatgccaattttcaaag

SEQ ID NO: 160879 - DNA, 20 bp, Artificial Sequence
  Description of Artificial Sequence: Synthetic oligonucleotide
  Target: LAMA2; (+) strand; PAM type: NRG; PAM sequence: CAG
aagaagacatatatatgcta

SEQ ID NO: 160880 - DNA, 20 bp, Artificial Sequence
  Description of Artificial Sequence: Synthetic oligonucleotide
  Target: LAMA2; (+) strand; PAM type: NRG; PAM sequence: GAG
gaagacatatatatgctaca

SEQ ID NO: 160881 - DNA, 20 bp, Artificial Sequence
  Description of Artificial Sequence: Synthetic oligonucleotide
  Target: LAMA2; (+) strand; PAM type: NRG; PAM sequence: CAG
atatatatgctacagagatg

SEQ ID NO: 160882 - DNA, 20 bp, Artificial Sequence
  Description of Artificial Sequence: Synthetic oligonucleotide
  Target: LAMA2; (+) strand; PAM type: NRG; PAM sequence: CAG
ctcacttttatgtctgaaaa

SEQ ID NO: 160883 - DNA, 20 bp, Artificial Sequence
  Description of Artificial Sequence: Synthetic oligonucleotide
  Target: LAMA2; (+) strand; PAM type: NRG; PAM sequence: CAG
tttatgtctgaaaacagtaa

SEQ ID NO: 160884 - DNA, 20 bp, Artificial Sequence
  Description of Artificial Sequence: Synthetic oligonucleotide
  Target: LAMA2; (+) strand; PAM type: NRG; PAM sequence: CGG
aaacagtaacagcaaatcac

SEQ ID NO: 160885 - DNA, 20 bp, Artificial Sequence
  Description of Artificial Sequence: Synthetic oligonucleotide
  Target: LAMA2; (+) strand; PAM type: NRG; PAM sequence: TGG
taacagcaaatcaccggatg

SEQ ID NO: 160886 - DNA, 20 bp, Artificial Sequence
  Description of Artificial Sequence: Synthetic oligonucleotide
  Target: LAMA2; (+) strand; PAM type: NRG; PAM sequence: GAG
gcaaatcaccggatgtggat

SEQ ID NO: 160887 - DNA, 20 bp, Artificial Sequence
  Description of Artificial Sequence: Synthetic oligonucleotide
  Target: LAMA2; (+) strand; PAM type: NRG; PAM sequence: GAG
aaatcaccggatgtggatga

SEQ ID NO: 160888 - DNA, 20 bp, Artificial Sequence
  Description of Artificial Sequence: Synthetic oligonucleotide
  Target: LAMA2; (+) strand; PAM type: NRG; PAM sequence: AGG
aatcaccggatgtggatgag

SEQ ID NO: 160889 - DNA, 20 bp, Artificial Sequence
  Description of Artificial Sequence: Synthetic oligonucleotide
  Target: LAMA2; (+) strand; PAM type: NRG; PAM sequence: CAG
tattttaacctgtgcatctt

SEQ ID NO: 160890 - DNA, 20 bp, Artificial Sequence
  Description of Artificial Sequence: Synthetic oligonucleotide
  Target: LAMA2; (+) strand; PAM type: NRG; PAM sequence: AAG
agtgcaatcacaatcccgtc

SEQ ID NO: 160891 - DNA, 20 bp, Artificial Sequence
  Description of Artificial Sequence: Synthetic oligonucleotide
  Target: LAMA2; (+) strand; PAM type: NRG; PAM sequence: TAG
cccgtcaagaaaatcaccca

SEQ ID NO: 160892 - DNA, 20 bp, Artificial Sequence
  Description of Artificial Sequence: Synthetic oligonucleotide
  Target: LAMA2; (+) strand; PAM type: NRG; PAM sequence: TGG
cacccatagtgaactgtctt

SEQ ID NO: 160893 - DNA, 20 bp, Artificial Sequence
  Description of Artificial Sequence: Synthetic oligonucleotide
  Target: LAMA2; (+) strand; PAM type: NRG; PAM sequence: GGG
acccatagtgaactgtcttt

SEQ ID NO: 160894 - DNA, 20 bp, Artificial Sequence
  Description of Artificial Sequence: Synthetic oligonucleotide
  Target: LAMA2; (+) strand; PAM type: NRG; PAM sequence: TAG
aactgtctttgggtcatgcg

SEQ ID NO: 160895 - DNA, 20 bp, Artificial Sequence
  Description of Artificial Sequence: Synthetic oligonucleotide
  Target: LAMA2; (+) strand; PAM type: NRG; PAM sequence: AAG
tctttgggtcatgcgtagca

SEQ ID NO: 160896 - DNA, 20 bp, Artificial Sequence
  Description of Artificial Sequence: Synthetic oligonucleotide
  Target: LAMA2; (+) strand; PAM type: NRG; PAM sequence: CAG
gggtcatgcgtagcaaagta

SEQ ID NO: 160897 - DNA, 20 bp, Artificial Sequence
  Description of Artificial Sequence: Synthetic oligonucleotide
  Target: LAMA2; (+) strand; PAM type: NRG; PAM sequence: AGG
ggtcatgcgtagcaaagtac

SEQ ID NO: 160898 - DNA, 20 bp, Artificial Sequence
  Description of Artificial Sequence: Synthetic oligonucleotide
  Target: LAMA2; (+) strand; PAM type: NRG; PAM sequence: AAG
aagtacaggatgctttataa

SEQ ID NO: 160899 - DNA, 20 bp, Artificial Sequence
  Description of Artificial Sequence: Synthetic oligonucleotide
  Target: LAMA2; (+) strand; PAM type: NRG; PAM sequence: AGG
agtacaggatgctttataaa

SEQ ID NO: 160900 - DNA, 20 bp, Artificial Sequence
  Description of Artificial Sequence: Synthetic oligonucleotide
  Target: LAMA2; (+) strand; PAM type: NRG; PAM sequence: GAG
tacaggatgctttataaaag

SEQ ID NO: 160901 - DNA, 20 bp, Artificial Sequence
  Description of Artificial Sequence: Synthetic oligonucleotide
  Target: LAMA2; (+) strand; PAM type: NRG; PAM sequence: CAG
aaaaggagattctttactcg

SEQ ID NO: 160902 - DNA, 20 bp, Artificial Sequence
  Description of Artificial Sequence: Synthetic oligonucleotide
  Target: LAMA2; (+) strand; PAM type: NRG; PAM sequence: TGG
tttactcgcagtgcacacgc

SEQ ID NO: 160903 - DNA, 20 bp, Artificial Sequence
  Description of Artificial Sequence: Synthetic oligonucleotide
  Target: LAMA2; (+) strand; PAM type: NRG; PAM sequence: GGG
ttactcgcagtgcacacgct

SEQ ID NO: 160904 - DNA, 20 bp, Artificial Sequence
  Description of Artificial Sequence: Synthetic oligonucleotide
  Target: LAMA2; (+) strand; PAM type: NRG; PAM sequence: CAG
gtcttgtctgctgttcatca

SEQ ID NO: 160905 - DNA, 20 bp, Artificial Sequence
  Description of Artificial Sequence: Synthetic oligonucleotide
  Target: LAMA2; (+) strand; PAM type: NRG; PAM sequence: CAG
ctgctgttcatcacagctac

SEQ ID NO: 160906 - DNA, 20 bp, Artificial Sequence
  Description of Artificial Sequence: Synthetic oligonucleotide
  Target: LAMA2; (+) strand; PAM type: NRG; PAM sequence: TGG
gctaccagaactccttaatg

SEQ ID NO: 160907 - DNA, 20 bp, Artificial Sequence
  Description of Artificial Sequence: Synthetic oligonucleotide
  Target: LAMA2; (+) strand; PAM type: NRG; PAM sequence: CAG
ttaatgtggaatctttgatc

SEQ ID NO: 160908 - DNA, 20 bp, Artificial Sequence
  Description of Artificial Sequence: Synthetic oligonucleotide
  Target: LAMA2; (+) strand; PAM type: NRG; PAM sequence: AAG
agataatatttataaattca

SEQ ID NO: 160909 - DNA, 20 bp, Artificial Sequence
  Description of Artificial Sequence: Synthetic oligonucleotide
  Target: LAMA2; (+) strand; PAM type: NRG; PAM sequence: CAG
tttataaattcaaagcatcc

SEQ ID NO: 160910 - DNA, 20 bp, Artificial Sequence
  Description of Artificial Sequence: Synthetic oligonucleotide
  Target: LAMA2; (+) strand; PAM type: NRG; PAM sequence: CAG
aaattcaaagcatcccagac

SEQ ID NO: 160911 - DNA, 20 bp, Artificial Sequence
  Description of Artificial Sequence: Synthetic oligonucleotide
  Target: LAMA2; (+) strand; PAM type: NRG; PAM sequence: CAG
cagcctttatctccttgacc

SEQ ID NO: 160912 - DNA, 20 bp, Artificial Sequence
  Description of Artificial Sequence: Synthetic oligonucleotide
  Target: LAMA2; (+) strand; PAM type: NRG; PAM sequence: CAG
cctttatctccttgacccag

SEQ ID NO: 160913 - DNA, 20 bp, Artificial Sequence
  Description of Artificial Sequence: Synthetic oligonucleotide
  Target: LAMA2; (+) strand; PAM type: NRG; PAM sequence: TAG
cttgacccagcagattcatt

SEQ ID NO: 160914 - DNA, 20 bp, Artificial Sequence
  Description of Artificial Sequence: Synthetic oligonucleotide
  Target: LAMA2; (+) strand; PAM type: NRG; PAM sequence: GAG
attcatttagactttccact

SEQ ID NO: 160915 - DNA, 20 bp, Artificial Sequence
  Description of Artificial Sequence: Synthetic oligonucleotide
  Target: LAMA2; (+) strand; PAM type: NRG; PAM sequence: TAG
agttgaaatgtttaaaatga

SEQ ID NO: 160916 - DNA, 20 bp, Artificial Sequence
  Description of Artificial Sequence: Synthetic oligonucleotide
  Target: LAMA2; (+) strand; PAM type: NRG; PAM sequence: TGG
tttaaaatgatagacttacc

SEQ ID NO: 160917 - DNA, 20 bp, Artificial Sequence
  Description of Artificial Sequence: Synthetic oligonucleotide
  Target: LAMA2; (+) strand; PAM type: NRG; PAM sequence: TAG
acctggtcctaataccttgc

SEQ ID NO: 160918 - DNA, 20 bp, Artificial Sequence
  Description of Artificial Sequence: Synthetic oligonucleotide
  Target: LAMA2; (+) strand; PAM type: NRG; PAM sequence: TAG
ccttgctagtatcccaaaaa

SEQ ID NO: 160919 - DNA, 20 bp, Artificial Sequence
  Description of Artificial Sequence: Synthetic oligonucleotide
  Target: LAMA2; (+) strand; PAM type: NRG; PAM sequence: AGG
cttgctagtatcccaaaaat

SEQ ID NO: 160920 - DNA, 20 bp, Artificial Sequence
  Description of Artificial Sequence: Synthetic oligonucleotide
  Target: LAMA2; (+) strand; PAM type: NRG; PAM sequence: AAG
gctagtatcccaaaaatagg

SEQ ID NO: 160921 - DNA, 20 bp, Artificial Sequence
  Description of Artificial Sequence: Synthetic oligonucleotide
  Target: LAMA2; (+) strand; PAM type: NRG; PAM sequence: CAG
gaagaactattaaatcttta

SEQ ID NO: 160922 - DNA, 20 bp, Artificial Sequence
  Description of Artificial Sequence: Synthetic oligonucleotide
  Target: LAMA2; (+) strand; PAM type: NRG; PAM sequence: GAG
aatctttacagaactaccct

SEQ ID NO: 160923 - DNA, 20 bp, Artificial Sequence
  Description of Artificial Sequence: Synthetic oligonucleotide
  Target: LAMA2; (+) strand; PAM type: NRG; PAM sequence: AAG
ttacagaactaccctgagtt

SEQ ID NO: 160924 - DNA, 20 bp, Artificial Sequence
  Description of Artificial Sequence: Synthetic oligonucleotide
  Target: LAMA2; (+) strand; PAM type: NRG; PAM sequence: CAG
agaactaccctgagttaagc

SEQ ID NO: 160925 - DNA, 20 bp, Artificial Sequence
  Description of Artificial Sequence: Synthetic oligonucleotide
  Target: LAMA2; (+) strand; PAM type: NRG; PAM sequence: GAG
aactaccctgagttaagcca

SEQ ID NO: 160926 - DNA, 20 bp, Artificial Sequence
  Description of Artificial Sequence: Synthetic oligonucleotide
  Target: LAMA2; (+) strand; PAM type: NRG; PAM sequence: CAG
taagccagagaaatactatt

SEQ ID NO: 160927 - DNA, 20 bp, Artificial Sequence
  Description of Artificial Sequence: Synthetic oligonucleotide
  Target: LAMA2; (+) strand; PAM type: NRG; PAM sequence: TAG
agagaaatactattcagaaa

SEQ ID NO: 160928 - DNA, 20 bp, Artificial Sequence
  Description of Artificial Sequence: Synthetic oligonucleotide
  Target: LAMA2; (+) strand; PAM type: NRG; PAM sequence: AAG
tcatgatctgatctgcacca

SEQ ID NO: 160929 - DNA, 20 bp, Artificial Sequence
  Description of Artificial Sequence: Synthetic oligonucleotide
  Target: LAMA2; (+) strand; PAM type: NRG; PAM sequence: AAG
atctgatctgcaccaaagtt

SEQ ID NO: 160930 - DNA, 20 bp, Artificial Sequence
  Description of Artificial Sequence: Synthetic oligonucleotide
  Target: LAMA2; (+) strand; PAM type: NRG; PAM sequence: AAG
gatctgcaccaaagttaaga

SEQ ID NO: 160931 - DNA, 20 bp, Artificial Sequence
  Description of Artificial Sequence: Synthetic oligonucleotide
  Target: LAMA2; (+) strand; PAM type: NRG; PAM sequence: AAG
aaagttaagaaagtatttca

SEQ ID NO: 160932 - DNA, 20 bp, Artificial Sequence
  Description of Artificial Sequence: Synthetic oligonucleotide
  Target: LAMA2; (+) strand; PAM type: NRG; PAM sequence: AAG
aaagtatttcaaagtaattc

SEQ ID NO: 160933 - DNA, 20 bp, Artificial Sequence
  Description of Artificial Sequence: Synthetic oligonucleotide
  Target: LAMA2; (+) strand; PAM type: NRG; PAM sequence: CAG
tttcaaagtaattcaagtgt

SEQ ID NO: 160934 - DNA, 20 bp, Artificial Sequence
  Description of Artificial Sequence: Synthetic oligonucleotide
  Target: LAMA2; (+) strand; PAM type: NRG; PAM sequence: AGG
ttcaaagtaattcaagtgtc

SEQ ID NO: 160935 - DNA, 20 bp, Artificial Sequence
  Description of Artificial Sequence: Synthetic oligonucleotide
  Target: LAMA2; (+) strand; PAM type: NRG; PAM sequence: GAG
caaagtaattcaagtgtcag

SEQ ID NO: 160936 - DNA, 20 bp, Artificial Sequence
  Description of Artificial Sequence: Synthetic oligonucleotide
  Target: LAMA2; (+) strand; PAM type: NRG; PAM sequence: CAG
agtaattcaagtgtcaggag

SEQ ID NO: 160937 - DNA, 20 bp, Artificial Sequence
  Description of Artificial Sequence: Synthetic oligonucleotide
  Target: LAMA2; (+) strand; PAM type: NRG; PAM sequence: AGG
gtaattcaagtgtcaggagc

SEQ ID NO: 160938 - DNA, 20 bp, Artificial Sequence
  Description of Artificial Sequence: Synthetic oligonucleotide
  Target: LAMA2; (+) strand; PAM type: NRG; PAM sequence: CAG
tgtcaggagcaggatcaaat

SEQ ID NO: 160939 - DNA, 20 bp, Artificial Sequence
  Description of Artificial Sequence: Synthetic oligonucleotide
  Target: LAMA2; (+) strand; PAM type: NRG; PAM sequence: AGG
gtcaggagcaggatcaaatc

SEQ ID NO: 160940 - DNA, 20 bp, Artificial Sequence
  Description of Artificial Sequence: Synthetic oligonucleotide
  Target: LAMA2; (+) strand; PAM type: NRG; PAM sequence: TGG
agcaggatcaaatcaggact

SEQ ID NO: 160941 - DNA, 20 bp, Artificial Sequence
  Description of Artificial Sequence: Synthetic oligonucleotide
  Target: LAMA2; (+) strand; PAM type: NRG; PAM sequence: TAG
tgttatgtctttaattcatt

SEQ ID NO: 160942 - DNA, 20 bp, Artificial Sequence
  Description of Artificial Sequence: Synthetic oligonucleotide
  Target: LAMA2; (+) strand; PAM type: NRG; PAM sequence: AAG
ctttaattcatttagccatc

SEQ ID NO: 160943 - DNA, 20 bp, Artificial Sequence
  Description of Artificial Sequence: Synthetic oligonucleotide
  Target: LAMA2; (+) strand; PAM type: NRG; PAM sequence: AAG
aattcatttagccatcaagc

SEQ ID NO: 160944 - DNA, 20 bp, Artificial Sequence
  Description of Artificial Sequence: Synthetic oligonucleotide
  Target: LAMA2; (+) strand; PAM type: NRG; PAM sequence: TAG
aattgccctgtcatatataa

SEQ ID NO: 160945 - DNA, 20 bp, Artificial Sequence
  Description of Artificial Sequence: Synthetic oligonucleotide
  Target: LAMA2; (+) strand; PAM type: NRG; PAM sequence: TAG
taatagaaaacaaatctact

SEQ ID NO: 160946 - DNA, 20 bp, Artificial Sequence
  Description of Artificial Sequence: Synthetic oligonucleotide
  Target: LAMA2; (+) strand; PAM type: NRG; PAM sequence: AGG
aatagaaaacaaatctactt

SEQ ID NO: 160947 - DNA, 20 bp, Artificial Sequence
  Description of Artificial Sequence: Synthetic oligonucleotide
  Target: LAMA2; (+) strand; PAM type: NRG; PAM sequence: GGG
atagaaaacaaatctactta

SEQ ID NO: 160948 - DNA, 20 bp, Artificial Sequence
  Description of Artificial Sequence: Synthetic oligonucleotide
  Target: LAMA2; (+) strand; PAM type: NRG; PAM sequence: AAG
ctacttagggaaaacataat

SEQ ID NO: 160949 - DNA, 20 bp, Artificial Sequence
  Description of Artificial Sequence: Synthetic oligonucleotide
  Target: LAMA2; (+) strand; PAM type: NRG; PAM sequence: GAG
acttagggaaaacataataa

SEQ ID NO: 160950 - DNA, 20 bp, Artificial Sequence
  Description of Artificial Sequence: Synthetic oligonucleotide
  Target: LAMA2; (+) strand; PAM type: NRG; PAM sequence: AAG
agggaaaacataataagaga

SEQ ID NO: 160951 - DNA, 20 bp, Artificial Sequence
  Description of Artificial Sequence: Synthetic oligonucleotide
  Target: LAMA2; (+) strand; PAM type: NRG; PAM sequence: GAG
taataagagaaagattaatt

SEQ ID NO: 160952 - DNA, 20 bp, Artificial Sequence
  Description of Artificial Sequence: Synthetic oligonucleotide
  Target: LAMA2; (+) strand; PAM type: NRG; PAM sequence: AGG
aataagagaaagattaattg

SEQ ID NO: 160953 - DNA, 20 bp, Artificial Sequence
  Description of Artificial Sequence: Synthetic oligonucleotide
  Target: LAMA2; (+) strand; PAM type: NRG; PAM sequence: GGG
ataagagaaagattaattga

SEQ ID NO: 160954 - DNA, 20 bp, Artificial Sequence
  Description of Artificial Sequence: Synthetic oligonucleotide
  Target: LAMA2; (+) strand; PAM type: NRG; PAM sequence: CGG
gagggcatttccctttaaaa

SEQ ID NO: 160955 - DNA, 20 bp, Artificial Sequence
  Description of Artificial Sequence: Synthetic oligonucleotide
  Target: LAMA2; (+) strand; PAM type: NRG; PAM sequence: TAG
ggcatttccctttaaaacgg

SEQ ID NO: 160956 - DNA, 20 bp, Artificial Sequence
  Description of Artificial Sequence: Synthetic oligonucleotide
  Target: LAMA2; (+) strand; PAM type: NRG; PAM sequence: CAG
cctttaaaacggtagcgcaa

SEQ ID NO: 160957 - DNA, 20 bp, Artificial Sequence
  Description of Artificial Sequence: Synthetic oligonucleotide
  Target: LAMA2; (+) strand; PAM type: NRG; PAM sequence: CAG
cggtagcgcaacagacctta

SEQ ID NO: 160958 - DNA, 20 bp, Artificial Sequence
  Description of Artificial Sequence: Synthetic oligonucleotide
  Target: LAMA2; (+) strand; PAM type: NRG; PAM sequence: TGG
agaccttacagaattcaaaa

SEQ ID NO: 160959 - DNA, 20 bp, Artificial Sequence
  Description of Artificial Sequence: Synthetic oligonucleotide
  Target: LAMA2; (+) strand; PAM type: NRG; PAM sequence: TGG
acagaattcaaaatggttga

SEQ ID NO: 160960 - DNA, 20 bp, Artificial Sequence
  Description of Artificial Sequence: Synthetic oligonucleotide
  Target: LAMA2; (+) strand; PAM type: NRG; PAM sequence: CAG
caaaatggttgatggccctt

SEQ ID NO: 160961 - DNA, 20 bp, Artificial Sequence
  Description of Artificial Sequence: Synthetic oligonucleotide
  Target: LAMA2; (+) strand; PAM type: NRG; PAM sequence: GAG
aaatggttgatggcccttca

SEQ ID NO: 160962 - DNA, 20 bp, Artificial Sequence
  Description of Artificial Sequence: Synthetic oligonucleotide
  Target: LAMA2; (+) strand; PAM type: NRG; PAM sequence: GAG
atggttgatggcccttcaga

SEQ ID NO: 160963 - DNA, 20 bp, Artificial Sequence
  Description of Artificial Sequence: Synthetic oligonucleotide
  Target: LAMA2; (+) strand; PAM type: NRG; PAM sequence: CAG
ttgatggcccttcagagagc

SEQ ID NO: 160964 - DNA, 20 bp, Artificial Sequence
  Description of Artificial Sequence: Synthetic oligonucleotide
  Target: LAMA2; (+) strand; PAM type: NRG; PAM sequence: GAG
ggcccttcagagagccagtc

SEQ ID NO: 160965 - DNA, 20 bp, Artificial Sequence
  Description of Artificial Sequence: Synthetic oligonucleotide
  Target: LAMA2; (+) strand; PAM type: NRG; PAM sequence: TGG
gcattaccgtgtgtcaatct

SEQ ID NO: 160966 - DNA, 20 bp, Artificial Sequence
  Description of Artificial Sequence: Synthetic oligonucleotide
  Target: LAMA2; (+) strand; PAM type: NRG; PAM sequence: GGG
cattaccgtgtgtcaatctt

SEQ ID NO: 160967 - DNA, 20 bp, Artificial Sequence
  Description of Artificial Sequence: Synthetic oligonucleotide
  Target: LAMA2; (+) strand; PAM type: NRG; PAM sequence: GGG
attaccgtgtgtcaatcttg

SEQ ID NO: 160968 - DNA, 20 bp, Artificial Sequence
  Description of Artificial Sequence: Synthetic oligonucleotide
  Target: LAMA2; (+) strand; PAM type: NRG; PAM sequence: TAG
accgtgtgtcaatcttgggg

SEQ ID NO: 160969 - DNA, 20 bp, Artificial Sequence
  Description of Artificial Sequence: Synthetic oligonucleotide
  Target: LAMA2; (+) strand; PAM type: NRG; PAM sequence: AGG
ccgtgtgtcaatcttggggt

SEQ ID NO: 160970 - DNA, 20 bp, Artificial Sequence
  Description of Artificial Sequence: Synthetic oligonucleotide
  Target: LAMA2; (+) strand; PAM type: NRG; PAM sequence: GGG
cgtgtgtcaatcttggggta

SEQ ID NO: 160971 - DNA, 20 bp, Artificial Sequence
  Description of Artificial Sequence: Synthetic oligonucleotide
  Target: LAMA2; (+) strand; PAM type: NRG; PAM sequence: GGG
gtgtgtcaatcttggggtag

SEQ ID NO: 160972 - DNA, 20 bp, Artificial Sequence
  Description of Artificial Sequence: Synthetic oligonucleotide
  Target: LAMA2; (+) strand; PAM type: NRG; PAM sequence: GAG
tggggtaggggttcatgtat

SEQ ID NO: 160973 - DNA, 20 bp, Artificial Sequence
  Description of Artificial Sequence: Synthetic oligonucleotide
  Target: LAMA2; (+) strand; PAM type: NRG; PAM sequence: GAG
gggtaggggttcatgtatga

SEQ ID NO: 160974 - DNA, 20 bp, Artificial Sequence
  Description of Artificial Sequence: Synthetic oligonucleotide
  Target: LAMA2; (+) strand; PAM type: NRG; PAM sequence: AGG
ggtaggggttcatgtatgag

SEQ ID NO: 160975 - DNA, 20 bp, Artificial Sequence
  Description of Artificial Sequence: Synthetic oligonucleotide
  Target: LAMA2; (+) strand; PAM type: NRG; PAM sequence: AAG
gtatgagaggtgcctctcac

SEQ ID NO: 160976 - DNA, 20 bp, Artificial Sequence
  Description of Artificial Sequence: Synthetic oligonucleotide
  Target: LAMA2; (+) strand; PAM type: NRG; PAM sequence: AGG
tatgagaggtgcctctcaca

SEQ ID NO: 160977 - DNA, 20 bp, Artificial Sequence
  Description of Artificial Sequence: Synthetic oligonucleotide
  Target: LAMA2; (+) strand; PAM type: NRG; PAM sequence: AAG
gaggtgcctctcacaaggca

SEQ ID NO: 160978 - DNA, 20 bp, Artificial Sequence
  Description of Artificial Sequence: Synthetic oligonucleotide
  Target: LAMA2; (+) strand; PAM type: NRG; PAM sequence: AAG
gtgcctctcacaaggcaaag

SEQ ID NO: 160979 - DNA, 20 bp, Artificial Sequence
  Description of Artificial Sequence: Synthetic oligonucleotide
  Target: LAMA2; (+) strand; PAM type: NRG; PAM sequence: TGG
tctcacaaggcaaagaagca

SEQ ID NO: 160980 - DNA, 20 bp, Artificial Sequence
  Description of Artificial Sequence: Synthetic oligonucleotide
  Target: LAMA2; (+) strand; PAM type: NRG; PAM sequence: TGG
acaaggcaaagaagcatggc

SEQ ID NO: 160981 - DNA, 20 bp, Artificial Sequence
  Description of Artificial Sequence: Synthetic oligonucleotide
  Target: LAMA2; (+) strand; PAM type: NRG; PAM sequence: GAG
aaggcaaagaagcatggctg

SEQ ID NO: 160982 - DNA, 20 bp, Artificial Sequence
  Description of Artificial Sequence: Synthetic oligonucleotide
  Target: LAMA2; (+) strand; PAM type: NRG; PAM sequence: AAG
ggagtgaaacatgttgctga

SEQ ID NO: 160983 - DNA, 20 bp, Artificial Sequence
  Description of Artificial Sequence: Synthetic oligonucleotide
  Target: LAMA2; (+) strand; PAM type: NRG; PAM sequence: AAG
aaacatgttgctgaaagcta

SEQ ID NO: 160984 - DNA, 20 bp, Artificial Sequence
  Description of Artificial Sequence: Synthetic oligonucleotide
  Target: LAMA2; (+) strand; PAM type: NRG; PAM sequence: TAG
atgttgctgaaagctaaagc

SEQ ID NO: 160985 - DNA, 20 bp, Artificial Sequence
  Description of Artificial Sequence: Synthetic oligonucleotide
  Target: LAMA2; (+) strand; PAM type: NRG; PAM sequence: GAG
gaaagctaaagctagcacct

SEQ ID NO: 160986 - DNA, 20 bp, Artificial Sequence
  Description of Artificial Sequence: Synthetic oligonucleotide
  Target: LAMA2; (+) strand; PAM type: NRG; PAM sequence: TGG
ctagcacctgagttctctgt

SEQ ID NO: 160987 - DNA, 20 bp, Artificial Sequence
  Description of Artificial Sequence: Synthetic oligonucleotide
  Target: LAMA2; (+) strand; PAM type: NRG; PAM sequence: TGG
ttctctgttggttcttcatc

SEQ ID NO: 160988 - DNA, 20 bp, Artificial Sequence
  Description of Artificial Sequence: Synthetic oligonucleotide
  Target: LAMA2; (+) strand; PAM type: NRG; PAM sequence: CAG
ttggttcttcatctggtgtt

SEQ ID NO: 160989 - DNA, 20 bp, Artificial Sequence
  Description of Artificial Sequence: Synthetic oligonucleotide
  Target: LAMA2; (+) strand; PAM type: NRG; PAM sequence: CAG
ggtgttcagctctattgctt

SEQ ID NO: 160990 - DNA, 20 bp, Artificial Sequence
  Description of Artificial Sequence: Synthetic oligonucleotide
  Target: LAMA2; (+) strand; PAM type: NRG; PAM sequence: TAG
ctattgcttcagacccaaat

SEQ ID NO: 160991 - DNA, 20 bp, Artificial Sequence
  Description of Artificial Sequence: Synthetic oligonucleotide
  Target: LAMA2; (+) strand; PAM type: NRG; PAM sequence: AAG
ccaaattagaaatatgtgca

SEQ ID NO: 160992 - DNA, 20 bp, Artificial Sequence
  Description of Artificial Sequence: Synthetic oligonucleotide
  Target: LAMA2; (+) strand; PAM type: NRG; PAM sequence: GAG
aaattagaaatatgtgcaaa

SEQ ID NO: 160993 - DNA, 20 bp, Artificial Sequence
  Description of Artificial Sequence: Synthetic oligonucleotide
  Target: LAMA2; (+) strand; PAM type: NRG; PAM sequence: GAG
attagaaatatgtgcaaaga

SEQ ID NO: 160994 - DNA, 20 bp, Artificial Sequence
  Description of Artificial Sequence: Synthetic oligonucleotide
  Target: LAMA2; (+) strand; PAM type: NRG; PAM sequence: AAG
agaaatatgtgcaaagagag

SEQ ID NO: 160995 - DNA, 20 bp, Artificial Sequence
  Description of Artificial Sequence: Synthetic oligonucleotide
  Target: LAMA2; (+) strand; PAM type: NRG; PAM sequence: CAG
aagtgaattttgaaacatgc

SEQ ID NO: 160996 - DNA, 20 bp, Artificial Sequence
  Description of Artificial Sequence: Synthetic oligonucleotide
  Target: LAMA2; (+) strand; PAM type: NRG; PAM sequence: GAG
gtgaattttgaaacatgcca

SEQ ID NO: 160997 - DNA, 20 bp, Artificial Sequence
  Description of Artificial Sequence: Synthetic oligonucleotide
  Target: LAMA2; (+) strand; PAM type: NRG; PAM sequence: AGG
tgaattttgaaacatgccag

SEQ ID NO: 160998 - DNA, 20 bp, Artificial Sequence
  Description of Artificial Sequence: Synthetic oligonucleotide
  Target: LAMA2; (+) strand; PAM type: NRG; PAM sequence: GGG
gaattttgaaacatgccaga

SEQ ID NO: 160999 - DNA, 20 bp, Artificial Sequence
  Description of Artificial Sequence: Synthetic oligonucleotide
  Target: LAMA2; (+) strand; PAM type: NRG; PAM sequence: GAG
tgaaacatgccagagggtat

SEQ ID NO: 161000 - DNA, 20 bp, Artificial Sequence
  Description of Artificial Sequence: Synthetic oligonucleotide
  Target: LAMA2; (+) strand; PAM type: NRG; PAM sequence: TGG
acatgccagagggtatgaga

SEQ ID NO: 161001 - DNA, 20 bp, Artificial Sequence
  Description of Artificial Sequence: Synthetic oligonucleotide
  Target: LAMA2; (+) strand; PAM type: NRG; PAM sequence: AAG
gccagagggtatgagatggc

SEQ ID NO: 161002 - DNA, 20 bp, Artificial Sequence
  Description of Artificial Sequence: Synthetic oligonucleotide
  Target: LAMA2; (+) strand; PAM type: NRG; PAM sequence: AGG
ccagagggtatgagatggca

SEQ ID NO: 161003 - DNA, 20 bp, Artificial Sequence
  Description of Artificial Sequence: Synthetic oligonucleotide
  Target: LAMA2; (+) strand; PAM type: NRG; PAM sequence: TGG
atggcaaggttgcttttgtt

SEQ ID NO: 161004 - DNA, 20 bp, Artificial Sequence
  Description of Artificial Sequence: Synthetic oligonucleotide
  Target: LAMA2; (+) strand; PAM type: NRG; PAM sequence: TAG
caaggttgcttttgtttggt

SEQ ID NO: 161005 - DNA, 20 bp, Artificial Sequence
  Description of Artificial Sequence: Synthetic oligonucleotide
  Target: LAMA2; (+) strand; PAM type: NRG; PAM sequence: AGG
aaggttgcttttgtttggtt

SEQ ID NO: 161006 - DNA, 20 bp, Artificial Sequence
  Description of Artificial Sequence: Synthetic oligonucleotide
  Target: LAMA2; (+) strand; PAM type: NRG; PAM sequence: AAG
tgtttggttaggtttatgat

SEQ ID NO: 161007 - DNA, 20 bp, Artificial Sequence
  Description of Artificial Sequence: Synthetic oligonucleotide
  Target: LAMA2; (+) strand; PAM type: NRG; PAM sequence: TAG
ggttaggtttatgataagtt

SEQ ID NO: 161008 - DNA, 20 bp, Artificial Sequence
  Description of Artificial Sequence: Synthetic oligonucleotide
  Target: LAMA2; (+) strand; PAM type: NRG; PAM sequence: AGG
gttaggtttatgataagttt

SEQ ID NO: 161009 - DNA, 20 bp, Artificial Sequence
  Description of Artificial Sequence: Synthetic oligonucleotide
  Target: LAMA2; (+) strand; PAM type: NRG; PAM sequence: TAG
aggtttatgataagtttagg

SEQ ID NO: 161010 - DNA, 20 bp, Artificial Sequence
  Description of Artificial Sequence: Synthetic oligonucleotide
  Target: LAMA2; (+) strand; PAM type: NRG; PAM sequence: AAG
gcacacttgatctcttctga

SEQ ID NO: 161011 - DNA, 20 bp, Artificial Sequence
  Description of Artificial Sequence: Synthetic oligonucleotide
  Target: LAMA2; (+) strand; PAM type: NRG; PAM sequence: GAG
tctcttctgaaagctttcct

SEQ ID NO: 161012 - DNA, 20 bp, Artificial Sequence
  Description of Artificial Sequence: Synthetic oligonucleotide
  Target: LAMA2; (+) strand; PAM type: NRG; PAM sequence: AGG
ctcttctgaaagctttcctg

SEQ ID NO: 161013 - DNA, 20 bp, Artificial Sequence
  Description of Artificial Sequence: Synthetic oligonucleotide
  Target: LAMA2; (+) strand; PAM type: NRG; PAM sequence: CAG
agctttcctgaggattccat

SEQ ID NO: 161014 - DNA, 20 bp, Artificial Sequence
  Description of Artificial Sequence: Synthetic oligonucleotide
  Target: LAMA2; (+) strand; PAM type: NRG; PAM sequence: GAG
cctgaggattccatcagtgt

SEQ ID NO: 161015 - DNA, 20 bp, Artificial Sequence
  Description of Artificial Sequence: Synthetic oligonucleotide
  Target: LAMA2; (+) strand; PAM type: NRG; PAM sequence: AGG
ctgaggattccatcagtgtg

SEQ ID NO: 161016 - DNA, 20 bp, Artificial Sequence
  Description of Artificial Sequence: Synthetic oligonucleotide
  Target: LAMA2; (+) strand; PAM type: NRG; PAM sequence: GGG
tgaggattccatcagtgtga

SEQ ID NO: 161017 - DNA, 20 bp, Artificial Sequence
  Description of Artificial Sequence: Synthetic oligonucleotide
  Target: LAMA2; (+) strand; PAM type: NRG; PAM sequence: AAG
cagtgtgagggcatacctgc

SEQ ID NO: 161018 - DNA, 20 bp, Artificial Sequence
  Description of Artificial Sequence: Synthetic oligonucleotide
  Target: LAMA2; (+) strand; PAM type: NRG; PAM sequence: AGG
agtgtgagggcatacctgca

SEQ ID NO: 161019 - DNA, 20 bp, Artificial Sequence
  Description of Artificial Sequence: Synthetic oligonucleotide
  Target: LAMA2; (+) strand; PAM type: NRG; PAM sequence: AAG
gtgagggcatacctgcaagg

SEQ ID NO: 161020 - DNA, 20 bp, Artificial Sequence
  Description of Artificial Sequence: Synthetic oligonucleotide
  Target: LAMA2; (+) strand; PAM type: NRG; PAM sequence: CAG
ctgcaaggaagcacatgccg

SEQ ID NO: 161021 - DNA, 20 bp, Artificial Sequence
  Description of Artificial Sequence: Synthetic oligonucleotide
  Target: LAMA2; (+) strand; PAM type: NRG; PAM sequence: CAG
cacatgccgcagcctgcaca

SEQ ID NO: 161022 - DNA, 20 bp, Artificial Sequence
  Description of Artificial Sequence: Synthetic oligonucleotide
  Target: LAMA2; (+) strand; PAM type: NRG; PAM sequence: AGG
acatgccgcagcctgcacac

SEQ ID NO: 161023 - DNA, 20 bp, Artificial Sequence
  Description of Artificial Sequence: Synthetic oligonucleotide
  Target: LAMA2; (+) strand; PAM type: NRG; PAM sequence: TGG
cacacaggcacgccccacta

SEQ ID NO: 161024 - DNA, 20 bp, Artificial Sequence
  Description of Artificial Sequence: Synthetic oligonucleotide
  Target: LAMA2; (+) strand; PAM type: NRG; PAM sequence: CAG
acaggcacgccccactatgg

SEQ ID NO: 161025 - DNA, 20 bp, Artificial Sequence
  Description of Artificial Sequence: Synthetic oligonucleotide
  Target: LAMA2; (+) strand; PAM type: NRG; PAM sequence: TAG
ggcacgccccactatggcag

SEQ ID NO: 161026 - DNA, 20 bp, Artificial Sequence
  Description of Artificial Sequence: Synthetic oligonucleotide
  Target: LAMA2; (+) strand; PAM type: NRG; PAM sequence: AAG
ccccactatggcagtagctg

SEQ ID NO: 161027 - DNA, 20 bp, Artificial Sequence
  Description of Artificial Sequence: Synthetic oligonucleotide
  Target: LAMA2; (+) strand; PAM type: NRG; PAM sequence: AAG
cactatggcagtagctgaag

SEQ ID NO: 161028 - DNA, 20 bp, Artificial Sequence
  Description of Artificial Sequence: Synthetic oligonucleotide
  Target: LAMA2; (+) strand; PAM type: NRG; PAM sequence: AGG
actatggcagtagctgaaga

SEQ ID NO: 161029 - DNA, 20 bp, Artificial Sequence
  Description of Artificial Sequence: Synthetic oligonucleotide
  Target: LAMA2; (+) strand; PAM type: NRG; PAM sequence: AAG
atggcagtagctgaagaagg

SEQ ID NO: 161030 - DNA, 20 bp, Artificial Sequence
  Description of Artificial Sequence: Synthetic oligonucleotide
  Target: LAMA2; (+) strand; PAM type: NRG; PAM sequence: GAG
caccaccactaccacatact

SEQ ID NO: 161031 - DNA, 20 bp, Artificial Sequence
  Description of Artificial Sequence: Synthetic oligonucleotide
  Target: LAMA2; (+) strand; PAM type: NRG; PAM sequence: CAG
aaatcactaacaaatttctc

SEQ ID NO: 161032 - DNA, 20 bp, Artificial Sequence
  Description of Artificial Sequence: Synthetic oligonucleotide
  Target: LAMA2; (+) strand; PAM type: NRG; PAM sequence: AGG
aatcactaacaaatttctcc

SEQ ID NO: 161033 - DNA, 20 bp, Artificial Sequence
  Description of Artificial Sequence: Synthetic oligonucleotide
  Target: LAMA2; (+) strand; PAM type: NRG; PAM sequence: CAG
tctccaggctgcttcaaatt

SEQ ID NO: 161034 - DNA, 20 bp, Artificial Sequence
  Description of Artificial Sequence: Synthetic oligonucleotide
  Target: LAMA2; (+) strand; PAM type: NRG; PAM sequence: GAG
tccaggctgcttcaaattca

SEQ ID NO: 161035 - DNA, 20 bp, Artificial Sequence
  Description of Artificial Sequence: Synthetic oligonucleotide
  Target: LAMA2; (+) strand; PAM type: NRG; PAM sequence: AGG
ccaggctgcttcaaattcag

SEQ ID NO: 161036 - DNA, 20 bp, Artificial Sequence
  Description of Artificial Sequence: Synthetic oligonucleotide
  Target: LAMA2; (+) strand; PAM type: NRG; PAM sequence: GGG
caggctgcttcaaattcaga

SEQ ID NO: 161037 - DNA, 20 bp, Artificial Sequence
  Description of Artificial Sequence: Synthetic oligonucleotide
  Target: LAMA2; (+) strand; PAM type: NRG; PAM sequence: TGG
gcttcaaattcagagggatt

SEQ ID NO: 161038 - DNA, 20 bp, Artificial Sequence
  Description of Artificial Sequence: Synthetic oligonucleotide
  Target: LAMA2; (+) strand; PAM type: NRG; PAM sequence: CAG
aattcagagggatttggcta

SEQ ID NO: 161039 - DNA, 20 bp, Artificial Sequence
  Description of Artificial Sequence: Synthetic oligonucleotide
  Target: LAMA2; (+) strand; PAM type: NRG; PAM sequence: AAG
tcagagggatttggctacag

SEQ ID NO: 161040 - DNA, 20 bp, Artificial Sequence
  Description of Artificial Sequence: Synthetic oligonucleotide
  Target: LAMA2; (+) strand; PAM type: NRG; PAM sequence: AAG
agggatttggctacagaaga

SEQ ID NO: 161041 - DNA, 20 bp, Artificial Sequence
  Description of Artificial Sequence: Synthetic oligonucleotide
  Target: LAMA2; (+) strand; PAM type: NRG; PAM sequence: GAG
ggctacagaagaaagtatgt

SEQ ID NO: 161042 - DNA, 20 bp, Artificial Sequence
  Description of Artificial Sequence: Synthetic oligonucleotide
  Target: LAMA2; (+) strand; PAM type: NRG; PAM sequence: AGG
gctacagaagaaagtatgtg

SEQ ID NO: 161043 - DNA, 20 bp, Artificial Sequence
  Description of Artificial Sequence: Synthetic oligonucleotide
  Target: LAMA2; (+) strand; PAM type: NRG; PAM sequence: CAG
atgtgaggctgcatatgtgc

SEQ ID NO: 161044 - DNA, 20 bp, Artificial Sequence
  Description of Artificial Sequence: Synthetic oligonucleotide
  Target: LAMA2; (+) strand; PAM type: NRG; PAM sequence: AGG
tgtgaggctgcatatgtgcc

SEQ ID NO: 161045 - DNA, 20 bp, Artificial Sequence
  Description of Artificial Sequence: Synthetic oligonucleotide
  Target: LAMA2; (+) strand; PAM type: NRG; PAM sequence: TGG
ggctgcatatgtgccaggcc

SEQ ID NO: 161046 - DNA, 20 bp, Artificial Sequence
  Description of Artificial Sequence: Synthetic oligonucleotide
  Target: LAMA2; (+) strand; PAM type: NRG; PAM sequence: GAG
ctgcatatgtgccaggcctg

SEQ ID NO: 161047 - DNA, 20 bp, Artificial Sequence
  Description of Artificial Sequence: Synthetic oligonucleotide
  Target: LAMA2; (+) strand; PAM type: NRG; PAM sequence: AGG
tgcatatgtgccaggcctgg

SEQ ID NO: 161048 - DNA, 20 bp, Artificial Sequence
  Description of Artificial Sequence: Synthetic oligonucleotide
  Target: LAMA2; (+) strand; PAM type: NRG; PAM sequence: AAG
ggcctggaggaatttctaaa

SEQ ID NO: 161049 - DNA, 20 bp, Artificial Sequence
  Description of Artificial Sequence: Synthetic oligonucleotide
  Target: LAMA2; (+) strand; PAM type: NRG; PAM sequence: CAG
ctggaggaatttctaaaaag

SEQ ID NO: 161050 - DNA, 20 bp, Artificial Sequence
  Description of Artificial Sequence: Synthetic oligonucleotide
  Target: LAMA2; (+) strand; PAM type: NRG; PAM sequence: CAG
tgttactgatgatcactact

SEQ ID NO: 161051 - DNA, 20 bp, Artificial Sequence
  Description of Artificial Sequence: Synthetic oligonucleotide
  Target: LAMA2; (+) strand; PAM type: NRG; PAM sequence: GAG
ttactgatgatcactactca

SEQ ID NO: 161052 - DNA, 20 bp, Artificial Sequence
  Description of Artificial Sequence: Synthetic oligonucleotide
  Target: LAMA2; (+) strand; PAM type: NRG; PAM sequence: CAG
ctgatgatcactactcagag

SEQ ID NO: 161053 - DNA, 20 bp, Artificial Sequence
  Description of Artificial Sequence: Synthetic oligonucleotide
  Target: LAMA2; (+) strand; PAM type: NRG; PAM sequence: AAG
tcactactcagagcagtcga

SEQ ID NO: 161054 - DNA, 20 bp, Artificial Sequence
  Description of Artificial Sequence: Synthetic oligonucleotide
  Target: LAMA2; (+) strand; PAM type: NRG; PAM sequence: CAG
tactcagagcagtcgaaagt

SEQ ID NO: 161055 - DNA, 20 bp, Artificial Sequence
  Description of Artificial Sequence: Synthetic oligonucleotide
  Target: LAMA2; (+) strand; PAM type: NRG; PAM sequence: CAG
agtcagttaataacatgtca

SEQ ID NO: 161056 - DNA, 20 bp, Artificial Sequence
  Description of Artificial Sequence: Synthetic oligonucleotide
  Target: LAMA2; (+) strand; PAM type: NRG; PAM sequence: AGG
gtcagttaataacatgtcac

SEQ ID NO: 161057 - DNA, 20 bp, Artificial Sequence
  Description of Artificial Sequence: Synthetic oligonucleotide
  Target: LAMA2; (+) strand; PAM type: NRG; PAM sequence: GGG
tcagttaataacatgtcaca

SEQ ID NO: 161058 - DNA, 20 bp, Artificial Sequence
  Description of Artificial Sequence: Synthetic oligonucleotide
  Target: LAMA2; (+) strand; PAM type: NRG; PAM sequence: TGG
acagggatactgctctccac

SEQ ID NO: 161059 - DNA, 20 bp, Artificial Sequence
  Description of Artificial Sequence: Synthetic oligonucleotide
  Target: LAMA2; (+) strand; PAM type: NRG; PAM sequence: GGG
cagggatactgctctccact

SEQ ID NO: 161060 - DNA, 20 bp, Artificial Sequence
  Description of Artificial Sequence: Synthetic oligonucleotide
  Target: LAMA2; (+) strand; PAM type: NRG; PAM sequence: CAG
ctgggctatattcacgtctg

SEQ ID NO: 161061 - DNA, 20 bp, Artificial Sequence
  Description of Artificial Sequence: Synthetic oligonucleotide
  Target: LAMA2; (+) strand; PAM type: NRG; PAM sequence: TAG
tatattcacgtctgcagaaa

SEQ ID NO: 161062 - DNA, 20 bp, Artificial Sequence
  Description of Artificial Sequence: Synthetic oligonucleotide
  Target: LAMA2; (+) strand; PAM type: NRG; PAM sequence: TGG
aatgtcatttcatcctccat

SEQ ID NO: 161063 - DNA, 20 bp, Artificial Sequence
  Description of Artificial Sequence: Synthetic oligonucleotide
  Target: LAMA2; (+) strand; PAM type: NRG; PAM sequence: CAG
tcatttcatcctccattggc

SEQ ID NO: 161064 - DNA, 20 bp, Artificial Sequence
  Description of Artificial Sequence: Synthetic oligonucleotide
  Target: LAMA2; (+) strand; PAM type: NRG; PAM sequence: TGG
cagaccctaatctctgtctc

SEQ ID NO: 161065 - DNA, 20 bp, Artificial Sequence
  Description of Artificial Sequence: Synthetic oligonucleotide
  Target: LAMA2; (+) strand; PAM type: NRG; PAM sequence: GGG
agaccctaatctctgtctct

SEQ ID NO: 161066 - DNA, 20 bp, Artificial Sequence
  Description of Artificial Sequence: Synthetic oligonucleotide
  Target: LAMA2; (+) strand; PAM type: NRG; PAM sequence: GGG
gaccctaatctctgtctctg

SEQ ID NO: 161067 - DNA, 20 bp, Artificial Sequence
  Description of Artificial Sequence: Synthetic oligonucleotide
  Target: LAMA2; (+) strand; PAM type: NRG; PAM sequence: GAG
ctaatctctgtctctggggt

SEQ ID NO: 161068 - DNA, 20 bp, Artificial Sequence
  Description of Artificial Sequence: Synthetic oligonucleotide
  Target: LAMA2; (+) strand; PAM type: NRG; PAM sequence: CAG
gtctctggggtgagaatgac

SEQ ID NO: 161069 - DNA, 20 bp, Artificial Sequence
  Description of Artificial Sequence: Synthetic oligonucleotide
  Target: LAMA2; (+) strand; PAM type: NRG; PAM sequence: CAG
accagcctgtactcttttgt

SEQ ID NO: 161070 - DNA, 20 bp, Artificial Sequence
  Description of Artificial Sequence: Synthetic oligonucleotide
  Target: LAMA2; (+) strand; PAM type: NRG; PAM sequence: GAG
cagcctgtactcttttgtca

SEQ ID NO: 161071 - DNA, 20 bp, Artificial Sequence
  Description of Artificial Sequence: Synthetic oligonucleotide
  Target: LAMA2; (+) strand; PAM type: NRG; PAM sequence: CAG
cctgtactcttttgtcagag

SEQ ID NO: 161072 - DNA, 20 bp, Artificial Sequence
  Description of Artificial Sequence: Synthetic oligonucleotide
  Target: LAMA2; (+) strand; PAM type: NRG; PAM sequence: TAG
gtactcttttgtcagagcag

SEQ ID NO: 161073 - DNA, 20 bp, Artificial Sequence
  Description of Artificial Sequence: Synthetic oligonucleotide
  Target: LAMA2; (+) strand; PAM type: NRG; PAM sequence: TGG
ctcttttgtcagagcagtag

SEQ ID NO: 161074 - DNA, 20 bp, Artificial Sequence
  Description of Artificial Sequence: Synthetic oligonucleotide
  Target: LAMA2; (+) strand; PAM type: NRG; PAM sequence: GAG
cttttgtcagagcagtagtg

SEQ ID NO: 161075 - DNA, 20 bp, Artificial Sequence
  Description of Artificial Sequence: Synthetic oligonucleotide
  Target: LAMA2; (+) strand; PAM type: NRG; PAM sequence: GAG
tttgtcagagcagtagtgga

SEQ ID NO: 161076 - DNA, 20 bp, Artificial Sequence
  Description of Artificial Sequence: Synthetic oligonucleotide
  Target: LAMA2; (+) strand; PAM type: NRG; PAM sequence: GAG
tgtcagagcagtagtggaga

SEQ ID NO: 161077 - DNA, 20 bp, Artificial Sequence
  Description of Artificial Sequence: Synthetic oligonucleotide
  Target: LAMA2; (+) strand; PAM type: NRG; PAM sequence: GAG
tcagagcagtagtggagaga

SEQ ID NO: 161078 - DNA, 20 bp, Artificial Sequence
  Description of Artificial Sequence: Synthetic oligonucleotide
  Target: LAMA2; (+) strand; PAM type: NRG; PAM sequence: GAG
agtagtggagagagagaaat

SEQ ID NO: 161079 - DNA, 20 bp, Artificial Sequence
  Description of Artificial Sequence: Synthetic oligonucleotide
  Target: LAMA2; (+) strand; PAM type: NRG; PAM sequence: TAG
tttccgcaacaacatcaaca

SEQ ID NO: 161080 - DNA, 20 bp, Artificial Sequence
  Description of Artificial Sequence: Synthetic oligonucleotide
  Target: LAMA2; (+) strand; PAM type: NRG; PAM sequence: TAG
caacaacatcaacatagctt

SEQ ID NO: 161081 - DNA, 20 bp, Artificial Sequence
  Description of Artificial Sequence: Synthetic oligonucleotide
  Target: LAMA2; (+) strand; PAM type: NRG; PAM sequence: TAG
ctttagcccaacgtgccatt

SEQ ID NO: 161082 - DNA, 20 bp, Artificial Sequence
  Description of Artificial Sequence: Synthetic oligonucleotide
  Target: LAMA2; (+) strand; PAM type: NRG; PAM sequence: CGG
gcccaacgtgccatttagac

SEQ ID NO: 161083 - DNA, 20 bp, Artificial Sequence
  Description of Artificial Sequence: Synthetic oligonucleotide
  Target: LAMA2; (+) strand; PAM type: NRG; PAM sequence: GAG
ccaacgtgccatttagaccg

SEQ ID NO: 161084 - DNA, 20 bp, Artificial Sequence
  Description of Artificial Sequence: Synthetic oligonucleotide
  Target: LAMA2; (+) strand; PAM type: NRG; PAM sequence: TGG
tgccatttagaccggagtct

SEQ ID NO: 161085 - DNA, 20 bp, Artificial Sequence
  Description of Artificial Sequence: Synthetic oligonucleotide
  Target: LAMA2; (+) strand; PAM type: NRG; PAM sequence: TGG
agtcttggattgatctgtga

SEQ ID NO: 161086 - DNA, 20 bp, Artificial Sequence
  Description of Artificial Sequence: Synthetic oligonucleotide
  Target: LAMA2; (+) strand; PAM type: NRG; PAM sequence: CGG
atctgtgatggatgccctgt

SEQ ID NO: 161087 - DNA, 20 bp, Artificial Sequence
  Description of Artificial Sequence: Synthetic oligonucleotide
  Target: LAMA2; (+) strand; PAM type: NRG; PAM sequence: GGG
tctgtgatggatgccctgtc

SEQ ID NO: 161088 - DNA, 20 bp, Artificial Sequence
  Description of Artificial Sequence: Synthetic oligonucleotide
  Target: LAMA2; (+) strand; PAM type: NRG; PAM sequence: CAG
tggatgccctgtcgggtaca

SEQ ID NO: 161089 - DNA, 20 bp, Artificial Sequence
  Description of Artificial Sequence: Synthetic oligonucleotide
  Target: LAMA2; (+) strand; PAM type: NRG; PAM sequence: AGG
ggatgccctgtcgggtacac

SEQ ID NO: 161090 - DNA, 20 bp, Artificial Sequence
  Description of Artificial Sequence: Synthetic oligonucleotide
  Target: LAMA2; (+) strand; PAM type: NRG; PAM sequence: GAG
ggtacacaggaccacgctgt

SEQ ID NO: 161091 - DNA, 20 bp, Artificial Sequence
  Description of Artificial Sequence: Synthetic oligonucleotide
  Target: LAMA2; (+) strand; PAM type: NRG; PAM sequence: GAG
tacacaggaccacgctgtga

SEQ ID NO: 161092 - DNA, 20 bp, Artificial Sequence
  Description of Artificial Sequence: Synthetic oligonucleotide
  Target: LAMA2; (+) strand; PAM type: NRG; PAM sequence: AGG
acacaggaccacgctgtgag

SEQ ID NO: 161093 - DNA, 20 bp, Artificial Sequence
  Description of Artificial Sequence: Synthetic oligonucleotide
  Target: LAMA2; (+) strand; PAM type: NRG; PAM sequence: AAG
aggaccacgctgtgagaggt

SEQ ID NO: 161094 - DNA, 20 bp, Artificial Sequence
  Description of Artificial Sequence: Synthetic oligonucleotide
  Target: LAMA2; (+) strand; PAM type: NRG; PAM sequence: GAG
gaccacgctgtgagaggtaa

SEQ ID NO: 161095 - DNA, 20 bp, Artificial Sequence
  Description of Artificial Sequence: Synthetic oligonucleotide
  Target: LAMA2; (+) strand; PAM type: NRG; PAM sequence: TGG
ttgcaaaatgatttctacct

SEQ ID NO: 161096 - DNA, 20 bp, Artificial Sequence
  Description of Artificial Sequence: Synthetic oligonucleotide
  Target: LAMA2; (+) strand; PAM type: NRG; PAM sequence: GGG
tgcaaaatgatttctacctt

SEQ ID NO: 161097 - DNA, 20 bp, Artificial Sequence
  Description of Artificial Sequence: Synthetic oligonucleotide
  Target: LAMA2; (+) strand; PAM type: NRG; PAM sequence: GAG
caaaatgatttctaccttgg

SEQ ID NO: 161098 - DNA, 20 bp, Artificial Sequence
  Description of Artificial Sequence: Synthetic oligonucleotide
  Target: LAMA2; (+) strand; PAM type: NRG; PAM sequence: CAG
ccttgggagttataaaaccg

SEQ ID NO: 161099 - DNA, 20 bp, Artificial Sequence
  Description of Artificial Sequence: Synthetic oligonucleotide
  Target: LAMA2; (+) strand; PAM type: NRG; PAM sequence: TGG
tcatcctttgcatcatcctt

SEQ ID NO: 161100 - DNA, 20 bp, Artificial Sequence
  Description of Artificial Sequence: Synthetic oligonucleotide
  Target: LAMA2; (+) strand; PAM type: NRG; PAM sequence: GAG
atcctttgcatcatcctttg

SEQ ID NO: 161101 - DNA, 20 bp, Artificial Sequence
  Description of Artificial Sequence: Synthetic oligonucleotide
  Target: LAMA2; (+) strand; PAM type: NRG; PAM sequence: AAG
gcatcatcctttggagaaaa

SEQ ID NO: 161102 - DNA, 20 bp, Artificial Sequence
  Description of Artificial Sequence: Synthetic oligonucleotide
  Target: LAMA2; (+) strand; PAM type: NRG; PAM sequence: AGG
catcatcctttggagaaaaa

SEQ ID NO: 161103 - DNA, 20 bp, Artificial Sequence
  Description of Artificial Sequence: Synthetic oligonucleotide
  Target: LAMA2; (+) strand; PAM type: NRG; PAM sequence: GAG
gaaaaaaggccacactcaat

SEQ ID NO: 161104 - DNA, 20 bp, Artificial Sequence
  Description of Artificial Sequence: Synthetic oligonucleotide
  Target: LAMA2; (+) strand; PAM type: NRG; PAM sequence: AGG
aaaaaaggccacactcaatg

SEQ ID NO: 161105 - DNA, 20 bp, Artificial Sequence
  Description of Artificial Sequence: Synthetic oligonucleotide
  Target: LAMA2; (+) strand; PAM type: NRG; PAM sequence: AAG
acactcaatgaggtgaaata

SEQ ID NO: 161106 - DNA, 20 bp, Artificial Sequence
  Description of Artificial Sequence: Synthetic oligonucleotide
  Target: LAMA2; (+) strand; PAM type: NRG; PAM sequence: CAG
tttgtaatttatttattttt

SEQ ID NO: 161107 - DNA, 20 bp, Artificial Sequence
  Description of Artificial Sequence: Synthetic oligonucleotide
  Target: LAMA2; (+) strand; PAM type: NRG; PAM sequence: CAG
ttcataaatcttcattcact

SEQ ID NO: 161108 - DNA, 20 bp, Artificial Sequence
  Description of Artificial Sequence: Synthetic oligonucleotide
  Target: LAMA2; (+) strand; PAM type: NRG; PAM sequence: GAG
cataaatcttcattcactca

SEQ ID NO: 161109 - DNA, 20 bp, Artificial Sequence
  Description of Artificial Sequence: Synthetic oligonucleotide
  Target: LAMA2; (+) strand; PAM type: NRG; PAM sequence: AAG
tgattaatgttttaatctta

SEQ ID NO: 161110 - DNA, 20 bp, Artificial Sequence
  Description of Artificial Sequence: Synthetic oligonucleotide
  Target: LAMA2; (+) strand; PAM type: NRG; PAM sequence: AGG
gattaatgttttaatcttaa

SEQ ID NO: 161111 - DNA, 20 bp, Artificial Sequence
  Description of Artificial Sequence: Synthetic oligonucleotide
  Target: LAMA2; (+) strand; PAM type: NRG; PAM sequence: AAG
atgttttaatcttaaaggtt

SEQ ID NO: 161112 - DNA, 20 bp, Artificial Sequence
  Description of Artificial Sequence: Synthetic oligonucleotide
  Target: LAMA2; (+) strand; PAM type: NRG; PAM sequence: TAG
gtattaacctacaatctttg

SEQ ID NO: 161113 - DNA, 20 bp, Artificial Sequence
  Description of Artificial Sequence: Synthetic oligonucleotide
  Target: LAMA2; (+) strand; PAM type: NRG; PAM sequence: AAG
taacctacaatctttgtaga

SEQ ID NO: 161114 - DNA, 20 bp, Artificial Sequence
  Description of Artificial Sequence: Synthetic oligonucleotide
  Target: LAMA2; (+) strand; PAM type: NRG; PAM sequence: AAG
ctttgtagaaagcattgctc

SEQ ID NO: 161115 - DNA, 20 bp, Artificial Sequence
  Description of Artificial Sequence: Synthetic oligonucleotide
  Target: LAMA2; (+) strand; PAM type: NRG; PAM sequence: TGG
tgtagaaagcattgctcaag

SEQ ID NO: 161116 - DNA, 20 bp, Artificial Sequence
  Description of Artificial Sequence: Synthetic oligonucleotide
  Target: LAMA2; (+) strand; PAM type: NRG; PAM sequence: AAG
gaaagcattgctcaagtgga

SEQ ID NO: 161117 - DNA, 20 bp, Artificial Sequence
  Description of Artificial Sequence: Synthetic oligonucleotide
  Target: LAMA2; (+) strand; PAM type: NRG; PAM sequence: AAG
agtggaaagtcatgcacttt

SEQ ID NO: 161118 - DNA, 20 bp, Artificial Sequence
  Description of Artificial Sequence: Synthetic oligonucleotide
  Target: LAMA2; (+) strand; PAM type: NRG; PAM sequence: TAG
gatttatcttactgtctgtg

SEQ ID NO: 161119 - DNA, 20 bp, Artificial Sequence
  Description of Artificial Sequence: Synthetic oligonucleotide
  Target: LAMA2; (+) strand; PAM type: NRG; PAM sequence: AGG
atttatcttactgtctgtgt

SEQ ID NO: 161120 - DNA, 20 bp, Artificial Sequence
  Description of Artificial Sequence: Synthetic oligonucleotide
  Target: LAMA2; (+) strand; PAM type: NRG; PAM sequence: TAG
caccatttatttttcataat

SEQ ID NO: 161121 - DNA, 20 bp, Artificial Sequence
  Description of Artificial Sequence: Synthetic oligonucleotide
  Target: LAMA2; (+) strand; PAM type: NRG; PAM sequence: TAG
agctttttgtccttaaaatg

SEQ ID NO: 161122 - DNA, 20 bp, Artificial Sequence
  Description of Artificial Sequence: Synthetic oligonucleotide
  Target: LAMA2; (+) strand; PAM type: NRG; PAM sequence: TAG
taaaatgtagcttaaatgca

SEQ ID NO: 161123 - DNA, 20 bp, Artificial Sequence
  Description of Artificial Sequence: Synthetic oligonucleotide
  Target: LAMA2; (+) strand; PAM type: NRG; PAM sequence: TAG
tagcttaaatgcatagttca

SEQ ID NO: 161124 - DNA, 20 bp, Artificial Sequence
  Description of Artificial Sequence: Synthetic oligonucleotide
  Target: LAMA2; (+) strand; PAM type: NRG; PAM sequence: CAG
taaatgcatagttcatagtt

SEQ ID NO: 161125 - DNA, 20 bp, Artificial Sequence
  Description of Artificial Sequence: Synthetic oligonucleotide
  Target: LAMA2; (+) strand; PAM type: NRG; PAM sequence: AAG
tgcatagttcatagttcagc

SEQ ID NO: 161126 - DNA, 20 bp, Artificial Sequence
  Description of Artificial Sequence: Synthetic oligonucleotide
  Target: LAMA2; (+) strand; PAM type: NRG; PAM sequence: TGG
atagttcatagttcagcaag

SEQ ID NO: 161127 - DNA, 20 bp, Artificial Sequence
  Description of Artificial Sequence: Synthetic oligonucleotide
  Target: LAMA2; (+) strand; PAM type: NRG; PAM sequence: TAG
actttaaatatacttgaaaa

SEQ ID NO: 161128 - DNA, 20 bp, Artificial Sequence
  Description of Artificial Sequence: Synthetic oligonucleotide
  Target: LAMA2; (+) strand; PAM type: NRG; PAM sequence: CAG
tcttctaattgctcctaaac

SEQ ID NO: 161129 - DNA, 20 bp, Artificial Sequence
  Description of Artificial Sequence: Synthetic oligonucleotide
  Target: LAMA2; (+) strand; PAM type: NRG; PAM sequence: TGG
ttaattcctgttgattttac

SEQ ID NO: 161130 - DNA, 20 bp, Artificial Sequence
  Description of Artificial Sequence: Synthetic oligonucleotide
  Target: LAMA2; (+) strand; PAM type: NRG; PAM sequence: GGG
taattcctgttgattttact

SEQ ID NO: 161131 - DNA, 20 bp, Artificial Sequence
  Description of Artificial Sequence: Synthetic oligonucleotide
  Target: LAMA2; (+) strand; PAM type: NRG; PAM sequence: CAG
gattttactgggttgctttg

SEQ ID NO: 161132 - DNA, 20 bp, Artificial Sequence
  Description of Artificial Sequence: Synthetic oligonucleotide
  Target: LAMA2; (+) strand; PAM type: NRG; PAM sequence: CAG
tttactgggttgctttgcag

SEQ ID NO: 161133 - DNA, 20 bp, Artificial Sequence
  Description of Artificial Sequence: Synthetic oligonucleotide
  Target: LAMA2; (+) strand; PAM type: NRG; PAM sequence: AAG
ggttgctttgcagcagaaac

SEQ ID NO: 161134 - DNA, 20 bp, Artificial Sequence
  Description of Artificial Sequence: Synthetic oligonucleotide
  Target: LAMA2; (+) strand; PAM type: NRG; PAM sequence: GAG
ttgctttgcagcagaaacaa

SEQ ID NO: 161135 - DNA, 20 bp, Artificial Sequence
  Description of Artificial Sequence: Synthetic oligonucleotide
  Target: LAMA2; (+) strand; PAM type: NRG; PAM sequence: AAG
ttccttctgaaatgtttttg

SEQ ID NO: 161136 - DNA, 20 bp, Artificial Sequence
  Description of Artificial Sequence: Synthetic oligonucleotide
  Target: LAMA2; (+) strand; PAM type: NRG; PAM sequence: CAG
aaataattcttctatatatt

SEQ ID NO: 161137 - DNA, 20 bp, Artificial Sequence
  Description of Artificial Sequence: Synthetic oligonucleotide
  Target: LAMA2; (+) strand; PAM type: NRG; PAM sequence: CAG
ttcttctatatattcagcct

SEQ ID NO: 161138 - DNA, 20 bp, Artificial Sequence
  Description of Artificial Sequence: Synthetic oligonucleotide
  Target: LAMA2; (+) strand; PAM type: NRG; PAM sequence: AAG
tatattcagcctcagcataa

SEQ ID NO: 161139 - DNA, 20 bp, Artificial Sequence
  Description of Artificial Sequence: Synthetic oligonucleotide
  Target: LAMA2; (+) strand; PAM type: NRG; PAM sequence: TGG
caaaaacaaaaacctccctc

SEQ ID NO: 161140 - DNA, 20 bp, Artificial Sequence
  Description of Artificial Sequence: Synthetic oligonucleotide
  Target: LAMA2; (+) strand; PAM type: NRG; PAM sequence: CAG
caaaaacctccctctggttt

SEQ ID NO: 161141 - DNA, 20 bp, Artificial Sequence
  Description of Artificial Sequence: Synthetic oligonucleotide
  Target: LAMA2; (+) strand; PAM type: NRG; PAM sequence: TGG
cctccctctggtttcagcac

SEQ ID NO: 161142 - DNA, 20 bp, Artificial Sequence
  Description of Artificial Sequence: Synthetic oligonucleotide
  Target: LAMA2; (+) strand; PAM type: NRG; PAM sequence: TAG
tctggtttcagcactggaaa

SEQ ID NO: 161143 - DNA, 20 bp, Artificial Sequence
  Description of Artificial Sequence: Synthetic oligonucleotide
  Target: LAMA2; (+) strand; PAM type: NRG; PAM sequence: TGG
gtccctgctgccacccttcc

SEQ ID NO: 161144 - DNA, 20 bp, Artificial Sequence
  Description of Artificial Sequence: Synthetic oligonucleotide
  Target: LAMA2; (+) strand; PAM type: NRG; PAM sequence: GGG
tccctgctgccacccttcct

SEQ ID NO: 161145 - DNA, 20 bp, Artificial Sequence
  Description of Artificial Sequence: Synthetic oligonucleotide
  Target: LAMA2; (+) strand; PAM type: NRG; PAM sequence: GAG
cctgctgccacccttcctgg

SEQ ID NO: 161146 - DNA, 20 bp, Artificial Sequence
  Description of Artificial Sequence: Synthetic oligonucleotide
  Target: LAMA2; (+) strand; PAM type: NRG; PAM sequence: AGG
ctgctgccacccttcctggg

SEQ ID NO: 161147 - DNA, 20 bp, Artificial Sequence
  Description of Artificial Sequence: Synthetic oligonucleotide
  Target: LAMA2; (+) strand; PAM type: NRG; PAM sequence: GGG
tgctgccacccttcctggga

SEQ ID NO: 161148 - DNA, 20 bp, Artificial Sequence
  Description of Artificial Sequence: Synthetic oligonucleotide
  Target: LAMA2; (+) strand; PAM type: NRG; PAM sequence: GAG
ctgccacccttcctgggagg

SEQ ID NO: 161149 - DNA, 20 bp, Artificial Sequence
  Description of Artificial Sequence: Synthetic oligonucleotide
  Target: LAMA2; (+) strand; PAM type: NRG; PAM sequence: AGG
tgccacccttcctgggaggg

SEQ ID NO: 161150 - DNA, 20 bp, Artificial Sequence
  Description of Artificial Sequence: Synthetic oligonucleotide
  Target: LAMA2; (+) strand; PAM type: NRG; PAM sequence: GGG
gccacccttcctgggaggga

SEQ ID NO: 161151 - DNA, 20 bp, Artificial Sequence
  Description of Artificial Sequence: Synthetic oligonucleotide
  Target: LAMA2; (+) strand; PAM type: NRG; PAM sequence: GGG
ccacccttcctgggagggag

SEQ ID NO: 161152 - DNA, 20 bp, Artificial Sequence
  Description of Artificial Sequence: Synthetic oligonucleotide
  Target: LAMA2; (+) strand; PAM type: NRG; PAM sequence: AAG
tcctgggagggaggggtgca

SEQ ID NO: 161153 - DNA, 20 bp, Artificial Sequence
  Description of Artificial Sequence: Synthetic oligonucleotide
  Target: LAMA2; (+) strand; PAM type: NRG; PAM sequence: AGG
cctgggagggaggggtgcaa

SEQ ID NO: 161154 - DNA, 20 bp, Artificial Sequence
  Description of Artificial Sequence: Synthetic oligonucleotide
  Target: LAMA2; (+) strand; PAM type: NRG; PAM sequence: AAG
gggagggaggggtgcaaagg

SEQ ID NO: 161155 - DNA, 20 bp, Artificial Sequence
  Description of Artificial Sequence: Synthetic oligonucleotide
  Target: LAMA2; (+) strand; PAM type: NRG; PAM sequence: GAG
tactttcactcatcatcact

SEQ ID NO: 161156 - DNA, 20 bp, Artificial Sequence
  Description of Artificial Sequence: Synthetic oligonucleotide
  Target: LAMA2; (+) strand; PAM type: NRG; PAM sequence: AGG
actttcactcatcatcactg

SEQ ID NO: 161157 - DNA, 20 bp, Artificial Sequence
  Description of Artificial Sequence: Synthetic oligonucleotide
  Target: LAMA2; (+) strand; PAM type: NRG; PAM sequence: AAG
catcactgaggctaaccctg

SEQ ID NO: 161158 - DNA, 20 bp, Artificial Sequence
  Description of Artificial Sequence: Synthetic oligonucleotide
  Target: LAMA2; (+) strand; PAM type: NRG; PAM sequence: GAG
tcactgaggctaaccctgaa

SEQ ID NO: 161159 - DNA, 20 bp, Artificial Sequence
  Description of Artificial Sequence: Synthetic oligonucleotide
  Target: LAMA2; (+) strand; PAM type: NRG; PAM sequence: AGG
cactgaggctaaccctgaag

SEQ ID NO: 161160 - DNA, 20 bp, Artificial Sequence
  Description of Artificial Sequence: Synthetic oligonucleotide
  Target: LAMA2; (+) strand; PAM type: NRG; PAM sequence: GGG
actgaggctaaccctgaaga

SEQ ID NO: 161161 - DNA, 20 bp, Artificial Sequence
  Description of Artificial Sequence: Synthetic oligonucleotide
  Target: LAMA2; (+) strand; PAM type: NRG; PAM sequence: TGG
cccgtcttttcctgtcatct

SEQ ID NO: 161162 - DNA, 20 bp, Artificial Sequence
  Description of Artificial Sequence: Synthetic oligonucleotide
  Target: LAMA2; (+) strand; PAM type: NRG; PAM sequence: CAG
gtcttttcctgtcatcttgg

SEQ ID NO: 161163 - DNA, 20 bp, Artificial Sequence
  Description of Artificial Sequence: Synthetic oligonucleotide
  Target: LAMA2; (+) strand; PAM type: NRG; PAM sequence: CAG
gctatcacccctgtttcaac

SEQ ID NO: 161164 - DNA, 20 bp, Artificial Sequence
  Description of Artificial Sequence: Synthetic oligonucleotide
  Target: LAMA2; (+) strand; PAM type: NRG; PAM sequence: AGG
ctatcacccctgtttcaacc

SEQ ID NO: 161165 - DNA, 20 bp, Artificial Sequence
  Description of Artificial Sequence: Synthetic oligonucleotide
  Target: LAMA2; (+) strand; PAM type: NRG; PAM sequence: AAG
caggatgcataaaattaatg

SEQ ID NO: 161166 - DNA, 20 bp, Artificial Sequence
  Description of Artificial Sequence: Synthetic oligonucleotide
  Target: LAMA2; (+) strand; PAM type: NRG; PAM sequence: CAG
gatgcataaaattaatgaag

SEQ ID NO: 161167 - DNA, 20 bp, Artificial Sequence
  Description of Artificial Sequence: Synthetic oligonucleotide
  Target: LAMA2; (+) strand; PAM type: NRG; PAM sequence: AGG
atgcataaaattaatgaagc

SEQ ID NO: 161168 - DNA, 20 bp, Artificial Sequence
  Description of Artificial Sequence: Synthetic oligonucleotide
  Target: LAMA2; (+) strand; PAM type: NRG; PAM sequence: GAG
gcataaaattaatgaagcag

SEQ ID NO: 161169 - DNA, 20 bp, Artificial Sequence
  Description of Artificial Sequence: Synthetic oligonucleotide
  Target: LAMA2; (+) strand; PAM type: NRG; PAM sequence: CAG
tgaagcaggagcctatcacc

SEQ ID NO: 161170 - DNA, 20 bp, Artificial Sequence
  Description of Artificial Sequence: Synthetic oligonucleotide
  Target: LAMA2; (+) strand; PAM type: NRG; PAM sequence: GAG
aagcaggagcctatcaccca

SEQ ID NO: 161171 - DNA, 20 bp, Artificial Sequence
  Description of Artificial Sequence: Synthetic oligonucleotide
  Target: LAMA2; (+) strand; PAM type: NRG; PAM sequence: GAG
gcaggagcctatcacccaga

SEQ ID NO: 161172 - DNA, 20 bp, Artificial Sequence
  Description of Artificial Sequence: Synthetic oligonucleotide
  Target: LAMA2; (+) strand; PAM type: NRG; PAM sequence: TAG
cctatcacccagagagaatt

SEQ ID NO: 161173 - DNA, 20 bp, Artificial Sequence
  Description of Artificial Sequence: Synthetic oligonucleotide
  Target: LAMA2; (+) strand; PAM type: NRG; PAM sequence: TAG
tcacccagagagaatttagc

SEQ ID NO: 161174 - DNA, 20 bp, Artificial Sequence
  Description of Artificial Sequence: Synthetic oligonucleotide
  Target: LAMA2; (+) strand; PAM type: NRG; PAM sequence: TAG
gagagaatttagctagcaac

SEQ ID NO: 161175 - DNA, 20 bp, Artificial Sequence
  Description of Artificial Sequence: Synthetic oligonucleotide
  Target: LAMA2; (+) strand; PAM type: NRG; PAM sequence: CAG
agaatttagctagcaactag

SEQ ID NO: 161176 - DNA, 20 bp, Artificial Sequence
  Description of Artificial Sequence: Synthetic oligonucleotide
  Target: LAMA2; (+) strand; PAM type: NRG; PAM sequence: TGG
agctagcaactagcagtctg

SEQ ID NO: 161177 - DNA, 20 bp, Artificial Sequence
  Description of Artificial Sequence: Synthetic oligonucleotide
  Target: LAMA2; (+) strand; PAM type: NRG; PAM sequence: AAG
caactagcagtctgtggaca

SEQ ID NO: 161178 - DNA, 20 bp, Artificial Sequence
  Description of Artificial Sequence: Synthetic oligonucleotide
  Target: LAMA2; (+) strand; PAM type: NRG; PAM sequence: CAG
tgtggacaaagtgccaatga

SEQ ID NO: 161179 - DNA, 20 bp, Artificial Sequence
  Description of Artificial Sequence: Synthetic oligonucleotide
  Target: LAMA2; (+) strand; PAM type: NRG; PAM sequence: TAG
aaagtgccaatgacagttcc

SEQ ID NO: 161180 - DNA, 20 bp, Artificial Sequence
  Description of Artificial Sequence: Synthetic oligonucleotide
  Target: LAMA2; (+) strand; PAM type: NRG; PAM sequence: CAG
gtgccaatgacagttcctag

SEQ ID NO: 161181 - DNA, 20 bp, Artificial Sequence
  Description of Artificial Sequence: Synthetic oligonucleotide
  Target: LAMA2; (+) strand; PAM type: NRG; PAM sequence: AAG
tgacagttcctagcagcaac

SEQ ID NO: 161182 - DNA, 20 bp, Artificial Sequence
  Description of Artificial Sequence: Synthetic oligonucleotide
  Target: LAMA2; (+) strand; PAM type: NRG; PAM sequence: GAG
cagcaacaagtactatttgt

SEQ ID NO: 161183 - DNA, 20 bp, Artificial Sequence
  Description of Artificial Sequence: Synthetic oligonucleotide
  Target: LAMA2; (+) strand; PAM type: NRG; PAM sequence: TGG
acaagtactatttgtgagta

SEQ ID NO: 161184 - DNA, 20 bp, Artificial Sequence
  Description of Artificial Sequence: Synthetic oligonucleotide
  Target: LAMA2; (+) strand; PAM type: NRG; PAM sequence: AAG
agtactatttgtgagtatgg

SEQ ID NO: 161185 - DNA, 20 bp, Artificial Sequence
  Description of Artificial Sequence: Synthetic oligonucleotide
  Target: LAMA2; (+) strand; PAM type: NRG; PAM sequence: TAG
gtatggaagcatctgtaaat

SEQ ID NO: 161186 - DNA, 20 bp, Artificial Sequence
  Description of Artificial Sequence: Synthetic oligonucleotide
  Target: LAMA2; (+) strand; PAM type: NRG; PAM sequence: AGG
tatggaagcatctgtaaatt

SEQ ID NO: 161187 - DNA, 20 bp, Artificial Sequence
  Description of Artificial Sequence: Synthetic oligonucleotide
  Target: LAMA2; (+) strand; PAM type: NRG; PAM sequence: AAG
catctgtaaattaggaatga

SEQ ID NO: 161188 - DNA, 20 bp, Artificial Sequence
  Description of Artificial Sequence: Synthetic oligonucleotide
  Target: LAMA2; (+) strand; PAM type: NRG; PAM sequence: AAG
gaaagaaaaaaaaatgaaac

SEQ ID NO: 161189 - DNA, 20 bp, Artificial Sequence
  Description of Artificial Sequence: Synthetic oligonucleotide
  Target: LAMA2; (+) strand; PAM type: NRG; PAM sequence: CAG
agaaaaaaaaatgaaacaag

SEQ ID NO: 161190 - DNA, 20 bp, Artificial Sequence
  Description of Artificial Sequence: Synthetic oligonucleotide
  Target: LAMA2; (+) strand; PAM type: NRG; PAM sequence: AAG
agcagcatttatttgcaatc

SEQ ID NO: 161191 - DNA, 20 bp, Artificial Sequence
  Description of Artificial Sequence: Synthetic oligonucleotide
  Target: LAMA2; (+) strand; PAM type: NRG; PAM sequence: TAG
tttatttgcaatcaagaaac

SEQ ID NO: 161192 - DNA, 20 bp, Artificial Sequence
  Description of Artificial Sequence: Synthetic oligonucleotide
  Target: LAMA2; (+) strand; PAM type: NRG; PAM sequence: AAG
tgtgtctgtgtgtgtgttta

SEQ ID NO: 161193 - DNA, 20 bp, Artificial Sequence
  Description of Artificial Sequence: Synthetic oligonucleotide
  Target: LAMA2; (+) strand; PAM type: NRG; PAM sequence: AAG
tctgtgtgtgtgtttaaaga

SEQ ID NO: 161194 - DNA, 20 bp, Artificial Sequence
  Description of Artificial Sequence: Synthetic oligonucleotide
  Target: LAMA2; (+) strand; PAM type: NRG; PAM sequence: AGG
ctgtgtgtgtgtttaaagaa

SEQ ID NO: 161195 - DNA, 20 bp, Artificial Sequence
  Description of Artificial Sequence: Synthetic oligonucleotide
  Target: LAMA2; (+) strand; PAM type: NRG; PAM sequence: TAG
gtgcatattacttactataa

SEQ ID NO: 161196 - DNA, 20 bp, Artificial Sequence
  Description of Artificial Sequence: Synthetic oligonucleotide
  Target: LAMA2; (+) strand; PAM type: NRG; PAM sequence: AGG
tgcatattacttactataat

SEQ ID NO: 161197 - DNA, 20 bp, Artificial Sequence
  Description of Artificial Sequence: Synthetic oligonucleotide
  Target: LAMA2; (+) strand; PAM type: NRG; PAM sequence: GAG
catattacttactataatag

SEQ ID NO: 161198 - DNA, 20 bp, Artificial Sequence
  Description of Artificial Sequence: Synthetic oligonucleotide
  Target: LAMA2; (+) strand; PAM type: NRG; PAM sequence: AAG
taggagaacatatcattgcc

SEQ ID NO: 161199 - DNA, 20 bp, Artificial Sequence
  Description of Artificial Sequence: Synthetic oligonucleotide
  Target: LAMA2; (+) strand; PAM type: NRG; PAM sequence: CAG
agaacatatcattgccaaga

SEQ ID NO: 161200 - DNA, 20 bp, Artificial Sequence
  Description of Artificial Sequence: Synthetic oligonucleotide
  Target: LAMA2; (+) strand; PAM type: NRG; PAM sequence: AAG
tgccaagacagatttacatc

SEQ ID NO: 161201 - DNA, 20 bp, Artificial Sequence
  Description of Artificial Sequence: Synthetic oligonucleotide
  Target: LAMA2; (+) strand; PAM type: NRG; PAM sequence: CAG
catcaagtgcctaaaccccc

SEQ ID NO: 161202 - DNA, 20 bp, Artificial Sequence
  Description of Artificial Sequence: Synthetic oligonucleotide
  Target: LAMA2; (+) strand; PAM type: NRG; PAM sequence: CAG
ctaaaccccccagttcacta

SEQ ID NO: 161203 - DNA, 20 bp, Artificial Sequence
  Description of Artificial Sequence: Synthetic oligonucleotide
  Target: LAMA2; (+) strand; PAM type: NRG; PAM sequence: AGG
taaaccccccagttcactac

SEQ ID NO: 161204 - DNA, 20 bp, Artificial Sequence
  Description of Artificial Sequence: Synthetic oligonucleotide
  Target: LAMA2; (+) strand; PAM type: NRG; PAM sequence: TAG
cactacaggcaacctttttt

SEQ ID NO: 161205 - DNA, 20 bp, Artificial Sequence
  Description of Artificial Sequence: Synthetic oligonucleotide
  Target: LAMA2; (+) strand; PAM type: NRG; PAM sequence: TGG
ggcaacctttttttagcaac

SEQ ID NO: 161206 - DNA, 20 bp, Artificial Sequence
  Description of Artificial Sequence: Synthetic oligonucleotide
  Target: LAMA2; (+) strand; PAM type: NRG; PAM sequence: CAG
ttttagcaactggaaaatga

SEQ ID NO: 161207 - DNA, 20 bp, Artificial Sequence
  Description of Artificial Sequence: Synthetic oligonucleotide
  Target: LAMA2; (+) strand; PAM type: NRG; PAM sequence: AAG
tgacagctgctctgtcatac

SEQ ID NO: 161208 - DNA, 20 bp, Artificial Sequence
  Description of Artificial Sequence: Synthetic oligonucleotide
  Target: LAMA2; (+) strand; PAM type: NRG; PAM sequence: AGG
gacagctgctctgtcataca

SEQ ID NO: 161209 - DNA, 20 bp, Artificial Sequence
  Description of Artificial Sequence: Synthetic oligonucleotide
  Target: LAMA2; (+) strand; PAM type: NRG; PAM sequence: TAG
ggctattaaatccacttatc

SEQ ID NO: 161210 - DNA, 20 bp, Artificial Sequence
  Description of Artificial Sequence: Synthetic oligonucleotide
  Target: LAMA2; (+) strand; PAM type: NRG; PAM sequence: AGG
gctattaaatccacttatct

SEQ ID NO: 161211 - DNA, 20 bp, Artificial Sequence
  Description of Artificial Sequence: Synthetic oligonucleotide
  Target: LAMA2; (+) strand; PAM type: NRG; PAM sequence: GAG
ttaaatccacttatctaggt

SEQ ID NO: 161212 - DNA, 20 bp, Artificial Sequence
  Description of Artificial Sequence: Synthetic oligonucleotide
  Target: LAMA2; (+) strand; PAM type: NRG; PAM sequence: TAG
actatactccctatacatgt

SEQ ID NO: 161213 - DNA, 20 bp, Artificial Sequence
  Description of Artificial Sequence: Synthetic oligonucleotide
  Target: LAMA2; (+) strand; PAM type: NRG; PAM sequence: TAG
tccctatacatgttagacaa

SEQ ID NO: 161214 - DNA, 20 bp, Artificial Sequence
  Description of Artificial Sequence: Synthetic oligonucleotide
  Target: LAMA2; (+) strand; PAM type: NRG; PAM sequence: TAG
ttatttaacaaacatctgtt

SEQ ID NO: 161215 - DNA, 20 bp, Artificial Sequence
  Description of Artificial Sequence: Synthetic oligonucleotide
  Target: LAMA2; (+) strand; PAM type: NRG; PAM sequence: TGG
gtttagcaactaccatgtgc

SEQ ID NO: 161216 - DNA, 20 bp, Artificial Sequence
  Description of Artificial Sequence: Synthetic oligonucleotide
  Target: LAMA2; (+) strand; PAM type: NRG; PAM sequence: GGG
tttagcaactaccatgtgct

SEQ ID NO: 161217 - DNA, 20 bp, Artificial Sequence
  Description of Artificial Sequence: Synthetic oligonucleotide
  Target: LAMA2; (+) strand; PAM type: NRG; PAM sequence: AAG
aactaccatgtgctgggtac

SEQ ID NO: 161218 - DNA, 20 bp, Artificial Sequence
  Description of Artificial Sequence: Synthetic oligonucleotide
  Target: LAMA2; (+) strand; PAM type: NRG; PAM sequence: AGG
actaccatgtgctgggtaca

SEQ ID NO: 161219 - DNA, 20 bp, Artificial Sequence
  Description of Artificial Sequence: Synthetic oligonucleotide
  Target: LAMA2; (+) strand; PAM type: NRG; PAM sequence: TAG
ccatgtgctgggtacaaggc

SEQ ID NO: 161220 - DNA, 20 bp, Artificial Sequence
  Description of Artificial Sequence: Synthetic oligonucleotide
  Target: LAMA2; (+) strand; PAM type: NRG; PAM sequence: TGG
ctgggtacaaggctagacat

SEQ ID NO: 161221 - DNA, 20 bp, Artificial Sequence
  Description of Artificial Sequence: Synthetic oligonucleotide
  Target: LAMA2; (+) strand; PAM type: NRG; PAM sequence: TAG
ggctagacattggatataaa

SEQ ID NO: 161222 - DNA, 20 bp, Artificial Sequence
  Description of Artificial Sequence: Synthetic oligonucleotide
  Target: LAMA2; (+) strand; PAM type: NRG; PAM sequence: CAG
cattttcccatccttgccct

SEQ ID NO: 161223 - DNA, 20 bp, Artificial Sequence
  Description of Artificial Sequence: Synthetic oligonucleotide
  Target: LAMA2; (+) strand; PAM type: NRG; PAM sequence: AAG
ctcacatctttctttaatgc

SEQ ID NO: 161224 - DNA, 20 bp, Artificial Sequence
  Description of Artificial Sequence: Synthetic oligonucleotide
  Target: LAMA2; (+) strand; PAM type: NRG; PAM sequence: GAG
catctttctttaatgcaagt

SEQ ID NO: 161225 - DNA, 20 bp, Artificial Sequence
  Description of Artificial Sequence: Synthetic oligonucleotide
  Target: LAMA2; (+) strand; PAM type: NRG; PAM sequence: AGG
atctttctttaatgcaagtg

SEQ ID NO: 161226 - DNA, 20 bp, Artificial Sequence
  Description of Artificial Sequence: Synthetic oligonucleotide
  Target: LAMA2; (+) strand; PAM type: NRG; PAM sequence: TGG
ttctttaatgcaagtgagga

SEQ ID NO: 161227 - DNA, 20 bp, Artificial Sequence
  Description of Artificial Sequence: Synthetic oligonucleotide
  Target: LAMA2; (+) strand; PAM type: NRG; PAM sequence: TGG
aggatggttgcttgtattct

SEQ ID NO: 161228 - DNA, 20 bp, Artificial Sequence
  Description of Artificial Sequence: Synthetic oligonucleotide
  Target: LAMA2; (+) strand; PAM type: NRG; PAM sequence: GGG
ggatggttgcttgtattctt

SEQ ID NO: 161229 - DNA, 20 bp, Artificial Sequence
  Description of Artificial Sequence: Synthetic oligonucleotide
  Target: LAMA2; (+) strand; PAM type: NRG; PAM sequence: GAG
atggttgcttgtattcttgg

SEQ ID NO: 161230 - DNA, 20 bp, Artificial Sequence
  Description of Artificial Sequence: Synthetic oligonucleotide
  Target: LAMA2; (+) strand; PAM type: NRG; PAM sequence: TAG
ttgggagaattccatttgaa

SEQ ID NO: 161231 - DNA, 20 bp, Artificial Sequence
  Description of Artificial Sequence: Synthetic oligonucleotide
  Target: LAMA2; (+) strand; PAM type: NRG; PAM sequence: AAG
tttgaatagtaaaaatcacc

SEQ ID NO: 161232 - DNA, 20 bp, Artificial Sequence
  Description of Artificial Sequence: Synthetic oligonucleotide
  Target: LAMA2; (+) strand; PAM type: NRG; PAM sequence: AGG
ttgaatagtaaaaatcacca

SEQ ID NO: 161233 - DNA, 20 bp, Artificial Sequence
  Description of Artificial Sequence: Synthetic oligonucleotide
  Target: LAMA2; (+) strand; PAM type: NRG; PAM sequence: GAG
gaatagtaaaaatcaccaag

SEQ ID NO: 161234 - DNA, 20 bp, Artificial Sequence
  Description of Artificial Sequence: Synthetic oligonucleotide
  Target: LAMA2; (+) strand; PAM type: NRG; PAM sequence: GAG
atagtaaaaatcaccaagga

SEQ ID NO: 161235 - DNA, 20 bp, Artificial Sequence
  Description of Artificial Sequence: Synthetic oligonucleotide
  Target: LAMA2; (+) strand; PAM type: NRG; PAM sequence: CAG
ccaaggagagaaatacctga

SEQ ID NO: 161236 - DNA, 20 bp, Artificial Sequence
  Description of Artificial Sequence: Synthetic oligonucleotide
  Target: LAMA2; (+) strand; PAM type: NRG; PAM sequence: AAG
ggagagaaatacctgacaga

SEQ ID NO: 161237 - DNA, 20 bp, Artificial Sequence
  Description of Artificial Sequence: Synthetic oligonucleotide
  Target: LAMA2; (+) strand; PAM type: NRG; PAM sequence: CAG
aaatctgtattaatctgatt

SEQ ID NO: 161238 - DNA, 20 bp, Artificial Sequence
  Description of Artificial Sequence: Synthetic oligonucleotide
  Target: LAMA2; (+) strand; PAM type: NRG; PAM sequence: AAG
tctgtattaatctgattcag

SEQ ID NO: 161239 - DNA, 20 bp, Artificial Sequence
  Description of Artificial Sequence: Synthetic oligonucleotide
  Target: LAMA2; (+) strand; PAM type: NRG; PAM sequence: TGG
tattaatctgattcagaaga

SEQ ID NO: 161240 - DNA, 20 bp, Artificial Sequence
  Description of Artificial Sequence: Synthetic oligonucleotide
  Target: LAMA2; (+) strand; PAM type: NRG; PAM sequence: CAG
aagatggcaacatgcatatg

SEQ ID NO: 161241 - DNA, 20 bp, Artificial Sequence
  Description of Artificial Sequence: Synthetic oligonucleotide
  Target: LAMA2; (+) strand; PAM type: NRG; PAM sequence: TGG
tgcatatgcagtgtaatgaa

SEQ ID NO: 161242 - DNA, 20 bp, Artificial Sequence
  Description of Artificial Sequence: Synthetic oligonucleotide
  Target: LAMA2; (+) strand; PAM type: NRG; PAM sequence: CAG
tgaatggcatattttatctc

SEQ ID NO: 161243 - DNA, 20 bp, Artificial Sequence
  Description of Artificial Sequence: Synthetic oligonucleotide
  Target: LAMA2; (+) strand; PAM type: NRG; PAM sequence: AAG
gcatattttatctccagctc

SEQ ID NO: 161244 - DNA, 20 bp, Artificial Sequence
  Description of Artificial Sequence: Synthetic oligonucleotide
  Target: LAMA2; (+) strand; PAM type: NRG; PAM sequence: CAG
ctccagctcaagtttttcca

SEQ ID NO: 161245 - DNA, 20 bp, Artificial Sequence
  Description of Artificial Sequence: Synthetic oligonucleotide
  Target: LAMA2; (+) strand; PAM type: NRG; PAM sequence: TAG
cagttgataccatatttttc

SEQ ID NO: 161246 - DNA, 20 bp, Artificial Sequence
  Description of Artificial Sequence: Synthetic oligonucleotide
  Target: LAMA2; (+) strand; PAM type: NRG; PAM sequence: CAG
tgataccatatttttctagc

SEQ ID NO: 161247 - DNA, 20 bp, Artificial Sequence
  Description of Artificial Sequence: Synthetic oligonucleotide
  Target: LAMA2; (+) strand; PAM type: NRG; PAM sequence: TAG
atatttttctagccagaatt

SEQ ID NO: 161248 - DNA, 20 bp, Artificial Sequence
  Description of Artificial Sequence: Synthetic oligonucleotide
  Target: LAMA2; (+) strand; PAM type: NRG; PAM sequence: TAG
tttctagccagaatttagat

SEQ ID NO: 161249 - DNA, 20 bp, Artificial Sequence
  Description of Artificial Sequence: Synthetic oligonucleotide
  Target: LAMA2; (+) strand; PAM type: NRG; PAM sequence: AGG
ttctagccagaatttagatt

SEQ ID NO: 161250 - DNA, 20 bp, Artificial Sequence
  Description of Artificial Sequence: Synthetic oligonucleotide
  Target: LAMA2; (+) strand; PAM type: NRG; PAM sequence: GGG
tctagccagaatttagatta

SEQ ID NO: 161251 - DNA, 20 bp, Artificial Sequence
  Description of Artificial Sequence: Synthetic oligonucleotide
  Target: LAMA2; (+) strand; PAM type: NRG; PAM sequence: CAG
gaatttagattagggttttc

SEQ ID NO: 161252 - DNA, 20 bp, Artificial Sequence
  Description of Artificial Sequence: Synthetic oligonucleotide
  Target: LAMA2; (+) strand; PAM type: NRG; PAM sequence: AGG
aatttagattagggttttcc

SEQ ID NO: 161253 - DNA, 20 bp, Artificial Sequence
  Description of Artificial Sequence: Synthetic oligonucleotide
  Target: LAMA2; (+) strand; PAM type: NRG; PAM sequence: AAG
agggttttccaggaatattt

SEQ ID NO: 161254 - DNA, 20 bp, Artificial Sequence
  Description of Artificial Sequence: Synthetic oligonucleotide
  Target: LAMA2; (+) strand; PAM type: NRG; PAM sequence: AAG
taatttcattgtatttatgt

SEQ ID NO: 161255 - DNA, 20 bp, Artificial Sequence
  Description of Artificial Sequence: Synthetic oligonucleotide
  Target: LAMA2; (+) strand; PAM type: NRG; PAM sequence: AAG
attgtatttatgtaagccaa

SEQ ID NO: 161256 - DNA, 20 bp, Artificial Sequence
  Description of Artificial Sequence: Synthetic oligonucleotide
  Target: LAMA2; (+) strand; PAM type: NRG; PAM sequence: TAG
tgtaagccaaaagaacacct

SEQ ID NO: 161257 - DNA, 20 bp, Artificial Sequence
  Description of Artificial Sequence: Synthetic oligonucleotide
  Target: LAMA2; (+) strand; PAM type: NRG; PAM sequence: TAG
agccaaaagaacaccttaga

SEQ ID NO: 161258 - DNA, 20 bp, Artificial Sequence
  Description of Artificial Sequence: Synthetic oligonucleotide
  Target: LAMA2; (+) strand; PAM type: NRG; PAM sequence: GAG
cttagatagatctaaaatat

SEQ ID NO: 161259 - DNA, 20 bp, Artificial Sequence
  Description of Artificial Sequence: Synthetic oligonucleotide
  Target: LAMA2; (+) strand; PAM type: NRG; PAM sequence: AGG
ttagatagatctaaaatatg

SEQ ID NO: 161260 - DNA, 20 bp, Artificial Sequence
  Description of Artificial Sequence: Synthetic oligonucleotide
  Target: LAMA2; (+) strand; PAM type: NRG; PAM sequence: GGG
tagatagatctaaaatatga

SEQ ID NO: 161261 - DNA, 20 bp, Artificial Sequence
  Description of Artificial Sequence: Synthetic oligonucleotide
  Target: LAMA2; (+) strand; PAM type: NRG; PAM sequence: GAG
gagggaaacattttttgttt

SEQ ID NO: 161262 - DNA, 20 bp, Artificial Sequence
  Description of Artificial Sequence: Synthetic oligonucleotide
  Target: LAMA2; (+) strand; PAM type: NRG; PAM sequence: AAG
tgtttgagatgtgcctgttg

SEQ ID NO: 161263 - DNA, 20 bp, Artificial Sequence
  Description of Artificial Sequence: Synthetic oligonucleotide
  Target: LAMA2; (+) strand; PAM type: NRG; PAM sequence: TAG
ttgagatgtgcctgttgaag

SEQ ID NO: 161264 - DNA, 20 bp, Artificial Sequence
  Description of Artificial Sequence: Synthetic oligonucleotide
  Target: LAMA2; (+) strand; PAM type: NRG; PAM sequence: AAG
agatgtgcctgttgaagtag

SEQ ID NO: 161265 - DNA, 20 bp, Artificial Sequence
  Description of Artificial Sequence: Synthetic oligonucleotide
  Target: LAMA2; (+) strand; PAM type: NRG; PAM sequence: GAG
atgtgcctgttgaagtagaa

SEQ ID NO: 161266 - DNA, 20 bp, Artificial Sequence
  Description of Artificial Sequence: Synthetic oligonucleotide
  Target: LAMA2; (+) strand; PAM type: NRG; PAM sequence: GAG
gtgcctgttgaagtagaaga

SEQ ID NO: 161267 - DNA, 20 bp, Artificial Sequence
  Description of Artificial Sequence: Synthetic oligonucleotide
  Target: LAMA2; (+) strand; PAM type: NRG; PAM sequence: AGG
tgcctgttgaagtagaagag

SEQ ID NO: 161268 - DNA, 20 bp, Artificial Sequence
  Description of Artificial Sequence: Synthetic oligonucleotide
  Target: LAMA2; (+) strand; PAM type: NRG; PAM sequence: GGG
gcctgttgaagtagaagaga

SEQ ID NO: 161269 - DNA, 20 bp, Artificial Sequence
  Description of Artificial Sequence: Synthetic oligonucleotide
  Target: LAMA2; (+) strand; PAM type: NRG; PAM sequence: AAG
tgttgaagtagaagagaggg

SEQ ID NO: 161270 - DNA, 20 bp, Artificial Sequence
  Description of Artificial Sequence: Synthetic oligonucleotide
  Target: LAMA2; (+) strand; PAM type: NRG; PAM sequence: AAG
aagtagaagagagggaagat

SEQ ID NO: 161271 - DNA, 20 bp, Artificial Sequence
  Description of Artificial Sequence: Synthetic oligonucleotide
  Target: LAMA2; (+) strand; PAM type: NRG; PAM sequence: AGG
agtagaagagagggaagata

SEQ ID NO: 161272 - DNA, 20 bp, Artificial Sequence
  Description of Artificial Sequence: Synthetic oligonucleotide
  Target: LAMA2; (+) strand; PAM type: NRG; PAM sequence: GGG
gtagaagagagggaagataa

SEQ ID NO: 161273 - DNA, 20 bp, Artificial Sequence
  Description of Artificial Sequence: Synthetic oligonucleotide
  Target: LAMA2; (+) strand; PAM type: NRG; PAM sequence: CAG
aagagagggaagataagggt

SEQ ID NO: 161274 - DNA, 20 bp, Artificial Sequence
  Description of Artificial Sequence: Synthetic oligonucleotide
  Target: LAMA2; (+) strand; PAM type: NRG; PAM sequence: AGG
agagagggaagataagggtc

SEQ ID NO: 161275 - DNA, 20 bp, Artificial Sequence
  Description of Artificial Sequence: Synthetic oligonucleotide
  Target: LAMA2; (+) strand; PAM type: NRG; PAM sequence: GGG
gagagggaagataagggtca

SEQ ID NO: 161276 - DNA, 20 bp, Artificial Sequence
  Description of Artificial Sequence: Synthetic oligonucleotide
  Target: LAMA2; (+) strand; PAM type: NRG; PAM sequence: AAG
gggaagataagggtcagggt

SEQ ID NO: 161277 - DNA, 20 bp, Artificial Sequence
  Description of Artificial Sequence: Synthetic oligonucleotide
  Target: LAMA2; (+) strand; PAM type: NRG; PAM sequence: AGG
ggaagataagggtcagggta

SEQ ID NO: 161278 - DNA, 20 bp, Artificial Sequence
  Description of Artificial Sequence: Synthetic oligonucleotide
  Target: LAMA2; (+) strand; PAM type: NRG; PAM sequence: GAG
aagataagggtcagggtaag

SEQ ID NO: 161279 - DNA, 20 bp, Artificial Sequence
  Description of Artificial Sequence: Synthetic oligonucleotide
  Target: LAMA2; (+) strand; PAM type: NRG; PAM sequence: AGG
agataagggtcagggtaagg

SEQ ID NO: 161280 - DNA, 20 bp, Artificial Sequence
  Description of Artificial Sequence: Synthetic oligonucleotide
  Target: LAMA2; (+) strand; PAM type: NRG; PAM sequence: GAG
ataagggtcagggtaaggag

SEQ ID NO: 161281 - DNA, 20 bp, Artificial Sequence
  Description of Artificial Sequence: Synthetic oligonucleotide
  Target: LAMA2; (+) strand; PAM type: NRG; PAM sequence: TGG
tcagggtaaggaggagatac

SEQ ID NO: 161282 - DNA, 20 bp, Artificial Sequence
  Description of Artificial Sequence: Synthetic oligonucleotide
  Target: LAMA2; (+) strand; PAM type: NRG; PAM sequence: AAG
tgtaatcaaaaccattctgt

SEQ ID NO: 161283 - DNA, 20 bp, Artificial Sequence
  Description of Artificial Sequence: Synthetic oligonucleotide
  Target: LAMA2; (+) strand; PAM type: NRG; PAM sequence: CAG
ctgtaagtgatttgtgtgat

SEQ ID NO: 161284 - DNA, 20 bp, Artificial Sequence
  Description of Artificial Sequence: Synthetic oligonucleotide
  Target: LAMA2; (+) strand; PAM type: NRG; PAM sequence: AAG
cttatgcacatcatctaaat

SEQ ID NO: 161285 - DNA, 20 bp, Artificial Sequence
  Description of Artificial Sequence: Synthetic oligonucleotide
  Target: LAMA2; (+) strand; PAM type: NRG; PAM sequence: CAG
gcacatcatctaaataagac

SEQ ID NO: 161286 - DNA, 20 bp, Artificial Sequence
  Description of Artificial Sequence: Synthetic oligonucleotide
  Target: LAMA2; (+) strand; PAM type: NRG; PAM sequence: TAG
aatcaacatttcccaaattg

SEQ ID NO: 161287 - DNA, 20 bp, Artificial Sequence
  Description of Artificial Sequence: Synthetic oligonucleotide
  Target: LAMA2; (+) strand; PAM type: NRG; PAM sequence: TGG
tcccaaattgtagatgttcc

SEQ ID NO: 161288 - DNA, 20 bp, Artificial Sequence
  Description of Artificial Sequence: Synthetic oligonucleotide
  Target: LAMA2; (+) strand; PAM type: NRG; PAM sequence: AAG
ttgtagatgttcctggaata

SEQ ID NO: 161289 - DNA, 20 bp, Artificial Sequence
  Description of Artificial Sequence: Synthetic oligonucleotide
  Target: LAMA2; (+) strand; PAM type: NRG; PAM sequence: GAG
aaagaattctgtgatcacat

SEQ ID NO: 161290 - DNA, 20 bp, Artificial Sequence
  Description of Artificial Sequence: Synthetic oligonucleotide
  Target: LAMA2; (+) strand; PAM type: NRG; PAM sequence: TGG
attctgtgatcacatgagtt

SEQ ID NO: 161291 - DNA, 20 bp, Artificial Sequence
  Description of Artificial Sequence: Synthetic oligonucleotide
  Target: LAMA2; (+) strand; PAM type: NRG; PAM sequence: GGG
ttctgtgatcacatgagttt

SEQ ID NO: 161292 - DNA, 20 bp, Artificial Sequence
  Description of Artificial Sequence: Synthetic oligonucleotide
  Target: LAMA2; (+) strand; PAM type: NRG; PAM sequence: AAG
tgtgatcacatgagtttggg

SEQ ID NO: 161293 - DNA, 20 bp, Artificial Sequence
  Description of Artificial Sequence: Synthetic oligonucleotide
  Target: LAMA2; (+) strand; PAM type: NRG; PAM sequence: AAG
agcatccatttgcatgttaa

SEQ ID NO: 161294 - DNA, 20 bp, Artificial Sequence
  Description of Artificial Sequence: Synthetic oligonucleotide
  Target: LAMA2; (+) strand; PAM type: NRG; PAM sequence: TGG
catttgcatgttaaaagttc

SEQ ID NO: 161295 - DNA, 20 bp, Artificial Sequence
  Description of Artificial Sequence: Synthetic oligonucleotide
  Target: LAMA2; (+) strand; PAM type: NRG; PAM sequence: CAG
aaaagttctggcatgtccta

SEQ ID NO: 161296 - DNA, 20 bp, Artificial Sequence
  Description of Artificial Sequence: Synthetic oligonucleotide
  Target: LAMA2; (+) strand; PAM type: NRG; PAM sequence: AAG
atgtcctacagtgtgtaatt

SEQ ID NO: 161297 - DNA, 20 bp, Artificial Sequence
  Description of Artificial Sequence: Synthetic oligonucleotide
  Target: LAMA2; (+) strand; PAM type: NRG; PAM sequence: TAG
agaaatctgttcaatttgtt

SEQ ID NO: 161298 - DNA, 20 bp, Artificial Sequence
  Description of Artificial Sequence: Synthetic oligonucleotide
  Target: LAMA2; (+) strand; PAM type: NRG; PAM sequence: CAG
tctgttcaatttgtttagct

SEQ ID NO: 161299 - DNA, 20 bp, Artificial Sequence
  Description of Artificial Sequence: Synthetic oligonucleotide
  Target: LAMA2; (+) strand; PAM type: NRG; PAM sequence: TGG
cagcatttcctaaacttatg

SEQ ID NO: 161300 - DNA, 20 bp, Artificial Sequence
  Description of Artificial Sequence: Synthetic oligonucleotide
  Target: LAMA2; (+) strand; PAM type: NRG; PAM sequence: TAG
aaccctctgctttaactata

SEQ ID NO: 161301 - DNA, 20 bp, Artificial Sequence
  Description of Artificial Sequence: Synthetic oligonucleotide
  Target: LAMA2; (+) strand; PAM type: NRG; PAM sequence: AAG
ctctgctttaactatatagc

SEQ ID NO: 161302 - DNA, 20 bp, Artificial Sequence
  Description of Artificial Sequence: Synthetic oligonucleotide
  Target: LAMA2; (+) strand; PAM type: NRG; PAM sequence: CAG
tatatagcaagaatatatct

SEQ ID NO: 161303 - DNA, 20 bp, Artificial Sequence
  Description of Artificial Sequence: Synthetic oligonucleotide
  Target: LAMA2; (+) strand; PAM type: NRG; PAM sequence: CAG
caagaatatatctcagacta

SEQ ID NO: 161304 - DNA, 20 bp, Artificial Sequence
  Description of Artificial Sequence: Synthetic oligonucleotide
  Target: LAMA2; (+) strand; PAM type: NRG; PAM sequence: CAG
atatatctcagactacagct

SEQ ID NO: 161305 - DNA, 20 bp, Artificial Sequence
  Description of Artificial Sequence: Synthetic oligonucleotide
  Target: LAMA2; (+) strand; PAM type: NRG; PAM sequence: AGG
tatatctcagactacagctc

SEQ ID NO: 161306 - DNA, 20 bp, Artificial Sequence
  Description of Artificial Sequence: Synthetic oligonucleotide
  Target: LAMA2; (+) strand; PAM type: NRG; PAM sequence: TGG
atctcagactacagctcagg

SEQ ID NO: 161307 - DNA, 20 bp, Artificial Sequence
  Description of Artificial Sequence: Synthetic oligonucleotide
  Target: LAMA2; (+) strand; PAM type: NRG; PAM sequence: GGG
tctcagactacagctcaggt

SEQ ID NO: 161308 - DNA, 20 bp, Artificial Sequence
  Description of Artificial Sequence: Synthetic oligonucleotide
  Target: LAMA2; (+) strand; PAM type: NRG; PAM sequence: AAG
gactacagctcaggtgggac

SEQ ID NO: 161309 - DNA, 20 bp, Artificial Sequence
  Description of Artificial Sequence: Synthetic oligonucleotide
  Target: LAMA2; (+) strand; PAM type: NRG; PAM sequence: GAG
ctacagctcaggtgggacaa

SEQ ID NO: 161310 - DNA, 20 bp, Artificial Sequence
  Description of Artificial Sequence: Synthetic oligonucleotide
  Target: LAMA2; (+) strand; PAM type: NRG; PAM sequence: TAG
ggacaagagttataacttta

SEQ ID NO: 161311 - DNA, 20 bp, Artificial Sequence
  Description of Artificial Sequence: Synthetic oligonucleotide
  Target: LAMA2; (+) strand; PAM type: NRG; PAM sequence: GAG
cacaatttaatttctatttt

SEQ ID NO: 161312 - DNA, 20 bp, Artificial Sequence
  Description of Artificial Sequence: Synthetic oligonucleotide
  Target: LAMA2; (+) strand; PAM type: NRG; PAM sequence: TGG
gagacccctttctctatatg

SEQ ID NO: 161313 - DNA, 20 bp, Artificial Sequence
  Description of Artificial Sequence: Synthetic oligonucleotide
  Target: LAMA2; (+) strand; PAM type: NRG; PAM sequence: GGG
agacccctttctctatatgt

SEQ ID NO: 161314 - DNA, 20 bp, Artificial Sequence
  Description of Artificial Sequence: Synthetic oligonucleotide
  Target: LAMA2; (+) strand; PAM type: NRG; PAM sequence: GAG
tctctatatgtgggaactgt

SEQ ID NO: 161315 - DNA, 20 bp, Artificial Sequence
  Description of Artificial Sequence: Synthetic oligonucleotide
  Target: LAMA2; (+) strand; PAM type: NRG; PAM sequence: AGG
ctctatatgtgggaactgtg

SEQ ID NO: 161316 - DNA, 20 bp, Artificial Sequence
  Description of Artificial Sequence: Synthetic oligonucleotide
  Target: LAMA2; (+) strand; PAM type: NRG; PAM sequence: TAG
atgtgggaactgtgaggtct

SEQ ID NO: 161317 - DNA, 20 bp, Artificial Sequence
  Description of Artificial Sequence: Synthetic oligonucleotide
  Target: LAMA2; (+) strand; PAM type: NRG; PAM sequence: GAG
aggtcttagaaacataatct

SEQ ID NO: 161318 - DNA, 20 bp, Artificial Sequence
  Description of Artificial Sequence: Synthetic oligonucleotide
  Target: LAMA2; (+) strand; PAM type: NRG; PAM sequence: AAG
acataatctgagcccatttc

SEQ ID NO: 161319 - DNA, 20 bp, Artificial Sequence
  Description of Artificial Sequence: Synthetic oligonucleotide
  Target: LAMA2; (+) strand; PAM type: NRG; PAM sequence: CAG
tgttttcttctcctctctcc

SEQ ID NO: 161320 - DNA, 20 bp, Artificial Sequence
  Description of Artificial Sequence: Synthetic oligonucleotide
  Target: LAMA2; (+) strand; PAM type: NRG; PAM sequence: TAG
ttcttctcctctctcccagc

SEQ ID NO: 161321 - DNA, 20 bp, Artificial Sequence
  Description of Artificial Sequence: Synthetic oligonucleotide
  Target: LAMA2; (+) strand; PAM type: NRG; PAM sequence: AAG
ctctctcccagctagaatca

SEQ ID NO: 161322 - DNA, 20 bp, Artificial Sequence
  Description of Artificial Sequence: Synthetic oligonucleotide
  Target: LAMA2; (+) strand; PAM type: NRG; PAM sequence: AAG
gctagaatcaaagttctatt

SEQ ID NO: 161323 - DNA, 20 bp, Artificial Sequence
  Description of Artificial Sequence: Synthetic oligonucleotide
  Target: LAMA2; (+) strand; PAM type: NRG; PAM sequence: TAG
aaagttctattaagcttacc

SEQ ID NO: 161324 - DNA, 20 bp, Artificial Sequence
  Description of Artificial Sequence: Synthetic oligonucleotide
  Target: LAMA2; (+) strand; PAM type: NRG; PAM sequence: AAG
attaagcttacctagtacca

SEQ ID NO: 161325 - DNA, 20 bp, Artificial Sequence
  Description of Artificial Sequence: Synthetic oligonucleotide
  Target: LAMA2; (+) strand; PAM type: NRG; PAM sequence: AGG
ttaagcttacctagtaccaa

SEQ ID NO: 161326 - DNA, 20 bp, Artificial Sequence
  Description of Artificial Sequence: Synthetic oligonucleotide
  Target: LAMA2; (+) strand; PAM type: NRG; PAM sequence: AAG
gtaccaaaggccttatatgc

SEQ ID NO: 161327 - DNA, 20 bp, Artificial Sequence
  Description of Artificial Sequence: Synthetic oligonucleotide
  Target: LAMA2; (+) strand; PAM type: NRG; PAM sequence: AGG
taccaaaggccttatatgca

SEQ ID NO: 161328 - DNA, 20 bp, Artificial Sequence
  Description of Artificial Sequence: Synthetic oligonucleotide
  Target: LAMA2; (+) strand; PAM type: NRG; PAM sequence: GGG
accaaaggccttatatgcaa

SEQ ID NO: 161329 - DNA, 20 bp, Artificial Sequence
  Description of Artificial Sequence: Synthetic oligonucleotide
  Target: LAMA2; (+) strand; PAM type: NRG; PAM sequence: TAG
aaaggccttatatgcaaggg

SEQ ID NO: 161330 - DNA, 20 bp, Artificial Sequence
  Description of Artificial Sequence: Synthetic oligonucleotide
  Target: LAMA2; (+) strand; PAM type: NRG; PAM sequence: GAG
aggccttatatgcaagggta

SEQ ID NO: 161331 - DNA, 20 bp, Artificial Sequence
  Description of Artificial Sequence: Synthetic oligonucleotide
  Target: LAMA2; (+) strand; PAM type: NRG; PAM sequence: AGG
ggccttatatgcaagggtag

SEQ ID NO: 161332 - DNA, 20 bp, Artificial Sequence
  Description of Artificial Sequence: Synthetic oligonucleotide
  Target: LAMA2; (+) strand; PAM type: NRG; PAM sequence: GGG
gccttatatgcaagggtaga

SEQ ID NO: 161333 - DNA, 20 bp, Artificial Sequence
  Description of Artificial Sequence: Synthetic oligonucleotide
  Target: LAMA2; (+) strand; PAM type: NRG; PAM sequence: GGG
ccttatatgcaagggtagag

SEQ ID NO: 161334 - DNA, 20 bp, Artificial Sequence
  Description of Artificial Sequence: Synthetic oligonucleotide
  Target: LAMA2; (+) strand; PAM type: NRG; PAM sequence: GAG
ttatatgcaagggtagaggg

SEQ ID NO: 161335 - DNA, 20 bp, Artificial Sequence
  Description of Artificial Sequence: Synthetic oligonucleotide
  Target: LAMA2; (+) strand; PAM type: NRG; PAM sequence: AGG
tatatgcaagggtagagggg

SEQ ID NO: 161336 - DNA, 20 bp, Artificial Sequence
  Description of Artificial Sequence: Synthetic oligonucleotide
  Target: LAMA2; (+) strand; PAM type: NRG; PAM sequence: GGG
atatgcaagggtagagggga

SEQ ID NO: 161337 - DNA, 20 bp, Artificial Sequence
  Description of Artificial Sequence: Synthetic oligonucleotide
  Target: LAMA2; (+) strand; PAM type: NRG; PAM sequence: GAG
aatgtctgtgtgtatatgtt

SEQ ID NO: 161338 - DNA, 20 bp, Artificial Sequence
  Description of Artificial Sequence: Synthetic oligonucleotide
  Target: LAMA2; (+) strand; PAM type: NRG; PAM sequence: AAG
tctgtgtgtatatgttgagc

SEQ ID NO: 161339 - DNA, 20 bp, Artificial Sequence
  Description of Artificial Sequence: Synthetic oligonucleotide
  Target: LAMA2; (+) strand; PAM type: NRG; PAM sequence: AGG
ctgtgtgtatatgttgagca

SEQ ID NO: 161340 - DNA, 20 bp, Artificial Sequence
  Description of Artificial Sequence: Synthetic oligonucleotide
  Target: LAMA2; (+) strand; PAM type: NRG; PAM sequence: GGG
tgtgtgtatatgttgagcaa

SEQ ID NO: 161341 - DNA, 20 bp, Artificial Sequence
  Description of Artificial Sequence: Synthetic oligonucleotide
  Target: LAMA2; (+) strand; PAM type: NRG; PAM sequence: GGG
gtgtgtatatgttgagcaag

SEQ ID NO: 161342 - DNA, 20 bp, Artificial Sequence
  Description of Artificial Sequence: Synthetic oligonucleotide
  Target: LAMA2; (+) strand; PAM type: NRG; PAM sequence: TAG
ttgagcaaggggacatgtga

SEQ ID NO: 161343 - DNA, 20 bp, Artificial Sequence
  Description of Artificial Sequence: Synthetic oligonucleotide
  Target: LAMA2; (+) strand; PAM type: NRG; PAM sequence: AGG
tgagcaaggggacatgtgat

SEQ ID NO: 161344 - DNA, 20 bp, Artificial Sequence
  Description of Artificial Sequence: Synthetic oligonucleotide
  Target: LAMA2; (+) strand; PAM type: NRG; PAM sequence: GGG
gagcaaggggacatgtgata

SEQ ID NO: 161345 - DNA, 20 bp, Artificial Sequence
  Description of Artificial Sequence: Synthetic oligonucleotide
  Target: LAMA2; (+) strand; PAM type: NRG; PAM sequence: CAG
aaggggacatgtgatagggc

SEQ ID NO: 161346 - DNA, 20 bp, Artificial Sequence
  Description of Artificial Sequence: Synthetic oligonucleotide
  Target: LAMA2; (+) strand; PAM type: NRG; PAM sequence: CAG
ggacatgtgatagggccagc

SEQ ID NO: 161347 - DNA, 20 bp, Artificial Sequence
  Description of Artificial Sequence: Synthetic oligonucleotide
  Target: LAMA2; (+) strand; PAM type: NRG; PAM sequence: GAG
tgatagggccagccagtact

SEQ ID NO: 161348 - DNA, 20 bp, Artificial Sequence
  Description of Artificial Sequence: Synthetic oligonucleotide
  Target: LAMA2; (+) strand; PAM type: NRG; PAM sequence: AAG
cagtactgagtatttcaccc

SEQ ID NO: 161349 - DNA, 20 bp, Artificial Sequence
  Description of Artificial Sequence: Synthetic oligonucleotide
  Target: LAMA2; (+) strand; PAM type: NRG; PAM sequence: CAG
ctcctaattacctttccttt

SEQ ID NO: 161350 - DNA, 20 bp, Artificial Sequence
  Description of Artificial Sequence: Synthetic oligonucleotide
  Target: LAMA2; (+) strand; PAM type: NRG; PAM sequence: AGG
tcctaattacctttcctttc

SEQ ID NO: 161351 - DNA, 20 bp, Artificial Sequence
  Description of Artificial Sequence: Synthetic oligonucleotide
  Target: LAMA2; (+) strand; PAM type: NRG; PAM sequence: TAG
attacctttcctttcaggtc

SEQ ID NO: 161352 - DNA, 20 bp, Artificial Sequence
  Description of Artificial Sequence: Synthetic oligonucleotide
  Target: LAMA2; (+) strand; PAM type: NRG; PAM sequence: AAG
cctttcctttcaggtctaga

SEQ ID NO: 161353 - DNA, 20 bp, Artificial Sequence
  Description of Artificial Sequence: Synthetic oligonucleotide
  Target: LAMA2; (+) strand; PAM type: NRG; PAM sequence: TAG
aactactttcattccattct

SEQ ID NO: 161354 - DNA, 20 bp, Artificial Sequence
  Description of Artificial Sequence: Synthetic oligonucleotide
  Target: LAMA2; (+) strand; PAM type: NRG; PAM sequence: GAG
ctactttcattccattctta

SEQ ID NO: 161355 - DNA, 20 bp, Artificial Sequence
  Description of Artificial Sequence: Synthetic oligonucleotide
  Target: LAMA2; (+) strand; PAM type: NRG; PAM sequence: AGG
tactttcattccattcttag

SEQ ID NO: 161356 - DNA, 20 bp, Artificial Sequence
  Description of Artificial Sequence: Synthetic oligonucleotide
  Target: LAMA2; (+) strand; PAM type: NRG; PAM sequence: CAG
tcattccattcttagaggca

SEQ ID NO: 161357 - DNA, 20 bp, Artificial Sequence
  Description of Artificial Sequence: Synthetic oligonucleotide
  Target: LAMA2; (+) strand; PAM type: NRG; PAM sequence: AGG
cattccattcttagaggcac

SEQ ID NO: 161358 - DNA, 20 bp, Artificial Sequence
  Description of Artificial Sequence: Synthetic oligonucleotide
  Target: LAMA2; (+) strand; PAM type: NRG; PAM sequence: CAG
ttagaggcacaggaatcatt

SEQ ID NO: 161359 - DNA, 20 bp, Artificial Sequence
  Description of Artificial Sequence: Synthetic oligonucleotide
  Target: LAMA2; (+) strand; PAM type: NRG; PAM sequence: AAG
agcttctttcattccatgct

SEQ ID NO: 161360 - DNA, 20 bp, Artificial Sequence
  Description of Artificial Sequence: Synthetic oligonucleotide
  Target: LAMA2; (+) strand; PAM type: NRG; PAM sequence: AAG
atcccattttctatttgaaa

SEQ ID NO: 161361 - DNA, 20 bp, Artificial Sequence
  Description of Artificial Sequence: Synthetic oligonucleotide
  Target: LAMA2; (+) strand; PAM type: NRG; PAM sequence: AGG
tcccattttctatttgaaaa

SEQ ID NO: 161362 - DNA, 20 bp, Artificial Sequence
  Description of Artificial Sequence: Synthetic oligonucleotide
  Target: LAMA2; (+) strand; PAM type: NRG; PAM sequence: GAG
ttttctatttgaaaaaggat

SEQ ID NO: 161363 - DNA, 20 bp, Artificial Sequence
  Description of Artificial Sequence: Synthetic oligonucleotide
  Target: LAMA2; (+) strand; PAM type: NRG; PAM sequence: TGG
aaaaggatgagctacatttg

SEQ ID NO: 161364 - DNA, 20 bp, Artificial Sequence
  Description of Artificial Sequence: Synthetic oligonucleotide
  Target: LAMA2; (+) strand; PAM type: NRG; PAM sequence: TGG
atgagctacatttgtggaac

SEQ ID NO: 161365 - DNA, 20 bp, Artificial Sequence
  Description of Artificial Sequence: Synthetic oligonucleotide
  Target: LAMA2; (+) strand; PAM type: NRG; PAM sequence: TGG
agctacatttgtggaactgg

SEQ ID NO: 161366 - DNA, 20 bp, Artificial Sequence
  Description of Artificial Sequence: Synthetic oligonucleotide
  Target: LAMA2; (+) strand; PAM type: NRG; PAM sequence: CAG
tttgtggaactggtggcttt

SEQ ID NO: 161367 - DNA, 20 bp, Artificial Sequence
  Description of Artificial Sequence: Synthetic oligonucleotide
  Target: LAMA2; (+) strand; PAM type: NRG; PAM sequence: GAG
tgtggaactggtggctttca

SEQ ID NO: 161368 - DNA, 20 bp, Artificial Sequence
  Description of Artificial Sequence: Synthetic oligonucleotide
  Target: LAMA2; (+) strand; PAM type: NRG; PAM sequence: CGG
aactggtggctttcagagct

SEQ ID NO: 161369 - DNA, 20 bp, Artificial Sequence
  Description of Artificial Sequence: Synthetic oligonucleotide
  Target: LAMA2; (+) strand; PAM type: NRG; PAM sequence: GGG
actggtggctttcagagctc

SEQ ID NO: 161370 - DNA, 20 bp, Artificial Sequence
  Description of Artificial Sequence: Synthetic oligonucleotide
  Target: LAMA2; (+) strand; PAM type: NRG; PAM sequence: GGG
ctggtggctttcagagctcg

SEQ ID NO: 161371 - DNA, 20 bp, Artificial Sequence
  Description of Artificial Sequence: Synthetic oligonucleotide
  Target: LAMA2; (+) strand; PAM type: NRG; PAM sequence: TGG
ggctttcagagctcggggtc

SEQ ID NO: 161372 - DNA, 20 bp, Artificial Sequence
  Description of Artificial Sequence: Synthetic oligonucleotide
  Target: LAMA2; (+) strand; PAM type: NRG; PAM sequence: CAG
tttcagagctcggggtctgg

SEQ ID NO: 161373 - DNA, 20 bp, Artificial Sequence
  Description of Artificial Sequence: Synthetic oligonucleotide
  Target: LAMA2; (+) strand; PAM type: NRG; PAM sequence: TAG
aatcccttcattcaaacatg

SEQ ID NO: 161374 - DNA, 20 bp, Artificial Sequence
  Description of Artificial Sequence: Synthetic oligonucleotide
  Target: LAMA2; (+) strand; PAM type: NRG; PAM sequence: AAG
ttcattcaaacatgtagcac

SEQ ID NO: 161375 - DNA, 20 bp, Artificial Sequence
  Description of Artificial Sequence: Synthetic oligonucleotide
  Target: LAMA2; (+) strand; PAM type: NRG; PAM sequence: TGG
ttcaaacatgtagcacaaga

SEQ ID NO: 161376 - DNA, 20 bp, Artificial Sequence
  Description of Artificial Sequence: Synthetic oligonucleotide
  Target: LAMA2; (+) strand; PAM type: NRG; PAM sequence: GAG
atggccttgcttcttgaatc

SEQ ID NO: 161377 - DNA, 20 bp, Artificial Sequence
  Description of Artificial Sequence: Synthetic oligonucleotide
  Target: LAMA2; (+) strand; PAM type: NRG; PAM sequence: AGG
tggccttgcttcttgaatcg

SEQ ID NO: 161378 - DNA, 20 bp, Artificial Sequence
  Description of Artificial Sequence: Synthetic oligonucleotide
  Target: LAMA2; (+) strand; PAM type: NRG; PAM sequence: GGG
ggccttgcttcttgaatcga

SEQ ID NO: 161379 - DNA, 20 bp, Artificial Sequence
  Description of Artificial Sequence: Synthetic oligonucleotide
  Target: LAMA2; (+) strand; PAM type: NRG; PAM sequence: GGG
gccttgcttcttgaatcgag

SEQ ID NO: 161380 - DNA, 20 bp, Artificial Sequence
  Description of Artificial Sequence: Synthetic oligonucleotide
  Target: LAMA2; (+) strand; PAM type: NRG; PAM sequence: GGG
ccttgcttcttgaatcgagg

SEQ ID NO: 161381 - DNA, 20 bp, Artificial Sequence
  Description of Artificial Sequence: Synthetic oligonucleotide
  Target: LAMA2; (+) strand; PAM type: NRG; PAM sequence: AAG
cttcttgaatcgagggggtg

SEQ ID NO: 161382 - DNA, 20 bp, Artificial Sequence
  Description of Artificial Sequence: Synthetic oligonucleotide
  Target: LAMA2; (+) strand; PAM type: NRG; PAM sequence: GAG
tcttgaatcgagggggtgaa

SEQ ID NO: 161383 - DNA, 20 bp, Artificial Sequence
  Description of Artificial Sequence: Synthetic oligonucleotide
  Target: LAMA2; (+) strand; PAM type: NRG; PAM sequence: CAG
atcgagggggtgaagagaaa

SEQ ID NO: 161384 - DNA, 20 bp, Artificial Sequence
  Description of Artificial Sequence: Synthetic oligonucleotide
  Target: LAMA2; (+) strand; PAM type: NRG; PAM sequence: CAG
gggtgaagagaaacagtgaa

SEQ ID NO: 161385 - DNA, 20 bp, Artificial Sequence
  Description of Artificial Sequence: Synthetic oligonucleotide
  Target: LAMA2; (+) strand; PAM type: NRG; PAM sequence: AGG
ggtgaagagaaacagtgaac

SEQ ID NO: 161386 - DNA, 20 bp, Artificial Sequence
  Description of Artificial Sequence: Synthetic oligonucleotide
  Target: LAMA2; (+) strand; PAM type: NRG; PAM sequence: GGG
gtgaagagaaacagtgaaca

SEQ ID NO: 161387 - DNA, 20 bp, Artificial Sequence
  Description of Artificial Sequence: Synthetic oligonucleotide
  Target: LAMA2; (+) strand; PAM type: NRG; PAM sequence: GGG
tgaagagaaacagtgaacag

SEQ ID NO: 161388 - DNA, 20 bp, Artificial Sequence
  Description of Artificial Sequence: Synthetic oligonucleotide
  Target: LAMA2; (+) strand; PAM type: NRG; PAM sequence: TGG
agaaacagtgaacaggggaa

SEQ ID NO: 161389 - DNA, 20 bp, Artificial Sequence
  Description of Artificial Sequence: Synthetic oligonucleotide
  Target: LAMA2; (+) strand; PAM type: NRG; PAM sequence: AAG
gaacaggggaatggccaaac

SEQ ID NO: 161390 - DNA, 20 bp, Artificial Sequence
  Description of Artificial Sequence: Synthetic oligonucleotide
  Target: LAMA2; (+) strand; PAM type: NRG; PAM sequence: TGG
aaacaagatacaacaaaaca

SEQ ID NO: 161391 - DNA, 20 bp, Artificial Sequence
  Description of Artificial Sequence: Synthetic oligonucleotide
  Target: LAMA2; (+) strand; PAM type: NRG; PAM sequence: TGG
agatacaacaaaacatggat

SEQ ID NO: 161392 - DNA, 20 bp, Artificial Sequence
  Description of Artificial Sequence: Synthetic oligonucleotide
  Target: LAMA2; (+) strand; PAM type: NRG; PAM sequence: AAG
atggattggtattctgtcac

SEQ ID NO: 161393 - DNA, 20 bp, Artificial Sequence
  Description of Artificial Sequence: Synthetic oligonucleotide
  Target: LAMA2; (+) strand; PAM type: NRG; PAM sequence: TAG
ttctgtcacaagttgaacac

SEQ ID NO: 161394 - DNA, 20 bp, Artificial Sequence
  Description of Artificial Sequence: Synthetic oligonucleotide
  Target: LAMA2; (+) strand; PAM type: NRG; PAM sequence: CAG
cacaagttgaacactagtta

SEQ ID NO: 161395 - DNA, 20 bp, Artificial Sequence
  Description of Artificial Sequence: Synthetic oligonucleotide
  Target: LAMA2; (+) strand; PAM type: NRG; PAM sequence: TGG
gttgaacactagttacagct

SEQ ID NO: 161396 - DNA, 20 bp, Artificial Sequence
  Description of Artificial Sequence: Synthetic oligonucleotide
  Target: LAMA2; (+) strand; PAM type: NRG; PAM sequence: TAG
cagcttggaaaacattcact

SEQ ID NO: 161397 - DNA, 20 bp, Artificial Sequence
  Description of Artificial Sequence: Synthetic oligonucleotide
  Target: LAMA2; (+) strand; PAM type: NRG; PAM sequence: AGG
agcttggaaaacattcactt

SEQ ID NO: 161398 - DNA, 20 bp, Artificial Sequence
  Description of Artificial Sequence: Synthetic oligonucleotide
  Target: LAMA2; (+) strand; PAM type: NRG; PAM sequence: GGG
gcttggaaaacattcactta

SEQ ID NO: 161399 - DNA, 20 bp, Artificial Sequence
  Description of Artificial Sequence: Synthetic oligonucleotide
  Target: LAMA2; (+) strand; PAM type: NRG; PAM sequence: GAG
gccaaaacaccactattttt

SEQ ID NO: 161400 - DNA, 20 bp, Artificial Sequence
  Description of Artificial Sequence: Synthetic oligonucleotide
  Target: LAMA2; (+) strand; PAM type: NRG; PAM sequence: AGG
ccaaaacaccactatttttg

SEQ ID NO: 161401 - DNA, 20 bp, Artificial Sequence
  Description of Artificial Sequence: Synthetic oligonucleotide
  Target: LAMA2; (+) strand; PAM type: NRG; PAM sequence: TGG
ttgaggtatcactgctttgc

SEQ ID NO: 161402 - DNA, 20 bp, Artificial Sequence
  Description of Artificial Sequence: Synthetic oligonucleotide
  Target: LAMA2; (+) strand; PAM type: NRG; PAM sequence: GGG
tgaggtatcactgctttgct

SEQ ID NO: 161403 - DNA, 20 bp, Artificial Sequence
  Description of Artificial Sequence: Synthetic oligonucleotide
  Target: LAMA2; (+) strand; PAM type: NRG; PAM sequence: GGG
gaggtatcactgctttgctg

SEQ ID NO: 161404 - DNA, 20 bp, Artificial Sequence
  Description of Artificial Sequence: Synthetic oligonucleotide
  Target: LAMA2; (+) strand; PAM type: NRG; PAM sequence: AAG
gctggggaatgatttaaaca

SEQ ID NO: 161405 - DNA, 20 bp, Artificial Sequence
  Description of Artificial Sequence: Synthetic oligonucleotide
  Target: LAMA2; (+) strand; PAM type: NRG; PAM sequence: AGG
ctggggaatgatttaaacaa

SEQ ID NO: 161406 - DNA, 20 bp, Artificial Sequence
  Description of Artificial Sequence: Synthetic oligonucleotide
  Target: LAMA2; (+) strand; PAM type: NRG; PAM sequence: AAG
gatttaaacaaaggaaaaaa

SEQ ID NO: 161407 - DNA, 20 bp, Artificial Sequence
  Description of Artificial Sequence: Synthetic oligonucleotide
  Target: LAMA2; (+) strand; PAM type: NRG; PAM sequence: GAG
tttaaacaaaggaaaaaaaa

SEQ ID NO: 161408 - DNA, 20 bp, Artificial Sequence
  Description of Artificial Sequence: Synthetic oligonucleotide
  Target: LAMA2; (+) strand; PAM type: NRG; PAM sequence: CAG
aacaaaggaaaaaaaagagt

SEQ ID NO: 161409 - DNA, 20 bp, Artificial Sequence
  Description of Artificial Sequence: Synthetic oligonucleotide
  Target: LAMA2; (+) strand; PAM type: NRG; PAM sequence: GAG
caaaggaaaaaaaagagtca

SEQ ID NO: 161410 - DNA, 20 bp, Artificial Sequence
  Description of Artificial Sequence: Synthetic oligonucleotide
  Target: LAMA2; (+) strand; PAM type: NRG; PAM sequence: GAG
aaggaaaaaaaagagtcaga

SEQ ID NO: 161411 - DNA, 20 bp, Artificial Sequence
  Description of Artificial Sequence: Synthetic oligonucleotide
  Target: LAMA2; (+) strand; PAM type: NRG; PAM sequence: GAG
aaaaaaaagagtcagagagt

SEQ ID NO: 161412 - DNA, 20 bp, Artificial Sequence
  Description of Artificial Sequence: Synthetic oligonucleotide
  Target: LAMA2; (+) strand; PAM type: NRG; PAM sequence: AGG
aaaaaaagagtcagagagtg

SEQ ID NO: 161413 - DNA, 20 bp, Artificial Sequence
  Description of Artificial Sequence: Synthetic oligonucleotide
  Target: LAMA2; (+) strand; PAM type: NRG; PAM sequence: GGG
aaaaaagagtcagagagtga

SEQ ID NO: 161414 - DNA, 20 bp, Artificial Sequence
  Description of Artificial Sequence: Synthetic oligonucleotide
  Target: LAMA2; (+) strand; PAM type: NRG; PAM sequence: GGG
aaaaagagtcagagagtgag

SEQ ID NO: 161415 - DNA, 20 bp, Artificial Sequence
  Description of Artificial Sequence: Synthetic oligonucleotide
  Target: LAMA2; (+) strand; PAM type: NRG; PAM sequence: GAG
aaagagtcagagagtgaggg

SEQ ID NO: 161416 - DNA, 20 bp, Artificial Sequence
  Description of Artificial Sequence: Synthetic oligonucleotide
  Target: LAMA2; (+) strand; PAM type: NRG; PAM sequence: AAG
gagtcagagagtgaggggag

SEQ ID NO: 161417 - DNA, 20 bp, Artificial Sequence
  Description of Artificial Sequence: Synthetic oligonucleotide
  Target: LAMA2; (+) strand; PAM type: NRG; PAM sequence: AGG
agtcagagagtgaggggaga

SEQ ID NO: 161418 - DNA, 20 bp, Artificial Sequence
  Description of Artificial Sequence: Synthetic oligonucleotide
  Target: LAMA2; (+) strand; PAM type: NRG; PAM sequence: AAG
ttcatgatgatacctttgct

SEQ ID NO: 161419 - DNA, 20 bp, Artificial Sequence
  Description of Artificial Sequence: Synthetic oligonucleotide
  Target: LAMA2; (+) strand; PAM type: NRG; PAM sequence: TAG
tgatacctttgctaagattc

SEQ ID NO: 161420 - DNA, 20 bp, Artificial Sequence
  Description of Artificial Sequence: Synthetic oligonucleotide
  Target: LAMA2; (+) strand; PAM type: NRG; PAM sequence: TGG
gattctagacttttatcatc

SEQ ID NO: 161421 - DNA, 20 bp, Artificial Sequence
  Description of Artificial Sequence: Synthetic oligonucleotide
  Target: LAMA2; (+) strand; PAM type: NRG; PAM sequence: AAG
tagacttttatcatctggac

SEQ ID NO: 161422 - DNA, 20 bp, Artificial Sequence
  Description of Artificial Sequence: Synthetic oligonucleotide
  Target: LAMA2; (+) strand; PAM type: NRG; PAM sequence: GAG
gacttttatcatctggacaa

SEQ ID NO: 161423 - DNA, 20 bp, Artificial Sequence
  Description of Artificial Sequence: Synthetic oligonucleotide
  Target: LAMA2; (+) strand; PAM type: NRG; PAM sequence: AGG
acttttatcatctggacaag

SEQ ID NO: 161424 - DNA, 20 bp, Artificial Sequence
  Description of Artificial Sequence: Synthetic oligonucleotide
  Target: LAMA2; (+) strand; PAM type: NRG; PAM sequence: GAG
ttttatcatctggacaagag

SEQ ID NO: 161425 - DNA, 20 bp, Artificial Sequence
  Description of Artificial Sequence: Synthetic oligonucleotide
  Target: LAMA2; (+) strand; PAM type: NRG; PAM sequence: AAG
agaggagaacaaaaataaca

SEQ ID NO: 161426 - DNA, 20 bp, Artificial Sequence
  Description of Artificial Sequence: Synthetic oligonucleotide
  Target: LAMA2; (+) strand; PAM type: NRG; PAM sequence: GAG
aggagaacaaaaataacaaa

SEQ ID NO: 161427 - DNA, 20 bp, Artificial Sequence
  Description of Artificial Sequence: Synthetic oligonucleotide
  Target: LAMA2; (+) strand; PAM type: NRG; PAM sequence: CAG
gaacaaaaataacaaagaga

SEQ ID NO: 161428 - DNA, 20 bp, Artificial Sequence
  Description of Artificial Sequence: Synthetic oligonucleotide
  Target: LAMA2; (+) strand; PAM type: NRG; PAM sequence: AAG
aacaaagagacagaatcttg

SEQ ID NO: 161429 - DNA, 20 bp, Artificial Sequence
  Description of Artificial Sequence: Synthetic oligonucleotide
  Target: LAMA2; (+) strand; PAM type: NRG; PAM sequence: AGG
acaaagagacagaatcttga

SEQ ID NO: 161430 - DNA, 20 bp, Artificial Sequence
  Description of Artificial Sequence: Synthetic oligonucleotide
  Target: LAMA2; (+) strand; PAM type: NRG; PAM sequence: GGG
caaagagacagaatcttgaa

SEQ ID NO: 161431 - DNA, 20 bp, Artificial Sequence
  Description of Artificial Sequence: Synthetic oligonucleotide
  Target: LAMA2; (+) strand; PAM type: NRG; PAM sequence: AAG
acagaatcttgaagggctaa

SEQ ID NO: 161432 - DNA, 20 bp, Artificial Sequence
  Description of Artificial Sequence: Synthetic oligonucleotide
  Target: LAMA2; (+) strand; PAM type: NRG; PAM sequence: GAG
agaatcttgaagggctaaaa

SEQ ID NO: 161433 - DNA, 20 bp, Artificial Sequence
  Description of Artificial Sequence: Synthetic oligonucleotide
  Target: LAMA2; (+) strand; PAM type: NRG; PAM sequence: AAG
ttgaagggctaaaagagatt

SEQ ID NO: 161434 - DNA, 20 bp, Artificial Sequence
  Description of Artificial Sequence: Synthetic oligonucleotide
  Target: LAMA2; (+) strand; PAM type: NRG; PAM sequence: AAG
agggctaaaagagattaagt

SEQ ID NO: 161435 - DNA, 20 bp, Artificial Sequence
  Description of Artificial Sequence: Synthetic oligonucleotide
  Target: LAMA2; (+) strand; PAM type: NRG; PAM sequence: TGG
aaagagattaagtaagcaat

SEQ ID NO: 161436 - DNA, 20 bp, Artificial Sequence
  Description of Artificial Sequence: Synthetic oligonucleotide
  Target: LAMA2; (+) strand; PAM type: NRG; PAM sequence: AAG
aagtaagcaattggaatatc

SEQ ID NO: 161437 - DNA, 20 bp, Artificial Sequence
  Description of Artificial Sequence: Synthetic oligonucleotide
  Target: LAMA2; (+) strand; PAM type: NRG; PAM sequence: GAG
gtaagcaattggaatatcaa

SEQ ID NO: 161438 - DNA, 20 bp, Artificial Sequence
  Description of Artificial Sequence: Synthetic oligonucleotide
  Target: LAMA2; (+) strand; PAM type: NRG; PAM sequence: AAG
gaatatcaagagcaattaaa

SEQ ID NO: 161439 - DNA, 20 bp, Artificial Sequence
  Description of Artificial Sequence: Synthetic oligonucleotide
  Target: LAMA2; (+) strand; PAM type: NRG; PAM sequence: GAG
gagcaattaaaaagactgtt

SEQ ID NO: 161440 - DNA, 20 bp, Artificial Sequence
  Description of Artificial Sequence: Synthetic oligonucleotide
  Target: LAMA2; (+) strand; PAM type: NRG; PAM sequence: AAG
taaaaagactgttgagctaa

SEQ ID NO: 161441 - DNA, 20 bp, Artificial Sequence
  Description of Artificial Sequence: Synthetic oligonucleotide
  Target: LAMA2; (+) strand; PAM type: NRG; PAM sequence: GAG
aagactgttgagctaaaagt

SEQ ID NO: 161442 - DNA, 20 bp, Artificial Sequence
  Description of Artificial Sequence: Synthetic oligonucleotide
  Target: LAMA2; (+) strand; PAM type: NRG; PAM sequence: GAG
ctaaaagtgagtcaaatgct

SEQ ID NO: 161443 - DNA, 20 bp, Artificial Sequence
  Description of Artificial Sequence: Synthetic oligonucleotide
  Target: LAMA2; (+) strand; PAM type: NRG; PAM sequence: AGG
taaaagtgagtcaaatgctg

SEQ ID NO: 161444 - DNA, 20 bp, Artificial Sequence
  Description of Artificial Sequence: Synthetic oligonucleotide
  Target: LAMA2; (+) strand; PAM type: NRG; PAM sequence: CGG
gctgaggatacctgcctgat

SEQ ID NO: 161445 - DNA, 20 bp, Artificial Sequence
  Description of Artificial Sequence: Synthetic oligonucleotide
  Target: LAMA2; (+) strand; PAM type: NRG; PAM sequence: AAG
tacctgcctgatcggacact

SEQ ID NO: 161446 - DNA, 20 bp, Artificial Sequence
  Description of Artificial Sequence: Synthetic oligonucleotide
  Target: LAMA2; (+) strand; PAM type: NRG; PAM sequence: CAG
atcggacactaagttacttt

SEQ ID NO: 161447 - DNA, 20 bp, Artificial Sequence
  Description of Artificial Sequence: Synthetic oligonucleotide
  Target: LAMA2; (+) strand; PAM type: NRG; PAM sequence: AAG
cactaagttactttcagaat

SEQ ID NO: 161448 - DNA, 20 bp, Artificial Sequence
  Description of Artificial Sequence: Synthetic oligonucleotide
  Target: LAMA2; (+) strand; PAM type: NRG; PAM sequence: CAG
tcagaataagtttgtaacct

SEQ ID NO: 161449 - DNA, 20 bp, Artificial Sequence
  Description of Artificial Sequence: Synthetic oligonucleotide
  Target: LAMA2; (+) strand; PAM type: NRG; PAM sequence: TGG
cagcaacatgtcatacatta

SEQ ID NO: 161450 - DNA, 20 bp, Artificial Sequence
  Description of Artificial Sequence: Synthetic oligonucleotide
  Target: LAMA2; (+) strand; PAM type: NRG; PAM sequence: GAG
gcaacatgtcatacattatg

SEQ ID NO: 161451 - DNA, 20 bp, Artificial Sequence
  Description of Artificial Sequence: Synthetic oligonucleotide
  Target: LAMA2; (+) strand; PAM type: NRG; PAM sequence: AAG
acatgtcatacattatggag

SEQ ID NO: 161452 - DNA, 20 bp, Artificial Sequence
  Description of Artificial Sequence: Synthetic oligonucleotide
  Target: LAMA2; (+) strand; PAM type: NRG; PAM sequence: AGG
catgtcatacattatggaga

SEQ ID NO: 161453 - DNA, 20 bp, Artificial Sequence
  Description of Artificial Sequence: Synthetic oligonucleotide
  Target: LAMA2; (+) strand; PAM type: NRG; PAM sequence: AAG
tatggagaaggcatttcaaa

SEQ ID NO: 161454 - DNA, 20 bp, Artificial Sequence
  Description of Artificial Sequence: Synthetic oligonucleotide
  Target: LAMA2; (+) strand; PAM type: NRG; PAM sequence: AGG
atggagaaggcatttcaaaa

SEQ ID NO: 161455 - DNA, 20 bp, Artificial Sequence
  Description of Artificial Sequence: Synthetic oligonucleotide
  Target: LAMA2; (+) strand; PAM type: NRG; PAM sequence: CAG
gagaaggcatttcaaaaagg

SEQ ID NO: 161456 - DNA, 20 bp, Artificial Sequence
  Description of Artificial Sequence: Synthetic oligonucleotide
  Target: LAMA2; (+) strand; PAM type: NRG; PAM sequence: AGG
agaaggcatttcaaaaaggc

SEQ ID NO: 161457 - DNA, 20 bp, Artificial Sequence
  Description of Artificial Sequence: Synthetic oligonucleotide
  Target: LAMA2; (+) strand; PAM type: NRG; PAM sequence: AAG
ggcatttcaaaaaggcaggc

SEQ ID NO: 161458 - DNA, 20 bp, Artificial Sequence
  Description of Artificial Sequence: Synthetic oligonucleotide
  Target: LAMA2; (+) strand; PAM type: NRG; PAM sequence: TGG
aaaaggcaggcaagttcatc

SEQ ID NO: 161459 - DNA, 20 bp, Artificial Sequence
  Description of Artificial Sequence: Synthetic oligonucleotide
  Target: LAMA2; (+) strand; PAM type: NRG; PAM sequence: TGG
aggcaggcaagttcatctgg

SEQ ID NO: 161460 - DNA, 20 bp, Artificial Sequence
  Description of Artificial Sequence: Synthetic oligonucleotide
  Target: LAMA2; (+) strand; PAM type: NRG; PAM sequence: TAG
agttcatctggtggattcta

SEQ ID NO: 161461 - DNA, 20 bp, Artificial Sequence
  Description of Artificial Sequence: Synthetic oligonucleotide
  Target: LAMA2; (+) strand; PAM type: NRG; PAM sequence: AGG
gttcatctggtggattctat

SEQ ID NO: 161462 - DNA, 20 bp, Artificial Sequence
  Description of Artificial Sequence: Synthetic oligonucleotide
  Target: LAMA2; (+) strand; PAM type: NRG; PAM sequence: TGG
taggacaacatgaaacttaa

SEQ ID NO: 161463 - DNA, 20 bp, Artificial Sequence
  Description of Artificial Sequence: Synthetic oligonucleotide
  Target: LAMA2; (+) strand; PAM type: NRG; PAM sequence: GGG
aggacaacatgaaacttaat

SEQ ID NO: 161464 - DNA, 20 bp, Artificial Sequence
  Description of Artificial Sequence: Synthetic oligonucleotide
  Target: LAMA2; (+) strand; PAM type: NRG; PAM sequence: TAG
atgaaacttaatgggataca

SEQ ID NO: 161465 - DNA, 20 bp, Artificial Sequence
  Description of Artificial Sequence: Synthetic oligonucleotide
  Target: LAMA2; (+) strand; PAM type: NRG; PAM sequence: AAG
atgggatacatagacttctt

SEQ ID NO: 161466 - DNA, 20 bp, Artificial Sequence
  Description of Artificial Sequence: Synthetic oligonucleotide
  Target: LAMA2; (+) strand; PAM type: NRG; PAM sequence: CAG
cttaagccctccccgctccc

SEQ ID NO: 161467 - DNA, 20 bp, Artificial Sequence
  Description of Artificial Sequence: Synthetic oligonucleotide
  Target: LAMA2; (+) strand; PAM type: NRG; PAM sequence: TGG
agccctccccgctccccagc

SEQ ID NO: 161468 - DNA, 20 bp, Artificial Sequence
  Description of Artificial Sequence: Synthetic oligonucleotide
  Target: LAMA2; (+) strand; PAM type: NRG; PAM sequence: AAG
atttttaacaacttctcctt

SEQ ID NO: 161469 - DNA, 20 bp, Artificial Sequence
  Description of Artificial Sequence: Synthetic oligonucleotide
  Target: LAMA2; (+) strand; PAM type: NRG; PAM sequence: GAG
acaacttctccttaagtgat

SEQ ID NO: 161470 - DNA, 20 bp, Artificial Sequence
  Description of Artificial Sequence: Synthetic oligonucleotide
  Target: LAMA2; (+) strand; PAM type: NRG; PAM sequence: GAG
aacttctccttaagtgatga

SEQ ID NO: 161471 - DNA, 20 bp, Artificial Sequence
  Description of Artificial Sequence: Synthetic oligonucleotide
  Target: LAMA2; (+) strand; PAM type: NRG; PAM sequence: GAG
cttctccttaagtgatgaga

SEQ ID NO: 161472 - DNA, 20 bp, Artificial Sequence
  Description of Artificial Sequence: Synthetic oligonucleotide
  Target: LAMA2; (+) strand; PAM type: NRG; PAM sequence: AGG
ttctccttaagtgatgagag

SEQ ID NO: 161473 - DNA, 20 bp, Artificial Sequence
  Description of Artificial Sequence: Synthetic oligonucleotide
  Target: LAMA2; (+) strand; PAM type: NRG; PAM sequence: GGG
tctccttaagtgatgagaga

SEQ ID NO: 161474 - DNA, 20 bp, Artificial Sequence
  Description of Artificial Sequence: Synthetic oligonucleotide
  Target: LAMA2; (+) strand; PAM type: NRG; PAM sequence: GGG
ctccttaagtgatgagagag

SEQ ID NO: 161475 - DNA, 20 bp, Artificial Sequence
  Description of Artificial Sequence: Synthetic oligonucleotide
  Target: LAMA2; (+) strand; PAM type: NRG; PAM sequence: AAG
agtgatgagagaggggtcaa

SEQ ID NO: 161476 - DNA, 20 bp, Artificial Sequence
  Description of Artificial Sequence: Synthetic oligonucleotide
  Target: LAMA2; (+) strand; PAM type: NRG; PAM sequence: CAG
atgagagaggggtcaaaagc

SEQ ID NO: 161477 - DNA, 20 bp, Artificial Sequence
  Description of Artificial Sequence: Synthetic oligonucleotide
  Target: LAMA2; (+) strand; PAM type: NRG; PAM sequence: AGG
tgagagaggggtcaaaagcc

SEQ ID NO: 161478 - DNA, 20 bp, Artificial Sequence
  Description of Artificial Sequence: Synthetic oligonucleotide
  Target: LAMA2; (+) strand; PAM type: NRG; PAM sequence: TGG
cacaattgccactgaaaatg

SEQ ID NO: 161479 - DNA, 20 bp, Artificial Sequence
  Description of Artificial Sequence: Synthetic oligonucleotide
  Target: LAMA2; (+) strand; PAM type: NRG; PAM sequence: AAG
aattgccactgaaaatgtgg

SEQ ID NO: 161480 - DNA, 20 bp, Artificial Sequence
  Description of Artificial Sequence: Synthetic oligonucleotide
  Target: LAMA2; (+) strand; PAM type: NRG; PAM sequence: AGG
attgccactgaaaatgtgga

SEQ ID NO: 161481 - DNA, 20 bp, Artificial Sequence
  Description of Artificial Sequence: Synthetic oligonucleotide
  Target: LAMA2; (+) strand; PAM type: NRG; PAM sequence: CAG
atattttgaaaattcatcta

SEQ ID NO: 161482 - DNA, 20 bp, Artificial Sequence
  Description of Artificial Sequence: Synthetic oligonucleotide
  Target: LAMA2; (+) strand; PAM type: NRG; PAM sequence: AAG
tcatctacagttttatcctc

SEQ ID NO: 161483 - DNA, 20 bp, Artificial Sequence
  Description of Artificial Sequence: Synthetic oligonucleotide
  Target: LAMA2; (+) strand; PAM type: NRG; PAM sequence: TAG
tttatcctcaagattcatac

SEQ ID NO: 161484 - DNA, 20 bp, Artificial Sequence
  Description of Artificial Sequence: Synthetic oligonucleotide
  Target: LAMA2; (+) strand; PAM type: NRG; PAM sequence: AAG
aagattcatactagatatca

SEQ ID NO: 161485 - DNA, 20 bp, Artificial Sequence
  Description of Artificial Sequence: Synthetic oligonucleotide
  Target: LAMA2; (+) strand; PAM type: NRG; PAM sequence: CAG
cctttttgtatcttaaattt

SEQ ID NO: 161486 - DNA, 20 bp, Artificial Sequence
  Description of Artificial Sequence: Synthetic oligonucleotide
  Target: LAMA2; (+) strand; PAM type: NRG; PAM sequence: TAG
ttcagttccaaaatcccatt

SEQ ID NO: 161487 - DNA, 20 bp, Artificial Sequence
  Description of Artificial Sequence: Synthetic oligonucleotide
  Target: LAMA2; (+) strand; PAM type: NRG; PAM sequence: CAG
catttagattttgtctgctt

SEQ ID NO: 161488 - DNA, 20 bp, Artificial Sequence
  Description of Artificial Sequence: Synthetic oligonucleotide
  Target: LAMA2; (+) strand; PAM type: NRG; PAM sequence: AAG
agaatgtctgaattcgaatc

SEQ ID NO: 161489 - DNA, 20 bp, Artificial Sequence
  Description of Artificial Sequence: Synthetic oligonucleotide
  Target: LAMA2; (+) strand; PAM type: NRG; PAM sequence: TGG
ccctctgcttactatgctca

SEQ ID NO: 161490 - DNA, 20 bp, Artificial Sequence
  Description of Artificial Sequence: Synthetic oligonucleotide
  Target: LAMA2; (+) strand; PAM type: NRG; PAM sequence: GGG
cctctgcttactatgctcat

SEQ ID NO: 161491 - DNA, 20 bp, Artificial Sequence
  Description of Artificial Sequence: Synthetic oligonucleotide
  Target: LAMA2; (+) strand; PAM type: NRG; PAM sequence: GAG
gggaccttctattcacttgt

SEQ ID NO: 161492 - DNA, 20 bp, Artificial Sequence
  Description of Artificial Sequence: Synthetic oligonucleotide
  Target: LAMA2; (+) strand; PAM type: NRG; PAM sequence: TGG
tgtgagtctccttgtgcctt

SEQ ID NO: 161493 - DNA, 20 bp, Artificial Sequence
  Description of Artificial Sequence: Synthetic oligonucleotide
  Target: LAMA2; (+) strand; PAM type: NRG; PAM sequence: GGG
gtgagtctccttgtgccttt

SEQ ID NO: 161494 - DNA, 20 bp, Artificial Sequence
  Description of Artificial Sequence: Synthetic oligonucleotide
  Target: LAMA2; (+) strand; PAM type: NRG; PAM sequence: CAG
gtgcctttgggtcctgaatg

SEQ ID NO: 161495 - DNA, 20 bp, Artificial Sequence
  Description of Artificial Sequence: Synthetic oligonucleotide
  Target: LAMA2; (+) strand; PAM type: NRG; PAM sequence: GAG
gcctttgggtcctgaatgca

SEQ ID NO: 161496 - DNA, 20 bp, Artificial Sequence
  Description of Artificial Sequence: Synthetic oligonucleotide
  Target: LAMA2; (+) strand; PAM type: NRG; PAM sequence: TGG
tgggtcctgaatgcagagca

SEQ ID NO: 161497 - DNA, 20 bp, Artificial Sequence
  Description of Artificial Sequence: Synthetic oligonucleotide
  Target: LAMA2; (+) strand; PAM type: NRG; PAM sequence: GGG
gggtcctgaatgcagagcat

SEQ ID NO: 161498 - DNA, 20 bp, Artificial Sequence
  Description of Artificial Sequence: Synthetic oligonucleotide
  Target: LAMA2; (+) strand; PAM type: NRG; PAM sequence: CAG
tgaatgcagagcatgggcta

SEQ ID NO: 161499 - DNA, 20 bp, Artificial Sequence
  Description of Artificial Sequence: Synthetic oligonucleotide
  Target: LAMA2; (+) strand; PAM type: NRG; PAM sequence: CAG
agcatgggctacagaaataa

SEQ ID NO: 161500 - DNA, 20 bp, Artificial Sequence
  Description of Artificial Sequence: Synthetic oligonucleotide
  Target: LAMA2; (+) strand; PAM type: NRG; PAM sequence: GAG
catgggctacagaaataaca

SEQ ID NO: 161501 - DNA, 20 bp, Artificial Sequence
  Description of Artificial Sequence: Synthetic oligonucleotide
  Target: LAMA2; (+) strand; PAM type: NRG; PAM sequence: AGG
atgggctacagaaataacag

SEQ ID NO: 161502 - DNA, 20 bp, Artificial Sequence
  Description of Artificial Sequence: Synthetic oligonucleotide
  Target: LAMA2; (+) strand; PAM type: NRG; PAM sequence: GAG
gggctacagaaataacagag

SEQ ID NO: 161503 - DNA, 20 bp, Artificial Sequence
  Description of Artificial Sequence: Synthetic oligonucleotide
  Target: LAMA2; (+) strand; PAM type: NRG; PAM sequence: AGG
ggctacagaaataacagagg

SEQ ID NO: 161504 - DNA, 20 bp, Artificial Sequence
  Description of Artificial Sequence: Synthetic oligonucleotide
  Target: LAMA2; (+) strand; PAM type: NRG; PAM sequence: GGG
gctacagaaataacagagga

SEQ ID NO: 161505 - DNA, 20 bp, Artificial Sequence
  Description of Artificial Sequence: Synthetic oligonucleotide
  Target: LAMA2; (+) strand; PAM type: NRG; PAM sequence: GGG
ctacagaaataacagaggag

SEQ ID NO: 161506 - DNA, 20 bp, Artificial Sequence
  Description of Artificial Sequence: Synthetic oligonucleotide
  Target: LAMA2; (+) strand; PAM type: NRG; PAM sequence: CAG
cagaaataacagaggagggg

SEQ ID NO: 161507 - DNA, 20 bp, Artificial Sequence
  Description of Artificial Sequence: Synthetic oligonucleotide
  Target: LAMA2; (+) strand; PAM type: NRG; PAM sequence: TAG
ggggcagttatacctacctg

SEQ ID NO: 161508 - DNA, 20 bp, Artificial Sequence
  Description of Artificial Sequence: Synthetic oligonucleotide
  Target: LAMA2; (+) strand; PAM type: NRG; PAM sequence: TAG
atacctacctgtagtactgt

SEQ ID NO: 161509 - DNA, 20 bp, Artificial Sequence
  Description of Artificial Sequence: Synthetic oligonucleotide
  Target: LAMA2; (+) strand; PAM type: NRG; PAM sequence: CAG
tgttagcaaaattgtgactc

SEQ ID NO: 161510 - DNA, 20 bp, Artificial Sequence
  Description of Artificial Sequence: Synthetic oligonucleotide
  Target: LAMA2; (+) strand; PAM type: NRG; PAM sequence: GAG
gcaaaattgtgactccagtt

SEQ ID NO: 161511 - DNA, 20 bp, Artificial Sequence
  Description of Artificial Sequence: Synthetic oligonucleotide
  Target: LAMA2; (+) strand; PAM type: NRG; PAM sequence: AGG
caaaattgtgactccagttg

SEQ ID NO: 161512 - DNA, 20 bp, Artificial Sequence
  Description of Artificial Sequence: Synthetic oligonucleotide
  Target: LAMA2; (+) strand; PAM type: NRG; PAM sequence: AAG
gtgactccagttgaggtgtc

SEQ ID NO: 161513 - DNA, 20 bp, Artificial Sequence
  Description of Artificial Sequence: Synthetic oligonucleotide
  Target: LAMA2; (+) strand; PAM type: NRG; PAM sequence: GAG
gactccagttgaggtgtcaa

SEQ ID NO: 161514 - DNA, 20 bp, Artificial Sequence
  Description of Artificial Sequence: Synthetic oligonucleotide
  Target: LAMA2; (+) strand; PAM type: NRG; PAM sequence: AGG
actccagttgaggtgtcaag

SEQ ID NO: 161515 - DNA, 20 bp, Artificial Sequence
  Description of Artificial Sequence: Synthetic oligonucleotide
  Target: LAMA2; (+) strand; PAM type: NRG; PAM sequence: TGG
gtcaagaggccactcatatg

SEQ ID NO: 161516 - DNA, 20 bp, Artificial Sequence
  Description of Artificial Sequence: Synthetic oligonucleotide
  Target: LAMA2; (+) strand; PAM type: NRG; PAM sequence: CAG
gccactcatatgtggttgtg

SEQ ID NO: 161517 - DNA, 20 bp, Artificial Sequence
  Description of Artificial Sequence: Synthetic oligonucleotide
  Target: LAMA2; (+) strand; PAM type: NRG; PAM sequence: AAG
tgcagtttgtacactgcaca

SEQ ID NO: 161518 - DNA, 20 bp, Artificial Sequence
  Description of Artificial Sequence: Synthetic oligonucleotide
  Target: LAMA2; (+) strand; PAM type: NRG; PAM sequence: AGG
gcagtttgtacactgcacaa

SEQ ID NO: 161519 - DNA, 20 bp, Artificial Sequence
  Description of Artificial Sequence: Synthetic oligonucleotide
  Target: LAMA2; (+) strand; PAM type: NRG; PAM sequence: CAG
gtacactgcacaaaggcact

SEQ ID NO: 161520 - DNA, 20 bp, Artificial Sequence
  Description of Artificial Sequence: Synthetic oligonucleotide
  Target: LAMA2; (+) strand; PAM type: NRG; PAM sequence: AGG
tacactgcacaaaggcactc

SEQ ID NO: 161521 - DNA, 20 bp, Artificial Sequence
  Description of Artificial Sequence: Synthetic oligonucleotide
  Target: LAMA2; (+) strand; PAM type: NRG; PAM sequence: GGG
acactgcacaaaggcactca

SEQ ID NO: 161522 - DNA, 20 bp, Artificial Sequence
  Description of Artificial Sequence: Synthetic oligonucleotide
  Target: LAMA2; (+) strand; PAM type: NRG; PAM sequence: AAG
ctgcacaaaggcactcaggg

SEQ ID NO: 161523 - DNA, 20 bp, Artificial Sequence
  Description of Artificial Sequence: Synthetic oligonucleotide
  Target: LAMA2; (+) strand; PAM type: NRG; PAM sequence: AGG
tgcacaaaggcactcaggga

SEQ ID NO: 161524 - DNA, 20 bp, Artificial Sequence
  Description of Artificial Sequence: Synthetic oligonucleotide
  Target: LAMA2; (+) strand; PAM type: NRG; PAM sequence: GGG
gcacaaaggcactcagggaa

SEQ ID NO: 161525 - DNA, 20 bp, Artificial Sequence
  Description of Artificial Sequence: Synthetic oligonucleotide
  Target: LAMA2; (+) strand; PAM type: NRG; PAM sequence: GGG
cacaaaggcactcagggaag

SEQ ID NO: 161526 - DNA, 20 bp, Artificial Sequence
  Description of Artificial Sequence: Synthetic oligonucleotide
  Target: LAMA2; (+) strand; PAM type: NRG; PAM sequence: AAG
aaaggcactcagggaagggg

SEQ ID NO: 161527 - DNA, 20 bp, Artificial Sequence
  Description of Artificial Sequence: Synthetic oligonucleotide
  Target: LAMA2; (+) strand; PAM type: NRG; PAM sequence: GAG
actcagggaaggggaagatt

SEQ ID NO: 161528 - DNA, 20 bp, Artificial Sequence
  Description of Artificial Sequence: Synthetic oligonucleotide
  Target: LAMA2; (+) strand; PAM type: NRG; PAM sequence: AGG
ctcagggaaggggaagattg

SEQ ID NO: 161529 - DNA, 20 bp, Artificial Sequence
  Description of Artificial Sequence: Synthetic oligonucleotide
  Target: LAMA2; (+) strand; PAM type: NRG; PAM sequence: GGG
tcagggaaggggaagattga

SEQ ID NO: 161530 - DNA, 20 bp, Artificial Sequence
  Description of Artificial Sequence: Synthetic oligonucleotide
  Target: LAMA2; (+) strand; PAM type: NRG; PAM sequence: CAG
gaagattgagggcttgaatc

SEQ ID NO: 161531 - DNA, 20 bp, Artificial Sequence
  Description of Artificial Sequence: Synthetic oligonucleotide
  Target: LAMA2; (+) strand; PAM type: NRG; PAM sequence: AAG
ttaccctcttcttttccatg

SEQ ID NO: 161532 - DNA, 20 bp, Artificial Sequence
  Description of Artificial Sequence: Synthetic oligonucleotide
  Target: LAMA2; (+) strand; PAM type: NRG; PAM sequence: TGG
cttcttttccatgaagtccc

SEQ ID NO: 161533 - DNA, 20 bp, Artificial Sequence
  Description of Artificial Sequence: Synthetic oligonucleotide
  Target: LAMA2; (+) strand; PAM type: NRG; PAM sequence: GGG
ttcttttccatgaagtccct

SEQ ID NO: 161534 - DNA, 20 bp, Artificial Sequence
  Description of Artificial Sequence: Synthetic oligonucleotide
  Target: LAMA2; (+) strand; PAM type: NRG; PAM sequence: TAG
ccatgaagtccctgggtgtc

SEQ ID NO: 161535 - DNA, 20 bp, Artificial Sequence
  Description of Artificial Sequence: Synthetic oligonucleotide
  Target: LAMA2; (+) strand; PAM type: NRG; PAM sequence: TAG
ttactttttctgcatatgtc

SEQ ID NO: 161536 - DNA, 20 bp, Artificial Sequence
  Description of Artificial Sequence: Synthetic oligonucleotide
  Target: LAMA2; (+) strand; PAM type: NRG; PAM sequence: AAG
tttttctgcatatgtctaga

SEQ ID NO: 161537 - DNA, 20 bp, Artificial Sequence
  Description of Artificial Sequence: Synthetic oligonucleotide
  Target: LAMA2; (+) strand; PAM type: NRG; PAM sequence: AGG
ttttctgcatatgtctagaa

SEQ ID NO: 161538 - DNA, 20 bp, Artificial Sequence
  Description of Artificial Sequence: Synthetic oligonucleotide
  Target: LAMA2; (+) strand; PAM type: NRG; PAM sequence: AAG
caatttcttccaacttgtaa

SEQ ID NO: 161539 - DNA, 20 bp, Artificial Sequence
  Description of Artificial Sequence: Synthetic oligonucleotide
  Target: LAMA2; (+) strand; PAM type: NRG; PAM sequence: AGG
aatttcttccaacttgtaaa

SEQ ID NO: 161540 - DNA, 20 bp, Artificial Sequence
  Description of Artificial Sequence: Synthetic oligonucleotide
  Target: LAMA2; (+) strand; PAM type: NRG; PAM sequence: GAG
acttgtaaaaggcaccatgt

SEQ ID NO: 161541 - DNA, 20 bp, Artificial Sequence
  Description of Artificial Sequence: Synthetic oligonucleotide
  Target: LAMA2; (+) strand; PAM type: NRG; PAM sequence: CAG
tgtaaaaggcaccatgtgag

SEQ ID NO: 161542 - DNA, 20 bp, Artificial Sequence
  Description of Artificial Sequence: Synthetic oligonucleotide
  Target: LAMA2; (+) strand; PAM type: NRG; PAM sequence: AGG
gtaaaaggcaccatgtgagc

SEQ ID NO: 161543 - DNA, 20 bp, Artificial Sequence
  Description of Artificial Sequence: Synthetic oligonucleotide
  Target: LAMA2; (+) strand; PAM type: NRG; PAM sequence: GGG
taaaaggcaccatgtgagca

SEQ ID NO: 161544 - DNA, 20 bp, Artificial Sequence
  Description of Artificial Sequence: Synthetic oligonucleotide
  Target: LAMA2; (+) strand; PAM type: NRG; PAM sequence: CAG
tgtgagcagggaaacaccct

SEQ ID NO: 161545 - DNA, 20 bp, Artificial Sequence
  Description of Artificial Sequence: Synthetic oligonucleotide
  Target: LAMA2; (+) strand; PAM type: NRG; PAM sequence: TGG
cttttgctgattatgtcaaa

SEQ ID NO: 161546 - DNA, 20 bp, Artificial Sequence
  Description of Artificial Sequence: Synthetic oligonucleotide
  Target: LAMA2; (+) strand; PAM type: NRG; PAM sequence: GGG
ttttgctgattatgtcaaat

SEQ ID NO: 161547 - DNA, 20 bp, Artificial Sequence
  Description of Artificial Sequence: Synthetic oligonucleotide
  Target: LAMA2; (+) strand; PAM type: NRG; PAM sequence: GAG
ttgctgattatgtcaaatgg

SEQ ID NO: 161548 - DNA, 20 bp, Artificial Sequence
  Description of Artificial Sequence: Synthetic oligonucleotide
  Target: LAMA2; (+) strand; PAM type: NRG; PAM sequence: AGG
tgctgattatgtcaaatggg

SEQ ID NO: 161549 - DNA, 20 bp, Artificial Sequence
  Description of Artificial Sequence: Synthetic oligonucleotide
  Target: LAMA2; (+) strand; PAM type: NRG; PAM sequence: AAG
tgattatgtcaaatgggagg

SEQ ID NO: 161550 - DNA, 20 bp, Artificial Sequence
  Description of Artificial Sequence: Synthetic oligonucleotide
  Target: LAMA2; (+) strand; PAM type: NRG; PAM sequence: AAG
tatgtcaaatgggaggaagt

SEQ ID NO: 161551 - DNA, 20 bp, Artificial Sequence
  Description of Artificial Sequence: Synthetic oligonucleotide
  Target: LAMA2; (+) strand; PAM type: NRG; PAM sequence: CAG
aatgggaggaagtaagaaca

SEQ ID NO: 161552 - DNA, 20 bp, Artificial Sequence
  Description of Artificial Sequence: Synthetic oligonucleotide
  Target: LAMA2; (+) strand; PAM type: NRG; PAM sequence: CAG
gaagtaagaacacagcatta

SEQ ID NO: 161553 - DNA, 20 bp, Artificial Sequence
  Description of Artificial Sequence: Synthetic oligonucleotide
  Target: LAMA2; (+) strand; PAM type: NRG; PAM sequence: CAG
tacagccacgcctctttata

SEQ ID NO: 161554 - DNA, 20 bp, Artificial Sequence
  Description of Artificial Sequence: Synthetic oligonucleotide
  Target: LAMA2; (+) strand; PAM type: NRG; PAM sequence: CAG
agccacgcctctttatacag

SEQ ID NO: 161555 - DNA, 20 bp, Artificial Sequence
  Description of Artificial Sequence: Synthetic oligonucleotide
  Target: LAMA2; (+) strand; PAM type: NRG; PAM sequence: TGG
ccaatactgttccctctgcc

SEQ ID NO: 161556 - DNA, 20 bp, Artificial Sequence
  Description of Artificial Sequence: Synthetic oligonucleotide
  Target: LAMA2; (+) strand; PAM type: NRG; PAM sequence: AAG
atactgttccctctgcctgg

SEQ ID NO: 161557 - DNA, 20 bp, Artificial Sequence
  Description of Artificial Sequence: Synthetic oligonucleotide
  Target: LAMA2; (+) strand; PAM type: NRG; PAM sequence: CAG
tccctctgcctggaagattg

SEQ ID NO: 161558 - DNA, 20 bp, Artificial Sequence
  Description of Artificial Sequence: Synthetic oligonucleotide
  Target: LAMA2; (+) strand; PAM type: NRG; PAM sequence: GAG
gccctttcactcctccatcc

SEQ ID NO: 161559 - DNA, 20 bp, Artificial Sequence
  Description of Artificial Sequence: Synthetic oligonucleotide
  Target: LAMA2; (+) strand; PAM type: NRG; PAM sequence: CAG
gagactaactaatccctgtt

SEQ ID NO: 161560 - DNA, 20 bp, Artificial Sequence
  Description of Artificial Sequence: Synthetic oligonucleotide
  Target: LAMA2; (+) strand; PAM type: NRG; PAM sequence: AAG
aatccctgttcagctcccaa

SEQ ID NO: 161561 - DNA, 20 bp, Artificial Sequence
  Description of Artificial Sequence: Synthetic oligonucleotide
  Target: LAMA2; (+) strand; PAM type: NRG; PAM sequence: CAG
cctgttcagctcccaaaagt

SEQ ID NO: 161562 - DNA, 20 bp, Artificial Sequence
  Description of Artificial Sequence: Synthetic oligonucleotide
  Target: LAMA2; (+) strand; PAM type: NRG; PAM sequence: TGG
atcctgaaaatgtccttgat

SEQ ID NO: 161563 - DNA, 20 bp, Artificial Sequence
  Description of Artificial Sequence: Synthetic oligonucleotide
  Target: LAMA2; (+) strand; PAM type: NRG; PAM sequence: GGG
tcctgaaaatgtccttgatt

SEQ ID NO: 161564 - DNA, 20 bp, Artificial Sequence
  Description of Artificial Sequence: Synthetic oligonucleotide
  Target: LAMA2; (+) strand; PAM type: NRG; PAM sequence: GAG
tccttgattgggcctaatct

SEQ ID NO: 161565 - DNA, 20 bp, Artificial Sequence
  Description of Artificial Sequence: Synthetic oligonucleotide
  Target: LAMA2; (+) strand; PAM type: NRG; PAM sequence: TGG
tgattgggcctaatctgagt

SEQ ID NO: 161566 - DNA, 20 bp, Artificial Sequence
  Description of Artificial Sequence: Synthetic oligonucleotide
  Target: LAMA2; (+) strand; PAM type: NRG; PAM sequence: TAG
ccttttgtgtgctgccataa

SEQ ID NO: 161567 - DNA, 20 bp, Artificial Sequence
  Description of Artificial Sequence: Synthetic oligonucleotide
  Target: LAMA2; (+) strand; PAM type: NRG; PAM sequence: CAG
taatagcatttgcatatctc

SEQ ID NO: 161568 - DNA, 20 bp, Artificial Sequence
  Description of Artificial Sequence: Synthetic oligonucleotide
  Target: LAMA2; (+) strand; PAM type: NRG; PAM sequence: TGG
aaatgtgtgttcattctcca

SEQ ID NO: 161569 - DNA, 20 bp, Artificial Sequence
  Description of Artificial Sequence: Synthetic oligonucleotide
  Target: LAMA2; (+) strand; PAM type: NRG; PAM sequence: TAG
tgttcattctccatggactg

SEQ ID NO: 161570 - DNA, 20 bp, Artificial Sequence
  Description of Artificial Sequence: Synthetic oligonucleotide
  Target: LAMA2; (+) strand; PAM type: NRG; PAM sequence: AAG
tctccatggactgtagtgtg

SEQ ID NO: 161571 - DNA, 20 bp, Artificial Sequence
  Description of Artificial Sequence: Synthetic oligonucleotide
  Target: LAMA2; (+) strand; PAM type: NRG; PAM sequence: TAG
agactgtaccttatttgtat

SEQ ID NO: 161572 - DNA, 20 bp, Artificial Sequence
  Description of Artificial Sequence: Synthetic oligonucleotide
  Target: LAMA2; (+) strand; PAM type: NRG; PAM sequence: AAG
tttgtattagtaccgtgtaa

SEQ ID NO: 161573 - DNA, 20 bp, Artificial Sequence
  Description of Artificial Sequence: Synthetic oligonucleotide
  Target: LAMA2; (+) strand; PAM type: NRG; PAM sequence: CAG
tagtaccgtgtaaaagtgct

SEQ ID NO: 161574 - DNA, 20 bp, Artificial Sequence
  Description of Artificial Sequence: Synthetic oligonucleotide
  Target: LAMA2; (+) strand; PAM type: NRG; PAM sequence: TGG
gctcagctgattttttttaa

SEQ ID NO: 161575 - DNA, 20 bp, Artificial Sequence
  Description of Artificial Sequence: Synthetic oligonucleotide
  Target: LAMA2; (+) strand; PAM type: NRG; PAM sequence: GGG
ctcagctgattttttttaat

SEQ ID NO: 161576 - DNA, 20 bp, Artificial Sequence
  Description of Artificial Sequence: Synthetic oligonucleotide
  Target: LAMA2; (+) strand; PAM type: NRG; PAM sequence: TGG
gctgattttttttaatgggt

SEQ ID NO: 161577 - DNA, 20 bp, Artificial Sequence
  Description of Artificial Sequence: Synthetic oligonucleotide
  Target: LAMA2; (+) strand; PAM type: NRG; PAM sequence: GGG
ctgattttttttaatgggtt

SEQ ID NO: 161578 - DNA, 20 bp, Artificial Sequence
  Description of Artificial Sequence: Synthetic oligonucleotide
  Target: LAMA2; (+) strand; PAM type: NRG; PAM sequence: GAG
gattttttttaatgggttgg

SEQ ID NO: 161579 - DNA, 20 bp, Artificial Sequence
  Description of Artificial Sequence: Synthetic oligonucleotide
  Target: LAMA2; (+) strand; PAM type: NRG; PAM sequence: CAG
tttaatgggttgggagaaac

SEQ ID NO: 161580 - DNA, 20 bp, Artificial Sequence
  Description of Artificial Sequence: Synthetic oligonucleotide
  Target: LAMA2; (+) strand; PAM type: NRG; PAM sequence: GAG
taatgggttgggagaaacca

SEQ ID NO: 161581 - DNA, 20 bp, Artificial Sequence
  Description of Artificial Sequence: Synthetic oligonucleotide
  Target: LAMA2; (+) strand; PAM type: NRG; PAM sequence: TGG
cagagcttttctaatttgct

SEQ ID NO: 161582 - DNA, 20 bp, Artificial Sequence
  Description of Artificial Sequence: Synthetic oligonucleotide
  Target: LAMA2; (+) strand; PAM type: NRG; PAM sequence: TAG
gcttttctaatttgcttggc

SEQ ID NO: 161583 - DNA, 20 bp, Artificial Sequence
  Description of Artificial Sequence: Synthetic oligonucleotide
  Target: LAMA2; (+) strand; PAM type: NRG; PAM sequence: AAG
ctaatttgcttggctagatt

SEQ ID NO: 161584 - DNA, 20 bp, Artificial Sequence
  Description of Artificial Sequence: Synthetic oligonucleotide
  Target: LAMA2; (+) strand; PAM type: NRG; PAM sequence: CAG
tttgcttggctagattaagc

SEQ ID NO: 161585 - DNA, 20 bp, Artificial Sequence
  Description of Artificial Sequence: Synthetic oligonucleotide
  Target: LAMA2; (+) strand; PAM type: NRG; PAM sequence: CAG
ttatattgtttcattgtttt

SEQ ID NO: 161586 - DNA, 20 bp, Artificial Sequence
  Description of Artificial Sequence: Synthetic oligonucleotide
  Target: LAMA2; (+) strand; PAM type: NRG; PAM sequence: TAG
gtttcattgttttcagtgta

SEQ ID NO: 161587 - DNA, 20 bp, Artificial Sequence
  Description of Artificial Sequence: Synthetic oligonucleotide
  Target: LAMA2; (+) strand; PAM type: NRG; PAM sequence: TAG
tgttttcagtgtatagataa

SEQ ID NO: 161588 - DNA, 20 bp, Artificial Sequence
  Description of Artificial Sequence: Synthetic oligonucleotide
  Target: LAMA2; (+) strand; PAM type: NRG; PAM sequence: TAG
gtgtatagataatagaaatg

SEQ ID NO: 161589 - DNA, 20 bp, Artificial Sequence
  Description of Artificial Sequence: Synthetic oligonucleotide
  Target: LAMA2; (+) strand; PAM type: NRG; PAM sequence: AGG
tgtatagataatagaaatgt

SEQ ID NO: 161590 - DNA, 20 bp, Artificial Sequence
  Description of Artificial Sequence: Synthetic oligonucleotide
  Target: LAMA2; (+) strand; PAM type: NRG; PAM sequence: TAG
agaaatgtaggccgtgattt

SEQ ID NO: 161591 - DNA, 20 bp, Artificial Sequence
  Description of Artificial Sequence: Synthetic oligonucleotide
  Target: LAMA2; (+) strand; PAM type: NRG; PAM sequence: AAG
taggccgtgattttagccaa

SEQ ID NO: 161592 - DNA, 20 bp, Artificial Sequence
  Description of Artificial Sequence: Synthetic oligonucleotide
  Target: LAMA2; (+) strand; PAM type: NRG; PAM sequence: TGG
aaaagttgctgaaaaaatga

SEQ ID NO: 161593 - DNA, 20 bp, Artificial Sequence
  Description of Artificial Sequence: Synthetic oligonucleotide
  Target: LAMA2; (+) strand; PAM type: NRG; PAM sequence: GGG
aaagttgctgaaaaaatgat

SEQ ID NO: 161594 - DNA, 20 bp, Artificial Sequence
  Description of Artificial Sequence: Synthetic oligonucleotide
  Target: LAMA2; (+) strand; PAM type: NRG; PAM sequence: GGG
aagttgctgaaaaaatgatg

SEQ ID NO: 161595 - DNA, 20 bp, Artificial Sequence
  Description of Artificial Sequence: Synthetic oligonucleotide
  Target: LAMA2; (+) strand; PAM type: NRG; PAM sequence: CAG
ttgctgaaaaaatgatgggg

SEQ ID NO: 161596 - DNA, 20 bp, Artificial Sequence
  Description of Artificial Sequence: Synthetic oligonucleotide
  Target: LAMA2; (+) strand; PAM type: NRG; PAM sequence: GAG
aaaaaatgatggggcagaat

SEQ ID NO: 161597 - DNA, 20 bp, Artificial Sequence
  Description of Artificial Sequence: Synthetic oligonucleotide
  Target: LAMA2; (+) strand; PAM type: NRG; PAM sequence: AAG
gatggggcagaatgagacaa

SEQ ID NO: 161598 - DNA, 20 bp, Artificial Sequence
  Description of Artificial Sequence: Synthetic oligonucleotide
  Target: LAMA2; (+) strand; PAM type: NRG; PAM sequence: CAG
gaatgagacaaaagtctcat

SEQ ID NO: 161599 - DNA, 20 bp, Artificial Sequence
  Description of Artificial Sequence: Synthetic oligonucleotide
  Target: LAMA2; (+) strand; PAM type: NRG; PAM sequence: TGG
agacaaaagtctcatcagtg

SEQ ID NO: 161600 - DNA, 20 bp, Artificial Sequence
  Description of Artificial Sequence: Synthetic oligonucleotide
  Target: LAMA2; (+) strand; PAM type: NRG; PAM sequence: TAG
cattgttcctaaattatcaa

SEQ ID NO: 161601 - DNA, 20 bp, Artificial Sequence
  Description of Artificial Sequence: Synthetic oligonucleotide
  Target: LAMA2; (+) strand; PAM type: NRG; PAM sequence: CAG
tgttcctaaattatcaatag

SEQ ID NO: 161602 - DNA, 20 bp, Artificial Sequence
  Description of Artificial Sequence: Synthetic oligonucleotide
  Target: LAMA2; (+) strand; PAM type: NRG; PAM sequence: AAG
cctaaattatcaatagcagc

SEQ ID NO: 161603 - DNA, 20 bp, Artificial Sequence
  Description of Artificial Sequence: Synthetic oligonucleotide
  Target: LAMA2; (+) strand; PAM type: NRG; PAM sequence: TGG
aaataactgcatgtgttatc

SEQ ID NO: 161604 - DNA, 20 bp, Artificial Sequence
  Description of Artificial Sequence: Synthetic oligonucleotide
  Target: LAMA2; (+) strand; PAM type: NRG; PAM sequence: GAG
ataactgcatgtgttatctg

SEQ ID NO: 161605 - DNA, 20 bp, Artificial Sequence
  Description of Artificial Sequence: Synthetic oligonucleotide
  Target: LAMA2; (+) strand; PAM type: NRG; PAM sequence: CGG
gagtcttatttacatttaaa

SEQ ID NO: 161606 - DNA, 20 bp, Artificial Sequence
  Description of Artificial Sequence: Synthetic oligonucleotide
  Target: LAMA2; (+) strand; PAM type: NRG; PAM sequence: AAG
tattgcaatttgatttgaaa

SEQ ID NO: 161607 - DNA, 20 bp, Artificial Sequence
  Description of Artificial Sequence: Synthetic oligonucleotide
  Target: LAMA2; (+) strand; PAM type: NRG; PAM sequence: CAG
atttgatttgaaaaagttaa

SEQ ID NO: 161608 - DNA, 20 bp, Artificial Sequence
  Description of Artificial Sequence: Synthetic oligonucleotide
  Target: LAMA2; (+) strand; PAM type: NRG; PAM sequence: TGG
tttgaaaaagttaacagatg

SEQ ID NO: 161609 - DNA, 20 bp, Artificial Sequence
  Description of Artificial Sequence: Synthetic oligonucleotide
  Target: LAMA2; (+) strand; PAM type: NRG; PAM sequence: AAG
aaaaagttaacagatgtgga

SEQ ID NO: 161610 - DNA, 20 bp, Artificial Sequence
  Description of Artificial Sequence: Synthetic oligonucleotide
  Target: LAMA2; (+) strand; PAM type: NRG; PAM sequence: AGG
aaaagttaacagatgtggaa

SEQ ID NO: 161611 - DNA, 20 bp, Artificial Sequence
  Description of Artificial Sequence: Synthetic oligonucleotide
  Target: LAMA2; (+) strand; PAM type: NRG; PAM sequence: AAG
aacaatgcctttgttatgtc

SEQ ID NO: 161612 - DNA, 20 bp, Artificial Sequence
  Description of Artificial Sequence: Synthetic oligonucleotide
  Target: LAMA2; (+) strand; PAM type: NRG; PAM sequence: TAG
tatgtcaagatatccgtttc

SEQ ID NO: 161613 - DNA, 20 bp, Artificial Sequence
  Description of Artificial Sequence: Synthetic oligonucleotide
  Target: LAMA2; (+) strand; PAM type: NRG; PAM sequence: AAG
tcaagatatccgtttctagc

SEQ ID NO: 161614 - DNA, 20 bp, Artificial Sequence
  Description of Artificial Sequence: Synthetic oligonucleotide
  Target: LAMA2; (+) strand; PAM type: NRG; PAM sequence: AGG
caagatatccgtttctagca

SEQ ID NO: 161615 - DNA, 20 bp, Artificial Sequence
  Description of Artificial Sequence: Synthetic oligonucleotide
  Target: LAMA2; (+) strand; PAM type: NRG; PAM sequence: GAG
tctgccttgcatatgaaaat

SEQ ID NO: 161616 - DNA, 20 bp, Artificial Sequence
  Description of Artificial Sequence: Synthetic oligonucleotide
  Target: LAMA2; (+) strand; PAM type: NRG; PAM sequence: GAG
tgccttgcatatgaaaatga

SEQ ID NO: 161617 - DNA, 20 bp, Artificial Sequence
  Description of Artificial Sequence: Synthetic oligonucleotide
  Target: LAMA2; (+) strand; PAM type: NRG; PAM sequence: AGG
gccttgcatatgaaaatgag

SEQ ID NO: 161618 - DNA, 20 bp, Artificial Sequence
  Description of Artificial Sequence: Synthetic oligonucleotide
  Target: LAMA2; (+) strand; PAM type: NRG; PAM sequence: GGG
ccttgcatatgaaaatgaga

SEQ ID NO: 161619 - DNA, 20 bp, Artificial Sequence
  Description of Artificial Sequence: Synthetic oligonucleotide
  Target: LAMA2; (+) strand; PAM type: NRG; PAM sequence: TGG
tttcacattacaattatttt

SEQ ID NO: 161620 - DNA, 20 bp, Artificial Sequence
  Description of Artificial Sequence: Synthetic oligonucleotide
  Target: LAMA2; (+) strand; PAM type: NRG; PAM sequence: TGG
cacattacaattatttttgg

SEQ ID NO: 161621 - DNA, 20 bp, Artificial Sequence
  Description of Artificial Sequence: Synthetic oligonucleotide
  Target: LAMA2; (+) strand; PAM type: NRG; PAM sequence: GAG
cattacaattatttttggtg

SEQ ID NO: 161622 - DNA, 20 bp, Artificial Sequence
  Description of Artificial Sequence: Synthetic oligonucleotide
  Target: LAMA2; (+) strand; PAM type: NRG; PAM sequence: AAG
tttggtggagtgaaaaacca

SEQ ID NO: 161623 - DNA, 20 bp, Artificial Sequence
  Description of Artificial Sequence: Synthetic oligonucleotide
  Target: LAMA2; (+) strand; PAM type: NRG; PAM sequence: AGG
ttggtggagtgaaaaaccaa

SEQ ID NO: 161624 - DNA, 20 bp, Artificial Sequence
  Description of Artificial Sequence: Synthetic oligonucleotide
  Target: LAMA2; (+) strand; PAM type: NRG; PAM sequence: TAG
tgatttaaactaattttaat

SEQ ID NO: 161625 - DNA, 20 bp, Artificial Sequence
  Description of Artificial Sequence: Synthetic oligonucleotide
  Target: LAMA2; (+) strand; PAM type: NRG; PAM sequence: AGG
gatttaaactaattttaatt

SEQ ID NO: 161626 - DNA, 20 bp, Artificial Sequence
  Description of Artificial Sequence: Synthetic oligonucleotide
  Target: LAMA2; (+) strand; PAM type: NRG; PAM sequence: CAG
ttaggtgaatccaacttgat

SEQ ID NO: 161627 - DNA, 20 bp, Artificial Sequence
  Description of Artificial Sequence: Synthetic oligonucleotide
  Target: LAMA2; (+) strand; PAM type: NRG; PAM sequence: AAG
cacactatttttattaataa

SEQ ID NO: 161628 - DNA, 20 bp, Artificial Sequence
  Description of Artificial Sequence: Synthetic oligonucleotide
  Target: LAMA2; (+) strand; PAM type: NRG; PAM sequence: TAG
attaataaaagttatatgat

SEQ ID NO: 161629 - DNA, 20 bp, Artificial Sequence
  Description of Artificial Sequence: Synthetic oligonucleotide
  Target: LAMA2; (+) strand; PAM type: NRG; PAM sequence: CAG
aataaaagttatatgattag

SEQ ID NO: 161630 - DNA, 20 bp, Artificial Sequence
  Description of Artificial Sequence: Synthetic oligonucleotide
  Target: LAMA2; (+) strand; PAM type: NRG; PAM sequence: CGG
aattactttttaattcctaa

SEQ ID NO: 161631 - DNA, 20 bp, Artificial Sequence
  Description of Artificial Sequence: Synthetic oligonucleotide
  Target: LAMA2; (+) strand; PAM type: NRG; PAM sequence: CAG
aattcctaacggaacacctt

SEQ ID NO: 161632 - DNA, 20 bp, Artificial Sequence
  Description of Artificial Sequence: Synthetic oligonucleotide
  Target: LAMA2; (+) strand; PAM type: NRG; PAM sequence: TAG
ctctaatactgttctctgta

SEQ ID NO: 161633 - DNA, 20 bp, Artificial Sequence
  Description of Artificial Sequence: Synthetic oligonucleotide
  Target: LAMA2; (+) strand; PAM type: NRG; PAM sequence: CAG
agaaacacacacccatacac

SEQ ID NO: 161634 - DNA, 20 bp, Artificial Sequence
  Description of Artificial Sequence: Synthetic oligonucleotide
  Target: LAMA2; (+) strand; PAM type: NRG; PAM sequence: AAG
catacaccagtaatgtgctg

SEQ ID NO: 161635 - DNA, 20 bp, Artificial Sequence
  Description of Artificial Sequence: Synthetic oligonucleotide
  Target: LAMA2; (+) strand; PAM type: NRG; PAM sequence: CAG
agtaatgtgctgaagtgttg

SEQ ID NO: 161636 - DNA, 20 bp, Artificial Sequence
  Description of Artificial Sequence: Synthetic oligonucleotide
  Target: LAMA2; (+) strand; PAM type: NRG; PAM sequence: TAG
tgctgaagtgttgcagaaaa

SEQ ID NO: 161637 - DNA, 20 bp, Artificial Sequence
  Description of Artificial Sequence: Synthetic oligonucleotide
  Target: LAMA2; (+) strand; PAM type: NRG; PAM sequence: CAG
gcagaaaatagtcccacttt

SEQ ID NO: 161638 - DNA, 20 bp, Artificial Sequence
  Description of Artificial Sequence: Synthetic oligonucleotide
  Target: LAMA2; (+) strand; PAM type: NRG; PAM sequence: TGG
tagtcccactttcagtaaca

SEQ ID NO: 161639 - DNA, 20 bp, Artificial Sequence
  Description of Artificial Sequence: Synthetic oligonucleotide
  Target: LAMA2; (+) strand; PAM type: NRG; PAM sequence: AAG
attttccttacacgtcctgc

SEQ ID NO: 161640 - DNA, 20 bp, Artificial Sequence
  Description of Artificial Sequence: Synthetic oligonucleotide
  Target: LAMA2; (+) strand; PAM type: NRG; PAM sequence: AAG
ctgcaagaaaaaataaataa

SEQ ID NO: 161641 - DNA, 20 bp, Artificial Sequence
  Description of Artificial Sequence: Synthetic oligonucleotide
  Target: LAMA2; (+) strand; PAM type: NRG; PAM sequence: CAG
aagaaaaaataaataaaaga

SEQ ID NO: 161642 - DNA, 20 bp, Artificial Sequence
  Description of Artificial Sequence: Synthetic oligonucleotide
  Target: LAMA2; (+) strand; PAM type: NRG; PAM sequence: TAG
ataaaagacagatgcttctt

SEQ ID NO: 161643 - DNA, 20 bp, Artificial Sequence
  Description of Artificial Sequence: Synthetic oligonucleotide
  Target: LAMA2; (+) strand; PAM type: NRG; PAM sequence: TAG
ttagttattctatttaatta

SEQ ID NO: 161644 - DNA, 20 bp, Artificial Sequence
  Description of Artificial Sequence: Synthetic oligonucleotide
  Target: LAMA2; (+) strand; PAM type: NRG; PAM sequence: GAG
agttattttcctcctgaaat

SEQ ID NO: 161645 - DNA, 20 bp, Artificial Sequence
  Description of Artificial Sequence: Synthetic oligonucleotide
  Target: LAMA2; (+) strand; PAM type: NRG; PAM sequence: TGG
tgaaatgagtttttttatta

SEQ ID NO: 161646 - DNA, 20 bp, Artificial Sequence
  Description of Artificial Sequence: Synthetic oligonucleotide
  Target: LAMA2; (+) strand; PAM type: NRG; PAM sequence: GAG
aaatgagtttttttattatg

SEQ ID NO: 161647 - DNA, 20 bp, Artificial Sequence
  Description of Artificial Sequence: Synthetic oligonucleotide
  Target: LAMA2; (+) strand; PAM type: NRG; PAM sequence: CAG
ttttttattatggagaattt

SEQ ID NO: 161648 - DNA, 20 bp, Artificial Sequence
  Description of Artificial Sequence: Synthetic oligonucleotide
  Target: LAMA2; (+) strand; PAM type: NRG; PAM sequence: AAG
agtcttattaattgctatct

SEQ ID NO: 161649 - DNA, 20 bp, Artificial Sequence
  Description of Artificial Sequence: Synthetic oligonucleotide
  Target: LAMA2; (+) strand; PAM type: NRG; PAM sequence: AAG
tattaattgctatctaagtt

SEQ ID NO: 161650 - DNA, 20 bp, Artificial Sequence
  Description of Artificial Sequence: Synthetic oligonucleotide
  Target: LAMA2; (+) strand; PAM type: NRG; PAM sequence: CAG
tctaagttaagaaaaattcc

SEQ ID NO: 161651 - DNA, 20 bp, Artificial Sequence
  Description of Artificial Sequence: Synthetic oligonucleotide
  Target: LAMA2; (+) strand; PAM type: NRG; PAM sequence: AAG
ttcccagatctcgttatata

SEQ ID NO: 161652 - DNA, 20 bp, Artificial Sequence
  Description of Artificial Sequence: Synthetic oligonucleotide
  Target: LAMA2; (+) strand; PAM type: NRG; PAM sequence: AAG
tatataaagctatctctcca

SEQ ID NO: 161653 - DNA, 20 bp, Artificial Sequence
  Description of Artificial Sequence: Synthetic oligonucleotide
  Target: LAMA2; (+) strand; PAM type: NRG; PAM sequence: AGG
atataaagctatctctccaa

SEQ ID NO: 161654 - DNA, 20 bp, Artificial Sequence
  Description of Artificial Sequence: Synthetic oligonucleotide
  Target: LAMA2; (+) strand; PAM type: NRG; PAM sequence: GGG
tataaagctatctctccaaa

SEQ ID NO: 161655 - DNA, 20 bp, Artificial Sequence
  Description of Artificial Sequence: Synthetic oligonucleotide
  Target: LAMA2; (+) strand; PAM type: NRG; PAM sequence: CAG
aaagctatctctccaaaggg

SEQ ID NO: 161656 - DNA, 20 bp, Artificial Sequence
  Description of Artificial Sequence: Synthetic oligonucleotide
  Target: LAMA2; (+) strand; PAM type: NRG; PAM sequence: GAG
aaagggcagtaactcatctt

SEQ ID NO: 161657 - DNA, 20 bp, Artificial Sequence
  Description of Artificial Sequence: Synthetic oligonucleotide
  Target: LAMA2; (+) strand; PAM type: NRG; PAM sequence: AGG
aagggcagtaactcatcttg

SEQ ID NO: 161658 - DNA, 20 bp, Artificial Sequence
  Description of Artificial Sequence: Synthetic oligonucleotide
  Target: LAMA2; (+) strand; PAM type: NRG; PAM sequence: AAG
gcagtaactcatcttgagga

SEQ ID NO: 161659 - DNA, 20 bp, Artificial Sequence
  Description of Artificial Sequence: Synthetic oligonucleotide
  Target: LAMA2; (+) strand; PAM type: NRG; PAM sequence: GAG
taactcatcttgaggaaagt

SEQ ID NO: 161660 - DNA, 20 bp, Artificial Sequence
  Description of Artificial Sequence: Synthetic oligonucleotide
  Target: LAMA2; (+) strand; PAM type: NRG; PAM sequence: TAG
ggaaagtgagctgaaaataa

SEQ ID NO: 161661 - DNA, 20 bp, Artificial Sequence
  Description of Artificial Sequence: Synthetic oligonucleotide
  Target: LAMA2; (+) strand; PAM type: NRG; PAM sequence: AGG
gaaagtgagctgaaaataat

SEQ ID NO: 161662 - DNA, 20 bp, Artificial Sequence
  Description of Artificial Sequence: Synthetic oligonucleotide
  Target: LAMA2; (+) strand; PAM type: NRG; PAM sequence: CAG
atcattgtatatccttattc

SEQ ID NO: 161663 - DNA, 20 bp, Artificial Sequence
  Description of Artificial Sequence: Synthetic oligonucleotide
  Target: LAMA2; (+) strand; PAM type: NRG; PAM sequence: TGG
attgtatatccttattccag

SEQ ID NO: 161664 - DNA, 20 bp, Artificial Sequence
  Description of Artificial Sequence: Synthetic oligonucleotide
  Target: LAMA2; (+) strand; PAM type: NRG; PAM sequence: AAG
atccttattccagtggcaca

SEQ ID NO: 161665 - DNA, 20 bp, Artificial Sequence
  Description of Artificial Sequence: Synthetic oligonucleotide
  Target: LAMA2; (+) strand; PAM type: NRG; PAM sequence: TAG
gtggcacaaagtcactctct

SEQ ID NO: 161666 - DNA, 20 bp, Artificial Sequence
  Description of Artificial Sequence: Synthetic oligonucleotide
  Target: LAMA2; (+) strand; PAM type: NRG; PAM sequence: TGG
gcacaaagtcactctcttag

SEQ ID NO: 161667 - DNA, 20 bp, Artificial Sequence
  Description of Artificial Sequence: Synthetic oligonucleotide
  Target: LAMA2; (+) strand; PAM type: NRG; PAM sequence: GAG
ctcttagtggtaaacaaaat

SEQ ID NO: 161668 - DNA, 20 bp, Artificial Sequence
  Description of Artificial Sequence: Synthetic oligonucleotide
  Target: LAMA2; (+) strand; PAM type: NRG; PAM sequence: TGG
aaatgagatgtgaatatatg

SEQ ID NO: 161669 - DNA, 20 bp, Artificial Sequence
  Description of Artificial Sequence: Synthetic oligonucleotide
  Target: LAMA2; (+) strand; PAM type: NRG; PAM sequence: AAG
atatatgtggatgtgatcat

SEQ ID NO: 161670 - DNA, 20 bp, Artificial Sequence
  Description of Artificial Sequence: Synthetic oligonucleotide
  Target: LAMA2; (+) strand; PAM type: NRG; PAM sequence: AAG
ataagctctgaatattaaat

SEQ ID NO: 161671 - DNA, 20 bp, Artificial Sequence
  Description of Artificial Sequence: Synthetic oligonucleotide
  Target: LAMA2; (+) strand; PAM type: NRG; PAM sequence: AAG
ctctgaatattaaataagac

SEQ ID NO: 161672 - DNA, 20 bp, Artificial Sequence
  Description of Artificial Sequence: Synthetic oligonucleotide
  Target: LAMA2; (+) strand; PAM type: NRG; PAM sequence: AAG
tgaatattaaataagacaag

SEQ ID NO: 161673 - DNA, 20 bp, Artificial Sequence
  Description of Artificial Sequence: Synthetic oligonucleotide
  Target: LAMA2; (+) strand; PAM type: NRG; PAM sequence: CAG
ttaaataagacaagaagaat

SEQ ID NO: 161674 - DNA, 20 bp, Artificial Sequence
  Description of Artificial Sequence: Synthetic oligonucleotide
  Target: LAMA2; (+) strand; PAM type: NRG; PAM sequence: AGG
taaataagacaagaagaatc

SEQ ID NO: 161675 - DNA, 20 bp, Artificial Sequence
  Description of Artificial Sequence: Synthetic oligonucleotide
  Target: LAMA2; (+) strand; PAM type: NRG; PAM sequence: AAG
agaatcaggttaaaattcaa

SEQ ID NO: 161676 - DNA, 20 bp, Artificial Sequence
  Description of Artificial Sequence: Synthetic oligonucleotide
  Target: LAMA2; (+) strand; PAM type: NRG; PAM sequence: AAG
tttatcaaatgcctctcttg

SEQ ID NO: 161677 - DNA, 20 bp, Artificial Sequence
  Description of Artificial Sequence: Synthetic oligonucleotide
  Target: LAMA2; (+) strand; PAM type: NRG; PAM sequence: AGG
ttatcaaatgcctctcttga

SEQ ID NO: 161678 - DNA, 20 bp, Artificial Sequence
  Description of Artificial Sequence: Synthetic oligonucleotide
  Target: LAMA2; (+) strand; PAM type: NRG; PAM sequence: GGG
tatcaaatgcctctcttgaa

SEQ ID NO: 161679 - DNA, 20 bp, Artificial Sequence
  Description of Artificial Sequence: Synthetic oligonucleotide
  Target: LAMA2; (+) strand; PAM type: NRG; PAM sequence: TGG
tgcctctcttgaagggattt

SEQ ID NO: 161680 - DNA, 20 bp, Artificial Sequence
  Description of Artificial Sequence: Synthetic oligonucleotide
  Target: LAMA2; (+) strand; PAM type: NRG; PAM sequence: GGG
gcctctcttgaagggatttt

SEQ ID NO: 161681 - DNA, 20 bp, Artificial Sequence
  Description of Artificial Sequence: Synthetic oligonucleotide
  Target: LAMA2; (+) strand; PAM type: NRG; PAM sequence: GGG
cctctcttgaagggattttg

SEQ ID NO: 161682 - DNA, 20 bp, Artificial Sequence
  Description of Artificial Sequence: Synthetic oligonucleotide
  Target: LAMA2; (+) strand; PAM type: NRG; PAM sequence: GGG
ctctcttgaagggattttgg

SEQ ID NO: 161683 - DNA, 20 bp, Artificial Sequence
  Description of Artificial Sequence: Synthetic oligonucleotide
  Target: LAMA2; (+) strand; PAM type: NRG; PAM sequence: CAG
ttattgcatattttataata

SEQ ID NO: 161684 - DNA, 20 bp, Artificial Sequence
  Description of Artificial Sequence: Synthetic oligonucleotide
  Target: LAMA2; (+) strand; PAM type: NRG; PAM sequence: TGG
ttaacaaacaattatatctg

SEQ ID NO: 161685 - DNA, 20 bp, Artificial Sequence
  Description of Artificial Sequence: Synthetic oligonucleotide
  Target: LAMA2; (+) strand; PAM type: NRG; PAM sequence: TGG
caaacaattatatctgtggt

SEQ ID NO: 161686 - DNA, 20 bp, Artificial Sequence
  Description of Artificial Sequence: Synthetic oligonucleotide
  Target: LAMA2; (+) strand; PAM type: NRG; PAM sequence: AAG
gtggttggcaatattcttct

SEQ ID NO: 161687 - DNA, 20 bp, Artificial Sequence
  Description of Artificial Sequence: Synthetic oligonucleotide
  Target: LAMA2; (+) strand; PAM type: NRG; PAM sequence: CAG
gttggcaatattcttctaag

SEQ ID NO: 161688 - DNA, 20 bp, Artificial Sequence
  Description of Artificial Sequence: Synthetic oligonucleotide
  Target: LAMA2; (+) strand; PAM type: NRG; PAM sequence: AAG
gcagtatttatacaactcat

SEQ ID NO: 161689 - DNA, 20 bp, Artificial Sequence
  Description of Artificial Sequence: Synthetic oligonucleotide
  Target: LAMA2; (+) strand; PAM type: NRG; PAM sequence: AAG
ataaaatcttttgtgaatat

SEQ ID NO: 161690 - DNA, 20 bp, Artificial Sequence
  Description of Artificial Sequence: Synthetic oligonucleotide
  Target: LAMA2; (+) strand; PAM type: NRG; PAM sequence: TAG
aacatcaaatctatgaatta

SEQ ID NO: 161691 - DNA, 20 bp, Artificial Sequence
  Description of Artificial Sequence: Synthetic oligonucleotide
  Target: LAMA2; (+) strand; PAM type: NRG; PAM sequence: AAG
atctatgaattatagtacct

SEQ ID NO: 161692 - DNA, 20 bp, Artificial Sequence
  Description of Artificial Sequence: Synthetic oligonucleotide
  Target: LAMA2; (+) strand; PAM type: NRG; PAM sequence: TAG
ctaagtacctatacattttc

SEQ ID NO: 161693 - DNA, 20 bp, Artificial Sequence
  Description of Artificial Sequence: Synthetic oligonucleotide
  Target: LAMA2; (+) strand; PAM type: NRG; PAM sequence: TAG
tatacattttctagaaaact

SEQ ID NO: 161694 - DNA, 20 bp, Artificial Sequence
  Description of Artificial Sequence: Synthetic oligonucleotide
  Target: LAMA2; (+) strand; PAM type: NRG; PAM sequence: TGG
atgtatctgcaccaaattaa

SEQ ID NO: 161695 - DNA, 20 bp, Artificial Sequence
  Description of Artificial Sequence: Synthetic oligonucleotide
  Target: LAMA2; (+) strand; PAM type: NRG; PAM sequence: CAG
ccaaattaatggctctgccc

SEQ ID NO: 161696 - DNA, 20 bp, Artificial Sequence
  Description of Artificial Sequence: Synthetic oligonucleotide
  Target: LAMA2; (+) strand; PAM type: NRG; PAM sequence: TGG
taatggctctgccccagaat

SEQ ID NO: 161697 - DNA, 20 bp, Artificial Sequence
  Description of Artificial Sequence: Synthetic oligonucleotide
  Target: LAMA2; (+) strand; PAM type: NRG; PAM sequence: GGG
aatggctctgccccagaatt

SEQ ID NO: 161698 - DNA, 20 bp, Artificial Sequence
  Description of Artificial Sequence: Synthetic oligonucleotide
  Target: LAMA2; (+) strand; PAM type: NRG; PAM sequence: AAG
cccagaattgggatttgtta

SEQ ID NO: 161699 - DNA, 20 bp, Artificial Sequence
  Description of Artificial Sequence: Synthetic oligonucleotide
  Target: LAMA2; (+) strand; PAM type: NRG; PAM sequence: TGG
gtactctcaatataatgtac

SEQ ID NO: 161700 - DNA, 20 bp, Artificial Sequence
  Description of Artificial Sequence: Synthetic oligonucleotide
  Target: LAMA2; (+) strand; PAM type: NRG; PAM sequence: TGG
taaaccatttttatttcaaa

SEQ ID NO: 161701 - DNA, 20 bp, Artificial Sequence
  Description of Artificial Sequence: Synthetic oligonucleotide
  Target: LAMA2; (+) strand; PAM type: NRG; PAM sequence: TAG
accatttttatttcaaatgg

SEQ ID NO: 161702 - DNA, 20 bp, Artificial Sequence
  Description of Artificial Sequence: Synthetic oligonucleotide
  Target: LAMA2; (+) strand; PAM type: NRG; PAM sequence: GAG
catttttatttcaaatggta

SEQ ID NO: 161703 - DNA, 20 bp, Artificial Sequence
  Description of Artificial Sequence: Synthetic oligonucleotide
  Target: LAMA2; (+) strand; PAM type: NRG; PAM sequence: GAG
tttttatttcaaatggtaga

SEQ ID NO: 161704 - DNA, 20 bp, Artificial Sequence
  Description of Artificial Sequence: Synthetic oligonucleotide
  Target: LAMA2; (+) strand; PAM type: NRG; PAM sequence: GAG
aataatgactgcatatctgt

SEQ ID NO: 161705 - DNA, 20 bp, Artificial Sequence
  Description of Artificial Sequence: Synthetic oligonucleotide
  Target: LAMA2; (+) strand; PAM type: NRG; PAM sequence: TAG
aatgactgcatatctgtgag

SEQ ID NO: 161706 - DNA, 20 bp, Artificial Sequence
  Description of Artificial Sequence: Synthetic oligonucleotide
  Target: LAMA2; (+) strand; PAM type: NRG; PAM sequence: GAG
ctgcatatctgtgagtagat

SEQ ID NO: 161707 - DNA, 20 bp, Artificial Sequence
  Description of Artificial Sequence: Synthetic oligonucleotide
  Target: LAMA2; (+) strand; PAM type: NRG; PAM sequence: AAG
ctgtgagtagatgagcataa

SEQ ID NO: 161708 - DNA, 20 bp, Artificial Sequence
  Description of Artificial Sequence: Synthetic oligonucleotide
  Target: LAMA2; (+) strand; PAM type: NRG; PAM sequence: TGG
tgagtagatgagcataaaag

SEQ ID NO: 161709 - DNA, 20 bp, Artificial Sequence
  Description of Artificial Sequence: Synthetic oligonucleotide
  Target: LAMA2; (+) strand; PAM type: NRG; PAM sequence: GAG
cataaaagtggtgtactact

SEQ ID NO: 161710 - DNA, 20 bp, Artificial Sequence
  Description of Artificial Sequence: Synthetic oligonucleotide
  Target: LAMA2; (+) strand; PAM type: NRG; PAM sequence: AGG
ataaaagtggtgtactactg

SEQ ID NO: 161711 - DNA, 20 bp, Artificial Sequence
  Description of Artificial Sequence: Synthetic oligonucleotide
  Target: LAMA2; (+) strand; PAM type: NRG; PAM sequence: AAG
aattttgacacttgctgcaa

SEQ ID NO: 161712 - DNA, 20 bp, Artificial Sequence
  Description of Artificial Sequence: Synthetic oligonucleotide
  Target: LAMA2; (+) strand; PAM type: NRG; PAM sequence: TGG
tgctgcaaaagactttatct

SEQ ID NO: 161713 - DNA, 20 bp, Artificial Sequence
  Description of Artificial Sequence: Synthetic oligonucleotide
  Target: LAMA2; (+) strand; PAM type: NRG; PAM sequence: AAG
gcaaaagactttatcttggt

SEQ ID NO: 161714 - DNA, 20 bp, Artificial Sequence
  Description of Artificial Sequence: Synthetic oligonucleotide
  Target: LAMA2; (+) strand; PAM type: NRG; PAM sequence: TGG
aagactttatcttggtaaga

SEQ ID NO: 161715 - DNA, 20 bp, Artificial Sequence
  Description of Artificial Sequence: Synthetic oligonucleotide
  Target: LAMA2; (+) strand; PAM type: NRG; PAM sequence: AAG
tttatcttggtaagatggca

SEQ ID NO: 161716 - DNA, 20 bp, Artificial Sequence
  Description of Artificial Sequence: Synthetic oligonucleotide
  Target: LAMA2; (+) strand; PAM type: NRG; PAM sequence: CAG
tggtaagatggcaaagataa

SEQ ID NO: 161717 - DNA, 20 bp, Artificial Sequence
  Description of Artificial Sequence: Synthetic oligonucleotide
  Target: LAMA2; (+) strand; PAM type: NRG; PAM sequence: GAG
gtaagatggcaaagataaca

SEQ ID NO: 161718 - DNA, 20 bp, Artificial Sequence
  Description of Artificial Sequence: Synthetic oligonucleotide
  Target: LAMA2; (+) strand; PAM type: NRG; PAM sequence: TAG
gatggcaaagataacagagc

SEQ ID NO: 161719 - DNA, 20 bp, Artificial Sequence
  Description of Artificial Sequence: Synthetic oligonucleotide
  Target: LAMA2; (+) strand; PAM type: NRG; PAM sequence: AAG
aacagagctagcctgaccat

SEQ ID NO: 161720 - DNA, 20 bp, Artificial Sequence
  Description of Artificial Sequence: Synthetic oligonucleotide
  Target: LAMA2; (+) strand; PAM type: NRG; PAM sequence: CAG
gctagcctgaccataagatt

SEQ ID NO: 161721 - DNA, 20 bp, Artificial Sequence
  Description of Artificial Sequence: Synthetic oligonucleotide
  Target: LAMA2; (+) strand; PAM type: NRG; PAM sequence: TGG
gccctgttctgtttctcctt

SEQ ID NO: 161722 - DNA, 20 bp, Artificial Sequence
  Description of Artificial Sequence: Synthetic oligonucleotide
  Target: LAMA2; (+) strand; PAM type: NRG; PAM sequence: TGG
tgtttctcctttggcaaatg

SEQ ID NO: 161723 - DNA, 20 bp, Artificial Sequence
  Description of Artificial Sequence: Synthetic oligonucleotide
  Target: LAMA2; (+) strand; PAM type: NRG; PAM sequence: TAG
ctcctttggcaaatgtggct

SEQ ID NO: 161724 - DNA, 20 bp, Artificial Sequence
  Description of Artificial Sequence: Synthetic oligonucleotide
  Target: LAMA2; (+) strand; PAM type: NRG; PAM sequence: AAG
ggcaaatgtggcttagtata

SEQ ID NO: 161725 - DNA, 20 bp, Artificial Sequence
  Description of Artificial Sequence: Synthetic oligonucleotide
  Target: LAMA2; (+) strand; PAM type: NRG; PAM sequence: GAG
tgtggcttagtataaagtgt

SEQ ID NO: 161726 - DNA, 20 bp, Artificial Sequence
  Description of Artificial Sequence: Synthetic oligonucleotide
  Target: LAMA2; (+) strand; PAM type: NRG; PAM sequence: AAG
gtgtgagcaaatgtcattga

SEQ ID NO: 161727 - DNA, 20 bp, Artificial Sequence
  Description of Artificial Sequence: Synthetic oligonucleotide
  Target: LAMA2; (+) strand; PAM type: NRG; PAM sequence: GAG
gtgagcaaatgtcattgaaa

SEQ ID NO: 161728 - DNA, 20 bp, Artificial Sequence
  Description of Artificial Sequence: Synthetic oligonucleotide
  Target: LAMA2; (+) strand; PAM type: NRG; PAM sequence: AAG
agcaaatgtcattgaaagag

SEQ ID NO: 161729 - DNA, 20 bp, Artificial Sequence
  Description of Artificial Sequence: Synthetic oligonucleotide
  Target: LAMA2; (+) strand; PAM type: NRG; PAM sequence: CAG
aatgtcattgaaagagaaga

SEQ ID NO: 161730 - DNA, 20 bp, Artificial Sequence
  Description of Artificial Sequence: Synthetic oligonucleotide
  Target: LAMA2; (+) strand; PAM type: NRG; PAM sequence: GAG
tgtcattgaaagagaagaca

SEQ ID NO: 161731 - DNA, 20 bp, Artificial Sequence
  Description of Artificial Sequence: Synthetic oligonucleotide
  Target: LAMA2; (+) strand; PAM type: NRG; PAM sequence: CAG
cattgaaagagaagacagag

SEQ ID NO: 161732 - DNA, 20 bp, Artificial Sequence
  Description of Artificial Sequence: Synthetic oligonucleotide
  Target: LAMA2; (+) strand; PAM type: NRG; PAM sequence: TAG
aagacagagcagaatataaa

SEQ ID NO: 161733 - DNA, 20 bp, Artificial Sequence
  Description of Artificial Sequence: Synthetic oligonucleotide
  Target: LAMA2; (+) strand; PAM type: NRG; PAM sequence: AGG
agacagagcagaatataaat

SEQ ID NO: 161734 - DNA, 20 bp, Artificial Sequence
  Description of Artificial Sequence: Synthetic oligonucleotide
  Target: LAMA2; (+) strand; PAM type: NRG; PAM sequence: AAG
tataaataggcgctgcctat

SEQ ID NO: 161735 - DNA, 20 bp, Artificial Sequence
  Description of Artificial Sequence: Synthetic oligonucleotide
  Target: LAMA2; (+) strand; PAM type: NRG; PAM sequence: AGG
ataaataggcgctgcctata

SEQ ID NO: 161736 - DNA, 20 bp, Artificial Sequence
  Description of Artificial Sequence: Synthetic oligonucleotide
  Target: LAMA2; (+) strand; PAM type: NRG; PAM sequence: TAG
aggacgtttctgcacacctg

SEQ ID NO: 161737 - DNA, 20 bp, Artificial Sequence
  Description of Artificial Sequence: Synthetic oligonucleotide
  Target: LAMA2; (+) strand; PAM type: NRG; PAM sequence: CAG
acgtttctgcacacctgtag

SEQ ID NO: 161738 - DNA, 20 bp, Artificial Sequence
  Description of Artificial Sequence: Synthetic oligonucleotide
  Target: LAMA2; (+) strand; PAM type: NRG; PAM sequence: AAG
ttctgcacacctgtagcagt

SEQ ID NO: 161739 - DNA, 20 bp, Artificial Sequence
  Description of Artificial Sequence: Synthetic oligonucleotide
  Target: LAMA2; (+) strand; PAM type: NRG; PAM sequence: TAG
gcattttaaaacataacatt

SEQ ID NO: 161740 - DNA, 20 bp, Artificial Sequence
  Description of Artificial Sequence: Synthetic oligonucleotide
  Target: LAMA2; (+) strand; PAM type: NRG; PAM sequence: AGG
cattttaaaacataacattt

SEQ ID NO: 161741 - DNA, 20 bp, Artificial Sequence
  Description of Artificial Sequence: Synthetic oligonucleotide
  Target: LAMA2; (+) strand; PAM type: NRG; PAM sequence: CAG
ttaaaacataacatttaggt

SEQ ID NO: 161742 - DNA, 20 bp, Artificial Sequence
  Description of Artificial Sequence: Synthetic oligonucleotide
  Target: LAMA2; (+) strand; PAM type: NRG; PAM sequence: GAG
aaaacataacatttaggtca

SEQ ID NO: 161743 - DNA, 20 bp, Artificial Sequence
  Description of Artificial Sequence: Synthetic oligonucleotide
  Target: LAMA2; (+) strand; PAM type: NRG; PAM sequence: TAG
aatataatatattatataaa

SEQ ID NO: 161744 - DNA, 20 bp, Artificial Sequence
  Description of Artificial Sequence: Synthetic oligonucleotide
  Target: LAMA2; (+) strand; PAM type: NRG; PAM sequence: TAG
tatataatatataatataaa

SEQ ID NO: 161745 - DNA, 20 bp, Artificial Sequence
  Description of Artificial Sequence: Synthetic oligonucleotide
  Target: LAMA2; (+) strand; PAM type: NRG; PAM sequence: TGG
tatataatataaatagtttt

SEQ ID NO: 161746 - DNA, 20 bp, Artificial Sequence
  Description of Artificial Sequence: Synthetic oligonucleotide
  Target: LAMA2; (+) strand; PAM type: NRG; PAM sequence: AAG
taatataaatagtttttggt

SEQ ID NO: 161747 - DNA, 20 bp, Artificial Sequence
  Description of Artificial Sequence: Synthetic oligonucleotide
  Target: LAMA2; (+) strand; PAM type: NRG; PAM sequence: AAG
ataaatagtttttggtaaga

SEQ ID NO: 161748 - DNA, 20 bp, Artificial Sequence
  Description of Artificial Sequence: Synthetic oligonucleotide
  Target: LAMA2; (+) strand; PAM type: NRG; PAM sequence: AAG
atagtttttggtaagaaaga

SEQ ID NO: 161749 - DNA, 20 bp, Artificial Sequence
  Description of Artificial Sequence: Synthetic oligonucleotide
  Target: LAMA2; (+) strand; PAM type: NRG; PAM sequence: GAG
agtttttggtaagaaagaaa

SEQ ID NO: 161750 - DNA, 20 bp, Artificial Sequence
  Description of Artificial Sequence: Synthetic oligonucleotide
  Target: LAMA2; (+) strand; PAM type: NRG; PAM sequence: CAG
ttttggtaagaaagaaagag

SEQ ID NO: 161751 - DNA, 20 bp, Artificial Sequence
  Description of Artificial Sequence: Synthetic oligonucleotide
  Target: LAMA2; (+) strand; PAM type: NRG; PAM sequence: AGG
tttggtaagaaagaaagagc

SEQ ID NO: 161752 - DNA, 20 bp, Artificial Sequence
  Description of Artificial Sequence: Synthetic oligonucleotide
  Target: LAMA2; (+) strand; PAM type: NRG; PAM sequence: GAG
tggtaagaaagaaagagcag

SEQ ID NO: 161753 - DNA, 20 bp, Artificial Sequence
  Description of Artificial Sequence: Synthetic oligonucleotide
  Target: LAMA2; (+) strand; PAM type: NRG; PAM sequence: AAG
gaaagaaagagcaggagaca

SEQ ID NO: 161754 - DNA, 20 bp, Artificial Sequence
  Description of Artificial Sequence: Synthetic oligonucleotide
  Target: LAMA2; (+) strand; PAM type: NRG; PAM sequence: AAG
gaaagagcaggagacaaaga

SEQ ID NO: 161755 - DNA, 20 bp, Artificial Sequence
  Description of Artificial Sequence: Synthetic oligonucleotide
  Target: LAMA2; (+) strand; PAM type: NRG; PAM sequence: AAG
gagcaggagacaaagaaaga

SEQ ID NO: 161756 - DNA, 20 bp, Artificial Sequence
  Description of Artificial Sequence: Synthetic oligonucleotide
  Target: LAMA2; (+) strand; PAM type: NRG; PAM sequence: CAG
gagacaaagaaagaaagaaa

SEQ ID NO: 161757 - DNA, 20 bp, Artificial Sequence
  Description of Artificial Sequence: Synthetic oligonucleotide
  Target: LAMA2; (+) strand; PAM type: NRG; PAM sequence: GAG
gacaaagaaagaaagaaaca

SEQ ID NO: 161758 - DNA, 20 bp, Artificial Sequence
  Description of Artificial Sequence: Synthetic oligonucleotide
  Target: LAMA2; (+) strand; PAM type: NRG; PAM sequence: GAG
caaagaaagaaagaaacaga

SEQ ID NO: 161759 - DNA, 20 bp, Artificial Sequence
  Description of Artificial Sequence: Synthetic oligonucleotide
  Target: LAMA2; (+) strand; PAM type: NRG; PAM sequence: AGG
aaagaaagaaagaaacagag

SEQ ID NO: 161760 - DNA, 20 bp, Artificial Sequence
  Description of Artificial Sequence: Synthetic oligonucleotide
  Target: LAMA2; (+) strand; PAM type: NRG; PAM sequence: AAG
gaaagaaagaaacagagagg

SEQ ID NO: 161761 - DNA, 20 bp, Artificial Sequence
  Description of Artificial Sequence: Synthetic oligonucleotide
  Target: LAMA2; (+) strand; PAM type: NRG; PAM sequence: AGG
aaagaaagaaacagagagga

SEQ ID NO: 161762 - DNA, 20 bp, Artificial Sequence
  Description of Artificial Sequence: Synthetic oligonucleotide
  Target: LAMA2; (+) strand; PAM type: NRG; PAM sequence: AAG
gaaagaaacagagaggaagg

SEQ ID NO: 161763 - DNA, 20 bp, Artificial Sequence
  Description of Artificial Sequence: Synthetic oligonucleotide
  Target: LAMA2; (+) strand; PAM type: NRG; PAM sequence: AGG
aaagaaacagagaggaagga

SEQ ID NO: 161764 - DNA, 20 bp, Artificial Sequence
  Description of Artificial Sequence: Synthetic oligonucleotide
  Target: LAMA2; (+) strand; PAM type: NRG; PAM sequence: AAG
gaaacagagaggaaggaagg

SEQ ID NO: 161765 - DNA, 20 bp, Artificial Sequence
  Description of Artificial Sequence: Synthetic oligonucleotide
  Target: LAMA2; (+) strand; PAM type: NRG; PAM sequence: AGG
aaacagagaggaaggaagga

SEQ ID NO: 161766 - DNA, 20 bp, Artificial Sequence
  Description of Artificial Sequence: Synthetic oligonucleotide
  Target: LAMA2; (+) strand; PAM type: NRG; PAM sequence: AAG
cagagaggaaggaaggaagg

SEQ ID NO: 161767 - DNA, 20 bp, Artificial Sequence
  Description of Artificial Sequence: Synthetic oligonucleotide
  Target: LAMA2; (+) strand; PAM type: NRG; PAM sequence: AGG
agagaggaaggaaggaagga

SEQ ID NO: 161768 - DNA, 20 bp, Artificial Sequence
  Description of Artificial Sequence: Synthetic oligonucleotide
  Target: LAMA2; (+) strand; PAM type: NRG; PAM sequence: GGG
gagaggaaggaaggaaggaa

SEQ ID NO: 161769 - DNA, 20 bp, Artificial Sequence
  Description of Artificial Sequence: Synthetic oligonucleotide
  Target: LAMA2; (+) strand; PAM type: NRG; PAM sequence: GAG
gaggaaggaaggaaggaagg

SEQ ID NO: 161770 - DNA, 20 bp, Artificial Sequence
  Description of Artificial Sequence: Synthetic oligonucleotide
  Target: LAMA2; (+) strand; PAM type: NRG; PAM sequence: AGG
aggaaggaaggaaggaaggg

SEQ ID NO: 161771 - DNA, 20 bp, Artificial Sequence
  Description of Artificial Sequence: Synthetic oligonucleotide
  Target: LAMA2; (+) strand; PAM type: NRG; PAM sequence: AAG
aggaaggaaggaagggagga

SEQ ID NO: 161772 - DNA, 20 bp, Artificial Sequence
  Description of Artificial Sequence: Synthetic oligonucleotide
  Target: LAMA2; (+) strand; PAM type: NRG; PAM sequence: GAG
gaaggaaggaagggaggaaa

SEQ ID NO: 161773 - DNA, 20 bp, Artificial Sequence
  Description of Artificial Sequence: Synthetic oligonucleotide
  Target: LAMA2; (+) strand; PAM type: NRG; PAM sequence: AGG
aaggaaggaagggaggaaag

SEQ ID NO: 161774 - DNA, 20 bp, Artificial Sequence
  Description of Artificial Sequence: Synthetic oligonucleotide
  Target: LAMA2; (+) strand; PAM type: NRG; PAM sequence: GGG
aggaaggaagggaggaaaga

SEQ ID NO: 161775 - DNA, 20 bp, Artificial Sequence
  Description of Artificial Sequence: Synthetic oligonucleotide
  Target: LAMA2; (+) strand; PAM type: NRG; PAM sequence: AAG
aaggaagggaggaaagaggg

SEQ ID NO: 161776 - DNA, 20 bp, Artificial Sequence
  Description of Artificial Sequence: Synthetic oligonucleotide
  Target: LAMA2; (+) strand; PAM type: NRG; PAM sequence: AGG
aggaagggaggaaagaggga

SEQ ID NO: 161777 - DNA, 20 bp, Artificial Sequence
  Description of Artificial Sequence: Synthetic oligonucleotide
  Target: LAMA2; (+) strand; PAM type: NRG; PAM sequence: GAG
gaagggaggaaagagggaag

SEQ ID NO: 161778 - DNA, 20 bp, Artificial Sequence
  Description of Artificial Sequence: Synthetic oligonucleotide
  Target: LAMA2; (+) strand; PAM type: NRG; PAM sequence: AGG
aagggaggaaagagggaagg

SEQ ID NO: 161779 - DNA, 20 bp, Artificial Sequence
  Description of Artificial Sequence: Synthetic oligonucleotide
  Target: LAMA2; (+) strand; PAM type: NRG; PAM sequence: GGG
agggaggaaagagggaagga

SEQ ID NO: 161780 - DNA, 20 bp, Artificial Sequence
  Description of Artificial Sequence: Synthetic oligonucleotide
  Target: LAMA2; (+) strand; PAM type: NRG; PAM sequence: GAG
ggaggaaagagggaaggagg

SEQ ID NO: 161781 - DNA, 20 bp, Artificial Sequence
  Description of Artificial Sequence: Synthetic oligonucleotide
  Target: LAMA2; (+) strand; PAM type: NRG; PAM sequence: GAG
aggaaagagggaaggaggga

SEQ ID NO: 161782 - DNA, 20 bp, Artificial Sequence
  Description of Artificial Sequence: Synthetic oligonucleotide
  Target: LAMA2; (+) strand; PAM type: NRG; PAM sequence: GAG
gaaagagggaaggagggaga

SEQ ID NO: 161783 - DNA, 20 bp, Artificial Sequence
  Description of Artificial Sequence: Synthetic oligonucleotide
  Target: LAMA2; (+) strand; PAM type: NRG; PAM sequence: AGG
aaagagggaaggagggagag

SEQ ID NO: 161784 - DNA, 20 bp, Artificial Sequence
  Description of Artificial Sequence: Synthetic oligonucleotide
  Target: LAMA2; (+) strand; PAM type: NRG; PAM sequence: GGG
aagagggaaggagggagaga

SEQ ID NO: 161785 - DNA, 20 bp, Artificial Sequence
  Description of Artificial Sequence: Synthetic oligonucleotide
  Target: LAMA2; (+) strand; PAM type: NRG; PAM sequence: GAG
gagggaaggagggagagagg

SEQ ID NO: 161786 - DNA, 20 bp, Artificial Sequence
  Description of Artificial Sequence: Synthetic oligonucleotide
  Target: LAMA2; (+) strand; PAM type: NRG; PAM sequence: AGG
agggaaggagggagagaggg

SEQ ID NO: 161787 - DNA, 20 bp, Artificial Sequence
  Description of Artificial Sequence: Synthetic oligonucleotide
  Target: LAMA2; (+) strand; PAM type: NRG; PAM sequence: GGG
gggaaggagggagagaggga

SEQ ID NO: 161788 - DNA, 20 bp, Artificial Sequence
  Description of Artificial Sequence: Synthetic oligonucleotide
  Target: LAMA2; (+) strand; PAM type: NRG; PAM sequence: GAG
gaaggagggagagagggagg

SEQ ID NO: 161789 - DNA, 20 bp, Artificial Sequence
  Description of Artificial Sequence: Synthetic oligonucleotide
  Target: LAMA2; (+) strand; PAM type: NRG; PAM sequence: AGG
aaggagggagagagggaggg

SEQ ID NO: 161790 - DNA, 20 bp, Artificial Sequence
  Description of Artificial Sequence: Synthetic oligonucleotide
  Target: LAMA2; (+) strand; PAM type: NRG; PAM sequence: GGG
aggagggagagagggaggga

SEQ ID NO: 161791 - DNA, 20 bp, Artificial Sequence
  Description of Artificial Sequence: Synthetic oligonucleotide
  Target: LAMA2; (+) strand; PAM type: NRG; PAM sequence: GAG
gagggagagagggagggagg

SEQ ID NO: 161792 - DNA, 20 bp, Artificial Sequence
  Description of Artificial Sequence: Synthetic oligonucleotide
  Target: LAMA2; (+) strand; PAM type: NRG; PAM sequence: AGG
agggagagagggagggaggg

SEQ ID NO: 161793 - DNA, 20 bp, Artificial Sequence
  Description of Artificial Sequence: Synthetic oligonucleotide
  Target: LAMA2; (+) strand; PAM type: NRG; PAM sequence: GGG
gggagagagggagggaggga

SEQ ID NO: 161794 - DNA, 20 bp, Artificial Sequence
  Description of Artificial Sequence: Synthetic oligonucleotide
  Target: LAMA2; (+) strand; PAM type: NRG; PAM sequence: GAG
gagagagggagggagggagg

SEQ ID NO: 161795 - DNA, 20 bp, Artificial Sequence
  Description of Artificial Sequence: Synthetic oligonucleotide
  Target: LAMA2; (+) strand; PAM type: NRG; PAM sequence: AGG
agagagggagggagggaggg

SEQ ID NO: 161796 - DNA, 20 bp, Artificial Sequence
  Description of Artificial Sequence: Synthetic oligonucleotide
  Target: LAMA2; (+) strand; PAM type: NRG; PAM sequence: AAG
gagggagggagggagggagg

SEQ ID NO: 161797 - DNA, 20 bp, Artificial Sequence
  Description of Artificial Sequence: Synthetic oligonucleotide
  Target: LAMA2; (+) strand; PAM type: NRG; PAM sequence: AGG
agggagggagggagggagga

SEQ ID NO: 161798 - DNA, 20 bp, Artificial Sequence
  Description of Artificial Sequence: Synthetic oligonucleotide
  Target: LAMA2; (+) strand; PAM type: NRG; PAM sequence: AAG
gagggagggagggaggaagg

SEQ ID NO: 161799 - DNA, 20 bp, Artificial Sequence
  Description of Artificial Sequence: Synthetic oligonucleotide
  Target: LAMA2; (+) strand; PAM type: NRG; PAM sequence: AGG
agggagggagggaggaagga

SEQ ID NO: 161800 - DNA, 20 bp, Artificial Sequence
  Description of Artificial Sequence: Synthetic oligonucleotide
  Target: LAMA2; (+) strand; PAM type: NRG; PAM sequence: AAG
gagggagggaggaaggaagg

SEQ ID NO: 161801 - DNA, 20 bp, Artificial Sequence
  Description of Artificial Sequence: Synthetic oligonucleotide
  Target: LAMA2; (+) strand; PAM type: NRG; PAM sequence: AAG
gagggaggaaggaaggaagc

SEQ ID NO: 161802 - DNA, 20 bp, Artificial Sequence
  Description of Artificial Sequence: Synthetic oligonucleotide
  Target: LAMA2; (+) strand; PAM type: NRG; PAM sequence: AGG
agggaggaaggaaggaagca

SEQ ID NO: 161803 - DNA, 20 bp, Artificial Sequence
  Description of Artificial Sequence: Synthetic oligonucleotide
  Target: LAMA2; (+) strand; PAM type: NRG; PAM sequence: AAG
gaggaaggaaggaagcaagg

SEQ ID NO: 161804 - DNA, 20 bp, Artificial Sequence
  Description of Artificial Sequence: Synthetic oligonucleotide
  Target: LAMA2; (+) strand; PAM type: NRG; PAM sequence: AGG
aggaaggaaggaagcaagga

SEQ ID NO: 161805 - DNA, 20 bp, Artificial Sequence
  Description of Artificial Sequence: Synthetic oligonucleotide
  Target: LAMA2; (+) strand; PAM type: NRG; PAM sequence: AAG
aaggaaggaagcaaggaagg

SEQ ID NO: 161806 - DNA, 20 bp, Artificial Sequence
  Description of Artificial Sequence: Synthetic oligonucleotide
  Target: LAMA2; (+) strand; PAM type: NRG; PAM sequence: AGG
aggaaggaagcaaggaagga

SEQ ID NO: 161807 - DNA, 20 bp, Artificial Sequence
  Description of Artificial Sequence: Synthetic oligonucleotide
  Target: LAMA2; (+) strand; PAM type: NRG; PAM sequence: AAG
aaggaagcaaggaaggaagg

SEQ ID NO: 161808 - DNA, 20 bp, Artificial Sequence
  Description of Artificial Sequence: Synthetic oligonucleotide
  Target: LAMA2; (+) strand; PAM type: NRG; PAM sequence: AGG
aggaagcaaggaaggaagga

SEQ ID NO: 161809 - DNA, 20 bp, Artificial Sequence
  Description of Artificial Sequence: Synthetic oligonucleotide
  Target: LAMA2; (+) strand; PAM type: NRG; PAM sequence: GGG
ggaagcaaggaaggaaggaa

SEQ ID NO: 161810 - DNA, 20 bp, Artificial Sequence
  Description of Artificial Sequence: Synthetic oligonucleotide
  Target: LAMA2; (+) strand; PAM type: NRG; PAM sequence: GAG
aagcaaggaaggaaggaagg

SEQ ID NO: 161811 - DNA, 20 bp, Artificial Sequence
  Description of Artificial Sequence: Synthetic oligonucleotide
  Target: LAMA2; (+) strand; PAM type: NRG; PAM sequence: AGG
agcaaggaaggaaggaaggg

SEQ ID NO: 161812 - DNA, 20 bp, Artificial Sequence
  Description of Artificial Sequence: Synthetic oligonucleotide
  Target: LAMA2; (+) strand; PAM type: NRG; PAM sequence: AAG
aggaaggaaggaagggagga

SEQ ID NO: 161813 - DNA, 20 bp, Artificial Sequence
  Description of Artificial Sequence: Synthetic oligonucleotide
  Target: LAMA2; (+) strand; PAM type: NRG; PAM sequence: GAG
gaaggaaggaagggaggaaa

SEQ ID NO: 161814 - DNA, 20 bp, Artificial Sequence
  Description of Artificial Sequence: Synthetic oligonucleotide
  Target: LAMA2; (+) strand; PAM type: NRG; PAM sequence: AGG
aaggaaggaagggaggaaag

SEQ ID NO: 161815 - DNA, 20 bp, Artificial Sequence
  Description of Artificial Sequence: Synthetic oligonucleotide
  Target: LAMA2; (+) strand; PAM type: NRG; PAM sequence: GGG
aggaaggaagggaggaaaga

SEQ ID NO: 161816 - DNA, 20 bp, Artificial Sequence
  Description of Artificial Sequence: Synthetic oligonucleotide
  Target: LAMA2; (+) strand; PAM type: NRG; PAM sequence: GAG
gaaggaagggaggaaagagg

SEQ ID NO: 161817 - DNA, 20 bp, Artificial Sequence
  Description of Artificial Sequence: Synthetic oligonucleotide
  Target: LAMA2; (+) strand; PAM type: NRG; PAM sequence: AGG
aaggaagggaggaaagaggg

SEQ ID NO: 161818 - DNA, 20 bp, Artificial Sequence
  Description of Artificial Sequence: Synthetic oligonucleotide
  Target: LAMA2; (+) strand; PAM type: NRG; PAM sequence: GGG
aggaagggaggaaagaggga

SEQ ID NO: 161819 - DNA, 20 bp, Artificial Sequence
  Description of Artificial Sequence: Synthetic oligonucleotide
  Target: LAMA2; (+) strand; PAM type: NRG; PAM sequence: GAG
gaagggaggaaagagggagg

SEQ ID NO: 161820 - DNA, 20 bp, Artificial Sequence
  Description of Artificial Sequence: Synthetic oligonucleotide
  Target: LAMA2; (+) strand; PAM type: NRG; PAM sequence: AGG
aagggaggaaagagggaggg

SEQ ID NO: 161821 - DNA, 20 bp, Artificial Sequence
  Description of Artificial Sequence: Synthetic oligonucleotide
  Target: LAMA2; (+) strand; PAM type: NRG; PAM sequence: GGG
agggaggaaagagggaggga

SEQ ID NO: 161822 - DNA, 20 bp, Artificial Sequence
  Description of Artificial Sequence: Synthetic oligonucleotide
  Target: LAMA2; (+) strand; PAM type: NRG; PAM sequence: AAG
gaggaaagagggagggaggg

SEQ ID NO: 161823 - DNA, 20 bp, Artificial Sequence
  Description of Artificial Sequence: Synthetic oligonucleotide
  Target: LAMA2; (+) strand; PAM type: NRG; PAM sequence: AGG
aggaaagagggagggaggga

SEQ ID NO: 161824 - DNA, 20 bp, Artificial Sequence
  Description of Artificial Sequence: Synthetic oligonucleotide
  Target: LAMA2; (+) strand; PAM type: NRG; PAM sequence: GAG
gaaagagggagggagggaag

SEQ ID NO: 161825 - DNA, 20 bp, Artificial Sequence
  Description of Artificial Sequence: Synthetic oligonucleotide
  Target: LAMA2; (+) strand; PAM type: NRG; PAM sequence: AGG
aaagagggagggagggaagg

SEQ ID NO: 161826 - DNA, 20 bp, Artificial Sequence
  Description of Artificial Sequence: Synthetic oligonucleotide
  Target: LAMA2; (+) strand; PAM type: NRG; PAM sequence: GGG
aagagggagggagggaagga

SEQ ID NO: 161827 - DNA, 20 bp, Artificial Sequence
  Description of Artificial Sequence: Synthetic oligonucleotide
  Target: LAMA2; (+) strand; PAM type: NRG; PAM sequence: AAG
agggagggagggaaggaggg

SEQ ID NO: 161828 - DNA, 20 bp, Artificial Sequence
  Description of Artificial Sequence: Synthetic oligonucleotide
  Target: LAMA2; (+) strand; PAM type: NRG; PAM sequence: AGG
gggagggagggaaggaggga

SEQ ID NO: 161829 - DNA, 20 bp, Artificial Sequence
  Description of Artificial Sequence: Synthetic oligonucleotide
  Target: LAMA2; (+) strand; PAM type: NRG; PAM sequence: GAG
gagggagggaaggagggaag

SEQ ID NO: 161830 - DNA, 20 bp, Artificial Sequence
  Description of Artificial Sequence: Synthetic oligonucleotide
  Target: LAMA2; (+) strand; PAM type: NRG; PAM sequence: AGG
agggagggaaggagggaagg

SEQ ID NO: 161831 - DNA, 20 bp, Artificial Sequence
  Description of Artificial Sequence: Synthetic oligonucleotide
  Target: LAMA2; (+) strand; PAM type: NRG; PAM sequence: GGG
gggagggaaggagggaagga

SEQ ID NO: 161832 - DNA, 20 bp, Artificial Sequence
  Description of Artificial Sequence: Synthetic oligonucleotide
  Target: LAMA2; (+) strand; PAM type: NRG; PAM sequence: GAG
gagggaaggagggaaggagg

SEQ ID NO: 161833 - DNA, 20 bp, Artificial Sequence
  Description of Artificial Sequence: Synthetic oligonucleotide
  Target: LAMA2; (+) strand; PAM type: NRG; PAM sequence: AGG
agggaaggagggaaggaggg

SEQ ID NO: 161834 - DNA, 20 bp, Artificial Sequence
  Description of Artificial Sequence: Synthetic oligonucleotide
  Target: LAMA2; (+) strand; PAM type: NRG; PAM sequence: AAG
gaaggagggaaggagggagg

SEQ ID NO: 161835 - DNA, 20 bp, Artificial Sequence
  Description of Artificial Sequence: Synthetic oligonucleotide
  Target: LAMA2; (+) strand; PAM type: NRG; PAM sequence: AGG
aaggagggaaggagggagga

SEQ ID NO: 161836 - DNA, 20 bp, Artificial Sequence
  Description of Artificial Sequence: Synthetic oligonucleotide
  Target: LAMA2; (+) strand; PAM type: NRG; PAM sequence: AAG
gagggaaggagggaggaagg

SEQ ID NO: 161837 - DNA, 20 bp, Artificial Sequence
  Description of Artificial Sequence: Synthetic oligonucleotide
  Target: LAMA2; (+) strand; PAM type: NRG; PAM sequence: AGG
agggaaggagggaggaagga

SEQ ID NO: 161838 - DNA, 20 bp, Artificial Sequence
  Description of Artificial Sequence: Synthetic oligonucleotide
  Target: LAMA2; (+) strand; PAM type: NRG; PAM sequence: AAG
gaaggagggaggaaggaagg

SEQ ID NO: 161839 - DNA, 20 bp, Artificial Sequence
  Description of Artificial Sequence: Synthetic oligonucleotide
  Target: LAMA2; (+) strand; PAM type: NRG; PAM sequence: GAG
aggagggaggaaggaaggaa

SEQ ID NO: 161840 - DNA, 20 bp, Artificial Sequence
  Description of Artificial Sequence: Synthetic oligonucleotide
  Target: LAMA2; (+) strand; PAM type: NRG; PAM sequence: GAG
gagggaggaaggaaggaaga

SEQ ID NO: 161841 - DNA, 20 bp, Artificial Sequence
  Description of Artificial Sequence: Synthetic oligonucleotide
  Target: LAMA2; (+) strand; PAM type: NRG; PAM sequence: GAG
gggaggaaggaaggaagaga

SEQ ID NO: 161842 - DNA, 20 bp, Artificial Sequence
  Description of Artificial Sequence: Synthetic oligonucleotide
  Target: LAMA2; (+) strand; PAM type: NRG; PAM sequence: GAG
gaggaaggaaggaagagaga

SEQ ID NO: 161843 - DNA, 20 bp, Artificial Sequence
  Description of Artificial Sequence: Synthetic oligonucleotide
  Target: LAMA2; (+) strand; PAM type: NRG; PAM sequence: GAG
ggaaggaaggaagagagaga

SEQ ID NO: 161844 - DNA, 20 bp, Artificial Sequence
  Description of Artificial Sequence: Synthetic oligonucleotide
  Target: LAMA2; (+) strand; PAM type: NRG; PAM sequence: AAG
ggaaggaagagagagagaga

SEQ ID NO: 161845 - DNA, 20 bp, Artificial Sequence
  Description of Artificial Sequence: Synthetic oligonucleotide
  Target: LAMA2; (+) strand; PAM type: NRG; PAM sequence: AAG
ggaagagagagagagaaaga

SEQ ID NO: 161846 - DNA, 20 bp, Artificial Sequence
  Description of Artificial Sequence: Synthetic oligonucleotide
  Target: LAMA2; (+) strand; PAM type: NRG; PAM sequence: AGG
gaagagagagagagaaagaa

SEQ ID NO: 161847 - DNA, 20 bp, Artificial Sequence
  Description of Artificial Sequence: Synthetic oligonucleotide
  Target: LAMA2; (+) strand; PAM type: NRG; PAM sequence: AAG
gagagagagagaaagaaagg

SEQ ID NO: 161848 - DNA, 20 bp, Artificial Sequence
  Description of Artificial Sequence: Synthetic oligonucleotide
  Target: LAMA2; (+) strand; PAM type: NRG; PAM sequence: AAG
gagagagaaagaaaggaaga

SEQ ID NO: 161849 - DNA, 20 bp, Artificial Sequence
  Description of Artificial Sequence: Synthetic oligonucleotide
  Target: LAMA2; (+) strand; PAM type: NRG; PAM sequence: AGG
agagagaaagaaaggaagaa

SEQ ID NO: 161850 - DNA, 20 bp, Artificial Sequence
  Description of Artificial Sequence: Synthetic oligonucleotide
  Target: LAMA2; (+) strand; PAM type: NRG; PAM sequence: GGG
gagagaaagaaaggaagaaa

SEQ ID NO: 161851 - DNA, 20 bp, Artificial Sequence
  Description of Artificial Sequence: Synthetic oligonucleotide
  Target: LAMA2; (+) strand; PAM type: NRG; PAM sequence: GAG
gagaaagaaaggaagaaagg

SEQ ID NO: 161852 - DNA, 20 bp, Artificial Sequence
  Description of Artificial Sequence: Synthetic oligonucleotide
  Target: LAMA2; (+) strand; PAM type: NRG; PAM sequence: AAG
aagaaaggaagaaagggaga

SEQ ID NO: 161853 - DNA, 20 bp, Artificial Sequence
  Description of Artificial Sequence: Synthetic oligonucleotide
  Target: LAMA2; (+) strand; PAM type: NRG; PAM sequence: TGG
ggaagaaagggagaaagacc

SEQ ID NO: 161854 - DNA, 20 bp, Artificial Sequence
  Description of Artificial Sequence: Synthetic oligonucleotide
  Target: LAMA2; (+) strand; PAM type: NRG; PAM sequence: GAG
aagaaagggagaaagacctg

SEQ ID NO: 161855 - DNA, 20 bp, Artificial Sequence
  Description of Artificial Sequence: Synthetic oligonucleotide
  Target: LAMA2; (+) strand; PAM type: NRG; PAM sequence: TAG
aaagacctggagtttgctaa

SEQ ID NO: 161856 - DNA, 20 bp, Artificial Sequence
  Description of Artificial Sequence: Synthetic oligonucleotide
  Target: LAMA2; (+) strand; PAM type: NRG; PAM sequence: GAG
agacctggagtttgctaata

SEQ ID NO: 161857 - DNA, 20 bp, Artificial Sequence
  Description of Artificial Sequence: Synthetic oligonucleotide
  Target: LAMA2; (+) strand; PAM type: NRG; PAM sequence: TGG
ctggagtttgctaatagagt

SEQ ID NO: 161858 - DNA, 20 bp, Artificial Sequence
  Description of Artificial Sequence: Synthetic oligonucleotide
  Target: LAMA2; (+) strand; PAM type: NRG; PAM sequence: CAG
gagtttgctaatagagttgg

SEQ ID NO: 161859 - DNA, 20 bp, Artificial Sequence
  Description of Artificial Sequence: Synthetic oligonucleotide
  Target: LAMA2; (+) strand; PAM type: NRG; PAM sequence: AGG
agtttgctaatagagttggc

SEQ ID NO: 161860 - DNA, 20 bp, Artificial Sequence
  Description of Artificial Sequence: Synthetic oligonucleotide
  Target: LAMA2; (+) strand; PAM type: NRG; PAM sequence: CAG
gctaatagagttggcaggca

SEQ ID NO: 161861 - DNA, 20 bp, Artificial Sequence
  Description of Artificial Sequence: Synthetic oligonucleotide
  Target: LAMA2; (+) strand; PAM type: NRG; PAM sequence: CAG
tagagttggcaggcacagtt

SEQ ID NO: 161862 - DNA, 20 bp, Artificial Sequence
  Description of Artificial Sequence: Synthetic oligonucleotide
  Target: LAMA2; (+) strand; PAM type: NRG; PAM sequence: TGG
cacagttcagtatcacctta

SEQ ID NO: 161863 - DNA, 20 bp, Artificial Sequence
  Description of Artificial Sequence: Synthetic oligonucleotide
  Target: LAMA2; (+) strand; PAM type: NRG; PAM sequence: CAG
tggcatattcctataatatg

SEQ ID NO: 161864 - DNA, 20 bp, Artificial Sequence
  Description of Artificial Sequence: Synthetic oligonucleotide
  Target: LAMA2; (+) strand; PAM type: NRG; PAM sequence: AGG
ggcatattcctataatatgc

SEQ ID NO: 161865 - DNA, 20 bp, Artificial Sequence
  Description of Artificial Sequence: Synthetic oligonucleotide
  Target: LAMA2; (+) strand; PAM type: NRG; PAM sequence: CAG
aatatgcaggcatgctttct

SEQ ID NO: 161866 - DNA, 20 bp, Artificial Sequence
  Description of Artificial Sequence: Synthetic oligonucleotide
  Target: LAMA2; (+) strand; PAM type: NRG; PAM sequence: TAG
tgctttctcagacttccctt

SEQ ID NO: 161867 - DNA, 20 bp, Artificial Sequence
  Description of Artificial Sequence: Synthetic oligonucleotide
  Target: LAMA2; (+) strand; PAM type: NRG; PAM sequence: AAG
tctcagacttccctttagta

SEQ ID NO: 161868 - DNA, 20 bp, Artificial Sequence
  Description of Artificial Sequence: Synthetic oligonucleotide
  Target: LAMA2; (+) strand; PAM type: NRG; PAM sequence: TAG
catatgcaaatacatacaaa

SEQ ID NO: 161869 - DNA, 20 bp, Artificial Sequence
  Description of Artificial Sequence: Synthetic oligonucleotide
  Target: LAMA2; (+) strand; PAM type: NRG; PAM sequence: CAG
atacaaatagattattaatt

SEQ ID NO: 161870 - DNA, 20 bp, Artificial Sequence
  Description of Artificial Sequence: Synthetic oligonucleotide
  Target: LAMA2; (+) strand; PAM type: NRG; PAM sequence: CAG
tattaattcagatataccca

SEQ ID NO: 161871 - DNA, 20 bp, Artificial Sequence
  Description of Artificial Sequence: Synthetic oligonucleotide
  Target: LAMA2; (+) strand; PAM type: NRG; PAM sequence: AAG
acagctcccatccaattaat

SEQ ID NO: 161872 - DNA, 20 bp, Artificial Sequence
  Description of Artificial Sequence: Synthetic oligonucleotide
  Target: LAMA2; (+) strand; PAM type: NRG; PAM sequence: GAG
ccaattaataagaatcttct

SEQ ID NO: 161873 - DNA, 20 bp, Artificial Sequence
  Description of Artificial Sequence: Synthetic oligonucleotide
  Target: LAMA2; (+) strand; PAM type: NRG; PAM sequence: CAG
aataagaatcttctgagtca

SEQ ID NO: 161874 - DNA, 20 bp, Artificial Sequence
  Description of Artificial Sequence: Synthetic oligonucleotide
  Target: LAMA2; (+) strand; PAM type: NRG; PAM sequence: TAG
atcttctgagtcacagtttc

SEQ ID NO: 161875 - DNA, 20 bp, Artificial Sequence
  Description of Artificial Sequence: Synthetic oligonucleotide
  Target: LAMA2; (+) strand; PAM type: NRG; PAM sequence: GAG
ttattactgaatttccttgc

SEQ ID NO: 161876 - DNA, 20 bp, Artificial Sequence
  Description of Artificial Sequence: Synthetic oligonucleotide
  Target: LAMA2; (+) strand; PAM type: NRG; PAM sequence: AAG
cgagcctgtttcctcataac

SEQ ID NO: 161877 - DNA, 20 bp, Artificial Sequence
  Description of Artificial Sequence: Synthetic oligonucleotide
  Target: LAMA2; (+) strand; PAM type: NRG; PAM sequence: TGG
tgtttcctcataacaagttc

SEQ ID NO: 161878 - DNA, 20 bp, Artificial Sequence
  Description of Artificial Sequence: Synthetic oligonucleotide
  Target: LAMA2; (+) strand; PAM type: NRG; PAM sequence: TAG
atgtgaaccttacatatttg

SEQ ID NO: 161879 - DNA, 20 bp, Artificial Sequence
  Description of Artificial Sequence: Synthetic oligonucleotide
  Target: LAMA2; (+) strand; PAM type: NRG; PAM sequence: GAG
gtgaaccttacatatttgta

SEQ ID NO: 161880 - DNA, 20 bp, Artificial Sequence
  Description of Artificial Sequence: Synthetic oligonucleotide
  Target: LAMA2; (+) strand; PAM type: NRG; PAM sequence: TGG
ttgtagagaaaataaccaat

SEQ ID NO: 161881 - DNA, 20 bp, Artificial Sequence
  Description of Artificial Sequence: Synthetic oligonucleotide
  Target: LAMA2; (+) strand; PAM type: NRG; PAM sequence: GAG
gtagagaaaataaccaattg

SEQ ID NO: 161882 - DNA, 20 bp, Artificial Sequence
  Description of Artificial Sequence: Synthetic oligonucleotide
  Target: LAMA2; (+) strand; PAM type: NRG; PAM sequence: TAG
gagaaaataaccaattggag

SEQ ID NO: 161883 - DNA, 20 bp, Artificial Sequence
  Description of Artificial Sequence: Synthetic oligonucleotide
  Target: LAMA2; (+) strand; PAM type: NRG; PAM sequence: GAG
gaaaataaccaattggagta

SEQ ID NO: 161884 - DNA, 20 bp, Artificial Sequence
  Description of Artificial Sequence: Synthetic oligonucleotide
  Target: LAMA2; (+) strand; PAM type: NRG; PAM sequence: AAG
atatgatgtgttgtactaca

SEQ ID NO: 161885 - DNA, 20 bp, Artificial Sequence
  Description of Artificial Sequence: Synthetic oligonucleotide
  Target: LAMA2; (+) strand; PAM type: NRG; PAM sequence: AGG
tatgatgtgttgtactacaa

SEQ ID NO: 161886 - DNA, 20 bp, Artificial Sequence
  Description of Artificial Sequence: Synthetic oligonucleotide
  Target: LAMA2; (+) strand; PAM type: NRG; PAM sequence: TGG
actacaaaggctttccaaca

SEQ ID NO: 161887 - DNA, 20 bp, Artificial Sequence
  Description of Artificial Sequence: Synthetic oligonucleotide
  Target: LAMA2; (+) strand; PAM type: NRG; PAM sequence: TGG
aaggctttccaacatggacc

SEQ ID NO: 161888 - DNA, 20 bp, Artificial Sequence
  Description of Artificial Sequence: Synthetic oligonucleotide
  Target: LAMA2; (+) strand; PAM type: NRG; PAM sequence: CAG
aacatggacctggattcctc

SEQ ID NO: 161889 - DNA, 20 bp, Artificial Sequence
  Description of Artificial Sequence: Synthetic oligonucleotide
  Target: LAMA2; (+) strand; PAM type: NRG; PAM sequence: GAG
catggacctggattcctcca

SEQ ID NO: 161890 - DNA, 20 bp, Artificial Sequence
  Description of Artificial Sequence: Synthetic oligonucleotide
  Target: LAMA2; (+) strand; PAM type: NRG; PAM sequence: CAG
cctggattcctccagagtgc

SEQ ID NO: 161891 - DNA, 20 bp, Artificial Sequence
  Description of Artificial Sequence: Synthetic oligonucleotide
  Target: LAMA2; (+) strand; PAM type: NRG; PAM sequence: CAG
ggattcctccagagtgccag

SEQ ID NO: 161892 - DNA, 20 bp, Artificial Sequence
  Description of Artificial Sequence: Synthetic oligonucleotide
  Target: LAMA2; (+) strand; PAM type: NRG; PAM sequence: CAG
ttcctccagagtgccagcag

SEQ ID NO: 161893 - DNA, 20 bp, Artificial Sequence
  Description of Artificial Sequence: Synthetic oligonucleotide
  Target: LAMA2; (+) strand; PAM type: NRG; PAM sequence: TGG
agcagattcttattatgctt

SEQ ID NO: 161894 - DNA, 20 bp, Artificial Sequence
  Description of Artificial Sequence: Synthetic oligonucleotide
  Target: LAMA2; (+) strand; PAM type: NRG; PAM sequence: CAG
ttatgctttggtctcatttt

SEQ ID NO: 161895 - DNA, 20 bp, Artificial Sequence
  Description of Artificial Sequence: Synthetic oligonucleotide
  Target: LAMA2; (+) strand; PAM type: NRG; PAM sequence: CAG
tttggtctcattttcagtgc

SEQ ID NO: 161896 - DNA, 20 bp, Artificial Sequence
  Description of Artificial Sequence: Synthetic oligonucleotide
  Target: LAMA2; (+) strand; PAM type: NRG; PAM sequence: AAG
tcattttcagtgccagtgac

SEQ ID NO: 161897 - DNA, 20 bp, Artificial Sequence
  Description of Artificial Sequence: Synthetic oligonucleotide
  Target: LAMA2; (+) strand; PAM type: NRG; PAM sequence: CGG
acaagattatatattttttt

SEQ ID NO: 161898 - DNA, 20 bp, Artificial Sequence
  Description of Artificial Sequence: Synthetic oligonucleotide
  Target: LAMA2; (+) strand; PAM type: NRG; PAM sequence: GGG
caagattatatatttttttc

SEQ ID NO: 161899 - DNA, 20 bp, Artificial Sequence
  Description of Artificial Sequence: Synthetic oligonucleotide
  Target: LAMA2; (+) strand; PAM type: NRG; PAM sequence: TAG
tcgggctgaaatctaattac

SEQ ID NO: 161900 - DNA, 20 bp, Artificial Sequence
  Description of Artificial Sequence: Synthetic oligonucleotide
  Target: LAMA2; (+) strand; PAM type: NRG; PAM sequence: TGG
ggctgaaatctaattactag

SEQ ID NO: 161901 - DNA, 20 bp, Artificial Sequence
  Description of Artificial Sequence: Synthetic oligonucleotide
  Target: LAMA2; (+) strand; PAM type: NRG; PAM sequence: GGG
gctgaaatctaattactagt

SEQ ID NO: 161902 - DNA, 20 bp, Artificial Sequence
  Description of Artificial Sequence: Synthetic oligonucleotide
  Target: LAMA2; (+) strand; PAM type: NRG; PAM sequence: TGG
aaatctaattactagtgggc

SEQ ID NO: 161903 - DNA, 20 bp, Artificial Sequence
  Description of Artificial Sequence: Synthetic oligonucleotide
  Target: LAMA2; (+) strand; PAM type: NRG; PAM sequence: CAG
tctaattactagtgggctgg

SEQ ID NO: 161904 - DNA, 20 bp, Artificial Sequence
  Description of Artificial Sequence: Synthetic oligonucleotide
  Target: LAMA2; (+) strand; PAM type: NRG; PAM sequence: AGG
ctaattactagtgggctggc

SEQ ID NO: 161905 - DNA, 20 bp, Artificial Sequence
  Description of Artificial Sequence: Synthetic oligonucleotide
  Target: LAMA2; (+) strand; PAM type: NRG; PAM sequence: CAG
atcatcttgtatctacactg

SEQ ID NO: 161906 - DNA, 20 bp, Artificial Sequence
  Description of Artificial Sequence: Synthetic oligonucleotide
  Target: LAMA2; (+) strand; PAM type: NRG; PAM sequence: TAG
ttgtatctacactgcagttg

SEQ ID NO: 161907 - DNA, 20 bp, Artificial Sequence
  Description of Artificial Sequence: Synthetic oligonucleotide
  Target: LAMA2; (+) strand; PAM type: NRG; PAM sequence: GAG
tttttaatcacgttgcgttt

SEQ ID NO: 161908 - DNA, 20 bp, Artificial Sequence
  Description of Artificial Sequence: Synthetic oligonucleotide
  Target: LAMA2; (+) strand; PAM type: NRG; PAM sequence: AAG
aatcacgttgcgtttgagaa

SEQ ID NO: 161909 - DNA, 20 bp, Artificial Sequence
  Description of Artificial Sequence: Synthetic oligonucleotide
  Target: LAMA2; (+) strand; PAM type: NRG; PAM sequence: AGG
atcacgttgcgtttgagaaa

SEQ ID NO: 161910 - DNA, 20 bp, Artificial Sequence
  Description of Artificial Sequence: Synthetic oligonucleotide
  Target: LAMA2; (+) strand; PAM type: NRG; PAM sequence: AAG
ttgagaaaaggaacacttaa

SEQ ID NO: 161911 - DNA, 20 bp, Artificial Sequence
  Description of Artificial Sequence: Synthetic oligonucleotide
  Target: LAMA2; (+) strand; PAM type: NRG; PAM sequence: AGG
tgagaaaaggaacacttaaa

SEQ ID NO: 161912 - DNA, 20 bp, Artificial Sequence
  Description of Artificial Sequence: Synthetic oligonucleotide
  Target: LAMA2; (+) strand; PAM type: NRG; PAM sequence: TGG
aaaaggaaaatccatcatcc

SEQ ID NO: 161913 - DNA, 20 bp, Artificial Sequence
  Description of Artificial Sequence: Synthetic oligonucleotide
  Target: LAMA2; (+) strand; PAM type: NRG; PAM sequence: GGG
aaaggaaaatccatcatcct

SEQ ID NO: 161914 - DNA, 20 bp, Artificial Sequence
  Description of Artificial Sequence: Synthetic oligonucleotide
  Target: LAMA2; (+) strand; PAM type: NRG; PAM sequence: GAG
aggaaaatccatcatcctgg

SEQ ID NO: 161915 - DNA, 20 bp, Artificial Sequence
  Description of Artificial Sequence: Synthetic oligonucleotide
  Target: LAMA2; (+) strand; PAM type: NRG; PAM sequence: AAG
aaaatccatcatcctgggag

SEQ ID NO: 161916 - DNA, 20 bp, Artificial Sequence
  Description of Artificial Sequence: Synthetic oligonucleotide
  Target: LAMA2; (+) strand; PAM type: NRG; PAM sequence: AGG
aaatccatcatcctgggaga

SEQ ID NO: 161917 - DNA, 20 bp, Artificial Sequence
  Description of Artificial Sequence: Synthetic oligonucleotide
  Target: LAMA2; (+) strand; PAM type: NRG; PAM sequence: GGG
aatccatcatcctgggagaa

SEQ ID NO: 161918 - DNA, 20 bp, Artificial Sequence
  Description of Artificial Sequence: Synthetic oligonucleotide
  Target: LAMA2; (+) strand; PAM type: NRG; PAM sequence: GGG
atccatcatcctgggagaag

SEQ ID NO: 161919 - DNA, 20 bp, Artificial Sequence
  Description of Artificial Sequence: Synthetic oligonucleotide
  Target: LAMA2; (+) strand; PAM type: NRG; PAM sequence: GAG
ccatcatcctgggagaaggg

SEQ ID NO: 161920 - DNA, 20 bp, Artificial Sequence
  Description of Artificial Sequence: Synthetic oligonucleotide
  Target: LAMA2; (+) strand; PAM type: NRG; PAM sequence: GAG
atgtaaacattgccccaact

SEQ ID NO: 161921 - DNA, 20 bp, Artificial Sequence
  Description of Artificial Sequence: Synthetic oligonucleotide
  Target: LAMA2; (+) strand; PAM type: NRG; PAM sequence: AGG
tgtaaacattgccccaactg

SEQ ID NO: 161922 - DNA, 20 bp, Artificial Sequence
  Description of Artificial Sequence: Synthetic oligonucleotide
  Target: LAMA2; (+) strand; PAM type: NRG; PAM sequence: AAG
ccccaactgaggtcccccca

SEQ ID NO: 161923 - DNA, 20 bp, Artificial Sequence
  Description of Artificial Sequence: Synthetic oligonucleotide
  Target: LAMA2; (+) strand; PAM type: NRG; PAM sequence: AGG
cccaactgaggtccccccaa

SEQ ID NO: 161924 - DNA, 20 bp, Artificial Sequence
  Description of Artificial Sequence: Synthetic oligonucleotide
  Target: LAMA2; (+) strand; PAM type: NRG; PAM sequence: TAG
actgatgaaatttcttgcct

SEQ ID NO: 161925 - DNA, 20 bp, Artificial Sequence
  Description of Artificial Sequence: Synthetic oligonucleotide
  Target: LAMA2; (+) strand; PAM type: NRG; PAM sequence: AGG
ctgatgaaatttcttgcctt

SEQ ID NO: 161926 - DNA, 20 bp, Artificial Sequence
  Description of Artificial Sequence: Synthetic oligonucleotide
  Target: LAMA2; (+) strand; PAM type: NRG; PAM sequence: CAG
aatttcttgccttaggtgtg

SEQ ID NO: 161927 - DNA, 20 bp, Artificial Sequence
  Description of Artificial Sequence: Synthetic oligonucleotide
  Target: LAMA2; (+) strand; PAM type: NRG; PAM sequence: AAG
ttcttgccttaggtgtgcag

SEQ ID NO: 161928 - DNA, 20 bp, Artificial Sequence
  Description of Artificial Sequence: Synthetic oligonucleotide
  Target: LAMA2; (+) strand; PAM type: NRG; PAM sequence: AGG
tcttgccttaggtgtgcaga

SEQ ID NO: 161929 - DNA, 20 bp, Artificial Sequence
  Description of Artificial Sequence: Synthetic oligonucleotide
  Target: LAMA2; (+) strand; PAM type: NRG; PAM sequence: TGG
aggtgtgcagaaggctattt

SEQ ID NO: 161930 - DNA, 20 bp, Artificial Sequence
  Description of Artificial Sequence: Synthetic oligonucleotide
  Target: LAMA2; (+) strand; PAM type: NRG; PAM sequence: TGG
tttggacaaccctctgtacc

SEQ ID NO: 161931 - DNA, 20 bp, Artificial Sequence
  Description of Artificial Sequence: Synthetic oligonucleotide
  Target: LAMA2; (+) strand; PAM type: NRG; PAM sequence: GAG
tggacaaccctctgtacctg

SEQ ID NO: 161932 - DNA, 20 bp, Artificial Sequence
  Description of Artificial Sequence: Synthetic oligonucleotide
  Target: LAMA2; (+) strand; PAM type: NRG; PAM sequence: AGG
ggacaaccctctgtacctgg

SEQ ID NO: 161933 - DNA, 20 bp, Artificial Sequence
  Description of Artificial Sequence: Synthetic oligonucleotide
  Target: LAMA2; (+) strand; PAM type: NRG; PAM sequence: CAG
ctgtacctggaggatcatgt

SEQ ID NO: 161934 - DNA, 20 bp, Artificial Sequence
  Description of Artificial Sequence: Synthetic oligonucleotide
  Target: LAMA2; (+) strand; PAM type: NRG; PAM sequence: TGG
aaccttgacttctccatccc

SEQ ID NO: 161935 - DNA, 20 bp, Artificial Sequence
  Description of Artificial Sequence: Synthetic oligonucleotide
  Target: LAMA2; (+) strand; PAM type: NRG; PAM sequence: CAG
cttgacttctccatccctgg

SEQ ID NO: 161936 - DNA, 20 bp, Artificial Sequence
  Description of Artificial Sequence: Synthetic oligonucleotide
  Target: LAMA2; (+) strand; PAM type: NRG; PAM sequence: CAG
tccatccctggcagctgtga

SEQ ID NO: 161937 - DNA, 20 bp, Artificial Sequence
  Description of Artificial Sequence: Synthetic oligonucleotide
  Target: LAMA2; (+) strand; PAM type: NRG; PAM sequence: TGG
ggcagctgtgacagcttgtc

SEQ ID NO: 161938 - DNA, 20 bp, Artificial Sequence
  Description of Artificial Sequence: Synthetic oligonucleotide
  Target: LAMA2; (+) strand; PAM type: NRG; PAM sequence: CAG
ctcctgtctgatatgtaaac

SEQ ID NO: 161939 - DNA, 20 bp, Artificial Sequence
  Description of Artificial Sequence: Synthetic oligonucleotide
  Target: LAMA2; (+) strand; PAM type: NRG; PAM sequence: AGG
tcctgtctgatatgtaaacc

SEQ ID NO: 161940 - DNA, 20 bp, Artificial Sequence
  Description of Artificial Sequence: Synthetic oligonucleotide
  Target: LAMA2; (+) strand; PAM type: NRG; PAM sequence: CAG
gatatgtaaaccaggtacaa

SEQ ID NO: 161941 - DNA, 20 bp, Artificial Sequence
  Description of Artificial Sequence: Synthetic oligonucleotide
  Target: LAMA2; (+) strand; PAM type: NRG; PAM sequence: AGG
atatgtaaaccaggtacaac

SEQ ID NO: 161942 - DNA, 20 bp, Artificial Sequence
  Description of Artificial Sequence: Synthetic oligonucleotide
  Target: LAMA2; (+) strand; PAM type: NRG; PAM sequence: CGG
gtaaaccaggtacaacaggc

SEQ ID NO: 161943 - DNA, 20 bp, Artificial Sequence
  Description of Artificial Sequence: Synthetic oligonucleotide
  Target: LAMA2; (+) strand; PAM type: NRG; PAM sequence: GAG
gtacaacaggccggtactgt

SEQ ID NO: 161944 - DNA, 20 bp, Artificial Sequence
  Description of Artificial Sequence: Synthetic oligonucleotide
  Target: LAMA2; (+) strand; PAM type: NRG; PAM sequence: TGG
tactgtgagctctgtgctga

SEQ ID NO: 161945 - DNA, 20 bp, Artificial Sequence
  Description of Artificial Sequence: Synthetic oligonucleotide
  Target: LAMA2; (+) strand; PAM type: NRG; PAM sequence: TGG
ctctgtgctgatggatattt

SEQ ID NO: 161946 - DNA, 20 bp, Artificial Sequence
  Description of Artificial Sequence: Synthetic oligonucleotide
  Target: LAMA2; (+) strand; PAM type: NRG; PAM sequence: GAG
ctgtgctgatggatattttg

SEQ ID NO: 161947 - DNA, 20 bp, Artificial Sequence
  Description of Artificial Sequence: Synthetic oligonucleotide
  Target: LAMA2; (+) strand; PAM type: NRG; PAM sequence: CAG
tgatggatattttggagatg

SEQ ID NO: 161948 - DNA, 20 bp, Artificial Sequence
  Description of Artificial Sequence: Synthetic oligonucleotide
  Target: LAMA2; (+) strand; PAM type: NRG; PAM sequence: AAG
ttggagatgcagttgatgcg

SEQ ID NO: 161949 - DNA, 20 bp, Artificial Sequence
  Description of Artificial Sequence: Synthetic oligonucleotide
  Target: LAMA2; (+) strand; PAM type: NRG; PAM sequence: CAG
cagttgatgcgaagaactgt

SEQ ID NO: 161950 - DNA, 20 bp, Artificial Sequence
  Description of Artificial Sequence: Synthetic oligonucleotide
  Target: LAMA2; (+) strand; PAM type: NRG; PAM sequence: AAG
atgcgaagaactgtcagcgt

SEQ ID NO: 161951 - DNA, 20 bp, Artificial Sequence
  Description of Artificial Sequence: Synthetic oligonucleotide
  Target: LAMA2; (+) strand; PAM type: NRG; PAM sequence: CAG
tgaactattgatgcccctga

SEQ ID NO: 161952 - DNA, 20 bp, Artificial Sequence
  Description of Artificial Sequence: Synthetic oligonucleotide
  Target: LAMA2; (+) strand; PAM type: NRG; PAM sequence: AAG
aattgatgtattgtacctca

SEQ ID NO: 161953 - DNA, 20 bp, Artificial Sequence
  Description of Artificial Sequence: Synthetic oligonucleotide
  Target: LAMA2; (+) strand; PAM type: NRG; PAM sequence: TAG
tgatgtattgtacctcaaag

SEQ ID NO: 161954 - DNA, 20 bp, Artificial Sequence
  Description of Artificial Sequence: Synthetic oligonucleotide
  Target: LAMA2; (+) strand; PAM type: NRG; PAM sequence: GAG
tgtacctcaaagtagctgat

SEQ ID NO: 161955 - DNA, 20 bp, Artificial Sequence
  Description of Artificial Sequence: Synthetic oligonucleotide
  Target: LAMA2; (+) strand; PAM type: NRG; PAM sequence: GAG
aaagtagctgatgagttctt

SEQ ID NO: 161956 - DNA, 20 bp, Artificial Sequence
  Description of Artificial Sequence: Synthetic oligonucleotide
  Target: LAMA2; (+) strand; PAM type: NRG; PAM sequence: TGG
agctgatgagttcttgagtg

SEQ ID NO: 161957 - DNA, 20 bp, Artificial Sequence
  Description of Artificial Sequence: Synthetic oligonucleotide
  Target: LAMA2; (+) strand; PAM type: NRG; PAM sequence: AAG
gagttcttgagtgtggattg

SEQ ID NO: 161958 - DNA, 20 bp, Artificial Sequence
  Description of Artificial Sequence: Synthetic oligonucleotide
  Target: LAMA2; (+) strand; PAM type: NRG; PAM sequence: GAG
gttcttgagtgtggattgaa

SEQ ID NO: 161959 - DNA, 20 bp, Artificial Sequence
  Description of Artificial Sequence: Synthetic oligonucleotide
  Target: LAMA2; (+) strand; PAM type: NRG; PAM sequence: TAG
cttgagtgtggattgaagag

SEQ ID NO: 161960 - DNA, 20 bp, Artificial Sequence
  Description of Artificial Sequence: Synthetic oligonucleotide
  Target: LAMA2; (+) strand; PAM type: NRG; PAM sequence: AGG
ttgagtgtggattgaagagt

SEQ ID NO: 161961 - DNA, 20 bp, Artificial Sequence
  Description of Artificial Sequence: Synthetic oligonucleotide
  Target: LAMA2; (+) strand; PAM type: NRG; PAM sequence: TGG
ttgaagagtaggaaattatg

SEQ ID NO: 161962 - DNA, 20 bp, Artificial Sequence
  Description of Artificial Sequence: Synthetic oligonucleotide
  Target: LAMA2; (+) strand; PAM type: NRG; PAM sequence: TGG
aggaaattatgtggaataca

SEQ ID NO: 161963 - DNA, 20 bp, Artificial Sequence
  Description of Artificial Sequence: Synthetic oligonucleotide
  Target: LAMA2; (+) strand; PAM type: NRG; PAM sequence: TAG
tatgtggaatacatggttga

SEQ ID NO: 161964 - DNA, 20 bp, Artificial Sequence
  Description of Artificial Sequence: Synthetic oligonucleotide
  Target: LAMA2; (+) strand; PAM type: NRG; PAM sequence: TAG
atacatggttgatagatgca

SEQ ID NO: 161965 - DNA, 20 bp, Artificial Sequence
  Description of Artificial Sequence: Synthetic oligonucleotide
  Target: LAMA2; (+) strand; PAM type: NRG; PAM sequence: CAG
tgatagatgcatagaatata

SEQ ID NO: 161966 - DNA, 20 bp, Artificial Sequence
  Description of Artificial Sequence: Synthetic oligonucleotide
  Target: LAMA2; (+) strand; PAM type: NRG; PAM sequence: GAG
atagatgcatagaatataca

SEQ ID NO: 161967 - DNA, 20 bp, Artificial Sequence
  Description of Artificial Sequence: Synthetic oligonucleotide
  Target: LAMA2; (+) strand; PAM type: NRG; PAM sequence: CAG
tatacagagtctgcatattc

SEQ ID NO: 161968 - DNA, 20 bp, Artificial Sequence
  Description of Artificial Sequence: Synthetic oligonucleotide
  Target: LAMA2; (+) strand; PAM type: NRG; PAM sequence: TAG
catttccttgtactaactaa

SEQ ID NO: 161969 - DNA, 20 bp, Artificial Sequence
  Description of Artificial Sequence: Synthetic oligonucleotide
  Target: LAMA2; (+) strand; PAM type: NRG; PAM sequence: GAG
tttccttgtactaactaata

SEQ ID NO: 161970 - DNA, 20 bp, Artificial Sequence
  Description of Artificial Sequence: Synthetic oligonucleotide
  Target: LAMA2; (+) strand; PAM type: NRG; PAM sequence: TGG
aaatacctttaaaattgctg

SEQ ID NO: 161971 - DNA, 20 bp, Artificial Sequence
  Description of Artificial Sequence: Synthetic oligonucleotide
  Target: LAMA2; (+) strand; PAM type: NRG; PAM sequence: AAG
ttaaaattgctgtggtattg

SEQ ID NO: 161972 - DNA, 20 bp, Artificial Sequence
  Description of Artificial Sequence: Synthetic oligonucleotide
  Target: LAMA2; (+) strand; PAM type: NRG; PAM sequence: CGG
aacatgtttttatttacatg

SEQ ID NO: 161973 - DNA, 20 bp, Artificial Sequence
  Description of Artificial Sequence: Synthetic oligonucleotide
  Target: LAMA2; (+) strand; PAM type: NRG; PAM sequence: AAG
atgtttttatttacatgcgg

SEQ ID NO: 161974 - DNA, 20 bp, Artificial Sequence
  Description of Artificial Sequence: Synthetic oligonucleotide
  Target: LAMA2; (+) strand; PAM type: NRG; PAM sequence: AGG
tgtttttatttacatgcgga

SEQ ID NO: 161975 - DNA, 20 bp, Artificial Sequence
  Description of Artificial Sequence: Synthetic oligonucleotide
  Target: LAMA2; (+) strand; PAM type: NRG; PAM sequence: AAG
ttttatttacatgcggaagg

SEQ ID NO: 161976 - DNA, 20 bp, Artificial Sequence
  Description of Artificial Sequence: Synthetic oligonucleotide
  Target: LAMA2; (+) strand; PAM type: NRG; PAM sequence: CAG
ttttaatgaacttatgtcca

SEQ ID NO: 161977 - DNA, 20 bp, Artificial Sequence
  Description of Artificial Sequence: Synthetic oligonucleotide
  Target: LAMA2; (+) strand; PAM type: NRG; PAM sequence: CAG
taatgaacttatgtccacag

SEQ ID NO: 161978 - DNA, 20 bp, Artificial Sequence
  Description of Artificial Sequence: Synthetic oligonucleotide
  Target: LAMA2; (+) strand; PAM type: NRG; PAM sequence: AGG
aatgaacttatgtccacagc

SEQ ID NO: 161979 - DNA, 20 bp, Artificial Sequence
  Description of Artificial Sequence: Synthetic oligonucleotide
  Target: LAMA2; (+) strand; PAM type: NRG; PAM sequence: AAG
aacttatgtccacagcagga

SEQ ID NO: 161980 - DNA, 20 bp, Artificial Sequence
  Description of Artificial Sequence: Synthetic oligonucleotide
  Target: LAMA2; (+) strand; PAM type: NRG; PAM sequence: AAG
ttatgtccacagcaggaaag

SEQ ID NO: 161981 - DNA, 20 bp, Artificial Sequence
  Description of Artificial Sequence: Synthetic oligonucleotide
  Target: LAMA2; (+) strand; PAM type: NRG; PAM sequence: TAG
ggaaagaagaatttgcatat

SEQ ID NO: 161982 - DNA, 20 bp, Artificial Sequence
  Description of Artificial Sequence: Synthetic oligonucleotide
  Target: LAMA2; (+) strand; PAM type: NRG; PAM sequence: TAG
agaagaatttgcatattaga

SEQ ID NO: 161983 - DNA, 20 bp, Artificial Sequence
  Description of Artificial Sequence: Synthetic oligonucleotide
  Target: LAMA2; (+) strand; PAM type: NRG; PAM sequence: CAG
tttttctgcccatgatattt

SEQ ID NO: 161984 - DNA, 20 bp, Artificial Sequence
  Description of Artificial Sequence: Synthetic oligonucleotide
  Target: LAMA2; (+) strand; PAM type: NRG; PAM sequence: TAG
ttctgcccatgatatttcag

SEQ ID NO: 161985 - DNA, 20 bp, Artificial Sequence
  Description of Artificial Sequence: Synthetic oligonucleotide
  Target: LAMA2; (+) strand; PAM type: NRG; PAM sequence: TAG
tgcccatgatatttcagtag

SEQ ID NO: 161986 - DNA, 20 bp, Artificial Sequence
  Description of Artificial Sequence: Synthetic oligonucleotide
  Target: LAMA2; (+) strand; PAM type: NRG; PAM sequence: CAG
gatatttcagtagtagccat

SEQ ID NO: 161987 - DNA, 20 bp, Artificial Sequence
  Description of Artificial Sequence: Synthetic oligonucleotide
  Target: LAMA2; (+) strand; PAM type: NRG; PAM sequence: AAG
atttcagtagtagccatcag

SEQ ID NO: 161988 - DNA, 20 bp, Artificial Sequence
  Description of Artificial Sequence: Synthetic oligonucleotide
  Target: LAMA2; (+) strand; PAM type: NRG; PAM sequence: AGG
tttcagtagtagccatcaga

SEQ ID NO: 161989 - DNA, 20 bp, Artificial Sequence
  Description of Artificial Sequence: Synthetic oligonucleotide
  Target: LAMA2; (+) strand; PAM type: NRG; PAM sequence: CAG
agccatcagaaggtgttaat

SEQ ID NO: 161990 - DNA, 20 bp, Artificial Sequence
  Description of Artificial Sequence: Synthetic oligonucleotide
  Target: LAMA2; (+) strand; PAM type: NRG; PAM sequence: CAG
gctttcatatgttaacttta

SEQ ID NO: 161991 - DNA, 20 bp, Artificial Sequence
  Description of Artificial Sequence: Synthetic oligonucleotide
  Target: LAMA2; (+) strand; PAM type: NRG; PAM sequence: TAG
tacagtgtcgtattttgtaa

SEQ ID NO: 161992 - DNA, 20 bp, Artificial Sequence
  Description of Artificial Sequence: Synthetic oligonucleotide
  Target: LAMA2; (+) strand; PAM type: NRG; PAM sequence: AGG
acagtgtcgtattttgtaat

SEQ ID NO: 161993 - DNA, 20 bp, Artificial Sequence
  Description of Artificial Sequence: Synthetic oligonucleotide
  Target: LAMA2; (+) strand; PAM type: NRG; PAM sequence: CAG
tctgccaatattttcgcaca

SEQ ID NO: 161994 - DNA, 20 bp, Artificial Sequence
  Description of Artificial Sequence: Synthetic oligonucleotide
  Target: LAMA2; (+) strand; PAM type: NRG; PAM sequence: AGG
ctgccaatattttcgcacac

SEQ ID NO: 161995 - DNA, 20 bp, Artificial Sequence
  Description of Artificial Sequence: Synthetic oligonucleotide
  Target: LAMA2; (+) strand; PAM type: NRG; PAM sequence: TAG
ttgaatgattaacctcattt

SEQ ID NO: 161996 - DNA, 20 bp, Artificial Sequence
  Description of Artificial Sequence: Synthetic oligonucleotide
  Target: LAMA2; (+) strand; PAM type: NRG; PAM sequence: TAG
acctcattttagtttcataa

SEQ ID NO: 161997 - DNA, 20 bp, Artificial Sequence
  Description of Artificial Sequence: Synthetic oligonucleotide
  Target: LAMA2; (+) strand; PAM type: NRG; PAM sequence: AAG
tagtttcataatagtcattt

SEQ ID NO: 161998 - DNA, 20 bp, Artificial Sequence
  Description of Artificial Sequence: Synthetic oligonucleotide
  Target: LAMA2; (+) strand; PAM type: NRG; PAM sequence: AGG
agtttcataatagtcattta

SEQ ID NO: 161999 - DNA, 20 bp, Artificial Sequence
  Description of Artificial Sequence: Synthetic oligonucleotide
  Target: LAMA2; (+) strand; PAM type: NRG; PAM sequence: TAG
agtcatttaaggactatttc

SEQ ID NO: 162000 - DNA, 20 bp, Artificial Sequence
  Description of Artificial Sequence: Synthetic oligonucleotide
  Target: LAMA2; (+) strand; PAM type: NRG; PAM sequence: CAG
ctatttctagaatgctcttt

SEQ ID NO: 162001 - DNA, 20 bp, Artificial Sequence
  Description of Artificial Sequence: Synthetic oligonucleotide
  Target: LAMA2; (+) strand; PAM type: NRG; PAM sequence: TAG
gtgttttccttccacaaaat

SEQ ID NO: 162002 - DNA, 20 bp, Artificial Sequence
  Description of Artificial Sequence: Synthetic oligonucleotide
  Target: LAMA2; (+) strand; PAM type: NRG; PAM sequence: TAG
ttccacaaaattagctactc

SEQ ID NO: 162003 - DNA, 20 bp, Artificial Sequence
  Description of Artificial Sequence: Synthetic oligonucleotide
  Target: LAMA2; (+) strand; PAM type: NRG; PAM sequence: AGG
tccacaaaattagctactct

SEQ ID NO: 162004 - DNA, 20 bp, Artificial Sequence
  Description of Artificial Sequence: Synthetic oligonucleotide
  Target: LAMA2; (+) strand; PAM type: NRG; PAM sequence: GGG
ccacaaaattagctactcta

SEQ ID NO: 162005 - DNA, 20 bp, Artificial Sequence
  Description of Artificial Sequence: Synthetic oligonucleotide
  Target: LAMA2; (+) strand; PAM type: NRG; PAM sequence: TAG
ctctagggcttcatccatat

SEQ ID NO: 162006 - DNA, 20 bp, Artificial Sequence
  Description of Artificial Sequence: Synthetic oligonucleotide
  Target: LAMA2; (+) strand; PAM type: NRG; PAM sequence: TAG
tttgctgtattaatactaca

SEQ ID NO: 162007 - DNA, 20 bp, Artificial Sequence
  Description of Artificial Sequence: Synthetic oligonucleotide
  Target: LAMA2; (+) strand; PAM type: NRG; PAM sequence: CAG
aatttccaaatccttaatgt

SEQ ID NO: 162008 - DNA, 20 bp, Artificial Sequence
  Description of Artificial Sequence: Synthetic oligonucleotide
  Target: LAMA2; (+) strand; PAM type: NRG; PAM sequence: TGG
ttccaaatccttaatgtcag

SEQ ID NO: 162009 - DNA, 20 bp, Artificial Sequence
  Description of Artificial Sequence: Synthetic oligonucleotide
  Target: LAMA2; (+) strand; PAM type: NRG; PAM sequence: GGG
tccaaatccttaatgtcagt

SEQ ID NO: 162010 - DNA, 20 bp, Artificial Sequence
  Description of Artificial Sequence: Synthetic oligonucleotide
  Target: LAMA2; (+) strand; PAM type: NRG; PAM sequence: TAG
atccttaatgtcagtgggat

SEQ ID NO: 162011 - DNA, 20 bp, Artificial Sequence
  Description of Artificial Sequence: Synthetic oligonucleotide
  Target: LAMA2; (+) strand; PAM type: NRG; PAM sequence: AAG
gtcagtgggattagaatatg

SEQ ID NO: 162012 - DNA, 20 bp, Artificial Sequence
  Description of Artificial Sequence: Synthetic oligonucleotide
  Target: LAMA2; (+) strand; PAM type: NRG; PAM sequence: AGG
tcagtgggattagaatatga

SEQ ID NO: 162013 - DNA, 20 bp, Artificial Sequence
  Description of Artificial Sequence: Synthetic oligonucleotide
  Target: LAMA2; (+) strand; PAM type: NRG; PAM sequence: CGG
gtgggattagaatatgaagg

SEQ ID NO: 162014 - DNA, 20 bp, Artificial Sequence
  Description of Artificial Sequence: Synthetic oligonucleotide
  Target: LAMA2; (+) strand; PAM type: NRG; PAM sequence: CAG
tatgaaggcggatcttgttg

SEQ ID NO: 162015 - DNA, 20 bp, Artificial Sequence
  Description of Artificial Sequence: Synthetic oligonucleotide
  Target: LAMA2; (+) strand; PAM type: NRG; PAM sequence: AAG
gaaggcggatcttgttgcag

SEQ ID NO: 162016 - DNA, 20 bp, Artificial Sequence
  Description of Artificial Sequence: Synthetic oligonucleotide
  Target: LAMA2; (+) strand; PAM type: NRG; PAM sequence: TGG
tcttgttgcagaagatcaaa

SEQ ID NO: 162017 - DNA, 20 bp, Artificial Sequence
  Description of Artificial Sequence: Synthetic oligonucleotide
  Target: LAMA2; (+) strand; PAM type: NRG; PAM sequence: AAG
gttgcagaagatcaaatgga

SEQ ID NO: 162018 - DNA, 20 bp, Artificial Sequence
  Description of Artificial Sequence: Synthetic oligonucleotide
  Target: LAMA2; (+) strand; PAM type: NRG; PAM sequence: TAG
atggaaagtgaatccaatgt

SEQ ID NO: 162019 - DNA, 20 bp, Artificial Sequence
  Description of Artificial Sequence: Synthetic oligonucleotide
  Target: LAMA2; (+) strand; PAM type: NRG; PAM sequence: TGG
gtgaatccaatgttagcatt

SEQ ID NO: 162020 - DNA, 20 bp, Artificial Sequence
  Description of Artificial Sequence: Synthetic oligonucleotide
  Target: LAMA2; (+) strand; PAM type: NRG; PAM sequence: CAG
tgttagcatttggccatcat

SEQ ID NO: 162021 - DNA, 20 bp, Artificial Sequence
  Description of Artificial Sequence: Synthetic oligonucleotide
  Target: LAMA2; (+) strand; PAM type: NRG; PAM sequence: AAG
catttactatcataatgttt

SEQ ID NO: 162022 - DNA, 20 bp, Artificial Sequence
  Description of Artificial Sequence: Synthetic oligonucleotide
  Target: LAMA2; (+) strand; PAM type: NRG; PAM sequence: CAG
ttactatcataatgtttaag

SEQ ID NO: 162023 - DNA, 20 bp, Artificial Sequence
  Description of Artificial Sequence: Synthetic oligonucleotide
  Target: LAMA2; (+) strand; PAM type: NRG; PAM sequence: GAG
actatcataatgtttaagca

SEQ ID NO: 162024 - DNA, 20 bp, Artificial Sequence
  Description of Artificial Sequence: Synthetic oligonucleotide
  Target: LAMA2; (+) strand; PAM type: NRG; PAM sequence: TAG
atcataatgtttaagcagag

SEQ ID NO: 162025 - DNA, 20 bp, Artificial Sequence
  Description of Artificial Sequence: Synthetic oligonucleotide
  Target: LAMA2; (+) strand; PAM type: NRG; PAM sequence: AGG
tcataatgtttaagcagagt

SEQ ID NO: 162026 - DNA, 20 bp, Artificial Sequence
  Description of Artificial Sequence: Synthetic oligonucleotide
  Target: LAMA2; (+) strand; PAM type: NRG; PAM sequence: GAG
gtttaagcagagtaggttat

SEQ ID NO: 162027 - DNA, 20 bp, Artificial Sequence
  Description of Artificial Sequence: Synthetic oligonucleotide
  Target: LAMA2; (+) strand; PAM type: NRG; PAM sequence: CAG
agcagagtaggttatgagac

SEQ ID NO: 162028 - DNA, 20 bp, Artificial Sequence
  Description of Artificial Sequence: Synthetic oligonucleotide
  Target: LAMA2; (+) strand; PAM type: NRG; PAM sequence: GAG
catttctgtcaaatttatgt

SEQ ID NO: 162029 - DNA, 20 bp, Artificial Sequence
  Description of Artificial Sequence: Synthetic oligonucleotide
  Target: LAMA2; (+) strand; PAM type: NRG; PAM sequence: GAG
tttctgtcaaatttatgtga

SEQ ID NO: 162030 - DNA, 20 bp, Artificial Sequence
  Description of Artificial Sequence: Synthetic oligonucleotide
  Target: LAMA2; (+) strand; PAM type: NRG; PAM sequence: CAG
gagagactcttccaattatt

SEQ ID NO: 162031 - DNA, 20 bp, Artificial Sequence
  Description of Artificial Sequence: Synthetic oligonucleotide
  Target: LAMA2; (+) strand; PAM type: NRG; PAM sequence: AGG
agagactcttccaattattc

SEQ ID NO: 162032 - DNA, 20 bp, Artificial Sequence
  Description of Artificial Sequence: Synthetic oligonucleotide
  Target: LAMA2; (+) strand; PAM type: NRG; PAM sequence: TGG
gactcttccaattattcagg

SEQ ID NO: 162033 - DNA, 20 bp, Artificial Sequence
  Description of Artificial Sequence: Synthetic oligonucleotide
  Target: LAMA2; (+) strand; PAM type: NRG; PAM sequence: GGG
actcttccaattattcaggt

SEQ ID NO: 162034 - DNA, 20 bp, Artificial Sequence
  Description of Artificial Sequence: Synthetic oligonucleotide
  Target: LAMA2; (+) strand; PAM type: NRG; PAM sequence: CAG
ccaattattcaggtgggtcc

SEQ ID NO: 162035 - DNA, 20 bp, Artificial Sequence
  Description of Artificial Sequence: Synthetic oligonucleotide
  Target: LAMA2; (+) strand; PAM type: NRG; PAM sequence: AGG
caattattcaggtgggtccc

SEQ ID NO: 162036 - DNA, 20 bp, Artificial Sequence
  Description of Artificial Sequence: Synthetic oligonucleotide
  Target: LAMA2; (+) strand; PAM type: NRG; PAM sequence: CAG
caggtgggtcccaggacatg

SEQ ID NO: 162037 - DNA, 20 bp, Artificial Sequence
  Description of Artificial Sequence: Synthetic oligonucleotide
  Target: LAMA2; (+) strand; PAM type: NRG; PAM sequence: TAG
tcccaggacatgcagaatta

SEQ ID NO: 162038 - DNA, 20 bp, Artificial Sequence
  Description of Artificial Sequence: Synthetic oligonucleotide
  Target: LAMA2; (+) strand; PAM type: NRG; PAM sequence: TAG
tatagaaaccactgtaaatg

SEQ ID NO: 162039 - DNA, 20 bp, Artificial Sequence
  Description of Artificial Sequence: Synthetic oligonucleotide
  Target: LAMA2; (+) strand; PAM type: NRG; PAM sequence: AAG
cctattatcaactctactgt

SEQ ID NO: 162040 - DNA, 20 bp, Artificial Sequence
  Description of Artificial Sequence: Synthetic oligonucleotide
  Target: LAMA2; (+) strand; PAM type: NRG; PAM sequence: AAG
caactctactgtaagcacca

SEQ ID NO: 162041 - DNA, 20 bp, Artificial Sequence
  Description of Artificial Sequence: Synthetic oligonucleotide
  Target: LAMA2; (+) strand; PAM type: NRG; PAM sequence: CAG
tactgtaagcaccaaagacc

SEQ ID NO: 162042 - DNA, 20 bp, Artificial Sequence
  Description of Artificial Sequence: Synthetic oligonucleotide
  Target: LAMA2; (+) strand; PAM type: NRG; PAM sequence: TAG
tgtaagcaccaaagacccag

SEQ ID NO: 162043 - DNA, 20 bp, Artificial Sequence
  Description of Artificial Sequence: Synthetic oligonucleotide
  Target: LAMA2; (+) strand; PAM type: NRG; PAM sequence: AGG
gtaagcaccaaagacccagt

SEQ ID NO: 162044 - DNA, 20 bp, Artificial Sequence
  Description of Artificial Sequence: Synthetic oligonucleotide
  Target: LAMA2; (+) strand; PAM type: NRG; PAM sequence: GGG
taagcaccaaagacccagta

SEQ ID NO: 162045 - DNA, 20 bp, Artificial Sequence
  Description of Artificial Sequence: Synthetic oligonucleotide
  Target: LAMA2; (+) strand; PAM type: NRG; PAM sequence: AAG
gtagggtaccctatttcatt

SEQ ID NO: 162046 - DNA, 20 bp, Artificial Sequence
  Description of Artificial Sequence: Synthetic oligonucleotide
  Target: LAMA2; (+) strand; PAM type: NRG; PAM sequence: CAG
gaaatgtgtctctctcatca

SEQ ID NO: 162047 - DNA, 20 bp, Artificial Sequence
  Description of Artificial Sequence: Synthetic oligonucleotide
  Target: LAMA2; (+) strand; PAM type: NRG; PAM sequence: AGG
aaatgtgtctctctcatcac

SEQ ID NO: 162048 - DNA, 20 bp, Artificial Sequence
  Description of Artificial Sequence: Synthetic oligonucleotide
  Target: LAMA2; (+) strand; PAM type: NRG; PAM sequence: TAG
tgtctctctcatcacaggtt

SEQ ID NO: 162049 - DNA, 20 bp, Artificial Sequence
  Description of Artificial Sequence: Synthetic oligonucleotide
  Target: LAMA2; (+) strand; PAM type: NRG; PAM sequence: AAG
ctctctcatcacaggtttag

SEQ ID NO: 162050 - DNA, 20 bp, Artificial Sequence
  Description of Artificial Sequence: Synthetic oligonucleotide
  Target: LAMA2; (+) strand; PAM type: NRG; PAM sequence: GAG
tcatcacaggtttagaagat

SEQ ID NO: 162051 - DNA, 20 bp, Artificial Sequence
  Description of Artificial Sequence: Synthetic oligonucleotide
  Target: LAMA2; (+) strand; PAM type: NRG; PAM sequence: TAG
caggtttagaagatgagttc

SEQ ID NO: 162052 - DNA, 20 bp, Artificial Sequence
  Description of Artificial Sequence: Synthetic oligonucleotide
  Target: LAMA2; (+) strand; PAM type: NRG; PAM sequence: TGG
atcaaaaccaaatcactttc

SEQ ID NO: 162053 - DNA, 20 bp, Artificial Sequence
  Description of Artificial Sequence: Synthetic oligonucleotide
  Target: LAMA2; (+) strand; PAM type: NRG; PAM sequence: TGG
aaatcactttctggaccaac

SEQ ID NO: 162054 - DNA, 20 bp, Artificial Sequence
  Description of Artificial Sequence: Synthetic oligonucleotide
  Target: LAMA2; (+) strand; PAM type: NRG; PAM sequence: CAG
tcactttctggaccaactgg

SEQ ID NO: 162055 - DNA, 20 bp, Artificial Sequence
  Description of Artificial Sequence: Synthetic oligonucleotide
  Target: LAMA2; (+) strand; PAM type: NRG; PAM sequence: AAG
tgtaaattgatcttttttta

SEQ ID NO: 162056 - DNA, 20 bp, Artificial Sequence
  Description of Artificial Sequence: Synthetic oligonucleotide
  Target: LAMA2; (+) strand; PAM type: NRG; PAM sequence: CAG
ttttaaagcaaaatttccaa

SEQ ID NO: 162057 - DNA, 20 bp, Artificial Sequence
  Description of Artificial Sequence: Synthetic oligonucleotide
  Target: LAMA2; (+) strand; PAM type: NRG; PAM sequence: CAG
aagcaaaatttccaacagct

SEQ ID NO: 162058 - DNA, 20 bp, Artificial Sequence
  Description of Artificial Sequence: Synthetic oligonucleotide
  Target: LAMA2; (+) strand; PAM type: NRG; PAM sequence: TGG
agctcagtgcctttaaacac

SEQ ID NO: 162059 - DNA, 20 bp, Artificial Sequence
  Description of Artificial Sequence: Synthetic oligonucleotide
  Target: LAMA2; (+) strand; PAM type: NRG; PAM sequence: TAG
ctgacaaatgtataaaatca

SEQ ID NO: 162060 - DNA, 20 bp, Artificial Sequence
  Description of Artificial Sequence: Synthetic oligonucleotide
  Target: LAMA2; (+) strand; PAM type: NRG; PAM sequence: AAG
caaatgtataaaatcataga

SEQ ID NO: 162061 - DNA, 20 bp, Artificial Sequence
  Description of Artificial Sequence: Synthetic oligonucleotide
  Target: LAMA2; (+) strand; PAM type: NRG; PAM sequence: AAG
tataaaatcatagaaagcct

SEQ ID NO: 162062 - DNA, 20 bp, Artificial Sequence
  Description of Artificial Sequence: Synthetic oligonucleotide
  Target: LAMA2; (+) strand; PAM type: NRG; PAM sequence: CAG
aagaaattcttcctttccca

SEQ ID NO: 162063 - DNA, 20 bp, Artificial Sequence
  Description of Artificial Sequence: Synthetic oligonucleotide
  Target: LAMA2; (+) strand; PAM type: NRG; PAM sequence: TAG
ttcctttcccacagatcatc

SEQ ID NO: 162064 - DNA, 20 bp, Artificial Sequence
  Description of Artificial Sequence: Synthetic oligonucleotide
  Target: LAMA2; (+) strand; PAM type: NRG; PAM sequence: AGG
tcctttcccacagatcatct

SEQ ID NO: 162065 - DNA, 20 bp, Artificial Sequence
  Description of Artificial Sequence: Synthetic oligonucleotide
  Target: LAMA2; (+) strand; PAM type: NRG; PAM sequence: TAG
catctaggatctacattttc

SEQ ID NO: 162066 - DNA, 20 bp, Artificial Sequence
  Description of Artificial Sequence: Synthetic oligonucleotide
  Target: LAMA2; (+) strand; PAM type: NRG; PAM sequence: GAG
ttttctagctgtgtgctcct

SEQ ID NO: 162067 - DNA, 20 bp, Artificial Sequence
  Description of Artificial Sequence: Synthetic oligonucleotide
  Target: LAMA2; (+) strand; PAM type: NRG; PAM sequence: AAG
ctagctgtgtgctcctgagc

SEQ ID NO: 162068 - DNA, 20 bp, Artificial Sequence
  Description of Artificial Sequence: Synthetic oligonucleotide
  Target: LAMA2; (+) strand; PAM type: NRG; PAM sequence: GAG
gcaagatatttgacctcctt

SEQ ID NO: 162069 - DNA, 20 bp, Artificial Sequence
  Description of Artificial Sequence: Synthetic oligonucleotide
  Target: LAMA2; (+) strand; PAM type: NRG; PAM sequence: CAG
tatttgacctccttgagaca

SEQ ID NO: 162070 - DNA, 20 bp, Artificial Sequence
  Description of Artificial Sequence: Synthetic oligonucleotide
  Target: LAMA2; (+) strand; PAM type: NRG; PAM sequence: TAG
ctccttgagacacagttttc

SEQ ID NO: 162071 - DNA, 20 bp, Artificial Sequence
  Description of Artificial Sequence: Synthetic oligonucleotide
  Target: LAMA2; (+) strand; PAM type: NRG; PAM sequence: AAG
acacagttttctagtctaca

SEQ ID NO: 162072 - DNA, 20 bp, Artificial Sequence
  Description of Artificial Sequence: Synthetic oligonucleotide
  Target: LAMA2; (+) strand; PAM type: NRG; PAM sequence: GAG
acagttttctagtctacaaa

SEQ ID NO: 162073 - DNA, 20 bp, Artificial Sequence
  Description of Artificial Sequence: Synthetic oligonucleotide
  Target: LAMA2; (+) strand; PAM type: NRG; PAM sequence: GAG
agttttctagtctacaaaga

SEQ ID NO: 162074 - DNA, 20 bp, Artificial Sequence
  Description of Artificial Sequence: Synthetic oligonucleotide
  Target: LAMA2; (+) strand; PAM type: NRG; PAM sequence: TGG
agagagtcatgaattttctg

SEQ ID NO: 162075 - DNA, 20 bp, Artificial Sequence
  Description of Artificial Sequence: Synthetic oligonucleotide
  Target: LAMA2; (+) strand; PAM type: NRG; PAM sequence: GGG
gagagtcatgaattttctgt

SEQ ID NO: 162076 - DNA, 20 bp, Artificial Sequence
  Description of Artificial Sequence: Synthetic oligonucleotide
  Target: LAMA2; (+) strand; PAM type: NRG; PAM sequence: GGG
agagtcatgaattttctgtg

SEQ ID NO: 162077 - DNA, 20 bp, Artificial Sequence
  Description of Artificial Sequence: Synthetic oligonucleotide
  Target: LAMA2; (+) strand; PAM type: NRG; PAM sequence: AAG
tgaattttctgtggggacta

SEQ ID NO: 162078 - DNA, 20 bp, Artificial Sequence
  Description of Artificial Sequence: Synthetic oligonucleotide
  Target: LAMA2; (+) strand; PAM type: NRG; PAM sequence: AGG
gaattttctgtggggactaa

SEQ ID NO: 162079 - DNA, 20 bp, Artificial Sequence
  Description of Artificial Sequence: Synthetic oligonucleotide
  Target: LAMA2; (+) strand; PAM type: NRG; PAM sequence: TGG
tctgtggggactaaaggatt

SEQ ID NO: 162080 - DNA, 20 bp, Artificial Sequence
  Description of Artificial Sequence: Synthetic oligonucleotide
  Target: LAMA2; (+) strand; PAM type: NRG; PAM sequence: TAG
ggactaaaggatttggcaca

SEQ ID NO: 162081 - DNA, 20 bp, Artificial Sequence
  Description of Artificial Sequence: Synthetic oligonucleotide
  Target: LAMA2; (+) strand; PAM type: NRG; PAM sequence: GAG
actaaaggatttggcacata

SEQ ID NO: 162082 - DNA, 20 bp, Artificial Sequence
  Description of Artificial Sequence: Synthetic oligonucleotide
  Target: LAMA2; (+) strand; PAM type: NRG; PAM sequence: AGG
ctaaaggatttggcacatag

SEQ ID NO: 162083 - DNA, 20 bp, Artificial Sequence
  Description of Artificial Sequence: Synthetic oligonucleotide
  Target: LAMA2; (+) strand; PAM type: NRG; PAM sequence: GGG
taaaggatttggcacataga

SEQ ID NO: 162084 - DNA, 20 bp, Artificial Sequence
  Description of Artificial Sequence: Synthetic oligonucleotide
  Target: LAMA2; (+) strand; PAM type: NRG; PAM sequence: CAG
tttggcacatagagggtatc

SEQ ID NO: 162085 - DNA, 20 bp, Artificial Sequence
  Description of Artificial Sequence: Synthetic oligonucleotide
  Target: LAMA2; (+) strand; PAM type: NRG; PAM sequence: GAG
gcacatagagggtatccagt

SEQ ID NO: 162086 - DNA, 20 bp, Artificial Sequence
  Description of Artificial Sequence: Synthetic oligonucleotide
  Target: LAMA2; (+) strand; PAM type: NRG; PAM sequence: AAG
agggtatccagtgagttccc

SEQ ID NO: 162087 - DNA, 20 bp, Artificial Sequence
  Description of Artificial Sequence: Synthetic oligonucleotide
  Target: LAMA2; (+) strand; PAM type: NRG; PAM sequence: TGG
tccagtgagttcccaagtcc

SEQ ID NO: 162088 - DNA, 20 bp, Artificial Sequence
  Description of Artificial Sequence: Synthetic oligonucleotide
  Target: LAMA2; (+) strand; PAM type: NRG; PAM sequence: GAG
cagtgagttcccaagtcctg

SEQ ID NO: 162089 - DNA, 20 bp, Artificial Sequence
  Description of Artificial Sequence: Synthetic oligonucleotide
  Target: LAMA2; (+) strand; PAM type: NRG; PAM sequence: TGG
gtcctggagatgctcacaca

SEQ ID NO: 162090 - DNA, 20 bp, Artificial Sequence
  Description of Artificial Sequence: Synthetic oligonucleotide
  Target: LAMA2; (+) strand; PAM type: NRG; PAM sequence: TAG
ctggagatgctcacacatgg

SEQ ID NO: 162091 - DNA, 20 bp, Artificial Sequence
  Description of Artificial Sequence: Synthetic oligonucleotide
  Target: LAMA2; (+) strand; PAM type: NRG; PAM sequence: TGG
tcacacatggtagctgtctt

SEQ ID NO: 162092 - DNA, 20 bp, Artificial Sequence
  Description of Artificial Sequence: Synthetic oligonucleotide
  Target: LAMA2; (+) strand; PAM type: NRG; PAM sequence: TAG
cacatggtagctgtctttgg

SEQ ID NO: 162093 - DNA, 20 bp, Artificial Sequence
  Description of Artificial Sequence: Synthetic oligonucleotide
  Target: LAMA2; (+) strand; PAM type: NRG; PAM sequence: CAG
atggtagctgtctttggtag

SEQ ID NO: 162094 - DNA, 20 bp, Artificial Sequence
  Description of Artificial Sequence: Synthetic oligonucleotide
  Target: LAMA2; (+) strand; PAM type: NRG; PAM sequence: TAG
gtctttggtagcagtgctca

SEQ ID NO: 162095 - DNA, 20 bp, Artificial Sequence
  Description of Artificial Sequence: Synthetic oligonucleotide
  Target: LAMA2; (+) strand; PAM type: NRG; PAM sequence: TAG
tttggtagcagtgctcatag

SEQ ID NO: 162096 - DNA, 20 bp, Artificial Sequence
  Description of Artificial Sequence: Synthetic oligonucleotide
  Target: LAMA2; (+) strand; PAM type: NRG; PAM sequence: CAG
ctcatagtagctgtgcatat

SEQ ID NO: 162097 - DNA, 20 bp, Artificial Sequence
  Description of Artificial Sequence: Synthetic oligonucleotide
  Target: LAMA2; (+) strand; PAM type: NRG; PAM sequence: CAG
tgtgcatatcagttgttcac

SEQ ID NO: 162098 - DNA, 20 bp, Artificial Sequence
  Description of Artificial Sequence: Synthetic oligonucleotide
  Target: LAMA2; (+) strand; PAM type: NRG; PAM sequence: AAG
gttgttcaccagtgaattct

SEQ ID NO: 162099 - DNA, 20 bp, Artificial Sequence
  Description of Artificial Sequence: Synthetic oligonucleotide
  Target: LAMA2; (+) strand; PAM type: NRG; PAM sequence: AGG
ttgttcaccagtgaattcta

SEQ ID NO: 162100 - DNA, 20 bp, Artificial Sequence
  Description of Artificial Sequence: Synthetic oligonucleotide
  Target: LAMA2; (+) strand; PAM type: NRG; PAM sequence: AAG
caccagtgaattctaaggct

SEQ ID NO: 162101 - DNA, 20 bp, Artificial Sequence
  Description of Artificial Sequence: Synthetic oligonucleotide
  Target: LAMA2; (+) strand; PAM type: NRG; PAM sequence: TAG
agtgaattctaaggctaagt

SEQ ID NO: 162102 - DNA, 20 bp, Artificial Sequence
  Description of Artificial Sequence: Synthetic oligonucleotide
  Target: LAMA2; (+) strand; PAM type: NRG; PAM sequence: AAG
caataacccccacccccata

SEQ ID NO: 162103 - DNA, 20 bp, Artificial Sequence
  Description of Artificial Sequence: Synthetic oligonucleotide
  Target: LAMA2; (+) strand; PAM type: NRG; PAM sequence: TAG
aacccccacccccataaagt

SEQ ID NO: 162104 - DNA, 20 bp, Artificial Sequence
  Description of Artificial Sequence: Synthetic oligonucleotide
  Target: LAMA2; (+) strand; PAM type: NRG; PAM sequence: AGG
acccccacccccataaagtt

SEQ ID NO: 162105 - DNA, 20 bp, Artificial Sequence
  Description of Artificial Sequence: Synthetic oligonucleotide
  Target: LAMA2; (+) strand; PAM type: NRG; PAM sequence: GGG
cccccacccccataaagtta

SEQ ID NO: 162106 - DNA, 20 bp, Artificial Sequence
  Description of Artificial Sequence: Synthetic oligonucleotide
  Target: LAMA2; (+) strand; PAM type: NRG; PAM sequence: TGG
ttattccactaattttatta

SEQ ID NO: 162107 - DNA, 20 bp, Artificial Sequence
  Description of Artificial Sequence: Synthetic oligonucleotide
  Target: LAMA2; (+) strand; PAM type: NRG; PAM sequence: TGG
tttattatggtaatttattg

SEQ ID NO: 162108 - DNA, 20 bp, Artificial Sequence
  Description of Artificial Sequence: Synthetic oligonucleotide
  Target: LAMA2; (+) strand; PAM type: NRG; PAM sequence: GGG
ttattatggtaatttattgt

SEQ ID NO: 162109 - DNA, 20 bp, Artificial Sequence
  Description of Artificial Sequence: Synthetic oligonucleotide
  Target: LAMA2; (+) strand; PAM type: NRG; PAM sequence: TGG
attgtgggattattttatta

SEQ ID NO: 162110 - DNA, 20 bp, Artificial Sequence
  Description of Artificial Sequence: Synthetic oligonucleotide
  Target: LAMA2; (+) strand; PAM type: NRG; PAM sequence: TGG
aattaattattattttatta

SEQ ID NO: 162111 - DNA, 20 bp, Artificial Sequence
  Description of Artificial Sequence: Synthetic oligonucleotide
  Target: LAMA2; (+) strand; PAM type: NRG; PAM sequence: TAG
attatggtaattaattattg

SEQ ID NO: 162112 - DNA, 20 bp, Artificial Sequence
  Description of Artificial Sequence: Synthetic oligonucleotide
  Target: LAMA2; (+) strand; PAM type: NRG; PAM sequence: TGG
attattgtagaaaattatta

SEQ ID NO: 162113 - DNA, 20 bp, Artificial Sequence
  Description of Artificial Sequence: Synthetic oligonucleotide
  Target: LAMA2; (+) strand; PAM type: NRG; PAM sequence: GGG
ttattgtagaaaattattat

SEQ ID NO: 162114 - DNA, 20 bp, Artificial Sequence
  Description of Artificial Sequence: Synthetic oligonucleotide
  Target: LAMA2; (+) strand; PAM type: NRG; PAM sequence: TGG
attatgggattattttatta

SEQ ID NO: 162115 - DNA, 20 bp, Artificial Sequence
  Description of Artificial Sequence: Synthetic oligonucleotide
  Target: LAMA2; (+) strand; PAM type: NRG; PAM sequence: TGG
tttattatggtaatttatta

SEQ ID NO: 162116 - DNA, 20 bp, Artificial Sequence
  Description of Artificial Sequence: Synthetic oligonucleotide
  Target: LAMA2; (+) strand; PAM type: NRG; PAM sequence: GGG
ttattatggtaatttattat

SEQ ID NO: 162117 - DNA, 20 bp, Artificial Sequence
  Description of Artificial Sequence: Synthetic oligonucleotide
  Target: LAMA2; (+) strand; PAM type: NRG; PAM sequence: TGG
gtaatttattatgggatcca

SEQ ID NO: 162118 - DNA, 20 bp, Artificial Sequence
  Description of Artificial Sequence: Synthetic oligonucleotide
  Target: LAMA2; (+) strand; PAM type: NRG; PAM sequence: AAG
attatgggatccatggcatg

SEQ ID NO: 162119 - DNA, 20 bp, Artificial Sequence
  Description of Artificial Sequence: Synthetic oligonucleotide
  Target: LAMA2; (+) strand; PAM type: NRG; PAM sequence: AAG
gatccatggcatgaagtctt

SEQ ID NO: 162120 - DNA, 20 bp, Artificial Sequence
  Description of Artificial Sequence: Synthetic oligonucleotide
  Target: LAMA2; (+) strand; PAM type: NRG; PAM sequence: AAG
gaagtcttaagaacataaaa

SEQ ID NO: 162121 - DNA, 20 bp, Artificial Sequence
  Description of Artificial Sequence: Synthetic oligonucleotide
  Target: LAMA2; (+) strand; PAM type: NRG; PAM sequence: GAG
aagaacataaaaaagaatgt

SEQ ID NO: 162122 - DNA, 20 bp, Artificial Sequence
  Description of Artificial Sequence: Synthetic oligonucleotide
  Target: LAMA2; (+) strand; PAM type: NRG; PAM sequence: CAG
aaaaacattttgaccattac

SEQ ID NO: 162123 - DNA, 20 bp, Artificial Sequence
  Description of Artificial Sequence: Synthetic oligonucleotide
  Target: LAMA2; (+) strand; PAM type: NRG; PAM sequence: GAG
gttttcatactacttgccgt

SEQ ID NO: 162124 - DNA, 20 bp, Artificial Sequence
  Description of Artificial Sequence: Synthetic oligonucleotide
  Target: LAMA2; (+) strand; PAM type: NRG; PAM sequence: TAG
catactacttgccgtgagta

SEQ ID NO: 162125 - DNA, 20 bp, Artificial Sequence
  Description of Artificial Sequence: Synthetic oligonucleotide
  Target: LAMA2; (+) strand; PAM type: NRG; PAM sequence: AAG
tgccatataatcacaattaa

SEQ ID NO: 162126 - DNA, 20 bp, Artificial Sequence
  Description of Artificial Sequence: Synthetic oligonucleotide
  Target: LAMA2; (+) strand; PAM type: NRG; PAM sequence: AAG
ataatcacaattaaaagtat

SEQ ID NO: 162127 - DNA, 20 bp, Artificial Sequence
  Description of Artificial Sequence: Synthetic oligonucleotide
  Target: LAMA2; (+) strand; PAM type: NRG; PAM sequence: AAG
atcacaattaaaagtataag

SEQ ID NO: 162128 - DNA, 20 bp, Artificial Sequence
  Description of Artificial Sequence: Synthetic oligonucleotide
  Target: LAMA2; (+) strand; PAM type: NRG; PAM sequence: TGG
cttatttttataatttttca

SEQ ID NO: 162129 - DNA, 20 bp, Artificial Sequence
  Description of Artificial Sequence: Synthetic oligonucleotide
  Target: LAMA2; (+) strand; PAM type: NRG; PAM sequence: AAG
acaatatcacttctatgcat

SEQ ID NO: 162130 - DNA, 20 bp, Artificial Sequence
  Description of Artificial Sequence: Synthetic oligonucleotide
  Target: LAMA2; (+) strand; PAM type: NRG; PAM sequence: TGG
atatcacttctatgcataag

SEQ ID NO: 162131 - DNA, 20 bp, Artificial Sequence
  Description of Artificial Sequence: Synthetic oligonucleotide
  Target: LAMA2; (+) strand; PAM type: NRG; PAM sequence: AAG
tgcataagtggtaaaacctc

SEQ ID NO: 162132 - DNA, 20 bp, Artificial Sequence
  Description of Artificial Sequence: Synthetic oligonucleotide
  Target: LAMA2; (+) strand; PAM type: NRG; PAM sequence: AGG
gcataagtggtaaaacctca

SEQ ID NO: 162133 - DNA, 20 bp, Artificial Sequence
  Description of Artificial Sequence: Synthetic oligonucleotide
  Target: LAMA2; (+) strand; PAM type: NRG; PAM sequence: AAG
aagtggtaaaacctcaagga

SEQ ID NO: 162134 - DNA, 20 bp, Artificial Sequence
  Description of Artificial Sequence: Synthetic oligonucleotide
  Target: LAMA2; (+) strand; PAM type: NRG; PAM sequence: AAG
ggtaaaacctcaaggaaaga

SEQ ID NO: 162135 - DNA, 20 bp, Artificial Sequence
  Description of Artificial Sequence: Synthetic oligonucleotide
  Target: LAMA2; (+) strand; PAM type: NRG; PAM sequence: TGG
cctcaaggaaagaaagttcc

SEQ ID NO: 162136 - DNA, 20 bp, Artificial Sequence
  Description of Artificial Sequence: Synthetic oligonucleotide
  Target: LAMA2; (+) strand; PAM type: NRG; PAM sequence: TGG
ttcctggaaatacattattt

SEQ ID NO: 162137 - DNA, 20 bp, Artificial Sequence
  Description of Artificial Sequence: Synthetic oligonucleotide
  Target: LAMA2; (+) strand; PAM type: NRG; PAM sequence: TAG
tacattattttggttaccta

SEQ ID NO: 162138 - DNA, 20 bp, Artificial Sequence
  Description of Artificial Sequence: Synthetic oligonucleotide
  Target: LAMA2; (+) strand; PAM type: NRG; PAM sequence: AAG
ggttacctatagatttgttc

SEQ ID NO: 162139 - DNA, 20 bp, Artificial Sequence
  Description of Artificial Sequence: Synthetic oligonucleotide
  Target: LAMA2; (+) strand; PAM type: NRG; PAM sequence: AAG
cctatagatttgttcaagaa

SEQ ID NO: 162140 - DNA, 20 bp, Artificial Sequence
  Description of Artificial Sequence: Synthetic oligonucleotide
  Target: LAMA2; (+) strand; PAM type: NRG; PAM sequence: AAG
aagaaaagtacaccactaca

SEQ ID NO: 162141 - DNA, 20 bp, Artificial Sequence
  Description of Artificial Sequence: Synthetic oligonucleotide
  Target: LAMA2; (+) strand; PAM type: NRG; PAM sequence: TGG
tttaaatttgtgtatatcgt

SEQ ID NO: 162142 - DNA, 20 bp, Artificial Sequence
  Description of Artificial Sequence: Synthetic oligonucleotide
  Target: LAMA2; (+) strand; PAM type: NRG; PAM sequence: TAG
tttccattaaaatgacactt

SEQ ID NO: 162143 - DNA, 20 bp, Artificial Sequence
  Description of Artificial Sequence: Synthetic oligonucleotide
  Target: LAMA2; (+) strand; PAM type: NRG; PAM sequence: TGG
attaattaccatcatattta

SEQ ID NO: 162144 - DNA, 20 bp, Artificial Sequence
  Description of Artificial Sequence: Synthetic oligonucleotide
  Target: LAMA2; (+) strand; PAM type: NRG; PAM sequence: TAG
ttatggtaaatttaattttg

SEQ ID NO: 162145 - DNA, 20 bp, Artificial Sequence
  Description of Artificial Sequence: Synthetic oligonucleotide
  Target: LAMA2; (+) strand; PAM type: NRG; PAM sequence: AAG
aattttgtagtttacactcc

SEQ ID NO: 162146 - DNA, 20 bp, Artificial Sequence
  Description of Artificial Sequence: Synthetic oligonucleotide
  Target: LAMA2; (+) strand; PAM type: NRG; PAM sequence: AAG
gtagtttacactccaagaaa

SEQ ID NO: 162147 - DNA, 20 bp, Artificial Sequence
  Description of Artificial Sequence: Synthetic oligonucleotide
  Target: LAMA2; (+) strand; PAM type: NRG; PAM sequence: AAG
ccaagaaaaagtgactccta

SEQ ID NO: 162148 - DNA, 20 bp, Artificial Sequence
  Description of Artificial Sequence: Synthetic oligonucleotide
  Target: LAMA2; (+) strand; PAM type: NRG; PAM sequence: AAG
taaaaatgtatgatatgcat

SEQ ID NO: 162149 - DNA, 20 bp, Artificial Sequence
  Description of Artificial Sequence: Synthetic oligonucleotide
  Target: LAMA2; (+) strand; PAM type: NRG; PAM sequence: AAG
aaactttcataaaataataa

SEQ ID NO: 162150 - DNA, 20 bp, Artificial Sequence
  Description of Artificial Sequence: Synthetic oligonucleotide
  Target: LAMA2; (+) strand; PAM type: NRG; PAM sequence: CAG
tatatacaaattcgataaat

SEQ ID NO: 162151 - DNA, 20 bp, Artificial Sequence
  Description of Artificial Sequence: Synthetic oligonucleotide
  Target: LAMA2; (+) strand; PAM type: NRG; PAM sequence: TGG
ttcgataaatcagatgaaaa

SEQ ID NO: 162152 - DNA, 20 bp, Artificial Sequence
  Description of Artificial Sequence: Synthetic oligonucleotide
  Target: LAMA2; (+) strand; PAM type: NRG; PAM sequence: AAG
cagatgaaaatggatattta

SEQ ID NO: 162153 - DNA, 20 bp, Artificial Sequence
  Description of Artificial Sequence: Synthetic oligonucleotide
  Target: LAMA2; (+) strand; PAM type: NRG; PAM sequence: AGG
agatgaaaatggatatttaa

SEQ ID NO: 162154 - DNA, 20 bp, Artificial Sequence
  Description of Artificial Sequence: Synthetic oligonucleotide
  Target: LAMA2; (+) strand; PAM type: NRG; PAM sequence: CAG
atatttaaaggaaaaatttt

SEQ ID NO: 162155 - DNA, 20 bp, Artificial Sequence
  Description of Artificial Sequence: Synthetic oligonucleotide
  Target: LAMA2; (+) strand; PAM type: NRG; PAM sequence: CAG
ttcagcctttccttgtattt

SEQ ID NO: 162156 - DNA, 20 bp, Artificial Sequence
  Description of Artificial Sequence: Synthetic oligonucleotide
  Target: LAMA2; (+) strand; PAM type: NRG; PAM sequence: TAG
ctttccttgtatttcagcta

SEQ ID NO: 162157 - DNA, 20 bp, Artificial Sequence
  Description of Artificial Sequence: Synthetic oligonucleotide
  Target: LAMA2; (+) strand; PAM type: NRG; PAM sequence: TAG
tttcagctatagactatccg

SEQ ID NO: 162158 - DNA, 20 bp, Artificial Sequence
  Description of Artificial Sequence: Synthetic oligonucleotide
  Target: LAMA2; (+) strand; PAM type: NRG; PAM sequence: AGG
ttcagctatagactatccgt

SEQ ID NO: 162159 - DNA, 20 bp, Artificial Sequence
  Description of Artificial Sequence: Synthetic oligonucleotide
  Target: LAMA2; (+) strand; PAM type: NRG; PAM sequence: CAG
agactatccgtaggctcttt

SEQ ID NO: 162160 - DNA, 20 bp, Artificial Sequence
  Description of Artificial Sequence: Synthetic oligonucleotide
  Target: LAMA2; (+) strand; PAM type: NRG; PAM sequence: TGG
aggctctttcagtttctcaa

SEQ ID NO: 162161 - DNA, 20 bp, Artificial Sequence
  Description of Artificial Sequence: Synthetic oligonucleotide
  Target: LAMA2; (+) strand; PAM type: NRG; PAM sequence: TAG
tttctcaatggcccttactc

SEQ ID NO: 162162 - DNA, 20 bp, Artificial Sequence
  Description of Artificial Sequence: Synthetic oligonucleotide
  Target: LAMA2; (+) strand; PAM type: NRG; PAM sequence: TGG
cccttactctagtatcccct

SEQ ID NO: 162163 - DNA, 20 bp, Artificial Sequence
  Description of Artificial Sequence: Synthetic oligonucleotide
  Target: LAMA2; (+) strand; PAM type: NRG; PAM sequence: CAG
ttactctagtatccccttgg

SEQ ID NO: 162164 - DNA, 20 bp, Artificial Sequence
  Description of Artificial Sequence: Synthetic oligonucleotide
  Target: LAMA2; (+) strand; PAM type: NRG; PAM sequence: AAG
tatccccttggcagacactg

SEQ ID NO: 162165 - DNA, 20 bp, Artificial Sequence
  Description of Artificial Sequence: Synthetic oligonucleotide
  Target: LAMA2; (+) strand; PAM type: NRG; PAM sequence: TGG
acactgaagacaaactttgc

SEQ ID NO: 162166 - DNA, 20 bp, Artificial Sequence
  Description of Artificial Sequence: Synthetic oligonucleotide
  Target: LAMA2; (+) strand; PAM type: NRG; PAM sequence: AAG
ctgaagacaaactttgctgg

SEQ ID NO: 162167 - DNA, 20 bp, Artificial Sequence
  Description of Artificial Sequence: Synthetic oligonucleotide
  Target: LAMA2; (+) strand; PAM type: NRG; PAM sequence: AAG
actttgctggaagataaatt

SEQ ID NO: 162168 - DNA, 20 bp, Artificial Sequence
  Description of Artificial Sequence: Synthetic oligonucleotide
  Target: LAMA2; (+) strand; PAM type: NRG; PAM sequence: CAG
ttgctggaagataaattaag

SEQ ID NO: 162169 - DNA, 20 bp, Artificial Sequence
  Description of Artificial Sequence: Synthetic oligonucleotide
  Target: LAMA2; (+) strand; PAM type: NRG; PAM sequence: TAG
aagataaattaagcagtttt

SEQ ID NO: 162170 - DNA, 20 bp, Artificial Sequence
  Description of Artificial Sequence: Synthetic oligonucleotide
  Target: LAMA2; (+) strand; PAM type: NRG; PAM sequence: AAG
aaattaagcagtttttagaa

SEQ ID NO: 162171 - DNA, 20 bp, Artificial Sequence
  Description of Artificial Sequence: Synthetic oligonucleotide
  Target: LAMA2; (+) strand; PAM type: NRG; PAM sequence: CAG
ttaagcagtttttagaaaag

SEQ ID NO: 162172 - DNA, 20 bp, Artificial Sequence
  Description of Artificial Sequence: Synthetic oligonucleotide
  Target: LAMA2; (+) strand; PAM type: NRG; PAM sequence: AAG
tttatttgtttgttttttaa

SEQ ID NO: 162173 - DNA, 20 bp, Artificial Sequence
  Description of Artificial Sequence: Synthetic oligonucleotide
  Target: LAMA2; (+) strand; PAM type: NRG; PAM sequence: AGG
ttatttgtttgttttttaaa

SEQ ID NO: 162174 - DNA, 20 bp, Artificial Sequence
  Description of Artificial Sequence: Synthetic oligonucleotide
  Target: LAMA2; (+) strand; PAM type: NRG; PAM sequence: GAG
atttgtttgttttttaaaag

SEQ ID NO: 162175 - DNA, 20 bp, Artificial Sequence
  Description of Artificial Sequence: Synthetic oligonucleotide
  Target: LAMA2; (+) strand; PAM type: NRG; PAM sequence: TAG
tgttttttaaaaggagaacc

SEQ ID NO: 162176 - DNA, 20 bp, Artificial Sequence
  Description of Artificial Sequence: Synthetic oligonucleotide
  Target: LAMA2; (+) strand; PAM type: NRG; PAM sequence: GAG
ttttttaaaaggagaaccta

SEQ ID NO: 162177 - DNA, 20 bp, Artificial Sequence
  Description of Artificial Sequence: Synthetic oligonucleotide
  Target: LAMA2; (+) strand; PAM type: NRG; PAM sequence: CAG
ttaaaaggagaacctagagc

SEQ ID NO: 162178 - DNA, 20 bp, Artificial Sequence
  Description of Artificial Sequence: Synthetic oligonucleotide
  Target: LAMA2; (+) strand; PAM type: NRG; PAM sequence: AGG
taaaaggagaacctagagcc

SEQ ID NO: 162179 - DNA, 20 bp, Artificial Sequence
  Description of Artificial Sequence: Synthetic oligonucleotide
  Target: LAMA2; (+) strand; PAM type: NRG; PAM sequence: GAG
aaaggagaacctagagccag

SEQ ID NO: 162180 - DNA, 20 bp, Artificial Sequence
  Description of Artificial Sequence: Synthetic oligonucleotide
  Target: LAMA2; (+) strand; PAM type: NRG; PAM sequence: TAG
gagccaggagaataaaatat

SEQ ID NO: 162181 - DNA, 20 bp, Artificial Sequence
  Description of Artificial Sequence: Synthetic oligonucleotide
  Target: LAMA2; (+) strand; PAM type: NRG; PAM sequence: TAG
aggagaataaaatattagca

SEQ ID NO: 162182 - DNA, 20 bp, Artificial Sequence
  Description of Artificial Sequence: Synthetic oligonucleotide
  Target: LAMA2; (+) strand; PAM type: NRG; PAM sequence: AGG
ggagaataaaatattagcat

SEQ ID NO: 162183 - DNA, 20 bp, Artificial Sequence
  Description of Artificial Sequence: Synthetic oligonucleotide
  Target: LAMA2; (+) strand; PAM type: NRG; PAM sequence: TAG
aaaatattagcataggctga

SEQ ID NO: 162184 - DNA, 20 bp, Artificial Sequence
  Description of Artificial Sequence: Synthetic oligonucleotide
  Target: LAMA2; (+) strand; PAM type: NRG; PAM sequence: GAG
aatattagcataggctgata

SEQ ID NO: 162185 - DNA, 20 bp, Artificial Sequence
  Description of Artificial Sequence: Synthetic oligonucleotide
  Target: LAMA2; (+) strand; PAM type: NRG; PAM sequence: TAG
gctgatagagtacctgttta

SEQ ID NO: 162186 - DNA, 20 bp, Artificial Sequence
  Description of Artificial Sequence: Synthetic oligonucleotide
  Target: LAMA2; (+) strand; PAM type: NRG; PAM sequence: TAG
acctgtttatagcttaattt

SEQ ID NO: 162187 - DNA, 20 bp, Artificial Sequence
  Description of Artificial Sequence: Synthetic oligonucleotide
  Target: LAMA2; (+) strand; PAM type: NRG; PAM sequence: AGG
cctgtttatagcttaatttt

SEQ ID NO: 162188 - DNA, 20 bp, Artificial Sequence
  Description of Artificial Sequence: Synthetic oligonucleotide
  Target: LAMA2; (+) strand; PAM type: NRG; PAM sequence: CAG
tgtgttcaaatcaaaatatt

SEQ ID NO: 162189 - DNA, 20 bp, Artificial Sequence
  Description of Artificial Sequence: Synthetic oligonucleotide
  Target: LAMA2; (+) strand; PAM type: NRG; PAM sequence: GAG
aatttaacaaaatcatctat

SEQ ID NO: 162190 - DNA, 20 bp, Artificial Sequence
  Description of Artificial Sequence: Synthetic oligonucleotide
  Target: LAMA2; (+) strand; PAM type: NRG; PAM sequence: TAG
ttaacaaaatcatctatgag

SEQ ID NO: 162191 - DNA, 20 bp, Artificial Sequence
  Description of Artificial Sequence: Synthetic oligonucleotide
  Target: LAMA2; (+) strand; PAM type: NRG; PAM sequence: TAG
tatatgtaccattaaaaata

SEQ ID NO: 162192 - DNA, 20 bp, Artificial Sequence
  Description of Artificial Sequence: Synthetic oligonucleotide
  Target: LAMA2; (+) strand; PAM type: NRG; PAM sequence: AGG
atatgtaccattaaaaatat

SEQ ID NO: 162193 - DNA, 20 bp, Artificial Sequence
  Description of Artificial Sequence: Synthetic oligonucleotide
  Target: LAMA2; (+) strand; PAM type: NRG; PAM sequence: GGG
tatgtaccattaaaaatata

SEQ ID NO: 162194 - DNA, 20 bp, Artificial Sequence
  Description of Artificial Sequence: Synthetic oligonucleotide
  Target: LAMA2; (+) strand; PAM type: NRG; PAM sequence: TAG
cattaaaaatatagggtaca

SEQ ID NO: 162195 - DNA, 20 bp, Artificial Sequence
  Description of Artificial Sequence: Synthetic oligonucleotide
  Target: LAMA2; (+) strand; PAM type: NRG; PAM sequence: AAG
attactattctatttgtgaa

SEQ ID NO: 162196 - DNA, 20 bp, Artificial Sequence
  Description of Artificial Sequence: Synthetic oligonucleotide
  Target: LAMA2; (+) strand; PAM type: NRG; PAM sequence: AGG
ttactattctatttgtgaaa

SEQ ID NO: 162197 - DNA, 20 bp, Artificial Sequence
  Description of Artificial Sequence: Synthetic oligonucleotide
  Target: LAMA2; (+) strand; PAM type: NRG; PAM sequence: AAG
tatttgtgaaaaggtcactt

SEQ ID NO: 162198 - DNA, 20 bp, Artificial Sequence
  Description of Artificial Sequence: Synthetic oligonucleotide
  Target: LAMA2; (+) strand; PAM type: NRG; PAM sequence: TAG
tgaaaaggtcacttaagctt

SEQ ID NO: 162199 - DNA, 20 bp, Artificial Sequence
  Description of Artificial Sequence: Synthetic oligonucleotide
  Target: LAMA2; (+) strand; PAM type: NRG; PAM sequence: TAG
gactgatttactctacgttt

SEQ ID NO: 162200 - DNA, 20 bp, Artificial Sequence
  Description of Artificial Sequence: Synthetic oligonucleotide
  Target: LAMA2; (+) strand; PAM type: NRG; PAM sequence: CAG
tctacgttttagaataacct

SEQ ID NO: 162201 - DNA, 20 bp, Artificial Sequence
  Description of Artificial Sequence: Synthetic oligonucleotide
  Target: LAMA2; (+) strand; PAM type: NRG; PAM sequence: CAG
cgttttagaataacctcaga

SEQ ID NO: 162202 - DNA, 20 bp, Artificial Sequence
  Description of Artificial Sequence: Synthetic oligonucleotide
  Target: LAMA2; (+) strand; PAM type: NRG; PAM sequence: AAG
cctcagacagctttataaca

SEQ ID NO: 162203 - DNA, 20 bp, Artificial Sequence
  Description of Artificial Sequence: Synthetic oligonucleotide
  Target: LAMA2; (+) strand; PAM type: NRG; PAM sequence: AAG
agctttataacaaagcaaaa

SEQ ID NO: 162204 - DNA, 20 bp, Artificial Sequence
  Description of Artificial Sequence: Synthetic oligonucleotide
  Target: LAMA2; (+) strand; PAM type: NRG; PAM sequence: AAG
taacaaagcaaaaaagacaa

SEQ ID NO: 162205 - DNA, 20 bp, Artificial Sequence
  Description of Artificial Sequence: Synthetic oligonucleotide
  Target: LAMA2; (+) strand; PAM type: NRG; PAM sequence: TGG
tgaaatatgttttgtatgtt

SEQ ID NO: 162206 - DNA, 20 bp, Artificial Sequence
  Description of Artificial Sequence: Synthetic oligonucleotide
  Target: LAMA2; (+) strand; PAM type: NRG; PAM sequence: GAG
aaatatgttttgtatgtttg

SEQ ID NO: 162207 - DNA, 20 bp, Artificial Sequence
  Description of Artificial Sequence: Synthetic oligonucleotide
  Target: LAMA2; (+) strand; PAM type: NRG; PAM sequence: TAG
atgttttgtatgtttggaga

SEQ ID NO: 162208 - DNA, 20 bp, Artificial Sequence
  Description of Artificial Sequence: Synthetic oligonucleotide
  Target: LAMA2; (+) strand; PAM type: NRG; PAM sequence: AAG
gcatataaactgtaaaataa

SEQ ID NO: 162209 - DNA, 20 bp, Artificial Sequence
  Description of Artificial Sequence: Synthetic oligonucleotide
  Target: LAMA2; (+) strand; PAM type: NRG; PAM sequence: TAG
tcttaaatgttataatgcta

SEQ ID NO: 162210 - DNA, 20 bp, Artificial Sequence
  Description of Artificial Sequence: Synthetic oligonucleotide
  Target: LAMA2; (+) strand; PAM type: NRG; PAM sequence: AAG
tgttataatgctatagtctt

SEQ ID NO: 162211 - DNA, 20 bp, Artificial Sequence
  Description of Artificial Sequence: Synthetic oligonucleotide
  Target: LAMA2; (+) strand; PAM type: NRG; PAM sequence: AAG
taaacttctgaatcttaaaa

SEQ ID NO: 162212 - DNA, 20 bp, Artificial Sequence
  Description of Artificial Sequence: Synthetic oligonucleotide
  Target: LAMA2; (+) strand; PAM type: NRG; PAM sequence: AGG
aaacttctgaatcttaaaaa

SEQ ID NO: 162213 - DNA, 20 bp, Artificial Sequence
  Description of Artificial Sequence: Synthetic oligonucleotide
  Target: LAMA2; (+) strand; PAM type: NRG; PAM sequence: CGG
ttttaaacttaacacaaaac

SEQ ID NO: 162214 - DNA, 20 bp, Artificial Sequence
  Description of Artificial Sequence: Synthetic oligonucleotide
  Target: LAMA2; (+) strand; PAM type: NRG; PAM sequence: CAG
cttaacacaaaaccggcaca

SEQ ID NO: 162215 - DNA, 20 bp, Artificial Sequence
  Description of Artificial Sequence: Synthetic oligonucleotide
  Target: LAMA2; (+) strand; PAM type: NRG; PAM sequence: TAG
aaaaactaactaaatttttc

SEQ ID NO: 162216 - DNA, 20 bp, Artificial Sequence
  Description of Artificial Sequence: Synthetic oligonucleotide
  Target: LAMA2; (+) strand; PAM type: NRG; PAM sequence: TAG
actaaatttttctagattaa

SEQ ID NO: 162217 - DNA, 20 bp, Artificial Sequence
  Description of Artificial Sequence: Synthetic oligonucleotide
  Target: LAMA2; (+) strand; PAM type: NRG; PAM sequence: CAG
tagtaacattaaaattttgc

SEQ ID NO: 162218 - DNA, 20 bp, Artificial Sequence
  Description of Artificial Sequence: Synthetic oligonucleotide
  Target: LAMA2; (+) strand; PAM type: NRG; PAM sequence: AGG
agtaacattaaaattttgcc

SEQ ID NO: 162219 - DNA, 20 bp, Artificial Sequence
  Description of Artificial Sequence: Synthetic oligonucleotide
  Target: LAMA2; (+) strand; PAM type: NRG; PAM sequence: GGG
gtaacattaaaattttgcca

SEQ ID NO: 162220 - DNA, 20 bp, Artificial Sequence
  Description of Artificial Sequence: Synthetic oligonucleotide
  Target: LAMA2; (+) strand; PAM type: NRG; PAM sequence: GGG
taacattaaaattttgccag

SEQ ID NO: 162221 - DNA, 20 bp, Artificial Sequence
  Description of Artificial Sequence: Synthetic oligonucleotide
  Target: LAMA2; (+) strand; PAM type: NRG; PAM sequence: TAG
aaaattcctcaaaattattt

SEQ ID NO: 162222 - DNA, 20 bp, Artificial Sequence
  Description of Artificial Sequence: Synthetic oligonucleotide
  Target: LAMA2; (+) strand; PAM type: NRG; PAM sequence: AAG
tcaaaattattttagttcta

SEQ ID NO: 162223 - DNA, 20 bp, Artificial Sequence
  Description of Artificial Sequence: Synthetic oligonucleotide
  Target: LAMA2; (+) strand; PAM type: NRG; PAM sequence: CAG
aattattttagttctaaagt

SEQ ID NO: 162224 - DNA, 20 bp, Artificial Sequence
  Description of Artificial Sequence: Synthetic oligonucleotide
  Target: LAMA2; (+) strand; PAM type: NRG; PAM sequence: TGG
tcagtatgcattacttacaa

SEQ ID NO: 162225 - DNA, 20 bp, Artificial Sequence
  Description of Artificial Sequence: Synthetic oligonucleotide
  Target: LAMA2; (+) strand; PAM type: NRG; PAM sequence: GGG
cagtatgcattacttacaat

SEQ ID NO: 162226 - DNA, 20 bp, Artificial Sequence
  Description of Artificial Sequence: Synthetic oligonucleotide
  Target: LAMA2; (+) strand; PAM type: NRG; PAM sequence: TAG
cattacttacaatgggataa

SEQ ID NO: 162227 - DNA, 20 bp, Artificial Sequence
  Description of Artificial Sequence: Synthetic oligonucleotide
  Target: LAMA2; (+) strand; PAM type: NRG; PAM sequence: AAG
caatgggataatagtatttt

SEQ ID NO: 162228 - DNA, 20 bp, Artificial Sequence
  Description of Artificial Sequence: Synthetic oligonucleotide
  Target: LAMA2; (+) strand; PAM type: NRG; PAM sequence: AAG
gttaccctgatgtatctgta

SEQ ID NO: 162229 - DNA, 20 bp, Artificial Sequence
  Description of Artificial Sequence: Synthetic oligonucleotide
  Target: LAMA2; (+) strand; PAM type: NRG; PAM sequence: CAG
gtatctgtaaagaactaaaa

SEQ ID NO: 162230 - DNA, 20 bp, Artificial Sequence
  Description of Artificial Sequence: Synthetic oligonucleotide
  Target: LAMA2; (+) strand; PAM type: NRG; PAM sequence: GAG
ctaaaacagcgttacacctt

SEQ ID NO: 162231 - DNA, 20 bp, Artificial Sequence
  Description of Artificial Sequence: Synthetic oligonucleotide
  Target: LAMA2; (+) strand; PAM type: NRG; PAM sequence: AAG
acagcgttacaccttgagtc

SEQ ID NO: 162232 - DNA, 20 bp, Artificial Sequence
  Description of Artificial Sequence: Synthetic oligonucleotide
  Target: LAMA2; (+) strand; PAM type: NRG; PAM sequence: AAG
caccttgagtcaagaactcc

SEQ ID NO: 162233 - DNA, 20 bp, Artificial Sequence
  Description of Artificial Sequence: Synthetic oligonucleotide
  Target: LAMA2; (+) strand; PAM type: NRG; PAM sequence: TGG
tccaagttcctgtcacgttc

SEQ ID NO: 162234 - DNA, 20 bp, Artificial Sequence
  Description of Artificial Sequence: Synthetic oligonucleotide
  Target: LAMA2; (+) strand; PAM type: NRG; PAM sequence: CAG
ctggactcacctatatgaca

SEQ ID NO: 162235 - DNA, 20 bp, Artificial Sequence
  Description of Artificial Sequence: Synthetic oligonucleotide
  Target: LAMA2; (+) strand; PAM type: NRG; PAM sequence: CAG
gactcacctatatgacacag

SEQ ID NO: 162236 - DNA, 20 bp, Artificial Sequence
  Description of Artificial Sequence: Synthetic oligonucleotide
  Target: LAMA2; (+) strand; PAM type: NRG; PAM sequence: AGG
actcacctatatgacacagc

SEQ ID NO: 162237 - DNA, 20 bp, Artificial Sequence
  Description of Artificial Sequence: Synthetic oligonucleotide
  Target: LAMA2; (+) strand; PAM type: NRG; PAM sequence: TGG
tatatgacacagcaggcatg

SEQ ID NO: 162238 - DNA, 20 bp, Artificial Sequence
  Description of Artificial Sequence: Synthetic oligonucleotide
  Target: LAMA2; (+) strand; PAM type: NRG; PAM sequence: AAG
gcaggcatgtggacttgtat

SEQ ID NO: 162239 - DNA, 20 bp, Artificial Sequence
  Description of Artificial Sequence: Synthetic oligonucleotide
  Target: LAMA2; (+) strand; PAM type: NRG; PAM sequence: TGG
atgtggacttgtataagcta

SEQ ID NO: 162240 - DNA, 20 bp, Artificial Sequence
  Description of Artificial Sequence: Synthetic oligonucleotide
  Target: LAMA2; (+) strand; PAM type: NRG; PAM sequence: CAG
gctatggcttctttgaattt

SEQ ID NO: 162241 - DNA, 20 bp, Artificial Sequence
  Description of Artificial Sequence: Synthetic oligonucleotide
  Target: LAMA2; (+) strand; PAM type: NRG; PAM sequence: TGG
agtgtcttcatgctcaaaat

SEQ ID NO: 162242 - DNA, 20 bp, Artificial Sequence
  Description of Artificial Sequence: Synthetic oligonucleotide
  Target: LAMA2; (+) strand; PAM type: NRG; PAM sequence: TGG
tgatgacattaatattttaa

SEQ ID NO: 162243 - DNA, 20 bp, Artificial Sequence
  Description of Artificial Sequence: Synthetic oligonucleotide
  Target: LAMA2; (+) strand; PAM type: NRG; PAM sequence: TGG
aatattttaatggcatatga

SEQ ID NO: 162244 - DNA, 20 bp, Artificial Sequence
  Description of Artificial Sequence: Synthetic oligonucleotide
  Target: LAMA2; (+) strand; PAM type: NRG; PAM sequence: GGG
atattttaatggcatatgat

SEQ ID NO: 162245 - DNA, 20 bp, Artificial Sequence
  Description of Artificial Sequence: Synthetic oligonucleotide
  Target: LAMA2; (+) strand; PAM type: NRG; PAM sequence: CAG
tttaatggcatatgatgggc

SEQ ID NO: 162246 - DNA, 20 bp, Artificial Sequence
  Description of Artificial Sequence: Synthetic oligonucleotide
  Target: LAMA2; (+) strand; PAM type: NRG; PAM sequence: AAG
atgggccagacatgatgcta

SEQ ID NO: 162247 - DNA, 20 bp, Artificial Sequence
  Description of Artificial Sequence: Synthetic oligonucleotide
  Target: LAMA2; (+) strand; PAM type: NRG; PAM sequence: CAG
ctttatgtgaattatcccta

SEQ ID NO: 162248 - DNA, 20 bp, Artificial Sequence
  Description of Artificial Sequence: Synthetic oligonucleotide
  Target: LAMA2; (+) strand; PAM type: NRG; PAM sequence: TAG
tgaattatccctacagcttg

SEQ ID NO: 162249 - DNA, 20 bp, Artificial Sequence
  Description of Artificial Sequence: Synthetic oligonucleotide
  Target: LAMA2; (+) strand; PAM type: NRG; PAM sequence: GAG
aattatccctacagcttgta

SEQ ID NO: 162250 - DNA, 20 bp, Artificial Sequence
  Description of Artificial Sequence: Synthetic oligonucleotide
  Target: LAMA2; (+) strand; PAM type: NRG; PAM sequence: TAG
tacagcttgtagagttgtta

SEQ ID NO: 162251 - DNA, 20 bp, Artificial Sequence
  Description of Artificial Sequence: Synthetic oligonucleotide
  Target: LAMA2; (+) strand; PAM type: NRG; PAM sequence: AGG
acagcttgtagagttgttat

SEQ ID NO: 162252 - DNA, 20 bp, Artificial Sequence
  Description of Artificial Sequence: Synthetic oligonucleotide
  Target: LAMA2; (+) strand; PAM type: NRG; PAM sequence: GGG
cagcttgtagagttgttata

SEQ ID NO: 162253 - DNA, 20 bp, Artificial Sequence
  Description of Artificial Sequence: Synthetic oligonucleotide
  Target: LAMA2; (+) strand; PAM type: NRG; PAM sequence: TAG
ttgttatagggattaaatga

SEQ ID NO: 162254 - DNA, 20 bp, Artificial Sequence
  Description of Artificial Sequence: Synthetic oligonucleotide
  Target: LAMA2; (+) strand; PAM type: NRG; PAM sequence: CAG
ttaaatgatagaatgcctaa

SEQ ID NO: 162255 - DNA, 20 bp, Artificial Sequence
  Description of Artificial Sequence: Synthetic oligonucleotide
  Target: LAMA2; (+) strand; PAM type: NRG; PAM sequence: AGG
taaatgatagaatgcctaac

SEQ ID NO: 162256 - DNA, 20 bp, Artificial Sequence
  Description of Artificial Sequence: Synthetic oligonucleotide
  Target: LAMA2; (+) strand; PAM type: NRG; PAM sequence: GGG
aaatgatagaatgcctaaca

SEQ ID NO: 162257 - DNA, 20 bp, Artificial Sequence
  Description of Artificial Sequence: Synthetic oligonucleotide
  Target: LAMA2; (+) strand; PAM type: NRG; PAM sequence: CAG
taacagggcacttaacaaat

SEQ ID NO: 162258 - DNA, 20 bp, Artificial Sequence
  Description of Artificial Sequence: Synthetic oligonucleotide
  Target: LAMA2; (+) strand; PAM type: NRG; PAM sequence: TAG
aaacattctgttactgaact

SEQ ID NO: 162259 - DNA, 20 bp, Artificial Sequence
  Description of Artificial Sequence: Synthetic oligonucleotide
  Target: LAMA2; (+) strand; PAM type: NRG; PAM sequence: AGG
aacattctgttactgaactt

SEQ ID NO: 162260 - DNA, 20 bp, Artificial Sequence
  Description of Artificial Sequence: Synthetic oligonucleotide
  Target: LAMA2; (+) strand; PAM type: NRG; PAM sequence: TGG
taggcgtccatgttaccatg

SEQ ID NO: 162261 - DNA, 20 bp, Artificial Sequence
  Description of Artificial Sequence: Synthetic oligonucleotide
  Target: LAMA2; (+) strand; PAM type: NRG; PAM sequence: GGG
aggcgtccatgttaccatgt

SEQ ID NO: 162262 - DNA, 20 bp, Artificial Sequence
  Description of Artificial Sequence: Synthetic oligonucleotide
  Target: LAMA2; (+) strand; PAM type: NRG; PAM sequence: GGG
ggcgtccatgttaccatgtg

SEQ ID NO: 162263 - DNA, 20 bp, Artificial Sequence
  Description of Artificial Sequence: Synthetic oligonucleotide
  Target: LAMA2; (+) strand; PAM type: NRG; PAM sequence: AAG
ggggtatattattatttaac

SEQ ID NO: 162264 - DNA, 20 bp, Artificial Sequence
  Description of Artificial Sequence: Synthetic oligonucleotide
  Target: LAMA2; (+) strand; PAM type: NRG; PAM sequence: AAG
tattatttaacaagcctatt

SEQ ID NO: 162265 - DNA, 20 bp, Artificial Sequence
  Description of Artificial Sequence: Synthetic oligonucleotide
  Target: LAMA2; (+) strand; PAM type: NRG; PAM sequence: TAG
aacaagcctattaagactat

SEQ ID NO: 162266 - DNA, 20 bp, Artificial Sequence
  Description of Artificial Sequence: Synthetic oligonucleotide
  Target: LAMA2; (+) strand; PAM type: NRG; PAM sequence: AAG
agcctattaagactattaga

SEQ ID NO: 162267 - DNA, 20 bp, Artificial Sequence
  Description of Artificial Sequence: Synthetic oligonucleotide
  Target: LAMA2; (+) strand; PAM type: NRG; PAM sequence: CAG
ttagaaagttttcctgatca

SEQ ID NO: 162268 - DNA, 20 bp, Artificial Sequence
  Description of Artificial Sequence: Synthetic oligonucleotide
  Target: LAMA2; (+) strand; PAM type: NRG; PAM sequence: AGG
tagaaagttttcctgatcac

SEQ ID NO: 162269 - DNA, 20 bp, Artificial Sequence
  Description of Artificial Sequence: Synthetic oligonucleotide
  Target: LAMA2; (+) strand; PAM type: NRG; PAM sequence: CAG
acaggtctctcttctctttg

SEQ ID NO: 162270 - DNA, 20 bp, Artificial Sequence
  Description of Artificial Sequence: Synthetic oligonucleotide
  Target: LAMA2; (+) strand; PAM type: NRG; PAM sequence: CGG
gcagcctgtcgctgtaatgc

SEQ ID NO: 162271 - DNA, 20 bp, Artificial Sequence
  Description of Artificial Sequence: Synthetic oligonucleotide
  Target: LAMA2; (+) strand; PAM type: NRG; PAM sequence: TGG
gcctgtcgctgtaatgccgg

SEQ ID NO: 162272 - DNA, 20 bp, Artificial Sequence
  Description of Artificial Sequence: Synthetic oligonucleotide
  Target: LAMA2; (+) strand; PAM type: NRG; PAM sequence: GAG
atgccggtggctctttctct

SEQ ID NO: 162273 - DNA, 20 bp, Artificial Sequence
  Description of Artificial Sequence: Synthetic oligonucleotide
  Target: LAMA2; (+) strand; PAM type: NRG; PAM sequence: AGG
tgccggtggctctttctctg

SEQ ID NO: 162274 - DNA, 20 bp, Artificial Sequence
  Description of Artificial Sequence: Synthetic oligonucleotide
  Target: LAMA2; (+) strand; PAM type: NRG; PAM sequence: CAG
tctttctctgaggtttgcca

SEQ ID NO: 162275 - DNA, 20 bp, Artificial Sequence
  Description of Artificial Sequence: Synthetic oligonucleotide
  Target: LAMA2; (+) strand; PAM type: NRG; PAM sequence: TGG
gaggtttgccacagtcaaac

SEQ ID NO: 162276 - DNA, 20 bp, Artificial Sequence
  Description of Artificial Sequence: Synthetic oligonucleotide
  Target: LAMA2; (+) strand; PAM type: NRG; PAM sequence: CAG
tttgccacagtcaaactgga

SEQ ID NO: 162277 - DNA, 20 bp, Artificial Sequence
  Description of Artificial Sequence: Synthetic oligonucleotide
  Target: LAMA2; (+) strand; PAM type: NRG; PAM sequence: GAG
acagtcaaactggacagtgt

SEQ ID NO: 162278 - DNA, 20 bp, Artificial Sequence
  Description of Artificial Sequence: Synthetic oligonucleotide
  Target: LAMA2; (+) strand; PAM type: NRG; PAM sequence: CAG
caaactggacagtgtgagtg

SEQ ID NO: 162279 - DNA, 20 bp, Artificial Sequence
  Description of Artificial Sequence: Synthetic oligonucleotide
  Target: LAMA2; (+) strand; PAM type: NRG; PAM sequence: GAG
aactggacagtgtgagtgca

SEQ ID NO: 162280 - DNA, 20 bp, Artificial Sequence
  Description of Artificial Sequence: Synthetic oligonucleotide
  Target: LAMA2; (+) strand; PAM type: NRG; PAM sequence: CAG
gtgagtgcagagccaacgtt

SEQ ID NO: 162281 - DNA, 20 bp, Artificial Sequence
  Description of Artificial Sequence: Synthetic oligonucleotide
  Target: LAMA2; (+) strand; PAM type: NRG; PAM sequence: AGG
tgagtgcagagccaacgttc

SEQ ID NO: 162282 - DNA, 20 bp, Artificial Sequence
  Description of Artificial Sequence: Synthetic oligonucleotide
  Target: LAMA2; (+) strand; PAM type: NRG; PAM sequence: GGG
gagtgcagagccaacgttca

SEQ ID NO: 162283 - DNA, 20 bp, Artificial Sequence
  Description of Artificial Sequence: Synthetic oligonucleotide
  Target: LAMA2; (+) strand; PAM type: NRG; PAM sequence: CAG
gcagagccaacgttcagggt

SEQ ID NO: 162284 - DNA, 20 bp, Artificial Sequence
  Description of Artificial Sequence: Synthetic oligonucleotide
  Target: LAMA2; (+) strand; PAM type: NRG; PAM sequence: GAG
agagccaacgttcagggtca

SEQ ID NO: 162285 - DNA, 20 bp, Artificial Sequence
  Description of Artificial Sequence: Synthetic oligonucleotide
  Target: LAMA2; (+) strand; PAM type: NRG; PAM sequence: AAG
gtcagagatgtgacaaatgc

SEQ ID NO: 162286 - DNA, 20 bp, Artificial Sequence
  Description of Artificial Sequence: Synthetic oligonucleotide
  Target: LAMA2; (+) strand; PAM type: NRG; PAM sequence: AGG
tcagagatgtgacaaatgca

SEQ ID NO: 162287 - DNA, 20 bp, Artificial Sequence
  Description of Artificial Sequence: Synthetic oligonucleotide
  Target: LAMA2; (+) strand; PAM type: NRG; PAM sequence: AAG
agatgtgacaaatgcaaggt

SEQ ID NO: 162288 - DNA, 20 bp, Artificial Sequence
  Description of Artificial Sequence: Synthetic oligonucleotide
  Target: LAMA2; (+) strand; PAM type: NRG; PAM sequence: AGG
gatgtgacaaatgcaaggta

SEQ ID NO: 162289 - DNA, 20 bp, Artificial Sequence
  Description of Artificial Sequence: Synthetic oligonucleotide
  Target: LAMA2; (+) strand; PAM type: NRG; PAM sequence: GAG
tgtgacaaatgcaaggtaag

SEQ ID NO: 162290 - DNA, 20 bp, Artificial Sequence
  Description of Artificial Sequence: Synthetic oligonucleotide
  Target: LAMA2; (+) strand; PAM type: NRG; PAM sequence: TAG
gacaaatgcaaggtaaggag

SEQ ID NO: 162291 - DNA, 20 bp, Artificial Sequence
  Description of Artificial Sequence: Synthetic oligonucleotide
  Target: LAMA2; (+) strand; PAM type: NRG; PAM sequence: GAG
caaatgcaaggtaaggagta

SEQ ID NO: 162292 - DNA, 20 bp, Artificial Sequence
  Description of Artificial Sequence: Synthetic oligonucleotide
  Target: LAMA2; (+) strand; PAM type: NRG; PAM sequence: AGG
aaatgcaaggtaaggagtag

SEQ ID NO: 162293 - DNA, 20 bp, Artificial Sequence
  Description of Artificial Sequence: Synthetic oligonucleotide
  Target: LAMA2; (+) strand; PAM type: NRG; PAM sequence: CAG
cataaattactttctcctta

SEQ ID NO: 162294 - DNA, 20 bp, Artificial Sequence
  Description of Artificial Sequence: Synthetic oligonucleotide
  Target: LAMA2; (+) strand; PAM type: NRG; PAM sequence: TGG
ttctccttacagattttcac

SEQ ID NO: 162295 - DNA, 20 bp, Artificial Sequence
  Description of Artificial Sequence: Synthetic oligonucleotide
  Target: LAMA2; (+) strand; PAM type: NRG; PAM sequence: AAG
tgtataccttcgtatattaa

SEQ ID NO: 162296 - DNA, 20 bp, Artificial Sequence
  Description of Artificial Sequence: Synthetic oligonucleotide
  Target: LAMA2; (+) strand; PAM type: NRG; PAM sequence: AGG
gtataccttcgtatattaaa

SEQ ID NO: 162297 - DNA, 20 bp, Artificial Sequence
  Description of Artificial Sequence: Synthetic oligonucleotide
  Target: LAMA2; (+) strand; PAM type: NRG; PAM sequence: AAG
taccttcgtatattaaaagg

SEQ ID NO: 162298 - DNA, 20 bp, Artificial Sequence
  Description of Artificial Sequence: Synthetic oligonucleotide
  Target: LAMA2; (+) strand; PAM type: NRG; PAM sequence: AGG
accttcgtatattaaaagga

SEQ ID NO: 162299 - DNA, 20 bp, Artificial Sequence
  Description of Artificial Sequence: Synthetic oligonucleotide
  Target: LAMA2; (+) strand; PAM type: NRG; PAM sequence: TGG
cgtatattaaaaggaaggtt

SEQ ID NO: 162300 - DNA, 20 bp, Artificial Sequence
  Description of Artificial Sequence: Synthetic oligonucleotide
  Target: LAMA2; (+) strand; PAM type: NRG; PAM sequence: GGG
gtatattaaaaggaaggttt

SEQ ID NO: 162301 - DNA, 20 bp, Artificial Sequence
  Description of Artificial Sequence: Synthetic oligonucleotide
  Target: LAMA2; (+) strand; PAM type: NRG; PAM sequence: CAG
acaattgaaatgactgtgat

SEQ ID NO: 162302 - DNA, 20 bp, Artificial Sequence
  Description of Artificial Sequence: Synthetic oligonucleotide
  Target: LAMA2; (+) strand; PAM type: NRG; PAM sequence: AAG
aaatgactgtgatcagtgaa

SEQ ID NO: 162303 - DNA, 20 bp, Artificial Sequence
  Description of Artificial Sequence: Synthetic oligonucleotide
  Target: LAMA2; (+) strand; PAM type: NRG; PAM sequence: TAG
gtgaaaagtttttttcaaac

SEQ ID NO: 162304 - DNA, 20 bp, Artificial Sequence
  Description of Artificial Sequence: Synthetic oligonucleotide
  Target: LAMA2; (+) strand; PAM type: NRG; PAM sequence: TGG
tgaccttaaacatttttttt

SEQ ID NO: 162305 - DNA, 20 bp, Artificial Sequence
  Description of Artificial Sequence: Synthetic oligonucleotide
  Target: LAMA2; (+) strand; PAM type: NRG; PAM sequence: CAG
ccttaaacatttttttttgg

SEQ ID NO: 162306 - DNA, 20 bp, Artificial Sequence
  Description of Artificial Sequence: Synthetic oligonucleotide
  Target: LAMA2; (+) strand; PAM type: NRG; PAM sequence: CAG
gtattatattcgctttaatt

SEQ ID NO: 162307 - DNA, 20 bp, Artificial Sequence
  Description of Artificial Sequence: Synthetic oligonucleotide
  Target: LAMA2; (+) strand; PAM type: NRG; PAM sequence: TAG
tcagacatttctgaaacaaa

SEQ ID NO: 162308 - DNA, 20 bp, Artificial Sequence
  Description of Artificial Sequence: Synthetic oligonucleotide
  Target: LAMA2; (+) strand; PAM type: NRG; PAM sequence: CAG
gacatttctgaaacaaatag

SEQ ID NO: 162309 - DNA, 20 bp, Artificial Sequence
  Description of Artificial Sequence: Synthetic oligonucleotide
  Target: LAMA2; (+) strand; PAM type: NRG; PAM sequence: AGG
acatttctgaaacaaatagc

SEQ ID NO: 162310 - DNA, 20 bp, Artificial Sequence
  Description of Artificial Sequence: Synthetic oligonucleotide
  Target: LAMA2; (+) strand; PAM type: NRG; PAM sequence: TGG
gcgaatttaatcttaatctg

SEQ ID NO: 162311 - DNA, 20 bp, Artificial Sequence
  Description of Artificial Sequence: Synthetic oligonucleotide
  Target: LAMA2; (+) strand; PAM type: NRG; PAM sequence: GAG
gaatttaatcttaatctgtg

SEQ ID NO: 162312 - DNA, 20 bp, Artificial Sequence
  Description of Artificial Sequence: Synthetic oligonucleotide
  Target: LAMA2; (+) strand; PAM type: NRG; PAM sequence: TGG
ttcctttgcctttacatttt

SEQ ID NO: 162313 - DNA, 20 bp, Artificial Sequence
  Description of Artificial Sequence: Synthetic oligonucleotide
  Target: LAMA2; (+) strand; PAM type: NRG; PAM sequence: CAG
ctttgcctttacatttttgg

SEQ ID NO: 162314 - DNA, 20 bp, Artificial Sequence
  Description of Artificial Sequence: Synthetic oligonucleotide
  Target: LAMA2; (+) strand; PAM type: NRG; PAM sequence: TGG
gcagaataaaatgttactct

SEQ ID NO: 162315 - DNA, 20 bp, Artificial Sequence
  Description of Artificial Sequence: Synthetic oligonucleotide
  Target: LAMA2; (+) strand; PAM type: NRG; PAM sequence: GGG
cagaataaaatgttactctt

SEQ ID NO: 162316 - DNA, 20 bp, Artificial Sequence
  Description of Artificial Sequence: Synthetic oligonucleotide
  Target: LAMA2; (+) strand; PAM type: NRG; PAM sequence: GGG
agaataaaatgttactcttg

SEQ ID NO: 162317 - DNA, 20 bp, Artificial Sequence
  Description of Artificial Sequence: Synthetic oligonucleotide
  Target: LAMA2; (+) strand; PAM type: NRG; PAM sequence: TGG
taaaatgttactcttggggc

SEQ ID NO: 162318 - DNA, 20 bp, Artificial Sequence
  Description of Artificial Sequence: Synthetic oligonucleotide
  Target: LAMA2; (+) strand; PAM type: NRG; PAM sequence: GGG
aaaatgttactcttggggct

SEQ ID NO: 162319 - DNA, 20 bp, Artificial Sequence
  Description of Artificial Sequence: Synthetic oligonucleotide
  Target: LAMA2; (+) strand; PAM type: NRG; PAM sequence: CGG
gttactcttggggctgggcg

SEQ ID NO: 162320 - DNA, 20 bp, Artificial Sequence
  Description of Artificial Sequence: Synthetic oligonucleotide
  Target: LAMA2; (+) strand; PAM type: NRG; PAM sequence: TGG
actcttggggctgggcgcgg

SEQ ID NO: 162321 - DNA, 20 bp, Artificial Sequence
  Description of Artificial Sequence: Synthetic oligonucleotide
  Target: LAMA2; (+) strand; PAM type: NRG; PAM sequence: CAG
gtggctcatgcctgtaatcc

SEQ ID NO: 162322 - DNA, 20 bp, Artificial Sequence
  Description of Artificial Sequence: Synthetic oligonucleotide
  Target: LAMA2; (+) strand; PAM type: NRG; PAM sequence: TGG
tgcctgtaatcccagcactt

SEQ ID NO: 162323 - DNA, 20 bp, Artificial Sequence
  Description of Artificial Sequence: Synthetic oligonucleotide
  Target: LAMA2; (+) strand; PAM type: NRG; PAM sequence: GGG
gcctgtaatcccagcacttt

SEQ ID NO: 162324 - DNA, 20 bp, Artificial Sequence
  Description of Artificial Sequence: Synthetic oligonucleotide
  Target: LAMA2; (+) strand; PAM type: NRG; PAM sequence: GAG
ctgtaatcccagcactttgg

SEQ ID NO: 162325 - DNA, 20 bp, Artificial Sequence
  Description of Artificial Sequence: Synthetic oligonucleotide
  Target: LAMA2; (+) strand; PAM type: NRG; PAM sequence: AGG
tgtaatcccagcactttggg

SEQ ID NO: 162326 - DNA, 20 bp, Artificial Sequence
  Description of Artificial Sequence: Synthetic oligonucleotide
  Target: LAMA2; (+) strand; PAM type: NRG; PAM sequence: AAG
tcccagcactttgggaggcc

SEQ ID NO: 162327 - DNA, 20 bp, Artificial Sequence
  Description of Artificial Sequence: Synthetic oligonucleotide
  Target: LAMA2; (+) strand; PAM type: NRG; PAM sequence: AGG
cccagcactttgggaggcca

SEQ ID NO: 162328 - DNA, 20 bp, Artificial Sequence
  Description of Artificial Sequence: Synthetic oligonucleotide
  Target: LAMA2; (+) strand; PAM type: NRG; PAM sequence: CAG
agcactttgggaggccaagg

SEQ ID NO: 162329 - DNA, 20 bp, Artificial Sequence
  Description of Artificial Sequence: Synthetic oligonucleotide
  Target: LAMA2; (+) strand; PAM type: NRG; PAM sequence: AGG
gcactttgggaggccaaggc

SEQ ID NO: 162330 - DNA, 20 bp, Artificial Sequence
  Description of Artificial Sequence: Synthetic oligonucleotide
  Target: LAMA2; (+) strand; PAM type: NRG; PAM sequence: TGG
ctttgggaggccaaggcagg

SEQ ID NO: 162331 - DNA, 20 bp, Artificial Sequence
  Description of Artificial Sequence: Synthetic oligonucleotide
  Target: LAMA2; (+) strand; PAM type: NRG; PAM sequence: GAG
ggccaaggcaggtggatcac

SEQ ID NO: 162332 - DNA, 20 bp, Artificial Sequence
  Description of Artificial Sequence: Synthetic oligonucleotide
  Target: LAMA2; (+) strand; PAM type: NRG; PAM sequence: AGG
gccaaggcaggtggatcacg

SEQ ID NO: 162333 - DNA, 20 bp, Artificial Sequence
  Description of Artificial Sequence: Synthetic oligonucleotide
  Target: LAMA2; (+) strand; PAM type: NRG; PAM sequence: CAG
aggcaggtggatcacgaggt

SEQ ID NO: 162334 - DNA, 20 bp, Artificial Sequence
  Description of Artificial Sequence: Synthetic oligonucleotide
  Target: LAMA2; (+) strand; PAM type: NRG; PAM sequence: AGG
ggcaggtggatcacgaggtc

SEQ ID NO: 162335 - DNA, 20 bp, Artificial Sequence
  Description of Artificial Sequence: Synthetic oligonucleotide
  Target: LAMA2; (+) strand; PAM type: NRG; PAM sequence: GAG
caggtggatcacgaggtcag

SEQ ID NO: 162336 - DNA, 20 bp, Artificial Sequence
  Description of Artificial Sequence: Synthetic oligonucleotide
  Target: LAMA2; (+) strand; PAM type: NRG; PAM sequence: AAG
gatcacgaggtcaggagttc

SEQ ID NO: 162337 - DNA, 20 bp, Artificial Sequence
  Description of Artificial Sequence: Synthetic oligonucleotide
  Target: LAMA2; (+) strand; PAM type: NRG; PAM sequence: CAG
cgaggtcaggagttcaagaa

SEQ ID NO: 162338 - DNA, 20 bp, Artificial Sequence
  Description of Artificial Sequence: Synthetic oligonucleotide
  Target: LAMA2; (+) strand; PAM type: NRG; PAM sequence: TGG
tcaggagttcaagaacagcc

SEQ ID NO: 162339 - DNA, 20 bp, Artificial Sequence
  Description of Artificial Sequence: Synthetic oligonucleotide
  Target: LAMA2; (+) strand; PAM type: NRG; PAM sequence: AAG
agttcaagaacagcctggcc

SEQ ID NO: 162340 - DNA, 20 bp, Artificial Sequence
  Description of Artificial Sequence: Synthetic oligonucleotide
  Target: LAMA2; (+) strand; PAM type: NRG; PAM sequence: TGG
caagaacagcctggccaaga

SEQ ID NO: 162341 - DNA, 20 bp, Artificial Sequence
  Description of Artificial Sequence: Synthetic oligonucleotide
  Target: LAMA2; (+) strand; PAM type: NRG; PAM sequence: CAG
ctgctaaaaactacaaaaat

SEQ ID NO: 162342 - DNA, 20 bp, Artificial Sequence
  Description of Artificial Sequence: Synthetic oligonucleotide
  Target: LAMA2; (+) strand; PAM type: NRG; PAM sequence: CAG
taaaaactacaaaaatcagc

SEQ ID NO: 162343 - DNA, 20 bp, Artificial Sequence
  Description of Artificial Sequence: Synthetic oligonucleotide
  Target: LAMA2; (+) strand; PAM type: NRG; PAM sequence: AGG
aaaaactacaaaaatcagcc

SEQ ID NO: 162344 - DNA, 20 bp, Artificial Sequence
  Description of Artificial Sequence: Synthetic oligonucleotide
  Target: LAMA2; (+) strand; PAM type: NRG; PAM sequence: CGG
ctacaaaaatcagccaggca

SEQ ID NO: 162345 - DNA, 20 bp, Artificial Sequence
  Description of Artificial Sequence: Synthetic oligonucleotide
  Target: LAMA2; (+) strand; PAM type: NRG; PAM sequence: TGG
caaaaatcagccaggcacgg

SEQ ID NO: 162346 - DNA, 20 bp, Artificial Sequence
  Description of Artificial Sequence: Synthetic oligonucleotide
  Target: LAMA2; (+) strand; PAM type: NRG; PAM sequence: CAG
aaatcagccaggcacggtgg

SEQ ID NO: 162347 - DNA, 20 bp, Artificial Sequence
  Description of Artificial Sequence: Synthetic oligonucleotide
  Target: LAMA2; (+) strand; PAM type: NRG; PAM sequence: AGG
aatcagccaggcacggtggc

SEQ ID NO: 162348 - DNA, 20 bp, Artificial Sequence
  Description of Artificial Sequence: Synthetic oligonucleotide
  Target: LAMA2; (+) strand; PAM type: NRG; PAM sequence: CAG
gtggcaggtgcctgtaatcc

SEQ ID NO: 162349 - DNA, 20 bp, Artificial Sequence
  Description of Artificial Sequence: Synthetic oligonucleotide
  Target: LAMA2; (+) strand; PAM type: NRG; PAM sequence: CAG
tgcctgtaatcccagctact

SEQ ID NO: 162350 - DNA, 20 bp, Artificial Sequence
  Description of Artificial Sequence: Synthetic oligonucleotide
  Target: LAMA2; (+) strand; PAM type: NRG; PAM sequence: AGG
gcctgtaatcccagctactc

SEQ ID NO: 162351 - DNA, 20 bp, Artificial Sequence
  Description of Artificial Sequence: Synthetic oligonucleotide
  Target: LAMA2; (+) strand; PAM type: NRG; PAM sequence: GAG
ctgtaatcccagctactcag

SEQ ID NO: 162352 - DNA, 20 bp, Artificial Sequence
  Description of Artificial Sequence: Synthetic oligonucleotide
  Target: LAMA2; (+) strand; PAM type: NRG; PAM sequence: AGG
tgtaatcccagctactcagg

SEQ ID NO: 162353 - DNA, 20 bp, Artificial Sequence
  Description of Artificial Sequence: Synthetic oligonucleotide
  Target: LAMA2; (+) strand; PAM type: NRG; PAM sequence: GAG
tcccagctactcaggaggct

SEQ ID NO: 162354 - DNA, 20 bp, Artificial Sequence
  Description of Artificial Sequence: Synthetic oligonucleotide
  Target: LAMA2; (+) strand; PAM type: NRG; PAM sequence: AGG
cccagctactcaggaggctg

SEQ ID NO: 162355 - DNA, 20 bp, Artificial Sequence
  Description of Artificial Sequence: Synthetic oligonucleotide
  Target: LAMA2; (+) strand; PAM type: NRG; PAM sequence: CGG
agctactcaggaggctgagg

SEQ ID NO: 162356 - DNA, 20 bp, Artificial Sequence
  Description of Artificial Sequence: Synthetic oligonucleotide
  Target: LAMA2; (+) strand; PAM type: NRG; PAM sequence: GGG
gctactcaggaggctgaggc

SEQ ID NO: 162357 - DNA, 20 bp, Artificial Sequence
  Description of Artificial Sequence: Synthetic oligonucleotide
  Target: LAMA2; (+) strand; PAM type: NRG; PAM sequence: GAG
tactcaggaggctgaggcgg

SEQ ID NO: 162358 - DNA, 20 bp, Artificial Sequence
  Description of Artificial Sequence: Synthetic oligonucleotide
  Target: LAMA2; (+) strand; PAM type: NRG; PAM sequence: TGG
gcgggagaatcgcttgaacc

SEQ ID NO: 162359 - DNA, 20 bp, Artificial Sequence
  Description of Artificial Sequence: Synthetic oligonucleotide
  Target: LAMA2; (+) strand; PAM type: NRG; PAM sequence: GGG
cgggagaatcgcttgaacct

SEQ ID NO: 162360 - DNA, 20 bp, Artificial Sequence
  Description of Artificial Sequence: Synthetic oligonucleotide
  Target: LAMA2; (+) strand; PAM type: NRG; PAM sequence: TGG
gagaatcgcttgaacctggg

SEQ ID NO: 162361 - DNA, 20 bp, Artificial Sequence
  Description of Artificial Sequence: Synthetic oligonucleotide
  Target: LAMA2; (+) strand; PAM type: NRG; PAM sequence: CAG
aatcgcttgaacctgggtgg

SEQ ID NO: 162362 - DNA, 20 bp, Artificial Sequence
  Description of Artificial Sequence: Synthetic oligonucleotide
  Target: LAMA2; (+) strand; PAM type: NRG; PAM sequence: GAG
tcgcttgaacctgggtggca

SEQ ID NO: 162363 - DNA, 20 bp, Artificial Sequence
  Description of Artificial Sequence: Synthetic oligonucleotide
  Target: LAMA2; (+) strand; PAM type: NRG; PAM sequence: AGG
cgcttgaacctgggtggcag

SEQ ID NO: 162364 - DNA, 20 bp, Artificial Sequence
  Description of Artificial Sequence: Synthetic oligonucleotide
  Target: LAMA2; (+) strand; PAM type: NRG; PAM sequence: CAG
aacctgggtggcagaggttg

SEQ ID NO: 162365 - DNA, 20 bp, Artificial Sequence
  Description of Artificial Sequence: Synthetic oligonucleotide
  Target: LAMA2; (+) strand; PAM type: NRG; PAM sequence: GAG
tgggtggcagaggttgcagt

SEQ ID NO: 162366 - DNA, 20 bp, Artificial Sequence
  Description of Artificial Sequence: Synthetic oligonucleotide
  Target: LAMA2; (+) strand; PAM type: NRG; PAM sequence: GAG
ggcagaggttgcagtgagcc

SEQ ID NO: 162367 - DNA, 20 bp, Artificial Sequence
  Description of Artificial Sequence: Synthetic oligonucleotide
  Target: LAMA2; (+) strand; PAM type: NRG; PAM sequence: TAG
gaggttgcagtgagccgaga

SEQ ID NO: 162368 - DNA, 20 bp, Artificial Sequence
  Description of Artificial Sequence: Synthetic oligonucleotide
  Target: LAMA2; (+) strand; PAM type: NRG; PAM sequence: CAG
gagatagtgccactgcactc

SEQ ID NO: 162369 - DNA, 20 bp, Artificial Sequence
  Description of Artificial Sequence: Synthetic oligonucleotide
  Target: LAMA2; (+) strand; PAM type: NRG; PAM sequence: TGG
agtgccactgcactccagcc

SEQ ID NO: 162370 - DNA, 20 bp, Artificial Sequence
  Description of Artificial Sequence: Synthetic oligonucleotide
  Target: LAMA2; (+) strand; PAM type: NRG; PAM sequence: GGG
gtgccactgcactccagcct

SEQ ID NO: 162371 - DNA, 20 bp, Artificial Sequence
  Description of Artificial Sequence: Synthetic oligonucleotide
  Target: LAMA2; (+) strand; PAM type: NRG; PAM sequence: GAG
gcactccagcctgggcgacc

SEQ ID NO: 162372 - DNA, 20 bp, Artificial Sequence
  Description of Artificial Sequence: Synthetic oligonucleotide
  Target: LAMA2; (+) strand; PAM type: NRG; PAM sequence: GAG
tccagcctgggcgaccgagt

SEQ ID NO: 162373 - DNA, 20 bp, Artificial Sequence
  Description of Artificial Sequence: Synthetic oligonucleotide
  Target: LAMA2; (+) strand; PAM type: NRG; PAM sequence: TAG
atgttactccctttgctttt

SEQ ID NO: 162374 - DNA, 20 bp, Artificial Sequence
  Description of Artificial Sequence: Synthetic oligonucleotide
  Target: LAMA2; (+) strand; PAM type: NRG; PAM sequence: TAG
ttttagcaaacaccttcttc

SEQ ID NO: 162375 - DNA, 20 bp, Artificial Sequence
  Description of Artificial Sequence: Synthetic oligonucleotide
  Target: LAMA2; (+) strand; PAM type: NRG; PAM sequence: AAG
cttctagttccatcatttaa

SEQ ID NO: 162376 - DNA, 20 bp, Artificial Sequence
  Description of Artificial Sequence: Synthetic oligonucleotide
  Target: LAMA2; (+) strand; PAM type: NRG; PAM sequence: GAG
atttaaaagctacttcctgt

SEQ ID NO: 162377 - DNA, 20 bp, Artificial Sequence
  Description of Artificial Sequence: Synthetic oligonucleotide
  Target: LAMA2; (+) strand; PAM type: NRG; PAM sequence: CAG
taaaagctacttcctgtgag

SEQ ID NO: 162378 - DNA, 20 bp, Artificial Sequence
  Description of Artificial Sequence: Synthetic oligonucleotide
  Target: LAMA2; (+) strand; PAM type: NRG; PAM sequence: TGG
cctgtgagcagtctacctaa

SEQ ID NO: 162379 - DNA, 20 bp, Artificial Sequence
  Description of Artificial Sequence: Synthetic oligonucleotide
  Target: LAMA2; (+) strand; PAM type: NRG; PAM sequence: AAG
gtgagcagtctacctaatgg

SEQ ID NO: 162380 - DNA, 20 bp, Artificial Sequence
  Description of Artificial Sequence: Synthetic oligonucleotide
  Target: LAMA2; (+) strand; PAM type: NRG; PAM sequence: CAG
agtctacctaatggaagttt

SEQ ID NO: 162381 - DNA, 20 bp, Artificial Sequence
  Description of Artificial Sequence: Synthetic oligonucleotide
  Target: LAMA2; (+) strand; PAM type: NRG; PAM sequence: TAG
ctacctaatggaagtttcag

SEQ ID NO: 162382 - DNA, 20 bp, Artificial Sequence
  Description of Artificial Sequence: Synthetic oligonucleotide
  Target: LAMA2; (+) strand; PAM type: NRG; PAM sequence: GAG
acctaatggaagtttcagta

SEQ ID NO: 162383 - DNA, 20 bp, Artificial Sequence
  Description of Artificial Sequence: Synthetic oligonucleotide
  Target: LAMA2; (+) strand; PAM type: NRG; PAM sequence: AAG
taatggaagtttcagtagag

SEQ ID NO: 162384 - DNA, 20 bp, Artificial Sequence
  Description of Artificial Sequence: Synthetic oligonucleotide
  Target: LAMA2; (+) strand; PAM type: NRG; PAM sequence: AAG
tttcagtagagaagttaatc

SEQ ID NO: 162385 - DNA, 20 bp, Artificial Sequence
  Description of Artificial Sequence: Synthetic oligonucleotide
  Target: LAMA2; (+) strand; PAM type: NRG; PAM sequence: AAG
agttaatcaagatattttta

SEQ ID NO: 162386 - DNA, 20 bp, Artificial Sequence
  Description of Artificial Sequence: Synthetic oligonucleotide
  Target: LAMA2; (+) strand; PAM type: NRG; PAM sequence: CAG
caaaatattcaattaaaata

SEQ ID NO: 162387 - DNA, 20 bp, Artificial Sequence
  Description of Artificial Sequence: Synthetic oligonucleotide
  Target: LAMA2; (+) strand; PAM type: NRG; PAM sequence: CAG
aaaatacagcatgttgttct

SEQ ID NO: 162388 - DNA, 20 bp, Artificial Sequence
  Description of Artificial Sequence: Synthetic oligonucleotide
  Target: LAMA2; (+) strand; PAM type: NRG; PAM sequence: CAG
cataccgattgccctgcttt

SEQ ID NO: 162389 - DNA, 20 bp, Artificial Sequence
  Description of Artificial Sequence: Synthetic oligonucleotide
  Target: LAMA2; (+) strand; PAM type: NRG; PAM sequence: TGG
cgattgccctgctttcagta

SEQ ID NO: 162390 - DNA, 20 bp, Artificial Sequence
  Description of Artificial Sequence: Synthetic oligonucleotide
  Target: LAMA2; (+) strand; PAM type: NRG; PAM sequence: AAG
tgccctgctttcagtatggc

SEQ ID NO: 162391 - DNA, 20 bp, Artificial Sequence
  Description of Artificial Sequence: Synthetic oligonucleotide
  Target: LAMA2; (+) strand; PAM type: NRG; PAM sequence: CAG
ttcagtatggcaagcaactt

SEQ ID NO: 162392 - DNA, 20 bp, Artificial Sequence
  Description of Artificial Sequence: Synthetic oligonucleotide
  Target: LAMA2; (+) strand; PAM type: NRG; PAM sequence: GAG
gcaacttcagattcctccat

SEQ ID NO: 162393 - DNA, 20 bp, Artificial Sequence
  Description of Artificial Sequence: Synthetic oligonucleotide
  Target: LAMA2; (+) strand; PAM type: NRG; PAM sequence: AGG
caacttcagattcctccatg

SEQ ID NO: 162394 - DNA, 20 bp, Artificial Sequence
  Description of Artificial Sequence: Synthetic oligonucleotide
  Target: LAMA2; (+) strand; PAM type: NRG; PAM sequence: GGG
aacttcagattcctccatga

SEQ ID NO: 162395 - DNA, 20 bp, Artificial Sequence
  Description of Artificial Sequence: Synthetic oligonucleotide
  Target: LAMA2; (+) strand; PAM type: NRG; PAM sequence: TGG
ttcagattcctccatgaggg

SEQ ID NO: 162396 - DNA, 20 bp, Artificial Sequence
  Description of Artificial Sequence: Synthetic oligonucleotide
  Target: LAMA2; (+) strand; PAM type: NRG; PAM sequence: CAG
gattcctccatgagggtgga

SEQ ID NO: 162397 - DNA, 20 bp, Artificial Sequence
  Description of Artificial Sequence: Synthetic oligonucleotide
  Target: LAMA2; (+) strand; PAM type: NRG; PAM sequence: TAG
gagggtggacagatttgctc

SEQ ID NO: 162398 - DNA, 20 bp, Artificial Sequence
  Description of Artificial Sequence: Synthetic oligonucleotide
  Target: LAMA2; (+) strand; PAM type: NRG; PAM sequence: AAG
aatacattgtatttgtgata

SEQ ID NO: 162399 - DNA, 20 bp, Artificial Sequence
  Description of Artificial Sequence: Synthetic oligonucleotide
  Target: LAMA2; (+) strand; PAM type: NRG; PAM sequence: CAG
cattgtatttgtgataaaga

SEQ ID NO: 162400 - DNA, 20 bp, Artificial Sequence
  Description of Artificial Sequence: Synthetic oligonucleotide
  Target: LAMA2; (+) strand; PAM type: NRG; PAM sequence: AAG
tatttgtgataaagacagct

SEQ ID NO: 162401 - DNA, 20 bp, Artificial Sequence
  Description of Artificial Sequence: Synthetic oligonucleotide
  Target: LAMA2; (+) strand; PAM type: NRG; PAM sequence: CAG
ttgtgataaagacagctaag

SEQ ID NO: 162402 - DNA, 20 bp, Artificial Sequence
  Description of Artificial Sequence: Synthetic oligonucleotide
  Target: LAMA2; (+) strand; PAM type: NRG; PAM sequence: AAG
tgataaagacagctaagcag

SEQ ID NO: 162403 - DNA, 20 bp, Artificial Sequence
  Description of Artificial Sequence: Synthetic oligonucleotide
  Target: LAMA2; (+) strand; PAM type: NRG; PAM sequence: AAG
aaagacagctaagcagaagc

SEQ ID NO: 162404 - DNA, 20 bp, Artificial Sequence
  Description of Artificial Sequence: Synthetic oligonucleotide
  Target: LAMA2; (+) strand; PAM type: NRG; PAM sequence: TGG
gcatttctccgatgtcaaac

SEQ ID NO: 162405 - DNA, 20 bp, Artificial Sequence
  Description of Artificial Sequence: Synthetic oligonucleotide
  Target: LAMA2; (+) strand; PAM type: NRG; PAM sequence: TAG
atgtcaaactggccttactg

SEQ ID NO: 162406 - DNA, 20 bp, Artificial Sequence
  Description of Artificial Sequence: Synthetic oligonucleotide
  Target: LAMA2; (+) strand; PAM type: NRG; PAM sequence: AGG
tgtcaaactggccttactgt

SEQ ID NO: 162407 - DNA, 20 bp, Artificial Sequence
  Description of Artificial Sequence: Synthetic oligonucleotide
  Target: LAMA2; (+) strand; PAM type: NRG; PAM sequence: AAG
caaactggccttactgtagg

SEQ ID NO: 162408 - DNA, 20 bp, Artificial Sequence
  Description of Artificial Sequence: Synthetic oligonucleotide
  Target: LAMA2; (+) strand; PAM type: NRG; PAM sequence: TGG
tttgtttttattttatttta

SEQ ID NO: 162409 - DNA, 20 bp, Artificial Sequence
  Description of Artificial Sequence: Synthetic oligonucleotide
  Target: LAMA2; (+) strand; PAM type: NRG; PAM sequence: TGG
tttttattttattttatggt

SEQ ID NO: 162410 - DNA, 20 bp, Artificial Sequence
  Description of Artificial Sequence: Synthetic oligonucleotide
  Target: LAMA2; (+) strand; PAM type: NRG; PAM sequence: AAG
tattttatggttggttttta

SEQ ID NO: 162411 - DNA, 20 bp, Artificial Sequence
  Description of Artificial Sequence: Synthetic oligonucleotide
  Target: LAMA2; (+) strand; PAM type: NRG; PAM sequence: TGG
ggtttttaaagcccaatatg

SEQ ID NO: 162412 - DNA, 20 bp, Artificial Sequence
  Description of Artificial Sequence: Synthetic oligonucleotide
  Target: LAMA2; (+) strand; PAM type: NRG; PAM sequence: CGG
ttttaaagcccaatatgtgg

SEQ ID NO: 162413 - DNA, 20 bp, Artificial Sequence
  Description of Artificial Sequence: Synthetic oligonucleotide
  Target: LAMA2; (+) strand; PAM type: NRG; PAM sequence: GGG
tttaaagcccaatatgtggc

SEQ ID NO: 162414 - DNA, 20 bp, Artificial Sequence
  Description of Artificial Sequence: Synthetic oligonucleotide
  Target: LAMA2; (+) strand; PAM type: NRG; PAM sequence: CAG
gcccaatatgtggcgggatc

SEQ ID NO: 162415 - DNA, 20 bp, Artificial Sequence
  Description of Artificial Sequence: Synthetic oligonucleotide
  Target: LAMA2; (+) strand; PAM type: NRG; PAM sequence: GAG
ccaatatgtggcgggatcca

SEQ ID NO: 162416 - DNA, 20 bp, Artificial Sequence
  Description of Artificial Sequence: Synthetic oligonucleotide
  Target: LAMA2; (+) strand; PAM type: NRG; PAM sequence: AAG
atatgtggcgggatccagag

SEQ ID NO: 162417 - DNA, 20 bp, Artificial Sequence
  Description of Artificial Sequence: Synthetic oligonucleotide
  Target: LAMA2; (+) strand; PAM type: NRG; PAM sequence: TGG
ctatgtgactgcgatcccgt

SEQ ID NO: 162418 - DNA, 20 bp, Artificial Sequence
  Description of Artificial Sequence: Synthetic oligonucleotide
  Target: LAMA2; (+) strand; PAM type: NRG; PAM sequence: CAG
gtcaccgcaatgtgatatta

SEQ ID NO: 162419 - DNA, 20 bp, Artificial Sequence
  Description of Artificial Sequence: Synthetic oligonucleotide
  Target: LAMA2; (+) strand; PAM type: NRG; PAM sequence: AGG
tcaccgcaatgtgatattac

SEQ ID NO: 162420 - DNA, 20 bp, Artificial Sequence
  Description of Artificial Sequence: Synthetic oligonucleotide
  Target: LAMA2; (+) strand; PAM type: NRG; PAM sequence: AAG
ccgcaatgtgatattacagg

SEQ ID NO: 162421 - DNA, 20 bp, Artificial Sequence
  Description of Artificial Sequence: Synthetic oligonucleotide
  Target: LAMA2; (+) strand; PAM type: NRG; PAM sequence: CAG
aggaagatgtgtctgtaaat

SEQ ID NO: 162422 - DNA, 20 bp, Artificial Sequence
  Description of Artificial Sequence: Synthetic oligonucleotide
  Target: LAMA2; (+) strand; PAM type: NRG; PAM sequence: AGG
ggaagatgtgtctgtaaatc

SEQ ID NO: 162423 - DNA, 20 bp, Artificial Sequence
  Description of Artificial Sequence: Synthetic oligonucleotide
  Target: LAMA2; (+) strand; PAM type: NRG; PAM sequence: TAG
tgtctgtaaatcaggcttcg

SEQ ID NO: 162424 - DNA, 20 bp, Artificial Sequence
  Description of Artificial Sequence: Synthetic oligonucleotide
  Target: LAMA2; (+) strand; PAM type: NRG; PAM sequence: AGG
gtctgtaaatcaggcttcgt

SEQ ID NO: 162425 - DNA, 20 bp, Artificial Sequence
  Description of Artificial Sequence: Synthetic oligonucleotide
  Target: LAMA2; (+) strand; PAM type: NRG; PAM sequence: GGG
tctgtaaatcaggcttcgta

SEQ ID NO: 162426 - DNA, 20 bp, Artificial Sequence
  Description of Artificial Sequence: Synthetic oligonucleotide
  Target: LAMA2; (+) strand; PAM type: NRG; PAM sequence: CAG
aatcaggcttcgtagggaaa

SEQ ID NO: 162427 - DNA, 20 bp, Artificial Sequence
  Description of Artificial Sequence: Synthetic oligonucleotide
  Target: LAMA2; (+) strand; PAM type: NRG; PAM sequence: CGG
gtagggaaacagtgcaacct

SEQ ID NO: 162428 - DNA, 20 bp, Artificial Sequence
  Description of Artificial Sequence: Synthetic oligonucleotide
  Target: LAMA2; (+) strand; PAM type: NRG; PAM sequence: CAG
gggaaacagtgcaacctcgg

SEQ ID NO: 162429 - DNA, 20 bp, Artificial Sequence
  Description of Artificial Sequence: Synthetic oligonucleotide
  Target: LAMA2; (+) strand; PAM type: NRG; PAM sequence: AGG
ggaaacagtgcaacctcggc

SEQ ID NO: 162430 - DNA, 20 bp, Artificial Sequence
  Description of Artificial Sequence: Synthetic oligonucleotide
  Target: LAMA2; (+) strand; PAM type: NRG; PAM sequence: CAG
aacagtgcaacctcggcagg

SEQ ID NO: 162431 - DNA, 20 bp, Artificial Sequence
  Description of Artificial Sequence: Synthetic oligonucleotide
  Target: LAMA2; (+) strand; PAM type: NRG; PAM sequence: AGG
acagtgcaacctcggcaggc

SEQ ID NO: 162432 - DNA, 20 bp, Artificial Sequence
  Description of Artificial Sequence: Synthetic oligonucleotide
  Target: LAMA2; (+) strand; PAM type: NRG; PAM sequence: CAG
tcggcaggcaggtgcaccaa

SEQ ID NO: 162433 - DNA, 20 bp, Artificial Sequence
  Description of Artificial Sequence: Synthetic oligonucleotide
  Target: LAMA2; (+) strand; PAM type: NRG; PAM sequence: AGG
cggcaggcaggtgcaccaac

SEQ ID NO: 162434 - DNA, 20 bp, Artificial Sequence
  Description of Artificial Sequence: Synthetic oligonucleotide
  Target: LAMA2; (+) strand; PAM type: NRG; PAM sequence: GAG
gcaggcaggtgcaccaacag

SEQ ID NO: 162435 - DNA, 20 bp, Artificial Sequence
  Description of Artificial Sequence: Synthetic oligonucleotide
  Target: LAMA2; (+) strand; PAM type: NRG; PAM sequence: AGG
caggcaggtgcaccaacagg

SEQ ID NO: 162436 - DNA, 20 bp, Artificial Sequence
  Description of Artificial Sequence: Synthetic oligonucleotide
  Target: LAMA2; (+) strand; PAM type: NRG; PAM sequence: GAG
ggcaggtgcaccaacaggag

SEQ ID NO: 162437 - DNA, 20 bp, Artificial Sequence
  Description of Artificial Sequence: Synthetic oligonucleotide
  Target: LAMA2; (+) strand; PAM type: NRG; PAM sequence: CAG
aggtgcaccaacaggaggag

SEQ ID NO: 162438 - DNA, 20 bp, Artificial Sequence
  Description of Artificial Sequence: Synthetic oligonucleotide
  Target: LAMA2; (+) strand; PAM type: NRG; PAM sequence: CGG
accaacaggaggagcagccg

SEQ ID NO: 162439 - DNA, 20 bp, Artificial Sequence
  Description of Artificial Sequence: Synthetic oligonucleotide
  Target: LAMA2; (+) strand; PAM type: NRG; PAM sequence: GAG
caacaggaggagcagccgcg

SEQ ID NO: 162440 - DNA, 20 bp, Artificial Sequence
  Description of Artificial Sequence: Synthetic oligonucleotide
  Target: LAMA2; (+) strand; PAM type: NRG; PAM sequence: GAG
acaggaggagcagccgcgga

SEQ ID NO: 162441 - DNA, 20 bp, Artificial Sequence
  Description of Artificial Sequence: Synthetic oligonucleotide
  Target: LAMA2; (+) strand; PAM type: NRG; PAM sequence: CGG
agcagccgcggagagcgcaa

SEQ ID NO: 162442 - DNA, 20 bp, Artificial Sequence
  Description of Artificial Sequence: Synthetic oligonucleotide
  Target: LAMA2; (+) strand; PAM type: NRG; PAM sequence: GGG
gcagccgcggagagcgcaac

SEQ ID NO: 162443 - DNA, 20 bp, Artificial Sequence
  Description of Artificial Sequence: Synthetic oligonucleotide
  Target: LAMA2; (+) strand; PAM type: NRG; PAM sequence: TGG
gcggagagcgcaacgggtgc

SEQ ID NO: 162444 - DNA, 20 bp, Artificial Sequence
  Description of Artificial Sequence: Synthetic oligonucleotide
  Target: LAMA2; (+) strand; PAM type: NRG; PAM sequence: GGG
cggagagcgcaacgggtgct

SEQ ID NO: 162445 - DNA, 20 bp, Artificial Sequence
  Description of Artificial Sequence: Synthetic oligonucleotide
  Target: LAMA2; (+) strand; PAM type: NRG; PAM sequence: CAG
aacgggtgctgggttctcct

SEQ ID NO: 162446 - DNA, 20 bp, Artificial Sequence
  Description of Artificial Sequence: Synthetic oligonucleotide
  Target: LAMA2; (+) strand; PAM type: NRG; PAM sequence: GAG
cgggtgctgggttctcctca

SEQ ID NO: 162447 - DNA, 20 bp, Artificial Sequence
  Description of Artificial Sequence: Synthetic oligonucleotide
  Target: LAMA2; (+) strand; PAM type: NRG; PAM sequence: AGG
gggtgctgggttctcctcag

SEQ ID NO: 162448 - DNA, 20 bp, Artificial Sequence
  Description of Artificial Sequence: Synthetic oligonucleotide
  Target: LAMA2; (+) strand; PAM type: NRG; PAM sequence: TGG
tgctgggttctcctcagagg

SEQ ID NO: 162449 - DNA, 20 bp, Artificial Sequence
  Description of Artificial Sequence: Synthetic oligonucleotide
  Target: LAMA2; (+) strand; PAM type: NRG; PAM sequence: GGG
gctgggttctcctcagaggt

SEQ ID NO: 162450 - DNA, 20 bp, Artificial Sequence
  Description of Artificial Sequence: Synthetic oligonucleotide
  Target: LAMA2; (+) strand; PAM type: NRG; PAM sequence: CGG
tctcctcagaggtgggctat

SEQ ID NO: 162451 - DNA, 20 bp, Artificial Sequence
  Description of Artificial Sequence: Synthetic oligonucleotide
  Target: LAMA2; (+) strand; PAM type: NRG; PAM sequence: CAG
cctcagaggtgggctatcgg

SEQ ID NO: 162452 - DNA, 20 bp, Artificial Sequence
  Description of Artificial Sequence: Synthetic oligonucleotide
  Target: LAMA2; (+) strand; PAM type: NRG; PAM sequence: CAG
aggtgggctatcggcagctc

SEQ ID NO: 162453 - DNA, 20 bp, Artificial Sequence
  Description of Artificial Sequence: Synthetic oligonucleotide
  Target: LAMA2; (+) strand; PAM type: NRG; PAM sequence: CGG
tgggctatcggcagctccag

SEQ ID NO: 162454 - DNA, 20 bp, Artificial Sequence
  Description of Artificial Sequence: Synthetic oligonucleotide
  Target: LAMA2; (+) strand; PAM type: NRG; PAM sequence: GGG
gggctatcggcagctccagc

SEQ ID NO: 162455 - DNA, 20 bp, Artificial Sequence
  Description of Artificial Sequence: Synthetic oligonucleotide
  Target: LAMA2; (+) strand; PAM type: NRG; PAM sequence: CGG
gcagctccagcgggtgccct

SEQ ID NO: 162456 - DNA, 20 bp, Artificial Sequence
  Description of Artificial Sequence: Synthetic oligonucleotide
  Target: LAMA2; (+) strand; PAM type: NRG; PAM sequence: GGG
cagctccagcgggtgccctc

SEQ ID NO: 162457 - DNA, 20 bp, Artificial Sequence
  Description of Artificial Sequence: Synthetic oligonucleotide
  Target: LAMA2; (+) strand; PAM type: NRG; PAM sequence: GGG
agctccagcgggtgccctcg

SEQ ID NO: 162458 - DNA, 20 bp, Artificial Sequence
  Description of Artificial Sequence: Synthetic oligonucleotide
  Target: LAMA2; (+) strand; PAM type: NRG; PAM sequence: GAG
ctccagcgggtgccctcggg

SEQ ID NO: 162459 - DNA, 20 bp, Artificial Sequence
  Description of Artificial Sequence: Synthetic oligonucleotide
  Target: LAMA2; (+) strand; PAM type: NRG; PAM sequence: CGG
ggtgccctcggggagcctat

SEQ ID NO: 162460 - DNA, 20 bp, Artificial Sequence
  Description of Artificial Sequence: Synthetic oligonucleotide
  Target: LAMA2; (+) strand; PAM type: NRG; PAM sequence: GGG
gtgccctcggggagcctatc

SEQ ID NO: 162461 - DNA, 20 bp, Artificial Sequence
  Description of Artificial Sequence: Synthetic oligonucleotide
  Target: LAMA2; (+) strand; PAM type: NRG; PAM sequence: CAG
tcggggagcctatcgggccc

SEQ ID NO: 162462 - DNA, 20 bp, Artificial Sequence
  Description of Artificial Sequence: Synthetic oligonucleotide
  Target: LAMA2; (+) strand; PAM type: NRG; PAM sequence: CGG
agcctatcgggccccagctc

SEQ ID NO: 162463 - DNA, 20 bp, Artificial Sequence
  Description of Artificial Sequence: Synthetic oligonucleotide
  Target: LAMA2; (+) strand; PAM type: NRG; PAM sequence: CAG
ggccccagctccggtaatcc

SEQ ID NO: 162464 - DNA, 20 bp, Artificial Sequence
  Description of Artificial Sequence: Synthetic oligonucleotide
  Target: LAMA2; (+) strand; PAM type: NRG; PAM sequence: GAG
ccccagctccggtaatccca

SEQ ID NO: 162465 - DNA, 20 bp, Artificial Sequence
  Description of Artificial Sequence: Synthetic oligonucleotide
  Target: LAMA2; (+) strand; PAM type: NRG; PAM sequence: AGG
cccagctccggtaatcccag

SEQ ID NO: 162466 - DNA, 20 bp, Artificial Sequence
  Description of Artificial Sequence: Synthetic oligonucleotide
  Target: LAMA2; (+) strand; PAM type: NRG; PAM sequence: TGG
gtaatcccagaggcgctgca

SEQ ID NO: 162467 - DNA, 20 bp, Artificial Sequence
  Description of Artificial Sequence: Synthetic oligonucleotide
  Target: LAMA2; (+) strand; PAM type: NRG; PAM sequence: TGG
atgttgtgttctgtgtgctg

SEQ ID NO: 162468 - DNA, 20 bp, Artificial Sequence
  Description of Artificial Sequence: Synthetic oligonucleotide
  Target: LAMA2; (+) strand; PAM type: NRG; PAM sequence: AAG
tgttctgtgtgctgtggctg

SEQ ID NO: 162469 - DNA, 20 bp, Artificial Sequence
  Description of Artificial Sequence: Synthetic oligonucleotide
  Target: LAMA2; (+) strand; PAM type: NRG; PAM sequence: TGG
gtgctgtggctgaagttccc

SEQ ID NO: 162470 - DNA, 20 bp, Artificial Sequence
  Description of Artificial Sequence: Synthetic oligonucleotide
  Target: LAMA2; (+) strand; PAM type: NRG; PAM sequence: TGG
ctgtggctgaagttccctgg

SEQ ID NO: 162471 - DNA, 20 bp, Artificial Sequence
  Description of Artificial Sequence: Synthetic oligonucleotide
  Target: LAMA2; (+) strand; PAM type: NRG; PAM sequence: CAG
ggtggcattttaccaaataa

SEQ ID NO: 162472 - DNA, 20 bp, Artificial Sequence
  Description of Artificial Sequence: Synthetic oligonucleotide
  Target: LAMA2; (+) strand; PAM type: NRG; PAM sequence: AAG
tttaccaaataacagttgct

SEQ ID NO: 162473 - DNA, 20 bp, Artificial Sequence
  Description of Artificial Sequence: Synthetic oligonucleotide
  Target: LAMA2; (+) strand; PAM type: NRG; PAM sequence: AAG
gtgtgcaaattgcaaatgca

SEQ ID NO: 162474 - DNA, 20 bp, Artificial Sequence
  Description of Artificial Sequence: Synthetic oligonucleotide
  Target: LAMA2; (+) strand; PAM type: NRG; PAM sequence: TAG
caaattgcaaatgcaaagat

SEQ ID NO: 162475 - DNA, 20 bp, Artificial Sequence
  Description of Artificial Sequence: Synthetic oligonucleotide
  Target: LAMA2; (+) strand; PAM type: NRG; PAM sequence: AAG
aaccatccgtatgctttaaa

SEQ ID NO: 162476 - DNA, 20 bp, Artificial Sequence
  Description of Artificial Sequence: Synthetic oligonucleotide
  Target: LAMA2; (+) strand; PAM type: NRG; PAM sequence: AAG
atgctttaaaaagcatattc

SEQ ID NO: 162477 - DNA, 20 bp, Artificial Sequence
  Description of Artificial Sequence: Synthetic oligonucleotide
  Target: LAMA2; (+) strand; PAM type: NRG; PAM sequence: TAG
aaaaagcatattcaagttca

SEQ ID NO: 162478 - DNA, 20 bp, Artificial Sequence
  Description of Artificial Sequence: Synthetic oligonucleotide
  Target: LAMA2; (+) strand; PAM type: NRG; PAM sequence: AGG
aaaagcatattcaagttcat

SEQ ID NO: 162479 - DNA, 20 bp, Artificial Sequence
  Description of Artificial Sequence: Synthetic oligonucleotide
  Target: LAMA2; (+) strand; PAM type: NRG; PAM sequence: GGG
aaagcatattcaagttcata

SEQ ID NO: 162480 - DNA, 20 bp, Artificial Sequence
  Description of Artificial Sequence: Synthetic oligonucleotide
  Target: LAMA2; (+) strand; PAM type: NRG; PAM sequence: TGG
ttcaattaaccatgaatatg

SEQ ID NO: 162481 - DNA, 20 bp, Artificial Sequence
  Description of Artificial Sequence: Synthetic oligonucleotide
  Target: LAMA2; (+) strand; PAM type: NRG; PAM sequence: GAG
aatcaaataaaaatctactt

SEQ ID NO: 162482 - DNA, 20 bp, Artificial Sequence
  Description of Artificial Sequence: Synthetic oligonucleotide
  Target: LAMA2; (+) strand; PAM type: NRG; PAM sequence: GAG
tcaaataaaaatctacttga

SEQ ID NO: 162483 - DNA, 20 bp, Artificial Sequence
  Description of Artificial Sequence: Synthetic oligonucleotide
  Target: LAMA2; (+) strand; PAM type: NRG; PAM sequence: TAG
cttgagagaacctataatct

SEQ ID NO: 162484 - DNA, 20 bp, Artificial Sequence
  Description of Artificial Sequence: Synthetic oligonucleotide
  Target: LAMA2; (+) strand; PAM type: NRG; PAM sequence: TGG
agaacctataatcttagaaa

SEQ ID NO: 162485 - DNA, 20 bp, Artificial Sequence
  Description of Artificial Sequence: Synthetic oligonucleotide
  Target: LAMA2; (+) strand; PAM type: NRG; PAM sequence: AAG
acctataatcttagaaatgg

SEQ ID NO: 162486 - DNA, 20 bp, Artificial Sequence
  Description of Artificial Sequence: Synthetic oligonucleotide
  Target: LAMA2; (+) strand; PAM type: NRG; PAM sequence: GAG
ctataatcttagaaatggaa

SEQ ID NO: 162487 - DNA, 20 bp, Artificial Sequence
  Description of Artificial Sequence: Synthetic oligonucleotide
  Target: LAMA2; (+) strand; PAM type: NRG; PAM sequence: CAG
cttagaaatggaagagactt

SEQ ID NO: 162488 - DNA, 20 bp, Artificial Sequence
  Description of Artificial Sequence: Synthetic oligonucleotide
  Target: LAMA2; (+) strand; PAM type: NRG; PAM sequence: AGG
ttagaaatggaagagacttc

SEQ ID NO: 162489 - DNA, 20 bp, Artificial Sequence
  Description of Artificial Sequence: Synthetic oligonucleotide
  Target: LAMA2; (+) strand; PAM type: NRG; PAM sequence: TGG
aagagacttcaggcaacctt

SEQ ID NO: 162490 - DNA, 20 bp, Artificial Sequence
  Description of Artificial Sequence: Synthetic oligonucleotide
  Target: LAMA2; (+) strand; PAM type: NRG; PAM sequence: GGG
agagacttcaggcaaccttt

SEQ ID NO: 162491 - DNA, 20 bp, Artificial Sequence
  Description of Artificial Sequence: Synthetic oligonucleotide
  Target: LAMA2; (+) strand; PAM type: NRG; PAM sequence: GGG
gagacttcaggcaacctttg

SEQ ID NO: 162492 - DNA, 20 bp, Artificial Sequence
  Description of Artificial Sequence: Synthetic oligonucleotide
  Target: LAMA2; (+) strand; PAM type: NRG; PAM sequence: AAG
cttcaggcaacctttgggga

SEQ ID NO: 162493 - DNA, 20 bp, Artificial Sequence
  Description of Artificial Sequence: Synthetic oligonucleotide
  Target: LAMA2; (+) strand; PAM type: NRG; PAM sequence: AAG
ctttaataaatgaacaaatg

SEQ ID NO: 162494 - DNA, 20 bp, Artificial Sequence
  Description of Artificial Sequence: Synthetic oligonucleotide
  Target: LAMA2; (+) strand; PAM type: NRG; PAM sequence: AGG
tttaataaatgaacaaatga

SEQ ID NO: 162495 - DNA, 20 bp, Artificial Sequence
  Description of Artificial Sequence: Synthetic oligonucleotide
  Target: LAMA2; (+) strand; PAM type: NRG; PAM sequence: TAG
tgaacaaatgaaggaaaatc

SEQ ID NO: 162496 - DNA, 20 bp, Artificial Sequence
  Description of Artificial Sequence: Synthetic oligonucleotide
  Target: LAMA2; (+) strand; PAM type: NRG; PAM sequence: CAG
acaaatgaaggaaaatctag

SEQ ID NO: 162497 - DNA, 20 bp, Artificial Sequence
  Description of Artificial Sequence: Synthetic oligonucleotide
  Target: LAMA2; (+) strand; PAM type: NRG; PAM sequence: GAG
aaatgaaggaaaatctagca

SEQ ID NO: 162498 - DNA, 20 bp, Artificial Sequence
  Description of Artificial Sequence: Synthetic oligonucleotide
  Target: LAMA2; (+) strand; PAM type: NRG; PAM sequence: AAG
gcagagaaattgatttgtcc

SEQ ID NO: 162499 - DNA, 20 bp, Artificial Sequence
  Description of Artificial Sequence: Synthetic oligonucleotide
  Target: LAMA2; (+) strand; PAM type: NRG; PAM sequence: CAG
ttgatttgtccaagaaaact

SEQ ID NO: 162500 - DNA, 20 bp, Artificial Sequence
  Description of Artificial Sequence: Synthetic oligonucleotide
  Target: LAMA2; (+) strand; PAM type: NRG; PAM sequence: CAG
agaaaactcagcccatttat

SEQ ID NO: 162501 - DNA, 20 bp, Artificial Sequence
  Description of Artificial Sequence: Synthetic oligonucleotide
  Target: LAMA2; (+) strand; PAM type: NRG; PAM sequence: AGG
gaaaactcagcccatttatc

SEQ ID NO: 162502 - DNA, 20 bp, Artificial Sequence
  Description of Artificial Sequence: Synthetic oligonucleotide
  Target: LAMA2; (+) strand; PAM type: NRG; PAM sequence: AAG
tcaggcatttcatcataatt

SEQ ID NO: 162503 - DNA, 20 bp, Artificial Sequence
  Description of Artificial Sequence: Synthetic oligonucleotide
  Target: LAMA2; (+) strand; PAM type: NRG; PAM sequence: AAG
cttatgtgtacaacaaatgc

SEQ ID NO: 162504 - DNA, 20 bp, Artificial Sequence
  Description of Artificial Sequence: Synthetic oligonucleotide
  Target: LAMA2; (+) strand; PAM type: NRG; PAM sequence: TGG
acattttcacacactataaa

SEQ ID NO: 162505 - DNA, 20 bp, Artificial Sequence
  Description of Artificial Sequence: Synthetic oligonucleotide
  Target: LAMA2; (+) strand; PAM type: NRG; PAM sequence: CGG
aaatggacaaatacccaaaa

SEQ ID NO: 162506 - DNA, 20 bp, Artificial Sequence
  Description of Artificial Sequence: Synthetic oligonucleotide
  Target: LAMA2; (+) strand; PAM type: NRG; PAM sequence: GGG
aatggacaaatacccaaaac

SEQ ID NO: 162507 - DNA, 20 bp, Artificial Sequence
  Description of Artificial Sequence: Synthetic oligonucleotide
  Target: LAMA2; (+) strand; PAM type: NRG; PAM sequence: GGG
atggacaaatacccaaaacg

SEQ ID NO: 162508 - DNA, 20 bp, Artificial Sequence
  Description of Artificial Sequence: Synthetic oligonucleotide
  Target: LAMA2; (+) strand; PAM type: NRG; PAM sequence: AAG
acaaatacccaaaacgggga

SEQ ID NO: 162509 - DNA, 20 bp, Artificial Sequence
  Description of Artificial Sequence: Synthetic oligonucleotide
  Target: LAMA2; (+) strand; PAM type: NRG; PAM sequence: AAG
aaagttgtttctaattacaa

SEQ ID NO: 162510 - DNA, 20 bp, Artificial Sequence
  Description of Artificial Sequence: Synthetic oligonucleotide
  Target: LAMA2; (+) strand; PAM type: NRG; PAM sequence: TGG
tgtttctaattacaaaagtg

SEQ ID NO: 162511 - DNA, 20 bp, Artificial Sequence
  Description of Artificial Sequence: Synthetic oligonucleotide
  Target: LAMA2; (+) strand; PAM type: NRG; PAM sequence: CAG
aaagtgtggttctcatatca

SEQ ID NO: 162512 - DNA, 20 bp, Artificial Sequence
  Description of Artificial Sequence: Synthetic oligonucleotide
  Target: LAMA2; (+) strand; PAM type: NRG; PAM sequence: AGG
aagtgtggttctcatatcac

SEQ ID NO: 162513 - DNA, 20 bp, Artificial Sequence
  Description of Artificial Sequence: Synthetic oligonucleotide
  Target: LAMA2; (+) strand; PAM type: NRG; PAM sequence: TGG
ggacaaaacaaaacaaatgc

SEQ ID NO: 162514 - DNA, 20 bp, Artificial Sequence
  Description of Artificial Sequence: Synthetic oligonucleotide
  Target: LAMA2; (+) strand; PAM type: NRG; PAM sequence: GGG
gacaaaacaaaacaaatgct

SEQ ID NO: 162515 - DNA, 20 bp, Artificial Sequence
  Description of Artificial Sequence: Synthetic oligonucleotide
  Target: LAMA2; (+) strand; PAM type: NRG; PAM sequence: GGG
acaaaacaaaacaaatgctg

SEQ ID NO: 162516 - DNA, 20 bp, Artificial Sequence
  Description of Artificial Sequence: Synthetic oligonucleotide
  Target: LAMA2; (+) strand; PAM type: NRG; PAM sequence: AAG
aaacaaaacaaatgctgggg

SEQ ID NO: 162517 - DNA, 20 bp, Artificial Sequence
  Description of Artificial Sequence: Synthetic oligonucleotide
  Target: LAMA2; (+) strand; PAM type: NRG; PAM sequence: AAG
caaaacaaatgctggggaag

SEQ ID NO: 162518 - DNA, 20 bp, Artificial Sequence
  Description of Artificial Sequence: Synthetic oligonucleotide
  Target: LAMA2; (+) strand; PAM type: NRG; PAM sequence: AGG
aaaacaaatgctggggaaga

SEQ ID NO: 162519 - DNA, 20 bp, Artificial Sequence
  Description of Artificial Sequence: Synthetic oligonucleotide
  Target: LAMA2; (+) strand; PAM type: NRG; PAM sequence: AAG
acaaatgctggggaagaagg

SEQ ID NO: 162520 - DNA, 20 bp, Artificial Sequence
  Description of Artificial Sequence: Synthetic oligonucleotide
  Target: LAMA2; (+) strand; PAM type: NRG; PAM sequence: GAG
aaatgctggggaagaaggaa

SEQ ID NO: 162521 - DNA, 20 bp, Artificial Sequence
  Description of Artificial Sequence: Synthetic oligonucleotide
  Target: LAMA2; (+) strand; PAM type: NRG; PAM sequence: GAG
atgctggggaagaaggaaga

SEQ ID NO: 162522 - DNA, 20 bp, Artificial Sequence
  Description of Artificial Sequence: Synthetic oligonucleotide
  Target: LAMA2; (+) strand; PAM type: NRG; PAM sequence: AGG
tgctggggaagaaggaagag

SEQ ID NO: 162523 - DNA, 20 bp, Artificial Sequence
  Description of Artificial Sequence: Synthetic oligonucleotide
  Target: LAMA2; (+) strand; PAM type: NRG; PAM sequence: GGG
gctggggaagaaggaagaga

SEQ ID NO: 162524 - DNA, 20 bp, Artificial Sequence
  Description of Artificial Sequence: Synthetic oligonucleotide
  Target: LAMA2; (+) strand; PAM type: NRG; PAM sequence: GAG
tggggaagaaggaagagagg

SEQ ID NO: 162525 - DNA, 20 bp, Artificial Sequence
  Description of Artificial Sequence: Synthetic oligonucleotide
  Target: LAMA2; (+) strand; PAM type: NRG; PAM sequence: AGG
ggggaagaaggaagagaggg

SEQ ID NO: 162526 - DNA, 20 bp, Artificial Sequence
  Description of Artificial Sequence: Synthetic oligonucleotide
  Target: LAMA2; (+) strand; PAM type: NRG; PAM sequence: GGG
gggaagaaggaagagaggga

SEQ ID NO: 162527 - DNA, 20 bp, Artificial Sequence
  Description of Artificial Sequence: Synthetic oligonucleotide
  Target: LAMA2; (+) strand; PAM type: NRG; PAM sequence: GAG
gaagaaggaagagagggagg

SEQ ID NO: 162528 - DNA, 20 bp, Artificial Sequence
  Description of Artificial Sequence: Synthetic oligonucleotide
  Target: LAMA2; (+) strand; PAM type: NRG; PAM sequence: AGG
aagaaggaagagagggaggg

SEQ ID NO: 162529 - DNA, 20 bp, Artificial Sequence
  Description of Artificial Sequence: Synthetic oligonucleotide
  Target: LAMA2; (+) strand; PAM type: NRG; PAM sequence: GGG
agaaggaagagagggaggga

SEQ ID NO: 162530 - DNA, 20 bp, Artificial Sequence
  Description of Artificial Sequence: Synthetic oligonucleotide
  Target: LAMA2; (+) strand; PAM type: NRG; PAM sequence: AAG
aggaagagagggagggaggg

SEQ ID NO: 162531 - DNA, 20 bp, Artificial Sequence
  Description of Artificial Sequence: Synthetic oligonucleotide
  Target: LAMA2; (+) strand; PAM type: NRG; PAM sequence: AAG
aagagagggagggagggaag

SEQ ID NO: 162532 - DNA, 20 bp, Artificial Sequence
  Description of Artificial Sequence: Synthetic oligonucleotide
  Target: LAMA2; (+) strand; PAM type: NRG; PAM sequence: GAG
gagagggagggagggaagaa

SEQ ID NO: 162533 - DNA, 20 bp, Artificial Sequence
  Description of Artificial Sequence: Synthetic oligonucleotide
  Target: LAMA2; (+) strand; PAM type: NRG; PAM sequence: AGG
agagggagggagggaagaag

SEQ ID NO: 162534 - DNA, 20 bp, Artificial Sequence
  Description of Artificial Sequence: Synthetic oligonucleotide
  Target: LAMA2; (+) strand; PAM type: NRG; PAM sequence: CAG
agggagggaagaagaggtcc

SEQ ID NO: 162535 - DNA, 20 bp, Artificial Sequence
  Description of Artificial Sequence: Synthetic oligonucleotide
  Target: LAMA2; (+) strand; PAM type: NRG; PAM sequence: AGG
gggagggaagaagaggtccc

SEQ ID NO: 162536 - DNA, 20 bp, Artificial Sequence
  Description of Artificial Sequence: Synthetic oligonucleotide
  Target: LAMA2; (+) strand; PAM type: NRG; PAM sequence: GAG
ggaagaagaggtcccaggct

SEQ ID NO: 162537 - DNA, 20 bp, Artificial Sequence
  Description of Artificial Sequence: Synthetic oligonucleotide
  Target: LAMA2; (+) strand; PAM type: NRG; PAM sequence: CAG
agaggtcccaggctgagctg

SEQ ID NO: 162538 - DNA, 20 bp, Artificial Sequence
  Description of Artificial Sequence: Synthetic oligonucleotide
  Target: LAMA2; (+) strand; PAM type: NRG; PAM sequence: AAG
ggtcccaggctgagctgcag

SEQ ID NO: 162539 - DNA, 20 bp, Artificial Sequence
  Description of Artificial Sequence: Synthetic oligonucleotide
  Target: LAMA2; (+) strand; PAM type: NRG; PAM sequence: GAG
tcccaggctgagctgcagaa

SEQ ID NO: 162540 - DNA, 20 bp, Artificial Sequence
  Description of Artificial Sequence: Synthetic oligonucleotide
  Target: LAMA2; (+) strand; PAM type: NRG; PAM sequence: TAG
caggctgagctgcagaagag

SEQ ID NO: 162541 - DNA, 20 bp, Artificial Sequence
  Description of Artificial Sequence: Synthetic oligonucleotide
  Target: LAMA2; (+) strand; PAM type: NRG; PAM sequence: AGG
aggctgagctgcagaagagt

SEQ ID NO: 162542 - DNA, 20 bp, Artificial Sequence
  Description of Artificial Sequence: Synthetic oligonucleotide
  Target: LAMA2; (+) strand; PAM type: NRG; PAM sequence: GAG
gctgagctgcagaagagtag

SEQ ID NO: 162543 - DNA, 20 bp, Artificial Sequence
  Description of Artificial Sequence: Synthetic oligonucleotide
  Target: LAMA2; (+) strand; PAM type: NRG; PAM sequence: AAG
gctgcagaagagtaggagac

SEQ ID NO: 162544 - DNA, 20 bp, Artificial Sequence
  Description of Artificial Sequence: Synthetic oligonucleotide
  Target: LAMA2; (+) strand; PAM type: NRG; PAM sequence: CAG
gagtaggagacaagacttac

SEQ ID NO: 162545 - DNA, 20 bp, Artificial Sequence
  Description of Artificial Sequence: Synthetic oligonucleotide
  Target: LAMA2; (+) strand; PAM type: NRG; PAM sequence: TAG
ggagacaagacttaccagta

SEQ ID NO: 162546 - DNA, 20 bp, Artificial Sequence
  Description of Artificial Sequence: Synthetic oligonucleotide
  Target: LAMA2; (+) strand; PAM type: NRG; PAM sequence: GAG
agacaagacttaccagtata

SEQ ID NO: 162547 - DNA, 20 bp, Artificial Sequence
  Description of Artificial Sequence: Synthetic oligonucleotide
  Target: LAMA2; (+) strand; PAM type: NRG; PAM sequence: CAG
aagacttaccagtatagagt

SEQ ID NO: 162548 - DNA, 20 bp, Artificial Sequence
  Description of Artificial Sequence: Synthetic oligonucleotide
  Target: LAMA2; (+) strand; PAM type: NRG; PAM sequence: AGG
agacttaccagtatagagtc

SEQ ID NO: 162549 - DNA, 20 bp, Artificial Sequence
  Description of Artificial Sequence: Synthetic oligonucleotide
  Target: LAMA2; (+) strand; PAM type: NRG; PAM sequence: TAG
cagtatagagtcaggacctg

SEQ ID NO: 162550 - DNA, 20 bp, Artificial Sequence
  Description of Artificial Sequence: Synthetic oligonucleotide
  Target: LAMA2; (+) strand; PAM type: NRG; PAM sequence: GAG
gtatagagtcaggacctgta

SEQ ID NO: 162551 - DNA, 20 bp, Artificial Sequence
  Description of Artificial Sequence: Synthetic oligonucleotide
  Target: LAMA2; (+) strand; PAM type: NRG; PAM sequence: GAG
gtcaggacctgtagagaatt

SEQ ID NO: 162552 - DNA, 20 bp, Artificial Sequence
  Description of Artificial Sequence: Synthetic oligonucleotide
  Target: LAMA2; (+) strand; PAM type: NRG; PAM sequence: AGG
tcaggacctgtagagaattg

SEQ ID NO: 162553 - DNA, 20 bp, Artificial Sequence
  Description of Artificial Sequence: Synthetic oligonucleotide
  Target: LAMA2; (+) strand; PAM type: NRG; PAM sequence: TAG
gacctgtagagaattgagga

SEQ ID NO: 162554 - DNA, 20 bp, Artificial Sequence
  Description of Artificial Sequence: Synthetic oligonucleotide
  Target: LAMA2; (+) strand; PAM type: NRG; PAM sequence: AGG
acctgtagagaattgaggat

SEQ ID NO: 162555 - DNA, 20 bp, Artificial Sequence
  Description of Artificial Sequence: Synthetic oligonucleotide
  Target: LAMA2; (+) strand; PAM type: NRG; PAM sequence: GGG
cctgtagagaattgaggata

SEQ ID NO: 162556 - DNA, 20 bp, Artificial Sequence
  Description of Artificial Sequence: Synthetic oligonucleotide
  Target: LAMA2; (+) strand; PAM type: NRG; PAM sequence: TAG
agagaattgaggatagggca

SEQ ID NO: 162557 - DNA, 20 bp, Artificial Sequence
  Description of Artificial Sequence: Synthetic oligonucleotide
  Target: LAMA2; (+) strand; PAM type: NRG; PAM sequence: AAG
gaattgaggatagggcatag

SEQ ID NO: 162558 - DNA, 20 bp, Artificial Sequence
  Description of Artificial Sequence: Synthetic oligonucleotide
  Target: LAMA2; (+) strand; PAM type: NRG; PAM sequence: AAG
ttgaggatagggcatagaag

SEQ ID NO: 162559 - DNA, 20 bp, Artificial Sequence
  Description of Artificial Sequence: Synthetic oligonucleotide
  Target: LAMA2; (+) strand; PAM type: NRG; PAM sequence: AGG
tgaggatagggcatagaaga

SEQ ID NO: 162560 - DNA, 20 bp, Artificial Sequence
  Description of Artificial Sequence: Synthetic oligonucleotide
  Target: LAMA2; (+) strand; PAM type: NRG; PAM sequence: GAG
aggatagggcatagaagaag

SEQ ID NO: 162561 - DNA, 20 bp, Artificial Sequence
  Description of Artificial Sequence: Synthetic oligonucleotide
  Target: LAMA2; (+) strand; PAM type: NRG; PAM sequence: GAG
gatagggcatagaagaagga

SEQ ID NO: 162562 - DNA, 20 bp, Artificial Sequence
  Description of Artificial Sequence: Synthetic oligonucleotide
  Target: LAMA2; (+) strand; PAM type: NRG; PAM sequence: TGG
gggcatagaagaaggagaga

SEQ ID NO: 162563 - DNA, 20 bp, Artificial Sequence
  Description of Artificial Sequence: Synthetic oligonucleotide
  Target: LAMA2; (+) strand; PAM type: NRG; PAM sequence: AAG
gaaggagagatggaaataaa

SEQ ID NO: 162564 - DNA, 20 bp, Artificial Sequence
  Description of Artificial Sequence: Synthetic oligonucleotide
  Target: LAMA2; (+) strand; PAM type: NRG; PAM sequence: AAG
agagatggaaataaaaagta

SEQ ID NO: 162565 - DNA, 20 bp, Artificial Sequence
  Description of Artificial Sequence: Synthetic oligonucleotide
  Target: LAMA2; (+) strand; PAM type: NRG; PAM sequence: AAG
gatggaaataaaaagtaaag

SEQ ID NO: 162566 - DNA, 20 bp, Artificial Sequence
  Description of Artificial Sequence: Synthetic oligonucleotide
  Target: LAMA2; (+) strand; PAM type: NRG; PAM sequence: AAG
ggaaataaaaagtaaagaag

SEQ ID NO: 162567 - DNA, 20 bp, Artificial Sequence
  Description of Artificial Sequence: Synthetic oligonucleotide
  Target: LAMA2; (+) strand; PAM type: NRG; PAM sequence: AAG
aataaaaagtaaagaagaag

SEQ ID NO: 162568 - DNA, 20 bp, Artificial Sequence
  Description of Artificial Sequence: Synthetic oligonucleotide
  Target: LAMA2; (+) strand; PAM type: NRG; PAM sequence: TGG
aagaagtaaaaaacaattca

SEQ ID NO: 162569 - DNA, 20 bp, Artificial Sequence
  Description of Artificial Sequence: Synthetic oligonucleotide
  Target: LAMA2; (+) strand; PAM type: NRG; PAM sequence: TGG
caattcatggttttatttct

SEQ ID NO: 162570 - DNA, 20 bp, Artificial Sequence
  Description of Artificial Sequence: Synthetic oligonucleotide
  Target: LAMA2; (+) strand; PAM type: NRG; PAM sequence: CAG
taaaaaacaaattttgatgt

SEQ ID NO: 162571 - DNA, 20 bp, Artificial Sequence
  Description of Artificial Sequence: Synthetic oligonucleotide
  Target: LAMA2; (+) strand; PAM type: NRG; PAM sequence: TAG
attttgatgtcagactgcct

SEQ ID NO: 162572 - DNA, 20 bp, Artificial Sequence
  Description of Artificial Sequence: Synthetic oligonucleotide
  Target: LAMA2; (+) strand; PAM type: NRG; PAM sequence: TGG
gactgccttagatcaaatcc

SEQ ID NO: 162573 - DNA, 20 bp, Artificial Sequence
  Description of Artificial Sequence: Synthetic oligonucleotide
  Target: LAMA2; (+) strand; PAM type: NRG; PAM sequence: TAG
atcctggcctcattacttcc

SEQ ID NO: 162574 - DNA, 20 bp, Artificial Sequence
  Description of Artificial Sequence: Synthetic oligonucleotide
  Target: LAMA2; (+) strand; PAM type: NRG; PAM sequence: CAG
ccttgaatctttctgtaatt

SEQ ID NO: 162575 - DNA, 20 bp, Artificial Sequence
  Description of Artificial Sequence: Synthetic oligonucleotide
  Target: LAMA2; (+) strand; PAM type: NRG; PAM sequence: TAG
taattcagcttcttcatctg

SEQ ID NO: 162576 - DNA, 20 bp, Artificial Sequence
  Description of Artificial Sequence: Synthetic oligonucleotide
  Target: LAMA2; (+) strand; PAM type: NRG; PAM sequence: AAG
tcagcttcttcatctgtagt

SEQ ID NO: 162577 - DNA, 20 bp, Artificial Sequence
  Description of Artificial Sequence: Synthetic oligonucleotide
  Target: LAMA2; (+) strand; PAM type: NRG; PAM sequence: CAG
atctgtagtaagatccactt

SEQ ID NO: 162578 - DNA, 20 bp, Artificial Sequence
  Description of Artificial Sequence: Synthetic oligonucleotide
  Target: LAMA2; (+) strand; PAM type: NRG; PAM sequence: GAG
ctgtagtaagatccacttca

SEQ ID NO: 162579 - DNA, 20 bp, Artificial Sequence
  Description of Artificial Sequence: Synthetic oligonucleotide
  Target: LAMA2; (+) strand; PAM type: NRG; PAM sequence: AGG
tgtagtaagatccacttcag

SEQ ID NO: 162580 - DNA, 20 bp, Artificial Sequence
  Description of Artificial Sequence: Synthetic oligonucleotide
  Target: LAMA2; (+) strand; PAM type: NRG; PAM sequence: GGG
gtagtaagatccacttcaga

SEQ ID NO: 162581 - DNA, 20 bp, Artificial Sequence
  Description of Artificial Sequence: Synthetic oligonucleotide
  Target: LAMA2; (+) strand; PAM type: NRG; PAM sequence: AAG
tatgtctgcttacgtactcc

SEQ ID NO: 162582 - DNA, 20 bp, Artificial Sequence
  Description of Artificial Sequence: Synthetic oligonucleotide
  Target: LAMA2; (+) strand; PAM type: NRG; PAM sequence: AAG
gtctgcttacgtactccaag

SEQ ID NO: 162583 - DNA, 20 bp, Artificial Sequence
  Description of Artificial Sequence: Synthetic oligonucleotide
  Target: LAMA2; (+) strand; PAM type: NRG; PAM sequence: AAG
tactccaagaagcaaatgcc

SEQ ID NO: 162584 - DNA, 20 bp, Artificial Sequence
  Description of Artificial Sequence: Synthetic oligonucleotide
  Target: LAMA2; (+) strand; PAM type: NRG; PAM sequence: GAG
ctccaagaagcaaatgccaa

SEQ ID NO: 162585 - DNA, 20 bp, Artificial Sequence
  Description of Artificial Sequence: Synthetic oligonucleotide
  Target: LAMA2; (+) strand; PAM type: NRG; PAM sequence: AGG
tccaagaagcaaatgccaag

SEQ ID NO: 162586 - DNA, 20 bp, Artificial Sequence
  Description of Artificial Sequence: Synthetic oligonucleotide
  Target: LAMA2; (+) strand; PAM type: NRG; PAM sequence: TGG
gcaaatgccaagaggtttcc

SEQ ID NO: 162587 - DNA, 20 bp, Artificial Sequence
  Description of Artificial Sequence: Synthetic oligonucleotide
  Target: LAMA2; (+) strand; PAM type: NRG; PAM sequence: GGG
caaatgccaagaggtttcct

SEQ ID NO: 162588 - DNA, 20 bp, Artificial Sequence
  Description of Artificial Sequence: Synthetic oligonucleotide
  Target: LAMA2; (+) strand; PAM type: NRG; PAM sequence: GGG
aaatgccaagaggtttcctg

SEQ ID NO: 162589 - DNA, 20 bp, Artificial Sequence
  Description of Artificial Sequence: Synthetic oligonucleotide
  Target: LAMA2; (+) strand; PAM type: NRG; PAM sequence: GGG
aatgccaagaggtttcctgg

SEQ ID NO: 162590 - DNA, 20 bp, Artificial Sequence
  Description of Artificial Sequence: Synthetic oligonucleotide
  Target: LAMA2; (+) strand; PAM type: NRG; PAM sequence: AAG
ccaagaggtttcctggggga

SEQ ID NO: 162591 - DNA, 20 bp, Artificial Sequence
  Description of Artificial Sequence: Synthetic oligonucleotide
  Target: LAMA2; (+) strand; PAM type: NRG; PAM sequence: AGG
caagaggtttcctgggggaa

SEQ ID NO: 162592 - DNA, 20 bp, Artificial Sequence
  Description of Artificial Sequence: Synthetic oligonucleotide
  Target: LAMA2; (+) strand; PAM type: NRG; PAM sequence: AAG
tcctgggggaaaggccaacg

SEQ ID NO: 162593 - DNA, 20 bp, Artificial Sequence
  Description of Artificial Sequence: Synthetic oligonucleotide
  Target: LAMA2; (+) strand; PAM type: NRG; PAM sequence: AAG
ggaaaggccaacgaagcatg

SEQ ID NO: 162594 - DNA, 20 bp, Artificial Sequence
  Description of Artificial Sequence: Synthetic oligonucleotide
  Target: LAMA2; (+) strand; PAM type: NRG; PAM sequence: TGG
aaggccaacgaagcatgaag

SEQ ID NO: 162595 - DNA, 20 bp, Artificial Sequence
  Description of Artificial Sequence: Synthetic oligonucleotide
  Target: LAMA2; (+) strand; PAM type: NRG; PAM sequence: GGG
aggccaacgaagcatgaagt

SEQ ID NO: 162596 - DNA, 20 bp, Artificial Sequence
  Description of Artificial Sequence: Synthetic oligonucleotide
  Target: LAMA2; (+) strand; PAM type: NRG; PAM sequence: GAG
gccaacgaagcatgaagtgg

SEQ ID NO: 162597 - DNA, 20 bp, Artificial Sequence
  Description of Artificial Sequence: Synthetic oligonucleotide
  Target: LAMA2; (+) strand; PAM type: NRG; PAM sequence: CAG
acgaagcatgaagtgggaga

SEQ ID NO: 162598 - DNA, 20 bp, Artificial Sequence
  Description of Artificial Sequence: Synthetic oligonucleotide
  Target: LAMA2; (+) strand; PAM type: NRG; PAM sequence: TAG
gcatgaagtgggagacagca

SEQ ID NO: 162599 - DNA, 20 bp, Artificial Sequence
  Description of Artificial Sequence: Synthetic oligonucleotide
  Target: LAMA2; (+) strand; PAM type: NRG; PAM sequence: TGG
agcatagccttctgctgcaa

SEQ ID NO: 162600 - DNA, 20 bp, Artificial Sequence
  Description of Artificial Sequence: Synthetic oligonucleotide
  Target: LAMA2; (+) strand; PAM type: NRG; PAM sequence: GGG
gcatagccttctgctgcaat

SEQ ID NO: 162601 - DNA, 20 bp, Artificial Sequence
  Description of Artificial Sequence: Synthetic oligonucleotide
  Target: LAMA2; (+) strand; PAM type: NRG; PAM sequence: GGG
catagccttctgctgcaatg

SEQ ID NO: 162602 - DNA, 20 bp, Artificial Sequence
  Description of Artificial Sequence: Synthetic oligonucleotide
  Target: LAMA2; (+) strand; PAM type: NRG; PAM sequence: CGG
tgcaatggggttctgactcc

SEQ ID NO: 162603 - DNA, 20 bp, Artificial Sequence
  Description of Artificial Sequence: Synthetic oligonucleotide
  Target: LAMA2; (+) strand; PAM type: NRG; PAM sequence: GGG
gcaatggggttctgactccc

SEQ ID NO: 162604 - DNA, 20 bp, Artificial Sequence
  Description of Artificial Sequence: Synthetic oligonucleotide
  Target: LAMA2; (+) strand; PAM type: NRG; PAM sequence: CAG
ttctgactcccgggaaaaca

SEQ ID NO: 162605 - DNA, 20 bp, Artificial Sequence
  Description of Artificial Sequence: Synthetic oligonucleotide
  Target: LAMA2; (+) strand; PAM type: NRG; PAM sequence: AAG
gactcccgggaaaacacaga

SEQ ID NO: 162606 - DNA, 20 bp, Artificial Sequence
  Description of Artificial Sequence: Synthetic oligonucleotide
  Target: LAMA2; (+) strand; PAM type: NRG; PAM sequence: AAG
cccgggaaaacacagaaaga

SEQ ID NO: 162607 - DNA, 20 bp, Artificial Sequence
  Description of Artificial Sequence: Synthetic oligonucleotide
  Target: LAMA2; (+) strand; PAM type: NRG; PAM sequence: TGG
gaaaacacagaaagaaagac

SEQ ID NO: 162608 - DNA, 20 bp, Artificial Sequence
  Description of Artificial Sequence: Synthetic oligonucleotide
  Target: LAMA2; (+) strand; PAM type: NRG; PAM sequence: GGG
aaaacacagaaagaaagact

SEQ ID NO: 162609 - DNA, 20 bp, Artificial Sequence
  Description of Artificial Sequence: Synthetic oligonucleotide
  Target: LAMA2; (+) strand; PAM type: NRG; PAM sequence: TAG
acacagaaagaaagactggg

SEQ ID NO: 162610 - DNA, 20 bp, Artificial Sequence
  Description of Artificial Sequence: Synthetic oligonucleotide
  Target: LAMA2; (+) strand; PAM type: NRG; PAM sequence: AGG
cacagaaagaaagactgggt

SEQ ID NO: 162611 - DNA, 20 bp, Artificial Sequence
  Description of Artificial Sequence: Synthetic oligonucleotide
  Target: LAMA2; (+) strand; PAM type: NRG; PAM sequence: AAG
aaagaaagactgggtaggaa

SEQ ID NO: 162612 - DNA, 20 bp, Artificial Sequence
  Description of Artificial Sequence: Synthetic oligonucleotide
  Target: LAMA2; (+) strand; PAM type: NRG; PAM sequence: TGG
tgggtaggaaaagccttgtt

SEQ ID NO: 162613 - DNA, 20 bp, Artificial Sequence
  Description of Artificial Sequence: Synthetic oligonucleotide
  Target: LAMA2; (+) strand; PAM type: NRG; PAM sequence: TGG
tttgtcaaatcttaaattct

SEQ ID NO: 162614 - DNA, 20 bp, Artificial Sequence
  Description of Artificial Sequence: Synthetic oligonucleotide
  Target: LAMA2; (+) strand; PAM type: NRG; PAM sequence: AAG
caaatcttaaattcttggcc

SEQ ID NO: 162615 - DNA, 20 bp, Artificial Sequence
  Description of Artificial Sequence: Synthetic oligonucleotide
  Target: LAMA2; (+) strand; PAM type: NRG; PAM sequence: TGG
taaattcttggccaagccaa

SEQ ID NO: 162616 - DNA, 20 bp, Artificial Sequence
  Description of Artificial Sequence: Synthetic oligonucleotide
  Target: LAMA2; (+) strand; PAM type: NRG; PAM sequence: GGG
aaattcttggccaagccaat

SEQ ID NO: 162617 - DNA, 20 bp, Artificial Sequence
  Description of Artificial Sequence: Synthetic oligonucleotide
  Target: LAMA2; (+) strand; PAM type: NRG; PAM sequence: AAG
caagccaatgggatataccc

SEQ ID NO: 162618 - DNA, 20 bp, Artificial Sequence
  Description of Artificial Sequence: Synthetic oligonucleotide
  Target: LAMA2; (+) strand; PAM type: NRG; PAM sequence: AAG
caagcaaattttacccacta

SEQ ID NO: 162619 - DNA, 20 bp, Artificial Sequence
  Description of Artificial Sequence: Synthetic oligonucleotide
  Target: LAMA2; (+) strand; PAM type: NRG; PAM sequence: AGG
aagcaaattttacccactaa

SEQ ID NO: 162620 - DNA, 20 bp, Artificial Sequence
  Description of Artificial Sequence: Synthetic oligonucleotide
  Target: LAMA2; (+) strand; PAM type: NRG; PAM sequence: TGG
ccactaaaggaatcctgaat

SEQ ID NO: 162621 - DNA, 20 bp, Artificial Sequence
  Description of Artificial Sequence: Synthetic oligonucleotide
  Target: LAMA2; (+) strand; PAM type: NRG; PAM sequence: CAG
taaaggaatcctgaattggt

SEQ ID NO: 162622 - DNA, 20 bp, Artificial Sequence
  Description of Artificial Sequence: Synthetic oligonucleotide
  Target: LAMA2; (+) strand; PAM type: NRG; PAM sequence: AGG
aaaggaatcctgaattggtc

SEQ ID NO: 162623 - DNA, 20 bp, Artificial Sequence
  Description of Artificial Sequence: Synthetic oligonucleotide
  Target: LAMA2; (+) strand; PAM type: NRG; PAM sequence: GGG
aaggaatcctgaattggtca

SEQ ID NO: 162624 - DNA, 20 bp, Artificial Sequence
  Description of Artificial Sequence: Synthetic oligonucleotide
  Target: LAMA2; (+) strand; PAM type: NRG; PAM sequence: GAG
ggaatcctgaattggtcagg

SEQ ID NO: 162625 - DNA, 20 bp, Artificial Sequence
  Description of Artificial Sequence: Synthetic oligonucleotide
  Target: LAMA2; (+) strand; PAM type: NRG; PAM sequence: AGG
gaatcctgaattggtcaggg

SEQ ID NO: 162626 - DNA, 20 bp, Artificial Sequence
  Description of Artificial Sequence: Synthetic oligonucleotide
  Target: LAMA2; (+) strand; PAM type: NRG; PAM sequence: TAG
tgaattggtcagggaggttc

SEQ ID NO: 162627 - DNA, 20 bp, Artificial Sequence
  Description of Artificial Sequence: Synthetic oligonucleotide
  Target: LAMA2; (+) strand; PAM type: NRG; PAM sequence: CAG
agggaggttctagtatctta

SEQ ID NO: 162628 - DNA, 20 bp, Artificial Sequence
  Description of Artificial Sequence: Synthetic oligonucleotide
  Target: LAMA2; (+) strand; PAM type: NRG; PAM sequence: CAG
ttctagtatcttacagtaat

SEQ ID NO: 162629 - DNA, 20 bp, Artificial Sequence
  Description of Artificial Sequence: Synthetic oligonucleotide
  Target: LAMA2; (+) strand; PAM type: NRG; PAM sequence: GAG
tatcttacagtaatcagcct

SEQ ID NO: 162630 - DNA, 20 bp, Artificial Sequence
  Description of Artificial Sequence: Synthetic oligonucleotide
  Target: LAMA2; (+) strand; PAM type: NRG; PAM sequence: GAG
tcttacagtaatcagcctga

SEQ ID NO: 162631 - DNA, 20 bp, Artificial Sequence
  Description of Artificial Sequence: Synthetic oligonucleotide
  Target: LAMA2; (+) strand; PAM type: NRG; PAM sequence: AAG
tacagtaatcagcctgagag

SEQ ID NO: 162632 - DNA, 20 bp, Artificial Sequence
  Description of Artificial Sequence: Synthetic oligonucleotide
  Target: LAMA2; (+) strand; PAM type: NRG; PAM sequence: AGG
acagtaatcagcctgagaga

SEQ ID NO: 162633 - DNA, 20 bp, Artificial Sequence
  Description of Artificial Sequence: Synthetic oligonucleotide
  Target: LAMA2; (+) strand; PAM type: NRG; PAM sequence: TGG
ctgagagaaggatactcttg

SEQ ID NO: 162634 - DNA, 20 bp, Artificial Sequence
  Description of Artificial Sequence: Synthetic oligonucleotide
  Target: LAMA2; (+) strand; PAM type: NRG; PAM sequence: AAG
agagaaggatactcttgtgg

SEQ ID NO: 162635 - DNA, 20 bp, Artificial Sequence
  Description of Artificial Sequence: Synthetic oligonucleotide
  Target: LAMA2; (+) strand; PAM type: NRG; PAM sequence: CAG
gaagctcatcttaattcatt

SEQ ID NO: 162636 - DNA, 20 bp, Artificial Sequence
  Description of Artificial Sequence: Synthetic oligonucleotide
  Target: LAMA2; (+) strand; PAM type: NRG; PAM sequence: GAG
agctcatcttaattcattca

SEQ ID NO: 162637 - DNA, 20 bp, Artificial Sequence
  Description of Artificial Sequence: Synthetic oligonucleotide
  Target: LAMA2; (+) strand; PAM type: NRG; PAM sequence: AAG
taattcattcagagtgctat

SEQ ID NO: 162638 - DNA, 20 bp, Artificial Sequence
  Description of Artificial Sequence: Synthetic oligonucleotide
  Target: LAMA2; (+) strand; PAM type: NRG; PAM sequence: GAG
attcattcagagtgctataa

SEQ ID NO: 162639 - DNA, 20 bp, Artificial Sequence
  Description of Artificial Sequence: Synthetic oligonucleotide
  Target: LAMA2; (+) strand; PAM type: NRG; PAM sequence: TAG
agtgctataagagcataaca

SEQ ID NO: 162640 - DNA, 20 bp, Artificial Sequence
  Description of Artificial Sequence: Synthetic oligonucleotide
  Target: LAMA2; (+) strand; PAM type: NRG; PAM sequence: AAG
ataagagcataacatagact

SEQ ID NO: 162641 - DNA, 20 bp, Artificial Sequence
  Description of Artificial Sequence: Synthetic oligonucleotide
  Target: LAMA2; (+) strand; PAM type: NRG; PAM sequence: TGG
agagcataacatagactaag

SEQ ID NO: 162642 - DNA, 20 bp, Artificial Sequence
  Description of Artificial Sequence: Synthetic oligonucleotide
  Target: LAMA2; (+) strand; PAM type: NRG; PAM sequence: TGG
actaagtggcatgtaaacaa

SEQ ID NO: 162643 - DNA, 20 bp, Artificial Sequence
  Description of Artificial Sequence: Synthetic oligonucleotide
  Target: LAMA2; (+) strand; PAM type: NRG; PAM sequence: TAG
aaattcatttctcacgattc

SEQ ID NO: 162644 - DNA, 20 bp, Artificial Sequence
  Description of Artificial Sequence: Synthetic oligonucleotide
  Target: LAMA2; (+) strand; PAM type: NRG; PAM sequence: GAG
attcatttctcacgattcta

SEQ ID NO: 162645 - DNA, 20 bp, Artificial Sequence
  Description of Artificial Sequence: Synthetic oligonucleotide
  Target: LAMA2; (+) strand; PAM type: NRG; PAM sequence: AGG
ttcatttctcacgattctag

SEQ ID NO: 162646 - DNA, 20 bp, Artificial Sequence
  Description of Artificial Sequence: Synthetic oligonucleotide
  Target: LAMA2; (+) strand; PAM type: NRG; PAM sequence: TGG
tttctcacgattctagaggc

SEQ ID NO: 162647 - DNA, 20 bp, Artificial Sequence
  Description of Artificial Sequence: Synthetic oligonucleotide
  Target: LAMA2; (+) strand; PAM type: NRG; PAM sequence: GGG
ttctcacgattctagaggct

SEQ ID NO: 162648 - DNA, 20 bp, Artificial Sequence
  Description of Artificial Sequence: Synthetic oligonucleotide
  Target: LAMA2; (+) strand; PAM type: NRG; PAM sequence: AAG
tcacgattctagaggctggg

SEQ ID NO: 162649 - DNA, 20 bp, Artificial Sequence
  Description of Artificial Sequence: Synthetic oligonucleotide
  Target: LAMA2; (+) strand; PAM type: NRG; PAM sequence: AAG
ttctagaggctgggaagtac

SEQ ID NO: 162650 - DNA, 20 bp, Artificial Sequence
  Description of Artificial Sequence: Synthetic oligonucleotide
  Target: LAMA2; (+) strand; PAM type: NRG; PAM sequence: CAG
aggctgggaagtacaagatc

SEQ ID NO: 162651 - DNA, 20 bp, Artificial Sequence
  Description of Artificial Sequence: Synthetic oligonucleotide
  Target: LAMA2; (+) strand; PAM type: NRG; PAM sequence: AGG
ggctgggaagtacaagatcc

SEQ ID NO: 162652 - DNA, 20 bp, Artificial Sequence
  Description of Artificial Sequence: Synthetic oligonucleotide
  Target: LAMA2; (+) strand; PAM type: NRG; PAM sequence: TGG
gaagtacaagatccaggtgc

SEQ ID NO: 162653 - DNA, 20 bp, Artificial Sequence
  Description of Artificial Sequence: Synthetic oligonucleotide
  Target: LAMA2; (+) strand; PAM type: NRG; PAM sequence: CAG
gtacaagatccaggtgctgg

SEQ ID NO: 162654 - DNA, 20 bp, Artificial Sequence
  Description of Artificial Sequence: Synthetic oligonucleotide
  Target: LAMA2; (+) strand; PAM type: NRG; PAM sequence: TAG
gtgctggcagatttcctatc

SEQ ID NO: 162655 - DNA, 20 bp, Artificial Sequence
  Description of Artificial Sequence: Synthetic oligonucleotide
  Target: LAMA2; (+) strand; PAM type: NRG; PAM sequence: GAG
tggcagatttcctatctagt

SEQ ID NO: 162656 - DNA, 20 bp, Artificial Sequence
  Description of Artificial Sequence: Synthetic oligonucleotide
  Target: LAMA2; (+) strand; PAM type: NRG; PAM sequence: AGG
ggcagatttcctatctagtg

SEQ ID NO: 162657 - DNA, 20 bp, Artificial Sequence
  Description of Artificial Sequence: Synthetic oligonucleotide
  Target: LAMA2; (+) strand; PAM type: NRG; PAM sequence: GGG
gcagatttcctatctagtga

SEQ ID NO: 162658 - DNA, 20 bp, Artificial Sequence
  Description of Artificial Sequence: Synthetic oligonucleotide
  Target: LAMA2; (+) strand; PAM type: NRG; PAM sequence: TAG
tagtgagggccctctttctc

SEQ ID NO: 162659 - DNA, 20 bp, Artificial Sequence
  Description of Artificial Sequence: Synthetic oligonucleotide
  Target: LAMA2; (+) strand; PAM type: NRG; PAM sequence: CAG
gagggccctctttctctaga

SEQ ID NO: 162660 - DNA, 20 bp, Artificial Sequence
  Description of Artificial Sequence: Synthetic oligonucleotide
  Target: LAMA2; (+) strand; PAM type: NRG; PAM sequence: TGG
ctagacagtcatttacccac

SEQ ID NO: 162661 - DNA, 20 bp, Artificial Sequence
  Description of Artificial Sequence: Synthetic oligonucleotide
  Target: LAMA2; (+) strand; PAM type: NRG; PAM sequence: TGG
ttacccactggaacctcact

SEQ ID NO: 162662 - DNA, 20 bp, Artificial Sequence
  Description of Artificial Sequence: Synthetic oligonucleotide
  Target: LAMA2; (+) strand; PAM type: NRG; PAM sequence: GGG
tacccactggaacctcactt

SEQ ID NO: 162663 - DNA, 20 bp, Artificial Sequence
  Description of Artificial Sequence: Synthetic oligonucleotide
  Target: LAMA2; (+) strand; PAM type: NRG; PAM sequence: GGG
acccactggaacctcacttg

SEQ ID NO: 162664 - DNA, 20 bp, Artificial Sequence
  Description of Artificial Sequence: Synthetic oligonucleotide
  Target: LAMA2; (+) strand; PAM type: NRG; PAM sequence: GGG
cccactggaacctcacttgg

SEQ ID NO: 162665 - DNA, 20 bp, Artificial Sequence
  Description of Artificial Sequence: Synthetic oligonucleotide
  Target: LAMA2; (+) strand; PAM type: NRG; PAM sequence: GAG
cactggaacctcacttgggg

SEQ ID NO: 162666 - DNA, 20 bp, Artificial Sequence
  Description of Artificial Sequence: Synthetic oligonucleotide
  Target: LAMA2; (+) strand; PAM type: NRG; PAM sequence: AGG
actggaacctcacttggggg

SEQ ID NO: 162667 - DNA, 20 bp, Artificial Sequence
  Description of Artificial Sequence: Synthetic oligonucleotide
  Target: LAMA2; (+) strand; PAM type: NRG; PAM sequence: GAG
cttgggggaggaaactctct

SEQ ID NO: 162668 - DNA, 20 bp, Artificial Sequence
  Description of Artificial Sequence: Synthetic oligonucleotide
  Target: LAMA2; (+) strand; PAM type: NRG; PAM sequence: AGG
ttgggggaggaaactctctg

SEQ ID NO: 162669 - DNA, 20 bp, Artificial Sequence
  Description of Artificial Sequence: Synthetic oligonucleotide
  Target: LAMA2; (+) strand; PAM type: NRG; PAM sequence: AAG
ctctctgaggcctcttttat

SEQ ID NO: 162670 - DNA, 20 bp, Artificial Sequence
  Description of Artificial Sequence: Synthetic oligonucleotide
  Target: LAMA2; (+) strand; PAM type: NRG; PAM sequence: CAG
tgaggcctcttttataagtg

SEQ ID NO: 162671 - DNA, 20 bp, Artificial Sequence
  Description of Artificial Sequence: Synthetic oligonucleotide
  Target: LAMA2; (+) strand; PAM type: NRG; PAM sequence: GAG
agtgcagtgatcccattcat

SEQ ID NO: 162672 - DNA, 20 bp, Artificial Sequence
  Description of Artificial Sequence: Synthetic oligonucleotide
  Target: LAMA2; (+) strand; PAM type: NRG; PAM sequence: GAG
tgcagtgatcccattcatga

SEQ ID NO: 162673 - DNA, 20 bp, Artificial Sequence
  Description of Artificial Sequence: Synthetic oligonucleotide
  Target: LAMA2; (+) strand; PAM type: NRG; PAM sequence: AAG
catgacctaatcacctccca

SEQ ID NO: 162674 - DNA, 20 bp, Artificial Sequence
  Description of Artificial Sequence: Synthetic oligonucleotide
  Target: LAMA2; (+) strand; PAM type: NRG; PAM sequence: AGG
atgacctaatcacctcccaa

SEQ ID NO: 162675 - DNA, 20 bp, Artificial Sequence
  Description of Artificial Sequence: Synthetic oligonucleotide
  Target: LAMA2; (+) strand; PAM type: NRG; PAM sequence: GAG
cctgtctataccaccacctt

SEQ ID NO: 162676 - DNA, 20 bp, Artificial Sequence
  Description of Artificial Sequence: Synthetic oligonucleotide
  Target: LAMA2; (+) strand; PAM type: NRG; PAM sequence: AGG
ctgtctataccaccaccttg

SEQ ID NO: 162677 - DNA, 20 bp, Artificial Sequence
  Description of Artificial Sequence: Synthetic oligonucleotide
  Target: LAMA2; (+) strand; PAM type: NRG; PAM sequence: GGG
tgtctataccaccaccttga

SEQ ID NO: 162678 - DNA, 20 bp, Artificial Sequence
  Description of Artificial Sequence: Synthetic oligonucleotide
  Target: LAMA2; (+) strand; PAM type: NRG; PAM sequence: AAG
ataccaccaccttgagggtt

SEQ ID NO: 162679 - DNA, 20 bp, Artificial Sequence
  Description of Artificial Sequence: Synthetic oligonucleotide
  Target: LAMA2; (+) strand; PAM type: NRG; PAM sequence: TGG
agatttctacatatgaattt

SEQ ID NO: 162680 - DNA, 20 bp, Artificial Sequence
  Description of Artificial Sequence: Synthetic oligonucleotide
  Target: LAMA2; (+) strand; PAM type: NRG; PAM sequence: GGG
gatttctacatatgaatttt

SEQ ID NO: 162681 - DNA, 20 bp, Artificial Sequence
  Description of Artificial Sequence: Synthetic oligonucleotide
  Target: LAMA2; (+) strand; PAM type: NRG; PAM sequence: GGG
atttctacatatgaattttg

SEQ ID NO: 162682 - DNA, 20 bp, Artificial Sequence
  Description of Artificial Sequence: Synthetic oligonucleotide
  Target: LAMA2; (+) strand; PAM type: NRG; PAM sequence: GGG
tttctacatatgaattttgg

SEQ ID NO: 162683 - DNA, 20 bp, Artificial Sequence
  Description of Artificial Sequence: Synthetic oligonucleotide
  Target: LAMA2; (+) strand; PAM type: NRG; PAM sequence: CAG
ttttgggggacataaacatt

SEQ ID NO: 162684 - DNA, 20 bp, Artificial Sequence
  Description of Artificial Sequence: Synthetic oligonucleotide
  Target: LAMA2; (+) strand; PAM type: NRG; PAM sequence: CAG
cataaacattcagtccatta

SEQ ID NO: 162685 - DNA, 20 bp, Artificial Sequence
  Description of Artificial Sequence: Synthetic oligonucleotide
  Target: LAMA2; (+) strand; PAM type: NRG; PAM sequence: GAG
taaacattcagtccattaca

SEQ ID NO: 162686 - DNA, 20 bp, Artificial Sequence
  Description of Artificial Sequence: Synthetic oligonucleotide
  Target: LAMA2; (+) strand; PAM type: NRG; PAM sequence: TGG
ccattacagagcacctctga

SEQ ID NO: 162687 - DNA, 20 bp, Artificial Sequence
  Description of Artificial Sequence: Synthetic oligonucleotide
  Target: LAMA2; (+) strand; PAM type: NRG; PAM sequence: GGG
cattacagagcacctctgat

SEQ ID NO: 162688 - DNA, 20 bp, Artificial Sequence
  Description of Artificial Sequence: Synthetic oligonucleotide
  Target: LAMA2; (+) strand; PAM type: NRG; PAM sequence: AAG
agcacctctgatgggtccaa

SEQ ID NO: 162689 - DNA, 20 bp, Artificial Sequence
  Description of Artificial Sequence: Synthetic oligonucleotide
  Target: LAMA2; (+) strand; PAM type: NRG; PAM sequence: AAG
ctctgatgggtccaaaagac

SEQ ID NO: 162690 - DNA, 20 bp, Artificial Sequence
  Description of Artificial Sequence: Synthetic oligonucleotide
  Target: LAMA2; (+) strand; PAM type: NRG; PAM sequence: TGG
gggtccaaaagacaagaaac

SEQ ID NO: 162691 - DNA, 20 bp, Artificial Sequence
  Description of Artificial Sequence: Synthetic oligonucleotide
  Target: LAMA2; (+) strand; PAM type: NRG; PAM sequence: GAG
gtccaaaagacaagaaactg

SEQ ID NO: 162692 - DNA, 20 bp, Artificial Sequence
  Description of Artificial Sequence: Synthetic oligonucleotide
  Target: LAMA2; (+) strand; PAM type: NRG; PAM sequence: AGG
tccaaaagacaagaaactgg

SEQ ID NO: 162693 - DNA, 20 bp, Artificial Sequence
  Description of Artificial Sequence: Synthetic oligonucleotide
  Target: LAMA2; (+) strand; PAM type: NRG; PAM sequence: CAG
gacaagaaactggaggcttt

SEQ ID NO: 162694 - DNA, 20 bp, Artificial Sequence
  Description of Artificial Sequence: Synthetic oligonucleotide
  Target: LAMA2; (+) strand; PAM type: NRG; PAM sequence: CAG
agaaactggaggctttcagt

SEQ ID NO: 162695 - DNA, 20 bp, Artificial Sequence
  Description of Artificial Sequence: Synthetic oligonucleotide
  Target: LAMA2; (+) strand; PAM type: NRG; PAM sequence: TAG
gtcagtaaaattccacactg

SEQ ID NO: 162696 - DNA, 20 bp, Artificial Sequence
  Description of Artificial Sequence: Synthetic oligonucleotide
  Target: LAMA2; (+) strand; PAM type: NRG; PAM sequence: AGG
tcagtaaaattccacactgt

SEQ ID NO: 162697 - DNA, 20 bp, Artificial Sequence
  Description of Artificial Sequence: Synthetic oligonucleotide
  Target: LAMA2; (+) strand; PAM type: NRG; PAM sequence: CAG
ccacactgtaggttgtcttg

SEQ ID NO: 162698 - DNA, 20 bp, Artificial Sequence
  Description of Artificial Sequence: Synthetic oligonucleotide
  Target: LAMA2; (+) strand; PAM type: NRG; PAM sequence: AGG
cacactgtaggttgtcttgc

SEQ ID NO: 162699 - DNA, 20 bp, Artificial Sequence
  Description of Artificial Sequence: Synthetic oligonucleotide
  Target: LAMA2; (+) strand; PAM type: NRG; PAM sequence: TAG
actgtaggttgtcttgcagg

SEQ ID NO: 162700 - DNA, 20 bp, Artificial Sequence
  Description of Artificial Sequence: Synthetic oligonucleotide
  Target: LAMA2; (+) strand; PAM type: NRG; PAM sequence: CGG
aggttgtcttgcaggtagat

SEQ ID NO: 162701 - DNA, 20 bp, Artificial Sequence
  Description of Artificial Sequence: Synthetic oligonucleotide
  Target: LAMA2; (+) strand; PAM type: NRG; PAM sequence: GAG
gtcttgcaggtagatcggat

SEQ ID NO: 162702 - DNA, 20 bp, Artificial Sequence
  Description of Artificial Sequence: Synthetic oligonucleotide
  Target: LAMA2; (+) strand; PAM type: NRG; PAM sequence: AGG
tcttgcaggtagatcggatg

SEQ ID NO: 162703 - DNA, 20 bp, Artificial Sequence
  Description of Artificial Sequence: Synthetic oligonucleotide
  Target: LAMA2; (+) strand; PAM type: NRG; PAM sequence: AAG
agatcggatgaggcgcctcc

SEQ ID NO: 162704 - DNA, 20 bp, Artificial Sequence
  Description of Artificial Sequence: Synthetic oligonucleotide
  Target: LAMA2; (+) strand; PAM type: NRG; PAM sequence: AGG
gatcggatgaggcgcctcca

SEQ ID NO: 162705 - DNA, 20 bp, Artificial Sequence
  Description of Artificial Sequence: Synthetic oligonucleotide
  Target: LAMA2; (+) strand; PAM type: NRG; PAM sequence: CAG
aggcgcctccaaggctgtct

SEQ ID NO: 162706 - DNA, 20 bp, Artificial Sequence
  Description of Artificial Sequence: Synthetic oligonucleotide
  Target: LAMA2; (+) strand; PAM type: NRG; PAM sequence: AGG
ggcgcctccaaggctgtctc

SEQ ID NO: 162707 - DNA, 20 bp, Artificial Sequence
  Description of Artificial Sequence: Synthetic oligonucleotide
  Target: LAMA2; (+) strand; PAM type: NRG; PAM sequence: GGG
gcgcctccaaggctgtctca

SEQ ID NO: 162708 - DNA, 20 bp, Artificial Sequence
  Description of Artificial Sequence: Synthetic oligonucleotide
  Target: LAMA2; (+) strand; PAM type: NRG; PAM sequence: TAG
cctccaaggctgtctcaggg

SEQ ID NO: 162709 - DNA, 20 bp, Artificial Sequence
  Description of Artificial Sequence: Synthetic oligonucleotide
  Target: LAMA2; (+) strand; PAM type: NRG; PAM sequence: CAG
ccaaggctgtctcagggtag

SEQ ID NO: 162710 - DNA, 20 bp, Artificial Sequence
  Description of Artificial Sequence: Synthetic oligonucleotide
  Target: LAMA2; (+) strand; PAM type: NRG; PAM sequence: GAG
ggctgtctcagggtagcagt

SEQ ID NO: 162711 - DNA, 20 bp, Artificial Sequence
  Description of Artificial Sequence: Synthetic oligonucleotide
  Target: LAMA2; (+) strand; PAM type: NRG; PAM sequence: CAG
tctcagggtagcagtgagaa

SEQ ID NO: 162712 - DNA, 20 bp, Artificial Sequence
  Description of Artificial Sequence: Synthetic oligonucleotide
  Target: LAMA2; (+) strand; PAM type: NRG; PAM sequence: CAG
tagcagtgagaacagtgcat

SEQ ID NO: 162713 - DNA, 20 bp, Artificial Sequence
  Description of Artificial Sequence: Synthetic oligonucleotide
  Target: LAMA2; (+) strand; PAM type: NRG; PAM sequence: AGG
agcagtgagaacagtgcatc

SEQ ID NO: 162714 - DNA, 20 bp, Artificial Sequence
  Description of Artificial Sequence: Synthetic oligonucleotide
  Target: LAMA2; (+) strand; PAM type: NRG; PAM sequence: CAG
agtgagaacagtgcatcagg

SEQ ID NO: 162715 - DNA, 20 bp, Artificial Sequence
  Description of Artificial Sequence: Synthetic oligonucleotide
  Target: LAMA2; (+) strand; PAM type: NRG; PAM sequence: AGG
gtgagaacagtgcatcaggc

SEQ ID NO: 162716 - DNA, 20 bp, Artificial Sequence
  Description of Artificial Sequence: Synthetic oligonucleotide
  Target: LAMA2; (+) strand; PAM type: NRG; PAM sequence: GAG
gagaacagtgcatcaggcag

SEQ ID NO: 162717 - DNA, 20 bp, Artificial Sequence
  Description of Artificial Sequence: Synthetic oligonucleotide
  Target: LAMA2; (+) strand; PAM type: NRG; PAM sequence: TAG
cagtgcatcaggcaggagca

SEQ ID NO: 162718 - DNA, 20 bp, Artificial Sequence
  Description of Artificial Sequence: Synthetic oligonucleotide
  Target: LAMA2; (+) strand; PAM type: NRG; PAM sequence: GAG
gtgcatcaggcaggagcata

SEQ ID NO: 162719 - DNA, 20 bp, Artificial Sequence
  Description of Artificial Sequence: Synthetic oligonucleotide
  Target: LAMA2; (+) strand; PAM type: NRG; PAM sequence: GAG
gcatcaggcaggagcataga

SEQ ID NO: 162720 - DNA, 20 bp, Artificial Sequence
  Description of Artificial Sequence: Synthetic oligonucleotide
  Target: LAMA2; (+) strand; PAM type: NRG; PAM sequence: TAG
gcaggagcatagagagtttt

SEQ ID NO: 162721 - DNA, 20 bp, Artificial Sequence
  Description of Artificial Sequence: Synthetic oligonucleotide
  Target: LAMA2; (+) strand; PAM type: NRG; PAM sequence: TAG
agagagtttttagtaaatgt

SEQ ID NO: 162722 - DNA, 20 bp, Artificial Sequence
  Description of Artificial Sequence: Synthetic oligonucleotide
  Target: LAMA2; (+) strand; PAM type: NRG; PAM sequence: AGG
gagagtttttagtaaatgtt

SEQ ID NO: 162723 - DNA, 20 bp, Artificial Sequence
  Description of Artificial Sequence: Synthetic oligonucleotide
  Target: LAMA2; (+) strand; PAM type: NRG; PAM sequence: AAG
attaccaatgttgttaaatg

SEQ ID NO: 162724 - DNA, 20 bp, Artificial Sequence
  Description of Artificial Sequence: Synthetic oligonucleotide
  Target: LAMA2; (+) strand; PAM type: NRG; PAM sequence: AAG
aatgcatacatttacaataa

SEQ ID NO: 162725 - DNA, 20 bp, Artificial Sequence
  Description of Artificial Sequence: Synthetic oligonucleotide
  Target: LAMA2; (+) strand; PAM type: NRG; PAM sequence: AAG
tacatttacaataaaagaaa

SEQ ID NO: 162726 - DNA, 20 bp, Artificial Sequence
  Description of Artificial Sequence: Synthetic oligonucleotide
  Target: LAMA2; (+) strand; PAM type: NRG; PAM sequence: TAG
atgtctcctaaatataaatt

SEQ ID NO: 162727 - DNA, 20 bp, Artificial Sequence
  Description of Artificial Sequence: Synthetic oligonucleotide
  Target: LAMA2; (+) strand; PAM type: NRG; PAM sequence: CAG
tctcctaaatataaatttag

SEQ ID NO: 162728 - DNA, 20 bp, Artificial Sequence
  Description of Artificial Sequence: Synthetic oligonucleotide
  Target: LAMA2; (+) strand; PAM type: NRG; PAM sequence: AAG
ctaaatataaatttagcaga

SEQ ID NO: 162729 - DNA, 20 bp, Artificial Sequence
  Description of Artificial Sequence: Synthetic oligonucleotide
  Target: LAMA2; (+) strand; PAM type: NRG; PAM sequence: AAG
cagaaagtcaacgttcattc

SEQ ID NO: 162730 - DNA, 20 bp, Artificial Sequence
  Description of Artificial Sequence: Synthetic oligonucleotide
  Target: LAMA2; (+) strand; PAM type: NRG; PAM sequence: CAG
ttcaagccctacatatctta

SEQ ID NO: 162731 - DNA, 20 bp, Artificial Sequence
  Description of Artificial Sequence: Synthetic oligonucleotide
  Target: LAMA2; (+) strand; PAM type: NRG; PAM sequence: AAG
tcttacagtactattgtatg

SEQ ID NO: 162732 - DNA, 20 bp, Artificial Sequence
  Description of Artificial Sequence: Synthetic oligonucleotide
  Target: LAMA2; (+) strand; PAM type: NRG; PAM sequence: CAG
tacagtactattgtatgaag

SEQ ID NO: 162733 - DNA, 20 bp, Artificial Sequence
  Description of Artificial Sequence: Synthetic oligonucleotide
  Target: LAMA2; (+) strand; PAM type: NRG; PAM sequence: AGG
acagtactattgtatgaagc

SEQ ID NO: 162734 - DNA, 20 bp, Artificial Sequence
  Description of Artificial Sequence: Synthetic oligonucleotide
  Target: LAMA2; (+) strand; PAM type: NRG; PAM sequence: GGG
cagtactattgtatgaagca

SEQ ID NO: 162735 - DNA, 20 bp, Artificial Sequence
  Description of Artificial Sequence: Synthetic oligonucleotide
  Target: LAMA2; (+) strand; PAM type: NRG; PAM sequence: GAG
atgaagcagggttttgtccc

SEQ ID NO: 162736 - DNA, 20 bp, Artificial Sequence
  Description of Artificial Sequence: Synthetic oligonucleotide
  Target: LAMA2; (+) strand; PAM type: NRG; PAM sequence: CAG
cgagactattttttcctctg

SEQ ID NO: 162737 - DNA, 20 bp, Artificial Sequence
  Description of Artificial Sequence: Synthetic oligonucleotide
  Target: LAMA2; (+) strand; PAM type: NRG; PAM sequence: CAG
gactattttttcctctgcag

SEQ ID NO: 162738 - DNA, 20 bp, Artificial Sequence
  Description of Artificial Sequence: Synthetic oligonucleotide
  Target: LAMA2; (+) strand; PAM type: NRG; PAM sequence: GAG
tcctctgcagcagtatgtgt

SEQ ID NO: 162739 - DNA, 20 bp, Artificial Sequence
  Description of Artificial Sequence: Synthetic oligonucleotide
  Target: LAMA2; (+) strand; PAM type: NRG; PAM sequence: GAG
ctctgcagcagtatgtgtga

SEQ ID NO: 162740 - DNA, 20 bp, Artificial Sequence
  Description of Artificial Sequence: Synthetic oligonucleotide
  Target: LAMA2; (+) strand; PAM type: NRG; PAM sequence: GAG
cagcagtatgtgtgagagct

SEQ ID NO: 162741 - DNA, 20 bp, Artificial Sequence
  Description of Artificial Sequence: Synthetic oligonucleotide
  Target: LAMA2; (+) strand; PAM type: NRG; PAM sequence: GAG
gcagtatgtgtgagagctga

SEQ ID NO: 162742 - DNA, 20 bp, Artificial Sequence
  Description of Artificial Sequence: Synthetic oligonucleotide
  Target: LAMA2; (+) strand; PAM type: NRG; PAM sequence: CAG
atgtgtgagagctgagagct

SEQ ID NO: 162743 - DNA, 20 bp, Artificial Sequence
  Description of Artificial Sequence: Synthetic oligonucleotide
  Target: LAMA2; (+) strand; PAM type: NRG; PAM sequence: TGG
agagctgagagctcagactc

SEQ ID NO: 162744 - DNA, 20 bp, Artificial Sequence
  Description of Artificial Sequence: Synthetic oligonucleotide
  Target: LAMA2; (+) strand; PAM type: NRG; PAM sequence: GAG
agctgagagctcagactctg

SEQ ID NO: 162745 - DNA, 20 bp, Artificial Sequence
  Description of Artificial Sequence: Synthetic oligonucleotide
  Target: LAMA2; (+) strand; PAM type: NRG; PAM sequence: TAG
ctcagactctggagccaacc

SEQ ID NO: 162746 - DNA, 20 bp, Artificial Sequence
  Description of Artificial Sequence: Synthetic oligonucleotide
  Target: LAMA2; (+) strand; PAM type: NRG; PAM sequence: TGG
tggagccaacctagctgatc

SEQ ID NO: 162747 - DNA, 20 bp, Artificial Sequence
  Description of Artificial Sequence: Synthetic oligonucleotide
  Target: LAMA2; (+) strand; PAM type: NRG; PAM sequence: TGG
tggaatcttgactccacaat

SEQ ID NO: 162748 - DNA, 20 bp, Artificial Sequence
  Description of Artificial Sequence: Synthetic oligonucleotide
  Target: LAMA2; (+) strand; PAM type: NRG; PAM sequence: TAG
atcttgactccacaattggt

SEQ ID NO: 162749 - DNA, 20 bp, Artificial Sequence
  Description of Artificial Sequence: Synthetic oligonucleotide
  Target: LAMA2; (+) strand; PAM type: NRG; PAM sequence: TAG
aattggttagctcatgacct

SEQ ID NO: 162750 - DNA, 20 bp, Artificial Sequence
  Description of Artificial Sequence: Synthetic oligonucleotide
  Target: LAMA2; (+) strand; PAM type: NRG; PAM sequence: AGG
attggttagctcatgacctt

SEQ ID NO: 162751 - DNA, 20 bp, Artificial Sequence
  Description of Artificial Sequence: Synthetic oligonucleotide
  Target: LAMA2; (+) strand; PAM type: NRG; PAM sequence: CAG
tacttaacctttctgtgcct

SEQ ID NO: 162752 - DNA, 20 bp, Artificial Sequence
  Description of Artificial Sequence: Synthetic oligonucleotide
  Target: LAMA2; (+) strand; PAM type: NRG; PAM sequence: AAG
agtttcaccactcaataaaa

SEQ ID NO: 162753 - DNA, 20 bp, Artificial Sequence
  Description of Artificial Sequence: Synthetic oligonucleotide
  Target: LAMA2; (+) strand; PAM type: NRG; PAM sequence: TGG
ttcaccactcaataaaaaag

SEQ ID NO: 162754 - DNA, 20 bp, Artificial Sequence
  Description of Artificial Sequence: Synthetic oligonucleotide
  Target: LAMA2; (+) strand; PAM type: NRG; PAM sequence: GAG
ccactcaataaaaaagtggt

SEQ ID NO: 162755 - DNA, 20 bp, Artificial Sequence
  Description of Artificial Sequence: Synthetic oligonucleotide
  Target: LAMA2; (+) strand; PAM type: NRG; PAM sequence: CAG
tgagaatgacaactctctgc

SEQ ID NO: 162756 - DNA, 20 bp, Artificial Sequence
  Description of Artificial Sequence: Synthetic oligonucleotide
  Target: LAMA2; (+) strand; PAM type: NRG; PAM sequence: AGG
gagaatgacaactctctgcc

SEQ ID NO: 162757 - DNA, 20 bp, Artificial Sequence
  Description of Artificial Sequence: Synthetic oligonucleotide
  Target: LAMA2; (+) strand; PAM type: NRG; PAM sequence: GGG
agaatgacaactctctgcca

SEQ ID NO: 162758 - DNA, 20 bp, Artificial Sequence
  Description of Artificial Sequence: Synthetic oligonucleotide
  Target: LAMA2; (+) strand; PAM type: NRG; PAM sequence: GAG
ctctctgccagggttgtcct

SEQ ID NO: 162759 - DNA, 20 bp, Artificial Sequence
  Description of Artificial Sequence: Synthetic oligonucleotide
  Target: LAMA2; (+) strand; PAM type: NRG; PAM sequence: AGG
tctctgccagggttgtcctg

SEQ ID NO: 162760 - DNA, 20 bp, Artificial Sequence
  Description of Artificial Sequence: Synthetic oligonucleotide
  Target: LAMA2; (+) strand; PAM type: NRG; PAM sequence: GAG
tctgccagggttgtcctgag

SEQ ID NO: 162761 - DNA, 20 bp, Artificial Sequence
  Description of Artificial Sequence: Synthetic oligonucleotide
  Target: LAMA2; (+) strand; PAM type: NRG; PAM sequence: GAG
ggttgtcctgaggagtaaat

SEQ ID NO: 162762 - DNA, 20 bp, Artificial Sequence
  Description of Artificial Sequence: Synthetic oligonucleotide
  Target: LAMA2; (+) strand; PAM type: NRG; PAM sequence: AAG
taaatgagtacatatttgta

SEQ ID NO: 162763 - DNA, 20 bp, Artificial Sequence
  Description of Artificial Sequence: Synthetic oligonucleotide
  Target: LAMA2; (+) strand; PAM type: NRG; PAM sequence: GAG
aatgagtacatatttgtaaa

SEQ ID NO: 162764 - DNA, 20 bp, Artificial Sequence
  Description of Artificial Sequence: Synthetic oligonucleotide
  Target: LAMA2; (+) strand; PAM type: NRG; PAM sequence: TAG
gtacatatttgtaaagagtt

SEQ ID NO: 162765 - DNA, 20 bp, Artificial Sequence
  Description of Artificial Sequence: Synthetic oligonucleotide
  Target: LAMA2; (+) strand; PAM type: NRG; PAM sequence: AAG
gtaaagagtttagatttgta

SEQ ID NO: 162766 - DNA, 20 bp, Artificial Sequence
  Description of Artificial Sequence: Synthetic oligonucleotide
  Target: LAMA2; (+) strand; PAM type: NRG; PAM sequence: AGG
taaagagtttagatttgtaa

SEQ ID NO: 162767 - DNA, 20 bp, Artificial Sequence
  Description of Artificial Sequence: Synthetic oligonucleotide
  Target: LAMA2; (+) strand; PAM type: NRG; PAM sequence: GGG
aaagagtttagatttgtaaa

SEQ ID NO: 162768 - DNA, 20 bp, Artificial Sequence
  Description of Artificial Sequence: Synthetic oligonucleotide
  Target: LAMA2; (+) strand; PAM type: NRG; PAM sequence: TAG
gtttagatttgtaaagggtt

SEQ ID NO: 162769 - DNA, 20 bp, Artificial Sequence
  Description of Artificial Sequence: Synthetic oligonucleotide
  Target: LAMA2; (+) strand; PAM type: NRG; PAM sequence: AAG
ttagaattgtgctttgcaaa

SEQ ID NO: 162770 - DNA, 20 bp, Artificial Sequence
  Description of Artificial Sequence: Synthetic oligonucleotide
  Target: LAMA2; (+) strand; PAM type: NRG; PAM sequence: AGG
tagaattgtgctttgcaaaa

SEQ ID NO: 162771 - DNA, 20 bp, Artificial Sequence
  Description of Artificial Sequence: Synthetic oligonucleotide
  Target: LAMA2; (+) strand; PAM type: NRG; PAM sequence: AAG
aattgtgctttgcaaaaagg

SEQ ID NO: 162772 - DNA, 20 bp, Artificial Sequence
  Description of Artificial Sequence: Synthetic oligonucleotide
  Target: LAMA2; (+) strand; PAM type: NRG; PAM sequence: TAG
gaagcacaatatatgaatgc

SEQ ID NO: 162773 - DNA, 20 bp, Artificial Sequence
  Description of Artificial Sequence: Synthetic oligonucleotide
  Target: LAMA2; (+) strand; PAM type: NRG; PAM sequence: GAG
atgctagttcttattacccc

SEQ ID NO: 162774 - DNA, 20 bp, Artificial Sequence
  Description of Artificial Sequence: Synthetic oligonucleotide
  Target: LAMA2; (+) strand; PAM type: NRG; PAM sequence: GAG
gctagttcttattaccccga

SEQ ID NO: 162775 - DNA, 20 bp, Artificial Sequence
  Description of Artificial Sequence: Synthetic oligonucleotide
  Target: LAMA2; (+) strand; PAM type: NRG; PAM sequence: GAG
tagttcttattaccccgaga

SEQ ID NO: 162776 - DNA, 20 bp, Artificial Sequence
  Description of Artificial Sequence: Synthetic oligonucleotide
  Target: LAMA2; (+) strand; PAM type: NRG; PAM sequence: TGG
ccccgagagagacacattta

SEQ ID NO: 162777 - DNA, 20 bp, Artificial Sequence
  Description of Artificial Sequence: Synthetic oligonucleotide
  Target: LAMA2; (+) strand; PAM type: NRG; PAM sequence: GGG
cccgagagagacacatttat

SEQ ID NO: 162778 - DNA, 20 bp, Artificial Sequence
  Description of Artificial Sequence: Synthetic oligonucleotide
  Target: LAMA2; (+) strand; PAM type: NRG; PAM sequence: CAG
cacatttatgggaacctata

SEQ ID NO: 162779 - DNA, 20 bp, Artificial Sequence
  Description of Artificial Sequence: Synthetic oligonucleotide
  Target: LAMA2; (+) strand; PAM type: NRG; PAM sequence: TGG
gaacctatacagtttctcac

SEQ ID NO: 162780 - DNA, 20 bp, Artificial Sequence
  Description of Artificial Sequence: Synthetic oligonucleotide
  Target: LAMA2; (+) strand; PAM type: NRG; PAM sequence: GGG
aacctatacagtttctcact

SEQ ID NO: 162781 - DNA, 20 bp, Artificial Sequence
  Description of Artificial Sequence: Synthetic oligonucleotide
  Target: LAMA2; (+) strand; PAM type: NRG; PAM sequence: TGG
atacagtttctcactgggtc

SEQ ID NO: 162782 - DNA, 20 bp, Artificial Sequence
  Description of Artificial Sequence: Synthetic oligonucleotide
  Target: LAMA2; (+) strand; PAM type: NRG; PAM sequence: TAG
agtttctcactgggtctgga

SEQ ID NO: 162783 - DNA, 20 bp, Artificial Sequence
  Description of Artificial Sequence: Synthetic oligonucleotide
  Target: LAMA2; (+) strand; PAM type: NRG; PAM sequence: AAG
accatgaatgtctgctcctt

SEQ ID NO: 162784 - DNA, 20 bp, Artificial Sequence
  Description of Artificial Sequence: Synthetic oligonucleotide
  Target: LAMA2; (+) strand; PAM type: NRG; PAM sequence: TAG
tgctccttaagtttgtttac

SEQ ID NO: 162785 - DNA, 20 bp, Artificial Sequence
  Description of Artificial Sequence: Synthetic oligonucleotide
  Target: LAMA2; (+) strand; PAM type: NRG; PAM sequence: TGG
tccttaagtttgtttactag

SEQ ID NO: 162786 - DNA, 20 bp, Artificial Sequence
  Description of Artificial Sequence: Synthetic oligonucleotide
  Target: LAMA2; (+) strand; PAM type: NRG; PAM sequence: GGG
ccttaagtttgtttactagt

SEQ ID NO: 162787 - DNA, 20 bp, Artificial Sequence
  Description of Artificial Sequence: Synthetic oligonucleotide
  Target: LAMA2; (+) strand; PAM type: NRG; PAM sequence: GGG
cttaagtttgtttactagtg

SEQ ID NO: 162788 - DNA, 20 bp, Artificial Sequence
  Description of Artificial Sequence: Synthetic oligonucleotide
  Target: LAMA2; (+) strand; PAM type: NRG; PAM sequence: TAG
tttactagtggggttttctt

SEQ ID NO: 162789 - DNA, 20 bp, Artificial Sequence
  Description of Artificial Sequence: Synthetic oligonucleotide
  Target: LAMA2; (+) strand; PAM type: NRG; PAM sequence: TGG
aacattttattactgaaatt

SEQ ID NO: 162790 - DNA, 20 bp, Artificial Sequence
  Description of Artificial Sequence: Synthetic oligonucleotide
  Target: LAMA2; (+) strand; PAM type: NRG; PAM sequence: TAG
attttattactgaaatttgg

SEQ ID NO: 162791 - DNA, 20 bp, Artificial Sequence
  Description of Artificial Sequence: Synthetic oligonucleotide
  Target: LAMA2; (+) strand; PAM type: NRG; PAM sequence: TAG
gtatttattttgctacaact

SEQ ID NO: 162792 - DNA, 20 bp, Artificial Sequence
  Description of Artificial Sequence: Synthetic oligonucleotide
  Target: LAMA2; (+) strand; PAM type: NRG; PAM sequence: AAG
ttgctacaacttagccttta

SEQ ID NO: 162793 - DNA, 20 bp, Artificial Sequence
  Description of Artificial Sequence: Synthetic oligonucleotide
  Target: LAMA2; (+) strand; PAM type: NRG; PAM sequence: AAG
acattatttaaatatttgaa

SEQ ID NO: 162794 - DNA, 20 bp, Artificial Sequence
  Description of Artificial Sequence: Synthetic oligonucleotide
  Target: LAMA2; (+) strand; PAM type: NRG; PAM sequence: GAG
tatttaaatatttgaaaagt

SEQ ID NO: 162795 - DNA, 20 bp, Artificial Sequence
  Description of Artificial Sequence: Synthetic oligonucleotide
  Target: LAMA2; (+) strand; PAM type: NRG; PAM sequence: AGG
atttaaatatttgaaaagtg

SEQ ID NO: 162796 - DNA, 20 bp, Artificial Sequence
  Description of Artificial Sequence: Synthetic oligonucleotide
  Target: LAMA2; (+) strand; PAM type: NRG; PAM sequence: TAG
taaatatttgaaaagtgagg

SEQ ID NO: 162797 - DNA, 20 bp, Artificial Sequence
  Description of Artificial Sequence: Synthetic oligonucleotide
  Target: LAMA2; (+) strand; PAM type: NRG; PAM sequence: TGG
tttccttacataatcgactt

SEQ ID NO: 162798 - DNA, 20 bp, Artificial Sequence
  Description of Artificial Sequence: Synthetic oligonucleotide
  Target: LAMA2; (+) strand; PAM type: NRG; PAM sequence: TAG
ctttggaatttttaaaatga

SEQ ID NO: 162799 - DNA, 20 bp, Artificial Sequence
  Description of Artificial Sequence: Synthetic oligonucleotide
  Target: LAMA2; (+) strand; PAM type: NRG; PAM sequence: TGG
ttaaaatgatagctataatt

SEQ ID NO: 162800 - DNA, 20 bp, Artificial Sequence
  Description of Artificial Sequence: Synthetic oligonucleotide
  Target: LAMA2; (+) strand; PAM type: NRG; PAM sequence: AAG
tttgatatttgattgattta

SEQ ID NO: 162801 - DNA, 20 bp, Artificial Sequence
  Description of Artificial Sequence: Synthetic oligonucleotide
  Target: LAMA2; (+) strand; PAM type: NRG; PAM sequence: AGG
ttgatatttgattgatttaa

SEQ ID NO: 162802 - DNA, 20 bp, Artificial Sequence
  Description of Artificial Sequence: Synthetic oligonucleotide
  Target: LAMA2; (+) strand; PAM type: NRG; PAM sequence: GGG
tgatatttgattgatttaaa

SEQ ID NO: 162803 - DNA, 20 bp, Artificial Sequence
  Description of Artificial Sequence: Synthetic oligonucleotide
  Target: LAMA2; (+) strand; PAM type: NRG; PAM sequence: GGG
gatatttgattgatttaaag

SEQ ID NO: 162804 - DNA, 20 bp, Artificial Sequence
  Description of Artificial Sequence: Synthetic oligonucleotide
  Target: LAMA2; (+) strand; PAM type: NRG; PAM sequence: GAG
tgtacacacacccctttaat

SEQ ID NO: 162805 - DNA, 20 bp, Artificial Sequence
  Description of Artificial Sequence: Synthetic oligonucleotide
  Target: LAMA2; (+) strand; PAM type: NRG; PAM sequence: GAG
tttaatgagtaaatcaatat

SEQ ID NO: 162806 - DNA, 20 bp, Artificial Sequence
  Description of Artificial Sequence: Synthetic oligonucleotide
  Target: LAMA2; (+) strand; PAM type: NRG; PAM sequence: GAG
taatgagtaaatcaatatga

SEQ ID NO: 162807 - DNA, 20 bp, Artificial Sequence
  Description of Artificial Sequence: Synthetic oligonucleotide
  Target: LAMA2; (+) strand; PAM type: NRG; PAM sequence: TGG
agtaaatcaatatgagagtg

SEQ ID NO: 162808 - DNA, 20 bp, Artificial Sequence
  Description of Artificial Sequence: Synthetic oligonucleotide
  Target: LAMA2; (+) strand; PAM type: NRG; PAM sequence: TAG
aatatgagagtgtggatata

SEQ ID NO: 162809 - DNA, 20 bp, Artificial Sequence
  Description of Artificial Sequence: Synthetic oligonucleotide
  Target: LAMA2; (+) strand; PAM type: NRG; PAM sequence: GAG
atatagatgtaaatatatat

SEQ ID NO: 162810 - DNA, 20 bp, Artificial Sequence
  Description of Artificial Sequence: Synthetic oligonucleotide
  Target: LAMA2; (+) strand; PAM type: NRG; PAM sequence: GAG
gagtaaatgtatatatatat

SEQ ID NO: 162811 - DNA, 20 bp, Artificial Sequence
  Description of Artificial Sequence: Synthetic oligonucleotide
  Target: LAMA2; (+) strand; PAM type: NRG; PAM sequence: CGG
atatgtgtttatacatatat

SEQ ID NO: 162812 - DNA, 20 bp, Artificial Sequence
  Description of Artificial Sequence: Synthetic oligonucleotide
  Target: LAMA2; (+) strand; PAM type: NRG; PAM sequence: TAG
tgtttatacatatatcggca

SEQ ID NO: 162813 - DNA, 20 bp, Artificial Sequence
  Description of Artificial Sequence: Synthetic oligonucleotide
  Target: LAMA2; (+) strand; PAM type: NRG; PAM sequence: GAG
atatatcggcatagatatat

SEQ ID NO: 162814 - DNA, 20 bp, Artificial Sequence
  Description of Artificial Sequence: Synthetic oligonucleotide
  Target: LAMA2; (+) strand; PAM type: NRG; PAM sequence: AAG
tcggcatagatatatgagtg

SEQ ID NO: 162815 - DNA, 20 bp, Artificial Sequence
  Description of Artificial Sequence: Synthetic oligonucleotide
  Target: LAMA2; (+) strand; PAM type: NRG; PAM sequence: AAG
tgaagacaatttctgaaata

SEQ ID NO: 162816 - DNA, 20 bp, Artificial Sequence
  Description of Artificial Sequence: Synthetic oligonucleotide
  Target: LAMA2; (+) strand; PAM type: NRG; PAM sequence: AAG
ctgaaataaagatgaataca

SEQ ID NO: 162817 - DNA, 20 bp, Artificial Sequence
  Description of Artificial Sequence: Synthetic oligonucleotide
  Target: LAMA2; (+) strand; PAM type: NRG; PAM sequence: CAG
aaagtattatttctatgact

SEQ ID NO: 162818 - DNA, 20 bp, Artificial Sequence
  Description of Artificial Sequence: Synthetic oligonucleotide
  Target: LAMA2; (+) strand; PAM type: NRG; PAM sequence: TAG
ccgttttaatatattatgtt

SEQ ID NO: 162819 - DNA, 20 bp, Artificial Sequence
  Description of Artificial Sequence: Synthetic oligonucleotide
  Target: LAMA2; (+) strand; PAM type: NRG; PAM sequence: TGG
tctgtttctgtttgtgtgtc

SEQ ID NO: 162820 - DNA, 20 bp, Artificial Sequence
  Description of Artificial Sequence: Synthetic oligonucleotide
  Target: LAMA2; (+) strand; PAM type: NRG; PAM sequence: TGG
gtttctgtttgtgtgtctgg

SEQ ID NO: 162821 - DNA, 20 bp, Artificial Sequence
  Description of Artificial Sequence: Synthetic oligonucleotide
  Target: LAMA2; (+) strand; PAM type: NRG; PAM sequence: TGG
tgtttgtgtgtctggtggta

SEQ ID NO: 162822 - DNA, 20 bp, Artificial Sequence
  Description of Artificial Sequence: Synthetic oligonucleotide
  Target: LAMA2; (+) strand; PAM type: NRG; PAM sequence: GGG
gtttgtgtgtctggtggtat

SEQ ID NO: 162823 - DNA, 20 bp, Artificial Sequence
  Description of Artificial Sequence: Synthetic oligonucleotide
  Target: LAMA2; (+) strand; PAM type: NRG; PAM sequence: TAG
gtatgtaattgaaatttaca

SEQ ID NO: 162824 - DNA, 20 bp, Artificial Sequence
  Description of Artificial Sequence: Synthetic oligonucleotide
  Target: LAMA2; (+) strand; PAM type: NRG; PAM sequence: TAG
aaatttacatagtatttata

SEQ ID NO: 162825 - DNA, 20 bp, Artificial Sequence
  Description of Artificial Sequence: Synthetic oligonucleotide
  Target: LAMA2; (+) strand; PAM type: NRG; PAM sequence: AAG
tctatttcatgctatatcct

SEQ ID NO: 162826 - DNA, 20 bp, Artificial Sequence
  Description of Artificial Sequence: Synthetic oligonucleotide
  Target: LAMA2; (+) strand; PAM type: NRG; PAM sequence: CAG
tcattaaaactgcttcaaaa

SEQ ID NO: 162827 - DNA, 20 bp, Artificial Sequence
  Description of Artificial Sequence: Synthetic oligonucleotide
  Target: LAMA2; (+) strand; PAM type: NRG; PAM sequence: AGG
cattaaaactgcttcaaaac

SEQ ID NO: 162828 - DNA, 20 bp, Artificial Sequence
  Description of Artificial Sequence: Synthetic oligonucleotide
  Target: LAMA2; (+) strand; PAM type: NRG; PAM sequence: TGG
ttgcatattatttcataatg

SEQ ID NO: 162829 - DNA, 20 bp, Artificial Sequence
  Description of Artificial Sequence: Synthetic oligonucleotide
  Target: LAMA2; (+) strand; PAM type: NRG; PAM sequence: CAG
acaatttttataacattgta

SEQ ID NO: 162830 - DNA, 20 bp, Artificial Sequence
  Description of Artificial Sequence: Synthetic oligonucleotide
  Target: LAMA2; (+) strand; PAM type: NRG; PAM sequence: AAG
ttttataacattgtacagtt

SEQ ID NO: 162831 - DNA, 20 bp, Artificial Sequence
  Description of Artificial Sequence: Synthetic oligonucleotide
  Target: LAMA2; (+) strand; PAM type: NRG; PAM sequence: TAG
tgtacagttaagtgcctgca

SEQ ID NO: 162832 - DNA, 20 bp, Artificial Sequence
  Description of Artificial Sequence: Synthetic oligonucleotide
  Target: LAMA2; (+) strand; PAM type: NRG; PAM sequence: TAG
catgataaataatattgtaa

SEQ ID NO: 162833 - DNA, 20 bp, Artificial Sequence
  Description of Artificial Sequence: Synthetic oligonucleotide
  Target: LAMA2; (+) strand; PAM type: NRG; PAM sequence: AGG
atgataaataatattgtaat

SEQ ID NO: 162834 - DNA, 20 bp, Artificial Sequence
  Description of Artificial Sequence: Synthetic oligonucleotide
  Target: LAMA2; (+) strand; PAM type: NRG; PAM sequence: AAG
caatttctgattatttctct

SEQ ID NO: 162835 - DNA, 20 bp, Artificial Sequence
  Description of Artificial Sequence: Synthetic oligonucleotide
  Target: LAMA2; (+) strand; PAM type: NRG; PAM sequence: CAG
ttctgattatttctctaagc

SEQ ID NO: 162836 - DNA, 20 bp, Artificial Sequence
  Description of Artificial Sequence: Synthetic oligonucleotide
  Target: LAMA2; (+) strand; PAM type: NRG; PAM sequence: AGG
tctgattatttctctaagcc

SEQ ID NO: 162837 - DNA, 20 bp, Artificial Sequence
  Description of Artificial Sequence: Synthetic oligonucleotide
  Target: LAMA2; (+) strand; PAM type: NRG; PAM sequence: TGG
ttactaataatgatattata

SEQ ID NO: 162838 - DNA, 20 bp, Artificial Sequence
  Description of Artificial Sequence: Synthetic oligonucleotide
  Target: LAMA2; (+) strand; PAM type: NRG; PAM sequence: TAG
taataatgatattatatggt

SEQ ID NO: 162839 - DNA, 20 bp, Artificial Sequence
  Description of Artificial Sequence: Synthetic oligonucleotide
  Target: LAMA2; (+) strand; PAM type: NRG; PAM sequence: TAG
tatggttagttttttttata

SEQ ID NO: 162840 - DNA, 20 bp, Artificial Sequence
  Description of Artificial Sequence: Synthetic oligonucleotide
  Target: LAMA2; (+) strand; PAM type: NRG; PAM sequence: AGG
atggttagttttttttatat

SEQ ID NO: 162841 - DNA, 20 bp, Artificial Sequence
  Description of Artificial Sequence: Synthetic oligonucleotide
  Target: LAMA2; (+) strand; PAM type: NRG; PAM sequence: AAG
tataggtgaatttaatttca

SEQ ID NO: 162842 - DNA, 20 bp, Artificial Sequence
  Description of Artificial Sequence: Synthetic oligonucleotide
  Target: LAMA2; (+) strand; PAM type: NRG; PAM sequence: TGG
ttcaaagtcatgtcatctgt

SEQ ID NO: 162843 - DNA, 20 bp, Artificial Sequence
  Description of Artificial Sequence: Synthetic oligonucleotide
  Target: LAMA2; (+) strand; PAM type: NRG; PAM sequence: TAG
tcatataccacaatctgaat

SEQ ID NO: 162844 - DNA, 20 bp, Artificial Sequence
  Description of Artificial Sequence: Synthetic oligonucleotide
  Target: LAMA2; (+) strand; PAM type: NRG; PAM sequence: TAG
accacaatctgaattagaac

SEQ ID NO: 162845 - DNA, 20 bp, Artificial Sequence
  Description of Artificial Sequence: Synthetic oligonucleotide
  Target: LAMA2; (+) strand; PAM type: NRG; PAM sequence: CAG
agaaataaaaataaaaccaa

SEQ ID NO: 162846 - DNA, 20 bp, Artificial Sequence
  Description of Artificial Sequence: Synthetic oligonucleotide
  Target: LAMA2; (+) strand; PAM type: NRG; PAM sequence: AAG
taaaaccaacagtaaatgta

SEQ ID NO: 162847 - DNA, 20 bp, Artificial Sequence
  Description of Artificial Sequence: Synthetic oligonucleotide
  Target: LAMA2; (+) strand; PAM type: NRG; PAM sequence: GAG
ccaacagtaaatgtaaagat

SEQ ID NO: 162848 - DNA, 20 bp, Artificial Sequence
  Description of Artificial Sequence: Synthetic oligonucleotide
  Target: LAMA2; (+) strand; PAM type: NRG; PAM sequence: CAG
atgagaatgatcgtcaaact

SEQ ID NO: 162849 - DNA, 20 bp, Artificial Sequence
  Description of Artificial Sequence: Synthetic oligonucleotide
  Target: LAMA2; (+) strand; PAM type: NRG; PAM sequence: TAG
tttaaaaataaaactattct

SEQ ID NO: 162850 - DNA, 20 bp, Artificial Sequence
  Description of Artificial Sequence: Synthetic oligonucleotide
  Target: LAMA2; (+) strand; PAM type: NRG; PAM sequence: CGG
aataaaactattcttagcta

SEQ ID NO: 162851 - DNA, 20 bp, Artificial Sequence
  Description of Artificial Sequence: Synthetic oligonucleotide
  Target: LAMA2; (+) strand; PAM type: NRG; PAM sequence: CAG
cattttaaaaatctaatttt

SEQ ID NO: 162852 - DNA, 20 bp, Artificial Sequence
  Description of Artificial Sequence: Synthetic oligonucleotide
  Target: LAMA2; (+) strand; PAM type: NRG; PAM sequence: GAG
taatatctaaaatatataat

SEQ ID NO: 162853 - DNA, 20 bp, Artificial Sequence
  Description of Artificial Sequence: Synthetic oligonucleotide
  Target: LAMA2; (+) strand; PAM type: NRG; PAM sequence: AGG
aatatctaaaatatataatg

SEQ ID NO: 162854 - DNA, 20 bp, Artificial Sequence
  Description of Artificial Sequence: Synthetic oligonucleotide
  Target: LAMA2; (+) strand; PAM type: NRG; PAM sequence: TGG
gaggcttattaatttctctt

SEQ ID NO: 162855 - DNA, 20 bp, Artificial Sequence
  Description of Artificial Sequence: Synthetic oligonucleotide
  Target: LAMA2; (+) strand; PAM type: NRG; PAM sequence: GGG
aggcttattaatttctcttt

SEQ ID NO: 162856 - DNA, 20 bp, Artificial Sequence
  Description of Artificial Sequence: Synthetic oligonucleotide
  Target: LAMA2; (+) strand; PAM type: NRG; PAM sequence: TGG
cttattaatttctctttggg

SEQ ID NO: 162857 - DNA, 20 bp, Artificial Sequence
  Description of Artificial Sequence: Synthetic oligonucleotide
  Target: LAMA2; (+) strand; PAM type: NRG; PAM sequence: AAG
ctctttgggtggctcacgtt

SEQ ID NO: 162858 - DNA, 20 bp, Artificial Sequence
  Description of Artificial Sequence: Synthetic oligonucleotide
  Target: LAMA2; (+) strand; PAM type: NRG; PAM sequence: TGG
tttgggtggctcacgttaag

SEQ ID NO: 162859 - DNA, 20 bp, Artificial Sequence
  Description of Artificial Sequence: Synthetic oligonucleotide
  Target: LAMA2; (+) strand; PAM type: NRG; PAM sequence: AAG
ggtggctcacgttaagtggc

SEQ ID NO: 162860 - DNA, 20 bp, Artificial Sequence
  Description of Artificial Sequence: Synthetic oligonucleotide
  Target: LAMA2; (+) strand; PAM type: NRG; PAM sequence: AAG
tggcaagatttttttttacc

SEQ ID NO: 162861 - DNA, 20 bp, Artificial Sequence
  Description of Artificial Sequence: Synthetic oligonucleotide
  Target: LAMA2; (+) strand; PAM type: NRG; PAM sequence: AAG
caagatttttttttaccaag

SEQ ID NO: 162862 - DNA, 20 bp, Artificial Sequence
  Description of Artificial Sequence: Synthetic oligonucleotide
  Target: LAMA2; (+) strand; PAM type: NRG; PAM sequence: AAG
tttaccaagaagcaattatt

SEQ ID NO: 162863 - DNA, 20 bp, Artificial Sequence
  Description of Artificial Sequence: Synthetic oligonucleotide
  Target: LAMA2; (+) strand; PAM type: NRG; PAM sequence: AAG
taagtctaattttccaaaat

SEQ ID NO: 162864 - DNA, 20 bp, Artificial Sequence
  Description of Artificial Sequence: Synthetic oligonucleotide
  Target: LAMA2; (+) strand; PAM type: NRG; PAM sequence: AAG
aaataagaattatttttaca

SEQ ID NO: 162865 - DNA, 20 bp, Artificial Sequence
  Description of Artificial Sequence: Synthetic oligonucleotide
  Target: LAMA2; (+) strand; PAM type: NRG; PAM sequence: AAG
taagaattatttttacaaag

SEQ ID NO: 162866 - DNA, 20 bp, Artificial Sequence
  Description of Artificial Sequence: Synthetic oligonucleotide
  Target: LAMA2; (+) strand; PAM type: NRG; PAM sequence: GAG
tttacaaagaagtaattacc

SEQ ID NO: 162867 - DNA, 20 bp, Artificial Sequence
  Description of Artificial Sequence: Synthetic oligonucleotide
  Target: LAMA2; (+) strand; PAM type: NRG; PAM sequence: CAG
aattaccgagaataattttc

SEQ ID NO: 162868 - DNA, 20 bp, Artificial Sequence
  Description of Artificial Sequence: Synthetic oligonucleotide
  Target: LAMA2; (+) strand; PAM type: NRG; PAM sequence: AAG
atttttaaaaaataaccctg

SEQ ID NO: 162869 - DNA, 20 bp, Artificial Sequence
  Description of Artificial Sequence: Synthetic oligonucleotide
  Target: LAMA2; (+) strand; PAM type: NRG; PAM sequence: AAG
aaataaccctgaagtatttt

SEQ ID NO: 162870 - DNA, 20 bp, Artificial Sequence
  Description of Artificial Sequence: Synthetic oligonucleotide
  Target: LAMA2; (+) strand; PAM type: NRG; PAM sequence: CAG
taaccctgaagtattttaag

SEQ ID NO: 162871 - DNA, 20 bp, Artificial Sequence
  Description of Artificial Sequence: Synthetic oligonucleotide
  Target: LAMA2; (+) strand; PAM type: NRG; PAM sequence: AGG
aaccctgaagtattttaagc

SEQ ID NO: 162872 - DNA, 20 bp, Artificial Sequence
  Description of Artificial Sequence: Synthetic oligonucleotide
  Target: LAMA2; (+) strand; PAM type: NRG; PAM sequence: TAG
ctgaagtattttaagcagga

SEQ ID NO: 162873 - DNA, 20 bp, Artificial Sequence
  Description of Artificial Sequence: Synthetic oligonucleotide
  Target: LAMA2; (+) strand; PAM type: NRG; PAM sequence: CGG
atgattttcatttttctgct

SEQ ID NO: 162874 - DNA, 20 bp, Artificial Sequence
  Description of Artificial Sequence: Synthetic oligonucleotide
  Target: LAMA2; (+) strand; PAM type: NRG; PAM sequence: GAG
gattttcatttttctgctcg

SEQ ID NO: 162875 - DNA, 20 bp, Artificial Sequence
  Description of Artificial Sequence: Synthetic oligonucleotide
  Target: LAMA2; (+) strand; PAM type: NRG; PAM sequence: CAG
ggagtgattttttaatccat

SEQ ID NO: 162876 - DNA, 20 bp, Artificial Sequence
  Description of Artificial Sequence: Synthetic oligonucleotide
  Target: LAMA2; (+) strand; PAM type: NRG; PAM sequence: AAG
attttctaacgtttcatttt

SEQ ID NO: 162877 - DNA, 20 bp, Artificial Sequence
  Description of Artificial Sequence: Synthetic oligonucleotide
  Target: LAMA2; (+) strand; PAM type: NRG; PAM sequence: AAG
agcctgataacatgcatttc

SEQ ID NO: 162878 - DNA, 20 bp, Artificial Sequence
  Description of Artificial Sequence: Synthetic oligonucleotide
  Target: LAMA2; (+) strand; PAM type: NRG; PAM sequence: AAG
tgataacatgcatttcaaga

SEQ ID NO: 162879 - DNA, 20 bp, Artificial Sequence
  Description of Artificial Sequence: Synthetic oligonucleotide
  Target: LAMA2; (+) strand; PAM type: NRG; PAM sequence: CAG
aacatgcatttcaagaaagt

SEQ ID NO: 162880 - DNA, 20 bp, Artificial Sequence
  Description of Artificial Sequence: Synthetic oligonucleotide
  Target: LAMA2; (+) strand; PAM type: NRG; PAM sequence: AAG
catttcaagaaagtcagccg

SEQ ID NO: 162881 - DNA, 20 bp, Artificial Sequence
  Description of Artificial Sequence: Synthetic oligonucleotide
  Target: LAMA2; (+) strand; PAM type: NRG; PAM sequence: TGG
tcaagaaagtcagccgaagc

SEQ ID NO: 162882 - DNA, 20 bp, Artificial Sequence
  Description of Artificial Sequence: Synthetic oligonucleotide
  Target: LAMA2; (+) strand; PAM type: NRG; PAM sequence: AAG
taatgcaaacttgaccgtaa

SEQ ID NO: 162883 - DNA, 20 bp, Artificial Sequence
  Description of Artificial Sequence: Synthetic oligonucleotide
  Target: LAMA2; (+) strand; PAM type: NRG; PAM sequence: TAG
ccgtaaaagatgatttgtta

SEQ ID NO: 162884 - DNA, 20 bp, Artificial Sequence
  Description of Artificial Sequence: Synthetic oligonucleotide
  Target: LAMA2; (+) strand; PAM type: NRG; PAM sequence: TAG
aaaagatgatttgttataga

SEQ ID NO: 162885 - DNA, 20 bp, Artificial Sequence
  Description of Artificial Sequence: Synthetic oligonucleotide
  Target: LAMA2; (+) strand; PAM type: NRG; PAM sequence: AAG
atgatttgttatagatagat

SEQ ID NO: 162886 - DNA, 20 bp, Artificial Sequence
  Description of Artificial Sequence: Synthetic oligonucleotide
  Target: LAMA2; (+) strand; PAM type: NRG; PAM sequence: GAG
gatttgttatagatagataa

SEQ ID NO: 162887 - DNA, 20 bp, Artificial Sequence
  Description of Artificial Sequence: Synthetic oligonucleotide
  Target: LAMA2; (+) strand; PAM type: NRG; PAM sequence: CAG
tatgcatatgaataactcat

SEQ ID NO: 162888 - DNA, 20 bp, Artificial Sequence
  Description of Artificial Sequence: Synthetic oligonucleotide
  Target: LAMA2; (+) strand; PAM type: NRG; PAM sequence: GAG
tgcatatgaataactcatca

SEQ ID NO: 162889 - DNA, 20 bp, Artificial Sequence
  Description of Artificial Sequence: Synthetic oligonucleotide
  Target: LAMA2; (+) strand; PAM type: NRG; PAM sequence: AAG
aataactcatcagagaatga

SEQ ID NO: 162890 - DNA, 20 bp, Artificial Sequence
  Description of Artificial Sequence: Synthetic oligonucleotide
  Target: LAMA2; (+) strand; PAM type: NRG; PAM sequence: TGG
gaaagtttacttacctgatc

SEQ ID NO: 162891 - DNA, 20 bp, Artificial Sequence
  Description of Artificial Sequence: Synthetic oligonucleotide
  Target: LAMA2; (+) strand; PAM type: NRG; PAM sequence: TAG
cactaatcaatttcaattgt

SEQ ID NO: 162892 - DNA, 20 bp, Artificial Sequence
  Description of Artificial Sequence: Synthetic oligonucleotide
  Target: LAMA2; (+) strand; PAM type: NRG; PAM sequence: AAG
caattgttagaatgaaacct

SEQ ID NO: 162893 - DNA, 20 bp, Artificial Sequence
  Description of Artificial Sequence: Synthetic oligonucleotide
  Target: LAMA2; (+) strand; PAM type: NRG; PAM sequence: CAG
tgttgaaccaattatttgat

SEQ ID NO: 162894 - DNA, 20 bp, Artificial Sequence
  Description of Artificial Sequence: Synthetic oligonucleotide
  Target: LAMA2; (+) strand; PAM type: NRG; PAM sequence: AAG
accaattatttgatcagtgt

SEQ ID NO: 162895 - DNA, 20 bp, Artificial Sequence
  Description of Artificial Sequence: Synthetic oligonucleotide
  Target: LAMA2; (+) strand; PAM type: NRG; PAM sequence: TAG
tatttataatgtgaacacta

SEQ ID NO: 162896 - DNA, 20 bp, Artificial Sequence
  Description of Artificial Sequence: Synthetic oligonucleotide
  Target: LAMA2; (+) strand; PAM type: NRG; PAM sequence: AAG
aacactatagcaatgattaa

SEQ ID NO: 162897 - DNA, 20 bp, Artificial Sequence
  Description of Artificial Sequence: Synthetic oligonucleotide
  Target: LAMA2; (+) strand; PAM type: NRG; PAM sequence: TGG
gcaatgattaaaagtattta

SEQ ID NO: 162898 - DNA, 20 bp, Artificial Sequence
  Description of Artificial Sequence: Synthetic oligonucleotide
  Target: LAMA2; (+) strand; PAM type: NRG; PAM sequence: TAG
gacaaaattctatcaaatat

SEQ ID NO: 162899 - DNA, 20 bp, Artificial Sequence
  Description of Artificial Sequence: Synthetic oligonucleotide
  Target: LAMA2; (+) strand; PAM type: NRG; PAM sequence: AGG
acaaaattctatcaaatatt

SEQ ID NO: 162900 - DNA, 20 bp, Artificial Sequence
  Description of Artificial Sequence: Synthetic oligonucleotide
  Target: LAMA2; (+) strand; PAM type: NRG; PAM sequence: GGG
caaaattctatcaaatatta

SEQ ID NO: 162901 - DNA, 20 bp, Artificial Sequence
  Description of Artificial Sequence: Synthetic oligonucleotide
  Target: LAMA2; (+) strand; PAM type: NRG; PAM sequence: AAG
ctatcaaatattagggcaaa

SEQ ID NO: 162902 - DNA, 20 bp, Artificial Sequence
  Description of Artificial Sequence: Synthetic oligonucleotide
  Target: LAMA2; (+) strand; PAM type: NRG; PAM sequence: AGG
tatcaaatattagggcaaaa

SEQ ID NO: 162903 - DNA, 20 bp, Artificial Sequence
  Description of Artificial Sequence: Synthetic oligonucleotide
  Target: LAMA2; (+) strand; PAM type: NRG; PAM sequence: TAG
aaaaaggattattttaactt

SEQ ID NO: 162904 - DNA, 20 bp, Artificial Sequence
  Description of Artificial Sequence: Synthetic oligonucleotide
  Target: LAMA2; (+) strand; PAM type: NRG; PAM sequence: AGG
aaaaggattattttaacttt

SEQ ID NO: 162905 - DNA, 20 bp, Artificial Sequence
  Description of Artificial Sequence: Synthetic oligonucleotide
  Target: LAMA2; (+) strand; PAM type: NRG; PAM sequence: TGG
ttattttaactttaggctgc

SEQ ID NO: 162906 - DNA, 20 bp, Artificial Sequence
  Description of Artificial Sequence: Synthetic oligonucleotide
  Target: LAMA2; (+) strand; PAM type: NRG; PAM sequence: AAG
ctgctggtcaataatgttga

SEQ ID NO: 162907 - DNA, 20 bp, Artificial Sequence
  Description of Artificial Sequence: Synthetic oligonucleotide
  Target: LAMA2; (+) strand; PAM type: NRG; PAM sequence: AAG
atgttgaaagtatttttacc

SEQ ID NO: 162908 - DNA, 20 bp, Artificial Sequence
  Description of Artificial Sequence: Synthetic oligonucleotide
  Target: LAMA2; (+) strand; PAM type: NRG; PAM sequence: TAG
ttgaaagtatttttaccaag

SEQ ID NO: 162909 - DNA, 20 bp, Artificial Sequence
  Description of Artificial Sequence: Synthetic oligonucleotide
  Target: LAMA2; (+) strand; PAM type: NRG; PAM sequence: AGG
tgaaagtatttttaccaagt

SEQ ID NO: 162910 - DNA, 20 bp, Artificial Sequence
  Description of Artificial Sequence: Synthetic oligonucleotide
  Target: LAMA2; (+) strand; PAM type: NRG; PAM sequence: GAG
aaagtatttttaccaagtag

SEQ ID NO: 162911 - DNA, 20 bp, Artificial Sequence
  Description of Artificial Sequence: Synthetic oligonucleotide
  Target: LAMA2; (+) strand; PAM type: NRG; PAM sequence: TAG
ttttaccaagtaggagtcca

SEQ ID NO: 162912 - DNA, 20 bp, Artificial Sequence
  Description of Artificial Sequence: Synthetic oligonucleotide
  Target: LAMA2; (+) strand; PAM type: NRG; PAM sequence: AAG
gtaggagtccatagatctga

SEQ ID NO: 162913 - DNA, 20 bp, Artificial Sequence
  Description of Artificial Sequence: Synthetic oligonucleotide
  Target: LAMA2; (+) strand; PAM type: NRG; PAM sequence: CAG
agatctgaaagtaatcaatt

SEQ ID NO: 162914 - DNA, 20 bp, Artificial Sequence
  Description of Artificial Sequence: Synthetic oligonucleotide
  Target: LAMA2; (+) strand; PAM type: NRG; PAM sequence: AAG
aattcagattactaaaaatg

SEQ ID NO: 162915 - DNA, 20 bp, Artificial Sequence
  Description of Artificial Sequence: Synthetic oligonucleotide
  Target: LAMA2; (+) strand; PAM type: NRG; PAM sequence: AAG
tcagattactaaaaatgaag

SEQ ID NO: 162916 - DNA, 20 bp, Artificial Sequence
  Description of Artificial Sequence: Synthetic oligonucleotide
  Target: LAMA2; (+) strand; PAM type: NRG; PAM sequence: AAG
aagaagtaaaattttaaatt

SEQ ID NO: 162917 - DNA, 20 bp, Artificial Sequence
  Description of Artificial Sequence: Synthetic oligonucleotide
  Target: LAMA2; (+) strand; PAM type: NRG; PAM sequence: TAG
gtaaaattttaaattaagac

SEQ ID NO: 162918 - DNA, 20 bp, Artificial Sequence
  Description of Artificial Sequence: Synthetic oligonucleotide
  Target: LAMA2; (+) strand; PAM type: NRG; PAM sequence: TAG
aagactagaaataccaccta

SEQ ID NO: 162919 - DNA, 20 bp, Artificial Sequence
  Description of Artificial Sequence: Synthetic oligonucleotide
  Target: LAMA2; (+) strand; PAM type: NRG; PAM sequence: AGG
agactagaaataccacctat

SEQ ID NO: 162920 - DNA, 20 bp, Artificial Sequence
  Description of Artificial Sequence: Synthetic oligonucleotide
  Target: LAMA2; (+) strand; PAM type: NRG; PAM sequence: GAG
catattgctattgaaatctt

SEQ ID NO: 162921 - DNA, 20 bp, Artificial Sequence
  Description of Artificial Sequence: Synthetic oligonucleotide
  Target: LAMA2; (+) strand; PAM type: NRG; PAM sequence: AAG
attgctattgaaatcttgag

SEQ ID NO: 162922 - DNA, 20 bp, Artificial Sequence
  Description of Artificial Sequence: Synthetic oligonucleotide
  Target: LAMA2; (+) strand; PAM type: NRG; PAM sequence: TGG
attgaaatcttgagaagtac

SEQ ID NO: 162923 - DNA, 20 bp, Artificial Sequence
  Description of Artificial Sequence: Synthetic oligonucleotide
  Target: LAMA2; (+) strand; PAM type: NRG; PAM sequence: GGG
ttgaaatcttgagaagtact

SEQ ID NO: 162924 - DNA, 20 bp, Artificial Sequence
  Description of Artificial Sequence: Synthetic oligonucleotide
  Target: LAMA2; (+) strand; PAM type: NRG; PAM sequence: CAG
aatcttgagaagtactggga

SEQ ID NO: 162925 - DNA, 20 bp, Artificial Sequence
  Description of Artificial Sequence: Synthetic oligonucleotide
  Target: LAMA2; (+) strand; PAM type: NRG; PAM sequence: AGG
atcttgagaagtactgggac

SEQ ID NO: 162926 - DNA, 20 bp, Artificial Sequence
  Description of Artificial Sequence: Synthetic oligonucleotide
  Target: LAMA2; (+) strand; PAM type: NRG; PAM sequence: TGG
tgagaagtactgggacaggc

SEQ ID NO: 162927 - DNA, 20 bp, Artificial Sequence
  Description of Artificial Sequence: Synthetic oligonucleotide
  Target: LAMA2; (+) strand; PAM type: NRG; PAM sequence: CAG
acaggctggtgaaaatacaa

SEQ ID NO: 162928 - DNA, 20 bp, Artificial Sequence
  Description of Artificial Sequence: Synthetic oligonucleotide
  Target: LAMA2; (+) strand; PAM type: NRG; PAM sequence: CAG
gctggtgaaaatacaacaga

SEQ ID NO: 162929 - DNA, 20 bp, Artificial Sequence
  Description of Artificial Sequence: Synthetic oligonucleotide
  Target: LAMA2; (+) strand; PAM type: NRG; PAM sequence: AAG
tgaaaatacaacagacagta

SEQ ID NO: 162930 - DNA, 20 bp, Artificial Sequence
  Description of Artificial Sequence: Synthetic oligonucleotide
  Target: LAMA2; (+) strand; PAM type: NRG; PAM sequence: AGG
gaaaatacaacagacagtaa

SEQ ID NO: 162931 - DNA, 20 bp, Artificial Sequence
  Description of Artificial Sequence: Synthetic oligonucleotide
  Target: LAMA2; (+) strand; PAM type: NRG; PAM sequence: AAG
aatacaacagacagtaaagg

SEQ ID NO: 162932 - DNA, 20 bp, Artificial Sequence
  Description of Artificial Sequence: Synthetic oligonucleotide
  Target: LAMA2; (+) strand; PAM type: NRG; PAM sequence: CAG
aaaggaagcgcctaattctg

SEQ ID NO: 162933 - DNA, 20 bp, Artificial Sequence
  Description of Artificial Sequence: Synthetic oligonucleotide
  Target: LAMA2; (+) strand; PAM type: NRG; PAM sequence: CAG
agttaattttgataaaattt

SEQ ID NO: 162934 - DNA, 20 bp, Artificial Sequence
  Description of Artificial Sequence: Synthetic oligonucleotide
  Target: LAMA2; (+) strand; PAM type: NRG; PAM sequence: TGG
aataattgaacttttctctt

SEQ ID NO: 162935 - DNA, 20 bp, Artificial Sequence
  Description of Artificial Sequence: Synthetic oligonucleotide
  Target: LAMA2; (+) strand; PAM type: NRG; PAM sequence: TAG
acttttctctttggatatca

SEQ ID NO: 162936 - DNA, 20 bp, Artificial Sequence
  Description of Artificial Sequence: Synthetic oligonucleotide
  Target: LAMA2; (+) strand; PAM type: NRG; PAM sequence: AAG
tctctttggatatcatagaa

SEQ ID NO: 162937 - DNA, 20 bp, Artificial Sequence
  Description of Artificial Sequence: Synthetic oligonucleotide
  Target: LAMA2; (+) strand; PAM type: NRG; PAM sequence: AGG
ctctttggatatcatagaaa

SEQ ID NO: 162938 - DNA, 20 bp, Artificial Sequence
  Description of Artificial Sequence: Synthetic oligonucleotide
  Target: LAMA2; (+) strand; PAM type: NRG; PAM sequence: CAG
aaacccaattgtcataacat

SEQ ID NO: 162939 - DNA, 20 bp, Artificial Sequence
  Description of Artificial Sequence: Synthetic oligonucleotide
  Target: LAMA2; (+) strand; PAM type: NRG; PAM sequence: GAG
ccaattgtcataacatcagt

SEQ ID NO: 162940 - DNA, 20 bp, Artificial Sequence
  Description of Artificial Sequence: Synthetic oligonucleotide
  Target: LAMA2; (+) strand; PAM type: NRG; PAM sequence: AGG
caattgtcataacatcagtg

SEQ ID NO: 162941 - DNA, 20 bp, Artificial Sequence
  Description of Artificial Sequence: Synthetic oligonucleotide
  Target: LAMA2; (+) strand; PAM type: NRG; PAM sequence: AAG
gaggaatcctgataactcct

SEQ ID NO: 162942 - DNA, 20 bp, Artificial Sequence
  Description of Artificial Sequence: Synthetic oligonucleotide
  Target: LAMA2; (+) strand; PAM type: NRG; PAM sequence: TGG
ctctgttcccacctgatctt

SEQ ID NO: 162943 - DNA, 20 bp, Artificial Sequence
  Description of Artificial Sequence: Synthetic oligonucleotide
  Target: LAMA2; (+) strand; PAM type: NRG; PAM sequence: GAG
tgtgcatcttgcttcacttc

SEQ ID NO: 162944 - DNA, 20 bp, Artificial Sequence
  Description of Artificial Sequence: Synthetic oligonucleotide
  Target: LAMA2; (+) strand; PAM type: NRG; PAM sequence: CAG
tttctctcctcttccattgc

SEQ ID NO: 162945 - DNA, 20 bp, Artificial Sequence
  Description of Artificial Sequence: Synthetic oligonucleotide
  Target: LAMA2; (+) strand; PAM type: NRG; PAM sequence: AGG
ttctctcctcttccattgcc

SEQ ID NO: 162946 - DNA, 20 bp, Artificial Sequence
  Description of Artificial Sequence: Synthetic oligonucleotide
  Target: LAMA2; (+) strand; PAM type: NRG; PAM sequence: TGG
ctcctcttccattgccaggc

SEQ ID NO: 162947 - DNA, 20 bp, Artificial Sequence
  Description of Artificial Sequence: Synthetic oligonucleotide
  Target: LAMA2; (+) strand; PAM type: NRG; PAM sequence: GGG
tcctcttccattgccaggct

SEQ ID NO: 162948 - DNA, 20 bp, Artificial Sequence
  Description of Artificial Sequence: Synthetic oligonucleotide
  Target: LAMA2; (+) strand; PAM type: NRG; PAM sequence: TGG
cattgccaggctgggacctt

SEQ ID NO: 162949 - DNA, 20 bp, Artificial Sequence
  Description of Artificial Sequence: Synthetic oligonucleotide
  Target: LAMA2; (+) strand; PAM type: NRG; PAM sequence: CAG
tgggacctttggcctacaat

SEQ ID NO: 162950 - DNA, 20 bp, Artificial Sequence
  Description of Artificial Sequence: Synthetic oligonucleotide
  Target: LAMA2; (+) strand; PAM type: NRG; PAM sequence: AAG
acctttggcctacaatcagc

SEQ ID NO: 162951 - DNA, 20 bp, Artificial Sequence
  Description of Artificial Sequence: Synthetic oligonucleotide
  Target: LAMA2; (+) strand; PAM type: NRG; PAM sequence: AGG
cctttggcctacaatcagca

SEQ ID NO: 162952 - DNA, 20 bp, Artificial Sequence
  Description of Artificial Sequence: Synthetic oligonucleotide
  Target: LAMA2; (+) strand; PAM type: NRG; PAM sequence: GGG
ctttggcctacaatcagcaa

SEQ ID NO: 162953 - DNA, 20 bp, Artificial Sequence
  Description of Artificial Sequence: Synthetic oligonucleotide
  Target: LAMA2; (+) strand; PAM type: NRG; PAM sequence: GGG
tttggcctacaatcagcaag

SEQ ID NO: 162954 - DNA, 20 bp, Artificial Sequence
  Description of Artificial Sequence: Synthetic oligonucleotide
  Target: LAMA2; (+) strand; PAM type: NRG; PAM sequence: TGG
ccctgcaactgcaattcttt

SEQ ID NO: 162955 - DNA, 20 bp, Artificial Sequence
  Description of Artificial Sequence: Synthetic oligonucleotide
  Target: LAMA2; (+) strand; PAM type: NRG; PAM sequence: GGG
cctgcaactgcaattctttt

SEQ ID NO: 162956 - DNA, 20 bp, Artificial Sequence
  Description of Artificial Sequence: Synthetic oligonucleotide
  Target: LAMA2; (+) strand; PAM type: NRG; PAM sequence: AAG
actgcaattcttttgggtct

SEQ ID NO: 162957 - DNA, 20 bp, Artificial Sequence
  Description of Artificial Sequence: Synthetic oligonucleotide
  Target: LAMA2; (+) strand; PAM type: NRG; PAM sequence: AAG
gtctaagtcattcgactgtg

SEQ ID NO: 162958 - DNA, 20 bp, Artificial Sequence
  Description of Artificial Sequence: Synthetic oligonucleotide
  Target: LAMA2; (+) strand; PAM type: NRG; PAM sequence: GAG
ctaagtcattcgactgtgaa

SEQ ID NO: 162959 - DNA, 20 bp, Artificial Sequence
  Description of Artificial Sequence: Synthetic oligonucleotide
  Target: LAMA2; (+) strand; PAM type: NRG; PAM sequence: GAG
aagtcattcgactgtgaaga

SEQ ID NO: 162960 - DNA, 20 bp, Artificial Sequence
  Description of Artificial Sequence: Synthetic oligonucleotide
  Target: LAMA2; (+) strand; PAM type: NRG; PAM sequence: TGG
tcattcgactgtgaagagag

SEQ ID NO: 162961 - DNA, 20 bp, Artificial Sequence
  Description of Artificial Sequence: Synthetic oligonucleotide
  Target: LAMA2; (+) strand; PAM type: NRG; PAM sequence: TGG
gtgaagagagtggacaatgt

SEQ ID NO: 162962 - DNA, 20 bp, Artificial Sequence
  Description of Artificial Sequence: Synthetic oligonucleotide
  Target: LAMA2; (+) strand; PAM type: NRG; PAM sequence: TGG
ggacaatgttggtgccaacc

SEQ ID NO: 162963 - DNA, 20 bp, Artificial Sequence
  Description of Artificial Sequence: Synthetic oligonucleotide
  Target: LAMA2; (+) strand; PAM type: NRG; PAM sequence: GAG
acaatgttggtgccaacctg

SEQ ID NO: 162964 - DNA, 20 bp, Artificial Sequence
  Description of Artificial Sequence: Synthetic oligonucleotide
  Target: LAMA2; (+) strand; PAM type: NRG; PAM sequence: CAG
ttggtgccaacctggagtca

SEQ ID NO: 162965 - DNA, 20 bp, Artificial Sequence
  Description of Artificial Sequence: Synthetic oligonucleotide
  Target: LAMA2; (+) strand; PAM type: NRG; PAM sequence: AGG
tggtgccaacctggagtcac

SEQ ID NO: 162966 - DNA, 20 bp, Artificial Sequence
  Description of Artificial Sequence: Synthetic oligonucleotide
  Target: LAMA2; (+) strand; PAM type: NRG; PAM sequence: GGG
ggtgccaacctggagtcaca

SEQ ID NO: 162967 - DNA, 20 bp, Artificial Sequence
  Description of Artificial Sequence: Synthetic oligonucleotide
  Target: LAMA2; (+) strand; PAM type: NRG; PAM sequence: AAG
gccaacctggagtcacaggg

SEQ ID NO: 162968 - DNA, 20 bp, Artificial Sequence
  Description of Artificial Sequence: Synthetic oligonucleotide
  Target: LAMA2; (+) strand; PAM type: NRG; PAM sequence: CGG
aaatgtgaccgctgtgccca

SEQ ID NO: 162969 - DNA, 20 bp, Artificial Sequence
  Description of Artificial Sequence: Synthetic oligonucleotide
  Target: LAMA2; (+) strand; PAM type: NRG; PAM sequence: AAG
ccacggctatttcaacttcc

SEQ ID NO: 162970 - DNA, 20 bp, Artificial Sequence
  Description of Artificial Sequence: Synthetic oligonucleotide
  Target: LAMA2; (+) strand; PAM type: NRG; PAM sequence: AAG
cggctatttcaacttccaag

SEQ ID NO: 162971 - DNA, 20 bp, Artificial Sequence
  Description of Artificial Sequence: Synthetic oligonucleotide
  Target: LAMA2; (+) strand; PAM type: NRG; PAM sequence: AGG
ggctatttcaacttccaaga

SEQ ID NO: 162972 - DNA, 20 bp, Artificial Sequence
  Description of Artificial Sequence: Synthetic oligonucleotide
  Target: LAMA2; (+) strand; PAM type: NRG; PAM sequence: GAG
ctatttcaacttccaagaag

SEQ ID NO: 162973 - DNA, 20 bp, Artificial Sequence
  Description of Artificial Sequence: Synthetic oligonucleotide
  Target: LAMA2; (+) strand; PAM type: NRG; PAM sequence: AGG
tatttcaacttccaagaagg

SEQ ID NO: 162974 - DNA, 20 bp, Artificial Sequence
  Description of Artificial Sequence: Synthetic oligonucleotide
  Target: LAMA2; (+) strand; PAM type: NRG; PAM sequence: CAG
cttccaagaaggaggctgca

SEQ ID NO: 162975 - DNA, 20 bp, Artificial Sequence
  Description of Artificial Sequence: Synthetic oligonucleotide
  Target: LAMA2; (+) strand; PAM type: NRG; PAM sequence: AGG
ttccaagaaggaggctgcac

SEQ ID NO: 162976 - DNA, 20 bp, Artificial Sequence
  Description of Artificial Sequence: Synthetic oligonucleotide
  Target: LAMA2; (+) strand; PAM type: NRG; PAM sequence: AAG
caggtctgtaaatatgactt

SEQ ID NO: 162977 - DNA, 20 bp, Artificial Sequence
  Description of Artificial Sequence: Synthetic oligonucleotide
  Target: LAMA2; (+) strand; PAM type: NRG; PAM sequence: TAG
gtcctacatattcactctga

SEQ ID NO: 162978 - DNA, 20 bp, Artificial Sequence
  Description of Artificial Sequence: Synthetic oligonucleotide
  Target: LAMA2; (+) strand; PAM type: NRG; PAM sequence: TAG
catattcactctgatagttt

SEQ ID NO: 162979 - DNA, 20 bp, Artificial Sequence
  Description of Artificial Sequence: Synthetic oligonucleotide
  Target: LAMA2; (+) strand; PAM type: NRG; PAM sequence: AGG
atattcactctgatagtttt

SEQ ID NO: 162980 - DNA, 20 bp, Artificial Sequence
  Description of Artificial Sequence: Synthetic oligonucleotide
  Target: LAMA2; (+) strand; PAM type: NRG; PAM sequence: GGG
tattcactctgatagtttta

SEQ ID NO: 162981 - DNA, 20 bp, Artificial Sequence
  Description of Artificial Sequence: Synthetic oligonucleotide
  Target: LAMA2; (+) strand; PAM type: NRG; PAM sequence: CAG
ttagggtctgacttctgtaa

SEQ ID NO: 162982 - DNA, 20 bp, Artificial Sequence
  Description of Artificial Sequence: Synthetic oligonucleotide
  Target: LAMA2; (+) strand; PAM type: NRG; PAM sequence: AAG
tgtaacagtttgttctttta

SEQ ID NO: 162983 - DNA, 20 bp, Artificial Sequence
  Description of Artificial Sequence: Synthetic oligonucleotide
  Target: LAMA2; (+) strand; PAM type: NRG; PAM sequence: AGG
gtaacagtttgttcttttaa

SEQ ID NO: 162984 - DNA, 20 bp, Artificial Sequence
  Description of Artificial Sequence: Synthetic oligonucleotide
  Target: LAMA2; (+) strand; PAM type: NRG; PAM sequence: AAG
acagtttgttcttttaaagg

SEQ ID NO: 162985 - DNA, 20 bp, Artificial Sequence
  Description of Artificial Sequence: Synthetic oligonucleotide
  Target: LAMA2; (+) strand; PAM type: NRG; PAM sequence: CAG
ttgttcttttaaaggaagca

SEQ ID NO: 162986 - DNA, 20 bp, Artificial Sequence
  Description of Artificial Sequence: Synthetic oligonucleotide
  Target: LAMA2; (+) strand; PAM type: NRG; PAM sequence: GAG
tacaacgtatttaacataat

SEQ ID NO: 162987 - DNA, 20 bp, Artificial Sequence
  Description of Artificial Sequence: Synthetic oligonucleotide
  Target: LAMA2; (+) strand; PAM type: NRG; PAM sequence: CAG
ttaaaaaatgaaatacatgt

SEQ ID NO: 162988 - DNA, 20 bp, Artificial Sequence
  Description of Artificial Sequence: Synthetic oligonucleotide
  Target: LAMA2; (+) strand; PAM type: NRG; PAM sequence: AAG
ctgccttaataactgtgtgc

SEQ ID NO: 162989 - DNA, 20 bp, Artificial Sequence
  Description of Artificial Sequence: Synthetic oligonucleotide
  Target: LAMA2; (+) strand; PAM type: NRG; PAM sequence: CAG
aataactgtgtgcaagtact

SEQ ID NO: 162990 - DNA, 20 bp, Artificial Sequence
  Description of Artificial Sequence: Synthetic oligonucleotide
  Target: LAMA2; (+) strand; PAM type: NRG; PAM sequence: CAG
tgcaagtactcagtaaaaat

SEQ ID NO: 162991 - DNA, 20 bp, Artificial Sequence
  Description of Artificial Sequence: Synthetic oligonucleotide
  Target: LAMA2; (+) strand; PAM type: NRG; PAM sequence: CAG
aagtactcagtaaaaatcag

SEQ ID NO: 162992 - DNA, 20 bp, Artificial Sequence
  Description of Artificial Sequence: Synthetic oligonucleotide
  Target: LAMA2; (+) strand; PAM type: NRG; PAM sequence: TGG
aaaatcagcagatgctcgtt

SEQ ID NO: 162993 - DNA, 20 bp, Artificial Sequence
  Description of Artificial Sequence: Synthetic oligonucleotide
  Target: LAMA2; (+) strand; PAM type: NRG; PAM sequence: CAG
ccctgtctgtgactttgatt

SEQ ID NO: 162994 - DNA, 20 bp, Artificial Sequence
  Description of Artificial Sequence: Synthetic oligonucleotide
  Target: LAMA2; (+) strand; PAM type: NRG; PAM sequence: CAG
gtctgtgactttgattcagc

SEQ ID NO: 162995 - DNA, 20 bp, Artificial Sequence
  Description of Artificial Sequence: Synthetic oligonucleotide
  Target: LAMA2; (+) strand; PAM type: NRG; PAM sequence: CGG
cagtcactcaaacactgcta

SEQ ID NO: 162996 - DNA, 20 bp, Artificial Sequence
  Description of Artificial Sequence: Synthetic oligonucleotide
  Target: LAMA2; (+) strand; PAM type: NRG; PAM sequence: AAG
caaacactgctacggcttga

SEQ ID NO: 162997 - DNA, 20 bp, Artificial Sequence
  Description of Artificial Sequence: Synthetic oligonucleotide
  Target: LAMA2; (+) strand; PAM type: NRG; PAM sequence: TGG
agttaaatgttcgatttttc

SEQ ID NO: 162998 - DNA, 20 bp, Artificial Sequence
  Description of Artificial Sequence: Synthetic oligonucleotide
  Target: LAMA2; (+) strand; PAM type: NRG; PAM sequence: CAG
atgttcgatttttctggtac

SEQ ID NO: 162999 - DNA, 20 bp, Artificial Sequence
  Description of Artificial Sequence: Synthetic oligonucleotide
  Target: LAMA2; (+) strand; PAM type: NRG; PAM sequence: TAG
ttctggtaccagtcttatct

SEQ ID NO: 163000 - DNA, 20 bp, Artificial Sequence
  Description of Artificial Sequence: Synthetic oligonucleotide
  Target: LAMA2; (+) strand; PAM type: NRG; PAM sequence: AAG
taccagtcttatcttagttt

SEQ ID NO: 163001 - DNA, 20 bp, Artificial Sequence
  Description of Artificial Sequence: Synthetic oligonucleotide
  Target: LAMA2; (+) strand; PAM type: NRG; PAM sequence: TGG
cctttttcctattgcaaaat

SEQ ID NO: 163002 - DNA, 20 bp, Artificial Sequence
  Description of Artificial Sequence: Synthetic oligonucleotide
  Target: LAMA2; (+) strand; PAM type: NRG; PAM sequence: CGG
cctattgcaaaattggtatc

SEQ ID NO: 163003 - DNA, 20 bp, Artificial Sequence
  Description of Artificial Sequence: Synthetic oligonucleotide
  Target: LAMA2; (+) strand; PAM type: NRG; PAM sequence: AAG
gcaaaattggtatccggatc

SEQ ID NO: 163004 - DNA, 20 bp, Artificial Sequence
  Description of Artificial Sequence: Synthetic oligonucleotide
  Target: LAMA2; (+) strand; PAM type: NRG; PAM sequence: AAG
attggtatccggatcaagaa

SEQ ID NO: 163005 - DNA, 20 bp, Artificial Sequence
  Description of Artificial Sequence: Synthetic oligonucleotide
  Target: LAMA2; (+) strand; PAM type: NRG; PAM sequence: AAG
tatccggatcaagaaaagtc

SEQ ID NO: 163006 - DNA, 20 bp, Artificial Sequence
  Description of Artificial Sequence: Synthetic oligonucleotide
  Target: LAMA2; (+) strand; PAM type: NRG; PAM sequence: AGG
atccggatcaagaaaagtca

SEQ ID NO: 163007 - DNA, 20 bp, Artificial Sequence
  Description of Artificial Sequence: Synthetic oligonucleotide
  Target: LAMA2; (+) strand; PAM type: NRG; PAM sequence: TGG
tcaaggtgttttttttttcc

SEQ ID NO: 163008 - DNA, 20 bp, Artificial Sequence
  Description of Artificial Sequence: Synthetic oligonucleotide
  Target: LAMA2; (+) strand; PAM type: NRG; PAM sequence: TGG
aacatcttttcatctacttt

SEQ ID NO: 163009 - DNA, 20 bp, Artificial Sequence
  Description of Artificial Sequence: Synthetic oligonucleotide
  Target: LAMA2; (+) strand; PAM type: NRG; PAM sequence: AAG
cttgaaaactatgatgttct

SEQ ID NO: 163010 - DNA, 20 bp, Artificial Sequence
  Description of Artificial Sequence: Synthetic oligonucleotide
  Target: LAMA2; (+) strand; PAM type: NRG; PAM sequence: GAG
tgaaaactatgatgttctaa

SEQ ID NO: 163011 - DNA, 20 bp, Artificial Sequence
  Description of Artificial Sequence: Synthetic oligonucleotide
  Target: LAMA2; (+) strand; PAM type: NRG; PAM sequence: GAG
aaaactatgatgttctaaga

SEQ ID NO: 163012 - DNA, 20 bp, Artificial Sequence
  Description of Artificial Sequence: Synthetic oligonucleotide
  Target: LAMA2; (+) strand; PAM type: NRG; PAM sequence: TAG
atgatgttctaagagagaaa

SEQ ID NO: 163013 - DNA, 20 bp, Artificial Sequence
  Description of Artificial Sequence: Synthetic oligonucleotide
  Target: LAMA2; (+) strand; PAM type: NRG; PAM sequence: AGG
tgatgttctaagagagaaat

SEQ ID NO: 163014 - DNA, 20 bp, Artificial Sequence
  Description of Artificial Sequence: Synthetic oligonucleotide
  Target: LAMA2; (+) strand; PAM type: NRG; PAM sequence: TGG
gttctaagagagaaataggt

SEQ ID NO: 163015 - DNA, 20 bp, Artificial Sequence
  Description of Artificial Sequence: Synthetic oligonucleotide
  Target: LAMA2; (+) strand; PAM type: NRG; PAM sequence: TAG
agagagaaataggttggctc

SEQ ID NO: 163016 - DNA, 20 bp, Artificial Sequence
  Description of Artificial Sequence: Synthetic oligonucleotide
  Target: LAMA2; (+) strand; PAM type: NRG; PAM sequence: TAG
ataggttggctctagatatt

SEQ ID NO: 163017 - DNA, 20 bp, Artificial Sequence
  Description of Artificial Sequence: Synthetic oligonucleotide
  Target: LAMA2; (+) strand; PAM type: NRG; PAM sequence: CAG
atttagttcatcaaaaaatg

SEQ ID NO: 163018 - DNA, 20 bp, Artificial Sequence
  Description of Artificial Sequence: Synthetic oligonucleotide
  Target: LAMA2; (+) strand; PAM type: NRG; PAM sequence: AGG
tttagttcatcaaaaaatgc

SEQ ID NO: 163019 - DNA, 20 bp, Artificial Sequence
  Description of Artificial Sequence: Synthetic oligonucleotide
  Target: LAMA2; (+) strand; PAM type: NRG; PAM sequence: CAG
agttcatcaaaaaatgcagg

SEQ ID NO: 163020 - DNA, 20 bp, Artificial Sequence
  Description of Artificial Sequence: Synthetic oligonucleotide
  Target: LAMA2; (+) strand; PAM type: NRG; PAM sequence: GAG
ttcatcaaaaaatgcaggca

SEQ ID NO: 163021 - DNA, 20 bp, Artificial Sequence
  Description of Artificial Sequence: Synthetic oligonucleotide
  Target: LAMA2; (+) strand; PAM type: NRG; PAM sequence: AGG
tcatcaaaaaatgcaggcag

SEQ ID NO: 163022 - DNA, 20 bp, Artificial Sequence
  Description of Artificial Sequence: Synthetic oligonucleotide
  Target: LAMA2; (+) strand; PAM type: NRG; PAM sequence: AAG
tttctaaccatgattccctc

SEQ ID NO: 163023 - DNA, 20 bp, Artificial Sequence
  Description of Artificial Sequence: Synthetic oligonucleotide
  Target: LAMA2; (+) strand; PAM type: NRG; PAM sequence: CAG
ctaaccatgattccctcaag

SEQ ID NO: 163024 - DNA, 20 bp, Artificial Sequence
  Description of Artificial Sequence: Synthetic oligonucleotide
  Target: LAMA2; (+) strand; PAM type: NRG; PAM sequence: CAG
aagcagtattcttatacatc

SEQ ID NO: 163025 - DNA, 20 bp, Artificial Sequence
  Description of Artificial Sequence: Synthetic oligonucleotide
  Target: LAMA2; (+) strand; PAM type: NRG; PAM sequence: CAG
tattcttatacatccagcca

SEQ ID NO: 163026 - DNA, 20 bp, Artificial Sequence
  Description of Artificial Sequence: Synthetic oligonucleotide
  Target: LAMA2; (+) strand; PAM type: NRG; PAM sequence: GAG
acagccttcacccaaatcat

SEQ ID NO: 163027 - DNA, 20 bp, Artificial Sequence
  Description of Artificial Sequence: Synthetic oligonucleotide
  Target: LAMA2; (+) strand; PAM type: NRG; PAM sequence: AAG
cttcacccaaatcatgagct

SEQ ID NO: 163028 - DNA, 20 bp, Artificial Sequence
  Description of Artificial Sequence: Synthetic oligonucleotide
  Target: LAMA2; (+) strand; PAM type: NRG; PAM sequence: TAG
tgagctaagaaaatatcact

SEQ ID NO: 163029 - DNA, 20 bp, Artificial Sequence
  Description of Artificial Sequence: Synthetic oligonucleotide
  Target: LAMA2; (+) strand; PAM type: NRG; PAM sequence: CAG
aaatatcacttagcattctg

SEQ ID NO: 163030 - DNA, 20 bp, Artificial Sequence
  Description of Artificial Sequence: Synthetic oligonucleotide
  Target: LAMA2; (+) strand; PAM type: NRG; PAM sequence: AAG
acttagcattctgcagatga

SEQ ID NO: 163031 - DNA, 20 bp, Artificial Sequence
  Description of Artificial Sequence: Synthetic oligonucleotide
  Target: LAMA2; (+) strand; PAM type: NRG; PAM sequence: AAG
gcattctgcagatgaaagta

SEQ ID NO: 163032 - DNA, 20 bp, Artificial Sequence
  Description of Artificial Sequence: Synthetic oligonucleotide
  Target: LAMA2; (+) strand; PAM type: NRG; PAM sequence: GAG
attctgcagatgaaagtaaa

SEQ ID NO: 163033 - DNA, 20 bp, Artificial Sequence
  Description of Artificial Sequence: Synthetic oligonucleotide
  Target: LAMA2; (+) strand; PAM type: NRG; PAM sequence: TAG
tgaaagtaaagagtgaacat

SEQ ID NO: 163034 - DNA, 20 bp, Artificial Sequence
  Description of Artificial Sequence: Synthetic oligonucleotide
  Target: LAMA2; (+) strand; PAM type: NRG; PAM sequence: TAG
acccttattccaacaatcac

SEQ ID NO: 163035 - DNA, 20 bp, Artificial Sequence
  Description of Artificial Sequence: Synthetic oligonucleotide
  Target: LAMA2; (+) strand; PAM type: NRG; PAM sequence: TGG
acctttgtttactaatgtca

SEQ ID NO: 163036 - DNA, 20 bp, Artificial Sequence
  Description of Artificial Sequence: Synthetic oligonucleotide
  Target: LAMA2; (+) strand; PAM type: NRG; PAM sequence: TGG
ctaatgtcatggattcaacc

SEQ ID NO: 163037 - DNA, 20 bp, Artificial Sequence
  Description of Artificial Sequence: Synthetic oligonucleotide
  Target: LAMA2; (+) strand; PAM type: NRG; PAM sequence: CAG
ggataatgctcacatactct

SEQ ID NO: 163038 - DNA, 20 bp, Artificial Sequence
  Description of Artificial Sequence: Synthetic oligonucleotide
  Target: LAMA2; (+) strand; PAM type: NRG; PAM sequence: TGG
ctcacatactctcagcacca

SEQ ID NO: 163039 - DNA, 20 bp, Artificial Sequence
  Description of Artificial Sequence: Synthetic oligonucleotide
  Target: LAMA2; (+) strand; PAM type: NRG; PAM sequence: AAG
catactctcagcaccatggt

SEQ ID NO: 163040 - DNA, 20 bp, Artificial Sequence
  Description of Artificial Sequence: Synthetic oligonucleotide
  Target: LAMA2; (+) strand; PAM type: NRG; PAM sequence: TGG
aacattgttattcactgttg

SEQ ID NO: 163041 - DNA, 20 bp, Artificial Sequence
  Description of Artificial Sequence: Synthetic oligonucleotide
  Target: LAMA2; (+) strand; PAM type: NRG; PAM sequence: AAG
ttcactgttgtggcaaattt

SEQ ID NO: 163042 - DNA, 20 bp, Artificial Sequence
  Description of Artificial Sequence: Synthetic oligonucleotide
  Target: LAMA2; (+) strand; PAM type: NRG; PAM sequence: TAG
actgttgtggcaaatttaag

SEQ ID NO: 163043 - DNA, 20 bp, Artificial Sequence
  Description of Artificial Sequence: Synthetic oligonucleotide
  Target: LAMA2; (+) strand; PAM type: NRG; PAM sequence: AGG
ctgttgtggcaaatttaagt

SEQ ID NO: 163044 - DNA, 20 bp, Artificial Sequence
  Description of Artificial Sequence: Synthetic oligonucleotide
  Target: LAMA2; (+) strand; PAM type: NRG; PAM sequence: AAG
ttgtggcaaatttaagtagg

SEQ ID NO: 163045 - DNA, 20 bp, Artificial Sequence
  Description of Artificial Sequence: Synthetic oligonucleotide
  Target: LAMA2; (+) strand; PAM type: NRG; PAM sequence: CAG
tggcaaatttaagtaggaag

SEQ ID NO: 163046 - DNA, 20 bp, Artificial Sequence
  Description of Artificial Sequence: Synthetic oligonucleotide
  Target: LAMA2; (+) strand; PAM type: NRG; PAM sequence: TAG
caaatttaagtaggaagcag

SEQ ID NO: 163047 - DNA, 20 bp, Artificial Sequence
  Description of Artificial Sequence: Synthetic oligonucleotide
  Target: LAMA2; (+) strand; PAM type: NRG; PAM sequence: AGG
aaatttaagtaggaagcagt

SEQ ID NO: 163048 - DNA, 20 bp, Artificial Sequence
  Description of Artificial Sequence: Synthetic oligonucleotide
  Target: LAMA2; (+) strand; PAM type: NRG; PAM sequence: AAG
ataatatttaaaactattta

SEQ ID NO: 163049 - DNA, 20 bp, Artificial Sequence
  Description of Artificial Sequence: Synthetic oligonucleotide
  Target: LAMA2; (+) strand; PAM type: NRG; PAM sequence: CAG
tttaaagaaccaatatcttt

SEQ ID NO: 163050 - DNA, 20 bp, Artificial Sequence
  Description of Artificial Sequence: Synthetic oligonucleotide
  Target: LAMA2; (+) strand; PAM type: NRG; PAM sequence: CAG
aatatctttcagacattctc

SEQ ID NO: 163051 - DNA, 20 bp, Artificial Sequence
  Description of Artificial Sequence: Synthetic oligonucleotide
  Target: LAMA2; (+) strand; PAM type: NRG; PAM sequence: TAG
tcagacattctccagcactt

SEQ ID NO: 163052 - DNA, 20 bp, Artificial Sequence
  Description of Artificial Sequence: Synthetic oligonucleotide
  Target: LAMA2; (+) strand; PAM type: NRG; PAM sequence: TGG
tctccagcactttagatatg

SEQ ID NO: 163053 - DNA, 20 bp, Artificial Sequence
  Description of Artificial Sequence: Synthetic oligonucleotide
  Target: LAMA2; (+) strand; PAM type: NRG; PAM sequence: AAG
tgtggattttaccataaatt

SEQ ID NO: 163054 - DNA, 20 bp, Artificial Sequence
  Description of Artificial Sequence: Synthetic oligonucleotide
  Target: LAMA2; (+) strand; PAM type: NRG; PAM sequence: AAG
accataaattaagccatgat

SEQ ID NO: 163055 - DNA, 20 bp, Artificial Sequence
  Description of Artificial Sequence: Synthetic oligonucleotide
  Target: LAMA2; (+) strand; PAM type: NRG; PAM sequence: AAG
gataagttattctaattgat

SEQ ID NO: 163056 - DNA, 20 bp, Artificial Sequence
  Description of Artificial Sequence: Synthetic oligonucleotide
  Target: LAMA2; (+) strand; PAM type: NRG; PAM sequence: AAG
gataagttattctaattgat

SEQ ID NO: 163057 - DNA, 20 bp, Artificial Sequence
  Description of Artificial Sequence: Synthetic oligonucleotide
  Target: LAMA2; (+) strand; PAM type: NRG; PAM sequence: AAG
gataagttattctaaatgat

SEQ ID NO: 163058 - DNA, 20 bp, Artificial Sequence
  Description of Artificial Sequence: Synthetic oligonucleotide
  Target: LAMA2; (+) strand; PAM type: NRG; PAM sequence: TAG
aaatgataagtttataattg

SEQ ID NO: 163059 - DNA, 20 bp, Artificial Sequence
  Description of Artificial Sequence: Synthetic oligonucleotide
  Target: LAMA2; (+) strand; PAM type: NRG; PAM sequence: AAG
tttataattgtagatcctct

SEQ ID NO: 163060 - DNA, 20 bp, Artificial Sequence
  Description of Artificial Sequence: Synthetic oligonucleotide
  Target: LAMA2; (+) strand; PAM type: NRG; PAM sequence: AAG
ctaagaatctgtatatctct

SEQ ID NO: 163061 - DNA, 20 bp, Artificial Sequence
  Description of Artificial Sequence: Synthetic oligonucleotide
  Target: LAMA2; (+) strand; PAM type: NRG; PAM sequence: AAG
tgtataacttaaaaattata

SEQ ID NO: 163062 - DNA, 20 bp, Artificial Sequence
  Description of Artificial Sequence: Synthetic oligonucleotide
  Target: LAMA2; (+) strand; PAM type: NRG; PAM sequence: AAG
tactctgttctttaaatcca

SEQ ID NO: 163063 - DNA, 20 bp, Artificial Sequence
  Description of Artificial Sequence: Synthetic oligonucleotide
  Target: LAMA2; (+) strand; PAM type: NRG; PAM sequence: GAG
tttacttaatatgaattaat

SEQ ID NO: 163064 - DNA, 20 bp, Artificial Sequence
  Description of Artificial Sequence: Synthetic oligonucleotide
  Target: LAMA2; (+) strand; PAM type: NRG; PAM sequence: AGG
ttacttaatatgaattaatg

SEQ ID NO: 163065 - DNA, 20 bp, Artificial Sequence
  Description of Artificial Sequence: Synthetic oligonucleotide
  Target: LAMA2; (+) strand; PAM type: NRG; PAM sequence: TAG
cttaatatgaattaatgagg

SEQ ID NO: 163066 - DNA, 20 bp, Artificial Sequence
  Description of Artificial Sequence: Synthetic oligonucleotide
  Target: LAMA2; (+) strand; PAM type: NRG; PAM sequence: TAG
attatacatttaaatacata

SEQ ID NO: 163067 - DNA, 20 bp, Artificial Sequence
  Description of Artificial Sequence: Synthetic oligonucleotide
  Target: LAMA2; (+) strand; PAM type: NRG; PAM sequence: GAG
tatagtaacaaattataaat

SEQ ID NO: 163068 - DNA, 20 bp, Artificial Sequence
  Description of Artificial Sequence: Synthetic oligonucleotide
  Target: LAMA2; (+) strand; PAM type: NRG; PAM sequence: AAG
aacaaattataaatgagacc

SEQ ID NO: 163069 - DNA, 20 bp, Artificial Sequence
  Description of Artificial Sequence: Synthetic oligonucleotide
  Target: LAMA2; (+) strand; PAM type: NRG; PAM sequence: TAG
aagaatattattttaaatta

SEQ ID NO: 163070 - DNA, 20 bp, Artificial Sequence
  Description of Artificial Sequence: Synthetic oligonucleotide
  Target: LAMA2; (+) strand; PAM type: NRG; PAM sequence: AAG
atattattttaaattataga

SEQ ID NO: 163071 - DNA, 20 bp, Artificial Sequence
  Description of Artificial Sequence: Synthetic oligonucleotide
  Target: LAMA2; (+) strand; PAM type: NRG; PAM sequence: CAG
tttaaattatagaaagatga

SEQ ID NO: 163072 - DNA, 20 bp, Artificial Sequence
  Description of Artificial Sequence: Synthetic oligonucleotide
  Target: LAMA2; (+) strand; PAM type: NRG; PAM sequence: CAG
atgacagcatttaataaatg

SEQ ID NO: 163073 - DNA, 20 bp, Artificial Sequence
  Description of Artificial Sequence: Synthetic oligonucleotide
  Target: LAMA2; (+) strand; PAM type: NRG; PAM sequence: TAG
tttaataaatgcagacctac

SEQ ID NO: 163074 - DNA, 20 bp, Artificial Sequence
  Description of Artificial Sequence: Synthetic oligonucleotide
  Target: LAMA2; (+) strand; PAM type: NRG; PAM sequence: TGG
atgcagacctactagcattc

SEQ ID NO: 163075 - DNA, 20 bp, Artificial Sequence
  Description of Artificial Sequence: Synthetic oligonucleotide
  Target: LAMA2; (+) strand; PAM type: NRG; PAM sequence: AAG
cctactagcattctggccca

SEQ ID NO: 163076 - DNA, 20 bp, Artificial Sequence
  Description of Artificial Sequence: Synthetic oligonucleotide
  Target: LAMA2; (+) strand; PAM type: NRG; PAM sequence: TAG
tctggcccaaagaaacacca

SEQ ID NO: 163077 - DNA, 20 bp, Artificial Sequence
  Description of Artificial Sequence: Synthetic oligonucleotide
  Target: LAMA2; (+) strand; PAM type: NRG; PAM sequence: AAG
gaaacaccatagaaaaaaaa

SEQ ID NO: 163078 - DNA, 20 bp, Artificial Sequence
  Description of Artificial Sequence: Synthetic oligonucleotide
  Target: LAMA2; (+) strand; PAM type: NRG; PAM sequence: CAG
agaaaaaaaaaagcacaaaa

SEQ ID NO: 163079 - DNA, 20 bp, Artificial Sequence
  Description of Artificial Sequence: Synthetic oligonucleotide
  Target: LAMA2; (+) strand; PAM type: NRG; PAM sequence: AGG
gaaaaaaaaaagcacaaaac

SEQ ID NO: 163080 - DNA, 20 bp, Artificial Sequence
  Description of Artificial Sequence: Synthetic oligonucleotide
  Target: LAMA2; (+) strand; PAM type: NRG; PAM sequence: AAG
aaaaaaaagcacaaaacagg

SEQ ID NO: 163081 - DNA, 20 bp, Artificial Sequence
  Description of Artificial Sequence: Synthetic oligonucleotide
  Target: LAMA2; (+) strand; PAM type: NRG; PAM sequence: TAG
aaagcacaaaacaggaagaa

SEQ ID NO: 163082 - DNA, 20 bp, Artificial Sequence
  Description of Artificial Sequence: Synthetic oligonucleotide
  Target: LAMA2; (+) strand; PAM type: NRG; PAM sequence: GAG
ggaagaatagtaatatgact

SEQ ID NO: 163083 - DNA, 20 bp, Artificial Sequence
  Description of Artificial Sequence: Synthetic oligonucleotide
  Target: LAMA2; (+) strand; PAM type: NRG; PAM sequence: AGG
gaagaatagtaatatgactg

SEQ ID NO: 163084 - DNA, 20 bp, Artificial Sequence
  Description of Artificial Sequence: Synthetic oligonucleotide
  Target: LAMA2; (+) strand; PAM type: NRG; PAM sequence: TAG
aggacatgacttgcacaaaa

SEQ ID NO: 163085 - DNA, 20 bp, Artificial Sequence
  Description of Artificial Sequence: Synthetic oligonucleotide
  Target: LAMA2; (+) strand; PAM type: NRG; PAM sequence: TGG
atgacttgcacaaaatagcc

SEQ ID NO: 163086 - DNA, 20 bp, Artificial Sequence
  Description of Artificial Sequence: Synthetic oligonucleotide
  Target: LAMA2; (+) strand; PAM type: NRG; PAM sequence: TGG
atagcctggatttgtctaaa

SEQ ID NO: 163087 - DNA, 20 bp, Artificial Sequence
  Description of Artificial Sequence: Synthetic oligonucleotide
  Target: LAMA2; (+) strand; PAM type: NRG; PAM sequence: CAG
atttgtctaaatggctcctt

SEQ ID NO: 163088 - DNA, 20 bp, Artificial Sequence
  Description of Artificial Sequence: Synthetic oligonucleotide
  Target: LAMA2; (+) strand; PAM type: NRG; PAM sequence: TAG
taaatggctccttcagtaac

SEQ ID NO: 163089 - DNA, 20 bp, Artificial Sequence
  Description of Artificial Sequence: Synthetic oligonucleotide
  Target: LAMA2; (+) strand; PAM type: NRG; PAM sequence: TGG
gctccttcagtaactagttc

SEQ ID NO: 163090 - DNA, 20 bp, Artificial Sequence
  Description of Artificial Sequence: Synthetic oligonucleotide
  Target: LAMA2; (+) strand; PAM type: NRG; PAM sequence: GGG
ctccttcagtaactagttct

SEQ ID NO: 163091 - DNA, 20 bp, Artificial Sequence
  Description of Artificial Sequence: Synthetic oligonucleotide
  Target: LAMA2; (+) strand; PAM type: NRG; PAM sequence: GAG
ctagttctgggaccttgact

SEQ ID NO: 163092 - DNA, 20 bp, Artificial Sequence
  Description of Artificial Sequence: Synthetic oligonucleotide
  Target: LAMA2; (+) strand; PAM type: NRG; PAM sequence: AAG
caaaattcatctattaaatt

SEQ ID NO: 163093 - DNA, 20 bp, Artificial Sequence
  Description of Artificial Sequence: Synthetic oligonucleotide
  Target: LAMA2; (+) strand; PAM type: NRG; PAM sequence: TAG
ctattaaattaagataataa

SEQ ID NO: 163094 - DNA, 20 bp, Artificial Sequence
  Description of Artificial Sequence: Synthetic oligonucleotide
  Target: LAMA2; (+) strand; PAM type: NRG; PAM sequence: TGG
ataatagtatctaccacaca

SEQ ID NO: 163095 - DNA, 20 bp, Artificial Sequence
  Description of Artificial Sequence: Synthetic oligonucleotide
  Target: LAMA2; (+) strand; PAM type: NRG; PAM sequence: TAG
cacatggtttttgttacaat

SEQ ID NO: 163096 - DNA, 20 bp, Artificial Sequence
  Description of Artificial Sequence: Synthetic oligonucleotide
  Target: LAMA2; (+) strand; PAM type: NRG; PAM sequence: GAG
ggtttttgttacaattagtt

SEQ ID NO: 163097 - DNA, 20 bp, Artificial Sequence
  Description of Artificial Sequence: Synthetic oligonucleotide
  Target: LAMA2; (+) strand; PAM type: NRG; PAM sequence: TAG
tttgttacaattagttgagt

SEQ ID NO: 163098 - DNA, 20 bp, Artificial Sequence
  Description of Artificial Sequence: Synthetic oligonucleotide
  Target: LAMA2; (+) strand; PAM type: NRG; PAM sequence: CGG
gttacaattagttgagttag

SEQ ID NO: 163099 - DNA, 20 bp, Artificial Sequence
  Description of Artificial Sequence: Synthetic oligonucleotide
  Target: LAMA2; (+) strand; PAM type: NRG; PAM sequence: TAG
gttagcggctataaaatatt

SEQ ID NO: 163100 - DNA, 20 bp, Artificial Sequence
  Description of Artificial Sequence: Synthetic oligonucleotide
  Target: LAMA2; (+) strand; PAM type: NRG; PAM sequence: GAG
tagcggctataaaatattta

SEQ ID NO: 163101 - DNA, 20 bp, Artificial Sequence
  Description of Artificial Sequence: Synthetic oligonucleotide
  Target: LAMA2; (+) strand; PAM type: NRG; PAM sequence: TAG
aaaatatttagagtaatgcc

SEQ ID NO: 163102 - DNA, 20 bp, Artificial Sequence
  Description of Artificial Sequence: Synthetic oligonucleotide
  Target: LAMA2; (+) strand; PAM type: NRG; PAM sequence: AAG
tagagtaatgcctagcatgt

SEQ ID NO: 163103 - DNA, 20 bp, Artificial Sequence
  Description of Artificial Sequence: Synthetic oligonucleotide
  Target: LAMA2; (+) strand; PAM type: NRG; PAM sequence: TGG
tgcctagcatgtaagtgcta

SEQ ID NO: 163104 - DNA, 20 bp, Artificial Sequence
  Description of Artificial Sequence: Synthetic oligonucleotide
  Target: LAMA2; (+) strand; PAM type: NRG; PAM sequence: AAG
ctagcatgtaagtgctatgg

SEQ ID NO: 163105 - DNA, 20 bp, Artificial Sequence
  Description of Artificial Sequence: Synthetic oligonucleotide
  Target: LAMA2; (+) strand; PAM type: NRG; PAM sequence: TAG
attattattattatctttat

SEQ ID NO: 163106 - DNA, 20 bp, Artificial Sequence
  Description of Artificial Sequence: Synthetic oligonucleotide
  Target: LAMA2; (+) strand; PAM type: NRG; PAM sequence: TGG
ttgtgttatacattgtgctt

SEQ ID NO: 163107 - DNA, 20 bp, Artificial Sequence
  Description of Artificial Sequence: Synthetic oligonucleotide
  Target: LAMA2; (+) strand; PAM type: NRG; PAM sequence: CAG
ttatacattgtgctttggca

SEQ ID NO: 163108 - DNA, 20 bp, Artificial Sequence
  Description of Artificial Sequence: Synthetic oligonucleotide
  Target: LAMA2; (+) strand; PAM type: NRG; PAM sequence: AGG
tatacattgtgctttggcac

SEQ ID NO: 163109 - DNA, 20 bp, Artificial Sequence
  Description of Artificial Sequence: Synthetic oligonucleotide
  Target: LAMA2; (+) strand; PAM type: NRG; PAM sequence: TAG
gtgctttggcacaggaaaac

SEQ ID NO: 163110 - DNA, 20 bp, Artificial Sequence
  Description of Artificial Sequence: Synthetic oligonucleotide
  Target: LAMA2; (+) strand; PAM type: NRG; PAM sequence: CAG
aggaaaactagctaattact

SEQ ID NO: 163111 - DNA, 20 bp, Artificial Sequence
  Description of Artificial Sequence: Synthetic oligonucleotide
  Target: LAMA2; (+) strand; PAM type: NRG; PAM sequence: AGG
ggaaaactagctaattactc

SEQ ID NO: 163112 - DNA, 20 bp, Artificial Sequence
  Description of Artificial Sequence: Synthetic oligonucleotide
  Target: LAMA2; (+) strand; PAM type: NRG; PAM sequence: TAG
actcaggttttctttctatt

SEQ ID NO: 163113 - DNA, 20 bp, Artificial Sequence
  Description of Artificial Sequence: Synthetic oligonucleotide
  Target: LAMA2; (+) strand; PAM type: NRG; PAM sequence: AAG
ttagtgttatgattccgctg

SEQ ID NO: 163114 - DNA, 20 bp, Artificial Sequence
  Description of Artificial Sequence: Synthetic oligonucleotide
  Target: LAMA2; (+) strand; PAM type: NRG; PAM sequence: AAG
attccgctgaagaactactt

SEQ ID NO: 163115 - DNA, 20 bp, Artificial Sequence
  Description of Artificial Sequence: Synthetic oligonucleotide
  Target: LAMA2; (+) strand; PAM type: NRG; PAM sequence: AAG
ttaagataatttctatttgc

SEQ ID NO: 163116 - DNA, 20 bp, Artificial Sequence
  Description of Artificial Sequence: Synthetic oligonucleotide
  Target: LAMA2; (+) strand; PAM type: NRG; PAM sequence: TAG
cactgtcccatgacattttt

SEQ ID NO: 163117 - DNA, 20 bp, Artificial Sequence
  Description of Artificial Sequence: Synthetic oligonucleotide
  Target: LAMA2; (+) strand; PAM type: NRG; PAM sequence: TGG
gcatataaatttaaacataa

SEQ ID NO: 163118 - DNA, 20 bp, Artificial Sequence
  Description of Artificial Sequence: Synthetic oligonucleotide
  Target: LAMA2; (+) strand; PAM type: NRG; PAM sequence: AAG
aactatttttcttcttaatg

SEQ ID NO: 163119 - DNA, 20 bp, Artificial Sequence
  Description of Artificial Sequence: Synthetic oligonucleotide
  Target: LAMA2; (+) strand; PAM type: NRG; PAM sequence: AGG
actatttttcttcttaatga

SEQ ID NO: 163120 - DNA, 20 bp, Artificial Sequence
  Description of Artificial Sequence: Synthetic oligonucleotide
  Target: LAMA2; (+) strand; PAM type: NRG; PAM sequence: TGG
cacatctaaaataaatcatt

SEQ ID NO: 163121 - DNA, 20 bp, Artificial Sequence
  Description of Artificial Sequence: Synthetic oligonucleotide
  Target: LAMA2; (+) strand; PAM type: NRG; PAM sequence: TAG
taaatcatttggcttaaaat

SEQ ID NO: 163122 - DNA, 20 bp, Artificial Sequence
  Description of Artificial Sequence: Synthetic oligonucleotide
  Target: LAMA2; (+) strand; PAM type: NRG; PAM sequence: CAG
tggcttaaaattagcaacaa

SEQ ID NO: 163123 - DNA, 20 bp, Artificial Sequence
  Description of Artificial Sequence: Synthetic oligonucleotide
  Target: LAMA2; (+) strand; PAM type: NRG; PAM sequence: CAG
aacaacagtaataaccaaaa

SEQ ID NO: 163124 - DNA, 20 bp, Artificial Sequence
  Description of Artificial Sequence: Synthetic oligonucleotide
  Target: LAMA2; (+) strand; PAM type: NRG; PAM sequence: TAG
agcaatgactaacatttatt

SEQ ID NO: 163125 - DNA, 20 bp, Artificial Sequence
  Description of Artificial Sequence: Synthetic oligonucleotide
  Target: LAMA2; (+) strand; PAM type: NRG; PAM sequence: CGG
acatttatttagtgtttact

SEQ ID NO: 163126 - DNA, 20 bp, Artificial Sequence
  Description of Artificial Sequence: Synthetic oligonucleotide
  Target: LAMA2; (+) strand; PAM type: NRG; PAM sequence: AAG
tttagtgtttactcggtgta

SEQ ID NO: 163127 - DNA, 20 bp, Artificial Sequence
  Description of Artificial Sequence: Synthetic oligonucleotide
  Target: LAMA2; (+) strand; PAM type: NRG; PAM sequence: CAG
atttttctaaacaccttcca

SEQ ID NO: 163128 - DNA, 20 bp, Artificial Sequence
  Description of Artificial Sequence: Synthetic oligonucleotide
  Target: LAMA2; (+) strand; PAM type: NRG; PAM sequence: TGG
ttctaaacaccttccacagc

SEQ ID NO: 163129 - DNA, 20 bp, Artificial Sequence
  Description of Artificial Sequence: Synthetic oligonucleotide
  Target: LAMA2; (+) strand; PAM type: NRG; PAM sequence: GAG
cagctggtgtgtaatgctgt

SEQ ID NO: 163130 - DNA, 20 bp, Artificial Sequence
  Description of Artificial Sequence: Synthetic oligonucleotide
  Target: LAMA2; (+) strand; PAM type: NRG; PAM sequence: AAG
gaatattgtcatttcataaa

SEQ ID NO: 163131 - DNA, 20 bp, Artificial Sequence
  Description of Artificial Sequence: Synthetic oligonucleotide
  Target: LAMA2; (+) strand; PAM type: NRG; PAM sequence: TAG
catttcataaaaagtgaatt

SEQ ID NO: 163132 - DNA, 20 bp, Artificial Sequence
  Description of Artificial Sequence: Synthetic oligonucleotide
  Target: LAMA2; (+) strand; PAM type: NRG; PAM sequence: CAG
tcaaatattctaaatatatt

SEQ ID NO: 163133 - DNA, 20 bp, Artificial Sequence
  Description of Artificial Sequence: Synthetic oligonucleotide
  Target: LAMA2; (+) strand; PAM type: NRG; PAM sequence: TAG
tatattcagtgaaaatgatt

SEQ ID NO: 163134 - DNA, 20 bp, Artificial Sequence
  Description of Artificial Sequence: Synthetic oligonucleotide
  Target: LAMA2; (+) strand; PAM type: NRG; PAM sequence: AAG
gtcatcatataaccaattaa

SEQ ID NO: 163135 - DNA, 20 bp, Artificial Sequence
  Description of Artificial Sequence: Synthetic oligonucleotide
  Target: LAMA2; (+) strand; PAM type: NRG; PAM sequence: TAG
taaaagtttactcataacat

SEQ ID NO: 163136 - DNA, 20 bp, Artificial Sequence
  Description of Artificial Sequence: Synthetic oligonucleotide
  Target: LAMA2; (+) strand; PAM type: NRG; PAM sequence: AAG
ttagtcttccatttgaattc

SEQ ID NO: 163137 - DNA, 20 bp, Artificial Sequence
  Description of Artificial Sequence: Synthetic oligonucleotide
  Target: LAMA2; (+) strand; PAM type: NRG; PAM sequence: TGG
tccatttgaattcaagtatt

SEQ ID NO: 163138 - DNA, 20 bp, Artificial Sequence
  Description of Artificial Sequence: Synthetic oligonucleotide
  Target: LAMA2; (+) strand; PAM type: NRG; PAM sequence: GGG
ccatttgaattcaagtattt

SEQ ID NO: 163139 - DNA, 20 bp, Artificial Sequence
  Description of Artificial Sequence: Synthetic oligonucleotide
  Target: LAMA2; (+) strand; PAM type: NRG; PAM sequence: TAG
tttgacatgaaacgctgcac

SEQ ID NO: 163140 - DNA, 20 bp, Artificial Sequence
  Description of Artificial Sequence: Synthetic oligonucleotide
  Target: LAMA2; (+) strand; PAM type: NRG; PAM sequence: TAG
cgctgcactagaaatattct

SEQ ID NO: 163141 - DNA, 20 bp, Artificial Sequence
  Description of Artificial Sequence: Synthetic oligonucleotide
  Target: LAMA2; (+) strand; PAM type: NRG; PAM sequence: TAG
tgcactagaaatattcttag

SEQ ID NO: 163142 - DNA, 20 bp, Artificial Sequence
  Description of Artificial Sequence: Synthetic oligonucleotide
  Target: LAMA2; (+) strand; PAM type: NRG; PAM sequence: TGG
ctagaaatattcttagtagc

SEQ ID NO: 163143 - DNA, 20 bp, Artificial Sequence
  Description of Artificial Sequence: Synthetic oligonucleotide
  Target: LAMA2; (+) strand; PAM type: NRG; PAM sequence: GGG
tagaaatattcttagtagct

SEQ ID NO: 163144 - DNA, 20 bp, Artificial Sequence
  Description of Artificial Sequence: Synthetic oligonucleotide
  Target: LAMA2; (+) strand; PAM type: NRG; PAM sequence: TGG
ctgggtcaactgccgctatg

SEQ ID NO: 163145 - DNA, 20 bp, Artificial Sequence
  Description of Artificial Sequence: Synthetic oligonucleotide
  Target: LAMA2; (+) strand; PAM type: NRG; PAM sequence: TGG
gtggcatgcattccttgtct

SEQ ID NO: 163146 - DNA, 20 bp, Artificial Sequence
  Description of Artificial Sequence: Synthetic oligonucleotide
  Target: LAMA2; (+) strand; PAM type: NRG; PAM sequence: TGG
catgcattccttgtcttgga

SEQ ID NO: 163147 - DNA, 20 bp, Artificial Sequence
  Description of Artificial Sequence: Synthetic oligonucleotide
  Target: LAMA2; (+) strand; PAM type: NRG; PAM sequence: AAG
ccttgtcttggatggctttg

SEQ ID NO: 163148 - DNA, 20 bp, Artificial Sequence
  Description of Artificial Sequence: Synthetic oligonucleotide
  Target: LAMA2; (+) strand; PAM type: NRG; PAM sequence: AAG
tatttttgcaatctttgaaa

SEQ ID NO: 163149 - DNA, 20 bp, Artificial Sequence
  Description of Artificial Sequence: Synthetic oligonucleotide
  Target: LAMA2; (+) strand; PAM type: NRG; PAM sequence: AAG
caatctttgaaaaagtacaa

SEQ ID NO: 163150 - DNA, 20 bp, Artificial Sequence
  Description of Artificial Sequence: Synthetic oligonucleotide
  Target: LAMA2; (+) strand; PAM type: NRG; PAM sequence: AGG
aatctttgaaaaagtacaaa

SEQ ID NO: 163151 - DNA, 20 bp, Artificial Sequence
  Description of Artificial Sequence: Synthetic oligonucleotide
  Target: LAMA2; (+) strand; PAM type: NRG; PAM sequence: TAG
ctttgaaaaagtacaaaagg

SEQ ID NO: 163152 - DNA, 20 bp, Artificial Sequence
  Description of Artificial Sequence: Synthetic oligonucleotide
  Target: LAMA2; (+) strand; PAM type: NRG; PAM sequence: TAG
accctttgaatattgcatga

SEQ ID NO: 163153 - DNA, 20 bp, Artificial Sequence
  Description of Artificial Sequence: Synthetic oligonucleotide
  Target: LAMA2; (+) strand; PAM type: NRG; PAM sequence: TAG
caacaaaaatgaaaaatcta

SEQ ID NO: 163154 - DNA, 20 bp, Artificial Sequence
  Description of Artificial Sequence: Synthetic oligonucleotide
  Target: LAMA2; (+) strand; PAM type: NRG; PAM sequence: AAG
aatgaaaaatctatagaaaa

SEQ ID NO: 163155 - DNA, 20 bp, Artificial Sequence
  Description of Artificial Sequence: Synthetic oligonucleotide
  Target: LAMA2; (+) strand; PAM type: NRG; PAM sequence: CAG
aaaaatctatagaaaaaagt

SEQ ID NO: 163156 - DNA, 20 bp, Artificial Sequence
  Description of Artificial Sequence: Synthetic oligonucleotide
  Target: LAMA2; (+) strand; PAM type: NRG; PAM sequence: AGG
aaaatctatagaaaaaagtc

SEQ ID NO: 163157 - DNA, 20 bp, Artificial Sequence
  Description of Artificial Sequence: Synthetic oligonucleotide
  Target: LAMA2; (+) strand; PAM type: NRG; PAM sequence: TGG
atctatagaaaaaagtcagg

SEQ ID NO: 163158 - DNA, 20 bp, Artificial Sequence
  Description of Artificial Sequence: Synthetic oligonucleotide
  Target: LAMA2; (+) strand; PAM type: NRG; PAM sequence: AAG
aggtggtaaataaaaatcga

SEQ ID NO: 163159 - DNA, 20 bp, Artificial Sequence
  Description of Artificial Sequence: Synthetic oligonucleotide
  Target: LAMA2; (+) strand; PAM type: NRG; PAM sequence: CAG
aaagtatctttatatataaa

SEQ ID NO: 163160 - DNA, 20 bp, Artificial Sequence
  Description of Artificial Sequence: Synthetic oligonucleotide
  Target: LAMA2; (+) strand; PAM type: NRG; PAM sequence: AAG
tccataattcaaccatttta

SEQ ID NO: 163161 - DNA, 20 bp, Artificial Sequence
  Description of Artificial Sequence: Synthetic oligonucleotide
  Target: LAMA2; (+) strand; PAM type: NRG; PAM sequence: TGG
ttttaaagtatttgcaaaat

SEQ ID NO: 163162 - DNA, 20 bp, Artificial Sequence
  Description of Artificial Sequence: Synthetic oligonucleotide
  Target: LAMA2; (+) strand; PAM type: NRG; PAM sequence: AAG
atacatgatgtaccgaattt

SEQ ID NO: 163163 - DNA, 20 bp, Artificial Sequence
  Description of Artificial Sequence: Synthetic oligonucleotide
  Target: LAMA2; (+) strand; PAM type: NRG; PAM sequence: AAG
catgatgtaccgaatttaag

SEQ ID NO: 163164 - DNA, 20 bp, Artificial Sequence
  Description of Artificial Sequence: Synthetic oligonucleotide
  Target: LAMA2; (+) strand; PAM type: NRG; PAM sequence: AAG
ccgaatttaagaagcttatt

SEQ ID NO: 163165 - DNA, 20 bp, Artificial Sequence
  Description of Artificial Sequence: Synthetic oligonucleotide
  Target: LAMA2; (+) strand; PAM type: NRG; PAM sequence: TGG
aagaagcttattaagcttat

SEQ ID NO: 163166 - DNA, 20 bp, Artificial Sequence
  Description of Artificial Sequence: Synthetic oligonucleotide
  Target: LAMA2; (+) strand; PAM type: NRG; PAM sequence: CAG
aagcttattggtttttactg

SEQ ID NO: 163167 - DNA, 20 bp, Artificial Sequence
  Description of Artificial Sequence: Synthetic oligonucleotide
  Target: LAMA2; (+) strand; PAM type: NRG; PAM sequence: CGG
tattggtttttactgcagat

SEQ ID NO: 163168 - DNA, 20 bp, Artificial Sequence
  Description of Artificial Sequence: Synthetic oligonucleotide
  Target: LAMA2; (+) strand; PAM type: NRG; PAM sequence: GGG
attggtttttactgcagatc

SEQ ID NO: 163169 - DNA, 20 bp, Artificial Sequence
  Description of Artificial Sequence: Synthetic oligonucleotide
  Target: LAMA2; (+) strand; PAM type: NRG; PAM sequence: AAG
tactgcagatcgggctcatc

SEQ ID NO: 163170 - DNA, 20 bp, Artificial Sequence
  Description of Artificial Sequence: Synthetic oligonucleotide
  Target: LAMA2; (+) strand; PAM type: NRG; PAM sequence: AGG
actgcagatcgggctcatca

SEQ ID NO: 163171 - DNA, 20 bp, Artificial Sequence
  Description of Artificial Sequence: Synthetic oligonucleotide
  Target: LAMA2; (+) strand; PAM type: NRG; PAM sequence: CAG
caaggaaaaactaatccgta

SEQ ID NO: 163172 - DNA, 20 bp, Artificial Sequence
  Description of Artificial Sequence: Synthetic oligonucleotide
  Target: LAMA2; (+) strand; PAM type: NRG; PAM sequence: TAG
tccgtacagcataaacaaat

SEQ ID NO: 163173 - DNA, 20 bp, Artificial Sequence
  Description of Artificial Sequence: Synthetic oligonucleotide
  Target: LAMA2; (+) strand; PAM type: NRG; PAM sequence: TAG
aaataaatatacaaacaaaa

SEQ ID NO: 163174 - DNA, 20 bp, Artificial Sequence
  Description of Artificial Sequence: Synthetic oligonucleotide
  Target: LAMA2; (+) strand; PAM type: NRG; PAM sequence: TAG
aaacaaaatagtaaactttg

SEQ ID NO: 163175 - DNA, 20 bp, Artificial Sequence
  Description of Artificial Sequence: Synthetic oligonucleotide
  Target: LAMA2; (+) strand; PAM type: NRG; PAM sequence: AAG
actttgtagtacccgaatat

SEQ ID NO: 163176 - DNA, 20 bp, Artificial Sequence
  Description of Artificial Sequence: Synthetic oligonucleotide
  Target: LAMA2; (+) strand; PAM type: NRG; PAM sequence: AGG
ctttgtagtacccgaatata

SEQ ID NO: 163177 - DNA, 20 bp, Artificial Sequence
  Description of Artificial Sequence: Synthetic oligonucleotide
  Target: LAMA2; (+) strand; PAM type: NRG; PAM sequence: CAG
tacccgaatataaggtgtta

SEQ ID NO: 163178 - DNA, 20 bp, Artificial Sequence
  Description of Artificial Sequence: Synthetic oligonucleotide
  Target: LAMA2; (+) strand; PAM type: NRG; PAM sequence: TGG
ataaggtgttacagttaaca

SEQ ID NO: 163179 - DNA, 20 bp, Artificial Sequence
  Description of Artificial Sequence: Synthetic oligonucleotide
  Target: LAMA2; (+) strand; PAM type: NRG; PAM sequence: TAG
ctttcctttcttaaacttca

SEQ ID NO: 163180 - DNA, 20 bp, Artificial Sequence
  Description of Artificial Sequence: Synthetic oligonucleotide
  Target: LAMA2; (+) strand; PAM type: NRG; PAM sequence: AGG
tttcctttcttaaacttcat

SEQ ID NO: 163181 - DNA, 20 bp, Artificial Sequence
  Description of Artificial Sequence: Synthetic oligonucleotide
  Target: LAMA2; (+) strand; PAM type: NRG; PAM sequence: AAG
ctttcttaaacttcatagga

SEQ ID NO: 163182 - DNA, 20 bp, Artificial Sequence
  Description of Artificial Sequence: Synthetic oligonucleotide
  Target: LAMA2; (+) strand; PAM type: NRG; PAM sequence: CAG
tacatcttatatttattgaa

SEQ ID NO: 163183 - DNA, 20 bp, Artificial Sequence
  Description of Artificial Sequence: Synthetic oligonucleotide
  Target: LAMA2; (+) strand; PAM type: NRG; PAM sequence: AAG
tacattgtactataatataa

SEQ ID NO: 163184 - DNA, 20 bp, Artificial Sequence
  Description of Artificial Sequence: Synthetic oligonucleotide
  Target: LAMA2; (+) strand; PAM type: NRG; PAM sequence: AAG
tataatataaaagatgaatg

SEQ ID NO: 163185 - DNA, 20 bp, Artificial Sequence
  Description of Artificial Sequence: Synthetic oligonucleotide
  Target: LAMA2; (+) strand; PAM type: NRG; PAM sequence: AAG
atataaaagatgaatgaagt

SEQ ID NO: 163186 - DNA, 20 bp, Artificial Sequence
  Description of Artificial Sequence: Synthetic oligonucleotide
  Target: LAMA2; (+) strand; PAM type: NRG; PAM sequence: AAG
ttttatttccaaatatcctt

SEQ ID NO: 163187 - DNA, 20 bp, Artificial Sequence
  Description of Artificial Sequence: Synthetic oligonucleotide
  Target: LAMA2; (+) strand; PAM type: NRG; PAM sequence: TAG
tttccaaatatccttaagtg

SEQ ID NO: 163188 - DNA, 20 bp, Artificial Sequence
  Description of Artificial Sequence: Synthetic oligonucleotide
  Target: LAMA2; (+) strand; PAM type: NRG; PAM sequence: AAG
tccttaagtgtagaactgaa

SEQ ID NO: 163189 - DNA, 20 bp, Artificial Sequence
  Description of Artificial Sequence: Synthetic oligonucleotide
  Target: LAMA2; (+) strand; PAM type: NRG; PAM sequence: AAG
tgtagaactgaaaagaaaat

SEQ ID NO: 163190 - DNA, 20 bp, Artificial Sequence
  Description of Artificial Sequence: Synthetic oligonucleotide
  Target: LAMA2; (+) strand; PAM type: NRG; PAM sequence: CGG
ctttgttttccctcttatac

SEQ ID NO: 163191 - DNA, 20 bp, Artificial Sequence
  Description of Artificial Sequence: Synthetic oligonucleotide
  Target: LAMA2; (+) strand; PAM type: NRG; PAM sequence: AAG
ttttccctcttataccggtg

SEQ ID NO: 163192 - DNA, 20 bp, Artificial Sequence
  Description of Artificial Sequence: Synthetic oligonucleotide
  Target: LAMA2; (+) strand; PAM type: NRG; PAM sequence: TGG
agcttgtgaatgttctcatc

SEQ ID NO: 163193 - DNA, 20 bp, Artificial Sequence
  Description of Artificial Sequence: Synthetic oligonucleotide
  Target: LAMA2; (+) strand; PAM type: NRG; PAM sequence: GGG
gcttgtgaatgttctcatct

SEQ ID NO: 163194 - DNA, 20 bp, Artificial Sequence
  Description of Artificial Sequence: Synthetic oligonucleotide
  Target: LAMA2; (+) strand; PAM type: NRG; PAM sequence: AAG
tgggtaataattgtgaccca

SEQ ID NO: 163195 - DNA, 20 bp, Artificial Sequence
  Description of Artificial Sequence: Synthetic oligonucleotide
  Target: LAMA2; (+) strand; PAM type: NRG; PAM sequence: TGG
aataattgtgacccaaagac

SEQ ID NO: 163196 - DNA, 20 bp, Artificial Sequence
  Description of Artificial Sequence: Synthetic oligonucleotide
  Target: LAMA2; (+) strand; PAM type: NRG; PAM sequence: GGG
ataattgtgacccaaagact

SEQ ID NO: 163197 - DNA, 20 bp, Artificial Sequence
  Description of Artificial Sequence: Synthetic oligonucleotide
  Target: LAMA2; (+) strand; PAM type: NRG; PAM sequence: TGG
atttgccctcccaataccat

SEQ ID NO: 163198 - DNA, 20 bp, Artificial Sequence
  Description of Artificial Sequence: Synthetic oligonucleotide
  Target: LAMA2; (+) strand; PAM type: NRG; PAM sequence: GAG
ttgccctcccaataccattg

SEQ ID NO: 163199 - DNA, 20 bp, Artificial Sequence
  Description of Artificial Sequence: Synthetic oligonucleotide
  Target: LAMA2; (+) strand; PAM type: NRG; PAM sequence: GAG
gccctcccaataccattgga

SEQ ID NO: 163200 - DNA, 20 bp, Artificial Sequence
  Description of Artificial Sequence: Synthetic oligonucleotide
  Target: LAMA2; (+) strand; PAM type: NRG; PAM sequence: TGG
ctaaatgtgcacccaatacc

SEQ ID NO: 163201 - DNA, 20 bp, Artificial Sequence
  Description of Artificial Sequence: Synthetic oligonucleotide
  Target: LAMA2; (+) strand; PAM type: NRG; PAM sequence: GGG
taaatgtgcacccaatacct

SEQ ID NO: 163202 - DNA, 20 bp, Artificial Sequence
  Description of Artificial Sequence: Synthetic oligonucleotide
  Target: LAMA2; (+) strand; PAM type: NRG; PAM sequence: GGG
aaatgtgcacccaatacctg

SEQ ID NO: 163203 - DNA, 20 bp, Artificial Sequence
  Description of Artificial Sequence: Synthetic oligonucleotide
  Target: LAMA2; (+) strand; PAM type: NRG; PAM sequence: CAG
gcacccaatacctggggcca

SEQ ID NO: 163204 - DNA, 20 bp, Artificial Sequence
  Description of Artificial Sequence: Synthetic oligonucleotide
  Target: LAMA2; (+) strand; PAM type: NRG; PAM sequence: TGG
tggggccacagcattaccac

SEQ ID NO: 163205 - DNA, 20 bp, Artificial Sequence
  Description of Artificial Sequence: Synthetic oligonucleotide
  Target: LAMA2; (+) strand; PAM type: NRG; PAM sequence: AAG
acagcattaccactggttgt

SEQ ID NO: 163206 - DNA, 20 bp, Artificial Sequence
  Description of Artificial Sequence: Synthetic oligonucleotide
  Target: LAMA2; (+) strand; PAM type: NRG; PAM sequence: AGG
cagcattaccactggttgta

SEQ ID NO: 163207 - DNA, 20 bp, Artificial Sequence
  Description of Artificial Sequence: Synthetic oligonucleotide
  Target: LAMA2; (+) strand; PAM type: NRG; PAM sequence: GAG
attaccactggttgtaaggt

SEQ ID NO: 163208 - DNA, 20 bp, Artificial Sequence
  Description of Artificial Sequence: Synthetic oligonucleotide
  Target: LAMA2; (+) strand; PAM type: NRG; PAM sequence: TGG
tttttgctctgataattttt

SEQ ID NO: 163209 - DNA, 20 bp, Artificial Sequence
  Description of Artificial Sequence: Synthetic oligonucleotide
  Target: LAMA2; (+) strand; PAM type: NRG; PAM sequence: GAG
tttgctctgataattttttg

SEQ ID NO: 163210 - DNA, 20 bp, Artificial Sequence
  Description of Artificial Sequence: Synthetic oligonucleotide
  Target: LAMA2; (+) strand; PAM type: NRG; PAM sequence: GAG
tgctctgataattttttgga

SEQ ID NO: 163211 - DNA, 20 bp, Artificial Sequence
  Description of Artificial Sequence: Synthetic oligonucleotide
  Target: LAMA2; (+) strand; PAM type: NRG; PAM sequence: TAG
ttggagagatttttgttttg

SEQ ID NO: 163212 - DNA, 20 bp, Artificial Sequence
  Description of Artificial Sequence: Synthetic oligonucleotide
  Target: LAMA2; (+) strand; PAM type: NRG; PAM sequence: GAG
ggagagatttttgttttgta

SEQ ID NO: 163213 - DNA, 20 bp, Artificial Sequence
  Description of Artificial Sequence: Synthetic oligonucleotide
  Target: LAMA2; (+) strand; PAM type: NRG; PAM sequence: TGG
gttttgtagagctctgtaat

SEQ ID NO: 163214 - DNA, 20 bp, Artificial Sequence
  Description of Artificial Sequence: Synthetic oligonucleotide
  Target: LAMA2; (+) strand; PAM type: NRG; PAM sequence: GGG
ttttgtagagctctgtaatt

SEQ ID NO: 163215 - DNA, 20 bp, Artificial Sequence
  Description of Artificial Sequence: Synthetic oligonucleotide
  Target: LAMA2; (+) strand; PAM type: NRG; PAM sequence: TAG
tattacatcacaaaataatg

SEQ ID NO: 163216 - DNA, 20 bp, Artificial Sequence
  Description of Artificial Sequence: Synthetic oligonucleotide
  Target: LAMA2; (+) strand; PAM type: NRG; PAM sequence: AAG
tacatcacaaaataatgtag

SEQ ID NO: 163217 - DNA, 20 bp, Artificial Sequence
  Description of Artificial Sequence: Synthetic oligonucleotide
  Target: LAMA2; (+) strand; PAM type: NRG; PAM sequence: CAG
gtattactataatgtgatta

SEQ ID NO: 163218 - DNA, 20 bp, Artificial Sequence
  Description of Artificial Sequence: Synthetic oligonucleotide
  Target: LAMA2; (+) strand; PAM type: NRG; PAM sequence: CAG
agatattaatcaatatctta

SEQ ID NO: 163219 - DNA, 20 bp, Artificial Sequence
  Description of Artificial Sequence: Synthetic oligonucleotide
  Target: LAMA2; (+) strand; PAM type: NRG; PAM sequence: TAG
aatatcttacagtttacttg

SEQ ID NO: 163220 - DNA, 20 bp, Artificial Sequence
  Description of Artificial Sequence: Synthetic oligonucleotide
  Target: LAMA2; (+) strand; PAM type: NRG; PAM sequence: AGG
atatcttacagtttacttgt

SEQ ID NO: 163221 - DNA, 20 bp, Artificial Sequence
  Description of Artificial Sequence: Synthetic oligonucleotide
  Target: LAMA2; (+) strand; PAM type: NRG; PAM sequence: AAG
cttacagtttacttgtagga

SEQ ID NO: 163222 - DNA, 20 bp, Artificial Sequence
  Description of Artificial Sequence: Synthetic oligonucleotide
  Target: LAMA2; (+) strand; PAM type: NRG; PAM sequence: AAG
tacttgtaggaaagatgatg

SEQ ID NO: 163223 - DNA, 20 bp, Artificial Sequence
  Description of Artificial Sequence: Synthetic oligonucleotide
  Target: LAMA2; (+) strand; PAM type: NRG; PAM sequence: CAG
gaagtaaatatacatttatg

SEQ ID NO: 163224 - DNA, 20 bp, Artificial Sequence
  Description of Artificial Sequence: Synthetic oligonucleotide
  Target: LAMA2; (+) strand; PAM type: NRG; PAM sequence: AAG
gctgaacacttgaaatctac

SEQ ID NO: 163225 - DNA, 20 bp, Artificial Sequence
  Description of Artificial Sequence: Synthetic oligonucleotide
  Target: LAMA2; (+) strand; PAM type: NRG; PAM sequence: GAG
tgaacacttgaaatctacaa

SEQ ID NO: 163226 - DNA, 20 bp, Artificial Sequence
  Description of Artificial Sequence: Synthetic oligonucleotide
  Target: LAMA2; (+) strand; PAM type: NRG; PAM sequence: AGG
gaacacttgaaatctacaag

SEQ ID NO: 163227 - DNA, 20 bp, Artificial Sequence
  Description of Artificial Sequence: Synthetic oligonucleotide
  Target: LAMA2; (+) strand; PAM type: NRG; PAM sequence: GGG
aacacttgaaatctacaaga

SEQ ID NO: 163228 - DNA, 20 bp, Artificial Sequence
  Description of Artificial Sequence: Synthetic oligonucleotide
  Target: LAMA2; (+) strand; PAM type: NRG; PAM sequence: GGG
acacttgaaatctacaagag

SEQ ID NO: 163229 - DNA, 20 bp, Artificial Sequence
  Description of Artificial Sequence: Synthetic oligonucleotide
  Target: LAMA2; (+) strand; PAM type: NRG; PAM sequence: AAG
aaatctacaagaggggtaaa

SEQ ID NO: 163230 - DNA, 20 bp, Artificial Sequence
  Description of Artificial Sequence: Synthetic oligonucleotide
  Target: LAMA2; (+) strand; PAM type: NRG; PAM sequence: CAG
caaaaattctgtaataatac

SEQ ID NO: 163231 - DNA, 20 bp, Artificial Sequence
  Description of Artificial Sequence: Synthetic oligonucleotide
  Target: LAMA2; (+) strand; PAM type: NRG; PAM sequence: AAG
attctgtaataataccagaa

SEQ ID NO: 163232 - DNA, 20 bp, Artificial Sequence
  Description of Artificial Sequence: Synthetic oligonucleotide
  Target: LAMA2; (+) strand; PAM type: NRG; PAM sequence: GAG
tctgtaataataccagaaaa

SEQ ID NO: 163233 - DNA, 20 bp, Artificial Sequence
  Description of Artificial Sequence: Synthetic oligonucleotide
  Target: LAMA2; (+) strand; PAM type: NRG; PAM sequence: TAG
aagagctataacctcatacc

SEQ ID NO: 163234 - DNA, 20 bp, Artificial Sequence
  Description of Artificial Sequence: Synthetic oligonucleotide
  Target: LAMA2; (+) strand; PAM type: NRG; PAM sequence: AGG
agagctataacctcatacct

SEQ ID NO: 163235 - DNA, 20 bp, Artificial Sequence
  Description of Artificial Sequence: Synthetic oligonucleotide
  Target: LAMA2; (+) strand; PAM type: NRG; PAM sequence: AAG
ataacctcatacctaggcac

SEQ ID NO: 163236 - DNA, 20 bp, Artificial Sequence
  Description of Artificial Sequence: Synthetic oligonucleotide
  Target: LAMA2; (+) strand; PAM type: NRG; PAM sequence: AGG
taacctcatacctaggcaca

SEQ ID NO: 163237 - DNA, 20 bp, Artificial Sequence
  Description of Artificial Sequence: Synthetic oligonucleotide
  Target: LAMA2; (+) strand; PAM type: NRG; PAM sequence: AAG
cacaaggacatacatgtgca

SEQ ID NO: 163238 - DNA, 20 bp, Artificial Sequence
  Description of Artificial Sequence: Synthetic oligonucleotide
  Target: LAMA2; (+) strand; PAM type: NRG; PAM sequence: GAG
gacatacatgtgcaaagtat

SEQ ID NO: 163239 - DNA, 20 bp, Artificial Sequence
  Description of Artificial Sequence: Synthetic oligonucleotide
  Target: LAMA2; (+) strand; PAM type: NRG; PAM sequence: AGG
acatacatgtgcaaagtatg

SEQ ID NO: 163240 - DNA, 20 bp, Artificial Sequence
  Description of Artificial Sequence: Synthetic oligonucleotide
  Target: LAMA2; (+) strand; PAM type: NRG; PAM sequence: GAG
tgtgcaaagtatgaggatat

SEQ ID NO: 163241 - DNA, 20 bp, Artificial Sequence
  Description of Artificial Sequence: Synthetic oligonucleotide
  Target: LAMA2; (+) strand; PAM type: NRG; PAM sequence: AGG
gtgcaaagtatgaggatatg

SEQ ID NO: 163242 - DNA, 20 bp, Artificial Sequence
  Description of Artificial Sequence: Synthetic oligonucleotide
  Target: LAMA2; (+) strand; PAM type: NRG; PAM sequence: TAG
attaattttccaaaaatcta

SEQ ID NO: 163243 - DNA, 20 bp, Artificial Sequence
  Description of Artificial Sequence: Synthetic oligonucleotide
  Target: LAMA2; (+) strand; PAM type: NRG; PAM sequence: TAG
aattgcccctgaattatgac

SEQ ID NO: 163244 - DNA, 20 bp, Artificial Sequence
  Description of Artificial Sequence: Synthetic oligonucleotide
  Target: LAMA2; (+) strand; PAM type: NRG; PAM sequence: AGG
attgcccctgaattatgact

SEQ ID NO: 163245 - DNA, 20 bp, Artificial Sequence
  Description of Artificial Sequence: Synthetic oligonucleotide
  Target: LAMA2; (+) strand; PAM type: NRG; PAM sequence: TAG
cctgaattatgactaggttt

SEQ ID NO: 163246 - DNA, 20 bp, Artificial Sequence
  Description of Artificial Sequence: Synthetic oligonucleotide
  Target: LAMA2; (+) strand; PAM type: NRG; PAM sequence: AGG
ctgaattatgactaggtttt

SEQ ID NO: 163247 - DNA, 20 bp, Artificial Sequence
  Description of Artificial Sequence: Synthetic oligonucleotide
  Target: LAMA2; (+) strand; PAM type: NRG; PAM sequence: CAG
tatgactaggttttaggttt

SEQ ID NO: 163248 - DNA, 20 bp, Artificial Sequence
  Description of Artificial Sequence: Synthetic oligonucleotide
  Target: LAMA2; (+) strand; PAM type: NRG; PAM sequence: AGG
atgactaggttttaggtttc

SEQ ID NO: 163249 - DNA, 20 bp, Artificial Sequence
  Description of Artificial Sequence: Synthetic oligonucleotide
  Target: LAMA2; (+) strand; PAM type: NRG; PAM sequence: AAG
actaggttttaggtttcagg

SEQ ID NO: 163250 - DNA, 20 bp, Artificial Sequence
  Description of Artificial Sequence: Synthetic oligonucleotide
  Target: LAMA2; (+) strand; PAM type: NRG; PAM sequence: TAG
aggttttaggtttcaggaag

SEQ ID NO: 163251 - DNA, 20 bp, Artificial Sequence
  Description of Artificial Sequence: Synthetic oligonucleotide
  Target: LAMA2; (+) strand; PAM type: NRG; PAM sequence: GAG
ttaggtttcaggaagtagtt

SEQ ID NO: 163252 - DNA, 20 bp, Artificial Sequence
  Description of Artificial Sequence: Synthetic oligonucleotide
  Target: LAMA2; (+) strand; PAM type: NRG; PAM sequence: AAG
aagtagttgagatcattctg

SEQ ID NO: 163253 - DNA, 20 bp, Artificial Sequence
  Description of Artificial Sequence: Synthetic oligonucleotide
  Target: LAMA2; (+) strand; PAM type: NRG; PAM sequence: GAG
gtagttgagatcattctgaa

SEQ ID NO: 163254 - DNA, 20 bp, Artificial Sequence
  Description of Artificial Sequence: Synthetic oligonucleotide
  Target: LAMA2; (+) strand; PAM type: NRG; PAM sequence: TAG
agagtcattttaacaacatt

SEQ ID NO: 163255 - DNA, 20 bp, Artificial Sequence
  Description of Artificial Sequence: Synthetic oligonucleotide
  Target: LAMA2; (+) strand; PAM type: NRG; PAM sequence: TGG
cattttaacaacatttagct

SEQ ID NO: 163256 - DNA, 20 bp, Artificial Sequence
  Description of Artificial Sequence: Synthetic oligonucleotide
  Target: LAMA2; (+) strand; PAM type: NRG; PAM sequence: TGG
aaataatcattttttcccat

SEQ ID NO: 163257 - DNA, 20 bp, Artificial Sequence
  Description of Artificial Sequence: Synthetic oligonucleotide
  Target: LAMA2; (+) strand; PAM type: NRG; PAM sequence: TAG
taatcattttttcccattgg

SEQ ID NO: 163258 - DNA, 20 bp, Artificial Sequence
  Description of Artificial Sequence: Synthetic oligonucleotide
  Target: LAMA2; (+) strand; PAM type: NRG; PAM sequence: TAG
tttttcccattggtagacca

SEQ ID NO: 163259 - DNA, 20 bp, Artificial Sequence
  Description of Artificial Sequence: Synthetic oligonucleotide
  Target: LAMA2; (+) strand; PAM type: NRG; PAM sequence: TGG
gtagaccatagaaattgaca

SEQ ID NO: 163260 - DNA, 20 bp, Artificial Sequence
  Description of Artificial Sequence: Synthetic oligonucleotide
  Target: LAMA2; (+) strand; PAM type: NRG; PAM sequence: CAG
accatagaaattgacatggc

SEQ ID NO: 163261 - DNA, 20 bp, Artificial Sequence
  Description of Artificial Sequence: Synthetic oligonucleotide
  Target: LAMA2; (+) strand; PAM type: NRG; PAM sequence: GAG
catagaaattgacatggcca

SEQ ID NO: 163262 - DNA, 20 bp, Artificial Sequence
  Description of Artificial Sequence: Synthetic oligonucleotide
  Target: LAMA2; (+) strand; PAM type: NRG; PAM sequence: CAG
gacatggccagagtcatgtt

SEQ ID NO: 163263 - DNA, 20 bp, Artificial Sequence
  Description of Artificial Sequence: Synthetic oligonucleotide
  Target: LAMA2; (+) strand; PAM type: NRG; PAM sequence: GAG
catggccagagtcatgttca

SEQ ID NO: 163264 - DNA, 20 bp, Artificial Sequence
  Description of Artificial Sequence: Synthetic oligonucleotide
  Target: LAMA2; (+) strand; PAM type: NRG; PAM sequence: GAG
tggccagagtcatgttcaga

SEQ ID NO: 163265 - DNA, 20 bp, Artificial Sequence
  Description of Artificial Sequence: Synthetic oligonucleotide
  Target: LAMA2; (+) strand; PAM type: NRG; PAM sequence: TAG
catgttcagagagatctatc

SEQ ID NO: 163266 - DNA, 20 bp, Artificial Sequence
  Description of Artificial Sequence: Synthetic oligonucleotide
  Target: LAMA2; (+) strand; PAM type: NRG; PAM sequence: CAG
cagagagatctatctagcat

SEQ ID NO: 163267 - DNA, 20 bp, Artificial Sequence
  Description of Artificial Sequence: Synthetic oligonucleotide
  Target: LAMA2; (+) strand; PAM type: NRG; PAM sequence: CAG
agagatctatctagcatcag

SEQ ID NO: 163268 - DNA, 20 bp, Artificial Sequence
  Description of Artificial Sequence: Synthetic oligonucleotide
  Target: LAMA2; (+) strand; PAM type: NRG; PAM sequence: AGG
gagatctatctagcatcagc

SEQ ID NO: 163269 - DNA, 20 bp, Artificial Sequence
  Description of Artificial Sequence: Synthetic oligonucleotide
  Target: LAMA2; (+) strand; PAM type: NRG; PAM sequence: GGG
agatctatctagcatcagca

SEQ ID NO: 163270 - DNA, 20 bp, Artificial Sequence
  Description of Artificial Sequence: Synthetic oligonucleotide
  Target: LAMA2; (+) strand; PAM type: NRG; PAM sequence: TGG
ctatctagcatcagcaggga

SEQ ID NO: 163271 - DNA, 20 bp, Artificial Sequence
  Description of Artificial Sequence: Synthetic oligonucleotide
  Target: LAMA2; (+) strand; PAM type: NRG; PAM sequence: AAG
cagggatggtaacaatttat

SEQ ID NO: 163272 - DNA, 20 bp, Artificial Sequence
  Description of Artificial Sequence: Synthetic oligonucleotide
  Target: LAMA2; (+) strand; PAM type: NRG; PAM sequence: AGG
agggatggtaacaatttata

SEQ ID NO: 163273 - DNA, 20 bp, Artificial Sequence
  Description of Artificial Sequence: Synthetic oligonucleotide
  Target: LAMA2; (+) strand; PAM type: NRG; PAM sequence: AAG
aacaatttataaggctgttg

SEQ ID NO: 163274 - DNA, 20 bp, Artificial Sequence
  Description of Artificial Sequence: Synthetic oligonucleotide
  Target: LAMA2; (+) strand; PAM type: NRG; PAM sequence: AAG
gctgttgaagaaatattaat

SEQ ID NO: 163275 - DNA, 20 bp, Artificial Sequence
  Description of Artificial Sequence: Synthetic oligonucleotide
  Target: LAMA2; (+) strand; PAM type: NRG; PAM sequence: GAG
tgttgaagaaatattaataa

SEQ ID NO: 163276 - DNA, 20 bp, Artificial Sequence
  Description of Artificial Sequence: Synthetic oligonucleotide
  Target: LAMA2; (+) strand; PAM type: NRG; PAM sequence: AAG
atattaataagagatgccaa

SEQ ID NO: 163277 - DNA, 20 bp, Artificial Sequence
  Description of Artificial Sequence: Synthetic oligonucleotide
  Target: LAMA2; (+) strand; PAM type: NRG; PAM sequence: TGG
aataagagatgccaaaagcc

SEQ ID NO: 163278 - DNA, 20 bp, Artificial Sequence
  Description of Artificial Sequence: Synthetic oligonucleotide
  Target: LAMA2; (+) strand; PAM type: NRG; PAM sequence: CAG
agatgccaaaagcctggacc

SEQ ID NO: 163279 - DNA, 20 bp, Artificial Sequence
  Description of Artificial Sequence: Synthetic oligonucleotide
  Target: LAMA2; (+) strand; PAM type: NRG; PAM sequence: GAG
aaagcctggacccagtcaat

SEQ ID NO: 163280 - DNA, 20 bp, Artificial Sequence
  Description of Artificial Sequence: Synthetic oligonucleotide
  Target: LAMA2; (+) strand; PAM type: NRG; PAM sequence: CAG
tggacccagtcaatgagcgt

SEQ ID NO: 163281 - DNA, 20 bp, Artificial Sequence
  Description of Artificial Sequence: Synthetic oligonucleotide
  Target: LAMA2; (+) strand; PAM type: NRG; PAM sequence: AAG
ccagtcaatgagcgtcagtg

SEQ ID NO: 163282 - DNA, 20 bp, Artificial Sequence
  Description of Artificial Sequence: Synthetic oligonucleotide
  Target: LAMA2; (+) strand; PAM type: NRG; PAM sequence: TAG
tgagcgtcagtgaagatata

SEQ ID NO: 163283 - DNA, 20 bp, Artificial Sequence
  Description of Artificial Sequence: Synthetic oligonucleotide
  Target: LAMA2; (+) strand; PAM type: NRG; PAM sequence: AGG
gagcgtcagtgaagatatat

SEQ ID NO: 163284 - DNA, 20 bp, Artificial Sequence
  Description of Artificial Sequence: Synthetic oligonucleotide
  Target: LAMA2; (+) strand; PAM type: NRG; PAM sequence: GGG
agcgtcagtgaagatatata

SEQ ID NO: 163285 - DNA, 20 bp, Artificial Sequence
  Description of Artificial Sequence: Synthetic oligonucleotide
  Target: LAMA2; (+) strand; PAM type: NRG; PAM sequence: GAG
agtgaagatatatagggcgc

SEQ ID NO: 163286 - DNA, 20 bp, Artificial Sequence
  Description of Artificial Sequence: Synthetic oligonucleotide
  Target: LAMA2; (+) strand; PAM type: NRG; PAM sequence: TAG
atagggcgcgagttacattt

SEQ ID NO: 163287 - DNA, 20 bp, Artificial Sequence
  Description of Artificial Sequence: Synthetic oligonucleotide
  Target: LAMA2; (+) strand; PAM type: NRG; PAM sequence: CAG
gcgagttacattttagaact

SEQ ID NO: 163288 - DNA, 20 bp, Artificial Sequence
  Description of Artificial Sequence: Synthetic oligonucleotide
  Target: LAMA2; (+) strand; PAM type: NRG; PAM sequence: AGG
cgagttacattttagaactc

SEQ ID NO: 163289 - DNA, 20 bp, Artificial Sequence
  Description of Artificial Sequence: Synthetic oligonucleotide
  Target: LAMA2; (+) strand; PAM type: NRG; PAM sequence: CAG
ttttagaactcaggctgata

SEQ ID NO: 163290 - DNA, 20 bp, Artificial Sequence
  Description of Artificial Sequence: Synthetic oligonucleotide
  Target: LAMA2; (+) strand; PAM type: NRG; PAM sequence: TGG
gaactcaggctgatacagcc

SEQ ID NO: 163291 - DNA, 20 bp, Artificial Sequence
  Description of Artificial Sequence: Synthetic oligonucleotide
  Target: LAMA2; (+) strand; PAM type: NRG; PAM sequence: TGG
gcctggtgaattcattgatt

SEQ ID NO: 163292 - DNA, 20 bp, Artificial Sequence
  Description of Artificial Sequence: Synthetic oligonucleotide
  Target: LAMA2; (+) strand; PAM type: NRG; PAM sequence: GGG
cctggtgaattcattgattt

SEQ ID NO: 163293 - DNA, 20 bp, Artificial Sequence
  Description of Artificial Sequence: Synthetic oligonucleotide
  Target: LAMA2; (+) strand; PAM type: NRG; PAM sequence: GGG
ctggtgaattcattgatttg

SEQ ID NO: 163294 - DNA, 20 bp, Artificial Sequence
  Description of Artificial Sequence: Synthetic oligonucleotide
  Target: LAMA2; (+) strand; PAM type: NRG; PAM sequence: AAG
aattcattgatttggggaat

SEQ ID NO: 163295 - DNA, 20 bp, Artificial Sequence
  Description of Artificial Sequence: Synthetic oligonucleotide
  Target: LAMA2; (+) strand; PAM type: NRG; PAM sequence: AAG
cattgatttggggaataaga

SEQ ID NO: 163296 - DNA, 20 bp, Artificial Sequence
  Description of Artificial Sequence: Synthetic oligonucleotide
  Target: LAMA2; (+) strand; PAM type: NRG; PAM sequence: GAG
ttgatttggggaataagaaa

SEQ ID NO: 163297 - DNA, 20 bp, Artificial Sequence
  Description of Artificial Sequence: Synthetic oligonucleotide
  Target: LAMA2; (+) strand; PAM type: NRG; PAM sequence: AAG
atttggggaataagaaagag

SEQ ID NO: 163298 - DNA, 20 bp, Artificial Sequence
  Description of Artificial Sequence: Synthetic oligonucleotide
  Target: LAMA2; (+) strand; PAM type: NRG; PAM sequence: TAG
ggaataagaaagagaagact

SEQ ID NO: 163299 - DNA, 20 bp, Artificial Sequence
  Description of Artificial Sequence: Synthetic oligonucleotide
  Target: LAMA2; (+) strand; PAM type: NRG; PAM sequence: AGG
gaataagaaagagaagactt

SEQ ID NO: 163300 - DNA, 20 bp, Artificial Sequence
  Description of Artificial Sequence: Synthetic oligonucleotide
  Target: LAMA2; (+) strand; PAM type: NRG; PAM sequence: TAG
agaagacttaggatgactcc

SEQ ID NO: 163301 - DNA, 20 bp, Artificial Sequence
  Description of Artificial Sequence: Synthetic oligonucleotide
  Target: LAMA2; (+) strand; PAM type: NRG; PAM sequence: AGG
gaagacttaggatgactcct

SEQ ID NO: 163302 - DNA, 20 bp, Artificial Sequence
  Description of Artificial Sequence: Synthetic oligonucleotide
  Target: LAMA2; (+) strand; PAM type: NRG; PAM sequence: TGG
tcctaggttttgctttgcaa

SEQ ID NO: 163303 - DNA, 20 bp, Artificial Sequence
  Description of Artificial Sequence: Synthetic oligonucleotide
  Target: LAMA2; (+) strand; PAM type: NRG; PAM sequence: GAG
ctaggttttgctttgcaatg

SEQ ID NO: 163304 - DNA, 20 bp, Artificial Sequence
  Description of Artificial Sequence: Synthetic oligonucleotide
  Target: LAMA2; (+) strand; PAM type: NRG; PAM sequence: TAG
ggttttgctttgcaatggag

SEQ ID NO: 163305 - DNA, 20 bp, Artificial Sequence
  Description of Artificial Sequence: Synthetic oligonucleotide
  Target: LAMA2; (+) strand; PAM type: NRG; PAM sequence: AAG
gcaatggagtagatgataat

SEQ ID NO: 163306 - DNA, 20 bp, Artificial Sequence
  Description of Artificial Sequence: Synthetic oligonucleotide
  Target: LAMA2; (+) strand; PAM type: NRG; PAM sequence: CAG
atgataataagtaccatgtg

SEQ ID NO: 163307 - DNA, 20 bp, Artificial Sequence
  Description of Artificial Sequence: Synthetic oligonucleotide
  Target: LAMA2; (+) strand; PAM type: NRG; PAM sequence: TAG
ataagtaccatgtgcagcta

SEQ ID NO: 163308 - DNA, 20 bp, Artificial Sequence
  Description of Artificial Sequence: Synthetic oligonucleotide
  Target: LAMA2; (+) strand; PAM type: NRG; PAM sequence: AGG
taagtaccatgtgcagctat

SEQ ID NO: 163309 - DNA, 20 bp, Artificial Sequence
  Description of Artificial Sequence: Synthetic oligonucleotide
  Target: LAMA2; (+) strand; PAM type: NRG; PAM sequence: TAG
atgtgcagctataggaatta

SEQ ID NO: 163310 - DNA, 20 bp, Artificial Sequence
  Description of Artificial Sequence: Synthetic oligonucleotide
  Target: LAMA2; (+) strand; PAM type: NRG; PAM sequence: AGG
tgtgcagctataggaattat

SEQ ID NO: 163311 - DNA, 20 bp, Artificial Sequence
  Description of Artificial Sequence: Synthetic oligonucleotide
  Target: LAMA2; (+) strand; PAM type: NRG; PAM sequence: GAG
tgcagctataggaattatag

SEQ ID NO: 163312 - DNA, 20 bp, Artificial Sequence
  Description of Artificial Sequence: Synthetic oligonucleotide
  Target: LAMA2; (+) strand; PAM type: NRG; PAM sequence: AGG
gcagctataggaattatagg

SEQ ID NO: 163313 - DNA, 20 bp, Artificial Sequence
  Description of Artificial Sequence: Synthetic oligonucleotide
  Target: LAMA2; (+) strand; PAM type: NRG; PAM sequence: GAG
agctataggaattataggag

SEQ ID NO: 163314 - DNA, 20 bp, Artificial Sequence
  Description of Artificial Sequence: Synthetic oligonucleotide
  Target: LAMA2; (+) strand; PAM type: NRG; PAM sequence: AGG
gctataggaattataggagg

SEQ ID NO: 163315 - DNA, 20 bp, Artificial Sequence
  Description of Artificial Sequence: Synthetic oligonucleotide
  Target: LAMA2; (+) strand; PAM type: NRG; PAM sequence: GAG
tataggaattataggaggag

SEQ ID NO: 163316 - DNA, 20 bp, Artificial Sequence
  Description of Artificial Sequence: Synthetic oligonucleotide
  Target: LAMA2; (+) strand; PAM type: NRG; PAM sequence: AAG
ggaattataggaggaggagc

SEQ ID NO: 163317 - DNA, 20 bp, Artificial Sequence
  Description of Artificial Sequence: Synthetic oligonucleotide
  Target: LAMA2; (+) strand; PAM type: NRG; PAM sequence: CAG
tataggaggaggagcaagtt

SEQ ID NO: 163318 - DNA, 20 bp, Artificial Sequence
  Description of Artificial Sequence: Synthetic oligonucleotide
  Target: LAMA2; (+) strand; PAM type: NRG; PAM sequence: AGG
ataggaggaggagcaagttc

SEQ ID NO: 163319 - DNA, 20 bp, Artificial Sequence
  Description of Artificial Sequence: Synthetic oligonucleotide
  Target: LAMA2; (+) strand; PAM type: NRG; PAM sequence: AAG
ggaggaggagcaagttcagg

SEQ ID NO: 163320 - DNA, 20 bp, Artificial Sequence
  Description of Artificial Sequence: Synthetic oligonucleotide
  Target: LAMA2; (+) strand; PAM type: NRG; PAM sequence: AGG
gaggaggagcaagttcagga

SEQ ID NO: 163321 - DNA, 20 bp, Artificial Sequence
  Description of Artificial Sequence: Synthetic oligonucleotide
  Target: LAMA2; (+) strand; PAM type: NRG; PAM sequence: AAG
aggagcaagttcaggaagga

SEQ ID NO: 163322 - DNA, 20 bp, Artificial Sequence
  Description of Artificial Sequence: Synthetic oligonucleotide
  Target: LAMA2; (+) strand; PAM type: NRG; PAM sequence: CAG
taatcactttgcatttttat

SEQ ID NO: 163323 - DNA, 20 bp, Artificial Sequence
  Description of Artificial Sequence: Synthetic oligonucleotide
  Target: LAMA2; (+) strand; PAM type: NRG; PAM sequence: GAG
catttttatcagctttttgt

SEQ ID NO: 163324 - DNA, 20 bp, Artificial Sequence
  Description of Artificial Sequence: Synthetic oligonucleotide
  Target: LAMA2; (+) strand; PAM type: NRG; PAM sequence: AGG
atttttatcagctttttgtg

SEQ ID NO: 163325 - DNA, 20 bp, Artificial Sequence
  Description of Artificial Sequence: Synthetic oligonucleotide
  Target: LAMA2; (+) strand; PAM type: NRG; PAM sequence: TAG
aaataaaattcacccattta

SEQ ID NO: 163326 - DNA, 20 bp, Artificial Sequence
  Description of Artificial Sequence: Synthetic oligonucleotide
  Target: LAMA2; (+) strand; PAM type: NRG; PAM sequence: CAG
tgaattttaaccaatgatta

SEQ ID NO: 163327 - DNA, 20 bp, Artificial Sequence
  Description of Artificial Sequence: Synthetic oligonucleotide
  Target: LAMA2; (+) strand; PAM type: NRG; PAM sequence: TGG
attttaaccaatgattacag

SEQ ID NO: 163328 - DNA, 20 bp, Artificial Sequence
  Description of Artificial Sequence: Synthetic oligonucleotide
  Target: LAMA2; (+) strand; PAM type: NRG; PAM sequence: CAG
tcatcccttgtgccccattg

SEQ ID NO: 163329 - DNA, 20 bp, Artificial Sequence
  Description of Artificial Sequence: Synthetic oligonucleotide
  Target: LAMA2; (+) strand; PAM type: NRG; PAM sequence: AAG
ccttgtgccccattgcagtg

SEQ ID NO: 163330 - DNA, 20 bp, Artificial Sequence
  Description of Artificial Sequence: Synthetic oligonucleotide
  Target: LAMA2; (+) strand; PAM type: NRG; PAM sequence: TAG
gtgcctactgttttgccttc

SEQ ID NO: 163331 - DNA, 20 bp, Artificial Sequence
  Description of Artificial Sequence: Synthetic oligonucleotide
  Target: LAMA2; (+) strand; PAM type: NRG; PAM sequence: TAG
tttctacaacttctgaaaaa

SEQ ID NO: 163332 - DNA, 20 bp, Artificial Sequence
  Description of Artificial Sequence: Synthetic oligonucleotide
  Target: LAMA2; (+) strand; PAM type: NRG; PAM sequence: TAG
acttctgaaaaatagaatcg

SEQ ID NO: 163333 - DNA, 20 bp, Artificial Sequence
  Description of Artificial Sequence: Synthetic oligonucleotide
  Target: LAMA2; (+) strand; PAM type: NRG; PAM sequence: GAG
gaatcgtagtctgttttttt

SEQ ID NO: 163334 - DNA, 20 bp, Artificial Sequence
  Description of Artificial Sequence: Synthetic oligonucleotide
  Target: LAMA2; (+) strand; PAM type: NRG; PAM sequence: AGG
aatcgtagtctgtttttttg

SEQ ID NO: 163335 - DNA, 20 bp, Artificial Sequence
  Description of Artificial Sequence: Synthetic oligonucleotide
  Target: LAMA2; (+) strand; PAM type: NRG; PAM sequence: GGG
atcgtagtctgtttttttga

SEQ ID NO: 163336 - DNA, 20 bp, Artificial Sequence
  Description of Artificial Sequence: Synthetic oligonucleotide
  Target: LAMA2; (+) strand; PAM type: NRG; PAM sequence: GGG
tcgtagtctgtttttttgag

SEQ ID NO: 163337 - DNA, 20 bp, Artificial Sequence
  Description of Artificial Sequence: Synthetic oligonucleotide
  Target: LAMA2; (+) strand; PAM type: NRG; PAM sequence: GGG
cgtagtctgtttttttgagg

SEQ ID NO: 163338 - DNA, 20 bp, Artificial Sequence
  Description of Artificial Sequence: Synthetic oligonucleotide
  Target: LAMA2; (+) strand; PAM type: NRG; PAM sequence: GGG
gtagtctgtttttttgaggg

SEQ ID NO: 163339 - DNA, 20 bp, Artificial Sequence
  Description of Artificial Sequence: Synthetic oligonucleotide
  Target: LAMA2; (+) strand; PAM type: NRG; PAM sequence: GGG
tagtctgtttttttgagggg

SEQ ID NO: 163340 - DNA, 20 bp, Artificial Sequence
  Description of Artificial Sequence: Synthetic oligonucleotide
  Target: LAMA2; (+) strand; PAM type: NRG; PAM sequence: TGG
ggtttgtttgtttctttgtt

SEQ ID NO: 163341 - DNA, 20 bp, Artificial Sequence
  Description of Artificial Sequence: Synthetic oligonucleotide
  Target: LAMA2; (+) strand; PAM type: NRG; PAM sequence: TGG
tttgtttggcttccttcact

SEQ ID NO: 163342 - DNA, 20 bp, Artificial Sequence
  Description of Artificial Sequence: Synthetic oligonucleotide
  Target: LAMA2; (+) strand; PAM type: NRG; PAM sequence: CAG
atccatattgttgcatgtat

SEQ ID NO: 163343 - DNA, 20 bp, Artificial Sequence
  Description of Artificial Sequence: Synthetic oligonucleotide
  Target: LAMA2; (+) strand; PAM type: NRG; PAM sequence: CAG
catattgttgcatgtatcag

SEQ ID NO: 163344 - DNA, 20 bp, Artificial Sequence
  Description of Artificial Sequence: Synthetic oligonucleotide
  Target: LAMA2; (+) strand; PAM type: NRG; PAM sequence: CAG
tattccatttgtgtaatgta

SEQ ID NO: 163345 - DNA, 20 bp, Artificial Sequence
  Description of Artificial Sequence: Synthetic oligonucleotide
  Target: LAMA2; (+) strand; PAM type: NRG; PAM sequence: TGG
cttacctgtttaccatttaa

SEQ ID NO: 163346 - DNA, 20 bp, Artificial Sequence
  Description of Artificial Sequence: Synthetic oligonucleotide
  Target: LAMA2; (+) strand; PAM type: NRG; PAM sequence: GGG
ttacctgtttaccatttaat

SEQ ID NO: 163347 - DNA, 20 bp, Artificial Sequence
  Description of Artificial Sequence: Synthetic oligonucleotide
  Target: LAMA2; (+) strand; PAM type: NRG; PAM sequence: TGG
tttaccatttaatgggtgtt

SEQ ID NO: 163348 - DNA, 20 bp, Artificial Sequence
  Description of Artificial Sequence: Synthetic oligonucleotide
  Target: LAMA2; (+) strand; PAM type: NRG; PAM sequence: GGG
ttaccatttaatgggtgttt

SEQ ID NO: 163349 - DNA, 20 bp, Artificial Sequence
  Description of Artificial Sequence: Synthetic oligonucleotide
  Target: LAMA2; (+) strand; PAM type: NRG; PAM sequence: TAG
atgggtgtttgggtcatttc

SEQ ID NO: 163350 - DNA, 20 bp, Artificial Sequence
  Description of Artificial Sequence: Synthetic oligonucleotide
  Target: LAMA2; (+) strand; PAM type: NRG; PAM sequence: TGG
tgtttgggtcatttctagtt

SEQ ID NO: 163351 - DNA, 20 bp, Artificial Sequence
  Description of Artificial Sequence: Synthetic oligonucleotide
  Target: LAMA2; (+) strand; PAM type: NRG; PAM sequence: GGG
gtttgggtcatttctagttt

SEQ ID NO: 163352 - DNA, 20 bp, Artificial Sequence
  Description of Artificial Sequence: Synthetic oligonucleotide
  Target: LAMA2; (+) strand; PAM type: NRG; PAM sequence: GGG
tttgggtcatttctagtttg

SEQ ID NO: 163353 - DNA, 20 bp, Artificial Sequence
  Description of Artificial Sequence: Synthetic oligonucleotide
  Target: LAMA2; (+) strand; PAM type: NRG; PAM sequence: TAG
tacaattttgctgtgaacat

SEQ ID NO: 163354 - DNA, 20 bp, Artificial Sequence
  Description of Artificial Sequence: Synthetic oligonucleotide
  Target: LAMA2; (+) strand; PAM type: NRG; PAM sequence: AAG
tgctgtgaacattagcatac

SEQ ID NO: 163355 - DNA, 20 bp, Artificial Sequence
  Description of Artificial Sequence: Synthetic oligonucleotide
  Target: LAMA2; (+) strand; PAM type: NRG; PAM sequence: AAG
aacattagcatacaagtcaa

SEQ ID NO: 163356 - DNA, 20 bp, Artificial Sequence
  Description of Artificial Sequence: Synthetic oligonucleotide
  Target: LAMA2; (+) strand; PAM type: NRG; PAM sequence: TGG
acaagtcaaaagcatattta

SEQ ID NO: 163357 - DNA, 20 bp, Artificial Sequence
  Description of Artificial Sequence: Synthetic oligonucleotide
  Target: LAMA2; (+) strand; PAM type: NRG; PAM sequence: AAG
tgttttctcttttttttctt

SEQ ID NO: 163358 - DNA, 20 bp, Artificial Sequence
  Description of Artificial Sequence: Synthetic oligonucleotide
  Target: LAMA2; (+) strand; PAM type: NRG; PAM sequence: TGG
tccacatctttgccaactct

SEQ ID NO: 163359 - DNA, 20 bp, Artificial Sequence
  Description of Artificial Sequence: Synthetic oligonucleotide
  Target: LAMA2; (+) strand; PAM type: NRG; PAM sequence: AAG
tttaacccttttttaatttt

SEQ ID NO: 163360 - DNA, 20 bp, Artificial Sequence
  Description of Artificial Sequence: Synthetic oligonucleotide
  Target: LAMA2; (+) strand; PAM type: NRG; PAM sequence: CAG
gtttgcatttatttaatgcc

SEQ ID NO: 163361 - DNA, 20 bp, Artificial Sequence
  Description of Artificial Sequence: Synthetic oligonucleotide
  Target: LAMA2; (+) strand; PAM type: NRG; PAM sequence: TGG
tatttaatgcccagtaatgt

SEQ ID NO: 163362 - DNA, 20 bp, Artificial Sequence
  Description of Artificial Sequence: Synthetic oligonucleotide
  Target: LAMA2; (+) strand; PAM type: NRG; PAM sequence: GGG
atttaatgcccagtaatgtt

SEQ ID NO: 163363 - DNA, 20 bp, Artificial Sequence
  Description of Artificial Sequence: Synthetic oligonucleotide
  Target: LAMA2; (+) strand; PAM type: NRG; PAM sequence: AAG
tcatttatacatcttttttg

SEQ ID NO: 163364 - DNA, 20 bp, Artificial Sequence
  Description of Artificial Sequence: Synthetic oligonucleotide
  Target: LAMA2; (+) strand; PAM type: NRG; PAM sequence: AAG
tcttttttgaagtgtttaca

SEQ ID NO: 163365 - DNA, 20 bp, Artificial Sequence
  Description of Artificial Sequence: Synthetic oligonucleotide
  Target: LAMA2; (+) strand; PAM type: NRG; PAM sequence: GAG
cttatgcccatttctatttt

SEQ ID NO: 163366 - DNA, 20 bp, Artificial Sequence
  Description of Artificial Sequence: Synthetic oligonucleotide
  Target: LAMA2; (+) strand; PAM type: NRG; PAM sequence: TAG
ttttgagttgtttgtttcct

SEQ ID NO: 163367 - DNA, 20 bp, Artificial Sequence
  Description of Artificial Sequence: Synthetic oligonucleotide
  Target: LAMA2; (+) strand; PAM type: NRG; PAM sequence: AAG
tttccttagtaatgcattgc

SEQ ID NO: 163368 - DNA, 20 bp, Artificial Sequence
  Description of Artificial Sequence: Synthetic oligonucleotide
  Target: LAMA2; (+) strand; PAM type: NRG; PAM sequence: AGG
ttccttagtaatgcattgca

SEQ ID NO: 163369 - DNA, 20 bp, Artificial Sequence
  Description of Artificial Sequence: Synthetic oligonucleotide
  Target: LAMA2; (+) strand; PAM type: NRG; PAM sequence: TGG
caaggattatttatatattc

SEQ ID NO: 163370 - DNA, 20 bp, Artificial Sequence
  Description of Artificial Sequence: Synthetic oligonucleotide
  Target: LAMA2; (+) strand; PAM type: NRG; PAM sequence: AAG
atgttctttaacgtatgtta

SEQ ID NO: 163371 - DNA, 20 bp, Artificial Sequence
  Description of Artificial Sequence: Synthetic oligonucleotide
  Target: LAMA2; (+) strand; PAM type: NRG; PAM sequence: TAG
gttaaagcttgcttttcata

SEQ ID NO: 163372 - DNA, 20 bp, Artificial Sequence
  Description of Artificial Sequence: Synthetic oligonucleotide
  Target: LAMA2; (+) strand; PAM type: NRG; PAM sequence: TAG
catatagattgctttttacc

SEQ ID NO: 163373 - DNA, 20 bp, Artificial Sequence
  Description of Artificial Sequence: Synthetic oligonucleotide
  Target: LAMA2; (+) strand; PAM type: NRG; PAM sequence: TAG
catctaatctttataaacac

SEQ ID NO: 163374 - DNA, 20 bp, Artificial Sequence
  Description of Artificial Sequence: Synthetic oligonucleotide
  Target: LAMA2; (+) strand; PAM type: NRG; PAM sequence: TAG
cttattatctttttcttcta

SEQ ID NO: 163375 - DNA, 20 bp, Artificial Sequence
  Description of Artificial Sequence: Synthetic oligonucleotide
  Target: LAMA2; (+) strand; PAM type: NRG; PAM sequence: AAG
atactttttatgttctaccc

SEQ ID NO: 163376 - DNA, 20 bp, Artificial Sequence
  Description of Artificial Sequence: Synthetic oligonucleotide
  Target: LAMA2; (+) strand; PAM type: NRG; PAM sequence: AAG
tttttatgttctacccaaga

SEQ ID NO: 163377 - DNA, 20 bp, Artificial Sequence
  Description of Artificial Sequence: Synthetic oligonucleotide
  Target: LAMA2; (+) strand; PAM type: NRG; PAM sequence: AAG
atgttctacccaagaaagac

SEQ ID NO: 163378 - DNA, 20 bp, Artificial Sequence
  Description of Artificial Sequence: Synthetic oligonucleotide
  Target: LAMA2; (+) strand; PAM type: NRG; PAM sequence: AGG
tgttctacccaagaaagaca

SEQ ID NO: 163379 - DNA, 20 bp, Artificial Sequence
  Description of Artificial Sequence: Synthetic oligonucleotide
  Target: LAMA2; (+) strand; PAM type: NRG; PAM sequence: AAG
cccaagaaagacaaggtcca

SEQ ID NO: 163380 - DNA, 20 bp, Artificial Sequence
  Description of Artificial Sequence: Synthetic oligonucleotide
  Target: LAMA2; (+) strand; PAM type: NRG; PAM sequence: AAG
ttctctcccatgttttcttc

SEQ ID NO: 163381 - DNA, 20 bp, Artificial Sequence
  Description of Artificial Sequence: Synthetic oligonucleotide
  Target: LAMA2; (+) strand; PAM type: NRG; PAM sequence: AAG
tctcccatgttttcttcaag

SEQ ID NO: 163382 - DNA, 20 bp, Artificial Sequence
  Description of Artificial Sequence: Synthetic oligonucleotide
  Target: LAMA2; (+) strand; PAM type: NRG; PAM sequence: TAG
atgttttcttcaagaagttt

SEQ ID NO: 163383 - DNA, 20 bp, Artificial Sequence
  Description of Artificial Sequence: Synthetic oligonucleotide
  Target: LAMA2; (+) strand; PAM type: NRG; PAM sequence: GAG
gttttcttcaagaagtttta

SEQ ID NO: 163384 - DNA, 20 bp, Artificial Sequence
  Description of Artificial Sequence: Synthetic oligonucleotide
  Target: LAMA2; (+) strand; PAM type: NRG; PAM sequence: TAG
ttcaagaagttttagagttt

SEQ ID NO: 163385 - DNA, 20 bp, Artificial Sequence
  Description of Artificial Sequence: Synthetic oligonucleotide
  Target: LAMA2; (+) strand; PAM type: NRG; PAM sequence: TAG
agagttttagctcttaaatg

SEQ ID NO: 163386 - DNA, 20 bp, Artificial Sequence
  Description of Artificial Sequence: Synthetic oligonucleotide
  Target: LAMA2; (+) strand; PAM type: NRG; PAM sequence: AGG
gagttttagctcttaaatgt

SEQ ID NO: 163387 - DNA, 20 bp, Artificial Sequence
  Description of Artificial Sequence: Synthetic oligonucleotide
  Target: LAMA2; (+) strand; PAM type: NRG; PAM sequence: TGG
ttagctcttaaatgtaggtt

SEQ ID NO: 163388 - DNA, 20 bp, Artificial Sequence
  Description of Artificial Sequence: Synthetic oligonucleotide
  Target: LAMA2; (+) strand; PAM type: NRG; PAM sequence: CAG
atattaatttttctatatat

SEQ ID NO: 163389 - DNA, 20 bp, Artificial Sequence
  Description of Artificial Sequence: Synthetic oligonucleotide
  Target: LAMA2; (+) strand; PAM type: NRG; PAM sequence: AGG
tattaatttttctatatatc

SEQ ID NO: 163390 - DNA, 20 bp, Artificial Sequence
  Description of Artificial Sequence: Synthetic oligonucleotide
  Target: LAMA2; (+) strand; PAM type: NRG; PAM sequence: TGG
tttttctatatatcaggtaa

SEQ ID NO: 163391 - DNA, 20 bp, Artificial Sequence
  Description of Artificial Sequence: Synthetic oligonucleotide
  Target: LAMA2; (+) strand; PAM type: NRG; PAM sequence: CAG
tctatatatcaggtaatggt

SEQ ID NO: 163392 - DNA, 20 bp, Artificial Sequence
  Description of Artificial Sequence: Synthetic oligonucleotide
  Target: LAMA2; (+) strand; PAM type: NRG; PAM sequence: GAG
tatatatcaggtaatggtca

SEQ ID NO: 163393 - DNA, 20 bp, Artificial Sequence
  Description of Artificial Sequence: Synthetic oligonucleotide
  Target: LAMA2; (+) strand; PAM type: NRG; PAM sequence: TGG
tggtcagagctcacttttta

SEQ ID NO: 163394 - DNA, 20 bp, Artificial Sequence
  Description of Artificial Sequence: Synthetic oligonucleotide
  Target: LAMA2; (+) strand; PAM type: NRG; PAM sequence: AAG
ttcaaacattatttgttgaa

SEQ ID NO: 163395 - DNA, 20 bp, Artificial Sequence
  Description of Artificial Sequence: Synthetic oligonucleotide
  Target: LAMA2; (+) strand; PAM type: NRG; PAM sequence: TGG
tatatatgtttatgcatttc

SEQ ID NO: 163396 - DNA, 20 bp, Artificial Sequence
  Description of Artificial Sequence: Synthetic oligonucleotide
  Target: LAMA2; (+) strand; PAM type: NRG; PAM sequence: TAG
atctattcttatgttaatac

SEQ ID NO: 163397 - DNA, 20 bp, Artificial Sequence
  Description of Artificial Sequence: Synthetic oligonucleotide
  Target: LAMA2; (+) strand; PAM type: NRG; PAM sequence: TAG
agttaatatgttaattattg

SEQ ID NO: 163398 - DNA, 20 bp, Artificial Sequence
  Description of Artificial Sequence: Synthetic oligonucleotide
  Target: LAMA2; (+) strand; PAM type: NRG; PAM sequence: CAG
tgttaattattgtagctttc

SEQ ID NO: 163399 - DNA, 20 bp, Artificial Sequence
  Description of Artificial Sequence: Synthetic oligonucleotide
  Target: LAMA2; (+) strand; PAM type: NRG; PAM sequence: AAG
aattattgtagctttccagc

SEQ ID NO: 163400 - DNA, 20 bp, Artificial Sequence
  Description of Artificial Sequence: Synthetic oligonucleotide
  Target: LAMA2; (+) strand; PAM type: NRG; PAM sequence: CAG
tttccagcaagtcataaaat

SEQ ID NO: 163401 - DNA, 20 bp, Artificial Sequence
  Description of Artificial Sequence: Synthetic oligonucleotide
  Target: LAMA2; (+) strand; PAM type: NRG; PAM sequence: AGG
ttccagcaagtcataaaatc

SEQ ID NO: 163402 - DNA, 20 bp, Artificial Sequence
  Description of Artificial Sequence: Synthetic oligonucleotide
  Target: LAMA2; (+) strand; PAM type: NRG; PAM sequence: GAG
catcgtttccaatacctttt

SEQ ID NO: 163403 - DNA, 20 bp, Artificial Sequence
  Description of Artificial Sequence: Synthetic oligonucleotide
  Target: LAMA2; (+) strand; PAM type: NRG; PAM sequence: TAG
ccaataccttttgagtactt

SEQ ID NO: 163404 - DNA, 20 bp, Artificial Sequence
  Description of Artificial Sequence: Synthetic oligonucleotide
  Target: LAMA2; (+) strand; PAM type: NRG; PAM sequence: TAG
ttccacataacttttaaatt

SEQ ID NO: 163405 - DNA, 20 bp, Artificial Sequence
  Description of Artificial Sequence: Synthetic oligonucleotide
  Target: LAMA2; (+) strand; PAM type: NRG; PAM sequence: AAG
catgtcaattctttaccaaa

SEQ ID NO: 163406 - DNA, 20 bp, Artificial Sequence
  Description of Artificial Sequence: Synthetic oligonucleotide
  Target: LAMA2; (+) strand; PAM type: NRG; PAM sequence: TAG
ttctttaccaaaaagcctgc

SEQ ID NO: 163407 - DNA, 20 bp, Artificial Sequence
  Description of Artificial Sequence: Synthetic oligonucleotide
  Target: LAMA2; (+) strand; PAM type: NRG; PAM sequence: AGG
tctttaccaaaaagcctgct

SEQ ID NO: 163408 - DNA, 20 bp, Artificial Sequence
  Description of Artificial Sequence: Synthetic oligonucleotide
  Target: LAMA2; (+) strand; PAM type: NRG; PAM sequence: TGG
ccaaaaagcctgctaggatt

SEQ ID NO: 163409 - DNA, 20 bp, Artificial Sequence
  Description of Artificial Sequence: Synthetic oligonucleotide
  Target: LAMA2; (+) strand; PAM type: NRG; PAM sequence: TAG
ctgaaattatattgaattga

SEQ ID NO: 163410 - DNA, 20 bp, Artificial Sequence
  Description of Artificial Sequence: Synthetic oligonucleotide
  Target: LAMA2; (+) strand; PAM type: NRG; PAM sequence: TGG
attgaattgatagatcaatt

SEQ ID NO: 163411 - DNA, 20 bp, Artificial Sequence
  Description of Artificial Sequence: Synthetic oligonucleotide
  Target: LAMA2; (+) strand; PAM type: NRG; PAM sequence: GGG
ttgaattgatagatcaattt

SEQ ID NO: 163412 - DNA, 20 bp, Artificial Sequence
  Description of Artificial Sequence: Synthetic oligonucleotide
  Target: LAMA2; (+) strand; PAM type: NRG; PAM sequence: AAG
aattgatagatcaatttggg

SEQ ID NO: 163413 - DNA, 20 bp, Artificial Sequence
  Description of Artificial Sequence: Synthetic oligonucleotide
  Target: LAMA2; (+) strand; PAM type: NRG; PAM sequence: CAG
atcaatttgggaagaattga

SEQ ID NO: 163414 - DNA, 20 bp, Artificial Sequence
  Description of Artificial Sequence: Synthetic oligonucleotide
  Target: LAMA2; (+) strand; PAM type: NRG; PAM sequence: AAG
gggaagaattgacagcttaa

SEQ ID NO: 163415 - DNA, 20 bp, Artificial Sequence
  Description of Artificial Sequence: Synthetic oligonucleotide
  Target: LAMA2; (+) strand; PAM type: NRG; PAM sequence: TAG
aattgacagcttaaaagtat

SEQ ID NO: 163416 - DNA, 20 bp, Artificial Sequence
  Description of Artificial Sequence: Synthetic oligonucleotide
  Target: LAMA2; (+) strand; PAM type: NRG; PAM sequence: CAG
cttaaaagtattagatatcc

SEQ ID NO: 163417 - DNA, 20 bp, Artificial Sequence
  Description of Artificial Sequence: Synthetic oligonucleotide
  Target: LAMA2; (+) strand; PAM type: NRG; PAM sequence: TGG
gatatcccagtgtatgaaca

SEQ ID NO: 163418 - DNA, 20 bp, Artificial Sequence
  Description of Artificial Sequence: Synthetic oligonucleotide
  Target: LAMA2; (+) strand; PAM type: NRG; PAM sequence: TAG
ggcataactctgcatttttt

SEQ ID NO: 163419 - DNA, 20 bp, Artificial Sequence
  Description of Artificial Sequence: Synthetic oligonucleotide
  Target: LAMA2; (+) strand; PAM type: NRG; PAM sequence: AGG
gcataactctgcattttttt

SEQ ID NO: 163420 - DNA, 20 bp, Artificial Sequence
  Description of Artificial Sequence: Synthetic oligonucleotide
  Target: LAMA2; (+) strand; PAM type: NRG; PAM sequence: CAG
aggttgttataattttttct

SEQ ID NO: 163421 - DNA, 20 bp, Artificial Sequence
  Description of Artificial Sequence: Synthetic oligonucleotide
  Target: LAMA2; (+) strand; PAM type: NRG; PAM sequence: TAG
ttttttctcagaaatgtttg

SEQ ID NO: 163422 - DNA, 20 bp, Artificial Sequence
  Description of Artificial Sequence: Synthetic oligonucleotide
  Target: LAMA2; (+) strand; PAM type: NRG; PAM sequence: AAG
gtttgtagtttttgatgtgc

SEQ ID NO: 163423 - DNA, 20 bp, Artificial Sequence
  Description of Artificial Sequence: Synthetic oligonucleotide
  Target: LAMA2; (+) strand; PAM type: NRG; PAM sequence: AAG
cgtttcatattttttatcaa

SEQ ID NO: 163424 - DNA, 20 bp, Artificial Sequence
  Description of Artificial Sequence: Synthetic oligonucleotide
  Target: LAMA2; (+) strand; PAM type: NRG; PAM sequence: CAG
gcaaatgctgtgttccattt

SEQ ID NO: 163425 - DNA, 20 bp, Artificial Sequence
  Description of Artificial Sequence: Synthetic oligonucleotide
  Target: LAMA2; (+) strand; PAM type: NRG; PAM sequence: TAG
agttttaaattgcttgttac

SEQ ID NO: 163426 - DNA, 20 bp, Artificial Sequence
  Description of Artificial Sequence: Synthetic oligonucleotide
  Target: LAMA2; (+) strand; PAM type: NRG; PAM sequence: TAG
taaattgcttgttactagaa

SEQ ID NO: 163427 - DNA, 20 bp, Artificial Sequence
  Description of Artificial Sequence: Synthetic oligonucleotide
  Target: LAMA2; (+) strand; PAM type: NRG; PAM sequence: TAG
tgtaatcttgctaaacttat

SEQ ID NO: 163428 - DNA, 20 bp, Artificial Sequence
  Description of Artificial Sequence: Synthetic oligonucleotide
  Target: LAMA2; (+) strand; PAM type: NRG; PAM sequence: TAG
cttgctaaacttattagttc

SEQ ID NO: 163429 - DNA, 20 bp, Artificial Sequence
  Description of Artificial Sequence: Synthetic oligonucleotide
  Target: LAMA2; (+) strand; PAM type: NRG; PAM sequence: TGG
tattagttctagtttctttt

SEQ ID NO: 163430 - DNA, 20 bp, Artificial Sequence
  Description of Artificial Sequence: Synthetic oligonucleotide
  Target: LAMA2; (+) strand; PAM type: NRG; PAM sequence: TAG
tagtttctttttggtccatt

SEQ ID NO: 163431 - DNA, 20 bp, Artificial Sequence
  Description of Artificial Sequence: Synthetic oligonucleotide
  Target: LAMA2; (+) strand; PAM type: NRG; PAM sequence: GAG
ttctttttggtccatttagt

SEQ ID NO: 163432 - DNA, 20 bp, Artificial Sequence
  Description of Artificial Sequence: Synthetic oligonucleotide
  Target: LAMA2; (+) strand; PAM type: NRG; PAM sequence: TAG
catttagtgagattttcttg

SEQ ID NO: 163433 - DNA, 20 bp, Artificial Sequence
  Description of Artificial Sequence: Synthetic oligonucleotide
  Target: LAMA2; (+) strand; PAM type: NRG; PAM sequence: AAG
agataatcatgtcatctgca

SEQ ID NO: 163434 - DNA, 20 bp, Artificial Sequence
  Description of Artificial Sequence: Synthetic oligonucleotide
  Target: LAMA2; (+) strand; PAM type: NRG; PAM sequence: GAG
ataatcatgtcatctgcaaa

SEQ ID NO: 163435 - DNA, 20 bp, Artificial Sequence
  Description of Artificial Sequence: Synthetic oligonucleotide
  Target: LAMA2; (+) strand; PAM type: NRG; PAM sequence: GAG
aatcatgtcatctgcaaaga

SEQ ID NO: 163436 - DNA, 20 bp, Artificial Sequence
  Description of Artificial Sequence: Synthetic oligonucleotide
  Target: LAMA2; (+) strand; PAM type: NRG; PAM sequence: TGG
tctaatctgtgtaacttctg

SEQ ID NO: 163437 - DNA, 20 bp, Artificial Sequence
  Description of Artificial Sequence: Synthetic oligonucleotide
  Target: LAMA2; (+) strand; PAM type: NRG; PAM sequence: TAG
ggcattttcttgtcctattg

SEQ ID NO: 163438 - DNA, 20 bp, Artificial Sequence
  Description of Artificial Sequence: Synthetic oligonucleotide
  Target: LAMA2; (+) strand; PAM type: NRG; PAM sequence: TAG
tattgtagtaaactattgac

SEQ ID NO: 163439 - DNA, 20 bp, Artificial Sequence
  Description of Artificial Sequence: Synthetic oligonucleotide
  Target: LAMA2; (+) strand; PAM type: NRG; PAM sequence: AAG
tgtagtaaactattgactag

SEQ ID NO: 163440 - DNA, 20 bp, Artificial Sequence
  Description of Artificial Sequence: Synthetic oligonucleotide
  Target: LAMA2; (+) strand; PAM type: NRG; PAM sequence: TGG
agtaaactattgactagaag

SEQ ID NO: 163441 - DNA, 20 bp, Artificial Sequence
  Description of Artificial Sequence: Synthetic oligonucleotide
  Target: LAMA2; (+) strand; PAM type: NRG; PAM sequence: TGG
aaactattgactagaagtgg

SEQ ID NO: 163442 - DNA, 20 bp, Artificial Sequence
  Description of Artificial Sequence: Synthetic oligonucleotide
  Target: LAMA2; (+) strand; PAM type: NRG; PAM sequence: AAG
ctattgactagaagtggtgg

SEQ ID NO: 163443 - DNA, 20 bp, Artificial Sequence
  Description of Artificial Sequence: Synthetic oligonucleotide
  Target: LAMA2; (+) strand; PAM type: NRG; PAM sequence: TAG
aatatccttgccttgttcct

SEQ ID NO: 163444 - DNA, 20 bp, Artificial Sequence
  Description of Artificial Sequence: Synthetic oligonucleotide
  Target: LAMA2; (+) strand; PAM type: NRG; PAM sequence: AAG
cttgccttgttccttagttt

SEQ ID NO: 163445 - DNA, 20 bp, Artificial Sequence
  Description of Artificial Sequence: Synthetic oligonucleotide
  Target: LAMA2; (+) strand; PAM type: NRG; PAM sequence: TGG
gccttgttccttagtttaag

SEQ ID NO: 163446 - DNA, 20 bp, Artificial Sequence
  Description of Artificial Sequence: Synthetic oligonucleotide
  Target: LAMA2; (+) strand; PAM type: NRG; PAM sequence: AAG
tgttccttagtttaagtgga

SEQ ID NO: 163447 - DNA, 20 bp, Artificial Sequence
  Description of Artificial Sequence: Synthetic oligonucleotide
  Target: LAMA2; (+) strand; PAM type: NRG; PAM sequence: TGG
tttataattgaaaatgatgt

SEQ ID NO: 163448 - DNA, 20 bp, Artificial Sequence
  Description of Artificial Sequence: Synthetic oligonucleotide
  Target: LAMA2; (+) strand; PAM type: NRG; PAM sequence: TAG
tgttggctatattttacctg

SEQ ID NO: 163449 - DNA, 20 bp, Artificial Sequence
  Description of Artificial Sequence: Synthetic oligonucleotide
  Target: LAMA2; (+) strand; PAM type: NRG; PAM sequence: AGG
gttggctatattttacctgt

SEQ ID NO: 163450 - DNA, 20 bp, Artificial Sequence
  Description of Artificial Sequence: Synthetic oligonucleotide
  Target: LAMA2; (+) strand; PAM type: NRG; PAM sequence: GAG
taggtgctttttattgtttt

SEQ ID NO: 163451 - DNA, 20 bp, Artificial Sequence
  Description of Artificial Sequence: Synthetic oligonucleotide
  Target: LAMA2; (+) strand; PAM type: NRG; PAM sequence: AGG
aggtgctttttattgttttg

SEQ ID NO: 163452 - DNA, 20 bp, Artificial Sequence
  Description of Artificial Sequence: Synthetic oligonucleotide
  Target: LAMA2; (+) strand; PAM type: NRG; PAM sequence: TAG
aggatgccccctcgtgtttt

SEQ ID NO: 163453 - DNA, 20 bp, Artificial Sequence
  Description of Artificial Sequence: Synthetic oligonucleotide
  Target: LAMA2; (+) strand; PAM type: NRG; PAM sequence: AAG
cctcgtgtttttagtttgct

SEQ ID NO: 163454 - DNA, 20 bp, Artificial Sequence
  Description of Artificial Sequence: Synthetic oligonucleotide
  Target: LAMA2; (+) strand; PAM type: NRG; PAM sequence: GAG
tcgtgtttttagtttgctaa

SEQ ID NO: 163455 - DNA, 20 bp, Artificial Sequence
  Description of Artificial Sequence: Synthetic oligonucleotide
  Target: LAMA2; (+) strand; PAM type: NRG; PAM sequence: AAG
gtttgctaagagcttttatc

SEQ ID NO: 163456 - DNA, 20 bp, Artificial Sequence
  Description of Artificial Sequence: Synthetic oligonucleotide
  Target: LAMA2; (+) strand; PAM type: NRG; PAM sequence: GAG
atgacttttctgcatctatt

SEQ ID NO: 163457 - DNA, 20 bp, Artificial Sequence
  Description of Artificial Sequence: Synthetic oligonucleotide
  Target: LAMA2; (+) strand; PAM type: NRG; PAM sequence: AAG
accatatgatatttcttttt

SEQ ID NO: 163458 - DNA, 20 bp, Artificial Sequence
  Description of Artificial Sequence: Synthetic oligonucleotide
  Target: LAMA2; (+) strand; PAM type: NRG; PAM sequence: CAG
tttttaagctgttaatatga

SEQ ID NO: 163459 - DNA, 20 bp, Artificial Sequence
  Description of Artificial Sequence: Synthetic oligonucleotide
  Target: LAMA2; (+) strand; PAM type: NRG; PAM sequence: CAG
tgattttcaacatatcaatc

SEQ ID NO: 163460 - DNA, 20 bp, Artificial Sequence
  Description of Artificial Sequence: Synthetic oligonucleotide
  Target: LAMA2; (+) strand; PAM type: NRG; PAM sequence: CAG
caatccagtcttacaatcct

SEQ ID NO: 163461 - DNA, 20 bp, Artificial Sequence
  Description of Artificial Sequence: Synthetic oligonucleotide
  Target: LAMA2; (+) strand; PAM type: NRG; PAM sequence: TGG
atcctcagattaatcctgct

SEQ ID NO: 163462 - DNA, 20 bp, Artificial Sequence
  Description of Artificial Sequence: Synthetic oligonucleotide
  Target: LAMA2; (+) strand; PAM type: NRG; PAM sequence: TGG
agattaatcctgcttggcca

SEQ ID NO: 163463 - DNA, 20 bp, Artificial Sequence
  Description of Artificial Sequence: Synthetic oligonucleotide
  Target: LAMA2; (+) strand; PAM type: NRG; PAM sequence: GGG
gattaatcctgcttggccat

SEQ ID NO: 163464 - DNA, 20 bp, Artificial Sequence
  Description of Artificial Sequence: Synthetic oligonucleotide
  Target: LAMA2; (+) strand; PAM type: NRG; PAM sequence: GGG
attaatcctgcttggccatg

SEQ ID NO: 163465 - DNA, 20 bp, Artificial Sequence
  Description of Artificial Sequence: Synthetic oligonucleotide
  Target: LAMA2; (+) strand; PAM type: NRG; PAM sequence: TAG
ttatgttgaatcctgtttgc

SEQ ID NO: 163466 - DNA, 20 bp, Artificial Sequence
  Description of Artificial Sequence: Synthetic oligonucleotide
  Target: LAMA2; (+) strand; PAM type: NRG; PAM sequence: TGG
tagcattttcttaatgattt

SEQ ID NO: 163467 - DNA, 20 bp, Artificial Sequence
  Description of Artificial Sequence: Synthetic oligonucleotide
  Target: LAMA2; (+) strand; PAM type: NRG; PAM sequence: AAG
gattttggatctacgtttat

SEQ ID NO: 163468 - DNA, 20 bp, Artificial Sequence
  Description of Artificial Sequence: Synthetic oligonucleotide
  Target: LAMA2; (+) strand; PAM type: NRG; PAM sequence: TGG
tctacgtttataagaaatat

SEQ ID NO: 163469 - DNA, 20 bp, Artificial Sequence
  Description of Artificial Sequence: Synthetic oligonucleotide
  Target: LAMA2; (+) strand; PAM type: NRG; PAM sequence: TAG
gtatgaacttatttttcttg

SEQ ID NO: 163470 - DNA, 20 bp, Artificial Sequence
  Description of Artificial Sequence: Synthetic oligonucleotide
  Target: LAMA2; (+) strand; PAM type: NRG; PAM sequence: CGG
ttttcttgtagcgttgtcgt

SEQ ID NO: 163471 - DNA, 20 bp, Artificial Sequence
  Description of Artificial Sequence: Synthetic oligonucleotide
  Target: LAMA2; (+) strand; PAM type: NRG; PAM sequence: GGG
tttcttgtagcgttgtcgtc

SEQ ID NO: 163472 - DNA, 20 bp, Artificial Sequence
  Description of Artificial Sequence: Synthetic oligonucleotide
  Target: LAMA2; (+) strand; PAM type: NRG; PAM sequence: GAG
tgtagcgttgtcgtcgggat

SEQ ID NO: 163473 - DNA, 20 bp, Artificial Sequence
  Description of Artificial Sequence: Synthetic oligonucleotide
  Target: LAMA2; (+) strand; PAM type: NRG; PAM sequence: AGG
gtagcgttgtcgtcgggatg

SEQ ID NO: 163474 - DNA, 20 bp, Artificial Sequence
  Description of Artificial Sequence: Synthetic oligonucleotide
  Target: LAMA2; (+) strand; PAM type: NRG; PAM sequence: AAG
tcgtcgggatgaggtactgc

SEQ ID NO: 163475 - DNA, 20 bp, Artificial Sequence
  Description of Artificial Sequence: Synthetic oligonucleotide
  Target: LAMA2; (+) strand; PAM type: NRG; PAM sequence: TGG
gtactgcaagcttcatgaaa

SEQ ID NO: 163476 - DNA, 20 bp, Artificial Sequence
  Description of Artificial Sequence: Synthetic oligonucleotide
  Target: LAMA2; (+) strand; PAM type: NRG; PAM sequence: CAG
caagcttcatgaaatggatt

SEQ ID NO: 163477 - DNA, 20 bp, Artificial Sequence
  Description of Artificial Sequence: Synthetic oligonucleotide
  Target: LAMA2; (+) strand; PAM type: NRG; PAM sequence: AAG
gcttcatgaaatggattcag

SEQ ID NO: 163478 - DNA, 20 bp, Artificial Sequence
  Description of Artificial Sequence: Synthetic oligonucleotide
  Target: LAMA2; (+) strand; PAM type: NRG; PAM sequence: AAG
tccctcctcataatttataa

SEQ ID NO: 163479 - DNA, 20 bp, Artificial Sequence
  Description of Artificial Sequence: Synthetic oligonucleotide
  Target: LAMA2; (+) strand; PAM type: NRG; PAM sequence: GAG
aaagcgttttcacaatcaat

SEQ ID NO: 163480 - DNA, 20 bp, Artificial Sequence
  Description of Artificial Sequence: Synthetic oligonucleotide
  Target: LAMA2; (+) strand; PAM type: NRG; PAM sequence: AGG
aagcgttttcacaatcaatg

SEQ ID NO: 163481 - DNA, 20 bp, Artificial Sequence
  Description of Artificial Sequence: Synthetic oligonucleotide
  Target: LAMA2; (+) strand; PAM type: NRG; PAM sequence: TAG
cgttttcacaatcaatgagg

SEQ ID NO: 163482 - DNA, 20 bp, Artificial Sequence
  Description of Artificial Sequence: Synthetic oligonucleotide
  Target: LAMA2; (+) strand; PAM type: NRG; PAM sequence: CAG
acaatcaatgaggtagaaaa

SEQ ID NO: 163483 - DNA, 20 bp, Artificial Sequence
  Description of Artificial Sequence: Synthetic oligonucleotide
  Target: LAMA2; (+) strand; PAM type: NRG; PAM sequence: TAG
ggtagaaaacagaaatactt

SEQ ID NO: 163484 - DNA, 20 bp, Artificial Sequence
  Description of Artificial Sequence: Synthetic oligonucleotide
  Target: LAMA2; (+) strand; PAM type: NRG; PAM sequence: GAG
tagaaaacagaaatacttta

SEQ ID NO: 163485 - DNA, 20 bp, Artificial Sequence
  Description of Artificial Sequence: Synthetic oligonucleotide
  Target: LAMA2; (+) strand; PAM type: NRG; PAM sequence: AGG
agaaaacagaaatactttag

SEQ ID NO: 163486 - DNA, 20 bp, Artificial Sequence
  Description of Artificial Sequence: Synthetic oligonucleotide
  Target: LAMA2; (+) strand; PAM type: NRG; PAM sequence: AAG
aatactttagaggaacccaa

SEQ ID NO: 163487 - DNA, 20 bp, Artificial Sequence
  Description of Artificial Sequence: Synthetic oligonucleotide
  Target: LAMA2; (+) strand; PAM type: NRG; PAM sequence: AAG
ccaaaagctcactatttgaa

SEQ ID NO: 163488 - DNA, 20 bp, Artificial Sequence
  Description of Artificial Sequence: Synthetic oligonucleotide
  Target: LAMA2; (+) strand; PAM type: NRG; PAM sequence: CAG
agctcactatttgaaaagat

SEQ ID NO: 163489 - DNA, 20 bp, Artificial Sequence
  Description of Artificial Sequence: Synthetic oligonucleotide
  Target: LAMA2; (+) strand; PAM type: NRG; PAM sequence: AAG
actatttgaaaagatcagta

SEQ ID NO: 163490 - DNA, 20 bp, Artificial Sequence
  Description of Artificial Sequence: Synthetic oligonucleotide
  Target: LAMA2; (+) strand; PAM type: NRG; PAM sequence: TGG
tttgaaaagatcagtaaagt

SEQ ID NO: 163491 - DNA, 20 bp, Artificial Sequence
  Description of Artificial Sequence: Synthetic oligonucleotide
  Target: LAMA2; (+) strand; PAM type: NRG; PAM sequence: TAG
cagtaaagttggtaatattc

SEQ ID NO: 163492 - DNA, 20 bp, Artificial Sequence
  Description of Artificial Sequence: Synthetic oligonucleotide
  Target: LAMA2; (+) strand; PAM type: NRG; PAM sequence: AAG
aaagttggtaatattctaga

SEQ ID NO: 163493 - DNA, 20 bp, Artificial Sequence
  Description of Artificial Sequence: Synthetic oligonucleotide
  Target: LAMA2; (+) strand; PAM type: NRG; PAM sequence: AGG
aagttggtaatattctagaa

SEQ ID NO: 163494 - DNA, 20 bp, Artificial Sequence
  Description of Artificial Sequence: Synthetic oligonucleotide
  Target: LAMA2; (+) strand; PAM type: NRG; PAM sequence: AAG
atattctagaaaggttaatc

SEQ ID NO: 163495 - DNA, 20 bp, Artificial Sequence
  Description of Artificial Sequence: Synthetic oligonucleotide
  Target: LAMA2; (+) strand; PAM type: NRG; PAM sequence: AAG
agaaaggttaatcaagaaaa

SEQ ID NO: 163496 - DNA, 20 bp, Artificial Sequence
  Description of Artificial Sequence: Synthetic oligonucleotide
  Target: LAMA2; (+) strand; PAM type: NRG; PAM sequence: GAG
aaaggttaatcaagaaaaaa

SEQ ID NO: 163497 - DNA, 20 bp, Artificial Sequence
  Description of Artificial Sequence: Synthetic oligonucleotide
  Target: LAMA2; (+) strand; PAM type: NRG; PAM sequence: GAG
aggttaatcaagaaaaaaga

SEQ ID NO: 163498 - DNA, 20 bp, Artificial Sequence
  Description of Artificial Sequence: Synthetic oligonucleotide
  Target: LAMA2; (+) strand; PAM type: NRG; PAM sequence: AAG
ttaatcaagaaaaaagagag

SEQ ID NO: 163499 - DNA, 20 bp, Artificial Sequence
  Description of Artificial Sequence: Synthetic oligonucleotide
  Target: LAMA2; (+) strand; PAM type: NRG; PAM sequence: AAG
agaaaaaagagagaagaaac

SEQ ID NO: 163500 - DNA, 20 bp, Artificial Sequence
  Description of Artificial Sequence: Synthetic oligonucleotide
  Target: LAMA2; (+) strand; PAM type: NRG; PAM sequence: AAG
gcaatcaaaatcacaaataa

SEQ ID NO: 163501 - DNA, 20 bp, Artificial Sequence
  Description of Artificial Sequence: Synthetic oligonucleotide
  Target: LAMA2; (+) strand; PAM type: NRG; PAM sequence: AGG
caatcaaaatcacaaataaa

SEQ ID NO: 163502 - DNA, 20 bp, Artificial Sequence
  Description of Artificial Sequence: Synthetic oligonucleotide
  Target: LAMA2; (+) strand; PAM type: NRG; PAM sequence: GGG
aatcaaaatcacaaataaaa

SEQ ID NO: 163503 - DNA, 20 bp, Artificial Sequence
  Description of Artificial Sequence: Synthetic oligonucleotide
  Target: LAMA2; (+) strand; PAM type: NRG; PAM sequence: GGG
atcaaaatcacaaataaaag

SEQ ID NO: 163504 - DNA, 20 bp, Artificial Sequence
  Description of Artificial Sequence: Synthetic oligonucleotide
  Target: LAMA2; (+) strand; PAM type: NRG; PAM sequence: GGG
tcaaaatcacaaataaaagg

SEQ ID NO: 163505 - DNA, 20 bp, Artificial Sequence
  Description of Artificial Sequence: Synthetic oligonucleotide
  Target: LAMA2; (+) strand; PAM type: NRG; PAM sequence: TAG
ataaaagggggacatcacta

SEQ ID NO: 163506 - DNA, 20 bp, Artificial Sequence
  Description of Artificial Sequence: Synthetic oligonucleotide
  Target: LAMA2; (+) strand; PAM type: NRG; PAM sequence: TAG
ggacatcactatagatccta

SEQ ID NO: 163507 - DNA, 20 bp, Artificial Sequence
  Description of Artificial Sequence: Synthetic oligonucleotide
  Target: LAMA2; (+) strand; PAM type: NRG; PAM sequence: AAG
ctatagatcctatagacatt

SEQ ID NO: 163508 - DNA, 20 bp, Artificial Sequence
  Description of Artificial Sequence: Synthetic oligonucleotide
  Target: LAMA2; (+) strand; PAM type: NRG; PAM sequence: TGG
tagacattaagataataata

SEQ ID NO: 163509 - DNA, 20 bp, Artificial Sequence
  Description of Artificial Sequence: Synthetic oligonucleotide
  Target: LAMA2; (+) strand; PAM type: NRG; PAM sequence: TAG
acattaagataataatatgg

SEQ ID NO: 163510 - DNA, 20 bp, Artificial Sequence
  Description of Artificial Sequence: Synthetic oligonucleotide
  Target: LAMA2; (+) strand; PAM type: NRG; PAM sequence: TAG
agataataatatggtagtaa

SEQ ID NO: 163511 - DNA, 20 bp, Artificial Sequence
  Description of Artificial Sequence: Synthetic oligonucleotide
  Target: LAMA2; (+) strand; PAM type: NRG; PAM sequence: AGG
gataataatatggtagtaat

SEQ ID NO: 163512 - DNA, 20 bp, Artificial Sequence
  Description of Artificial Sequence: Synthetic oligonucleotide
  Target: LAMA2; (+) strand; PAM type: NRG; PAM sequence: AAG
aatatggtagtaataggaac

SEQ ID NO: 163513 - DNA, 20 bp, Artificial Sequence
  Description of Artificial Sequence: Synthetic oligonucleotide
  Target: LAMA2; (+) strand; PAM type: NRG; PAM sequence: AAG
aatgtgataacttgcatgaa

SEQ ID NO: 163514 - DNA, 20 bp, Artificial Sequence
  Description of Artificial Sequence: Synthetic oligonucleotide
  Target: LAMA2; (+) strand; PAM type: NRG; PAM sequence: GAG
ttccttcttttgcttacttt

SEQ ID NO: 163515 - DNA, 20 bp, Artificial Sequence
  Description of Artificial Sequence: Synthetic oligonucleotide
  Target: LAMA2; (+) strand; PAM type: NRG; PAM sequence: AAG
ttaattttctcttgtgttcc

SEQ ID NO: 163516 - DNA, 20 bp, Artificial Sequence
  Description of Artificial Sequence: Synthetic oligonucleotide
  Target: LAMA2; (+) strand; PAM type: NRG; PAM sequence: GAG
gttttttgttttttgttttt

SEQ ID NO: 163517 - DNA, 20 bp, Artificial Sequence
  Description of Artificial Sequence: Synthetic oligonucleotide
  Target: LAMA2; (+) strand; PAM type: NRG; PAM sequence: CGG
tttgttttttgtttttgaga

SEQ ID NO: 163518 - DNA, 20 bp, Artificial Sequence
  Description of Artificial Sequence: Synthetic oligonucleotide
  Target: LAMA2; (+) strand; PAM type: NRG; PAM sequence: GAG
tgttttttgtttttgagacg

SEQ ID NO: 163519 - DNA, 20 bp, Artificial Sequence
  Description of Artificial Sequence: Synthetic oligonucleotide
  Target: LAMA2; (+) strand; PAM type: NRG; PAM sequence: CAG
cggagtcttgctctgacccc

SEQ ID NO: 163520 - DNA, 20 bp, Artificial Sequence
  Description of Artificial Sequence: Synthetic oligonucleotide
  Target: LAMA2; (+) strand; PAM type: NRG; PAM sequence: AGG
ggagtcttgctctgaccccc

SEQ ID NO: 163521 - DNA, 20 bp, Artificial Sequence
  Description of Artificial Sequence: Synthetic oligonucleotide
  Target: LAMA2; (+) strand; PAM type: NRG; PAM sequence: GAG
ttgctctgacccccaggctc

SEQ ID NO: 163522 - DNA, 20 bp, Artificial Sequence
  Description of Artificial Sequence: Synthetic oligonucleotide
  Target: LAMA2; (+) strand; PAM type: NRG; PAM sequence: CAG
ctgacccccaggctcgagtg

SEQ ID NO: 163523 - DNA, 20 bp, Artificial Sequence
  Description of Artificial Sequence: Synthetic oligonucleotide
  Target: LAMA2; (+) strand; PAM type: NRG; PAM sequence: TGG
acccccaggctcgagtgcag

SEQ ID NO: 163524 - DNA, 20 bp, Artificial Sequence
  Description of Artificial Sequence: Synthetic oligonucleotide
  Target: LAMA2; (+) strand; PAM type: NRG; PAM sequence: CAG
cccaggctcgagtgcagtgg

SEQ ID NO: 163525 - DNA, 20 bp, Artificial Sequence
  Description of Artificial Sequence: Synthetic oligonucleotide
  Target: LAMA2; (+) strand; PAM type: NRG; PAM sequence: TGG
tcgagtgcagtggcagatct

SEQ ID NO: 163526 - DNA, 20 bp, Artificial Sequence
  Description of Artificial Sequence: Synthetic oligonucleotide
  Target: LAMA2; (+) strand; PAM type: NRG; PAM sequence: CAG
ggcagatcttggctcactgc

SEQ ID NO: 163527 - DNA, 20 bp, Artificial Sequence
  Description of Artificial Sequence: Synthetic oligonucleotide
  Target: LAMA2; (+) strand; PAM type: NRG; PAM sequence: CGG
tcactgccagctccgcctcc

SEQ ID NO: 163528 - DNA, 20 bp, Artificial Sequence
  Description of Artificial Sequence: Synthetic oligonucleotide
  Target: LAMA2; (+) strand; PAM type: NRG; PAM sequence: GGG
cactgccagctccgcctccc

SEQ ID NO: 163529 - DNA, 20 bp, Artificial Sequence
  Description of Artificial Sequence: Synthetic oligonucleotide
  Target: LAMA2; (+) strand; PAM type: NRG; PAM sequence: CAG
ttcacgccattctcctgcct

SEQ ID NO: 163530 - DNA, 20 bp, Artificial Sequence
  Description of Artificial Sequence: Synthetic oligonucleotide
  Target: LAMA2; (+) strand; PAM type: NRG; PAM sequence: GAG
ttctcctgcctcagcctcct

SEQ ID NO: 163531 - DNA, 20 bp, Artificial Sequence
  Description of Artificial Sequence: Synthetic oligonucleotide
  Target: LAMA2; (+) strand; PAM type: NRG; PAM sequence: TAG
tcctgcctcagcctcctgag

SEQ ID NO: 163532 - DNA, 20 bp, Artificial Sequence
  Description of Artificial Sequence: Synthetic oligonucleotide
  Target: LAMA2; (+) strand; PAM type: NRG; PAM sequence: TGG
gcctcagcctcctgagtagc

SEQ ID NO: 163533 - DNA, 20 bp, Artificial Sequence
  Description of Artificial Sequence: Synthetic oligonucleotide
  Target: LAMA2; (+) strand; PAM type: NRG; PAM sequence: GGG
cctcagcctcctgagtagct

SEQ ID NO: 163534 - DNA, 20 bp, Artificial Sequence
  Description of Artificial Sequence: Synthetic oligonucleotide
  Target: LAMA2; (+) strand; PAM type: NRG; PAM sequence: CAG
ctcctgagtagctgggacta

SEQ ID NO: 163535 - DNA, 20 bp, Artificial Sequence
  Description of Artificial Sequence: Synthetic oligonucleotide
  Target: LAMA2; (+) strand; PAM type: NRG; PAM sequence: AGG
tcctgagtagctgggactac

SEQ ID NO: 163536 - DNA, 20 bp, Artificial Sequence
  Description of Artificial Sequence: Synthetic oligonucleotide
  Target: LAMA2; (+) strand; PAM type: NRG; PAM sequence: CGG
caggtgcccgccactacgcc

SEQ ID NO: 163537 - DNA, 20 bp, Artificial Sequence
  Description of Artificial Sequence: Synthetic oligonucleotide
  Target: LAMA2; (+) strand; PAM type: NRG; PAM sequence: TAG
cggctaattttttgtatttt

SEQ ID NO: 163538 - DNA, 20 bp, Artificial Sequence
  Description of Artificial Sequence: Synthetic oligonucleotide
  Target: LAMA2; (+) strand; PAM type: NRG; PAM sequence: TAG
ctaattttttgtatttttag

SEQ ID NO: 163539 - DNA, 20 bp, Artificial Sequence
  Description of Artificial Sequence: Synthetic oligonucleotide
  Target: LAMA2; (+) strand; PAM type: NRG; PAM sequence: GAG
aattttttgtatttttagta

SEQ ID NO: 163540 - DNA, 20 bp, Artificial Sequence
  Description of Artificial Sequence: Synthetic oligonucleotide
  Target: LAMA2; (+) strand; PAM type: NRG; PAM sequence: CGG
ttttgtatttttagtagaga

SEQ ID NO: 163541 - DNA, 20 bp, Artificial Sequence
  Description of Artificial Sequence: Synthetic oligonucleotide
  Target: LAMA2; (+) strand; PAM type: NRG; PAM sequence: GGG
tttgtatttttagtagagac

SEQ ID NO: 163542 - DNA, 20 bp, Artificial Sequence
  Description of Artificial Sequence: Synthetic oligonucleotide
  Target: LAMA2; (+) strand; PAM type: NRG; PAM sequence: GGG
ttgtatttttagtagagacg

SEQ ID NO: 163543 - DNA, 20 bp, Artificial Sequence
  Description of Artificial Sequence: Synthetic oligonucleotide
  Target: LAMA2; (+) strand; PAM type: NRG; PAM sequence: TAG
gagacggggtttcaccgcgt

SEQ ID NO: 163544 - DNA, 20 bp, Artificial Sequence
  Description of Artificial Sequence: Synthetic oligonucleotide
  Target: LAMA2; (+) strand; PAM type: NRG; PAM sequence: CAG
cggggtttcaccgcgttagc

SEQ ID NO: 163545 - DNA, 20 bp, Artificial Sequence
  Description of Artificial Sequence: Synthetic oligonucleotide
  Target: LAMA2; (+) strand; PAM type: NRG; PAM sequence: AGG
ggggtttcaccgcgttagcc

SEQ ID NO: 163546 - DNA, 20 bp, Artificial Sequence
  Description of Artificial Sequence: Synthetic oligonucleotide
  Target: LAMA2; (+) strand; PAM type: NRG; PAM sequence: TGG
tttcaccgcgttagccagga

SEQ ID NO: 163547 - DNA, 20 bp, Artificial Sequence
  Description of Artificial Sequence: Synthetic oligonucleotide
  Target: LAMA2; (+) strand; PAM type: NRG; PAM sequence: CAG
ctcctgacctcgtgatccgc

SEQ ID NO: 163548 - DNA, 20 bp, Artificial Sequence
  Description of Artificial Sequence: Synthetic oligonucleotide
  Target: LAMA2; (+) strand; PAM type: NRG; PAM sequence: CAG
acctcgtgatccgccagcct

SEQ ID NO: 163549 - DNA, 20 bp, Artificial Sequence
  Description of Artificial Sequence: Synthetic oligonucleotide
  Target: LAMA2; (+) strand; PAM type: NRG; PAM sequence: TAG
gcctcagcctcccaaaatgc

SEQ ID NO: 163550 - DNA, 20 bp, Artificial Sequence
  Description of Artificial Sequence: Synthetic oligonucleotide
  Target: LAMA2; (+) strand; PAM type: NRG; PAM sequence: AGG
cctcagcctcccaaaatgct

SEQ ID NO: 163551 - DNA, 20 bp, Artificial Sequence
  Description of Artificial Sequence: Synthetic oligonucleotide
  Target: LAMA2; (+) strand; PAM type: NRG; PAM sequence: CAG
ctcccaaaatgctaggatta

SEQ ID NO: 163552 - DNA, 20 bp, Artificial Sequence
  Description of Artificial Sequence: Synthetic oligonucleotide
  Target: LAMA2; (+) strand; PAM type: NRG; PAM sequence: AGG
tcccaaaatgctaggattac

SEQ ID NO: 163553 - DNA, 20 bp, Artificial Sequence
  Description of Artificial Sequence: Synthetic oligonucleotide
  Target: LAMA2; (+) strand; PAM type: NRG; PAM sequence: GAG
aatgctaggattacaggcgt

SEQ ID NO: 163554 - DNA, 20 bp, Artificial Sequence
  Description of Artificial Sequence: Synthetic oligonucleotide
  Target: LAMA2; (+) strand; PAM type: NRG; PAM sequence: CGG
caggcgtgagccaccgtgcc

SEQ ID NO: 163555 - DNA, 20 bp, Artificial Sequence
  Description of Artificial Sequence: Synthetic oligonucleotide
  Target: LAMA2; (+) strand; PAM type: NRG; PAM sequence: AAG
tgcccggccaattgtgttcc

SEQ ID NO: 163556 - DNA, 20 bp, Artificial Sequence
  Description of Artificial Sequence: Synthetic oligonucleotide
  Target: LAMA2; (+) strand; PAM type: NRG; PAM sequence: AAG
aattgtgttccaagtttctt

SEQ ID NO: 163557 - DNA, 20 bp, Artificial Sequence
  Description of Artificial Sequence: Synthetic oligonucleotide
  Target: LAMA2; (+) strand; PAM type: NRG; PAM sequence: AGG
attgtgttccaagtttctta

SEQ ID NO: 163558 - DNA, 20 bp, Artificial Sequence
  Description of Artificial Sequence: Synthetic oligonucleotide
  Target: LAMA2; (+) strand; PAM type: NRG; PAM sequence: TAG
agtttcttaaggtgaaacct

SEQ ID NO: 163559 - DNA, 20 bp, Artificial Sequence
  Description of Artificial Sequence: Synthetic oligonucleotide
  Target: LAMA2; (+) strand; PAM type: NRG; PAM sequence: TGG
gtaatcctttttctctaata

SEQ ID NO: 163560 - DNA, 20 bp, Artificial Sequence
  Description of Artificial Sequence: Synthetic oligonucleotide
  Target: LAMA2; (+) strand; PAM type: NRG; PAM sequence: GGG
taatcctttttctctaatat

SEQ ID NO: 163561 - DNA, 20 bp, Artificial Sequence
  Description of Artificial Sequence: Synthetic oligonucleotide
  Target: LAMA2; (+) strand; PAM type: NRG; PAM sequence: CAG
gcatttgatacatttttttc

SEQ ID NO: 163562 - DNA, 20 bp, Artificial Sequence
  Description of Artificial Sequence: Synthetic oligonucleotide
  Target: LAMA2; (+) strand; PAM type: NRG; PAM sequence: TGG
gctgtgttttaattttcact

SEQ ID NO: 163563 - DNA, 20 bp, Artificial Sequence
  Description of Artificial Sequence: Synthetic oligonucleotide
  Target: LAMA2; (+) strand; PAM type: NRG; PAM sequence: TGG
atataatctttaatttattt

SEQ ID NO: 163564 - DNA, 20 bp, Artificial Sequence
  Description of Artificial Sequence: Synthetic oligonucleotide
  Target: LAMA2; (+) strand; PAM type: NRG; PAM sequence: GGG
tataatctttaatttatttt

SEQ ID NO: 163565 - DNA, 20 bp, Artificial Sequence
  Description of Artificial Sequence: Synthetic oligonucleotide
  Target: LAMA2; (+) strand; PAM type: NRG; PAM sequence: GGG
ataatctttaatttattttg

SEQ ID NO: 163566 - DNA, 20 bp, Artificial Sequence
  Description of Artificial Sequence: Synthetic oligonucleotide
  Target: LAMA2; (+) strand; PAM type: NRG; PAM sequence: TAG
tttattttggggataatgtt

SEQ ID NO: 163567 - DNA, 20 bp, Artificial Sequence
  Description of Artificial Sequence: Synthetic oligonucleotide
  Target: LAMA2; (+) strand; PAM type: NRG; PAM sequence: TGG
atgtttagtttctaaatatt

SEQ ID NO: 163568 - DNA, 20 bp, Artificial Sequence
  Description of Artificial Sequence: Synthetic oligonucleotide
  Target: LAMA2; (+) strand; PAM type: NRG; PAM sequence: GGG
tgtttagtttctaaatattt

SEQ ID NO: 163569 - DNA, 20 bp, Artificial Sequence
  Description of Artificial Sequence: Synthetic oligonucleotide
  Target: LAMA2; (+) strand; PAM type: NRG; PAM sequence: GGG
gtttagtttctaaatatttg

SEQ ID NO: 163570 - DNA, 20 bp, Artificial Sequence
  Description of Artificial Sequence: Synthetic oligonucleotide
  Target: LAMA2; (+) strand; PAM type: NRG; PAM sequence: AAG
taaatatttggggaattttc

SEQ ID NO: 163571 - DNA, 20 bp, Artificial Sequence
  Description of Artificial Sequence: Synthetic oligonucleotide
  Target: LAMA2; (+) strand; PAM type: NRG; PAM sequence: AGG
aaatatttggggaattttca

SEQ ID NO: 163572 - DNA, 20 bp, Artificial Sequence
  Description of Artificial Sequence: Synthetic oligonucleotide
  Target: LAMA2; (+) strand; PAM type: NRG; PAM sequence: TAG
caaggtatcgttactgttac

SEQ ID NO: 163573 - DNA, 20 bp, Artificial Sequence
  Description of Artificial Sequence: Synthetic oligonucleotide
  Target: LAMA2; (+) strand; PAM type: NRG; PAM sequence: TAG
tcgttactgttactagtatc

SEQ ID NO: 163574 - DNA, 20 bp, Artificial Sequence
  Description of Artificial Sequence: Synthetic oligonucleotide
  Target: LAMA2; (+) strand; PAM type: NRG; PAM sequence: GAG
gtttaattctaaattgttct

SEQ ID NO: 163575 - DNA, 20 bp, Artificial Sequence
  Description of Artificial Sequence: Synthetic oligonucleotide
  Target: LAMA2; (+) strand; PAM type: NRG; PAM sequence: CAG
gaacataatctgcattattt

SEQ ID NO: 163576 - DNA, 20 bp, Artificial Sequence
  Description of Artificial Sequence: Synthetic oligonucleotide
  Target: LAMA2; (+) strand; PAM type: NRG; PAM sequence: GAG
cagaccttttgaaaattatt

SEQ ID NO: 163577 - DNA, 20 bp, Artificial Sequence
  Description of Artificial Sequence: Synthetic oligonucleotide
  Target: LAMA2; (+) strand; PAM type: NRG; PAM sequence: TGG
aattattgagatttgtttta

SEQ ID NO: 163578 - DNA, 20 bp, Artificial Sequence
  Description of Artificial Sequence: Synthetic oligonucleotide
  Target: LAMA2; (+) strand; PAM type: NRG; PAM sequence: CGG
ttgagatttgttttatggcc

SEQ ID NO: 163579 - DNA, 20 bp, Artificial Sequence
  Description of Artificial Sequence: Synthetic oligonucleotide
  Target: LAMA2; (+) strand; PAM type: NRG; PAM sequence: TAG
atttgttttatggcccggaa

SEQ ID NO: 163580 - DNA, 20 bp, Artificial Sequence
  Description of Artificial Sequence: Synthetic oligonucleotide
  Target: LAMA2; (+) strand; PAM type: NRG; PAM sequence: CAG
ttatggcccggaatagtgtt

SEQ ID NO: 163581 - DNA, 20 bp, Artificial Sequence
  Description of Artificial Sequence: Synthetic oligonucleotide
  Target: LAMA2; (+) strand; PAM type: NRG; PAM sequence: TGG
cttgaaaataatgtgtattc

SEQ ID NO: 163582 - DNA, 20 bp, Artificial Sequence
  Description of Artificial Sequence: Synthetic oligonucleotide
  Target: LAMA2; (+) strand; PAM type: NRG; PAM sequence: GAG
tgaaaataatgtgtattctg

SEQ ID NO: 163583 - DNA, 20 bp, Artificial Sequence
  Description of Artificial Sequence: Synthetic oligonucleotide
  Target: LAMA2; (+) strand; PAM type: NRG; PAM sequence: TGG
aatgtgtattctggagttgt

SEQ ID NO: 163584 - DNA, 20 bp, Artificial Sequence
  Description of Artificial Sequence: Synthetic oligonucleotide
  Target: LAMA2; (+) strand; PAM type: NRG; PAM sequence: TAG
gttggatgaaaacttctata

SEQ ID NO: 163585 - DNA, 20 bp, Artificial Sequence
  Description of Artificial Sequence: Synthetic oligonucleotide
  Target: LAMA2; (+) strand; PAM type: NRG; PAM sequence: AGG
ttggatgaaaacttctatat

SEQ ID NO: 163586 - DNA, 20 bp, Artificial Sequence
  Description of Artificial Sequence: Synthetic oligonucleotide
  Target: LAMA2; (+) strand; PAM type: NRG; PAM sequence: CGG
tataggtcaattatccttaa

SEQ ID NO: 163587 - DNA, 20 bp, Artificial Sequence
  Description of Artificial Sequence: Synthetic oligonucleotide
  Target: LAMA2; (+) strand; PAM type: NRG; PAM sequence: TAG
caattatccttaacggtttt

SEQ ID NO: 163588 - DNA, 20 bp, Artificial Sequence
  Description of Artificial Sequence: Synthetic oligonucleotide
  Target: LAMA2; (+) strand; PAM type: NRG; PAM sequence: CAG
tttagatctacatgttctct

SEQ ID NO: 163589 - DNA, 20 bp, Artificial Sequence
  Description of Artificial Sequence: Synthetic oligonucleotide
  Target: LAMA2; (+) strand; PAM type: NRG; PAM sequence: GAG
tacatgttctctcagttact

SEQ ID NO: 163590 - DNA, 20 bp, Artificial Sequence
  Description of Artificial Sequence: Synthetic oligonucleotide
  Target: LAMA2; (+) strand; PAM type: NRG; PAM sequence: GAG
catgttctctcagttactga

SEQ ID NO: 163591 - DNA, 20 bp, Artificial Sequence
  Description of Artificial Sequence: Synthetic oligonucleotide
  Target: LAMA2; (+) strand; PAM type: NRG; PAM sequence: TGG
ctctcagttactgagagtgt

SEQ ID NO: 163592 - DNA, 20 bp, Artificial Sequence
  Description of Artificial Sequence: Synthetic oligonucleotide
  Target: LAMA2; (+) strand; PAM type: NRG; PAM sequence: CAG
gtttcttctttcacttctct

SEQ ID NO: 163593 - DNA, 20 bp, Artificial Sequence
  Description of Artificial Sequence: Synthetic oligonucleotide
  Target: LAMA2; (+) strand; PAM type: NRG; PAM sequence: AGG
tttcttctttcacttctctc

SEQ ID NO: 163594 - DNA, 20 bp, Artificial Sequence
  Description of Artificial Sequence: Synthetic oligonucleotide
  Target: LAMA2; (+) strand; PAM type: NRG; PAM sequence: GAG
ttttattcacatgtattttt

SEQ ID NO: 163595 - DNA, 20 bp, Artificial Sequence
  Description of Artificial Sequence: Synthetic oligonucleotide
  Target: LAMA2; (+) strand; PAM type: NRG; PAM sequence: CAG
tattcacatgtatttttgag

SEQ ID NO: 163596 - DNA, 20 bp, Artificial Sequence
  Description of Artificial Sequence: Synthetic oligonucleotide
  Target: LAMA2; (+) strand; PAM type: NRG; PAM sequence: TAG
gtatttttgagcagtgatac

SEQ ID NO: 163597 - DNA, 20 bp, Artificial Sequence
  Description of Artificial Sequence: Synthetic oligonucleotide
  Target: LAMA2; (+) strand; PAM type: NRG; PAM sequence: AGG
tatttttgagcagtgatact

SEQ ID NO: 163598 - DNA, 20 bp, Artificial Sequence
  Description of Artificial Sequence: Synthetic oligonucleotide
  Target: LAMA2; (+) strand; PAM type: NRG; PAM sequence: TAG
atactaggtgcatgaacatt

SEQ ID NO: 163599 - DNA, 20 bp, Artificial Sequence
  Description of Artificial Sequence: Synthetic oligonucleotide
  Target: LAMA2; (+) strand; PAM type: NRG; PAM sequence: AGG
tactaggtgcatgaacattt

SEQ ID NO: 163600 - DNA, 20 bp, Artificial Sequence
  Description of Artificial Sequence: Synthetic oligonucleotide
  Target: LAMA2; (+) strand; PAM type: NRG; PAM sequence: AAG
gattgctatgtctttttgaa

SEQ ID NO: 163601 - DNA, 20 bp, Artificial Sequence
  Description of Artificial Sequence: Synthetic oligonucleotide
  Target: LAMA2; (+) strand; PAM type: NRG; PAM sequence: TGG
gctatgtctttttgaaaagt

SEQ ID NO: 163602 - DNA, 20 bp, Artificial Sequence
  Description of Artificial Sequence: Synthetic oligonucleotide
  Target: LAMA2; (+) strand; PAM type: NRG; PAM sequence: TAG
gaaatgtctctctttattcc

SEQ ID NO: 163603 - DNA, 20 bp, Artificial Sequence
  Description of Artificial Sequence: Synthetic oligonucleotide
  Target: LAMA2; (+) strand; PAM type: NRG; PAM sequence: CAG
tcctagtaacattccttgtt

SEQ ID NO: 163604 - DNA, 20 bp, Artificial Sequence
  Description of Artificial Sequence: Synthetic oligonucleotide
  Target: LAMA2; (+) strand; PAM type: NRG; PAM sequence: AAG
tagtaacattccttgttcag

SEQ ID NO: 163605 - DNA, 20 bp, Artificial Sequence
  Description of Artificial Sequence: Synthetic oligonucleotide
  Target: LAMA2; (+) strand; PAM type: NRG; PAM sequence: TAG
tactttttctgatatttata

SEQ ID NO: 163606 - DNA, 20 bp, Artificial Sequence
  Description of Artificial Sequence: Synthetic oligonucleotide
  Target: LAMA2; (+) strand; PAM type: NRG; PAM sequence: TGG
tattgcaactttctttttaa

SEQ ID NO: 163607 - DNA, 20 bp, Artificial Sequence
  Description of Artificial Sequence: Synthetic oligonucleotide
  Target: LAMA2; (+) strand; PAM type: NRG; PAM sequence: TGG
tctttttaatggtgtttgtg

SEQ ID NO: 163608 - DNA, 20 bp, Artificial Sequence
  Description of Artificial Sequence: Synthetic oligonucleotide
  Target: LAMA2; (+) strand; PAM type: NRG; PAM sequence: TAG
atctatttcatctccctttt

SEQ ID NO: 163609 - DNA, 20 bp, Artificial Sequence
  Description of Artificial Sequence: Synthetic oligonucleotide
  Target: LAMA2; (+) strand; PAM type: NRG; PAM sequence: GAG
gccttttttttttttattct

SEQ ID NO: 163610 - DNA, 20 bp, Artificial Sequence
  Description of Artificial Sequence: Synthetic oligonucleotide
  Target: LAMA2; (+) strand; PAM type: NRG; PAM sequence: CAG
tttttttttttattctgaga

SEQ ID NO: 163611 - DNA, 20 bp, Artificial Sequence
  Description of Artificial Sequence: Synthetic oligonucleotide
  Target: LAMA2; (+) strand; PAM type: NRG; PAM sequence: AGG
ttttttttttattctgagac

SEQ ID NO: 163612 - DNA, 20 bp, Artificial Sequence
  Description of Artificial Sequence: Synthetic oligonucleotide
  Target: LAMA2; (+) strand; PAM type: NRG; PAM sequence: GGG
tttttttttattctgagaca

SEQ ID NO: 163613 - DNA, 20 bp, Artificial Sequence
  Description of Artificial Sequence: Synthetic oligonucleotide
  Target: LAMA2; (+) strand; PAM type: NRG; PAM sequence: CAG
cagggtcttactccattgcc

SEQ ID NO: 163614 - DNA, 20 bp, Artificial Sequence
  Description of Artificial Sequence: Synthetic oligonucleotide
  Target: LAMA2; (+) strand; PAM type: NRG; PAM sequence: AGG
agggtcttactccattgccc

SEQ ID NO: 163615 - DNA, 20 bp, Artificial Sequence
  Description of Artificial Sequence: Synthetic oligonucleotide
  Target: LAMA2; (+) strand; PAM type: NRG; PAM sequence: TAG
tcttactccattgcccaggc

SEQ ID NO: 163616 - DNA, 20 bp, Artificial Sequence
  Description of Artificial Sequence: Synthetic oligonucleotide
  Target: LAMA2; (+) strand; PAM type: NRG; PAM sequence: GAG
ttactccattgcccaggcta

SEQ ID NO: 163617 - DNA, 20 bp, Artificial Sequence
  Description of Artificial Sequence: Synthetic oligonucleotide
  Target: LAMA2; (+) strand; PAM type: NRG; PAM sequence: CAG
ccattgcccaggctagagtg

SEQ ID NO: 163618 - DNA, 20 bp, Artificial Sequence
  Description of Artificial Sequence: Synthetic oligonucleotide
  Target: LAMA2; (+) strand; PAM type: NRG; PAM sequence: TGG
ttgcccaggctagagtgcag

SEQ ID NO: 163619 - DNA, 20 bp, Artificial Sequence
  Description of Artificial Sequence: Synthetic oligonucleotide
  Target: LAMA2; (+) strand; PAM type: NRG; PAM sequence: CAG
agagtgcagtggtgtgatct

SEQ ID NO: 163620 - DNA, 20 bp, Artificial Sequence
  Description of Artificial Sequence: Synthetic oligonucleotide
  Target: LAMA2; (+) strand; PAM type: NRG; PAM sequence: TGG
tcactgcaccctccaccttc

SEQ ID NO: 163621 - DNA, 20 bp, Artificial Sequence
  Description of Artificial Sequence: Synthetic oligonucleotide
  Target: LAMA2; (+) strand; PAM type: NRG; PAM sequence: GGG
cactgcaccctccaccttct

SEQ ID NO: 163622 - DNA, 20 bp, Artificial Sequence
  Description of Artificial Sequence: Synthetic oligonucleotide
  Target: LAMA2; (+) strand; PAM type: NRG; PAM sequence: AAG
accctccaccttctgggctc

SEQ ID NO: 163623 - DNA, 20 bp, Artificial Sequence
  Description of Artificial Sequence: Synthetic oligonucleotide
  Target: LAMA2; (+) strand; PAM type: NRG; PAM sequence: CAG
ctcaagaaatcctctcacct

SEQ ID NO: 163624 - DNA, 20 bp, Artificial Sequence
  Description of Artificial Sequence: Synthetic oligonucleotide
  Target: LAMA2; (+) strand; PAM type: NRG; PAM sequence: CAG
aatcctctcacctcagcctc

SEQ ID NO: 163625 - DNA, 20 bp, Artificial Sequence
  Description of Artificial Sequence: Synthetic oligonucleotide
  Target: LAMA2; (+) strand; PAM type: NRG; PAM sequence: GAG
tcctctcacctcagcctcca

SEQ ID NO: 163626 - DNA, 20 bp, Artificial Sequence
  Description of Artificial Sequence: Synthetic oligonucleotide
  Target: LAMA2; (+) strand; PAM type: NRG; PAM sequence: TAG
tctcacctcagcctccagag

SEQ ID NO: 163627 - DNA, 20 bp, Artificial Sequence
  Description of Artificial Sequence: Synthetic oligonucleotide
  Target: LAMA2; (+) strand; PAM type: NRG; PAM sequence: TGG
acctcagcctccagagtagc

SEQ ID NO: 163628 - DNA, 20 bp, Artificial Sequence
  Description of Artificial Sequence: Synthetic oligonucleotide
  Target: LAMA2; (+) strand; PAM type: NRG; PAM sequence: GGG
cctcagcctccagagtagct

SEQ ID NO: 163629 - DNA, 20 bp, Artificial Sequence
  Description of Artificial Sequence: Synthetic oligonucleotide
  Target: LAMA2; (+) strand; PAM type: NRG; PAM sequence: CAG
ctccagagtagctgggacta

SEQ ID NO: 163630 - DNA, 20 bp, Artificial Sequence
  Description of Artificial Sequence: Synthetic oligonucleotide
  Target: LAMA2; (+) strand; PAM type: NRG; PAM sequence: AGG
tccagagtagctgggactac

SEQ ID NO: 163631 - DNA, 20 bp, Artificial Sequence
  Description of Artificial Sequence: Synthetic oligonucleotide
  Target: LAMA2; (+) strand; PAM type: NRG; PAM sequence: TGG
caggcgcatgccaccatgct

SEQ ID NO: 163632 - DNA, 20 bp, Artificial Sequence
  Description of Artificial Sequence: Synthetic oligonucleotide
  Target: LAMA2; (+) strand; PAM type: NRG; PAM sequence: AAG
accatgcttggctaattttt

SEQ ID NO: 163633 - DNA, 20 bp, Artificial Sequence
  Description of Artificial Sequence: Synthetic oligonucleotide
  Target: LAMA2; (+) strand; PAM type: NRG; PAM sequence: TAG
gctaatttttaagttttttg

SEQ ID NO: 163634 - DNA, 20 bp, Artificial Sequence
  Description of Artificial Sequence: Synthetic oligonucleotide
  Target: LAMA2; (+) strand; PAM type: NRG; PAM sequence: GAG
tttaagttttttgtagaaat

SEQ ID NO: 163635 - DNA, 20 bp, Artificial Sequence
  Description of Artificial Sequence: Synthetic oligonucleotide
  Target: LAMA2; (+) strand; PAM type: NRG; PAM sequence: AAG
tattgcccatgcttgtctca

SEQ ID NO: 163636 - DNA, 20 bp, Artificial Sequence
  Description of Artificial Sequence: Synthetic oligonucleotide
  Target: LAMA2; (+) strand; PAM type: NRG; PAM sequence: AAG
tgtctcaaagtcctgtgctc

SEQ ID NO: 163637 - DNA, 20 bp, Artificial Sequence
  Description of Artificial Sequence: Synthetic oligonucleotide
  Target: LAMA2; (+) strand; PAM type: NRG; PAM sequence: TGG
caagtgatcctgcaaaattc

SEQ ID NO: 163638 - DNA, 20 bp, Artificial Sequence
  Description of Artificial Sequence: Synthetic oligonucleotide
  Target: LAMA2; (+) strand; PAM type: NRG; PAM sequence: GGG
aagtgatcctgcaaaattct

SEQ ID NO: 163639 - DNA, 20 bp, Artificial Sequence
  Description of Artificial Sequence: Synthetic oligonucleotide
  Target: LAMA2; (+) strand; PAM type: NRG; PAM sequence: CAG
cctgcaaaattctgggatta

SEQ ID NO: 163640 - DNA, 20 bp, Artificial Sequence
  Description of Artificial Sequence: Synthetic oligonucleotide
  Target: LAMA2; (+) strand; PAM type: NRG; PAM sequence: AGG
ctgcaaaattctgggattac

SEQ ID NO: 163641 - DNA, 20 bp, Artificial Sequence
  Description of Artificial Sequence: Synthetic oligonucleotide
  Target: LAMA2; (+) strand; PAM type: NRG; PAM sequence: TAG
caggtgtataccaccatgcc

SEQ ID NO: 163642 - DNA, 20 bp, Artificial Sequence
  Description of Artificial Sequence: Synthetic oligonucleotide
  Target: LAMA2; (+) strand; PAM type: NRG; PAM sequence: GAG
agcttaatgtgtgtgtgtgt

SEQ ID NO: 163643 - DNA, 20 bp, Artificial Sequence
  Description of Artificial Sequence: Synthetic oligonucleotide
  Target: LAMA2; (+) strand; PAM type: NRG; PAM sequence: GAG
cttaatgtgtgtgtgtgtga

SEQ ID NO: 163644 - DNA, 20 bp, Artificial Sequence
  Description of Artificial Sequence: Synthetic oligonucleotide
  Target: LAMA2; (+) strand; PAM type: NRG; PAM sequence: GAG
taatgtgtgtgtgtgtgaga

SEQ ID NO: 163645 - DNA, 20 bp, Artificial Sequence
  Description of Artificial Sequence: Synthetic oligonucleotide
  Target: LAMA2; (+) strand; PAM type: NRG; PAM sequence: GAG
atgtgtgtgtgtgtgagaga

SEQ ID NO: 163646 - DNA, 20 bp, Artificial Sequence
  Description of Artificial Sequence: Synthetic oligonucleotide
  Target: LAMA2; (+) strand; PAM type: NRG; PAM sequence: CAG
gtgtgtgtgtgagagagaga

SEQ ID NO: 163647 - DNA, 20 bp, Artificial Sequence
  Description of Artificial Sequence: Synthetic oligonucleotide
  Target: LAMA2; (+) strand; PAM type: NRG; PAM sequence: GAG
gtgtgtgtgagagagagaca

SEQ ID NO: 163648 - DNA, 20 bp, Artificial Sequence
  Description of Artificial Sequence: Synthetic oligonucleotide
  Target: LAMA2; (+) strand; PAM type: NRG; PAM sequence: GAG
gtgtgtgagagagagacaga

SEQ ID NO: 163649 - DNA, 20 bp, Artificial Sequence
  Description of Artificial Sequence: Synthetic oligonucleotide
  Target: LAMA2; (+) strand; PAM type: NRG; PAM sequence: GAG
gtgtgagagagagacagaga

SEQ ID NO: 163650 - DNA, 20 bp, Artificial Sequence
  Description of Artificial Sequence: Synthetic oligonucleotide
  Target: LAMA2; (+) strand; PAM type: NRG; PAM sequence: GAG
gtgagagagagacagagaga

SEQ ID NO: 163651 - DNA, 20 bp, Artificial Sequence
  Description of Artificial Sequence: Synthetic oligonucleotide
  Target: LAMA2; (+) strand; PAM type: NRG; PAM sequence: GAG
gagagagagacagagagaga

SEQ ID NO: 163652 - DNA, 20 bp, Artificial Sequence
  Description of Artificial Sequence: Synthetic oligonucleotide
  Target: LAMA2; (+) strand; PAM type: NRG; PAM sequence: CAG
gtgtgtaaataacatatatt

SEQ ID NO: 163653 - DNA, 20 bp, Artificial Sequence
  Description of Artificial Sequence: Synthetic oligonucleotide
  Target: LAMA2; (+) strand; PAM type: NRG; PAM sequence: TGG
ttcaacgaatcttaataatt

SEQ ID NO: 163654 - DNA, 20 bp, Artificial Sequence
  Description of Artificial Sequence: Synthetic oligonucleotide
  Target: LAMA2; (+) strand; PAM type: NRG; PAM sequence: GAG
ataatttggccttttaattt

SEQ ID NO: 163655 - DNA, 20 bp, Artificial Sequence
  Description of Artificial Sequence: Synthetic oligonucleotide
  Target: LAMA2; (+) strand; PAM type: NRG; PAM sequence: AGG
taatttggccttttaatttg

SEQ ID NO: 163656 - DNA, 20 bp, Artificial Sequence
  Description of Artificial Sequence: Synthetic oligonucleotide
  Target: LAMA2; (+) strand; PAM type: NRG; PAM sequence: GAG
atttggccttttaatttgag

SEQ ID NO: 163657 - DNA, 20 bp, Artificial Sequence
  Description of Artificial Sequence: Synthetic oligonucleotide
  Target: LAMA2; (+) strand; PAM type: NRG; PAM sequence: TGG
tttccacttaatgtaaatat

SEQ ID NO: 163658 - DNA, 20 bp, Artificial Sequence
  Description of Artificial Sequence: Synthetic oligonucleotide
  Target: LAMA2; (+) strand; PAM type: NRG; PAM sequence: TGG
aatgtaaatattggtatgat

SEQ ID NO: 163659 - DNA, 20 bp, Artificial Sequence
  Description of Artificial Sequence: Synthetic oligonucleotide
  Target: LAMA2; (+) strand; PAM type: NRG; PAM sequence: AAG
aatattggtatgattggatt

SEQ ID NO: 163660 - DNA, 20 bp, Artificial Sequence
  Description of Artificial Sequence: Synthetic oligonucleotide
  Target: LAMA2; (+) strand; PAM type: NRG; PAM sequence: TGG
taacatcttctcttgacttt

SEQ ID NO: 163661 - DNA, 20 bp, Artificial Sequence
  Description of Artificial Sequence: Synthetic oligonucleotide
  Target: LAMA2; (+) strand; PAM type: NRG; PAM sequence: TGG
acctattcattttatttctt

SEQ ID NO: 163662 - DNA, 20 bp, Artificial Sequence
  Description of Artificial Sequence: Synthetic oligonucleotide
  Target: LAMA2; (+) strand; PAM type: NRG; PAM sequence: TAG
tttatttctttggttttgtc

SEQ ID NO: 163663 - DNA, 20 bp, Artificial Sequence
  Description of Artificial Sequence: Synthetic oligonucleotide
  Target: LAMA2; (+) strand; PAM type: NRG; PAM sequence: AGG
ttatttctttggttttgtct

SEQ ID NO: 163664 - DNA, 20 bp, Artificial Sequence
  Description of Artificial Sequence: Synthetic oligonucleotide
  Target: LAMA2; (+) strand; PAM type: NRG; PAM sequence: CAG
aatatacatctttaactttc

SEQ ID NO: 163665 - DNA, 20 bp, Artificial Sequence
  Description of Artificial Sequence: Synthetic oligonucleotide
  Target: LAMA2; (+) strand; PAM type: NRG; PAM sequence: TAG
atattataccactttacatt

SEQ ID NO: 163666 - DNA, 20 bp, Artificial Sequence
  Description of Artificial Sequence: Synthetic oligonucleotide
  Target: LAMA2; (+) strand; PAM type: NRG; PAM sequence: AAG
taccactttacatttagcgt

SEQ ID NO: 163667 - DNA, 20 bp, Artificial Sequence
  Description of Artificial Sequence: Synthetic oligonucleotide
  Target: LAMA2; (+) strand; PAM type: NRG; PAM sequence: CAG
ttagcgtaagaaccttacaa

SEQ ID NO: 163668 - DNA, 20 bp, Artificial Sequence
  Description of Artificial Sequence: Synthetic oligonucleotide
  Target: LAMA2; (+) strand; PAM type: NRG; PAM sequence: AGG
tagcgtaagaaccttacaac

SEQ ID NO: 163669 - DNA, 20 bp, Artificial Sequence
  Description of Artificial Sequence: Synthetic oligonucleotide
  Target: LAMA2; (+) strand; PAM type: NRG; PAM sequence: CAG
accttacaacaggaaacctc

SEQ ID NO: 163670 - DNA, 20 bp, Artificial Sequence
  Description of Artificial Sequence: Synthetic oligonucleotide
  Target: LAMA2; (+) strand; PAM type: NRG; PAM sequence: AAG
tattatacatctgacaatat

SEQ ID NO: 163671 - DNA, 20 bp, Artificial Sequence
  Description of Artificial Sequence: Synthetic oligonucleotide
  Target: LAMA2; (+) strand; PAM type: NRG; PAM sequence: TAG
gcttacgattttgatttcaa

SEQ ID NO: 163672 - DNA, 20 bp, Artificial Sequence
  Description of Artificial Sequence: Synthetic oligonucleotide
  Target: LAMA2; (+) strand; PAM type: NRG; PAM sequence: AAG
agtcaattatctttttaaac

SEQ ID NO: 163673 - DNA, 20 bp, Artificial Sequence
  Description of Artificial Sequence: Synthetic oligonucleotide
  Target: LAMA2; (+) strand; PAM type: NRG; PAM sequence: CAG
tcattttattcctgttgttt

SEQ ID NO: 163674 - DNA, 20 bp, Artificial Sequence
  Description of Artificial Sequence: Synthetic oligonucleotide
  Target: LAMA2; (+) strand; PAM type: NRG; PAM sequence: AGG
cattttattcctgttgtttc

SEQ ID NO: 163675 - DNA, 20 bp, Artificial Sequence
  Description of Artificial Sequence: Synthetic oligonucleotide
  Target: LAMA2; (+) strand; PAM type: NRG; PAM sequence: CAG
ttttttttttttttttgttc

SEQ ID NO: 163676 - DNA, 20 bp, Artificial Sequence
  Description of Artificial Sequence: Synthetic oligonucleotide
  Target: LAMA2; (+) strand; PAM type: NRG; PAM sequence: AAG
ttttttttttttgttccaga

SEQ ID NO: 163677 - DNA, 20 bp, Artificial Sequence
  Description of Artificial Sequence: Synthetic oligonucleotide
  Target: LAMA2; (+) strand; PAM type: NRG; PAM sequence: AGG
tttttttttttgttccagaa

SEQ ID NO: 163678 - DNA, 20 bp, Artificial Sequence
  Description of Artificial Sequence: Synthetic oligonucleotide
  Target: LAMA2; (+) strand; PAM type: NRG; PAM sequence: AAG
aggtgttttttttttttccg

SEQ ID NO: 163679 - DNA, 20 bp, Artificial Sequence
  Description of Artificial Sequence: Synthetic oligonucleotide
  Target: LAMA2; (+) strand; PAM type: NRG; PAM sequence: CAG
tttttccgaagatgtttttg

SEQ ID NO: 163680 - DNA, 20 bp, Artificial Sequence
  Description of Artificial Sequence: Synthetic oligonucleotide
  Target: LAMA2; (+) strand; PAM type: NRG; PAM sequence: GAG
tttccgaagatgtttttgca

SEQ ID NO: 163681 - DNA, 20 bp, Artificial Sequence
  Description of Artificial Sequence: Synthetic oligonucleotide
  Target: LAMA2; (+) strand; PAM type: NRG; PAM sequence: TGG
gagtatgtaatcctaaatac

SEQ ID NO: 163682 - DNA, 20 bp, Artificial Sequence
  Description of Artificial Sequence: Synthetic oligonucleotide
  Target: LAMA2; (+) strand; PAM type: NRG; PAM sequence: CAG
taatcctaaatactggtttg

SEQ ID NO: 163683 - DNA, 20 bp, Artificial Sequence
  Description of Artificial Sequence: Synthetic oligonucleotide
  Target: LAMA2; (+) strand; PAM type: NRG; PAM sequence: TGG
gtttaataattattttttca

SEQ ID NO: 163684 - DNA, 20 bp, Artificial Sequence
  Description of Artificial Sequence: Synthetic oligonucleotide
  Target: LAMA2; (+) strand; PAM type: NRG; PAM sequence: GGG
tttaataattattttttcat

SEQ ID NO: 163685 - DNA, 20 bp, Artificial Sequence
  Description of Artificial Sequence: Synthetic oligonucleotide
  Target: LAMA2; (+) strand; PAM type: NRG; PAM sequence: TAG
taattattttttcatgggat

SEQ ID NO: 163686 - DNA, 20 bp, Artificial Sequence
  Description of Artificial Sequence: Synthetic oligonucleotide
  Target: LAMA2; (+) strand; PAM type: NRG; PAM sequence: TAG
tattttttcatgggattagt

SEQ ID NO: 163687 - DNA, 20 bp, Artificial Sequence
  Description of Artificial Sequence: Synthetic oligonucleotide
  Target: LAMA2; (+) strand; PAM type: NRG; PAM sequence: TGG
atgggattagttagatctgt

SEQ ID NO: 163688 - DNA, 20 bp, Artificial Sequence
  Description of Artificial Sequence: Synthetic oligonucleotide
  Target: LAMA2; (+) strand; PAM type: NRG; PAM sequence: TAG
agttagatctgttggccctg

SEQ ID NO: 163689 - DNA, 20 bp, Artificial Sequence
  Description of Artificial Sequence: Synthetic oligonucleotide
  Target: LAMA2; (+) strand; PAM type: NRG; PAM sequence: AGG
gttagatctgttggccctgt

SEQ ID NO: 163690 - DNA, 20 bp, Artificial Sequence
  Description of Artificial Sequence: Synthetic oligonucleotide
  Target: LAMA2; (+) strand; PAM type: NRG; PAM sequence: TAG
ctgttggccctgtaggatta

SEQ ID NO: 163691 - DNA, 20 bp, Artificial Sequence
  Description of Artificial Sequence: Synthetic oligonucleotide
  Target: LAMA2; (+) strand; PAM type: NRG; PAM sequence: TGG
attatagttttcatcaaatt

SEQ ID NO: 163692 - DNA, 20 bp, Artificial Sequence
  Description of Artificial Sequence: Synthetic oligonucleotide
  Target: LAMA2; (+) strand; PAM type: NRG; PAM sequence: AAG
ttcatcaaatttggaaatga

SEQ ID NO: 163693 - DNA, 20 bp, Artificial Sequence
  Description of Artificial Sequence: Synthetic oligonucleotide
  Target: LAMA2; (+) strand; PAM type: NRG; PAM sequence: CAG
aatttggaaatgaaagttgt

SEQ ID NO: 163694 - DNA, 20 bp, Artificial Sequence
  Description of Artificial Sequence: Synthetic oligonucleotide
  Target: LAMA2; (+) strand; PAM type: NRG; PAM sequence: TGG
tcattcttattgtctctttc

SEQ ID NO: 163695 - DNA, 20 bp, Artificial Sequence
  Description of Artificial Sequence: Synthetic oligonucleotide
  Target: LAMA2; (+) strand; PAM type: NRG; PAM sequence: TGG
ggaaatcattttttgtatgt

SEQ ID NO: 163696 - DNA, 20 bp, Artificial Sequence
  Description of Artificial Sequence: Synthetic oligonucleotide
  Target: LAMA2; (+) strand; PAM type: NRG; PAM sequence: GGG
gaaatcattttttgtatgtt

SEQ ID NO: 163697 - DNA, 20 bp, Artificial Sequence
  Description of Artificial Sequence: Synthetic oligonucleotide
  Target: LAMA2; (+) strand; PAM type: NRG; PAM sequence: GAG
atattttcccccatctcact

SEQ ID NO: 163698 - DNA, 20 bp, Artificial Sequence
  Description of Artificial Sequence: Synthetic oligonucleotide
  Target: LAMA2; (+) strand; PAM type: NRG; PAM sequence: AGG
tattttcccccatctcactg

SEQ ID NO: 163699 - DNA, 20 bp, Artificial Sequence
  Description of Artificial Sequence: Synthetic oligonucleotide
  Target: LAMA2; (+) strand; PAM type: NRG; PAM sequence: TAG
tctgtattttttatttctga

SEQ ID NO: 163700 - DNA, 20 bp, Artificial Sequence
  Description of Artificial Sequence: Synthetic oligonucleotide
  Target: LAMA2; (+) strand; PAM type: NRG; PAM sequence: AAG
ttctgatagtttctattgtt

SEQ ID NO: 163701 - DNA, 20 bp, Artificial Sequence
  Description of Artificial Sequence: Synthetic oligonucleotide
  Target: LAMA2; (+) strand; PAM type: NRG; PAM sequence: AAG
tttctattgttaagtgtcca

SEQ ID NO: 163702 - DNA, 20 bp, Artificial Sequence
  Description of Artificial Sequence: Synthetic oligonucleotide
  Target: LAMA2; (+) strand; PAM type: NRG; PAM sequence: CAG
aagtcactgattttttaatg

SEQ ID NO: 163703 - DNA, 20 bp, Artificial Sequence
  Description of Artificial Sequence: Synthetic oligonucleotide
  Target: LAMA2; (+) strand; PAM type: NRG; PAM sequence: GAG
aacctgtttttaatccaatt

SEQ ID NO: 163704 - DNA, 20 bp, Artificial Sequence
  Description of Artificial Sequence: Synthetic oligonucleotide
  Target: LAMA2; (+) strand; PAM type: NRG; PAM sequence: TGG
ttatcttttaaatttccttt

SEQ ID NO: 163705 - DNA, 20 bp, Artificial Sequence
  Description of Artificial Sequence: Synthetic oligonucleotide
  Target: LAMA2; (+) strand; PAM type: NRG; PAM sequence: TAG
aatataatgtttataaacat

SEQ ID NO: 163706 - DNA, 20 bp, Artificial Sequence
  Description of Artificial Sequence: Synthetic oligonucleotide
  Target: LAMA2; (+) strand; PAM type: NRG; PAM sequence: TGG
aaacattagcatttttaaaa

SEQ ID NO: 163707 - DNA, 20 bp, Artificial Sequence
  Description of Artificial Sequence: Synthetic oligonucleotide
  Target: LAMA2; (+) strand; PAM type: NRG; PAM sequence: CAG
aaattccatcttttttattg

SEQ ID NO: 163708 - DNA, 20 bp, Artificial Sequence
  Description of Artificial Sequence: Synthetic oligonucleotide
  Target: LAMA2; (+) strand; PAM type: NRG; PAM sequence: AGG
aattccatcttttttattgc

SEQ ID NO: 163709 - DNA, 20 bp, Artificial Sequence
  Description of Artificial Sequence: Synthetic oligonucleotide
  Target: LAMA2; (+) strand; PAM type: NRG; PAM sequence: GAG
ctgacttttctcctgtttct

SEQ ID NO: 163710 - DNA, 20 bp, Artificial Sequence
  Description of Artificial Sequence: Synthetic oligonucleotide
  Target: LAMA2; (+) strand; PAM type: NRG; PAM sequence: TGG
catgcctgataatttttatt

SEQ ID NO: 163711 - DNA, 20 bp, Artificial Sequence
  Description of Artificial Sequence: Synthetic oligonucleotide
  Target: LAMA2; (+) strand; PAM type: NRG; PAM sequence: CAG
gataatttttatttggatgc

SEQ ID NO: 163712 - DNA, 20 bp, Artificial Sequence
  Description of Artificial Sequence: Synthetic oligonucleotide
  Target: LAMA2; (+) strand; PAM type: NRG; PAM sequence: TGG
tacttttcattgttgtgtat

SEQ ID NO: 163713 - DNA, 20 bp, Artificial Sequence
  Description of Artificial Sequence: Synthetic oligonucleotide
  Target: LAMA2; (+) strand; PAM type: NRG; PAM sequence: AAG
gattttattgtatttcttta

SEQ ID NO: 163714 - DNA, 20 bp, Artificial Sequence
  Description of Artificial Sequence: Synthetic oligonucleotide
  Target: LAMA2; (+) strand; PAM type: NRG; PAM sequence: TGG
aagaatgttgaactttatgc

SEQ ID NO: 163715 - DNA, 20 bp, Artificial Sequence
  Description of Artificial Sequence: Synthetic oligonucleotide
  Target: LAMA2; (+) strand; PAM type: NRG; PAM sequence: CAG
ttgaactttatgctggcaaa

SEQ ID NO: 163716 - DNA, 20 bp, Artificial Sequence
  Description of Artificial Sequence: Synthetic oligonucleotide
  Target: LAMA2; (+) strand; PAM type: NRG; PAM sequence: TAG
ctttatgctggcaaacagtt

SEQ ID NO: 163717 - DNA, 20 bp, Artificial Sequence
  Description of Artificial Sequence: Synthetic oligonucleotide
  Target: LAMA2; (+) strand; PAM type: NRG; PAM sequence: AGG
tttatgctggcaaacagttt

SEQ ID NO: 163718 - DNA, 20 bp, Artificial Sequence
  Description of Artificial Sequence: Synthetic oligonucleotide
  Target: LAMA2; (+) strand; PAM type: NRG; PAM sequence: TAG
atgctggcaaacagtttagg

SEQ ID NO: 163719 - DNA, 20 bp, Artificial Sequence
  Description of Artificial Sequence: Synthetic oligonucleotide
  Target: LAMA2; (+) strand; PAM type: NRG; PAM sequence: CGG
gcaaacagtttaggtagtca

SEQ ID NO: 163720 - DNA, 20 bp, Artificial Sequence
  Description of Artificial Sequence: Synthetic oligonucleotide
  Target: LAMA2; (+) strand; PAM type: NRG; PAM sequence: GGG
caaacagtttaggtagtcac

SEQ ID NO: 163721 - DNA, 20 bp, Artificial Sequence
  Description of Artificial Sequence: Synthetic oligonucleotide
  Target: LAMA2; (+) strand; PAM type: NRG; PAM sequence: TGG
ttaggtagtcacgggtcact

SEQ ID NO: 163722 - DNA, 20 bp, Artificial Sequence
  Description of Artificial Sequence: Synthetic oligonucleotide
  Target: LAMA2; (+) strand; PAM type: NRG; PAM sequence: AAG
gggtcacttggattcttttg

SEQ ID NO: 163723 - DNA, 20 bp, Artificial Sequence
  Description of Artificial Sequence: Synthetic oligonucleotide
  Target: LAMA2; (+) strand; PAM type: NRG; PAM sequence: GAG
ttcttttgaagcttgctttt

SEQ ID NO: 163724 - DNA, 20 bp, Artificial Sequence
  Description of Artificial Sequence: Synthetic oligonucleotide
  Target: LAMA2; (+) strand; PAM type: NRG; PAM sequence: TAG
agcttgcttttgagttttgt

SEQ ID NO: 163725 - DNA, 20 bp, Artificial Sequence
  Description of Artificial Sequence: Synthetic oligonucleotide
  Target: LAMA2; (+) strand; PAM type: NRG; PAM sequence: AGG
gcttgcttttgagttttgtt

SEQ ID NO: 163726 - DNA, 20 bp, Artificial Sequence
  Description of Artificial Sequence: Synthetic oligonucleotide
  Target: LAMA2; (+) strand; PAM type: NRG; PAM sequence: GGG
cttgcttttgagttttgtta

SEQ ID NO: 163727 - DNA, 20 bp, Artificial Sequence
  Description of Artificial Sequence: Synthetic oligonucleotide
  Target: LAMA2; (+) strand; PAM type: NRG; PAM sequence: AAG
gcttttgagttttgttaggg

SEQ ID NO: 163728 - DNA, 20 bp, Artificial Sequence
  Description of Artificial Sequence: Synthetic oligonucleotide
  Target: LAMA2; (+) strand; PAM type: NRG; PAM sequence: AGG
cttttgagttttgttaggga

SEQ ID NO: 163729 - DNA, 20 bp, Artificial Sequence
  Description of Artificial Sequence: Synthetic oligonucleotide
  Target: LAMA2; (+) strand; PAM type: NRG; PAM sequence: CAG
gagttttgttagggaaggtg

SEQ ID NO: 163730 - DNA, 20 bp, Artificial Sequence
  Description of Artificial Sequence: Synthetic oligonucleotide
  Target: LAMA2; (+) strand; PAM type: NRG; PAM sequence: CAG
ttttgttagggaaggtgcag

SEQ ID NO: 163731 - DNA, 20 bp, Artificial Sequence
  Description of Artificial Sequence: Synthetic oligonucleotide
  Target: LAMA2; (+) strand; PAM type: NRG; PAM sequence: CAG
ttagggaaggtgcagcagaa

SEQ ID NO: 163732 - DNA, 20 bp, Artificial Sequence
  Description of Artificial Sequence: Synthetic oligonucleotide
  Target: LAMA2; (+) strand; PAM type: NRG; PAM sequence: AAG
ggtgcagcagaacagtctga

SEQ ID NO: 163733 - DNA, 20 bp, Artificial Sequence
  Description of Artificial Sequence: Synthetic oligonucleotide
  Target: LAMA2; (+) strand; PAM type: NRG; PAM sequence: AAG
agtctgaaagcccttctact

SEQ ID NO: 163734 - DNA, 20 bp, Artificial Sequence
  Description of Artificial Sequence: Synthetic oligonucleotide
  Target: LAMA2; (+) strand; PAM type: NRG; PAM sequence: GAG
tactaagctgtgaaacttct

SEQ ID NO: 163735 - DNA, 20 bp, Artificial Sequence
  Description of Artificial Sequence: Synthetic oligonucleotide
  Target: LAMA2; (+) strand; PAM type: NRG; PAM sequence: TAG
aaacttctgagaatactacc

SEQ ID NO: 163736 - DNA, 20 bp, Artificial Sequence
  Description of Artificial Sequence: Synthetic oligonucleotide
  Target: LAMA2; (+) strand; PAM type: NRG; PAM sequence: TGG
ttctgagaatactacctagt

SEQ ID NO: 163737 - DNA, 20 bp, Artificial Sequence
  Description of Artificial Sequence: Synthetic oligonucleotide
  Target: LAMA2; (+) strand; PAM type: NRG; PAM sequence: TGG
gttactatgtctctttactc

SEQ ID NO: 163738 - DNA, 20 bp, Artificial Sequence
  Description of Artificial Sequence: Synthetic oligonucleotide
  Target: LAMA2; (+) strand; PAM type: NRG; PAM sequence: TGG
tactctggctgttgaaaata

SEQ ID NO: 163739 - DNA, 20 bp, Artificial Sequence
  Description of Artificial Sequence: Synthetic oligonucleotide
  Target: LAMA2; (+) strand; PAM type: NRG; PAM sequence: AAG
ttgaaaatatggcttattcc

SEQ ID NO: 163740 - DNA, 20 bp, Artificial Sequence
  Description of Artificial Sequence: Synthetic oligonucleotide
  Target: LAMA2; (+) strand; PAM type: NRG; PAM sequence: TGG
ggcttattccaagctttctc

SEQ ID NO: 163741 - DNA, 20 bp, Artificial Sequence
  Description of Artificial Sequence: Synthetic oligonucleotide
  Target: LAMA2; (+) strand; PAM type: NRG; PAM sequence: GGG
gcttattccaagctttctct

SEQ ID NO: 163742 - DNA, 20 bp, Artificial Sequence
  Description of Artificial Sequence: Synthetic oligonucleotide
  Target: LAMA2; (+) strand; PAM type: NRG; PAM sequence: AAG
ccaagctttctctgggctgt

SEQ ID NO: 163743 - DNA, 20 bp, Artificial Sequence
  Description of Artificial Sequence: Synthetic oligonucleotide
  Target: LAMA2; (+) strand; PAM type: NRG; PAM sequence: CAG
ctgggctgtaagaatttttg

SEQ ID NO: 163744 - DNA, 20 bp, Artificial Sequence
  Description of Artificial Sequence: Synthetic oligonucleotide
  Target: LAMA2; (+) strand; PAM type: NRG; PAM sequence: TAG
ctgtaagaatttttgcagcc

SEQ ID NO: 163745 - DNA, 20 bp, Artificial Sequence
  Description of Artificial Sequence: Synthetic oligonucleotide
  Target: LAMA2; (+) strand; PAM type: NRG; PAM sequence: AGG
tgtaagaatttttgcagcct

SEQ ID NO: 163746 - DNA, 20 bp, Artificial Sequence
  Description of Artificial Sequence: Synthetic oligonucleotide
  Target: LAMA2; (+) strand; PAM type: NRG; PAM sequence: GGG
gtaagaatttttgcagccta

SEQ ID NO: 163747 - DNA, 20 bp, Artificial Sequence
  Description of Artificial Sequence: Synthetic oligonucleotide
  Target: LAMA2; (+) strand; PAM type: NRG; PAM sequence: CAG
catcccatgcatgcacctat

SEQ ID NO: 163748 - DNA, 20 bp, Artificial Sequence
  Description of Artificial Sequence: Synthetic oligonucleotide
  Target: LAMA2; (+) strand; PAM type: NRG; PAM sequence: CAG
tgcatgcacctatcagcatt

SEQ ID NO: 163749 - DNA, 20 bp, Artificial Sequence
  Description of Artificial Sequence: Synthetic oligonucleotide
  Target: LAMA2; (+) strand; PAM type: NRG; PAM sequence: AAG
cagcattcagtcaatgactc

SEQ ID NO: 163750 - DNA, 20 bp, Artificial Sequence
  Description of Artificial Sequence: Synthetic oligonucleotide
  Target: LAMA2; (+) strand; PAM type: NRG; PAM sequence: GAG
gcattcagtcaatgactcaa

SEQ ID NO: 163751 - DNA, 20 bp, Artificial Sequence
  Description of Artificial Sequence: Synthetic oligonucleotide
  Target: LAMA2; (+) strand; PAM type: NRG; PAM sequence: TGG
agaacgcttctgcacatctc

SEQ ID NO: 163752 - DNA, 20 bp, Artificial Sequence
  Description of Artificial Sequence: Synthetic oligonucleotide
  Target: LAMA2; (+) strand; PAM type: NRG; PAM sequence: AAG
cgtattctatttgccatcat

SEQ ID NO: 163753 - DNA, 20 bp, Artificial Sequence
  Description of Artificial Sequence: Synthetic oligonucleotide
  Target: LAMA2; (+) strand; PAM type: NRG; PAM sequence: CAG
ctatttgccatcataagttt

SEQ ID NO: 163754 - DNA, 20 bp, Artificial Sequence
  Description of Artificial Sequence: Synthetic oligonucleotide
  Target: LAMA2; (+) strand; PAM type: NRG; PAM sequence: CAG
tttgccatcataagtttcag

SEQ ID NO: 163755 - DNA, 20 bp, Artificial Sequence
  Description of Artificial Sequence: Synthetic oligonucleotide
  Target: LAMA2; (+) strand; PAM type: NRG; PAM sequence: CGG
atcataagtttcagcagcct

SEQ ID NO: 163756 - DNA, 20 bp, Artificial Sequence
  Description of Artificial Sequence: Synthetic oligonucleotide
  Target: LAMA2; (+) strand; PAM type: NRG; PAM sequence: CAG
ccactctttgtctctcaact

SEQ ID NO: 163757 - DNA, 20 bp, Artificial Sequence
  Description of Artificial Sequence: Synthetic oligonucleotide
  Target: LAMA2; (+) strand; PAM type: NRG; PAM sequence: CGG
ctctcaactcagctataatg

SEQ ID NO: 163758 - DNA, 20 bp, Artificial Sequence
  Description of Artificial Sequence: Synthetic oligonucleotide
  Target: LAMA2; (+) strand; PAM type: NRG; PAM sequence: GGG
tctcaactcagctataatgc

SEQ ID NO: 163759 - DNA, 20 bp, Artificial Sequence
  Description of Artificial Sequence: Synthetic oligonucleotide
  Target: LAMA2; (+) strand; PAM type: NRG; PAM sequence: TGG
ctcagctataatgcgggctt

SEQ ID NO: 163760 - DNA, 20 bp, Artificial Sequence
  Description of Artificial Sequence: Synthetic oligonucleotide
  Target: LAMA2; (+) strand; PAM type: NRG; PAM sequence: GGG
tcagctataatgcgggcttt

SEQ ID NO: 163761 - DNA, 20 bp, Artificial Sequence
  Description of Artificial Sequence: Synthetic oligonucleotide
  Target: LAMA2; (+) strand; PAM type: NRG; PAM sequence: CAG
ggtttaccctctctgtgttg

SEQ ID NO: 163762 - DNA, 20 bp, Artificial Sequence
  Description of Artificial Sequence: Synthetic oligonucleotide
  Target: LAMA2; (+) strand; PAM type: NRG; PAM sequence: TAG
accctctctgtgttgcagcc

SEQ ID NO: 163763 - DNA, 20 bp, Artificial Sequence
  Description of Artificial Sequence: Synthetic oligonucleotide
  Target: LAMA2; (+) strand; PAM type: NRG; PAM sequence: CAG
tcatgtttttttccttctct

SEQ ID NO: 163764 - DNA, 20 bp, Artificial Sequence
  Description of Artificial Sequence: Synthetic oligonucleotide
  Target: LAMA2; (+) strand; PAM type: NRG; PAM sequence: CAG
tttccttctctcagaaatca

SEQ ID NO: 163765 - DNA, 20 bp, Artificial Sequence
  Description of Artificial Sequence: Synthetic oligonucleotide
  Target: LAMA2; (+) strand; PAM type: NRG; PAM sequence: TGG
atctaaaaacaattgtttct

SEQ ID NO: 163766 - DNA, 20 bp, Artificial Sequence
  Description of Artificial Sequence: Synthetic oligonucleotide
  Target: LAMA2; (+) strand; PAM type: NRG; PAM sequence: TAG
cttggtttgtatttttattt

SEQ ID NO: 163767 - DNA, 20 bp, Artificial Sequence
  Description of Artificial Sequence: Synthetic oligonucleotide
  Target: LAMA2; (+) strand; PAM type: NRG; PAM sequence: TGG
gtttgtatttttattttagt

SEQ ID NO: 163768 - DNA, 20 bp, Artificial Sequence
  Description of Artificial Sequence: Synthetic oligonucleotide
  Target: LAMA2; (+) strand; PAM type: NRG; PAM sequence: CAG
tagttggttgtgtactttaa

SEQ ID NO: 163769 - DNA, 20 bp, Artificial Sequence
  Description of Artificial Sequence: Synthetic oligonucleotide
  Target: LAMA2; (+) strand; PAM type: NRG; PAM sequence: AAG
tgtactttaacagcttaaca

SEQ ID NO: 163770 - DNA, 20 bp, Artificial Sequence
  Description of Artificial Sequence: Synthetic oligonucleotide
  Target: LAMA2; (+) strand; PAM type: NRG; PAM sequence: AAG
actttaacagcttaacaaag

SEQ ID NO: 163771 - DNA, 20 bp, Artificial Sequence
  Description of Artificial Sequence: Synthetic oligonucleotide
  Target: LAMA2; (+) strand; PAM type: NRG; PAM sequence: AAG
gaataaatactgtaaaaact

SEQ ID NO: 163772 - DNA, 20 bp, Artificial Sequence
  Description of Artificial Sequence: Synthetic oligonucleotide
  Target: LAMA2; (+) strand; PAM type: NRG; PAM sequence: AAG
taaatactgtaaaaactaag

SEQ ID NO: 163773 - DNA, 20 bp, Artificial Sequence
  Description of Artificial Sequence: Synthetic oligonucleotide
  Target: LAMA2; (+) strand; PAM type: NRG; PAM sequence: GAG
aatactgtaaaaactaagaa

SEQ ID NO: 163774 - DNA, 20 bp, Artificial Sequence
  Description of Artificial Sequence: Synthetic oligonucleotide
  Target: LAMA2; (+) strand; PAM type: NRG; PAM sequence: AGG
atactgtaaaaactaagaag

SEQ ID NO: 163775 - DNA, 20 bp, Artificial Sequence
  Description of Artificial Sequence: Synthetic oligonucleotide
  Target: LAMA2; (+) strand; PAM type: NRG; PAM sequence: AAG
actaagaagaggctgttcaa

SEQ ID NO: 163776 - DNA, 20 bp, Artificial Sequence
  Description of Artificial Sequence: Synthetic oligonucleotide
  Target: LAMA2; (+) strand; PAM type: NRG; PAM sequence: AAG
aagaagaggctgttcaaaag

SEQ ID NO: 163777 - DNA, 20 bp, Artificial Sequence
  Description of Artificial Sequence: Synthetic oligonucleotide
  Target: LAMA2; (+) strand; PAM type: NRG; PAM sequence: CAG
ttcaaaagaagaatattctt

SEQ ID NO: 163778 - DNA, 20 bp, Artificial Sequence
  Description of Artificial Sequence: Synthetic oligonucleotide
  Target: LAMA2; (+) strand; PAM type: NRG; PAM sequence: AAG
tcagtgcctaatgcaacaca

SEQ ID NO: 163779 - DNA, 20 bp, Artificial Sequence
  Description of Artificial Sequence: Synthetic oligonucleotide
  Target: LAMA2; (+) strand; PAM type: NRG; PAM sequence: AGG
cagtgcctaatgcaacacaa

SEQ ID NO: 163780 - DNA, 20 bp, Artificial Sequence
  Description of Artificial Sequence: Synthetic oligonucleotide
  Target: LAMA2; (+) strand; PAM type: NRG; PAM sequence: AAG
cctaatgcaacacaaaggtc

SEQ ID NO: 163781 - DNA, 20 bp, Artificial Sequence
  Description of Artificial Sequence: Synthetic oligonucleotide
  Target: LAMA2; (+) strand; PAM type: NRG; PAM sequence: TAG
aatgcaacacaaaggtcaag

SEQ ID NO: 163782 - DNA, 20 bp, Artificial Sequence
  Description of Artificial Sequence: Synthetic oligonucleotide
  Target: LAMA2; (+) strand; PAM type: NRG; PAM sequence: AGG
atgcaacacaaaggtcaagt

SEQ ID NO: 163783 - DNA, 20 bp, Artificial Sequence
  Description of Artificial Sequence: Synthetic oligonucleotide
  Target: LAMA2; (+) strand; PAM type: NRG; PAM sequence: TAG
acacaaaggtcaagtaggat

SEQ ID NO: 163784 - DNA, 20 bp, Artificial Sequence
  Description of Artificial Sequence: Synthetic oligonucleotide
  Target: LAMA2; (+) strand; PAM type: NRG; PAM sequence: AAG
gtcaagtaggattagtgctg

SEQ ID NO: 163785 - DNA, 20 bp, Artificial Sequence
  Description of Artificial Sequence: Synthetic oligonucleotide
  Target: LAMA2; (+) strand; PAM type: NRG; PAM sequence: AAG
tgaagttgttcattaaattg

SEQ ID NO: 163786 - DNA, 20 bp, Artificial Sequence
  Description of Artificial Sequence: Synthetic oligonucleotide
  Target: LAMA2; (+) strand; PAM type: NRG; PAM sequence: GAG
aagttgttcattaaattgaa

SEQ ID NO: 163787 - DNA, 20 bp, Artificial Sequence
  Description of Artificial Sequence: Synthetic oligonucleotide
  Target: LAMA2; (+) strand; PAM type: NRG; PAM sequence: AAG
ttaaattgaagagcaataat

SEQ ID NO: 163788 - DNA, 20 bp, Artificial Sequence
  Description of Artificial Sequence: Synthetic oligonucleotide
  Target: LAMA2; (+) strand; PAM type: NRG; PAM sequence: AGG
taaattgaagagcaataata

SEQ ID NO: 163789 - DNA, 20 bp, Artificial Sequence
  Description of Artificial Sequence: Synthetic oligonucleotide
  Target: LAMA2; (+) strand; PAM type: NRG; PAM sequence: GGG
aaattgaagagcaataataa

SEQ ID NO: 163790 - DNA, 20 bp, Artificial Sequence
  Description of Artificial Sequence: Synthetic oligonucleotide
  Target: LAMA2; (+) strand; PAM type: NRG; PAM sequence: TAG
ataagggcatttttttatgt

SEQ ID NO: 163791 - DNA, 20 bp, Artificial Sequence
  Description of Artificial Sequence: Synthetic oligonucleotide
  Target: LAMA2; (+) strand; PAM type: NRG; PAM sequence: TGG
agggcatttttttatgttag

SEQ ID NO: 163792 - DNA, 20 bp, Artificial Sequence
  Description of Artificial Sequence: Synthetic oligonucleotide
  Target: LAMA2; (+) strand; PAM type: NRG; PAM sequence: GGG
gggcatttttttatgttagt

SEQ ID NO: 163793 - DNA, 20 bp, Artificial Sequence
  Description of Artificial Sequence: Synthetic oligonucleotide
  Target: LAMA2; (+) strand; PAM type: NRG; PAM sequence: GAG
gcatttttttatgttagtgg

SEQ ID NO: 163794 - DNA, 20 bp, Artificial Sequence
  Description of Artificial Sequence: Synthetic oligonucleotide
  Target: LAMA2; (+) strand; PAM type: NRG; PAM sequence: TGG
gtcgttccaattgattccac

SEQ ID NO: 163795 - DNA, 20 bp, Artificial Sequence
  Description of Artificial Sequence: Synthetic oligonucleotide
  Target: LAMA2; (+) strand; PAM type: NRG; PAM sequence: GGG
tcgttccaattgattccact

SEQ ID NO: 163796 - DNA, 20 bp, Artificial Sequence
  Description of Artificial Sequence: Synthetic oligonucleotide
  Target: LAMA2; (+) strand; PAM type: NRG; PAM sequence: TGG
tccactgggttgtgaaatat

SEQ ID NO: 163797 - DNA, 20 bp, Artificial Sequence
  Description of Artificial Sequence: Synthetic oligonucleotide
  Target: LAMA2; (+) strand; PAM type: NRG; PAM sequence: AAG
aatattggaacgtgatgacc

SEQ ID NO: 163798 - DNA, 20 bp, Artificial Sequence
  Description of Artificial Sequence: Synthetic oligonucleotide
  Target: LAMA2; (+) strand; PAM type: NRG; PAM sequence: TGG
tggaacgtgatgaccaagtg

SEQ ID NO: 163799 - DNA, 20 bp, Artificial Sequence
  Description of Artificial Sequence: Synthetic oligonucleotide
  Target: LAMA2; (+) strand; PAM type: NRG; PAM sequence: TAG
tgtggtcctgtttgacccta

SEQ ID NO: 163800 - DNA, 20 bp, Artificial Sequence
  Description of Artificial Sequence: Synthetic oligonucleotide
  Target: LAMA2; (+) strand; PAM type: NRG; PAM sequence: CAG
ggtcctgtttgaccctatag

SEQ ID NO: 163801 - DNA, 20 bp, Artificial Sequence
  Description of Artificial Sequence: Synthetic oligonucleotide
  Target: LAMA2; (+) strand; PAM type: NRG; PAM sequence: TAG
gaccctatagcagtacccta

SEQ ID NO: 163802 - DNA, 20 bp, Artificial Sequence
  Description of Artificial Sequence: Synthetic oligonucleotide
  Target: LAMA2; (+) strand; PAM type: NRG; PAM sequence: GAG
ccctatagcagtaccctata

SEQ ID NO: 163803 - DNA, 20 bp, Artificial Sequence
  Description of Artificial Sequence: Synthetic oligonucleotide
  Target: LAMA2; (+) strand; PAM type: NRG; PAM sequence: GAG
tgtaaactttttttcctgct

SEQ ID NO: 163804 - DNA, 20 bp, Artificial Sequence
  Description of Artificial Sequence: Synthetic oligonucleotide
  Target: LAMA2; (+) strand; PAM type: NRG; PAM sequence: TAG
aactttttttcctgctgagt

SEQ ID NO: 163805 - DNA, 20 bp, Artificial Sequence
  Description of Artificial Sequence: Synthetic oligonucleotide
  Target: LAMA2; (+) strand; PAM type: NRG; PAM sequence: CAG
tttttcctgctgagttagca

SEQ ID NO: 163806 - DNA, 20 bp, Artificial Sequence
  Description of Artificial Sequence: Synthetic oligonucleotide
  Target: LAMA2; (+) strand; PAM type: NRG; PAM sequence: TAG
agttagcacagatgaaataa

SEQ ID NO: 163807 - DNA, 20 bp, Artificial Sequence
  Description of Artificial Sequence: Synthetic oligonucleotide
  Target: LAMA2; (+) strand; PAM type: NRG; PAM sequence: TGG
tatgataaaacatttgaacc

SEQ ID NO: 163808 - DNA, 20 bp, Artificial Sequence
  Description of Artificial Sequence: Synthetic oligonucleotide
  Target: LAMA2; (+) strand; PAM type: NRG; PAM sequence: TAG
taaaacatttgaacctggtc

SEQ ID NO: 163809 - DNA, 20 bp, Artificial Sequence
  Description of Artificial Sequence: Synthetic oligonucleotide
  Target: LAMA2; (+) strand; PAM type: NRG; PAM sequence: TAG
tggtctagaatatgctgacc

SEQ ID NO: 163810 - DNA, 20 bp, Artificial Sequence
  Description of Artificial Sequence: Synthetic oligonucleotide
  Target: LAMA2; (+) strand; PAM type: NRG; PAM sequence: GAG
gtctagaatatgctgaccta

SEQ ID NO: 163811 - DNA, 20 bp, Artificial Sequence
  Description of Artificial Sequence: Synthetic oligonucleotide
  Target: LAMA2; (+) strand; PAM type: NRG; PAM sequence: AGG
tctagaatatgctgacctag

SEQ ID NO: 163812 - DNA, 20 bp, Artificial Sequence
  Description of Artificial Sequence: Synthetic oligonucleotide
  Target: LAMA2; (+) strand; PAM type: NRG; PAM sequence: AAG
atgctgacctagaggaaaac

SEQ ID NO: 163813 - DNA, 20 bp, Artificial Sequence
  Description of Artificial Sequence: Synthetic oligonucleotide
  Target: LAMA2; (+) strand; PAM type: NRG; PAM sequence: AAG
aagcatattgatgattcttc

SEQ ID NO: 163814 - DNA, 20 bp, Artificial Sequence
  Description of Artificial Sequence: Synthetic oligonucleotide
  Target: LAMA2; (+) strand; PAM type: NRG; PAM sequence: AGG
agcatattgatgattcttca

SEQ ID NO: 163815 - DNA, 20 bp, Artificial Sequence
  Description of Artificial Sequence: Synthetic oligonucleotide
  Target: LAMA2; (+) strand; PAM type: NRG; PAM sequence: AAG
atattgatgattcttcaagg

SEQ ID NO: 163816 - DNA, 20 bp, Artificial Sequence
  Description of Artificial Sequence: Synthetic oligonucleotide
  Target: LAMA2; (+) strand; PAM type: NRG; PAM sequence: CAG
gatgattcttcaaggaagtt

SEQ ID NO: 163817 - DNA, 20 bp, Artificial Sequence
  Description of Artificial Sequence: Synthetic oligonucleotide
  Target: LAMA2; (+) strand; PAM type: NRG; PAM sequence: TAG
ttcagatgtctgacttcaat

SEQ ID NO: 163818 - DNA, 20 bp, Artificial Sequence
  Description of Artificial Sequence: Synthetic oligonucleotide
  Target: LAMA2; (+) strand; PAM type: NRG; PAM sequence: TAG
acttcaattagacatgtgat

SEQ ID NO: 163819 - DNA, 20 bp, Artificial Sequence
  Description of Artificial Sequence: Synthetic oligonucleotide
  Target: LAMA2; (+) strand; PAM type: NRG; PAM sequence: TGG
tgattagaaaaaataaaaac

SEQ ID NO: 163820 - DNA, 20 bp, Artificial Sequence
  Description of Artificial Sequence: Synthetic oligonucleotide
  Target: LAMA2; (+) strand; PAM type: NRG; PAM sequence: CAG
tagaaaaaataaaaactgga

SEQ ID NO: 163821 - DNA, 20 bp, Artificial Sequence
  Description of Artificial Sequence: Synthetic oligonucleotide
  Target: LAMA2; (+) strand; PAM type: NRG; PAM sequence: AGG
agaaaaaataaaaactggac

SEQ ID NO: 163822 - DNA, 20 bp, Artificial Sequence
  Description of Artificial Sequence: Synthetic oligonucleotide
  Target: LAMA2; (+) strand; PAM type: NRG; PAM sequence: TAG
attcatttttctattgtcaa

SEQ ID NO: 163823 - DNA, 20 bp, Artificial Sequence
  Description of Artificial Sequence: Synthetic oligonucleotide
  Target: LAMA2; (+) strand; PAM type: NRG; PAM sequence: AAG
ctattgtcaatagcattatt

SEQ ID NO: 163824 - DNA, 20 bp, Artificial Sequence
  Description of Artificial Sequence: Synthetic oligonucleotide
  Target: LAMA2; (+) strand; PAM type: NRG; PAM sequence: AAG
cattattaagtttaaaatgc

SEQ ID NO: 163825 - DNA, 20 bp, Artificial Sequence
  Description of Artificial Sequence: Synthetic oligonucleotide
  Target: LAMA2; (+) strand; PAM type: NRG; PAM sequence: GAG
ttattaagtttaaaatgcaa

SEQ ID NO: 163826 - DNA, 20 bp, Artificial Sequence
  Description of Artificial Sequence: Synthetic oligonucleotide
  Target: LAMA2; (+) strand; PAM type: NRG; PAM sequence: GAG
attaagtttaaaatgcaaga

SEQ ID NO: 163827 - DNA, 20 bp, Artificial Sequence
  Description of Artificial Sequence: Synthetic oligonucleotide
  Target: LAMA2; (+) strand; PAM type: NRG; PAM sequence: TAG
atgcaagagagctacatttt

SEQ ID NO: 163828 - DNA, 20 bp, Artificial Sequence
  Description of Artificial Sequence: Synthetic oligonucleotide
  Target: LAMA2; (+) strand; PAM type: NRG; PAM sequence: AAG
aagagagctacatttttaga

SEQ ID NO: 163829 - DNA, 20 bp, Artificial Sequence
  Description of Artificial Sequence: Synthetic oligonucleotide
  Target: LAMA2; (+) strand; PAM type: NRG; PAM sequence: CAG
gaaagaaatcaaaaactcct

SEQ ID NO: 163830 - DNA, 20 bp, Artificial Sequence
  Description of Artificial Sequence: Synthetic oligonucleotide
  Target: LAMA2; (+) strand; PAM type: NRG; PAM sequence: AAG
aaaaactcctcagaatttca

SEQ ID NO: 163831 - DNA, 20 bp, Artificial Sequence
  Description of Artificial Sequence: Synthetic oligonucleotide
  Target: LAMA2; (+) strand; PAM type: NRG; PAM sequence: AAG
atgaatatgaacaatgctat

SEQ ID NO: 163832 - DNA, 20 bp, Artificial Sequence
  Description of Artificial Sequence: Synthetic oligonucleotide
  Target: LAMA2; (+) strand; PAM type: NRG; PAM sequence: CAG
atgactgacttttgcatttt

SEQ ID NO: 163833 - DNA, 20 bp, Artificial Sequence
  Description of Artificial Sequence: Synthetic oligonucleotide
  Target: LAMA2; (+) strand; PAM type: NRG; PAM sequence: AAG
gcattttcagcttcaaatcc

SEQ ID NO: 163834 - DNA, 20 bp, Artificial Sequence
  Description of Artificial Sequence: Synthetic oligonucleotide
  Target: LAMA2; (+) strand; PAM type: NRG; PAM sequence: TGG
caagcatccaccatatcact

SEQ ID NO: 163835 - DNA, 20 bp, Artificial Sequence
  Description of Artificial Sequence: Synthetic oligonucleotide
  Target: LAMA2; (+) strand; PAM type: NRG; PAM sequence: CAG
tccaccatatcacttggact

SEQ ID NO: 163836 - DNA, 20 bp, Artificial Sequence
  Description of Artificial Sequence: Synthetic oligonucleotide
  Target: LAMA2; (+) strand; PAM type: NRG; PAM sequence: AGG
ccaccatatcacttggactc

SEQ ID NO: 163837 - DNA, 20 bp, Artificial Sequence
  Description of Artificial Sequence: Synthetic oligonucleotide
  Target: LAMA2; (+) strand; PAM type: NRG; PAM sequence: GAG
accatatcacttggactcag

SEQ ID NO: 163838 - DNA, 20 bp, Artificial Sequence
  Description of Artificial Sequence: Synthetic oligonucleotide
  Target: LAMA2; (+) strand; PAM type: NRG; PAM sequence: AAG
tatcacttggactcaggagt

SEQ ID NO: 163839 - DNA, 20 bp, Artificial Sequence
  Description of Artificial Sequence: Synthetic oligonucleotide
  Target: LAMA2; (+) strand; PAM type: NRG; PAM sequence: TAG
ttggactcaggagtaagccc

SEQ ID NO: 163840 - DNA, 20 bp, Artificial Sequence
  Description of Artificial Sequence: Synthetic oligonucleotide
  Target: LAMA2; (+) strand; PAM type: NRG; PAM sequence: AGG
tggactcaggagtaagccct

SEQ ID NO: 163841 - DNA, 20 bp, Artificial Sequence
  Description of Artificial Sequence: Synthetic oligonucleotide
  Target: LAMA2; (+) strand; PAM type: NRG; PAM sequence: GGG
ggactcaggagtaagcccta

SEQ ID NO: 163842 - DNA, 20 bp, Artificial Sequence
  Description of Artificial Sequence: Synthetic oligonucleotide
  Target: LAMA2; (+) strand; PAM type: NRG; PAM sequence: AAG
taagccctagggaaacttac

SEQ ID NO: 163843 - DNA, 20 bp, Artificial Sequence
  Description of Artificial Sequence: Synthetic oligonucleotide
  Target: LAMA2; (+) strand; PAM type: NRG; PAM sequence: GAG
agccctagggaaacttacaa

SEQ ID NO: 163844 - DNA, 20 bp, Artificial Sequence
  Description of Artificial Sequence: Synthetic oligonucleotide
  Target: LAMA2; (+) strand; PAM type: NRG; PAM sequence: CAG
caagagttccgttttatcca

SEQ ID NO: 163845 - DNA, 20 bp, Artificial Sequence
  Description of Artificial Sequence: Synthetic oligonucleotide
  Target: LAMA2; (+) strand; PAM type: NRG; PAM sequence: TAG
atccacagaatgctatgata

SEQ ID NO: 163846 - DNA, 20 bp, Artificial Sequence
  Description of Artificial Sequence: Synthetic oligonucleotide
  Target: LAMA2; (+) strand; PAM type: NRG; PAM sequence: AAG
taattaaactcttgaaattg

SEQ ID NO: 163847 - DNA, 20 bp, Artificial Sequence
  Description of Artificial Sequence: Synthetic oligonucleotide
  Target: LAMA2; (+) strand; PAM type: NRG; PAM sequence: AAG
gaagttgatacctcatgttc

SEQ ID NO: 163848 - DNA, 20 bp, Artificial Sequence
  Description of Artificial Sequence: Synthetic oligonucleotide
  Target: LAMA2; (+) strand; PAM type: NRG; PAM sequence: CAG
ctcatgttcaagatataaat

SEQ ID NO: 163849 - DNA, 20 bp, Artificial Sequence
  Description of Artificial Sequence: Synthetic oligonucleotide
  Target: LAMA2; (+) strand; PAM type: NRG; PAM sequence: AGG
tcatgttcaagatataaatc

SEQ ID NO: 163850 - DNA, 20 bp, Artificial Sequence
  Description of Artificial Sequence: Synthetic oligonucleotide
  Target: LAMA2; (+) strand; PAM type: NRG; PAM sequence: AAG
atcaggataaaatacattcc

SEQ ID NO: 163851 - DNA, 20 bp, Artificial Sequence
  Description of Artificial Sequence: Synthetic oligonucleotide
  Target: LAMA2; (+) strand; PAM type: NRG; PAM sequence: TAG
tccaagtttctatgaaaacg

SEQ ID NO: 163852 - DNA, 20 bp, Artificial Sequence
  Description of Artificial Sequence: Synthetic oligonucleotide
  Target: LAMA2; (+) strand; PAM type: NRG; PAM sequence: TAG
tgaaaacgtagttatatgtt

SEQ ID NO: 163853 - DNA, 20 bp, Artificial Sequence
  Description of Artificial Sequence: Synthetic oligonucleotide
  Target: LAMA2; (+) strand; PAM type: NRG; PAM sequence: TAG
ctatcatttttactgatcat

SEQ ID NO: 163854 - DNA, 20 bp, Artificial Sequence
  Description of Artificial Sequence: Synthetic oligonucleotide
  Target: LAMA2; (+) strand; PAM type: NRG; PAM sequence: AAG
gataattactctgttgacta

SEQ ID NO: 163855 - DNA, 20 bp, Artificial Sequence
  Description of Artificial Sequence: Synthetic oligonucleotide
  Target: LAMA2; (+) strand; PAM type: NRG; PAM sequence: AAG
tactttaaaatcaccatcaa

SEQ ID NO: 163856 - DNA, 20 bp, Artificial Sequence
  Description of Artificial Sequence: Synthetic oligonucleotide
  Target: LAMA2; (+) strand; PAM type: NRG; PAM sequence: TAG
taaaatcaccatcaaaagtc

SEQ ID NO: 163857 - DNA, 20 bp, Artificial Sequence
  Description of Artificial Sequence: Synthetic oligonucleotide
  Target: LAMA2; (+) strand; PAM type: NRG; PAM sequence: GAG
aaagtctagacttctgaatc

SEQ ID NO: 163858 - DNA, 20 bp, Artificial Sequence
  Description of Artificial Sequence: Synthetic oligonucleotide
  Target: LAMA2; (+) strand; PAM type: NRG; PAM sequence: AAG
agaaatacttcaccattatg

SEQ ID NO: 163859 - DNA, 20 bp, Artificial Sequence
  Description of Artificial Sequence: Synthetic oligonucleotide
  Target: LAMA2; (+) strand; PAM type: NRG; PAM sequence: TAG
acaaaaaaaaacaaaactca

SEQ ID NO: 163860 - DNA, 20 bp, Artificial Sequence
  Description of Artificial Sequence: Synthetic oligonucleotide
  Target: LAMA2; (+) strand; PAM type: NRG; PAM sequence: GAG
aaaaaaaaacaaaactcata

SEQ ID NO: 163861 - DNA, 20 bp, Artificial Sequence
  Description of Artificial Sequence: Synthetic oligonucleotide
  Target: LAMA2; (+) strand; PAM type: NRG; PAM sequence: CAG
aaaactcatagagcctgtat

SEQ ID NO: 163862 - DNA, 20 bp, Artificial Sequence
  Description of Artificial Sequence: Synthetic oligonucleotide
  Target: LAMA2; (+) strand; PAM type: NRG; PAM sequence: AAG
acaattcttgcattgctata

SEQ ID NO: 163863 - DNA, 20 bp, Artificial Sequence
  Description of Artificial Sequence: Synthetic oligonucleotide
  Target: LAMA2; (+) strand; PAM type: NRG; PAM sequence: GAG
attgctataaagaaatacct

SEQ ID NO: 163864 - DNA, 20 bp, Artificial Sequence
  Description of Artificial Sequence: Synthetic oligonucleotide
  Target: LAMA2; (+) strand; PAM type: NRG; PAM sequence: AAG
aaatacctgagactgattat

SEQ ID NO: 163865 - DNA, 20 bp, Artificial Sequence
  Description of Artificial Sequence: Synthetic oligonucleotide
  Target: LAMA2; (+) strand; PAM type: NRG; PAM sequence: TGG
gagactgattataagaaaac

SEQ ID NO: 163866 - DNA, 20 bp, Artificial Sequence
  Description of Artificial Sequence: Synthetic oligonucleotide
  Target: LAMA2; (+) strand; PAM type: NRG; PAM sequence: TGG
ttataagaaaactggtttaa

SEQ ID NO: 163867 - DNA, 20 bp, Artificial Sequence
  Description of Artificial Sequence: Synthetic oligonucleotide
  Target: LAMA2; (+) strand; PAM type: NRG; PAM sequence: GGG
tataagaaaactggtttaat

SEQ ID NO: 163868 - DNA, 20 bp, Artificial Sequence
  Description of Artificial Sequence: Synthetic oligonucleotide
  Target: LAMA2; (+) strand; PAM type: NRG; PAM sequence: CAG
aaactggtttaatgggctca

SEQ ID NO: 163869 - DNA, 20 bp, Artificial Sequence
  Description of Artificial Sequence: Synthetic oligonucleotide
  Target: LAMA2; (+) strand; PAM type: NRG; PAM sequence: TGG
gtttaatgggctcacagttc

SEQ ID NO: 163870 - DNA, 20 bp, Artificial Sequence
  Description of Artificial Sequence: Synthetic oligonucleotide
  Target: LAMA2; (+) strand; PAM type: NRG; PAM sequence: GAG
ttaatgggctcacagttctg

SEQ ID NO: 163871 - DNA, 20 bp, Artificial Sequence
  Description of Artificial Sequence: Synthetic oligonucleotide
  Target: LAMA2; (+) strand; PAM type: NRG; PAM sequence: AGG
taatgggctcacagttctgg

SEQ ID NO: 163872 - DNA, 20 bp, Artificial Sequence
  Description of Artificial Sequence: Synthetic oligonucleotide
  Target: LAMA2; (+) strand; PAM type: NRG; PAM sequence: GGG
aatgggctcacagttctgga

SEQ ID NO: 163873 - DNA, 20 bp, Artificial Sequence
  Description of Artificial Sequence: Synthetic oligonucleotide
  Target: LAMA2; (+) strand; PAM type: NRG; PAM sequence: CAG
tcacagttctggagggtgta

SEQ ID NO: 163874 - DNA, 20 bp, Artificial Sequence
  Description of Artificial Sequence: Synthetic oligonucleotide
  Target: LAMA2; (+) strand; PAM type: NRG; PAM sequence: AGG
cacagttctggagggtgtac

SEQ ID NO: 163875 - DNA, 20 bp, Artificial Sequence
  Description of Artificial Sequence: Synthetic oligonucleotide
  Target: LAMA2; (+) strand; PAM type: NRG; PAM sequence: AAG
agttctggagggtgtacagg

SEQ ID NO: 163876 - DNA, 20 bp, Artificial Sequence
  Description of Artificial Sequence: Synthetic oligonucleotide
  Target: LAMA2; (+) strand; PAM type: NRG; PAM sequence: TAG
tggagggtgtacaggaagca

SEQ ID NO: 163877 - DNA, 20 bp, Artificial Sequence
  Description of Artificial Sequence: Synthetic oligonucleotide
  Target: LAMA2; (+) strand; PAM type: NRG; PAM sequence: CGG
agggtgtacaggaagcatag

SEQ ID NO: 163878 - DNA, 20 bp, Artificial Sequence
  Description of Artificial Sequence: Synthetic oligonucleotide
  Target: LAMA2; (+) strand; PAM type: NRG; PAM sequence: TGG
agcatagcggcatctgtttc

SEQ ID NO: 163879 - DNA, 20 bp, Artificial Sequence
  Description of Artificial Sequence: Synthetic oligonucleotide
  Target: LAMA2; (+) strand; PAM type: NRG; PAM sequence: AAG
agcggcatctgtttctggtg

SEQ ID NO: 163880 - DNA, 20 bp, Artificial Sequence
  Description of Artificial Sequence: Synthetic oligonucleotide
  Target: LAMA2; (+) strand; PAM type: NRG; PAM sequence: AGG
gcggcatctgtttctggtga

SEQ ID NO: 163881 - DNA, 20 bp, Artificial Sequence
  Description of Artificial Sequence: Synthetic oligonucleotide
  Target: LAMA2; (+) strand; PAM type: NRG; PAM sequence: CAG
tctgtttctggtgaaggcct

SEQ ID NO: 163882 - DNA, 20 bp, Artificial Sequence
  Description of Artificial Sequence: Synthetic oligonucleotide
  Target: LAMA2; (+) strand; PAM type: NRG; PAM sequence: AGG
ctgtttctggtgaaggcctc

SEQ ID NO: 163883 - DNA, 20 bp, Artificial Sequence
  Description of Artificial Sequence: Synthetic oligonucleotide
  Target: LAMA2; (+) strand; PAM type: NRG; PAM sequence: AAG
tttctggtgaaggcctcagg

SEQ ID NO: 163884 - DNA, 20 bp, Artificial Sequence
  Description of Artificial Sequence: Synthetic oligonucleotide
  Target: LAMA2; (+) strand; PAM type: NRG; PAM sequence: CAG
tgaaggcctcaggaagcttc

SEQ ID NO: 163885 - DNA, 20 bp, Artificial Sequence
  Description of Artificial Sequence: Synthetic oligonucleotide
  Target: LAMA2; (+) strand; PAM type: NRG; PAM sequence: TGG
caggaagcttccagtcatga

SEQ ID NO: 163886 - DNA, 20 bp, Artificial Sequence
  Description of Artificial Sequence: Synthetic oligonucleotide
  Target: LAMA2; (+) strand; PAM type: NRG; PAM sequence: AAG
gaagcttccagtcatgatgg

SEQ ID NO: 163887 - DNA, 20 bp, Artificial Sequence
  Description of Artificial Sequence: Synthetic oligonucleotide
  Target: LAMA2; (+) strand; PAM type: NRG; PAM sequence: AGG
aagcttccagtcatgatgga

SEQ ID NO: 163888 - DNA, 20 bp, Artificial Sequence
  Description of Artificial Sequence: Synthetic oligonucleotide
  Target: LAMA2; (+) strand; PAM type: NRG; PAM sequence: AAG
tccagtcatgatggaaggcc

SEQ ID NO: 163889 - DNA, 20 bp, Artificial Sequence
  Description of Artificial Sequence: Synthetic oligonucleotide
  Target: LAMA2; (+) strand; PAM type: NRG; PAM sequence: AAG
gtcatgatggaaggccaagc

SEQ ID NO: 163890 - DNA, 20 bp, Artificial Sequence
  Description of Artificial Sequence: Synthetic oligonucleotide
  Target: LAMA2; (+) strand; PAM type: NRG; PAM sequence: AGG
tcatgatggaaggccaagca

SEQ ID NO: 163891 - DNA, 20 bp, Artificial Sequence
  Description of Artificial Sequence: Synthetic oligonucleotide
  Target: LAMA2; (+) strand; PAM type: NRG; PAM sequence: CAG
gatggaaggccaagcaagga

SEQ ID NO: 163892 - DNA, 20 bp, Artificial Sequence
  Description of Artificial Sequence: Synthetic oligonucleotide
  Target: LAMA2; (+) strand; PAM type: NRG; PAM sequence: TGG
agcaaggacagacttccaca

SEQ ID NO: 163893 - DNA, 20 bp, Artificial Sequence
  Description of Artificial Sequence: Synthetic oligonucleotide
  Target: LAMA2; (+) strand; PAM type: NRG; PAM sequence: CAG
aaggacagacttccacatgg

SEQ ID NO: 163894 - DNA, 20 bp, Artificial Sequence
  Description of Artificial Sequence: Synthetic oligonucleotide
  Target: LAMA2; (+) strand; PAM type: NRG; PAM sequence: AGG
aggacagacttccacatggc

SEQ ID NO: 163895 - DNA, 20 bp, Artificial Sequence
  Description of Artificial Sequence: Synthetic oligonucleotide
  Target: LAMA2; (+) strand; PAM type: NRG; PAM sequence: CAG
agacttccacatggcaggat

SEQ ID NO: 163896 - DNA, 20 bp, Artificial Sequence
  Description of Artificial Sequence: Synthetic oligonucleotide
  Target: LAMA2; (+) strand; PAM type: NRG; PAM sequence: AGG
gacttccacatggcaggatc

SEQ ID NO: 163897 - DNA, 20 bp, Artificial Sequence
  Description of Artificial Sequence: Synthetic oligonucleotide
  Target: LAMA2; (+) strand; PAM type: NRG; PAM sequence: GAG
cttccacatggcaggatcag

SEQ ID NO: 163898 - DNA, 20 bp, Artificial Sequence
  Description of Artificial Sequence: Synthetic oligonucleotide
  Target: LAMA2; (+) strand; PAM type: NRG; PAM sequence: AAG
acatggcaggatcaggagaa

SEQ ID NO: 163899 - DNA, 20 bp, Artificial Sequence
  Description of Artificial Sequence: Synthetic oligonucleotide
  Target: LAMA2; (+) strand; PAM type: NRG; PAM sequence: CAG
tggcaggatcaggagaaaag

SEQ ID NO: 163900 - DNA, 20 bp, Artificial Sequence
  Description of Artificial Sequence: Synthetic oligonucleotide
  Target: LAMA2; (+) strand; PAM type: NRG; PAM sequence: AGG
ggcaggatcaggagaaaagc

SEQ ID NO: 163901 - DNA, 20 bp, Artificial Sequence
  Description of Artificial Sequence: Synthetic oligonucleotide
  Target: LAMA2; (+) strand; PAM type: NRG; PAM sequence: GGG
gcaggatcaggagaaaagca

SEQ ID NO: 163902 - DNA, 20 bp, Artificial Sequence
  Description of Artificial Sequence: Synthetic oligonucleotide
  Target: LAMA2; (+) strand; PAM type: NRG; PAM sequence: CAG
atgccatgcatttaaacaac

SEQ ID NO: 163903 - DNA, 20 bp, Artificial Sequence
  Description of Artificial Sequence: Synthetic oligonucleotide
  Target: LAMA2; (+) strand; PAM type: NRG; PAM sequence: CGG
tttaaacaaccagatcttgc

SEQ ID NO: 163904 - DNA, 20 bp, Artificial Sequence
  Description of Artificial Sequence: Synthetic oligonucleotide
  Target: LAMA2; (+) strand; PAM type: NRG; PAM sequence: TAG
aaacaaccagatcttgccgg

SEQ ID NO: 163905 - DNA, 20 bp, Artificial Sequence
  Description of Artificial Sequence: Synthetic oligonucleotide
  Target: LAMA2; (+) strand; PAM type: NRG; PAM sequence: AGG
aacaaccagatcttgccggt

SEQ ID NO: 163906 - DNA, 20 bp, Artificial Sequence
  Description of Artificial Sequence: Synthetic oligonucleotide
  Target: LAMA2; (+) strand; PAM type: NRG; PAM sequence: TGG
atcttgccggtaggaactca

SEQ ID NO: 163907 - DNA, 20 bp, Artificial Sequence
  Description of Artificial Sequence: Synthetic oligonucleotide
  Target: LAMA2; (+) strand; PAM type: NRG; PAM sequence: AAG
cggtaggaactcatggtcac

SEQ ID NO: 163908 - DNA, 20 bp, Artificial Sequence
  Description of Artificial Sequence: Synthetic oligonucleotide
  Target: LAMA2; (+) strand; PAM type: NRG; PAM sequence: AGG
ggtaggaactcatggtcaca

SEQ ID NO: 163909 - DNA, 20 bp, Artificial Sequence
  Description of Artificial Sequence: Synthetic oligonucleotide
  Target: LAMA2; (+) strand; PAM type: NRG; PAM sequence: CAG
ggaactcatggtcacaagga

SEQ ID NO: 163910 - DNA, 20 bp, Artificial Sequence
  Description of Artificial Sequence: Synthetic oligonucleotide
  Target: LAMA2; (+) strand; PAM type: NRG; PAM sequence: AAG
atggtcacaaggacagcacc

SEQ ID NO: 163911 - DNA, 20 bp, Artificial Sequence
  Description of Artificial Sequence: Synthetic oligonucleotide
  Target: LAMA2; (+) strand; PAM type: NRG; PAM sequence: GAG
caaggacagcaccaagccct

SEQ ID NO: 163912 - DNA, 20 bp, Artificial Sequence
  Description of Artificial Sequence: Synthetic oligonucleotide
  Target: LAMA2; (+) strand; PAM type: NRG; PAM sequence: AGG
aaggacagcaccaagccctg

SEQ ID NO: 163913 - DNA, 20 bp, Artificial Sequence
  Description of Artificial Sequence: Synthetic oligonucleotide
  Target: LAMA2; (+) strand; PAM type: NRG; PAM sequence: GGG
aggacagcaccaagccctga

SEQ ID NO: 163914 - DNA, 20 bp, Artificial Sequence
  Description of Artificial Sequence: Synthetic oligonucleotide
  Target: LAMA2; (+) strand; PAM type: NRG; PAM sequence: CAG
agcaccaagccctgagggat

SEQ ID NO: 163915 - DNA, 20 bp, Artificial Sequence
  Description of Artificial Sequence: Synthetic oligonucleotide
  Target: LAMA2; (+) strand; PAM type: NRG; PAM sequence: CAG
atgatccaaacacctcccac

SEQ ID NO: 163916 - DNA, 20 bp, Artificial Sequence
  Description of Artificial Sequence: Synthetic oligonucleotide
  Target: LAMA2; (+) strand; PAM type: NRG; PAM sequence: AGG
tgatccaaacacctcccacc

SEQ ID NO: 163917 - DNA, 20 bp, Artificial Sequence
  Description of Artificial Sequence: Synthetic oligonucleotide
  Target: LAMA2; (+) strand; PAM type: NRG; PAM sequence: TGG
ccaggctccacctccaacac

SEQ ID NO: 163918 - DNA, 20 bp, Artificial Sequence
  Description of Artificial Sequence: Synthetic oligonucleotide
  Target: LAMA2; (+) strand; PAM type: NRG; PAM sequence: GGG
caggctccacctccaacact

SEQ ID NO: 163919 - DNA, 20 bp, Artificial Sequence
  Description of Artificial Sequence: Synthetic oligonucleotide
  Target: LAMA2; (+) strand; PAM type: NRG; PAM sequence: GGG
aggctccacctccaacactg

SEQ ID NO: 163920 - DNA, 20 bp, Artificial Sequence
  Description of Artificial Sequence: Synthetic oligonucleotide
  Target: LAMA2; (+) strand; PAM type: NRG; PAM sequence: GAG
tggggattatattttaacac

SEQ ID NO: 163921 - DNA, 20 bp, Artificial Sequence
  Description of Artificial Sequence: Synthetic oligonucleotide
  Target: LAMA2; (+) strand; PAM type: NRG; PAM sequence: TAG
ttatattttaacacgagaat

SEQ ID NO: 163922 - DNA, 20 bp, Artificial Sequence
  Description of Artificial Sequence: Synthetic oligonucleotide
  Target: LAMA2; (+) strand; PAM type: NRG; PAM sequence: TGG
tattttaacacgagaattag

SEQ ID NO: 163923 - DNA, 20 bp, Artificial Sequence
  Description of Artificial Sequence: Synthetic oligonucleotide
  Target: LAMA2; (+) strand; PAM type: NRG; PAM sequence: GGG
attttaacacgagaattagt

SEQ ID NO: 163924 - DNA, 20 bp, Artificial Sequence
  Description of Artificial Sequence: Synthetic oligonucleotide
  Target: LAMA2; (+) strand; PAM type: NRG; PAM sequence: GGG
ttttaacacgagaattagtg

SEQ ID NO: 163925 - DNA, 20 bp, Artificial Sequence
  Description of Artificial Sequence: Synthetic oligonucleotide
  Target: LAMA2; (+) strand; PAM type: NRG; PAM sequence: CAG
ggggacatatccaactgtat

SEQ ID NO: 163926 - DNA, 20 bp, Artificial Sequence
  Description of Artificial Sequence: Synthetic oligonucleotide
  Target: LAMA2; (+) strand; PAM type: NRG; PAM sequence: GAG
ggacatatccaactgtatca

SEQ ID NO: 163927 - DNA, 20 bp, Artificial Sequence
  Description of Artificial Sequence: Synthetic oligonucleotide
  Target: LAMA2; (+) strand; PAM type: NRG; PAM sequence: AAG
aactgtatcagagacctctc

SEQ ID NO: 163928 - DNA, 20 bp, Artificial Sequence
  Description of Artificial Sequence: Synthetic oligonucleotide
  Target: LAMA2; (+) strand; PAM type: NRG; PAM sequence: GAG
ctctcaagtaatttatttat

SEQ ID NO: 163929 - DNA, 20 bp, Artificial Sequence
  Description of Artificial Sequence: Synthetic oligonucleotide
  Target: LAMA2; (+) strand; PAM type: NRG; PAM sequence: TGG
tgttttactgtttttaaaac

SEQ ID NO: 163930 - DNA, 20 bp, Artificial Sequence
  Description of Artificial Sequence: Synthetic oligonucleotide
  Target: LAMA2; (+) strand; PAM type: NRG; PAM sequence: GGG
gttttactgtttttaaaact

SEQ ID NO: 163931 - DNA, 20 bp, Artificial Sequence
  Description of Artificial Sequence: Synthetic oligonucleotide
  Target: LAMA2; (+) strand; PAM type: NRG; PAM sequence: CAG
atgactttaatttaaatgaa

SEQ ID NO: 163932 - DNA, 20 bp, Artificial Sequence
  Description of Artificial Sequence: Synthetic oligonucleotide
  Target: LAMA2; (+) strand; PAM type: NRG; PAM sequence: GAG
atttaaatgaacagtgattt

SEQ ID NO: 163933 - DNA, 20 bp, Artificial Sequence
  Description of Artificial Sequence: Synthetic oligonucleotide
  Target: LAMA2; (+) strand; PAM type: NRG; PAM sequence: TAG
gaacagtgatttgagattta

SEQ ID NO: 163934 - DNA, 20 bp, Artificial Sequence
  Description of Artificial Sequence: Synthetic oligonucleotide
  Target: LAMA2; (+) strand; PAM type: NRG; PAM sequence: TGG
gcttccctttctttgtgtca

SEQ ID NO: 163935 - DNA, 20 bp, Artificial Sequence
  Description of Artificial Sequence: Synthetic oligonucleotide
  Target: LAMA2; (+) strand; PAM type: NRG; PAM sequence: AAG
atggataatttctctgtgct

SEQ ID NO: 163936 - DNA, 20 bp, Artificial Sequence
  Description of Artificial Sequence: Synthetic oligonucleotide
  Target: LAMA2; (+) strand; PAM type: NRG; PAM sequence: AGG
tggataatttctctgtgcta

SEQ ID NO: 163937 - DNA, 20 bp, Artificial Sequence
  Description of Artificial Sequence: Synthetic oligonucleotide
  Target: LAMA2; (+) strand; PAM type: NRG; PAM sequence: GAG
atttctctgtgctaaggtgt

SEQ ID NO: 163938 - DNA, 20 bp, Artificial Sequence
  Description of Artificial Sequence: Synthetic oligonucleotide
  Target: LAMA2; (+) strand; PAM type: NRG; PAM sequence: TGG
gtgtgagcatacacatcatt

SEQ ID NO: 163939 - DNA, 20 bp, Artificial Sequence
  Description of Artificial Sequence: Synthetic oligonucleotide
  Target: LAMA2; (+) strand; PAM type: NRG; PAM sequence: GGG
tgtgagcatacacatcattt

SEQ ID NO: 163940 - DNA, 20 bp, Artificial Sequence
  Description of Artificial Sequence: Synthetic oligonucleotide
  Target: LAMA2; (+) strand; PAM type: NRG; PAM sequence: AAG
catcatttgggctgttattg

SEQ ID NO: 163941 - DNA, 20 bp, Artificial Sequence
  Description of Artificial Sequence: Synthetic oligonucleotide
  Target: LAMA2; (+) strand; PAM type: NRG; PAM sequence: TAG
catttgggctgttattgaag

SEQ ID NO: 163942 - DNA, 20 bp, Artificial Sequence
  Description of Artificial Sequence: Synthetic oligonucleotide
  Target: LAMA2; (+) strand; PAM type: NRG; PAM sequence: AAG
tgttattgaagtagaatacg

SEQ ID NO: 163943 - DNA, 20 bp, Artificial Sequence
  Description of Artificial Sequence: Synthetic oligonucleotide
  Target: LAMA2; (+) strand; PAM type: NRG; PAM sequence: TAG
cgaagcctgccttctttcac

SEQ ID NO: 163944 - DNA, 20 bp, Artificial Sequence
  Description of Artificial Sequence: Synthetic oligonucleotide
  Target: LAMA2; (+) strand; PAM type: NRG; PAM sequence: CAG
agcctgccttctttcactag

SEQ ID NO: 163945 - DNA, 20 bp, Artificial Sequence
  Description of Artificial Sequence: Synthetic oligonucleotide
  Target: LAMA2; (+) strand; PAM type: NRG; PAM sequence: AGG
gcctgccttctttcactagc

SEQ ID NO: 163946 - DNA, 20 bp, Artificial Sequence
  Description of Artificial Sequence: Synthetic oligonucleotide
  Target: LAMA2; (+) strand; PAM type: NRG; PAM sequence: GGG
cctgccttctttcactagca

SEQ ID NO: 163947 - DNA, 20 bp, Artificial Sequence
  Description of Artificial Sequence: Synthetic oligonucleotide
  Target: LAMA2; (+) strand; PAM type: NRG; PAM sequence: GGG
ctgccttctttcactagcag

SEQ ID NO: 163948 - DNA, 20 bp, Artificial Sequence
  Description of Artificial Sequence: Synthetic oligonucleotide
  Target: LAMA2; (+) strand; PAM type: NRG; PAM sequence: TAG
ttctttcactagcaggggaa

SEQ ID NO: 163949 - DNA, 20 bp, Artificial Sequence
  Description of Artificial Sequence: Synthetic oligonucleotide
  Target: LAMA2; (+) strand; PAM type: NRG; PAM sequence: GAG
ttcactagcaggggaatagt

SEQ ID NO: 163950 - DNA, 20 bp, Artificial Sequence
  Description of Artificial Sequence: Synthetic oligonucleotide
  Target: LAMA2; (+) strand; PAM type: NRG; PAM sequence: TGG
ttatgatttaaatttgatga

SEQ ID NO: 163951 - DNA, 20 bp, Artificial Sequence
  Description of Artificial Sequence: Synthetic oligonucleotide
  Target: LAMA2; (+) strand; PAM type: NRG; PAM sequence: TAG
tttaaatttgatgatggcca

SEQ ID NO: 163952 - DNA, 20 bp, Artificial Sequence
  Description of Artificial Sequence: Synthetic oligonucleotide
  Target: LAMA2; (+) strand; PAM type: NRG; PAM sequence: TGG
catagtgctatctaaacaca

SEQ ID NO: 163953 - DNA, 20 bp, Artificial Sequence
  Description of Artificial Sequence: Synthetic oligonucleotide
  Target: LAMA2; (+) strand; PAM type: NRG; PAM sequence: TGG
ctatctaaacacatggttaa

SEQ ID NO: 163954 - DNA, 20 bp, Artificial Sequence
  Description of Artificial Sequence: Synthetic oligonucleotide
  Target: LAMA2; (+) strand; PAM type: NRG; PAM sequence: TGG
taaacacatggttaatggtc

SEQ ID NO: 163955 - DNA, 20 bp, Artificial Sequence
  Description of Artificial Sequence: Synthetic oligonucleotide
  Target: LAMA2; (+) strand; PAM type: NRG; PAM sequence: TGG
cctgaataaacttcctgatt

SEQ ID NO: 163956 - DNA, 20 bp, Artificial Sequence
  Description of Artificial Sequence: Synthetic oligonucleotide
  Target: LAMA2; (+) strand; PAM type: NRG; PAM sequence: AAG
aataaacttcctgatttgga

SEQ ID NO: 163957 - DNA, 20 bp, Artificial Sequence
  Description of Artificial Sequence: Synthetic oligonucleotide
  Target: LAMA2; (+) strand; PAM type: NRG; PAM sequence: AGG
ataaacttcctgatttggaa

SEQ ID NO: 163958 - DNA, 20 bp, Artificial Sequence
  Description of Artificial Sequence: Synthetic oligonucleotide
  Target: LAMA2; (+) strand; PAM type: NRG; PAM sequence: TGG
ttttgtaaaaattcatgctt

SEQ ID NO: 163959 - DNA, 20 bp, Artificial Sequence
  Description of Artificial Sequence: Synthetic oligonucleotide
  Target: LAMA2; (+) strand; PAM type: NRG; PAM sequence: TGG
tttggttttatacaattatt

SEQ ID NO: 163960 - DNA, 20 bp, Artificial Sequence
  Description of Artificial Sequence: Synthetic oligonucleotide
  Target: LAMA2; (+) strand; PAM type: NRG; PAM sequence: TAG
atttggataacttcatattt

SEQ ID NO: 163961 - DNA, 20 bp, Artificial Sequence
  Description of Artificial Sequence: Synthetic oligonucleotide
  Target: LAMA2; (+) strand; PAM type: NRG; PAM sequence: AAG
ataacttcatattttagtta

SEQ ID NO: 163962 - DNA, 20 bp, Artificial Sequence
  Description of Artificial Sequence: Synthetic oligonucleotide
  Target: LAMA2; (+) strand; PAM type: NRG; PAM sequence: AAG
tcatattttagttaaagata

SEQ ID NO: 163963 - DNA, 20 bp, Artificial Sequence
  Description of Artificial Sequence: Synthetic oligonucleotide
  Target: LAMA2; (+) strand; PAM type: NRG; PAM sequence: CAG
ttaaagataaagatgcctca

SEQ ID NO: 163964 - DNA, 20 bp, Artificial Sequence
  Description of Artificial Sequence: Synthetic oligonucleotide
  Target: LAMA2; (+) strand; PAM type: NRG; PAM sequence: AGG
taaagataaagatgcctcac

SEQ ID NO: 163965 - DNA, 20 bp, Artificial Sequence
  Description of Artificial Sequence: Synthetic oligonucleotide
  Target: LAMA2; (+) strand; PAM type: NRG; PAM sequence: TAG
ttaaatttattatttgatta

SEQ ID NO: 163966 - DNA, 20 bp, Artificial Sequence
  Description of Artificial Sequence: Synthetic oligonucleotide
  Target: LAMA2; (+) strand; PAM type: NRG; PAM sequence: TGG
tttctattaatacccgatta

SEQ ID NO: 163967 - DNA, 20 bp, Artificial Sequence
  Description of Artificial Sequence: Synthetic oligonucleotide
  Target: LAMA2; (+) strand; PAM type: NRG; PAM sequence: AAG
gattatggcctattttgttt

SEQ ID NO: 163968 - DNA, 20 bp, Artificial Sequence
  Description of Artificial Sequence: Synthetic oligonucleotide
  Target: LAMA2; (+) strand; PAM type: NRG; PAM sequence: GAG
atggcctattttgtttaagt

SEQ ID NO: 163969 - DNA, 20 bp, Artificial Sequence
  Description of Artificial Sequence: Synthetic oligonucleotide
  Target: LAMA2; (+) strand; PAM type: NRG; PAM sequence: AAG
agtgagttaatacatactca

SEQ ID NO: 163970 - DNA, 20 bp, Artificial Sequence
  Description of Artificial Sequence: Synthetic oligonucleotide
  Target: LAMA2; (+) strand; PAM type: NRG; PAM sequence: CAG
gagttaatacatactcaaag

SEQ ID NO: 163971 - DNA, 20 bp, Artificial Sequence
  Description of Artificial Sequence: Synthetic oligonucleotide
  Target: LAMA2; (+) strand; PAM type: NRG; PAM sequence: TGG
taatacatactcaaagcagt

SEQ ID NO: 163972 - DNA, 20 bp, Artificial Sequence
  Description of Artificial Sequence: Synthetic oligonucleotide
  Target: LAMA2; (+) strand; PAM type: NRG; PAM sequence: AAG
catactcaaagcagttggca

SEQ ID NO: 163973 - DNA, 20 bp, Artificial Sequence
  Description of Artificial Sequence: Synthetic oligonucleotide
  Target: LAMA2; (+) strand; PAM type: NRG; PAM sequence: AAG
ttggcaaagaaaaactatgt

SEQ ID NO: 163974 - DNA, 20 bp, Artificial Sequence
  Description of Artificial Sequence: Synthetic oligonucleotide
  Target: LAMA2; (+) strand; PAM type: NRG; PAM sequence: AAG
aactatgtaagtgaatatgt

SEQ ID NO: 163975 - DNA, 20 bp, Artificial Sequence
  Description of Artificial Sequence: Synthetic oligonucleotide
  Target: LAMA2; (+) strand; PAM type: NRG; PAM sequence: AAG
ttctacatctgatgttcttt

SEQ ID NO: 163976 - DNA, 20 bp, Artificial Sequence
  Description of Artificial Sequence: Synthetic oligonucleotide
  Target: LAMA2; (+) strand; PAM type: NRG; PAM sequence: TGG
ctgatgttctttaagttact

SEQ ID NO: 163977 - DNA, 20 bp, Artificial Sequence
  Description of Artificial Sequence: Synthetic oligonucleotide
  Target: LAMA2; (+) strand; PAM type: NRG; PAM sequence: CGG
atgttctttaagttacttgg

SEQ ID NO: 163978 - DNA, 20 bp, Artificial Sequence
  Description of Artificial Sequence: Synthetic oligonucleotide
  Target: LAMA2; (+) strand; PAM type: NRG; PAM sequence: GAG
tctttaagttacttggcggt

SEQ ID NO: 163979 - DNA, 20 bp, Artificial Sequence
  Description of Artificial Sequence: Synthetic oligonucleotide
  Target: LAMA2; (+) strand; PAM type: NRG; PAM sequence: AGG
ctttaagttacttggcggtg

SEQ ID NO: 163980 - DNA, 20 bp, Artificial Sequence
  Description of Artificial Sequence: Synthetic oligonucleotide
  Target: LAMA2; (+) strand; PAM type: NRG; PAM sequence: TAG
aagttacttggcggtgaggt

SEQ ID NO: 163981 - DNA, 20 bp, Artificial Sequence
  Description of Artificial Sequence: Synthetic oligonucleotide
  Target: LAMA2; (+) strand; PAM type: NRG; PAM sequence: TGG
ttacttggcggtgaggttag

SEQ ID NO: 163982 - DNA, 20 bp, Artificial Sequence
  Description of Artificial Sequence: Synthetic oligonucleotide
  Target: LAMA2; (+) strand; PAM type: NRG; PAM sequence: GGG
tacttggcggtgaggttagt

SEQ ID NO: 163983 - DNA, 20 bp, Artificial Sequence
  Description of Artificial Sequence: Synthetic oligonucleotide
  Target: LAMA2; (+) strand; PAM type: NRG; PAM sequence: TGG
tagtgggttattctatgcct

SEQ ID NO: 163984 - DNA, 20 bp, Artificial Sequence
  Description of Artificial Sequence: Synthetic oligonucleotide
  Target: LAMA2; (+) strand; PAM type: NRG; PAM sequence: AAG
tgggttattctatgccttgg

SEQ ID NO: 163985 - DNA, 20 bp, Artificial Sequence
  Description of Artificial Sequence: Synthetic oligonucleotide
  Target: LAMA2; (+) strand; PAM type: NRG; PAM sequence: TAG
atatacaaataatcacattt

SEQ ID NO: 163986 - DNA, 20 bp, Artificial Sequence
  Description of Artificial Sequence: Synthetic oligonucleotide
  Target: LAMA2; (+) strand; PAM type: NRG; PAM sequence: TGG
ataatcacattttagatctt

SEQ ID NO: 163987 - DNA, 20 bp, Artificial Sequence
  Description of Artificial Sequence: Synthetic oligonucleotide
  Target: LAMA2; (+) strand; PAM type: NRG; PAM sequence: GGG
taatcacattttagatcttt

SEQ ID NO: 163988 - DNA, 20 bp, Artificial Sequence
  Description of Artificial Sequence: Synthetic oligonucleotide
  Target: LAMA2; (+) strand; PAM type: NRG; PAM sequence: TAG
tttgggtttaaaatatcttc

SEQ ID NO: 163989 - DNA, 20 bp, Artificial Sequence
  Description of Artificial Sequence: Synthetic oligonucleotide
  Target: LAMA2; (+) strand; PAM type: NRG; PAM sequence: AAG
gggtttaaaatatcttctag

SEQ ID NO: 163990 - DNA, 20 bp, Artificial Sequence
  Description of Artificial Sequence: Synthetic oligonucleotide
  Target: LAMA2; (+) strand; PAM type: NRG; PAM sequence: CAG
tctagaagccgcccttattg

SEQ ID NO: 163991 - DNA, 20 bp, Artificial Sequence
  Description of Artificial Sequence: Synthetic oligonucleotide
  Target: LAMA2; (+) strand; PAM type: NRG; PAM sequence: TAG
attgcagcctttctactgat

SEQ ID NO: 163992 - DNA, 20 bp, Artificial Sequence
  Description of Artificial Sequence: Synthetic oligonucleotide
  Target: LAMA2; (+) strand; PAM type: NRG; PAM sequence: TAG
ttctactgattagcaataat

SEQ ID NO: 163993 - DNA, 20 bp, Artificial Sequence
  Description of Artificial Sequence: Synthetic oligonucleotide
  Target: LAMA2; (+) strand; PAM type: NRG; PAM sequence: TAG
actgattagcaataattaga

SEQ ID NO: 163994 - DNA, 20 bp, Artificial Sequence
  Description of Artificial Sequence: Synthetic oligonucleotide
  Target: LAMA2; (+) strand; PAM type: NRG; PAM sequence: AAG
tagaaaaatacttacctata

SEQ ID NO: 163995 - DNA, 20 bp, Artificial Sequence
  Description of Artificial Sequence: Synthetic oligonucleotide
  Target: LAMA2; (+) strand; PAM type: NRG; PAM sequence: AAG
aaatacttacctataaagac

SEQ ID NO: 163996 - DNA, 20 bp, Artificial Sequence
  Description of Artificial Sequence: Synthetic oligonucleotide
  Target: LAMA2; (+) strand; PAM type: NRG; PAM sequence: AAG
acctataaagacaagaaata

SEQ ID NO: 163997 - DNA, 20 bp, Artificial Sequence
  Description of Artificial Sequence: Synthetic oligonucleotide
  Target: LAMA2; (+) strand; PAM type: NRG; PAM sequence: GAG
aatcattttttttttttttt

SEQ ID NO: 163998 - DNA, 20 bp, Artificial Sequence
  Description of Artificial Sequence: Synthetic oligonucleotide
  Target: LAMA2; (+) strand; PAM type: NRG; PAM sequence: CGG
atttttttttttttttgaga

SEQ ID NO: 163999 - DNA, 20 bp, Artificial Sequence
  Description of Artificial Sequence: Synthetic oligonucleotide
  Target: LAMA2; (+) strand; PAM type: NRG; PAM sequence: GAG
ttttttttttttttgagacg

SEQ ID NO: 164000 - DNA, 20 bp, Artificial Sequence
  Description of Artificial Sequence: Synthetic oligonucleotide
  Target: LAMA2; (+) strand; PAM type: NRG; PAM sequence: CAG
cggagtctcgctctgtcacc

SEQ ID NO: 164001 - DNA, 20 bp, Artificial Sequence
  Description of Artificial Sequence: Synthetic oligonucleotide
  Target: LAMA2; (+) strand; PAM type: NRG; PAM sequence: AGG
ggagtctcgctctgtcaccc

SEQ ID NO: 164002 - DNA, 20 bp, Artificial Sequence
  Description of Artificial Sequence: Synthetic oligonucleotide
  Target: LAMA2; (+) strand; PAM type: NRG; PAM sequence: TGG
tctcgctctgtcacccaggc

SEQ ID NO: 164003 - DNA, 20 bp, Artificial Sequence
  Description of Artificial Sequence: Synthetic oligonucleotide
  Target: LAMA2; (+) strand; PAM type: NRG; PAM sequence: GAG
tcgctctgtcacccaggctg

SEQ ID NO: 164004 - DNA, 20 bp, Artificial Sequence
  Description of Artificial Sequence: Synthetic oligonucleotide
  Target: LAMA2; (+) strand; PAM type: NRG; PAM sequence: CAG
ctgtcacccaggctggagtg

SEQ ID NO: 164005 - DNA, 20 bp, Artificial Sequence
  Description of Artificial Sequence: Synthetic oligonucleotide
  Target: LAMA2; (+) strand; PAM type: NRG; PAM sequence: TGG
tcacccaggctggagtgcag

SEQ ID NO: 164006 - DNA, 20 bp, Artificial Sequence
  Description of Artificial Sequence: Synthetic oligonucleotide
  Target: LAMA2; (+) strand; PAM type: NRG; PAM sequence: CGG
ggagtgcagtggcgcgatct

SEQ ID NO: 164007 - DNA, 20 bp, Artificial Sequence
  Description of Artificial Sequence: Synthetic oligonucleotide
  Target: LAMA2; (+) strand; PAM type: NRG; PAM sequence: AAG
gcgcgatctcggctcactgc

SEQ ID NO: 164008 - DNA, 20 bp, Artificial Sequence
  Description of Artificial Sequence: Synthetic oligonucleotide
  Target: LAMA2; (+) strand; PAM type: NRG; PAM sequence: CGG
tcactgcaagctccgcctcc

SEQ ID NO: 164009 - DNA, 20 bp, Artificial Sequence
  Description of Artificial Sequence: Synthetic oligonucleotide
  Target: LAMA2; (+) strand; PAM type: NRG; PAM sequence: GGG
cactgcaagctccgcctccc

SEQ ID NO: 164010 - DNA, 20 bp, Artificial Sequence
  Description of Artificial Sequence: Synthetic oligonucleotide
  Target: LAMA2; (+) strand; PAM type: NRG; PAM sequence: CAG
ttcacgccattctcctgcct

SEQ ID NO: 164011 - DNA, 20 bp, Artificial Sequence
  Description of Artificial Sequence: Synthetic oligonucleotide
  Target: LAMA2; (+) strand; PAM type: NRG; PAM sequence: GAG
ttctcctgcctcagcctccc

SEQ ID NO: 164012 - DNA, 20 bp, Artificial Sequence
  Description of Artificial Sequence: Synthetic oligonucleotide
  Target: LAMA2; (+) strand; PAM type: NRG; PAM sequence: TAG
tcctgcctcagcctcccgag

SEQ ID NO: 164013 - DNA, 20 bp, Artificial Sequence
  Description of Artificial Sequence: Synthetic oligonucleotide
  Target: LAMA2; (+) strand; PAM type: NRG; PAM sequence: TGG
gcctcagcctcccgagtagc

SEQ ID NO: 164014 - DNA, 20 bp, Artificial Sequence
  Description of Artificial Sequence: Synthetic oligonucleotide
  Target: LAMA2; (+) strand; PAM type: NRG; PAM sequence: GGG
cctcagcctcccgagtagct

SEQ ID NO: 164015 - DNA, 20 bp, Artificial Sequence
  Description of Artificial Sequence: Synthetic oligonucleotide
  Target: LAMA2; (+) strand; PAM type: NRG; PAM sequence: CAG
ctcccgagtagctgggacta

SEQ ID NO: 164016 - DNA, 20 bp, Artificial Sequence
  Description of Artificial Sequence: Synthetic oligonucleotide
  Target: LAMA2; (+) strand; PAM type: NRG; PAM sequence: AGG
tcccgagtagctgggactac

SEQ ID NO: 164017 - DNA, 20 bp, Artificial Sequence
  Description of Artificial Sequence: Synthetic oligonucleotide
  Target: LAMA2; (+) strand; PAM type: NRG; PAM sequence: CGG
caggcgcccgctaccacgcc

SEQ ID NO: 164018 - DNA, 20 bp, Artificial Sequence
  Description of Artificial Sequence: Synthetic oligonucleotide
  Target: LAMA2; (+) strand; PAM type: NRG; PAM sequence: TAG
cggctaattttttgtatttt

SEQ ID NO: 164019 - DNA, 20 bp, Artificial Sequence
  Description of Artificial Sequence: Synthetic oligonucleotide
  Target: LAMA2; (+) strand; PAM type: NRG; PAM sequence: TAG
ctaattttttgtatttttag

SEQ ID NO: 164020 - DNA, 20 bp, Artificial Sequence
  Description of Artificial Sequence: Synthetic oligonucleotide
  Target: LAMA2; (+) strand; PAM type: NRG; PAM sequence: GAG
aattttttgtatttttagta

SEQ ID NO: 164021 - DNA, 20 bp, Artificial Sequence
  Description of Artificial Sequence: Synthetic oligonucleotide
  Target: LAMA2; (+) strand; PAM type: NRG; PAM sequence: CGG
ttttgtatttttagtagaga

SEQ ID NO: 164022 - DNA, 20 bp, Artificial Sequence
  Description of Artificial Sequence: Synthetic oligonucleotide
  Target: LAMA2; (+) strand; PAM type: NRG; PAM sequence: GGG
tttgtatttttagtagagac

SEQ ID NO: 164023 - DNA, 20 bp, Artificial Sequence
  Description of Artificial Sequence: Synthetic oligonucleotide
  Target: LAMA2; (+) strand; PAM type: NRG; PAM sequence: GGG
ttgtatttttagtagagacg

SEQ ID NO: 164024 - DNA, 20 bp, Artificial Sequence
  Description of Artificial Sequence: Synthetic oligonucleotide
  Target: LAMA2; (+) strand; PAM type: NRG; PAM sequence: TAG
gagacggggtttcaccgtgt

SEQ ID NO: 164025 - DNA, 20 bp, Artificial Sequence
  Description of Artificial Sequence: Synthetic oligonucleotide
  Target: LAMA2; (+) strand; PAM type: NRG; PAM sequence: CAG
cggggtttcaccgtgttagc

SEQ ID NO: 164026 - DNA, 20 bp, Artificial Sequence
  Description of Artificial Sequence: Synthetic oligonucleotide
  Target: LAMA2; (+) strand; PAM type: NRG; PAM sequence: AGG
ggggtttcaccgtgttagcc

SEQ ID NO: 164027 - DNA, 20 bp, Artificial Sequence
  Description of Artificial Sequence: Synthetic oligonucleotide
  Target: LAMA2; (+) strand; PAM type: NRG; PAM sequence: TGG
tttcaccgtgttagccagga

SEQ ID NO: 164028 - DNA, 20 bp, Artificial Sequence
  Description of Artificial Sequence: Synthetic oligonucleotide
  Target: LAMA2; (+) strand; PAM type: NRG; PAM sequence: CGG
acctcgtgatccgcccgcct

SEQ ID NO: 164029 - DNA, 20 bp, Artificial Sequence
  Description of Artificial Sequence: Synthetic oligonucleotide
  Target: LAMA2; (+) strand; PAM type: NRG; PAM sequence: AAG
ccgcccgcctcggcctccca

SEQ ID NO: 164030 - DNA, 20 bp, Artificial Sequence
  Description of Artificial Sequence: Synthetic oligonucleotide
  Target: LAMA2; (+) strand; PAM type: NRG; PAM sequence: TGG
gcctcggcctcccaaagtgc

SEQ ID NO: 164031 - DNA, 20 bp, Artificial Sequence
  Description of Artificial Sequence: Synthetic oligonucleotide
  Target: LAMA2; (+) strand; PAM type: NRG; PAM sequence: GGG
cctcggcctcccaaagtgct

SEQ ID NO: 164032 - DNA, 20 bp, Artificial Sequence
  Description of Artificial Sequence: Synthetic oligonucleotide
  Target: LAMA2; (+) strand; PAM type: NRG; PAM sequence: CAG
ctcccaaagtgctgggatta

SEQ ID NO: 164033 - DNA, 20 bp, Artificial Sequence
  Description of Artificial Sequence: Synthetic oligonucleotide
  Target: LAMA2; (+) strand; PAM type: NRG; PAM sequence: AGG
tcccaaagtgctgggattac

SEQ ID NO: 164034 - DNA, 20 bp, Artificial Sequence
  Description of Artificial Sequence: Synthetic oligonucleotide
  Target: LAMA2; (+) strand; PAM type: NRG; PAM sequence: GAG
agtgctgggattacaggcgt

SEQ ID NO: 164035 - DNA, 20 bp, Artificial Sequence
  Description of Artificial Sequence: Synthetic oligonucleotide
  Target: LAMA2; (+) strand; PAM type: NRG; PAM sequence: CGG
caggcgtgagccaccgcgcc

SEQ ID NO: 164036 - DNA, 20 bp, Artificial Sequence
  Description of Artificial Sequence: Synthetic oligonucleotide
  Target: LAMA2; (+) strand; PAM type: NRG; PAM sequence: CAG
gccgataatcattttaataa

SEQ ID NO: 164037 - DNA, 20 bp, Artificial Sequence
  Description of Artificial Sequence: Synthetic oligonucleotide
  Target: LAMA2; (+) strand; PAM type: NRG; PAM sequence: TGG
atcattttaataacagaatc

SEQ ID NO: 164038 - DNA, 20 bp, Artificial Sequence
  Description of Artificial Sequence: Synthetic oligonucleotide
  Target: LAMA2; (+) strand; PAM type: NRG; PAM sequence: GGG
tcattttaataacagaatct

SEQ ID NO: 164039 - DNA, 20 bp, Artificial Sequence
  Description of Artificial Sequence: Synthetic oligonucleotide
  Target: LAMA2; (+) strand; PAM type: NRG; PAM sequence: AAG
ttttaataacagaatctggg

SEQ ID NO: 164040 - DNA, 20 bp, Artificial Sequence
  Description of Artificial Sequence: Synthetic oligonucleotide
  Target: LAMA2; (+) strand; PAM type: NRG; PAM sequence: TGG
aagatttttaaccaaatatt

SEQ ID NO: 164041 - DNA, 20 bp, Artificial Sequence
  Description of Artificial Sequence: Synthetic oligonucleotide
  Target: LAMA2; (+) strand; PAM type: NRG; PAM sequence: GGG
agatttttaaccaaatattt

SEQ ID NO: 164042 - DNA, 20 bp, Artificial Sequence
  Description of Artificial Sequence: Synthetic oligonucleotide
  Target: LAMA2; (+) strand; PAM type: NRG; PAM sequence: AAG
aaccaaatatttgggcatga

SEQ ID NO: 164043 - DNA, 20 bp, Artificial Sequence
  Description of Artificial Sequence: Synthetic oligonucleotide
  Target: LAMA2; (+) strand; PAM type: NRG; PAM sequence: TAG
tatttgggcatgaaagacaa

SEQ ID NO: 164044 - DNA, 20 bp, Artificial Sequence
  Description of Artificial Sequence: Synthetic oligonucleotide
  Target: LAMA2; (+) strand; PAM type: NRG; PAM sequence: GAG
tttgggcatgaaagacaata

SEQ ID NO: 164045 - DNA, 20 bp, Artificial Sequence
  Description of Artificial Sequence: Synthetic oligonucleotide
  Target: LAMA2; (+) strand; PAM type: NRG; PAM sequence: AGG
ttgggcatgaaagacaatag

SEQ ID NO: 164046 - DNA, 20 bp, Artificial Sequence
  Description of Artificial Sequence: Synthetic oligonucleotide
  Target: LAMA2; (+) strand; PAM type: NRG; PAM sequence: GAG
gggcatgaaagacaatagag

SEQ ID NO: 164047 - DNA, 20 bp, Artificial Sequence
  Description of Artificial Sequence: Synthetic oligonucleotide
  Target: LAMA2; (+) strand; PAM type: NRG; PAM sequence: AGG
ggcatgaaagacaatagagg

SEQ ID NO: 164048 - DNA, 20 bp, Artificial Sequence
  Description of Artificial Sequence: Synthetic oligonucleotide
  Target: LAMA2; (+) strand; PAM type: NRG; PAM sequence: TGG
aaagacaatagaggaggaac

SEQ ID NO: 164049 - DNA, 20 bp, Artificial Sequence
  Description of Artificial Sequence: Synthetic oligonucleotide
  Target: LAMA2; (+) strand; PAM type: NRG; PAM sequence: TGG
agaggaggaactggtgatct

SEQ ID NO: 164050 - DNA, 20 bp, Artificial Sequence
  Description of Artificial Sequence: Synthetic oligonucleotide
  Target: LAMA2; (+) strand; PAM type: NRG; PAM sequence: AAG
cttggaaatgataatctcat

SEQ ID NO: 164051 - DNA, 20 bp, Artificial Sequence
  Description of Artificial Sequence: Synthetic oligonucleotide
  Target: LAMA2; (+) strand; PAM type: NRG; PAM sequence: TAG
tctcataagcaaactactgt

SEQ ID NO: 164052 - DNA, 20 bp, Artificial Sequence
  Description of Artificial Sequence: Synthetic oligonucleotide
  Target: LAMA2; (+) strand; PAM type: NRG; PAM sequence: CAG
cataagcaaactactgttag

SEQ ID NO: 164053 - DNA, 20 bp, Artificial Sequence
  Description of Artificial Sequence: Synthetic oligonucleotide
  Target: LAMA2; (+) strand; PAM type: NRG; PAM sequence: AGG
ataagcaaactactgttagc

SEQ ID NO: 164054 - DNA, 20 bp, Artificial Sequence
  Description of Artificial Sequence: Synthetic oligonucleotide
  Target: LAMA2; (+) strand; PAM type: NRG; PAM sequence: CAG
caaactactgttagcaggaa

SEQ ID NO: 164055 - DNA, 20 bp, Artificial Sequence
  Description of Artificial Sequence: Synthetic oligonucleotide
  Target: LAMA2; (+) strand; PAM type: NRG; PAM sequence: TGG
gaacagaaacataatactcc

SEQ ID NO: 164056 - DNA, 20 bp, Artificial Sequence
  Description of Artificial Sequence: Synthetic oligonucleotide
  Target: LAMA2; (+) strand; PAM type: NRG; PAM sequence: TGG
aaacataatactcctggtaa

SEQ ID NO: 164057 - DNA, 20 bp, Artificial Sequence
  Description of Artificial Sequence: Synthetic oligonucleotide
  Target: LAMA2; (+) strand; PAM type: NRG; PAM sequence: TGG
cataatactcctggtaatgg

SEQ ID NO: 164058 - DNA, 20 bp, Artificial Sequence
  Description of Artificial Sequence: Synthetic oligonucleotide
  Target: LAMA2; (+) strand; PAM type: NRG; PAM sequence: AAG
ctcctggtaatggtggatat

SEQ ID NO: 164059 - DNA, 20 bp, Artificial Sequence
  Description of Artificial Sequence: Synthetic oligonucleotide
  Target: LAMA2; (+) strand; PAM type: NRG; PAM sequence: AAG
taatggtggatataagaatt

SEQ ID NO: 164060 - DNA, 20 bp, Artificial Sequence
  Description of Artificial Sequence: Synthetic oligonucleotide
  Target: LAMA2; (+) strand; PAM type: NRG; PAM sequence: GAG
gtggatataagaattaagct

SEQ ID NO: 164061 - DNA, 20 bp, Artificial Sequence
  Description of Artificial Sequence: Synthetic oligonucleotide
  Target: LAMA2; (+) strand; PAM type: NRG; PAM sequence: AGG
tggatataagaattaagctg

SEQ ID NO: 164062 - DNA, 20 bp, Artificial Sequence
  Description of Artificial Sequence: Synthetic oligonucleotide
  Target: LAMA2; (+) strand; PAM type: NRG; PAM sequence: GAG
gatataagaattaagctgag

SEQ ID NO: 164063 - DNA, 20 bp, Artificial Sequence
  Description of Artificial Sequence: Synthetic oligonucleotide
  Target: LAMA2; (+) strand; PAM type: NRG; PAM sequence: AGG
atataagaattaagctgagg

SEQ ID NO: 164064 - DNA, 20 bp, Artificial Sequence
  Description of Artificial Sequence: Synthetic oligonucleotide
  Target: LAMA2; (+) strand; PAM type: NRG; PAM sequence: GGG
tataagaattaagctgagga

SEQ ID NO: 164065 - DNA, 20 bp, Artificial Sequence
  Description of Artificial Sequence: Synthetic oligonucleotide
  Target: LAMA2; (+) strand; PAM type: NRG; PAM sequence: AAG
agaattaagctgaggaggga

SEQ ID NO: 164066 - DNA, 20 bp, Artificial Sequence
  Description of Artificial Sequence: Synthetic oligonucleotide
  Target: LAMA2; (+) strand; PAM type: NRG; PAM sequence: GAG
aagctgaggagggaaagtgt

SEQ ID NO: 164067 - DNA, 20 bp, Artificial Sequence
  Description of Artificial Sequence: Synthetic oligonucleotide
  Target: LAMA2; (+) strand; PAM type: NRG; PAM sequence: CAG
gagggaaagtgtgagataca

SEQ ID NO: 164068 - DNA, 20 bp, Artificial Sequence
  Description of Artificial Sequence: Synthetic oligonucleotide
  Target: LAMA2; (+) strand; PAM type: NRG; PAM sequence: GAG
gaaagtgtgagatacacagt

SEQ ID NO: 164069 - DNA, 20 bp, Artificial Sequence
  Description of Artificial Sequence: Synthetic oligonucleotide
  Target: LAMA2; (+) strand; PAM type: NRG; PAM sequence: CAG
gtgagatacacagtgagatg

SEQ ID NO: 164070 - DNA, 20 bp, Artificial Sequence
  Description of Artificial Sequence: Synthetic oligonucleotide
  Target: LAMA2; (+) strand; PAM type: NRG; PAM sequence: CAG
gatacacagtgagatgcagc

SEQ ID NO: 164071 - DNA, 20 bp, Artificial Sequence
  Description of Artificial Sequence: Synthetic oligonucleotide
  Target: LAMA2; (+) strand; PAM type: NRG; PAM sequence: TGG
cagtgagatgcagccagact

SEQ ID NO: 164072 - DNA, 20 bp, Artificial Sequence
  Description of Artificial Sequence: Synthetic oligonucleotide
  Target: LAMA2; (+) strand; PAM type: NRG; PAM sequence: TAG
gatgcagccagacttggatc

SEQ ID NO: 164073 - DNA, 20 bp, Artificial Sequence
  Description of Artificial Sequence: Synthetic oligonucleotide
  Target: LAMA2; (+) strand; PAM type: NRG; PAM sequence: AGG
atgcagccagacttggatct

SEQ ID NO: 164074 - DNA, 20 bp, Artificial Sequence
  Description of Artificial Sequence: Synthetic oligonucleotide
  Target: LAMA2; (+) strand; PAM type: NRG; PAM sequence: GAG
gcagccagacttggatctag

SEQ ID NO: 164075 - DNA, 20 bp, Artificial Sequence
  Description of Artificial Sequence: Synthetic oligonucleotide
  Target: LAMA2; (+) strand; PAM type: NRG; PAM sequence: TGG
cagacttggatctaggagtt

SEQ ID NO: 164076 - DNA, 20 bp, Artificial Sequence
  Description of Artificial Sequence: Synthetic oligonucleotide
  Target: LAMA2; (+) strand; PAM type: NRG; PAM sequence: CAG
cttggatctaggagtttggc

SEQ ID NO: 164077 - DNA, 20 bp, Artificial Sequence
  Description of Artificial Sequence: Synthetic oligonucleotide
  Target: LAMA2; (+) strand; PAM type: NRG; PAM sequence: AGG
ttggatctaggagtttggcc

SEQ ID NO: 164078 - DNA, 20 bp, Artificial Sequence
  Description of Artificial Sequence: Synthetic oligonucleotide
  Target: LAMA2; (+) strand; PAM type: NRG; PAM sequence: TGG
tatgcatatgactttaccac

SEQ ID NO: 164079 - DNA, 20 bp, Artificial Sequence
  Description of Artificial Sequence: Synthetic oligonucleotide
  Target: LAMA2; (+) strand; PAM type: NRG; PAM sequence: GGG
atgcatatgactttaccact

SEQ ID NO: 164080 - DNA, 20 bp, Artificial Sequence
  Description of Artificial Sequence: Synthetic oligonucleotide
  Target: LAMA2; (+) strand; PAM type: NRG; PAM sequence: TAG
atgactttaccactgggctg

SEQ ID NO: 164081 - DNA, 20 bp, Artificial Sequence
  Description of Artificial Sequence: Synthetic oligonucleotide
  Target: LAMA2; (+) strand; PAM type: NRG; PAM sequence: GAG
taccactgggctgtagatct

SEQ ID NO: 164082 - DNA, 20 bp, Artificial Sequence
  Description of Artificial Sequence: Synthetic oligonucleotide
  Target: LAMA2; (+) strand; PAM type: NRG; PAM sequence: AAG
cactgggctgtagatctgag

SEQ ID NO: 164083 - DNA, 20 bp, Artificial Sequence
  Description of Artificial Sequence: Synthetic oligonucleotide
  Target: LAMA2; (+) strand; PAM type: NRG; PAM sequence: AGG
actgggctgtagatctgaga

SEQ ID NO: 164084 - DNA, 20 bp, Artificial Sequence
  Description of Artificial Sequence: Synthetic oligonucleotide
  Target: LAMA2; (+) strand; PAM type: NRG; PAM sequence: TAG
tgtagatctgagaaggataa

SEQ ID NO: 164085 - DNA, 20 bp, Artificial Sequence
  Description of Artificial Sequence: Synthetic oligonucleotide
  Target: LAMA2; (+) strand; PAM type: NRG; PAM sequence: CAG
atctgagaaggataatagaa

SEQ ID NO: 164086 - DNA, 20 bp, Artificial Sequence
  Description of Artificial Sequence: Synthetic oligonucleotide
  Target: LAMA2; (+) strand; PAM type: NRG; PAM sequence: AAG
gataatagaacagcaccaaa

SEQ ID NO: 164087 - DNA, 20 bp, Artificial Sequence
  Description of Artificial Sequence: Synthetic oligonucleotide
  Target: LAMA2; (+) strand; PAM type: NRG; PAM sequence: GAG
taatagaacagcaccaaaaa

SEQ ID NO: 164088 - DNA, 20 bp, Artificial Sequence
  Description of Artificial Sequence: Synthetic oligonucleotide
  Target: LAMA2; (+) strand; PAM type: NRG; PAM sequence: AAG
gaacagcaccaaaaagagtt

SEQ ID NO: 164089 - DNA, 20 bp, Artificial Sequence
  Description of Artificial Sequence: Synthetic oligonucleotide
  Target: LAMA2; (+) strand; PAM type: NRG; PAM sequence: AAG
ccaaaaagagttaagtcaca

SEQ ID NO: 164090 - DNA, 20 bp, Artificial Sequence
  Description of Artificial Sequence: Synthetic oligonucleotide
  Target: LAMA2; (+) strand; PAM type: NRG; PAM sequence: TGG
cacaaagtgcatacaccata

SEQ ID NO: 164091 - DNA, 20 bp, Artificial Sequence
  Description of Artificial Sequence: Synthetic oligonucleotide
  Target: LAMA2; (+) strand; PAM type: NRG; PAM sequence: TGG
aaagtgcatacaccatatgg

SEQ ID NO: 164092 - DNA, 20 bp, Artificial Sequence
  Description of Artificial Sequence: Synthetic oligonucleotide
  Target: LAMA2; (+) strand; PAM type: NRG; PAM sequence: CAG
acaccatatggtggcaaact

SEQ ID NO: 164093 - DNA, 20 bp, Artificial Sequence
  Description of Artificial Sequence: Synthetic oligonucleotide
  Target: LAMA2; (+) strand; PAM type: NRG; PAM sequence: CAG
catatggtggcaaactcaga

SEQ ID NO: 164094 - DNA, 20 bp, Artificial Sequence
  Description of Artificial Sequence: Synthetic oligonucleotide
  Target: LAMA2; (+) strand; PAM type: NRG; PAM sequence: GAG
tatggtggcaaactcagaca

SEQ ID NO: 164095 - DNA, 20 bp, Artificial Sequence
  Description of Artificial Sequence: Synthetic oligonucleotide
  Target: LAMA2; (+) strand; PAM type: NRG; PAM sequence: GAG
tggtggcaaactcagacaga

SEQ ID NO: 164096 - DNA, 20 bp, Artificial Sequence
  Description of Artificial Sequence: Synthetic oligonucleotide
  Target: LAMA2; (+) strand; PAM type: NRG; PAM sequence: GAG
gtggcaaactcagacagaga

SEQ ID NO: 164097 - DNA, 20 bp, Artificial Sequence
  Description of Artificial Sequence: Synthetic oligonucleotide
  Target: LAMA2; (+) strand; PAM type: NRG; PAM sequence: AGG
tggcaaactcagacagagag

SEQ ID NO: 164098 - DNA, 20 bp, Artificial Sequence
  Description of Artificial Sequence: Synthetic oligonucleotide
  Target: LAMA2; (+) strand; PAM type: NRG; PAM sequence: AAG
gtgataccctttgtaatgcc

SEQ ID NO: 164099 - DNA, 20 bp, Artificial Sequence
  Description of Artificial Sequence: Synthetic oligonucleotide
  Target: LAMA2; (+) strand; PAM type: NRG; PAM sequence: TGG
atgccaagtcatgctctgct

SEQ ID NO: 164100 - DNA, 20 bp, Artificial Sequence
  Description of Artificial Sequence: Synthetic oligonucleotide
  Target: LAMA2; (+) strand; PAM type: NRG; PAM sequence: GGG
tgccaagtcatgctctgctt

SEQ ID NO: 164101 - DNA, 20 bp, Artificial Sequence
  Description of Artificial Sequence: Synthetic oligonucleotide
  Target: LAMA2; (+) strand; PAM type: NRG; PAM sequence: GAG
ccaagtcatgctctgcttgg

SEQ ID NO: 164102 - DNA, 20 bp, Artificial Sequence
  Description of Artificial Sequence: Synthetic oligonucleotide
  Target: LAMA2; (+) strand; PAM type: NRG; PAM sequence: CAG
gtcatgctctgcttgggaga

SEQ ID NO: 164103 - DNA, 20 bp, Artificial Sequence
  Description of Artificial Sequence: Synthetic oligonucleotide
  Target: LAMA2; (+) strand; PAM type: NRG; PAM sequence: TGG
ttgggagacagaaactacac

SEQ ID NO: 164104 - DNA, 20 bp, Artificial Sequence
  Description of Artificial Sequence: Synthetic oligonucleotide
  Target: LAMA2; (+) strand; PAM type: NRG; PAM sequence: CAG
aactacactggttttttaaa

SEQ ID NO: 164105 - DNA, 20 bp, Artificial Sequence
  Description of Artificial Sequence: Synthetic oligonucleotide
  Target: LAMA2; (+) strand; PAM type: NRG; PAM sequence: TGG
tggttttttaaacagtgaaa

SEQ ID NO: 164106 - DNA, 20 bp, Artificial Sequence
  Description of Artificial Sequence: Synthetic oligonucleotide
  Target: LAMA2; (+) strand; PAM type: NRG; PAM sequence: TGG
agtgaaatggaattgttaac

SEQ ID NO: 164107 - DNA, 20 bp, Artificial Sequence
  Description of Artificial Sequence: Synthetic oligonucleotide
  Target: LAMA2; (+) strand; PAM type: NRG; PAM sequence: AAG
atggaattgttaactggtaa

SEQ ID NO: 164108 - DNA, 20 bp, Artificial Sequence
  Description of Artificial Sequence: Synthetic oligonucleotide
  Target: LAMA2; (+) strand; PAM type: NRG; PAM sequence: AGG
tggaattgttaactggtaaa

SEQ ID NO: 164109 - DNA, 20 bp, Artificial Sequence
  Description of Artificial Sequence: Synthetic oligonucleotide
  Target: LAMA2; (+) strand; PAM type: NRG; PAM sequence: TGG
aattgttaactggtaaaagg

SEQ ID NO: 164110 - DNA, 20 bp, Artificial Sequence
  Description of Artificial Sequence: Synthetic oligonucleotide
  Target: LAMA2; (+) strand; PAM type: NRG; PAM sequence: TGG
gttaactggtaaaaggtggt

SEQ ID NO: 164111 - DNA, 20 bp, Artificial Sequence
  Description of Artificial Sequence: Synthetic oligonucleotide
  Target: LAMA2; (+) strand; PAM type: NRG; PAM sequence: AAG
aaggtggttggttactaaaa

SEQ ID NO: 164112 - DNA, 20 bp, Artificial Sequence
  Description of Artificial Sequence: Synthetic oligonucleotide
  Target: LAMA2; (+) strand; PAM type: NRG; PAM sequence: AGG
aggtggttggttactaaaaa

SEQ ID NO: 164113 - DNA, 20 bp, Artificial Sequence
  Description of Artificial Sequence: Synthetic oligonucleotide
  Target: LAMA2; (+) strand; PAM type: NRG; PAM sequence: AAG
tggttactaaaaaaggataa

SEQ ID NO: 164114 - DNA, 20 bp, Artificial Sequence
  Description of Artificial Sequence: Synthetic oligonucleotide
  Target: LAMA2; (+) strand; PAM type: NRG; PAM sequence: AAG
tactaaaaaaggataaaaga

SEQ ID NO: 164115 - DNA, 20 bp, Artificial Sequence
  Description of Artificial Sequence: Synthetic oligonucleotide
  Target: LAMA2; (+) strand; PAM type: NRG; PAM sequence: AAG
aaaggataaaagaaagctat

SEQ ID NO: 164116 - DNA, 20 bp, Artificial Sequence
  Description of Artificial Sequence: Synthetic oligonucleotide
  Target: LAMA2; (+) strand; PAM type: NRG; PAM sequence: AGG
aaggataaaagaaagctata

SEQ ID NO: 164117 - DNA, 20 bp, Artificial Sequence
  Description of Artificial Sequence: Synthetic oligonucleotide
  Target: LAMA2; (+) strand; PAM type: NRG; PAM sequence: GAG
agaaagctataaggtgtccc

SEQ ID NO: 164118 - DNA, 20 bp, Artificial Sequence
  Description of Artificial Sequence: Synthetic oligonucleotide
  Target: LAMA2; (+) strand; PAM type: NRG; PAM sequence: CAG
gctataaggtgtcccgagta

SEQ ID NO: 164119 - DNA, 20 bp, Artificial Sequence
  Description of Artificial Sequence: Synthetic oligonucleotide
  Target: LAMA2; (+) strand; PAM type: NRG; PAM sequence: AGG
ctataaggtgtcccgagtac

SEQ ID NO: 164120 - DNA, 20 bp, Artificial Sequence
  Description of Artificial Sequence: Synthetic oligonucleotide
  Target: LAMA2; (+) strand; PAM type: NRG; PAM sequence: CAG
aggtgtcccgagtacaggta

SEQ ID NO: 164121 - DNA, 20 bp, Artificial Sequence
  Description of Artificial Sequence: Synthetic oligonucleotide
  Target: LAMA2; (+) strand; PAM type: NRG; PAM sequence: AAG
tgtcccgagtacaggtacag

SEQ ID NO: 164122 - DNA, 20 bp, Artificial Sequence
  Description of Artificial Sequence: Synthetic oligonucleotide
  Target: LAMA2; (+) strand; PAM type: NRG; PAM sequence: GAG
tcccgagtacaggtacagaa

SEQ ID NO: 164123 - DNA, 20 bp, Artificial Sequence
  Description of Artificial Sequence: Synthetic oligonucleotide
  Target: LAMA2; (+) strand; PAM type: NRG; PAM sequence: CAG
cgagtacaggtacagaagag

SEQ ID NO: 164124 - DNA, 20 bp, Artificial Sequence
  Description of Artificial Sequence: Synthetic oligonucleotide
  Target: LAMA2; (+) strand; PAM type: NRG; PAM sequence: TAG
agaagagcagctactccctc

SEQ ID NO: 164125 - DNA, 20 bp, Artificial Sequence
  Description of Artificial Sequence: Synthetic oligonucleotide
  Target: LAMA2; (+) strand; PAM type: NRG; PAM sequence: AGG
gaagagcagctactccctct

SEQ ID NO: 164126 - DNA, 20 bp, Artificial Sequence
  Description of Artificial Sequence: Synthetic oligonucleotide
  Target: LAMA2; (+) strand; PAM type: NRG; PAM sequence: GAG
gcagctactccctctaggct

SEQ ID NO: 164127 - DNA, 20 bp, Artificial Sequence
  Description of Artificial Sequence: Synthetic oligonucleotide
  Target: LAMA2; (+) strand; PAM type: NRG; PAM sequence: AGG
cagctactccctctaggctg

SEQ ID NO: 164128 - DNA, 20 bp, Artificial Sequence
  Description of Artificial Sequence: Synthetic oligonucleotide
  Target: LAMA2; (+) strand; PAM type: NRG; PAM sequence: GGG
agctactccctctaggctga

SEQ ID NO: 164129 - DNA, 20 bp, Artificial Sequence
  Description of Artificial Sequence: Synthetic oligonucleotide
  Target: LAMA2; (+) strand; PAM type: NRG; PAM sequence: GAG
ctactccctctaggctgagg

SEQ ID NO: 164130 - DNA, 20 bp, Artificial Sequence
  Description of Artificial Sequence: Synthetic oligonucleotide
  Target: LAMA2; (+) strand; PAM type: NRG; PAM sequence: AGG
tactccctctaggctgaggg

SEQ ID NO: 164131 - DNA, 20 bp, Artificial Sequence
  Description of Artificial Sequence: Synthetic oligonucleotide
  Target: LAMA2; (+) strand; PAM type: NRG; PAM sequence: AAG
ccctctaggctgagggagga

SEQ ID NO: 164132 - DNA, 20 bp, Artificial Sequence
  Description of Artificial Sequence: Synthetic oligonucleotide
  Target: LAMA2; (+) strand; PAM type: NRG; PAM sequence: CAG
ctaggctgagggaggaaaga

SEQ ID NO: 164133 - DNA, 20 bp, Artificial Sequence
  Description of Artificial Sequence: Synthetic oligonucleotide
  Target: LAMA2; (+) strand; PAM type: NRG; PAM sequence: AAG
ctgagggaggaaagacagtg

SEQ ID NO: 164134 - DNA, 20 bp, Artificial Sequence
  Description of Artificial Sequence: Synthetic oligonucleotide
  Target: LAMA2; (+) strand; PAM type: NRG; PAM sequence: AGG
tgagggaggaaagacagtga

SEQ ID NO: 164135 - DNA, 20 bp, Artificial Sequence
  Description of Artificial Sequence: Synthetic oligonucleotide
  Target: LAMA2; (+) strand; PAM type: NRG; PAM sequence: GAG
agggaggaaagacagtgaag

SEQ ID NO: 164136 - DNA, 20 bp, Artificial Sequence
  Description of Artificial Sequence: Synthetic oligonucleotide
  Target: LAMA2; (+) strand; PAM type: NRG; PAM sequence: AAG
ggaaagacagtgaaggagtt

SEQ ID NO: 164137 - DNA, 20 bp, Artificial Sequence
  Description of Artificial Sequence: Synthetic oligonucleotide
  Target: LAMA2; (+) strand; PAM type: NRG; PAM sequence: AGG
gaaagacagtgaaggagtta

SEQ ID NO: 164138 - DNA, 20 bp, Artificial Sequence
  Description of Artificial Sequence: Synthetic oligonucleotide
  Target: LAMA2; (+) strand; PAM type: NRG; PAM sequence: GGG
aaagacagtgaaggagttaa

SEQ ID NO: 164139 - DNA, 20 bp, Artificial Sequence
  Description of Artificial Sequence: Synthetic oligonucleotide
  Target: LAMA2; (+) strand; PAM type: NRG; PAM sequence: AAG
cagtgaaggagttaagggct

SEQ ID NO: 164140 - DNA, 20 bp, Artificial Sequence
  Description of Artificial Sequence: Synthetic oligonucleotide
  Target: LAMA2; (+) strand; PAM type: NRG; PAM sequence: GAG
gtgaaggagttaagggctaa

SEQ ID NO: 164141 - DNA, 20 bp, Artificial Sequence
  Description of Artificial Sequence: Synthetic oligonucleotide
  Target: LAMA2; (+) strand; PAM type: NRG; PAM sequence: GAG
gaaggagttaagggctaaga

SEQ ID NO: 164142 - DNA, 20 bp, Artificial Sequence
  Description of Artificial Sequence: Synthetic oligonucleotide
  Target: LAMA2; (+) strand; PAM type: NRG; PAM sequence: AGG
aaggagttaagggctaagag

SEQ ID NO: 164143 - DNA, 20 bp, Artificial Sequence
  Description of Artificial Sequence: Synthetic oligonucleotide
  Target: LAMA2; (+) strand; PAM type: NRG; PAM sequence: GGG
aggagttaagggctaagaga

SEQ ID NO: 164144 - DNA, 20 bp, Artificial Sequence
  Description of Artificial Sequence: Synthetic oligonucleotide
  Target: LAMA2; (+) strand; PAM type: NRG; PAM sequence: CAG
atgctccttctccccacttg

SEQ ID NO: 164145 - DNA, 20 bp, Artificial Sequence
  Description of Artificial Sequence: Synthetic oligonucleotide
  Target: LAMA2; (+) strand; PAM type: NRG; PAM sequence: AAG
ccttctccccacttgcagca

SEQ ID NO: 164146 - DNA, 20 bp, Artificial Sequence
  Description of Artificial Sequence: Synthetic oligonucleotide
  Target: LAMA2; (+) strand; PAM type: NRG; PAM sequence: GAG
tccccacttgcagcaaagct

SEQ ID NO: 164147 - DNA, 20 bp, Artificial Sequence
  Description of Artificial Sequence: Synthetic oligonucleotide
  Target: LAMA2; (+) strand; PAM type: NRG; PAM sequence: AGG
ccccacttgcagcaaagctg

SEQ ID NO: 164148 - DNA, 20 bp, Artificial Sequence
  Description of Artificial Sequence: Synthetic oligonucleotide
  Target: LAMA2; (+) strand; PAM type: NRG; PAM sequence: CAG
cttgcagcaaagctgaggtt

SEQ ID NO: 164149 - DNA, 20 bp, Artificial Sequence
  Description of Artificial Sequence: Synthetic oligonucleotide
  Target: LAMA2; (+) strand; PAM type: NRG; PAM sequence: AAG
ctgaggttcagaaatctttc

SEQ ID NO: 164150 - DNA, 20 bp, Artificial Sequence
  Description of Artificial Sequence: Synthetic oligonucleotide
  Target: LAMA2; (+) strand; PAM type: NRG; PAM sequence: GAG
gaggttcagaaatctttcaa

SEQ ID NO: 164151 - DNA, 20 bp, Artificial Sequence
  Description of Artificial Sequence: Synthetic oligonucleotide
  Target: LAMA2; (+) strand; PAM type: NRG; PAM sequence: AGG
aggttcagaaatctttcaag

SEQ ID NO: 164152 - DNA, 20 bp, Artificial Sequence
  Description of Artificial Sequence: Synthetic oligonucleotide
  Target: LAMA2; (+) strand; PAM type: NRG; PAM sequence: GGG
ggttcagaaatctttcaaga

SEQ ID NO: 164153 - DNA, 20 bp, Artificial Sequence
  Description of Artificial Sequence: Synthetic oligonucleotide
  Target: LAMA2; (+) strand; PAM type: NRG; PAM sequence: TAG
tcaagagggcgttgctgtca

SEQ ID NO: 164154 - DNA, 20 bp, Artificial Sequence
  Description of Artificial Sequence: Synthetic oligonucleotide
  Target: LAMA2; (+) strand; PAM type: NRG; PAM sequence: AGG
caagagggcgttgctgtcat

SEQ ID NO: 164155 - DNA, 20 bp, Artificial Sequence
  Description of Artificial Sequence: Synthetic oligonucleotide
  Target: LAMA2; (+) strand; PAM type: NRG; PAM sequence: CAG
gttgctgtcataggaatgta

SEQ ID NO: 164156 - DNA, 20 bp, Artificial Sequence
  Description of Artificial Sequence: Synthetic oligonucleotide
  Target: LAMA2; (+) strand; PAM type: NRG; PAM sequence: TGG
tcataggaatgtacagccta

SEQ ID NO: 164157 - DNA, 20 bp, Artificial Sequence
  Description of Artificial Sequence: Synthetic oligonucleotide
  Target: LAMA2; (+) strand; PAM type: NRG; PAM sequence: TGG
aggaatgtacagcctatgga

SEQ ID NO: 164158 - DNA, 20 bp, Artificial Sequence
  Description of Artificial Sequence: Synthetic oligonucleotide
  Target: LAMA2; (+) strand; PAM type: NRG; PAM sequence: CGG
aaaaccaaaaacaaacacgt

SEQ ID NO: 164159 - DNA, 20 bp, Artificial Sequence
  Description of Artificial Sequence: Synthetic oligonucleotide
  Target: LAMA2; (+) strand; PAM type: NRG; PAM sequence: GAG
aaccaaaaacaaacacgtcg

SEQ ID NO: 164160 - DNA, 20 bp, Artificial Sequence
  Description of Artificial Sequence: Synthetic oligonucleotide
  Target: LAMA2; (+) strand; PAM type: NRG; PAM sequence: TAG
aacaaacacgtcggagtttg

SEQ ID NO: 164161 - DNA, 20 bp, Artificial Sequence
  Description of Artificial Sequence: Synthetic oligonucleotide
  Target: LAMA2; (+) strand; PAM type: NRG; PAM sequence: AGG
acaaacacgtcggagtttgt

SEQ ID NO: 164162 - DNA, 20 bp, Artificial Sequence
  Description of Artificial Sequence: Synthetic oligonucleotide
  Target: LAMA2; (+) strand; PAM type: NRG; PAM sequence: TAG
tgtaggcaaatgcatgtctg

SEQ ID NO: 164163 - DNA, 20 bp, Artificial Sequence
  Description of Artificial Sequence: Synthetic oligonucleotide
  Target: LAMA2; (+) strand; PAM type: NRG; PAM sequence: AAG
aggcaaatgcatgtctgtag

SEQ ID NO: 164164 - DNA, 20 bp, Artificial Sequence
  Description of Artificial Sequence: Synthetic oligonucleotide
  Target: LAMA2; (+) strand; PAM type: NRG; PAM sequence: TGG
tagaagctgcccaccgttct

SEQ ID NO: 164165 - DNA, 20 bp, Artificial Sequence
  Description of Artificial Sequence: Synthetic oligonucleotide
  Target: LAMA2; (+) strand; PAM type: NRG; PAM sequence: GAG
gaagctgcccaccgttcttg

SEQ ID NO: 164166 - DNA, 20 bp, Artificial Sequence
  Description of Artificial Sequence: Synthetic oligonucleotide
  Target: LAMA2; (+) strand; PAM type: NRG; PAM sequence: AGG
aagctgcccaccgttcttgg

SEQ ID NO: 164167 - DNA, 20 bp, Artificial Sequence
  Description of Artificial Sequence: Synthetic oligonucleotide
  Target: LAMA2; (+) strand; PAM type: NRG; PAM sequence: TAG
tgcccaccgttcttggagga

SEQ ID NO: 164168 - DNA, 20 bp, Artificial Sequence
  Description of Artificial Sequence: Synthetic oligonucleotide
  Target: LAMA2; (+) strand; PAM type: NRG; PAM sequence: AGG
gcccaccgttcttggaggat

SEQ ID NO: 164169 - DNA, 20 bp, Artificial Sequence
  Description of Artificial Sequence: Synthetic oligonucleotide
  Target: LAMA2; (+) strand; PAM type: NRG; PAM sequence: GAG
ccaccgttcttggaggatag

SEQ ID NO: 164170 - DNA, 20 bp, Artificial Sequence
  Description of Artificial Sequence: Synthetic oligonucleotide
  Target: LAMA2; (+) strand; PAM type: NRG; PAM sequence: TGG
cttggaggataggagcacgc

SEQ ID NO: 164171 - DNA, 20 bp, Artificial Sequence
  Description of Artificial Sequence: Synthetic oligonucleotide
  Target: LAMA2; (+) strand; PAM type: NRG; PAM sequence: GGG
ttggaggataggagcacgct

SEQ ID NO: 164172 - DNA, 20 bp, Artificial Sequence
  Description of Artificial Sequence: Synthetic oligonucleotide
  Target: LAMA2; (+) strand; PAM type: NRG; PAM sequence: GAG
taggagcacgctgggctact

SEQ ID NO: 164173 - DNA, 20 bp, Artificial Sequence
  Description of Artificial Sequence: Synthetic oligonucleotide
  Target: LAMA2; (+) strand; PAM type: NRG; PAM sequence: AAG
gagcacgctgggctactgag

SEQ ID NO: 164174 - DNA, 20 bp, Artificial Sequence
  Description of Artificial Sequence: Synthetic oligonucleotide
  Target: LAMA2; (+) strand; PAM type: NRG; PAM sequence: AAG
gctactgagaagccgacttc

SEQ ID NO: 164175 - DNA, 20 bp, Artificial Sequence
  Description of Artificial Sequence: Synthetic oligonucleotide
  Target: LAMA2; (+) strand; PAM type: NRG; PAM sequence: AGG
ctactgagaagccgacttca

SEQ ID NO: 164176 - DNA, 20 bp, Artificial Sequence
  Description of Artificial Sequence: Synthetic oligonucleotide
  Target: LAMA2; (+) strand; PAM type: NRG; PAM sequence: CAG
tgagaagccgacttcaaggt

SEQ ID NO: 164177 - DNA, 20 bp, Artificial Sequence
  Description of Artificial Sequence: Synthetic oligonucleotide
  Target: LAMA2; (+) strand; PAM type: NRG; PAM sequence: GAG
agaagccgacttcaaggtca

SEQ ID NO: 164178 - DNA, 20 bp, Artificial Sequence
  Description of Artificial Sequence: Synthetic oligonucleotide
  Target: LAMA2; (+) strand; PAM type: NRG; PAM sequence: CAG
tcaaggtcagagcgtgtgtg

SEQ ID NO: 164179 - DNA, 20 bp, Artificial Sequence
  Description of Artificial Sequence: Synthetic oligonucleotide
  Target: LAMA2; (+) strand; PAM type: NRG; PAM sequence: AAG
cagagcgtgtgtgcagacca

SEQ ID NO: 164180 - DNA, 20 bp, Artificial Sequence
  Description of Artificial Sequence: Synthetic oligonucleotide
  Target: LAMA2; (+) strand; PAM type: NRG; PAM sequence: TAG
gcgtgtgtgcagaccaaagc

SEQ ID NO: 164181 - DNA, 20 bp, Artificial Sequence
  Description of Artificial Sequence: Synthetic oligonucleotide
  Target: LAMA2; (+) strand; PAM type: NRG; PAM sequence: CAG
gtgtgcagaccaaagctagt

SEQ ID NO: 164182 - DNA, 20 bp, Artificial Sequence
  Description of Artificial Sequence: Synthetic oligonucleotide
  Target: LAMA2; (+) strand; PAM type: NRG; PAM sequence: AAG
tgcagaccaaagctagtcag

SEQ ID NO: 164183 - DNA, 20 bp, Artificial Sequence
  Description of Artificial Sequence: Synthetic oligonucleotide
  Target: LAMA2; (+) strand; PAM type: NRG; PAM sequence: AGG
gcagaccaaagctagtcaga

SEQ ID NO: 164184 - DNA, 20 bp, Artificial Sequence
  Description of Artificial Sequence: Synthetic oligonucleotide
  Target: LAMA2; (+) strand; PAM type: NRG; PAM sequence: GGG
cagaccaaagctagtcagaa

SEQ ID NO: 164185 - DNA, 20 bp, Artificial Sequence
  Description of Artificial Sequence: Synthetic oligonucleotide
  Target: LAMA2; (+) strand; PAM type: NRG; PAM sequence: TGG
gctagtcagaagggtgccta

SEQ ID NO: 164186 - DNA, 20 bp, Artificial Sequence
  Description of Artificial Sequence: Synthetic oligonucleotide
  Target: LAMA2; (+) strand; PAM type: NRG; PAM sequence: GAG
tagtcagaagggtgcctatg

SEQ ID NO: 164187 - DNA, 20 bp, Artificial Sequence
  Description of Artificial Sequence: Synthetic oligonucleotide
  Target: LAMA2; (+) strand; PAM type: NRG; PAM sequence: GAG
gtcagaagggtgcctatgga

SEQ ID NO: 164188 - DNA, 20 bp, Artificial Sequence
  Description of Artificial Sequence: Synthetic oligonucleotide
  Target: LAMA2; (+) strand; PAM type: NRG; PAM sequence: AAG
acaatgtgccctcccaacta

SEQ ID NO: 164189 - DNA, 20 bp, Artificial Sequence
  Description of Artificial Sequence: Synthetic oligonucleotide
  Target: LAMA2; (+) strand; PAM type: NRG; PAM sequence: AGG
caatgtgccctcccaactaa

SEQ ID NO: 164190 - DNA, 20 bp, Artificial Sequence
  Description of Artificial Sequence: Synthetic oligonucleotide
  Target: LAMA2; (+) strand; PAM type: NRG; PAM sequence: TGG
ctcccaactaaaggcacacc

SEQ ID NO: 164191 - DNA, 20 bp, Artificial Sequence
  Description of Artificial Sequence: Synthetic oligonucleotide
  Target: LAMA2; (+) strand; PAM type: NRG; PAM sequence: GGG
tcccaactaaaggcacacct

SEQ ID NO: 164192 - DNA, 20 bp, Artificial Sequence
  Description of Artificial Sequence: Synthetic oligonucleotide
  Target: LAMA2; (+) strand; PAM type: NRG; PAM sequence: TGG
ggcacacctgggattctttc

SEQ ID NO: 164193 - DNA, 20 bp, Artificial Sequence
  Description of Artificial Sequence: Synthetic oligonucleotide
  Target: LAMA2; (+) strand; PAM type: NRG; PAM sequence: GGG
gcacacctgggattctttct

SEQ ID NO: 164194 - DNA, 20 bp, Artificial Sequence
  Description of Artificial Sequence: Synthetic oligonucleotide
  Target: LAMA2; (+) strand; PAM type: NRG; PAM sequence: TGG
tgggattctttctgggccac

SEQ ID NO: 164195 - DNA, 20 bp, Artificial Sequence
  Description of Artificial Sequence: Synthetic oligonucleotide
  Target: LAMA2; (+) strand; PAM type: NRG; PAM sequence: GGG
gggattctttctgggccact

SEQ ID NO: 164196 - DNA, 20 bp, Artificial Sequence
  Description of Artificial Sequence: Synthetic oligonucleotide
  Target: LAMA2; (+) strand; PAM type: NRG; PAM sequence: AAG
ataatacaaaaataatgatg

SEQ ID NO: 164197 - DNA, 20 bp, Artificial Sequence
  Description of Artificial Sequence: Synthetic oligonucleotide
  Target: LAMA2; (+) strand; PAM type: NRG; PAM sequence: TAG
gaagattctttttttttttt

SEQ ID NO: 164198 - DNA, 20 bp, Artificial Sequence
  Description of Artificial Sequence: Synthetic oligonucleotide
  Target: LAMA2; (+) strand; PAM type: NRG; PAM sequence: CAG
attctttttttttttttaga

SEQ ID NO: 164199 - DNA, 20 bp, Artificial Sequence
  Description of Artificial Sequence: Synthetic oligonucleotide
  Target: LAMA2; (+) strand; PAM type: NRG; PAM sequence: GAG
tctttttttttttttagaca

SEQ ID NO: 164200 - DNA, 20 bp, Artificial Sequence
  Description of Artificial Sequence: Synthetic oligonucleotide
  Target: LAMA2; (+) strand; PAM type: NRG; PAM sequence: TAG
cagagccttgctctgtcgcc

SEQ ID NO: 164201 - DNA, 20 bp, Artificial Sequence
  Description of Artificial Sequence: Synthetic oligonucleotide
  Target: LAMA2; (+) strand; PAM type: NRG; PAM sequence: AGG
agagccttgctctgtcgcct

SEQ ID NO: 164202 - DNA, 20 bp, Artificial Sequence
  Description of Artificial Sequence: Synthetic oligonucleotide
  Target: LAMA2; (+) strand; PAM type: NRG; PAM sequence: TGG
ccttgctctgtcgcctaggc

SEQ ID NO: 164203 - DNA, 20 bp, Artificial Sequence
  Description of Artificial Sequence: Synthetic oligonucleotide
  Target: LAMA2; (+) strand; PAM type: NRG; PAM sequence: GAG
ttgctctgtcgcctaggctg

SEQ ID NO: 164204 - DNA, 20 bp, Artificial Sequence
  Description of Artificial Sequence: Synthetic oligonucleotide
  Target: LAMA2; (+) strand; PAM type: NRG; PAM sequence: CAG
ctgtcgcctaggctggagtg

SEQ ID NO: 164205 - DNA, 20 bp, Artificial Sequence
  Description of Artificial Sequence: Synthetic oligonucleotide
  Target: LAMA2; (+) strand; PAM type: NRG; PAM sequence: TGG
tcgcctaggctggagtgcag

SEQ ID NO: 164206 - DNA, 20 bp, Artificial Sequence
  Description of Artificial Sequence: Synthetic oligonucleotide
  Target: LAMA2; (+) strand; PAM type: NRG; PAM sequence: CGG
ggagtgcagtggcgcgatct

SEQ ID NO: 164207 - DNA, 20 bp, Artificial Sequence
  Description of Artificial Sequence: Synthetic oligonucleotide
  Target: LAMA2; (+) strand; PAM type: NRG; PAM sequence: AAG
gcgcgatctcggctcactgc

SEQ ID NO: 164208 - DNA, 20 bp, Artificial Sequence
  Description of Artificial Sequence: Synthetic oligonucleotide
  Target: LAMA2; (+) strand; PAM type: NRG; PAM sequence: TGG
tcactgcaagctgcacctcc

SEQ ID NO: 164209 - DNA, 20 bp, Artificial Sequence
  Description of Artificial Sequence: Synthetic oligonucleotide
  Target: LAMA2; (+) strand; PAM type: NRG; PAM sequence: GGG
cactgcaagctgcacctcct

SEQ ID NO: 164210 - DNA, 20 bp, Artificial Sequence
  Description of Artificial Sequence: Synthetic oligonucleotide
  Target: LAMA2; (+) strand; PAM type: NRG; PAM sequence: CAG
ttcacgccattctcctgcct

SEQ ID NO: 164211 - DNA, 20 bp, Artificial Sequence
  Description of Artificial Sequence: Synthetic oligonucleotide
  Target: LAMA2; (+) strand; PAM type: NRG; PAM sequence: CAG
ccattctcctgcctcagcct

SEQ ID NO: 164212 - DNA, 20 bp, Artificial Sequence
  Description of Artificial Sequence: Synthetic oligonucleotide
  Target: LAMA2; (+) strand; PAM type: NRG; PAM sequence: AGG
cattctcctgcctcagcctc

SEQ ID NO: 164213 - DNA, 20 bp, Artificial Sequence
  Description of Artificial Sequence: Synthetic oligonucleotide
  Target: LAMA2; (+) strand; PAM type: NRG; PAM sequence: GAG
ttctcctgcctcagcctcag

SEQ ID NO: 164214 - DNA, 20 bp, Artificial Sequence
  Description of Artificial Sequence: Synthetic oligonucleotide
  Target: LAMA2; (+) strand; PAM type: NRG; PAM sequence: TAG
tcctgcctcagcctcaggag

SEQ ID NO: 164215 - DNA, 20 bp, Artificial Sequence
  Description of Artificial Sequence: Synthetic oligonucleotide
  Target: LAMA2; (+) strand; PAM type: NRG; PAM sequence: TGG
gcctcagcctcaggagtagc

SEQ ID NO: 164216 - DNA, 20 bp, Artificial Sequence
  Description of Artificial Sequence: Synthetic oligonucleotide
  Target: LAMA2; (+) strand; PAM type: NRG; PAM sequence: GGG
cctcagcctcaggagtagct

SEQ ID NO: 164217 - DNA, 20 bp, Artificial Sequence
  Description of Artificial Sequence: Synthetic oligonucleotide
  Target: LAMA2; (+) strand; PAM type: NRG; PAM sequence: CAG
ctcaggagtagctgggacta

SEQ ID NO: 164218 - DNA, 20 bp, Artificial Sequence
  Description of Artificial Sequence: Synthetic oligonucleotide
  Target: LAMA2; (+) strand; PAM type: NRG; PAM sequence: AGG
tcaggagtagctgggactac

SEQ ID NO: 164219 - DNA, 20 bp, Artificial Sequence
  Description of Artificial Sequence: Synthetic oligonucleotide
  Target: LAMA2; (+) strand; PAM type: NRG; PAM sequence: CGG
caggcgtccgccaccacgcc

SEQ ID NO: 164220 - DNA, 20 bp, Artificial Sequence
  Description of Artificial Sequence: Synthetic oligonucleotide
  Target: LAMA2; (+) strand; PAM type: NRG; PAM sequence: TAG
ctaattttttgtgtttttaa

SEQ ID NO: 164221 - DNA, 20 bp, Artificial Sequence
  Description of Artificial Sequence: Synthetic oligonucleotide
  Target: LAMA2; (+) strand; PAM type: NRG; PAM sequence: GAG
aattttttgtgtttttaata

SEQ ID NO: 164222 - DNA, 20 bp, Artificial Sequence
  Description of Artificial Sequence: Synthetic oligonucleotide
  Target: LAMA2; (+) strand; PAM type: NRG; PAM sequence: CAG
ttttgtgtttttaatagaga

SEQ ID NO: 164223 - DNA, 20 bp, Artificial Sequence
  Description of Artificial Sequence: Synthetic oligonucleotide
  Target: LAMA2; (+) strand; PAM type: NRG; PAM sequence: AGG
tttgtgtttttaatagagac

SEQ ID NO: 164224 - DNA, 20 bp, Artificial Sequence
  Description of Artificial Sequence: Synthetic oligonucleotide
  Target: LAMA2; (+) strand; PAM type: NRG; PAM sequence: GGG
ttgtgtttttaatagagaca

SEQ ID NO: 164225 - DNA, 20 bp, Artificial Sequence
  Description of Artificial Sequence: Synthetic oligonucleotide
  Target: LAMA2; (+) strand; PAM type: NRG; PAM sequence: TAG
gagacagggtttcaccatgt

SEQ ID NO: 164226 - DNA, 20 bp, Artificial Sequence
  Description of Artificial Sequence: Synthetic oligonucleotide
  Target: LAMA2; (+) strand; PAM type: NRG; PAM sequence: CAG
cagggtttcaccatgttagc

SEQ ID NO: 164227 - DNA, 20 bp, Artificial Sequence
  Description of Artificial Sequence: Synthetic oligonucleotide
  Target: LAMA2; (+) strand; PAM type: NRG; PAM sequence: AGG
agggtttcaccatgttagcc

SEQ ID NO: 164228 - DNA, 20 bp, Artificial Sequence
  Description of Artificial Sequence: Synthetic oligonucleotide
  Target: LAMA2; (+) strand; PAM type: NRG; PAM sequence: CGG
tttcaccatgttagccagga

SEQ ID NO: 164229 - DNA, 20 bp, Artificial Sequence
  Description of Artificial Sequence: Synthetic oligonucleotide
  Target: LAMA2; (+) strand; PAM type: NRG; PAM sequence: CGG
accttgtgatccgccctcct

SEQ ID NO: 164230 - DNA, 20 bp, Artificial Sequence
  Description of Artificial Sequence: Synthetic oligonucleotide
  Target: LAMA2; (+) strand; PAM type: NRG; PAM sequence: AAG
ccgccctcctcggcctccca

SEQ ID NO: 164231 - DNA, 20 bp, Artificial Sequence
  Description of Artificial Sequence: Synthetic oligonucleotide
  Target: LAMA2; (+) strand; PAM type: NRG; PAM sequence: TGG
tcctcggcctcccaaagtgc

SEQ ID NO: 164232 - DNA, 20 bp, Artificial Sequence
  Description of Artificial Sequence: Synthetic oligonucleotide
  Target: LAMA2; (+) strand; PAM type: NRG; PAM sequence: GGG
cctcggcctcccaaagtgct

SEQ ID NO: 164233 - DNA, 20 bp, Artificial Sequence
  Description of Artificial Sequence: Synthetic oligonucleotide
  Target: LAMA2; (+) strand; PAM type: NRG; PAM sequence: CAG
ctcccaaagtgctgggatta

SEQ ID NO: 164234 - DNA, 20 bp, Artificial Sequence
  Description of Artificial Sequence: Synthetic oligonucleotide
  Target: LAMA2; (+) strand; PAM type: NRG; PAM sequence: AGG
tcccaaagtgctgggattac

SEQ ID NO: 164235 - DNA, 20 bp, Artificial Sequence
  Description of Artificial Sequence: Synthetic oligonucleotide
  Target: LAMA2; (+) strand; PAM type: NRG; PAM sequence: GAG
agtgctgggattacaggcat

SEQ ID NO: 164236 - DNA, 20 bp, Artificial Sequence
  Description of Artificial Sequence: Synthetic oligonucleotide
  Target: LAMA2; (+) strand; PAM type: NRG; PAM sequence: CGG
caggcatgagccaccgcgcc

SEQ ID NO: 164237 - DNA, 20 bp, Artificial Sequence
  Description of Artificial Sequence: Synthetic oligonucleotide
  Target: LAMA2; (+) strand; PAM type: NRG; PAM sequence: AAG
ccaccgcgcccggcctaatg

SEQ ID NO: 164238 - DNA, 20 bp, Artificial Sequence
  Description of Artificial Sequence: Synthetic oligonucleotide
  Target: LAMA2; (+) strand; PAM type: NRG; PAM sequence: CAG
cgcccggcctaatgaagaac

SEQ ID NO: 164239 - DNA, 20 bp, Artificial Sequence
  Description of Artificial Sequence: Synthetic oligonucleotide
  Target: LAMA2; (+) strand; PAM type: NRG; PAM sequence: CAG
cctaatgaagaaccagaact

SEQ ID NO: 164240 - DNA, 20 bp, Artificial Sequence
  Description of Artificial Sequence: Synthetic oligonucleotide
  Target: LAMA2; (+) strand; PAM type: NRG; PAM sequence: TGG
tgaagaaccagaactcagct

SEQ ID NO: 164241 - DNA, 20 bp, Artificial Sequence
  Description of Artificial Sequence: Synthetic oligonucleotide
  Target: LAMA2; (+) strand; PAM type: NRG; PAM sequence: AAG
agaaccagaactcagcttgg

SEQ ID NO: 164242 - DNA, 20 bp, Artificial Sequence
  Description of Artificial Sequence: Synthetic oligonucleotide
  Target: LAMA2; (+) strand; PAM type: NRG; PAM sequence: TGG
cagaactcagcttggaagtg

SEQ ID NO: 164243 - DNA, 20 bp, Artificial Sequence
  Description of Artificial Sequence: Synthetic oligonucleotide
  Target: LAMA2; (+) strand; PAM type: NRG; PAM sequence: TGG
aactcagcttggaagtgtgg

SEQ ID NO: 164244 - DNA, 20 bp, Artificial Sequence
  Description of Artificial Sequence: Synthetic oligonucleotide
  Target: LAMA2; (+) strand; PAM type: NRG; PAM sequence: GGG
actcagcttggaagtgtggt

SEQ ID NO: 164245 - DNA, 20 bp, Artificial Sequence
  Description of Artificial Sequence: Synthetic oligonucleotide
  Target: LAMA2; (+) strand; PAM type: NRG; PAM sequence: TGG
agtgtggtgggccgccatta

SEQ ID NO: 164246 - DNA, 20 bp, Artificial Sequence
  Description of Artificial Sequence: Synthetic oligonucleotide
  Target: LAMA2; (+) strand; PAM type: NRG; PAM sequence: TGG
ggccgccattatggacttat

SEQ ID NO: 164247 - DNA, 20 bp, Artificial Sequence
  Description of Artificial Sequence: Synthetic oligonucleotide
  Target: LAMA2; (+) strand; PAM type: NRG; PAM sequence: GGG
gccgccattatggacttatt

SEQ ID NO: 164248 - DNA, 20 bp, Artificial Sequence
  Description of Artificial Sequence: Synthetic oligonucleotide
  Target: LAMA2; (+) strand; PAM type: NRG; PAM sequence: AAG
tggacttattgggtccttcc

SEQ ID NO: 164249 - DNA, 20 bp, Artificial Sequence
  Description of Artificial Sequence: Synthetic oligonucleotide
  Target: LAMA2; (+) strand; PAM type: NRG; PAM sequence: AGG
ggacttattgggtccttcca

SEQ ID NO: 164250 - DNA, 20 bp, Artificial Sequence
  Description of Artificial Sequence: Synthetic oligonucleotide
  Target: LAMA2; (+) strand; PAM type: NRG; PAM sequence: AAG
ttccaaggcctctattgact

SEQ ID NO: 164251 - DNA, 20 bp, Artificial Sequence
  Description of Artificial Sequence: Synthetic oligonucleotide
  Target: LAMA2; (+) strand; PAM type: NRG; PAM sequence: CGG
taagcctatcattctgccac

SEQ ID NO: 164252 - DNA, 20 bp, Artificial Sequence
  Description of Artificial Sequence: Synthetic oligonucleotide
  Target: LAMA2; (+) strand; PAM type: NRG; PAM sequence: CGG
tatcattctgccaccggata

SEQ ID NO: 164253 - DNA, 20 bp, Artificial Sequence
  Description of Artificial Sequence: Synthetic oligonucleotide
  Target: LAMA2; (+) strand; PAM type: NRG; PAM sequence: GAG
tcattctgccaccggatacg

SEQ ID NO: 164254 - DNA, 20 bp, Artificial Sequence
  Description of Artificial Sequence: Synthetic oligonucleotide
  Target: LAMA2; (+) strand; PAM type: NRG; PAM sequence: CGG
cggatacggagaaatgtcta

SEQ ID NO: 164255 - DNA, 20 bp, Artificial Sequence
  Description of Artificial Sequence: Synthetic oligonucleotide
  Target: LAMA2; (+) strand; PAM type: NRG; PAM sequence: GGG
ggatacggagaaatgtctac

SEQ ID NO: 164256 - DNA, 20 bp, Artificial Sequence
  Description of Artificial Sequence: Synthetic oligonucleotide
  Target: LAMA2; (+) strand; PAM type: NRG; PAM sequence: GGG
gatacggagaaatgtctacg

SEQ ID NO: 164257 - DNA, 20 bp, Artificial Sequence
  Description of Artificial Sequence: Synthetic oligonucleotide
  Target: LAMA2; (+) strand; PAM type: NRG; PAM sequence: AAG
ggtctacctactgtatcaca

SEQ ID NO: 164258 - DNA, 20 bp, Artificial Sequence
  Description of Artificial Sequence: Synthetic oligonucleotide
  Target: LAMA2; (+) strand; PAM type: NRG; PAM sequence: CAG
ctacctactgtatcacaaag

SEQ ID NO: 164259 - DNA, 20 bp, Artificial Sequence
  Description of Artificial Sequence: Synthetic oligonucleotide
  Target: LAMA2; (+) strand; PAM type: NRG; PAM sequence: AGG
tacctactgtatcacaaagc

SEQ ID NO: 164260 - DNA, 20 bp, Artificial Sequence
  Description of Artificial Sequence: Synthetic oligonucleotide
  Target: LAMA2; (+) strand; PAM type: NRG; PAM sequence: GGG
acctactgtatcacaaagca

SEQ ID NO: 164261 - DNA, 20 bp, Artificial Sequence
  Description of Artificial Sequence: Synthetic oligonucleotide
  Target: LAMA2; (+) strand; PAM type: NRG; PAM sequence: TGG
atcacaaagcagggtgaatt

SEQ ID NO: 164262 - DNA, 20 bp, Artificial Sequence
  Description of Artificial Sequence: Synthetic oligonucleotide
  Target: LAMA2; (+) strand; PAM type: NRG; PAM sequence: GAG
cacaaagcagggtgaatttg

SEQ ID NO: 164263 - DNA, 20 bp, Artificial Sequence
  Description of Artificial Sequence: Synthetic oligonucleotide
  Target: LAMA2; (+) strand; PAM type: NRG; PAM sequence: CAG
agcagggtgaatttggagct

SEQ ID NO: 164264 - DNA, 20 bp, Artificial Sequence
  Description of Artificial Sequence: Synthetic oligonucleotide
  Target: LAMA2; (+) strand; PAM type: NRG; PAM sequence: CAG
gtgaatttggagctcagaaa

SEQ ID NO: 164265 - DNA, 20 bp, Artificial Sequence
  Description of Artificial Sequence: Synthetic oligonucleotide
  Target: LAMA2; (+) strand; PAM type: NRG; PAM sequence: TAG
aatttggagctcagaaacag

SEQ ID NO: 164266 - DNA, 20 bp, Artificial Sequence
  Description of Artificial Sequence: Synthetic oligonucleotide
  Target: LAMA2; (+) strand; PAM type: NRG; PAM sequence: TGG
agaaacagtagatgtataat

SEQ ID NO: 164267 - DNA, 20 bp, Artificial Sequence
  Description of Artificial Sequence: Synthetic oligonucleotide
  Target: LAMA2; (+) strand; PAM type: NRG; PAM sequence: CAG
cagtagatgtataattggca

SEQ ID NO: 164268 - DNA, 20 bp, Artificial Sequence
  Description of Artificial Sequence: Synthetic oligonucleotide
  Target: LAMA2; (+) strand; PAM type: NRG; PAM sequence: TGG
agatgtataattggcacagc

SEQ ID NO: 164269 - DNA, 20 bp, Artificial Sequence
  Description of Artificial Sequence: Synthetic oligonucleotide
  Target: LAMA2; (+) strand; PAM type: NRG; PAM sequence: AAG
tccctgaaatgacttattcc

SEQ ID NO: 164270 - DNA, 20 bp, Artificial Sequence
  Description of Artificial Sequence: Synthetic oligonucleotide
  Target: LAMA2; (+) strand; PAM type: NRG; PAM sequence: TAG
caagatcctaaatgacattt

SEQ ID NO: 164271 - DNA, 20 bp, Artificial Sequence
  Description of Artificial Sequence: Synthetic oligonucleotide
  Target: LAMA2; (+) strand; PAM type: NRG; PAM sequence: TGG
tgacattttagaaattcact

SEQ ID NO: 164272 - DNA, 20 bp, Artificial Sequence
  Description of Artificial Sequence: Synthetic oligonucleotide
  Target: LAMA2; (+) strand; PAM type: NRG; PAM sequence: AAG
tggcatttttattaaattgc

SEQ ID NO: 164273 - DNA, 20 bp, Artificial Sequence
  Description of Artificial Sequence: Synthetic oligonucleotide
  Target: LAMA2; (+) strand; PAM type: NRG; PAM sequence: AAG
catttttattaaattgcaag

SEQ ID NO: 164274 - DNA, 20 bp, Artificial Sequence
  Description of Artificial Sequence: Synthetic oligonucleotide
  Target: LAMA2; (+) strand; PAM type: NRG; PAM sequence: GAG
attaaattgcaagaagatat

SEQ ID NO: 164275 - DNA, 20 bp, Artificial Sequence
  Description of Artificial Sequence: Synthetic oligonucleotide
  Target: LAMA2; (+) strand; PAM type: NRG; PAM sequence: AAG
agatatgagctctgtaaatc

SEQ ID NO: 164276 - DNA, 20 bp, Artificial Sequence
  Description of Artificial Sequence: Synthetic oligonucleotide
  Target: LAMA2; (+) strand; PAM type: NRG; PAM sequence: GAG
atatgagctctgtaaatcaa

SEQ ID NO: 164277 - DNA, 20 bp, Artificial Sequence
  Description of Artificial Sequence: Synthetic oligonucleotide
  Target: LAMA2; (+) strand; PAM type: NRG; PAM sequence: CAG
tgagctctgtaaatcaagag

SEQ ID NO: 164278 - DNA, 20 bp, Artificial Sequence
  Description of Artificial Sequence: Synthetic oligonucleotide
  Target: LAMA2; (+) strand; PAM type: NRG; PAM sequence: AAG
tcaagagcagaaacctttaa

SEQ ID NO: 164279 - DNA, 20 bp, Artificial Sequence
  Description of Artificial Sequence: Synthetic oligonucleotide
  Target: LAMA2; (+) strand; PAM type: NRG; PAM sequence: AGG
caagagcagaaacctttaaa

SEQ ID NO: 164280 - DNA, 20 bp, Artificial Sequence
  Description of Artificial Sequence: Synthetic oligonucleotide
  Target: LAMA2; (+) strand; PAM type: NRG; PAM sequence: AAG
aacctttaaaaggataatgt

SEQ ID NO: 164281 - DNA, 20 bp, Artificial Sequence
  Description of Artificial Sequence: Synthetic oligonucleotide
  Target: LAMA2; (+) strand; PAM type: NRG; PAM sequence: AAG
aaaggataatgtaagacaaa

SEQ ID NO: 164282 - DNA, 20 bp, Artificial Sequence
  Description of Artificial Sequence: Synthetic oligonucleotide
  Target: LAMA2; (+) strand; PAM type: NRG; PAM sequence: TGG
atgtaagacaaaaagacaaa

SEQ ID NO: 164283 - DNA, 20 bp, Artificial Sequence
  Description of Artificial Sequence: Synthetic oligonucleotide
  Target: LAMA2; (+) strand; PAM type: NRG; PAM sequence: AAG
agacaaaaagacaaatggat

SEQ ID NO: 164284 - DNA, 20 bp, Artificial Sequence
  Description of Artificial Sequence: Synthetic oligonucleotide
  Target: LAMA2; (+) strand; PAM type: NRG; PAM sequence: CAG
caaaaagacaaatggataag

SEQ ID NO: 164285 - DNA, 20 bp, Artificial Sequence
  Description of Artificial Sequence: Synthetic oligonucleotide
  Target: LAMA2; (+) strand; PAM type: NRG; PAM sequence: AAG
aaatggataagcagaaatta

SEQ ID NO: 164286 - DNA, 20 bp, Artificial Sequence
  Description of Artificial Sequence: Synthetic oligonucleotide
  Target: LAMA2; (+) strand; PAM type: NRG; PAM sequence: GAG
gataagcagaaattaaagat

SEQ ID NO: 164287 - DNA, 20 bp, Artificial Sequence
  Description of Artificial Sequence: Synthetic oligonucleotide
  Target: LAMA2; (+) strand; PAM type: NRG; PAM sequence: GAG
taagcagaaattaaagatga

SEQ ID NO: 164288 - DNA, 20 bp, Artificial Sequence
  Description of Artificial Sequence: Synthetic oligonucleotide
  Target: LAMA2; (+) strand; PAM type: NRG; PAM sequence: AAG
agagaaataaaattattcaa

SEQ ID NO: 164289 - DNA, 20 bp, Artificial Sequence
  Description of Artificial Sequence: Synthetic oligonucleotide
  Target: LAMA2; (+) strand; PAM type: NRG; PAM sequence: AAG
gaaataaaattattcaaaag

SEQ ID NO: 164290 - DNA, 20 bp, Artificial Sequence
  Description of Artificial Sequence: Synthetic oligonucleotide
  Target: LAMA2; (+) strand; PAM type: NRG; PAM sequence: AAG
aaaattattcaaaagaagtt

SEQ ID NO: 164291 - DNA, 20 bp, Artificial Sequence
  Description of Artificial Sequence: Synthetic oligonucleotide
  Target: LAMA2; (+) strand; PAM type: NRG; PAM sequence: TAG
aaaagaagttaagattgcaa

SEQ ID NO: 164292 - DNA, 20 bp, Artificial Sequence
  Description of Artificial Sequence: Synthetic oligonucleotide
  Target: LAMA2; (+) strand; PAM type: NRG; PAM sequence: AGG
aaagaagttaagattgcaat

SEQ ID NO: 164293 - DNA, 20 bp, Artificial Sequence
  Description of Artificial Sequence: Synthetic oligonucleotide
  Target: LAMA2; (+) strand; PAM type: NRG; PAM sequence: GGG
aagaagttaagattgcaata

SEQ ID NO: 164294 - DNA, 20 bp, Artificial Sequence
  Description of Artificial Sequence: Synthetic oligonucleotide
  Target: LAMA2; (+) strand; PAM type: NRG; PAM sequence: AAG
tgcaatagggtaatgaaaat

SEQ ID NO: 164295 - DNA, 20 bp, Artificial Sequence
  Description of Artificial Sequence: Synthetic oligonucleotide
  Target: LAMA2; (+) strand; PAM type: NRG; PAM sequence: TGG
agggtaatgaaaataagcat

SEQ ID NO: 164296 - DNA, 20 bp, Artificial Sequence
  Description of Artificial Sequence: Synthetic oligonucleotide
  Target: LAMA2; (+) strand; PAM type: NRG; PAM sequence: TGG
gtaatgaaaataagcattgg

SEQ ID NO: 164297 - DNA, 20 bp, Artificial Sequence
  Description of Artificial Sequence: Synthetic oligonucleotide
  Target: LAMA2; (+) strand; PAM type: NRG; PAM sequence: CAG
ataaaacttttcctgtaaaa

SEQ ID NO: 164298 - DNA, 20 bp, Artificial Sequence
  Description of Artificial Sequence: Synthetic oligonucleotide
  Target: LAMA2; (+) strand; PAM type: NRG; PAM sequence: AGG
taaaacttttcctgtaaaac

SEQ ID NO: 164299 - DNA, 20 bp, Artificial Sequence
  Description of Artificial Sequence: Synthetic oligonucleotide
  Target: LAMA2; (+) strand; PAM type: NRG; PAM sequence: GAG
aaacttttcctgtaaaacag

SEQ ID NO: 164300 - DNA, 20 bp, Artificial Sequence
  Description of Artificial Sequence: Synthetic oligonucleotide
  Target: LAMA2; (+) strand; PAM type: NRG; PAM sequence: AAG
ctgtaaaacaggagctgtga

SEQ ID NO: 164301 - DNA, 20 bp, Artificial Sequence
  Description of Artificial Sequence: Synthetic oligonucleotide
  Target: LAMA2; (+) strand; PAM type: NRG; PAM sequence: TAG
taaaacaggagctgtgaaag

SEQ ID NO: 164302 - DNA, 20 bp, Artificial Sequence
  Description of Artificial Sequence: Synthetic oligonucleotide
  Target: LAMA2; (+) strand; PAM type: NRG; PAM sequence: AGG
aaaacaggagctgtgaaagt

SEQ ID NO: 164303 - DNA, 20 bp, Artificial Sequence
  Description of Artificial Sequence: Synthetic oligonucleotide
  Target: LAMA2; (+) strand; PAM type: NRG; PAM sequence: GAG
tgaaagtaggataccaattt

SEQ ID NO: 164304 - DNA, 20 bp, Artificial Sequence
  Description of Artificial Sequence: Synthetic oligonucleotide
  Target: LAMA2; (+) strand; PAM type: NRG; PAM sequence: GAG
aaagtaggataccaatttga

SEQ ID NO: 164305 - DNA, 20 bp, Artificial Sequence
  Description of Artificial Sequence: Synthetic oligonucleotide
  Target: LAMA2; (+) strand; PAM type: NRG; PAM sequence: AGG
aagtaggataccaatttgag

SEQ ID NO: 164306 - DNA, 20 bp, Artificial Sequence
  Description of Artificial Sequence: Synthetic oligonucleotide
  Target: LAMA2; (+) strand; PAM type: NRG; PAM sequence: CAG
accaatttgagaggtaaata

SEQ ID NO: 164307 - DNA, 20 bp, Artificial Sequence
  Description of Artificial Sequence: Synthetic oligonucleotide
  Target: LAMA2; (+) strand; PAM type: NRG; PAM sequence: AAG
atttgagaggtaaatacagc

SEQ ID NO: 164308 - DNA, 20 bp, Artificial Sequence
  Description of Artificial Sequence: Synthetic oligonucleotide
  Target: LAMA2; (+) strand; PAM type: NRG; PAM sequence: AAG
acagcaagaaatgtaaaaca

SEQ ID NO: 164309 - DNA, 20 bp, Artificial Sequence
  Description of Artificial Sequence: Synthetic oligonucleotide
  Target: LAMA2; (+) strand; PAM type: NRG; PAM sequence: AGG
cagcaagaaatgtaaaacaa

SEQ ID NO: 164310 - DNA, 20 bp, Artificial Sequence
  Description of Artificial Sequence: Synthetic oligonucleotide
  Target: LAMA2; (+) strand; PAM type: NRG; PAM sequence: CAG
aaaacaaaggaaaatgattg

SEQ ID NO: 164311 - DNA, 20 bp, Artificial Sequence
  Description of Artificial Sequence: Synthetic oligonucleotide
  Target: LAMA2; (+) strand; PAM type: NRG; PAM sequence: AAG
acaaaggaaaatgattgcag

SEQ ID NO: 164312 - DNA, 20 bp, Artificial Sequence
  Description of Artificial Sequence: Synthetic oligonucleotide
  Target: LAMA2; (+) strand; PAM type: NRG; PAM sequence: TAG
aaaatgattgcagaagacat

SEQ ID NO: 164313 - DNA, 20 bp, Artificial Sequence
  Description of Artificial Sequence: Synthetic oligonucleotide
  Target: LAMA2; (+) strand; PAM type: NRG; PAM sequence: AGG
aaatgattgcagaagacatt

SEQ ID NO: 164314 - DNA, 20 bp, Artificial Sequence
  Description of Artificial Sequence: Synthetic oligonucleotide
  Target: LAMA2; (+) strand; PAM type: NRG; PAM sequence: TAG
cagaagacattaggatatta

SEQ ID NO: 164315 - DNA, 20 bp, Artificial Sequence
  Description of Artificial Sequence: Synthetic oligonucleotide
  Target: LAMA2; (+) strand; PAM type: NRG; PAM sequence: TGG
acattaggatattatagatt

SEQ ID NO: 164316 - DNA, 20 bp, Artificial Sequence
  Description of Artificial Sequence: Synthetic oligonucleotide
  Target: LAMA2; (+) strand; PAM type: NRG; PAM sequence: CAG
ttaggatattatagatttgg

SEQ ID NO: 164317 - DNA, 20 bp, Artificial Sequence
  Description of Artificial Sequence: Synthetic oligonucleotide
  Target: LAMA2; (+) strand; PAM type: NRG; PAM sequence: GAG
aggatattatagatttggca

SEQ ID NO: 164318 - DNA, 20 bp, Artificial Sequence
  Description of Artificial Sequence: Synthetic oligonucleotide
  Target: LAMA2; (+) strand; PAM type: NRG; PAM sequence: GAG
gatattatagatttggcaga

SEQ ID NO: 164319 - DNA, 20 bp, Artificial Sequence
  Description of Artificial Sequence: Synthetic oligonucleotide
  Target: LAMA2; (+) strand; PAM type: NRG; PAM sequence: CAG
tatagatttggcagagagaa

SEQ ID NO: 164320 - DNA, 20 bp, Artificial Sequence
  Description of Artificial Sequence: Synthetic oligonucleotide
  Target: LAMA2; (+) strand; PAM type: NRG; PAM sequence: GAG
tagatttggcagagagaaca

SEQ ID NO: 164321 - DNA, 20 bp, Artificial Sequence
  Description of Artificial Sequence: Synthetic oligonucleotide
  Target: LAMA2; (+) strand; PAM type: NRG; PAM sequence: AAG
agaacagagtgatgtacttt

SEQ ID NO: 164322 - DNA, 20 bp, Artificial Sequence
  Description of Artificial Sequence: Synthetic oligonucleotide
  Target: LAMA2; (+) strand; PAM type: NRG; PAM sequence: TAG
gtgatgtactttaagaatta

SEQ ID NO: 164323 - DNA, 20 bp, Artificial Sequence
  Description of Artificial Sequence: Synthetic oligonucleotide
  Target: LAMA2; (+) strand; PAM type: NRG; PAM sequence: AAG
aattatagatgatcctgaaa

SEQ ID NO: 164324 - DNA, 20 bp, Artificial Sequence
  Description of Artificial Sequence: Synthetic oligonucleotide
  Target: LAMA2; (+) strand; PAM type: NRG; PAM sequence: TAG
gaaaaagaaaattgattaat

SEQ ID NO: 164325 - DNA, 20 bp, Artificial Sequence
  Description of Artificial Sequence: Synthetic oligonucleotide
  Target: LAMA2; (+) strand; PAM type: NRG; PAM sequence: CAG
agaaaattgattaattagaa

SEQ ID NO: 164326 - DNA, 20 bp, Artificial Sequence
  Description of Artificial Sequence: Synthetic oligonucleotide
  Target: LAMA2; (+) strand; PAM type: NRG; PAM sequence: AAG
aaaaatcaaaaacaaatctg

SEQ ID NO: 164327 - DNA, 20 bp, Artificial Sequence
  Description of Artificial Sequence: Synthetic oligonucleotide
  Target: LAMA2; (+) strand; PAM type: NRG; PAM sequence: AAG
aatcaaaaacaaatctgaag

SEQ ID NO: 164328 - DNA, 20 bp, Artificial Sequence
  Description of Artificial Sequence: Synthetic oligonucleotide
  Target: LAMA2; (+) strand; PAM type: NRG; PAM sequence: CAG
aaacaaatctgaagaagaaa

SEQ ID NO: 164329 - DNA, 20 bp, Artificial Sequence
  Description of Artificial Sequence: Synthetic oligonucleotide
  Target: LAMA2; (+) strand; PAM type: NRG; PAM sequence: AAG
caattatgttcccaaactga

SEQ ID NO: 164330 - DNA, 20 bp, Artificial Sequence
  Description of Artificial Sequence: Synthetic oligonucleotide
  Target: LAMA2; (+) strand; PAM type: NRG; PAM sequence: CAG
aaactgaaagaactatgttc

SEQ ID NO: 164331 - DNA, 20 bp, Artificial Sequence
  Description of Artificial Sequence: Synthetic oligonucleotide
  Target: LAMA2; (+) strand; PAM type: NRG; PAM sequence: AAG
tgaaagaactatgttccagt

SEQ ID NO: 164332 - DNA, 20 bp, Artificial Sequence
  Description of Artificial Sequence: Synthetic oligonucleotide
  Target: LAMA2; (+) strand; PAM type: NRG; PAM sequence: TGG
actatgttccagtaagttga

SEQ ID NO: 164333 - DNA, 20 bp, Artificial Sequence
  Description of Artificial Sequence: Synthetic oligonucleotide
  Target: LAMA2; (+) strand; PAM type: NRG; PAM sequence: AAG
gaaaaaaaaaaaacaaaccc

SEQ ID NO: 164334 - DNA, 20 bp, Artificial Sequence
  Description of Artificial Sequence: Synthetic oligonucleotide
  Target: LAMA2; (+) strand; PAM type: NRG; PAM sequence: CAG
aaaaaaacaaacccaagctt

SEQ ID NO: 164335 - DNA, 20 bp, Artificial Sequence
  Description of Artificial Sequence: Synthetic oligonucleotide
  Target: LAMA2; (+) strand; PAM type: NRG; PAM sequence: TAG
acccaagcttcagaaaattc

SEQ ID NO: 164336 - DNA, 20 bp, Artificial Sequence
  Description of Artificial Sequence: Synthetic oligonucleotide
  Target: LAMA2; (+) strand; PAM type: NRG; PAM sequence: AAG
aaatatgaattatgtaaata

SEQ ID NO: 164337 - DNA, 20 bp, Artificial Sequence
  Description of Artificial Sequence: Synthetic oligonucleotide
  Target: LAMA2; (+) strand; PAM type: NRG; PAM sequence: GAG
atatgaattatgtaaataaa

SEQ ID NO: 164338 - DNA, 20 bp, Artificial Sequence
  Description of Artificial Sequence: Synthetic oligonucleotide
  Target: LAMA2; (+) strand; PAM type: NRG; PAM sequence: TGG
agaaaatcgtgtatacatct

SEQ ID NO: 164339 - DNA, 20 bp, Artificial Sequence
  Description of Artificial Sequence: Synthetic oligonucleotide
  Target: LAMA2; (+) strand; PAM type: NRG; PAM sequence: GGG
gaaaatcgtgtatacatctt

SEQ ID NO: 164340 - DNA, 20 bp, Artificial Sequence
  Description of Artificial Sequence: Synthetic oligonucleotide
  Target: LAMA2; (+) strand; PAM type: NRG; PAM sequence: AAG
tcgtgtatacatcttgggcg

SEQ ID NO: 164341 - DNA, 20 bp, Artificial Sequence
  Description of Artificial Sequence: Synthetic oligonucleotide
  Target: LAMA2; (+) strand; PAM type: NRG; PAM sequence: CAG
gcgaagaaaaacgttactaa

SEQ ID NO: 164342 - DNA, 20 bp, Artificial Sequence
  Description of Artificial Sequence: Synthetic oligonucleotide
  Target: LAMA2; (+) strand; PAM type: NRG; PAM sequence: GAG
gaagaaaaacgttactaaca

SEQ ID NO: 164343 - DNA, 20 bp, Artificial Sequence
  Description of Artificial Sequence: Synthetic oligonucleotide
  Target: LAMA2; (+) strand; PAM type: NRG; PAM sequence: CAG
tactaacagagacctcaaat

SEQ ID NO: 164344 - DNA, 20 bp, Artificial Sequence
  Description of Artificial Sequence: Synthetic oligonucleotide
  Target: LAMA2; (+) strand; PAM type: NRG; PAM sequence: AAG
ctcaaatcagaattgtatgc

SEQ ID NO: 164345 - DNA, 20 bp, Artificial Sequence
  Description of Artificial Sequence: Synthetic oligonucleotide
  Target: LAMA2; (+) strand; PAM type: NRG; PAM sequence: TAG
aatgccaaaaaacaatatac

SEQ ID NO: 164346 - DNA, 20 bp, Artificial Sequence
  Description of Artificial Sequence: Synthetic oligonucleotide
  Target: LAMA2; (+) strand; PAM type: NRG; PAM sequence: AAG
actagatgttacttctcttc

SEQ ID NO: 164347 - DNA, 20 bp, Artificial Sequence
  Description of Artificial Sequence: Synthetic oligonucleotide
  Target: LAMA2; (+) strand; PAM type: NRG; PAM sequence: TGG
acttctcttcaagctctcct

SEQ ID NO: 164348 - DNA, 20 bp, Artificial Sequence
  Description of Artificial Sequence: Synthetic oligonucleotide
  Target: LAMA2; (+) strand; PAM type: NRG; PAM sequence: AAG
aagctctccttggattcccc

SEQ ID NO: 164349 - DNA, 20 bp, Artificial Sequence
  Description of Artificial Sequence: Synthetic oligonucleotide
  Target: LAMA2; (+) strand; PAM type: NRG; PAM sequence: TAG
ctccttggattccccaagtc

SEQ ID NO: 164350 - DNA, 20 bp, Artificial Sequence
  Description of Artificial Sequence: Synthetic oligonucleotide
  Target: LAMA2; (+) strand; PAM type: NRG; PAM sequence: TAG
atgccctttgtatgttcaca

SEQ ID NO: 164351 - DNA, 20 bp, Artificial Sequence
  Description of Artificial Sequence: Synthetic oligonucleotide
  Target: LAMA2; (+) strand; PAM type: NRG; PAM sequence: TGG
tgtatgttcacatagcattt

SEQ ID NO: 164352 - DNA, 20 bp, Artificial Sequence
  Description of Artificial Sequence: Synthetic oligonucleotide
  Target: LAMA2; (+) strand; PAM type: NRG; PAM sequence: TAG
atttacttgtctccctctac

SEQ ID NO: 164353 - DNA, 20 bp, Artificial Sequence
  Description of Artificial Sequence: Synthetic oligonucleotide
  Target: LAMA2; (+) strand; PAM type: NRG; PAM sequence: AAG
gtctccctctactagaccgt

SEQ ID NO: 164354 - DNA, 20 bp, Artificial Sequence
  Description of Artificial Sequence: Synthetic oligonucleotide
  Target: LAMA2; (+) strand; PAM type: NRG; PAM sequence: AGG
tctccctctactagaccgta

SEQ ID NO: 164355 - DNA, 20 bp, Artificial Sequence
  Description of Artificial Sequence: Synthetic oligonucleotide
  Target: LAMA2; (+) strand; PAM type: NRG; PAM sequence: GAG
tgtttaaatgctacaattat

SEQ ID NO: 164356 - DNA, 20 bp, Artificial Sequence
  Description of Artificial Sequence: Synthetic oligonucleotide
  Target: LAMA2; (+) strand; PAM type: NRG; PAM sequence: AAG
tgctacaattatgagataat

SEQ ID NO: 164357 - DNA, 20 bp, Artificial Sequence
  Description of Artificial Sequence: Synthetic oligonucleotide
  Target: LAMA2; (+) strand; PAM type: NRG; PAM sequence: AGG
gctacaattatgagataata

SEQ ID NO: 164358 - DNA, 20 bp, Artificial Sequence
  Description of Artificial Sequence: Synthetic oligonucleotide
  Target: LAMA2; (+) strand; PAM type: NRG; PAM sequence: GAG
ttgtctaaaatttaatcttt

SEQ ID NO: 164359 - DNA, 20 bp, Artificial Sequence
  Description of Artificial Sequence: Synthetic oligonucleotide
  Target: LAMA2; (+) strand; PAM type: NRG; PAM sequence: AAG
aaaatttaatctttgagaca

SEQ ID NO: 164360 - DNA, 20 bp, Artificial Sequence
  Description of Artificial Sequence: Synthetic oligonucleotide
  Target: LAMA2; (+) strand; PAM type: NRG; PAM sequence: CAG
atttaatctttgagacaaag

SEQ ID NO: 164361 - DNA, 20 bp, Artificial Sequence
  Description of Artificial Sequence: Synthetic oligonucleotide
  Target: LAMA2; (+) strand; PAM type: NRG; PAM sequence: TGG
aatctttgagacaaagcagt

SEQ ID NO: 164362 - DNA, 20 bp, Artificial Sequence
  Description of Artificial Sequence: Synthetic oligonucleotide
  Target: LAMA2; (+) strand; PAM type: NRG; PAM sequence: CAG
agttggaaaaaacccatacc

SEQ ID NO: 164363 - DNA, 20 bp, Artificial Sequence
  Description of Artificial Sequence: Synthetic oligonucleotide
  Target: LAMA2; (+) strand; PAM type: NRG; PAM sequence: CAG
tacccagcccctctctacct

SEQ ID NO: 164364 - DNA, 20 bp, Artificial Sequence
  Description of Artificial Sequence: Synthetic oligonucleotide
  Target: LAMA2; (+) strand; PAM type: NRG; PAM sequence: AAG
cagcccctctctacctcaga

SEQ ID NO: 164365 - DNA, 20 bp, Artificial Sequence
  Description of Artificial Sequence: Synthetic oligonucleotide
  Target: LAMA2; (+) strand; PAM type: NRG; PAM sequence: GAG
gcccctctctacctcagaaa

SEQ ID NO: 164366 - DNA, 20 bp, Artificial Sequence
  Description of Artificial Sequence: Synthetic oligonucleotide
  Target: LAMA2; (+) strand; PAM type: NRG; PAM sequence: GAG
ccctctctacctcagaaaga

SEQ ID NO: 164367 - DNA, 20 bp, Artificial Sequence
  Description of Artificial Sequence: Synthetic oligonucleotide
  Target: LAMA2; (+) strand; PAM type: NRG; PAM sequence: AAG
tctctacctcagaaagagag

SEQ ID NO: 164368 - DNA, 20 bp, Artificial Sequence
  Description of Artificial Sequence: Synthetic oligonucleotide
  Target: LAMA2; (+) strand; PAM type: NRG; PAM sequence: TAG
cattttctttctaattcaca

SEQ ID NO: 164369 - DNA, 20 bp, Artificial Sequence
  Description of Artificial Sequence: Synthetic oligonucleotide
  Target: LAMA2; (+) strand; PAM type: NRG; PAM sequence: TGG
ttctaattcacatagcatta

SEQ ID NO: 164370 - DNA, 20 bp, Artificial Sequence
  Description of Artificial Sequence: Synthetic oligonucleotide
  Target: LAMA2; (+) strand; PAM type: NRG; PAM sequence: TGG
tcacatagcattatggtttc

SEQ ID NO: 164371 - DNA, 20 bp, Artificial Sequence
  Description of Artificial Sequence: Synthetic oligonucleotide
  Target: LAMA2; (+) strand; PAM type: NRG; PAM sequence: CAG
atcatatatttccataaatg

SEQ ID NO: 164372 - DNA, 20 bp, Artificial Sequence
  Description of Artificial Sequence: Synthetic oligonucleotide
  Target: LAMA2; (+) strand; PAM type: NRG; PAM sequence: AGG
tcatatatttccataaatgc

SEQ ID NO: 164373 - DNA, 20 bp, Artificial Sequence
  Description of Artificial Sequence: Synthetic oligonucleotide
  Target: LAMA2; (+) strand; PAM type: NRG; PAM sequence: AAG
tatatttccataaatgcagg

SEQ ID NO: 164374 - DNA, 20 bp, Artificial Sequence
  Description of Artificial Sequence: Synthetic oligonucleotide
  Target: LAMA2; (+) strand; PAM type: NRG; PAM sequence: AAG
tatgttcactgatgtttccc

SEQ ID NO: 164375 - DNA, 20 bp, Artificial Sequence
  Description of Artificial Sequence: Synthetic oligonucleotide
  Target: LAMA2; (+) strand; PAM type: NRG; PAM sequence: TAG
tgtttcccaagtgactaaac

SEQ ID NO: 164376 - DNA, 20 bp, Artificial Sequence
  Description of Artificial Sequence: Synthetic oligonucleotide
  Target: LAMA2; (+) strand; PAM type: NRG; PAM sequence: TAG
cccaagtgactaaactagaa

SEQ ID NO: 164377 - DNA, 20 bp, Artificial Sequence
  Description of Artificial Sequence: Synthetic oligonucleotide
  Target: LAMA2; (+) strand; PAM type: NRG; PAM sequence: AAG
gactaaactagaatagtaca

SEQ ID NO: 164378 - DNA, 20 bp, Artificial Sequence
  Description of Artificial Sequence: Synthetic oligonucleotide
  Target: LAMA2; (+) strand; PAM type: NRG; PAM sequence: CAG
gaatagtacaaagcctataa

SEQ ID NO: 164379 - DNA, 20 bp, Artificial Sequence
  Description of Artificial Sequence: Synthetic oligonucleotide
  Target: LAMA2; (+) strand; PAM type: NRG; PAM sequence: TGG
catgattaatatgtgtttaa

SEQ ID NO: 164380 - DNA, 20 bp, Artificial Sequence
  Description of Artificial Sequence: Synthetic oligonucleotide
  Target: LAMA2; (+) strand; PAM type: NRG; PAM sequence: AAG
gattaatatgtgtttaatgg

SEQ ID NO: 164381 - DNA, 20 bp, Artificial Sequence
  Description of Artificial Sequence: Synthetic oligonucleotide
  Target: LAMA2; (+) strand; PAM type: NRG; PAM sequence: TAG
atatgtgtttaatggaagca

SEQ ID NO: 164382 - DNA, 20 bp, Artificial Sequence
  Description of Artificial Sequence: Synthetic oligonucleotide
  Target: LAMA2; (+) strand; PAM type: NRG; PAM sequence: TAG
taatggaagcatagaaacat

SEQ ID NO: 164383 - DNA, 20 bp, Artificial Sequence
  Description of Artificial Sequence: Synthetic oligonucleotide
  Target: LAMA2; (+) strand; PAM type: NRG; PAM sequence: AAG
aacattagaattaaaatttt

SEQ ID NO: 164384 - DNA, 20 bp, Artificial Sequence
  Description of Artificial Sequence: Synthetic oligonucleotide
  Target: LAMA2; (+) strand; PAM type: NRG; PAM sequence: AAG
attttaagatatttcccata

SEQ ID NO: 164385 - DNA, 20 bp, Artificial Sequence
  Description of Artificial Sequence: Synthetic oligonucleotide
  Target: LAMA2; (+) strand; PAM type: NRG; PAM sequence: TGG
ttcccataaagttgtgttaa

SEQ ID NO: 164386 - DNA, 20 bp, Artificial Sequence
  Description of Artificial Sequence: Synthetic oligonucleotide
  Target: LAMA2; (+) strand; PAM type: NRG; PAM sequence: TAG
tgctgtttttatctcctcta

SEQ ID NO: 164387 - DNA, 20 bp, Artificial Sequence
  Description of Artificial Sequence: Synthetic oligonucleotide
  Target: LAMA2; (+) strand; PAM type: NRG; PAM sequence: AGG
gctgtttttatctcctctat

SEQ ID NO: 164388 - DNA, 20 bp, Artificial Sequence
  Description of Artificial Sequence: Synthetic oligonucleotide
  Target: LAMA2; (+) strand; PAM type: NRG; PAM sequence: CAG
cctctataggcttgtaactg

SEQ ID NO: 164389 - DNA, 20 bp, Artificial Sequence
  Description of Artificial Sequence: Synthetic oligonucleotide
  Target: LAMA2; (+) strand; PAM type: NRG; PAM sequence: CAG
ataggcttgtaactgcagca

SEQ ID NO: 164390 - DNA, 20 bp, Artificial Sequence
  Description of Artificial Sequence: Synthetic oligonucleotide
  Target: LAMA2; (+) strand; PAM type: NRG; PAM sequence: TGG
ggcttgtaactgcagcacag

SEQ ID NO: 164391 - DNA, 20 bp, Artificial Sequence
  Description of Artificial Sequence: Synthetic oligonucleotide
  Target: LAMA2; (+) strand; PAM type: NRG; PAM sequence: GGG
gcttgtaactgcagcacagt

SEQ ID NO: 164392 - DNA, 20 bp, Artificial Sequence
  Description of Artificial Sequence: Synthetic oligonucleotide
  Target: LAMA2; (+) strand; PAM type: NRG; PAM sequence: TGG
ctgcagcacagtgggatcct

SEQ ID NO: 164393 - DNA, 20 bp, Artificial Sequence
  Description of Artificial Sequence: Synthetic oligonucleotide
  Target: LAMA2; (+) strand; PAM type: NRG; PAM sequence: CAG
tttccaatgcaatgtaaata

SEQ ID NO: 164394 - DNA, 20 bp, Artificial Sequence
  Description of Artificial Sequence: Synthetic oligonucleotide
  Target: LAMA2; (+) strand; PAM type: NRG; PAM sequence: AGG
ttccaatgcaatgtaaatac

SEQ ID NO: 164395 - DNA, 20 bp, Artificial Sequence
  Description of Artificial Sequence: Synthetic oligonucleotide
  Target: LAMA2; (+) strand; PAM type: NRG; PAM sequence: TGG
aactgtcatccaaaattctc

SEQ ID NO: 164396 - DNA, 20 bp, Artificial Sequence
  Description of Artificial Sequence: Synthetic oligonucleotide
  Target: LAMA2; (+) strand; PAM type: NRG; PAM sequence: CAG
attctctggtgcaaaatgta

SEQ ID NO: 164397 - DNA, 20 bp, Artificial Sequence
  Description of Artificial Sequence: Synthetic oligonucleotide
  Target: LAMA2; (+) strand; PAM type: NRG; PAM sequence: GAG
tctctggtgcaaaatgtaca

SEQ ID NO: 164398 - DNA, 20 bp, Artificial Sequence
  Description of Artificial Sequence: Synthetic oligonucleotide
  Target: LAMA2; (+) strand; PAM type: NRG; PAM sequence: CAG
ggtgcaaaatgtacagagtg

SEQ ID NO: 164399 - DNA, 20 bp, Artificial Sequence
  Description of Artificial Sequence: Synthetic oligonucleotide
  Target: LAMA2; (+) strand; PAM type: NRG; PAM sequence: GAG
aaaatgtacagagtgcagtc

SEQ ID NO: 164400 - DNA, 20 bp, Artificial Sequence
  Description of Artificial Sequence: Synthetic oligonucleotide
  Target: LAMA2; (+) strand; PAM type: NRG; PAM sequence: AGG
aaatgtacagagtgcagtcg

SEQ ID NO: 164401 - DNA, 20 bp, Artificial Sequence
  Description of Artificial Sequence: Synthetic oligonucleotide
  Target: LAMA2; (+) strand; PAM type: NRG; PAM sequence: TGG
cagagtgcagtcgaggtcac

SEQ ID NO: 164402 - DNA, 20 bp, Artificial Sequence
  Description of Artificial Sequence: Synthetic oligonucleotide
  Target: LAMA2; (+) strand; PAM type: NRG; PAM sequence: TGG
ctctgtgactgcttcctccc

SEQ ID NO: 164403 - DNA, 20 bp, Artificial Sequence
  Description of Artificial Sequence: Synthetic oligonucleotide
  Target: LAMA2; (+) strand; PAM type: NRG; PAM sequence: GGG
tctgtgactgcttcctccct

SEQ ID NO: 164404 - DNA, 20 bp, Artificial Sequence
  Description of Artificial Sequence: Synthetic oligonucleotide
  Target: LAMA2; (+) strand; PAM type: NRG; PAM sequence: CAG
tgactgcttcctccctggga

SEQ ID NO: 164405 - DNA, 20 bp, Artificial Sequence
  Description of Artificial Sequence: Synthetic oligonucleotide
  Target: LAMA2; (+) strand; PAM type: NRG; PAM sequence: CAG
agatgccacaacctgtgatt

SEQ ID NO: 164406 - DNA, 20 bp, Artificial Sequence
  Description of Artificial Sequence: Synthetic oligonucleotide
  Target: LAMA2; (+) strand; PAM type: NRG; PAM sequence: GAG
atgccacaacctgtgattca

SEQ ID NO: 164407 - DNA, 20 bp, Artificial Sequence
  Description of Artificial Sequence: Synthetic oligonucleotide
  Target: LAMA2; (+) strand; PAM type: NRG; PAM sequence: TAG
gagactaaaaaatgctcctg

SEQ ID NO: 164408 - DNA, 20 bp, Artificial Sequence
  Description of Artificial Sequence: Synthetic oligonucleotide
  Target: LAMA2; (+) strand; PAM type: NRG; PAM sequence: TGG
tgctcctgtagtgatcaaac

SEQ ID NO: 164409 - DNA, 20 bp, Artificial Sequence
  Description of Artificial Sequence: Synthetic oligonucleotide
  Target: LAMA2; (+) strand; PAM type: NRG; PAM sequence: GGG
gctcctgtagtgatcaaact

SEQ ID NO: 164410 - DNA, 20 bp, Artificial Sequence
  Description of Artificial Sequence: Synthetic oligonucleotide
  Target: LAMA2; (+) strand; PAM type: NRG; PAM sequence: CAG
cctgtagtgatcaaactggg

SEQ ID NO: 164411 - DNA, 20 bp, Artificial Sequence
  Description of Artificial Sequence: Synthetic oligonucleotide
  Target: LAMA2; (+) strand; PAM type: NRG; PAM sequence: AAG
aaactgggcagtgcacttgt

SEQ ID NO: 164412 - DNA, 20 bp, Artificial Sequence
  Description of Artificial Sequence: Synthetic oligonucleotide
  Target: LAMA2; (+) strand; PAM type: NRG; PAM sequence: AGG
aactgggcagtgcacttgta

SEQ ID NO: 164413 - DNA, 20 bp, Artificial Sequence
  Description of Artificial Sequence: Synthetic oligonucleotide
  Target: LAMA2; (+) strand; PAM type: NRG; PAM sequence: CAG
aggtatgtgctgctgacatg

SEQ ID NO: 164414 - DNA, 20 bp, Artificial Sequence
  Description of Artificial Sequence: Synthetic oligonucleotide
  Target: LAMA2; (+) strand; PAM type: NRG; PAM sequence: TAG
atgtgctgctgacatgcagc

SEQ ID NO: 164415 - DNA, 20 bp, Artificial Sequence
  Description of Artificial Sequence: Synthetic oligonucleotide
  Target: LAMA2; (+) strand; PAM type: NRG; PAM sequence: AGG
tgtgctgctgacatgcagct

SEQ ID NO: 164416 - DNA, 20 bp, Artificial Sequence
  Description of Artificial Sequence: Synthetic oligonucleotide
  Target: LAMA2; (+) strand; PAM type: NRG; PAM sequence: GGG
gtgctgctgacatgcagcta

SEQ ID NO: 164417 - DNA, 20 bp, Artificial Sequence
  Description of Artificial Sequence: Synthetic oligonucleotide
  Target: LAMA2; (+) strand; PAM type: NRG; PAM sequence: CAG
tcaattctgtttccattgct

SEQ ID NO: 164418 - DNA, 20 bp, Artificial Sequence
  Description of Artificial Sequence: Synthetic oligonucleotide
  Target: LAMA2; (+) strand; PAM type: NRG; PAM sequence: CAG
tgctcagttttaacttcatt

SEQ ID NO: 164419 - DNA, 20 bp, Artificial Sequence
  Description of Artificial Sequence: Synthetic oligonucleotide
  Target: LAMA2; (+) strand; PAM type: NRG; PAM sequence: AAG
tttgttatacctgcttcatt

SEQ ID NO: 164420 - DNA, 20 bp, Artificial Sequence
  Description of Artificial Sequence: Synthetic oligonucleotide
  Target: LAMA2; (+) strand; PAM type: NRG; PAM sequence: CAG
gcttcattaagctaaacaaa

SEQ ID NO: 164421 - DNA, 20 bp, Artificial Sequence
  Description of Artificial Sequence: Synthetic oligonucleotide
  Target: LAMA2; (+) strand; PAM type: NRG; PAM sequence: TGG
cattaagctaaacaaacaga

SEQ ID NO: 164422 - DNA, 20 bp, Artificial Sequence
  Description of Artificial Sequence: Synthetic oligonucleotide
  Target: LAMA2; (+) strand; PAM type: NRG; PAM sequence: CAG
gatggacaaaatctcattgc

SEQ ID NO: 164423 - DNA, 20 bp, Artificial Sequence
  Description of Artificial Sequence: Synthetic oligonucleotide
  Target: LAMA2; (+) strand; PAM type: NRG; PAM sequence: TGG
caaaatctcattgccagaca

SEQ ID NO: 164424 - DNA, 20 bp, Artificial Sequence
  Description of Artificial Sequence: Synthetic oligonucleotide
  Target: LAMA2; (+) strand; PAM type: NRG; PAM sequence: GAG
aaatctcattgccagacatg

SEQ ID NO: 164425 - DNA, 20 bp, Artificial Sequence
  Description of Artificial Sequence: Synthetic oligonucleotide
  Target: LAMA2; (+) strand; PAM type: NRG; PAM sequence: TGG
tttcattgatatgcatttgt

SEQ ID NO: 164426 - DNA, 20 bp, Artificial Sequence
  Description of Artificial Sequence: Synthetic oligonucleotide
  Target: LAMA2; (+) strand; PAM type: NRG; PAM sequence: TAG
accgataaacactgcttttc

SEQ ID NO: 164427 - DNA, 20 bp, Artificial Sequence
  Description of Artificial Sequence: Synthetic oligonucleotide
  Target: LAMA2; (+) strand; PAM type: NRG; PAM sequence: GAG
cgataaacactgcttttcta

SEQ ID NO: 164428 - DNA, 20 bp, Artificial Sequence
  Description of Artificial Sequence: Synthetic oligonucleotide
  Target: LAMA2; (+) strand; PAM type: NRG; PAM sequence: TAG
cccaaacccacctttttttc

SEQ ID NO: 164429 - DNA, 20 bp, Artificial Sequence
  Description of Artificial Sequence: Synthetic oligonucleotide
  Target: LAMA2; (+) strand; PAM type: NRG; PAM sequence: TGG
aacccacctttttttctagt

SEQ ID NO: 164430 - DNA, 20 bp, Artificial Sequence
  Description of Artificial Sequence: Synthetic oligonucleotide
  Target: LAMA2; (+) strand; PAM type: NRG; PAM sequence: TGG
ccacctttttttctagttgg

SEQ ID NO: 164431 - DNA, 20 bp, Artificial Sequence
  Description of Artificial Sequence: Synthetic oligonucleotide
  Target: LAMA2; (+) strand; PAM type: NRG; PAM sequence: GAG
acctttttttctagttggtg

SEQ ID NO: 164432 - DNA, 20 bp, Artificial Sequence
  Description of Artificial Sequence: Synthetic oligonucleotide
  Target: LAMA2; (+) strand; PAM type: NRG; PAM sequence: TGG
tggagatgatctattttcaa

SEQ ID NO: 164433 - DNA, 20 bp, Artificial Sequence
  Description of Artificial Sequence: Synthetic oligonucleotide
  Target: LAMA2; (+) strand; PAM type: NRG; PAM sequence: TAG
atgatctattttcaatggta

SEQ ID NO: 164434 - DNA, 20 bp, Artificial Sequence
  Description of Artificial Sequence: Synthetic oligonucleotide
  Target: LAMA2; (+) strand; PAM type: NRG; PAM sequence: TAG
tgattttttaaaaaatatat

SEQ ID NO: 164435 - DNA, 20 bp, Artificial Sequence
  Description of Artificial Sequence: Synthetic oligonucleotide
  Target: LAMA2; (+) strand; PAM type: NRG; PAM sequence: AAG
tatattagatttgcttcgat

SEQ ID NO: 164436 - DNA, 20 bp, Artificial Sequence
  Description of Artificial Sequence: Synthetic oligonucleotide
  Target: LAMA2; (+) strand; PAM type: NRG; PAM sequence: AGG
atattagatttgcttcgata

SEQ ID NO: 164437 - DNA, 20 bp, Artificial Sequence
  Description of Artificial Sequence: Synthetic oligonucleotide
  Target: LAMA2; (+) strand; PAM type: NRG; PAM sequence: TGG
ttgcttcgataaggacaatc

SEQ ID NO: 164438 - DNA, 20 bp, Artificial Sequence
  Description of Artificial Sequence: Synthetic oligonucleotide
  Target: LAMA2; (+) strand; PAM type: NRG; PAM sequence: GGG
tgcttcgataaggacaatct

SEQ ID NO: 164439 - DNA, 20 bp, Artificial Sequence
  Description of Artificial Sequence: Synthetic oligonucleotide
  Target: LAMA2; (+) strand; PAM type: NRG; PAM sequence: GAG
cttcgataaggacaatctgg

SEQ ID NO: 164440 - DNA, 20 bp, Artificial Sequence
  Description of Artificial Sequence: Synthetic oligonucleotide
  Target: LAMA2; (+) strand; PAM type: NRG; PAM sequence: AGG
ttcgataaggacaatctggg

SEQ ID NO: 164441 - DNA, 20 bp, Artificial Sequence
  Description of Artificial Sequence: Synthetic oligonucleotide
  Target: LAMA2; (+) strand; PAM type: NRG; PAM sequence: GGG
tcgataaggacaatctggga

SEQ ID NO: 164442 - DNA, 20 bp, Artificial Sequence
  Description of Artificial Sequence: Synthetic oligonucleotide
  Target: LAMA2; (+) strand; PAM type: NRG; PAM sequence: GGG
cgataaggacaatctgggag

SEQ ID NO: 164443 - DNA, 20 bp, Artificial Sequence
  Description of Artificial Sequence: Synthetic oligonucleotide
  Target: LAMA2; (+) strand; PAM type: NRG; PAM sequence: TGG
taaggacaatctgggagggg

SEQ ID NO: 164444 - DNA, 20 bp, Artificial Sequence
  Description of Artificial Sequence: Synthetic oligonucleotide
  Target: LAMA2; (+) strand; PAM type: NRG; PAM sequence: CAG
ggacaatctgggaggggtgg

SEQ ID NO: 164445 - DNA, 20 bp, Artificial Sequence
  Description of Artificial Sequence: Synthetic oligonucleotide
  Target: LAMA2; (+) strand; PAM type: NRG; PAM sequence: AGG
gacaatctgggaggggtggc

SEQ ID NO: 164446 - DNA, 20 bp, Artificial Sequence
  Description of Artificial Sequence: Synthetic oligonucleotide
  Target: LAMA2; (+) strand; PAM type: NRG; PAM sequence: GGG
acaatctgggaggggtggca

SEQ ID NO: 164447 - DNA, 20 bp, Artificial Sequence
  Description of Artificial Sequence: Synthetic oligonucleotide
  Target: LAMA2; (+) strand; PAM type: NRG; PAM sequence: AAG
atctgggaggggtggcaggg

SEQ ID NO: 164448 - DNA, 20 bp, Artificial Sequence
  Description of Artificial Sequence: Synthetic oligonucleotide
  Target: LAMA2; (+) strand; PAM type: NRG; PAM sequence: CAG
gggaggggtggcagggaaga

SEQ ID NO: 164449 - DNA, 20 bp, Artificial Sequence
  Description of Artificial Sequence: Synthetic oligonucleotide
  Target: LAMA2; (+) strand; PAM type: NRG; PAM sequence: AAG
gcagggaagacagttctttt

SEQ ID NO: 164450 - DNA, 20 bp, Artificial Sequence
  Description of Artificial Sequence: Synthetic oligonucleotide
  Target: LAMA2; (+) strand; PAM type: NRG; PAM sequence: CAG
acagttcttttaagcatcat

SEQ ID NO: 164451 - DNA, 20 bp, Artificial Sequence
  Description of Artificial Sequence: Synthetic oligonucleotide
  Target: LAMA2; (+) strand; PAM type: NRG; PAM sequence: GAG
agttcttttaagcatcatca

SEQ ID NO: 164452 - DNA, 20 bp, Artificial Sequence
  Description of Artificial Sequence: Synthetic oligonucleotide
  Target: LAMA2; (+) strand; PAM type: NRG; PAM sequence: CAG
agcatcatcagagaaaatca

SEQ ID NO: 164453 - DNA, 20 bp, Artificial Sequence
  Description of Artificial Sequence: Synthetic oligonucleotide
  Target: LAMA2; (+) strand; PAM type: NRG; PAM sequence: AAG
gaaaatcacagctaaataat

SEQ ID NO: 164454 - DNA, 20 bp, Artificial Sequence
  Description of Artificial Sequence: Synthetic oligonucleotide
  Target: LAMA2; (+) strand; PAM type: NRG; PAM sequence: AGG
aaaatcacagctaaataata

SEQ ID NO: 164455 - DNA, 20 bp, Artificial Sequence
  Description of Artificial Sequence: Synthetic oligonucleotide
  Target: LAMA2; (+) strand; PAM type: NRG; PAM sequence: TAG
aatctgcaatcgctgtatac

SEQ ID NO: 164456 - DNA, 20 bp, Artificial Sequence
  Description of Artificial Sequence: Synthetic oligonucleotide
  Target: LAMA2; (+) strand; PAM type: NRG; PAM sequence: TGG
agaaaatatatttactgctg

SEQ ID NO: 164457 - DNA, 20 bp, Artificial Sequence
  Description of Artificial Sequence: Synthetic oligonucleotide
  Target: LAMA2; (+) strand; PAM type: NRG; PAM sequence: AAG
aaatatatttactgctgtgg

SEQ ID NO: 164458 - DNA, 20 bp, Artificial Sequence
  Description of Artificial Sequence: Synthetic oligonucleotide
  Target: LAMA2; (+) strand; PAM type: NRG; PAM sequence: TAG
tatttactgctgtggaagtt

SEQ ID NO: 164459 - DNA, 20 bp, Artificial Sequence
  Description of Artificial Sequence: Synthetic oligonucleotide
  Target: LAMA2; (+) strand; PAM type: NRG; PAM sequence: CAG
ataaacgctgtcattacaaa

SEQ ID NO: 164460 - DNA, 20 bp, Artificial Sequence
  Description of Artificial Sequence: Synthetic oligonucleotide
  Target: LAMA2; (+) strand; PAM type: NRG; PAM sequence: CAG
cagtgactatgtgcaaattt

SEQ ID NO: 164461 - DNA, 20 bp, Artificial Sequence
  Description of Artificial Sequence: Synthetic oligonucleotide
  Target: LAMA2; (+) strand; PAM type: NRG; PAM sequence: TGG
aatttcagccctcattaata

SEQ ID NO: 164462 - DNA, 20 bp, Artificial Sequence
  Description of Artificial Sequence: Synthetic oligonucleotide
  Target: LAMA2; (+) strand; PAM type: NRG; PAM sequence: TAG
attaatatggttaaatgatg

SEQ ID NO: 164463 - DNA, 20 bp, Artificial Sequence
  Description of Artificial Sequence: Synthetic oligonucleotide
  Target: LAMA2; (+) strand; PAM type: NRG; PAM sequence: AAG
atggttaaatgatgtagaaa

SEQ ID NO: 164464 - DNA, 20 bp, Artificial Sequence
  Description of Artificial Sequence: Synthetic oligonucleotide
  Target: LAMA2; (+) strand; PAM type: NRG; PAM sequence: GAG
ggttaaatgatgtagaaaaa

SEQ ID NO: 164465 - DNA, 20 bp, Artificial Sequence
  Description of Artificial Sequence: Synthetic oligonucleotide
  Target: LAMA2; (+) strand; PAM type: NRG; PAM sequence: AAG
tagaaaaagagccaattaaa

SEQ ID NO: 164466 - DNA, 20 bp, Artificial Sequence
  Description of Artificial Sequence: Synthetic oligonucleotide
  Target: LAMA2; (+) strand; PAM type: NRG; PAM sequence: AGG
agaaaaagagccaattaaaa

SEQ ID NO: 164467 - DNA, 20 bp, Artificial Sequence
  Description of Artificial Sequence: Synthetic oligonucleotide
  Target: LAMA2; (+) strand; PAM type: NRG; PAM sequence: AAG
gagccaattaaaaaggtaaa

SEQ ID NO: 164468 - DNA, 20 bp, Artificial Sequence
  Description of Artificial Sequence: Synthetic oligonucleotide
  Target: LAMA2; (+) strand; PAM type: NRG; PAM sequence: AGG
agccaattaaaaaggtaaaa

SEQ ID NO: 164469 - DNA, 20 bp, Artificial Sequence
  Description of Artificial Sequence: Synthetic oligonucleotide
  Target: LAMA2; (+) strand; PAM type: NRG; PAM sequence: CAG
gtaaaaaggatttttcccct

SEQ ID NO: 164470 - DNA, 20 bp, Artificial Sequence
  Description of Artificial Sequence: Synthetic oligonucleotide
  Target: LAMA2; (+) strand; PAM type: NRG; PAM sequence: TAG
aaaggatttttcccctcaga

SEQ ID NO: 164471 - DNA, 20 bp, Artificial Sequence
  Description of Artificial Sequence: Synthetic oligonucleotide
  Target: LAMA2; (+) strand; PAM type: NRG; PAM sequence: CAG
tagttctgaaaaatcaattc

SEQ ID NO: 164472 - DNA, 20 bp, Artificial Sequence
  Description of Artificial Sequence: Synthetic oligonucleotide
  Target: LAMA2; (+) strand; PAM type: NRG; PAM sequence: AGG
agttctgaaaaatcaattcc

SEQ ID NO: 164473 - DNA, 20 bp, Artificial Sequence
  Description of Artificial Sequence: Synthetic oligonucleotide
  Target: LAMA2; (+) strand; PAM type: NRG; PAM sequence: CAG
aatcaattccaggataaatg

SEQ ID NO: 164474 - DNA, 20 bp, Artificial Sequence
  Description of Artificial Sequence: Synthetic oligonucleotide
  Target: LAMA2; (+) strand; PAM type: NRG; PAM sequence: CAG
aaatgcagtttaaactgtgt

SEQ ID NO: 164475 - DNA, 20 bp, Artificial Sequence
  Description of Artificial Sequence: Synthetic oligonucleotide
  Target: LAMA2; (+) strand; PAM type: NRG; PAM sequence: GAG
atgcagtttaaactgtgtca

SEQ ID NO: 164476 - DNA, 20 bp, Artificial Sequence
  Description of Artificial Sequence: Synthetic oligonucleotide
  Target: LAMA2; (+) strand; PAM type: NRG; PAM sequence: AGG
tgcagtttaaactgtgtcag

SEQ ID NO: 164477 - DNA, 20 bp, Artificial Sequence
  Description of Artificial Sequence: Synthetic oligonucleotide
  Target: LAMA2; (+) strand; PAM type: NRG; PAM sequence: AAG
tgtgtcagaggtatcttttc

SEQ ID NO: 164478 - DNA, 20 bp, Artificial Sequence
  Description of Artificial Sequence: Synthetic oligonucleotide
  Target: LAMA2; (+) strand; PAM type: NRG; PAM sequence: AAG
caagataaaatctatgcaaa

SEQ ID NO: 164479 - DNA, 20 bp, Artificial Sequence
  Description of Artificial Sequence: Synthetic oligonucleotide
  Target: LAMA2; (+) strand; PAM type: NRG; PAM sequence: AGG
aagataaaatctatgcaaaa

SEQ ID NO: 164480 - DNA, 20 bp, Artificial Sequence
  Description of Artificial Sequence: Synthetic oligonucleotide
  Target: LAMA2; (+) strand; PAM type: NRG; PAM sequence: GGG
agataaaatctatgcaaaaa

SEQ ID NO: 164481 - DNA, 20 bp, Artificial Sequence
  Description of Artificial Sequence: Synthetic oligonucleotide
  Target: LAMA2; (+) strand; PAM type: NRG; PAM sequence: CAG
aaaatctatgcaaaaaggga

SEQ ID NO: 164482 - DNA, 20 bp, Artificial Sequence
  Description of Artificial Sequence: Synthetic oligonucleotide
  Target: LAMA2; (+) strand; PAM type: NRG; PAM sequence: GAG
aatctatgcaaaaagggaca

SEQ ID NO: 164483 - DNA, 20 bp, Artificial Sequence
  Description of Artificial Sequence: Synthetic oligonucleotide
  Target: LAMA2; (+) strand; PAM type: NRG; PAM sequence: AGG
atctatgcaaaaagggacag

SEQ ID NO: 164484 - DNA, 20 bp, Artificial Sequence
  Description of Artificial Sequence: Synthetic oligonucleotide
  Target: LAMA2; (+) strand; PAM type: NRG; PAM sequence: CAG
gcaaaaagggacagaggaaa

SEQ ID NO: 164485 - DNA, 20 bp, Artificial Sequence
  Description of Artificial Sequence: Synthetic oligonucleotide
  Target: LAMA2; (+) strand; PAM type: NRG; PAM sequence: AGG
caaaaagggacagaggaaac

SEQ ID NO: 164486 - DNA, 20 bp, Artificial Sequence
  Description of Artificial Sequence: Synthetic oligonucleotide
  Target: LAMA2; (+) strand; PAM type: NRG; PAM sequence: AAG
aaagggacagaggaaacagg

SEQ ID NO: 164487 - DNA, 20 bp, Artificial Sequence
  Description of Artificial Sequence: Synthetic oligonucleotide
  Target: LAMA2; (+) strand; PAM type: NRG; PAM sequence: TGG
ggaaacaggaagataaaatc

SEQ ID NO: 164488 - DNA, 20 bp, Artificial Sequence
  Description of Artificial Sequence: Synthetic oligonucleotide
  Target: LAMA2; (+) strand; PAM type: NRG; PAM sequence: GGG
gaaacaggaagataaaatct

SEQ ID NO: 164489 - DNA, 20 bp, Artificial Sequence
  Description of Artificial Sequence: Synthetic oligonucleotide
  Target: LAMA2; (+) strand; PAM type: NRG; PAM sequence: TAG
acaggaagataaaatctggg

SEQ ID NO: 164490 - DNA, 20 bp, Artificial Sequence
  Description of Artificial Sequence: Synthetic oligonucleotide
  Target: LAMA2; (+) strand; PAM type: NRG; PAM sequence: TGG
ggaagataaaatctgggtag

SEQ ID NO: 164491 - DNA, 20 bp, Artificial Sequence
  Description of Artificial Sequence: Synthetic oligonucleotide
  Target: LAMA2; (+) strand; PAM type: NRG; PAM sequence: TGG
ctgggtagtggttgttaaaa

SEQ ID NO: 164492 - DNA, 20 bp, Artificial Sequence
  Description of Artificial Sequence: Synthetic oligonucleotide
  Target: LAMA2; (+) strand; PAM type: NRG; PAM sequence: GAG
gtggttgttaaaatggcctt

SEQ ID NO: 164493 - DNA, 20 bp, Artificial Sequence
  Description of Artificial Sequence: Synthetic oligonucleotide
  Target: LAMA2; (+) strand; PAM type: NRG; PAM sequence: GAG
ttaaaatggccttgagaatt

SEQ ID NO: 164494 - DNA, 20 bp, Artificial Sequence
  Description of Artificial Sequence: Synthetic oligonucleotide
  Target: LAMA2; (+) strand; PAM type: NRG; PAM sequence: AGG
taaaatggccttgagaattg

SEQ ID NO: 164495 - DNA, 20 bp, Artificial Sequence
  Description of Artificial Sequence: Synthetic oligonucleotide
  Target: LAMA2; (+) strand; PAM type: NRG; PAM sequence: TGG
gccttgagaattgaggaaaa

SEQ ID NO: 164496 - DNA, 20 bp, Artificial Sequence
  Description of Artificial Sequence: Synthetic oligonucleotide
  Target: LAMA2; (+) strand; PAM type: NRG; PAM sequence: CAG
ttgagaattgaggaaaatgg

SEQ ID NO: 164497 - DNA, 20 bp, Artificial Sequence
  Description of Artificial Sequence: Synthetic oligonucleotide
  Target: LAMA2; (+) strand; PAM type: NRG; PAM sequence: AAG
aaatggcagtttctaccatc

SEQ ID NO: 164498 - DNA, 20 bp, Artificial Sequence
  Description of Artificial Sequence: Synthetic oligonucleotide
  Target: LAMA2; (+) strand; PAM type: NRG; PAM sequence: AGG
aatggcagtttctaccatca

SEQ ID NO: 164499 - DNA, 20 bp, Artificial Sequence
  Description of Artificial Sequence: Synthetic oligonucleotide
  Target: LAMA2; (+) strand; PAM type: NRG; PAM sequence: GGG
atggcagtttctaccatcaa

SEQ ID NO: 164500 - DNA, 20 bp, Artificial Sequence
  Description of Artificial Sequence: Synthetic oligonucleotide
  Target: LAMA2; (+) strand; PAM type: NRG; PAM sequence: CGG
gtttctaccatcaagggctt

SEQ ID NO: 164501 - DNA, 20 bp, Artificial Sequence
  Description of Artificial Sequence: Synthetic oligonucleotide
  Target: LAMA2; (+) strand; PAM type: NRG; PAM sequence: GAG
caagggcttcggccaatacc

SEQ ID NO: 164502 - DNA, 20 bp, Artificial Sequence
  Description of Artificial Sequence: Synthetic oligonucleotide
  Target: LAMA2; (+) strand; PAM type: NRG; PAM sequence: CAG
aacctgctgcctatttctta

SEQ ID NO: 164503 - DNA, 20 bp, Artificial Sequence
  Description of Artificial Sequence: Synthetic oligonucleotide
  Target: LAMA2; (+) strand; PAM type: NRG; PAM sequence: TAG
ctatttcttacagcttacaa

SEQ ID NO: 164504 - DNA, 20 bp, Artificial Sequence
  Description of Artificial Sequence: Synthetic oligonucleotide
  Target: LAMA2; (+) strand; PAM type: NRG; PAM sequence: AAG
ttacaatagcaccactgttt

SEQ ID NO: 164505 - DNA, 20 bp, Artificial Sequence
  Description of Artificial Sequence: Synthetic oligonucleotide
  Target: LAMA2; (+) strand; PAM type: NRG; PAM sequence: GAG
gttgcttttgaaattttcat

SEQ ID NO: 164506 - DNA, 20 bp, Artificial Sequence
  Description of Artificial Sequence: Synthetic oligonucleotide
  Target: LAMA2; (+) strand; PAM type: NRG; PAM sequence: CAG
catgagtctttcatattgct

SEQ ID NO: 164507 - DNA, 20 bp, Artificial Sequence
  Description of Artificial Sequence: Synthetic oligonucleotide
  Target: LAMA2; (+) strand; PAM type: NRG; PAM sequence: GAG
tgagtctttcatattgctca

SEQ ID NO: 164508 - DNA, 20 bp, Artificial Sequence
  Description of Artificial Sequence: Synthetic oligonucleotide
  Target: LAMA2; (+) strand; PAM type: NRG; PAM sequence: CAG
gtctttcatattgctcagag

SEQ ID NO: 164509 - DNA, 20 bp, Artificial Sequence
  Description of Artificial Sequence: Synthetic oligonucleotide
  Target: LAMA2; (+) strand; PAM type: NRG; PAM sequence: TAG
tattgctcagagcagaactg

SEQ ID NO: 164510 - DNA, 20 bp, Artificial Sequence
  Description of Artificial Sequence: Synthetic oligonucleotide
  Target: LAMA2; (+) strand; PAM type: NRG; PAM sequence: AAG
aaaatgtaccacttacattt

SEQ ID NO: 164511 - DNA, 20 bp, Artificial Sequence
  Description of Artificial Sequence: Synthetic oligonucleotide
  Target: LAMA2; (+) strand; PAM type: NRG; PAM sequence: CAG
tacatttaagaaacaatgta

SEQ ID NO: 164512 - DNA, 20 bp, Artificial Sequence
  Description of Artificial Sequence: Synthetic oligonucleotide
  Target: LAMA2; (+) strand; PAM type: NRG; PAM sequence: AGG
acatttaagaaacaatgtac

SEQ ID NO: 164513 - DNA, 20 bp, Artificial Sequence
  Description of Artificial Sequence: Synthetic oligonucleotide
  Target: LAMA2; (+) strand; PAM type: NRG; PAM sequence: CGG
ttaagaaacaatgtacaggc

SEQ ID NO: 164514 - DNA, 20 bp, Artificial Sequence
  Description of Artificial Sequence: Synthetic oligonucleotide
  Target: LAMA2; (+) strand; PAM type: NRG; PAM sequence: GGG
taagaaacaatgtacaggcc

SEQ ID NO: 164515 - DNA, 20 bp, Artificial Sequence
  Description of Artificial Sequence: Synthetic oligonucleotide
  Target: LAMA2; (+) strand; PAM type: NRG; PAM sequence: TGG
aacaatgtacaggccgggcg

SEQ ID NO: 164516 - DNA, 20 bp, Artificial Sequence
  Description of Artificial Sequence: Synthetic oligonucleotide
  Target: LAMA2; (+) strand; PAM type: NRG; PAM sequence: TGG
aatgtacaggccgggcgtgg

SEQ ID NO: 164517 - DNA, 20 bp, Artificial Sequence
  Description of Artificial Sequence: Synthetic oligonucleotide
  Target: LAMA2; (+) strand; PAM type: NRG; PAM sequence: TGG
cgcctgtaatcccaccactt

SEQ ID NO: 164518 - DNA, 20 bp, Artificial Sequence
  Description of Artificial Sequence: Synthetic oligonucleotide
  Target: LAMA2; (+) strand; PAM type: NRG; PAM sequence: GGG
gcctgtaatcccaccacttt

SEQ ID NO: 164519 - DNA, 20 bp, Artificial Sequence
  Description of Artificial Sequence: Synthetic oligonucleotide
  Target: LAMA2; (+) strand; PAM type: NRG; PAM sequence: GAG
ctgtaatcccaccactttgg

SEQ ID NO: 164520 - DNA, 20 bp, Artificial Sequence
  Description of Artificial Sequence: Synthetic oligonucleotide
  Target: LAMA2; (+) strand; PAM type: NRG; PAM sequence: AGG
tgtaatcccaccactttggg

SEQ ID NO: 164521 - DNA, 20 bp, Artificial Sequence
  Description of Artificial Sequence: Synthetic oligonucleotide
  Target: LAMA2; (+) strand; PAM type: NRG; PAM sequence: GAG
tcccaccactttgggaggcc

SEQ ID NO: 164522 - DNA, 20 bp, Artificial Sequence
  Description of Artificial Sequence: Synthetic oligonucleotide
  Target: LAMA2; (+) strand; PAM type: NRG; PAM sequence: AGG
cccaccactttgggaggccg

SEQ ID NO: 164523 - DNA, 20 bp, Artificial Sequence
  Description of Artificial Sequence: Synthetic oligonucleotide
  Target: LAMA2; (+) strand; PAM type: NRG; PAM sequence: CGG
accactttgggaggccgagg

SEQ ID NO: 164524 - DNA, 20 bp, Artificial Sequence
  Description of Artificial Sequence: Synthetic oligonucleotide
  Target: LAMA2; (+) strand; PAM type: NRG; PAM sequence: GGG
ccactttgggaggccgaggc

SEQ ID NO: 164525 - DNA, 20 bp, Artificial Sequence
  Description of Artificial Sequence: Synthetic oligonucleotide
  Target: LAMA2; (+) strand; PAM type: NRG; PAM sequence: CGG
ctttgggaggccgaggcggg

SEQ ID NO: 164526 - DNA, 20 bp, Artificial Sequence
  Description of Artificial Sequence: Synthetic oligonucleotide
  Target: LAMA2; (+) strand; PAM type: NRG; PAM sequence: GAG
ggccgaggcgggcggatcac

SEQ ID NO: 164527 - DNA, 20 bp, Artificial Sequence
  Description of Artificial Sequence: Synthetic oligonucleotide
  Target: LAMA2; (+) strand; PAM type: NRG; PAM sequence: AGG
gccgaggcgggcggatcacg

SEQ ID NO: 164528 - DNA, 20 bp, Artificial Sequence
  Description of Artificial Sequence: Synthetic oligonucleotide
  Target: LAMA2; (+) strand; PAM type: NRG; PAM sequence: CAG
aggcgggcggatcacgaggt

SEQ ID NO: 164529 - DNA, 20 bp, Artificial Sequence
  Description of Artificial Sequence: Synthetic oligonucleotide
  Target: LAMA2; (+) strand; PAM type: NRG; PAM sequence: AGG
ggcgggcggatcacgaggtc

SEQ ID NO: 164530 - DNA, 20 bp, Artificial Sequence
  Description of Artificial Sequence: Synthetic oligonucleotide
  Target: LAMA2; (+) strand; PAM type: NRG; PAM sequence: GAG
cgggcggatcacgaggtcag

SEQ ID NO: 164531 - DNA, 20 bp, Artificial Sequence
  Description of Artificial Sequence: Synthetic oligonucleotide
  Target: LAMA2; (+) strand; PAM type: NRG; PAM sequence: GAG
gatcacgaggtcaggagatc

SEQ ID NO: 164532 - DNA, 20 bp, Artificial Sequence
  Description of Artificial Sequence: Synthetic oligonucleotide
  Target: LAMA2; (+) strand; PAM type: NRG; PAM sequence: TGG
tcaggagatcgagacaatcc

SEQ ID NO: 164533 - DNA, 20 bp, Artificial Sequence
  Description of Artificial Sequence: Synthetic oligonucleotide
  Target: LAMA2; (+) strand; PAM type: NRG; PAM sequence: CGG
cgagacaatcctggctaaca

SEQ ID NO: 164534 - DNA, 20 bp, Artificial Sequence
  Description of Artificial Sequence: Synthetic oligonucleotide
  Target: LAMA2; (+) strand; PAM type: NRG; PAM sequence: TAG
tctactaaaaatacaaaaat

SEQ ID NO: 164535 - DNA, 20 bp, Artificial Sequence
  Description of Artificial Sequence: Synthetic oligonucleotide
  Target: LAMA2; (+) strand; PAM type: NRG; PAM sequence: TGG
ctaaaaatacaaaaattagc

SEQ ID NO: 164536 - DNA, 20 bp, Artificial Sequence
  Description of Artificial Sequence: Synthetic oligonucleotide
  Target: LAMA2; (+) strand; PAM type: NRG; PAM sequence: GGG
taaaaatacaaaaattagct

SEQ ID NO: 164537 - DNA, 20 bp, Artificial Sequence
  Description of Artificial Sequence: Synthetic oligonucleotide
  Target: LAMA2; (+) strand; PAM type: NRG; PAM sequence: CGG
atacaaaaattagctgggcg

SEQ ID NO: 164538 - DNA, 20 bp, Artificial Sequence
  Description of Artificial Sequence: Synthetic oligonucleotide
  Target: LAMA2; (+) strand; PAM type: NRG; PAM sequence: TGG
caaaaattagctgggcgcgg

SEQ ID NO: 164539 - DNA, 20 bp, Artificial Sequence
  Description of Artificial Sequence: Synthetic oligonucleotide
  Target: LAMA2; (+) strand; PAM type: NRG; PAM sequence: CGG
aaattagctgggcgcggtgg

SEQ ID NO: 164540 - DNA, 20 bp, Artificial Sequence
  Description of Artificial Sequence: Synthetic oligonucleotide
  Target: LAMA2; (+) strand; PAM type: NRG; PAM sequence: GGG
aattagctgggcgcggtggc

SEQ ID NO: 164541 - DNA, 20 bp, Artificial Sequence
  Description of Artificial Sequence: Synthetic oligonucleotide
  Target: LAMA2; (+) strand; PAM type: NRG; PAM sequence: TAG
ggcgcggtggcgggcgcctg

SEQ ID NO: 164542 - DNA, 20 bp, Artificial Sequence
  Description of Artificial Sequence: Synthetic oligonucleotide
  Target: LAMA2; (+) strand; PAM type: NRG; PAM sequence: CGG
cgcctgtagtcccatctact

SEQ ID NO: 164543 - DNA, 20 bp, Artificial Sequence
  Description of Artificial Sequence: Synthetic oligonucleotide
  Target: LAMA2; (+) strand; PAM type: NRG; PAM sequence: AAG
ctgtagtcccatctactcgg

SEQ ID NO: 164544 - DNA, 20 bp, Artificial Sequence
  Description of Artificial Sequence: Synthetic oligonucleotide
  Target: LAMA2; (+) strand; PAM type: NRG; PAM sequence: AGG
tgtagtcccatctactcgga

SEQ ID NO: 164545 - DNA, 20 bp, Artificial Sequence
  Description of Artificial Sequence: Synthetic oligonucleotide
  Target: LAMA2; (+) strand; PAM type: NRG; PAM sequence: GAG
tcccatctactcggaaggct

SEQ ID NO: 164546 - DNA, 20 bp, Artificial Sequence
  Description of Artificial Sequence: Synthetic oligonucleotide
  Target: LAMA2; (+) strand; PAM type: NRG; PAM sequence: AGG
cccatctactcggaaggctg

SEQ ID NO: 164547 - DNA, 20 bp, Artificial Sequence
  Description of Artificial Sequence: Synthetic oligonucleotide
  Target: LAMA2; (+) strand; PAM type: NRG; PAM sequence: CGG
tctactcggaaggctgaggc

SEQ ID NO: 164548 - DNA, 20 bp, Artificial Sequence
  Description of Artificial Sequence: Synthetic oligonucleotide
  Target: LAMA2; (+) strand; PAM type: NRG; PAM sequence: GAG
tactcggaaggctgaggccg

SEQ ID NO: 164549 - DNA, 20 bp, Artificial Sequence
  Description of Artificial Sequence: Synthetic oligonucleotide
  Target: LAMA2; (+) strand; PAM type: NRG; PAM sequence: TGG
ggaaggctgaggccggagaa

SEQ ID NO: 164550 - DNA, 20 bp, Artificial Sequence
  Description of Artificial Sequence: Synthetic oligonucleotide
  Target: LAMA2; (+) strand; PAM type: NRG; PAM sequence: TGG
gccggagaatggtgtgaacc

SEQ ID NO: 164551 - DNA, 20 bp, Artificial Sequence
  Description of Artificial Sequence: Synthetic oligonucleotide
  Target: LAMA2; (+) strand; PAM type: NRG; PAM sequence: GGG
ccggagaatggtgtgaacct

SEQ ID NO: 164552 - DNA, 20 bp, Artificial Sequence
  Description of Artificial Sequence: Synthetic oligonucleotide
  Target: LAMA2; (+) strand; PAM type: NRG; PAM sequence: GAG
ggagaatggtgtgaacctgg

SEQ ID NO: 164553 - DNA, 20 bp, Artificial Sequence
  Description of Artificial Sequence: Synthetic oligonucleotide
  Target: LAMA2; (+) strand; PAM type: NRG; PAM sequence: AGG
gagaatggtgtgaacctggg

SEQ ID NO: 164554 - DNA, 20 bp, Artificial Sequence
  Description of Artificial Sequence: Synthetic oligonucleotide
  Target: LAMA2; (+) strand; PAM type: NRG; PAM sequence: CGG
aatggtgtgaacctgggagg

SEQ ID NO: 164555 - DNA, 20 bp, Artificial Sequence
  Description of Artificial Sequence: Synthetic oligonucleotide
  Target: LAMA2; (+) strand; PAM type: NRG; PAM sequence: GAG
tggtgtgaacctgggaggcg

SEQ ID NO: 164556 - DNA, 20 bp, Artificial Sequence
  Description of Artificial Sequence: Synthetic oligonucleotide
  Target: LAMA2; (+) strand; PAM type: NRG; PAM sequence: CAG
aacctgggaggcggagcttg

SEQ ID NO: 164557 - DNA, 20 bp, Artificial Sequence
  Description of Artificial Sequence: Synthetic oligonucleotide
  Target: LAMA2; (+) strand; PAM type: NRG; PAM sequence: GAG
tgggaggcggagcttgcagt

SEQ ID NO: 164558 - DNA, 20 bp, Artificial Sequence
  Description of Artificial Sequence: Synthetic oligonucleotide
  Target: LAMA2; (+) strand; PAM type: NRG; PAM sequence: CAG
gaggcggagcttgcagtgag

SEQ ID NO: 164559 - DNA, 20 bp, Artificial Sequence
  Description of Artificial Sequence: Synthetic oligonucleotide
  Target: LAMA2; (+) strand; PAM type: NRG; PAM sequence: GAG
ggcggagcttgcagtgagca

SEQ ID NO: 164560 - DNA, 20 bp, Artificial Sequence
  Description of Artificial Sequence: Synthetic oligonucleotide
  Target: LAMA2; (+) strand; PAM type: NRG; PAM sequence: TAG
gagcttgcagtgagcagaga

SEQ ID NO: 164561 - DNA, 20 bp, Artificial Sequence
  Description of Artificial Sequence: Synthetic oligonucleotide
  Target: LAMA2; (+) strand; PAM type: NRG; PAM sequence: TGG
gagatagcgccactgcactc

SEQ ID NO: 164562 - DNA, 20 bp, Artificial Sequence
  Description of Artificial Sequence: Synthetic oligonucleotide
  Target: LAMA2; (+) strand; PAM type: NRG; PAM sequence: TGG
agcgccactgcactctggcc

SEQ ID NO: 164563 - DNA, 20 bp, Artificial Sequence
  Description of Artificial Sequence: Synthetic oligonucleotide
  Target: LAMA2; (+) strand; PAM type: NRG; PAM sequence: GGG
gcgccactgcactctggcct

SEQ ID NO: 164564 - DNA, 20 bp, Artificial Sequence
  Description of Artificial Sequence: Synthetic oligonucleotide
  Target: LAMA2; (+) strand; PAM type: NRG; PAM sequence: AAG
ctgcactctggcctgggcga

SEQ ID NO: 164565 - DNA, 20 bp, Artificial Sequence
  Description of Artificial Sequence: Synthetic oligonucleotide
  Target: LAMA2; (+) strand; PAM type: NRG; PAM sequence: GAG
gcactctggcctgggcgaaa

SEQ ID NO: 164566 - DNA, 20 bp, Artificial Sequence
  Description of Artificial Sequence: Synthetic oligonucleotide
  Target: LAMA2; (+) strand; PAM type: NRG; PAM sequence: GAG
tctggcctgggcgaaagagc

SEQ ID NO: 164567 - DNA, 20 bp, Artificial Sequence
  Description of Artificial Sequence: Synthetic oligonucleotide
  Target: LAMA2; (+) strand; PAM type: NRG; PAM sequence: AAG
caaaaaaaaaaaaaaaaaaa

SEQ ID NO: 164568 - DNA, 20 bp, Artificial Sequence
  Description of Artificial Sequence: Synthetic oligonucleotide
  Target: LAMA2; (+) strand; PAM type: NRG; PAM sequence: TAG
aaaaaaaagtacaatacctt

SEQ ID NO: 164569 - DNA, 20 bp, Artificial Sequence
  Description of Artificial Sequence: Synthetic oligonucleotide
  Target: LAMA2; (+) strand; PAM type: NRG; PAM sequence: AAG
cttatatctatttaaaaata

SEQ ID NO: 164570 - DNA, 20 bp, Artificial Sequence
  Description of Artificial Sequence: Synthetic oligonucleotide
  Target: LAMA2; (+) strand; PAM type: NRG; PAM sequence: AAG
taaaaataaagcatttttaa

SEQ ID NO: 164571 - DNA, 20 bp, Artificial Sequence
  Description of Artificial Sequence: Synthetic oligonucleotide
  Target: LAMA2; (+) strand; PAM type: NRG; PAM sequence: GAG
atccatgaactcctaacaat

SEQ ID NO: 164572 - DNA, 20 bp, Artificial Sequence
  Description of Artificial Sequence: Synthetic oligonucleotide
  Target: LAMA2; (+) strand; PAM type: NRG; PAM sequence: AGG
tccatgaactcctaacaatg

SEQ ID NO: 164573 - DNA, 20 bp, Artificial Sequence
  Description of Artificial Sequence: Synthetic oligonucleotide
  Target: LAMA2; (+) strand; PAM type: NRG; PAM sequence: GAG
gttaactacatgtgccattt

SEQ ID NO: 164574 - DNA, 20 bp, Artificial Sequence
  Description of Artificial Sequence: Synthetic oligonucleotide
  Target: LAMA2; (+) strand; PAM type: NRG; PAM sequence: GAG
acatgtgccatttgagatgt

SEQ ID NO: 164575 - DNA, 20 bp, Artificial Sequence
  Description of Artificial Sequence: Synthetic oligonucleotide
  Target: LAMA2; (+) strand; PAM type: NRG; PAM sequence: CAG
tgagatgtgagtctaatact

SEQ ID NO: 164576 - DNA, 20 bp, Artificial Sequence
  Description of Artificial Sequence: Synthetic oligonucleotide
  Target: LAMA2; (+) strand; PAM type: NRG; PAM sequence: AAG
tttgttttaaattttttaaa

SEQ ID NO: 164577 - DNA, 20 bp, Artificial Sequence
  Description of Artificial Sequence: Synthetic oligonucleotide
  Target: LAMA2; (+) strand; PAM type: NRG; PAM sequence: GAG
tgttttaaattttttaaaaa

SEQ ID NO: 164578 - DNA, 20 bp, Artificial Sequence
  Description of Artificial Sequence: Synthetic oligonucleotide
  Target: LAMA2; (+) strand; PAM type: NRG; PAM sequence: CAG
atgctcccgttatgcattct

SEQ ID NO: 164579 - DNA, 20 bp, Artificial Sequence
  Description of Artificial Sequence: Synthetic oligonucleotide
  Target: LAMA2; (+) strand; PAM type: NRG; PAM sequence: AGG
tgctcccgttatgcattctc

SEQ ID NO: 164580 - DNA, 20 bp, Artificial Sequence
  Description of Artificial Sequence: Synthetic oligonucleotide
  Target: LAMA2; (+) strand; PAM type: NRG; PAM sequence: GGG
gctcccgttatgcattctca

SEQ ID NO: 164581 - DNA, 20 bp, Artificial Sequence
  Description of Artificial Sequence: Synthetic oligonucleotide
  Target: LAMA2; (+) strand; PAM type: NRG; PAM sequence: GAG
actttgccgttataaactct

SEQ ID NO: 164582 - DNA, 20 bp, Artificial Sequence
  Description of Artificial Sequence: Synthetic oligonucleotide
  Target: LAMA2; (+) strand; PAM type: NRG; PAM sequence: AGG
ctttgccgttataaactctg

SEQ ID NO: 164583 - DNA, 20 bp, Artificial Sequence
  Description of Artificial Sequence: Synthetic oligonucleotide
  Target: LAMA2; (+) strand; PAM type: NRG; PAM sequence: GGG
tttgccgttataaactctga

SEQ ID NO: 164584 - DNA, 20 bp, Artificial Sequence
  Description of Artificial Sequence: Synthetic oligonucleotide
  Target: LAMA2; (+) strand; PAM type: NRG; PAM sequence: CAG
gagggtctcttgtctttcct

SEQ ID NO: 164585 - DNA, 20 bp, Artificial Sequence
  Description of Artificial Sequence: Synthetic oligonucleotide
  Target: LAMA2; (+) strand; PAM type: NRG; PAM sequence: AGG
agggtctcttgtctttcctc

SEQ ID NO: 164586 - DNA, 20 bp, Artificial Sequence
  Description of Artificial Sequence: Synthetic oligonucleotide
  Target: LAMA2; (+) strand; PAM type: NRG; PAM sequence: TGG
tgtctttcctcaggtgaatg

SEQ ID NO: 164587 - DNA, 20 bp, Artificial Sequence
  Description of Artificial Sequence: Synthetic oligonucleotide
  Target: LAMA2; (+) strand; PAM type: NRG; PAM sequence: AAG
ctttcctcaggtgaatgtgg

SEQ ID NO: 164588 - DNA, 20 bp, Artificial Sequence
  Description of Artificial Sequence: Synthetic oligonucleotide
  Target: LAMA2; (+) strand; PAM type: NRG; PAM sequence: AGG
tttcctcaggtgaatgtgga

SEQ ID NO: 164589 - DNA, 20 bp, Artificial Sequence
  Description of Artificial Sequence: Synthetic oligonucleotide
  Target: LAMA2; (+) strand; PAM type: NRG; PAM sequence: CAG
gtggaaggcatccactgtga

SEQ ID NO: 164590 - DNA, 20 bp, Artificial Sequence
  Description of Artificial Sequence: Synthetic oligonucleotide
  Target: LAMA2; (+) strand; PAM type: NRG; PAM sequence: CGG
gcatccactgtgacagatgc

SEQ ID NO: 164591 - DNA, 20 bp, Artificial Sequence
  Description of Artificial Sequence: Synthetic oligonucleotide
  Target: LAMA2; (+) strand; PAM type: NRG; PAM sequence: TGG
cactgtgacagatgccggcc

SEQ ID NO: 164592 - DNA, 20 bp, Artificial Sequence
  Description of Artificial Sequence: Synthetic oligonucleotide
  Target: LAMA2; (+) strand; PAM type: NRG; PAM sequence: CGG
agatgccggcctggcaaatt

SEQ ID NO: 164593 - DNA, 20 bp, Artificial Sequence
  Description of Artificial Sequence: Synthetic oligonucleotide
  Target: LAMA2; (+) strand; PAM type: NRG; PAM sequence: AAG
gcaaattcggactcgatgcc

SEQ ID NO: 164594 - DNA, 20 bp, Artificial Sequence
  Description of Artificial Sequence: Synthetic oligonucleotide
  Target: LAMA2; (+) strand; PAM type: NRG; PAM sequence: TGG
ctcgatgccaagaatccact

SEQ ID NO: 164595 - DNA, 20 bp, Artificial Sequence
  Description of Artificial Sequence: Synthetic oligonucleotide
  Target: LAMA2; (+) strand; PAM type: NRG; PAM sequence: CAG
gccaagaatccacttggctg

SEQ ID NO: 164596 - DNA, 20 bp, Artificial Sequence
  Description of Artificial Sequence: Synthetic oligonucleotide
  Target: LAMA2; (+) strand; PAM type: NRG; PAM sequence: CAG
aagaatccacttggctgcag

SEQ ID NO: 164597 - DNA, 20 bp, Artificial Sequence
  Description of Artificial Sequence: Synthetic oligonucleotide
  Target: LAMA2; (+) strand; PAM type: NRG; PAM sequence: CGG
tgcagcagctgctattgctt

SEQ ID NO: 164598 - DNA, 20 bp, Artificial Sequence
  Description of Artificial Sequence: Synthetic oligonucleotide
  Target: LAMA2; (+) strand; PAM type: NRG; PAM sequence: CAG
attgcttcggcactactacc

SEQ ID NO: 164599 - DNA, 20 bp, Artificial Sequence
  Description of Artificial Sequence: Synthetic oligonucleotide
  Target: LAMA2; (+) strand; PAM type: NRG; PAM sequence: AAG
cactactacccagtgctctg

SEQ ID NO: 164600 - DNA, 20 bp, Artificial Sequence
  Description of Artificial Sequence: Synthetic oligonucleotide
  Target: LAMA2; (+) strand; PAM type: NRG; PAM sequence: AAG
tacccagtgctctgaagcaa

SEQ ID NO: 164601 - DNA, 20 bp, Artificial Sequence
  Description of Artificial Sequence: Synthetic oligonucleotide
  Target: LAMA2; (+) strand; PAM type: NRG; PAM sequence: AGG
acccagtgctctgaagcaaa

SEQ ID NO: 164602 - DNA, 20 bp, Artificial Sequence
  Description of Artificial Sequence: Synthetic oligonucleotide
  Target: LAMA2; (+) strand; PAM type: NRG; PAM sequence: CGG
ctgaagcaaaaggactgatc

SEQ ID NO: 164603 - DNA, 20 bp, Artificial Sequence
  Description of Artificial Sequence: Synthetic oligonucleotide
  Target: LAMA2; (+) strand; PAM type: NRG; PAM sequence: TGG
caaaaggactgatccggacg

SEQ ID NO: 164604 - DNA, 20 bp, Artificial Sequence
  Description of Artificial Sequence: Synthetic oligonucleotide
  Target: LAMA2; (+) strand; PAM type: NRG; PAM sequence: GGG
aaaaggactgatccggacgt

SEQ ID NO: 164605 - DNA, 20 bp, Artificial Sequence
  Description of Artificial Sequence: Synthetic oligonucleotide
  Target: LAMA2; (+) strand; PAM type: NRG; PAM sequence: GAG
ggactgatccggacgtgggt

SEQ ID NO: 164606 - DNA, 20 bp, Artificial Sequence
  Description of Artificial Sequence: Synthetic oligonucleotide
  Target: LAMA2; (+) strand; PAM type: NRG; PAM sequence: TAG
ctgatccggacgtgggtgag

SEQ ID NO: 164607 - DNA, 20 bp, Artificial Sequence
  Description of Artificial Sequence: Synthetic oligonucleotide
  Target: LAMA2; (+) strand; PAM type: NRG; PAM sequence: AGG
tgatccggacgtgggtgagt

SEQ ID NO: 164608 - DNA, 20 bp, Artificial Sequence
  Description of Artificial Sequence: Synthetic oligonucleotide
  Target: LAMA2; (+) strand; PAM type: NRG; PAM sequence: GGG
gatccggacgtgggtgagta

SEQ ID NO: 164609 - DNA, 20 bp, Artificial Sequence
  Description of Artificial Sequence: Synthetic oligonucleotide
  Target: LAMA2; (+) strand; PAM type: NRG; PAM sequence: GAG
tgggtgagtagggaactgct

SEQ ID NO: 164610 - DNA, 20 bp, Artificial Sequence
  Description of Artificial Sequence: Synthetic oligonucleotide
  Target: LAMA2; (+) strand; PAM type: NRG; PAM sequence: TGG
ggaactgctgagccatgtaa

SEQ ID NO: 164611 - DNA, 20 bp, Artificial Sequence
  Description of Artificial Sequence: Synthetic oligonucleotide
  Target: LAMA2; (+) strand; PAM type: NRG; PAM sequence: TAG
gccatgtaatggtataatgt

SEQ ID NO: 164612 - DNA, 20 bp, Artificial Sequence
  Description of Artificial Sequence: Synthetic oligonucleotide
  Target: LAMA2; (+) strand; PAM type: NRG; PAM sequence: TGG
ggtataatgttagttcctgc

SEQ ID NO: 164613 - DNA, 20 bp, Artificial Sequence
  Description of Artificial Sequence: Synthetic oligonucleotide
  Target: LAMA2; (+) strand; PAM type: NRG; PAM sequence: TAG
tagttcctgctggtgtcttt

SEQ ID NO: 164614 - DNA, 20 bp, Artificial Sequence
  Description of Artificial Sequence: Synthetic oligonucleotide
  Target: LAMA2; (+) strand; PAM type: NRG; PAM sequence: CAG
tcctgctggtgtcttttagt

SEQ ID NO: 164615 - DNA, 20 bp, Artificial Sequence
  Description of Artificial Sequence: Synthetic oligonucleotide
  Target: LAMA2; (+) strand; PAM type: NRG; PAM sequence: AGG
cctgctggtgtcttttagtc

SEQ ID NO: 164616 - DNA, 20 bp, Artificial Sequence
  Description of Artificial Sequence: Synthetic oligonucleotide
  Target: LAMA2; (+) strand; PAM type: NRG; PAM sequence: GAG
gtgtcttttagtcaggcact

SEQ ID NO: 164617 - DNA, 20 bp, Artificial Sequence
  Description of Artificial Sequence: Synthetic oligonucleotide
  Target: LAMA2; (+) strand; PAM type: NRG; PAM sequence: AGG
tgtcttttagtcaggcactg

SEQ ID NO: 164618 - DNA, 20 bp, Artificial Sequence
  Description of Artificial Sequence: Synthetic oligonucleotide
  Target: LAMA2; (+) strand; PAM type: NRG; PAM sequence: GGG
gtcttttagtcaggcactga

SEQ ID NO: 164619 - DNA, 20 bp, Artificial Sequence
  Description of Artificial Sequence: Synthetic oligonucleotide
  Target: LAMA2; (+) strand; PAM type: NRG; PAM sequence: GGG
tcttttagtcaggcactgag

SEQ ID NO: 164620 - DNA, 20 bp, Artificial Sequence
  Description of Artificial Sequence: Synthetic oligonucleotide
  Target: LAMA2; (+) strand; PAM type: NRG; PAM sequence: TAG
tttagtcaggcactgagggg

SEQ ID NO: 164621 - DNA, 20 bp, Artificial Sequence
  Description of Artificial Sequence: Synthetic oligonucleotide
  Target: LAMA2; (+) strand; PAM type: NRG; PAM sequence: TAG
agtcaggcactgaggggtag

SEQ ID NO: 164622 - DNA, 20 bp, Artificial Sequence
  Description of Artificial Sequence: Synthetic oligonucleotide
  Target: LAMA2; (+) strand; PAM type: NRG; PAM sequence: TGG
cactgaggggtagtagaaaa

SEQ ID NO: 164623 - DNA, 20 bp, Artificial Sequence
  Description of Artificial Sequence: Synthetic oligonucleotide
  Target: LAMA2; (+) strand; PAM type: NRG; PAM sequence: AAG
tagaaaatggcaaaacattt

SEQ ID NO: 164624 - DNA, 20 bp, Artificial Sequence
  Description of Artificial Sequence: Synthetic oligonucleotide
  Target: LAMA2; (+) strand; PAM type: NRG; PAM sequence: TAG
ccttttcctctgtgaacatt

SEQ ID NO: 164625 - DNA, 20 bp, Artificial Sequence
  Description of Artificial Sequence: Synthetic oligonucleotide
  Target: LAMA2; (+) strand; PAM type: NRG; PAM sequence: AGG
cttttcctctgtgaacattt

SEQ ID NO: 164626 - DNA, 20 bp, Artificial Sequence
  Description of Artificial Sequence: Synthetic oligonucleotide
  Target: LAMA2; (+) strand; PAM type: NRG; PAM sequence: CAG
cctctgtgaacatttaggaa

SEQ ID NO: 164627 - DNA, 20 bp, Artificial Sequence
  Description of Artificial Sequence: Synthetic oligonucleotide
  Target: LAMA2; (+) strand; PAM type: NRG; PAM sequence: AAG
gtgaacatttaggaacagca

SEQ ID NO: 164628 - DNA, 20 bp, Artificial Sequence
  Description of Artificial Sequence: Synthetic oligonucleotide
  Target: LAMA2; (+) strand; PAM type: NRG; PAM sequence: AGG
tgaacatttaggaacagcaa

SEQ ID NO: 164629 - DNA, 20 bp, Artificial Sequence
  Description of Artificial Sequence: Synthetic oligonucleotide
  Target: LAMA2; (+) strand; PAM type: NRG; PAM sequence: GGG
gaacatttaggaacagcaaa

SEQ ID NO: 164630 - DNA, 20 bp, Artificial Sequence
  Description of Artificial Sequence: Synthetic oligonucleotide
  Target: LAMA2; (+) strand; PAM type: NRG; PAM sequence: GGG
aacatttaggaacagcaaag

SEQ ID NO: 164631 - DNA, 20 bp, Artificial Sequence
  Description of Artificial Sequence: Synthetic oligonucleotide
  Target: LAMA2; (+) strand; PAM type: NRG; PAM sequence: TAG
gcaaaggggtcacgtgccat

SEQ ID NO: 164632 - DNA, 20 bp, Artificial Sequence
  Description of Artificial Sequence: Synthetic oligonucleotide
  Target: LAMA2; (+) strand; PAM type: NRG; PAM sequence: GAG
aaaggggtcacgtgccatta

SEQ ID NO: 164633 - DNA, 20 bp, Artificial Sequence
  Description of Artificial Sequence: Synthetic oligonucleotide
  Target: LAMA2; (+) strand; PAM type: NRG; PAM sequence: GAG
aggggtcacgtgccattaga

SEQ ID NO: 164634 - DNA, 20 bp, Artificial Sequence
  Description of Artificial Sequence: Synthetic oligonucleotide
  Target: LAMA2; (+) strand; PAM type: NRG; PAM sequence: TGG
gtcacgtgccattagagagt

SEQ ID NO: 164635 - DNA, 20 bp, Artificial Sequence
  Description of Artificial Sequence: Synthetic oligonucleotide
  Target: LAMA2; (+) strand; PAM type: NRG; PAM sequence: GAG
cacgtgccattagagagttg

SEQ ID NO: 164636 - DNA, 20 bp, Artificial Sequence
  Description of Artificial Sequence: Synthetic oligonucleotide
  Target: LAMA2; (+) strand; PAM type: NRG; PAM sequence: AAG
cctttcttatttgttcttaa

SEQ ID NO: 164637 - DNA, 20 bp, Artificial Sequence
  Description of Artificial Sequence: Synthetic oligonucleotide
  Target: LAMA2; (+) strand; PAM type: NRG; PAM sequence: TAG
ttcttatttgttcttaaaag

SEQ ID NO: 164638 - DNA, 20 bp, Artificial Sequence
  Description of Artificial Sequence: Synthetic oligonucleotide
  Target: LAMA2; (+) strand; PAM type: NRG; PAM sequence: AAG
aaagtagttcacttattgat

SEQ ID NO: 164639 - DNA, 20 bp, Artificial Sequence
  Description of Artificial Sequence: Synthetic oligonucleotide
  Target: LAMA2; (+) strand; PAM type: NRG; PAM sequence: AGG
aagtagttcacttattgata

SEQ ID NO: 164640 - DNA, 20 bp, Artificial Sequence
  Description of Artificial Sequence: Synthetic oligonucleotide
  Target: LAMA2; (+) strand; PAM type: NRG; PAM sequence: TAG
ttcacttattgataaggaaa

SEQ ID NO: 164641 - DNA, 20 bp, Artificial Sequence
  Description of Artificial Sequence: Synthetic oligonucleotide
  Target: LAMA2; (+) strand; PAM type: NRG; PAM sequence: AAG
ttgataaggaaatagatgcc

SEQ ID NO: 164642 - DNA, 20 bp, Artificial Sequence
  Description of Artificial Sequence: Synthetic oligonucleotide
  Target: LAMA2; (+) strand; PAM type: NRG; PAM sequence: AAG
gaaatagatgccaagtgaaa

SEQ ID NO: 164643 - DNA, 20 bp, Artificial Sequence
  Description of Artificial Sequence: Synthetic oligonucleotide
  Target: LAMA2; (+) strand; PAM type: NRG; PAM sequence: GAG
aatagatgccaagtgaaaaa

SEQ ID NO: 164644 - DNA, 20 bp, Artificial Sequence
  Description of Artificial Sequence: Synthetic oligonucleotide
  Target: LAMA2; (+) strand; PAM type: NRG; PAM sequence: AGG
atagatgccaagtgaaaaag

SEQ ID NO: 164645 - DNA, 20 bp, Artificial Sequence
  Description of Artificial Sequence: Synthetic oligonucleotide
  Target: LAMA2; (+) strand; PAM type: NRG; PAM sequence: CGG
tgaaaaagaggaaccttgtc

SEQ ID NO: 164646 - DNA, 20 bp, Artificial Sequence
  Description of Artificial Sequence: Synthetic oligonucleotide
  Target: LAMA2; (+) strand; PAM type: NRG; PAM sequence: GGG
gaaaaagaggaaccttgtcc

SEQ ID NO: 164647 - DNA, 20 bp, Artificial Sequence
  Description of Artificial Sequence: Synthetic oligonucleotide
  Target: LAMA2; (+) strand; PAM type: NRG; PAM sequence: AAG
aaagaggaaccttgtccggg

SEQ ID NO: 164648 - DNA, 20 bp, Artificial Sequence
  Description of Artificial Sequence: Synthetic oligonucleotide
  Target: LAMA2; (+) strand; PAM type: NRG; PAM sequence: GAG
tccgggaagcattatgtttt

SEQ ID NO: 164649 - DNA, 20 bp, Artificial Sequence
  Description of Artificial Sequence: Synthetic oligonucleotide
  Target: LAMA2; (+) strand; PAM type: NRG; PAM sequence: TGG
ggaagcattatgttttgaga

SEQ ID NO: 164650 - DNA, 20 bp, Artificial Sequence
  Description of Artificial Sequence: Synthetic oligonucleotide
  Target: LAMA2; (+) strand; PAM type: NRG; PAM sequence: GGG
gaagcattatgttttgagat

SEQ ID NO: 164651 - DNA, 20 bp, Artificial Sequence
  Description of Artificial Sequence: Synthetic oligonucleotide
  Target: LAMA2; (+) strand; PAM type: NRG; PAM sequence: AAG
gcattatgttttgagatggg

SEQ ID NO: 164652 - DNA, 20 bp, Artificial Sequence
  Description of Artificial Sequence: Synthetic oligonucleotide
  Target: LAMA2; (+) strand; PAM type: NRG; PAM sequence: GAG
attatgttttgagatgggaa

SEQ ID NO: 164653 - DNA, 20 bp, Artificial Sequence
  Description of Artificial Sequence: Synthetic oligonucleotide
  Target: LAMA2; (+) strand; PAM type: NRG; PAM sequence: GAG
tgttttgagatgggaagagt

SEQ ID NO: 164654 - DNA, 20 bp, Artificial Sequence
  Description of Artificial Sequence: Synthetic oligonucleotide
  Target: LAMA2; (+) strand; PAM type: NRG; PAM sequence: AGG
gttttgagatgggaagagtg

SEQ ID NO: 164655 - DNA, 20 bp, Artificial Sequence
  Description of Artificial Sequence: Synthetic oligonucleotide
  Target: LAMA2; (+) strand; PAM type: NRG; PAM sequence: GGG
ttttgagatgggaagagtga

SEQ ID NO: 164656 - DNA, 20 bp, Artificial Sequence
  Description of Artificial Sequence: Synthetic oligonucleotide
  Target: LAMA2; (+) strand; PAM type: NRG; PAM sequence: CAG
gatgggaagagtgagggcac

SEQ ID NO: 164657 - DNA, 20 bp, Artificial Sequence
  Description of Artificial Sequence: Synthetic oligonucleotide
  Target: LAMA2; (+) strand; PAM type: NRG; PAM sequence: GAG
tgggaagagtgagggcacca

SEQ ID NO: 164658 - DNA, 20 bp, Artificial Sequence
  Description of Artificial Sequence: Synthetic oligonucleotide
  Target: LAMA2; (+) strand; PAM type: NRG; PAM sequence: GAG
cagagcatgaatgttgatat

SEQ ID NO: 164659 - DNA, 20 bp, Artificial Sequence
  Description of Artificial Sequence: Synthetic oligonucleotide
  Target: LAMA2; (+) strand; PAM type: NRG; PAM sequence: GAG
atatgagctaacacaccaat

SEQ ID NO: 164660 - DNA, 20 bp, Artificial Sequence
  Description of Artificial Sequence: Synthetic oligonucleotide
  Target: LAMA2; (+) strand; PAM type: NRG; PAM sequence: CAG
gctaacacaccaatgagaac

SEQ ID NO: 164661 - DNA, 20 bp, Artificial Sequence
  Description of Artificial Sequence: Synthetic oligonucleotide
  Target: LAMA2; (+) strand; PAM type: NRG; PAM sequence: AGG
ctaacacaccaatgagaacc

SEQ ID NO: 164662 - DNA, 20 bp, Artificial Sequence
  Description of Artificial Sequence: Synthetic oligonucleotide
  Target: LAMA2; (+) strand; PAM type: NRG; PAM sequence: TAG
acattcattccaaccaacct

SEQ ID NO: 164663 - DNA, 20 bp, Artificial Sequence
  Description of Artificial Sequence: Synthetic oligonucleotide
  Target: LAMA2; (+) strand; PAM type: NRG; PAM sequence: AGG
cattcattccaaccaacctt

SEQ ID NO: 164664 - DNA, 20 bp, Artificial Sequence
  Description of Artificial Sequence: Synthetic oligonucleotide
  Target: LAMA2; (+) strand; PAM type: NRG; PAM sequence: TGG
ccttaggcaatcatgatttt

SEQ ID NO: 164665 - DNA, 20 bp, Artificial Sequence
  Description of Artificial Sequence: Synthetic oligonucleotide
  Target: LAMA2; (+) strand; PAM type: NRG; PAM sequence: GAG
ttaggcaatcatgatttttg

SEQ ID NO: 164666 - DNA, 20 bp, Artificial Sequence
  Description of Artificial Sequence: Synthetic oligonucleotide
  Target: LAMA2; (+) strand; PAM type: NRG; PAM sequence: TAG
cctttaactctttctacatt

SEQ ID NO: 164667 - DNA, 20 bp, Artificial Sequence
  Description of Artificial Sequence: Synthetic oligonucleotide
  Target: LAMA2; (+) strand; PAM type: NRG; PAM sequence: TAG
catttagattcaatttgtgt

SEQ ID NO: 164668 - DNA, 20 bp, Artificial Sequence
  Description of Artificial Sequence: Synthetic oligonucleotide
  Target: LAMA2; (+) strand; PAM type: NRG; PAM sequence: AAG
ttcaatttgtgttagtgtga

SEQ ID NO: 164669 - DNA, 20 bp, Artificial Sequence
  Description of Artificial Sequence: Synthetic oligonucleotide
  Target: LAMA2; (+) strand; PAM type: NRG; PAM sequence: AGG
tcaatttgtgttagtgtgaa

SEQ ID NO: 164670 - DNA, 20 bp, Artificial Sequence
  Description of Artificial Sequence: Synthetic oligonucleotide
  Target: LAMA2; (+) strand; PAM type: NRG; PAM sequence: CAG
tgtgttagtgtgaaaggctc

SEQ ID NO: 164671 - DNA, 20 bp, Artificial Sequence
  Description of Artificial Sequence: Synthetic oligonucleotide
  Target: LAMA2; (+) strand; PAM type: NRG; PAM sequence: CAG
gtgaaaggctccagtgtcca

SEQ ID NO: 164672 - DNA, 20 bp, Artificial Sequence
  Description of Artificial Sequence: Synthetic oligonucleotide
  Target: LAMA2; (+) strand; PAM type: NRG; PAM sequence: TGG
tccagtgtccacagatattg

SEQ ID NO: 164673 - DNA, 20 bp, Artificial Sequence
  Description of Artificial Sequence: Synthetic oligonucleotide
  Target: LAMA2; (+) strand; PAM type: NRG; PAM sequence: TAG
gtggctttcactatgtgaat

SEQ ID NO: 164674 - DNA, 20 bp, Artificial Sequence
  Description of Artificial Sequence: Synthetic oligonucleotide
  Target: LAMA2; (+) strand; PAM type: NRG; PAM sequence: AAG
cactatgtgaattagtcaaa

SEQ ID NO: 164675 - DNA, 20 bp, Artificial Sequence
  Description of Artificial Sequence: Synthetic oligonucleotide
  Target: LAMA2; (+) strand; PAM type: NRG; PAM sequence: GAG
catgcttgcccactgcgtgt

SEQ ID NO: 164676 - DNA, 20 bp, Artificial Sequence
  Description of Artificial Sequence: Synthetic oligonucleotide
  Target: LAMA2; (+) strand; PAM type: NRG; PAM sequence: GAG
gtgtgagttctgttgcttgt

SEQ ID NO: 164677 - DNA, 20 bp, Artificial Sequence
  Description of Artificial Sequence: Synthetic oligonucleotide
  Target: LAMA2; (+) strand; PAM type: NRG; PAM sequence: CAG
gttgcttgtgagaacatcat

SEQ ID NO: 164678 - DNA, 20 bp, Artificial Sequence
  Description of Artificial Sequence: Synthetic oligonucleotide
  Target: LAMA2; (+) strand; PAM type: NRG; PAM sequence: TGG
ttgtgagaacatcatcagaa

SEQ ID NO: 164679 - DNA, 20 bp, Artificial Sequence
  Description of Artificial Sequence: Synthetic oligonucleotide
  Target: LAMA2; (+) strand; PAM type: NRG; PAM sequence: GGG
tgtgagaacatcatcagaat

SEQ ID NO: 164680 - DNA, 20 bp, Artificial Sequence
  Description of Artificial Sequence: Synthetic oligonucleotide
  Target: LAMA2; (+) strand; PAM type: NRG; PAM sequence: TAG
gaacatcatcagaatgggta

SEQ ID NO: 164681 - DNA, 20 bp, Artificial Sequence
  Description of Artificial Sequence: Synthetic oligonucleotide
  Target: LAMA2; (+) strand; PAM type: NRG; PAM sequence: AGG
aacatcatcagaatgggtat

SEQ ID NO: 164682 - DNA, 20 bp, Artificial Sequence
  Description of Artificial Sequence: Synthetic oligonucleotide
  Target: LAMA2; (+) strand; PAM type: NRG; PAM sequence: CAG
cagaatgggtataggaactg

SEQ ID NO: 164683 - DNA, 20 bp, Artificial Sequence
  Description of Artificial Sequence: Synthetic oligonucleotide
  Target: LAMA2; (+) strand; PAM type: NRG; PAM sequence: TAG
atgggtataggaactgcaga

SEQ ID NO: 164684 - DNA, 20 bp, Artificial Sequence
  Description of Artificial Sequence: Synthetic oligonucleotide
  Target: LAMA2; (+) strand; PAM type: NRG; PAM sequence: CAG
aggaactgcagatagacatg

SEQ ID NO: 164685 - DNA, 20 bp, Artificial Sequence
  Description of Artificial Sequence: Synthetic oligonucleotide
  Target: LAMA2; (+) strand; PAM type: NRG; PAM sequence: TAG
tagacatgcagttcgtaact

SEQ ID NO: 164686 - DNA, 20 bp, Artificial Sequence
  Description of Artificial Sequence: Synthetic oligonucleotide
  Target: LAMA2; (+) strand; PAM type: NRG; PAM sequence: AAG
cagttcgtaacttagtttta

SEQ ID NO: 164687 - DNA, 20 bp, Artificial Sequence
  Description of Artificial Sequence: Synthetic oligonucleotide
  Target: LAMA2; (+) strand; PAM type: NRG; PAM sequence: AAG
tagttttaaagaaatgtcca

SEQ ID NO: 164688 - DNA, 20 bp, Artificial Sequence
  Description of Artificial Sequence: Synthetic oligonucleotide
  Target: LAMA2; (+) strand; PAM type: NRG; PAM sequence: CAG
aaatgtccaaagcgtaaatt

SEQ ID NO: 164689 - DNA, 20 bp, Artificial Sequence
  Description of Artificial Sequence: Synthetic oligonucleotide
  Target: LAMA2; (+) strand; PAM type: NRG; PAM sequence: CAG
tgctgtattttgaccccttg

SEQ ID NO: 164690 - DNA, 20 bp, Artificial Sequence
  Description of Artificial Sequence: Synthetic oligonucleotide
  Target: LAMA2; (+) strand; PAM type: NRG; PAM sequence: AGG
gctgtattttgaccccttgc

SEQ ID NO: 164691 - DNA, 20 bp, Artificial Sequence
  Description of Artificial Sequence: Synthetic oligonucleotide
  Target: LAMA2; (+) strand; PAM type: NRG; PAM sequence: AAG
accccttgcaggtgactctg

SEQ ID NO: 164692 - DNA, 20 bp, Artificial Sequence
  Description of Artificial Sequence: Synthetic oligonucleotide
  Target: LAMA2; (+) strand; PAM type: NRG; PAM sequence: AGG
ccccttgcaggtgactctga

SEQ ID NO: 164693 - DNA, 20 bp, Artificial Sequence
  Description of Artificial Sequence: Synthetic oligonucleotide
  Target: LAMA2; (+) strand; PAM type: NRG; PAM sequence: GAG
tgcaggtgactctgaaggct

SEQ ID NO: 164694 - DNA, 20 bp, Artificial Sequence
  Description of Artificial Sequence: Synthetic oligonucleotide
  Target: LAMA2; (+) strand; PAM type: NRG; PAM sequence: CAG
aggtgactctgaaggctgag

SEQ ID NO: 164695 - DNA, 20 bp, Artificial Sequence
  Description of Artificial Sequence: Synthetic oligonucleotide
  Target: LAMA2; (+) strand; PAM type: NRG; PAM sequence: TGG
tgagcagaccattctacccc

SEQ ID NO: 164696 - DNA, 20 bp, Artificial Sequence
  Description of Artificial Sequence: Synthetic oligonucleotide
  Target: LAMA2; (+) strand; PAM type: NRG; PAM sequence: TAG
gcagaccattctacccctgg

SEQ ID NO: 164697 - DNA, 20 bp, Artificial Sequence
  Description of Artificial Sequence: Synthetic oligonucleotide
  Target: LAMA2; (+) strand; PAM type: NRG; PAM sequence: GAG
ccattctacccctggtagat

SEQ ID NO: 164698 - DNA, 20 bp, Artificial Sequence
  Description of Artificial Sequence: Synthetic oligonucleotide
  Target: LAMA2; (+) strand; PAM type: NRG; PAM sequence: AGG
cattctacccctggtagatg

SEQ ID NO: 164699 - DNA, 20 bp, Artificial Sequence
  Description of Artificial Sequence: Synthetic oligonucleotide
  Target: LAMA2; (+) strand; PAM type: NRG; PAM sequence: CAG
ccctggtagatgaggctctg

SEQ ID NO: 164700 - DNA, 20 bp, Artificial Sequence
  Description of Artificial Sequence: Synthetic oligonucleotide
  Target: LAMA2; (+) strand; PAM type: NRG; PAM sequence: AAG
ctctgcagcacacgaccacc

SEQ ID NO: 164701 - DNA, 20 bp, Artificial Sequence
  Description of Artificial Sequence: Synthetic oligonucleotide
  Target: LAMA2; (+) strand; PAM type: NRG; PAM sequence: AGG
tctgcagcacacgaccacca

SEQ ID NO: 164702 - DNA, 20 bp, Artificial Sequence
  Description of Artificial Sequence: Synthetic oligonucleotide
  Target: LAMA2; (+) strand; PAM type: NRG; PAM sequence: GGG
ctgcagcacacgaccaccaa

SEQ ID NO: 164703 - DNA, 20 bp, Artificial Sequence
  Description of Artificial Sequence: Synthetic oligonucleotide
  Target: LAMA2; (+) strand; PAM type: NRG; PAM sequence: CAG
gggcattgtttttcaacatc

SEQ ID NO: 164704 - DNA, 20 bp, Artificial Sequence
  Description of Artificial Sequence: Synthetic oligonucleotide
  Target: LAMA2; (+) strand; PAM type: NRG; PAM sequence: GAG
gcattgtttttcaacatcca

SEQ ID NO: 164705 - DNA, 20 bp, Artificial Sequence
  Description of Artificial Sequence: Synthetic oligonucleotide
  Target: LAMA2; (+) strand; PAM type: NRG; PAM sequence: TGG
tccagagattgttgcccaca

SEQ ID NO: 164706 - DNA, 20 bp, Artificial Sequence
  Description of Artificial Sequence: Synthetic oligonucleotide
  Target: LAMA2; (+) strand; PAM type: NRG; PAM sequence: GAG
gttgcccacatggacctgat

SEQ ID NO: 164707 - DNA, 20 bp, Artificial Sequence
  Description of Artificial Sequence: Synthetic oligonucleotide
  Target: LAMA2; (+) strand; PAM type: NRG; PAM sequence: GAG
tgcccacatggacctgatga

SEQ ID NO: 164708 - DNA, 20 bp, Artificial Sequence
  Description of Artificial Sequence: Synthetic oligonucleotide
  Target: LAMA2; (+) strand; PAM type: NRG; PAM sequence: AAG
ccacatggacctgatgagag

SEQ ID NO: 164709 - DNA, 20 bp, Artificial Sequence
  Description of Artificial Sequence: Synthetic oligonucleotide
  Target: LAMA2; (+) strand; PAM type: NRG; PAM sequence: TGG
gatgagagaagatctccatt

SEQ ID NO: 164710 - DNA, 20 bp, Artificial Sequence
  Description of Artificial Sequence: Synthetic oligonucleotide
  Target: LAMA2; (+) strand; PAM type: NRG; PAM sequence: TGG
tccatttggaacctttttat

SEQ ID NO: 164711 - DNA, 20 bp, Artificial Sequence
  Description of Artificial Sequence: Synthetic oligonucleotide
  Target: LAMA2; (+) strand; PAM type: NRG; PAM sequence: CAG
acctttttattggaaacttc

SEQ ID NO: 164712 - DNA, 20 bp, Artificial Sequence
  Description of Artificial Sequence: Synthetic oligonucleotide
  Target: LAMA2; (+) strand; PAM type: NRG; PAM sequence: AAG
gaaacttccagaacaatttg

SEQ ID NO: 164713 - DNA, 20 bp, Artificial Sequence
  Description of Artificial Sequence: Synthetic oligonucleotide
  Target: LAMA2; (+) strand; PAM type: NRG; PAM sequence: AGG
aaacttccagaacaatttga

SEQ ID NO: 164714 - DNA, 20 bp, Artificial Sequence
  Description of Artificial Sequence: Synthetic oligonucleotide
  Target: LAMA2; (+) strand; PAM type: NRG; PAM sequence: AAG
ttccagaacaatttgaagga

SEQ ID NO: 164715 - DNA, 20 bp, Artificial Sequence
  Description of Artificial Sequence: Synthetic oligonucleotide
  Target: LAMA2; (+) strand; PAM type: NRG; PAM sequence: AAG
cagaacaatttgaaggaaag

SEQ ID NO: 164716 - DNA, 20 bp, Artificial Sequence
  Description of Artificial Sequence: Synthetic oligonucleotide
  Target: LAMA2; (+) strand; PAM type: NRG; PAM sequence: AGG
agaacaatttgaaggaaaga

SEQ ID NO: 164717 - DNA, 20 bp, Artificial Sequence
  Description of Artificial Sequence: Synthetic oligonucleotide
  Target: LAMA2; (+) strand; PAM type: NRG; PAM sequence: AAG
caatttgaaggaaagaaggt

SEQ ID NO: 164718 - DNA, 20 bp, Artificial Sequence
  Description of Artificial Sequence: Synthetic oligonucleotide
  Target: LAMA2; (+) strand; PAM type: NRG; PAM sequence: AAG
gaaggaaagaaggtaagcac

SEQ ID NO: 164719 - DNA, 20 bp, Artificial Sequence
  Description of Artificial Sequence: Synthetic oligonucleotide
  Target: LAMA2; (+) strand; PAM type: NRG; PAM sequence: AAG
agcacaagaactttaatgtc

SEQ ID NO: 164720 - DNA, 20 bp, Artificial Sequence
  Description of Artificial Sequence: Synthetic oligonucleotide
  Target: LAMA2; (+) strand; PAM type: NRG; PAM sequence: GAG
caagaactttaatgtcaagt

SEQ ID NO: 164721 - DNA, 20 bp, Artificial Sequence
  Description of Artificial Sequence: Synthetic oligonucleotide
  Target: LAMA2; (+) strand; PAM type: NRG; PAM sequence: AAG
ctttaatgtcaagtgagaac

SEQ ID NO: 164722 - DNA, 20 bp, Artificial Sequence
  Description of Artificial Sequence: Synthetic oligonucleotide
  Target: LAMA2; (+) strand; PAM type: NRG; PAM sequence: TAG
agaacaagataaaatctttt

SEQ ID NO: 164723 - DNA, 20 bp, Artificial Sequence
  Description of Artificial Sequence: Synthetic oligonucleotide
  Target: LAMA2; (+) strand; PAM type: NRG; PAM sequence: TGG
ctttttagaatcacaccatt

SEQ ID NO: 164724 - DNA, 20 bp, Artificial Sequence
  Description of Artificial Sequence: Synthetic oligonucleotide
  Target: LAMA2; (+) strand; PAM type: NRG; PAM sequence: GAG
ttttagaatcacaccatttg

SEQ ID NO: 164725 - DNA, 20 bp, Artificial Sequence
  Description of Artificial Sequence: Synthetic oligonucleotide
  Target: LAMA2; (+) strand; PAM type: NRG; PAM sequence: CAG
cattcttctttttattttgt

SEQ ID NO: 164726 - DNA, 20 bp, Artificial Sequence
  Description of Artificial Sequence: Synthetic oligonucleotide
  Target: LAMA2; (+) strand; PAM type: NRG; PAM sequence: TGG
ctttttattttgtcagttga

SEQ ID NO: 164727 - DNA, 20 bp, Artificial Sequence
  Description of Artificial Sequence: Synthetic oligonucleotide
  Target: LAMA2; (+) strand; PAM type: NRG; PAM sequence: TGG
ttttgtcagttgatggccta

SEQ ID NO: 164728 - DNA, 20 bp, Artificial Sequence
  Description of Artificial Sequence: Synthetic oligonucleotide
  Target: LAMA2; (+) strand; PAM type: NRG; PAM sequence: GGG
tttgtcagttgatggcctat

SEQ ID NO: 164729 - DNA, 20 bp, Artificial Sequence
  Description of Artificial Sequence: Synthetic oligonucleotide
  Target: LAMA2; (+) strand; PAM type: NRG; PAM sequence: GGG
ttgtcagttgatggcctatg

SEQ ID NO: 164730 - DNA, 20 bp, Artificial Sequence
  Description of Artificial Sequence: Synthetic oligonucleotide
  Target: LAMA2; (+) strand; PAM type: NRG; PAM sequence: GGG
tgtcagttgatggcctatgg

SEQ ID NO: 164731 - DNA, 20 bp, Artificial Sequence
  Description of Artificial Sequence: Synthetic oligonucleotide
  Target: LAMA2; (+) strand; PAM type: NRG; PAM sequence: AAG
tggcctatgggggcaaactc

SEQ ID NO: 164732 - DNA, 20 bp, Artificial Sequence
  Description of Artificial Sequence: Synthetic oligonucleotide
  Target: LAMA2; (+) strand; PAM type: NRG; PAM sequence: GAG
tcaagtatgcaatctatttc

SEQ ID NO: 164733 - DNA, 20 bp, Artificial Sequence
  Description of Artificial Sequence: Synthetic oligonucleotide
  Target: LAMA2; (+) strand; PAM type: NRG; PAM sequence: AGG
caagtatgcaatctatttcg

SEQ ID NO: 164734 - DNA, 20 bp, Artificial Sequence
  Description of Artificial Sequence: Synthetic oligonucleotide
  Target: LAMA2; (+) strand; PAM type: NRG; PAM sequence: CGG
atgcaatctatttcgaggct

SEQ ID NO: 164735 - DNA, 20 bp, Artificial Sequence
  Description of Artificial Sequence: Synthetic oligonucleotide
  Target: LAMA2; (+) strand; PAM type: NRG; PAM sequence: GGG
tgcaatctatttcgaggctc

SEQ ID NO: 164736 - DNA, 20 bp, Artificial Sequence
  Description of Artificial Sequence: Synthetic oligonucleotide
  Target: LAMA2; (+) strand; PAM type: NRG; PAM sequence: AAG
aatctatttcgaggctcggg

SEQ ID NO: 164737 - DNA, 20 bp, Artificial Sequence
  Description of Artificial Sequence: Synthetic oligonucleotide
  Target: LAMA2; (+) strand; PAM type: NRG; PAM sequence: CAG
tttcgaggctcgggaagaaa

SEQ ID NO: 164738 - DNA, 20 bp, Artificial Sequence
  Description of Artificial Sequence: Synthetic oligonucleotide
  Target: LAMA2; (+) strand; PAM type: NRG; PAM sequence: AGG
ttcgaggctcgggaagaaac

SEQ ID NO: 164739 - DNA, 20 bp, Artificial Sequence
  Description of Artificial Sequence: Synthetic oligonucleotide
  Target: LAMA2; (+) strand; PAM type: NRG; PAM sequence: AAG
tttctctacatataatcctc

SEQ ID NO: 164740 - DNA, 20 bp, Artificial Sequence
  Description of Artificial Sequence: Synthetic oligonucleotide
  Target: LAMA2; (+) strand; PAM type: NRG; PAM sequence: GAG
taatcctcaagtgatcattc

SEQ ID NO: 164741 - DNA, 20 bp, Artificial Sequence
  Description of Artificial Sequence: Synthetic oligonucleotide
  Target: LAMA2; (+) strand; PAM type: NRG; PAM sequence: AGG
aatcctcaagtgatcattcg

SEQ ID NO: 164742 - DNA, 20 bp, Artificial Sequence
  Description of Artificial Sequence: Synthetic oligonucleotide
  Target: LAMA2; (+) strand; PAM type: NRG; PAM sequence: TGG
cctcaagtgatcattcgagg

SEQ ID NO: 164743 - DNA, 20 bp, Artificial Sequence
  Description of Artificial Sequence: Synthetic oligonucleotide
  Target: LAMA2; (+) strand; PAM type: NRG; PAM sequence: GGG
ctcaagtgatcattcgaggt

SEQ ID NO: 164744 - DNA, 20 bp, Artificial Sequence
  Description of Artificial Sequence: Synthetic oligonucleotide
  Target: LAMA2; (+) strand; PAM type: NRG; PAM sequence: TAG
ggtgggacacctactcatgc

SEQ ID NO: 164745 - DNA, 20 bp, Artificial Sequence
  Description of Artificial Sequence: Synthetic oligonucleotide
  Target: LAMA2; (+) strand; PAM type: NRG; PAM sequence: CAG
actcatgctagaattatcgt

SEQ ID NO: 164746 - DNA, 20 bp, Artificial Sequence
  Description of Artificial Sequence: Synthetic oligonucleotide
  Target: LAMA2; (+) strand; PAM type: NRG; PAM sequence: AGG
ctcatgctagaattatcgtc

SEQ ID NO: 164747 - DNA, 20 bp, Artificial Sequence
  Description of Artificial Sequence: Synthetic oligonucleotide
  Target: LAMA2; (+) strand; PAM type: NRG; PAM sequence: TGG
tagaattatcgtcaggcata

SEQ ID NO: 164748 - DNA, 20 bp, Artificial Sequence
  Description of Artificial Sequence: Synthetic oligonucleotide
  Target: LAMA2; (+) strand; PAM type: NRG; PAM sequence: TGG
catatggctgctcctctgat

SEQ ID NO: 164749 - DNA, 20 bp, Artificial Sequence
  Description of Artificial Sequence: Synthetic oligonucleotide
  Target: LAMA2; (+) strand; PAM type: NRG; PAM sequence: AAG
cctctgattggccaattgac

SEQ ID NO: 164750 - DNA, 20 bp, Artificial Sequence
  Description of Artificial Sequence: Synthetic oligonucleotide
  Target: LAMA2; (+) strand; PAM type: NRG; PAM sequence: AGG
ctctgattggccaattgaca

SEQ ID NO: 164751 - DNA, 20 bp, Artificial Sequence
  Description of Artificial Sequence: Synthetic oligonucleotide
  Target: LAMA2; (+) strand; PAM type: NRG; PAM sequence: CAG
aaggcatgaaattgaaatga

SEQ ID NO: 164752 - DNA, 20 bp, Artificial Sequence
  Description of Artificial Sequence: Synthetic oligonucleotide
  Target: LAMA2; (+) strand; PAM type: NRG; PAM sequence: GAG
ggcatgaaattgaaatgaca

SEQ ID NO: 164753 - DNA, 20 bp, Artificial Sequence
  Description of Artificial Sequence: Synthetic oligonucleotide
  Target: LAMA2; (+) strand; PAM type: NRG; PAM sequence: AGG
gcatgaaattgaaatgacag

SEQ ID NO: 164754 - DNA, 20 bp, Artificial Sequence
  Description of Artificial Sequence: Synthetic oligonucleotide
  Target: LAMA2; (+) strand; PAM type: NRG; PAM sequence: AAG
aaattgaaatgacagaggta

SEQ ID NO: 164755 - DNA, 20 bp, Artificial Sequence
  Description of Artificial Sequence: Synthetic oligonucleotide
  Target: LAMA2; (+) strand; PAM type: NRG; PAM sequence: TAG
tgaaatgacagaggtaaagt

SEQ ID NO: 164756 - DNA, 20 bp, Artificial Sequence
  Description of Artificial Sequence: Synthetic oligonucleotide
  Target: LAMA2; (+) strand; PAM type: NRG; PAM sequence: TGG
aggtaaagttagtcattgtt

SEQ ID NO: 164757 - DNA, 20 bp, Artificial Sequence
  Description of Artificial Sequence: Synthetic oligonucleotide
  Target: LAMA2; (+) strand; PAM type: NRG; PAM sequence: AAG
gttagtcattgtttggtgca

SEQ ID NO: 164758 - DNA, 20 bp, Artificial Sequence
  Description of Artificial Sequence: Synthetic oligonucleotide
  Target: LAMA2; (+) strand; PAM type: NRG; PAM sequence: TGG
ggtgcaaagataccaatcaa

SEQ ID NO: 164759 - DNA, 20 bp, Artificial Sequence
  Description of Artificial Sequence: Synthetic oligonucleotide
  Target: LAMA2; (+) strand; PAM type: NRG; PAM sequence: CAG
ccaatcaatggttttgcatt

SEQ ID NO: 164760 - DNA, 20 bp, Artificial Sequence
  Description of Artificial Sequence: Synthetic oligonucleotide
  Target: LAMA2; (+) strand; PAM type: NRG; PAM sequence: TAG
ttttgcattcagttttgtca

SEQ ID NO: 164761 - DNA, 20 bp, Artificial Sequence
  Description of Artificial Sequence: Synthetic oligonucleotide
  Target: LAMA2; (+) strand; PAM type: NRG; PAM sequence: CAG
gtgatttctcttcttgttaa

SEQ ID NO: 164762 - DNA, 20 bp, Artificial Sequence
  Description of Artificial Sequence: Synthetic oligonucleotide
  Target: LAMA2; (+) strand; PAM type: NRG; PAM sequence: AAG
tttctcttcttgttaacaga

SEQ ID NO: 164763 - DNA, 20 bp, Artificial Sequence
  Description of Artificial Sequence: Synthetic oligonucleotide
  Target: LAMA2; (+) strand; PAM type: NRG; PAM sequence: TGG
cttcttgttaacagaaagaa

SEQ ID NO: 164764 - DNA, 20 bp, Artificial Sequence
  Description of Artificial Sequence: Synthetic oligonucleotide
  Target: LAMA2; (+) strand; PAM type: NRG; PAM sequence: TGG
cagaaagaatggaaatatta

SEQ ID NO: 164765 - DNA, 20 bp, Artificial Sequence
  Description of Artificial Sequence: Synthetic oligonucleotide
  Target: LAMA2; (+) strand; PAM type: NRG; PAM sequence: GGG
agaaagaatggaaatattat

SEQ ID NO: 164766 - DNA, 20 bp, Artificial Sequence
  Description of Artificial Sequence: Synthetic oligonucleotide
  Target: LAMA2; (+) strand; PAM type: NRG; PAM sequence: GGG
gaaagaatggaaatattatg

SEQ ID NO: 164767 - DNA, 20 bp, Artificial Sequence
  Description of Artificial Sequence: Synthetic oligonucleotide
  Target: LAMA2; (+) strand; PAM type: NRG; PAM sequence: GAG
atattatggggatgatcctc

SEQ ID NO: 164768 - DNA, 20 bp, Artificial Sequence
  Description of Artificial Sequence: Synthetic oligonucleotide
  Target: LAMA2; (+) strand; PAM type: NRG; PAM sequence: TAG
ggggatgatcctcgagtcca

SEQ ID NO: 164769 - DNA, 20 bp, Artificial Sequence
  Description of Artificial Sequence: Synthetic oligonucleotide
  Target: LAMA2; (+) strand; PAM type: NRG; PAM sequence: GAG
agtccatagaactgtgaccc

SEQ ID NO: 164770 - DNA, 20 bp, Artificial Sequence
  Description of Artificial Sequence: Synthetic oligonucleotide
  Target: LAMA2; (+) strand; PAM type: NRG; PAM sequence: AAG
ccatagaactgtgacccgag

SEQ ID NO: 164771 - DNA, 20 bp, Artificial Sequence
  Description of Artificial Sequence: Synthetic oligonucleotide
  Target: LAMA2; (+) strand; PAM type: NRG; PAM sequence: TGG
tgtgacccgagaagacttct

SEQ ID NO: 164772 - DNA, 20 bp, Artificial Sequence
  Description of Artificial Sequence: Synthetic oligonucleotide
  Target: LAMA2; (+) strand; PAM type: NRG; PAM sequence: AAG
tattcattacattcttatca

SEQ ID NO: 164773 - DNA, 20 bp, Artificial Sequence
  Description of Artificial Sequence: Synthetic oligonucleotide
  Target: LAMA2; (+) strand; PAM type: NRG; PAM sequence: TGG
attcttatcaaagctactta

SEQ ID NO: 164774 - DNA, 20 bp, Artificial Sequence
  Description of Artificial Sequence: Synthetic oligonucleotide
  Target: LAMA2; (+) strand; PAM type: NRG; PAM sequence: AAG
tatggaaatttcatgcgaca

SEQ ID NO: 164775 - DNA, 20 bp, Artificial Sequence
  Description of Artificial Sequence: Synthetic oligonucleotide
  Target: LAMA2; (+) strand; PAM type: NRG; PAM sequence: CAG
ggaaatttcatgcgacaaag

SEQ ID NO: 164776 - DNA, 20 bp, Artificial Sequence
  Description of Artificial Sequence: Synthetic oligonucleotide
  Target: LAMA2; (+) strand; PAM type: NRG; PAM sequence: AGG
gaaatttcatgcgacaaagc

SEQ ID NO: 164777 - DNA, 20 bp, Artificial Sequence
  Description of Artificial Sequence: Synthetic oligonucleotide
  Target: LAMA2; (+) strand; PAM type: NRG; PAM sequence: TAG
acaaagcaggtaaactctaa

SEQ ID NO: 164778 - DNA, 20 bp, Artificial Sequence
  Description of Artificial Sequence: Synthetic oligonucleotide
  Target: LAMA2; (+) strand; PAM type: NRG; PAM sequence: AAG
aactctaatagaaaatattc

SEQ ID NO: 164779 - DNA, 20 bp, Artificial Sequence
  Description of Artificial Sequence: Synthetic oligonucleotide
  Target: LAMA2; (+) strand; PAM type: NRG; PAM sequence: TAG
aaatattcaagctcttattt

SEQ ID NO: 164780 - DNA, 20 bp, Artificial Sequence
  Description of Artificial Sequence: Synthetic oligonucleotide
  Target: LAMA2; (+) strand; PAM type: NRG; PAM sequence: GAG
atattcaagctcttatttta

SEQ ID NO: 164781 - DNA, 20 bp, Artificial Sequence
  Description of Artificial Sequence: Synthetic oligonucleotide
  Target: LAMA2; (+) strand; PAM type: NRG; PAM sequence: AAG
gctcttattttagagtctgt

SEQ ID NO: 164782 - DNA, 20 bp, Artificial Sequence
  Description of Artificial Sequence: Synthetic oligonucleotide
  Target: LAMA2; (+) strand; PAM type: NRG; PAM sequence: AGG
ctcttattttagagtctgta

SEQ ID NO: 164783 - DNA, 20 bp, Artificial Sequence
  Description of Artificial Sequence: Synthetic oligonucleotide
  Target: LAMA2; (+) strand; PAM type: NRG; PAM sequence: AAG
ttattttagagtctgtaagg

SEQ ID NO: 164784 - DNA, 20 bp, Artificial Sequence
  Description of Artificial Sequence: Synthetic oligonucleotide
  Target: LAMA2; (+) strand; PAM type: NRG; PAM sequence: AGG
tattttagagtctgtaagga

SEQ ID NO: 164785 - DNA, 20 bp, Artificial Sequence
  Description of Artificial Sequence: Synthetic oligonucleotide
  Target: LAMA2; (+) strand; PAM type: NRG; PAM sequence: CAG
taaggaaggttattgaccta

SEQ ID NO: 164786 - DNA, 20 bp, Artificial Sequence
  Description of Artificial Sequence: Synthetic oligonucleotide
  Target: LAMA2; (+) strand; PAM type: NRG; PAM sequence: CAG
ggttattgacctacagatat

SEQ ID NO: 164787 - DNA, 20 bp, Artificial Sequence
  Description of Artificial Sequence: Synthetic oligonucleotide
  Target: LAMA2; (+) strand; PAM type: NRG; PAM sequence: AAG
ttgacctacagatatcagat

SEQ ID NO: 164788 - DNA, 20 bp, Artificial Sequence
  Description of Artificial Sequence: Synthetic oligonucleotide
  Target: LAMA2; (+) strand; PAM type: NRG; PAM sequence: AAG
cctacagatatcagataaga

SEQ ID NO: 164789 - DNA, 20 bp, Artificial Sequence
  Description of Artificial Sequence: Synthetic oligonucleotide
  Target: LAMA2; (+) strand; PAM type: NRG; PAM sequence: TGG
agatatcagataagaaagat

SEQ ID NO: 164790 - DNA, 20 bp, Artificial Sequence
  Description of Artificial Sequence: Synthetic oligonucleotide
  Target: LAMA2; (+) strand; PAM type: NRG; PAM sequence: AAG
atcagataagaaagattgga

SEQ ID NO: 164791 - DNA, 20 bp, Artificial Sequence
  Description of Artificial Sequence: Synthetic oligonucleotide
  Target: LAMA2; (+) strand; PAM type: NRG; PAM sequence: TGG
aagaaagattggaaagtgat

SEQ ID NO: 164792 - DNA, 20 bp, Artificial Sequence
  Description of Artificial Sequence: Synthetic oligonucleotide
  Target: LAMA2; (+) strand; PAM type: NRG; PAM sequence: CAG
ttggaaagtgattggttttg

SEQ ID NO: 164793 - DNA, 20 bp, Artificial Sequence
  Description of Artificial Sequence: Synthetic oligonucleotide
  Target: LAMA2; (+) strand; PAM type: NRG; PAM sequence: TAG
ttggttttgcagtataatga

SEQ ID NO: 164794 - DNA, 20 bp, Artificial Sequence
  Description of Artificial Sequence: Synthetic oligonucleotide
  Target: LAMA2; (+) strand; PAM type: NRG; PAM sequence: AAG
gttttgcagtataatgatag

SEQ ID NO: 164795 - DNA, 20 bp, Artificial Sequence
  Description of Artificial Sequence: Synthetic oligonucleotide
  Target: LAMA2; (+) strand; PAM type: NRG; PAM sequence: TGG
taatgatagaagataaacca

SEQ ID NO: 164796 - DNA, 20 bp, Artificial Sequence
  Description of Artificial Sequence: Synthetic oligonucleotide
  Target: LAMA2; (+) strand; PAM type: NRG; PAM sequence: GAG
atgatagaagataaaccatg

SEQ ID NO: 164797 - DNA, 20 bp, Artificial Sequence
  Description of Artificial Sequence: Synthetic oligonucleotide
  Target: LAMA2; (+) strand; PAM type: NRG; PAM sequence: AGG
tgatagaagataaaccatgg

SEQ ID NO: 164798 - DNA, 20 bp, Artificial Sequence
  Description of Artificial Sequence: Synthetic oligonucleotide
  Target: LAMA2; (+) strand; PAM type: NRG; PAM sequence: TGG
atggaggcttccctgtgacc

SEQ ID NO: 164799 - DNA, 20 bp, Artificial Sequence
  Description of Artificial Sequence: Synthetic oligonucleotide
  Target: LAMA2; (+) strand; PAM type: NRG; PAM sequence: AAG
gaggcttccctgtgacctgg

SEQ ID NO: 164800 - DNA, 20 bp, Artificial Sequence
  Description of Artificial Sequence: Synthetic oligonucleotide
  Target: LAMA2; (+) strand; PAM type: NRG; PAM sequence: AAG
gcttccctgtgacctggaag

SEQ ID NO: 164801 - DNA, 20 bp, Artificial Sequence
  Description of Artificial Sequence: Synthetic oligonucleotide
  Target: LAMA2; (+) strand; PAM type: NRG; PAM sequence: CAG
aagaagctactaccattcat

SEQ ID NO: 164802 - DNA, 20 bp, Artificial Sequence
  Description of Artificial Sequence: Synthetic oligonucleotide
  Target: LAMA2; (+) strand; PAM type: NRG; PAM sequence: AAG
gctactaccattcatcagaa

SEQ ID NO: 164803 - DNA, 20 bp, Artificial Sequence
  Description of Artificial Sequence: Synthetic oligonucleotide
  Target: LAMA2; (+) strand; PAM type: NRG; PAM sequence: TAG
cattcatcagaaaagaaaaa

SEQ ID NO: 164804 - DNA, 20 bp, Artificial Sequence
  Description of Artificial Sequence: Synthetic oligonucleotide
  Target: LAMA2; (+) strand; PAM type: NRG; PAM sequence: GAG
tcagaaaagaaaaatagcat

SEQ ID NO: 164805 - DNA, 20 bp, Artificial Sequence
  Description of Artificial Sequence: Synthetic oligonucleotide
  Target: LAMA2; (+) strand; PAM type: NRG; PAM sequence: AAG
atagcatgagaaacacgtta

SEQ ID NO: 164806 - DNA, 20 bp, Artificial Sequence
  Description of Artificial Sequence: Synthetic oligonucleotide
  Target: LAMA2; (+) strand; PAM type: NRG; PAM sequence: AGG
tagcatgagaaacacgttaa

SEQ ID NO: 164807 - DNA, 20 bp, Artificial Sequence
  Description of Artificial Sequence: Synthetic oligonucleotide
  Target: LAMA2; (+) strand; PAM type: NRG; PAM sequence: GGG
agcatgagaaacacgttaaa

SEQ ID NO: 164808 - DNA, 20 bp, Artificial Sequence
  Description of Artificial Sequence: Synthetic oligonucleotide
  Target: LAMA2; (+) strand; PAM type: NRG; PAM sequence: TGG
gttaaagggaaaaaaaaata

SEQ ID NO: 164809 - DNA, 20 bp, Artificial Sequence
  Description of Artificial Sequence: Synthetic oligonucleotide
  Target: LAMA2; (+) strand; PAM type: NRG; PAM sequence: CAG
aaaaaatatggaattcactg

SEQ ID NO: 164810 - DNA, 20 bp, Artificial Sequence
  Description of Artificial Sequence: Synthetic oligonucleotide
  Target: LAMA2; (+) strand; PAM type: NRG; PAM sequence: TAG
tatggaattcactgcagaca

SEQ ID NO: 164811 - DNA, 20 bp, Artificial Sequence
  Description of Artificial Sequence: Synthetic oligonucleotide
  Target: LAMA2; (+) strand; PAM type: NRG; PAM sequence: GAG
gaattcactgcagacatagt

SEQ ID NO: 164812 - DNA, 20 bp, Artificial Sequence
  Description of Artificial Sequence: Synthetic oligonucleotide
  Target: LAMA2; (+) strand; PAM type: NRG; PAM sequence: AAG
actgcagacatagtgagttt

SEQ ID NO: 164813 - DNA, 20 bp, Artificial Sequence
  Description of Artificial Sequence: Synthetic oligonucleotide
  Target: LAMA2; (+) strand; PAM type: NRG; PAM sequence: CAG
acatagtgagtttaagatgc

SEQ ID NO: 164814 - DNA, 20 bp, Artificial Sequence
  Description of Artificial Sequence: Synthetic oligonucleotide
  Target: LAMA2; (+) strand; PAM type: NRG; PAM sequence: AAG
aagatgccagtcataaattc

SEQ ID NO: 164815 - DNA, 20 bp, Artificial Sequence
  Description of Artificial Sequence: Synthetic oligonucleotide
  Target: LAMA2; (+) strand; PAM type: NRG; PAM sequence: GAG
gatgccagtcataaattcaa

SEQ ID NO: 164816 - DNA, 20 bp, Artificial Sequence
  Description of Artificial Sequence: Synthetic oligonucleotide
  Target: LAMA2; (+) strand; PAM type: NRG; PAM sequence: TAG
attcaagagatcatatactg

SEQ ID NO: 164817 - DNA, 20 bp, Artificial Sequence
  Description of Artificial Sequence: Synthetic oligonucleotide
  Target: LAMA2; (+) strand; PAM type: NRG; PAM sequence: CAG
agagatcatatactgtagat

SEQ ID NO: 164818 - DNA, 20 bp, Artificial Sequence
  Description of Artificial Sequence: Synthetic oligonucleotide
  Target: LAMA2; (+) strand; PAM type: NRG; PAM sequence: AGG
gagatcatatactgtagatc

SEQ ID NO: 164819 - DNA, 20 bp, Artificial Sequence
  Description of Artificial Sequence: Synthetic oligonucleotide
  Target: LAMA2; (+) strand; PAM type: NRG; PAM sequence: TGG
tcaggtaaaattaactgttg

SEQ ID NO: 164820 - DNA, 20 bp, Artificial Sequence
  Description of Artificial Sequence: Synthetic oligonucleotide
  Target: LAMA2; (+) strand; PAM type: NRG; PAM sequence: TGG
attaactgttgtggtataaa

SEQ ID NO: 164821 - DNA, 20 bp, Artificial Sequence
  Description of Artificial Sequence: Synthetic oligonucleotide
  Target: LAMA2; (+) strand; PAM type: NRG; PAM sequence: AAG
gtggtataaatggattataa

SEQ ID NO: 164822 - DNA, 20 bp, Artificial Sequence
  Description of Artificial Sequence: Synthetic oligonucleotide
  Target: LAMA2; (+) strand; PAM type: NRG; PAM sequence: GAG
aaatggattataaaagtgct

SEQ ID NO: 164823 - DNA, 20 bp, Artificial Sequence
  Description of Artificial Sequence: Synthetic oligonucleotide
  Target: LAMA2; (+) strand; PAM type: NRG; PAM sequence: AAG
ggattataaaagtgctgaga

SEQ ID NO: 164824 - DNA, 20 bp, Artificial Sequence
  Description of Artificial Sequence: Synthetic oligonucleotide
  Target: LAMA2; (+) strand; PAM type: NRG; PAM sequence: CAG
aaagtgacctcttcacccat

SEQ ID NO: 164825 - DNA, 20 bp, Artificial Sequence
  Description of Artificial Sequence: Synthetic oligonucleotide
  Target: LAMA2; (+) strand; PAM type: NRG; PAM sequence: AGG
aagtgacctcttcacccatc

SEQ ID NO: 164826 - DNA, 20 bp, Artificial Sequence
  Description of Artificial Sequence: Synthetic oligonucleotide
  Target: LAMA2; (+) strand; PAM type: NRG; PAM sequence: GGG
agtgacctcttcacccatca

SEQ ID NO: 164827 - DNA, 20 bp, Artificial Sequence
  Description of Artificial Sequence: Synthetic oligonucleotide
  Target: LAMA2; (+) strand; PAM type: NRG; PAM sequence: GGG
gtgacctcttcacccatcag

SEQ ID NO: 164828 - DNA, 20 bp, Artificial Sequence
  Description of Artificial Sequence: Synthetic oligonucleotide
  Target: LAMA2; (+) strand; PAM type: NRG; PAM sequence: CAG
tcttcacccatcaggggaac

SEQ ID NO: 164829 - DNA, 20 bp, Artificial Sequence
  Description of Artificial Sequence: Synthetic oligonucleotide
  Target: LAMA2; (+) strand; PAM type: NRG; PAM sequence: AGG
cttcacccatcaggggaacc

SEQ ID NO: 164830 - DNA, 20 bp, Artificial Sequence
  Description of Artificial Sequence: Synthetic oligonucleotide
  Target: LAMA2; (+) strand; PAM type: NRG; PAM sequence: CAG
cacccatcaggggaaccagg

SEQ ID NO: 164831 - DNA, 20 bp, Artificial Sequence
  Description of Artificial Sequence: Synthetic oligonucleotide
  Target: LAMA2; (+) strand; PAM type: NRG; PAM sequence: AGG
acccatcaggggaaccaggc

SEQ ID NO: 164832 - DNA, 20 bp, Artificial Sequence
  Description of Artificial Sequence: Synthetic oligonucleotide
  Target: LAMA2; (+) strand; PAM type: NRG; PAM sequence: GGG
cccatcaggggaaccaggca

SEQ ID NO: 164833 - DNA, 20 bp, Artificial Sequence
  Description of Artificial Sequence: Synthetic oligonucleotide
  Target: LAMA2; (+) strand; PAM type: NRG; PAM sequence: AAG
caggggaaccaggcagggcc

SEQ ID NO: 164834 - DNA, 20 bp, Artificial Sequence
  Description of Artificial Sequence: Synthetic oligonucleotide
  Target: LAMA2; (+) strand; PAM type: NRG; PAM sequence: TGG
ggaaccaggcagggccaagt

SEQ ID NO: 164835 - DNA, 20 bp, Artificial Sequence
  Description of Artificial Sequence: Synthetic oligonucleotide
  Target: LAMA2; (+) strand; PAM type: NRG; PAM sequence: CAG
caggcagggccaagttggtc

SEQ ID NO: 164836 - DNA, 20 bp, Artificial Sequence
  Description of Artificial Sequence: Synthetic oligonucleotide
  Target: LAMA2; (+) strand; PAM type: NRG; PAM sequence: GAG
gtccagtctcctccaactgt

SEQ ID NO: 164837 - DNA, 20 bp, Artificial Sequence
  Description of Artificial Sequence: Synthetic oligonucleotide
  Target: LAMA2; (+) strand; PAM type: NRG; PAM sequence: CAG
gcattctaatctgttcaccc

SEQ ID NO: 164838 - DNA, 20 bp, Artificial Sequence
  Description of Artificial Sequence: Synthetic oligonucleotide
  Target: LAMA2; (+) strand; PAM type: NRG; PAM sequence: GAG
ttttccctatgcatcatgtt

SEQ ID NO: 164839 - DNA, 20 bp, Artificial Sequence
  Description of Artificial Sequence: Synthetic oligonucleotide
  Target: LAMA2; (+) strand; PAM type: NRG; PAM sequence: CAG
tcactttgaaaaaaatcaca

SEQ ID NO: 164840 - DNA, 20 bp, Artificial Sequence
  Description of Artificial Sequence: Synthetic oligonucleotide
  Target: LAMA2; (+) strand; PAM type: NRG; PAM sequence: CAG
ttgaaaaaaatcacacagaa

SEQ ID NO: 164841 - DNA, 20 bp, Artificial Sequence
  Description of Artificial Sequence: Synthetic oligonucleotide
  Target: LAMA2; (+) strand; PAM type: NRG; PAM sequence: AAG
aaaaaatcacacagaacagc

SEQ ID NO: 164842 - DNA, 20 bp, Artificial Sequence
  Description of Artificial Sequence: Synthetic oligonucleotide
  Target: LAMA2; (+) strand; PAM type: NRG; PAM sequence: TGG
atgttgtcgaacctacatga

SEQ ID NO: 164843 - DNA, 20 bp, Artificial Sequence
  Description of Artificial Sequence: Synthetic oligonucleotide
  Target: LAMA2; (+) strand; PAM type: NRG; PAM sequence: GGG
tgttgtcgaacctacatgat

SEQ ID NO: 164844 - DNA, 20 bp, Artificial Sequence
  Description of Artificial Sequence: Synthetic oligonucleotide
  Target: LAMA2; (+) strand; PAM type: NRG; PAM sequence: AAG
ctacatgatgggaatacttc

SEQ ID NO: 164845 - DNA, 20 bp, Artificial Sequence
  Description of Artificial Sequence: Synthetic oligonucleotide
  Target: LAMA2; (+) strand; PAM type: NRG; PAM sequence: AGG
tacatgatgggaatacttca

SEQ ID NO: 164846 - DNA, 20 bp, Artificial Sequence
  Description of Artificial Sequence: Synthetic oligonucleotide
  Target: LAMA2; (+) strand; PAM type: NRG; PAM sequence: GGG
acatgatgggaatacttcaa

SEQ ID NO: 164847 - DNA, 20 bp, Artificial Sequence
  Description of Artificial Sequence: Synthetic oligonucleotide
  Target: LAMA2; (+) strand; PAM type: NRG; PAM sequence: GAG
atgatgggaatacttcaagg

SEQ ID NO: 164848 - DNA, 20 bp, Artificial Sequence
  Description of Artificial Sequence: Synthetic oligonucleotide
  Target: LAMA2; (+) strand; PAM type: NRG; PAM sequence: TGG
tgttttcttatgaccaaaat

SEQ ID NO: 164849 - DNA, 20 bp, Artificial Sequence
  Description of Artificial Sequence: Synthetic oligonucleotide
  Target: LAMA2; (+) strand; PAM type: NRG; PAM sequence: GAG
caaaattggccaactgaaat

SEQ ID NO: 164850 - DNA, 20 bp, Artificial Sequence
  Description of Artificial Sequence: Synthetic oligonucleotide
  Target: LAMA2; (+) strand; PAM type: NRG; PAM sequence: AGG
aaaattggccaactgaaatg

SEQ ID NO: 164851 - DNA, 20 bp, Artificial Sequence
  Description of Artificial Sequence: Synthetic oligonucleotide
  Target: LAMA2; (+) strand; PAM type: NRG; PAM sequence: TGG
ccaactgaaatgaggcttgt

SEQ ID NO: 164852 - DNA, 20 bp, Artificial Sequence
  Description of Artificial Sequence: Synthetic oligonucleotide
  Target: LAMA2; (+) strand; PAM type: NRG; PAM sequence: GGG
caactgaaatgaggcttgtt

SEQ ID NO: 164853 - DNA, 20 bp, Artificial Sequence
  Description of Artificial Sequence: Synthetic oligonucleotide
  Target: LAMA2; (+) strand; PAM type: NRG; PAM sequence: TAG
ggcttgttgggtctgacact

SEQ ID NO: 164854 - DNA, 20 bp, Artificial Sequence
  Description of Artificial Sequence: Synthetic oligonucleotide
  Target: LAMA2; (+) strand; PAM type: NRG; PAM sequence: AGG
gcttgttgggtctgacactt

SEQ ID NO: 164855 - DNA, 20 bp, Artificial Sequence
  Description of Artificial Sequence: Synthetic oligonucleotide
  Target: LAMA2; (+) strand; PAM type: NRG; PAM sequence: TGG
tctgacacttaggaccacac

SEQ ID NO: 164856 - DNA, 20 bp, Artificial Sequence
  Description of Artificial Sequence: Synthetic oligonucleotide
  Target: LAMA2; (+) strand; PAM type: NRG; PAM sequence: CGG
actggtaacattcatgatac

SEQ ID NO: 164857 - DNA, 20 bp, Artificial Sequence
  Description of Artificial Sequence: Synthetic oligonucleotide
  Target: LAMA2; (+) strand; PAM type: NRG; PAM sequence: CAG
aacattcatgataccggtct

SEQ ID NO: 164858 - DNA, 20 bp, Artificial Sequence
  Description of Artificial Sequence: Synthetic oligonucleotide
  Target: LAMA2; (+) strand; PAM type: NRG; PAM sequence: TGG
tgataccggtctcagtgtcc

SEQ ID NO: 164859 - DNA, 20 bp, Artificial Sequence
  Description of Artificial Sequence: Synthetic oligonucleotide
  Target: LAMA2; (+) strand; PAM type: NRG; PAM sequence: GGG
gataccggtctcagtgtcct

SEQ ID NO: 164860 - DNA, 20 bp, Artificial Sequence
  Description of Artificial Sequence: Synthetic oligonucleotide
  Target: LAMA2; (+) strand; PAM type: NRG; PAM sequence: GGG
ataccggtctcagtgtcctg

SEQ ID NO: 164861 - DNA, 20 bp, Artificial Sequence
  Description of Artificial Sequence: Synthetic oligonucleotide
  Target: LAMA2; (+) strand; PAM type: NRG; PAM sequence: CAG
ccggtctcagtgtcctgggg

SEQ ID NO: 164862 - DNA, 20 bp, Artificial Sequence
  Description of Artificial Sequence: Synthetic oligonucleotide
  Target: LAMA2; (+) strand; PAM type: NRG; PAM sequence: AAG
cctggggcagaattaatctc

SEQ ID NO: 164863 - DNA, 20 bp, Artificial Sequence
  Description of Artificial Sequence: Synthetic oligonucleotide
  Target: LAMA2; (+) strand; PAM type: NRG; PAM sequence: AAG
gaattaatctcaagctttta

SEQ ID NO: 164864 - DNA, 20 bp, Artificial Sequence
  Description of Artificial Sequence: Synthetic oligonucleotide
  Target: LAMA2; (+) strand; PAM type: NRG; PAM sequence: AAG
taatctcaagcttttaaaga

SEQ ID NO: 164865 - DNA, 20 bp, Artificial Sequence
  Description of Artificial Sequence: Synthetic oligonucleotide
  Target: LAMA2; (+) strand; PAM type: NRG; PAM sequence: GAG
aaagaaagaatgtgacacat

SEQ ID NO: 164866 - DNA, 20 bp, Artificial Sequence
  Description of Artificial Sequence: Synthetic oligonucleotide
  Target: LAMA2; (+) strand; PAM type: NRG; PAM sequence: GAG
acacatgagcccaatattat

SEQ ID NO: 164867 - DNA, 20 bp, Artificial Sequence
  Description of Artificial Sequence: Synthetic oligonucleotide
  Target: LAMA2; (+) strand; PAM type: NRG; PAM sequence: AAG
tccatgaatataattgtaaa

SEQ ID NO: 164868 - DNA, 20 bp, Artificial Sequence
  Description of Artificial Sequence: Synthetic oligonucleotide
  Target: LAMA2; (+) strand; PAM type: NRG; PAM sequence: AAG
atgaatataattgtaaaaag

SEQ ID NO: 164869 - DNA, 20 bp, Artificial Sequence
  Description of Artificial Sequence: Synthetic oligonucleotide
  Target: LAMA2; (+) strand; PAM type: NRG; PAM sequence: AGG
tgaatataattgtaaaaaga

SEQ ID NO: 164870 - DNA, 20 bp, Artificial Sequence
  Description of Artificial Sequence: Synthetic oligonucleotide
  Target: LAMA2; (+) strand; PAM type: NRG; PAM sequence: AAG
aaggaataacatattgtcaa

SEQ ID NO: 164871 - DNA, 20 bp, Artificial Sequence
  Description of Artificial Sequence: Synthetic oligonucleotide
  Target: LAMA2; (+) strand; PAM type: NRG; PAM sequence: AAG
aacatattgtcaaaagtaaa

SEQ ID NO: 164872 - DNA, 20 bp, Artificial Sequence
  Description of Artificial Sequence: Synthetic oligonucleotide
  Target: LAMA2; (+) strand; PAM type: NRG; PAM sequence: AAG
aagatgattgtttaatttga

SEQ ID NO: 164873 - DNA, 20 bp, Artificial Sequence
  Description of Artificial Sequence: Synthetic oligonucleotide
  Target: LAMA2; (+) strand; PAM type: NRG; PAM sequence: GAG
gatgattgtttaatttgaaa

SEQ ID NO: 164874 - DNA, 20 bp, Artificial Sequence
  Description of Artificial Sequence: Synthetic oligonucleotide
  Target: LAMA2; (+) strand; PAM type: NRG; PAM sequence: CAG
aatttgaaagagtatgttta

SEQ ID NO: 164875 - DNA, 20 bp, Artificial Sequence
  Description of Artificial Sequence: Synthetic oligonucleotide
  Target: LAMA2; (+) strand; PAM type: NRG; PAM sequence: TGG
aagagtatgtttacagaaca

SEQ ID NO: 164876 - DNA, 20 bp, Artificial Sequence
  Description of Artificial Sequence: Synthetic oligonucleotide
  Target: LAMA2; (+) strand; PAM type: NRG; PAM sequence: GGG
agagtatgtttacagaacat

SEQ ID NO: 164877 - DNA, 20 bp, Artificial Sequence
  Description of Artificial Sequence: Synthetic oligonucleotide
  Target: LAMA2; (+) strand; PAM type: NRG; PAM sequence: TGG
atgtttacagaacatgggaa

SEQ ID NO: 164878 - DNA, 20 bp, Artificial Sequence
  Description of Artificial Sequence: Synthetic oligonucleotide
  Target: LAMA2; (+) strand; PAM type: NRG; PAM sequence: TAG
tacagaacatgggaatggat

SEQ ID NO: 164879 - DNA, 20 bp, Artificial Sequence
  Description of Artificial Sequence: Synthetic oligonucleotide
  Target: LAMA2; (+) strand; PAM type: NRG; PAM sequence: GAG
catgggaatggattagtaat

SEQ ID NO: 164880 - DNA, 20 bp, Artificial Sequence
  Description of Artificial Sequence: Synthetic oligonucleotide
  Target: LAMA2; (+) strand; PAM type: NRG; PAM sequence: AGG
atgggaatggattagtaatg

SEQ ID NO: 164881 - DNA, 20 bp, Artificial Sequence
  Description of Artificial Sequence: Synthetic oligonucleotide
  Target: LAMA2; (+) strand; PAM type: NRG; PAM sequence: AAG
aaatattgaaatataaaata

SEQ ID NO: 164882 - DNA, 20 bp, Artificial Sequence
  Description of Artificial Sequence: Synthetic oligonucleotide
  Target: LAMA2; (+) strand; PAM type: NRG; PAM sequence: GAG
atattgaaatataaaataaa

SEQ ID NO: 164883 - DNA, 20 bp, Artificial Sequence
  Description of Artificial Sequence: Synthetic oligonucleotide
  Target: LAMA2; (+) strand; PAM type: NRG; PAM sequence: GAG
attgaaatataaaataaaga

SEQ ID NO: 164884 - DNA, 20 bp, Artificial Sequence
  Description of Artificial Sequence: Synthetic oligonucleotide
  Target: LAMA2; (+) strand; PAM type: NRG; PAM sequence: TAG
aataaagagagaataactaa

SEQ ID NO: 164885 - DNA, 20 bp, Artificial Sequence
  Description of Artificial Sequence: Synthetic oligonucleotide
  Target: LAMA2; (+) strand; PAM type: NRG; PAM sequence: GAG
taaagagagaataactaata

SEQ ID NO: 164886 - DNA, 20 bp, Artificial Sequence
  Description of Artificial Sequence: Synthetic oligonucleotide
  Target: LAMA2; (+) strand; PAM type: NRG; PAM sequence: AGG
aaagagagaataactaatag

SEQ ID NO: 164887 - DNA, 20 bp, Artificial Sequence
  Description of Artificial Sequence: Synthetic oligonucleotide
  Target: LAMA2; (+) strand; PAM type: NRG; PAM sequence: CAG
agaataactaatagaggaac

SEQ ID NO: 164888 - DNA, 20 bp, Artificial Sequence
  Description of Artificial Sequence: Synthetic oligonucleotide
  Target: LAMA2; (+) strand; PAM type: NRG; PAM sequence: AGG
gaataactaatagaggaacc

SEQ ID NO: 164889 - DNA, 20 bp, Artificial Sequence
  Description of Artificial Sequence: Synthetic oligonucleotide
  Target: LAMA2; (+) strand; PAM type: NRG; PAM sequence: GAG
ataactaatagaggaaccag

SEQ ID NO: 164890 - DNA, 20 bp, Artificial Sequence
  Description of Artificial Sequence: Synthetic oligonucleotide
  Target: LAMA2; (+) strand; PAM type: NRG; PAM sequence: TGG
accaggagacttccacatca

SEQ ID NO: 164891 - DNA, 20 bp, Artificial Sequence
  Description of Artificial Sequence: Synthetic oligonucleotide
  Target: LAMA2; (+) strand; PAM type: NRG; PAM sequence: TGG
ttccacatcatggaccctca

SEQ ID NO: 164892 - DNA, 20 bp, Artificial Sequence
  Description of Artificial Sequence: Synthetic oligonucleotide
  Target: LAMA2; (+) strand; PAM type: NRG; PAM sequence: GAG
ccctcatggtcatattcttt

SEQ ID NO: 164893 - DNA, 20 bp, Artificial Sequence
  Description of Artificial Sequence: Synthetic oligonucleotide
  Target: LAMA2; (+) strand; PAM type: NRG; PAM sequence: TAG
tcatggtcatattctttgag

SEQ ID NO: 164894 - DNA, 20 bp, Artificial Sequence
  Description of Artificial Sequence: Synthetic oligonucleotide
  Target: LAMA2; (+) strand; PAM type: NRG; PAM sequence: CGG
ggtcatattctttgagtaga

SEQ ID NO: 164895 - DNA, 20 bp, Artificial Sequence
  Description of Artificial Sequence: Synthetic oligonucleotide
  Target: LAMA2; (+) strand; PAM type: NRG; PAM sequence: TGG
agacggttcaccttatccaa

SEQ ID NO: 164896 - DNA, 20 bp, Artificial Sequence
  Description of Artificial Sequence: Synthetic oligonucleotide
  Target: LAMA2; (+) strand; PAM type: NRG; PAM sequence: GGG
gacggttcaccttatccaat

SEQ ID NO: 164897 - DNA, 20 bp, Artificial Sequence
  Description of Artificial Sequence: Synthetic oligonucleotide
  Target: LAMA2; (+) strand; PAM type: NRG; PAM sequence: GAG
cttatccaatgggataaaat

SEQ ID NO: 164898 - DNA, 20 bp, Artificial Sequence
  Description of Artificial Sequence: Synthetic oligonucleotide
  Target: LAMA2; (+) strand; PAM type: NRG; PAM sequence: CAG
ggataaaatgagaaatcata

SEQ ID NO: 164899 - DNA, 20 bp, Artificial Sequence
  Description of Artificial Sequence: Synthetic oligonucleotide
  Target: LAMA2; (+) strand; PAM type: NRG; PAM sequence: TAG
aatgagaaatcatacagatt

SEQ ID NO: 164900 - DNA, 20 bp, Artificial Sequence
  Description of Artificial Sequence: Synthetic oligonucleotide
  Target: LAMA2; (+) strand; PAM type: NRG; PAM sequence: AGG
atgagaaatcatacagattt

SEQ ID NO: 164901 - DNA, 20 bp, Artificial Sequence
  Description of Artificial Sequence: Synthetic oligonucleotide
  Target: LAMA2; (+) strand; PAM type: NRG; PAM sequence: AAG
gaaatcatacagatttaggt

SEQ ID NO: 164902 - DNA, 20 bp, Artificial Sequence
  Description of Artificial Sequence: Synthetic oligonucleotide
  Target: LAMA2; (+) strand; PAM type: NRG; PAM sequence: TGG
tttaggtaagtttcatacca

SEQ ID NO: 164903 - DNA, 20 bp, Artificial Sequence
  Description of Artificial Sequence: Synthetic oligonucleotide
  Target: LAMA2; (+) strand; PAM type: NRG; PAM sequence: GAG
taggtaagtttcataccatg

SEQ ID NO: 164904 - DNA, 20 bp, Artificial Sequence
  Description of Artificial Sequence: Synthetic oligonucleotide
  Target: LAMA2; (+) strand; PAM type: NRG; PAM sequence: AGG
aggtaagtttcataccatgg

SEQ ID NO: 164905 - DNA, 20 bp, Artificial Sequence
  Description of Artificial Sequence: Synthetic oligonucleotide
  Target: LAMA2; (+) strand; PAM type: NRG; PAM sequence: CAG
taagtttcataccatggagg

SEQ ID NO: 164906 - DNA, 20 bp, Artificial Sequence
  Description of Artificial Sequence: Synthetic oligonucleotide
  Target: LAMA2; (+) strand; PAM type: NRG; PAM sequence: AAG
tttcataccatggaggcaga

SEQ ID NO: 164907 - DNA, 20 bp, Artificial Sequence
  Description of Artificial Sequence: Synthetic oligonucleotide
  Target: LAMA2; (+) strand; PAM type: NRG; PAM sequence: GAG
tggaggcagaaagttgaact

SEQ ID NO: 164908 - DNA, 20 bp, Artificial Sequence
  Description of Artificial Sequence: Synthetic oligonucleotide
  Target: LAMA2; (+) strand; PAM type: NRG; PAM sequence: TAG
aaagttgaactgagttcata

SEQ ID NO: 164909 - DNA, 20 bp, Artificial Sequence
  Description of Artificial Sequence: Synthetic oligonucleotide
  Target: LAMA2; (+) strand; PAM type: NRG; PAM sequence: AGG
aagttgaactgagttcatat

SEQ ID NO: 164910 - DNA, 20 bp, Artificial Sequence
  Description of Artificial Sequence: Synthetic oligonucleotide
  Target: LAMA2; (+) strand; PAM type: NRG; PAM sequence: GAG
gttgaactgagttcatatag

SEQ ID NO: 164911 - DNA, 20 bp, Artificial Sequence
  Description of Artificial Sequence: Synthetic oligonucleotide
  Target: LAMA2; (+) strand; PAM type: NRG; PAM sequence: CAG
cctcaatttctctttcatgt

SEQ ID NO: 164912 - DNA, 20 bp, Artificial Sequence
  Description of Artificial Sequence: Synthetic oligonucleotide
  Target: LAMA2; (+) strand; PAM type: NRG; PAM sequence: GAG
cagtctctgttacattctat

SEQ ID NO: 164913 - DNA, 20 bp, Artificial Sequence
  Description of Artificial Sequence: Synthetic oligonucleotide
  Target: LAMA2; (+) strand; PAM type: NRG; PAM sequence: TAG
tgttacattctatgagaata

SEQ ID NO: 164914 - DNA, 20 bp, Artificial Sequence
  Description of Artificial Sequence: Synthetic oligonucleotide
  Target: LAMA2; (+) strand; PAM type: NRG; PAM sequence: TAG
aatcgatatatgtttgtaaa

SEQ ID NO: 164915 - DNA, 20 bp, Artificial Sequence
  Description of Artificial Sequence: Synthetic oligonucleotide
  Target: LAMA2; (+) strand; PAM type: NRG; PAM sequence: TAG
agtcttatataataaattat

SEQ ID NO: 164916 - DNA, 20 bp, Artificial Sequence
  Description of Artificial Sequence: Synthetic oligonucleotide
  Target: LAMA2; (+) strand; PAM type: NRG; PAM sequence: TAG
aataaattattagacctgcc

SEQ ID NO: 164917 - DNA, 20 bp, Artificial Sequence
  Description of Artificial Sequence: Synthetic oligonucleotide
  Target: LAMA2; (+) strand; PAM type: NRG; PAM sequence: AGG
ataaattattagacctgcct

SEQ ID NO: 164918 - DNA, 20 bp, Artificial Sequence
  Description of Artificial Sequence: Synthetic oligonucleotide
  Target: LAMA2; (+) strand; PAM type: NRG; PAM sequence: AAG
attattagacctgcctagga

SEQ ID NO: 164919 - DNA, 20 bp, Artificial Sequence
  Description of Artificial Sequence: Synthetic oligonucleotide
  Target: LAMA2; (+) strand; PAM type: NRG; PAM sequence: CAG
acctgcctaggaaagcaaaa

SEQ ID NO: 164920 - DNA, 20 bp, Artificial Sequence
  Description of Artificial Sequence: Synthetic oligonucleotide
  Target: LAMA2; (+) strand; PAM type: NRG; PAM sequence: AAG
agcaaaacagaaaaattatg

SEQ ID NO: 164921 - DNA, 20 bp, Artificial Sequence
  Description of Artificial Sequence: Synthetic oligonucleotide
  Target: LAMA2; (+) strand; PAM type: NRG; PAM sequence: TGG
aaaattatgaagtctctcaa

SEQ ID NO: 164922 - DNA, 20 bp, Artificial Sequence
  Description of Artificial Sequence: Synthetic oligonucleotide
  Target: LAMA2; (+) strand; PAM type: NRG; PAM sequence: TGG
tatttttcaaatgtttatac

SEQ ID NO: 164923 - DNA, 20 bp, Artificial Sequence
  Description of Artificial Sequence: Synthetic oligonucleotide
  Target: LAMA2; (+) strand; PAM type: NRG; PAM sequence: AAG
tcaaatgtttatactggaat

SEQ ID NO: 164924 - DNA, 20 bp, Artificial Sequence
  Description of Artificial Sequence: Synthetic oligonucleotide
  Target: LAMA2; (+) strand; PAM type: NRG; PAM sequence: AAG
ttatactggaataagcacac

SEQ ID NO: 164925 - DNA, 20 bp, Artificial Sequence
  Description of Artificial Sequence: Synthetic oligonucleotide
  Target: LAMA2; (+) strand; PAM type: NRG; PAM sequence: CAG
actggaataagcacacaaga

SEQ ID NO: 164926 - DNA, 20 bp, Artificial Sequence
  Description of Artificial Sequence: Synthetic oligonucleotide
  Target: LAMA2; (+) strand; PAM type: NRG; PAM sequence: CAG
ggaataagcacacaagacag

SEQ ID NO: 164927 - DNA, 20 bp, Artificial Sequence
  Description of Artificial Sequence: Synthetic oligonucleotide
  Target: LAMA2; (+) strand; PAM type: NRG; PAM sequence: CAG
agaaaaccttttatttcatg

SEQ ID NO: 164928 - DNA, 20 bp, Artificial Sequence
  Description of Artificial Sequence: Synthetic oligonucleotide
  Target: LAMA2; (+) strand; PAM type: NRG; PAM sequence: AAG
aaaccttttatttcatgcag

SEQ ID NO: 164929 - DNA, 20 bp, Artificial Sequence
  Description of Artificial Sequence: Synthetic oligonucleotide
  Target: LAMA2; (+) strand; PAM type: NRG; PAM sequence: TAG
taatgcttttctgattgatg

SEQ ID NO: 164930 - DNA, 20 bp, Artificial Sequence
  Description of Artificial Sequence: Synthetic oligonucleotide
  Target: LAMA2; (+) strand; PAM type: NRG; PAM sequence: GAG
atgcttttctgattgatgta

SEQ ID NO: 164931 - DNA, 20 bp, Artificial Sequence
  Description of Artificial Sequence: Synthetic oligonucleotide
  Target: LAMA2; (+) strand; PAM type: NRG; PAM sequence: TAG
ctgattgatgtagagacttt

SEQ ID NO: 164932 - DNA, 20 bp, Artificial Sequence
  Description of Artificial Sequence: Synthetic oligonucleotide
  Target: LAMA2; (+) strand; PAM type: NRG; PAM sequence: AAG
gatgtagagacttttagtaa

SEQ ID NO: 164933 - DNA, 20 bp, Artificial Sequence
  Description of Artificial Sequence: Synthetic oligonucleotide
  Target: LAMA2; (+) strand; PAM type: NRG; PAM sequence: GAG
tgtagagacttttagtaaaa

SEQ ID NO: 164934 - DNA, 20 bp, Artificial Sequence
  Description of Artificial Sequence: Synthetic oligonucleotide
  Target: LAMA2; (+) strand; PAM type: NRG; PAM sequence: AAG
ttttagtaaaagagtaaatt

SEQ ID NO: 164935 - DNA, 20 bp, Artificial Sequence
  Description of Artificial Sequence: Synthetic oligonucleotide
  Target: LAMA2; (+) strand; PAM type: NRG; PAM sequence: AGG
tttagtaaaagagtaaatta

SEQ ID NO: 164936 - DNA, 20 bp, Artificial Sequence
  Description of Artificial Sequence: Synthetic oligonucleotide
  Target: LAMA2; (+) strand; PAM type: NRG; PAM sequence: TGG
acttttatatatgtattcct

SEQ ID NO: 164937 - DNA, 20 bp, Artificial Sequence
  Description of Artificial Sequence: Synthetic oligonucleotide
  Target: LAMA2; (+) strand; PAM type: NRG; PAM sequence: GGG
cttttatatatgtattcctt

SEQ ID NO: 164938 - DNA, 20 bp, Artificial Sequence
  Description of Artificial Sequence: Synthetic oligonucleotide
  Target: LAMA2; (+) strand; PAM type: NRG; PAM sequence: CAG
tttgatatttctcactataa

SEQ ID NO: 164939 - DNA, 20 bp, Artificial Sequence
  Description of Artificial Sequence: Synthetic oligonucleotide
  Target: LAMA2; (+) strand; PAM type: NRG; PAM sequence: AGG
ttgatatttctcactataac

SEQ ID NO: 164940 - DNA, 20 bp, Artificial Sequence
  Description of Artificial Sequence: Synthetic oligonucleotide
  Target: LAMA2; (+) strand; PAM type: NRG; PAM sequence: GAG
gatatttctcactataacag

SEQ ID NO: 164941 - DNA, 20 bp, Artificial Sequence
  Description of Artificial Sequence: Synthetic oligonucleotide
  Target: LAMA2; (+) strand; PAM type: NRG; PAM sequence: TAG
atctatactgttaattattt

SEQ ID NO: 164942 - DNA, 20 bp, Artificial Sequence
  Description of Artificial Sequence: Synthetic oligonucleotide
  Target: LAMA2; (+) strand; PAM type: NRG; PAM sequence: TAG
ttagaatatcacatgtaaat

SEQ ID NO: 164943 - DNA, 20 bp, Artificial Sequence
  Description of Artificial Sequence: Synthetic oligonucleotide
  Target: LAMA2; (+) strand; PAM type: NRG; PAM sequence: AGG
tagaatatcacatgtaaatt

SEQ ID NO: 164944 - DNA, 20 bp, Artificial Sequence
  Description of Artificial Sequence: Synthetic oligonucleotide
  Target: LAMA2; (+) strand; PAM type: NRG; PAM sequence: TGG
aatatcacatgtaaattagg

SEQ ID NO: 164945 - DNA, 20 bp, Artificial Sequence
  Description of Artificial Sequence: Synthetic oligonucleotide
  Target: LAMA2; (+) strand; PAM type: NRG; PAM sequence: CAG
atcacatgtaaattaggtgg

SEQ ID NO: 164946 - DNA, 20 bp, Artificial Sequence
  Description of Artificial Sequence: Synthetic oligonucleotide
  Target: LAMA2; (+) strand; PAM type: NRG; PAM sequence: AAG
acatgtaaattaggtggcag

SEQ ID NO: 164947 - DNA, 20 bp, Artificial Sequence
  Description of Artificial Sequence: Synthetic oligonucleotide
  Target: LAMA2; (+) strand; PAM type: NRG; PAM sequence: TAG
aaattaggtggcagaagcca

SEQ ID NO: 164948 - DNA, 20 bp, Artificial Sequence
  Description of Artificial Sequence: Synthetic oligonucleotide
  Target: LAMA2; (+) strand; PAM type: NRG; PAM sequence: CAG
ttaggtggcagaagccatag

SEQ ID NO: 164949 - DNA, 20 bp, Artificial Sequence
  Description of Artificial Sequence: Synthetic oligonucleotide
  Target: LAMA2; (+) strand; PAM type: NRG; PAM sequence: TAG
catagcagatttgcatgtct

SEQ ID NO: 164950 - DNA, 20 bp, Artificial Sequence
  Description of Artificial Sequence: Synthetic oligonucleotide
  Target: LAMA2; (+) strand; PAM type: NRG; PAM sequence: TAG
gatttgcatgtcttagaaaa

SEQ ID NO: 164951 - DNA, 20 bp, Artificial Sequence
  Description of Artificial Sequence: Synthetic oligonucleotide
  Target: LAMA2; (+) strand; PAM type: NRG; PAM sequence: CAG
ttgcatgtcttagaaaatag

SEQ ID NO: 164952 - DNA, 20 bp, Artificial Sequence
  Description of Artificial Sequence: Synthetic oligonucleotide
  Target: LAMA2; (+) strand; PAM type: NRG; PAM sequence: AGG
tgcatgtcttagaaaatagc

SEQ ID NO: 164953 - DNA, 20 bp, Artificial Sequence
  Description of Artificial Sequence: Synthetic oligonucleotide
  Target: LAMA2; (+) strand; PAM type: NRG; PAM sequence: GAG
aaaatagcaggtaatttcgt

SEQ ID NO: 164954 - DNA, 20 bp, Artificial Sequence
  Description of Artificial Sequence: Synthetic oligonucleotide
  Target: LAMA2; (+) strand; PAM type: NRG; PAM sequence: TAG
taatttcgtgagtttgcaaa

SEQ ID NO: 164955 - DNA, 20 bp, Artificial Sequence
  Description of Artificial Sequence: Synthetic oligonucleotide
  Target: LAMA2; (+) strand; PAM type: NRG; PAM sequence: TGG
caaatagattattttgcaaa

SEQ ID NO: 164956 - DNA, 20 bp, Artificial Sequence
  Description of Artificial Sequence: Synthetic oligonucleotide
  Target: LAMA2; (+) strand; PAM type: NRG; PAM sequence: CAG
ttgcaaatggttctgtactg

SEQ ID NO: 164957 - DNA, 20 bp, Artificial Sequence
  Description of Artificial Sequence: Synthetic oligonucleotide
  Target: LAMA2; (+) strand; PAM type: NRG; PAM sequence: AAG
atggttctgtactgcagtaa

SEQ ID NO: 164958 - DNA, 20 bp, Artificial Sequence
  Description of Artificial Sequence: Synthetic oligonucleotide
  Target: LAMA2; (+) strand; PAM type: NRG; PAM sequence: GAG
ggttctgtactgcagtaaaa

SEQ ID NO: 164959 - DNA, 20 bp, Artificial Sequence
  Description of Artificial Sequence: Synthetic oligonucleotide
  Target: LAMA2; (+) strand; PAM type: NRG; PAM sequence: TGG
tgtactgcagtaaaagagtt

SEQ ID NO: 164960 - DNA, 20 bp, Artificial Sequence
  Description of Artificial Sequence: Synthetic oligonucleotide
  Target: LAMA2; (+) strand; PAM type: NRG; PAM sequence: TAG
actgcagtaaaagagtttgg

SEQ ID NO: 164961 - DNA, 20 bp, Artificial Sequence
  Description of Artificial Sequence: Synthetic oligonucleotide
  Target: LAMA2; (+) strand; PAM type: NRG; PAM sequence: CAG
taaaagagtttggtagtaaa

SEQ ID NO: 164962 - DNA, 20 bp, Artificial Sequence
  Description of Artificial Sequence: Synthetic oligonucleotide
  Target: LAMA2; (+) strand; PAM type: NRG; PAM sequence: TAG
tagtaaacagaacatcttgt

SEQ ID NO: 164963 - DNA, 20 bp, Artificial Sequence
  Description of Artificial Sequence: Synthetic oligonucleotide
  Target: LAMA2; (+) strand; PAM type: NRG; PAM sequence: TGG
taaacagaacatcttgttag

SEQ ID NO: 164964 - DNA, 20 bp, Artificial Sequence
  Description of Artificial Sequence: Synthetic oligonucleotide
  Target: LAMA2; (+) strand; PAM type: NRG; PAM sequence: TAG
catcttgttagtggaactga

SEQ ID NO: 164965 - DNA, 20 bp, Artificial Sequence
  Description of Artificial Sequence: Synthetic oligonucleotide
  Target: LAMA2; (+) strand; PAM type: NRG; PAM sequence: GAG
ttttacatacctcaccaaat

SEQ ID NO: 164966 - DNA, 20 bp, Artificial Sequence
  Description of Artificial Sequence: Synthetic oligonucleotide
  Target: LAMA2; (+) strand; PAM type: NRG; PAM sequence: TGG
cctcaccaaatgagatcttt

SEQ ID NO: 164967 - DNA, 20 bp, Artificial Sequence
  Description of Artificial Sequence: Synthetic oligonucleotide
  Target: LAMA2; (+) strand; PAM type: NRG; PAM sequence: AAG
caaatgagatcttttggttt

SEQ ID NO: 164968 - DNA, 20 bp, Artificial Sequence
  Description of Artificial Sequence: Synthetic oligonucleotide
  Target: LAMA2; (+) strand; PAM type: NRG; PAM sequence: TAG
tgaccgtttttttgaaactt

SEQ ID NO: 164969 - DNA, 20 bp, Artificial Sequence
  Description of Artificial Sequence: Synthetic oligonucleotide
  Target: LAMA2; (+) strand; PAM type: NRG; PAM sequence: CAG
gaatacatttttcctaatct

SEQ ID NO: 164970 - DNA, 20 bp, Artificial Sequence
  Description of Artificial Sequence: Synthetic oligonucleotide
  Target: LAMA2; (+) strand; PAM type: NRG; PAM sequence: TGG
ttcctaatctcagtaaaaac

SEQ ID NO: 164971 - DNA, 20 bp, Artificial Sequence
  Description of Artificial Sequence: Synthetic oligonucleotide
  Target: LAMA2; (+) strand; PAM type: NRG; PAM sequence: GGG
tcctaatctcagtaaaaact

SEQ ID NO: 164972 - DNA, 20 bp, Artificial Sequence
  Description of Artificial Sequence: Synthetic oligonucleotide
  Target: LAMA2; (+) strand; PAM type: NRG; PAM sequence: GGG
cctaatctcagtaaaaactg

SEQ ID NO: 164973 - DNA, 20 bp, Artificial Sequence
  Description of Artificial Sequence: Synthetic oligonucleotide
  Target: LAMA2; (+) strand; PAM type: NRG; PAM sequence: TAG
ctcagtaaaaactggggtca

SEQ ID NO: 164974 - DNA, 20 bp, Artificial Sequence
  Description of Artificial Sequence: Synthetic oligonucleotide
  Target: LAMA2; (+) strand; PAM type: NRG; PAM sequence: AAG
ggtcatagtctcacaatgct

SEQ ID NO: 164975 - DNA, 20 bp, Artificial Sequence
  Description of Artificial Sequence: Synthetic oligonucleotide
  Target: LAMA2; (+) strand; PAM type: NRG; PAM sequence: AAG
cacaatgctaagaacaaata

SEQ ID NO: 164976 - DNA, 20 bp, Artificial Sequence
  Description of Artificial Sequence: Synthetic oligonucleotide
  Target: LAMA2; (+) strand; PAM type: NRG; PAM sequence: CAG
agaacaaataaagctgtcat

SEQ ID NO: 164977 - DNA, 20 bp, Artificial Sequence
  Description of Artificial Sequence: Synthetic oligonucleotide
  Target: LAMA2; (+) strand; PAM type: NRG; PAM sequence: AAG
tcatcagcatttgattttgt

SEQ ID NO: 164978 - DNA, 20 bp, Artificial Sequence
  Description of Artificial Sequence: Synthetic oligonucleotide
  Target: LAMA2; (+) strand; PAM type: NRG; PAM sequence: AGG
catcagcatttgattttgta

SEQ ID NO: 164979 - DNA, 20 bp, Artificial Sequence
  Description of Artificial Sequence: Synthetic oligonucleotide
  Target: LAMA2; (+) strand; PAM type: NRG; PAM sequence: CAG
cagcatttgattttgtaagg

SEQ ID NO: 164980 - DNA, 20 bp, Artificial Sequence
  Description of Artificial Sequence: Synthetic oligonucleotide
  Target: LAMA2; (+) strand; PAM type: NRG; PAM sequence: TGG
catttgattttgtaaggcag

SEQ ID NO: 164981 - DNA, 20 bp, Artificial Sequence
  Description of Artificial Sequence: Synthetic oligonucleotide
  Target: LAMA2; (+) strand; PAM type: NRG; PAM sequence: TGG
tttgtaaggcagtggaattg

SEQ ID NO: 164982 - DNA, 20 bp, Artificial Sequence
  Description of Artificial Sequence: Synthetic oligonucleotide
  Target: LAMA2; (+) strand; PAM type: NRG; PAM sequence: AAG
aaggcagtggaattgtggca

SEQ ID NO: 164983 - DNA, 20 bp, Artificial Sequence
  Description of Artificial Sequence: Synthetic oligonucleotide
  Target: LAMA2; (+) strand; PAM type: NRG; PAM sequence: AGG
aggcagtggaattgtggcaa

SEQ ID NO: 164984 - DNA, 20 bp, Artificial Sequence
  Description of Artificial Sequence: Synthetic oligonucleotide
  Target: LAMA2; (+) strand; PAM type: NRG; PAM sequence: AAG
attgtggcaaaggtttttaa

SEQ ID NO: 164985 - DNA, 20 bp, Artificial Sequence
  Description of Artificial Sequence: Synthetic oligonucleotide
  Target: LAMA2; (+) strand; PAM type: NRG; PAM sequence: AGG
ttgtggcaaaggtttttaaa

SEQ ID NO: 164986 - DNA, 20 bp, Artificial Sequence
  Description of Artificial Sequence: Synthetic oligonucleotide
  Target: LAMA2; (+) strand; PAM type: NRG; PAM sequence: TAG
aggtttttaaaaggtttgaa

SEQ ID NO: 164987 - DNA, 20 bp, Artificial Sequence
  Description of Artificial Sequence: Synthetic oligonucleotide
  Target: LAMA2; (+) strand; PAM type: NRG; PAM sequence: AAG
aggtttgaatagtcccccta

SEQ ID NO: 164988 - DNA, 20 bp, Artificial Sequence
  Description of Artificial Sequence: Synthetic oligonucleotide
  Target: LAMA2; (+) strand; PAM type: NRG; PAM sequence: AAG
attataaatttaaatctcaa

SEQ ID NO: 164989 - DNA, 20 bp, Artificial Sequence
  Description of Artificial Sequence: Synthetic oligonucleotide
  Target: LAMA2; (+) strand; PAM type: NRG; PAM sequence: CAG
ataaatttaaatctcaaaag

SEQ ID NO: 164990 - DNA, 20 bp, Artificial Sequence
  Description of Artificial Sequence: Synthetic oligonucleotide
  Target: LAMA2; (+) strand; PAM type: NRG; PAM sequence: GAG
aaatttaaatctcaaaagca

SEQ ID NO: 164991 - DNA, 20 bp, Artificial Sequence
  Description of Artificial Sequence: Synthetic oligonucleotide
  Target: LAMA2; (+) strand; PAM type: NRG; PAM sequence: GAG
atttaaatctcaaaagcaga

SEQ ID NO: 164992 - DNA, 20 bp, Artificial Sequence
  Description of Artificial Sequence: Synthetic oligonucleotide
  Target: LAMA2; (+) strand; PAM type: NRG; PAM sequence: AAG
atctcaaaagcagagagttt

SEQ ID NO: 164993 - DNA, 20 bp, Artificial Sequence
  Description of Artificial Sequence: Synthetic oligonucleotide
  Target: LAMA2; (+) strand; PAM type: NRG; PAM sequence: GAG
ctcaaaagcagagagtttaa

SEQ ID NO: 164994 - DNA, 20 bp, Artificial Sequence
  Description of Artificial Sequence: Synthetic oligonucleotide
  Target: LAMA2; (+) strand; PAM type: NRG; PAM sequence: GAG
taagagtttatattctgttt

SEQ ID NO: 164995 - DNA, 20 bp, Artificial Sequence
  Description of Artificial Sequence: Synthetic oligonucleotide
  Target: LAMA2; (+) strand; PAM type: NRG; PAM sequence: AGG
aagagtttatattctgtttg

SEQ ID NO: 164996 - DNA, 20 bp, Artificial Sequence
  Description of Artificial Sequence: Synthetic oligonucleotide
  Target: LAMA2; (+) strand; PAM type: NRG; PAM sequence: CAG
ttgaactttgtacattgtat

SEQ ID NO: 164997 - DNA, 20 bp, Artificial Sequence
  Description of Artificial Sequence: Synthetic oligonucleotide
  Target: LAMA2; (+) strand; PAM type: NRG; PAM sequence: TGG
tttgtacattgtatcagtgc

SEQ ID NO: 164998 - DNA, 20 bp, Artificial Sequence
  Description of Artificial Sequence: Synthetic oligonucleotide
  Target: LAMA2; (+) strand; PAM type: NRG; PAM sequence: AAG
tgcttttgtttccttttata

SEQ ID NO: 164999 - DNA, 20 bp, Artificial Sequence
  Description of Artificial Sequence: Synthetic oligonucleotide
  Target: LAMA2; (+) strand; PAM type: NRG; PAM sequence: AAG
ccttttataaagtttaattt

SEQ ID NO: 165000 - DNA, 20 bp, Artificial Sequence
  Description of Artificial Sequence: Synthetic oligonucleotide
  Target: LAMA2; (+) strand; PAM type: NRG; PAM sequence: AGG
cttttataaagtttaattta

SEQ ID NO: 165001 - DNA, 20 bp, Artificial Sequence
  Description of Artificial Sequence: Synthetic oligonucleotide
  Target: LAMA2; (+) strand; PAM type: NRG; PAM sequence: TAG
taaagtttaatttaaggaaa

SEQ ID NO: 165002 - DNA, 20 bp, Artificial Sequence
  Description of Artificial Sequence: Synthetic oligonucleotide
  Target: LAMA2; (+) strand; PAM type: NRG; PAM sequence: CAG
aaatagcaacttttgcattt

SEQ ID NO: 165003 - DNA, 20 bp, Artificial Sequence
  Description of Artificial Sequence: Synthetic oligonucleotide
  Target: LAMA2; (+) strand; PAM type: NRG; PAM sequence: TAG
tagcaacttttgcatttcag

SEQ ID NO: 165004 - DNA, 20 bp, Artificial Sequence
  Description of Artificial Sequence: Synthetic oligonucleotide
  Target: LAMA2; (+) strand; PAM type: NRG; PAM sequence: TGG
catttcagtagttatttaaa

SEQ ID NO: 165005 - DNA, 20 bp, Artificial Sequence
  Description of Artificial Sequence: Synthetic oligonucleotide
  Target: LAMA2; (+) strand; PAM type: NRG; PAM sequence: AAG
ttcagtagttatttaaatgg

SEQ ID NO: 165006 - DNA, 20 bp, Artificial Sequence
  Description of Artificial Sequence: Synthetic oligonucleotide
  Target: LAMA2; (+) strand; PAM type: NRG; PAM sequence: TGG
gtagttatttaaatggaagc

SEQ ID NO: 165007 - DNA, 20 bp, Artificial Sequence
  Description of Artificial Sequence: Synthetic oligonucleotide
  Target: LAMA2; (+) strand; PAM type: NRG; PAM sequence: GAG
agttatttaaatggaagctg

SEQ ID NO: 165008 - DNA, 20 bp, Artificial Sequence
  Description of Artificial Sequence: Synthetic oligonucleotide
  Target: LAMA2; (+) strand; PAM type: NRG; PAM sequence: TGG
tttaaatggaagctggagtt

SEQ ID NO: 165009 - DNA, 20 bp, Artificial Sequence
  Description of Artificial Sequence: Synthetic oligonucleotide
  Target: LAMA2; (+) strand; PAM type: NRG; PAM sequence: AAG
ccaaatccctgatgcaatca

SEQ ID NO: 165010 - DNA, 20 bp, Artificial Sequence
  Description of Artificial Sequence: Synthetic oligonucleotide
  Target: LAMA2; (+) strand; PAM type: NRG; PAM sequence: TGG
taatcccctgaaaaaaaaaa

SEQ ID NO: 165011 - DNA, 20 bp, Artificial Sequence
  Description of Artificial Sequence: Synthetic oligonucleotide
  Target: LAMA2; (+) strand; PAM type: NRG; PAM sequence: CAG
aaaaaaaaaatggtgtattg

SEQ ID NO: 165012 - DNA, 20 bp, Artificial Sequence
  Description of Artificial Sequence: Synthetic oligonucleotide
  Target: LAMA2; (+) strand; PAM type: NRG; PAM sequence: AAG
atttgttgttgctgccattc

SEQ ID NO: 165013 - DNA, 20 bp, Artificial Sequence
  Description of Artificial Sequence: Synthetic oligonucleotide
  Target: LAMA2; (+) strand; PAM type: NRG; PAM sequence: CGG
acttgatttgtaaacacttg

SEQ ID NO: 165014 - DNA, 20 bp, Artificial Sequence
  Description of Artificial Sequence: Synthetic oligonucleotide
  Target: LAMA2; (+) strand; PAM type: NRG; PAM sequence: GGG
cttgatttgtaaacacttgc

SEQ ID NO: 165015 - DNA, 20 bp, Artificial Sequence
  Description of Artificial Sequence: Synthetic oligonucleotide
  Target: LAMA2; (+) strand; PAM type: NRG; PAM sequence: AAG
tgttatgtgcattcatgtgc

SEQ ID NO: 165016 - DNA, 20 bp, Artificial Sequence
  Description of Artificial Sequence: Synthetic oligonucleotide
  Target: LAMA2; (+) strand; PAM type: NRG; PAM sequence: GAG
ttatgtgcattcatgtgcaa

SEQ ID NO: 165017 - DNA, 20 bp, Artificial Sequence
  Description of Artificial Sequence: Synthetic oligonucleotide
  Target: LAMA2; (+) strand; PAM type: NRG; PAM sequence: AAG
gtgcattcatgtgcaagaga

SEQ ID NO: 165018 - DNA, 20 bp, Artificial Sequence
  Description of Artificial Sequence: Synthetic oligonucleotide
  Target: LAMA2; (+) strand; PAM type: NRG; PAM sequence: AGG
tgcattcatgtgcaagagaa

SEQ ID NO: 165019 - DNA, 20 bp, Artificial Sequence
  Description of Artificial Sequence: Synthetic oligonucleotide
  Target: LAMA2; (+) strand; PAM type: NRG; PAM sequence: GAG
cattcatgtgcaagagaaag

SEQ ID NO: 165020 - DNA, 20 bp, Artificial Sequence
  Description of Artificial Sequence: Synthetic oligonucleotide
  Target: LAMA2; (+) strand; PAM type: NRG; PAM sequence: AAG
gtgcaagagaaaggagaatg

SEQ ID NO: 165021 - DNA, 20 bp, Artificial Sequence
  Description of Artificial Sequence: Synthetic oligonucleotide
  Target: LAMA2; (+) strand; PAM type: NRG; PAM sequence: CAG
aagagaaaggagaatgaagc

SEQ ID NO: 165022 - DNA, 20 bp, Artificial Sequence
  Description of Artificial Sequence: Synthetic oligonucleotide
  Target: LAMA2; (+) strand; PAM type: NRG; PAM sequence: TAG
agaaaggagaatgaagccag

SEQ ID NO: 165023 - DNA, 20 bp, Artificial Sequence
  Description of Artificial Sequence: Synthetic oligonucleotide
  Target: LAMA2; (+) strand; PAM type: NRG; PAM sequence: CGG
gaatgaagccagtagctcct

SEQ ID NO: 165024 - DNA, 20 bp, Artificial Sequence
  Description of Artificial Sequence: Synthetic oligonucleotide
  Target: LAMA2; (+) strand; PAM type: NRG; PAM sequence: GGG
aatgaagccagtagctcctc

SEQ ID NO: 165025 - DNA, 20 bp, Artificial Sequence
  Description of Artificial Sequence: Synthetic oligonucleotide
  Target: LAMA2; (+) strand; PAM type: NRG; PAM sequence: TGG
cctcgggctataaaattcca

SEQ ID NO: 165026 - DNA, 20 bp, Artificial Sequence
  Description of Artificial Sequence: Synthetic oligonucleotide
  Target: LAMA2; (+) strand; PAM type: NRG; PAM sequence: GAG
tcgggctataaaattccatg

SEQ ID NO: 165027 - DNA, 20 bp, Artificial Sequence
  Description of Artificial Sequence: Synthetic oligonucleotide
  Target: LAMA2; (+) strand; PAM type: NRG; PAM sequence: AAG
tccatggagatgccaatgca

SEQ ID NO: 165028 - DNA, 20 bp, Artificial Sequence
  Description of Artificial Sequence: Synthetic oligonucleotide
  Target: LAMA2; (+) strand; PAM type: NRG; PAM sequence: CAG
aagttaccttcttactccca

SEQ ID NO: 165029 - DNA, 20 bp, Artificial Sequence
  Description of Artificial Sequence: Synthetic oligonucleotide
  Target: LAMA2; (+) strand; PAM type: NRG; PAM sequence: GAG
gttaccttcttactcccaca

SEQ ID NO: 165030 - DNA, 20 bp, Artificial Sequence
  Description of Artificial Sequence: Synthetic oligonucleotide
  Target: LAMA2; (+) strand; PAM type: NRG; PAM sequence: GAG
taccttcttactcccacaga

SEQ ID NO: 165031 - DNA, 20 bp, Artificial Sequence
  Description of Artificial Sequence: Synthetic oligonucleotide
  Target: LAMA2; (+) strand; PAM type: NRG; PAM sequence: CAG
tcttactcccacagagagcc

SEQ ID NO: 165032 - DNA, 20 bp, Artificial Sequence
  Description of Artificial Sequence: Synthetic oligonucleotide
  Target: LAMA2; (+) strand; PAM type: NRG; PAM sequence: GAG
ttactcccacagagagccca

SEQ ID NO: 165033 - DNA, 20 bp, Artificial Sequence
  Description of Artificial Sequence: Synthetic oligonucleotide
  Target: LAMA2; (+) strand; PAM type: NRG; PAM sequence: AAG
acagagagcccagagaacat

SEQ ID NO: 165034 - DNA, 20 bp, Artificial Sequence
  Description of Artificial Sequence: Synthetic oligonucleotide
  Target: LAMA2; (+) strand; PAM type: NRG; PAM sequence: AGG
cagagagcccagagaacata

SEQ ID NO: 165035 - DNA, 20 bp, Artificial Sequence
  Description of Artificial Sequence: Synthetic oligonucleotide
  Target: LAMA2; (+) strand; PAM type: NRG; PAM sequence: GGG
agagagcccagagaacataa

SEQ ID NO: 165036 - DNA, 20 bp, Artificial Sequence
  Description of Artificial Sequence: Synthetic oligonucleotide
  Target: LAMA2; (+) strand; PAM type: NRG; PAM sequence: GAG
agagcccagagaacataagg

SEQ ID NO: 165037 - DNA, 20 bp, Artificial Sequence
  Description of Artificial Sequence: Synthetic oligonucleotide
  Target: LAMA2; (+) strand; PAM type: NRG; PAM sequence: AAG
gcccagagaacataagggag

SEQ ID NO: 165038 - DNA, 20 bp, Artificial Sequence
  Description of Artificial Sequence: Synthetic oligonucleotide
  Target: LAMA2; (+) strand; PAM type: NRG; PAM sequence: CAG
taagggagaagtttttcttg

SEQ ID NO: 165039 - DNA, 20 bp, Artificial Sequence
  Description of Artificial Sequence: Synthetic oligonucleotide
  Target: LAMA2; (+) strand; PAM type: NRG; PAM sequence: AAG
gggagaagtttttcttgcag

SEQ ID NO: 165040 - DNA, 20 bp, Artificial Sequence
  Description of Artificial Sequence: Synthetic oligonucleotide
  Target: LAMA2; (+) strand; PAM type: NRG; PAM sequence: AGG
ggagaagtttttcttgcaga

SEQ ID NO: 165041 - DNA, 20 bp, Artificial Sequence
  Description of Artificial Sequence: Synthetic oligonucleotide
  Target: LAMA2; (+) strand; PAM type: NRG; PAM sequence: GGG
gagaagtttttcttgcagaa

SEQ ID NO: 165042 - DNA, 20 bp, Artificial Sequence
  Description of Artificial Sequence: Synthetic oligonucleotide
  Target: LAMA2; (+) strand; PAM type: NRG; PAM sequence: GGG
agaagtttttcttgcagaag

SEQ ID NO: 165043 - DNA, 20 bp, Artificial Sequence
  Description of Artificial Sequence: Synthetic oligonucleotide
  Target: LAMA2; (+) strand; PAM type: NRG; PAM sequence: GAG
aagtttttcttgcagaaggg

SEQ ID NO: 165044 - DNA, 20 bp, Artificial Sequence
  Description of Artificial Sequence: Synthetic oligonucleotide
  Target: LAMA2; (+) strand; PAM type: NRG; PAM sequence: TGG
tttttcttgcagaaggggag

SEQ ID NO: 165045 - DNA, 20 bp, Artificial Sequence
  Description of Artificial Sequence: Synthetic oligonucleotide
  Target: LAMA2; (+) strand; PAM type: NRG; PAM sequence: CAG
gaaggggagtggtttgctta

SEQ ID NO: 165046 - DNA, 20 bp, Artificial Sequence
  Description of Artificial Sequence: Synthetic oligonucleotide
  Target: LAMA2; (+) strand; PAM type: NRG; PAM sequence: CAG
accaccactgtgtgtactta

SEQ ID NO: 165047 - DNA, 20 bp, Artificial Sequence
  Description of Artificial Sequence: Synthetic oligonucleotide
  Target: LAMA2; (+) strand; PAM type: NRG; PAM sequence: AGG
ccaccactgtgtgtacttac

SEQ ID NO: 165048 - DNA, 20 bp, Artificial Sequence
  Description of Artificial Sequence: Synthetic oligonucleotide
  Target: LAMA2; (+) strand; PAM type: NRG; PAM sequence: GGG
caccactgtgtgtacttaca

SEQ ID NO: 165049 - DNA, 20 bp, Artificial Sequence
  Description of Artificial Sequence: Synthetic oligonucleotide
  Target: LAMA2; (+) strand; PAM type: NRG; PAM sequence: GAG
ccactgtgtgtacttacagg

SEQ ID NO: 165050 - DNA, 20 bp, Artificial Sequence
  Description of Artificial Sequence: Synthetic oligonucleotide
  Target: LAMA2; (+) strand; PAM type: NRG; PAM sequence: CAG
ctgtgtgtacttacagggag

SEQ ID NO: 165051 - DNA, 20 bp, Artificial Sequence
  Description of Artificial Sequence: Synthetic oligonucleotide
  Target: LAMA2; (+) strand; PAM type: NRG; PAM sequence: GAG
gtgtgtacttacagggagca

SEQ ID NO: 165052 - DNA, 20 bp, Artificial Sequence
  Description of Artificial Sequence: Synthetic oligonucleotide
  Target: LAMA2; (+) strand; PAM type: NRG; PAM sequence: GAG
gtgtacttacagggagcaga

SEQ ID NO: 165053 - DNA, 20 bp, Artificial Sequence
  Description of Artificial Sequence: Synthetic oligonucleotide
  Target: LAMA2; (+) strand; PAM type: NRG; PAM sequence: AAG
aattgaatgtgtgtttcatc

SEQ ID NO: 165054 - DNA, 20 bp, Artificial Sequence
  Description of Artificial Sequence: Synthetic oligonucleotide
  Target: LAMA2; (+) strand; PAM type: NRG; PAM sequence: CAG
gtttcatcaagaccaatctt

SEQ ID NO: 165055 - DNA, 20 bp, Artificial Sequence
  Description of Artificial Sequence: Synthetic oligonucleotide
  Target: LAMA2; (+) strand; PAM type: NRG; PAM sequence: GAG
ttcatcaagaccaatcttca

SEQ ID NO: 165056 - DNA, 20 bp, Artificial Sequence
  Description of Artificial Sequence: Synthetic oligonucleotide
  Target: LAMA2; (+) strand; PAM type: NRG; PAM sequence: CAG
caagaccaatcttcagagtg

SEQ ID NO: 165057 - DNA, 20 bp, Artificial Sequence
  Description of Artificial Sequence: Synthetic oligonucleotide
  Target: LAMA2; (+) strand; PAM type: NRG; PAM sequence: TAG
cagagtgcagattacaatgc

SEQ ID NO: 165058 - DNA, 20 bp, Artificial Sequence
  Description of Artificial Sequence: Synthetic oligonucleotide
  Target: LAMA2; (+) strand; PAM type: NRG; PAM sequence: AAG
tgcagattacaatgctagca

SEQ ID NO: 165059 - DNA, 20 bp, Artificial Sequence
  Description of Artificial Sequence: Synthetic oligonucleotide
  Target: LAMA2; (+) strand; PAM type: NRG; PAM sequence: CAG
aagaacatgcattcataatt

SEQ ID NO: 165060 - DNA, 20 bp, Artificial Sequence
  Description of Artificial Sequence: Synthetic oligonucleotide
  Target: LAMA2; (+) strand; PAM type: NRG; PAM sequence: AAG
acctacctatgcttgttata

SEQ ID NO: 165061 - DNA, 20 bp, Artificial Sequence
  Description of Artificial Sequence: Synthetic oligonucleotide
  Target: LAMA2; (+) strand; PAM type: NRG; PAM sequence: TGG
actcaaactccttaaactcc

SEQ ID NO: 165062 - DNA, 20 bp, Artificial Sequence
  Description of Artificial Sequence: Synthetic oligonucleotide
  Target: LAMA2; (+) strand; PAM type: NRG; PAM sequence: GAG
tcaaactccttaaactcctg

SEQ ID NO: 165063 - DNA, 20 bp, Artificial Sequence
  Description of Artificial Sequence: Synthetic oligonucleotide
  Target: LAMA2; (+) strand; PAM type: NRG; PAM sequence: AGG
caaactccttaaactcctgg

SEQ ID NO: 165064 - DNA, 20 bp, Artificial Sequence
  Description of Artificial Sequence: Synthetic oligonucleotide
  Target: LAMA2; (+) strand; PAM type: NRG; PAM sequence: AAG
ctggaggtaacttttatttg

SEQ ID NO: 165065 - DNA, 20 bp, Artificial Sequence
  Description of Artificial Sequence: Synthetic oligonucleotide
  Target: LAMA2; (+) strand; PAM type: NRG; PAM sequence: AAG
ctattcattgtcacatttta

SEQ ID NO: 165066 - DNA, 20 bp, Artificial Sequence
  Description of Artificial Sequence: Synthetic oligonucleotide
  Target: LAMA2; (+) strand; PAM type: NRG; PAM sequence: CAG
cccaaacatgtttgtgttac

SEQ ID NO: 165067 - DNA, 20 bp, Artificial Sequence
  Description of Artificial Sequence: Synthetic oligonucleotide
  Target: LAMA2; (+) strand; PAM type: NRG; PAM sequence: TAG
aacatgtttgtgttaccagt

SEQ ID NO: 165068 - DNA, 20 bp, Artificial Sequence
  Description of Artificial Sequence: Synthetic oligonucleotide
  Target: LAMA2; (+) strand; PAM type: NRG; PAM sequence: TAG
ccagttagtccatcataaaa

SEQ ID NO: 165069 - DNA, 20 bp, Artificial Sequence
  Description of Artificial Sequence: Synthetic oligonucleotide
  Target: LAMA2; (+) strand; PAM type: NRG; PAM sequence: CAG
agtccatcataaaatagtcc

SEQ ID NO: 165070 - DNA, 20 bp, Artificial Sequence
  Description of Artificial Sequence: Synthetic oligonucleotide
  Target: LAMA2; (+) strand; PAM type: NRG; PAM sequence: TGG
cataaaatagtcccagttta

SEQ ID NO: 165071 - DNA, 20 bp, Artificial Sequence
  Description of Artificial Sequence: Synthetic oligonucleotide
  Target: LAMA2; (+) strand; PAM type: NRG; PAM sequence: AAG
tacatttattttttaatgaa

SEQ ID NO: 165072 - DNA, 20 bp, Artificial Sequence
  Description of Artificial Sequence: Synthetic oligonucleotide
  Target: LAMA2; (+) strand; PAM type: NRG; PAM sequence: AGG
acatttattttttaatgaaa

SEQ ID NO: 165073 - DNA, 20 bp, Artificial Sequence
  Description of Artificial Sequence: Synthetic oligonucleotide
  Target: LAMA2; (+) strand; PAM type: NRG; PAM sequence: GGG
catttattttttaatgaaaa

SEQ ID NO: 165074 - DNA, 20 bp, Artificial Sequence
  Description of Artificial Sequence: Synthetic oligonucleotide
  Target: LAMA2; (+) strand; PAM type: NRG; PAM sequence: CAG
tataatgactatttcaccat

SEQ ID NO: 165075 - DNA, 20 bp, Artificial Sequence
  Description of Artificial Sequence: Synthetic oligonucleotide
  Target: LAMA2; (+) strand; PAM type: NRG; PAM sequence: AAG
tgactatttcaccatcagaa

SEQ ID NO: 165076 - DNA, 20 bp, Artificial Sequence
  Description of Artificial Sequence: Synthetic oligonucleotide
  Target: LAMA2; (+) strand; PAM type: NRG; PAM sequence: AGG
gactatttcaccatcagaaa

SEQ ID NO: 165077 - DNA, 20 bp, Artificial Sequence
  Description of Artificial Sequence: Synthetic oligonucleotide
  Target: LAMA2; (+) strand; PAM type: NRG; PAM sequence: GAG
atttcaccatcagaaaaggt

SEQ ID NO: 165078 - DNA, 20 bp, Artificial Sequence
  Description of Artificial Sequence: Synthetic oligonucleotide
  Target: LAMA2; (+) strand; PAM type: NRG; PAM sequence: AAG
accatcagaaaaggtgagtt

SEQ ID NO: 165079 - DNA, 20 bp, Artificial Sequence
  Description of Artificial Sequence: Synthetic oligonucleotide
  Target: LAMA2; (+) strand; PAM type: NRG; PAM sequence: AAG
aaggtgagttaagttacttg

SEQ ID NO: 165080 - DNA, 20 bp, Artificial Sequence
  Description of Artificial Sequence: Synthetic oligonucleotide
  Target: LAMA2; (+) strand; PAM type: NRG; PAM sequence: AGG
aggtgagttaagttacttga

SEQ ID NO: 165081 - DNA, 20 bp, Artificial Sequence
  Description of Artificial Sequence: Synthetic oligonucleotide
  Target: LAMA2; (+) strand; PAM type: NRG; PAM sequence: AAG
cttgaaggaattatttaata

SEQ ID NO: 165082 - DNA, 20 bp, Artificial Sequence
  Description of Artificial Sequence: Synthetic oligonucleotide
  Target: LAMA2; (+) strand; PAM type: NRG; PAM sequence: AAG
aggaattatttaataaagtt

SEQ ID NO: 165083 - DNA, 20 bp, Artificial Sequence
  Description of Artificial Sequence: Synthetic oligonucleotide
  Target: LAMA2; (+) strand; PAM type: NRG; PAM sequence: CAG
ttattttgaaacattatcct

SEQ ID NO: 165084 - DNA, 20 bp, Artificial Sequence
  Description of Artificial Sequence: Synthetic oligonucleotide
  Target: LAMA2; (+) strand; PAM type: NRG; PAM sequence: AAG
tttgaaacattatcctcaga

SEQ ID NO: 165085 - DNA, 20 bp, Artificial Sequence
  Description of Artificial Sequence: Synthetic oligonucleotide
  Target: LAMA2; (+) strand; PAM type: NRG; PAM sequence: TAG
cagaaagaaatcaatattat

SEQ ID NO: 165086 - DNA, 20 bp, Artificial Sequence
  Description of Artificial Sequence: Synthetic oligonucleotide
  Target: LAMA2; (+) strand; PAM type: NRG; PAM sequence: TAG
tatgcgtgatcattattttc

SEQ ID NO: 165087 - DNA, 20 bp, Artificial Sequence
  Description of Artificial Sequence: Synthetic oligonucleotide
  Target: LAMA2; (+) strand; PAM type: NRG; PAM sequence: AGG
atgcgtgatcattattttct

SEQ ID NO: 165088 - DNA, 20 bp, Artificial Sequence
  Description of Artificial Sequence: Synthetic oligonucleotide
  Target: LAMA2; (+) strand; PAM type: NRG; PAM sequence: TGG
cgtgatcattattttctagg

SEQ ID NO: 165089 - DNA, 20 bp, Artificial Sequence
  Description of Artificial Sequence: Synthetic oligonucleotide
  Target: LAMA2; (+) strand; PAM type: NRG; PAM sequence: AAG
attttctaggtggttttcta

SEQ ID NO: 165090 - DNA, 20 bp, Artificial Sequence
  Description of Artificial Sequence: Synthetic oligonucleotide
  Target: LAMA2; (+) strand; PAM type: NRG; PAM sequence: AAG
tggttttctaaagttcctga

SEQ ID NO: 165091 - DNA, 20 bp, Artificial Sequence
  Description of Artificial Sequence: Synthetic oligonucleotide
  Target: LAMA2; (+) strand; PAM type: NRG; PAM sequence: AGG
ggttttctaaagttcctgaa

SEQ ID NO: 165092 - DNA, 20 bp, Artificial Sequence
  Description of Artificial Sequence: Synthetic oligonucleotide
  Target: LAMA2; (+) strand; PAM type: NRG; PAM sequence: CAG
aaagttcctgaaaggtcatt

SEQ ID NO: 165093 - DNA, 20 bp, Artificial Sequence
  Description of Artificial Sequence: Synthetic oligonucleotide
  Target: LAMA2; (+) strand; PAM type: NRG; PAM sequence: GAG
agttcctgaaaggtcattca

SEQ ID NO: 165094 - DNA, 20 bp, Artificial Sequence
  Description of Artificial Sequence: Synthetic oligonucleotide
  Target: LAMA2; (+) strand; PAM type: NRG; PAM sequence: TGG
tgaaaggtcattcagagcat

SEQ ID NO: 165095 - DNA, 20 bp, Artificial Sequence
  Description of Artificial Sequence: Synthetic oligonucleotide
  Target: LAMA2; (+) strand; PAM type: NRG; PAM sequence: GGG
gaaaggtcattcagagcatt

SEQ ID NO: 165096 - DNA, 20 bp, Artificial Sequence
  Description of Artificial Sequence: Synthetic oligonucleotide
  Target: LAMA2; (+) strand; PAM type: NRG; PAM sequence: AAG
aggtcattcagagcattggg

SEQ ID NO: 165097 - DNA, 20 bp, Artificial Sequence
  Description of Artificial Sequence: Synthetic oligonucleotide
  Target: LAMA2; (+) strand; PAM type: NRG; PAM sequence: AAG
tcattcagagcattgggaag

SEQ ID NO: 165098 - DNA, 20 bp, Artificial Sequence
  Description of Artificial Sequence: Synthetic oligonucleotide
  Target: LAMA2; (+) strand; PAM type: NRG; PAM sequence: TGG
agcattgggaagaagaaatt

SEQ ID NO: 165099 - DNA, 20 bp, Artificial Sequence
  Description of Artificial Sequence: Synthetic oligonucleotide
  Target: LAMA2; (+) strand; PAM type: NRG; PAM sequence: GGG
gcattgggaagaagaaattt

SEQ ID NO: 165100 - DNA, 20 bp, Artificial Sequence
  Description of Artificial Sequence: Synthetic oligonucleotide
  Target: LAMA2; (+) strand; PAM type: NRG; PAM sequence: TAG
tgggaagaagaaatttggga

SEQ ID NO: 165101 - DNA, 20 bp, Artificial Sequence
  Description of Artificial Sequence: Synthetic oligonucleotide
  Target: LAMA2; (+) strand; PAM type: NRG; PAM sequence: TAG
gaagaagaaatttgggatag

SEQ ID NO: 165102 - DNA, 20 bp, Artificial Sequence
  Description of Artificial Sequence: Synthetic oligonucleotide
  Target: LAMA2; (+) strand; PAM type: NRG; PAM sequence: AAG
ttgggatagtagtaaattca

SEQ ID NO: 165103 - DNA, 20 bp, Artificial Sequence
  Description of Artificial Sequence: Synthetic oligonucleotide
  Target: LAMA2; (+) strand; PAM type: NRG; PAM sequence: CAG
taaattcaaagcaatttcac

SEQ ID NO: 165104 - DNA, 20 bp, Artificial Sequence
  Description of Artificial Sequence: Synthetic oligonucleotide
  Target: LAMA2; (+) strand; PAM type: NRG; PAM sequence: TGG
gcctgtacgaaataattgaa

SEQ ID NO: 165105 - DNA, 20 bp, Artificial Sequence
  Description of Artificial Sequence: Synthetic oligonucleotide
  Target: LAMA2; (+) strand; PAM type: NRG; PAM sequence: GGG
cctgtacgaaataattgaat

SEQ ID NO: 165106 - DNA, 20 bp, Artificial Sequence
  Description of Artificial Sequence: Synthetic oligonucleotide
  Target: LAMA2; (+) strand; PAM type: NRG; PAM sequence: GGG
ctgtacgaaataattgaatg

SEQ ID NO: 165107 - DNA, 20 bp, Artificial Sequence
  Description of Artificial Sequence: Synthetic oligonucleotide
  Target: LAMA2; (+) strand; PAM type: NRG; PAM sequence: TGG
aattgaatggggaatgacct

SEQ ID NO: 165108 - DNA, 20 bp, Artificial Sequence
  Description of Artificial Sequence: Synthetic oligonucleotide
  Target: LAMA2; (+) strand; PAM type: NRG; PAM sequence: GGG
attgaatggggaatgacctt

SEQ ID NO: 165109 - DNA, 20 bp, Artificial Sequence
  Description of Artificial Sequence: Synthetic oligonucleotide
  Target: LAMA2; (+) strand; PAM type: NRG; PAM sequence: AAG
accttgggttgtctgtttgc

SEQ ID NO: 165110 - DNA, 20 bp, Artificial Sequence
  Description of Artificial Sequence: Synthetic oligonucleotide
  Target: LAMA2; (+) strand; PAM type: NRG; PAM sequence: TGG
aatataaatgtctaattaat

SEQ ID NO: 165111 - DNA, 20 bp, Artificial Sequence
  Description of Artificial Sequence: Synthetic oligonucleotide
  Target: LAMA2; (+) strand; PAM type: NRG; PAM sequence: AAG
taattggccgtgtctacctg

SEQ ID NO: 165112 - DNA, 20 bp, Artificial Sequence
  Description of Artificial Sequence: Synthetic oligonucleotide
  Target: LAMA2; (+) strand; PAM type: NRG; PAM sequence: AAG
gaagccactcacattttaaa

SEQ ID NO: 165113 - DNA, 20 bp, Artificial Sequence
  Description of Artificial Sequence: Synthetic oligonucleotide
  Target: LAMA2; (+) strand; PAM type: NRG; PAM sequence: TGG
gccactcacattttaaaaag

SEQ ID NO: 165114 - DNA, 20 bp, Artificial Sequence
  Description of Artificial Sequence: Synthetic oligonucleotide
  Target: LAMA2; (+) strand; PAM type: NRG; PAM sequence: GGG
ccactcacattttaaaaagt

SEQ ID NO: 165115 - DNA, 20 bp, Artificial Sequence
  Description of Artificial Sequence: Synthetic oligonucleotide
  Target: LAMA2; (+) strand; PAM type: NRG; PAM sequence: GGG
cactcacattttaaaaagtg

SEQ ID NO: 165116 - DNA, 20 bp, Artificial Sequence
  Description of Artificial Sequence: Synthetic oligonucleotide
  Target: LAMA2; (+) strand; PAM type: NRG; PAM sequence: GGG
actcacattttaaaaagtgg

SEQ ID NO: 165117 - DNA, 20 bp, Artificial Sequence
  Description of Artificial Sequence: Synthetic oligonucleotide
  Target: LAMA2; (+) strand; PAM type: NRG; PAM sequence: GGG
ctcacattttaaaaagtggg

SEQ ID NO: 165118 - DNA, 20 bp, Artificial Sequence
  Description of Artificial Sequence: Synthetic oligonucleotide
  Target: LAMA2; (+) strand; PAM type: NRG; PAM sequence: CAG
tctttataataacttttcaa

SEQ ID NO: 165119 - DNA, 20 bp, Artificial Sequence
  Description of Artificial Sequence: Synthetic oligonucleotide
  Target: LAMA2; (+) strand; PAM type: NRG; PAM sequence: AGG
ctttataataacttttcaac

SEQ ID NO: 165120 - DNA, 20 bp, Artificial Sequence
  Description of Artificial Sequence: Synthetic oligonucleotide
  Target: LAMA2; (+) strand; PAM type: NRG; PAM sequence: CAG
ataacttttcaacaggatat

SEQ ID NO: 165121 - DNA, 20 bp, Artificial Sequence
  Description of Artificial Sequence: Synthetic oligonucleotide
  Target: LAMA2; (+) strand; PAM type: NRG; PAM sequence: GAG
aatatgtactcttaacattt

SEQ ID NO: 165122 - DNA, 20 bp, Artificial Sequence
  Description of Artificial Sequence: Synthetic oligonucleotide
  Target: LAMA2; (+) strand; PAM type: NRG; PAM sequence: AGG
atatgtactcttaacatttg

SEQ ID NO: 165123 - DNA, 20 bp, Artificial Sequence
  Description of Artificial Sequence: Synthetic oligonucleotide
  Target: LAMA2; (+) strand; PAM type: NRG; PAM sequence: AAG
tgtactcttaacatttgagg

SEQ ID NO: 165124 - DNA, 20 bp, Artificial Sequence
  Description of Artificial Sequence: Synthetic oligonucleotide
  Target: LAMA2; (+) strand; PAM type: NRG; PAM sequence: TAG
aggaagcaaaaatgcaatat

SEQ ID NO: 165125 - DNA, 20 bp, Artificial Sequence
  Description of Artificial Sequence: Synthetic oligonucleotide
  Target: LAMA2; (+) strand; PAM type: NRG; PAM sequence: AGG
ggaagcaaaaatgcaatatt

SEQ ID NO: 165126 - DNA, 20 bp, Artificial Sequence
  Description of Artificial Sequence: Synthetic oligonucleotide
  Target: LAMA2; (+) strand; PAM type: NRG; PAM sequence: TGG
aaaaatgcaatattaggatt

SEQ ID NO: 165127 - DNA, 20 bp, Artificial Sequence
  Description of Artificial Sequence: Synthetic oligonucleotide
  Target: LAMA2; (+) strand; PAM type: NRG; PAM sequence: GAG
aatattaggatttggtacat

SEQ ID NO: 165128 - DNA, 20 bp, Artificial Sequence
  Description of Artificial Sequence: Synthetic oligonucleotide
  Target: LAMA2; (+) strand; PAM type: NRG; PAM sequence: CAG
aggatttggtacatgagccc

SEQ ID NO: 165129 - DNA, 20 bp, Artificial Sequence
  Description of Artificial Sequence: Synthetic oligonucleotide
  Target: LAMA2; (+) strand; PAM type: NRG; PAM sequence: CAG
atgagccccagaaatttaaa

SEQ ID NO: 165130 - DNA, 20 bp, Artificial Sequence
  Description of Artificial Sequence: Synthetic oligonucleotide
  Target: LAMA2; (+) strand; PAM type: NRG; PAM sequence: TAG
tcacattgtttaaataaata

SEQ ID NO: 165131 - DNA, 20 bp, Artificial Sequence
  Description of Artificial Sequence: Synthetic oligonucleotide
  Target: LAMA2; (+) strand; PAM type: NRG; PAM sequence: TGG
tagttgacccttgaacaaca

SEQ ID NO: 165132 - DNA, 20 bp, Artificial Sequence
  Description of Artificial Sequence: Synthetic oligonucleotide
  Target: LAMA2; (+) strand; PAM type: NRG; PAM sequence: TGG
ttgacccttgaacaacatgg

SEQ ID NO: 165133 - DNA, 20 bp, Artificial Sequence
  Description of Artificial Sequence: Synthetic oligonucleotide
  Target: LAMA2; (+) strand; PAM type: NRG; PAM sequence: TAG
cccttgaacaacatggtggt

SEQ ID NO: 165134 - DNA, 20 bp, Artificial Sequence
  Description of Artificial Sequence: Synthetic oligonucleotide
  Target: LAMA2; (+) strand; PAM type: NRG; PAM sequence: AGG
ccttgaacaacatggtggtt

SEQ ID NO: 165135 - DNA, 20 bp, Artificial Sequence
  Description of Artificial Sequence: Synthetic oligonucleotide
  Target: LAMA2; (+) strand; PAM type: NRG; PAM sequence: GAG
ttgaacaacatggtggttag

SEQ ID NO: 165136 - DNA, 20 bp, Artificial Sequence
  Description of Artificial Sequence: Synthetic oligonucleotide
  Target: LAMA2; (+) strand; PAM type: NRG; PAM sequence: CAG
agcatcaaccccacctcatg

SEQ ID NO: 165137 - DNA, 20 bp, Artificial Sequence
  Description of Artificial Sequence: Synthetic oligonucleotide
  Target: LAMA2; (+) strand; PAM type: NRG; PAM sequence: CAG
tcaaccccacctcatgcagt

SEQ ID NO: 165138 - DNA, 20 bp, Artificial Sequence
  Description of Artificial Sequence: Synthetic oligonucleotide
  Target: LAMA2; (+) strand; PAM type: NRG; PAM sequence: TAG
cttcaaaacttaactactaa

SEQ ID NO: 165139 - DNA, 20 bp, Artificial Sequence
  Description of Artificial Sequence: Synthetic oligonucleotide
  Target: LAMA2; (+) strand; PAM type: NRG; PAM sequence: CAG
actaatagcctcctgttgaa

SEQ ID NO: 165140 - DNA, 20 bp, Artificial Sequence
  Description of Artificial Sequence: Synthetic oligonucleotide
  Target: LAMA2; (+) strand; PAM type: NRG; PAM sequence: AAG
aatagcctcctgttgaacag

SEQ ID NO: 165141 - DNA, 20 bp, Artificial Sequence
  Description of Artificial Sequence: Synthetic oligonucleotide
  Target: LAMA2; (+) strand; PAM type: NRG; PAM sequence: TAG
cagaagccatactgataaca

SEQ ID NO: 165142 - DNA, 20 bp, Artificial Sequence
  Description of Artificial Sequence: Synthetic oligonucleotide
  Target: LAMA2; (+) strand; PAM type: NRG; PAM sequence: TAG
aagccatactgataacatag

SEQ ID NO: 165143 - DNA, 20 bp, Artificial Sequence
  Description of Artificial Sequence: Synthetic oligonucleotide
  Target: LAMA2; (+) strand; PAM type: NRG; PAM sequence: TGG
tagattaacatatatttgtg

SEQ ID NO: 165144 - DNA, 20 bp, Artificial Sequence
  Description of Artificial Sequence: Synthetic oligonucleotide
  Target: LAMA2; (+) strand; PAM type: NRG; PAM sequence: GGG
agattaacatatatttgtgt

SEQ ID NO: 165145 - DNA, 20 bp, Artificial Sequence
  Description of Artificial Sequence: Synthetic oligonucleotide
  Target: LAMA2; (+) strand; PAM type: NRG; PAM sequence: AAG
tatattgtattcttataata

SEQ ID NO: 165146 - DNA, 20 bp, Artificial Sequence
  Description of Artificial Sequence: Synthetic oligonucleotide
  Target: LAMA2; (+) strand; PAM type: NRG; PAM sequence: GAG
ttgtattcttataataaagt

SEQ ID NO: 165147 - DNA, 20 bp, Artificial Sequence
  Description of Artificial Sequence: Synthetic oligonucleotide
  Target: LAMA2; (+) strand; PAM type: NRG; PAM sequence: TAG
attcttataataaagtgagc

SEQ ID NO: 165148 - DNA, 20 bp, Artificial Sequence
  Description of Artificial Sequence: Synthetic oligonucleotide
  Target: LAMA2; (+) strand; PAM type: NRG; PAM sequence: GAG
tcttataataaagtgagcta

SEQ ID NO: 165149 - DNA, 20 bp, Artificial Sequence
  Description of Artificial Sequence: Synthetic oligonucleotide
  Target: LAMA2; (+) strand; PAM type: NRG; PAM sequence: AAG
taataaagtgagctagagaa

SEQ ID NO: 165150 - DNA, 20 bp, Artificial Sequence
  Description of Artificial Sequence: Synthetic oligonucleotide
  Target: LAMA2; (+) strand; PAM type: NRG; PAM sequence: AAG
agagaaaagaaaatgttatt

SEQ ID NO: 165151 - DNA, 20 bp, Artificial Sequence
  Description of Artificial Sequence: Synthetic oligonucleotide
  Target: LAMA2; (+) strand; PAM type: NRG; PAM sequence: AAG
aaaagaaaatgttattaaga

SEQ ID NO: 165152 - DNA, 20 bp, Artificial Sequence
  Description of Artificial Sequence: Synthetic oligonucleotide
  Target: LAMA2; (+) strand; PAM type: NRG; PAM sequence: AAG
aatgttattaagaaagtaat

SEQ ID NO: 165153 - DNA, 20 bp, Artificial Sequence
  Description of Artificial Sequence: Synthetic oligonucleotide
  Target: LAMA2; (+) strand; PAM type: NRG; PAM sequence: AGG
atgttattaagaaagtaata

SEQ ID NO: 165154 - DNA, 20 bp, Artificial Sequence
  Description of Artificial Sequence: Synthetic oligonucleotide
  Target: LAMA2; (+) strand; PAM type: NRG; PAM sequence: GGG
tgttattaagaaagtaataa

SEQ ID NO: 165155 - DNA, 20 bp, Artificial Sequence
  Description of Artificial Sequence: Synthetic oligonucleotide
  Target: LAMA2; (+) strand; PAM type: NRG; PAM sequence: TGG
attaagaaagtaataagggc

SEQ ID NO: 165156 - DNA, 20 bp, Artificial Sequence
  Description of Artificial Sequence: Synthetic oligonucleotide
  Target: LAMA2; (+) strand; PAM type: NRG; PAM sequence: GGG
ttaagaaagtaataagggct

SEQ ID NO: 165157 - DNA, 20 bp, Artificial Sequence
  Description of Artificial Sequence: Synthetic oligonucleotide
  Target: LAMA2; (+) strand; PAM type: NRG; PAM sequence: CAG
aaagtaataagggctgggct

SEQ ID NO: 165158 - DNA, 20 bp, Artificial Sequence
  Description of Artificial Sequence: Synthetic oligonucleotide
  Target: LAMA2; (+) strand; PAM type: NRG; PAM sequence: TGG
gtaataagggctgggctcag

SEQ ID NO: 165159 - DNA, 20 bp, Artificial Sequence
  Description of Artificial Sequence: Synthetic oligonucleotide
  Target: LAMA2; (+) strand; PAM type: NRG; PAM sequence: CAG
gtggctcatgcctgtaatcc

SEQ ID NO: 165160 - DNA, 20 bp, Artificial Sequence
  Description of Artificial Sequence: Synthetic oligonucleotide
  Target: LAMA2; (+) strand; PAM type: NRG; PAM sequence: CGG
tgcctgtaatcccagcactt

SEQ ID NO: 165161 - DNA, 20 bp, Artificial Sequence
  Description of Artificial Sequence: Synthetic oligonucleotide
  Target: LAMA2; (+) strand; PAM type: NRG; PAM sequence: GGG
gcctgtaatcccagcacttc

SEQ ID NO: 165162 - DNA, 20 bp, Artificial Sequence
  Description of Artificial Sequence: Synthetic oligonucleotide
  Target: LAMA2; (+) strand; PAM type: NRG; PAM sequence: GAG
ctgtaatcccagcacttcgg

SEQ ID NO: 165163 - DNA, 20 bp, Artificial Sequence
  Description of Artificial Sequence: Synthetic oligonucleotide
  Target: LAMA2; (+) strand; PAM type: NRG; PAM sequence: AGG
tgtaatcccagcacttcggg

SEQ ID NO: 165164 - DNA, 20 bp, Artificial Sequence
  Description of Artificial Sequence: Synthetic oligonucleotide
  Target: LAMA2; (+) strand; PAM type: NRG; PAM sequence: AAG
cccagcacttcgggaggcca

SEQ ID NO: 165165 - DNA, 20 bp, Artificial Sequence
  Description of Artificial Sequence: Synthetic oligonucleotide
  Target: LAMA2; (+) strand; PAM type: NRG; PAM sequence: CAG
agcacttcgggaggccaaag

SEQ ID NO: 165166 - DNA, 20 bp, Artificial Sequence
  Description of Artificial Sequence: Synthetic oligonucleotide
  Target: LAMA2; (+) strand; PAM type: NRG; PAM sequence: AGG
gcacttcgggaggccaaagc

SEQ ID NO: 165167 - DNA, 20 bp, Artificial Sequence
  Description of Artificial Sequence: Synthetic oligonucleotide
  Target: LAMA2; (+) strand; PAM type: NRG; PAM sequence: CAG
cttcgggaggccaaagcagg

SEQ ID NO: 165168 - DNA, 20 bp, Artificial Sequence
  Description of Artificial Sequence: Synthetic oligonucleotide
  Target: LAMA2; (+) strand; PAM type: NRG; PAM sequence: GAG
ccaaagcaggcagatcactt

SEQ ID NO: 165169 - DNA, 20 bp, Artificial Sequence
  Description of Artificial Sequence: Synthetic oligonucleotide
  Target: LAMA2; (+) strand; PAM type: NRG; PAM sequence: AGG
caaagcaggcagatcacttg

SEQ ID NO: 165170 - DNA, 20 bp, Artificial Sequence
  Description of Artificial Sequence: Synthetic oligonucleotide
  Target: LAMA2; (+) strand; PAM type: NRG; PAM sequence: CAG
ggcagatcacttgaggtcaa

SEQ ID NO: 165171 - DNA, 20 bp, Artificial Sequence
  Description of Artificial Sequence: Synthetic oligonucleotide
  Target: LAMA2; (+) strand; PAM type: NRG; PAM sequence: AAG
tcacttgaggtcaacagttc

SEQ ID NO: 165172 - DNA, 20 bp, Artificial Sequence
  Description of Artificial Sequence: Synthetic oligonucleotide
  Target: LAMA2; (+) strand; PAM type: NRG; PAM sequence: CAG
tgaggtcaacagttcaagac

SEQ ID NO: 165173 - DNA, 20 bp, Artificial Sequence
  Description of Artificial Sequence: Synthetic oligonucleotide
  Target: LAMA2; (+) strand; PAM type: NRG; PAM sequence: TGG
tcaacagttcaagaccagcc

SEQ ID NO: 165174 - DNA, 20 bp, Artificial Sequence
  Description of Artificial Sequence: Synthetic oligonucleotide
  Target: LAMA2; (+) strand; PAM type: NRG; PAM sequence: CAG
ctggccaacatgatgaaacc

SEQ ID NO: 165175 - DNA, 20 bp, Artificial Sequence
  Description of Artificial Sequence: Synthetic oligonucleotide
  Target: LAMA2; (+) strand; PAM type: NRG; PAM sequence: TAG
tctactaaaaatacaataat

SEQ ID NO: 165176 - DNA, 20 bp, Artificial Sequence
  Description of Artificial Sequence: Synthetic oligonucleotide
  Target: LAMA2; (+) strand; PAM type: NRG; PAM sequence: TGG
ctaaaaatacaataattagc

SEQ ID NO: 165177 - DNA, 20 bp, Artificial Sequence
  Description of Artificial Sequence: Synthetic oligonucleotide
  Target: LAMA2; (+) strand; PAM type: NRG; PAM sequence: GGG
taaaaatacaataattagct

SEQ ID NO: 165178 - DNA, 20 bp, Artificial Sequence
  Description of Artificial Sequence: Synthetic oligonucleotide
  Target: LAMA2; (+) strand; PAM type: NRG; PAM sequence: TGG
atacaataattagctgggcg

SEQ ID NO: 165179 - DNA, 20 bp, Artificial Sequence
  Description of Artificial Sequence: Synthetic oligonucleotide
  Target: LAMA2; (+) strand; PAM type: NRG; PAM sequence: CAG
gtgttgcacacctgtaatcc

SEQ ID NO: 165180 - DNA, 20 bp, Artificial Sequence
  Description of Artificial Sequence: Synthetic oligonucleotide
  Target: LAMA2; (+) strand; PAM type: NRG; PAM sequence: CAG
cacctgtaatcccagctact

SEQ ID NO: 165181 - DNA, 20 bp, Artificial Sequence
  Description of Artificial Sequence: Synthetic oligonucleotide
  Target: LAMA2; (+) strand; PAM type: NRG; PAM sequence: AGG
acctgtaatcccagctactc

SEQ ID NO: 165182 - DNA, 20 bp, Artificial Sequence
  Description of Artificial Sequence: Synthetic oligonucleotide
  Target: LAMA2; (+) strand; PAM type: NRG; PAM sequence: GAG
ctgtaatcccagctactcag

SEQ ID NO: 165183 - DNA, 20 bp, Artificial Sequence
  Description of Artificial Sequence: Synthetic oligonucleotide
  Target: LAMA2; (+) strand; PAM type: NRG; PAM sequence: AGG
tgtaatcccagctactcagg

SEQ ID NO: 165184 - DNA, 20 bp, Artificial Sequence
  Description of Artificial Sequence: Synthetic oligonucleotide
  Target: LAMA2; (+) strand; PAM type: NRG; PAM sequence: GAG
tcccagctactcaggaggct

SEQ ID NO: 165185 - DNA, 20 bp, Artificial Sequence
  Description of Artificial Sequence: Synthetic oligonucleotide
  Target: LAMA2; (+) strand; PAM type: NRG; PAM sequence: AGG
cccagctactcaggaggctg

SEQ ID NO: 165186 - DNA, 20 bp, Artificial Sequence
  Description of Artificial Sequence: Synthetic oligonucleotide
  Target: LAMA2; (+) strand; PAM type: NRG; PAM sequence: CAG
agctactcaggaggctgagg

SEQ ID NO: 165187 - DNA, 20 bp, Artificial Sequence
  Description of Artificial Sequence: Synthetic oligonucleotide
  Target: LAMA2; (+) strand; PAM type: NRG; PAM sequence: AGG
gctactcaggaggctgaggc

SEQ ID NO: 165188 - DNA, 20 bp, Artificial Sequence
  Description of Artificial Sequence: Synthetic oligonucleotide
  Target: LAMA2; (+) strand; PAM type: NRG; PAM sequence: GAG
tactcaggaggctgaggcag

SEQ ID NO: 165189 - DNA, 20 bp, Artificial Sequence
  Description of Artificial Sequence: Synthetic oligonucleotide
  Target: LAMA2; (+) strand; PAM type: NRG; PAM sequence: TGG
gcaggagaatcacttgaacc

SEQ ID NO: 165190 - DNA, 20 bp, Artificial Sequence
  Description of Artificial Sequence: Synthetic oligonucleotide
  Target: LAMA2; (+) strand; PAM type: NRG; PAM sequence: TAG
ggagaatcacttgaacctgg

SEQ ID NO: 165191 - DNA, 20 bp, Artificial Sequence
  Description of Artificial Sequence: Synthetic oligonucleotide
  Target: LAMA2; (+) strand; PAM type: NRG; PAM sequence: AGG
gagaatcacttgaacctggt

SEQ ID NO: 165192 - DNA, 20 bp, Artificial Sequence
  Description of Artificial Sequence: Synthetic oligonucleotide
  Target: LAMA2; (+) strand; PAM type: NRG; PAM sequence: CGG
aatcacttgaacctggtagg

SEQ ID NO: 165193 - DNA, 20 bp, Artificial Sequence
  Description of Artificial Sequence: Synthetic oligonucleotide
  Target: LAMA2; (+) strand; PAM type: NRG; PAM sequence: GAG
tcacttgaacctggtaggcg

SEQ ID NO: 165194 - DNA, 20 bp, Artificial Sequence
  Description of Artificial Sequence: Synthetic oligonucleotide
  Target: LAMA2; (+) strand; PAM type: NRG; PAM sequence: AGG
cacttgaacctggtaggcgg

SEQ ID NO: 165195 - DNA, 20 bp, Artificial Sequence
  Description of Artificial Sequence: Synthetic oligonucleotide
  Target: LAMA2; (+) strand; PAM type: NRG; PAM sequence: TAG
aacctggtaggcggaggttg

SEQ ID NO: 165196 - DNA, 20 bp, Artificial Sequence
  Description of Artificial Sequence: Synthetic oligonucleotide
  Target: LAMA2; (+) strand; PAM type: NRG; PAM sequence: GAG
tggtaggcggaggttgtagt

SEQ ID NO: 165197 - DNA, 20 bp, Artificial Sequence
  Description of Artificial Sequence: Synthetic oligonucleotide
  Target: LAMA2; (+) strand; PAM type: NRG; PAM sequence: AAG
ggcggaggttgtagtgagcc

SEQ ID NO: 165198 - DNA, 20 bp, Artificial Sequence
  Description of Artificial Sequence: Synthetic oligonucleotide
  Target: LAMA2; (+) strand; PAM type: NRG; PAM sequence: CAG
aagattatgccactacactc

SEQ ID NO: 165199 - DNA, 20 bp, Artificial Sequence
  Description of Artificial Sequence: Synthetic oligonucleotide
  Target: LAMA2; (+) strand; PAM type: NRG; PAM sequence: TGG
tatgccactacactccagcc

SEQ ID NO: 165200 - DNA, 20 bp, Artificial Sequence
  Description of Artificial Sequence: Synthetic oligonucleotide
  Target: LAMA2; (+) strand; PAM type: NRG; PAM sequence: GGG
atgccactacactccagcct

SEQ ID NO: 165201 - DNA, 20 bp, Artificial Sequence
  Description of Artificial Sequence: Synthetic oligonucleotide
  Target: LAMA2; (+) strand; PAM type: NRG; PAM sequence: CAG
ctacactccagcctgggtga

SEQ ID NO: 165202 - DNA, 20 bp, Artificial Sequence
  Description of Artificial Sequence: Synthetic oligonucleotide
  Target: LAMA2; (+) strand; PAM type: NRG; PAM sequence: GAG
acactccagcctgggtgaca

SEQ ID NO: 165203 - DNA, 20 bp, Artificial Sequence
  Description of Artificial Sequence: Synthetic oligonucleotide
  Target: LAMA2; (+) strand; PAM type: NRG; PAM sequence: GAG
tccagcctgggtgacagagt

SEQ ID NO: 165204 - DNA, 20 bp, Artificial Sequence
  Description of Artificial Sequence: Synthetic oligonucleotide
  Target: LAMA2; (+) strand; PAM type: NRG; PAM sequence: AAG
taaataaataaataaataaa

SEQ ID NO: 165205 - DNA, 20 bp, Artificial Sequence
  Description of Artificial Sequence: Synthetic oligonucleotide
  Target: LAMA2; (+) strand; PAM type: NRG; PAM sequence: AAG
taaataaaaagaaaaaaaaa

SEQ ID NO: 165206 - DNA, 20 bp, Artificial Sequence
  Description of Artificial Sequence: Synthetic oligonucleotide
  Target: LAMA2; (+) strand; PAM type: NRG; PAM sequence: AAG
aaaaagaaaaaaaaaaagaa

SEQ ID NO: 165207 - DNA, 20 bp, Artificial Sequence
  Description of Artificial Sequence: Synthetic oligonucleotide
  Target: LAMA2; (+) strand; PAM type: NRG; PAM sequence: TAG
gaaaaaaaaaaagaaaagaa

SEQ ID NO: 165208 - DNA, 20 bp, Artificial Sequence
  Description of Artificial Sequence: Synthetic oligonucleotide
  Target: LAMA2; (+) strand; PAM type: NRG; PAM sequence: AGG
aaaaaaaaaaagaaaagaat

SEQ ID NO: 165209 - DNA, 20 bp, Artificial Sequence
  Description of Artificial Sequence: Synthetic oligonucleotide
  Target: LAMA2; (+) strand; PAM type: NRG; PAM sequence: AAG
aaaaaaaagaaaagaatagg

SEQ ID NO: 165210 - DNA, 20 bp, Artificial Sequence
  Description of Artificial Sequence: Synthetic oligonucleotide
  Target: LAMA2; (+) strand; PAM type: NRG; PAM sequence: GAG
aaaaaagaaaagaataggaa

SEQ ID NO: 165211 - DNA, 20 bp, Artificial Sequence
  Description of Artificial Sequence: Synthetic oligonucleotide
  Target: LAMA2; (+) strand; PAM type: NRG; PAM sequence: AAG
ataggaagagcaaatatatt

SEQ ID NO: 165212 - DNA, 20 bp, Artificial Sequence
  Description of Artificial Sequence: Synthetic oligonucleotide
  Target: LAMA2; (+) strand; PAM type: NRG; PAM sequence: TGG
ggaagagcaaatatattaag

SEQ ID NO: 165213 - DNA, 20 bp, Artificial Sequence
  Description of Artificial Sequence: Synthetic oligonucleotide
  Target: LAMA2; (+) strand; PAM type: NRG; PAM sequence: AAG
agagcaaatatattaagtgg

SEQ ID NO: 165214 - DNA, 20 bp, Artificial Sequence
  Description of Artificial Sequence: Synthetic oligonucleotide
  Target: LAMA2; (+) strand; PAM type: NRG; PAM sequence: TGG
gcaaatatattaagtggaag

SEQ ID NO: 165215 - DNA, 20 bp, Artificial Sequence
  Description of Artificial Sequence: Synthetic oligonucleotide
  Target: LAMA2; (+) strand; PAM type: NRG; PAM sequence: AAG
agtggaagtggatcattgta

SEQ ID NO: 165216 - DNA, 20 bp, Artificial Sequence
  Description of Artificial Sequence: Synthetic oligonucleotide
  Target: LAMA2; (+) strand; PAM type: NRG; PAM sequence: AGG
gtggaagtggatcattgtaa

SEQ ID NO: 165217 - DNA, 20 bp, Artificial Sequence
  Description of Artificial Sequence: Synthetic oligonucleotide
  Target: LAMA2; (+) strand; PAM type: NRG; PAM sequence: GAG
atcctcgttgtcttcatttt

SEQ ID NO: 165218 - DNA, 20 bp, Artificial Sequence
  Description of Artificial Sequence: Synthetic oligonucleotide
  Target: LAMA2; (+) strand; PAM type: NRG; PAM sequence: CAG
ctcgttgtcttcattttgag

SEQ ID NO: 165219 - DNA, 20 bp, Artificial Sequence
  Description of Artificial Sequence: Synthetic oligonucleotide
  Target: LAMA2; (+) strand; PAM type: NRG; PAM sequence: AAG
tcttcattttgagcagacta

SEQ ID NO: 165220 - DNA, 20 bp, Artificial Sequence
  Description of Artificial Sequence: Synthetic oligonucleotide
  Target: LAMA2; (+) strand; PAM type: NRG; PAM sequence: GAG
ttcattttgagcagactaaa

SEQ ID NO: 165221 - DNA, 20 bp, Artificial Sequence
  Description of Artificial Sequence: Synthetic oligonucleotide
  Target: LAMA2; (+) strand; PAM type: NRG; PAM sequence: AGG
tcattttgagcagactaaag

SEQ ID NO: 165222 - DNA, 20 bp, Artificial Sequence
  Description of Artificial Sequence: Synthetic oligonucleotide
  Target: LAMA2; (+) strand; PAM type: NRG; PAM sequence: GAG
attttgagcagactaaagag

SEQ ID NO: 165223 - DNA, 20 bp, Artificial Sequence
  Description of Artificial Sequence: Synthetic oligonucleotide
  Target: LAMA2; (+) strand; PAM type: NRG; PAM sequence: AGG
ttttgagcagactaaagagg

SEQ ID NO: 165224 - DNA, 20 bp, Artificial Sequence
  Description of Artificial Sequence: Synthetic oligonucleotide
  Target: LAMA2; (+) strand; PAM type: NRG; PAM sequence: GAG
ttgagcagactaaagaggag

SEQ ID NO: 165225 - DNA, 20 bp, Artificial Sequence
  Description of Artificial Sequence: Synthetic oligonucleotide
  Target: LAMA2; (+) strand; PAM type: NRG; PAM sequence: AGG
tgagcagactaaagaggagg

SEQ ID NO: 165226 - DNA, 20 bp, Artificial Sequence
  Description of Artificial Sequence: Synthetic oligonucleotide
  Target: LAMA2; (+) strand; PAM type: NRG; PAM sequence: AAG
gcagactaaagaggaggagg

SEQ ID NO: 165227 - DNA, 20 bp, Artificial Sequence
  Description of Artificial Sequence: Synthetic oligonucleotide
  Target: LAMA2; (+) strand; PAM type: NRG; PAM sequence: AAG
gactaaagaggaggaggaag

SEQ ID NO: 165228 - DNA, 20 bp, Artificial Sequence
  Description of Artificial Sequence: Synthetic oligonucleotide
  Target: LAMA2; (+) strand; PAM type: NRG; PAM sequence: GAG
ctaaagaggaggaggaagaa

SEQ ID NO: 165229 - DNA, 20 bp, Artificial Sequence
  Description of Artificial Sequence: Synthetic oligonucleotide
  Target: LAMA2; (+) strand; PAM type: NRG; PAM sequence: AGG
taaagaggaggaggaagaag

SEQ ID NO: 165230 - DNA, 20 bp, Artificial Sequence
  Description of Artificial Sequence: Synthetic oligonucleotide
  Target: LAMA2; (+) strand; PAM type: NRG; PAM sequence: GAG
aagaggaggaggaagaagag

SEQ ID NO: 165231 - DNA, 20 bp, Artificial Sequence
  Description of Artificial Sequence: Synthetic oligonucleotide
  Target: LAMA2; (+) strand; PAM type: NRG; PAM sequence: AGG
agaggaggaggaagaagagg

SEQ ID NO: 165232 - DNA, 20 bp, Artificial Sequence
  Description of Artificial Sequence: Synthetic oligonucleotide
  Target: LAMA2; (+) strand; PAM type: NRG; PAM sequence: GGG
gaggaggaggaagaagagga

SEQ ID NO: 165233 - DNA, 20 bp, Artificial Sequence
  Description of Artificial Sequence: Synthetic oligonucleotide
  Target: LAMA2; (+) strand; PAM type: NRG; PAM sequence: TGG
ggaggaagaagaggagggat

SEQ ID NO: 165234 - DNA, 20 bp, Artificial Sequence
  Description of Artificial Sequence: Synthetic oligonucleotide
  Target: LAMA2; (+) strand; PAM type: NRG; PAM sequence: TGG
gggattggtcctgctatctc

SEQ ID NO: 165235 - DNA, 20 bp, Artificial Sequence
  Description of Artificial Sequence: Synthetic oligonucleotide
  Target: LAMA2; (+) strand; PAM type: NRG; PAM sequence: GGG
ggattggtcctgctatctct

SEQ ID NO: 165236 - DNA, 20 bp, Artificial Sequence
  Description of Artificial Sequence: Synthetic oligonucleotide
  Target: LAMA2; (+) strand; PAM type: NRG; PAM sequence: TAG
ttggtcctgctatctctggg

SEQ ID NO: 165237 - DNA, 20 bp, Artificial Sequence
  Description of Artificial Sequence: Synthetic oligonucleotide
  Target: LAMA2; (+) strand; PAM type: NRG; PAM sequence: CAG
gtcctgctatctctgggtag

SEQ ID NO: 165238 - DNA, 20 bp, Artificial Sequence
  Description of Artificial Sequence: Synthetic oligonucleotide
  Target: LAMA2; (+) strand; PAM type: NRG; PAM sequence: TGG
ctatctctgggtagcagacg

SEQ ID NO: 165239 - DNA, 20 bp, Artificial Sequence
  Description of Artificial Sequence: Synthetic oligonucleotide
  Target: LAMA2; (+) strand; PAM type: NRG; PAM sequence: AAG
tctctgggtagcagacgtgg

SEQ ID NO: 165240 - DNA, 20 bp, Artificial Sequence
  Description of Artificial Sequence: Synthetic oligonucleotide
  Target: LAMA2; (+) strand; PAM type: NRG; PAM sequence: AAG
gtggaagaaaatccccgtac

SEQ ID NO: 165241 - DNA, 20 bp, Artificial Sequence
  Description of Artificial Sequence: Synthetic oligonucleotide
  Target: LAMA2; (+) strand; PAM type: NRG; PAM sequence: CAG
cccgtacaagtgaacccatg

SEQ ID NO: 165242 - DNA, 20 bp, Artificial Sequence
  Description of Artificial Sequence: Synthetic oligonucleotide
  Target: LAMA2; (+) strand; PAM type: NRG; PAM sequence: AAG
caagtgaacccatgcagttc

SEQ ID NO: 165243 - DNA, 20 bp, Artificial Sequence
  Description of Artificial Sequence: Synthetic oligonucleotide
  Target: LAMA2; (+) strand; PAM type: NRG; PAM sequence: AAG
agttcaagcccatattgttc

SEQ ID NO: 165244 - DNA, 20 bp, Artificial Sequence
  Description of Artificial Sequence: Synthetic oligonucleotide
  Target: LAMA2; (+) strand; PAM type: NRG; PAM sequence: AGG
gttcaagcccatattgttca

SEQ ID NO: 165245 - DNA, 20 bp, Artificial Sequence
  Description of Artificial Sequence: Synthetic oligonucleotide
  Target: LAMA2; (+) strand; PAM type: NRG; PAM sequence: GGG
ttcaagcccatattgttcaa

SEQ ID NO: 165246 - DNA, 20 bp, Artificial Sequence
  Description of Artificial Sequence: Synthetic oligonucleotide
  Target: LAMA2; (+) strand; PAM type: NRG; PAM sequence: AAG
atttgtcaattaaaaacaaa

SEQ ID NO: 165247 - DNA, 20 bp, Artificial Sequence
  Description of Artificial Sequence: Synthetic oligonucleotide
  Target: LAMA2; (+) strand; PAM type: NRG; PAM sequence: TAG
aattaaaaacaaaaagacaa

SEQ ID NO: 165248 - DNA, 20 bp, Artificial Sequence
  Description of Artificial Sequence: Synthetic oligonucleotide
  Target: LAMA2; (+) strand; PAM type: NRG; PAM sequence: GAG
aaagacaatagaacatactt

SEQ ID NO: 165249 - DNA, 20 bp, Artificial Sequence
  Description of Artificial Sequence: Synthetic oligonucleotide
  Target: LAMA2; (+) strand; PAM type: NRG; PAM sequence: AGG
aagacaatagaacatacttg

SEQ ID NO: 165250 - DNA, 20 bp, Artificial Sequence
  Description of Artificial Sequence: Synthetic oligonucleotide
  Target: LAMA2; (+) strand; PAM type: NRG; PAM sequence: GAG
cttgaggttgacaaaaacgt

SEQ ID NO: 165251 - DNA, 20 bp, Artificial Sequence
  Description of Artificial Sequence: Synthetic oligonucleotide
  Target: LAMA2; (+) strand; PAM type: NRG; PAM sequence: AAG
gaggttgacaaaaacgtgag

SEQ ID NO: 165252 - DNA, 20 bp, Artificial Sequence
  Description of Artificial Sequence: Synthetic oligonucleotide
  Target: LAMA2; (+) strand; PAM type: NRG; PAM sequence: AGG
aggttgacaaaaacgtgaga

SEQ ID NO: 165253 - DNA, 20 bp, Artificial Sequence
  Description of Artificial Sequence: Synthetic oligonucleotide
  Target: LAMA2; (+) strand; PAM type: NRG; PAM sequence: TAG
acgtgagaaggatattgctg

SEQ ID NO: 165254 - DNA, 20 bp, Artificial Sequence
  Description of Artificial Sequence: Synthetic oligonucleotide
  Target: LAMA2; (+) strand; PAM type: NRG; PAM sequence: AGG
cgtgagaaggatattgctgt

SEQ ID NO: 165255 - DNA, 20 bp, Artificial Sequence
  Description of Artificial Sequence: Synthetic oligonucleotide
  Target: LAMA2; (+) strand; PAM type: NRG; PAM sequence: TAG
ctgtaggattgattgtttac

SEQ ID NO: 165256 - DNA, 20 bp, Artificial Sequence
  Description of Artificial Sequence: Synthetic oligonucleotide
  Target: LAMA2; (+) strand; PAM type: NRG; PAM sequence: AGG
tgtaggattgattgtttact

SEQ ID NO: 165257 - DNA, 20 bp, Artificial Sequence
  Description of Artificial Sequence: Synthetic oligonucleotide
  Target: LAMA2; (+) strand; PAM type: NRG; PAM sequence: TAG
gtgatcttaactgactgtca

SEQ ID NO: 165258 - DNA, 20 bp, Artificial Sequence
  Description of Artificial Sequence: Synthetic oligonucleotide
  Target: LAMA2; (+) strand; PAM type: NRG; PAM sequence: AAG
actgactgtcatagtaatct

SEQ ID NO: 165259 - DNA, 20 bp, Artificial Sequence
  Description of Artificial Sequence: Synthetic oligonucleotide
  Target: LAMA2; (+) strand; PAM type: NRG; PAM sequence: TAG
aagtacattctcgctgtttc

SEQ ID NO: 165260 - DNA, 20 bp, Artificial Sequence
  Description of Artificial Sequence: Synthetic oligonucleotide
  Target: LAMA2; (+) strand; PAM type: NRG; PAM sequence: AGG
agtacattctcgctgtttct

SEQ ID NO: 165261 - DNA, 20 bp, Artificial Sequence
  Description of Artificial Sequence: Synthetic oligonucleotide
  Target: LAMA2; (+) strand; PAM type: NRG; PAM sequence: TGG
taggatttctgaaatctcaa

SEQ ID NO: 165262 - DNA, 20 bp, Artificial Sequence
  Description of Artificial Sequence: Synthetic oligonucleotide
  Target: LAMA2; (+) strand; PAM type: NRG; PAM sequence: GAG
ggatttctgaaatctcaatg

SEQ ID NO: 165263 - DNA, 20 bp, Artificial Sequence
  Description of Artificial Sequence: Synthetic oligonucleotide
  Target: LAMA2; (+) strand; PAM type: NRG; PAM sequence: AGG
gatttctgaaatctcaatgg

SEQ ID NO: 165264 - DNA, 20 bp, Artificial Sequence
  Description of Artificial Sequence: Synthetic oligonucleotide
  Target: LAMA2; (+) strand; PAM type: NRG; PAM sequence: TAG
ttctgaaatctcaatggagg

SEQ ID NO: 165265 - DNA, 20 bp, Artificial Sequence
  Description of Artificial Sequence: Synthetic oligonucleotide
  Target: LAMA2; (+) strand; PAM type: NRG; PAM sequence: AAG
ctcaatggaggtagctgaac

SEQ ID NO: 165266 - DNA, 20 bp, Artificial Sequence
  Description of Artificial Sequence: Synthetic oligonucleotide
  Target: LAMA2; (+) strand; PAM type: NRG; PAM sequence: AGG
tcaatggaggtagctgaaca

SEQ ID NO: 165267 - DNA, 20 bp, Artificial Sequence
  Description of Artificial Sequence: Synthetic oligonucleotide
  Target: LAMA2; (+) strand; PAM type: NRG; PAM sequence: TGG
gaggtagctgaacaaggacg

SEQ ID NO: 165268 - DNA, 20 bp, Artificial Sequence
  Description of Artificial Sequence: Synthetic oligonucleotide
  Target: LAMA2; (+) strand; PAM type: NRG; PAM sequence: CAG
tggaacaacaatgactcctc

SEQ ID NO: 165269 - DNA, 20 bp, Artificial Sequence
  Description of Artificial Sequence: Synthetic oligonucleotide
  Target: LAMA2; (+) strand; PAM type: NRG; PAM sequence: TGG
tgaaaaatgtgattgtcccc

SEQ ID NO: 165270 - DNA, 20 bp, Artificial Sequence
  Description of Artificial Sequence: Synthetic oligonucleotide
  Target: LAMA2; (+) strand; PAM type: NRG; PAM sequence: GGG
gaaaaatgtgattgtcccct

SEQ ID NO: 165271 - DNA, 20 bp, Artificial Sequence
  Description of Artificial Sequence: Synthetic oligonucleotide
  Target: LAMA2; (+) strand; PAM type: NRG; PAM sequence: TGG
gattgtcccctgggctattc

SEQ ID NO: 165272 - DNA, 20 bp, Artificial Sequence
  Description of Artificial Sequence: Synthetic oligonucleotide
  Target: LAMA2; (+) strand; PAM type: NRG; PAM sequence: GAG
gctattctggcctgtcctgt

SEQ ID NO: 165273 - DNA, 20 bp, Artificial Sequence
  Description of Artificial Sequence: Synthetic oligonucleotide
  Target: LAMA2; (+) strand; PAM type: NRG; PAM sequence: AGG
ctattctggcctgtcctgtg

SEQ ID NO: 165274 - DNA, 20 bp, Artificial Sequence
  Description of Artificial Sequence: Synthetic oligonucleotide
  Target: LAMA2; (+) strand; PAM type: NRG; PAM sequence: AAG
tctggcctgtcctgtgaggt

SEQ ID NO: 165275 - DNA, 20 bp, Artificial Sequence
  Description of Artificial Sequence: Synthetic oligonucleotide
  Target: LAMA2; (+) strand; PAM type: NRG; PAM sequence: AAG
ctactaacctgcttaatctc

SEQ ID NO: 165276 - DNA, 20 bp, Artificial Sequence
  Description of Artificial Sequence: Synthetic oligonucleotide
  Target: LAMA2; (+) strand; PAM type: NRG; PAM sequence: CAG
tgcttaatctcaagtcactt

SEQ ID NO: 165277 - DNA, 20 bp, Artificial Sequence
  Description of Artificial Sequence: Synthetic oligonucleotide
  Target: LAMA2; (+) strand; PAM type: NRG; PAM sequence: AGG
gcttaatctcaagtcacttc

SEQ ID NO: 165278 - DNA, 20 bp, Artificial Sequence
  Description of Artificial Sequence: Synthetic oligonucleotide
  Target: LAMA2; (+) strand; PAM type: NRG; PAM sequence: GAG
ttaatctcaagtcacttcag

SEQ ID NO: 165279 - DNA, 20 bp, Artificial Sequence
  Description of Artificial Sequence: Synthetic oligonucleotide
  Target: LAMA2; (+) strand; PAM type: NRG; PAM sequence: TGG
aagtcacttcaggagctaaa

SEQ ID NO: 165280 - DNA, 20 bp, Artificial Sequence
  Description of Artificial Sequence: Synthetic oligonucleotide
  Target: LAMA2; (+) strand; PAM type: NRG; PAM sequence: CAG
gagctaaatggaaatactcc

SEQ ID NO: 165281 - DNA, 20 bp, Artificial Sequence
  Description of Artificial Sequence: Synthetic oligonucleotide
  Target: LAMA2; (+) strand; PAM type: NRG; PAM sequence: AAG
ctaaatggaaatactcccag

SEQ ID NO: 165282 - DNA, 20 bp, Artificial Sequence
  Description of Artificial Sequence: Synthetic oligonucleotide
  Target: LAMA2; (+) strand; PAM type: NRG; PAM sequence: CAG
tttatttaatcttccactca

SEQ ID NO: 165283 - DNA, 20 bp, Artificial Sequence
  Description of Artificial Sequence: Synthetic oligonucleotide
  Target: LAMA2; (+) strand; PAM type: NRG; PAM sequence: GAG
taatcttccactcacagtgt

SEQ ID NO: 165284 - DNA, 20 bp, Artificial Sequence
  Description of Artificial Sequence: Synthetic oligonucleotide
  Target: LAMA2; (+) strand; PAM type: NRG; PAM sequence: CAG
tccactcacagtgtgagaca

SEQ ID NO: 165285 - DNA, 20 bp, Artificial Sequence
  Description of Artificial Sequence: Synthetic oligonucleotide
  Target: LAMA2; (+) strand; PAM type: NRG; PAM sequence: TGG
actcacagtgtgagacacag

SEQ ID NO: 165286 - DNA, 20 bp, Artificial Sequence
  Description of Artificial Sequence: Synthetic oligonucleotide
  Target: LAMA2; (+) strand; PAM type: NRG; PAM sequence: AAG
acagtgtgagacacagtggc

SEQ ID NO: 165287 - DNA, 20 bp, Artificial Sequence
  Description of Artificial Sequence: Synthetic oligonucleotide
  Target: LAMA2; (+) strand; PAM type: NRG; PAM sequence: GAG
agtgtgagacacagtggcaa

SEQ ID NO: 165288 - DNA, 20 bp, Artificial Sequence
  Description of Artificial Sequence: Synthetic oligonucleotide
  Target: LAMA2; (+) strand; PAM type: NRG; PAM sequence: AGG
gtgtgagacacagtggcaag

SEQ ID NO: 165289 - DNA, 20 bp, Artificial Sequence
  Description of Artificial Sequence: Synthetic oligonucleotide
  Target: LAMA2; (+) strand; PAM type: NRG; PAM sequence: TAG
aggataatgttattgatatt

SEQ ID NO: 165290 - DNA, 20 bp, Artificial Sequence
  Description of Artificial Sequence: Synthetic oligonucleotide
  Target: LAMA2; (+) strand; PAM type: NRG; PAM sequence: AAG
tttagtacaaatcatacctg

SEQ ID NO: 165291 - DNA, 20 bp, Artificial Sequence
  Description of Artificial Sequence: Synthetic oligonucleotide
  Target: LAMA2; (+) strand; PAM type: NRG; PAM sequence: AGG
ttagtacaaatcatacctga

SEQ ID NO: 165292 - DNA, 20 bp, Artificial Sequence
  Description of Artificial Sequence: Synthetic oligonucleotide
  Target: LAMA2; (+) strand; PAM type: NRG; PAM sequence: GGG
tagtacaaatcatacctgaa

SEQ ID NO: 165293 - DNA, 20 bp, Artificial Sequence
  Description of Artificial Sequence: Synthetic oligonucleotide
  Target: LAMA2; (+) strand; PAM type: NRG; PAM sequence: TAG
aaatcatacctgaagggaaa

SEQ ID NO: 165294 - DNA, 20 bp, Artificial Sequence
  Description of Artificial Sequence: Synthetic oligonucleotide
  Target: LAMA2; (+) strand; PAM type: NRG; PAM sequence: AAG
aatagttgatcaaaaattta

SEQ ID NO: 165295 - DNA, 20 bp, Artificial Sequence
  Description of Artificial Sequence: Synthetic oligonucleotide
  Target: LAMA2; (+) strand; PAM type: NRG; PAM sequence: CAG
ttgtgaaaatatttaacaat

SEQ ID NO: 165296 - DNA, 20 bp, Artificial Sequence
  Description of Artificial Sequence: Synthetic oligonucleotide
  Target: LAMA2; (+) strand; PAM type: NRG; PAM sequence: AGG
tgtgaaaatatttaacaatc

SEQ ID NO: 165297 - DNA, 20 bp, Artificial Sequence
  Description of Artificial Sequence: Synthetic oligonucleotide
  Target: LAMA2; (+) strand; PAM type: NRG; PAM sequence: AAG
atatttaacaatcaggaatt

SEQ ID NO: 165298 - DNA, 20 bp, Artificial Sequence
  Description of Artificial Sequence: Synthetic oligonucleotide
  Target: LAMA2; (+) strand; PAM type: NRG; PAM sequence: AAG
ggaattaagaatgttttaat

SEQ ID NO: 165299 - DNA, 20 bp, Artificial Sequence
  Description of Artificial Sequence: Synthetic oligonucleotide
  Target: LAMA2; (+) strand; PAM type: NRG; PAM sequence: TAG
tttaataagcctatttatta

SEQ ID NO: 165300 - DNA, 20 bp, Artificial Sequence
  Description of Artificial Sequence: Synthetic oligonucleotide
  Target: LAMA2; (+) strand; PAM type: NRG; PAM sequence: TGG
ttatagctgatctattttct

SEQ ID NO: 165301 - DNA, 20 bp, Artificial Sequence
  Description of Artificial Sequence: Synthetic oligonucleotide
  Target: LAMA2; (+) strand; PAM type: NRG; PAM sequence: AAG
attttcttggaccacttctg

SEQ ID NO: 165302 - DNA, 20 bp, Artificial Sequence
  Description of Artificial Sequence: Synthetic oligonucleotide
  Target: LAMA2; (+) strand; PAM type: NRG; PAM sequence: GAG
tttcttggaccacttctgaa

SEQ ID NO: 165303 - DNA, 20 bp, Artificial Sequence
  Description of Artificial Sequence: Synthetic oligonucleotide
  Target: LAMA2; (+) strand; PAM type: NRG; PAM sequence: TAG
ttggaccacttctgaagagt

SEQ ID NO: 165304 - DNA, 20 bp, Artificial Sequence
  Description of Artificial Sequence: Synthetic oligonucleotide
  Target: LAMA2; (+) strand; PAM type: NRG; PAM sequence: GAG
ggaccacttctgaagagtta

SEQ ID NO: 165305 - DNA, 20 bp, Artificial Sequence
  Description of Artificial Sequence: Synthetic oligonucleotide
  Target: LAMA2; (+) strand; PAM type: NRG; PAM sequence: TAG
gacatttaaactgcaatgat

SEQ ID NO: 165306 - DNA, 20 bp, Artificial Sequence
  Description of Artificial Sequence: Synthetic oligonucleotide
  Target: LAMA2; (+) strand; PAM type: NRG; PAM sequence: AGG
acatttaaactgcaatgatt

SEQ ID NO: 165307 - DNA, 20 bp, Artificial Sequence
  Description of Artificial Sequence: Synthetic oligonucleotide
  Target: LAMA2; (+) strand; PAM type: NRG; PAM sequence: GAG
atttaaactgcaatgattag

SEQ ID NO: 165308 - DNA, 20 bp, Artificial Sequence
  Description of Artificial Sequence: Synthetic oligonucleotide
  Target: LAMA2; (+) strand; PAM type: NRG; PAM sequence: TAG
aaactgcaatgattaggaga

SEQ ID NO: 165309 - DNA, 20 bp, Artificial Sequence
  Description of Artificial Sequence: Synthetic oligonucleotide
  Target: LAMA2; (+) strand; PAM type: NRG; PAM sequence: AGG
aactgcaatgattaggagat

SEQ ID NO: 165310 - DNA, 20 bp, Artificial Sequence
  Description of Artificial Sequence: Synthetic oligonucleotide
  Target: LAMA2; (+) strand; PAM type: NRG; PAM sequence: TGG
attaggagataggattatac

SEQ ID NO: 165311 - DNA, 20 bp, Artificial Sequence
  Description of Artificial Sequence: Synthetic oligonucleotide
  Target: LAMA2; (+) strand; PAM type: NRG; PAM sequence: GGG
ttaggagataggattatact

SEQ ID NO: 165312 - DNA, 20 bp, Artificial Sequence
  Description of Artificial Sequence: Synthetic oligonucleotide
  Target: LAMA2; (+) strand; PAM type: NRG; PAM sequence: TAG
gttttgaaaatatttttata

SEQ ID NO: 165313 - DNA, 20 bp, Artificial Sequence
  Description of Artificial Sequence: Synthetic oligonucleotide
  Target: LAMA2; (+) strand; PAM type: NRG; PAM sequence: TAG
gacaaaacttgtacactaaa

SEQ ID NO: 165314 - DNA, 20 bp, Artificial Sequence
  Description of Artificial Sequence: Synthetic oligonucleotide
  Target: LAMA2; (+) strand; PAM type: NRG; PAM sequence: CAG
aaaacttgtacactaaatag

SEQ ID NO: 165315 - DNA, 20 bp, Artificial Sequence
  Description of Artificial Sequence: Synthetic oligonucleotide
  Target: LAMA2; (+) strand; PAM type: NRG; PAM sequence: AGG
aaacttgtacactaaatagc

SEQ ID NO: 165316 - DNA, 20 bp, Artificial Sequence
  Description of Artificial Sequence: Synthetic oligonucleotide
  Target: LAMA2; (+) strand; PAM type: NRG; PAM sequence: AAG
caggctgttccctttaacat

SEQ ID NO: 165317 - DNA, 20 bp, Artificial Sequence
  Description of Artificial Sequence: Synthetic oligonucleotide
  Target: LAMA2; (+) strand; PAM type: NRG; PAM sequence: CAG
tccctttaacataagcttct

SEQ ID NO: 165318 - DNA, 20 bp, Artificial Sequence
  Description of Artificial Sequence: Synthetic oligonucleotide
  Target: LAMA2; (+) strand; PAM type: NRG; PAM sequence: AGG
ccctttaacataagcttctc

SEQ ID NO: 165319 - DNA, 20 bp, Artificial Sequence
  Description of Artificial Sequence: Synthetic oligonucleotide
  Target: LAMA2; (+) strand; PAM type: NRG; PAM sequence: GGG
cctttaacataagcttctca

SEQ ID NO: 165320 - DNA, 20 bp, Artificial Sequence
  Description of Artificial Sequence: Synthetic oligonucleotide
  Target: LAMA2; (+) strand; PAM type: NRG; PAM sequence: CAG
gaaacatatctttgttccaa

SEQ ID NO: 165321 - DNA, 20 bp, Artificial Sequence
  Description of Artificial Sequence: Synthetic oligonucleotide
  Target: LAMA2; (+) strand; PAM type: NRG; PAM sequence: GAG
tgttccaacagtgctgctat

SEQ ID NO: 165322 - DNA, 20 bp, Artificial Sequence
  Description of Artificial Sequence: Synthetic oligonucleotide
  Target: LAMA2; (+) strand; PAM type: NRG; PAM sequence: CAG
agtgctgctatgagtcatta

SEQ ID NO: 165323 - DNA, 20 bp, Artificial Sequence
  Description of Artificial Sequence: Synthetic oligonucleotide
  Target: LAMA2; (+) strand; PAM type: NRG; PAM sequence: AAG
cttttttttttacattttaa

SEQ ID NO: 165324 - DNA, 20 bp, Artificial Sequence
  Description of Artificial Sequence: Synthetic oligonucleotide
  Target: LAMA2; (+) strand; PAM type: NRG; PAM sequence: GAG
tgcttttcaataaacttgct

SEQ ID NO: 165325 - DNA, 20 bp, Artificial Sequence
  Description of Artificial Sequence: Synthetic oligonucleotide
  Target: LAMA2; (+) strand; PAM type: NRG; PAM sequence: AAG
atattctcttgtctgccttc

SEQ ID NO: 165326 - DNA, 20 bp, Artificial Sequence
  Description of Artificial Sequence: Synthetic oligonucleotide
  Target: LAMA2; (+) strand; PAM type: NRG; PAM sequence: TAG
ttcaagattgtcaaatttct

SEQ ID NO: 165327 - DNA, 20 bp, Artificial Sequence
  Description of Artificial Sequence: Synthetic oligonucleotide
  Target: LAMA2; (+) strand; PAM type: NRG; PAM sequence: AGG
tcaagattgtcaaatttctt

SEQ ID NO: 165328 - DNA, 20 bp, Artificial Sequence
  Description of Artificial Sequence: Synthetic oligonucleotide
  Target: LAMA2; (+) strand; PAM type: NRG; PAM sequence: TAG
ctataattgtgaaatattaa

SEQ ID NO: 165329 - DNA, 20 bp, Artificial Sequence
  Description of Artificial Sequence: Synthetic oligonucleotide
  Target: LAMA2; (+) strand; PAM type: NRG; PAM sequence: AGG
tataattgtgaaatattaat

SEQ ID NO: 165330 - DNA, 20 bp, Artificial Sequence
  Description of Artificial Sequence: Synthetic oligonucleotide
  Target: LAMA2; (+) strand; PAM type: NRG; PAM sequence: CAG
ttgtgaaatattaataggaa

SEQ ID NO: 165331 - DNA, 20 bp, Artificial Sequence
  Description of Artificial Sequence: Synthetic oligonucleotide
  Target: LAMA2; (+) strand; PAM type: NRG; PAM sequence: AAG
taataggaacagtacgactt

SEQ ID NO: 165332 - DNA, 20 bp, Artificial Sequence
  Description of Artificial Sequence: Synthetic oligonucleotide
  Target: LAMA2; (+) strand; PAM type: NRG; PAM sequence: AGG
aataggaacagtacgactta

SEQ ID NO: 165333 - DNA, 20 bp, Artificial Sequence
  Description of Artificial Sequence: Synthetic oligonucleotide
  Target: LAMA2; (+) strand; PAM type: NRG; PAM sequence: GGG
ataggaacagtacgacttaa

SEQ ID NO: 165334 - DNA, 20 bp, Artificial Sequence
  Description of Artificial Sequence: Synthetic oligonucleotide
  Target: LAMA2; (+) strand; PAM type: NRG; PAM sequence: GAG
aggaacagtacgacttaagg

SEQ ID NO: 165335 - DNA, 20 bp, Artificial Sequence
  Description of Artificial Sequence: Synthetic oligonucleotide
  Target: LAMA2; (+) strand; PAM type: NRG; PAM sequence: AGG
ggaacagtacgacttaaggg

SEQ ID NO: 165336 - DNA, 20 bp, Artificial Sequence
  Description of Artificial Sequence: Synthetic oligonucleotide
  Target: LAMA2; (+) strand; PAM type: NRG; PAM sequence: TGG
acagtacgacttaagggagg

SEQ ID NO: 165337 - DNA, 20 bp, Artificial Sequence
  Description of Artificial Sequence: Synthetic oligonucleotide
  Target: LAMA2; (+) strand; PAM type: NRG; PAM sequence: TAG
cttaagggaggtggaatgaa

SEQ ID NO: 165338 - DNA, 20 bp, Artificial Sequence
  Description of Artificial Sequence: Synthetic oligonucleotide
  Target: LAMA2; (+) strand; PAM type: NRG; PAM sequence: GAG
gggaggtggaatgaatagat

SEQ ID NO: 165339 - DNA, 20 bp, Artificial Sequence
  Description of Artificial Sequence: Synthetic oligonucleotide
  Target: LAMA2; (+) strand; PAM type: NRG; PAM sequence: TGG
ggaatgaatagatgagaaac

SEQ ID NO: 165340 - DNA, 20 bp, Artificial Sequence
  Description of Artificial Sequence: Synthetic oligonucleotide
  Target: LAMA2; (+) strand; PAM type: NRG; PAM sequence: TGG
gaatagatgagaaactggcc

SEQ ID NO: 165341 - DNA, 20 bp, Artificial Sequence
  Description of Artificial Sequence: Synthetic oligonucleotide
  Target: LAMA2; (+) strand; PAM type: NRG; PAM sequence: GGG
aatagatgagaaactggcct

SEQ ID NO: 165342 - DNA, 20 bp, Artificial Sequence
  Description of Artificial Sequence: Synthetic oligonucleotide
  Target: LAMA2; (+) strand; PAM type: NRG; PAM sequence: CAG
tgaatctcgacttcaccata

SEQ ID NO: 165343 - DNA, 20 bp, Artificial Sequence
  Description of Artificial Sequence: Synthetic oligonucleotide
  Target: LAMA2; (+) strand; PAM type: NRG; PAM sequence: AAG
tctcgacttcaccatacagt

SEQ ID NO: 165344 - DNA, 20 bp, Artificial Sequence
  Description of Artificial Sequence: Synthetic oligonucleotide
  Target: LAMA2; (+) strand; PAM type: NRG; PAM sequence: GAG
cttcaccatacagtaagcct

SEQ ID NO: 165345 - DNA, 20 bp, Artificial Sequence
  Description of Artificial Sequence: Synthetic oligonucleotide
  Target: LAMA2; (+) strand; PAM type: NRG; PAM sequence: TGG
gtaagcctgagaccctgcac

SEQ ID NO: 165346 - DNA, 20 bp, Artificial Sequence
  Description of Artificial Sequence: Synthetic oligonucleotide
  Target: LAMA2; (+) strand; PAM type: NRG; PAM sequence: GGG
taagcctgagaccctgcact

SEQ ID NO: 165347 - DNA, 20 bp, Artificial Sequence
  Description of Artificial Sequence: Synthetic oligonucleotide
  Target: LAMA2; (+) strand; PAM type: NRG; PAM sequence: TAG
cactgggtgctacacctctt

SEQ ID NO: 165348 - DNA, 20 bp, Artificial Sequence
  Description of Artificial Sequence: Synthetic oligonucleotide
  Target: LAMA2; (+) strand; PAM type: NRG; PAM sequence: AGG
actgggtgctacacctcttt

SEQ ID NO: 165349 - DNA, 20 bp, Artificial Sequence
  Description of Artificial Sequence: Synthetic oligonucleotide
  Target: LAMA2; (+) strand; PAM type: NRG; PAM sequence: TAG
tgctacacctctttaggctt

SEQ ID NO: 165350 - DNA, 20 bp, Artificial Sequence
  Description of Artificial Sequence: Synthetic oligonucleotide
  Target: LAMA2; (+) strand; PAM type: NRG; PAM sequence: CAG
tacacctctttaggctttag

SEQ ID NO: 165351 - DNA, 20 bp, Artificial Sequence
  Description of Artificial Sequence: Synthetic oligonucleotide
  Target: LAMA2; (+) strand; PAM type: NRG; PAM sequence: AGG
acacctctttaggctttagc

SEQ ID NO: 165352 - DNA, 20 bp, Artificial Sequence
  Description of Artificial Sequence: Synthetic oligonucleotide
  Target: LAMA2; (+) strand; PAM type: NRG; PAM sequence: AAG
ggctttagcaggtaaacacc

SEQ ID NO: 165353 - DNA, 20 bp, Artificial Sequence
  Description of Artificial Sequence: Synthetic oligonucleotide
  Target: LAMA2; (+) strand; PAM type: NRG; PAM sequence: GAG
caggtaaacaccaagtccct

SEQ ID NO: 165354 - DNA, 20 bp, Artificial Sequence
  Description of Artificial Sequence: Synthetic oligonucleotide
  Target: LAMA2; (+) strand; PAM type: NRG; PAM sequence: CAG
ctacactttcacctctcccg

SEQ ID NO: 165355 - DNA, 20 bp, Artificial Sequence
  Description of Artificial Sequence: Synthetic oligonucleotide
  Target: LAMA2; (+) strand; PAM type: NRG; PAM sequence: CAG
cacctctcccgcagacccca

SEQ ID NO: 165356 - DNA, 20 bp, Artificial Sequence
  Description of Artificial Sequence: Synthetic oligonucleotide
  Target: LAMA2; (+) strand; PAM type: NRG; PAM sequence: AAG
cccgcagaccccacagtctg

SEQ ID NO: 165357 - DNA, 20 bp, Artificial Sequence
  Description of Artificial Sequence: Synthetic oligonucleotide
  Target: LAMA2; (+) strand; PAM type: NRG; PAM sequence: TGG
agaccccacagtctgaagcc

SEQ ID NO: 165358 - DNA, 20 bp, Artificial Sequence
  Description of Artificial Sequence: Synthetic oligonucleotide
  Target: LAMA2; (+) strand; PAM type: NRG; PAM sequence: TGG
agtctgaagcctggcatgca

SEQ ID NO: 165359 - DNA, 20 bp, Artificial Sequence
  Description of Artificial Sequence: Synthetic oligonucleotide
  Target: LAMA2; (+) strand; PAM type: NRG; PAM sequence: GGG
gtctgaagcctggcatgcat

SEQ ID NO: 165360 - DNA, 20 bp, Artificial Sequence
  Description of Artificial Sequence: Synthetic oligonucleotide
  Target: LAMA2; (+) strand; PAM type: NRG; PAM sequence: GGG
tctgaagcctggcatgcatg

SEQ ID NO: 165361 - DNA, 20 bp, Artificial Sequence
  Description of Artificial Sequence: Synthetic oligonucleotide
  Target: LAMA2; (+) strand; PAM type: NRG; PAM sequence: CAG
cctggcatgcatggggcctc

SEQ ID NO: 165362 - DNA, 20 bp, Artificial Sequence
  Description of Artificial Sequence: Synthetic oligonucleotide
  Target: LAMA2; (+) strand; PAM type: NRG; PAM sequence: AGG
ctggcatgcatggggcctcc

SEQ ID NO: 165363 - DNA, 20 bp, Artificial Sequence
  Description of Artificial Sequence: Synthetic oligonucleotide
  Target: LAMA2; (+) strand; PAM type: NRG; PAM sequence: CAG
tggggcctccaggactgctc

SEQ ID NO: 165364 - DNA, 20 bp, Artificial Sequence
  Description of Artificial Sequence: Synthetic oligonucleotide
  Target: LAMA2; (+) strand; PAM type: NRG; PAM sequence: CAG
ccaggactgctccagcccta

SEQ ID NO: 165365 - DNA, 20 bp, Artificial Sequence
  Description of Artificial Sequence: Synthetic oligonucleotide
  Target: LAMA2; (+) strand; PAM type: NRG; PAM sequence: TGG
gactgctccagccctacagc

SEQ ID NO: 165366 - DNA, 20 bp, Artificial Sequence
  Description of Artificial Sequence: Synthetic oligonucleotide
  Target: LAMA2; (+) strand; PAM type: NRG; PAM sequence: GGG
actgctccagccctacagct

SEQ ID NO: 165367 - DNA, 20 bp, Artificial Sequence
  Description of Artificial Sequence: Synthetic oligonucleotide
  Target: LAMA2; (+) strand; PAM type: NRG; PAM sequence: TAG
cagctgggattctttctcat

SEQ ID NO: 165368 - DNA, 20 bp, Artificial Sequence
  Description of Artificial Sequence: Synthetic oligonucleotide
  Target: LAMA2; (+) strand; PAM type: NRG; PAM sequence: CAG
tgggattctttctcattagt

SEQ ID NO: 165369 - DNA, 20 bp, Artificial Sequence
  Description of Artificial Sequence: Synthetic oligonucleotide
  Target: LAMA2; (+) strand; PAM type: NRG; PAM sequence: AGG
gggattctttctcattagtc

SEQ ID NO: 165370 - DNA, 20 bp, Artificial Sequence
  Description of Artificial Sequence: Synthetic oligonucleotide
  Target: LAMA2; (+) strand; PAM type: NRG; PAM sequence: TGG
ttctttctcattagtcaggc

SEQ ID NO: 165371 - DNA, 20 bp, Artificial Sequence
  Description of Artificial Sequence: Synthetic oligonucleotide
  Target: LAMA2; (+) strand; PAM type: NRG; PAM sequence: TGG
ttctcattagtcaggctggc

SEQ ID NO: 165372 - DNA, 20 bp, Artificial Sequence
  Description of Artificial Sequence: Synthetic oligonucleotide
  Target: LAMA2; (+) strand; PAM type: NRG; PAM sequence: CAG
gtcaggctggctggtgctca

SEQ ID NO: 165373 - DNA, 20 bp, Artificial Sequence
  Description of Artificial Sequence: Synthetic oligonucleotide
  Target: LAMA2; (+) strand; PAM type: NRG; PAM sequence: CAG
ggctggtgctcacagcatac

SEQ ID NO: 165374 - DNA, 20 bp, Artificial Sequence
  Description of Artificial Sequence: Synthetic oligonucleotide
  Target: LAMA2; (+) strand; PAM type: NRG; PAM sequence: TAG
ggtgctcacagcataccagt

SEQ ID NO: 165375 - DNA, 20 bp, Artificial Sequence
  Description of Artificial Sequence: Synthetic oligonucleotide
  Target: LAMA2; (+) strand; PAM type: NRG; PAM sequence: CAG
tattaaatctccctcaccta

SEQ ID NO: 165376 - DNA, 20 bp, Artificial Sequence
  Description of Artificial Sequence: Synthetic oligonucleotide
  Target: LAMA2; (+) strand; PAM type: NRG; PAM sequence: GAG
atctccctcacctacagcct

SEQ ID NO: 165377 - DNA, 20 bp, Artificial Sequence
  Description of Artificial Sequence: Synthetic oligonucleotide
  Target: LAMA2; (+) strand; PAM type: NRG; PAM sequence: AAG
cctacagcctgagtcttatg

SEQ ID NO: 165378 - DNA, 20 bp, Artificial Sequence
  Description of Artificial Sequence: Synthetic oligonucleotide
  Target: LAMA2; (+) strand; PAM type: NRG; PAM sequence: GAG
gagtcttatgaagactaaat

SEQ ID NO: 165379 - DNA, 20 bp, Artificial Sequence
  Description of Artificial Sequence: Synthetic oligonucleotide
  Target: LAMA2; (+) strand; PAM type: NRG; PAM sequence: AAG
ctaaatgagctgttaatgtt

SEQ ID NO: 165380 - DNA, 20 bp, Artificial Sequence
  Description of Artificial Sequence: Synthetic oligonucleotide
  Target: LAMA2; (+) strand; PAM type: NRG; PAM sequence: AGG
taaatgagctgttaatgtta

SEQ ID NO: 165381 - DNA, 20 bp, Artificial Sequence
  Description of Artificial Sequence: Synthetic oligonucleotide
  Target: LAMA2; (+) strand; PAM type: NRG; PAM sequence: CAG
ttaatgttaaggattcatca

SEQ ID NO: 165382 - DNA, 20 bp, Artificial Sequence
  Description of Artificial Sequence: Synthetic oligonucleotide
  Target: LAMA2; (+) strand; PAM type: NRG; PAM sequence: TGG
taaggattcatcacagcacc

SEQ ID NO: 165383 - DNA, 20 bp, Artificial Sequence
  Description of Artificial Sequence: Synthetic oligonucleotide
  Target: LAMA2; (+) strand; PAM type: NRG; PAM sequence: TAG
tcatcacagcacctggtgtg

SEQ ID NO: 165384 - DNA, 20 bp, Artificial Sequence
  Description of Artificial Sequence: Synthetic oligonucleotide
  Target: LAMA2; (+) strand; PAM type: NRG; PAM sequence: AAG
acctggtgtgtagatgatgt

SEQ ID NO: 165385 - DNA, 20 bp, Artificial Sequence
  Description of Artificial Sequence: Synthetic oligonucleotide
  Target: LAMA2; (+) strand; PAM type: NRG; PAM sequence: TGG
gtagatgatgtaagttttga

SEQ ID NO: 165386 - DNA, 20 bp, Artificial Sequence
  Description of Artificial Sequence: Synthetic oligonucleotide
  Target: LAMA2; (+) strand; PAM type: NRG; PAM sequence: TAG
attattattaatgtaatcac

SEQ ID NO: 165387 - DNA, 20 bp, Artificial Sequence
  Description of Artificial Sequence: Synthetic oligonucleotide
  Target: LAMA2; (+) strand; PAM type: NRG; PAM sequence: CAG
tatatacccatgtattgatt

SEQ ID NO: 165388 - DNA, 20 bp, Artificial Sequence
  Description of Artificial Sequence: Synthetic oligonucleotide
  Target: LAMA2; (+) strand; PAM type: NRG; PAM sequence: TAG
tatacatcttattttgtaaa

SEQ ID NO: 165389 - DNA, 20 bp, Artificial Sequence
  Description of Artificial Sequence: Synthetic oligonucleotide
  Target: LAMA2; (+) strand; PAM type: NRG; PAM sequence: AGG
atacatcttattttgtaaat

SEQ ID NO: 165390 - DNA, 20 bp, Artificial Sequence
  Description of Artificial Sequence: Synthetic oligonucleotide
  Target: LAMA2; (+) strand; PAM type: NRG; PAM sequence: GAG
ttattttgtaaataggattt

SEQ ID NO: 165391 - DNA, 20 bp, Artificial Sequence
  Description of Artificial Sequence: Synthetic oligonucleotide
  Target: LAMA2; (+) strand; PAM type: NRG; PAM sequence: AAG
ttttgtaaataggatttgag

SEQ ID NO: 165392 - DNA, 20 bp, Artificial Sequence
  Description of Artificial Sequence: Synthetic oligonucleotide
  Target: LAMA2; (+) strand; PAM type: NRG; PAM sequence: AAG
aggatttgagaagttgtatt

SEQ ID NO: 165393 - DNA, 20 bp, Artificial Sequence
  Description of Artificial Sequence: Synthetic oligonucleotide
  Target: LAMA2; (+) strand; PAM type: NRG; PAM sequence: TGG
ttgagaagttgtattaagta

SEQ ID NO: 165394 - DNA, 20 bp, Artificial Sequence
  Description of Artificial Sequence: Synthetic oligonucleotide
  Target: LAMA2; (+) strand; PAM type: NRG; PAM sequence: GAG
ttgtattaagtatggtacat

SEQ ID NO: 165395 - DNA, 20 bp, Artificial Sequence
  Description of Artificial Sequence: Synthetic oligonucleotide
  Target: LAMA2; (+) strand; PAM type: NRG; PAM sequence: CAG
attaagtatggtacatgaga

SEQ ID NO: 165396 - DNA, 20 bp, Artificial Sequence
  Description of Artificial Sequence: Synthetic oligonucleotide
  Target: LAMA2; (+) strand; PAM type: NRG; PAM sequence: TAG
catgagacagatgattccac

SEQ ID NO: 165397 - DNA, 20 bp, Artificial Sequence
  Description of Artificial Sequence: Synthetic oligonucleotide
  Target: LAMA2; (+) strand; PAM type: NRG; PAM sequence: AGG
atgagacagatgattccact

SEQ ID NO: 165398 - DNA, 20 bp, Artificial Sequence
  Description of Artificial Sequence: Synthetic oligonucleotide
  Target: LAMA2; (+) strand; PAM type: NRG; PAM sequence: AAG
attccactaggtcaaaactg

SEQ ID NO: 165399 - DNA, 20 bp, Artificial Sequence
  Description of Artificial Sequence: Synthetic oligonucleotide
  Target: LAMA2; (+) strand; PAM type: NRG; PAM sequence: GAG
aagtgcaacttaaaaataat

SEQ ID NO: 165400 - DNA, 20 bp, Artificial Sequence
  Description of Artificial Sequence: Synthetic oligonucleotide
  Target: LAMA2; (+) strand; PAM type: NRG; PAM sequence: GAG
ataatgagtatacatttctt

SEQ ID NO: 165401 - DNA, 20 bp, Artificial Sequence
  Description of Artificial Sequence: Synthetic oligonucleotide
  Target: LAMA2; (+) strand; PAM type: NRG; PAM sequence: GAG
aatgagtatacatttcttga

SEQ ID NO: 165402 - DNA, 20 bp, Artificial Sequence
  Description of Artificial Sequence: Synthetic oligonucleotide
  Target: LAMA2; (+) strand; PAM type: NRG; PAM sequence: AGG
atgagtatacatttcttgag

SEQ ID NO: 165403 - DNA, 20 bp, Artificial Sequence
  Description of Artificial Sequence: Synthetic oligonucleotide
  Target: LAMA2; (+) strand; PAM type: NRG; PAM sequence: GGG
tgagtatacatttcttgaga

SEQ ID NO: 165404 - DNA, 20 bp, Artificial Sequence
  Description of Artificial Sequence: Synthetic oligonucleotide
  Target: LAMA2; (+) strand; PAM type: NRG; PAM sequence: TGG
tacatttcttgagagggaca

SEQ ID NO: 165405 - DNA, 20 bp, Artificial Sequence
  Description of Artificial Sequence: Synthetic oligonucleotide
  Target: LAMA2; (+) strand; PAM type: NRG; PAM sequence: AAG
gagggacatggcatcatgaa

SEQ ID NO: 165406 - DNA, 20 bp, Artificial Sequence
  Description of Artificial Sequence: Synthetic oligonucleotide
  Target: LAMA2; (+) strand; PAM type: NRG; PAM sequence: AAG
catggcatcatgaaaagaaa

SEQ ID NO: 165407 - DNA, 20 bp, Artificial Sequence
  Description of Artificial Sequence: Synthetic oligonucleotide
  Target: LAMA2; (+) strand; PAM type: NRG; PAM sequence: AGG
atggcatcatgaaaagaaaa

SEQ ID NO: 165408 - DNA, 20 bp, Artificial Sequence
  Description of Artificial Sequence: Synthetic oligonucleotide
  Target: LAMA2; (+) strand; PAM type: NRG; PAM sequence: TGG
catgaaaagaaaaaggaatt

SEQ ID NO: 165409 - DNA, 20 bp, Artificial Sequence
  Description of Artificial Sequence: Synthetic oligonucleotide
  Target: LAMA2; (+) strand; PAM type: NRG; PAM sequence: CAG
aagaaaaaggaatttggttt

SEQ ID NO: 165410 - DNA, 20 bp, Artificial Sequence
  Description of Artificial Sequence: Synthetic oligonucleotide
  Target: LAMA2; (+) strand; PAM type: NRG; PAM sequence: TAG
tggtttcagtgaatcctacc

SEQ ID NO: 165411 - DNA, 20 bp, Artificial Sequence
  Description of Artificial Sequence: Synthetic oligonucleotide
  Target: LAMA2; (+) strand; PAM type: NRG; PAM sequence: TGG
tcctacctagctgcactact

SEQ ID NO: 165412 - DNA, 20 bp, Artificial Sequence
  Description of Artificial Sequence: Synthetic oligonucleotide
  Target: LAMA2; (+) strand; PAM type: NRG; PAM sequence: CAG
acctagctgcactacttgga

SEQ ID NO: 165413 - DNA, 20 bp, Artificial Sequence
  Description of Artificial Sequence: Synthetic oligonucleotide
  Target: LAMA2; (+) strand; PAM type: NRG; PAM sequence: AGG
cctagctgcactacttggac

SEQ ID NO: 165414 - DNA, 20 bp, Artificial Sequence
  Description of Artificial Sequence: Synthetic oligonucleotide
  Target: LAMA2; (+) strand; PAM type: NRG; PAM sequence: TGG
gctctgtttttgctaaatct

SEQ ID NO: 165415 - DNA, 20 bp, Artificial Sequence
  Description of Artificial Sequence: Synthetic oligonucleotide
  Target: LAMA2; (+) strand; PAM type: NRG; PAM sequence: GGG
ctctgtttttgctaaatctt

SEQ ID NO: 165416 - DNA, 20 bp, Artificial Sequence
  Description of Artificial Sequence: Synthetic oligonucleotide
  Target: LAMA2; (+) strand; PAM type: NRG; PAM sequence: AAG
ggtttttacctatacatcct

SEQ ID NO: 165417 - DNA, 20 bp, Artificial Sequence
  Description of Artificial Sequence: Synthetic oligonucleotide
  Target: LAMA2; (+) strand; PAM type: NRG; PAM sequence: AGG
gtttttacctatacatccta

SEQ ID NO: 165418 - DNA, 20 bp, Artificial Sequence
  Description of Artificial Sequence: Synthetic oligonucleotide
  Target: LAMA2; (+) strand; PAM type: NRG; PAM sequence: TGG
atcctaaggattgatttaaa

SEQ ID NO: 165419 - DNA, 20 bp, Artificial Sequence
  Description of Artificial Sequence: Synthetic oligonucleotide
  Target: LAMA2; (+) strand; PAM type: NRG; PAM sequence: CAG
ttacaaactgacatgccatt

SEQ ID NO: 165420 - DNA, 20 bp, Artificial Sequence
  Description of Artificial Sequence: Synthetic oligonucleotide
  Target: LAMA2; (+) strand; PAM type: NRG; PAM sequence: TAG
aactgacatgccattcagct

SEQ ID NO: 165421 - DNA, 20 bp, Artificial Sequence
  Description of Artificial Sequence: Synthetic oligonucleotide
  Target: LAMA2; (+) strand; PAM type: NRG; PAM sequence: TGG
tcagcttagttaccatcaca

SEQ ID NO: 165422 - DNA, 20 bp, Artificial Sequence
  Description of Artificial Sequence: Synthetic oligonucleotide
  Target: LAMA2; (+) strand; PAM type: NRG; PAM sequence: TAG
accatcacatggattccata

SEQ ID NO: 165423 - DNA, 20 bp, Artificial Sequence
  Description of Artificial Sequence: Synthetic oligonucleotide
  Target: LAMA2; (+) strand; PAM type: NRG; PAM sequence: AAG
acatggattccatatagttc

SEQ ID NO: 165424 - DNA, 20 bp, Artificial Sequence
  Description of Artificial Sequence: Synthetic oligonucleotide
  Target: LAMA2; (+) strand; PAM type: NRG; PAM sequence: AGG
catggattccatatagttca

SEQ ID NO: 165425 - DNA, 20 bp, Artificial Sequence
  Description of Artificial Sequence: Synthetic oligonucleotide
  Target: LAMA2; (+) strand; PAM type: NRG; PAM sequence: AAG
ttccatatagttcaaggaaa

SEQ ID NO: 165426 - DNA, 20 bp, Artificial Sequence
  Description of Artificial Sequence: Synthetic oligonucleotide
  Target: LAMA2; (+) strand; PAM type: NRG; PAM sequence: AAG
tctttcctgtgacttctctg

SEQ ID NO: 165427 - DNA, 20 bp, Artificial Sequence
  Description of Artificial Sequence: Synthetic oligonucleotide
  Target: LAMA2; (+) strand; PAM type: NRG; PAM sequence: AGG
ctttcctgtgacttctctga

SEQ ID NO: 165428 - DNA, 20 bp, Artificial Sequence
  Description of Artificial Sequence: Synthetic oligonucleotide
  Target: LAMA2; (+) strand; PAM type: NRG; PAM sequence: GGG
tttcctgtgacttctctgaa

SEQ ID NO: 165429 - DNA, 20 bp, Artificial Sequence
  Description of Artificial Sequence: Synthetic oligonucleotide
  Target: LAMA2; (+) strand; PAM type: NRG; PAM sequence: GAG
tatttacatgtgtccatttt

SEQ ID NO: 165430 - DNA, 20 bp, Artificial Sequence
  Description of Artificial Sequence: Synthetic oligonucleotide
  Target: LAMA2; (+) strand; PAM type: NRG; PAM sequence: AAG
ttttgagctaataaataatc

SEQ ID NO: 165431 - DNA, 20 bp, Artificial Sequence
  Description of Artificial Sequence: Synthetic oligonucleotide
  Target: LAMA2; (+) strand; PAM type: NRG; PAM sequence: TAG
acatctatttatacacacac

SEQ ID NO: 165432 - DNA, 20 bp, Artificial Sequence
  Description of Artificial Sequence: Synthetic oligonucleotide
  Target: LAMA2; (+) strand; PAM type: NRG; PAM sequence: TGG
acacactagtaaacttatac

SEQ ID NO: 165433 - DNA, 20 bp, Artificial Sequence
  Description of Artificial Sequence: Synthetic oligonucleotide
  Target: LAMA2; (+) strand; PAM type: NRG; PAM sequence: AAG
actagtaaacttatactggt

SEQ ID NO: 165434 - DNA, 20 bp, Artificial Sequence
  Description of Artificial Sequence: Synthetic oligonucleotide
  Target: LAMA2; (+) strand; PAM type: NRG; PAM sequence: CAG
actggtaagcactgcttata

SEQ ID NO: 165435 - DNA, 20 bp, Artificial Sequence
  Description of Artificial Sequence: Synthetic oligonucleotide
  Target: LAMA2; (+) strand; PAM type: NRG; PAM sequence: AAG
gtaagcactgcttatacagt

SEQ ID NO: 165436 - DNA, 20 bp, Artificial Sequence
  Description of Artificial Sequence: Synthetic oligonucleotide
  Target: LAMA2; (+) strand; PAM type: NRG; PAM sequence: TAG
ccaatatacatatgtacaca

SEQ ID NO: 165437 - DNA, 20 bp, Artificial Sequence
  Description of Artificial Sequence: Synthetic oligonucleotide
  Target: LAMA2; (+) strand; PAM type: NRG; PAM sequence: TGG
acatatgtacacatagtgta

SEQ ID NO: 165438 - DNA, 20 bp, Artificial Sequence
  Description of Artificial Sequence: Synthetic oligonucleotide
  Target: LAMA2; (+) strand; PAM type: NRG; PAM sequence: GGG
catatgtacacatagtgtat

SEQ ID NO: 165439 - DNA, 20 bp, Artificial Sequence
  Description of Artificial Sequence: Synthetic oligonucleotide
  Target: LAMA2; (+) strand; PAM type: NRG; PAM sequence: GAG
atagtgtatgggtgaaaact

SEQ ID NO: 165440 - DNA, 20 bp, Artificial Sequence
  Description of Artificial Sequence: Synthetic oligonucleotide
  Target: LAMA2; (+) strand; PAM type: NRG; PAM sequence: TGG
gggtgaaaactgagactgtg

SEQ ID NO: 165441 - DNA, 20 bp, Artificial Sequence
  Description of Artificial Sequence: Synthetic oligonucleotide
  Target: LAMA2; (+) strand; PAM type: NRG; PAM sequence: GAG
ctgtgtggcacatatgaaat

SEQ ID NO: 165442 - DNA, 20 bp, Artificial Sequence
  Description of Artificial Sequence: Synthetic oligonucleotide
  Target: LAMA2; (+) strand; PAM type: NRG; PAM sequence: CAG
tatgaaatgagtgacctttc

SEQ ID NO: 165443 - DNA, 20 bp, Artificial Sequence
  Description of Artificial Sequence: Synthetic oligonucleotide
  Target: LAMA2; (+) strand; PAM type: NRG; PAM sequence: GAG
aaatgagtgacctttccagt

SEQ ID NO: 165444 - DNA, 20 bp, Artificial Sequence
  Description of Artificial Sequence: Synthetic oligonucleotide
  Target: LAMA2; (+) strand; PAM type: NRG; PAM sequence: AAG
gacctttccagtgagcattg

SEQ ID NO: 165445 - DNA, 20 bp, Artificial Sequence
  Description of Artificial Sequence: Synthetic oligonucleotide
  Target: LAMA2; (+) strand; PAM type: NRG; PAM sequence: TGG
gagcattgaagattttaaaa

SEQ ID NO: 165446 - DNA, 20 bp, Artificial Sequence
  Description of Artificial Sequence: Synthetic oligonucleotide
  Target: LAMA2; (+) strand; PAM type: NRG; PAM sequence: GAG
gcattgaagattttaaaatg

SEQ ID NO: 165447 - DNA, 20 bp, Artificial Sequence
  Description of Artificial Sequence: Synthetic oligonucleotide
  Target: LAMA2; (+) strand; PAM type: NRG; PAM sequence: AGG
cattgaagattttaaaatgg

SEQ ID NO: 165448 - DNA, 20 bp, Artificial Sequence
  Description of Artificial Sequence: Synthetic oligonucleotide
  Target: LAMA2; (+) strand; PAM type: NRG; PAM sequence: CAG
gaagattttaaaatggagga

SEQ ID NO: 165449 - DNA, 20 bp, Artificial Sequence
  Description of Artificial Sequence: Synthetic oligonucleotide
  Target: LAMA2; (+) strand; PAM type: NRG; PAM sequence: AAG
attttaaaatggaggacaga

SEQ ID NO: 165450 - DNA, 20 bp, Artificial Sequence
  Description of Artificial Sequence: Synthetic oligonucleotide
  Target: LAMA2; (+) strand; PAM type: NRG; PAM sequence: GAG
atggaggacagaaagaatgt

SEQ ID NO: 165451 - DNA, 20 bp, Artificial Sequence
  Description of Artificial Sequence: Synthetic oligonucleotide
  Target: LAMA2; (+) strand; PAM type: NRG; PAM sequence: TAG
gaaagaatgtgagatttttc

SEQ ID NO: 165452 - DNA, 20 bp, Artificial Sequence
  Description of Artificial Sequence: Synthetic oligonucleotide
  Target: LAMA2; (+) strand; PAM type: NRG; PAM sequence: AAG
aatgtgagatttttctagac

SEQ ID NO: 165453 - DNA, 20 bp, Artificial Sequence
  Description of Artificial Sequence: Synthetic oligonucleotide
  Target: LAMA2; (+) strand; PAM type: NRG; PAM sequence: GAG
tgtgagatttttctagacaa

SEQ ID NO: 165454 - DNA, 20 bp, Artificial Sequence
  Description of Artificial Sequence: Synthetic oligonucleotide
  Target: LAMA2; (+) strand; PAM type: NRG; PAM sequence: TGG
agatttttctagacaagaga

SEQ ID NO: 165455 - DNA, 20 bp, Artificial Sequence
  Description of Artificial Sequence: Synthetic oligonucleotide
  Target: LAMA2; (+) strand; PAM type: NRG; PAM sequence: CAG
agatggaatttcctttatcc

SEQ ID NO: 165456 - DNA, 20 bp, Artificial Sequence
  Description of Artificial Sequence: Synthetic oligonucleotide
  Target: LAMA2; (+) strand; PAM type: NRG; PAM sequence: AGG
gatggaatttcctttatccc

SEQ ID NO: 165457 - DNA, 20 bp, Artificial Sequence
  Description of Artificial Sequence: Synthetic oligonucleotide
  Target: LAMA2; (+) strand; PAM type: NRG; PAM sequence: TAG
ggaatttcctttatcccagg

SEQ ID NO: 165458 - DNA, 20 bp, Artificial Sequence
  Description of Artificial Sequence: Synthetic oligonucleotide
  Target: LAMA2; (+) strand; PAM type: NRG; PAM sequence: TGG
cctttatcccaggtagcgtt

SEQ ID NO: 165459 - DNA, 20 bp, Artificial Sequence
  Description of Artificial Sequence: Synthetic oligonucleotide
  Target: LAMA2; (+) strand; PAM type: NRG; PAM sequence: TAG
atcaatgctcttaattgctg

SEQ ID NO: 165460 - DNA, 20 bp, Artificial Sequence
  Description of Artificial Sequence: Synthetic oligonucleotide
  Target: LAMA2; (+) strand; PAM type: NRG; PAM sequence: TAG
tgtagaccttcgttattata

SEQ ID NO: 165461 - DNA, 20 bp, Artificial Sequence
  Description of Artificial Sequence: Synthetic oligonucleotide
  Target: LAMA2; (+) strand; PAM type: NRG; PAM sequence: CAG
ctatccaatctataaaatga

SEQ ID NO: 165462 - DNA, 20 bp, Artificial Sequence
  Description of Artificial Sequence: Synthetic oligonucleotide
  Target: LAMA2; (+) strand; PAM type: NRG; PAM sequence: GAG
aatctataaaatgacagatt

SEQ ID NO: 165463 - DNA, 20 bp, Artificial Sequence
  Description of Artificial Sequence: Synthetic oligonucleotide
  Target: LAMA2; (+) strand; PAM type: NRG; PAM sequence: AAG
taaaatgacagattgagttg

SEQ ID NO: 165464 - DNA, 20 bp, Artificial Sequence
  Description of Artificial Sequence: Synthetic oligonucleotide
  Target: LAMA2; (+) strand; PAM type: NRG; PAM sequence: TAG
tctgcaatattattttgcta

SEQ ID NO: 165465 - DNA, 20 bp, Artificial Sequence
  Description of Artificial Sequence: Synthetic oligonucleotide
  Target: LAMA2; (+) strand; PAM type: NRG; PAM sequence: AAG
tgctatagaaaatattctgt

SEQ ID NO: 165466 - DNA, 20 bp, Artificial Sequence
  Description of Artificial Sequence: Synthetic oligonucleotide
  Target: LAMA2; (+) strand; PAM type: NRG; PAM sequence: TAG
tatagaaaatattctgtaag

SEQ ID NO: 165467 - DNA, 20 bp, Artificial Sequence
  Description of Artificial Sequence: Synthetic oligonucleotide
  Target: LAMA2; (+) strand; PAM type: NRG; PAM sequence: AAG
aaaatattctgtaagtagtc

SEQ ID NO: 165468 - DNA, 20 bp, Artificial Sequence
  Description of Artificial Sequence: Synthetic oligonucleotide
  Target: LAMA2; (+) strand; PAM type: NRG; PAM sequence: AGG
aaatattctgtaagtagtca

SEQ ID NO: 165469 - DNA, 20 bp, Artificial Sequence
  Description of Artificial Sequence: Synthetic oligonucleotide
  Target: LAMA2; (+) strand; PAM type: NRG; PAM sequence: TAG
aagtagtcaaggttgacctt

SEQ ID NO: 165470 - DNA, 20 bp, Artificial Sequence
  Description of Artificial Sequence: Synthetic oligonucleotide
  Target: LAMA2; (+) strand; PAM type: NRG; PAM sequence: AAG
gttgacctttagatatcttg

SEQ ID NO: 165471 - DNA, 20 bp, Artificial Sequence
  Description of Artificial Sequence: Synthetic oligonucleotide
  Target: LAMA2; (+) strand; PAM type: NRG; PAM sequence: GAG
tgacctttagatatcttgaa

SEQ ID NO: 165472 - DNA, 20 bp, Artificial Sequence
  Description of Artificial Sequence: Synthetic oligonucleotide
  Target: LAMA2; (+) strand; PAM type: NRG; PAM sequence: AAG
cctttagatatcttgaagag

SEQ ID NO: 165473 - DNA, 20 bp, Artificial Sequence
  Description of Artificial Sequence: Synthetic oligonucleotide
  Target: LAMA2; (+) strand; PAM type: NRG; PAM sequence: AGG
ctttagatatcttgaagaga

SEQ ID NO: 165474 - DNA, 20 bp, Artificial Sequence
  Description of Artificial Sequence: Synthetic oligonucleotide
  Target: LAMA2; (+) strand; PAM type: NRG; PAM sequence: CAG
tcttgaagagaaggttatta

SEQ ID NO: 165475 - DNA, 20 bp, Artificial Sequence
  Description of Artificial Sequence: Synthetic oligonucleotide
  Target: LAMA2; (+) strand; PAM type: NRG; PAM sequence: TAG
tcacttgtgaacaaaaatgt

SEQ ID NO: 165476 - DNA, 20 bp, Artificial Sequence
  Description of Artificial Sequence: Synthetic oligonucleotide
  Target: LAMA2; (+) strand; PAM type: NRG; PAM sequence: TAG
cttgtgaacaaaaatgttag

SEQ ID NO: 165477 - DNA, 20 bp, Artificial Sequence
  Description of Artificial Sequence: Synthetic oligonucleotide
  Target: LAMA2; (+) strand; PAM type: NRG; PAM sequence: TAG
gaacaaaaatgttagtagaa

SEQ ID NO: 165478 - DNA, 20 bp, Artificial Sequence
  Description of Artificial Sequence: Synthetic oligonucleotide
  Target: LAMA2; (+) strand; PAM type: NRG; PAM sequence: TGG
atgcaaccaaccttccattc

SEQ ID NO: 165479 - DNA, 20 bp, Artificial Sequence
  Description of Artificial Sequence: Synthetic oligonucleotide
  Target: LAMA2; (+) strand; PAM type: NRG; PAM sequence: TAG
acctttcttcatatgattga

SEQ ID NO: 165480 - DNA, 20 bp, Artificial Sequence
  Description of Artificial Sequence: Synthetic oligonucleotide
  Target: LAMA2; (+) strand; PAM type: NRG; PAM sequence: TAG
tgattgatagactttttgaa

SEQ ID NO: 165481 - DNA, 20 bp, Artificial Sequence
  Description of Artificial Sequence: Synthetic oligonucleotide
  Target: LAMA2; (+) strand; PAM type: NRG; PAM sequence: GAG
acatgctttcccattaattt

SEQ ID NO: 165482 - DNA, 20 bp, Artificial Sequence
  Description of Artificial Sequence: Synthetic oligonucleotide
  Target: LAMA2; (+) strand; PAM type: NRG; PAM sequence: GAG
cattatatgaaaatgtaaat

SEQ ID NO: 165483 - DNA, 20 bp, Artificial Sequence
  Description of Artificial Sequence: Synthetic oligonucleotide
  Target: LAMA2; (+) strand; PAM type: NRG; PAM sequence: AAG
acaaatgataaatgaaaatc

SEQ ID NO: 165484 - DNA, 20 bp, Artificial Sequence
  Description of Artificial Sequence: Synthetic oligonucleotide
  Target: LAMA2; (+) strand; PAM type: NRG; PAM sequence: AAG
aatgaaaatcaagaaaaact

SEQ ID NO: 165485 - DNA, 20 bp, Artificial Sequence
  Description of Artificial Sequence: Synthetic oligonucleotide
  Target: LAMA2; (+) strand; PAM type: NRG; PAM sequence: TAG
gtacaaattgtcatctgcat

SEQ ID NO: 165486 - DNA, 20 bp, Artificial Sequence
  Description of Artificial Sequence: Synthetic oligonucleotide
  Target: LAMA2; (+) strand; PAM type: NRG; PAM sequence: TGG
caaattgtcatctgcattag

SEQ ID NO: 165487 - DNA, 20 bp, Artificial Sequence
  Description of Artificial Sequence: Synthetic oligonucleotide
  Target: LAMA2; (+) strand; PAM type: NRG; PAM sequence: AAG
ccgtcccatgactttcactt

SEQ ID NO: 165488 - DNA, 20 bp, Artificial Sequence
  Description of Artificial Sequence: Synthetic oligonucleotide
  Target: LAMA2; (+) strand; PAM type: NRG; PAM sequence: CAG
ttcacttaagcatctattta

SEQ ID NO: 165489 - DNA, 20 bp, Artificial Sequence
  Description of Artificial Sequence: Synthetic oligonucleotide
  Target: LAMA2; (+) strand; PAM type: NRG; PAM sequence: CAG
cttaagcatctatttacaga

SEQ ID NO: 165490 - DNA, 20 bp, Artificial Sequence
  Description of Artificial Sequence: Synthetic oligonucleotide
  Target: LAMA2; (+) strand; PAM type: NRG; PAM sequence: CAG
ctatttacagacagtaattg

SEQ ID NO: 165491 - DNA, 20 bp, Artificial Sequence
  Description of Artificial Sequence: Synthetic oligonucleotide
  Target: LAMA2; (+) strand; PAM type: NRG; PAM sequence: TAG
cagtaattgcagtaatatct

SEQ ID NO: 165492 - DNA, 20 bp, Artificial Sequence
  Description of Artificial Sequence: Synthetic oligonucleotide
  Target: LAMA2; (+) strand; PAM type: NRG; PAM sequence: TAG
taattgcagtaatatcttag

SEQ ID NO: 165493 - DNA, 20 bp, Artificial Sequence
  Description of Artificial Sequence: Synthetic oligonucleotide
  Target: LAMA2; (+) strand; PAM type: NRG; PAM sequence: GAG
attgcagtaatatcttagta

SEQ ID NO: 165494 - DNA, 20 bp, Artificial Sequence
  Description of Artificial Sequence: Synthetic oligonucleotide
  Target: LAMA2; (+) strand; PAM type: NRG; PAM sequence: GAG
tgcagtaatatcttagtaga

SEQ ID NO: 165495 - DNA, 20 bp, Artificial Sequence
  Description of Artificial Sequence: Synthetic oligonucleotide
  Target: LAMA2; (+) strand; PAM type: NRG; PAM sequence: CAG
atatcttagtagagagatta

SEQ ID NO: 165496 - DNA, 20 bp, Artificial Sequence
  Description of Artificial Sequence: Synthetic oligonucleotide
  Target: LAMA2; (+) strand; PAM type: NRG; PAM sequence: GAG
atcttagtagagagattaca

SEQ ID NO: 165497 - DNA, 20 bp, Artificial Sequence
  Description of Artificial Sequence: Synthetic oligonucleotide
  Target: LAMA2; (+) strand; PAM type: NRG; PAM sequence: AAG
gtagagagattacagagata

SEQ ID NO: 165498 - DNA, 20 bp, Artificial Sequence
  Description of Artificial Sequence: Synthetic oligonucleotide
  Target: LAMA2; (+) strand; PAM type: NRG; PAM sequence: AAG
ctctcataataatgtacctg

SEQ ID NO: 165499 - DNA, 20 bp, Artificial Sequence
  Description of Artificial Sequence: Synthetic oligonucleotide
  Target: LAMA2; (+) strand; PAM type: NRG; PAM sequence: TGG
gaagtgttttccacaaccca

SEQ ID NO: 165500 - DNA, 20 bp, Artificial Sequence
  Description of Artificial Sequence: Synthetic oligonucleotide
  Target: LAMA2; (+) strand; PAM type: NRG; PAM sequence: AAG
tataattcatcttgattcct

SEQ ID NO: 165501 - DNA, 20 bp, Artificial Sequence
  Description of Artificial Sequence: Synthetic oligonucleotide
  Target: LAMA2; (+) strand; PAM type: NRG; PAM sequence: CAG
gattcctaagtgtaattacc

SEQ ID NO: 165502 - DNA, 20 bp, Artificial Sequence
  Description of Artificial Sequence: Synthetic oligonucleotide
  Target: LAMA2; (+) strand; PAM type: NRG; PAM sequence: AGG
attcctaagtgtaattaccc

SEQ ID NO: 165503 - DNA, 20 bp, Artificial Sequence
  Description of Artificial Sequence: Synthetic oligonucleotide
  Target: LAMA2; (+) strand; PAM type: NRG; PAM sequence: AAG
ggcataaaatcttatcatca

SEQ ID NO: 165504 - DNA, 20 bp, Artificial Sequence
  Description of Artificial Sequence: Synthetic oligonucleotide
  Target: LAMA2; (+) strand; PAM type: NRG; PAM sequence: AAG
taaaatcttatcatcaaagc

SEQ ID NO: 165505 - DNA, 20 bp, Artificial Sequence
  Description of Artificial Sequence: Synthetic oligonucleotide
  Target: LAMA2; (+) strand; PAM type: NRG; PAM sequence: GAG
aaatcttatcatcaaagcaa

SEQ ID NO: 165506 - DNA, 20 bp, Artificial Sequence
  Description of Artificial Sequence: Synthetic oligonucleotide
  Target: LAMA2; (+) strand; PAM type: NRG; PAM sequence: AAG
ttatcatcaaagcaagagct

SEQ ID NO: 165507 - DNA, 20 bp, Artificial Sequence
  Description of Artificial Sequence: Synthetic oligonucleotide
  Target: LAMA2; (+) strand; PAM type: NRG; PAM sequence: AGG
tatcatcaaagcaagagcta

SEQ ID NO: 165508 - DNA, 20 bp, Artificial Sequence
  Description of Artificial Sequence: Synthetic oligonucleotide
  Target: LAMA2; (+) strand; PAM type: NRG; PAM sequence: GGG
atcatcaaagcaagagctaa

SEQ ID NO: 165509 - DNA, 20 bp, Artificial Sequence
  Description of Artificial Sequence: Synthetic oligonucleotide
  Target: LAMA2; (+) strand; PAM type: NRG; PAM sequence: CAG
atcaaagcaagagctaaggg

SEQ ID NO: 165510 - DNA, 20 bp, Artificial Sequence
  Description of Artificial Sequence: Synthetic oligonucleotide
  Target: LAMA2; (+) strand; PAM type: NRG; PAM sequence: CAG
tgaaataatacatcccattc

SEQ ID NO: 165511 - DNA, 20 bp, Artificial Sequence
  Description of Artificial Sequence: Synthetic oligonucleotide
  Target: LAMA2; (+) strand; PAM type: NRG; PAM sequence: TGG
cattccagtaacatatgctt

SEQ ID NO: 165512 - DNA, 20 bp, Artificial Sequence
  Description of Artificial Sequence: Synthetic oligonucleotide
  Target: LAMA2; (+) strand; PAM type: NRG; PAM sequence: GGG
attccagtaacatatgcttt

SEQ ID NO: 165513 - DNA, 20 bp, Artificial Sequence
  Description of Artificial Sequence: Synthetic oligonucleotide
  Target: LAMA2; (+) strand; PAM type: NRG; PAM sequence: AAG
ctttgggtcatgaatacaca

SEQ ID NO: 165514 - DNA, 20 bp, Artificial Sequence
  Description of Artificial Sequence: Synthetic oligonucleotide
  Target: LAMA2; (+) strand; PAM type: NRG; PAM sequence: CAG
tgggtcatgaatacacaaag

SEQ ID NO: 165515 - DNA, 20 bp, Artificial Sequence
  Description of Artificial Sequence: Synthetic oligonucleotide
  Target: LAMA2; (+) strand; PAM type: NRG; PAM sequence: TAG
caatatttttacaaaatgta

SEQ ID NO: 165516 - DNA, 20 bp, Artificial Sequence
  Description of Artificial Sequence: Synthetic oligonucleotide
  Target: LAMA2; (+) strand; PAM type: NRG; PAM sequence: TAG
ttacaaaatgtatagtattc

SEQ ID NO: 165517 - DNA, 20 bp, Artificial Sequence
  Description of Artificial Sequence: Synthetic oligonucleotide
  Target: LAMA2; (+) strand; PAM type: NRG; PAM sequence: GAG
acaaaatgtatagtattcta

SEQ ID NO: 165518 - DNA, 20 bp, Artificial Sequence
  Description of Artificial Sequence: Synthetic oligonucleotide
  Target: LAMA2; (+) strand; PAM type: NRG; PAM sequence: CAG
tctagagacatctgcatcta

SEQ ID NO: 165519 - DNA, 20 bp, Artificial Sequence
  Description of Artificial Sequence: Synthetic oligonucleotide
  Target: LAMA2; (+) strand; PAM type: NRG; PAM sequence: AGG
ctagagacatctgcatctac

SEQ ID NO: 165520 - DNA, 20 bp, Artificial Sequence
  Description of Artificial Sequence: Synthetic oligonucleotide
  Target: LAMA2; (+) strand; PAM type: NRG; PAM sequence: TGG
tcatgtttttatccacaata

SEQ ID NO: 165521 - DNA, 20 bp, Artificial Sequence
  Description of Artificial Sequence: Synthetic oligonucleotide
  Target: LAMA2; (+) strand; PAM type: NRG; PAM sequence: AAG
tttatccacaatatggttgc

SEQ ID NO: 165522 - DNA, 20 bp, Artificial Sequence
  Description of Artificial Sequence: Synthetic oligonucleotide
  Target: LAMA2; (+) strand; PAM type: NRG; PAM sequence: AAG
ggttgcaagtaaacaaaatt

SEQ ID NO: 165523 - DNA, 20 bp, Artificial Sequence
  Description of Artificial Sequence: Synthetic oligonucleotide
  Target: LAMA2; (+) strand; PAM type: NRG; PAM sequence: CAG
aagtaaacaaaattaagtat

SEQ ID NO: 165524 - DNA, 20 bp, Artificial Sequence
  Description of Artificial Sequence: Synthetic oligonucleotide
  Target: LAMA2; (+) strand; PAM type: NRG; PAM sequence: TAG
tatcagttactgctaaaata

SEQ ID NO: 165525 - DNA, 20 bp, Artificial Sequence
  Description of Artificial Sequence: Synthetic oligonucleotide
  Target: LAMA2; (+) strand; PAM type: NRG; PAM sequence: CAG
agttactgctaaaatatagc

SEQ ID NO: 165526 - DNA, 20 bp, Artificial Sequence
  Description of Artificial Sequence: Synthetic oligonucleotide
  Target: LAMA2; (+) strand; PAM type: NRG; PAM sequence: AAG
ctaaaatatagccagttgta

SEQ ID NO: 165527 - DNA, 20 bp, Artificial Sequence
  Description of Artificial Sequence: Synthetic oligonucleotide
  Target: LAMA2; (+) strand; PAM type: NRG; PAM sequence: TAG
tagccagttgtaaagactct

SEQ ID NO: 165528 - DNA, 20 bp, Artificial Sequence
  Description of Artificial Sequence: Synthetic oligonucleotide
  Target: LAMA2; (+) strand; PAM type: NRG; PAM sequence: CAG
tgttacctgcactgttatga

SEQ ID NO: 165529 - DNA, 20 bp, Artificial Sequence
  Description of Artificial Sequence: Synthetic oligonucleotide
  Target: LAMA2; (+) strand; PAM type: NRG; PAM sequence: CAG
cctgcactgttatgacagtg

SEQ ID NO: 165530 - DNA, 20 bp, Artificial Sequence
  Description of Artificial Sequence: Synthetic oligonucleotide
  Target: LAMA2; (+) strand; PAM type: NRG; PAM sequence: AGG
ctgcactgttatgacagtgc

SEQ ID NO: 165531 - DNA, 20 bp, Artificial Sequence
  Description of Artificial Sequence: Synthetic oligonucleotide
  Target: LAMA2; (+) strand; PAM type: NRG; PAM sequence: TGG
ctgttatgacagtgcaggcc

SEQ ID NO: 165532 - DNA, 20 bp, Artificial Sequence
  Description of Artificial Sequence: Synthetic oligonucleotide
  Target: LAMA2; (+) strand; PAM type: NRG; PAM sequence: TAG
ggcctggtcattaaaaatgt

SEQ ID NO: 165533 - DNA, 20 bp, Artificial Sequence
  Description of Artificial Sequence: Synthetic oligonucleotide
  Target: LAMA2; (+) strand; PAM type: NRG; PAM sequence: TAG
gtcattaaaaatgttagttt

SEQ ID NO: 165534 - DNA, 20 bp, Artificial Sequence
  Description of Artificial Sequence: Synthetic oligonucleotide
  Target: LAMA2; (+) strand; PAM type: NRG; PAM sequence: CAG
ttattataatttactatttg

SEQ ID NO: 165535 - DNA, 20 bp, Artificial Sequence
  Description of Artificial Sequence: Synthetic oligonucleotide
  Target: LAMA2; (+) strand; PAM type: NRG; PAM sequence: AAG
ttataatttactatttgcag

SEQ ID NO: 165536 - DNA, 20 bp, Artificial Sequence
  Description of Artificial Sequence: Synthetic oligonucleotide
  Target: LAMA2; (+) strand; PAM type: NRG; PAM sequence: AGG
tataatttactatttgcaga

SEQ ID NO: 165537 - DNA, 20 bp, Artificial Sequence
  Description of Artificial Sequence: Synthetic oligonucleotide
  Target: LAMA2; (+) strand; PAM type: NRG; PAM sequence: GGG
ataatttactatttgcagaa

SEQ ID NO: 165538 - DNA, 20 bp, Artificial Sequence
  Description of Artificial Sequence: Synthetic oligonucleotide
  Target: LAMA2; (+) strand; PAM type: NRG; PAM sequence: GGG
taatttactatttgcagaag

SEQ ID NO: 165539 - DNA, 20 bp, Artificial Sequence
  Description of Artificial Sequence: Synthetic oligonucleotide
  Target: LAMA2; (+) strand; PAM type: NRG; PAM sequence: CAG
ttactatttgcagaaggggc

SEQ ID NO: 165540 - DNA, 20 bp, Artificial Sequence
  Description of Artificial Sequence: Synthetic oligonucleotide
  Target: LAMA2; (+) strand; PAM type: NRG; PAM sequence: CAG
agaaggggccagattacctt

SEQ ID NO: 165541 - DNA, 20 bp, Artificial Sequence
  Description of Artificial Sequence: Synthetic oligonucleotide
  Target: LAMA2; (+) strand; PAM type: NRG; PAM sequence: AGG
gaaggggccagattaccttc

SEQ ID NO: 165542 - DNA, 20 bp, Artificial Sequence
  Description of Artificial Sequence: Synthetic oligonucleotide
  Target: LAMA2; (+) strand; PAM type: NRG; PAM sequence: GAG
aggggccagattaccttcag

SEQ ID NO: 165543 - DNA, 20 bp, Artificial Sequence
  Description of Artificial Sequence: Synthetic oligonucleotide
  Target: LAMA2; (+) strand; PAM type: NRG; PAM sequence: AAG
ttaccttcaggagtcaaaca

SEQ ID NO: 165544 - DNA, 20 bp, Artificial Sequence
  Description of Artificial Sequence: Synthetic oligonucleotide
  Target: LAMA2; (+) strand; PAM type: NRG; PAM sequence: AGG
taccttcaggagtcaaacaa

SEQ ID NO: 165545 - DNA, 20 bp, Artificial Sequence
  Description of Artificial Sequence: Synthetic oligonucleotide
  Target: LAMA2; (+) strand; PAM type: NRG; PAM sequence: CAG
aaaggacaccatttcctcac

SEQ ID NO: 165546 - DNA, 20 bp, Artificial Sequence
  Description of Artificial Sequence: Synthetic oligonucleotide
  Target: LAMA2; (+) strand; PAM type: NRG; PAM sequence: TGG
catttcctcaccagatttct

SEQ ID NO: 165547 - DNA, 20 bp, Artificial Sequence
  Description of Artificial Sequence: Synthetic oligonucleotide
  Target: LAMA2; (+) strand; PAM type: NRG; PAM sequence: TGG
ctcaccagatttcttggtgt

SEQ ID NO: 165548 - DNA, 20 bp, Artificial Sequence
  Description of Artificial Sequence: Synthetic oligonucleotide
  Target: LAMA2; (+) strand; PAM type: NRG; PAM sequence: GAG
caccagatttcttggtgttg

SEQ ID NO: 165549 - DNA, 20 bp, Artificial Sequence
  Description of Artificial Sequence: Synthetic oligonucleotide
  Target: LAMA2; (+) strand; PAM type: NRG; PAM sequence: GAG
ttcttggtgttggagccatt

SEQ ID NO: 165550 - DNA, 20 bp, Artificial Sequence
  Description of Artificial Sequence: Synthetic oligonucleotide
  Target: LAMA2; (+) strand; PAM type: NRG; PAM sequence: GAG
actttatttaacctgtcttt

SEQ ID NO: 165551 - DNA, 20 bp, Artificial Sequence
  Description of Artificial Sequence: Synthetic oligonucleotide
  Target: LAMA2; (+) strand; PAM type: NRG; PAM sequence: TAG
tctttgagtgacattaaata

SEQ ID NO: 165552 - DNA, 20 bp, Artificial Sequence
  Description of Artificial Sequence: Synthetic oligonucleotide
  Target: LAMA2; (+) strand; PAM type: NRG; PAM sequence: AGG
ctttgagtgacattaaatat

SEQ ID NO: 165553 - DNA, 20 bp, Artificial Sequence
  Description of Artificial Sequence: Synthetic oligonucleotide
  Target: LAMA2; (+) strand; PAM type: NRG; PAM sequence: GAG
tgcccaaactgacctaaact

SEQ ID NO: 165554 - DNA, 20 bp, Artificial Sequence
  Description of Artificial Sequence: Synthetic oligonucleotide
  Target: LAMA2; (+) strand; PAM type: NRG; PAM sequence: CAG
gacctaaactgagctttatg

SEQ ID NO: 165555 - DNA, 20 bp, Artificial Sequence
  Description of Artificial Sequence: Synthetic oligonucleotide
  Target: LAMA2; (+) strand; PAM type: NRG; PAM sequence: AAG
actgagctttatgcagttga

SEQ ID NO: 165556 - DNA, 20 bp, Artificial Sequence
  Description of Artificial Sequence: Synthetic oligonucleotide
  Target: LAMA2; (+) strand; PAM type: NRG; PAM sequence: AGG
ctgagctttatgcagttgaa

SEQ ID NO: 165557 - DNA, 20 bp, Artificial Sequence
  Description of Artificial Sequence: Synthetic oligonucleotide
  Target: LAMA2; (+) strand; PAM type: NRG; PAM sequence: CAG
tgcagttgaaaggttatatg

SEQ ID NO: 165558 - DNA, 20 bp, Artificial Sequence
  Description of Artificial Sequence: Synthetic oligonucleotide
  Target: LAMA2; (+) strand; PAM type: NRG; PAM sequence: AGG
gcagttgaaaggttatatgc

SEQ ID NO: 165559 - DNA, 20 bp, Artificial Sequence
  Description of Artificial Sequence: Synthetic oligonucleotide
  Target: LAMA2; (+) strand; PAM type: NRG; PAM sequence: TGG
atgactttctttcttaaata

SEQ ID NO: 165560 - DNA, 20 bp, Artificial Sequence
  Description of Artificial Sequence: Synthetic oligonucleotide
  Target: LAMA2; (+) strand; PAM type: NRG; PAM sequence: CAG
tcttaaatatggaaaatatt

SEQ ID NO: 165561 - DNA, 20 bp, Artificial Sequence
  Description of Artificial Sequence: Synthetic oligonucleotide
  Target: LAMA2; (+) strand; PAM type: NRG; PAM sequence: CAG
aatattcagccttgcgtgtg

SEQ ID NO: 165562 - DNA, 20 bp, Artificial Sequence
  Description of Artificial Sequence: Synthetic oligonucleotide
  Target: LAMA2; (+) strand; PAM type: NRG; PAM sequence: CAG
cttgcgtgtgcagctctctg

SEQ ID NO: 165563 - DNA, 20 bp, Artificial Sequence
  Description of Artificial Sequence: Synthetic oligonucleotide
  Target: LAMA2; (+) strand; PAM type: NRG; PAM sequence: CGG
tgcagctctctgcagtaata

SEQ ID NO: 165564 - DNA, 20 bp, Artificial Sequence
  Description of Artificial Sequence: Synthetic oligonucleotide
  Target: LAMA2; (+) strand; PAM type: NRG; PAM sequence: CAG
ctctgcagtaatacggaaat

SEQ ID NO: 165565 - DNA, 20 bp, Artificial Sequence
  Description of Artificial Sequence: Synthetic oligonucleotide
  Target: LAMA2; (+) strand; PAM type: NRG; PAM sequence: TAG
agaaatttgtcaatgatctc

SEQ ID NO: 165566 - DNA, 20 bp, Artificial Sequence
  Description of Artificial Sequence: Synthetic oligonucleotide
  Target: LAMA2; (+) strand; PAM type: NRG; PAM sequence: AGG
gaaatttgtcaatgatctct

SEQ ID NO: 165567 - DNA, 20 bp, Artificial Sequence
  Description of Artificial Sequence: Synthetic oligonucleotide
  Target: LAMA2; (+) strand; PAM type: NRG; PAM sequence: TAG
atctctaggtcatgttttga

SEQ ID NO: 165568 - DNA, 20 bp, Artificial Sequence
  Description of Artificial Sequence: Synthetic oligonucleotide
  Target: LAMA2; (+) strand; PAM type: NRG; PAM sequence: CAG
aggtcatgttttgatagttt

SEQ ID NO: 165569 - DNA, 20 bp, Artificial Sequence
  Description of Artificial Sequence: Synthetic oligonucleotide
  Target: LAMA2; (+) strand; PAM type: NRG; PAM sequence: AAG
cctgtcttcccatattttaa

SEQ ID NO: 165570 - DNA, 20 bp, Artificial Sequence
  Description of Artificial Sequence: Synthetic oligonucleotide
  Target: LAMA2; (+) strand; PAM type: NRG; PAM sequence: AGG
ctgtcttcccatattttaaa

SEQ ID NO: 165571 - DNA, 20 bp, Artificial Sequence
  Description of Artificial Sequence: Synthetic oligonucleotide
  Target: LAMA2; (+) strand; PAM type: NRG; PAM sequence: GGG
tgtcttcccatattttaaaa

SEQ ID NO: 165572 - DNA, 20 bp, Artificial Sequence
  Description of Artificial Sequence: Synthetic oligonucleotide
  Target: LAMA2; (+) strand; PAM type: NRG; PAM sequence: TAG
cccatattttaaaagggctt

SEQ ID NO: 165573 - DNA, 20 bp, Artificial Sequence
  Description of Artificial Sequence: Synthetic oligonucleotide
  Target: LAMA2; (+) strand; PAM type: NRG; PAM sequence: AGG
ccatattttaaaagggcttt

SEQ ID NO: 165574 - DNA, 20 bp, Artificial Sequence
  Description of Artificial Sequence: Synthetic oligonucleotide
  Target: LAMA2; (+) strand; PAM type: NRG; PAM sequence: CAG
ttaaaagggctttaggcttg

SEQ ID NO: 165575 - DNA, 20 bp, Artificial Sequence
  Description of Artificial Sequence: Synthetic oligonucleotide
  Target: LAMA2; (+) strand; PAM type: NRG; PAM sequence: TGG
gctttaggcttgcagttgaa

SEQ ID NO: 165576 - DNA, 20 bp, Artificial Sequence
  Description of Artificial Sequence: Synthetic oligonucleotide
  Target: LAMA2; (+) strand; PAM type: NRG; PAM sequence: CGG
taggcttgcagttgaatggc

SEQ ID NO: 165577 - DNA, 20 bp, Artificial Sequence
  Description of Artificial Sequence: Synthetic oligonucleotide
  Target: LAMA2; (+) strand; PAM type: NRG; PAM sequence: TGG
gttgaatggccggtgtctat

SEQ ID NO: 165578 - DNA, 20 bp, Artificial Sequence
  Description of Artificial Sequence: Synthetic oligonucleotide
  Target: LAMA2; (+) strand; PAM type: NRG; PAM sequence: CAG
gtgtctattggatcgccact

SEQ ID NO: 165579 - DNA, 20 bp, Artificial Sequence
  Description of Artificial Sequence: Synthetic oligonucleotide
  Target: LAMA2; (+) strand; PAM type: NRG; PAM sequence: AAG
tctattggatcgccactcag

SEQ ID NO: 165580 - DNA, 20 bp, Artificial Sequence
  Description of Artificial Sequence: Synthetic oligonucleotide
  Target: LAMA2; (+) strand; PAM type: NRG; PAM sequence: TGG
cactcagaagctgtcccttg

SEQ ID NO: 165581 - DNA, 20 bp, Artificial Sequence
  Description of Artificial Sequence: Synthetic oligonucleotide
  Target: LAMA2; (+) strand; PAM type: NRG; PAM sequence: AAG
atacctatcgtcaacacata

SEQ ID NO: 165582 - DNA, 20 bp, Artificial Sequence
  Description of Artificial Sequence: Synthetic oligonucleotide
  Target: LAMA2; (+) strand; PAM type: NRG; PAM sequence: AAG
cgtcaacacataaagcccaa

SEQ ID NO: 165583 - DNA, 20 bp, Artificial Sequence
  Description of Artificial Sequence: Synthetic oligonucleotide
  Target: LAMA2; (+) strand; PAM type: NRG; PAM sequence: AGG
gtcaacacataaagcccaaa

SEQ ID NO: 165584 - DNA, 20 bp, Artificial Sequence
  Description of Artificial Sequence: Synthetic oligonucleotide
  Target: LAMA2; (+) strand; PAM type: NRG; PAM sequence: TAG
caaaaggcaaaatgtgaaaa

SEQ ID NO: 165585 - DNA, 20 bp, Artificial Sequence
  Description of Artificial Sequence: Synthetic oligonucleotide
  Target: LAMA2; (+) strand; PAM type: NRG; PAM sequence: TAG
gcaaaatgtgaaaatagtct

SEQ ID NO: 165586 - DNA, 20 bp, Artificial Sequence
  Description of Artificial Sequence: Synthetic oligonucleotide
  Target: LAMA2; (+) strand; PAM type: NRG; PAM sequence: CAG
ttatcacttctgttgcacac

SEQ ID NO: 165587 - DNA, 20 bp, Artificial Sequence
  Description of Artificial Sequence: Synthetic oligonucleotide
  Target: LAMA2; (+) strand; PAM type: NRG; PAM sequence: GAG
atcacttctgttgcacacca

SEQ ID NO: 165588 - DNA, 20 bp, Artificial Sequence
  Description of Artificial Sequence: Synthetic oligonucleotide
  Target: LAMA2; (+) strand; PAM type: NRG; PAM sequence: AAG
tgttgcacaccagagaccca

SEQ ID NO: 165589 - DNA, 20 bp, Artificial Sequence
  Description of Artificial Sequence: Synthetic oligonucleotide
  Target: LAMA2; (+) strand; PAM type: NRG; PAM sequence: CAG
aaagtctctgttttcatgta

SEQ ID NO: 165590 - DNA, 20 bp, Artificial Sequence
  Description of Artificial Sequence: Synthetic oligonucleotide
  Target: LAMA2; (+) strand; PAM type: NRG; PAM sequence: AAG
ctctgttttcatgtacagac

SEQ ID NO: 165591 - DNA, 20 bp, Artificial Sequence
  Description of Artificial Sequence: Synthetic oligonucleotide
  Target: LAMA2; (+) strand; PAM type: NRG; PAM sequence: GAG
ttcatgtacagacaagtgtt

SEQ ID NO: 165592 - DNA, 20 bp, Artificial Sequence
  Description of Artificial Sequence: Synthetic oligonucleotide
  Target: LAMA2; (+) strand; PAM type: NRG; PAM sequence: AGG
tcatgtacagacaagtgttg

SEQ ID NO: 165593 - DNA, 20 bp, Artificial Sequence
  Description of Artificial Sequence: Synthetic oligonucleotide
  Target: LAMA2; (+) strand; PAM type: NRG; PAM sequence: TGG
cagacaagtgttgaggaaca

SEQ ID NO: 165594 - DNA, 20 bp, Artificial Sequence
  Description of Artificial Sequence: Synthetic oligonucleotide
  Target: LAMA2; (+) strand; PAM type: NRG; PAM sequence: TGG
aagtgttgaggaacatggca

SEQ ID NO: 165595 - DNA, 20 bp, Artificial Sequence
  Description of Artificial Sequence: Synthetic oligonucleotide
  Target: LAMA2; (+) strand; PAM type: NRG; PAM sequence: GGG
agtgttgaggaacatggcat

SEQ ID NO: 165596 - DNA, 20 bp, Artificial Sequence
  Description of Artificial Sequence: Synthetic oligonucleotide
  Target: LAMA2; (+) strand; PAM type: NRG; PAM sequence: AAG
ttgaggaacatggcatgggt

SEQ ID NO: 165597 - DNA, 20 bp, Artificial Sequence
  Description of Artificial Sequence: Synthetic oligonucleotide
  Target: LAMA2; (+) strand; PAM type: NRG; PAM sequence: TGG
aatataacctaaaacaatca

SEQ ID NO: 165598 - DNA, 20 bp, Artificial Sequence
  Description of Artificial Sequence: Synthetic oligonucleotide
  Target: LAMA2; (+) strand; PAM type: NRG; PAM sequence: TAG
aatcatggtatctttatttt

SEQ ID NO: 165599 - DNA, 20 bp, Artificial Sequence
  Description of Artificial Sequence: Synthetic oligonucleotide
  Target: LAMA2; (+) strand; PAM type: NRG; PAM sequence: CAG
ctttatttttagtttatttc

SEQ ID NO: 165600 - DNA, 20 bp, Artificial Sequence
  Description of Artificial Sequence: Synthetic oligonucleotide
  Target: LAMA2; (+) strand; PAM type: NRG; PAM sequence: TAG
tagtttatttccagcaaaca

SEQ ID NO: 165601 - DNA, 20 bp, Artificial Sequence
  Description of Artificial Sequence: Synthetic oligonucleotide
  Target: LAMA2; (+) strand; PAM type: NRG; PAM sequence: GAG
aaacatagaaaaaactattt

SEQ ID NO: 165602 - DNA, 20 bp, Artificial Sequence
  Description of Artificial Sequence: Synthetic oligonucleotide
  Target: LAMA2; (+) strand; PAM type: NRG; PAM sequence: TAG
atagaaaaaactatttgaga

SEQ ID NO: 165603 - DNA, 20 bp, Artificial Sequence
  Description of Artificial Sequence: Synthetic oligonucleotide
  Target: LAMA2; (+) strand; PAM type: NRG; PAM sequence: GAG
agaaaaaactatttgagata

SEQ ID NO: 165604 - DNA, 20 bp, Artificial Sequence
  Description of Artificial Sequence: Synthetic oligonucleotide
  Target: LAMA2; (+) strand; PAM type: NRG; PAM sequence: AAG
tattaaacatgctttatctc

SEQ ID NO: 165605 - DNA, 20 bp, Artificial Sequence
  Description of Artificial Sequence: Synthetic oligonucleotide
  Target: LAMA2; (+) strand; PAM type: NRG; PAM sequence: CAG
gctttatctcaagtaatcct

SEQ ID NO: 165606 - DNA, 20 bp, Artificial Sequence
  Description of Artificial Sequence: Synthetic oligonucleotide
  Target: LAMA2; (+) strand; PAM type: NRG; PAM sequence: AAG
cctcagatccaccctatgaa

SEQ ID NO: 165607 - DNA, 20 bp, Artificial Sequence
  Description of Artificial Sequence: Synthetic oligonucleotide
  Target: LAMA2; (+) strand; PAM type: NRG; PAM sequence: CAG
cagatccaccctatgaaaag

SEQ ID NO: 165608 - DNA, 20 bp, Artificial Sequence
  Description of Artificial Sequence: Synthetic oligonucleotide
  Target: LAMA2; (+) strand; PAM type: NRG; PAM sequence: GAG
agcagaacctaccattgatt

SEQ ID NO: 165609 - DNA, 20 bp, Artificial Sequence
  Description of Artificial Sequence: Synthetic oligonucleotide
  Target: LAMA2; (+) strand; PAM type: NRG; PAM sequence: CAG
ctcctgtacacttcctaata

SEQ ID NO: 165610 - DNA, 20 bp, Artificial Sequence
  Description of Artificial Sequence: Synthetic oligonucleotide
  Target: LAMA2; (+) strand; PAM type: NRG; PAM sequence: CGG
aatttatgatccccatttta

SEQ ID NO: 165611 - DNA, 20 bp, Artificial Sequence
  Description of Artificial Sequence: Synthetic oligonucleotide
  Target: LAMA2; (+) strand; PAM type: NRG; PAM sequence: GGG
atttatgatccccattttac

SEQ ID NO: 165612 - DNA, 20 bp, Artificial Sequence
  Description of Artificial Sequence: Synthetic oligonucleotide
  Target: LAMA2; (+) strand; PAM type: NRG; PAM sequence: GAG
atgatccccattttacgggt

SEQ ID NO: 165613 - DNA, 20 bp, Artificial Sequence
  Description of Artificial Sequence: Synthetic oligonucleotide
  Target: LAMA2; (+) strand; PAM type: NRG; PAM sequence: GAG
gatccccattttacgggtga

SEQ ID NO: 165614 - DNA, 20 bp, Artificial Sequence
  Description of Artificial Sequence: Synthetic oligonucleotide
  Target: LAMA2; (+) strand; PAM type: NRG; PAM sequence: GAG
attttacgggtgagagaatt

SEQ ID NO: 165615 - DNA, 20 bp, Artificial Sequence
  Description of Artificial Sequence: Synthetic oligonucleotide
  Target: LAMA2; (+) strand; PAM type: NRG; PAM sequence: AGG
ttttacgggtgagagaattg

SEQ ID NO: 165616 - DNA, 20 bp, Artificial Sequence
  Description of Artificial Sequence: Synthetic oligonucleotide
  Target: LAMA2; (+) strand; PAM type: NRG; PAM sequence: CAG
cccatgatcacacacctaca

SEQ ID NO: 165617 - DNA, 20 bp, Artificial Sequence
  Description of Artificial Sequence: Synthetic oligonucleotide
  Target: LAMA2; (+) strand; PAM type: NRG; PAM sequence: TAG
atgaatctgtttccaaaacc

SEQ ID NO: 165618 - DNA, 20 bp, Artificial Sequence
  Description of Artificial Sequence: Synthetic oligonucleotide
  Target: LAMA2; (+) strand; PAM type: NRG; PAM sequence: AGG
tgaatctgtttccaaaacct

SEQ ID NO: 165619 - DNA, 20 bp, Artificial Sequence
  Description of Artificial Sequence: Synthetic oligonucleotide
  Target: LAMA2; (+) strand; PAM type: NRG; PAM sequence: CAG
tactcaactattatattatg

SEQ ID NO: 165620 - DNA, 20 bp, Artificial Sequence
  Description of Artificial Sequence: Synthetic oligonucleotide
  Target: LAMA2; (+) strand; PAM type: NRG; PAM sequence: CAG
agtcatgtgctgcttaacga

SEQ ID NO: 165621 - DNA, 20 bp, Artificial Sequence
  Description of Artificial Sequence: Synthetic oligonucleotide
  Target: LAMA2; (+) strand; PAM type: NRG; PAM sequence: AGG
gtcatgtgctgcttaacgac

SEQ ID NO: 165622 - DNA, 20 bp, Artificial Sequence
  Description of Artificial Sequence: Synthetic oligonucleotide
  Target: LAMA2; (+) strand; PAM type: NRG; PAM sequence: GGG
tcatgtgctgcttaacgaca

SEQ ID NO: 165623 - DNA, 20 bp, Artificial Sequence
  Description of Artificial Sequence: Synthetic oligonucleotide
  Target: LAMA2; (+) strand; PAM type: NRG; PAM sequence: GAG
taacgacagggatacgttct

SEQ ID NO: 165624 - DNA, 20 bp, Artificial Sequence
  Description of Artificial Sequence: Synthetic oligonucleotide
  Target: LAMA2; (+) strand; PAM type: NRG; PAM sequence: TAG
cgttctgagaaatgtgtcgt

SEQ ID NO: 165625 - DNA, 20 bp, Artificial Sequence
  Description of Artificial Sequence: Synthetic oligonucleotide
  Target: LAMA2; (+) strand; PAM type: NRG; PAM sequence: AGG
gttctgagaaatgtgtcgtt

SEQ ID NO: 165626 - DNA, 20 bp, Artificial Sequence
  Description of Artificial Sequence: Synthetic oligonucleotide
  Target: LAMA2; (+) strand; PAM type: NRG; PAM sequence: TAG
tcctcattgtgcaaacatca

SEQ ID NO: 165627 - DNA, 20 bp, Artificial Sequence
  Description of Artificial Sequence: Synthetic oligonucleotide
  Target: LAMA2; (+) strand; PAM type: NRG; PAM sequence: GAG
ctcattgtgcaaacatcata

SEQ ID NO: 165628 - DNA, 20 bp, Artificial Sequence
  Description of Artificial Sequence: Synthetic oligonucleotide
  Target: LAMA2; (+) strand; PAM type: NRG; PAM sequence: TGG
tgtacatacacaaacctaaa

SEQ ID NO: 165629 - DNA, 20 bp, Artificial Sequence
  Description of Artificial Sequence: Synthetic oligonucleotide
  Target: LAMA2; (+) strand; PAM type: NRG; PAM sequence: TAG
atacacaaacctaaatggtg

SEQ ID NO: 165630 - DNA, 20 bp, Artificial Sequence
  Description of Artificial Sequence: Synthetic oligonucleotide
  Target: LAMA2; (+) strand; PAM type: NRG; PAM sequence: TAG
ggtgtagcctactacacacc

SEQ ID NO: 165631 - DNA, 20 bp, Artificial Sequence
  Description of Artificial Sequence: Synthetic oligonucleotide
  Target: LAMA2; (+) strand; PAM type: NRG; PAM sequence: AGG
gtgtagcctactacacacct

SEQ ID NO: 165632 - DNA, 20 bp, Artificial Sequence
  Description of Artificial Sequence: Synthetic oligonucleotide
  Target: LAMA2; (+) strand; PAM type: NRG; PAM sequence: TGG
tactacacacctaggctaca

SEQ ID NO: 165633 - DNA, 20 bp, Artificial Sequence
  Description of Artificial Sequence: Synthetic oligonucleotide
  Target: LAMA2; (+) strand; PAM type: NRG; PAM sequence: GGG
actacacacctaggctacat

SEQ ID NO: 165634 - DNA, 20 bp, Artificial Sequence
  Description of Artificial Sequence: Synthetic oligonucleotide
  Target: LAMA2; (+) strand; PAM type: NRG; PAM sequence: TAG
cacacctaggctacatggga

SEQ ID NO: 165635 - DNA, 20 bp, Artificial Sequence
  Description of Artificial Sequence: Synthetic oligonucleotide
  Target: LAMA2; (+) strand; PAM type: NRG; PAM sequence: TAG
atgggatagcctgttgctcc

SEQ ID NO: 165636 - DNA, 20 bp, Artificial Sequence
  Description of Artificial Sequence: Synthetic oligonucleotide
  Target: LAMA2; (+) strand; PAM type: NRG; PAM sequence: AGG
tgggatagcctgttgctcct

SEQ ID NO: 165637 - DNA, 20 bp, Artificial Sequence
  Description of Artificial Sequence: Synthetic oligonucleotide
  Target: LAMA2; (+) strand; PAM type: NRG; PAM sequence: CAG
agcctgttgctcctaggcta

SEQ ID NO: 165638 - DNA, 20 bp, Artificial Sequence
  Description of Artificial Sequence: Synthetic oligonucleotide
  Target: LAMA2; (+) strand; PAM type: NRG; PAM sequence: CAG
tcctaggctacagacctgca

SEQ ID NO: 165639 - DNA, 20 bp, Artificial Sequence
  Description of Artificial Sequence: Synthetic oligonucleotide
  Target: LAMA2; (+) strand; PAM type: NRG; PAM sequence: TGG
agacctgcacagcatgttat

SEQ ID NO: 165640 - DNA, 20 bp, Artificial Sequence
  Description of Artificial Sequence: Synthetic oligonucleotide
  Target: LAMA2; (+) strand; PAM type: NRG; PAM sequence: CAG
catgttattggtactgaata

SEQ ID NO: 165641 - DNA, 20 bp, Artificial Sequence
  Description of Artificial Sequence: Synthetic oligonucleotide
  Target: LAMA2; (+) strand; PAM type: NRG; PAM sequence: TAG
gttattggtactgaatacag

SEQ ID NO: 165642 - DNA, 20 bp, Artificial Sequence
  Description of Artificial Sequence: Synthetic oligonucleotide
  Target: LAMA2; (+) strand; PAM type: NRG; PAM sequence: AGG
ttattggtactgaatacagt

SEQ ID NO: 165643 - DNA, 20 bp, Artificial Sequence
  Description of Artificial Sequence: Synthetic oligonucleotide
  Target: LAMA2; (+) strand; PAM type: NRG; PAM sequence: TGG
agtaggcaattgtaacataa

SEQ ID NO: 165644 - DNA, 20 bp, Artificial Sequence
  Description of Artificial Sequence: Synthetic oligonucleotide
  Target: LAMA2; (+) strand; PAM type: NRG; PAM sequence: AAG
ggcaattgtaacataatggt

SEQ ID NO: 165645 - DNA, 20 bp, Artificial Sequence
  Description of Artificial Sequence: Synthetic oligonucleotide
  Target: LAMA2; (+) strand; PAM type: NRG; PAM sequence: TAG
tatctaaacatatttaaaca

SEQ ID NO: 165646 - DNA, 20 bp, Artificial Sequence
  Description of Artificial Sequence: Synthetic oligonucleotide
  Target: LAMA2; (+) strand; PAM type: NRG; PAM sequence: AAG
aaacatatttaaacatagca

SEQ ID NO: 165647 - DNA, 20 bp, Artificial Sequence
  Description of Artificial Sequence: Synthetic oligonucleotide
  Target: LAMA2; (+) strand; PAM type: NRG; PAM sequence: AGG
aacatatttaaacatagcaa

SEQ ID NO: 165648 - DNA, 20 bp, Artificial Sequence
  Description of Artificial Sequence: Synthetic oligonucleotide
  Target: LAMA2; (+) strand; PAM type: NRG; PAM sequence: TAG
gcaaaggtacattaaaaata

SEQ ID NO: 165649 - DNA, 20 bp, Artificial Sequence
  Description of Artificial Sequence: Synthetic oligonucleotide
  Target: LAMA2; (+) strand; PAM type: NRG; PAM sequence: TGG
aatatagttttataatctta

SEQ ID NO: 165650 - DNA, 20 bp, Artificial Sequence
  Description of Artificial Sequence: Synthetic oligonucleotide
  Target: LAMA2; (+) strand; PAM type: NRG; PAM sequence: GGG
atatagttttataatcttat

SEQ ID NO: 165651 - DNA, 20 bp, Artificial Sequence
  Description of Artificial Sequence: Synthetic oligonucleotide
  Target: LAMA2; (+) strand; PAM type: NRG; PAM sequence: TGG
tgggaccactgtcgtacaca

SEQ ID NO: 165652 - DNA, 20 bp, Artificial Sequence
  Description of Artificial Sequence: Synthetic oligonucleotide
  Target: LAMA2; (+) strand; PAM type: NRG; PAM sequence: CAG
ttgaccaaaatgtcattatg

SEQ ID NO: 165653 - DNA, 20 bp, Artificial Sequence
  Description of Artificial Sequence: Synthetic oligonucleotide
  Target: LAMA2; (+) strand; PAM type: NRG; PAM sequence: CAG
accaaaatgtcattatgcag

SEQ ID NO: 165654 - DNA, 20 bp, Artificial Sequence
  Description of Artificial Sequence: Synthetic oligonucleotide
  Target: LAMA2; (+) strand; PAM type: NRG; PAM sequence: CAG
tgtacaatattcctacattc

SEQ ID NO: 165655 - DNA, 20 bp, Artificial Sequence
  Description of Artificial Sequence: Synthetic oligonucleotide
  Target: LAMA2; (+) strand; PAM type: NRG; PAM sequence: AGG
gtacaatattcctacattcc

SEQ ID NO: 165656 - DNA, 20 bp, Artificial Sequence
  Description of Artificial Sequence: Synthetic oligonucleotide
  Target: LAMA2; (+) strand; PAM type: NRG; PAM sequence: GAG
aatattcctacattccaggt

SEQ ID NO: 165657 - DNA, 20 bp, Artificial Sequence
  Description of Artificial Sequence: Synthetic oligonucleotide
  Target: LAMA2; (+) strand; PAM type: NRG; PAM sequence: AGG
atattcctacattccaggtg

SEQ ID NO: 165658 - DNA, 20 bp, Artificial Sequence
  Description of Artificial Sequence: Synthetic oligonucleotide
  Target: LAMA2; (+) strand; PAM type: NRG; PAM sequence: AAG
acattccaggtgaggaaacc

SEQ ID NO: 165659 - DNA, 20 bp, Artificial Sequence
  Description of Artificial Sequence: Synthetic oligonucleotide
  Target: LAMA2; (+) strand; PAM type: NRG; PAM sequence: AGG
cattccaggtgaggaaacca

SEQ ID NO: 165660 - DNA, 20 bp, Artificial Sequence
  Description of Artificial Sequence: Synthetic oligonucleotide
  Target: LAMA2; (+) strand; PAM type: NRG; PAM sequence: CAG
ggtgaggaaaccaaggcaca

SEQ ID NO: 165661 - DNA, 20 bp, Artificial Sequence
  Description of Artificial Sequence: Synthetic oligonucleotide
  Target: LAMA2; (+) strand; PAM type: NRG; PAM sequence: CAG
aaaccaaggcacacagtatt

SEQ ID NO: 165662 - DNA, 20 bp, Artificial Sequence
  Description of Artificial Sequence: Synthetic oligonucleotide
  Target: LAMA2; (+) strand; PAM type: NRG; PAM sequence: AAG
tcagaaccttactacataca

SEQ ID NO: 165663 - DNA, 20 bp, Artificial Sequence
  Description of Artificial Sequence: Synthetic oligonucleotide
  Target: LAMA2; (+) strand; PAM type: NRG; PAM sequence: TGG
gaaccttactacatacaaag

SEQ ID NO: 165664 - DNA, 20 bp, Artificial Sequence
  Description of Artificial Sequence: Synthetic oligonucleotide
  Target: LAMA2; (+) strand; PAM type: NRG; PAM sequence: CAG
ctacatacaaagtggtgaaa

SEQ ID NO: 165665 - DNA, 20 bp, Artificial Sequence
  Description of Artificial Sequence: Synthetic oligonucleotide
  Target: LAMA2; (+) strand; PAM type: NRG; PAM sequence: AGG
tacatacaaagtggtgaaac

SEQ ID NO: 165666 - DNA, 20 bp, Artificial Sequence
  Description of Artificial Sequence: Synthetic oligonucleotide
  Target: LAMA2; (+) strand; PAM type: NRG; PAM sequence: CGG
ggtgaaacaggaattaaact

SEQ ID NO: 165667 - DNA, 20 bp, Artificial Sequence
  Description of Artificial Sequence: Synthetic oligonucleotide
  Target: LAMA2; (+) strand; PAM type: NRG; PAM sequence: GGG
gtgaaacaggaattaaactc

SEQ ID NO: 165668 - DNA, 20 bp, Artificial Sequence
  Description of Artificial Sequence: Synthetic oligonucleotide
  Target: LAMA2; (+) strand; PAM type: NRG; PAM sequence: AAG
ctgattgcaaaatccatgca

SEQ ID NO: 165669 - DNA, 20 bp, Artificial Sequence
  Description of Artificial Sequence: Synthetic oligonucleotide
  Target: LAMA2; (+) strand; PAM type: NRG; PAM sequence: AAG
caaaatccatgcaaagatac

SEQ ID NO: 165670 - DNA, 20 bp, Artificial Sequence
  Description of Artificial Sequence: Synthetic oligonucleotide
  Target: LAMA2; (+) strand; PAM type: NRG; PAM sequence: TAG
atccatgcaaagatacaaga

SEQ ID NO: 165671 - DNA, 20 bp, Artificial Sequence
  Description of Artificial Sequence: Synthetic oligonucleotide
  Target: LAMA2; (+) strand; PAM type: NRG; PAM sequence: GAG
ccatgcaaagatacaagata

SEQ ID NO: 165672 - DNA, 20 bp, Artificial Sequence
  Description of Artificial Sequence: Synthetic oligonucleotide
  Target: LAMA2; (+) strand; PAM type: NRG; PAM sequence: GAG
acaagatagagtgtttttat

SEQ ID NO: 165673 - DNA, 20 bp, Artificial Sequence
  Description of Artificial Sequence: Synthetic oligonucleotide
  Target: LAMA2; (+) strand; PAM type: NRG; PAM sequence: CAG
tagagtgtttttatgagctc

SEQ ID NO: 165674 - DNA, 20 bp, Artificial Sequence
  Description of Artificial Sequence: Synthetic oligonucleotide
  Target: LAMA2; (+) strand; PAM type: NRG; PAM sequence: AAG
gtttttatgagctccagcac

SEQ ID NO: 165675 - DNA, 20 bp, Artificial Sequence
  Description of Artificial Sequence: Synthetic oligonucleotide
  Target: LAMA2; (+) strand; PAM type: NRG; PAM sequence: AAG
atttttattactaaactctg

SEQ ID NO: 165676 - DNA, 20 bp, Artificial Sequence
  Description of Artificial Sequence: Synthetic oligonucleotide
  Target: LAMA2; (+) strand; PAM type: NRG; PAM sequence: AAG
ttattactaaactctgaaga

SEQ ID NO: 165677 - DNA, 20 bp, Artificial Sequence
  Description of Artificial Sequence: Synthetic oligonucleotide
  Target: LAMA2; (+) strand; PAM type: NRG; PAM sequence: AAG
tactaaactctgaagaaaga

SEQ ID NO: 165678 - DNA, 20 bp, Artificial Sequence
  Description of Artificial Sequence: Synthetic oligonucleotide
  Target: LAMA2; (+) strand; PAM type: NRG; PAM sequence: AGG
actaaactctgaagaaagaa

SEQ ID NO: 165679 - DNA, 20 bp, Artificial Sequence
  Description of Artificial Sequence: Synthetic oligonucleotide
  Target: LAMA2; (+) strand; PAM type: NRG; PAM sequence: GAG
taaactctgaagaaagaaag

SEQ ID NO: 165680 - DNA, 20 bp, Artificial Sequence
  Description of Artificial Sequence: Synthetic oligonucleotide
  Target: LAMA2; (+) strand; PAM type: NRG; PAM sequence: CAG
tctgaagaaagaaaggagcg

SEQ ID NO: 165681 - DNA, 20 bp, Artificial Sequence
  Description of Artificial Sequence: Synthetic oligonucleotide
  Target: LAMA2; (+) strand; PAM type: NRG; PAM sequence: CAG
aaagaaaggagcgcagtgtg

SEQ ID NO: 165682 - DNA, 20 bp, Artificial Sequence
  Description of Artificial Sequence: Synthetic oligonucleotide
  Target: LAMA2; (+) strand; PAM type: NRG; PAM sequence: GAG
ggagcgcagtgtgcagccct

SEQ ID NO: 165683 - DNA, 20 bp, Artificial Sequence
  Description of Artificial Sequence: Synthetic oligonucleotide
  Target: LAMA2; (+) strand; PAM type: NRG; PAM sequence: TAG
gcagtgtgcagccctgagcc

SEQ ID NO: 165684 - DNA, 20 bp, Artificial Sequence
  Description of Artificial Sequence: Synthetic oligonucleotide
  Target: LAMA2; (+) strand; PAM type: NRG; PAM sequence: AGG
cagtgtgcagccctgagcct

SEQ ID NO: 165685 - DNA, 20 bp, Artificial Sequence
  Description of Artificial Sequence: Synthetic oligonucleotide
  Target: LAMA2; (+) strand; PAM type: NRG; PAM sequence: TAG
gtgcagccctgagcctagga

SEQ ID NO: 165686 - DNA, 20 bp, Artificial Sequence
  Description of Artificial Sequence: Synthetic oligonucleotide
  Target: LAMA2; (+) strand; PAM type: NRG; PAM sequence: AGG
tgcagccctgagcctaggat

SEQ ID NO: 165687 - DNA, 20 bp, Artificial Sequence
  Description of Artificial Sequence: Synthetic oligonucleotide
  Target: LAMA2; (+) strand; PAM type: NRG; PAM sequence: TAG
gccctgagcctaggatagga

SEQ ID NO: 165688 - DNA, 20 bp, Artificial Sequence
  Description of Artificial Sequence: Synthetic oligonucleotide
  Target: LAMA2; (+) strand; PAM type: NRG; PAM sequence: AGG
ccctgagcctaggataggat

SEQ ID NO: 165689 - DNA, 20 bp, Artificial Sequence
  Description of Artificial Sequence: Synthetic oligonucleotide
  Target: LAMA2; (+) strand; PAM type: NRG; PAM sequence: CAG
taggataggataggtctcta

SEQ ID NO: 165690 - DNA, 20 bp, Artificial Sequence
  Description of Artificial Sequence: Synthetic oligonucleotide
  Target: LAMA2; (+) strand; PAM type: NRG; PAM sequence: AAG
tatattatgaaaataaatta

SEQ ID NO: 165691 - DNA, 20 bp, Artificial Sequence
  Description of Artificial Sequence: Synthetic oligonucleotide
  Target: LAMA2; (+) strand; PAM type: NRG; PAM sequence: TAG
ttatgaaaataaattaaaga

SEQ ID NO: 165692 - DNA, 20 bp, Artificial Sequence
  Description of Artificial Sequence: Synthetic oligonucleotide
  Target: LAMA2; (+) strand; PAM type: NRG; PAM sequence: GAG
aaaataaattaaagatagac

SEQ ID NO: 165693 - DNA, 20 bp, Artificial Sequence
  Description of Artificial Sequence: Synthetic oligonucleotide
  Target: LAMA2; (+) strand; PAM type: NRG; PAM sequence: GAG
aataaattaaagatagacga

SEQ ID NO: 165694 - DNA, 20 bp, Artificial Sequence
  Description of Artificial Sequence: Synthetic oligonucleotide
  Target: LAMA2; (+) strand; PAM type: NRG; PAM sequence: CAG
aaattaaagatagacgagag

SEQ ID NO: 165695 - DNA, 20 bp, Artificial Sequence
  Description of Artificial Sequence: Synthetic oligonucleotide
  Target: LAMA2; (+) strand; PAM type: NRG; PAM sequence: AAG
ttaaagatagacgagagcag

SEQ ID NO: 165696 - DNA, 20 bp, Artificial Sequence
  Description of Artificial Sequence: Synthetic oligonucleotide
  Target: LAMA2; (+) strand; PAM type: NRG; PAM sequence: GAG
gacgagagcagaagaaaatt

SEQ ID NO: 165697 - DNA, 20 bp, Artificial Sequence
  Description of Artificial Sequence: Synthetic oligonucleotide
  Target: LAMA2; (+) strand; PAM type: NRG; PAM sequence: CAG
tgagccatgaataatttcaa

SEQ ID NO: 165698 - DNA, 20 bp, Artificial Sequence
  Description of Artificial Sequence: Synthetic oligonucleotide
  Target: LAMA2; (+) strand; PAM type: NRG; PAM sequence: TGG
gccatgaataatttcaacag

SEQ ID NO: 165699 - DNA, 20 bp, Artificial Sequence
  Description of Artificial Sequence: Synthetic oligonucleotide
  Target: LAMA2; (+) strand; PAM type: NRG; PAM sequence: GGG
ccatgaataatttcaacagt

SEQ ID NO: 165700 - DNA, 20 bp, Artificial Sequence
  Description of Artificial Sequence: Synthetic oligonucleotide
  Target: LAMA2; (+) strand; PAM type: NRG; PAM sequence: GGG
catgaataatttcaacagtg

SEQ ID NO: 165701 - DNA, 20 bp, Artificial Sequence
  Description of Artificial Sequence: Synthetic oligonucleotide
  Target: LAMA2; (+) strand; PAM type: NRG; PAM sequence: AAG
gaataatttcaacagtgggg

SEQ ID NO: 165702 - DNA, 20 bp, Artificial Sequence
  Description of Artificial Sequence: Synthetic oligonucleotide
  Target: LAMA2; (+) strand; PAM type: NRG; PAM sequence: GAG
ataatttcaacagtggggaa

SEQ ID NO: 165703 - DNA, 20 bp, Artificial Sequence
  Description of Artificial Sequence: Synthetic oligonucleotide
  Target: LAMA2; (+) strand; PAM type: NRG; PAM sequence: TGG
aacagtggggaagagaactt

SEQ ID NO: 165704 - DNA, 20 bp, Artificial Sequence
  Description of Artificial Sequence: Synthetic oligonucleotide
  Target: LAMA2; (+) strand; PAM type: NRG; PAM sequence: AAG
tggggaagagaactttggaa

SEQ ID NO: 165705 - DNA, 20 bp, Artificial Sequence
  Description of Artificial Sequence: Synthetic oligonucleotide
  Target: LAMA2; (+) strand; PAM type: NRG; PAM sequence: TAG
aactttggaaaagtttaaat

SEQ ID NO: 165706 - DNA, 20 bp, Artificial Sequence
  Description of Artificial Sequence: Synthetic oligonucleotide
  Target: LAMA2; (+) strand; PAM type: NRG; PAM sequence: GAG
ctttggaaaagtttaaatta

SEQ ID NO: 165707 - DNA, 20 bp, Artificial Sequence
  Description of Artificial Sequence: Synthetic oligonucleotide
  Target: LAMA2; (+) strand; PAM type: NRG; PAM sequence: TAG
tggaaaagtttaaattagag

SEQ ID NO: 165708 - DNA, 20 bp, Artificial Sequence
  Description of Artificial Sequence: Synthetic oligonucleotide
  Target: LAMA2; (+) strand; PAM type: NRG; PAM sequence: TGG
agtttaaattagagtagaaa

SEQ ID NO: 165709 - DNA, 20 bp, Artificial Sequence
  Description of Artificial Sequence: Synthetic oligonucleotide
  Target: LAMA2; (+) strand; PAM type: NRG; PAM sequence: GGG
gtttaaattagagtagaaat

SEQ ID NO: 165710 - DNA, 20 bp, Artificial Sequence
  Description of Artificial Sequence: Synthetic oligonucleotide
  Target: LAMA2; (+) strand; PAM type: NRG; PAM sequence: AAG
aaattagagtagaaatgggt

SEQ ID NO: 165711 - DNA, 20 bp, Artificial Sequence
  Description of Artificial Sequence: Synthetic oligonucleotide
  Target: LAMA2; (+) strand; PAM type: NRG; PAM sequence: GAG
attagagtagaaatgggtaa

SEQ ID NO: 165712 - DNA, 20 bp, Artificial Sequence
  Description of Artificial Sequence: Synthetic oligonucleotide
  Target: LAMA2; (+) strand; PAM type: NRG; PAM sequence: AGG
ttagagtagaaatgggtaag

SEQ ID NO: 165713 - DNA, 20 bp, Artificial Sequence
  Description of Artificial Sequence: Synthetic oligonucleotide
  Target: LAMA2; (+) strand; PAM type: NRG; PAM sequence: GAG
agagtagaaatgggtaagag

SEQ ID NO: 165714 - DNA, 20 bp, Artificial Sequence
  Description of Artificial Sequence: Synthetic oligonucleotide
  Target: LAMA2; (+) strand; PAM type: NRG; PAM sequence: CAG
agaaatgggtaagaggagct

SEQ ID NO: 165715 - DNA, 20 bp, Artificial Sequence
  Description of Artificial Sequence: Synthetic oligonucleotide
  Target: LAMA2; (+) strand; PAM type: NRG; PAM sequence: AGG
gaaatgggtaagaggagctc

SEQ ID NO: 165716 - DNA, 20 bp, Artificial Sequence
  Description of Artificial Sequence: Synthetic oligonucleotide
  Target: LAMA2; (+) strand; PAM type: NRG; PAM sequence: AAG
tgggtaagaggagctcagga

SEQ ID NO: 165717 - DNA, 20 bp, Artificial Sequence
  Description of Artificial Sequence: Synthetic oligonucleotide
  Target: LAMA2; (+) strand; PAM type: NRG; PAM sequence: CAG
tttaattccccattgtgttc

SEQ ID NO: 165718 - DNA, 20 bp, Artificial Sequence
  Description of Artificial Sequence: Synthetic oligonucleotide
  Target: LAMA2; (+) strand; PAM type: NRG; PAM sequence: AAG
attccccattgtgttccaga

SEQ ID NO: 165719 - DNA, 20 bp, Artificial Sequence
  Description of Artificial Sequence: Synthetic oligonucleotide
  Target: LAMA2; (+) strand; PAM type: NRG; PAM sequence: AGG
ttccccattgtgttccagaa

SEQ ID NO: 165720 - DNA, 20 bp, Artificial Sequence
  Description of Artificial Sequence: Synthetic oligonucleotide
  Target: LAMA2; (+) strand; PAM type: NRG; PAM sequence: TAG
ttgtgttccagaaaggattt

SEQ ID NO: 165721 - DNA, 20 bp, Artificial Sequence
  Description of Artificial Sequence: Synthetic oligonucleotide
  Target: LAMA2; (+) strand; PAM type: NRG; PAM sequence: TGG
gttccagaaaggattttaga

SEQ ID NO: 165722 - DNA, 20 bp, Artificial Sequence
  Description of Artificial Sequence: Synthetic oligonucleotide
  Target: LAMA2; (+) strand; PAM type: NRG; PAM sequence: GGG
ttccagaaaggattttagat

SEQ ID NO: 165723 - DNA, 20 bp, Artificial Sequence
  Description of Artificial Sequence: Synthetic oligonucleotide
  Target: LAMA2; (+) strand; PAM type: NRG; PAM sequence: AAG
gattttagatgggactcaaa

SEQ ID NO: 165724 - DNA, 20 bp, Artificial Sequence
  Description of Artificial Sequence: Synthetic oligonucleotide
  Target: LAMA2; (+) strand; PAM type: NRG; PAM sequence: CAG
attctcacaaacttttgtct

SEQ ID NO: 165725 - DNA, 20 bp, Artificial Sequence
  Description of Artificial Sequence: Synthetic oligonucleotide
  Target: LAMA2; (+) strand; PAM type: NRG; PAM sequence: AAG
aacttttgtctcagttcacc

SEQ ID NO: 165726 - DNA, 20 bp, Artificial Sequence
  Description of Artificial Sequence: Synthetic oligonucleotide
  Target: LAMA2; (+) strand; PAM type: NRG; PAM sequence: GAG
cttttgtctcagttcaccaa

SEQ ID NO: 165727 - DNA, 20 bp, Artificial Sequence
  Description of Artificial Sequence: Synthetic oligonucleotide
  Target: LAMA2; (+) strand; PAM type: NRG; PAM sequence: AGG
ttttgtctcagttcaccaag

SEQ ID NO: 165728 - DNA, 20 bp, Artificial Sequence
  Description of Artificial Sequence: Synthetic oligonucleotide
  Target: LAMA2; (+) strand; PAM type: NRG; PAM sequence: AAG
ctaaaaattatttaaattga

SEQ ID NO: 165729 - DNA, 20 bp, Artificial Sequence
  Description of Artificial Sequence: Synthetic oligonucleotide
  Target: LAMA2; (+) strand; PAM type: NRG; PAM sequence: TAG
aattatttaaattgaaagaa

SEQ ID NO: 165730 - DNA, 20 bp, Artificial Sequence
  Description of Artificial Sequence: Synthetic oligonucleotide
  Target: LAMA2; (+) strand; PAM type: NRG; PAM sequence: AAG
aagaatagtgcaaaataatc

SEQ ID NO: 165731 - DNA, 20 bp, Artificial Sequence
  Description of Artificial Sequence: Synthetic oligonucleotide
  Target: LAMA2; (+) strand; PAM type: NRG; PAM sequence: AGG
agaatagtgcaaaataatca

SEQ ID NO: 165732 - DNA, 20 bp, Artificial Sequence
  Description of Artificial Sequence: Synthetic oligonucleotide
  Target: LAMA2; (+) strand; PAM type: NRG; PAM sequence: AAG
agtgcaaaataatcaaggaa

SEQ ID NO: 165733 - DNA, 20 bp, Artificial Sequence
  Description of Artificial Sequence: Synthetic oligonucleotide
  Target: LAMA2; (+) strand; PAM type: NRG; PAM sequence: GAG
tgcaaaataatcaaggaaaa

SEQ ID NO: 165734 - DNA, 20 bp, Artificial Sequence
  Description of Artificial Sequence: Synthetic oligonucleotide
  Target: LAMA2; (+) strand; PAM type: NRG; PAM sequence: GAG
caaaataatcaaggaaaaga

SEQ ID NO: 165735 - DNA, 20 bp, Artificial Sequence
  Description of Artificial Sequence: Synthetic oligonucleotide
  Target: LAMA2; (+) strand; PAM type: NRG; PAM sequence: CAG
gtttttttttttaaaaaaaa

SEQ ID NO: 165736 - DNA, 20 bp, Artificial Sequence
  Description of Artificial Sequence: Synthetic oligonucleotide
  Target: LAMA2; (+) strand; PAM type: NRG; PAM sequence: AAG
taaaaaaaacagcacgtttt

SEQ ID NO: 165737 - DNA, 20 bp, Artificial Sequence
  Description of Artificial Sequence: Synthetic oligonucleotide
  Target: LAMA2; (+) strand; PAM type: NRG; PAM sequence: TAG
ctctctcttttgctacctca

SEQ ID NO: 165738 - DNA, 20 bp, Artificial Sequence
  Description of Artificial Sequence: Synthetic oligonucleotide
  Target: LAMA2; (+) strand; PAM type: NRG; PAM sequence: CAG
ctcatagaaatttaatccat

SEQ ID NO: 165739 - DNA, 20 bp, Artificial Sequence
  Description of Artificial Sequence: Synthetic oligonucleotide
  Target: LAMA2; (+) strand; PAM type: NRG; PAM sequence: AGG
tcatagaaatttaatccatc

SEQ ID NO: 165740 - DNA, 20 bp, Artificial Sequence
  Description of Artificial Sequence: Synthetic oligonucleotide
  Target: LAMA2; (+) strand; PAM type: NRG; PAM sequence: AAG
atctaaaatgttaaaactga

SEQ ID NO: 165741 - DNA, 20 bp, Artificial Sequence
  Description of Artificial Sequence: Synthetic oligonucleotide
  Target: LAMA2; (+) strand; PAM type: NRG; PAM sequence: TAG
gttaaaactgaaagacactt

SEQ ID NO: 165742 - DNA, 20 bp, Artificial Sequence
  Description of Artificial Sequence: Synthetic oligonucleotide
  Target: LAMA2; (+) strand; PAM type: NRG; PAM sequence: AAG
aaaactgaaagacactttag

SEQ ID NO: 165743 - DNA, 20 bp, Artificial Sequence
  Description of Artificial Sequence: Synthetic oligonucleotide
  Target: LAMA2; (+) strand; PAM type: NRG; PAM sequence: GAG
agacactttagaagtcatct

SEQ ID NO: 165744 - DNA, 20 bp, Artificial Sequence
  Description of Artificial Sequence: Synthetic oligonucleotide
  Target: LAMA2; (+) strand; PAM type: NRG; PAM sequence: TGG
tgagttaacctactcatttg

SEQ ID NO: 165745 - DNA, 20 bp, Artificial Sequence
  Description of Artificial Sequence: Synthetic oligonucleotide
  Target: LAMA2; (+) strand; PAM type: NRG; PAM sequence: GGG
gagttaacctactcatttgt

SEQ ID NO: 165746 - DNA, 20 bp, Artificial Sequence
  Description of Artificial Sequence: Synthetic oligonucleotide
  Target: LAMA2; (+) strand; PAM type: NRG; PAM sequence: GAG
aacctactcatttgtgggat

SEQ ID NO: 165747 - DNA, 20 bp, Artificial Sequence
  Description of Artificial Sequence: Synthetic oligonucleotide
  Target: LAMA2; (+) strand; PAM type: NRG; PAM sequence: AGG
acctactcatttgtgggatg

SEQ ID NO: 165748 - DNA, 20 bp, Artificial Sequence
  Description of Artificial Sequence: Synthetic oligonucleotide
  Target: LAMA2; (+) strand; PAM type: NRG; PAM sequence: TGG
catttgtgggatgaggaaac

SEQ ID NO: 165749 - DNA, 20 bp, Artificial Sequence
  Description of Artificial Sequence: Synthetic oligonucleotide
  Target: LAMA2; (+) strand; PAM type: NRG; PAM sequence: GGG
atttgtgggatgaggaaact

SEQ ID NO: 165750 - DNA, 20 bp, Artificial Sequence
  Description of Artificial Sequence: Synthetic oligonucleotide
  Target: LAMA2; (+) strand; PAM type: NRG; PAM sequence: AAG
gatgaggaaactgggtctca

SEQ ID NO: 165751 - DNA, 20 bp, Artificial Sequence
  Description of Artificial Sequence: Synthetic oligonucleotide
  Target: LAMA2; (+) strand; PAM type: NRG; PAM sequence: CAG
agtaacttgcccatatctct

SEQ ID NO: 165752 - DNA, 20 bp, Artificial Sequence
  Description of Artificial Sequence: Synthetic oligonucleotide
  Target: LAMA2; (+) strand; PAM type: NRG; PAM sequence: AAG
gacaaaactaacataaaatc

SEQ ID NO: 165753 - DNA, 20 bp, Artificial Sequence
  Description of Artificial Sequence: Synthetic oligonucleotide
  Target: LAMA2; (+) strand; PAM type: NRG; PAM sequence: AGG
acaaaactaacataaaatca

SEQ ID NO: 165754 - DNA, 20 bp, Artificial Sequence
  Description of Artificial Sequence: Synthetic oligonucleotide
  Target: LAMA2; (+) strand; PAM type: NRG; PAM sequence: TAG
ttccctattcattcctttta

SEQ ID NO: 165755 - DNA, 20 bp, Artificial Sequence
  Description of Artificial Sequence: Synthetic oligonucleotide
  Target: LAMA2; (+) strand; PAM type: NRG; PAM sequence: AAG
ttcattccttttatagtacc

SEQ ID NO: 165756 - DNA, 20 bp, Artificial Sequence
  Description of Artificial Sequence: Synthetic oligonucleotide
  Target: LAMA2; (+) strand; PAM type: NRG; PAM sequence: AGG
tcattccttttatagtacca

SEQ ID NO: 165757 - DNA, 20 bp, Artificial Sequence
  Description of Artificial Sequence: Synthetic oligonucleotide
  Target: LAMA2; (+) strand; PAM type: NRG; PAM sequence: GAG
attccttttatagtaccaag

SEQ ID NO: 165758 - DNA, 20 bp, Artificial Sequence
  Description of Artificial Sequence: Synthetic oligonucleotide
  Target: LAMA2; (+) strand; PAM type: NRG; PAM sequence: TGG
ccttttatagtaccaaggag

SEQ ID NO: 165759 - DNA, 20 bp, Artificial Sequence
  Description of Artificial Sequence: Synthetic oligonucleotide
  Target: LAMA2; (+) strand; PAM type: NRG; PAM sequence: GAG
atgtatttatttattttttt

SEQ ID NO: 165760 - DNA, 20 bp, Artificial Sequence
  Description of Artificial Sequence: Synthetic oligonucleotide
  Target: LAMA2; (+) strand; PAM type: NRG; PAM sequence: TGG
atttatttatttttttgaga

SEQ ID NO: 165761 - DNA, 20 bp, Artificial Sequence
  Description of Artificial Sequence: Synthetic oligonucleotide
  Target: LAMA2; (+) strand; PAM type: NRG; PAM sequence: GAG
ttatttatttttttgagatg

SEQ ID NO: 165762 - DNA, 20 bp, Artificial Sequence
  Description of Artificial Sequence: Synthetic oligonucleotide
  Target: LAMA2; (+) strand; PAM type: NRG; PAM sequence: CAG
tggagtctcgctttgtcact

SEQ ID NO: 165763 - DNA, 20 bp, Artificial Sequence
  Description of Artificial Sequence: Synthetic oligonucleotide
  Target: LAMA2; (+) strand; PAM type: NRG; PAM sequence: AGG
ggagtctcgctttgtcactc

SEQ ID NO: 165764 - DNA, 20 bp, Artificial Sequence
  Description of Artificial Sequence: Synthetic oligonucleotide
  Target: LAMA2; (+) strand; PAM type: NRG; PAM sequence: TGG
tctcgctttgtcactcaggc

SEQ ID NO: 165765 - DNA, 20 bp, Artificial Sequence
  Description of Artificial Sequence: Synthetic oligonucleotide
  Target: LAMA2; (+) strand; PAM type: NRG; PAM sequence: GAG
tcgctttgtcactcaggctg

SEQ ID NO: 165766 - DNA, 20 bp, Artificial Sequence
  Description of Artificial Sequence: Synthetic oligonucleotide
  Target: LAMA2; (+) strand; PAM type: NRG; PAM sequence: CAG
ttgtcactcaggctggagtg

SEQ ID NO: 165767 - DNA, 20 bp, Artificial Sequence
  Description of Artificial Sequence: Synthetic oligonucleotide
  Target: LAMA2; (+) strand; PAM type: NRG; PAM sequence: TGG
tcactcaggctggagtgcag

SEQ ID NO: 165768 - DNA, 20 bp, Artificial Sequence
  Description of Artificial Sequence: Synthetic oligonucleotide
  Target: LAMA2; (+) strand; PAM type: NRG; PAM sequence: CAG
tcaggctggagtgcagtggc

SEQ ID NO: 165769 - DNA, 20 bp, Artificial Sequence
  Description of Artificial Sequence: Synthetic oligonucleotide
  Target: LAMA2; (+) strand; PAM type: NRG; PAM sequence: CAG
ggagtgcagtggccagatct

SEQ ID NO: 165770 - DNA, 20 bp, Artificial Sequence
  Description of Artificial Sequence: Synthetic oligonucleotide
  Target: LAMA2; (+) strand; PAM type: NRG; PAM sequence: CAG
ttactgcaacctccacttcc

SEQ ID NO: 165771 - DNA, 20 bp, Artificial Sequence
  Description of Artificial Sequence: Synthetic oligonucleotide
  Target: LAMA2; (+) strand; PAM type: NRG; PAM sequence: AGG
tactgcaacctccacttccc

SEQ ID NO: 165772 - DNA, 20 bp, Artificial Sequence
  Description of Artificial Sequence: Synthetic oligonucleotide
  Target: LAMA2; (+) strand; PAM type: NRG; PAM sequence: AAG
aacctccacttcccaggttc

SEQ ID NO: 165773 - DNA, 20 bp, Artificial Sequence
  Description of Artificial Sequence: Synthetic oligonucleotide
  Target: LAMA2; (+) strand; PAM type: NRG; PAM sequence: CAG
ttcaagcgatgctcgtgcct

SEQ ID NO: 165774 - DNA, 20 bp, Artificial Sequence
  Description of Artificial Sequence: Synthetic oligonucleotide
  Target: LAMA2; (+) strand; PAM type: NRG; PAM sequence: CAG
gatgctcgtgcctcagcctc

SEQ ID NO: 165775 - DNA, 20 bp, Artificial Sequence
  Description of Artificial Sequence: Synthetic oligonucleotide
  Target: LAMA2; (+) strand; PAM type: NRG; PAM sequence: GAG
tgctcgtgcctcagcctcca

SEQ ID NO: 165776 - DNA, 20 bp, Artificial Sequence
  Description of Artificial Sequence: Synthetic oligonucleotide
  Target: LAMA2; (+) strand; PAM type: NRG; PAM sequence: TAG
tcgtgcctcagcctccagag

SEQ ID NO: 165777 - DNA, 20 bp, Artificial Sequence
  Description of Artificial Sequence: Synthetic oligonucleotide
  Target: LAMA2; (+) strand; PAM type: NRG; PAM sequence: TGG
gcctcagcctccagagtagt

SEQ ID NO: 165778 - DNA, 20 bp, Artificial Sequence
  Description of Artificial Sequence: Synthetic oligonucleotide
  Target: LAMA2; (+) strand; PAM type: NRG; PAM sequence: GGG
cctcagcctccagagtagtt

SEQ ID NO: 165779 - DNA, 20 bp, Artificial Sequence
  Description of Artificial Sequence: Synthetic oligonucleotide
  Target: LAMA2; (+) strand; PAM type: NRG; PAM sequence: CAG
ctccagagtagttgggacta

SEQ ID NO: 165780 - DNA, 20 bp, Artificial Sequence
  Description of Artificial Sequence: Synthetic oligonucleotide
  Target: LAMA2; (+) strand; PAM type: NRG; PAM sequence: TGG
cagacacgcatcaccacgcc

SEQ ID NO: 165781 - DNA, 20 bp, Artificial Sequence
  Description of Artificial Sequence: Synthetic oligonucleotide
  Target: LAMA2; (+) strand; PAM type: NRG; PAM sequence: TAG
ctggctaatttttgtatttt

SEQ ID NO: 165782 - DNA, 20 bp, Artificial Sequence
  Description of Artificial Sequence: Synthetic oligonucleotide
  Target: LAMA2; (+) strand; PAM type: NRG; PAM sequence: AAG
taatttttgtatttttagtc

SEQ ID NO: 165783 - DNA, 20 bp, Artificial Sequence
  Description of Artificial Sequence: Synthetic oligonucleotide
  Target: LAMA2; (+) strand; PAM type: NRG; PAM sequence: TGG
ttgtatttttagtcaagaca

SEQ ID NO: 165784 - DNA, 20 bp, Artificial Sequence
  Description of Artificial Sequence: Synthetic oligonucleotide
  Target: LAMA2; (+) strand; PAM type: NRG; PAM sequence: TGG
aagacatggtttcaccatgt

SEQ ID NO: 165785 - DNA, 20 bp, Artificial Sequence
  Description of Artificial Sequence: Synthetic oligonucleotide
  Target: LAMA2; (+) strand; PAM type: NRG; PAM sequence: CAG
catggtttcaccatgttggc

SEQ ID NO: 165786 - DNA, 20 bp, Artificial Sequence
  Description of Artificial Sequence: Synthetic oligonucleotide
  Target: LAMA2; (+) strand; PAM type: NRG; PAM sequence: AGG
atggtttcaccatgttggcc

SEQ ID NO: 165787 - DNA, 20 bp, Artificial Sequence
  Description of Artificial Sequence: Synthetic oligonucleotide
  Target: LAMA2; (+) strand; PAM type: NRG; PAM sequence: TGG
tttcaccatgttggccaggc

SEQ ID NO: 165788 - DNA, 20 bp, Artificial Sequence
  Description of Artificial Sequence: Synthetic oligonucleotide
  Target: LAMA2; (+) strand; PAM type: NRG; PAM sequence: TGG
ccatgttggccaggctggtc

SEQ ID NO: 165789 - DNA, 20 bp, Artificial Sequence
  Description of Artificial Sequence: Synthetic oligonucleotide
  Target: LAMA2; (+) strand; PAM type: NRG; PAM sequence: AAG
ggtctggaactcctgacctc

SEQ ID NO: 165790 - DNA, 20 bp, Artificial Sequence
  Description of Artificial Sequence: Synthetic oligonucleotide
  Target: LAMA2; (+) strand; PAM type: NRG; PAM sequence: CAG
actcctgacctcaagtaatc

SEQ ID NO: 165791 - DNA, 20 bp, Artificial Sequence
  Description of Artificial Sequence: Synthetic oligonucleotide
  Target: LAMA2; (+) strand; PAM type: NRG; PAM sequence: CAG
ctcaagtaatccagccacct

SEQ ID NO: 165792 - DNA, 20 bp, Artificial Sequence
  Description of Artificial Sequence: Synthetic oligonucleotide
  Target: LAMA2; (+) strand; PAM type: NRG; PAM sequence: TGG
acctcagcctcccaaaatgc

SEQ ID NO: 165793 - DNA, 20 bp, Artificial Sequence
  Description of Artificial Sequence: Synthetic oligonucleotide
  Target: LAMA2; (+) strand; PAM type: NRG; PAM sequence: GGG
cctcagcctcccaaaatgct

SEQ ID NO: 165794 - DNA, 20 bp, Artificial Sequence
  Description of Artificial Sequence: Synthetic oligonucleotide
  Target: LAMA2; (+) strand; PAM type: NRG; PAM sequence: CAG
ctcccaaaatgctgggatta

SEQ ID NO: 165795 - DNA, 20 bp, Artificial Sequence
  Description of Artificial Sequence: Synthetic oligonucleotide
  Target: LAMA2; (+) strand; PAM type: NRG; PAM sequence: AGG
tcccaaaatgctgggattac

SEQ ID NO: 165796 - DNA, 20 bp, Artificial Sequence
  Description of Artificial Sequence: Synthetic oligonucleotide
  Target: LAMA2; (+) strand; PAM type: NRG; PAM sequence: GAG
aatgctgggattacaggcgt

SEQ ID NO: 165797 - DNA, 20 bp, Artificial Sequence
  Description of Artificial Sequence: Synthetic oligonucleotide
  Target: LAMA2; (+) strand; PAM type: NRG; PAM sequence: CAG
ttaaatgcacacatacacaa

SEQ ID NO: 165798 - DNA, 20 bp, Artificial Sequence
  Description of Artificial Sequence: Synthetic oligonucleotide
  Target: LAMA2; (+) strand; PAM type: NRG; PAM sequence: GAG
aaatgcacacatacacaaca

SEQ ID NO: 165799 - DNA, 20 bp, Artificial Sequence
  Description of Artificial Sequence: Synthetic oligonucleotide
  Target: LAMA2; (+) strand; PAM type: NRG; PAM sequence: AAG
acacatacacaacagagaat

SEQ ID NO: 165800 - DNA, 20 bp, Artificial Sequence
  Description of Artificial Sequence: Synthetic oligonucleotide
  Target: LAMA2; (+) strand; PAM type: NRG; PAM sequence: AGG
cacatacacaacagagaata

SEQ ID NO: 165801 - DNA, 20 bp, Artificial Sequence
  Description of Artificial Sequence: Synthetic oligonucleotide
  Target: LAMA2; (+) strand; PAM type: NRG; PAM sequence: GAG
catacacaacagagaataag

SEQ ID NO: 165802 - DNA, 20 bp, Artificial Sequence
  Description of Artificial Sequence: Synthetic oligonucleotide
  Target: LAMA2; (+) strand; PAM type: NRG; PAM sequence: CAG
acagagaataaggagcttgc

SEQ ID NO: 165803 - DNA, 20 bp, Artificial Sequence
  Description of Artificial Sequence: Synthetic oligonucleotide
  Target: LAMA2; (+) strand; PAM type: NRG; PAM sequence: TAG
gctgcgctctaattgtctgt

SEQ ID NO: 165804 - DNA, 20 bp, Artificial Sequence
  Description of Artificial Sequence: Synthetic oligonucleotide
  Target: LAMA2; (+) strand; PAM type: NRG; PAM sequence: AAG
attgtctgttagacttttct

SEQ ID NO: 165805 - DNA, 20 bp, Artificial Sequence
  Description of Artificial Sequence: Synthetic oligonucleotide
  Target: LAMA2; (+) strand; PAM type: NRG; PAM sequence: GAG
tgtctgttagacttttctaa

SEQ ID NO: 165806 - DNA, 20 bp, Artificial Sequence
  Description of Artificial Sequence: Synthetic oligonucleotide
  Target: LAMA2; (+) strand; PAM type: NRG; PAM sequence: CGG
taagagttttaaaacaaact

SEQ ID NO: 165807 - DNA, 20 bp, Artificial Sequence
  Description of Artificial Sequence: Synthetic oligonucleotide
  Target: LAMA2; (+) strand; PAM type: NRG; PAM sequence: GGG
aagagttttaaaacaaactc

SEQ ID NO: 165808 - DNA, 20 bp, Artificial Sequence
  Description of Artificial Sequence: Synthetic oligonucleotide
  Target: LAMA2; (+) strand; PAM type: NRG; PAM sequence: CAG
ctcgggcctcaactctcccc

SEQ ID NO: 165809 - DNA, 20 bp, Artificial Sequence
  Description of Artificial Sequence: Synthetic oligonucleotide
  Target: LAMA2; (+) strand; PAM type: NRG; PAM sequence: GAG
cgggcctcaactctccccca

SEQ ID NO: 165810 - DNA, 20 bp, Artificial Sequence
  Description of Artificial Sequence: Synthetic oligonucleotide
  Target: LAMA2; (+) strand; PAM type: NRG; PAM sequence: AGG
gggcctcaactctcccccag

SEQ ID NO: 165811 - DNA, 20 bp, Artificial Sequence
  Description of Artificial Sequence: Synthetic oligonucleotide
  Target: LAMA2; (+) strand; PAM type: NRG; PAM sequence: TAG
ggaattgactccacctcctc

SEQ ID NO: 165812 - DNA, 20 bp, Artificial Sequence
  Description of Artificial Sequence: Synthetic oligonucleotide
  Target: LAMA2; (+) strand; PAM type: NRG; PAM sequence: AGG
gaattgactccacctcctct

SEQ ID NO: 165813 - DNA, 20 bp, Artificial Sequence
  Description of Artificial Sequence: Synthetic oligonucleotide
  Target: LAMA2; (+) strand; PAM type: NRG; PAM sequence: GGG
aattgactccacctcctcta

SEQ ID NO: 165814 - DNA, 20 bp, Artificial Sequence
  Description of Artificial Sequence: Synthetic oligonucleotide
  Target: LAMA2; (+) strand; PAM type: NRG; PAM sequence: TGG
gactccacctcctctagggc

SEQ ID NO: 165815 - DNA, 20 bp, Artificial Sequence
  Description of Artificial Sequence: Synthetic oligonucleotide
  Target: LAMA2; (+) strand; PAM type: NRG; PAM sequence: CGG
cacctcctctagggctggac

SEQ ID NO: 165816 - DNA, 20 bp, Artificial Sequence
  Description of Artificial Sequence: Synthetic oligonucleotide
  Target: LAMA2; (+) strand; PAM type: NRG; PAM sequence: CAG
tctagggctggaccggacca

SEQ ID NO: 165817 - DNA, 20 bp, Artificial Sequence
  Description of Artificial Sequence: Synthetic oligonucleotide
  Target: LAMA2; (+) strand; PAM type: NRG; PAM sequence: TGG
cggaccacagactcccacta

SEQ ID NO: 165818 - DNA, 20 bp, Artificial Sequence
  Description of Artificial Sequence: Synthetic oligonucleotide
  Target: LAMA2; (+) strand; PAM type: NRG; PAM sequence: GGG
ggaccacagactcccactat

SEQ ID NO: 165819 - DNA, 20 bp, Artificial Sequence
  Description of Artificial Sequence: Synthetic oligonucleotide
  Target: LAMA2; (+) strand; PAM type: NRG; PAM sequence: CAG
tgggcgcttgtctattgtgt

SEQ ID NO: 165820 - DNA, 20 bp, Artificial Sequence
  Description of Artificial Sequence: Synthetic oligonucleotide
  Target: LAMA2; (+) strand; PAM type: NRG; PAM sequence: AGG
gggcgcttgtctattgtgtc

SEQ ID NO: 165821 - DNA, 20 bp, Artificial Sequence
  Description of Artificial Sequence: Synthetic oligonucleotide
  Target: LAMA2; (+) strand; PAM type: NRG; PAM sequence: CGG
tattgtgtcaggctgcctgt

SEQ ID NO: 165822 - DNA, 20 bp, Artificial Sequence
  Description of Artificial Sequence: Synthetic oligonucleotide
  Target: LAMA2; (+) strand; PAM type: NRG; PAM sequence: GGG
attgtgtcaggctgcctgtc

SEQ ID NO: 165823 - DNA, 20 bp, Artificial Sequence
  Description of Artificial Sequence: Synthetic oligonucleotide
  Target: LAMA2; (+) strand; PAM type: NRG; PAM sequence: GGG
ttgtgtcaggctgcctgtcg

SEQ ID NO: 165824 - DNA, 20 bp, Artificial Sequence
  Description of Artificial Sequence: Synthetic oligonucleotide
  Target: LAMA2; (+) strand; PAM type: NRG; PAM sequence: CAG
ctgcctgtcggggaaaacca

SEQ ID NO: 165825 - DNA, 20 bp, Artificial Sequence
  Description of Artificial Sequence: Synthetic oligonucleotide
  Target: LAMA2; (+) strand; PAM type: NRG; PAM sequence: TAG
gtcggggaaaaccacagtaa

SEQ ID NO: 165826 - DNA, 20 bp, Artificial Sequence
  Description of Artificial Sequence: Synthetic oligonucleotide
  Target: LAMA2; (+) strand; PAM type: NRG; PAM sequence: AGG
tcggggaaaaccacagtaat

SEQ ID NO: 165827 - DNA, 20 bp, Artificial Sequence
  Description of Artificial Sequence: Synthetic oligonucleotide
  Target: LAMA2; (+) strand; PAM type: NRG; PAM sequence: TAG
aggaaaaatgtgttgtgcgt

SEQ ID NO: 165828 - DNA, 20 bp, Artificial Sequence
  Description of Artificial Sequence: Synthetic oligonucleotide
  Target: LAMA2; (+) strand; PAM type: NRG; PAM sequence: GAG
gaaaaatgtgttgtgcgtta

SEQ ID NO: 165829 - DNA, 20 bp, Artificial Sequence
  Description of Artificial Sequence: Synthetic oligonucleotide
  Target: LAMA2; (+) strand; PAM type: NRG; PAM sequence: TAG
aaatgtgttgtgcgttagag

SEQ ID NO: 165830 - DNA, 20 bp, Artificial Sequence
  Description of Artificial Sequence: Synthetic oligonucleotide
  Target: LAMA2; (+) strand; PAM type: NRG; PAM sequence: TAG
cgttagagtagacttcacct

SEQ ID NO: 165831 - DNA, 20 bp, Artificial Sequence
  Description of Artificial Sequence: Synthetic oligonucleotide
  Target: LAMA2; (+) strand; PAM type: NRG; PAM sequence: AGG
gttagagtagacttcacctt

SEQ ID NO: 165832 - DNA, 20 bp, Artificial Sequence
  Description of Artificial Sequence: Synthetic oligonucleotide
  Target: LAMA2; (+) strand; PAM type: NRG; PAM sequence: GGG
ttagagtagacttcacctta

SEQ ID NO: 165833 - DNA, 20 bp, Artificial Sequence
  Description of Artificial Sequence: Synthetic oligonucleotide
  Target: LAMA2; (+) strand; PAM type: NRG; PAM sequence: TGG
ttagggctcgccttcacatt

SEQ ID NO: 165834 - DNA, 20 bp, Artificial Sequence
  Description of Artificial Sequence: Synthetic oligonucleotide
  Target: LAMA2; (+) strand; PAM type: NRG; PAM sequence: GAG
aaactgtacaattcctcgat

SEQ ID NO: 165835 - DNA, 20 bp, Artificial Sequence
  Description of Artificial Sequence: Synthetic oligonucleotide
  Target: LAMA2; (+) strand; PAM type: NRG; PAM sequence: AGG
aactgtacaattcctcgatg

SEQ ID NO: 165836 - DNA, 20 bp, Artificial Sequence
  Description of Artificial Sequence: Synthetic oligonucleotide
  Target: LAMA2; (+) strand; PAM type: NRG; PAM sequence: GAG
ctgtacaattcctcgatgag

SEQ ID NO: 165837 - DNA, 20 bp, Artificial Sequence
  Description of Artificial Sequence: Synthetic oligonucleotide
  Target: LAMA2; (+) strand; PAM type: NRG; PAM sequence: AAG
cttgtgtttctttttcttct

SEQ ID NO: 165838 - DNA, 20 bp, Artificial Sequence
  Description of Artificial Sequence: Synthetic oligonucleotide
  Target: LAMA2; (+) strand; PAM type: NRG; PAM sequence: GAG
tttattttaaacttttgttt

SEQ ID NO: 165839 - DNA, 20 bp, Artificial Sequence
  Description of Artificial Sequence: Synthetic oligonucleotide
  Target: LAMA2; (+) strand; PAM type: NRG; PAM sequence: AAG
taaacttttgtttgagcttc

SEQ ID NO: 165840 - DNA, 20 bp, Artificial Sequence
  Description of Artificial Sequence: Synthetic oligonucleotide
  Target: LAMA2; (+) strand; PAM type: NRG; PAM sequence: AGG
aaacttttgtttgagcttca

SEQ ID NO: 165841 - DNA, 20 bp, Artificial Sequence
  Description of Artificial Sequence: Synthetic oligonucleotide
  Target: LAMA2; (+) strand; PAM type: NRG; PAM sequence: CAG
attttttacacaaattttta

SEQ ID NO: 165842 - DNA, 20 bp, Artificial Sequence
  Description of Artificial Sequence: Synthetic oligonucleotide
  Target: LAMA2; (+) strand; PAM type: NRG; PAM sequence: CAG
tttacacaaatttttacaga

SEQ ID NO: 165843 - DNA, 20 bp, Artificial Sequence
  Description of Artificial Sequence: Synthetic oligonucleotide
  Target: LAMA2; (+) strand; PAM type: NRG; PAM sequence: CAG
atttttacagacagtaatta

SEQ ID NO: 165844 - DNA, 20 bp, Artificial Sequence
  Description of Artificial Sequence: Synthetic oligonucleotide
  Target: LAMA2; (+) strand; PAM type: NRG; PAM sequence: TAG
cagtaattacagtaataact

SEQ ID NO: 165845 - DNA, 20 bp, Artificial Sequence
  Description of Artificial Sequence: Synthetic oligonucleotide
  Target: LAMA2; (+) strand; PAM type: NRG; PAM sequence: TAG
taattacagtaataacttag

SEQ ID NO: 165846 - DNA, 20 bp, Artificial Sequence
  Description of Artificial Sequence: Synthetic oligonucleotide
  Target: LAMA2; (+) strand; PAM type: NRG; PAM sequence: GAG
attacagtaataacttagta

SEQ ID NO: 165847 - DNA, 20 bp, Artificial Sequence
  Description of Artificial Sequence: Synthetic oligonucleotide
  Target: LAMA2; (+) strand; PAM type: NRG; PAM sequence: GAG
tacagtaataacttagtaga

SEQ ID NO: 165848 - DNA, 20 bp, Artificial Sequence
  Description of Artificial Sequence: Synthetic oligonucleotide
  Target: LAMA2; (+) strand; PAM type: NRG; PAM sequence: CAG
ataacttagtagagagatta

SEQ ID NO: 165849 - DNA, 20 bp, Artificial Sequence
  Description of Artificial Sequence: Synthetic oligonucleotide
  Target: LAMA2; (+) strand; PAM type: NRG; PAM sequence: GAG
aacttagtagagagattaca

SEQ ID NO: 165850 - DNA, 20 bp, Artificial Sequence
  Description of Artificial Sequence: Synthetic oligonucleotide
  Target: LAMA2; (+) strand; PAM type: NRG; PAM sequence: AAG
gtagagagattacagagata

SEQ ID NO: 165851 - DNA, 20 bp, Artificial Sequence
  Description of Artificial Sequence: Synthetic oligonucleotide
  Target: LAMA2; (+) strand; PAM type: NRG; PAM sequence: TAG
agataaagtcctatctctca

SEQ ID NO: 165852 - DNA, 20 bp, Artificial Sequence
  Description of Artificial Sequence: Synthetic oligonucleotide
  Target: LAMA2; (+) strand; PAM type: NRG; PAM sequence: TAG
gtaacacacatgcatgcacc

SEQ ID NO: 165853 - DNA, 20 bp, Artificial Sequence
  Description of Artificial Sequence: Synthetic oligonucleotide
  Target: LAMA2; (+) strand; PAM type: NRG; PAM sequence: AAG
cacacatgcatgcacctagc

SEQ ID NO: 165854 - DNA, 20 bp, Artificial Sequence
  Description of Artificial Sequence: Synthetic oligonucleotide
  Target: LAMA2; (+) strand; PAM type: NRG; PAM sequence: AAG
tataattaatatatatattc

SEQ ID NO: 165855 - DNA, 20 bp, Artificial Sequence
  Description of Artificial Sequence: Synthetic oligonucleotide
  Target: LAMA2; (+) strand; PAM type: NRG; PAM sequence: AGG
ataattaatatatatattca

SEQ ID NO: 165856 - DNA, 20 bp, Artificial Sequence
  Description of Artificial Sequence: Synthetic oligonucleotide
  Target: LAMA2; (+) strand; PAM type: NRG; PAM sequence: CAG
tcaaggatgaaatccatgca

SEQ ID NO: 165857 - DNA, 20 bp, Artificial Sequence
  Description of Artificial Sequence: Synthetic oligonucleotide
  Target: LAMA2; (+) strand; PAM type: NRG; PAM sequence: CAG
aaatccatgcacagaaaatc

SEQ ID NO: 165858 - DNA, 20 bp, Artificial Sequence
  Description of Artificial Sequence: Synthetic oligonucleotide
  Target: LAMA2; (+) strand; PAM type: NRG; PAM sequence: CAG
acagaaaatccagttttatt

SEQ ID NO: 165859 - DNA, 20 bp, Artificial Sequence
  Description of Artificial Sequence: Synthetic oligonucleotide
  Target: LAMA2; (+) strand; PAM type: NRG; PAM sequence: TGG
gaaaatccagttttattcag

SEQ ID NO: 165860 - DNA, 20 bp, Artificial Sequence
  Description of Artificial Sequence: Synthetic oligonucleotide
  Target: LAMA2; (+) strand; PAM type: NRG; PAM sequence: CAG
atccagttttattcagtggt

SEQ ID NO: 165861 - DNA, 20 bp, Artificial Sequence
  Description of Artificial Sequence: Synthetic oligonucleotide
  Target: LAMA2; (+) strand; PAM type: NRG; PAM sequence: AAG
attcagtggtcagcttgcta

SEQ ID NO: 165862 - DNA, 20 bp, Artificial Sequence
  Description of Artificial Sequence: Synthetic oligonucleotide
  Target: LAMA2; (+) strand; PAM type: NRG; PAM sequence: TGG
tggtcagcttgctaaagaat

SEQ ID NO: 165863 - DNA, 20 bp, Artificial Sequence
  Description of Artificial Sequence: Synthetic oligonucleotide
  Target: LAMA2; (+) strand; PAM type: NRG; PAM sequence: TAG
cactatgaaccacttttaaa

SEQ ID NO: 165864 - DNA, 20 bp, Artificial Sequence
  Description of Artificial Sequence: Synthetic oligonucleotide
  Target: LAMA2; (+) strand; PAM type: NRG; PAM sequence: TGG
aaccacttttaaatagatct

SEQ ID NO: 165865 - DNA, 20 bp, Artificial Sequence
  Description of Artificial Sequence: Synthetic oligonucleotide
  Target: LAMA2; (+) strand; PAM type: NRG; PAM sequence: CAG
tagatcttggtttatttctt

SEQ ID NO: 165866 - DNA, 20 bp, Artificial Sequence
  Description of Artificial Sequence: Synthetic oligonucleotide
  Target: LAMA2; (+) strand; PAM type: NRG; PAM sequence: CAG
aattcttcaaccatcatttc

SEQ ID NO: 165867 - DNA, 20 bp, Artificial Sequence
  Description of Artificial Sequence: Synthetic oligonucleotide
  Target: LAMA2; (+) strand; PAM type: NRG; PAM sequence: AGG
attcttcaaccatcatttcc

SEQ ID NO: 165868 - DNA, 20 bp, Artificial Sequence
  Description of Artificial Sequence: Synthetic oligonucleotide
  Target: LAMA2; (+) strand; PAM type: NRG; PAM sequence: TGG
caggacttattcaataataa

SEQ ID NO: 165869 - DNA, 20 bp, Artificial Sequence
  Description of Artificial Sequence: Synthetic oligonucleotide
  Target: LAMA2; (+) strand; PAM type: NRG; PAM sequence: AAG
tatatgattatgtccaccat

SEQ ID NO: 165870 - DNA, 20 bp, Artificial Sequence
  Description of Artificial Sequence: Synthetic oligonucleotide
  Target: LAMA2; (+) strand; PAM type: NRG; PAM sequence: AAG
atgtccaccataagacaaat

SEQ ID NO: 165871 - DNA, 20 bp, Artificial Sequence
  Description of Artificial Sequence: Synthetic oligonucleotide
  Target: LAMA2; (+) strand; PAM type: NRG; PAM sequence: TAG
aagacaaataagactcaaaa

SEQ ID NO: 165872 - DNA, 20 bp, Artificial Sequence
  Description of Artificial Sequence: Synthetic oligonucleotide
  Target: LAMA2; (+) strand; PAM type: NRG; PAM sequence: CAG
aatagtttgaatactattct

SEQ ID NO: 165873 - DNA, 20 bp, Artificial Sequence
  Description of Artificial Sequence: Synthetic oligonucleotide
  Target: LAMA2; (+) strand; PAM type: NRG; PAM sequence: CAG
aatactattctcagttttat

SEQ ID NO: 165874 - DNA, 20 bp, Artificial Sequence
  Description of Artificial Sequence: Synthetic oligonucleotide
  Target: LAMA2; (+) strand; PAM type: NRG; PAM sequence: AAG
cagttttatcagcttgctca

SEQ ID NO: 165875 - DNA, 20 bp, Artificial Sequence
  Description of Artificial Sequence: Synthetic oligonucleotide
  Target: LAMA2; (+) strand; PAM type: NRG; PAM sequence: TGG
tttatcagcttgctcaaagt

SEQ ID NO: 165876 - DNA, 20 bp, Artificial Sequence
  Description of Artificial Sequence: Synthetic oligonucleotide
  Target: LAMA2; (+) strand; PAM type: NRG; PAM sequence: GGG
ttatcagcttgctcaaagtt

SEQ ID NO: 165877 - DNA, 20 bp, Artificial Sequence
  Description of Artificial Sequence: Synthetic oligonucleotide
  Target: LAMA2; (+) strand; PAM type: NRG; PAM sequence: TAG
gggacattattaaatctcat

SEQ ID NO: 165878 - DNA, 20 bp, Artificial Sequence
  Description of Artificial Sequence: Synthetic oligonucleotide
  Target: LAMA2; (+) strand; PAM type: NRG; PAM sequence: TAG
aatctcattagaatttattt

SEQ ID NO: 165879 - DNA, 20 bp, Artificial Sequence
  Description of Artificial Sequence: Synthetic oligonucleotide
  Target: LAMA2; (+) strand; PAM type: NRG; PAM sequence: AGG
atctcattagaatttatttt

SEQ ID NO: 165880 - DNA, 20 bp, Artificial Sequence
  Description of Artificial Sequence: Synthetic oligonucleotide
  Target: LAMA2; (+) strand; PAM type: NRG; PAM sequence: AAG
tttattttaggctgtgataa

SEQ ID NO: 165881 - DNA, 20 bp, Artificial Sequence
  Description of Artificial Sequence: Synthetic oligonucleotide
  Target: LAMA2; (+) strand; PAM type: NRG; PAM sequence: CAG
attttaggctgtgataaaag

SEQ ID NO: 165882 - DNA, 20 bp, Artificial Sequence
  Description of Artificial Sequence: Synthetic oligonucleotide
  Target: LAMA2; (+) strand; PAM type: NRG; PAM sequence: GAG
tttaggctgtgataaaagca

SEQ ID NO: 165883 - DNA, 20 bp, Artificial Sequence
  Description of Artificial Sequence: Synthetic oligonucleotide
  Target: LAMA2; (+) strand; PAM type: NRG; PAM sequence: GAG
taggctgtgataaaagcaga

SEQ ID NO: 165884 - DNA, 20 bp, Artificial Sequence
  Description of Artificial Sequence: Synthetic oligonucleotide
  Target: LAMA2; (+) strand; PAM type: NRG; PAM sequence: AAG
aagcagagagtctcttgatt

SEQ ID NO: 165885 - DNA, 20 bp, Artificial Sequence
  Description of Artificial Sequence: Synthetic oligonucleotide
  Target: LAMA2; (+) strand; PAM type: NRG; PAM sequence: AAG
cttgattaagtgcttaattg

SEQ ID NO: 165886 - DNA, 20 bp, Artificial Sequence
  Description of Artificial Sequence: Synthetic oligonucleotide
  Target: LAMA2; (+) strand; PAM type: NRG; PAM sequence: AAG
ttatccaaatcaaaataaac

SEQ ID NO: 165887 - DNA, 20 bp, Artificial Sequence
  Description of Artificial Sequence: Synthetic oligonucleotide
  Target: LAMA2; (+) strand; PAM type: NRG; PAM sequence: AGG
tatccaaatcaaaataaaca

SEQ ID NO: 165888 - DNA, 20 bp, Artificial Sequence
  Description of Artificial Sequence: Synthetic oligonucleotide
  Target: LAMA2; (+) strand; PAM type: NRG; PAM sequence: GAG
tccaaatcaaaataaacaag

SEQ ID NO: 165889 - DNA, 20 bp, Artificial Sequence
  Description of Artificial Sequence: Synthetic oligonucleotide
  Target: LAMA2; (+) strand; PAM type: NRG; PAM sequence: AGG
ccaaatcaaaataaacaagg

SEQ ID NO: 165890 - DNA, 20 bp, Artificial Sequence
  Description of Artificial Sequence: Synthetic oligonucleotide
  Target: LAMA2; (+) strand; PAM type: NRG; PAM sequence: GGG
caaatcaaaataaacaagga

SEQ ID NO: 165891 - DNA, 20 bp, Artificial Sequence
  Description of Artificial Sequence: Synthetic oligonucleotide
  Target: LAMA2; (+) strand; PAM type: NRG; PAM sequence: TAG
aaaataaacaaggagggtgc

SEQ ID NO: 165892 - DNA, 20 bp, Artificial Sequence
  Description of Artificial Sequence: Synthetic oligonucleotide
  Target: LAMA2; (+) strand; PAM type: NRG; PAM sequence: AAG
caaggagggtgctagctatt

SEQ ID NO: 165893 - DNA, 20 bp, Artificial Sequence
  Description of Artificial Sequence: Synthetic oligonucleotide
  Target: LAMA2; (+) strand; PAM type: NRG; PAM sequence: TAG
gagggtgctagctattaagc

SEQ ID NO: 165894 - DNA, 20 bp, Artificial Sequence
  Description of Artificial Sequence: Synthetic oligonucleotide
  Target: LAMA2; (+) strand; PAM type: NRG; PAM sequence: AAG
ctattaagctagatcttttt

SEQ ID NO: 165895 - DNA, 20 bp, Artificial Sequence
  Description of Artificial Sequence: Synthetic oligonucleotide
  Target: LAMA2; (+) strand; PAM type: NRG; PAM sequence: AGG
tattaagctagatcttttta

SEQ ID NO: 165896 - DNA, 20 bp, Artificial Sequence
  Description of Artificial Sequence: Synthetic oligonucleotide
  Target: LAMA2; (+) strand; PAM type: NRG; PAM sequence: GAG
ttaagctagatctttttaag

SEQ ID NO: 165897 - DNA, 20 bp, Artificial Sequence
  Description of Artificial Sequence: Synthetic oligonucleotide
  Target: LAMA2; (+) strand; PAM type: NRG; PAM sequence: TGG
cttctttgtatatttgtctc

SEQ ID NO: 165898 - DNA, 20 bp, Artificial Sequence
  Description of Artificial Sequence: Synthetic oligonucleotide
  Target: LAMA2; (+) strand; PAM type: NRG; PAM sequence: TAG
atatttgtctctggactgtc

SEQ ID NO: 165899 - DNA, 20 bp, Artificial Sequence
  Description of Artificial Sequence: Synthetic oligonucleotide
  Target: LAMA2; (+) strand; PAM type: NRG; PAM sequence: AGG
tatttgtctctggactgtct

SEQ ID NO: 165900 - DNA, 20 bp, Artificial Sequence
  Description of Artificial Sequence: Synthetic oligonucleotide
  Target: LAMA2; (+) strand; PAM type: NRG; PAM sequence: CAG
tgtctctggactgtctaggc

SEQ ID NO: 165901 - DNA, 20 bp, Artificial Sequence
  Description of Artificial Sequence: Synthetic oligonucleotide
  Target: LAMA2; (+) strand; PAM type: NRG; PAM sequence: AAG
gactgtctaggccagaacca

SEQ ID NO: 165902 - DNA, 20 bp, Artificial Sequence
  Description of Artificial Sequence: Synthetic oligonucleotide
  Target: LAMA2; (+) strand; PAM type: NRG; PAM sequence: AGG
actgtctaggccagaaccaa

SEQ ID NO: 165903 - DNA, 20 bp, Artificial Sequence
  Description of Artificial Sequence: Synthetic oligonucleotide
  Target: LAMA2; (+) strand; PAM type: NRG; PAM sequence: GGG
ctgtctaggccagaaccaaa

SEQ ID NO: 165904 - DNA, 20 bp, Artificial Sequence
  Description of Artificial Sequence: Synthetic oligonucleotide
  Target: LAMA2; (+) strand; PAM type: NRG; PAM sequence: TGG
aggccagaaccaaagggatg

SEQ ID NO: 165905 - DNA, 20 bp, Artificial Sequence
  Description of Artificial Sequence: Synthetic oligonucleotide
  Target: LAMA2; (+) strand; PAM type: NRG; PAM sequence: GAG
gccagaaccaaagggatgtg

SEQ ID NO: 165906 - DNA, 20 bp, Artificial Sequence
  Description of Artificial Sequence: Synthetic oligonucleotide
  Target: LAMA2; (+) strand; PAM type: NRG; PAM sequence: AGG
ccagaaccaaagggatgtgg

SEQ ID NO: 165907 - DNA, 20 bp, Artificial Sequence
  Description of Artificial Sequence: Synthetic oligonucleotide
  Target: LAMA2; (+) strand; PAM type: NRG; PAM sequence: TAG
ccaaagggatgtggaggtac

SEQ ID NO: 165908 - DNA, 20 bp, Artificial Sequence
  Description of Artificial Sequence: Synthetic oligonucleotide
  Target: LAMA2; (+) strand; PAM type: NRG; PAM sequence: AAG
agggatgtggaggtactaga

SEQ ID NO: 165909 - DNA, 20 bp, Artificial Sequence
  Description of Artificial Sequence: Synthetic oligonucleotide
  Target: LAMA2; (+) strand; PAM type: NRG; PAM sequence: TGG
tcttaatctgatattttttc

SEQ ID NO: 165910 - DNA, 20 bp, Artificial Sequence
  Description of Artificial Sequence: Synthetic oligonucleotide
  Target: LAMA2; (+) strand; PAM type: NRG; PAM sequence: TAG
atctgatattttttctggct

SEQ ID NO: 165911 - DNA, 20 bp, Artificial Sequence
  Description of Artificial Sequence: Synthetic oligonucleotide
  Target: LAMA2; (+) strand; PAM type: NRG; PAM sequence: CAG
gatattttttctggcttagt

SEQ ID NO: 165912 - DNA, 20 bp, Artificial Sequence
  Description of Artificial Sequence: Synthetic oligonucleotide
  Target: LAMA2; (+) strand; PAM type: NRG; PAM sequence: TGG
aatcacttttctttcatcaa

SEQ ID NO: 165913 - DNA, 20 bp, Artificial Sequence
  Description of Artificial Sequence: Synthetic oligonucleotide
  Target: LAMA2; (+) strand; PAM type: NRG; PAM sequence: GGG
atcacttttctttcatcaat

SEQ ID NO: 165914 - DNA, 20 bp, Artificial Sequence
  Description of Artificial Sequence: Synthetic oligonucleotide
  Target: LAMA2; (+) strand; PAM type: NRG; PAM sequence: AAG
tttctttcatcaatgggcat

SEQ ID NO: 165915 - DNA, 20 bp, Artificial Sequence
  Description of Artificial Sequence: Synthetic oligonucleotide
  Target: LAMA2; (+) strand; PAM type: NRG; PAM sequence: AAG
tcaatgggcataagattttt

SEQ ID NO: 165916 - DNA, 20 bp, Artificial Sequence
  Description of Artificial Sequence: Synthetic oligonucleotide
  Target: LAMA2; (+) strand; PAM type: NRG; PAM sequence: AAG
aaaaaaaattctacttaacc

SEQ ID NO: 165917 - DNA, 20 bp, Artificial Sequence
  Description of Artificial Sequence: Synthetic oligonucleotide
  Target: LAMA2; (+) strand; PAM type: NRG; PAM sequence: AGG
aaaaaaattctacttaacca

SEQ ID NO: 165918 - DNA, 20 bp, Artificial Sequence
  Description of Artificial Sequence: Synthetic oligonucleotide
  Target: LAMA2; (+) strand; PAM type: NRG; PAM sequence: TGG
aaaattctacttaaccaagg

SEQ ID NO: 165919 - DNA, 20 bp, Artificial Sequence
  Description of Artificial Sequence: Synthetic oligonucleotide
  Target: LAMA2; (+) strand; PAM type: NRG; PAM sequence: TAG
acttaaccaaggtggtaaaa

SEQ ID NO: 165920 - DNA, 20 bp, Artificial Sequence
  Description of Artificial Sequence: Synthetic oligonucleotide
  Target: LAMA2; (+) strand; PAM type: NRG; PAM sequence: TGG
agtccccttgtaattctcca

SEQ ID NO: 165921 - DNA, 20 bp, Artificial Sequence
  Description of Artificial Sequence: Synthetic oligonucleotide
  Target: LAMA2; (+) strand; PAM type: NRG; PAM sequence: GGG
gtccccttgtaattctccat

SEQ ID NO: 165922 - DNA, 20 bp, Artificial Sequence
  Description of Artificial Sequence: Synthetic oligonucleotide
  Target: LAMA2; (+) strand; PAM type: NRG; PAM sequence: AAG
ctaccttttattcataaatc

SEQ ID NO: 165923 - DNA, 20 bp, Artificial Sequence
  Description of Artificial Sequence: Synthetic oligonucleotide
  Target: LAMA2; (+) strand; PAM type: NRG; PAM sequence: CAG
cataaatcaagcaatgtctg

SEQ ID NO: 165924 - DNA, 20 bp, Artificial Sequence
  Description of Artificial Sequence: Synthetic oligonucleotide
  Target: LAMA2; (+) strand; PAM type: NRG; PAM sequence: GAG
caatgtctgcagctatgcat

SEQ ID NO: 165925 - DNA, 20 bp, Artificial Sequence
  Description of Artificial Sequence: Synthetic oligonucleotide
  Target: LAMA2; (+) strand; PAM type: NRG; PAM sequence: AGG
aatgtctgcagctatgcatg

SEQ ID NO: 165926 - DNA, 20 bp, Artificial Sequence
  Description of Artificial Sequence: Synthetic oligonucleotide
  Target: LAMA2; (+) strand; PAM type: NRG; PAM sequence: GAG
tgtctgcagctatgcatgag

SEQ ID NO: 165927 - DNA, 20 bp, Artificial Sequence
  Description of Artificial Sequence: Synthetic oligonucleotide
  Target: LAMA2; (+) strand; PAM type: NRG; PAM sequence: GAG
tctgcagctatgcatgagga

SEQ ID NO: 165928 - DNA, 20 bp, Artificial Sequence
  Description of Artificial Sequence: Synthetic oligonucleotide
  Target: LAMA2; (+) strand; PAM type: NRG; PAM sequence: AGG
ctgcagctatgcatgaggag

SEQ ID NO: 165929 - DNA, 20 bp, Artificial Sequence
  Description of Artificial Sequence: Synthetic oligonucleotide
  Target: LAMA2; (+) strand; PAM type: NRG; PAM sequence: GAG
ctatgcatgaggagaggact

SEQ ID NO: 165930 - DNA, 20 bp, Artificial Sequence
  Description of Artificial Sequence: Synthetic oligonucleotide
  Target: LAMA2; (+) strand; PAM type: NRG; PAM sequence: AAG
gaggactgagcctgaaacac

SEQ ID NO: 165931 - DNA, 20 bp, Artificial Sequence
  Description of Artificial Sequence: Synthetic oligonucleotide
  Target: LAMA2; (+) strand; PAM type: NRG; PAM sequence: CGG
actgagcctgaaacacaaga

SEQ ID NO: 165932 - DNA, 20 bp, Artificial Sequence
  Description of Artificial Sequence: Synthetic oligonucleotide
  Target: LAMA2; (+) strand; PAM type: NRG; PAM sequence: CAG
gacggttttcatcttcgtgc

SEQ ID NO: 165933 - DNA, 20 bp, Artificial Sequence
  Description of Artificial Sequence: Synthetic oligonucleotide
  Target: LAMA2; (+) strand; PAM type: NRG; PAM sequence: GAG
cggttttcatcttcgtgcca

SEQ ID NO: 165934 - DNA, 20 bp, Artificial Sequence
  Description of Artificial Sequence: Synthetic oligonucleotide
  Target: LAMA2; (+) strand; PAM type: NRG; PAM sequence: TGG
tcatcttcgtgccagagctg

SEQ ID NO: 165935 - DNA, 20 bp, Artificial Sequence
  Description of Artificial Sequence: Synthetic oligonucleotide
  Target: LAMA2; (+) strand; PAM type: NRG; PAM sequence: CAG
cagagctgtggactaccttc

SEQ ID NO: 165936 - DNA, 20 bp, Artificial Sequence
  Description of Artificial Sequence: Synthetic oligonucleotide
  Target: LAMA2; (+) strand; PAM type: NRG; PAM sequence: AAG
gctgtggactaccttccaga

SEQ ID NO: 165937 - DNA, 20 bp, Artificial Sequence
  Description of Artificial Sequence: Synthetic oligonucleotide
  Target: LAMA2; (+) strand; PAM type: NRG; PAM sequence: CAG
tggactaccttccagaaagc

SEQ ID NO: 165938 - DNA, 20 bp, Artificial Sequence
  Description of Artificial Sequence: Synthetic oligonucleotide
  Target: LAMA2; (+) strand; PAM type: NRG; PAM sequence: GAG
gactaccttccagaaagcca

SEQ ID NO: 165939 - DNA, 20 bp, Artificial Sequence
  Description of Artificial Sequence: Synthetic oligonucleotide
  Target: LAMA2; (+) strand; PAM type: NRG; PAM sequence: AAG
tttcataataaacccaaatg

SEQ ID NO: 165940 - DNA, 20 bp, Artificial Sequence
  Description of Artificial Sequence: Synthetic oligonucleotide
  Target: LAMA2; (+) strand; PAM type: NRG; PAM sequence: TGG
ataataaacccaaatgaaga

SEQ ID NO: 165941 - DNA, 20 bp, Artificial Sequence
  Description of Artificial Sequence: Synthetic oligonucleotide
  Target: LAMA2; (+) strand; PAM type: NRG; PAM sequence: AAG
ataaacccaaatgaagatgg

SEQ ID NO: 165942 - DNA, 20 bp, Artificial Sequence
  Description of Artificial Sequence: Synthetic oligonucleotide
  Target: LAMA2; (+) strand; PAM type: NRG; PAM sequence: CAG
agtcttgattttgcatatgt

SEQ ID NO: 165943 - DNA, 20 bp, Artificial Sequence
  Description of Artificial Sequence: Synthetic oligonucleotide
  Target: LAMA2; (+) strand; PAM type: NRG; PAM sequence: TAG
tttgcatatgtcagcttcac

SEQ ID NO: 165944 - DNA, 20 bp, Artificial Sequence
  Description of Artificial Sequence: Synthetic oligonucleotide
  Target: LAMA2; (+) strand; PAM type: NRG; PAM sequence: AAG
gcatatgtcagcttcactag

SEQ ID NO: 165945 - DNA, 20 bp, Artificial Sequence
  Description of Artificial Sequence: Synthetic oligonucleotide
  Target: LAMA2; (+) strand; PAM type: NRG; PAM sequence: CAG
agaagttttctgtttgcttt

SEQ ID NO: 165946 - DNA, 20 bp, Artificial Sequence
  Description of Artificial Sequence: Synthetic oligonucleotide
  Target: LAMA2; (+) strand; PAM type: NRG; PAM sequence: AAG
tttcagatttttattgcaaa

SEQ ID NO: 165947 - DNA, 20 bp, Artificial Sequence
  Description of Artificial Sequence: Synthetic oligonucleotide
  Target: LAMA2; (+) strand; PAM type: NRG; PAM sequence: CAG
caaaaagaaaaaaattatat

SEQ ID NO: 165948 - DNA, 20 bp, Artificial Sequence
  Description of Artificial Sequence: Synthetic oligonucleotide
  Target: LAMA2; (+) strand; PAM type: NRG; PAM sequence: AGG
aaaaagaaaaaaattatatc

SEQ ID NO: 165949 - DNA, 20 bp, Artificial Sequence
  Description of Artificial Sequence: Synthetic oligonucleotide
  Target: LAMA2; (+) strand; PAM type: NRG; PAM sequence: GGG
aaaagaaaaaaattatatca

SEQ ID NO: 165950 - DNA, 20 bp, Artificial Sequence
  Description of Artificial Sequence: Synthetic oligonucleotide
  Target: LAMA2; (+) strand; PAM type: NRG; PAM sequence: AAG
gaaaaaaattatatcaggga

SEQ ID NO: 165951 - DNA, 20 bp, Artificial Sequence
  Description of Artificial Sequence: Synthetic oligonucleotide
  Target: LAMA2; (+) strand; PAM type: NRG; PAM sequence: TGG
cagggaaagataaattttat

SEQ ID NO: 165952 - DNA, 20 bp, Artificial Sequence
  Description of Artificial Sequence: Synthetic oligonucleotide
  Target: LAMA2; (+) strand; PAM type: NRG; PAM sequence: TGG
ggaaagataaattttattgg

SEQ ID NO: 165953 - DNA, 20 bp, Artificial Sequence
  Description of Artificial Sequence: Synthetic oligonucleotide
  Target: LAMA2; (+) strand; PAM type: NRG; PAM sequence: TAG
aaattttattggtggtctaa

SEQ ID NO: 165954 - DNA, 20 bp, Artificial Sequence
  Description of Artificial Sequence: Synthetic oligonucleotide
  Target: LAMA2; (+) strand; PAM type: NRG; PAM sequence: AAG
attggtggtctaatagtcgc

SEQ ID NO: 165955 - DNA, 20 bp, Artificial Sequence
  Description of Artificial Sequence: Synthetic oligonucleotide
  Target: LAMA2; (+) strand; PAM type: NRG; PAM sequence: CAG
taatagtcgcaagacatgta

SEQ ID NO: 165956 - DNA, 20 bp, Artificial Sequence
  Description of Artificial Sequence: Synthetic oligonucleotide
  Target: LAMA2; (+) strand; PAM type: NRG; PAM sequence: TGG
atgtacagcttttattattt

SEQ ID NO: 165957 - DNA, 20 bp, Artificial Sequence
  Description of Artificial Sequence: Synthetic oligonucleotide
  Target: LAMA2; (+) strand; PAM type: NRG; PAM sequence: TAG
ttttggatttcttactttta

SEQ ID NO: 165958 - DNA, 20 bp, Artificial Sequence
  Description of Artificial Sequence: Synthetic oligonucleotide
  Target: LAMA2; (+) strand; PAM type: NRG; PAM sequence: CAG
ttatagtctttaaattatat

SEQ ID NO: 165959 - DNA, 20 bp, Artificial Sequence
  Description of Artificial Sequence: Synthetic oligonucleotide
  Target: LAMA2; (+) strand; PAM type: NRG; PAM sequence: TAG
catccataacactttttatt

SEQ ID NO: 165960 - DNA, 20 bp, Artificial Sequence
  Description of Artificial Sequence: Synthetic oligonucleotide
  Target: LAMA2; (+) strand; PAM type: NRG; PAM sequence: TGG
agttttttgctgtgtttcat

SEQ ID NO: 165961 - DNA, 20 bp, Artificial Sequence
  Description of Artificial Sequence: Synthetic oligonucleotide
  Target: LAMA2; (+) strand; PAM type: NRG; PAM sequence: TAG
gtgtttcattggacatttgc

SEQ ID NO: 165962 - DNA, 20 bp, Artificial Sequence
  Description of Artificial Sequence: Synthetic oligonucleotide
  Target: LAMA2; (+) strand; PAM type: NRG; PAM sequence: AAG
acatttgctagttatccatc

SEQ ID NO: 165963 - DNA, 20 bp, Artificial Sequence
  Description of Artificial Sequence: Synthetic oligonucleotide
  Target: LAMA2; (+) strand; PAM type: NRG; PAM sequence: CAG
tgctagttatccatcaagca

SEQ ID NO: 165964 - DNA, 20 bp, Artificial Sequence
  Description of Artificial Sequence: Synthetic oligonucleotide
  Target: LAMA2; (+) strand; PAM type: NRG; PAM sequence: AAG
ttatccatcaagcacagtaa

SEQ ID NO: 165965 - DNA, 20 bp, Artificial Sequence
  Description of Artificial Sequence: Synthetic oligonucleotide
  Target: LAMA2; (+) strand; PAM type: NRG; PAM sequence: CAG
tccatcaagcacagtaaaag

SEQ ID NO: 165966 - DNA, 20 bp, Artificial Sequence
  Description of Artificial Sequence: Synthetic oligonucleotide
  Target: LAMA2; (+) strand; PAM type: NRG; PAM sequence: TAG
agcacagtaaaagcagattt

SEQ ID NO: 165967 - DNA, 20 bp, Artificial Sequence
  Description of Artificial Sequence: Synthetic oligonucleotide
  Target: LAMA2; (+) strand; PAM type: NRG; PAM sequence: AGG
gcacagtaaaagcagatttt

SEQ ID NO: 165968 - DNA, 20 bp, Artificial Sequence
  Description of Artificial Sequence: Synthetic oligonucleotide
  Target: LAMA2; (+) strand; PAM type: NRG; PAM sequence: AAG
aaagcagattttaggtgtta

SEQ ID NO: 165969 - DNA, 20 bp, Artificial Sequence
  Description of Artificial Sequence: Synthetic oligonucleotide
  Target: LAMA2; (+) strand; PAM type: NRG; PAM sequence: TGG
attttaggtgttaaagacat

SEQ ID NO: 165970 - DNA, 20 bp, Artificial Sequence
  Description of Artificial Sequence: Synthetic oligonucleotide
  Target: LAMA2; (+) strand; PAM type: NRG; PAM sequence: AAG
taaaaacaaacatctttttc

SEQ ID NO: 165971 - DNA, 20 bp, Artificial Sequence
  Description of Artificial Sequence: Synthetic oligonucleotide
  Target: LAMA2; (+) strand; PAM type: NRG; PAM sequence: TGG
ttttcaagaaaaatactctt

SEQ ID NO: 165972 - DNA, 20 bp, Artificial Sequence
  Description of Artificial Sequence: Synthetic oligonucleotide
  Target: LAMA2; (+) strand; PAM type: NRG; PAM sequence: GAG
ttcaagaaaaatactctttg

SEQ ID NO: 165973 - DNA, 20 bp, Artificial Sequence
  Description of Artificial Sequence: Synthetic oligonucleotide
  Target: LAMA2; (+) strand; PAM type: NRG; PAM sequence: CAG
aatactctttggagcttttt

SEQ ID NO: 165974 - DNA, 20 bp, Artificial Sequence
  Description of Artificial Sequence: Synthetic oligonucleotide
  Target: LAMA2; (+) strand; PAM type: NRG; PAM sequence: AGG
atactctttggagctttttc

SEQ ID NO: 165975 - DNA, 20 bp, Artificial Sequence
  Description of Artificial Sequence: Synthetic oligonucleotide
  Target: LAMA2; (+) strand; PAM type: NRG; PAM sequence: AAG
tgaattgtatctacaaataa

SEQ ID NO: 165976 - DNA, 20 bp, Artificial Sequence
  Description of Artificial Sequence: Synthetic oligonucleotide
  Target: LAMA2; (+) strand; PAM type: NRG; PAM sequence: TGG
ctacaaataaaagctttcct

SEQ ID NO: 165977 - DNA, 20 bp, Artificial Sequence
  Description of Artificial Sequence: Synthetic oligonucleotide
  Target: LAMA2; (+) strand; PAM type: NRG; PAM sequence: TGG
ggttaaaatctgattacaca

SEQ ID NO: 165978 - DNA, 20 bp, Artificial Sequence
  Description of Artificial Sequence: Synthetic oligonucleotide
  Target: LAMA2; (+) strand; PAM type: NRG; PAM sequence: TGG
tggatgccgcccgaacacct

SEQ ID NO: 165979 - DNA, 20 bp, Artificial Sequence
  Description of Artificial Sequence: Synthetic oligonucleotide
  Target: LAMA2; (+) strand; PAM type: NRG; PAM sequence: GAG
gatgccgcccgaacaccttg

SEQ ID NO: 165980 - DNA, 20 bp, Artificial Sequence
  Description of Artificial Sequence: Synthetic oligonucleotide
  Target: LAMA2; (+) strand; PAM type: NRG; PAM sequence: CAG
cgcccgaacaccttggagac

SEQ ID NO: 165981 - DNA, 20 bp, Artificial Sequence
  Description of Artificial Sequence: Synthetic oligonucleotide
  Target: LAMA2; (+) strand; PAM type: NRG; PAM sequence: AGG
gcccgaacaccttggagacc

SEQ ID NO: 165982 - DNA, 20 bp, Artificial Sequence
  Description of Artificial Sequence: Synthetic oligonucleotide
  Target: LAMA2; (+) strand; PAM type: NRG; PAM sequence: AAG
cgaacaccttggagaccagg

SEQ ID NO: 165983 - DNA, 20 bp, Artificial Sequence
  Description of Artificial Sequence: Synthetic oligonucleotide
  Target: LAMA2; (+) strand; PAM type: NRG; PAM sequence: AAG
accaggaagaaatacacatt

SEQ ID NO: 165984 - DNA, 20 bp, Artificial Sequence
  Description of Artificial Sequence: Synthetic oligonucleotide
  Target: LAMA2; (+) strand; PAM type: NRG; PAM sequence: CGG
tacacattaagtatcaaaat

SEQ ID NO: 165985 - DNA, 20 bp, Artificial Sequence
  Description of Artificial Sequence: Synthetic oligonucleotide
  Target: LAMA2; (+) strand; PAM type: NRG; PAM sequence: AAG
aaatcggcacttgcgtttgt

SEQ ID NO: 165986 - DNA, 20 bp, Artificial Sequence
  Description of Artificial Sequence: Synthetic oligonucleotide
  Target: LAMA2; (+) strand; PAM type: NRG; PAM sequence: CAG
aagtgatgttgcccctgccg

SEQ ID NO: 165987 - DNA, 20 bp, Artificial Sequence
  Description of Artificial Sequence: Synthetic oligonucleotide
  Target: LAMA2; (+) strand; PAM type: NRG; PAM sequence: AGG
agtgatgttgcccctgccgc

SEQ ID NO: 165988 - DNA, 20 bp, Artificial Sequence
  Description of Artificial Sequence: Synthetic oligonucleotide
  Target: LAMA2; (+) strand; PAM type: NRG; PAM sequence: TGG
gatgttgcccctgccgcagg

SEQ ID NO: 165989 - DNA, 20 bp, Artificial Sequence
  Description of Artificial Sequence: Synthetic oligonucleotide
  Target: LAMA2; (+) strand; PAM type: NRG; PAM sequence: GGG
atgttgcccctgccgcaggt

SEQ ID NO: 165990 - DNA, 20 bp, Artificial Sequence
  Description of Artificial Sequence: Synthetic oligonucleotide
  Target: LAMA2; (+) strand; PAM type: NRG; PAM sequence: GGG
tgttgcccctgccgcaggtg

SEQ ID NO: 165991 - DNA, 20 bp, Artificial Sequence
  Description of Artificial Sequence: Synthetic oligonucleotide
  Target: LAMA2; (+) strand; PAM type: NRG; PAM sequence: GGG
gttgcccctgccgcaggtgg

SEQ ID NO: 165992 - DNA, 20 bp, Artificial Sequence
  Description of Artificial Sequence: Synthetic oligonucleotide
  Target: LAMA2; (+) strand; PAM type: NRG; PAM sequence: AAG
gcccctgccgcaggtggggg

SEQ ID NO: 165993 - DNA, 20 bp, Artificial Sequence
  Description of Artificial Sequence: Synthetic oligonucleotide
  Target: LAMA2; (+) strand; PAM type: NRG; PAM sequence: AGG
cccctgccgcaggtggggga

SEQ ID NO: 165994 - DNA, 20 bp, Artificial Sequence
  Description of Artificial Sequence: Synthetic oligonucleotide
  Target: LAMA2; (+) strand; PAM type: NRG; PAM sequence: CAG
tgccgcaggtgggggaaggc

SEQ ID NO: 165995 - DNA, 20 bp, Artificial Sequence
  Description of Artificial Sequence: Synthetic oligonucleotide
  Target: LAMA2; (+) strand; PAM type: NRG; PAM sequence: CAG
ggaaggccagtctgtctttg

SEQ ID NO: 165996 - DNA, 20 bp, Artificial Sequence
  Description of Artificial Sequence: Synthetic oligonucleotide
  Target: LAMA2; (+) strand; PAM type: NRG; PAM sequence: AAG
gtctgtctttgcagccactg

SEQ ID NO: 165997 - DNA, 20 bp, Artificial Sequence
  Description of Artificial Sequence: Synthetic oligonucleotide
  Target: LAMA2; (+) strand; PAM type: NRG; PAM sequence: GAG
ctgtctttgcagccactgaa

SEQ ID NO: 165998 - DNA, 20 bp, Artificial Sequence
  Description of Artificial Sequence: Synthetic oligonucleotide
  Target: LAMA2; (+) strand; PAM type: NRG; PAM sequence: AAG
ttgcagccactgaagagctc

SEQ ID NO: 165999 - DNA, 20 bp, Artificial Sequence
  Description of Artificial Sequence: Synthetic oligonucleotide
  Target: LAMA2; (+) strand; PAM type: NRG; PAM sequence: CAG
gagctcaagcgttgctaatg

SEQ ID NO: 166000 - DNA, 20 bp, Artificial Sequence
  Description of Artificial Sequence: Synthetic oligonucleotide
  Target: LAMA2; (+) strand; PAM type: NRG; PAM sequence: TGG
tctaactttgctgtcctaat

SEQ ID NO: 166001 - DNA, 20 bp, Artificial Sequence
  Description of Artificial Sequence: Synthetic oligonucleotide
  Target: LAMA2; (+) strand; PAM type: NRG; PAM sequence: CAG
taattggcttccttttcttt

SEQ ID NO: 166002 - DNA, 20 bp, Artificial Sequence
  Description of Artificial Sequence: Synthetic oligonucleotide
  Target: LAMA2; (+) strand; PAM type: NRG; PAM sequence: AGG
aattggcttccttttctttc

SEQ ID NO: 166003 - DNA, 20 bp, Artificial Sequence
  Description of Artificial Sequence: Synthetic oligonucleotide
  Target: LAMA2; (+) strand; PAM type: NRG; PAM sequence: CGG
tttctttcaggcatgcttgc

SEQ ID NO: 166004 - DNA, 20 bp, Artificial Sequence
  Description of Artificial Sequence: Synthetic oligonucleotide
  Target: LAMA2; (+) strand; PAM type: NRG; PAM sequence: GGG
ttctttcaggcatgcttgcc

SEQ ID NO: 166005 - DNA, 20 bp, Artificial Sequence
  Description of Artificial Sequence: Synthetic oligonucleotide
  Target: LAMA2; (+) strand; PAM type: NRG; PAM sequence: CAG
ttatcgactgcgttctcaac

SEQ ID NO: 166006 - DNA, 20 bp, Artificial Sequence
  Description of Artificial Sequence: Synthetic oligonucleotide
  Target: LAMA2; (+) strand; PAM type: NRG; PAM sequence: AGG
tatcgactgcgttctcaacc

SEQ ID NO: 166007 - DNA, 20 bp, Artificial Sequence
  Description of Artificial Sequence: Synthetic oligonucleotide
  Target: LAMA2; (+) strand; PAM type: NRG; PAM sequence: TGG
cgactgcgttctcaaccagg

SEQ ID NO: 166008 - DNA, 20 bp, Artificial Sequence
  Description of Artificial Sequence: Synthetic oligonucleotide
  Target: LAMA2; (+) strand; PAM type: NRG; PAM sequence: TGG
caaccaggtggccgcacccc

SEQ ID NO: 166009 - DNA, 20 bp, Artificial Sequence
  Description of Artificial Sequence: Synthetic oligonucleotide
  Target: LAMA2; (+) strand; PAM type: NRG; PAM sequence: TGG
ccgcacccctggaccaaccc

SEQ ID NO: 166010 - DNA, 20 bp, Artificial Sequence
  Description of Artificial Sequence: Synthetic oligonucleotide
  Target: LAMA2; (+) strand; PAM type: NRG; PAM sequence: GGG
cgcacccctggaccaaccct

SEQ ID NO: 166011 - DNA, 20 bp, Artificial Sequence
  Description of Artificial Sequence: Synthetic oligonucleotide
  Target: LAMA2; (+) strand; PAM type: NRG; PAM sequence: TGG
tgtgttccatgtcaatgtaa

SEQ ID NO: 166012 - DNA, 20 bp, Artificial Sequence
  Description of Artificial Sequence: Synthetic oligonucleotide
  Target: LAMA2; (+) strand; PAM type: NRG; PAM sequence: CAG
ccatgtcaatgtaatggaca

SEQ ID NO: 166013 - DNA, 20 bp, Artificial Sequence
  Description of Artificial Sequence: Synthetic oligonucleotide
  Target: LAMA2; (+) strand; PAM type: NRG; PAM sequence: CAG
tgtcaatgtaatggacacag

SEQ ID NO: 166014 - DNA, 20 bp, Artificial Sequence
  Description of Artificial Sequence: Synthetic oligonucleotide
  Target: LAMA2; (+) strand; PAM type: NRG; PAM sequence: CAG
accctgaaacatcgatatgc

SEQ ID NO: 166015 - DNA, 20 bp, Artificial Sequence
  Description of Artificial Sequence: Synthetic oligonucleotide
  Target: LAMA2; (+) strand; PAM type: NRG; PAM sequence: AGG
ccctgaaacatcgatatgcc

SEQ ID NO: 166016 - DNA, 20 bp, Artificial Sequence
  Description of Artificial Sequence: Synthetic oligonucleotide
  Target: LAMA2; (+) strand; PAM type: NRG; PAM sequence: TAG
tgaaacatcgatatgccagg

SEQ ID NO: 166017 - DNA, 20 bp, Artificial Sequence
  Description of Artificial Sequence: Synthetic oligonucleotide
  Target: LAMA2; (+) strand; PAM type: NRG; PAM sequence: GAG
gatatgccaggtagtcctct

SEQ ID NO: 166018 - DNA, 20 bp, Artificial Sequence
  Description of Artificial Sequence: Synthetic oligonucleotide
  Target: LAMA2; (+) strand; PAM type: NRG; PAM sequence: AAG
cctctgagccttccttgaac

SEQ ID NO: 166019 - DNA, 20 bp, Artificial Sequence
  Description of Artificial Sequence: Synthetic oligonucleotide
  Target: LAMA2; (+) strand; PAM type: NRG; PAM sequence: AGG
ctctgagccttccttgaaca

SEQ ID NO: 166020 - DNA, 20 bp, Artificial Sequence
  Description of Artificial Sequence: Synthetic oligonucleotide
  Target: LAMA2; (+) strand; PAM type: NRG; PAM sequence: CAG
cattcctctttacacatgct

SEQ ID NO: 166021 - DNA, 20 bp, Artificial Sequence
  Description of Artificial Sequence: Synthetic oligonucleotide
  Target: LAMA2; (+) strand; PAM type: NRG; PAM sequence: CAG
acatgctcagcatctgcatg

SEQ ID NO: 166022 - DNA, 20 bp, Artificial Sequence
  Description of Artificial Sequence: Synthetic oligonucleotide
  Target: LAMA2; (+) strand; PAM type: NRG; PAM sequence: GAG
atgctcagcatctgcatgca

SEQ ID NO: 166023 - DNA, 20 bp, Artificial Sequence
  Description of Artificial Sequence: Synthetic oligonucleotide
  Target: LAMA2; (+) strand; PAM type: NRG; PAM sequence: AGG
tgctcagcatctgcatgcag

SEQ ID NO: 166024 - DNA, 20 bp, Artificial Sequence
  Description of Artificial Sequence: Synthetic oligonucleotide
  Target: LAMA2; (+) strand; PAM type: NRG; PAM sequence: CAG
cagcatctgcatgcagaggc

SEQ ID NO: 166025 - DNA, 20 bp, Artificial Sequence
  Description of Artificial Sequence: Synthetic oligonucleotide
  Target: LAMA2; (+) strand; PAM type: NRG; PAM sequence: AAG
gcagaggccagctaaactgt

SEQ ID NO: 166026 - DNA, 20 bp, Artificial Sequence
  Description of Artificial Sequence: Synthetic oligonucleotide
  Target: LAMA2; (+) strand; PAM type: NRG; PAM sequence: AGG
cagaggccagctaaactgta

SEQ ID NO: 166027 - DNA, 20 bp, Artificial Sequence
  Description of Artificial Sequence: Synthetic oligonucleotide
  Target: LAMA2; (+) strand; PAM type: NRG; PAM sequence: GGG
agaggccagctaaactgtaa

SEQ ID NO: 166028 - DNA, 20 bp, Artificial Sequence
  Description of Artificial Sequence: Synthetic oligonucleotide
  Target: LAMA2; (+) strand; PAM type: NRG; PAM sequence: AAG
gtgtgtgaaataaaatatgt

SEQ ID NO: 166029 - DNA, 20 bp, Artificial Sequence
  Description of Artificial Sequence: Synthetic oligonucleotide
  Target: LAMA2; (+) strand; PAM type: NRG; PAM sequence: AGG
tgtgtgaaataaaatatgta

SEQ ID NO: 166030 - DNA, 20 bp, Artificial Sequence
  Description of Artificial Sequence: Synthetic oligonucleotide
  Target: LAMA2; (+) strand; PAM type: NRG; PAM sequence: GGG
gtgtgaaataaaatatgtaa

SEQ ID NO: 166031 - DNA, 20 bp, Artificial Sequence
  Description of Artificial Sequence: Synthetic oligonucleotide
  Target: LAMA2; (+) strand; PAM type: NRG; PAM sequence: AAG
aataaaatatgtaagggaaa

SEQ ID NO: 166032 - DNA, 20 bp, Artificial Sequence
  Description of Artificial Sequence: Synthetic oligonucleotide
  Target: LAMA2; (+) strand; PAM type: NRG; PAM sequence: CAG
gtaagggaaaaagatattca

SEQ ID NO: 166033 - DNA, 20 bp, Artificial Sequence
  Description of Artificial Sequence: Synthetic oligonucleotide
  Target: LAMA2; (+) strand; PAM type: NRG; PAM sequence: AAG
cacagattctgcattttaaa

SEQ ID NO: 166034 - DNA, 20 bp, Artificial Sequence
  Description of Artificial Sequence: Synthetic oligonucleotide
  Target: LAMA2; (+) strand; PAM type: NRG; PAM sequence: AAG
gattctgcattttaaaaagt

SEQ ID NO: 166035 - DNA, 20 bp, Artificial Sequence
  Description of Artificial Sequence: Synthetic oligonucleotide
  Target: LAMA2; (+) strand; PAM type: NRG; PAM sequence: AGG
attctgcattttaaaaagta

SEQ ID NO: 166036 - DNA, 20 bp, Artificial Sequence
  Description of Artificial Sequence: Synthetic oligonucleotide
  Target: LAMA2; (+) strand; PAM type: NRG; PAM sequence: TGG
aaaagtaaggaaaaaataac

SEQ ID NO: 166037 - DNA, 20 bp, Artificial Sequence
  Description of Artificial Sequence: Synthetic oligonucleotide
  Target: LAMA2; (+) strand; PAM type: NRG; PAM sequence: GGG
aaagtaaggaaaaaataact

SEQ ID NO: 166038 - DNA, 20 bp, Artificial Sequence
  Description of Artificial Sequence: Synthetic oligonucleotide
  Target: LAMA2; (+) strand; PAM type: NRG; PAM sequence: GAG
agtaaggaaaaaataactgg

SEQ ID NO: 166039 - DNA, 20 bp, Artificial Sequence
  Description of Artificial Sequence: Synthetic oligonucleotide
  Target: LAMA2; (+) strand; PAM type: NRG; PAM sequence: GAG
aaataactgggagaaccact

SEQ ID NO: 166040 - DNA, 20 bp, Artificial Sequence
  Description of Artificial Sequence: Synthetic oligonucleotide
  Target: LAMA2; (+) strand; PAM type: NRG; PAM sequence: AAG
ggagaaccactgagcatgtc

SEQ ID NO: 166041 - DNA, 20 bp, Artificial Sequence
  Description of Artificial Sequence: Synthetic oligonucleotide
  Target: LAMA2; (+) strand; PAM type: NRG; PAM sequence: TAG
ccactgagcatgtcaagaaa

SEQ ID NO: 166042 - DNA, 20 bp, Artificial Sequence
  Description of Artificial Sequence: Synthetic oligonucleotide
  Target: LAMA2; (+) strand; PAM type: NRG; PAM sequence: TAG
catgtcaagaaatagaattt

SEQ ID NO: 166043 - DNA, 20 bp, Artificial Sequence
  Description of Artificial Sequence: Synthetic oligonucleotide
  Target: LAMA2; (+) strand; PAM type: NRG; PAM sequence: CAG
gtcaagaaatagaattttag

SEQ ID NO: 166044 - DNA, 20 bp, Artificial Sequence
  Description of Artificial Sequence: Synthetic oligonucleotide
  Target: LAMA2; (+) strand; PAM type: NRG; PAM sequence: TAG
atagaattttagcagcatct

SEQ ID NO: 166045 - DNA, 20 bp, Artificial Sequence
  Description of Artificial Sequence: Synthetic oligonucleotide
  Target: LAMA2; (+) strand; PAM type: NRG; PAM sequence: AAG
gaattttagcagcatcttag

SEQ ID NO: 166046 - DNA, 20 bp, Artificial Sequence
  Description of Artificial Sequence: Synthetic oligonucleotide
  Target: LAMA2; (+) strand; PAM type: NRG; PAM sequence: GAG
attttagcagcatcttagaa

SEQ ID NO: 166047 - DNA, 20 bp, Artificial Sequence
  Description of Artificial Sequence: Synthetic oligonucleotide
  Target: LAMA2; (+) strand; PAM type: NRG; PAM sequence: CAG
gcagcatcttagaagagcac

SEQ ID NO: 166048 - DNA, 20 bp, Artificial Sequence
  Description of Artificial Sequence: Synthetic oligonucleotide
  Target: LAMA2; (+) strand; PAM type: NRG; PAM sequence: AAG
gcatcttagaagagcaccag

SEQ ID NO: 166049 - DNA, 20 bp, Artificial Sequence
  Description of Artificial Sequence: Synthetic oligonucleotide
  Target: LAMA2; (+) strand; PAM type: NRG; PAM sequence: TGG
aataaactttctataaaatt

SEQ ID NO: 166050 - DNA, 20 bp, Artificial Sequence
  Description of Artificial Sequence: Synthetic oligonucleotide
  Target: LAMA2; (+) strand; PAM type: NRG; PAM sequence: CAG
tctataaaatttggaaatta

SEQ ID NO: 166051 - DNA, 20 bp, Artificial Sequence
  Description of Artificial Sequence: Synthetic oligonucleotide
  Target: LAMA2; (+) strand; PAM type: NRG; PAM sequence: AAG
aaaatttggaaattacagaa

SEQ ID NO: 166052 - DNA, 20 bp, Artificial Sequence
  Description of Artificial Sequence: Synthetic oligonucleotide
  Target: LAMA2; (+) strand; PAM type: NRG; PAM sequence: AAG
ggaaattacagaaaagaatt

SEQ ID NO: 166053 - DNA, 20 bp, Artificial Sequence
  Description of Artificial Sequence: Synthetic oligonucleotide
  Target: LAMA2; (+) strand; PAM type: NRG; PAM sequence: AAG
aattacagaaaagaattaag

SEQ ID NO: 166054 - DNA, 20 bp, Artificial Sequence
  Description of Artificial Sequence: Synthetic oligonucleotide
  Target: LAMA2; (+) strand; PAM type: NRG; PAM sequence: AAG
acataacattttaatgtttt

SEQ ID NO: 166055 - DNA, 20 bp, Artificial Sequence
  Description of Artificial Sequence: Synthetic oligonucleotide
  Target: LAMA2; (+) strand; PAM type: NRG; PAM sequence: AAG
ttttacatgtgtttatgaat

SEQ ID NO: 166056 - DNA, 20 bp, Artificial Sequence
  Description of Artificial Sequence: Synthetic oligonucleotide
  Target: LAMA2; (+) strand; PAM type: NRG; PAM sequence: TGG
ataagatttatataacacca

SEQ ID NO: 166057 - DNA, 20 bp, Artificial Sequence
  Description of Artificial Sequence: Synthetic oligonucleotide
  Target: LAMA2; (+) strand; PAM type: NRG; PAM sequence: CAG
tttatataacaccatggatg

SEQ ID NO: 166058 - DNA, 20 bp, Artificial Sequence
  Description of Artificial Sequence: Synthetic oligonucleotide
  Target: LAMA2; (+) strand; PAM type: NRG; PAM sequence: GAG
tttacatttttacctatcat

SEQ ID NO: 166059 - DNA, 20 bp, Artificial Sequence
  Description of Artificial Sequence: Synthetic oligonucleotide
  Target: LAMA2; (+) strand; PAM type: NRG; PAM sequence: AGG
ttacatttttacctatcatg

SEQ ID NO: 166060 - DNA, 20 bp, Artificial Sequence
  Description of Artificial Sequence: Synthetic oligonucleotide
  Target: LAMA2; (+) strand; PAM type: NRG; PAM sequence: TAG
atgaggttgtattatgttgt

SEQ ID NO: 166061 - DNA, 20 bp, Artificial Sequence
  Description of Artificial Sequence: Synthetic oligonucleotide
  Target: LAMA2; (+) strand; PAM type: NRG; PAM sequence: TGG
aaatctttacgatctttgtt

SEQ ID NO: 166062 - DNA, 20 bp, Artificial Sequence
  Description of Artificial Sequence: Synthetic oligonucleotide
  Target: LAMA2; (+) strand; PAM type: NRG; PAM sequence: TAG
cataatttacccatttccct

SEQ ID NO: 166063 - DNA, 20 bp, Artificial Sequence
  Description of Artificial Sequence: Synthetic oligonucleotide
  Target: LAMA2; (+) strand; PAM type: NRG; PAM sequence: GAG
tacccatttcccttagaatt

SEQ ID NO: 166064 - DNA, 20 bp, Artificial Sequence
  Description of Artificial Sequence: Synthetic oligonucleotide
  Target: LAMA2; (+) strand; PAM type: NRG; PAM sequence: AGG
acccatttcccttagaattg

SEQ ID NO: 166065 - DNA, 20 bp, Artificial Sequence
  Description of Artificial Sequence: Synthetic oligonucleotide
  Target: LAMA2; (+) strand; PAM type: NRG; PAM sequence: TAG
catttcccttagaattgagg

SEQ ID NO: 166066 - DNA, 20 bp, Artificial Sequence
  Description of Artificial Sequence: Synthetic oligonucleotide
  Target: LAMA2; (+) strand; PAM type: NRG; PAM sequence: TGG
ttatttttttatgtttctgc

SEQ ID NO: 166067 - DNA, 20 bp, Artificial Sequence
  Description of Artificial Sequence: Synthetic oligonucleotide
  Target: LAMA2; (+) strand; PAM type: NRG; PAM sequence: TAG
ctctctaccaccatctgcat

SEQ ID NO: 166068 - DNA, 20 bp, Artificial Sequence
  Description of Artificial Sequence: Synthetic oligonucleotide
  Target: LAMA2; (+) strand; PAM type: NRG; PAM sequence: CAG
accatctgcattagaacaat

SEQ ID NO: 166069 - DNA, 20 bp, Artificial Sequence
  Description of Artificial Sequence: Synthetic oligonucleotide
  Target: LAMA2; (+) strand; PAM type: NRG; PAM sequence: TAG
gtgttccaccctttttatcg

SEQ ID NO: 166070 - DNA, 20 bp, Artificial Sequence
  Description of Artificial Sequence: Synthetic oligonucleotide
  Target: LAMA2; (+) strand; PAM type: NRG; PAM sequence: AAG
ctttttatcgtagtcactgt

SEQ ID NO: 166071 - DNA, 20 bp, Artificial Sequence
  Description of Artificial Sequence: Synthetic oligonucleotide
  Target: LAMA2; (+) strand; PAM type: NRG; PAM sequence: CAG
cgtagtcactgtaagaaatt

SEQ ID NO: 166072 - DNA, 20 bp, Artificial Sequence
  Description of Artificial Sequence: Synthetic oligonucleotide
  Target: LAMA2; (+) strand; PAM type: NRG; PAM sequence: AGG
gtagtcactgtaagaaattc

SEQ ID NO: 166073 - DNA, 20 bp, Artificial Sequence
  Description of Artificial Sequence: Synthetic oligonucleotide
  Target: LAMA2; (+) strand; PAM type: NRG; PAM sequence: AAG
cctgtcaccacttgtccctc

SEQ ID NO: 166074 - DNA, 20 bp, Artificial Sequence
  Description of Artificial Sequence: Synthetic oligonucleotide
  Target: LAMA2; (+) strand; PAM type: NRG; PAM sequence: CAG
ctcaagctgtaatctgccca

SEQ ID NO: 166075 - DNA, 20 bp, Artificial Sequence
  Description of Artificial Sequence: Synthetic oligonucleotide
  Target: LAMA2; (+) strand; PAM type: NRG; PAM sequence: AAG
gcccacagctcatctttgtt

SEQ ID NO: 166076 - DNA, 20 bp, Artificial Sequence
  Description of Artificial Sequence: Synthetic oligonucleotide
  Target: LAMA2; (+) strand; PAM type: NRG; PAM sequence: GAG
ccttctgaaaccattctact

SEQ ID NO: 166077 - DNA, 20 bp, Artificial Sequence
  Description of Artificial Sequence: Synthetic oligonucleotide
  Target: LAMA2; (+) strand; PAM type: NRG; PAM sequence: TGG
aaccattctactgagccttg

SEQ ID NO: 166078 - DNA, 20 bp, Artificial Sequence
  Description of Artificial Sequence: Synthetic oligonucleotide
  Target: LAMA2; (+) strand; PAM type: NRG; PAM sequence: TGG
actgagccttgtggaactca

SEQ ID NO: 166079 - DNA, 20 bp, Artificial Sequence
  Description of Artificial Sequence: Synthetic oligonucleotide
  Target: LAMA2; (+) strand; PAM type: NRG; PAM sequence: CAG
tgtggaactcatggtcaaaa

SEQ ID NO: 166080 - DNA, 20 bp, Artificial Sequence
  Description of Artificial Sequence: Synthetic oligonucleotide
  Target: LAMA2; (+) strand; PAM type: NRG; PAM sequence: AGG
gtggaactcatggtcaaaac

SEQ ID NO: 166081 - DNA, 20 bp, Artificial Sequence
  Description of Artificial Sequence: Synthetic oligonucleotide
  Target: LAMA2; (+) strand; PAM type: NRG; PAM sequence: CAG
aaaacaggcaaaataccccg

SEQ ID NO: 166082 - DNA, 20 bp, Artificial Sequence
  Description of Artificial Sequence: Synthetic oligonucleotide
  Target: LAMA2; (+) strand; PAM type: NRG; PAM sequence: CAG
gcagaatcctcctcttccct

SEQ ID NO: 166083 - DNA, 20 bp, Artificial Sequence
  Description of Artificial Sequence: Synthetic oligonucleotide
  Target: LAMA2; (+) strand; PAM type: NRG; PAM sequence: CGG
cactttgcatgctgctaccc

SEQ ID NO: 166084 - DNA, 20 bp, Artificial Sequence
  Description of Artificial Sequence: Synthetic oligonucleotide
  Target: LAMA2; (+) strand; PAM type: NRG; PAM sequence: CAG
tttgcatgctgctaccccgg

SEQ ID NO: 166085 - DNA, 20 bp, Artificial Sequence
  Description of Artificial Sequence: Synthetic oligonucleotide
  Target: LAMA2; (+) strand; PAM type: NRG; PAM sequence: AAG
gctaccccggcagccctctt

SEQ ID NO: 166086 - DNA, 20 bp, Artificial Sequence
  Description of Artificial Sequence: Synthetic oligonucleotide
  Target: LAMA2; (+) strand; PAM type: NRG; PAM sequence: AGG
ctaccccggcagccctctta

SEQ ID NO: 166087 - DNA, 20 bp, Artificial Sequence
  Description of Artificial Sequence: Synthetic oligonucleotide
  Target: LAMA2; (+) strand; PAM type: NRG; PAM sequence: GAG
accccggcagccctcttaag

SEQ ID NO: 166088 - DNA, 20 bp, Artificial Sequence
  Description of Artificial Sequence: Synthetic oligonucleotide
  Target: LAMA2; (+) strand; PAM type: NRG; PAM sequence: TAG
ccggcagccctcttaaggag

SEQ ID NO: 166089 - DNA, 20 bp, Artificial Sequence
  Description of Artificial Sequence: Synthetic oligonucleotide
  Target: LAMA2; (+) strand; PAM type: NRG; PAM sequence: GAG
ttttgttttttttttcccct

SEQ ID NO: 166090 - DNA, 20 bp, Artificial Sequence
  Description of Artificial Sequence: Synthetic oligonucleotide
  Target: LAMA2; (+) strand; PAM type: NRG; PAM sequence: CAG
tgctgactcactctgtcgtg

SEQ ID NO: 166091 - DNA, 20 bp, Artificial Sequence
  Description of Artificial Sequence: Synthetic oligonucleotide
  Target: LAMA2; (+) strand; PAM type: NRG; PAM sequence: AGG
gctgactcactctgtcgtgc

SEQ ID NO: 166092 - DNA, 20 bp, Artificial Sequence
  Description of Artificial Sequence: Synthetic oligonucleotide
  Target: LAMA2; (+) strand; PAM type: NRG; PAM sequence: TGG
actcactctgtcgtgcaggc

SEQ ID NO: 166093 - DNA, 20 bp, Artificial Sequence
  Description of Artificial Sequence: Synthetic oligonucleotide
  Target: LAMA2; (+) strand; PAM type: NRG; PAM sequence: GAG
tcactctgtcgtgcaggctg

SEQ ID NO: 166094 - DNA, 20 bp, Artificial Sequence
  Description of Artificial Sequence: Synthetic oligonucleotide
  Target: LAMA2; (+) strand; PAM type: NRG; PAM sequence: AGG
cactctgtcgtgcaggctgg

SEQ ID NO: 166095 - DNA, 20 bp, Artificial Sequence
  Description of Artificial Sequence: Synthetic oligonucleotide
  Target: LAMA2; (+) strand; PAM type: NRG; PAM sequence: GGG
actctgtcgtgcaggctgga

SEQ ID NO: 166096 - DNA, 20 bp, Artificial Sequence
  Description of Artificial Sequence: Synthetic oligonucleotide
  Target: LAMA2; (+) strand; PAM type: NRG; PAM sequence: CAG
ctgtcgtgcaggctggaggg

SEQ ID NO: 166097 - DNA, 20 bp, Artificial Sequence
  Description of Artificial Sequence: Synthetic oligonucleotide
  Target: LAMA2; (+) strand; PAM type: NRG; PAM sequence: TGG
tcgtgcaggctggagggcag

SEQ ID NO: 166098 - DNA, 20 bp, Artificial Sequence
  Description of Artificial Sequence: Synthetic oligonucleotide
  Target: LAMA2; (+) strand; PAM type: NRG; PAM sequence: TGG
ctggagggcagtggcgatcc

SEQ ID NO: 166099 - DNA, 20 bp, Artificial Sequence
  Description of Artificial Sequence: Synthetic oligonucleotide
  Target: LAMA2; (+) strand; PAM type: NRG; PAM sequence: CGG
tcactgcaacctccgactcc

SEQ ID NO: 166100 - DNA, 20 bp, Artificial Sequence
  Description of Artificial Sequence: Synthetic oligonucleotide
  Target: LAMA2; (+) strand; PAM type: NRG; PAM sequence: GGG
cactgcaacctccgactccc

SEQ ID NO: 166101 - DNA, 20 bp, Artificial Sequence
  Description of Artificial Sequence: Synthetic oligonucleotide
  Target: LAMA2; (+) strand; PAM type: NRG; PAM sequence: AAG
aacctccgactcccgggttc

SEQ ID NO: 166102 - DNA, 20 bp, Artificial Sequence
  Description of Artificial Sequence: Synthetic oligonucleotide
  Target: LAMA2; (+) strand; PAM type: NRG; PAM sequence: CAG
ttcaagtgattctcatgcct

SEQ ID NO: 166103 - DNA, 20 bp, Artificial Sequence
  Description of Artificial Sequence: Synthetic oligonucleotide
  Target: LAMA2; (+) strand; PAM type: NRG; PAM sequence: GAG
ttctcatgcctcagcctcct

SEQ ID NO: 166104 - DNA, 20 bp, Artificial Sequence
  Description of Artificial Sequence: Synthetic oligonucleotide
  Target: LAMA2; (+) strand; PAM type: NRG; PAM sequence: TAG
tcatgcctcagcctcctgag

SEQ ID NO: 166105 - DNA, 20 bp, Artificial Sequence
  Description of Artificial Sequence: Synthetic oligonucleotide
  Target: LAMA2; (+) strand; PAM type: NRG; PAM sequence: TGG
gcctcagcctcctgagtagc

SEQ ID NO: 166106 - DNA, 20 bp, Artificial Sequence
  Description of Artificial Sequence: Synthetic oligonucleotide
  Target: LAMA2; (+) strand; PAM type: NRG; PAM sequence: GGG
cctcagcctcctgagtagct

SEQ ID NO: 166107 - DNA, 20 bp, Artificial Sequence
  Description of Artificial Sequence: Synthetic oligonucleotide
  Target: LAMA2; (+) strand; PAM type: NRG; PAM sequence: CAG
ctcctgagtagctgggacta

SEQ ID NO: 166108 - DNA, 20 bp, Artificial Sequence
  Description of Artificial Sequence: Synthetic oligonucleotide
  Target: LAMA2; (+) strand; PAM type: NRG; PAM sequence: AGG
tcctgagtagctgggactac

SEQ ID NO: 166109 - DNA, 20 bp, Artificial Sequence
  Description of Artificial Sequence: Synthetic oligonucleotide
  Target: LAMA2; (+) strand; PAM type: NRG; PAM sequence: TGG
caggctcacgccaccacacc

SEQ ID NO: 166110 - DNA, 20 bp, Artificial Sequence
  Description of Artificial Sequence: Synthetic oligonucleotide
  Target: LAMA2; (+) strand; PAM type: NRG; PAM sequence: TAG
ctggatattttttttatttt

SEQ ID NO: 166111 - DNA, 20 bp, Artificial Sequence
  Description of Artificial Sequence: Synthetic oligonucleotide
  Target: LAMA2; (+) strand; PAM type: NRG; PAM sequence: TAG
gatattttttttatttttag

SEQ ID NO: 166112 - DNA, 20 bp, Artificial Sequence
  Description of Artificial Sequence: Synthetic oligonucleotide
  Target: LAMA2; (+) strand; PAM type: NRG; PAM sequence: GAG
tattttttttatttttagta

SEQ ID NO: 166113 - DNA, 20 bp, Artificial Sequence
  Description of Artificial Sequence: Synthetic oligonucleotide
  Target: LAMA2; (+) strand; PAM type: NRG; PAM sequence: CGG
ttttttatttttagtagaga

SEQ ID NO: 166114 - DNA, 20 bp, Artificial Sequence
  Description of Artificial Sequence: Synthetic oligonucleotide
  Target: LAMA2; (+) strand; PAM type: NRG; PAM sequence: GGG
tttttatttttagtagagac

SEQ ID NO: 166115 - DNA, 20 bp, Artificial Sequence
  Description of Artificial Sequence: Synthetic oligonucleotide
  Target: LAMA2; (+) strand; PAM type: NRG; PAM sequence: GGG
ttttatttttagtagagacg

SEQ ID NO: 166116 - DNA, 20 bp, Artificial Sequence
  Description of Artificial Sequence: Synthetic oligonucleotide
  Target: LAMA2; (+) strand; PAM type: NRG; PAM sequence: TAG
cggggtttcaccatgttgtc

SEQ ID NO: 166117 - DNA, 20 bp, Artificial Sequence
  Description of Artificial Sequence: Synthetic oligonucleotide
  Target: LAMA2; (+) strand; PAM type: NRG; PAM sequence: AGG
ggggtttcaccatgttgtct

SEQ ID NO: 166118 - DNA, 20 bp, Artificial Sequence
  Description of Artificial Sequence: Synthetic oligonucleotide
  Target: LAMA2; (+) strand; PAM type: NRG; PAM sequence: TGG
tttcaccatgttgtctaggc

SEQ ID NO: 166119 - DNA, 20 bp, Artificial Sequence
  Description of Artificial Sequence: Synthetic oligonucleotide
  Target: LAMA2; (+) strand; PAM type: NRG; PAM sequence: CAG
tggtctcgaactcctaacct

SEQ ID NO: 166120 - DNA, 20 bp, Artificial Sequence
  Description of Artificial Sequence: Synthetic oligonucleotide
  Target: LAMA2; (+) strand; PAM type: NRG; PAM sequence: AGG
ggtctcgaactcctaacctc

SEQ ID NO: 166121 - DNA, 20 bp, Artificial Sequence
  Description of Artificial Sequence: Synthetic oligonucleotide
  Target: LAMA2; (+) strand; PAM type: NRG; PAM sequence: TGG
ctcaggtaatccacccacct

SEQ ID NO: 166122 - DNA, 20 bp, Artificial Sequence
  Description of Artificial Sequence: Synthetic oligonucleotide
  Target: LAMA2; (+) strand; PAM type: NRG; PAM sequence: AAG
ccacccaccttggcctccca

SEQ ID NO: 166123 - DNA, 20 bp, Artificial Sequence
  Description of Artificial Sequence: Synthetic oligonucleotide
  Target: LAMA2; (+) strand; PAM type: NRG; PAM sequence: TGG
accttggcctcccaaagtgc

SEQ ID NO: 166124 - DNA, 20 bp, Artificial Sequence
  Description of Artificial Sequence: Synthetic oligonucleotide
  Target: LAMA2; (+) strand; PAM type: NRG; PAM sequence: GGG
ccttggcctcccaaagtgct

SEQ ID NO: 166125 - DNA, 20 bp, Artificial Sequence
  Description of Artificial Sequence: Synthetic oligonucleotide
  Target: LAMA2; (+) strand; PAM type: NRG; PAM sequence: CAG
ctcccaaagtgctgggatta

SEQ ID NO: 166126 - DNA, 20 bp, Artificial Sequence
  Description of Artificial Sequence: Synthetic oligonucleotide
  Target: LAMA2; (+) strand; PAM type: NRG; PAM sequence: AGG
tcccaaagtgctgggattac

SEQ ID NO: 166127 - DNA, 20 bp, Artificial Sequence
  Description of Artificial Sequence: Synthetic oligonucleotide
  Target: LAMA2; (+) strand; PAM type: NRG; PAM sequence: GAG
agtgctgggattacaggcat

SEQ ID NO: 166128 - DNA, 20 bp, Artificial Sequence
  Description of Artificial Sequence: Synthetic oligonucleotide
  Target: LAMA2; (+) strand; PAM type: NRG; PAM sequence: CAG
caggcatgagccaccatgcc

SEQ ID NO: 166129 - DNA, 20 bp, Artificial Sequence
  Description of Artificial Sequence: Synthetic oligonucleotide
  Target: LAMA2; (+) strand; PAM type: NRG; PAM sequence: CAG
tgagccaccatgcccagctg

SEQ ID NO: 166130 - DNA, 20 bp, Artificial Sequence
  Description of Artificial Sequence: Synthetic oligonucleotide
  Target: LAMA2; (+) strand; PAM type: NRG; PAM sequence: GAG
ttcactcccttcattcccct

SEQ ID NO: 166131 - DNA, 20 bp, Artificial Sequence
  Description of Artificial Sequence: Synthetic oligonucleotide
  Target: LAMA2; (+) strand; PAM type: NRG; PAM sequence: AAG
ccttcattcccctgagtctg

SEQ ID NO: 166132 - DNA, 20 bp, Artificial Sequence
  Description of Artificial Sequence: Synthetic oligonucleotide
  Target: LAMA2; (+) strand; PAM type: NRG; PAM sequence: AGG
cttcattcccctgagtctga

SEQ ID NO: 166133 - DNA, 20 bp, Artificial Sequence
  Description of Artificial Sequence: Synthetic oligonucleotide
  Target: LAMA2; (+) strand; PAM type: NRG; PAM sequence: TGG
cattcccctgagtctgaagg

SEQ ID NO: 166134 - DNA, 20 bp, Artificial Sequence
  Description of Artificial Sequence: Synthetic oligonucleotide
  Target: LAMA2; (+) strand; PAM type: NRG; PAM sequence: GGG
attcccctgagtctgaaggt

SEQ ID NO: 166135 - DNA, 20 bp, Artificial Sequence
  Description of Artificial Sequence: Synthetic oligonucleotide
  Target: LAMA2; (+) strand; PAM type: NRG; PAM sequence: GGG
ttcccctgagtctgaaggtg

SEQ ID NO: 166136 - DNA, 20 bp, Artificial Sequence
  Description of Artificial Sequence: Synthetic oligonucleotide
  Target: LAMA2; (+) strand; PAM type: NRG; PAM sequence: GGG
tcccctgagtctgaaggtgg

SEQ ID NO: 166137 - DNA, 20 bp, Artificial Sequence
  Description of Artificial Sequence: Synthetic oligonucleotide
  Target: LAMA2; (+) strand; PAM type: NRG; PAM sequence: CAG
cctgagtctgaaggtggggg

SEQ ID NO: 166138 - DNA, 20 bp, Artificial Sequence
  Description of Artificial Sequence: Synthetic oligonucleotide
  Target: LAMA2; (+) strand; PAM type: NRG; PAM sequence: AGG
ctgagtctgaaggtgggggc

SEQ ID NO: 166139 - DNA, 20 bp, Artificial Sequence
  Description of Artificial Sequence: Synthetic oligonucleotide
  Target: LAMA2; (+) strand; PAM type: NRG; PAM sequence: CAG
gttttcctgctcctcgctgc

SEQ ID NO: 166140 - DNA, 20 bp, Artificial Sequence
  Description of Artificial Sequence: Synthetic oligonucleotide
  Target: LAMA2; (+) strand; PAM type: NRG; PAM sequence: CAG
ttatccatcctcctctacat

SEQ ID NO: 166141 - DNA, 20 bp, Artificial Sequence
  Description of Artificial Sequence: Synthetic oligonucleotide
  Target: LAMA2; (+) strand; PAM type: NRG; PAM sequence: AGG
tatccatcctcctctacatc

SEQ ID NO: 166142 - DNA, 20 bp, Artificial Sequence
  Description of Artificial Sequence: Synthetic oligonucleotide
  Target: LAMA2; (+) strand; PAM type: NRG; PAM sequence: GGG
atccatcctcctctacatca

SEQ ID NO: 166143 - DNA, 20 bp, Artificial Sequence
  Description of Artificial Sequence: Synthetic oligonucleotide
  Target: LAMA2; (+) strand; PAM type: NRG; PAM sequence: TGG
acatcagggtccacaacccc

SEQ ID NO: 166144 - DNA, 20 bp, Artificial Sequence
  Description of Artificial Sequence: Synthetic oligonucleotide
  Target: LAMA2; (+) strand; PAM type: NRG; PAM sequence: GGG
catcagggtccacaacccct

SEQ ID NO: 166145 - DNA, 20 bp, Artificial Sequence
  Description of Artificial Sequence: Synthetic oligonucleotide
  Target: LAMA2; (+) strand; PAM type: NRG; PAM sequence: CAG
ggtccacaacccctgggcca

SEQ ID NO: 166146 - DNA, 20 bp, Artificial Sequence
  Description of Artificial Sequence: Synthetic oligonucleotide
  Target: LAMA2; (+) strand; PAM type: NRG; PAM sequence: AGG
gtccacaacccctgggccac

SEQ ID NO: 166147 - DNA, 20 bp, Artificial Sequence
  Description of Artificial Sequence: Synthetic oligonucleotide
  Target: LAMA2; (+) strand; PAM type: NRG; PAM sequence: GAG
ccacaacccctgggccacag

SEQ ID NO: 166148 - DNA, 20 bp, Artificial Sequence
  Description of Artificial Sequence: Synthetic oligonucleotide
  Target: LAMA2; (+) strand; PAM type: NRG; PAM sequence: AGG
cacaacccctgggccacagg

SEQ ID NO: 166149 - DNA, 20 bp, Artificial Sequence
  Description of Artificial Sequence: Synthetic oligonucleotide
  Target: LAMA2; (+) strand; PAM type: NRG; PAM sequence: TGG
cctgggccacaggaggatat

SEQ ID NO: 166150 - DNA, 20 bp, Artificial Sequence
  Description of Artificial Sequence: Synthetic oligonucleotide
  Target: LAMA2; (+) strand; PAM type: NRG; PAM sequence: TGG
cacaggaggatattggtccg

SEQ ID NO: 166151 - DNA, 20 bp, Artificial Sequence
  Description of Artificial Sequence: Synthetic oligonucleotide
  Target: LAMA2; (+) strand; PAM type: NRG; PAM sequence: TAG
gatattggtccgtggccttt

SEQ ID NO: 166152 - DNA, 20 bp, Artificial Sequence
  Description of Artificial Sequence: Synthetic oligonucleotide
  Target: LAMA2; (+) strand; PAM type: NRG; PAM sequence: CAG
gtccgtggccttttagaaac

SEQ ID NO: 166153 - DNA, 20 bp, Artificial Sequence
  Description of Artificial Sequence: Synthetic oligonucleotide
  Target: LAMA2; (+) strand; PAM type: NRG; PAM sequence: CAG
cttttagaaaccagaccaca

SEQ ID NO: 166154 - DNA, 20 bp, Artificial Sequence
  Description of Artificial Sequence: Synthetic oligonucleotide
  Target: LAMA2; (+) strand; PAM type: NRG; PAM sequence: CAG
ttagaaaccagaccacacag

SEQ ID NO: 166155 - DNA, 20 bp, Artificial Sequence
  Description of Artificial Sequence: Synthetic oligonucleotide
  Target: LAMA2; (+) strand; PAM type: NRG; PAM sequence: AGG
tagaaaccagaccacacagc

SEQ ID NO: 166156 - DNA, 20 bp, Artificial Sequence
  Description of Artificial Sequence: Synthetic oligonucleotide
  Target: LAMA2; (+) strand; PAM type: NRG; PAM sequence: GAG
gaaaccagaccacacagcag

SEQ ID NO: 166157 - DNA, 20 bp, Artificial Sequence
  Description of Artificial Sequence: Synthetic oligonucleotide
  Target: LAMA2; (+) strand; PAM type: NRG; PAM sequence: AGG
aaaccagaccacacagcagg

SEQ ID NO: 166158 - DNA, 20 bp, Artificial Sequence
  Description of Artificial Sequence: Synthetic oligonucleotide
  Target: LAMA2; (+) strand; PAM type: NRG; PAM sequence: AAG
cagaccacacagcaggaggc

SEQ ID NO: 166159 - DNA, 20 bp, Artificial Sequence
  Description of Artificial Sequence: Synthetic oligonucleotide
  Target: LAMA2; (+) strand; PAM type: NRG; PAM sequence: CAG
accacacagcaggaggcaag

SEQ ID NO: 166160 - DNA, 20 bp, Artificial Sequence
  Description of Artificial Sequence: Synthetic oligonucleotide
  Target: LAMA2; (+) strand; PAM type: NRG; PAM sequence: CAG
acacagcaggaggcaagcag

SEQ ID NO: 166161 - DNA, 20 bp, Artificial Sequence
  Description of Artificial Sequence: Synthetic oligonucleotide
  Target: LAMA2; (+) strand; PAM type: NRG; PAM sequence: AGG
cacagcaggaggcaagcagc

SEQ ID NO: 166162 - DNA, 20 bp, Artificial Sequence
  Description of Artificial Sequence: Synthetic oligonucleotide
  Target: LAMA2; (+) strand; PAM type: NRG; PAM sequence: AAG
caggaggcaagcagcaggca

SEQ ID NO: 166163 - DNA, 20 bp, Artificial Sequence
  Description of Artificial Sequence: Synthetic oligonucleotide
  Target: LAMA2; (+) strand; PAM type: NRG; PAM sequence: AGG
aggaggcaagcagcaggcaa

SEQ ID NO: 166164 - DNA, 20 bp, Artificial Sequence
  Description of Artificial Sequence: Synthetic oligonucleotide
  Target: LAMA2; (+) strand; PAM type: NRG; PAM sequence: GAG
gaggcaagcagcaggcaaag

SEQ ID NO: 166165 - DNA, 20 bp, Artificial Sequence
  Description of Artificial Sequence: Synthetic oligonucleotide
  Target: LAMA2; (+) strand; PAM type: NRG; PAM sequence: AAG
caagcagcaggcaaaggagc

SEQ ID NO: 166166 - DNA, 20 bp, Artificial Sequence
  Description of Artificial Sequence: Synthetic oligonucleotide
  Target: LAMA2; (+) strand; PAM type: NRG; PAM sequence: CAG
agcaggcaaaggagcaagcg

SEQ ID NO: 166167 - DNA, 20 bp, Artificial Sequence
  Description of Artificial Sequence: Synthetic oligonucleotide
  Target: LAMA2; (+) strand; PAM type: NRG; PAM sequence: TAG
aggagcaagcgcagcttcat

SEQ ID NO: 166168 - DNA, 20 bp, Artificial Sequence
  Description of Artificial Sequence: Synthetic oligonucleotide
  Target: LAMA2; (+) strand; PAM type: NRG; PAM sequence: CAG
cgcagcttcattagcattta

SEQ ID NO: 166169 - DNA, 20 bp, Artificial Sequence
  Description of Artificial Sequence: Synthetic oligonucleotide
  Target: LAMA2; (+) strand; PAM type: NRG; PAM sequence: TGG
ttacagctgctcctcattcc

SEQ ID NO: 166170 - DNA, 20 bp, Artificial Sequence
  Description of Artificial Sequence: Synthetic oligonucleotide
  Target: LAMA2; (+) strand; PAM type: NRG; PAM sequence: GAG
ctggtattactgtactgcct

SEQ ID NO: 166171 - DNA, 20 bp, Artificial Sequence
  Description of Artificial Sequence: Synthetic oligonucleotide
  Target: LAMA2; (+) strand; PAM type: NRG; PAM sequence: CAG
gcctgagctccacctcctgt

SEQ ID NO: 166172 - DNA, 20 bp, Artificial Sequence
  Description of Artificial Sequence: Synthetic oligonucleotide
  Target: LAMA2; (+) strand; PAM type: NRG; PAM sequence: CAG
agctccacctcctgtcagat

SEQ ID NO: 166173 - DNA, 20 bp, Artificial Sequence
  Description of Artificial Sequence: Synthetic oligonucleotide
  Target: LAMA2; (+) strand; PAM type: NRG; PAM sequence: GAG
ctccacctcctgtcagatca

SEQ ID NO: 166174 - DNA, 20 bp, Artificial Sequence
  Description of Artificial Sequence: Synthetic oligonucleotide
  Target: LAMA2; (+) strand; PAM type: NRG; PAM sequence: CAG
acctcctgtcagatcagaga

SEQ ID NO: 166175 - DNA, 20 bp, Artificial Sequence
  Description of Artificial Sequence: Synthetic oligonucleotide
  Target: LAMA2; (+) strand; PAM type: NRG; PAM sequence: TAG
tgtcagatcagagacagcat

SEQ ID NO: 166176 - DNA, 20 bp, Artificial Sequence
  Description of Artificial Sequence: Synthetic oligonucleotide
  Target: LAMA2; (+) strand; PAM type: NRG; PAM sequence: TAG
gagacagcattagattctca

SEQ ID NO: 166177 - DNA, 20 bp, Artificial Sequence
  Description of Artificial Sequence: Synthetic oligonucleotide
  Target: LAMA2; (+) strand; PAM type: NRG; PAM sequence: AGG
agacagcattagattctcat

SEQ ID NO: 166178 - DNA, 20 bp, Artificial Sequence
  Description of Artificial Sequence: Synthetic oligonucleotide
  Target: LAMA2; (+) strand; PAM type: NRG; PAM sequence: GAG
acagcattagattctcatag

SEQ ID NO: 166179 - DNA, 20 bp, Artificial Sequence
  Description of Artificial Sequence: Synthetic oligonucleotide
  Target: LAMA2; (+) strand; PAM type: NRG; PAM sequence: GAG
ctattgtgaactgcacatgt

SEQ ID NO: 166180 - DNA, 20 bp, Artificial Sequence
  Description of Artificial Sequence: Synthetic oligonucleotide
  Target: LAMA2; (+) strand; PAM type: NRG; PAM sequence: AGG
tattgtgaactgcacatgtg

SEQ ID NO: 166181 - DNA, 20 bp, Artificial Sequence
  Description of Artificial Sequence: Synthetic oligonucleotide
  Target: LAMA2; (+) strand; PAM type: NRG; PAM sequence: GGG
attgtgaactgcacatgtga

SEQ ID NO: 166182 - DNA, 20 bp, Artificial Sequence
  Description of Artificial Sequence: Synthetic oligonucleotide
  Target: LAMA2; (+) strand; PAM type: NRG; PAM sequence: TAG
aactgcacatgtgagggatc

SEQ ID NO: 166183 - DNA, 20 bp, Artificial Sequence
  Description of Artificial Sequence: Synthetic oligonucleotide
  Target: LAMA2; (+) strand; PAM type: NRG; PAM sequence: AGG
actgcacatgtgagggatct

SEQ ID NO: 166184 - DNA, 20 bp, Artificial Sequence
  Description of Artificial Sequence: Synthetic oligonucleotide
  Target: LAMA2; (+) strand; PAM type: NRG; PAM sequence: GAG
gatctaggttgtgcgctcct

SEQ ID NO: 166185 - DNA, 20 bp, Artificial Sequence
  Description of Artificial Sequence: Synthetic oligonucleotide
  Target: LAMA2; (+) strand; PAM type: NRG; PAM sequence: AAG
tcactgtctcccatcacccc

SEQ ID NO: 166186 - DNA, 20 bp, Artificial Sequence
  Description of Artificial Sequence: Synthetic oligonucleotide
  Target: LAMA2; (+) strand; PAM type: NRG; PAM sequence: TGG
tgtctcccatcaccccaaga

SEQ ID NO: 166187 - DNA, 20 bp, Artificial Sequence
  Description of Artificial Sequence: Synthetic oligonucleotide
  Target: LAMA2; (+) strand; PAM type: NRG; PAM sequence: GGG
gtctcccatcaccccaagat

SEQ ID NO: 166188 - DNA, 20 bp, Artificial Sequence
  Description of Artificial Sequence: Synthetic oligonucleotide
  Target: LAMA2; (+) strand; PAM type: NRG; PAM sequence: TAG
caccccaagatgggactatc

SEQ ID NO: 166189 - DNA, 20 bp, Artificial Sequence
  Description of Artificial Sequence: Synthetic oligonucleotide
  Target: LAMA2; (+) strand; PAM type: NRG; PAM sequence: CAG
aagatgggactatctagttg

SEQ ID NO: 166190 - DNA, 20 bp, Artificial Sequence
  Description of Artificial Sequence: Synthetic oligonucleotide
  Target: LAMA2; (+) strand; PAM type: NRG; PAM sequence: AGG
agatgggactatctagttgc

SEQ ID NO: 166191 - DNA, 20 bp, Artificial Sequence
  Description of Artificial Sequence: Synthetic oligonucleotide
  Target: LAMA2; (+) strand; PAM type: NRG; PAM sequence: AAG
ctatctagttgcaggaaaac

SEQ ID NO: 166192 - DNA, 20 bp, Artificial Sequence
  Description of Artificial Sequence: Synthetic oligonucleotide
  Target: LAMA2; (+) strand; PAM type: NRG; PAM sequence: TAG
tagttgcaggaaaacaagct

SEQ ID NO: 166193 - DNA, 20 bp, Artificial Sequence
  Description of Artificial Sequence: Synthetic oligonucleotide
  Target: LAMA2; (+) strand; PAM type: NRG; PAM sequence: AGG
agttgcaggaaaacaagctt

SEQ ID NO: 166194 - DNA, 20 bp, Artificial Sequence
  Description of Artificial Sequence: Synthetic oligonucleotide
  Target: LAMA2; (+) strand; PAM type: NRG; PAM sequence: GGG
gttgcaggaaaacaagctta

SEQ ID NO: 166195 - DNA, 20 bp, Artificial Sequence
  Description of Artificial Sequence: Synthetic oligonucleotide
  Target: LAMA2; (+) strand; PAM type: NRG; PAM sequence: TGG
cttccactgattctatgtta

SEQ ID NO: 166196 - DNA, 20 bp, Artificial Sequence
  Description of Artificial Sequence: Synthetic oligonucleotide
  Target: LAMA2; (+) strand; PAM type: NRG; PAM sequence: GAG
cactgattctatgttatggt

SEQ ID NO: 166197 - DNA, 20 bp, Artificial Sequence
  Description of Artificial Sequence: Synthetic oligonucleotide
  Target: LAMA2; (+) strand; PAM type: NRG; PAM sequence: TAG
atattacaatgtaataataa

SEQ ID NO: 166198 - DNA, 20 bp, Artificial Sequence
  Description of Artificial Sequence: Synthetic oligonucleotide
  Target: LAMA2; (+) strand; PAM type: NRG; PAM sequence: TAG
tacaatgtaataataataga

SEQ ID NO: 166199 - DNA, 20 bp, Artificial Sequence
  Description of Artificial Sequence: Synthetic oligonucleotide
  Target: LAMA2; (+) strand; PAM type: NRG; PAM sequence: TAG
atagatagtaataataataa

SEQ ID NO: 166200 - DNA, 20 bp, Artificial Sequence
  Description of Artificial Sequence: Synthetic oligonucleotide
  Target: LAMA2; (+) strand; PAM type: NRG; PAM sequence: AAG
aataataataatagataata

SEQ ID NO: 166201 - DNA, 20 bp, Artificial Sequence
  Description of Artificial Sequence: Synthetic oligonucleotide
  Target: LAMA2; (+) strand; PAM type: NRG; PAM sequence: CAG
ataatagataataaagtgca

SEQ ID NO: 166202 - DNA, 20 bp, Artificial Sequence
  Description of Artificial Sequence: Synthetic oligonucleotide
  Target: LAMA2; (+) strand; PAM type: NRG; PAM sequence: TAG
acaaaaccatcccccaatcc

SEQ ID NO: 166203 - DNA, 20 bp, Artificial Sequence
  Description of Artificial Sequence: Synthetic oligonucleotide
  Target: LAMA2; (+) strand; PAM type: NRG; PAM sequence: TGG
catcccccaatcctagtcca

SEQ ID NO: 166204 - DNA, 20 bp, Artificial Sequence
  Description of Artificial Sequence: Synthetic oligonucleotide
  Target: LAMA2; (+) strand; PAM type: NRG; PAM sequence: CAG
aaaattgccttccatgaaac

SEQ ID NO: 166205 - DNA, 20 bp, Artificial Sequence
  Description of Artificial Sequence: Synthetic oligonucleotide
  Target: LAMA2; (+) strand; PAM type: NRG; PAM sequence: TGG
ccttccatgaaaccagtccc

SEQ ID NO: 166206 - DNA, 20 bp, Artificial Sequence
  Description of Artificial Sequence: Synthetic oligonucleotide
  Target: LAMA2; (+) strand; PAM type: NRG; PAM sequence: TGG
gtccctggtgccaaaaacat

SEQ ID NO: 166207 - DNA, 20 bp, Artificial Sequence
  Description of Artificial Sequence: Synthetic oligonucleotide
  Target: LAMA2; (+) strand; PAM type: NRG; PAM sequence: GAG
ccctggtgccaaaaacattg

SEQ ID NO: 166208 - DNA, 20 bp, Artificial Sequence
  Description of Artificial Sequence: Synthetic oligonucleotide
  Target: LAMA2; (+) strand; PAM type: NRG; PAM sequence: CAG
acattggagacgctgctcta

SEQ ID NO: 166209 - DNA, 20 bp, Artificial Sequence
  Description of Artificial Sequence: Synthetic oligonucleotide
  Target: LAMA2; (+) strand; PAM type: NRG; PAM sequence: CAG
agacgctgctctacagcacc

SEQ ID NO: 166210 - DNA, 20 bp, Artificial Sequence
  Description of Artificial Sequence: Synthetic oligonucleotide
  Target: LAMA2; (+) strand; PAM type: NRG; PAM sequence: AAG
ccctctccatctgcttgtcg

SEQ ID NO: 166211 - DNA, 20 bp, Artificial Sequence
  Description of Artificial Sequence: Synthetic oligonucleotide
  Target: LAMA2; (+) strand; PAM type: NRG; PAM sequence: TAG
tgtctaattgtcattttccc

SEQ ID NO: 166212 - DNA, 20 bp, Artificial Sequence
  Description of Artificial Sequence: Synthetic oligonucleotide
  Target: LAMA2; (+) strand; PAM type: NRG; PAM sequence: TAG
actactcctgtcatcattct

SEQ ID NO: 166213 - DNA, 20 bp, Artificial Sequence
  Description of Artificial Sequence: Synthetic oligonucleotide
  Target: LAMA2; (+) strand; PAM type: NRG; PAM sequence: CAG
tcttccatactcttcacttt

SEQ ID NO: 166214 - DNA, 20 bp, Artificial Sequence
  Description of Artificial Sequence: Synthetic oligonucleotide
  Target: LAMA2; (+) strand; PAM type: NRG; PAM sequence: TGG
ttcagtttcttgtgcctctc

SEQ ID NO: 166215 - DNA, 20 bp, Artificial Sequence
  Description of Artificial Sequence: Synthetic oligonucleotide
  Target: LAMA2; (+) strand; PAM type: NRG; PAM sequence: AAG
gcctctctggtctccatttg

SEQ ID NO: 166216 - DNA, 20 bp, Artificial Sequence
  Description of Artificial Sequence: Synthetic oligonucleotide
  Target: LAMA2; (+) strand; PAM type: NRG; PAM sequence: TGG
agcgtttttttgttgttgtt

SEQ ID NO: 166217 - DNA, 20 bp, Artificial Sequence
  Description of Artificial Sequence: Synthetic oligonucleotide
  Target: LAMA2; (+) strand; PAM type: NRG; PAM sequence: TAG
cccactgtgtcgtttctctc

SEQ ID NO: 166218 - DNA, 20 bp, Artificial Sequence
  Description of Artificial Sequence: Synthetic oligonucleotide
  Target: LAMA2; (+) strand; PAM type: NRG; PAM sequence: TAG
cttatctcatgctttcactg

SEQ ID NO: 166219 - DNA, 20 bp, Artificial Sequence
  Description of Artificial Sequence: Synthetic oligonucleotide
  Target: LAMA2; (+) strand; PAM type: NRG; PAM sequence: CAG
catgctttcactgtagtaac

SEQ ID NO: 166220 - DNA, 20 bp, Artificial Sequence
  Description of Artificial Sequence: Synthetic oligonucleotide
  Target: LAMA2; (+) strand; PAM type: NRG; PAM sequence: TAG
cactgtagtaaccagcttaa

SEQ ID NO: 166221 - DNA, 20 bp, Artificial Sequence
  Description of Artificial Sequence: Synthetic oligonucleotide
  Target: LAMA2; (+) strand; PAM type: NRG; PAM sequence: TGG
taatagtcatgatctttcat

SEQ ID NO: 166222 - DNA, 20 bp, Artificial Sequence
  Description of Artificial Sequence: Synthetic oligonucleotide
  Target: LAMA2; (+) strand; PAM type: NRG; PAM sequence: TGG
ctttgcaacgctcatttccc

SEQ ID NO: 166223 - DNA, 20 bp, Artificial Sequence
  Description of Artificial Sequence: Synthetic oligonucleotide
  Target: LAMA2; (+) strand; PAM type: NRG; PAM sequence: AAG
cctttacttattttttactc

SEQ ID NO: 166224 - DNA, 20 bp, Artificial Sequence
  Description of Artificial Sequence: Synthetic oligonucleotide
  Target: LAMA2; (+) strand; PAM type: NRG; PAM sequence: GAG
caagtgaactccaacactgt

SEQ ID NO: 166225 - DNA, 20 bp, Artificial Sequence
  Description of Artificial Sequence: Synthetic oligonucleotide
  Target: LAMA2; (+) strand; PAM type: NRG; PAM sequence: GAG
tgcaccttcttttttttttt

SEQ ID NO: 166226 - DNA, 20 bp, Artificial Sequence
  Description of Artificial Sequence: Synthetic oligonucleotide
  Target: LAMA2; (+) strand; PAM type: NRG; PAM sequence: CGG
ccttctttttttttttgaga

SEQ ID NO: 166227 - DNA, 20 bp, Artificial Sequence
  Description of Artificial Sequence: Synthetic oligonucleotide
  Target: LAMA2; (+) strand; PAM type: NRG; PAM sequence: GAG
ttctttttttttttgagacg

SEQ ID NO: 166228 - DNA, 20 bp, Artificial Sequence
  Description of Artificial Sequence: Synthetic oligonucleotide
  Target: LAMA2; (+) strand; PAM type: NRG; PAM sequence: CAG
cggagtcttgctctgtcacc

SEQ ID NO: 166229 - DNA, 20 bp, Artificial Sequence
  Description of Artificial Sequence: Synthetic oligonucleotide
  Target: LAMA2; (+) strand; PAM type: NRG; PAM sequence: AGG
ggagtcttgctctgtcaccc

SEQ ID NO: 166230 - DNA, 20 bp, Artificial Sequence
  Description of Artificial Sequence: Synthetic oligonucleotide
  Target: LAMA2; (+) strand; PAM type: NRG; PAM sequence: TGG
tcttgctctgtcacccaggc

SEQ ID NO: 166231 - DNA, 20 bp, Artificial Sequence
  Description of Artificial Sequence: Synthetic oligonucleotide
  Target: LAMA2; (+) strand; PAM type: NRG; PAM sequence: GAG
ttgctctgtcacccaggctg

SEQ ID NO: 166232 - DNA, 20 bp, Artificial Sequence
  Description of Artificial Sequence: Synthetic oligonucleotide
  Target: LAMA2; (+) strand; PAM type: NRG; PAM sequence: CAG
ctgtcacccaggctggagtg

SEQ ID NO: 166233 - DNA, 20 bp, Artificial Sequence
  Description of Artificial Sequence: Synthetic oligonucleotide
  Target: LAMA2; (+) strand; PAM type: NRG; PAM sequence: CAG
ggagtgcagtgacgcgatct

SEQ ID NO: 166234 - DNA, 20 bp, Artificial Sequence
  Description of Artificial Sequence: Synthetic oligonucleotide
  Target: LAMA2; (+) strand; PAM type: NRG; PAM sequence: AAG
acgcgatctcagctcactgc

SEQ ID NO: 166235 - DNA, 20 bp, Artificial Sequence
  Description of Artificial Sequence: Synthetic oligonucleotide
  Target: LAMA2; (+) strand; PAM type: NRG; PAM sequence: CAG
tcactgcaagctccgcctct

SEQ ID NO: 166236 - DNA, 20 bp, Artificial Sequence
  Description of Artificial Sequence: Synthetic oligonucleotide
  Target: LAMA2; (+) strand; PAM type: NRG; PAM sequence: AGG
cactgcaagctccgcctctc

SEQ ID NO: 166237 - DNA, 20 bp, Artificial Sequence
  Description of Artificial Sequence: Synthetic oligonucleotide
  Target: LAMA2; (+) strand; PAM type: NRG; PAM sequence: AAG
aagctccgcctctcaggttc

SEQ ID NO: 166238 - DNA, 20 bp, Artificial Sequence
  Description of Artificial Sequence: Synthetic oligonucleotide
  Target: LAMA2; (+) strand; PAM type: NRG; PAM sequence: CAG
ttcaagccattctcctgcct

SEQ ID NO: 166239 - DNA, 20 bp, Artificial Sequence
  Description of Artificial Sequence: Synthetic oligonucleotide
  Target: LAMA2; (+) strand; PAM type: NRG; PAM sequence: GAG
ttctcctgcctcagcctcct

SEQ ID NO: 166240 - DNA, 20 bp, Artificial Sequence
  Description of Artificial Sequence: Synthetic oligonucleotide
  Target: LAMA2; (+) strand; PAM type: NRG; PAM sequence: TAG
tcctgcctcagcctcctgag

SEQ ID NO: 166241 - DNA, 20 bp, Artificial Sequence
  Description of Artificial Sequence: Synthetic oligonucleotide
  Target: LAMA2; (+) strand; PAM type: NRG; PAM sequence: TGG
gcctcagcctcctgagtagc

SEQ ID NO: 166242 - DNA, 20 bp, Artificial Sequence
  Description of Artificial Sequence: Synthetic oligonucleotide
  Target: LAMA2; (+) strand; PAM type: NRG; PAM sequence: CAG
ctcctgagtagctggaacta

SEQ ID NO: 166243 - DNA, 20 bp, Artificial Sequence
  Description of Artificial Sequence: Synthetic oligonucleotide
  Target: LAMA2; (+) strand; PAM type: NRG; PAM sequence: AGG
tcctgagtagctggaactac

SEQ ID NO: 166244 - DNA, 20 bp, Artificial Sequence
  Description of Artificial Sequence: Synthetic oligonucleotide
  Target: LAMA2; (+) strand; PAM type: NRG; PAM sequence: CGG
caggtgcccaccaccatgcc

SEQ ID NO: 166245 - DNA, 20 bp, Artificial Sequence
  Description of Artificial Sequence: Synthetic oligonucleotide
  Target: LAMA2; (+) strand; PAM type: NRG; PAM sequence: TAG
ttctttttttgtatttttaa

SEQ ID NO: 166246 - DNA, 20 bp, Artificial Sequence
  Description of Artificial Sequence: Synthetic oligonucleotide
  Target: LAMA2; (+) strand; PAM type: NRG; PAM sequence: GAG
ctttttttgtatttttaata

SEQ ID NO: 166247 - DNA, 20 bp, Artificial Sequence
  Description of Artificial Sequence: Synthetic oligonucleotide
  Target: LAMA2; (+) strand; PAM type: NRG; PAM sequence: CGG
ttttgtatttttaatagaga

SEQ ID NO: 166248 - DNA, 20 bp, Artificial Sequence
  Description of Artificial Sequence: Synthetic oligonucleotide
  Target: LAMA2; (+) strand; PAM type: NRG; PAM sequence: GGG
tttgtatttttaatagagac

SEQ ID NO: 166249 - DNA, 20 bp, Artificial Sequence
  Description of Artificial Sequence: Synthetic oligonucleotide
  Target: LAMA2; (+) strand; PAM type: NRG; PAM sequence: GGG
ttgtatttttaatagagacg

SEQ ID NO: 166250 - DNA, 20 bp, Artificial Sequence
  Description of Artificial Sequence: Synthetic oligonucleotide
  Target: LAMA2; (+) strand; PAM type: NRG; PAM sequence: TAG
gagacggggtttcactgtgt

SEQ ID NO: 166251 - DNA, 20 bp, Artificial Sequence
  Description of Artificial Sequence: Synthetic oligonucleotide
  Target: LAMA2; (+) strand; PAM type: NRG; PAM sequence: CAG
cggggtttcactgtgttagc

SEQ ID NO: 166252 - DNA, 20 bp, Artificial Sequence
  Description of Artificial Sequence: Synthetic oligonucleotide
  Target: LAMA2; (+) strand; PAM type: NRG; PAM sequence: AGG
ggggtttcactgtgttagcc

SEQ ID NO: 166253 - DNA, 20 bp, Artificial Sequence
  Description of Artificial Sequence: Synthetic oligonucleotide
  Target: LAMA2; (+) strand; PAM type: NRG; PAM sequence: TGG
tttcactgtgttagccagga

SEQ ID NO: 166254 - DNA, 20 bp, Artificial Sequence
  Description of Artificial Sequence: Synthetic oligonucleotide
  Target: LAMA2; (+) strand; PAM type: NRG; PAM sequence: CGG
gatccatgattcgcctcctt

SEQ ID NO: 166255 - DNA, 20 bp, Artificial Sequence
  Description of Artificial Sequence: Synthetic oligonucleotide
  Target: LAMA2; (+) strand; PAM type: NRG; PAM sequence: AAG
tcgcctccttcggcctccca

SEQ ID NO: 166256 - DNA, 20 bp, Artificial Sequence
  Description of Artificial Sequence: Synthetic oligonucleotide
  Target: LAMA2; (+) strand; PAM type: NRG; PAM sequence: TGG
ccttcggcctcccaaagtgc

SEQ ID NO: 166257 - DNA, 20 bp, Artificial Sequence
  Description of Artificial Sequence: Synthetic oligonucleotide
  Target: LAMA2; (+) strand; PAM type: NRG; PAM sequence: GGG
cttcggcctcccaaagtgct

SEQ ID NO: 166258 - DNA, 20 bp, Artificial Sequence
  Description of Artificial Sequence: Synthetic oligonucleotide
  Target: LAMA2; (+) strand; PAM type: NRG; PAM sequence: CAG
ctcccaaagtgctgggacta

SEQ ID NO: 166259 - DNA, 20 bp, Artificial Sequence
  Description of Artificial Sequence: Synthetic oligonucleotide
  Target: LAMA2; (+) strand; PAM type: NRG; PAM sequence: AGG
tcccaaagtgctgggactac

SEQ ID NO: 166260 - DNA, 20 bp, Artificial Sequence
  Description of Artificial Sequence: Synthetic oligonucleotide
  Target: LAMA2; (+) strand; PAM type: NRG; PAM sequence: AAG
agtgctgggactacaggcgt

SEQ ID NO: 166261 - DNA, 20 bp, Artificial Sequence
  Description of Artificial Sequence: Synthetic oligonucleotide
  Target: LAMA2; (+) strand; PAM type: NRG; PAM sequence: CGG
caggcgtaagccactgcgcc

SEQ ID NO: 166262 - DNA, 20 bp, Artificial Sequence
  Description of Artificial Sequence: Synthetic oligonucleotide
  Target: LAMA2; (+) strand; PAM type: NRG; PAM sequence: AAG
cccggccacctgcaccttct

SEQ ID NO: 166263 - DNA, 20 bp, Artificial Sequence
  Description of Artificial Sequence: Synthetic oligonucleotide
  Target: LAMA2; (+) strand; PAM type: NRG; PAM sequence: TGG
tgcaccttctaagctgaacg

SEQ ID NO: 166264 - DNA, 20 bp, Artificial Sequence
  Description of Artificial Sequence: Synthetic oligonucleotide
  Target: LAMA2; (+) strand; PAM type: NRG; PAM sequence: TAG
ttctaagctgaacgtggctg

SEQ ID NO: 166265 - DNA, 20 bp, Artificial Sequence
  Description of Artificial Sequence: Synthetic oligonucleotide
  Target: LAMA2; (+) strand; PAM type: NRG; PAM sequence: AAG
gctgaacgtggctgtagaaa

SEQ ID NO: 166266 - DNA, 20 bp, Artificial Sequence
  Description of Artificial Sequence: Synthetic oligonucleotide
  Target: LAMA2; (+) strand; PAM type: NRG; PAM sequence: TGG
tcatgatccctctcttcaaa

SEQ ID NO: 166267 - DNA, 20 bp, Artificial Sequence
  Description of Artificial Sequence: Synthetic oligonucleotide
  Target: LAMA2; (+) strand; PAM type: NRG; PAM sequence: TAG
ctttttcttttccacattcc

SEQ ID NO: 166268 - DNA, 20 bp, Artificial Sequence
  Description of Artificial Sequence: Synthetic oligonucleotide
  Target: LAMA2; (+) strand; PAM type: NRG; PAM sequence: AGG
tttttcttttccacattcct

SEQ ID NO: 166269 - DNA, 20 bp, Artificial Sequence
  Description of Artificial Sequence: Synthetic oligonucleotide
  Target: LAMA2; (+) strand; PAM type: NRG; PAM sequence: AAG
atacctccccctccatcctc

SEQ ID NO: 166270 - DNA, 20 bp, Artificial Sequence
  Description of Artificial Sequence: Synthetic oligonucleotide
  Target: LAMA2; (+) strand; PAM type: NRG; PAM sequence: CAG
ccccctcccatccttaccct

SEQ ID NO: 166271 - DNA, 20 bp, Artificial Sequence
  Description of Artificial Sequence: Synthetic oligonucleotide
  Target: LAMA2; (+) strand; PAM type: NRG; PAM sequence: TGG
ccatccttaccctcagttga

SEQ ID NO: 166272 - DNA, 20 bp, Artificial Sequence
  Description of Artificial Sequence: Synthetic oligonucleotide
  Target: LAMA2; (+) strand; PAM type: NRG; PAM sequence: GAG
gtgttgcctcttatttcatt

SEQ ID NO: 166273 - DNA, 20 bp, Artificial Sequence
  Description of Artificial Sequence: Synthetic oligonucleotide
  Target: LAMA2; (+) strand; PAM type: NRG; PAM sequence: TAG
ctcttatttcattgagaatt

SEQ ID NO: 166274 - DNA, 20 bp, Artificial Sequence
  Description of Artificial Sequence: Synthetic oligonucleotide
  Target: LAMA2; (+) strand; PAM type: NRG; PAM sequence: AAG
ttatttcattgagaatttag

SEQ ID NO: 166275 - DNA, 20 bp, Artificial Sequence
  Description of Artificial Sequence: Synthetic oligonucleotide
  Target: LAMA2; (+) strand; PAM type: NRG; PAM sequence: CAG
attgagaatttagaagctgt

SEQ ID NO: 166276 - DNA, 20 bp, Artificial Sequence
  Description of Artificial Sequence: Synthetic oligonucleotide
  Target: LAMA2; (+) strand; PAM type: NRG; PAM sequence: AAG
gagaatttagaagctgtcag

SEQ ID NO: 166277 - DNA, 20 bp, Artificial Sequence
  Description of Artificial Sequence: Synthetic oligonucleotide
  Target: LAMA2; (+) strand; PAM type: NRG; PAM sequence: GAG
gaatttagaagctgtcagaa

SEQ ID NO: 166278 - DNA, 20 bp, Artificial Sequence
  Description of Artificial Sequence: Synthetic oligonucleotide
  Target: LAMA2; (+) strand; PAM type: NRG; PAM sequence: GAG
atttagaagctgtcagaaga

SEQ ID NO: 166279 - DNA, 20 bp, Artificial Sequence
  Description of Artificial Sequence: Synthetic oligonucleotide
  Target: LAMA2; (+) strand; PAM type: NRG; PAM sequence: AGG
tttagaagctgtcagaagag

SEQ ID NO: 166280 - DNA, 20 bp, Artificial Sequence
  Description of Artificial Sequence: Synthetic oligonucleotide
  Target: LAMA2; (+) strand; PAM type: NRG; PAM sequence: AAG
gctgtcagaagagaggtaac

SEQ ID NO: 166281 - DNA, 20 bp, Artificial Sequence
  Description of Artificial Sequence: Synthetic oligonucleotide
  Target: LAMA2; (+) strand; PAM type: NRG; PAM sequence: TGG
atgactcttttctattactt

SEQ ID NO: 166282 - DNA, 20 bp, Artificial Sequence
  Description of Artificial Sequence: Synthetic oligonucleotide
  Target: LAMA2; (+) strand; PAM type: NRG; PAM sequence: CAG
ggatgaattattcttgtttc

SEQ ID NO: 166283 - DNA, 20 bp, Artificial Sequence
  Description of Artificial Sequence: Synthetic oligonucleotide
  Target: LAMA2; (+) strand; PAM type: NRG; PAM sequence: AAG
aattattcttgtttccagaa

SEQ ID NO: 166284 - DNA, 20 bp, Artificial Sequence
  Description of Artificial Sequence: Synthetic oligonucleotide
  Target: LAMA2; (+) strand; PAM type: NRG; PAM sequence: TGG
cccgcttgatgacatcactc

SEQ ID NO: 166285 - DNA, 20 bp, Artificial Sequence
  Description of Artificial Sequence: Synthetic oligonucleotide
  Target: LAMA2; (+) strand; PAM type: NRG; PAM sequence: AAG
actttttttttccatcttaa

SEQ ID NO: 166286 - DNA, 20 bp, Artificial Sequence
  Description of Artificial Sequence: Synthetic oligonucleotide
  Target: LAMA2; (+) strand; PAM type: NRG; PAM sequence: AAG
tcctgactcatttcctttct

SEQ ID NO: 166287 - DNA, 20 bp, Artificial Sequence
  Description of Artificial Sequence: Synthetic oligonucleotide
  Target: LAMA2; (+) strand; PAM type: NRG; PAM sequence: TGG
attcttctccttccatacaa

SEQ ID NO: 166288 - DNA, 20 bp, Artificial Sequence
  Description of Artificial Sequence: Synthetic oligonucleotide
  Target: LAMA2; (+) strand; PAM type: NRG; PAM sequence: GAG
tcttctccttccatacaatg

SEQ ID NO: 166289 - DNA, 20 bp, Artificial Sequence
  Description of Artificial Sequence: Synthetic oligonucleotide
  Target: LAMA2; (+) strand; PAM type: NRG; PAM sequence: GAG
ttctccttccatacaatgga

SEQ ID NO: 166290 - DNA, 20 bp, Artificial Sequence
  Description of Artificial Sequence: Synthetic oligonucleotide
  Target: LAMA2; (+) strand; PAM type: NRG; PAM sequence: CAG
ctcctttgaattactaaaaa

SEQ ID NO: 166291 - DNA, 20 bp, Artificial Sequence
  Description of Artificial Sequence: Synthetic oligonucleotide
  Target: LAMA2; (+) strand; PAM type: NRG; PAM sequence: AGG
tcctttgaattactaaaaac

SEQ ID NO: 166292 - DNA, 20 bp, Artificial Sequence
  Description of Artificial Sequence: Synthetic oligonucleotide
  Target: LAMA2; (+) strand; PAM type: NRG; PAM sequence: TGG
tatcacctcctcttctatac

SEQ ID NO: 166293 - DNA, 20 bp, Artificial Sequence
  Description of Artificial Sequence: Synthetic oligonucleotide
  Target: LAMA2; (+) strand; PAM type: NRG; PAM sequence: TGG
ctcttctatactggattcaa

SEQ ID NO: 166294 - DNA, 20 bp, Artificial Sequence
  Description of Artificial Sequence: Synthetic oligonucleotide
  Target: LAMA2; (+) strand; PAM type: NRG; PAM sequence: CAG
tggattcaatggctaatcta

SEQ ID NO: 166295 - DNA, 20 bp, Artificial Sequence
  Description of Artificial Sequence: Synthetic oligonucleotide
  Target: LAMA2; (+) strand; PAM type: NRG; PAM sequence: CAG
aatggctaatctacagccac

SEQ ID NO: 166296 - DNA, 20 bp, Artificial Sequence
  Description of Artificial Sequence: Synthetic oligonucleotide
  Target: LAMA2; (+) strand; PAM type: NRG; PAM sequence: CAG
gttcaccttactatatctaa

SEQ ID NO: 166297 - DNA, 20 bp, Artificial Sequence
  Description of Artificial Sequence: Synthetic oligonucleotide
  Target: LAMA2; (+) strand; PAM type: NRG; PAM sequence: CAG
cctttgctcaatttgctttc

SEQ ID NO: 166298 - DNA, 20 bp, Artificial Sequence
  Description of Artificial Sequence: Synthetic oligonucleotide
  Target: LAMA2; (+) strand; PAM type: NRG; PAM sequence: TGG
tcaatttgctttccagccca

SEQ ID NO: 166299 - DNA, 20 bp, Artificial Sequence
  Description of Artificial Sequence: Synthetic oligonucleotide
  Target: LAMA2; (+) strand; PAM type: NRG; PAM sequence: TGG
ctttccagcccatggcattc

SEQ ID NO: 166300 - DNA, 20 bp, Artificial Sequence
  Description of Artificial Sequence: Synthetic oligonucleotide
  Target: LAMA2; (+) strand; PAM type: NRG; PAM sequence: GAG
ttccagcccatggcattctg

SEQ ID NO: 166301 - DNA, 20 bp, Artificial Sequence
  Description of Artificial Sequence: Synthetic oligonucleotide
  Target: LAMA2; (+) strand; PAM type: NRG; PAM sequence: TAG
ctggagatgttcaaattcca

SEQ ID NO: 166302 - DNA, 20 bp, Artificial Sequence
  Description of Artificial Sequence: Synthetic oligonucleotide
  Target: LAMA2; (+) strand; PAM type: NRG; PAM sequence: TGG
gagatgttcaaattccatag

SEQ ID NO: 166303 - DNA, 20 bp, Artificial Sequence
  Description of Artificial Sequence: Synthetic oligonucleotide
  Target: LAMA2; (+) strand; PAM type: NRG; PAM sequence: CAG
attccatagtggctccttct

SEQ ID NO: 166304 - DNA, 20 bp, Artificial Sequence
  Description of Artificial Sequence: Synthetic oligonucleotide
  Target: LAMA2; (+) strand; PAM type: NRG; PAM sequence: TAG
tcattactctgaaatctaca

SEQ ID NO: 166305 - DNA, 20 bp, Artificial Sequence
  Description of Artificial Sequence: Synthetic oligonucleotide
  Target: LAMA2; (+) strand; PAM type: NRG; PAM sequence: TGG
ttactctgaaatctacatag

SEQ ID NO: 166306 - DNA, 20 bp, Artificial Sequence
  Description of Artificial Sequence: Synthetic oligonucleotide
  Target: LAMA2; (+) strand; PAM type: NRG; PAM sequence: TGG
aatctacatagtggtattcc

SEQ ID NO: 166307 - DNA, 20 bp, Artificial Sequence
  Description of Artificial Sequence: Synthetic oligonucleotide
  Target: LAMA2; (+) strand; PAM type: NRG; PAM sequence: GGG
atctacatagtggtattcct

SEQ ID NO: 166308 - DNA, 20 bp, Artificial Sequence
  Description of Artificial Sequence: Synthetic oligonucleotide
  Target: LAMA2; (+) strand; PAM type: NRG; PAM sequence: TGG
tattcctgggactcaatcct

SEQ ID NO: 166309 - DNA, 20 bp, Artificial Sequence
  Description of Artificial Sequence: Synthetic oligonucleotide
  Target: LAMA2; (+) strand; PAM type: NRG; PAM sequence: GAG
ttcctgggactcaatccttg

SEQ ID NO: 166310 - DNA, 20 bp, Artificial Sequence
  Description of Artificial Sequence: Synthetic oligonucleotide
  Target: LAMA2; (+) strand; PAM type: NRG; PAM sequence: CAG
tttctctaactacattcatt

SEQ ID NO: 166311 - DNA, 20 bp, Artificial Sequence
  Description of Artificial Sequence: Synthetic oligonucleotide
  Target: LAMA2; (+) strand; PAM type: NRG; PAM sequence: TGG
tctaactacattcattcaga

SEQ ID NO: 166312 - DNA, 20 bp, Artificial Sequence
  Description of Artificial Sequence: Synthetic oligonucleotide
  Target: LAMA2; (+) strand; PAM type: NRG; PAM sequence: CAG
attcagatggtgatcttacc

SEQ ID NO: 166313 - DNA, 20 bp, Artificial Sequence
  Description of Artificial Sequence: Synthetic oligonucleotide
  Target: LAMA2; (+) strand; PAM type: NRG; PAM sequence: AGG
ttcagatggtgatcttaccc

SEQ ID NO: 166314 - DNA, 20 bp, Artificial Sequence
  Description of Artificial Sequence: Synthetic oligonucleotide
  Target: LAMA2; (+) strand; PAM type: NRG; PAM sequence: TGG
ggtgatcttacccaggcatg

SEQ ID NO: 166315 - DNA, 20 bp, Artificial Sequence
  Description of Artificial Sequence: Synthetic oligonucleotide
  Target: LAMA2; (+) strand; PAM type: NRG; PAM sequence: GAG
ggcatgtggctttctgtact

SEQ ID NO: 166316 - DNA, 20 bp, Artificial Sequence
  Description of Artificial Sequence: Synthetic oligonucleotide
  Target: LAMA2; (+) strand; PAM type: NRG; PAM sequence: CAG
attttgatattgacatccca

SEQ ID NO: 166317 - DNA, 20 bp, Artificial Sequence
  Description of Artificial Sequence: Synthetic oligonucleotide
  Target: LAMA2; (+) strand; PAM type: NRG; PAM sequence: AAG
atcccacagtatttactatt

SEQ ID NO: 166318 - DNA, 20 bp, Artificial Sequence
  Description of Artificial Sequence: Synthetic oligonucleotide
  Target: LAMA2; (+) strand; PAM type: NRG; PAM sequence: TGG
tttatatccactcattacta

SEQ ID NO: 166319 - DNA, 20 bp, Artificial Sequence
  Description of Artificial Sequence: Synthetic oligonucleotide
  Target: LAMA2; (+) strand; PAM type: NRG; PAM sequence: TGG
atccactcattactatggtg

SEQ ID NO: 166320 - DNA, 20 bp, Artificial Sequence
  Description of Artificial Sequence: Synthetic oligonucleotide
  Target: LAMA2; (+) strand; PAM type: NRG; PAM sequence: GGG
tccactcattactatggtgt

SEQ ID NO: 166321 - DNA, 20 bp, Artificial Sequence
  Description of Artificial Sequence: Synthetic oligonucleotide
  Target: LAMA2; (+) strand; PAM type: NRG; PAM sequence: GGG
ccactcattactatggtgtg

SEQ ID NO: 166322 - DNA, 20 bp, Artificial Sequence
  Description of Artificial Sequence: Synthetic oligonucleotide
  Target: LAMA2; (+) strand; PAM type: NRG; PAM sequence: GAG
actcattactatggtgtggg

SEQ ID NO: 166323 - DNA, 20 bp, Artificial Sequence
  Description of Artificial Sequence: Synthetic oligonucleotide
  Target: LAMA2; (+) strand; PAM type: NRG; PAM sequence: AGG
ctcattactatggtgtgggg

SEQ ID NO: 166324 - DNA, 20 bp, Artificial Sequence
  Description of Artificial Sequence: Synthetic oligonucleotide
  Target: LAMA2; (+) strand; PAM type: NRG; PAM sequence: CAG
gtggggaggtaatttttctg

SEQ ID NO: 166325 - DNA, 20 bp, Artificial Sequence
  Description of Artificial Sequence: Synthetic oligonucleotide
  Target: LAMA2; (+) strand; PAM type: NRG; PAM sequence: AAG
agatatgtattaccactgta

SEQ ID NO: 166326 - DNA, 20 bp, Artificial Sequence
  Description of Artificial Sequence: Synthetic oligonucleotide
  Target: LAMA2; (+) strand; PAM type: NRG; PAM sequence: AAG
aaatttatttcatccatatt

SEQ ID NO: 166327 - DNA, 20 bp, Artificial Sequence
  Description of Artificial Sequence: Synthetic oligonucleotide
  Target: LAMA2; (+) strand; PAM type: NRG; PAM sequence: CAG
atccatattaagatatgttt

SEQ ID NO: 166328 - DNA, 20 bp, Artificial Sequence
  Description of Artificial Sequence: Synthetic oligonucleotide
  Target: LAMA2; (+) strand; PAM type: NRG; PAM sequence: TAG
attttgttttacttaccttt

SEQ ID NO: 166329 - DNA, 20 bp, Artificial Sequence
  Description of Artificial Sequence: Synthetic oligonucleotide
  Target: LAMA2; (+) strand; PAM type: NRG; PAM sequence: AAG
tttatgttaacatatctgta

SEQ ID NO: 166330 - DNA, 20 bp, Artificial Sequence
  Description of Artificial Sequence: Synthetic oligonucleotide
  Target: LAMA2; (+) strand; PAM type: NRG; PAM sequence: AAG
tgttaacatatctgtaaagc

SEQ ID NO: 166331 - DNA, 20 bp, Artificial Sequence
  Description of Artificial Sequence: Synthetic oligonucleotide
  Target: LAMA2; (+) strand; PAM type: NRG; PAM sequence: AGG
gttaacatatctgtaaagca

SEQ ID NO: 166332 - DNA, 20 bp, Artificial Sequence
  Description of Artificial Sequence: Synthetic oligonucleotide
  Target: LAMA2; (+) strand; PAM type: NRG; PAM sequence: TAG
tctcttctcttctaattaac

SEQ ID NO: 166333 - DNA, 20 bp, Artificial Sequence
  Description of Artificial Sequence: Synthetic oligonucleotide
  Target: LAMA2; (+) strand; PAM type: NRG; PAM sequence: CAG
gatgctcttacatattcttc

SEQ ID NO: 166334 - DNA, 20 bp, Artificial Sequence
  Description of Artificial Sequence: Synthetic oligonucleotide
  Target: LAMA2; (+) strand; PAM type: NRG; PAM sequence: TGG
ttaattacaatcaaaattac

SEQ ID NO: 166335 - DNA, 20 bp, Artificial Sequence
  Description of Artificial Sequence: Synthetic oligonucleotide
  Target: LAMA2; (+) strand; PAM type: NRG; PAM sequence: TAG
aattttgattgtaattaaat

SEQ ID NO: 166336 - DNA, 20 bp, Artificial Sequence
  Description of Artificial Sequence: Synthetic oligonucleotide
  Target: LAMA2; (+) strand; PAM type: NRG; PAM sequence: AAG
attaaattagcctatttgta

SEQ ID NO: 166337 - DNA, 20 bp, Artificial Sequence
  Description of Artificial Sequence: Synthetic oligonucleotide
  Target: LAMA2; (+) strand; PAM type: NRG; PAM sequence: TAG
aagaattgctatatttacac

SEQ ID NO: 166338 - DNA, 20 bp, Artificial Sequence
  Description of Artificial Sequence: Synthetic oligonucleotide
  Target: LAMA2; (+) strand; PAM type: NRG; PAM sequence: CAG
actagtcactcttctctctt

SEQ ID NO: 166339 - DNA, 20 bp, Artificial Sequence
  Description of Artificial Sequence: Synthetic oligonucleotide
  Target: LAMA2; (+) strand; PAM type: NRG; PAM sequence: CAG
ttcagatattttatgtctta

SEQ ID NO: 166340 - DNA, 20 bp, Artificial Sequence
  Description of Artificial Sequence: Synthetic oligonucleotide
  Target: LAMA2; (+) strand; PAM type: NRG; PAM sequence: AAG
gtcttacagtaaactgtttt

SEQ ID NO: 166341 - DNA, 20 bp, Artificial Sequence
  Description of Artificial Sequence: Synthetic oligonucleotide
  Target: LAMA2; (+) strand; PAM type: NRG; PAM sequence: AGG
tcttacagtaaactgtttta

SEQ ID NO: 166342 - DNA, 20 bp, Artificial Sequence
  Description of Artificial Sequence: Synthetic oligonucleotide
  Target: LAMA2; (+) strand; PAM type: NRG; PAM sequence: AAG
gttttaaggttgtctatatc

SEQ ID NO: 166343 - DNA, 20 bp, Artificial Sequence
  Description of Artificial Sequence: Synthetic oligonucleotide
  Target: LAMA2; (+) strand; PAM type: NRG; PAM sequence: TGG
atcttacattttcattttaa

SEQ ID NO: 166344 - DNA, 20 bp, Artificial Sequence
  Description of Artificial Sequence: Synthetic oligonucleotide
  Target: LAMA2; (+) strand; PAM type: NRG; PAM sequence: TAG
ttacattttcattttaatgg

SEQ ID NO: 166345 - DNA, 20 bp, Artificial Sequence
  Description of Artificial Sequence: Synthetic oligonucleotide
  Target: LAMA2; (+) strand; PAM type: NRG; PAM sequence: TAG
ttacctgttttgtttcaaca

SEQ ID NO: 166346 - DNA, 20 bp, Artificial Sequence
  Description of Artificial Sequence: Synthetic oligonucleotide
  Target: LAMA2; (+) strand; PAM type: NRG; PAM sequence: TGG
aacatagtaaatgtactaac

SEQ ID NO: 166347 - DNA, 20 bp, Artificial Sequence
  Description of Artificial Sequence: Synthetic oligonucleotide
  Target: LAMA2; (+) strand; PAM type: NRG; PAM sequence: TGG
atgtactaactggtcattat

SEQ ID NO: 166348 - DNA, 20 bp, Artificial Sequence
  Description of Artificial Sequence: Synthetic oligonucleotide
  Target: LAMA2; (+) strand; PAM type: NRG; PAM sequence: TAG
tattggtaaaccttaactat

SEQ ID NO: 166349 - DNA, 20 bp, Artificial Sequence
  Description of Artificial Sequence: Synthetic oligonucleotide
  Target: LAMA2; (+) strand; PAM type: NRG; PAM sequence: TAG
gtaaaccttaactattagaa

SEQ ID NO: 166350 - DNA, 20 bp, Artificial Sequence
  Description of Artificial Sequence: Synthetic oligonucleotide
  Target: LAMA2; (+) strand; PAM type: NRG; PAM sequence: AGG
taaaccttaactattagaat

SEQ ID NO: 166351 - DNA, 20 bp, Artificial Sequence
  Description of Artificial Sequence: Synthetic oligonucleotide
  Target: LAMA2; (+) strand; PAM type: NRG; PAM sequence: TAG
atatccaataacttttattt

SEQ ID NO: 166352 - DNA, 20 bp, Artificial Sequence
  Description of Artificial Sequence: Synthetic oligonucleotide
  Target: LAMA2; (+) strand; PAM type: NRG; PAM sequence: TAG
aataacttttattttagttc

SEQ ID NO: 166353 - DNA, 20 bp, Artificial Sequence
  Description of Artificial Sequence: Synthetic oligonucleotide
  Target: LAMA2; (+) strand; PAM type: NRG; PAM sequence: AAG
aacttttattttagttctag

SEQ ID NO: 166354 - DNA, 20 bp, Artificial Sequence
  Description of Artificial Sequence: Synthetic oligonucleotide
  Target: LAMA2; (+) strand; PAM type: NRG; PAM sequence: CAG
ttttagttctagaagtttat

SEQ ID NO: 166355 - DNA, 20 bp, Artificial Sequence
  Description of Artificial Sequence: Synthetic oligonucleotide
  Target: LAMA2; (+) strand; PAM type: NRG; PAM sequence: CAG
tagaagtttatcagttgatt

SEQ ID NO: 166356 - DNA, 20 bp, Artificial Sequence
  Description of Artificial Sequence: Synthetic oligonucleotide
  Target: LAMA2; (+) strand; PAM type: NRG; PAM sequence: AAG
cagttgattcagttattgtt

SEQ ID NO: 166357 - DNA, 20 bp, Artificial Sequence
  Description of Artificial Sequence: Synthetic oligonucleotide
  Target: LAMA2; (+) strand; PAM type: NRG; PAM sequence: GAG
tttttttttttttttttttt

SEQ ID NO: 166358 - DNA, 20 bp, Artificial Sequence
  Description of Artificial Sequence: Synthetic oligonucleotide
  Target: LAMA2; (+) strand; PAM type: NRG; PAM sequence: GAG
ttttttttttttttttttga

SEQ ID NO: 166359 - DNA, 20 bp, Artificial Sequence
  Description of Artificial Sequence: Synthetic oligonucleotide
  Target: LAMA2; (+) strand; PAM type: NRG; PAM sequence: AGG
tttttttttttttttttgag

SEQ ID NO: 166360 - DNA, 20 bp, Artificial Sequence
  Description of Artificial Sequence: Synthetic oligonucleotide
  Target: LAMA2; (+) strand; PAM type: NRG; PAM sequence: GGG
ttttttttttttttttgaga

SEQ ID NO: 166361 - DNA, 20 bp, Artificial Sequence
  Description of Artificial Sequence: Synthetic oligonucleotide
  Target: LAMA2; (+) strand; PAM type: NRG; PAM sequence: GAG
ttttttttttttttgagagg

SEQ ID NO: 166362 - DNA, 20 bp, Artificial Sequence
  Description of Artificial Sequence: Synthetic oligonucleotide
  Target: LAMA2; (+) strand; PAM type: NRG; PAM sequence: CAG
gggagtcttgctctgtcacc

SEQ ID NO: 166363 - DNA, 20 bp, Artificial Sequence
  Description of Artificial Sequence: Synthetic oligonucleotide
  Target: LAMA2; (+) strand; PAM type: NRG; PAM sequence: AGG
ggagtcttgctctgtcaccc

SEQ ID NO: 166364 - DNA, 20 bp, Artificial Sequence
  Description of Artificial Sequence: Synthetic oligonucleotide
  Target: LAMA2; (+) strand; PAM type: NRG; PAM sequence: TAG
tcttgctctgtcacccaggc

SEQ ID NO: 166365 - DNA, 20 bp, Artificial Sequence
  Description of Artificial Sequence: Synthetic oligonucleotide
  Target: LAMA2; (+) strand; PAM type: NRG; PAM sequence: GAG
ttgctctgtcacccaggcta

SEQ ID NO: 166366 - DNA, 20 bp, Artificial Sequence
  Description of Artificial Sequence: Synthetic oligonucleotide
  Target: LAMA2; (+) strand; PAM type: NRG; PAM sequence: AGG
tgctctgtcacccaggctag

SEQ ID NO: 166367 - DNA, 20 bp, Artificial Sequence
  Description of Artificial Sequence: Synthetic oligonucleotide
  Target: LAMA2; (+) strand; PAM type: NRG; PAM sequence: GGG
gctctgtcacccaggctaga

SEQ ID NO: 166368 - DNA, 20 bp, Artificial Sequence
  Description of Artificial Sequence: Synthetic oligonucleotide
  Target: LAMA2; (+) strand; PAM type: NRG; PAM sequence: CAG
ctgtcacccaggctagaggg

SEQ ID NO: 166369 - DNA, 20 bp, Artificial Sequence
  Description of Artificial Sequence: Synthetic oligonucleotide
  Target: LAMA2; (+) strand; PAM type: NRG; PAM sequence: TGG
tcacccaggctagagggcag

SEQ ID NO: 166370 - DNA, 20 bp, Artificial Sequence
  Description of Artificial Sequence: Synthetic oligonucleotide
  Target: LAMA2; (+) strand; PAM type: NRG; PAM sequence: TGG
agagggcagtggtgctatca

SEQ ID NO: 166371 - DNA, 20 bp, Artificial Sequence
  Description of Artificial Sequence: Synthetic oligonucleotide
  Target: LAMA2; (+) strand; PAM type: NRG; PAM sequence: CAG
tcactgcaacctccacctcc

SEQ ID NO: 166372 - DNA, 20 bp, Artificial Sequence
  Description of Artificial Sequence: Synthetic oligonucleotide
  Target: LAMA2; (+) strand; PAM type: NRG; PAM sequence: AGG
cactgcaacctccacctccc

SEQ ID NO: 166373 - DNA, 20 bp, Artificial Sequence
  Description of Artificial Sequence: Synthetic oligonucleotide
  Target: LAMA2; (+) strand; PAM type: NRG; PAM sequence: AAG
aacctccacctcccaggttc

SEQ ID NO: 166374 - DNA, 20 bp, Artificial Sequence
  Description of Artificial Sequence: Synthetic oligonucleotide
  Target: LAMA2; (+) strand; PAM type: NRG; PAM sequence: CAG
ttcaagcgattttcctgcct

SEQ ID NO: 166375 - DNA, 20 bp, Artificial Sequence
  Description of Artificial Sequence: Synthetic oligonucleotide
  Target: LAMA2; (+) strand; PAM type: NRG; PAM sequence: GAG
ttttcctgcctcagcctcct

SEQ ID NO: 166376 - DNA, 20 bp, Artificial Sequence
  Description of Artificial Sequence: Synthetic oligonucleotide
  Target: LAMA2; (+) strand; PAM type: NRG; PAM sequence: TAG
tcctgcctcagcctcctgag

SEQ ID NO: 166377 - DNA, 20 bp, Artificial Sequence
  Description of Artificial Sequence: Synthetic oligonucleotide
  Target: LAMA2; (+) strand; PAM type: NRG; PAM sequence: TGG
gcctcagcctcctgagtagc

SEQ ID NO: 166378 - DNA, 20 bp, Artificial Sequence
  Description of Artificial Sequence: Synthetic oligonucleotide
  Target: LAMA2; (+) strand; PAM type: NRG; PAM sequence: GGG
cctcagcctcctgagtagct

SEQ ID NO: 166379 - DNA, 20 bp, Artificial Sequence
  Description of Artificial Sequence: Synthetic oligonucleotide
  Target: LAMA2; (+) strand; PAM type: NRG; PAM sequence: CAG
ctcctgagtagctgggatta

SEQ ID NO: 166380 - DNA, 20 bp, Artificial Sequence
  Description of Artificial Sequence: Synthetic oligonucleotide
  Target: LAMA2; (+) strand; PAM type: NRG; PAM sequence: AGG
tcctgagtagctgggattac

SEQ ID NO: 166381 - DNA, 20 bp, Artificial Sequence
  Description of Artificial Sequence: Synthetic oligonucleotide
  Target: LAMA2; (+) strand; PAM type: NRG; PAM sequence: TGG
caggcacctgccaccataac

SEQ ID NO: 166382 - DNA, 20 bp, Artificial Sequence
  Description of Artificial Sequence: Synthetic oligonucleotide
  Target: LAMA2; (+) strand; PAM type: NRG; PAM sequence: TAG
actggctaatttttgcattt

SEQ ID NO: 166383 - DNA, 20 bp, Artificial Sequence
  Description of Artificial Sequence: Synthetic oligonucleotide
  Target: LAMA2; (+) strand; PAM type: NRG; PAM sequence: TAG
ggctaatttttgcattttag

SEQ ID NO: 166384 - DNA, 20 bp, Artificial Sequence
  Description of Artificial Sequence: Synthetic oligonucleotide
  Target: LAMA2; (+) strand; PAM type: NRG; PAM sequence: GAG
ctaatttttgcattttagta

SEQ ID NO: 166385 - DNA, 20 bp, Artificial Sequence
  Description of Artificial Sequence: Synthetic oligonucleotide
  Target: LAMA2; (+) strand; PAM type: NRG; PAM sequence: TGG
tttttgcattttagtagaga

SEQ ID NO: 166386 - DNA, 20 bp, Artificial Sequence
  Description of Artificial Sequence: Synthetic oligonucleotide
  Target: LAMA2; (+) strand; PAM type: NRG; PAM sequence: GGG
ttttgcattttagtagagat

SEQ ID NO: 166387 - DNA, 20 bp, Artificial Sequence
  Description of Artificial Sequence: Synthetic oligonucleotide
  Target: LAMA2; (+) strand; PAM type: NRG; PAM sequence: GGG
tttgcattttagtagagatg

SEQ ID NO: 166388 - DNA, 20 bp, Artificial Sequence
  Description of Artificial Sequence: Synthetic oligonucleotide
  Target: LAMA2; (+) strand; PAM type: NRG; PAM sequence: TAG
gagatggggtttcaccattt

SEQ ID NO: 166389 - DNA, 20 bp, Artificial Sequence
  Description of Artificial Sequence: Synthetic oligonucleotide
  Target: LAMA2; (+) strand; PAM type: NRG; PAM sequence: CAG
tggggtttcaccattttagc

SEQ ID NO: 166390 - DNA, 20 bp, Artificial Sequence
  Description of Artificial Sequence: Synthetic oligonucleotide
  Target: LAMA2; (+) strand; PAM type: NRG; PAM sequence: AGG
ggggtttcaccattttagcc

SEQ ID NO: 166391 - DNA, 20 bp, Artificial Sequence
  Description of Artificial Sequence: Synthetic oligonucleotide
  Target: LAMA2; (+) strand; PAM type: NRG; PAM sequence: AAG
gatttcaaactcctgacctc

SEQ ID NO: 166392 - DNA, 20 bp, Artificial Sequence
  Description of Artificial Sequence: Synthetic oligonucleotide
  Target: LAMA2; (+) strand; PAM type: NRG; PAM sequence: CGG
ctcaagtgatctgcctgcct

SEQ ID NO: 166393 - DNA, 20 bp, Artificial Sequence
  Description of Artificial Sequence: Synthetic oligonucleotide
  Target: LAMA2; (+) strand; PAM type: NRG; PAM sequence: AAG
ctgcctgcctcggcctccca

SEQ ID NO: 166394 - DNA, 20 bp, Artificial Sequence
  Description of Artificial Sequence: Synthetic oligonucleotide
  Target: LAMA2; (+) strand; PAM type: NRG; PAM sequence: CAG
tgcctcggcctcccaaagtt

SEQ ID NO: 166395 - DNA, 20 bp, Artificial Sequence
  Description of Artificial Sequence: Synthetic oligonucleotide
  Target: LAMA2; (+) strand; PAM type: NRG; PAM sequence: AGG
gcctcggcctcccaaagttc

SEQ ID NO: 166396 - DNA, 20 bp, Artificial Sequence
  Description of Artificial Sequence: Synthetic oligonucleotide
  Target: LAMA2; (+) strand; PAM type: NRG; PAM sequence: GGG
cctcggcctcccaaagttca

SEQ ID NO: 166397 - DNA, 20 bp, Artificial Sequence
  Description of Artificial Sequence: Synthetic oligonucleotide
  Target: LAMA2; (+) strand; PAM type: NRG; PAM sequence: CAG
ctcccaaagttcagggatta

SEQ ID NO: 166398 - DNA, 20 bp, Artificial Sequence
  Description of Artificial Sequence: Synthetic oligonucleotide
  Target: LAMA2; (+) strand; PAM type: NRG; PAM sequence: AGG
tcccaaagttcagggattac

SEQ ID NO: 166399 - DNA, 20 bp, Artificial Sequence
  Description of Artificial Sequence: Synthetic oligonucleotide
  Target: LAMA2; (+) strand; PAM type: NRG; PAM sequence: TGG
caggcatgaaccaccaaacc

SEQ ID NO: 166400 - DNA, 20 bp, Artificial Sequence
  Description of Artificial Sequence: Synthetic oligonucleotide
  Target: LAMA2; (+) strand; PAM type: NRG; PAM sequence: AAG
attgtgctttcacttgtcaa

SEQ ID NO: 166401 - DNA, 20 bp, Artificial Sequence
  Description of Artificial Sequence: Synthetic oligonucleotide
  Target: LAMA2; (+) strand; PAM type: NRG; PAM sequence: AAG
aaattgtctcccaaaataat

SEQ ID NO: 166402 - DNA, 20 bp, Artificial Sequence
  Description of Artificial Sequence: Synthetic oligonucleotide
  Target: LAMA2; (+) strand; PAM type: NRG; PAM sequence: AAG
gattttaatatgattgcctt

SEQ ID NO: 166403 - DNA, 20 bp, Artificial Sequence
  Description of Artificial Sequence: Synthetic oligonucleotide
  Target: LAMA2; (+) strand; PAM type: NRG; PAM sequence: AAG
gccttaagtctttcaccatt

SEQ ID NO: 166404 - DNA, 20 bp, Artificial Sequence
  Description of Artificial Sequence: Synthetic oligonucleotide
  Target: LAMA2; (+) strand; PAM type: NRG; PAM sequence: TGG
accattaagtatgatgctga

SEQ ID NO: 166405 - DNA, 20 bp, Artificial Sequence
  Description of Artificial Sequence: Synthetic oligonucleotide
  Target: LAMA2; (+) strand; PAM type: NRG; PAM sequence: TAG
ttaagtatgatgctgatggt

SEQ ID NO: 166406 - DNA, 20 bp, Artificial Sequence
  Description of Artificial Sequence: Synthetic oligonucleotide
  Target: LAMA2; (+) strand; PAM type: NRG; PAM sequence: AAG
atgatgctgatggttagtat

SEQ ID NO: 166407 - DNA, 20 bp, Artificial Sequence
  Description of Artificial Sequence: Synthetic oligonucleotide
  Target: LAMA2; (+) strand; PAM type: NRG; PAM sequence: TAG
cgaaaactgctttctattcc

SEQ ID NO: 166408 - DNA, 20 bp, Artificial Sequence
  Description of Artificial Sequence: Synthetic oligonucleotide
  Target: LAMA2; (+) strand; PAM type: NRG; PAM sequence: AAG
tttctattcctagcttctta

SEQ ID NO: 166409 - DNA, 20 bp, Artificial Sequence
  Description of Artificial Sequence: Synthetic oligonucleotide
  Target: LAMA2; (+) strand; PAM type: NRG; PAM sequence: CAG
taaagatatcctctttcaat

SEQ ID NO: 166410 - DNA, 20 bp, Artificial Sequence
  Description of Artificial Sequence: Synthetic oligonucleotide
  Target: LAMA2; (+) strand; PAM type: NRG; PAM sequence: AGG
aaagatatcctctttcaatc

SEQ ID NO: 166411 - DNA, 20 bp, Artificial Sequence
  Description of Artificial Sequence: Synthetic oligonucleotide
  Target: LAMA2; (+) strand; PAM type: NRG; PAM sequence: AAG
tatcctctttcaatcaggat

SEQ ID NO: 166412 - DNA, 20 bp, Artificial Sequence
  Description of Artificial Sequence: Synthetic oligonucleotide
  Target: LAMA2; (+) strand; PAM type: NRG; PAM sequence: TGG
attactcatatgcttaattg

SEQ ID NO: 166413 - DNA, 20 bp, Artificial Sequence
  Description of Artificial Sequence: Synthetic oligonucleotide
  Target: LAMA2; (+) strand; PAM type: NRG; PAM sequence: GAG
tactcatatgcttaattgtg

SEQ ID NO: 166414 - DNA, 20 bp, Artificial Sequence
  Description of Artificial Sequence: Synthetic oligonucleotide
  Target: LAMA2; (+) strand; PAM type: NRG; PAM sequence: GAG
ctcatatgcttaattgtgga

SEQ ID NO: 166415 - DNA, 20 bp, Artificial Sequence
  Description of Artificial Sequence: Synthetic oligonucleotide
  Target: LAMA2; (+) strand; PAM type: NRG; PAM sequence: TGG
atatgcttaattgtggagag

SEQ ID NO: 166416 - DNA, 20 bp, Artificial Sequence
  Description of Artificial Sequence: Synthetic oligonucleotide
  Target: LAMA2; (+) strand; PAM type: NRG; PAM sequence: GAG
atgcttaattgtggagagtg

SEQ ID NO: 166417 - DNA, 20 bp, Artificial Sequence
  Description of Artificial Sequence: Synthetic oligonucleotide
  Target: LAMA2; (+) strand; PAM type: NRG; PAM sequence: TGG
cttaattgtggagagtggag

SEQ ID NO: 166418 - DNA, 20 bp, Artificial Sequence
  Description of Artificial Sequence: Synthetic oligonucleotide
  Target: LAMA2; (+) strand; PAM type: NRG; PAM sequence: GGG
ttaattgtggagagtggagt

SEQ ID NO: 166419 - DNA, 20 bp, Artificial Sequence
  Description of Artificial Sequence: Synthetic oligonucleotide
  Target: LAMA2; (+) strand; PAM type: NRG; PAM sequence: TAG
tggagagtggagtgggaatg

SEQ ID NO: 166420 - DNA, 20 bp, Artificial Sequence
  Description of Artificial Sequence: Synthetic oligonucleotide
  Target: LAMA2; (+) strand; PAM type: NRG; PAM sequence: AAG
gtgggaatgtagatgcattt

SEQ ID NO: 166421 - DNA, 20 bp, Artificial Sequence
  Description of Artificial Sequence: Synthetic oligonucleotide
  Target: LAMA2; (+) strand; PAM type: NRG; PAM sequence: GAG
gggaatgtagatgcatttaa

SEQ ID NO: 166422 - DNA, 20 bp, Artificial Sequence
  Description of Artificial Sequence: Synthetic oligonucleotide
  Target: LAMA2; (+) strand; PAM type: NRG; PAM sequence: AGG
ggaatgtagatgcatttaag

SEQ ID NO: 166423 - DNA, 20 bp, Artificial Sequence
  Description of Artificial Sequence: Synthetic oligonucleotide
  Target: LAMA2; (+) strand; PAM type: NRG; PAM sequence: TAG
atttaagaggtgatcatata

SEQ ID NO: 166424 - DNA, 20 bp, Artificial Sequence
  Description of Artificial Sequence: Synthetic oligonucleotide
  Target: LAMA2; (+) strand; PAM type: NRG; PAM sequence: AGG
tttaagaggtgatcatatat

SEQ ID NO: 166425 - DNA, 20 bp, Artificial Sequence
  Description of Artificial Sequence: Synthetic oligonucleotide
  Target: LAMA2; (+) strand; PAM type: NRG; PAM sequence: CAG
tataggtttttcaccttaaa

SEQ ID NO: 166426 - DNA, 20 bp, Artificial Sequence
  Description of Artificial Sequence: Synthetic oligonucleotide
  Target: LAMA2; (+) strand; PAM type: NRG; PAM sequence: TAG
ctaaataaataacttaatat

SEQ ID NO: 166427 - DNA, 20 bp, Artificial Sequence
  Description of Artificial Sequence: Synthetic oligonucleotide
  Target: LAMA2; (+) strand; PAM type: NRG; PAM sequence: CAG
tattagccatccatgaattc

SEQ ID NO: 166428 - DNA, 20 bp, Artificial Sequence
  Description of Artificial Sequence: Synthetic oligonucleotide
  Target: LAMA2; (+) strand; PAM type: NRG; PAM sequence: TAG
aaataattactatcttgctt

SEQ ID NO: 166429 - DNA, 20 bp, Artificial Sequence
  Description of Artificial Sequence: Synthetic oligonucleotide
  Target: LAMA2; (+) strand; PAM type: NRG; PAM sequence: TAG
tgcttgcctgacaaattcaa

SEQ ID NO: 166430 - DNA, 20 bp, Artificial Sequence
  Description of Artificial Sequence: Synthetic oligonucleotide
  Target: LAMA2; (+) strand; PAM type: NRG; PAM sequence: AGG
gcttgcctgacaaattcaat

SEQ ID NO: 166431 - DNA, 20 bp, Artificial Sequence
  Description of Artificial Sequence: Synthetic oligonucleotide
  Target: LAMA2; (+) strand; PAM type: NRG; PAM sequence: GAG
acaaattcaataggcaattt

SEQ ID NO: 166432 - DNA, 20 bp, Artificial Sequence
  Description of Artificial Sequence: Synthetic oligonucleotide
  Target: LAMA2; (+) strand; PAM type: NRG; PAM sequence: GAG
aaattcaataggcaatttga

SEQ ID NO: 166433 - DNA, 20 bp, Artificial Sequence
  Description of Artificial Sequence: Synthetic oligonucleotide
  Target: LAMA2; (+) strand; PAM type: NRG; PAM sequence: AGG
aattcaataggcaatttgag

SEQ ID NO: 166434 - DNA, 20 bp, Artificial Sequence
  Description of Artificial Sequence: Synthetic oligonucleotide
  Target: LAMA2; (+) strand; PAM type: NRG; PAM sequence: AAG
tcaataggcaatttgagagg

SEQ ID NO: 166435 - DNA, 20 bp, Artificial Sequence
  Description of Artificial Sequence: Synthetic oligonucleotide
  Target: LAMA2; (+) strand; PAM type: NRG; PAM sequence: AGG
caataggcaatttgagagga

SEQ ID NO: 166436 - DNA, 20 bp, Artificial Sequence
  Description of Artificial Sequence: Synthetic oligonucleotide
  Target: LAMA2; (+) strand; PAM type: NRG; PAM sequence: GGG
aataggcaatttgagaggaa

SEQ ID NO: 166437 - DNA, 20 bp, Artificial Sequence
  Description of Artificial Sequence: Synthetic oligonucleotide
  Target: LAMA2; (+) strand; PAM type: NRG; PAM sequence: GGG
ataggcaatttgagaggaag

SEQ ID NO: 166438 - DNA, 20 bp, Artificial Sequence
  Description of Artificial Sequence: Synthetic oligonucleotide
  Target: LAMA2; (+) strand; PAM type: NRG; PAM sequence: AAG
gttaatctatacacattctt

SEQ ID NO: 166439 - DNA, 20 bp, Artificial Sequence
  Description of Artificial Sequence: Synthetic oligonucleotide
  Target: LAMA2; (+) strand; PAM type: NRG; PAM sequence: AAG
atctatacacattcttaagc

SEQ ID NO: 166440 - DNA, 20 bp, Artificial Sequence
  Description of Artificial Sequence: Synthetic oligonucleotide
  Target: LAMA2; (+) strand; PAM type: NRG; PAM sequence: TGG
atgtcttatgcaatcttcac

SEQ ID NO: 166441 - DNA, 20 bp, Artificial Sequence
  Description of Artificial Sequence: Synthetic oligonucleotide
  Target: LAMA2; (+) strand; PAM type: NRG; PAM sequence: TAG
gcaatcttcactggcatttt

SEQ ID NO: 166442 - DNA, 20 bp, Artificial Sequence
  Description of Artificial Sequence: Synthetic oligonucleotide
  Target: LAMA2; (+) strand; PAM type: NRG; PAM sequence: CAG
cttcactggcatttttagca

SEQ ID NO: 166443 - DNA, 20 bp, Artificial Sequence
  Description of Artificial Sequence: Synthetic oligonucleotide
  Target: LAMA2; (+) strand; PAM type: NRG; PAM sequence: TAG
tttgctttatatgattaatt

SEQ ID NO: 166444 - DNA, 20 bp, Artificial Sequence
  Description of Artificial Sequence: Synthetic oligonucleotide
  Target: LAMA2; (+) strand; PAM type: NRG; PAM sequence: AAG
gctttatatgattaatttag

SEQ ID NO: 166445 - DNA, 20 bp, Artificial Sequence
  Description of Artificial Sequence: Synthetic oligonucleotide
  Target: LAMA2; (+) strand; PAM type: NRG; PAM sequence: CAG
agaagcatttataaataatg

SEQ ID NO: 166446 - DNA, 20 bp, Artificial Sequence
  Description of Artificial Sequence: Synthetic oligonucleotide
  Target: LAMA2; (+) strand; PAM type: NRG; PAM sequence: TAG
cagtttaatttcaattttgt

SEQ ID NO: 166447 - DNA, 20 bp, Artificial Sequence
  Description of Artificial Sequence: Synthetic oligonucleotide
  Target: LAMA2; (+) strand; PAM type: NRG; PAM sequence: AGG
agtttaatttcaattttgtt

SEQ ID NO: 166448 - DNA, 20 bp, Artificial Sequence
  Description of Artificial Sequence: Synthetic oligonucleotide
  Target: LAMA2; (+) strand; PAM type: NRG; PAM sequence: AAG
tatgactatttttgttctct

SEQ ID NO: 166449 - DNA, 20 bp, Artificial Sequence
  Description of Artificial Sequence: Synthetic oligonucleotide
  Target: LAMA2; (+) strand; PAM type: NRG; PAM sequence: AAG
ttgttctctaagaattctaa

SEQ ID NO: 166450 - DNA, 20 bp, Artificial Sequence
  Description of Artificial Sequence: Synthetic oligonucleotide
  Target: LAMA2; (+) strand; PAM type: NRG; PAM sequence: GAG
taaaagcatgtctattttct

SEQ ID NO: 166451 - DNA, 20 bp, Artificial Sequence
  Description of Artificial Sequence: Synthetic oligonucleotide
  Target: LAMA2; (+) strand; PAM type: NRG; PAM sequence: AGG
aaaagcatgtctattttctg

SEQ ID NO: 166452 - DNA, 20 bp, Artificial Sequence
  Description of Artificial Sequence: Synthetic oligonucleotide
  Target: LAMA2; (+) strand; PAM type: NRG; PAM sequence: TAG
tctattttctgaggaatccc

SEQ ID NO: 166453 - DNA, 20 bp, Artificial Sequence
  Description of Artificial Sequence: Synthetic oligonucleotide
  Target: LAMA2; (+) strand; PAM type: NRG; PAM sequence: AAG
ttctgaggaatccctagatg

SEQ ID NO: 166454 - DNA, 20 bp, Artificial Sequence
  Description of Artificial Sequence: Synthetic oligonucleotide
  Target: LAMA2; (+) strand; PAM type: NRG; PAM sequence: CAG
atacttccattaaacaaaca

SEQ ID NO: 166455 - DNA, 20 bp, Artificial Sequence
  Description of Artificial Sequence: Synthetic oligonucleotide
  Target: LAMA2; (+) strand; PAM type: NRG; PAM sequence: TGG
ttccattaaacaaacacagc

SEQ ID NO: 166456 - DNA, 20 bp, Artificial Sequence
  Description of Artificial Sequence: Synthetic oligonucleotide
  Target: LAMA2; (+) strand; PAM type: NRG; PAM sequence: TGG
aatttttatattttctttca

SEQ ID NO: 166457 - DNA, 20 bp, Artificial Sequence
  Description of Artificial Sequence: Synthetic oligonucleotide
  Target: LAMA2; (+) strand; PAM type: NRG; PAM sequence: TAG
gaactcacaacttttgaatt

SEQ ID NO: 166458 - DNA, 20 bp, Artificial Sequence
  Description of Artificial Sequence: Synthetic oligonucleotide
  Target: LAMA2; (+) strand; PAM type: NRG; PAM sequence: AGG
aactcacaacttttgaattt

SEQ ID NO: 166459 - DNA, 20 bp, Artificial Sequence
  Description of Artificial Sequence: Synthetic oligonucleotide
  Target: LAMA2; (+) strand; PAM type: NRG; PAM sequence: TGG
aactctgttcatctttgaaa

SEQ ID NO: 166460 - DNA, 20 bp, Artificial Sequence
  Description of Artificial Sequence: Synthetic oligonucleotide
  Target: LAMA2; (+) strand; PAM type: NRG; PAM sequence: GAG
catctttgaaatggcctcat

SEQ ID NO: 166461 - DNA, 20 bp, Artificial Sequence
  Description of Artificial Sequence: Synthetic oligonucleotide
  Target: LAMA2; (+) strand; PAM type: NRG; PAM sequence: AGG
atctttgaaatggcctcatg

SEQ ID NO: 166462 - DNA, 20 bp, Artificial Sequence
  Description of Artificial Sequence: Synthetic oligonucleotide
  Target: LAMA2; (+) strand; PAM type: NRG; PAM sequence: AAG
aatggcctcatgaggcaaat

SEQ ID NO: 166463 - DNA, 20 bp, Artificial Sequence
  Description of Artificial Sequence: Synthetic oligonucleotide
  Target: LAMA2; (+) strand; PAM type: NRG; PAM sequence: TAG
ctcatgaggcaaataagaaa

SEQ ID NO: 166464 - DNA, 20 bp, Artificial Sequence
  Description of Artificial Sequence: Synthetic oligonucleotide
  Target: LAMA2; (+) strand; PAM type: NRG; PAM sequence: CAG
tagctgttattactcccaca

SEQ ID NO: 166465 - DNA, 20 bp, Artificial Sequence
  Description of Artificial Sequence: Synthetic oligonucleotide
  Target: LAMA2; (+) strand; PAM type: NRG; PAM sequence: AAG
tgttattactcccacacagt

SEQ ID NO: 166466 - DNA, 20 bp, Artificial Sequence
  Description of Artificial Sequence: Synthetic oligonucleotide
  Target: LAMA2; (+) strand; PAM type: NRG; PAM sequence: GAG
attactcccacacagtaagt

SEQ ID NO: 166467 - DNA, 20 bp, Artificial Sequence
  Description of Artificial Sequence: Synthetic oligonucleotide
  Target: LAMA2; (+) strand; PAM type: NRG; PAM sequence: AGG
ttactcccacacagtaagtg

SEQ ID NO: 166468 - DNA, 20 bp, Artificial Sequence
  Description of Artificial Sequence: Synthetic oligonucleotide
  Target: LAMA2; (+) strand; PAM type: NRG; PAM sequence: AAG
cacagtaagtgaggaaactg

SEQ ID NO: 166469 - DNA, 20 bp, Artificial Sequence
  Description of Artificial Sequence: Synthetic oligonucleotide
  Target: LAMA2; (+) strand; PAM type: NRG; PAM sequence: TGG
tttctcttttatgtgcaata

SEQ ID NO: 166470 - DNA, 20 bp, Artificial Sequence
  Description of Artificial Sequence: Synthetic oligonucleotide
  Target: LAMA2; (+) strand; PAM type: NRG; PAM sequence: CAG
tttatgtgcaatatggctct

SEQ ID NO: 166471 - DNA, 20 bp, Artificial Sequence
  Description of Artificial Sequence: Synthetic oligonucleotide
  Target: LAMA2; (+) strand; PAM type: NRG; PAM sequence: CAG
ttcatatcatatccattata

SEQ ID NO: 166472 - DNA, 20 bp, Artificial Sequence
  Description of Artificial Sequence: Synthetic oligonucleotide
  Target: LAMA2; (+) strand; PAM type: NRG; PAM sequence: TGG
cagtgcaatgccctctacct

SEQ ID NO: 166473 - DNA, 20 bp, Artificial Sequence
  Description of Artificial Sequence: Synthetic oligonucleotide
  Target: LAMA2; (+) strand; PAM type: NRG; PAM sequence: TAG
caatgccctctaccttggta

SEQ ID NO: 166474 - DNA, 20 bp, Artificial Sequence
  Description of Artificial Sequence: Synthetic oligonucleotide
  Target: LAMA2; (+) strand; PAM type: NRG; PAM sequence: TGG
tgccctctaccttggtatag

SEQ ID NO: 166475 - DNA, 20 bp, Artificial Sequence
  Description of Artificial Sequence: Synthetic oligonucleotide
  Target: LAMA2; (+) strand; PAM type: NRG; PAM sequence: AAG
ctctaccttggtatagtggc

SEQ ID NO: 166476 - DNA, 20 bp, Artificial Sequence
  Description of Artificial Sequence: Synthetic oligonucleotide
  Target: LAMA2; (+) strand; PAM type: NRG; PAM sequence: CAG
agtggcaagcatgaactctg

SEQ ID NO: 166477 - DNA, 20 bp, Artificial Sequence
  Description of Artificial Sequence: Synthetic oligonucleotide
  Target: LAMA2; (+) strand; PAM type: NRG; PAM sequence: CAG
gcaagcatgaactctgcagt

SEQ ID NO: 166478 - DNA, 20 bp, Artificial Sequence
  Description of Artificial Sequence: Synthetic oligonucleotide
  Target: LAMA2; (+) strand; PAM type: NRG; PAM sequence: GAG
aagcatgaactctgcagtca

SEQ ID NO: 166479 - DNA, 20 bp, Artificial Sequence
  Description of Artificial Sequence: Synthetic oligonucleotide
  Target: LAMA2; (+) strand; PAM type: NRG; PAM sequence: TGG
gagtgccttgattcaaatcc

SEQ ID NO: 166480 - DNA, 20 bp, Artificial Sequence
  Description of Artificial Sequence: Synthetic oligonucleotide
  Target: LAMA2; (+) strand; PAM type: NRG; PAM sequence: TGG
atcctggcttcaccccttac

SEQ ID NO: 166481 - DNA, 20 bp, Artificial Sequence
  Description of Artificial Sequence: Synthetic oligonucleotide
  Target: LAMA2; (+) strand; PAM type: NRG; PAM sequence: TAG
ctggcttcaccccttactgg

SEQ ID NO: 166482 - DNA, 20 bp, Artificial Sequence
  Description of Artificial Sequence: Synthetic oligonucleotide
  Target: LAMA2; (+) strand; PAM type: NRG; PAM sequence: GAG
tcaccccttactggtagtgt

SEQ ID NO: 166483 - DNA, 20 bp, Artificial Sequence
  Description of Artificial Sequence: Synthetic oligonucleotide
  Target: LAMA2; (+) strand; PAM type: NRG; PAM sequence: GAG
tcaatttatttaacctgaat

SEQ ID NO: 166484 - DNA, 20 bp, Artificial Sequence
  Description of Artificial Sequence: Synthetic oligonucleotide
  Target: LAMA2; (+) strand; PAM type: NRG; PAM sequence: AGG
caatttatttaacctgaatg

SEQ ID NO: 166485 - DNA, 20 bp, Artificial Sequence
  Description of Artificial Sequence: Synthetic oligonucleotide
  Target: LAMA2; (+) strand; PAM type: NRG; PAM sequence: TAG
atttaacctgaatgaggtct

SEQ ID NO: 166486 - DNA, 20 bp, Artificial Sequence
  Description of Artificial Sequence: Synthetic oligonucleotide
  Target: LAMA2; (+) strand; PAM type: NRG; PAM sequence: TAG
ttatataatgaaaacaataa

SEQ ID NO: 166487 - DNA, 20 bp, Artificial Sequence
  Description of Artificial Sequence: Synthetic oligonucleotide
  Target: LAMA2; (+) strand; PAM type: NRG; PAM sequence: TGG
tataatgaaaacaataatag

SEQ ID NO: 166488 - DNA, 20 bp, Artificial Sequence
  Description of Artificial Sequence: Synthetic oligonucleotide
  Target: LAMA2; (+) strand; PAM type: NRG; PAM sequence: CAG
acaataatagtggctactca

SEQ ID NO: 166489 - DNA, 20 bp, Artificial Sequence
  Description of Artificial Sequence: Synthetic oligonucleotide
  Target: LAMA2; (+) strand; PAM type: NRG; PAM sequence: GAG
aataatagtggctactcaca

SEQ ID NO: 166490 - DNA, 20 bp, Artificial Sequence
  Description of Artificial Sequence: Synthetic oligonucleotide
  Target: LAMA2; (+) strand; PAM type: NRG; PAM sequence: AAG
gctactcacagagtttttgt

SEQ ID NO: 166491 - DNA, 20 bp, Artificial Sequence
  Description of Artificial Sequence: Synthetic oligonucleotide
  Target: LAMA2; (+) strand; PAM type: NRG; PAM sequence: AGG
ctactcacagagtttttgta

SEQ ID NO: 166492 - DNA, 20 bp, Artificial Sequence
  Description of Artificial Sequence: Synthetic oligonucleotide
  Target: LAMA2; (+) strand; PAM type: NRG; PAM sequence: AAG
tttgatgaaatactcaataa

SEQ ID NO: 166493 - DNA, 20 bp, Artificial Sequence
  Description of Artificial Sequence: Synthetic oligonucleotide
  Target: LAMA2; (+) strand; PAM type: NRG; PAM sequence: AGG
ttgatgaaatactcaataaa

SEQ ID NO: 166494 - DNA, 20 bp, Artificial Sequence
  Description of Artificial Sequence: Synthetic oligonucleotide
  Target: LAMA2; (+) strand; PAM type: NRG; PAM sequence: TAG
gaaatactcaataaaaggct

SEQ ID NO: 166495 - DNA, 20 bp, Artificial Sequence
  Description of Artificial Sequence: Synthetic oligonucleotide
  Target: LAMA2; (+) strand; PAM type: NRG; PAM sequence: TAG
aaaaggcttagaacattact

SEQ ID NO: 166496 - DNA, 20 bp, Artificial Sequence
  Description of Artificial Sequence: Synthetic oligonucleotide
  Target: LAMA2; (+) strand; PAM type: NRG; PAM sequence: TGG
ttagaacattacttagtgca

SEQ ID NO: 166497 - DNA, 20 bp, Artificial Sequence
  Description of Artificial Sequence: Synthetic oligonucleotide
  Target: LAMA2; (+) strand; PAM type: NRG; PAM sequence: AAG
gtgcatggtacgcttcataa

SEQ ID NO: 166498 - DNA, 20 bp, Artificial Sequence
  Description of Artificial Sequence: Synthetic oligonucleotide
  Target: LAMA2; (+) strand; PAM type: NRG; PAM sequence: AAG
ttatgataatgatgatcata

SEQ ID NO: 166499 - DNA, 20 bp, Artificial Sequence
  Description of Artificial Sequence: Synthetic oligonucleotide
  Target: LAMA2; (+) strand; PAM type: NRG; PAM sequence: TAG
tacacattatctaccattta

SEQ ID NO: 166500 - DNA, 20 bp, Artificial Sequence
  Description of Artificial Sequence: Synthetic oligonucleotide
  Target: LAMA2; (+) strand; PAM type: NRG; PAM sequence: AAG
ttatctaccatttatagtcg

SEQ ID NO: 166501 - DNA, 20 bp, Artificial Sequence
  Description of Artificial Sequence: Synthetic oligonucleotide
  Target: LAMA2; (+) strand; PAM type: NRG; PAM sequence: CAG
tttatagtcgaagaaccaat

SEQ ID NO: 166502 - DNA, 20 bp, Artificial Sequence
  Description of Artificial Sequence: Synthetic oligonucleotide
  Target: LAMA2; (+) strand; PAM type: NRG; PAM sequence: AAG
ttgataattaatcaaaaaat

SEQ ID NO: 166503 - DNA, 20 bp, Artificial Sequence
  Description of Artificial Sequence: Synthetic oligonucleotide
  Target: LAMA2; (+) strand; PAM type: NRG; PAM sequence: TAG
aagtaaaaaaaattcatgtc

SEQ ID NO: 166504 - DNA, 20 bp, Artificial Sequence
  Description of Artificial Sequence: Synthetic oligonucleotide
  Target: LAMA2; (+) strand; PAM type: NRG; PAM sequence: TAG
attcatgtctagcgctatgc

SEQ ID NO: 166505 - DNA, 20 bp, Artificial Sequence
  Description of Artificial Sequence: Synthetic oligonucleotide
  Target: LAMA2; (+) strand; PAM type: NRG; PAM sequence: CAG
gctagattttcttactgtct

SEQ ID NO: 166506 - DNA, 20 bp, Artificial Sequence
  Description of Artificial Sequence: Synthetic oligonucleotide
  Target: LAMA2; (+) strand; PAM type: NRG; PAM sequence: CGG
cttactgtctcagtccattt

SEQ ID NO: 166507 - DNA, 20 bp, Artificial Sequence
  Description of Artificial Sequence: Synthetic oligonucleotide
  Target: LAMA2; (+) strand; PAM type: NRG; PAM sequence: TGG
tgtaacaaaatatcataaac

SEQ ID NO: 166508 - DNA, 20 bp, Artificial Sequence
  Description of Artificial Sequence: Synthetic oligonucleotide
  Target: LAMA2; (+) strand; PAM type: NRG; PAM sequence: GGG
gtaacaaaatatcataaact

SEQ ID NO: 166509 - DNA, 20 bp, Artificial Sequence
  Description of Artificial Sequence: Synthetic oligonucleotide
  Target: LAMA2; (+) strand; PAM type: NRG; PAM sequence: TAG
acaaaatatcataaactggg

SEQ ID NO: 166510 - DNA, 20 bp, Artificial Sequence
  Description of Artificial Sequence: Synthetic oligonucleotide
  Target: LAMA2; (+) strand; PAM type: NRG; PAM sequence: CAG
actgggtagcttataaataa

SEQ ID NO: 166511 - DNA, 20 bp, Artificial Sequence
  Description of Artificial Sequence: Synthetic oligonucleotide
  Target: LAMA2; (+) strand; PAM type: NRG; PAM sequence: CAG
taacagaaacttatttccca

SEQ ID NO: 166512 - DNA, 20 bp, Artificial Sequence
  Description of Artificial Sequence: Synthetic oligonucleotide
  Target: LAMA2; (+) strand; PAM type: NRG; PAM sequence: AAG
acttatttcccacagttctg

SEQ ID NO: 166513 - DNA, 20 bp, Artificial Sequence
  Description of Artificial Sequence: Synthetic oligonucleotide
  Target: LAMA2; (+) strand; PAM type: NRG; PAM sequence: AGG
cttatttcccacagttctga

SEQ ID NO: 166514 - DNA, 20 bp, Artificial Sequence
  Description of Artificial Sequence: Synthetic oligonucleotide
  Target: LAMA2; (+) strand; PAM type: NRG; PAM sequence: TGG
tttcccacagttctgaaggc

SEQ ID NO: 166515 - DNA, 20 bp, Artificial Sequence
  Description of Artificial Sequence: Synthetic oligonucleotide
  Target: LAMA2; (+) strand; PAM type: NRG; PAM sequence: GGG
ttcccacagttctgaaggct

SEQ ID NO: 166516 - DNA, 20 bp, Artificial Sequence
  Description of Artificial Sequence: Synthetic oligonucleotide
  Target: LAMA2; (+) strand; PAM type: NRG; PAM sequence: AAG
ccacagttctgaaggctggg

SEQ ID NO: 166517 - DNA, 20 bp, Artificial Sequence
  Description of Artificial Sequence: Synthetic oligonucleotide
  Target: LAMA2; (+) strand; PAM type: NRG; PAM sequence: AAG
ttctgaaggctgggaagtcc

SEQ ID NO: 166518 - DNA, 20 bp, Artificial Sequence
  Description of Artificial Sequence: Synthetic oligonucleotide
  Target: LAMA2; (+) strand; PAM type: NRG; PAM sequence: AAG
aggctgggaagtccaagatc

SEQ ID NO: 166519 - DNA, 20 bp, Artificial Sequence
  Description of Artificial Sequence: Synthetic oligonucleotide
  Target: LAMA2; (+) strand; PAM type: NRG; PAM sequence: CAG
gaagtccaagatcaagtctc

SEQ ID NO: 166520 - DNA, 20 bp, Artificial Sequence
  Description of Artificial Sequence: Synthetic oligonucleotide
  Target: LAMA2; (+) strand; PAM type: NRG; PAM sequence: AAG
ccaagatcaagtctccagca

SEQ ID NO: 166521 - DNA, 20 bp, Artificial Sequence
  Description of Artificial Sequence: Synthetic oligonucleotide
  Target: LAMA2; (+) strand; PAM type: NRG; PAM sequence: CAG
gatcaagtctccagcaaagt

SEQ ID NO: 166522 - DNA, 20 bp, Artificial Sequence
  Description of Artificial Sequence: Synthetic oligonucleotide
  Target: LAMA2; (+) strand; PAM type: NRG; PAM sequence: TGG
tctccagcaaagtcagtgtc

SEQ ID NO: 166523 - DNA, 20 bp, Artificial Sequence
  Description of Artificial Sequence: Synthetic oligonucleotide
  Target: LAMA2; (+) strand; PAM type: NRG; PAM sequence: GGG
ctccagcaaagtcagtgtct

SEQ ID NO: 166524 - DNA, 20 bp, Artificial Sequence
  Description of Artificial Sequence: Synthetic oligonucleotide
  Target: LAMA2; (+) strand; PAM type: NRG; PAM sequence: GGG
tccagcaaagtcagtgtctg

SEQ ID NO: 166525 - DNA, 20 bp, Artificial Sequence
  Description of Artificial Sequence: Synthetic oligonucleotide
  Target: LAMA2; (+) strand; PAM type: NRG; PAM sequence: AAG
agcaaagtcagtgtctgggg

SEQ ID NO: 166526 - DNA, 20 bp, Artificial Sequence
  Description of Artificial Sequence: Synthetic oligonucleotide
  Target: LAMA2; (+) strand; PAM type: NRG; PAM sequence: AGG
gcaaagtcagtgtctgggga

SEQ ID NO: 166527 - DNA, 20 bp, Artificial Sequence
  Description of Artificial Sequence: Synthetic oligonucleotide
  Target: LAMA2; (+) strand; PAM type: NRG; PAM sequence: TGG
tctggggaaggcttctttcc

SEQ ID NO: 166528 - DNA, 20 bp, Artificial Sequence
  Description of Artificial Sequence: Synthetic oligonucleotide
  Target: LAMA2; (+) strand; PAM type: NRG; PAM sequence: TAG
gaaggcttctttcctggtca

SEQ ID NO: 166529 - DNA, 20 bp, Artificial Sequence
  Description of Artificial Sequence: Synthetic oligonucleotide
  Target: LAMA2; (+) strand; PAM type: NRG; PAM sequence: TGG
ctttctttgtcttcacgtgt

SEQ ID NO: 166530 - DNA, 20 bp, Artificial Sequence
  Description of Artificial Sequence: Synthetic oligonucleotide
  Target: LAMA2; (+) strand; PAM type: NRG; PAM sequence: AAG
tctttgtcttcacgtgttgg

SEQ ID NO: 166531 - DNA, 20 bp, Artificial Sequence
  Description of Artificial Sequence: Synthetic oligonucleotide
  Target: LAMA2; (+) strand; PAM type: NRG; PAM sequence: AGG
ctttgtcttcacgtgttgga

SEQ ID NO: 166532 - DNA, 20 bp, Artificial Sequence
  Description of Artificial Sequence: Synthetic oligonucleotide
  Target: LAMA2; (+) strand; PAM type: NRG; PAM sequence: TAG
cttcacgtgttggaaggcac

SEQ ID NO: 166533 - DNA, 20 bp, Artificial Sequence
  Description of Artificial Sequence: Synthetic oligonucleotide
  Target: LAMA2; (+) strand; PAM type: NRG; PAM sequence: TAG
acgtgttggaaggcactaga

SEQ ID NO: 166534 - DNA, 20 bp, Artificial Sequence
  Description of Artificial Sequence: Synthetic oligonucleotide
  Target: LAMA2; (+) strand; PAM type: NRG; PAM sequence: TGG
gaaggcactagatagctctc

SEQ ID NO: 166535 - DNA, 20 bp, Artificial Sequence
  Description of Artificial Sequence: Synthetic oligonucleotide
  Target: LAMA2; (+) strand; PAM type: NRG; PAM sequence: GGG
aaggcactagatagctctct

SEQ ID NO: 166536 - DNA, 20 bp, Artificial Sequence
  Description of Artificial Sequence: Synthetic oligonucleotide
  Target: LAMA2; (+) strand; PAM type: NRG; PAM sequence: GGG
aggcactagatagctctctg

SEQ ID NO: 166537 - DNA, 20 bp, Artificial Sequence
  Description of Artificial Sequence: Synthetic oligonucleotide
  Target: LAMA2; (+) strand; PAM type: NRG; PAM sequence: AAG
tctctggggtctcttttgta

SEQ ID NO: 166538 - DNA, 20 bp, Artificial Sequence
  Description of Artificial Sequence: Synthetic oligonucleotide
  Target: LAMA2; (+) strand; PAM type: NRG; PAM sequence: AGG
ctctggggtctcttttgtaa

SEQ ID NO: 166539 - DNA, 20 bp, Artificial Sequence
  Description of Artificial Sequence: Synthetic oligonucleotide
  Target: LAMA2; (+) strand; PAM type: NRG; PAM sequence: GAG
aaggccctaatcccactcat

SEQ ID NO: 166540 - DNA, 20 bp, Artificial Sequence
  Description of Artificial Sequence: Synthetic oligonucleotide
  Target: LAMA2; (+) strand; PAM type: NRG; PAM sequence: AGG
aggccctaatcccactcatg

SEQ ID NO: 166541 - DNA, 20 bp, Artificial Sequence
  Description of Artificial Sequence: Synthetic oligonucleotide
  Target: LAMA2; (+) strand; PAM type: NRG; PAM sequence: CAG
taatcccactcatgaggctc

SEQ ID NO: 166542 - DNA, 20 bp, Artificial Sequence
  Description of Artificial Sequence: Synthetic oligonucleotide
  Target: LAMA2; (+) strand; PAM type: NRG; PAM sequence: AAG
catgatgtaatcacctccca

SEQ ID NO: 166543 - DNA, 20 bp, Artificial Sequence
  Description of Artificial Sequence: Synthetic oligonucleotide
  Target: LAMA2; (+) strand; PAM type: NRG; PAM sequence: AGG
atgatgtaatcacctcccaa

SEQ ID NO: 166544 - DNA, 20 bp, Artificial Sequence
  Description of Artificial Sequence: Synthetic oligonucleotide
  Target: LAMA2; (+) strand; PAM type: NRG; PAM sequence: TGG
atctcctattactatcacac

SEQ ID NO: 166545 - DNA, 20 bp, Artificial Sequence
  Description of Artificial Sequence: Synthetic oligonucleotide
  Target: LAMA2; (+) strand; PAM type: NRG; PAM sequence: GGG
tctcctattactatcacact

SEQ ID NO: 166546 - DNA, 20 bp, Artificial Sequence
  Description of Artificial Sequence: Synthetic oligonucleotide
  Target: LAMA2; (+) strand; PAM type: NRG; PAM sequence: GAG
tcctattactatcacactgg

SEQ ID NO: 166547 - DNA, 20 bp, Artificial Sequence
  Description of Artificial Sequence: Synthetic oligonucleotide
  Target: LAMA2; (+) strand; PAM type: NRG; PAM sequence: CAG
attactatcacactgggaga

SEQ ID NO: 166548 - DNA, 20 bp, Artificial Sequence
  Description of Artificial Sequence: Synthetic oligonucleotide
  Target: LAMA2; (+) strand; PAM type: NRG; PAM sequence: AGG
ttactatcacactgggagac

SEQ ID NO: 166549 - DNA, 20 bp, Artificial Sequence
  Description of Artificial Sequence: Synthetic oligonucleotide
  Target: LAMA2; (+) strand; PAM type: NRG; PAM sequence: TGG
gatttcaacatacaaatttt

SEQ ID NO: 166550 - DNA, 20 bp, Artificial Sequence
  Description of Artificial Sequence: Synthetic oligonucleotide
  Target: LAMA2; (+) strand; PAM type: NRG; PAM sequence: GAG
tttcaacatacaaatttttg

SEQ ID NO: 166551 - DNA, 20 bp, Artificial Sequence
  Description of Artificial Sequence: Synthetic oligonucleotide
  Target: LAMA2; (+) strand; PAM type: NRG; PAM sequence: CAG
atacaaatttttggagaaca

SEQ ID NO: 166552 - DNA, 20 bp, Artificial Sequence
  Description of Artificial Sequence: Synthetic oligonucleotide
  Target: LAMA2; (+) strand; PAM type: NRG; PAM sequence: CAG
ttttggagaacacagttgtt

SEQ ID NO: 166553 - DNA, 20 bp, Artificial Sequence
  Description of Artificial Sequence: Synthetic oligonucleotide
  Target: LAMA2; (+) strand; PAM type: NRG; PAM sequence: AGG
tttggagaacacagttgttc

SEQ ID NO: 166554 - DNA, 20 bp, Artificial Sequence
  Description of Artificial Sequence: Synthetic oligonucleotide
  Target: LAMA2; (+) strand; PAM type: NRG; PAM sequence: TAG
gaacacagttgttcaggcca

SEQ ID NO: 166555 - DNA, 20 bp, Artificial Sequence
  Description of Artificial Sequence: Synthetic oligonucleotide
  Target: LAMA2; (+) strand; PAM type: NRG; PAM sequence: AAG
acagttgttcaggccatagc

SEQ ID NO: 166556 - DNA, 20 bp, Artificial Sequence
  Description of Artificial Sequence: Synthetic oligonucleotide
  Target: LAMA2; (+) strand; PAM type: NRG; PAM sequence: TGG
acccccaacatgatgatatt

SEQ ID NO: 166557 - DNA, 20 bp, Artificial Sequence
  Description of Artificial Sequence: Synthetic oligonucleotide
  Target: LAMA2; (+) strand; PAM type: NRG; PAM sequence: GAG
ccccaacatgatgatatttg

SEQ ID NO: 166558 - DNA, 20 bp, Artificial Sequence
  Description of Artificial Sequence: Synthetic oligonucleotide
  Target: LAMA2; (+) strand; PAM type: NRG; PAM sequence: TGG
aacatgatgatatttggaga

SEQ ID NO: 166559 - DNA, 20 bp, Artificial Sequence
  Description of Artificial Sequence: Synthetic oligonucleotide
  Target: LAMA2; (+) strand; PAM type: NRG; PAM sequence: GGG
acatgatgatatttggagat

SEQ ID NO: 166560 - DNA, 20 bp, Artificial Sequence
  Description of Artificial Sequence: Synthetic oligonucleotide
  Target: LAMA2; (+) strand; PAM type: NRG; PAM sequence: AAG
cacctttccctgaaaatata

SEQ ID NO: 166561 - DNA, 20 bp, Artificial Sequence
  Description of Artificial Sequence: Synthetic oligonucleotide
  Target: LAMA2; (+) strand; PAM type: NRG; PAM sequence: TAG
ccctgaaaatataaagtgca

SEQ ID NO: 166562 - DNA, 20 bp, Artificial Sequence
  Description of Artificial Sequence: Synthetic oligonucleotide
  Target: LAMA2; (+) strand; PAM type: NRG; PAM sequence: AGG
cctgaaaatataaagtgcat

SEQ ID NO: 166563 - DNA, 20 bp, Artificial Sequence
  Description of Artificial Sequence: Synthetic oligonucleotide
  Target: LAMA2; (+) strand; PAM type: NRG; PAM sequence: AAG
aaaatataaagtgcatagga

SEQ ID NO: 166564 - DNA, 20 bp, Artificial Sequence
  Description of Artificial Sequence: Synthetic oligonucleotide
  Target: LAMA2; (+) strand; PAM type: NRG; PAM sequence: TAG
gtgcataggaaagaaaactg

SEQ ID NO: 166565 - DNA, 20 bp, Artificial Sequence
  Description of Artificial Sequence: Synthetic oligonucleotide
  Target: LAMA2; (+) strand; PAM type: NRG; PAM sequence: AAG
ataggaaagaaaactgtaga

SEQ ID NO: 166566 - DNA, 20 bp, Artificial Sequence
  Description of Artificial Sequence: Synthetic oligonucleotide
  Target: LAMA2; (+) strand; PAM type: NRG; PAM sequence: TAG
gaaaactgtagaaagcttta

SEQ ID NO: 166567 - DNA, 20 bp, Artificial Sequence
  Description of Artificial Sequence: Synthetic oligonucleotide
  Target: LAMA2; (+) strand; PAM type: NRG; PAM sequence: AAG
tttatagactaaatatttta

SEQ ID NO: 166568 - DNA, 20 bp, Artificial Sequence
  Description of Artificial Sequence: Synthetic oligonucleotide
  Target: LAMA2; (+) strand; PAM type: NRG; PAM sequence: CAG
ctaaatattttaaagaaacc

SEQ ID NO: 166569 - DNA, 20 bp, Artificial Sequence
  Description of Artificial Sequence: Synthetic oligonucleotide
  Target: LAMA2; (+) strand; PAM type: NRG; PAM sequence: AAG
tcatacctaatgatacttgc

SEQ ID NO: 166570 - DNA, 20 bp, Artificial Sequence
  Description of Artificial Sequence: Synthetic oligonucleotide
  Target: LAMA2; (+) strand; PAM type: NRG; PAM sequence: TAG
agataattgttgcttcatcc

SEQ ID NO: 166571 - DNA, 20 bp, Artificial Sequence
  Description of Artificial Sequence: Synthetic oligonucleotide
  Target: LAMA2; (+) strand; PAM type: NRG; PAM sequence: AGG
gataattgttgcttcatcct

SEQ ID NO: 166572 - DNA, 20 bp, Artificial Sequence
  Description of Artificial Sequence: Synthetic oligonucleotide
  Target: LAMA2; (+) strand; PAM type: NRG; PAM sequence: TAG
gcattaataaatcctgtaca

SEQ ID NO: 166573 - DNA, 20 bp, Artificial Sequence
  Description of Artificial Sequence: Synthetic oligonucleotide
  Target: LAMA2; (+) strand; PAM type: NRG; PAM sequence: AGG
cattaataaatcctgtacat

SEQ ID NO: 166574 - DNA, 20 bp, Artificial Sequence
  Description of Artificial Sequence: Synthetic oligonucleotide
  Target: LAMA2; (+) strand; PAM type: NRG; PAM sequence: TAG
cataggcatgttattatgaa

SEQ ID NO: 166575 - DNA, 20 bp, Artificial Sequence
  Description of Artificial Sequence: Synthetic oligonucleotide
  Target: LAMA2; (+) strand; PAM type: NRG; PAM sequence: CAG
gcatgttattatgaatagct

SEQ ID NO: 166576 - DNA, 20 bp, Artificial Sequence
  Description of Artificial Sequence: Synthetic oligonucleotide
  Target: LAMA2; (+) strand; PAM type: NRG; PAM sequence: AAG
gctcagtgacattgctcctt

SEQ ID NO: 166577 - DNA, 20 bp, Artificial Sequence
  Description of Artificial Sequence: Synthetic oligonucleotide
  Target: LAMA2; (+) strand; PAM type: NRG; PAM sequence: AAG
taagaaaaaaaatttttttg

SEQ ID NO: 166578 - DNA, 20 bp, Artificial Sequence
  Description of Artificial Sequence: Synthetic oligonucleotide
  Target: LAMA2; (+) strand; PAM type: NRG; PAM sequence: GAG
actaaaacctatgtaatact

SEQ ID NO: 166579 - DNA, 20 bp, Artificial Sequence
  Description of Artificial Sequence: Synthetic oligonucleotide
  Target: LAMA2; (+) strand; PAM type: NRG; PAM sequence: AAG
acctatgtaatactgagtcc

SEQ ID NO: 166580 - DNA, 20 bp, Artificial Sequence
  Description of Artificial Sequence: Synthetic oligonucleotide
  Target: LAMA2; (+) strand; PAM type: NRG; PAM sequence: AGG
cctatgtaatactgagtcca

SEQ ID NO: 166581 - DNA, 20 bp, Artificial Sequence
  Description of Artificial Sequence: Synthetic oligonucleotide
  Target: LAMA2; (+) strand; PAM type: NRG; PAM sequence: GGG
ctatgtaatactgagtccaa

SEQ ID NO: 166582 - DNA, 20 bp, Artificial Sequence
  Description of Artificial Sequence: Synthetic oligonucleotide
  Target: LAMA2; (+) strand; PAM type: NRG; PAM sequence: GGG
tatgtaatactgagtccaag

SEQ ID NO: 166583 - DNA, 20 bp, Artificial Sequence
  Description of Artificial Sequence: Synthetic oligonucleotide
  Target: LAMA2; (+) strand; PAM type: NRG; PAM sequence: TAG
taatactgagtccaagggga

SEQ ID NO: 166584 - DNA, 20 bp, Artificial Sequence
  Description of Artificial Sequence: Synthetic oligonucleotide
  Target: LAMA2; (+) strand; PAM type: NRG; PAM sequence: CGG
tactgagtccaaggggatag

SEQ ID NO: 166585 - DNA, 20 bp, Artificial Sequence
  Description of Artificial Sequence: Synthetic oligonucleotide
  Target: LAMA2; (+) strand; PAM type: NRG; PAM sequence: GGG
actgagtccaaggggatagc

SEQ ID NO: 166586 - DNA, 20 bp, Artificial Sequence
  Description of Artificial Sequence: Synthetic oligonucleotide
  Target: LAMA2; (+) strand; PAM type: NRG; PAM sequence: GAG
tgagtccaaggggatagcgg

SEQ ID NO: 166587 - DNA, 20 bp, Artificial Sequence
  Description of Artificial Sequence: Synthetic oligonucleotide
  Target: LAMA2; (+) strand; PAM type: NRG; PAM sequence: AGG
gagtccaaggggatagcggg

SEQ ID NO: 166588 - DNA, 20 bp, Artificial Sequence
  Description of Artificial Sequence: Synthetic oligonucleotide
  Target: LAMA2; (+) strand; PAM type: NRG; PAM sequence: AAG
ccaaggggatagcgggaggt

SEQ ID NO: 166589 - DNA, 20 bp, Artificial Sequence
  Description of Artificial Sequence: Synthetic oligonucleotide
  Target: LAMA2; (+) strand; PAM type: NRG; PAM sequence: CAG
gcgggaggtaagtgaactaa

SEQ ID NO: 166590 - DNA, 20 bp, Artificial Sequence
  Description of Artificial Sequence: Synthetic oligonucleotide
  Target: LAMA2; (+) strand; PAM type: NRG; PAM sequence: TAG
gtaagtgaactaacagtaac

SEQ ID NO: 166591 - DNA, 20 bp, Artificial Sequence
  Description of Artificial Sequence: Synthetic oligonucleotide
  Target: LAMA2; (+) strand; PAM type: NRG; PAM sequence: TAG
cagtaactagtacacacaca

SEQ ID NO: 166592 - DNA, 20 bp, Artificial Sequence
  Description of Artificial Sequence: Synthetic oligonucleotide
  Target: LAMA2; (+) strand; PAM type: NRG; PAM sequence: AGG
agtaactagtacacacacat

SEQ ID NO: 166593 - DNA, 20 bp, Artificial Sequence
  Description of Artificial Sequence: Synthetic oligonucleotide
  Target: LAMA2; (+) strand; PAM type: NRG; PAM sequence: TAG
aactagtacacacacatagg

SEQ ID NO: 166594 - DNA, 20 bp, Artificial Sequence
  Description of Artificial Sequence: Synthetic oligonucleotide
  Target: LAMA2; (+) strand; PAM type: NRG; PAM sequence: AAG
agtacacacacataggtagt

SEQ ID NO: 166595 - DNA, 20 bp, Artificial Sequence
  Description of Artificial Sequence: Synthetic oligonucleotide
  Target: LAMA2; (+) strand; PAM type: NRG; PAM sequence: TAG
acacacacataggtagtaag

SEQ ID NO: 166596 - DNA, 20 bp, Artificial Sequence
  Description of Artificial Sequence: Synthetic oligonucleotide
  Target: LAMA2; (+) strand; PAM type: NRG; PAM sequence: AGG
cacacacataggtagtaagt

SEQ ID NO: 166597 - DNA, 20 bp, Artificial Sequence
  Description of Artificial Sequence: Synthetic oligonucleotide
  Target: LAMA2; (+) strand; PAM type: NRG; PAM sequence: TAG
acacataggtagtaagtagg

SEQ ID NO: 166598 - DNA, 20 bp, Artificial Sequence
  Description of Artificial Sequence: Synthetic oligonucleotide
  Target: LAMA2; (+) strand; PAM type: NRG; PAM sequence: TAG
ataggtagtaagtaggtaga

SEQ ID NO: 166599 - DNA, 20 bp, Artificial Sequence
  Description of Artificial Sequence: Synthetic oligonucleotide
  Target: LAMA2; (+) strand; PAM type: NRG; PAM sequence: TAG
gtagtaagtaggtagataga

SEQ ID NO: 166600 - DNA, 20 bp, Artificial Sequence
  Description of Artificial Sequence: Synthetic oligonucleotide
  Target: LAMA2; (+) strand; PAM type: NRG; PAM sequence: TAG
taagtaggtagatagataga

SEQ ID NO: 166601 - DNA, 20 bp, Artificial Sequence
  Description of Artificial Sequence: Synthetic oligonucleotide
  Target: LAMA2; (+) strand; PAM type: NRG; PAM sequence: TAG
taggtagatagatagataga

SEQ ID NO: 166602 - DNA, 20 bp, Artificial Sequence
  Description of Artificial Sequence: Synthetic oligonucleotide
  Target: LAMA2; (+) strand; PAM type: NRG; PAM sequence: TAG
tagatagatagatagataga

SEQ ID NO: 166603 - DNA, 20 bp, Artificial Sequence
  Description of Artificial Sequence: Synthetic oligonucleotide
  Target: LAMA2; (+) strand; PAM type: NRG; PAM sequence: TAG
tagatagatagatagataga

SEQ ID NO: 166604 - DNA, 20 bp, Artificial Sequence
  Description of Artificial Sequence: Synthetic oligonucleotide
  Target: LAMA2; (+) strand; PAM type: NRG; PAM sequence: TAG
tagatagatagatagataga

SEQ ID NO: 166605 - DNA, 20 bp, Artificial Sequence
  Description of Artificial Sequence: Synthetic oligonucleotide
  Target: LAMA2; (+) strand; PAM type: NRG; PAM sequence: TAG
tagatagatagatagataga

SEQ ID NO: 166606 - DNA, 20 bp, Artificial Sequence
  Description of Artificial Sequence: Synthetic oligonucleotide
  Target: LAMA2; (+) strand; PAM type: NRG; PAM sequence: TAG
tagatagatagatagataga

SEQ ID NO: 166607 - DNA, 20 bp, Artificial Sequence
  Description of Artificial Sequence: Synthetic oligonucleotide
  Target: LAMA2; (+) strand; PAM type: NRG; PAM sequence: CAG
gatagatagatagatagata

SEQ ID NO: 166608 - DNA, 20 bp, Artificial Sequence
  Description of Artificial Sequence: Synthetic oligonucleotide
  Target: LAMA2; (+) strand; PAM type: NRG; PAM sequence: AAG
agatagatagatagatacag

SEQ ID NO: 166609 - DNA, 20 bp, Artificial Sequence
  Description of Artificial Sequence: Synthetic oligonucleotide
  Target: LAMA2; (+) strand; PAM type: NRG; PAM sequence: AGG
gatagatagatagatacaga

SEQ ID NO: 166610 - DNA, 20 bp, Artificial Sequence
  Description of Artificial Sequence: Synthetic oligonucleotide
  Target: LAMA2; (+) strand; PAM type: NRG; PAM sequence: AAG
agatagatagatacagaagg

SEQ ID NO: 166611 - DNA, 20 bp, Artificial Sequence
  Description of Artificial Sequence: Synthetic oligonucleotide
  Target: LAMA2; (+) strand; PAM type: NRG; PAM sequence: TAG
ttaatcattgctacaccctg

SEQ ID NO: 166612 - DNA, 20 bp, Artificial Sequence
  Description of Artificial Sequence: Synthetic oligonucleotide
  Target: LAMA2; (+) strand; PAM type: NRG; PAM sequence: CAG
tcattgctacaccctgtagt

SEQ ID NO: 166613 - DNA, 20 bp, Artificial Sequence
  Description of Artificial Sequence: Synthetic oligonucleotide
  Target: LAMA2; (+) strand; PAM type: NRG; PAM sequence: TGG
ctcctattttttttttcaca

SEQ ID NO: 166614 - DNA, 20 bp, Artificial Sequence
  Description of Artificial Sequence: Synthetic oligonucleotide
  Target: LAMA2; (+) strand; PAM type: NRG; PAM sequence: GGG
tcctattttttttttcacat

SEQ ID NO: 166615 - DNA, 20 bp, Artificial Sequence
  Description of Artificial Sequence: Synthetic oligonucleotide
  Target: LAMA2; (+) strand; PAM type: NRG; PAM sequence: AAG
tttttcacatgggaatattg

SEQ ID NO: 166616 - DNA, 20 bp, Artificial Sequence
  Description of Artificial Sequence: Synthetic oligonucleotide
  Target: LAMA2; (+) strand; PAM type: NRG; PAM sequence: TAG
acatgggaatattgaagact

SEQ ID NO: 166617 - DNA, 20 bp, Artificial Sequence
  Description of Artificial Sequence: Synthetic oligonucleotide
  Target: LAMA2; (+) strand; PAM type: NRG; PAM sequence: TAG
gggaatattgaagacttagc

SEQ ID NO: 166618 - DNA, 20 bp, Artificial Sequence
  Description of Artificial Sequence: Synthetic oligonucleotide
  Target: LAMA2; (+) strand; PAM type: NRG; PAM sequence: AAG
ctagctcaaacaacttttta

SEQ ID NO: 166619 - DNA, 20 bp, Artificial Sequence
  Description of Artificial Sequence: Synthetic oligonucleotide
  Target: LAMA2; (+) strand; PAM type: NRG; PAM sequence: TGG
tttaaagataaaataatttg

SEQ ID NO: 166620 - DNA, 20 bp, Artificial Sequence
  Description of Artificial Sequence: Synthetic oligonucleotide
  Target: LAMA2; (+) strand; PAM type: NRG; PAM sequence: AAG
atcataattcttattttaaa

SEQ ID NO: 166621 - DNA, 20 bp, Artificial Sequence
  Description of Artificial Sequence: Synthetic oligonucleotide
  Target: LAMA2; (+) strand; PAM type: NRG; PAM sequence: CAG
taaccaattacctctatctt

SEQ ID NO: 166622 - DNA, 20 bp, Artificial Sequence
  Description of Artificial Sequence: Synthetic oligonucleotide
  Target: LAMA2; (+) strand; PAM type: NRG; PAM sequence: TAG
ttacctctatcttcagtaaa

SEQ ID NO: 166623 - DNA, 20 bp, Artificial Sequence
  Description of Artificial Sequence: Synthetic oligonucleotide
  Target: LAMA2; (+) strand; PAM type: NRG; PAM sequence: CAG
ctctatcttcagtaaataga

SEQ ID NO: 166624 - DNA, 20 bp, Artificial Sequence
  Description of Artificial Sequence: Synthetic oligonucleotide
  Target: LAMA2; (+) strand; PAM type: NRG; PAM sequence: TAG
taaatagacagatttgtaac

SEQ ID NO: 166625 - DNA, 20 bp, Artificial Sequence
  Description of Artificial Sequence: Synthetic oligonucleotide
  Target: LAMA2; (+) strand; PAM type: NRG; PAM sequence: CAG
aatctacctaacaaccttgc

SEQ ID NO: 166626 - DNA, 20 bp, Artificial Sequence
  Description of Artificial Sequence: Synthetic oligonucleotide
  Target: LAMA2; (+) strand; PAM type: NRG; PAM sequence: TAG
acctaacaaccttgccagaa

SEQ ID NO: 166627 - DNA, 20 bp, Artificial Sequence
  Description of Artificial Sequence: Synthetic oligonucleotide
  Target: LAMA2; (+) strand; PAM type: NRG; PAM sequence: GAG
ctaacaaccttgccagaata

SEQ ID NO: 166628 - DNA, 20 bp, Artificial Sequence
  Description of Artificial Sequence: Synthetic oligonucleotide
  Target: LAMA2; (+) strand; PAM type: NRG; PAM sequence: TAG
cttgccagaatagagattgt

SEQ ID NO: 166629 - DNA, 20 bp, Artificial Sequence
  Description of Artificial Sequence: Synthetic oligonucleotide
  Target: LAMA2; (+) strand; PAM type: NRG; PAM sequence: AAG
gagattgttagcattatact

SEQ ID NO: 166630 - DNA, 20 bp, Artificial Sequence
  Description of Artificial Sequence: Synthetic oligonucleotide
  Target: LAMA2; (+) strand; PAM type: NRG; PAM sequence: TGG
gttagcattatactaagttc

SEQ ID NO: 166631 - DNA, 20 bp, Artificial Sequence
  Description of Artificial Sequence: Synthetic oligonucleotide
  Target: LAMA2; (+) strand; PAM type: NRG; PAM sequence: AAG
aagttctggaaattaatgct

SEQ ID NO: 166632 - DNA, 20 bp, Artificial Sequence
  Description of Artificial Sequence: Synthetic oligonucleotide
  Target: LAMA2; (+) strand; PAM type: NRG; PAM sequence: AAG
aattaatgctaagaaaatgt

SEQ ID NO: 166633 - DNA, 20 bp, Artificial Sequence
  Description of Artificial Sequence: Synthetic oligonucleotide
  Target: LAMA2; (+) strand; PAM type: NRG; PAM sequence: AAG
gaaaatgtaagcaacctata

SEQ ID NO: 166634 - DNA, 20 bp, Artificial Sequence
  Description of Artificial Sequence: Synthetic oligonucleotide
  Target: LAMA2; (+) strand; PAM type: NRG; PAM sequence: AAG
cctataaagccttgaacaaa

SEQ ID NO: 166635 - DNA, 20 bp, Artificial Sequence
  Description of Artificial Sequence: Synthetic oligonucleotide
  Target: LAMA2; (+) strand; PAM type: NRG; PAM sequence: TAG
aagccttgaacaaaaagtat

SEQ ID NO: 166636 - DNA, 20 bp, Artificial Sequence
  Description of Artificial Sequence: Synthetic oligonucleotide
  Target: LAMA2; (+) strand; PAM type: NRG; PAM sequence: AAG
ccttgaacaaaaagtattag

SEQ ID NO: 166637 - DNA, 20 bp, Artificial Sequence
  Description of Artificial Sequence: Synthetic oligonucleotide
  Target: LAMA2; (+) strand; PAM type: NRG; PAM sequence: CAG
tgaacaaaaagtattagaag

SEQ ID NO: 166638 - DNA, 20 bp, Artificial Sequence
  Description of Artificial Sequence: Synthetic oligonucleotide
  Target: LAMA2; (+) strand; PAM type: NRG; PAM sequence: AGG
gaacaaaaagtattagaagc

SEQ ID NO: 166639 - DNA, 20 bp, Artificial Sequence
  Description of Artificial Sequence: Synthetic oligonucleotide
  Target: LAMA2; (+) strand; PAM type: NRG; PAM sequence: CAG
ccaccacaaactgcgttctc

SEQ ID NO: 166640 - DNA, 20 bp, Artificial Sequence
  Description of Artificial Sequence: Synthetic oligonucleotide
  Target: LAMA2; (+) strand; PAM type: NRG; PAM sequence: CGG
cacaaactgcgttctccaga

SEQ ID NO: 166641 - DNA, 20 bp, Artificial Sequence
  Description of Artificial Sequence: Synthetic oligonucleotide
  Target: LAMA2; (+) strand; PAM type: NRG; PAM sequence: AAG
aactgcgttctccagacggc

SEQ ID NO: 166642 - DNA, 20 bp, Artificial Sequence
  Description of Artificial Sequence: Synthetic oligonucleotide
  Target: LAMA2; (+) strand; PAM type: NRG; PAM sequence: GAG
ctgcgttctccagacggcaa

SEQ ID NO: 166643 - DNA, 20 bp, Artificial Sequence
  Description of Artificial Sequence: Synthetic oligonucleotide
  Target: LAMA2; (+) strand; PAM type: NRG; PAM sequence: GAG
gcgttctccagacggcaaga

SEQ ID NO: 166644 - DNA, 20 bp, Artificial Sequence
  Description of Artificial Sequence: Synthetic oligonucleotide
  Target: LAMA2; (+) strand; PAM type: NRG; PAM sequence: GAG
acactctctgctgattaaat

SEQ ID NO: 166645 - DNA, 20 bp, Artificial Sequence
  Description of Artificial Sequence: Synthetic oligonucleotide
  Target: LAMA2; (+) strand; PAM type: NRG; PAM sequence: AAG
ttaaatgagtttgattttac

SEQ ID NO: 166646 - DNA, 20 bp, Artificial Sequence
  Description of Artificial Sequence: Synthetic oligonucleotide
  Target: LAMA2; (+) strand; PAM type: NRG; PAM sequence: AAG
gagtttgattttacaagctc

SEQ ID NO: 166647 - DNA, 20 bp, Artificial Sequence
  Description of Artificial Sequence: Synthetic oligonucleotide
  Target: LAMA2; (+) strand; PAM type: NRG; PAM sequence: TAG
agctcaagtgaattatatct

SEQ ID NO: 166648 - DNA, 20 bp, Artificial Sequence
  Description of Artificial Sequence: Synthetic oligonucleotide
  Target: LAMA2; (+) strand; PAM type: NRG; PAM sequence: GAG
ctcaagtgaattatatctta

SEQ ID NO: 166649 - DNA, 20 bp, Artificial Sequence
  Description of Artificial Sequence: Synthetic oligonucleotide
  Target: LAMA2; (+) strand; PAM type: NRG; PAM sequence: CGG
agtgaattatatcttagagt

SEQ ID NO: 166650 - DNA, 20 bp, Artificial Sequence
  Description of Artificial Sequence: Synthetic oligonucleotide
  Target: LAMA2; (+) strand; PAM type: NRG; PAM sequence: GGG
gtgaattatatcttagagtc

SEQ ID NO: 166651 - DNA, 20 bp, Artificial Sequence
  Description of Artificial Sequence: Synthetic oligonucleotide
  Target: LAMA2; (+) strand; PAM type: NRG; PAM sequence: CAG
attatatcttagagtcggga

SEQ ID NO: 166652 - DNA, 20 bp, Artificial Sequence
  Description of Artificial Sequence: Synthetic oligonucleotide
  Target: LAMA2; (+) strand; PAM type: NRG; PAM sequence: AAG
agtcgggacagaatctgcaa

SEQ ID NO: 166653 - DNA, 20 bp, Artificial Sequence
  Description of Artificial Sequence: Synthetic oligonucleotide
  Target: LAMA2; (+) strand; PAM type: NRG; PAM sequence: TAG
acagaatctgcaaaagtgac

SEQ ID NO: 166654 - DNA, 20 bp, Artificial Sequence
  Description of Artificial Sequence: Synthetic oligonucleotide
  Target: LAMA2; (+) strand; PAM type: NRG; PAM sequence: AGG
cagaatctgcaaaagtgact

SEQ ID NO: 166655 - DNA, 20 bp, Artificial Sequence
  Description of Artificial Sequence: Synthetic oligonucleotide
  Target: LAMA2; (+) strand; PAM type: NRG; PAM sequence: GGG
agaatctgcaaaagtgacta

SEQ ID NO: 166656 - DNA, 20 bp, Artificial Sequence
  Description of Artificial Sequence: Synthetic oligonucleotide
  Target: LAMA2; (+) strand; PAM type: NRG; PAM sequence: GGG
gaatctgcaaaagtgactag

SEQ ID NO: 166657 - DNA, 20 bp, Artificial Sequence
  Description of Artificial Sequence: Synthetic oligonucleotide
  Target: LAMA2; (+) strand; PAM type: NRG; PAM sequence: TGG
aagtgactaggggtcatgta

SEQ ID NO: 166658 - DNA, 20 bp, Artificial Sequence
  Description of Artificial Sequence: Synthetic oligonucleotide
  Target: LAMA2; (+) strand; PAM type: NRG; PAM sequence: GAG
gtcatgtatggaaaacactt

SEQ ID NO: 166659 - DNA, 20 bp, Artificial Sequence
  Description of Artificial Sequence: Synthetic oligonucleotide
  Target: LAMA2; (+) strand; PAM type: NRG; PAM sequence: GAG
gaaaacacttgagaaattgt

SEQ ID NO: 166660 - DNA, 20 bp, Artificial Sequence
  Description of Artificial Sequence: Synthetic oligonucleotide
  Target: LAMA2; (+) strand; PAM type: NRG; PAM sequence: CAG
tgagaacataaaatttgtcg

SEQ ID NO: 166661 - DNA, 20 bp, Artificial Sequence
  Description of Artificial Sequence: Synthetic oligonucleotide
  Target: LAMA2; (+) strand; PAM type: NRG; PAM sequence: AGG
gagaacataaaatttgtcgc

SEQ ID NO: 166662 - DNA, 20 bp, Artificial Sequence
  Description of Artificial Sequence: Synthetic oligonucleotide
  Target: LAMA2; (+) strand; PAM type: NRG; PAM sequence: TAG
acataaaatttgtcgcagga

SEQ ID NO: 166663 - DNA, 20 bp, Artificial Sequence
  Description of Artificial Sequence: Synthetic oligonucleotide
  Target: LAMA2; (+) strand; PAM type: NRG; PAM sequence: AAG
aaaatttgtcgcaggatagt

SEQ ID NO: 166664 - DNA, 20 bp, Artificial Sequence
  Description of Artificial Sequence: Synthetic oligonucleotide
  Target: LAMA2; (+) strand; PAM type: NRG; PAM sequence: CAG
taagcaataaaacatctttc

SEQ ID NO: 166665 - DNA, 20 bp, Artificial Sequence
  Description of Artificial Sequence: Synthetic oligonucleotide
  Target: LAMA2; (+) strand; PAM type: NRG; PAM sequence: AGG
aagcaataaaacatctttcc

SEQ ID NO: 166666 - DNA, 20 bp, Artificial Sequence
  Description of Artificial Sequence: Synthetic oligonucleotide
  Target: LAMA2; (+) strand; PAM type: NRG; PAM sequence: AAG
acatctttccaggttttata

SEQ ID NO: 166667 - DNA, 20 bp, Artificial Sequence
  Description of Artificial Sequence: Synthetic oligonucleotide
  Target: LAMA2; (+) strand; PAM type: NRG; PAM sequence: AGG
catctttccaggttttataa

SEQ ID NO: 166668 - DNA, 20 bp, Artificial Sequence
  Description of Artificial Sequence: Synthetic oligonucleotide
  Target: LAMA2; (+) strand; PAM type: NRG; PAM sequence: TAG
ttataaaggaaaataaaatg

SEQ ID NO: 166669 - DNA, 20 bp, Artificial Sequence
  Description of Artificial Sequence: Synthetic oligonucleotide
  Target: LAMA2; (+) strand; PAM type: NRG; PAM sequence: AGG
tataaaggaaaataaaatgt

SEQ ID NO: 166670 - DNA, 20 bp, Artificial Sequence
  Description of Artificial Sequence: Synthetic oligonucleotide
  Target: LAMA2; (+) strand; PAM type: NRG; PAM sequence: CAG
aggaaactgattgtcatctc

SEQ ID NO: 166671 - DNA, 20 bp, Artificial Sequence
  Description of Artificial Sequence: Synthetic oligonucleotide
  Target: LAMA2; (+) strand; PAM type: NRG; PAM sequence: AAG
tgtcatctccagtgaaactt

SEQ ID NO: 166672 - DNA, 20 bp, Artificial Sequence
  Description of Artificial Sequence: Synthetic oligonucleotide
  Target: LAMA2; (+) strand; PAM type: NRG; PAM sequence: TGG
taacaaatatctgtcaactg

SEQ ID NO: 166673 - DNA, 20 bp, Artificial Sequence
  Description of Artificial Sequence: Synthetic oligonucleotide
  Target: LAMA2; (+) strand; PAM type: NRG; PAM sequence: CAG
tcaactgtggaaaaaataaa

SEQ ID NO: 166674 - DNA, 20 bp, Artificial Sequence
  Description of Artificial Sequence: Synthetic oligonucleotide
  Target: LAMA2; (+) strand; PAM type: NRG; PAM sequence: TAG
aaaaaataaacagtgctcat

SEQ ID NO: 166675 - DNA, 20 bp, Artificial Sequence
  Description of Artificial Sequence: Synthetic oligonucleotide
  Target: LAMA2; (+) strand; PAM type: NRG; PAM sequence: AGG
aaaaataaacagtgctcatt

SEQ ID NO: 166676 - DNA, 20 bp, Artificial Sequence
  Description of Artificial Sequence: Synthetic oligonucleotide
  Target: LAMA2; (+) strand; PAM type: NRG; PAM sequence: CAG
aaacagtgctcattaggaat

SEQ ID NO: 166677 - DNA, 20 bp, Artificial Sequence
  Description of Artificial Sequence: Synthetic oligonucleotide
  Target: LAMA2; (+) strand; PAM type: NRG; PAM sequence: TAG
gtgctcattaggaatcagaa

SEQ ID NO: 166678 - DNA, 20 bp, Artificial Sequence
  Description of Artificial Sequence: Synthetic oligonucleotide
  Target: LAMA2; (+) strand; PAM type: NRG; PAM sequence: AGG
tgctcattaggaatcagaat

SEQ ID NO: 166679 - DNA, 20 bp, Artificial Sequence
  Description of Artificial Sequence: Synthetic oligonucleotide
  Target: LAMA2; (+) strand; PAM type: NRG; PAM sequence: CAG
tcagaataggttcactttgt

SEQ ID NO: 166680 - DNA, 20 bp, Artificial Sequence
  Description of Artificial Sequence: Synthetic oligonucleotide
  Target: LAMA2; (+) strand; PAM type: NRG; PAM sequence: GAG
agaataggttcactttgtca

SEQ ID NO: 166681 - DNA, 20 bp, Artificial Sequence
  Description of Artificial Sequence: Synthetic oligonucleotide
  Target: LAMA2; (+) strand; PAM type: NRG; PAM sequence: AGG
gaataggttcactttgtcag

SEQ ID NO: 166682 - DNA, 20 bp, Artificial Sequence
  Description of Artificial Sequence: Synthetic oligonucleotide
  Target: LAMA2; (+) strand; PAM type: NRG; PAM sequence: TGG
gttcactttgtcagaggcaa

SEQ ID NO: 166683 - DNA, 20 bp, Artificial Sequence
  Description of Artificial Sequence: Synthetic oligonucleotide
  Target: LAMA2; (+) strand; PAM type: NRG; PAM sequence: TAG
atggctcatgcctgtaatcc

SEQ ID NO: 166684 - DNA, 20 bp, Artificial Sequence
  Description of Artificial Sequence: Synthetic oligonucleotide
  Target: LAMA2; (+) strand; PAM type: NRG; PAM sequence: TGG
gcctgtaatcctagcacttt

SEQ ID NO: 166685 - DNA, 20 bp, Artificial Sequence
  Description of Artificial Sequence: Synthetic oligonucleotide
  Target: LAMA2; (+) strand; PAM type: NRG; PAM sequence: GAG
ctgtaatcctagcacttttg

SEQ ID NO: 166686 - DNA, 20 bp, Artificial Sequence
  Description of Artificial Sequence: Synthetic oligonucleotide
  Target: LAMA2; (+) strand; PAM type: NRG; PAM sequence: AGG
tgtaatcctagcacttttgg

SEQ ID NO: 166687 - DNA, 20 bp, Artificial Sequence
  Description of Artificial Sequence: Synthetic oligonucleotide
  Target: LAMA2; (+) strand; PAM type: NRG; PAM sequence: AAG
tcctagcacttttggaggcc

SEQ ID NO: 166688 - DNA, 20 bp, Artificial Sequence
  Description of Artificial Sequence: Synthetic oligonucleotide
  Target: LAMA2; (+) strand; PAM type: NRG; PAM sequence: GAG
ctagcacttttggaggccaa

SEQ ID NO: 166689 - DNA, 20 bp, Artificial Sequence
  Description of Artificial Sequence: Synthetic oligonucleotide
  Target: LAMA2; (+) strand; PAM type: NRG; PAM sequence: CGG
gcacttttggaggccaagag

SEQ ID NO: 166690 - DNA, 20 bp, Artificial Sequence
  Description of Artificial Sequence: Synthetic oligonucleotide
  Target: LAMA2; (+) strand; PAM type: NRG; PAM sequence: GAG
acttttggaggccaagagcg

SEQ ID NO: 166691 - DNA, 20 bp, Artificial Sequence
  Description of Artificial Sequence: Synthetic oligonucleotide
  Target: LAMA2; (+) strand; PAM type: NRG; PAM sequence: AGG
cttttggaggccaagagcgg

SEQ ID NO: 166692 - DNA, 20 bp, Artificial Sequence
  Description of Artificial Sequence: Synthetic oligonucleotide
  Target: LAMA2; (+) strand; PAM type: NRG; PAM sequence: CAG
gaggccaagagcggaggatc

SEQ ID NO: 166693 - DNA, 20 bp, Artificial Sequence
  Description of Artificial Sequence: Synthetic oligonucleotide
  Target: LAMA2; (+) strand; PAM type: NRG; PAM sequence: AGG
aggccaagagcggaggatcc

SEQ ID NO: 166694 - DNA, 20 bp, Artificial Sequence
  Description of Artificial Sequence: Synthetic oligonucleotide
  Target: LAMA2; (+) strand; PAM type: NRG; PAM sequence: GAG
gccaagagcggaggatccag

SEQ ID NO: 166695 - DNA, 20 bp, Artificial Sequence
  Description of Artificial Sequence: Synthetic oligonucleotide
  Target: LAMA2; (+) strand; PAM type: NRG; PAM sequence: GAG
agcggaggatccaggagttc

SEQ ID NO: 166696 - DNA, 20 bp, Artificial Sequence
  Description of Artificial Sequence: Synthetic oligonucleotide
  Target: LAMA2; (+) strand; PAM type: NRG; PAM sequence: CAG
aggatccaggagttcgagac

SEQ ID NO: 166697 - DNA, 20 bp, Artificial Sequence
  Description of Artificial Sequence: Synthetic oligonucleotide
  Target: LAMA2; (+) strand; PAM type: NRG; PAM sequence: TGG
ccaggagttcgagaccagca

SEQ ID NO: 166698 - DNA, 20 bp, Artificial Sequence
  Description of Artificial Sequence: Synthetic oligonucleotide
  Target: LAMA2; (+) strand; PAM type: NRG; PAM sequence: AAG
cgagaccagcatggtcaaca

SEQ ID NO: 166699 - DNA, 20 bp, Artificial Sequence
  Description of Artificial Sequence: Synthetic oligonucleotide
  Target: LAMA2; (+) strand; PAM type: NRG; PAM sequence: AGG
gagaccagcatggtcaacaa

SEQ ID NO: 166700 - DNA, 20 bp, Artificial Sequence
  Description of Artificial Sequence: Synthetic oligonucleotide
  Target: LAMA2; (+) strand; PAM type: NRG; PAM sequence: AAG
aaaaattaaaaattaaaaaa

SEQ ID NO: 166701 - DNA, 20 bp, Artificial Sequence
  Description of Artificial Sequence: Synthetic oligonucleotide
  Target: LAMA2; (+) strand; PAM type: NRG; PAM sequence: TAG
ttaaaaattaaaaaaaagaa

SEQ ID NO: 166702 - DNA, 20 bp, Artificial Sequence
  Description of Artificial Sequence: Synthetic oligonucleotide
  Target: LAMA2; (+) strand; PAM type: NRG; PAM sequence: AGG
taaaaattaaaaaaaagaat

SEQ ID NO: 166703 - DNA, 20 bp, Artificial Sequence
  Description of Artificial Sequence: Synthetic oligonucleotide
  Target: LAMA2; (+) strand; PAM type: NRG; PAM sequence: AAG
aaaataacacatatcaaact

SEQ ID NO: 166704 - DNA, 20 bp, Artificial Sequence
  Description of Artificial Sequence: Synthetic oligonucleotide
  Target: LAMA2; (+) strand; PAM type: NRG; PAM sequence: TAG
acacatatcaaactaagtgc

SEQ ID NO: 166705 - DNA, 20 bp, Artificial Sequence
  Description of Artificial Sequence: Synthetic oligonucleotide
  Target: LAMA2; (+) strand; PAM type: NRG; PAM sequence: AGG
cacatatcaaactaagtgct

SEQ ID NO: 166706 - DNA, 20 bp, Artificial Sequence
  Description of Artificial Sequence: Synthetic oligonucleotide
  Target: LAMA2; (+) strand; PAM type: NRG; PAM sequence: TAG
atatataatatctgaaaacc

SEQ ID NO: 166707 - DNA, 20 bp, Artificial Sequence
  Description of Artificial Sequence: Synthetic oligonucleotide
  Target: LAMA2; (+) strand; PAM type: NRG; PAM sequence: CAG
aaacctagttttctaaatcc

SEQ ID NO: 166708 - DNA, 20 bp, Artificial Sequence
  Description of Artificial Sequence: Synthetic oligonucleotide
  Target: LAMA2; (+) strand; PAM type: NRG; PAM sequence: AAG
ctaaatcccagtaaaatatc

SEQ ID NO: 166709 - DNA, 20 bp, Artificial Sequence
  Description of Artificial Sequence: Synthetic oligonucleotide
  Target: LAMA2; (+) strand; PAM type: NRG; PAM sequence: CAG
cagtaaaatatcaagtttat

SEQ ID NO: 166710 - DNA, 20 bp, Artificial Sequence
  Description of Artificial Sequence: Synthetic oligonucleotide
  Target: LAMA2; (+) strand; PAM type: NRG; PAM sequence: CAG
gatacatcatatctcaaatt

SEQ ID NO: 166711 - DNA, 20 bp, Artificial Sequence
  Description of Artificial Sequence: Synthetic oligonucleotide
  Target: LAMA2; (+) strand; PAM type: NRG; PAM sequence: CAG
gtccaaaactgtgtatgtac

SEQ ID NO: 166712 - DNA, 20 bp, Artificial Sequence
  Description of Artificial Sequence: Synthetic oligonucleotide
  Target: LAMA2; (+) strand; PAM type: NRG; PAM sequence: AGG
tccaaaactgtgtatgtacc

SEQ ID NO: 166713 - DNA, 20 bp, Artificial Sequence
  Description of Artificial Sequence: Synthetic oligonucleotide
  Target: LAMA2; (+) strand; PAM type: NRG; PAM sequence: CAG
tgtatgtaccaggaccaaaa

SEQ ID NO: 166714 - DNA, 20 bp, Artificial Sequence
  Description of Artificial Sequence: Synthetic oligonucleotide
  Target: LAMA2; (+) strand; PAM type: NRG; PAM sequence: AGG
gtatgtaccaggaccaaaac

SEQ ID NO: 166715 - DNA, 20 bp, Artificial Sequence
  Description of Artificial Sequence: Synthetic oligonucleotide
  Target: LAMA2; (+) strand; PAM type: NRG; PAM sequence: CAG
gaccaaaacaggtcactgta

SEQ ID NO: 166716 - DNA, 20 bp, Artificial Sequence
  Description of Artificial Sequence: Synthetic oligonucleotide
  Target: LAMA2; (+) strand; PAM type: NRG; PAM sequence: GAG
ccaaaacaggtcactgtaca

SEQ ID NO: 166717 - DNA, 20 bp, Artificial Sequence
  Description of Artificial Sequence: Synthetic oligonucleotide
  Target: LAMA2; (+) strand; PAM type: NRG; PAM sequence: GAG
tattgttacaataaacttat

SEQ ID NO: 166718 - DNA, 20 bp, Artificial Sequence
  Description of Artificial Sequence: Synthetic oligonucleotide
  Target: LAMA2; (+) strand; PAM type: NRG; PAM sequence: TAG
gttacaataaacttatgaga

SEQ ID NO: 166719 - DNA, 20 bp, Artificial Sequence
  Description of Artificial Sequence: Synthetic oligonucleotide
  Target: LAMA2; (+) strand; PAM type: NRG; PAM sequence: AAG
aataaacttatgagatagac

SEQ ID NO: 166720 - DNA, 20 bp, Artificial Sequence
  Description of Artificial Sequence: Synthetic oligonucleotide
  Target: LAMA2; (+) strand; PAM type: NRG; PAM sequence: TAG
tattgttgatgaactgatgc

SEQ ID NO: 166721 - DNA, 20 bp, Artificial Sequence
  Description of Artificial Sequence: Synthetic oligonucleotide
  Target: LAMA2; (+) strand; PAM type: NRG; PAM sequence: GAG
ttgttgatgaactgatgcta

SEQ ID NO: 166722 - DNA, 20 bp, Artificial Sequence
  Description of Artificial Sequence: Synthetic oligonucleotide
  Target: LAMA2; (+) strand; PAM type: NRG; PAM sequence: AAG
agaaattaaataacttgctt

SEQ ID NO: 166723 - DNA, 20 bp, Artificial Sequence
  Description of Artificial Sequence: Synthetic oligonucleotide
  Target: LAMA2; (+) strand; PAM type: NRG; PAM sequence: CAG
aacttgcttaagtcataaaa

SEQ ID NO: 166724 - DNA, 20 bp, Artificial Sequence
  Description of Artificial Sequence: Synthetic oligonucleotide
  Target: LAMA2; (+) strand; PAM type: NRG; PAM sequence: CAG
ttgcttaagtcataaaacag

SEQ ID NO: 166725 - DNA, 20 bp, Artificial Sequence
  Description of Artificial Sequence: Synthetic oligonucleotide
  Target: LAMA2; (+) strand; PAM type: NRG; PAM sequence: GAG
gcttaagtcataaaacagca

SEQ ID NO: 166726 - DNA, 20 bp, Artificial Sequence
  Description of Artificial Sequence: Synthetic oligonucleotide
  Target: LAMA2; (+) strand; PAM type: NRG; PAM sequence: AGG
cttaagtcataaaacagcag

SEQ ID NO: 166727 - DNA, 20 bp, Artificial Sequence
  Description of Artificial Sequence: Synthetic oligonucleotide
  Target: LAMA2; (+) strand; PAM type: NRG; PAM sequence: TGG
catatccatgtttcaaatgc

SEQ ID NO: 166728 - DNA, 20 bp, Artificial Sequence
  Description of Artificial Sequence: Synthetic oligonucleotide
  Target: LAMA2; (+) strand; PAM type: NRG; PAM sequence: TAG
caaatgctggtttgtttaaa

SEQ ID NO: 166729 - DNA, 20 bp, Artificial Sequence
  Description of Artificial Sequence: Synthetic oligonucleotide
  Target: LAMA2; (+) strand; PAM type: NRG; PAM sequence: GAG
tgtttaaatagatgtttgat

SEQ ID NO: 166730 - DNA, 20 bp, Artificial Sequence
  Description of Artificial Sequence: Synthetic oligonucleotide
  Target: LAMA2; (+) strand; PAM type: NRG; PAM sequence: TAG
atgtttgatgagctatttca

SEQ ID NO: 166731 - DNA, 20 bp, Artificial Sequence
  Description of Artificial Sequence: Synthetic oligonucleotide
  Target: LAMA2; (+) strand; PAM type: NRG; PAM sequence: AAG
ttcatagtatccttgtgcac

SEQ ID NO: 166732 - DNA, 20 bp, Artificial Sequence
  Description of Artificial Sequence: Synthetic oligonucleotide
  Target: LAMA2; (+) strand; PAM type: NRG; PAM sequence: GAG
gtgcacaagattgaaaatat

SEQ ID NO: 166733 - DNA, 20 bp, Artificial Sequence
  Description of Artificial Sequence: Synthetic oligonucleotide
  Target: LAMA2; (+) strand; PAM type: NRG; PAM sequence: CAG
acaagattgaaaatatgagc

SEQ ID NO: 166734 - DNA, 20 bp, Artificial Sequence
  Description of Artificial Sequence: Synthetic oligonucleotide
  Target: LAMA2; (+) strand; PAM type: NRG; PAM sequence: TAG
tgaaaatatgagccagatgt

SEQ ID NO: 166735 - DNA, 20 bp, Artificial Sequence
  Description of Artificial Sequence: Synthetic oligonucleotide
  Target: LAMA2; (+) strand; PAM type: NRG; PAM sequence: CAG
aatatgagccagatgttagc

SEQ ID NO: 166736 - DNA, 20 bp, Artificial Sequence
  Description of Artificial Sequence: Synthetic oligonucleotide
  Target: LAMA2; (+) strand; PAM type: NRG; PAM sequence: TAG
gccagatgttagccagctga

SEQ ID NO: 166737 - DNA, 20 bp, Artificial Sequence
  Description of Artificial Sequence: Synthetic oligonucleotide
  Target: LAMA2; (+) strand; PAM type: NRG; PAM sequence: AGG
ccagatgttagccagctgat

SEQ ID NO: 166738 - DNA, 20 bp, Artificial Sequence
  Description of Artificial Sequence: Synthetic oligonucleotide
  Target: LAMA2; (+) strand; PAM type: NRG; PAM sequence: TGG
ttagccagctgataggttga

SEQ ID NO: 166739 - DNA, 20 bp, Artificial Sequence
  Description of Artificial Sequence: Synthetic oligonucleotide
  Target: LAMA2; (+) strand; PAM type: NRG; PAM sequence: GGG
tagccagctgataggttgat

SEQ ID NO: 166740 - DNA, 20 bp, Artificial Sequence
  Description of Artificial Sequence: Synthetic oligonucleotide
  Target: LAMA2; (+) strand; PAM type: NRG; PAM sequence: CAG
gttgctaaaaaaatgtgacc

SEQ ID NO: 166741 - DNA, 20 bp, Artificial Sequence
  Description of Artificial Sequence: Synthetic oligonucleotide
  Target: LAMA2; (+) strand; PAM type: NRG; PAM sequence: GAG
tgctaaaaaaatgtgaccca

SEQ ID NO: 166742 - DNA, 20 bp, Artificial Sequence
  Description of Artificial Sequence: Synthetic oligonucleotide
  Target: LAMA2; (+) strand; PAM type: NRG; PAM sequence: TAG
atgtgacccagagtacactc

SEQ ID NO: 166743 - DNA, 20 bp, Artificial Sequence
  Description of Artificial Sequence: Synthetic oligonucleotide
  Target: LAMA2; (+) strand; PAM type: NRG; PAM sequence: GAG
ctagtgatatctccaatgat

SEQ ID NO: 166744 - DNA, 20 bp, Artificial Sequence
  Description of Artificial Sequence: Synthetic oligonucleotide
  Target: LAMA2; (+) strand; PAM type: NRG; PAM sequence: AGG
tagtgatatctccaatgatg

SEQ ID NO: 166745 - DNA, 20 bp, Artificial Sequence
  Description of Artificial Sequence: Synthetic oligonucleotide
  Target: LAMA2; (+) strand; PAM type: NRG; PAM sequence: AAG
tatctccaatgatgaggcgt

SEQ ID NO: 166746 - DNA, 20 bp, Artificial Sequence
  Description of Artificial Sequence: Synthetic oligonucleotide
  Target: LAMA2; (+) strand; PAM type: NRG; PAM sequence: TGG
caaaatatctgtaaatgctt

SEQ ID NO: 166747 - DNA, 20 bp, Artificial Sequence
  Description of Artificial Sequence: Synthetic oligonucleotide
  Target: LAMA2; (+) strand; PAM type: NRG; PAM sequence: CAG
gatgatatctatcaaatatt

SEQ ID NO: 166748 - DNA, 20 bp, Artificial Sequence
  Description of Artificial Sequence: Synthetic oligonucleotide
  Target: LAMA2; (+) strand; PAM type: NRG; PAM sequence: AAG
tcaaatattcagataatata

SEQ ID NO: 166749 - DNA, 20 bp, Artificial Sequence
  Description of Artificial Sequence: Synthetic oligonucleotide
  Target: LAMA2; (+) strand; PAM type: NRG; PAM sequence: AAG
ttcagataatataaagctga

SEQ ID NO: 166750 - DNA, 20 bp, Artificial Sequence
  Description of Artificial Sequence: Synthetic oligonucleotide
  Target: LAMA2; (+) strand; PAM type: NRG; PAM sequence: TGG
gaaagtattatctaatgtgt

SEQ ID NO: 166751 - DNA, 20 bp, Artificial Sequence
  Description of Artificial Sequence: Synthetic oligonucleotide
  Target: LAMA2; (+) strand; PAM type: NRG; PAM sequence: TGG
gtattatctaatgtgttgga

SEQ ID NO: 166752 - DNA, 20 bp, Artificial Sequence
  Description of Artificial Sequence: Synthetic oligonucleotide
  Target: LAMA2; (+) strand; PAM type: NRG; PAM sequence: TGG
ttatctaatgtgttggatgg

SEQ ID NO: 166753 - DNA, 20 bp, Artificial Sequence
  Description of Artificial Sequence: Synthetic oligonucleotide
  Target: LAMA2; (+) strand; PAM type: NRG; PAM sequence: GGG
tatctaatgtgttggatggt

SEQ ID NO: 166754 - DNA, 20 bp, Artificial Sequence
  Description of Artificial Sequence: Synthetic oligonucleotide
  Target: LAMA2; (+) strand; PAM type: NRG; PAM sequence: CAG
atggtgggaaaatatcctga

SEQ ID NO: 166755 - DNA, 20 bp, Artificial Sequence
  Description of Artificial Sequence: Synthetic oligonucleotide
  Target: LAMA2; (+) strand; PAM type: NRG; PAM sequence: CAG
acagatgatactatgaatta

SEQ ID NO: 166756 - DNA, 20 bp, Artificial Sequence
  Description of Artificial Sequence: Synthetic oligonucleotide
  Target: LAMA2; (+) strand; PAM type: NRG; PAM sequence: AAG
tactatgaattacagttaac

SEQ ID NO: 166757 - DNA, 20 bp, Artificial Sequence
  Description of Artificial Sequence: Synthetic oligonucleotide
  Target: LAMA2; (+) strand; PAM type: NRG; PAM sequence: GAG
tgaattacagttaacaagat

SEQ ID NO: 166758 - DNA, 20 bp, Artificial Sequence
  Description of Artificial Sequence: Synthetic oligonucleotide
  Target: LAMA2; (+) strand; PAM type: NRG; PAM sequence: TAG
agttaacaagatgagattaa

SEQ ID NO: 166759 - DNA, 20 bp, Artificial Sequence
  Description of Artificial Sequence: Synthetic oligonucleotide
  Target: LAMA2; (+) strand; PAM type: NRG; PAM sequence: AAG
acaagatgagattaatagaa

SEQ ID NO: 166760 - DNA, 20 bp, Artificial Sequence
  Description of Artificial Sequence: Synthetic oligonucleotide
  Target: LAMA2; (+) strand; PAM type: NRG; PAM sequence: CAG
taatagaaaagatttgaact

SEQ ID NO: 166761 - DNA, 20 bp, Artificial Sequence
  Description of Artificial Sequence: Synthetic oligonucleotide
  Target: LAMA2; (+) strand; PAM type: NRG; PAM sequence: AGG
aatagaaaagatttgaactc

SEQ ID NO: 166762 - DNA, 20 bp, Artificial Sequence
  Description of Artificial Sequence: Synthetic oligonucleotide
  Target: LAMA2; (+) strand; PAM type: NRG; PAM sequence: AAG
gaaaagatttgaactcaggt

SEQ ID NO: 166763 - DNA, 20 bp, Artificial Sequence
  Description of Artificial Sequence: Synthetic oligonucleotide
  Target: LAMA2; (+) strand; PAM type: NRG; PAM sequence: TGG
cacttgtttgttcattcctg

SEQ ID NO: 166764 - DNA, 20 bp, Artificial Sequence
  Description of Artificial Sequence: Synthetic oligonucleotide
  Target: LAMA2; (+) strand; PAM type: NRG; PAM sequence: CAG
ttaattatgtttccaacatg

SEQ ID NO: 166765 - DNA, 20 bp, Artificial Sequence
  Description of Artificial Sequence: Synthetic oligonucleotide
  Target: LAMA2; (+) strand; PAM type: NRG; PAM sequence: AGG
taattatgtttccaacatgc

SEQ ID NO: 166766 - DNA, 20 bp, Artificial Sequence
  Description of Artificial Sequence: Synthetic oligonucleotide
  Target: LAMA2; (+) strand; PAM type: NRG; PAM sequence: TGG
gtttccaacatgcaggtcta

SEQ ID NO: 166767 - DNA, 20 bp, Artificial Sequence
  Description of Artificial Sequence: Synthetic oligonucleotide
  Target: LAMA2; (+) strand; PAM type: NRG; PAM sequence: TGG
acatgcaggtctatggccta

SEQ ID NO: 166768 - DNA, 20 bp, Artificial Sequence
  Description of Artificial Sequence: Synthetic oligonucleotide
  Target: LAMA2; (+) strand; PAM type: NRG; PAM sequence: TAG
tgcaggtctatggcctatgg

SEQ ID NO: 166769 - DNA, 20 bp, Artificial Sequence
  Description of Artificial Sequence: Synthetic oligonucleotide
  Target: LAMA2; (+) strand; PAM type: NRG; PAM sequence: TAG
ggtctatggcctatggtaga

SEQ ID NO: 166770 - DNA, 20 bp, Artificial Sequence
  Description of Artificial Sequence: Synthetic oligonucleotide
  Target: LAMA2; (+) strand; PAM type: NRG; PAM sequence: AAG
tatggcctatggtagatagt

SEQ ID NO: 166771 - DNA, 20 bp, Artificial Sequence
  Description of Artificial Sequence: Synthetic oligonucleotide
  Target: LAMA2; (+) strand; PAM type: NRG; PAM sequence: AAG
tggtagatagtaagaatatg

SEQ ID NO: 166772 - DNA, 20 bp, Artificial Sequence
  Description of Artificial Sequence: Synthetic oligonucleotide
  Target: LAMA2; (+) strand; PAM type: NRG; PAM sequence: TGG
gtaagaatatgaagactgca

SEQ ID NO: 166773 - DNA, 20 bp, Artificial Sequence
  Description of Artificial Sequence: Synthetic oligonucleotide
  Target: LAMA2; (+) strand; PAM type: NRG; PAM sequence: GGG
taagaatatgaagactgcat

SEQ ID NO: 166774 - DNA, 20 bp, Artificial Sequence
  Description of Artificial Sequence: Synthetic oligonucleotide
  Target: LAMA2; (+) strand; PAM type: NRG; PAM sequence: TAG
actgcatgggtcttgccctc

SEQ ID NO: 166775 - DNA, 20 bp, Artificial Sequence
  Description of Artificial Sequence: Synthetic oligonucleotide
  Target: LAMA2; (+) strand; PAM type: NRG; PAM sequence: AGG
ctgcatgggtcttgccctct

SEQ ID NO: 166776 - DNA, 20 bp, Artificial Sequence
  Description of Artificial Sequence: Synthetic oligonucleotide
  Target: LAMA2; (+) strand; PAM type: NRG; PAM sequence: GAG
gcatgggtcttgccctctag

SEQ ID NO: 166777 - DNA, 20 bp, Artificial Sequence
  Description of Artificial Sequence: Synthetic oligonucleotide
  Target: LAMA2; (+) strand; PAM type: NRG; PAM sequence: TAG
ccctctaggagcttattctc

SEQ ID NO: 166778 - DNA, 20 bp, Artificial Sequence
  Description of Artificial Sequence: Synthetic oligonucleotide
  Target: LAMA2; (+) strand; PAM type: NRG; PAM sequence: TAG
taggagcttattctctagtt

SEQ ID NO: 166779 - DNA, 20 bp, Artificial Sequence
  Description of Artificial Sequence: Synthetic oligonucleotide
  Target: LAMA2; (+) strand; PAM type: NRG; PAM sequence: AGG
aggagcttattctctagttt

SEQ ID NO: 166780 - DNA, 20 bp, Artificial Sequence
  Description of Artificial Sequence: Synthetic oligonucleotide
  Target: LAMA2; (+) strand; PAM type: NRG; PAM sequence: GGG
ggagcttattctctagttta

SEQ ID NO: 166781 - DNA, 20 bp, Artificial Sequence
  Description of Artificial Sequence: Synthetic oligonucleotide
  Target: LAMA2; (+) strand; PAM type: NRG; PAM sequence: GGG
gagcttattctctagtttag

SEQ ID NO: 166782 - DNA, 20 bp, Artificial Sequence
  Description of Artificial Sequence: Synthetic oligonucleotide
  Target: LAMA2; (+) strand; PAM type: NRG; PAM sequence: AAG
ttattctctagtttagggga

SEQ ID NO: 166783 - DNA, 20 bp, Artificial Sequence
  Description of Artificial Sequence: Synthetic oligonucleotide
  Target: LAMA2; (+) strand; PAM type: NRG; PAM sequence: CAG
ctctagtttaggggaaagaa

SEQ ID NO: 166784 - DNA, 20 bp, Artificial Sequence
  Description of Artificial Sequence: Synthetic oligonucleotide
  Target: LAMA2; (+) strand; PAM type: NRG; PAM sequence: GAG
ctagtttaggggaaagaaca

SEQ ID NO: 166785 - DNA, 20 bp, Artificial Sequence
  Description of Artificial Sequence: Synthetic oligonucleotide
  Target: LAMA2; (+) strand; PAM type: NRG; PAM sequence: AGG
tagtttaggggaaagaacag

SEQ ID NO: 166786 - DNA, 20 bp, Artificial Sequence
  Description of Artificial Sequence: Synthetic oligonucleotide
  Target: LAMA2; (+) strand; PAM type: NRG; PAM sequence: TAG
acagaggaaatgacacatat

SEQ ID NO: 166787 - DNA, 20 bp, Artificial Sequence
  Description of Artificial Sequence: Synthetic oligonucleotide
  Target: LAMA2; (+) strand; PAM type: NRG; PAM sequence: AAG
acatattagcaattcatgtg

SEQ ID NO: 166788 - DNA, 20 bp, Artificial Sequence
  Description of Artificial Sequence: Synthetic oligonucleotide
  Target: LAMA2; (+) strand; PAM type: NRG; PAM sequence: AAG
attagcaattcatgtgaagt

SEQ ID NO: 166789 - DNA, 20 bp, Artificial Sequence
  Description of Artificial Sequence: Synthetic oligonucleotide
  Target: LAMA2; (+) strand; PAM type: NRG; PAM sequence: GAG
tagcaattcatgtgaagtaa

SEQ ID NO: 166790 - DNA, 20 bp, Artificial Sequence
  Description of Artificial Sequence: Synthetic oligonucleotide
  Target: LAMA2; (+) strand; PAM type: NRG; PAM sequence: CAG
taagagtccttacttgattg

SEQ ID NO: 166791 - DNA, 20 bp, Artificial Sequence
  Description of Artificial Sequence: Synthetic oligonucleotide
  Target: LAMA2; (+) strand; PAM type: NRG; PAM sequence: TAG
ttacttgattgcagattcac

SEQ ID NO: 166792 - DNA, 20 bp, Artificial Sequence
  Description of Artificial Sequence: Synthetic oligonucleotide
  Target: LAMA2; (+) strand; PAM type: NRG; PAM sequence: AGG
tacttgattgcagattcact

SEQ ID NO: 166793 - DNA, 20 bp, Artificial Sequence
  Description of Artificial Sequence: Synthetic oligonucleotide
  Target: LAMA2; (+) strand; PAM type: NRG; PAM sequence: CAG
agattcactaggtgccaaca

SEQ ID NO: 166794 - DNA, 20 bp, Artificial Sequence
  Description of Artificial Sequence: Synthetic oligonucleotide
  Target: LAMA2; (+) strand; PAM type: NRG; PAM sequence: AGG
gattcactaggtgccaacac

SEQ ID NO: 166795 - DNA, 20 bp, Artificial Sequence
  Description of Artificial Sequence: Synthetic oligonucleotide
  Target: LAMA2; (+) strand; PAM type: NRG; PAM sequence: GGG
attcactaggtgccaacaca

SEQ ID NO: 166796 - DNA, 20 bp, Artificial Sequence
  Description of Artificial Sequence: Synthetic oligonucleotide
  Target: LAMA2; (+) strand; PAM type: NRG; PAM sequence: AAG
cagggcattgctatttgtat

SEQ ID NO: 166797 - DNA, 20 bp, Artificial Sequence
  Description of Artificial Sequence: Synthetic oligonucleotide
  Target: LAMA2; (+) strand; PAM type: NRG; PAM sequence: AAG
atttgtataagatccaaatc

SEQ ID NO: 166798 - DNA, 20 bp, Artificial Sequence
  Description of Artificial Sequence: Synthetic oligonucleotide
  Target: LAMA2; (+) strand; PAM type: NRG; PAM sequence: AGG
tttgtataagatccaaatca

SEQ ID NO: 166799 - DNA, 20 bp, Artificial Sequence
  Description of Artificial Sequence: Synthetic oligonucleotide
  Target: LAMA2; (+) strand; PAM type: NRG; PAM sequence: GGG
ttgtataagatccaaatcaa

SEQ ID NO: 166800 - DNA, 20 bp, Artificial Sequence
  Description of Artificial Sequence: Synthetic oligonucleotide
  Target: LAMA2; (+) strand; PAM type: NRG; PAM sequence: GAG
gtataagatccaaatcaagg

SEQ ID NO: 166801 - DNA, 20 bp, Artificial Sequence
  Description of Artificial Sequence: Synthetic oligonucleotide
  Target: LAMA2; (+) strand; PAM type: NRG; PAM sequence: AGG
tataagatccaaatcaaggg

SEQ ID NO: 166802 - DNA, 20 bp, Artificial Sequence
  Description of Artificial Sequence: Synthetic oligonucleotide
  Target: LAMA2; (+) strand; PAM type: NRG; PAM sequence: AAG
aagatccaaatcaagggagg

SEQ ID NO: 166803 - DNA, 20 bp, Artificial Sequence
  Description of Artificial Sequence: Synthetic oligonucleotide
  Target: LAMA2; (+) strand; PAM type: NRG; PAM sequence: AAG
agtacatttaatatatttgc

SEQ ID NO: 166804 - DNA, 20 bp, Artificial Sequence
  Description of Artificial Sequence: Synthetic oligonucleotide
  Target: LAMA2; (+) strand; PAM type: NRG; PAM sequence: CAG
tttaatatatttgcaagtca

SEQ ID NO: 166805 - DNA, 20 bp, Artificial Sequence
  Description of Artificial Sequence: Synthetic oligonucleotide
  Target: LAMA2; (+) strand; PAM type: NRG; PAM sequence: TAG
atatatttgcaagtcacagc

SEQ ID NO: 166806 - DNA, 20 bp, Artificial Sequence
  Description of Artificial Sequence: Synthetic oligonucleotide
  Target: LAMA2; (+) strand; PAM type: NRG; PAM sequence: GAG
atatttgcaagtcacagcta

SEQ ID NO: 166807 - DNA, 20 bp, Artificial Sequence
  Description of Artificial Sequence: Synthetic oligonucleotide
  Target: LAMA2; (+) strand; PAM type: NRG; PAM sequence: AAG
tataatctactatattttga

SEQ ID NO: 166808 - DNA, 20 bp, Artificial Sequence
  Description of Artificial Sequence: Synthetic oligonucleotide
  Target: LAMA2; (+) strand; PAM type: NRG; PAM sequence: GAG
tatattttgaaagaaaccct

SEQ ID NO: 166809 - DNA, 20 bp, Artificial Sequence
  Description of Artificial Sequence: Synthetic oligonucleotide
  Target: LAMA2; (+) strand; PAM type: NRG; PAM sequence: AAG
ttttgaaagaaaccctgagt

SEQ ID NO: 166810 - DNA, 20 bp, Artificial Sequence
  Description of Artificial Sequence: Synthetic oligonucleotide
  Target: LAMA2; (+) strand; PAM type: NRG; PAM sequence: TAG
gagtaagattgctaaatgtt

SEQ ID NO: 166811 - DNA, 20 bp, Artificial Sequence
  Description of Artificial Sequence: Synthetic oligonucleotide
  Target: LAMA2; (+) strand; PAM type: NRG; PAM sequence: AAG
taaatgtttagcttgaaaca

SEQ ID NO: 166812 - DNA, 20 bp, Artificial Sequence
  Description of Artificial Sequence: Synthetic oligonucleotide
  Target: LAMA2; (+) strand; PAM type: NRG; PAM sequence: TAG
tttagcttgaaacaaagatt

SEQ ID NO: 166813 - DNA, 20 bp, Artificial Sequence
  Description of Artificial Sequence: Synthetic oligonucleotide
  Target: LAMA2; (+) strand; PAM type: NRG; PAM sequence: AGG
ttagcttgaaacaaagattt

SEQ ID NO: 166814 - DNA, 20 bp, Artificial Sequence
  Description of Artificial Sequence: Synthetic oligonucleotide
  Target: LAMA2; (+) strand; PAM type: NRG; PAM sequence: AAG
gcttgaaacaaagatttagg

SEQ ID NO: 166815 - DNA, 20 bp, Artificial Sequence
  Description of Artificial Sequence: Synthetic oligonucleotide
  Target: LAMA2; (+) strand; PAM type: NRG; PAM sequence: TAG
aacaaagatttaggaagtaa

SEQ ID NO: 166816 - DNA, 20 bp, Artificial Sequence
  Description of Artificial Sequence: Synthetic oligonucleotide
  Target: LAMA2; (+) strand; PAM type: NRG; PAM sequence: TAG
ttaggaagtaatagtattct

SEQ ID NO: 166817 - DNA, 20 bp, Artificial Sequence
  Description of Artificial Sequence: Synthetic oligonucleotide
  Target: LAMA2; (+) strand; PAM type: NRG; PAM sequence: GAG
aatagtattcttagatattt

SEQ ID NO: 166818 - DNA, 20 bp, Artificial Sequence
  Description of Artificial Sequence: Synthetic oligonucleotide
  Target: LAMA2; (+) strand; PAM type: NRG; PAM sequence: AGG
atagtattcttagatatttg

SEQ ID NO: 166819 - DNA, 20 bp, Artificial Sequence
  Description of Artificial Sequence: Synthetic oligonucleotide
  Target: LAMA2; (+) strand; PAM type: NRG; PAM sequence: TAG
agatatttgaggaccttccc

SEQ ID NO: 166820 - DNA, 20 bp, Artificial Sequence
  Description of Artificial Sequence: Synthetic oligonucleotide
  Target: LAMA2; (+) strand; PAM type: NRG; PAM sequence: AGG
gatatttgaggaccttccct

SEQ ID NO: 166821 - DNA, 20 bp, Artificial Sequence
  Description of Artificial Sequence: Synthetic oligonucleotide
  Target: LAMA2; (+) strand; PAM type: NRG; PAM sequence: AAG
ttgaggaccttccctaggaa

SEQ ID NO: 166822 - DNA, 20 bp, Artificial Sequence
  Description of Artificial Sequence: Synthetic oligonucleotide
  Target: LAMA2; (+) strand; PAM type: NRG; PAM sequence: AGG
tgaggaccttccctaggaaa

SEQ ID NO: 166823 - DNA, 20 bp, Artificial Sequence
  Description of Artificial Sequence: Synthetic oligonucleotide
  Target: LAMA2; (+) strand; PAM type: NRG; PAM sequence: GGG
gaggaccttccctaggaaaa

SEQ ID NO: 166824 - DNA, 20 bp, Artificial Sequence
  Description of Artificial Sequence: Synthetic oligonucleotide
  Target: LAMA2; (+) strand; PAM type: NRG; PAM sequence: TAG
cttccctaggaaaagggaat

SEQ ID NO: 166825 - DNA, 20 bp, Artificial Sequence
  Description of Artificial Sequence: Synthetic oligonucleotide
  Target: LAMA2; (+) strand; PAM type: NRG; PAM sequence: TAG
ggaattagacttaattttca

SEQ ID NO: 166826 - DNA, 20 bp, Artificial Sequence
  Description of Artificial Sequence: Synthetic oligonucleotide
  Target: LAMA2; (+) strand; PAM type: NRG; PAM sequence: CAG
agacttaattttcatagctt

SEQ ID NO: 166827 - DNA, 20 bp, Artificial Sequence
  Description of Artificial Sequence: Synthetic oligonucleotide
  Target: LAMA2; (+) strand; PAM type: NRG; PAM sequence: AAG
cttaattttcatagcttcag

SEQ ID NO: 166828 - DNA, 20 bp, Artificial Sequence
  Description of Artificial Sequence: Synthetic oligonucleotide
  Target: LAMA2; (+) strand; PAM type: NRG; PAM sequence: AGG
ttaattttcatagcttcaga

SEQ ID NO: 166829 - DNA, 20 bp, Artificial Sequence
  Description of Artificial Sequence: Synthetic oligonucleotide
  Target: LAMA2; (+) strand; PAM type: NRG; PAM sequence: CAG
attttcatagcttcagaagg

SEQ ID NO: 166830 - DNA, 20 bp, Artificial Sequence
  Description of Artificial Sequence: Synthetic oligonucleotide
  Target: LAMA2; (+) strand; PAM type: NRG; PAM sequence: TGG
tagcttcagaaggcagaact

SEQ ID NO: 166831 - DNA, 20 bp, Artificial Sequence
  Description of Artificial Sequence: Synthetic oligonucleotide
  Target: LAMA2; (+) strand; PAM type: NRG; PAM sequence: TAG
ttggatcactcactgaaaat

SEQ ID NO: 166832 - DNA, 20 bp, Artificial Sequence
  Description of Artificial Sequence: Synthetic oligonucleotide
  Target: LAMA2; (+) strand; PAM type: NRG; PAM sequence: AAG
atcaaatttttattcaccgt

SEQ ID NO: 166833 - DNA, 20 bp, Artificial Sequence
  Description of Artificial Sequence: Synthetic oligonucleotide
  Target: LAMA2; (+) strand; PAM type: NRG; PAM sequence: AGG
tcaaatttttattcaccgta

SEQ ID NO: 166834 - DNA, 20 bp, Artificial Sequence
  Description of Artificial Sequence: Synthetic oligonucleotide
  Target: LAMA2; (+) strand; PAM type: NRG; PAM sequence: CAG
caccgtaaggaaaaacttca

SEQ ID NO: 166835 - DNA, 20 bp, Artificial Sequence
  Description of Artificial Sequence: Synthetic oligonucleotide
  Target: LAMA2; (+) strand; PAM type: NRG; PAM sequence: AAG
aaaaacttcacagcttatgc

SEQ ID NO: 166836 - DNA, 20 bp, Artificial Sequence
  Description of Artificial Sequence: Synthetic oligonucleotide
  Target: LAMA2; (+) strand; PAM type: NRG; PAM sequence: AAG
cagcttatgcaagacgaaaa

SEQ ID NO: 166837 - DNA, 20 bp, Artificial Sequence
  Description of Artificial Sequence: Synthetic oligonucleotide
  Target: LAMA2; (+) strand; PAM type: NRG; PAM sequence: AAG
gacgaaaaaagctgtcttat

SEQ ID NO: 166838 - DNA, 20 bp, Artificial Sequence
  Description of Artificial Sequence: Synthetic oligonucleotide
  Target: LAMA2; (+) strand; PAM type: NRG; PAM sequence: AAG
catgcatttaatgatatctc

SEQ ID NO: 166839 - DNA, 20 bp, Artificial Sequence
  Description of Artificial Sequence: Synthetic oligonucleotide
  Target: LAMA2; (+) strand; PAM type: NRG; PAM sequence: AGG
atgcatttaatgatatctca

SEQ ID NO: 166840 - DNA, 20 bp, Artificial Sequence
  Description of Artificial Sequence: Synthetic oligonucleotide
  Target: LAMA2; (+) strand; PAM type: NRG; PAM sequence: AAG
atttaatgatatctcaagga

SEQ ID NO: 166841 - DNA, 20 bp, Artificial Sequence
  Description of Artificial Sequence: Synthetic oligonucleotide
  Target: LAMA2; (+) strand; PAM type: NRG; PAM sequence: TAG
atgatatctcaaggaaagta

SEQ ID NO: 166842 - DNA, 20 bp, Artificial Sequence
  Description of Artificial Sequence: Synthetic oligonucleotide
  Target: LAMA2; (+) strand; PAM type: NRG; PAM sequence: AAG
atatctcaaggaaagtatag

SEQ ID NO: 166843 - DNA, 20 bp, Artificial Sequence
  Description of Artificial Sequence: Synthetic oligonucleotide
  Target: LAMA2; (+) strand; PAM type: NRG; PAM sequence: AGG
tatctcaaggaaagtataga

SEQ ID NO: 166844 - DNA, 20 bp, Artificial Sequence
  Description of Artificial Sequence: Synthetic oligonucleotide
  Target: LAMA2; (+) strand; PAM type: NRG; PAM sequence: TGG
gtatagaaggcattcctgta

SEQ ID NO: 166845 - DNA, 20 bp, Artificial Sequence
  Description of Artificial Sequence: Synthetic oligonucleotide
  Target: LAMA2; (+) strand; PAM type: NRG; PAM sequence: AAG
agaaggcattcctgtatggc

SEQ ID NO: 166846 - DNA, 20 bp, Artificial Sequence
  Description of Artificial Sequence: Synthetic oligonucleotide
  Target: LAMA2; (+) strand; PAM type: NRG; PAM sequence: AAG
aggcattcctgtatggcaag

SEQ ID NO: 166847 - DNA, 20 bp, Artificial Sequence
  Description of Artificial Sequence: Synthetic oligonucleotide
  Target: LAMA2; (+) strand; PAM type: NRG; PAM sequence: AGG
ggcattcctgtatggcaaga

SEQ ID NO: 166848 - DNA, 20 bp, Artificial Sequence
  Description of Artificial Sequence: Synthetic oligonucleotide
  Target: LAMA2; (+) strand; PAM type: NRG; PAM sequence: TAG
ttcctgtatggcaagaaggt

SEQ ID NO: 166849 - DNA, 20 bp, Artificial Sequence
  Description of Artificial Sequence: Synthetic oligonucleotide
  Target: LAMA2; (+) strand; PAM type: NRG; PAM sequence: AAG
tatggcaagaaggttagatt

SEQ ID NO: 166850 - DNA, 20 bp, Artificial Sequence
  Description of Artificial Sequence: Synthetic oligonucleotide
  Target: LAMA2; (+) strand; PAM type: NRG; PAM sequence: TAG
gattaagtaatttctcacct

SEQ ID NO: 166851 - DNA, 20 bp, Artificial Sequence
  Description of Artificial Sequence: Synthetic oligonucleotide
  Target: LAMA2; (+) strand; PAM type: NRG; PAM sequence: AGG
attaagtaatttctcacctt

SEQ ID NO: 166852 - DNA, 20 bp, Artificial Sequence
  Description of Artificial Sequence: Synthetic oligonucleotide
  Target: LAMA2; (+) strand; PAM type: NRG; PAM sequence: GAG
taatttctcaccttaggcct

SEQ ID NO: 166853 - DNA, 20 bp, Artificial Sequence
  Description of Artificial Sequence: Synthetic oligonucleotide
  Target: LAMA2; (+) strand; PAM type: NRG; PAM sequence: TAG
atactataatattaatgtta

SEQ ID NO: 166854 - DNA, 20 bp, Artificial Sequence
  Description of Artificial Sequence: Synthetic oligonucleotide
  Target: LAMA2; (+) strand; PAM type: NRG; PAM sequence: TAG
gttatagtcatttgattttg

SEQ ID NO: 166855 - DNA, 20 bp, Artificial Sequence
  Description of Artificial Sequence: Synthetic oligonucleotide
  Target: LAMA2; (+) strand; PAM type: NRG; PAM sequence: AAG
atagtcatttgattttgtag

SEQ ID NO: 166856 - DNA, 20 bp, Artificial Sequence
  Description of Artificial Sequence: Synthetic oligonucleotide
  Target: LAMA2; (+) strand; PAM type: NRG; PAM sequence: AGG
tagtcatttgattttgtaga

SEQ ID NO: 166857 - DNA, 20 bp, Artificial Sequence
  Description of Artificial Sequence: Synthetic oligonucleotide
  Target: LAMA2; (+) strand; PAM type: NRG; PAM sequence: CAG
gtagaaggaatatataccaa

SEQ ID NO: 166858 - DNA, 20 bp, Artificial Sequence
  Description of Artificial Sequence: Synthetic oligonucleotide
  Target: LAMA2; (+) strand; PAM type: NRG; PAM sequence: CAG
aatatataccaacagttttc

SEQ ID NO: 166859 - DNA, 20 bp, Artificial Sequence
  Description of Artificial Sequence: Synthetic oligonucleotide
  Target: LAMA2; (+) strand; PAM type: NRG; PAM sequence: AAG
tatattctgatgtattattg

SEQ ID NO: 166860 - DNA, 20 bp, Artificial Sequence
  Description of Artificial Sequence: Synthetic oligonucleotide
  Target: LAMA2; (+) strand; PAM type: NRG; PAM sequence: GAG
tattctgatgtattattgaa

SEQ ID NO: 166861 - DNA, 20 bp, Artificial Sequence
  Description of Artificial Sequence: Synthetic oligonucleotide
  Target: LAMA2; (+) strand; PAM type: NRG; PAM sequence: TAG
atgtattattgaagagatac

SEQ ID NO: 166862 - DNA, 20 bp, Artificial Sequence
  Description of Artificial Sequence: Synthetic oligonucleotide
  Target: LAMA2; (+) strand; PAM type: NRG; PAM sequence: GAG
tactagcacataccactctt

SEQ ID NO: 166863 - DNA, 20 bp, Artificial Sequence
  Description of Artificial Sequence: Synthetic oligonucleotide
  Target: LAMA2; (+) strand; PAM type: NRG; PAM sequence: TAG
aatataattaaacttctcat

SEQ ID NO: 166864 - DNA, 20 bp, Artificial Sequence
  Description of Artificial Sequence: Synthetic oligonucleotide
  Target: LAMA2; (+) strand; PAM type: NRG; PAM sequence: AGG
atataattaaacttctcatt

SEQ ID NO: 166865 - DNA, 20 bp, Artificial Sequence
  Description of Artificial Sequence: Synthetic oligonucleotide
  Target: LAMA2; (+) strand; PAM type: NRG; PAM sequence: TAG
ctcattaggcatccaaaata

SEQ ID NO: 166866 - DNA, 20 bp, Artificial Sequence
  Description of Artificial Sequence: Synthetic oligonucleotide
  Target: LAMA2; (+) strand; PAM type: NRG; PAM sequence: AGG
tcattaggcatccaaaatat

SEQ ID NO: 166867 - DNA, 20 bp, Artificial Sequence
  Description of Artificial Sequence: Synthetic oligonucleotide
  Target: LAMA2; (+) strand; PAM type: NRG; PAM sequence: TGG
aatataggaatttcccctaa

SEQ ID NO: 166868 - DNA, 20 bp, Artificial Sequence
  Description of Artificial Sequence: Synthetic oligonucleotide
  Target: LAMA2; (+) strand; PAM type: NRG; PAM sequence: AAG
ctaatggctaatttttatat

SEQ ID NO: 166869 - DNA, 20 bp, Artificial Sequence
  Description of Artificial Sequence: Synthetic oligonucleotide
  Target: LAMA2; (+) strand; PAM type: NRG; PAM sequence: AAG
atactatgtacactatttca

SEQ ID NO: 166870 - DNA, 20 bp, Artificial Sequence
  Description of Artificial Sequence: Synthetic oligonucleotide
  Target: LAMA2; (+) strand; PAM type: NRG; PAM sequence: CAG
ctatgtacactatttcaaag

SEQ ID NO: 166871 - DNA, 20 bp, Artificial Sequence
  Description of Artificial Sequence: Synthetic oligonucleotide
  Target: LAMA2; (+) strand; PAM type: NRG; PAM sequence: CAG
gtacactatttcaaagcaga

SEQ ID NO: 166872 - DNA, 20 bp, Artificial Sequence
  Description of Artificial Sequence: Synthetic oligonucleotide
  Target: LAMA2; (+) strand; PAM type: NRG; PAM sequence: AAG
ctatttcaaagcagacagaa

SEQ ID NO: 166873 - DNA, 20 bp, Artificial Sequence
  Description of Artificial Sequence: Synthetic oligonucleotide
  Target: LAMA2; (+) strand; PAM type: NRG; PAM sequence: AAG
agacagaaaagtcatatgaa

SEQ ID NO: 166874 - DNA, 20 bp, Artificial Sequence
  Description of Artificial Sequence: Synthetic oligonucleotide
  Target: LAMA2; (+) strand; PAM type: NRG; PAM sequence: AGG
gacagaaaagtcatatgaaa

SEQ ID NO: 166875 - DNA, 20 bp, Artificial Sequence
  Description of Artificial Sequence: Synthetic oligonucleotide
  Target: LAMA2; (+) strand; PAM type: NRG; PAM sequence: GGG
acagaaaagtcatatgaaaa

SEQ ID NO: 166876 - DNA, 20 bp, Artificial Sequence
  Description of Artificial Sequence: Synthetic oligonucleotide
  Target: LAMA2; (+) strand; PAM type: NRG; PAM sequence: AAG
atgaaaagggtatgtcaaaa

SEQ ID NO: 166877 - DNA, 20 bp, Artificial Sequence
  Description of Artificial Sequence: Synthetic oligonucleotide
  Target: LAMA2; (+) strand; PAM type: NRG; PAM sequence: AAG
tatgtcaaaaaagtttcaaa

SEQ ID NO: 166878 - DNA, 20 bp, Artificial Sequence
  Description of Artificial Sequence: Synthetic oligonucleotide
  Target: LAMA2; (+) strand; PAM type: NRG; PAM sequence: GAG
tgtcaaaaaagtttcaaaaa

SEQ ID NO: 166879 - DNA, 20 bp, Artificial Sequence
  Description of Artificial Sequence: Synthetic oligonucleotide
  Target: LAMA2; (+) strand; PAM type: NRG; PAM sequence: AGG
gtcaaaaaagtttcaaaaag

SEQ ID NO: 166880 - DNA, 20 bp, Artificial Sequence
  Description of Artificial Sequence: Synthetic oligonucleotide
  Target: LAMA2; (+) strand; PAM type: NRG; PAM sequence: TGG
atttatgtgttgtgtgtttg

SEQ ID NO: 166881 - DNA, 20 bp, Artificial Sequence
  Description of Artificial Sequence: Synthetic oligonucleotide
  Target: LAMA2; (+) strand; PAM type: NRG; PAM sequence: CAG
tgtgtgtttgtggacctaac

SEQ ID NO: 166882 - DNA, 20 bp, Artificial Sequence
  Description of Artificial Sequence: Synthetic oligonucleotide
  Target: LAMA2; (+) strand; PAM type: NRG; PAM sequence: AGG
gtgtgtttgtggacctaacc

SEQ ID NO: 166883 - DNA, 20 bp, Artificial Sequence
  Description of Artificial Sequence: Synthetic oligonucleotide
  Target: LAMA2; (+) strand; PAM type: NRG; PAM sequence: AAG
gacatttgattcaattaacc

SEQ ID NO: 166884 - DNA, 20 bp, Artificial Sequence
  Description of Artificial Sequence: Synthetic oligonucleotide
  Target: LAMA2; (+) strand; PAM type: NRG; PAM sequence: TAG
ttgattcaattaaccaagtt

SEQ ID NO: 166885 - DNA, 20 bp, Artificial Sequence
  Description of Artificial Sequence: Synthetic oligonucleotide
  Target: LAMA2; (+) strand; PAM type: NRG; PAM sequence: CAG
attaaccaagtttagtatgt

SEQ ID NO: 166886 - DNA, 20 bp, Artificial Sequence
  Description of Artificial Sequence: Synthetic oligonucleotide
  Target: LAMA2; (+) strand; PAM type: NRG; PAM sequence: AAG
gtatgtcagcaaccctctga

SEQ ID NO: 166887 - DNA, 20 bp, Artificial Sequence
  Description of Artificial Sequence: Synthetic oligonucleotide
  Target: LAMA2; (+) strand; PAM type: NRG; PAM sequence: GAG
cagcaaccctctgaaagatt

SEQ ID NO: 166888 - DNA, 20 bp, Artificial Sequence
  Description of Artificial Sequence: Synthetic oligonucleotide
  Target: LAMA2; (+) strand; PAM type: NRG; PAM sequence: AAG
caaccctctgaaagattgag

SEQ ID NO: 166889 - DNA, 20 bp, Artificial Sequence
  Description of Artificial Sequence: Synthetic oligonucleotide
  Target: LAMA2; (+) strand; PAM type: NRG; PAM sequence: CAG
gattgagaagattgactgtc

SEQ ID NO: 166890 - DNA, 20 bp, Artificial Sequence
  Description of Artificial Sequence: Synthetic oligonucleotide
  Target: LAMA2; (+) strand; PAM type: NRG; PAM sequence: GAG
ttgagaagattgactgtcca

SEQ ID NO: 166891 - DNA, 20 bp, Artificial Sequence
  Description of Artificial Sequence: Synthetic oligonucleotide
  Target: LAMA2; (+) strand; PAM type: NRG; PAM sequence: AAG
aatatttgctttctctgttg

SEQ ID NO: 166892 - DNA, 20 bp, Artificial Sequence
  Description of Artificial Sequence: Synthetic oligonucleotide
  Target: LAMA2; (+) strand; PAM type: NRG; PAM sequence: TAG
tctctgttgaagaaattatg

SEQ ID NO: 166893 - DNA, 20 bp, Artificial Sequence
  Description of Artificial Sequence: Synthetic oligonucleotide
  Target: LAMA2; (+) strand; PAM type: NRG; PAM sequence: CAG
gaagaaattatgtagactta

SEQ ID NO: 166894 - DNA, 20 bp, Artificial Sequence
  Description of Artificial Sequence: Synthetic oligonucleotide
  Target: LAMA2; (+) strand; PAM type: NRG; PAM sequence: AGG
aagaaattatgtagacttac

SEQ ID NO: 166895 - DNA, 20 bp, Artificial Sequence
  Description of Artificial Sequence: Synthetic oligonucleotide
  Target: LAMA2; (+) strand; PAM type: NRG; PAM sequence: AAG
ttatgtagacttacaggtat

SEQ ID NO: 166896 - DNA, 20 bp, Artificial Sequence
  Description of Artificial Sequence: Synthetic oligonucleotide
  Target: LAMA2; (+) strand; PAM type: NRG; PAM sequence: GAG
atgtagacttacaggtataa

SEQ ID NO: 166897 - DNA, 20 bp, Artificial Sequence
  Description of Artificial Sequence: Synthetic oligonucleotide
  Target: LAMA2; (+) strand; PAM type: NRG; PAM sequence: TAG
atttttgaatctcttatttt

SEQ ID NO: 166898 - DNA, 20 bp, Artificial Sequence
  Description of Artificial Sequence: Synthetic oligonucleotide
  Target: LAMA2; (+) strand; PAM type: NRG; PAM sequence: TGG
ttatttttagtaatgattat

SEQ ID NO: 166899 - DNA, 20 bp, Artificial Sequence
  Description of Artificial Sequence: Synthetic oligonucleotide
  Target: LAMA2; (+) strand; PAM type: NRG; PAM sequence: AAG
tagtaatgattattggcttt

SEQ ID NO: 166900 - DNA, 20 bp, Artificial Sequence
  Description of Artificial Sequence: Synthetic oligonucleotide
  Target: LAMA2; (+) strand; PAM type: NRG; PAM sequence: AGG
agtaatgattattggcttta

SEQ ID NO: 166901 - DNA, 20 bp, Artificial Sequence
  Description of Artificial Sequence: Synthetic oligonucleotide
  Target: LAMA2; (+) strand; PAM type: NRG; PAM sequence: CAG
tggctttaaggattttaatt

SEQ ID NO: 166902 - DNA, 20 bp, Artificial Sequence
  Description of Artificial Sequence: Synthetic oligonucleotide
  Target: LAMA2; (+) strand; PAM type: NRG; PAM sequence: TAG
tcagttactaatgttatatt

SEQ ID NO: 166903 - DNA, 20 bp, Artificial Sequence
  Description of Artificial Sequence: Synthetic oligonucleotide
  Target: LAMA2; (+) strand; PAM type: NRG; PAM sequence: AGG
cagttactaatgttatattt

SEQ ID NO: 166904 - DNA, 20 bp, Artificial Sequence
  Description of Artificial Sequence: Synthetic oligonucleotide
  Target: LAMA2; (+) strand; PAM type: NRG; PAM sequence: AAG
atgcaattattttactgcaa

SEQ ID NO: 166905 - DNA, 20 bp, Artificial Sequence
  Description of Artificial Sequence: Synthetic oligonucleotide
  Target: LAMA2; (+) strand; PAM type: NRG; PAM sequence: AAG
ttattttactgcaaaagcaa

SEQ ID NO: 166906 - DNA, 20 bp, Artificial Sequence
  Description of Artificial Sequence: Synthetic oligonucleotide
  Target: LAMA2; (+) strand; PAM type: NRG; PAM sequence: AGG
tattttactgcaaaagcaaa

SEQ ID NO: 166907 - DNA, 20 bp, Artificial Sequence
  Description of Artificial Sequence: Synthetic oligonucleotide
  Target: LAMA2; (+) strand; PAM type: NRG; PAM sequence: AAG
aaggctgaaaattattgttg

SEQ ID NO: 166908 - DNA, 20 bp, Artificial Sequence
  Description of Artificial Sequence: Synthetic oligonucleotide
  Target: LAMA2; (+) strand; PAM type: NRG; PAM sequence: TGG
ttgaagatcccatgtatttt

SEQ ID NO: 166909 - DNA, 20 bp, Artificial Sequence
  Description of Artificial Sequence: Synthetic oligonucleotide
  Target: LAMA2; (+) strand; PAM type: NRG; PAM sequence: AAG
cacattcatctctataaaat

SEQ ID NO: 166910 - DNA, 20 bp, Artificial Sequence
  Description of Artificial Sequence: Synthetic oligonucleotide
  Target: LAMA2; (+) strand; PAM type: NRG; PAM sequence: CAG
taagttcttaaaacactccc

SEQ ID NO: 166911 - DNA, 20 bp, Artificial Sequence
  Description of Artificial Sequence: Synthetic oligonucleotide
  Target: LAMA2; (+) strand; PAM type: NRG; PAM sequence: CAG
cccagttaacacttattcat

SEQ ID NO: 166912 - DNA, 20 bp, Artificial Sequence
  Description of Artificial Sequence: Synthetic oligonucleotide
  Target: LAMA2; (+) strand; PAM type: NRG; PAM sequence: TAG
tgacttgaaattataattca

SEQ ID NO: 166913 - DNA, 20 bp, Artificial Sequence
  Description of Artificial Sequence: Synthetic oligonucleotide
  Target: LAMA2; (+) strand; PAM type: NRG; PAM sequence: TGG
catagataattattttatct

SEQ ID NO: 166914 - DNA, 20 bp, Artificial Sequence
  Description of Artificial Sequence: Synthetic oligonucleotide
  Target: LAMA2; (+) strand; PAM type: NRG; PAM sequence: GAG
tagataattattttatcttg

SEQ ID NO: 166915 - DNA, 20 bp, Artificial Sequence
  Description of Artificial Sequence: Synthetic oligonucleotide
  Target: LAMA2; (+) strand; PAM type: NRG; PAM sequence: TGG
cataatgctactgttaaata

SEQ ID NO: 166916 - DNA, 20 bp, Artificial Sequence
  Description of Artificial Sequence: Synthetic oligonucleotide
  Target: LAMA2; (+) strand; PAM type: NRG; PAM sequence: TGG
tgctactgttaaatatggaa

SEQ ID NO: 166917 - DNA, 20 bp, Artificial Sequence
  Description of Artificial Sequence: Synthetic oligonucleotide
  Target: LAMA2; (+) strand; PAM type: NRG; PAM sequence: TGG
gctcttttattgcttaaaaa

SEQ ID NO: 166918 - DNA, 20 bp, Artificial Sequence
  Description of Artificial Sequence: Synthetic oligonucleotide
  Target: LAMA2; (+) strand; PAM type: NRG; PAM sequence: TGG
cttttattgcttaaaaatgg

SEQ ID NO: 166919 - DNA, 20 bp, Artificial Sequence
  Description of Artificial Sequence: Synthetic oligonucleotide
  Target: LAMA2; (+) strand; PAM type: NRG; PAM sequence: TGG
cttaaaaatggtggttcctt

SEQ ID NO: 166920 - DNA, 20 bp, Artificial Sequence
  Description of Artificial Sequence: Synthetic oligonucleotide
  Target: LAMA2; (+) strand; PAM type: NRG; PAM sequence: TGG
aaaatggtggttcctttgga

SEQ ID NO: 166921 - DNA, 20 bp, Artificial Sequence
  Description of Artificial Sequence: Synthetic oligonucleotide
  Target: LAMA2; (+) strand; PAM type: NRG; PAM sequence: AAG
tcctttggatggttgaataa

SEQ ID NO: 166922 - DNA, 20 bp, Artificial Sequence
  Description of Artificial Sequence: Synthetic oligonucleotide
  Target: LAMA2; (+) strand; PAM type: NRG; PAM sequence: GAG
ctttggatggttgaataaaa

SEQ ID NO: 166923 - DNA, 20 bp, Artificial Sequence
  Description of Artificial Sequence: Synthetic oligonucleotide
  Target: LAMA2; (+) strand; PAM type: NRG; PAM sequence: AGG
tttggatggttgaataaaag

SEQ ID NO: 166924 - DNA, 20 bp, Artificial Sequence
  Description of Artificial Sequence: Synthetic oligonucleotide
  Target: LAMA2; (+) strand; PAM type: NRG; PAM sequence: TGG
ggttgaataaaagaggatta

SEQ ID NO: 166925 - DNA, 20 bp, Artificial Sequence
  Description of Artificial Sequence: Synthetic oligonucleotide
  Target: LAMA2; (+) strand; PAM type: NRG; PAM sequence: TGG
gattatggcacttaaatcaa

SEQ ID NO: 166926 - DNA, 20 bp, Artificial Sequence
  Description of Artificial Sequence: Synthetic oligonucleotide
  Target: LAMA2; (+) strand; PAM type: NRG; PAM sequence: TGG
ctgcaatgacacttgaaatt

SEQ ID NO: 166927 - DNA, 20 bp, Artificial Sequence
  Description of Artificial Sequence: Synthetic oligonucleotide
  Target: LAMA2; (+) strand; PAM type: NRG; PAM sequence: GGG
tgcaatgacacttgaaattt

SEQ ID NO: 166928 - DNA, 20 bp, Artificial Sequence
  Description of Artificial Sequence: Synthetic oligonucleotide
  Target: LAMA2; (+) strand; PAM type: NRG; PAM sequence: AAG
ttgggctttttcatctgaaa

SEQ ID NO: 166929 - DNA, 20 bp, Artificial Sequence
  Description of Artificial Sequence: Synthetic oligonucleotide
  Target: LAMA2; (+) strand; PAM type: NRG; PAM sequence: CAG
ttcatctgaaaaagcctgac

SEQ ID NO: 166930 - DNA, 20 bp, Artificial Sequence
  Description of Artificial Sequence: Synthetic oligonucleotide
  Target: LAMA2; (+) strand; PAM type: NRG; PAM sequence: TGG
ccagtttcatctatacttcc

SEQ ID NO: 166931 - DNA, 20 bp, Artificial Sequence
  Description of Artificial Sequence: Synthetic oligonucleotide
  Target: LAMA2; (+) strand; PAM type: NRG; PAM sequence: CAG
ggaacatgcattcattcatt

SEQ ID NO: 166932 - DNA, 20 bp, Artificial Sequence
  Description of Artificial Sequence: Synthetic oligonucleotide
  Target: LAMA2; (+) strand; PAM type: NRG; PAM sequence: TAG
attcattcagtcattcaaaa

SEQ ID NO: 166933 - DNA, 20 bp, Artificial Sequence
  Description of Artificial Sequence: Synthetic oligonucleotide
  Target: LAMA2; (+) strand; PAM type: NRG; PAM sequence: AAG
tcccatgtttgatgaactaa

SEQ ID NO: 166934 - DNA, 20 bp, Artificial Sequence
  Description of Artificial Sequence: Synthetic oligonucleotide
  Target: LAMA2; (+) strand; PAM type: NRG; PAM sequence: AGG
cccatgtttgatgaactaaa

SEQ ID NO: 166935 - DNA, 20 bp, Artificial Sequence
  Description of Artificial Sequence: Synthetic oligonucleotide
  Target: LAMA2; (+) strand; PAM type: NRG; PAM sequence: GAG
catgtttgatgaactaaaag

SEQ ID NO: 166936 - DNA, 20 bp, Artificial Sequence
  Description of Artificial Sequence: Synthetic oligonucleotide
  Target: LAMA2; (+) strand; PAM type: NRG; PAM sequence: AAG
atgaactaaaaggagcattt

SEQ ID NO: 166937 - DNA, 20 bp, Artificial Sequence
  Description of Artificial Sequence: Synthetic oligonucleotide
  Target: LAMA2; (+) strand; PAM type: NRG; PAM sequence: CAG
actaaaaggagcatttaagc

SEQ ID NO: 166938 - DNA, 20 bp, Artificial Sequence
  Description of Artificial Sequence: Synthetic oligonucleotide
  Target: LAMA2; (+) strand; PAM type: NRG; PAM sequence: TAG
aggagcatttaagccagttt

SEQ ID NO: 166939 - DNA, 20 bp, Artificial Sequence
  Description of Artificial Sequence: Synthetic oligonucleotide
  Target: LAMA2; (+) strand; PAM type: NRG; PAM sequence: AGG
ggagcatttaagccagtttt

SEQ ID NO: 166940 - DNA, 20 bp, Artificial Sequence
  Description of Artificial Sequence: Synthetic oligonucleotide
  Target: LAMA2; (+) strand; PAM type: NRG; PAM sequence: CGG
ttaagccagttttaggtcat

SEQ ID NO: 166941 - DNA, 20 bp, Artificial Sequence
  Description of Artificial Sequence: Synthetic oligonucleotide
  Target: LAMA2; (+) strand; PAM type: NRG; PAM sequence: GGG
taagccagttttaggtcatc

SEQ ID NO: 166942 - DNA, 20 bp, Artificial Sequence
  Description of Artificial Sequence: Synthetic oligonucleotide
  Target: LAMA2; (+) strand; PAM type: NRG; PAM sequence: GGG
aagccagttttaggtcatcg

SEQ ID NO: 166943 - DNA, 20 bp, Artificial Sequence
  Description of Artificial Sequence: Synthetic oligonucleotide
  Target: LAMA2; (+) strand; PAM type: NRG; PAM sequence: CAG
ggtcatcggggaatgtttct

SEQ ID NO: 166944 - DNA, 20 bp, Artificial Sequence
  Description of Artificial Sequence: Synthetic oligonucleotide
  Target: LAMA2; (+) strand; PAM type: NRG; PAM sequence: GAG
tcatcggggaatgtttctca

SEQ ID NO: 166945 - DNA, 20 bp, Artificial Sequence
  Description of Artificial Sequence: Synthetic oligonucleotide
  Target: LAMA2; (+) strand; PAM type: NRG; PAM sequence: AAG
cggggaatgtttctcagaga

SEQ ID NO: 166946 - DNA, 20 bp, Artificial Sequence
  Description of Artificial Sequence: Synthetic oligonucleotide
  Target: LAMA2; (+) strand; PAM type: NRG; PAM sequence: GAG
gagaaagtgacatttaaaat

SEQ ID NO: 166947 - DNA, 20 bp, Artificial Sequence
  Description of Artificial Sequence: Synthetic oligonucleotide
  Target: LAMA2; (+) strand; PAM type: NRG; PAM sequence: GAG
gaaagtgacatttaaaatga

SEQ ID NO: 166948 - DNA, 20 bp, Artificial Sequence
  Description of Artificial Sequence: Synthetic oligonucleotide
  Target: LAMA2; (+) strand; PAM type: NRG; PAM sequence: AAG
aaatgagagctgaaatgaat

SEQ ID NO: 166949 - DNA, 20 bp, Artificial Sequence
  Description of Artificial Sequence: Synthetic oligonucleotide
  Target: LAMA2; (+) strand; PAM type: NRG; PAM sequence: TAG
gagctgaaatgaataagtgc

SEQ ID NO: 166950 - DNA, 20 bp, Artificial Sequence
  Description of Artificial Sequence: Synthetic oligonucleotide
  Target: LAMA2; (+) strand; PAM type: NRG; PAM sequence: TAG
tgctagcctgatatacactg

SEQ ID NO: 166951 - DNA, 20 bp, Artificial Sequence
  Description of Artificial Sequence: Synthetic oligonucleotide
  Target: LAMA2; (+) strand; PAM type: NRG; PAM sequence: GAG
ctagcctgatatacactgta

SEQ ID NO: 166952 - DNA, 20 bp, Artificial Sequence
  Description of Artificial Sequence: Synthetic oligonucleotide
  Target: LAMA2; (+) strand; PAM type: NRG; PAM sequence: AAG
ctgatatacactgtagagct

SEQ ID NO: 166953 - DNA, 20 bp, Artificial Sequence
  Description of Artificial Sequence: Synthetic oligonucleotide
  Target: LAMA2; (+) strand; PAM type: NRG; PAM sequence: AGG
tgatatacactgtagagcta

SEQ ID NO: 166954 - DNA, 20 bp, Artificial Sequence
  Description of Artificial Sequence: Synthetic oligonucleotide
  Target: LAMA2; (+) strand; PAM type: NRG; PAM sequence: AAG
gctaaggatttgcaaatgaa

SEQ ID NO: 166955 - DNA, 20 bp, Artificial Sequence
  Description of Artificial Sequence: Synthetic oligonucleotide
  Target: LAMA2; (+) strand; PAM type: NRG; PAM sequence: CAG
gatttgcaaatgaaaagtcc

SEQ ID NO: 166956 - DNA, 20 bp, Artificial Sequence
  Description of Artificial Sequence: Synthetic oligonucleotide
  Target: LAMA2; (+) strand; PAM type: NRG; PAM sequence: CAG
ttgcaaatgaaaagtcccag

SEQ ID NO: 166957 - DNA, 20 bp, Artificial Sequence
  Description of Artificial Sequence: Synthetic oligonucleotide
  Target: LAMA2; (+) strand; PAM type: NRG; PAM sequence: AAG
gaaaagtcccagcagtgata

SEQ ID NO: 166958 - DNA, 20 bp, Artificial Sequence
  Description of Artificial Sequence: Synthetic oligonucleotide
  Target: LAMA2; (+) strand; PAM type: NRG; PAM sequence: GAG
aaagtcccagcagtgataaa

SEQ ID NO: 166959 - DNA, 20 bp, Artificial Sequence
  Description of Artificial Sequence: Synthetic oligonucleotide
  Target: LAMA2; (+) strand; PAM type: NRG; PAM sequence: GAG
aaagagtatccgcataattt

SEQ ID NO: 166960 - DNA, 20 bp, Artificial Sequence
  Description of Artificial Sequence: Synthetic oligonucleotide
  Target: LAMA2; (+) strand; PAM type: NRG; PAM sequence: CAG
tccgcataatttgagaattt

SEQ ID NO: 166961 - DNA, 20 bp, Artificial Sequence
  Description of Artificial Sequence: Synthetic oligonucleotide
  Target: LAMA2; (+) strand; PAM type: NRG; PAM sequence: TGG
cataatttgagaatttcaga

SEQ ID NO: 166962 - DNA, 20 bp, Artificial Sequence
  Description of Artificial Sequence: Synthetic oligonucleotide
  Target: LAMA2; (+) strand; PAM type: NRG; PAM sequence: TGG
gaatttcagatggccccatg

SEQ ID NO: 166963 - DNA, 20 bp, Artificial Sequence
  Description of Artificial Sequence: Synthetic oligonucleotide
  Target: LAMA2; (+) strand; PAM type: NRG; PAM sequence: CGG
cagatggccccatgtggcta

SEQ ID NO: 166964 - DNA, 20 bp, Artificial Sequence
  Description of Artificial Sequence: Synthetic oligonucleotide
  Target: LAMA2; (+) strand; PAM type: NRG; PAM sequence: AAG
tggctacggcattatatgca

SEQ ID NO: 166965 - DNA, 20 bp, Artificial Sequence
  Description of Artificial Sequence: Synthetic oligonucleotide
  Target: LAMA2; (+) strand; PAM type: NRG; PAM sequence: AAG
tacggcattatatgcaaaga

SEQ ID NO: 166966 - DNA, 20 bp, Artificial Sequence
  Description of Artificial Sequence: Synthetic oligonucleotide
  Target: LAMA2; (+) strand; PAM type: NRG; PAM sequence: CAG
ggcattatatgcaaagaaag

SEQ ID NO: 166967 - DNA, 20 bp, Artificial Sequence
  Description of Artificial Sequence: Synthetic oligonucleotide
  Target: LAMA2; (+) strand; PAM type: NRG; PAM sequence: TGG
attatatgcaaagaaagcag

SEQ ID NO: 166968 - DNA, 20 bp, Artificial Sequence
  Description of Artificial Sequence: Synthetic oligonucleotide
  Target: LAMA2; (+) strand; PAM type: NRG; PAM sequence: CAG
tgcaaagaaagcagtggcta

SEQ ID NO: 166969 - DNA, 20 bp, Artificial Sequence
  Description of Artificial Sequence: Synthetic oligonucleotide
  Target: LAMA2; (+) strand; PAM type: NRG; PAM sequence: TGG
gcagtggctacagctacata

SEQ ID NO: 166970 - DNA, 20 bp, Artificial Sequence
  Description of Artificial Sequence: Synthetic oligonucleotide
  Target: LAMA2; (+) strand; PAM type: NRG; PAM sequence: GAG
agtggctacagctacatatg

SEQ ID NO: 166971 - DNA, 20 bp, Artificial Sequence
  Description of Artificial Sequence: Synthetic oligonucleotide
  Target: LAMA2; (+) strand; PAM type: NRG; PAM sequence: AGG
gtggctacagctacatatgg

SEQ ID NO: 166972 - DNA, 20 bp, Artificial Sequence
  Description of Artificial Sequence: Synthetic oligonucleotide
  Target: LAMA2; (+) strand; PAM type: NRG; PAM sequence: GGG
tggctacagctacatatgga

SEQ ID NO: 166973 - DNA, 20 bp, Artificial Sequence
  Description of Artificial Sequence: Synthetic oligonucleotide
  Target: LAMA2; (+) strand; PAM type: NRG; PAM sequence: GGG
ggctacagctacatatggag

SEQ ID NO: 166974 - DNA, 20 bp, Artificial Sequence
  Description of Artificial Sequence: Synthetic oligonucleotide
  Target: LAMA2; (+) strand; PAM type: NRG; PAM sequence: AAG
acagctacatatggaggggt

SEQ ID NO: 166975 - DNA, 20 bp, Artificial Sequence
  Description of Artificial Sequence: Synthetic oligonucleotide
  Target: LAMA2; (+) strand; PAM type: NRG; PAM sequence: CAG
tacatatggaggggtaagca

SEQ ID NO: 166976 - DNA, 20 bp, Artificial Sequence
  Description of Artificial Sequence: Synthetic oligonucleotide
  Target: LAMA2; (+) strand; PAM type: NRG; PAM sequence: TGG
atatggaggggtaagcacag

SEQ ID NO: 166977 - DNA, 20 bp, Artificial Sequence
  Description of Artificial Sequence: Synthetic oligonucleotide
  Target: LAMA2; (+) strand; PAM type: NRG; PAM sequence: TGG
tggaggggtaagcacagtgg

SEQ ID NO: 166978 - DNA, 20 bp, Artificial Sequence
  Description of Artificial Sequence: Synthetic oligonucleotide
  Target: LAMA2; (+) strand; PAM type: NRG; PAM sequence: AAG
gggtaagcacagtggtggtg

SEQ ID NO: 166979 - DNA, 20 bp, Artificial Sequence
  Description of Artificial Sequence: Synthetic oligonucleotide
  Target: LAMA2; (+) strand; PAM type: NRG; PAM sequence: AGG
ggtaagcacagtggtggtga

SEQ ID NO: 166980 - DNA, 20 bp, Artificial Sequence
  Description of Artificial Sequence: Synthetic oligonucleotide
  Target: LAMA2; (+) strand; PAM type: NRG; PAM sequence: CGG
aagcacagtggtggtgaagg

SEQ ID NO: 166981 - DNA, 20 bp, Artificial Sequence
  Description of Artificial Sequence: Synthetic oligonucleotide
  Target: LAMA2; (+) strand; PAM type: NRG; PAM sequence: GGG
agcacagtggtggtgaaggc

SEQ ID NO: 166982 - DNA, 20 bp, Artificial Sequence
  Description of Artificial Sequence: Synthetic oligonucleotide
  Target: LAMA2; (+) strand; PAM type: NRG; PAM sequence: GGG
gcacagtggtggtgaaggcg

SEQ ID NO: 166983 - DNA, 20 bp, Artificial Sequence
  Description of Artificial Sequence: Synthetic oligonucleotide
  Target: LAMA2; (+) strand; PAM type: NRG; PAM sequence: GGG
cacagtggtggtgaaggcgg

SEQ ID NO: 166984 - DNA, 20 bp, Artificial Sequence
  Description of Artificial Sequence: Synthetic oligonucleotide
  Target: LAMA2; (+) strand; PAM type: NRG; PAM sequence: TGG
agtggtggtgaaggcggggg

SEQ ID NO: 166985 - DNA, 20 bp, Artificial Sequence
  Description of Artificial Sequence: Synthetic oligonucleotide
  Target: LAMA2; (+) strand; PAM type: NRG; PAM sequence: GGG
gtggtggtgaaggcgggggt

SEQ ID NO: 166986 - DNA, 20 bp, Artificial Sequence
  Description of Artificial Sequence: Synthetic oligonucleotide
  Target: LAMA2; (+) strand; PAM type: NRG; PAM sequence: GGG
tggtggtgaaggcgggggtg

SEQ ID NO: 166987 - DNA, 20 bp, Artificial Sequence
  Description of Artificial Sequence: Synthetic oligonucleotide
  Target: LAMA2; (+) strand; PAM type: NRG; PAM sequence: GGG
ggtggtgaaggcgggggtgg

SEQ ID NO: 166988 - DNA, 20 bp, Artificial Sequence
  Description of Artificial Sequence: Synthetic oligonucleotide
  Target: LAMA2; (+) strand; PAM type: NRG; PAM sequence: TGG
ggtgaaggcgggggtggggg

SEQ ID NO: 166989 - DNA, 20 bp, Artificial Sequence
  Description of Artificial Sequence: Synthetic oligonucleotide
  Target: LAMA2; (+) strand; PAM type: NRG; PAM sequence: CAG
gaaggcgggggtgggggtgg

SEQ ID NO: 166990 - DNA, 20 bp, Artificial Sequence
  Description of Artificial Sequence: Synthetic oligonucleotide
  Target: LAMA2; (+) strand; PAM type: NRG; PAM sequence: AGG
aaggcgggggtgggggtggc

SEQ ID NO: 166991 - DNA, 20 bp, Artificial Sequence
  Description of Artificial Sequence: Synthetic oligonucleotide
  Target: LAMA2; (+) strand; PAM type: NRG; PAM sequence: AAG
ggtgggggtggcaggtaatg

SEQ ID NO: 166992 - DNA, 20 bp, Artificial Sequence
  Description of Artificial Sequence: Synthetic oligonucleotide
  Target: LAMA2; (+) strand; PAM type: NRG; PAM sequence: TGG
ttattcatcctgactgcatt

SEQ ID NO: 166993 - DNA, 20 bp, Artificial Sequence
  Description of Artificial Sequence: Synthetic oligonucleotide
  Target: LAMA2; (+) strand; PAM type: NRG; PAM sequence: GGG
tattcatcctgactgcattt

SEQ ID NO: 166994 - DNA, 20 bp, Artificial Sequence
  Description of Artificial Sequence: Synthetic oligonucleotide
  Target: LAMA2; (+) strand; PAM type: NRG; PAM sequence: GAG
ttcatcctgactgcatttgg

SEQ ID NO: 166995 - DNA, 20 bp, Artificial Sequence
  Description of Artificial Sequence: Synthetic oligonucleotide
  Target: LAMA2; (+) strand; PAM type: NRG; PAM sequence: TAG
tcctgactgcatttgggagc

SEQ ID NO: 166996 - DNA, 20 bp, Artificial Sequence
  Description of Artificial Sequence: Synthetic oligonucleotide
  Target: LAMA2; (+) strand; PAM type: NRG; PAM sequence: TAG
actgcatttgggagctagtg

SEQ ID NO: 166997 - DNA, 20 bp, Artificial Sequence
  Description of Artificial Sequence: Synthetic oligonucleotide
  Target: LAMA2; (+) strand; PAM type: NRG; PAM sequence: AGG
ctgcatttgggagctagtgt

SEQ ID NO: 166998 - DNA, 20 bp, Artificial Sequence
  Description of Artificial Sequence: Synthetic oligonucleotide
  Target: LAMA2; (+) strand; PAM type: NRG; PAM sequence: AAG
gggagctagtgtaggctttc

SEQ ID NO: 166999 - DNA, 20 bp, Artificial Sequence
  Description of Artificial Sequence: Synthetic oligonucleotide
  Target: LAMA2; (+) strand; PAM type: NRG; PAM sequence: AAG
gctagtgtaggctttcaagc

SEQ ID NO: 167000 - DNA, 20 bp, Artificial Sequence
  Description of Artificial Sequence: Synthetic oligonucleotide
  Target: LAMA2; (+) strand; PAM type: NRG; PAM sequence: GAG
tagtgtaggctttcaagcaa

SEQ ID NO: 167001 - DNA, 20 bp, Artificial Sequence
  Description of Artificial Sequence: Synthetic oligonucleotide
  Target: LAMA2; (+) strand; PAM type: NRG; PAM sequence: AAG
tgtaggctttcaagcaagag

SEQ ID NO: 167002 - DNA, 20 bp, Artificial Sequence
  Description of Artificial Sequence: Synthetic oligonucleotide
  Target: LAMA2; (+) strand; PAM type: NRG; PAM sequence: AGG
gtaggctttcaagcaagaga

SEQ ID NO: 167003 - DNA, 20 bp, Artificial Sequence
  Description of Artificial Sequence: Synthetic oligonucleotide
  Target: LAMA2; (+) strand; PAM type: NRG; PAM sequence: TGG
tttcaagcaagagaaggtca

SEQ ID NO: 167004 - DNA, 20 bp, Artificial Sequence
  Description of Artificial Sequence: Synthetic oligonucleotide
  Target: LAMA2; (+) strand; PAM type: NRG; PAM sequence: TAG
gtcatggtttgatatgttca

SEQ ID NO: 167005 - DNA, 20 bp, Artificial Sequence
  Description of Artificial Sequence: Synthetic oligonucleotide
  Target: LAMA2; (+) strand; PAM type: NRG; PAM sequence: AGG
tcatggtttgatatgttcat

SEQ ID NO: 167006 - DNA, 20 bp, Artificial Sequence
  Description of Artificial Sequence: Synthetic oligonucleotide
  Target: LAMA2; (+) strand; PAM type: NRG; PAM sequence: CAG
ttcataggatgatcactctg

SEQ ID NO: 167007 - DNA, 20 bp, Artificial Sequence
  Description of Artificial Sequence: Synthetic oligonucleotide
  Target: LAMA2; (+) strand; PAM type: NRG; PAM sequence: TGG
aggatgatcactctgcagtg

SEQ ID NO: 167008 - DNA, 20 bp, Artificial Sequence
  Description of Artificial Sequence: Synthetic oligonucleotide
  Target: LAMA2; (+) strand; PAM type: NRG; PAM sequence: GAG
gatgatcactctgcagtgtg

SEQ ID NO: 167009 - DNA, 20 bp, Artificial Sequence
  Description of Artificial Sequence: Synthetic oligonucleotide
  Target: LAMA2; (+) strand; PAM type: NRG; PAM sequence: CAG
ctgcagtgtggagaaatcac

SEQ ID NO: 167010 - DNA, 20 bp, Artificial Sequence
  Description of Artificial Sequence: Synthetic oligonucleotide
  Target: LAMA2; (+) strand; PAM type: NRG; PAM sequence: AAG
gtgtggagaaatcaccagat

SEQ ID NO: 167011 - DNA, 20 bp, Artificial Sequence
  Description of Artificial Sequence: Synthetic oligonucleotide
  Target: LAMA2; (+) strand; PAM type: NRG; PAM sequence: TGG
aatcaccagataagaaaata

SEQ ID NO: 167012 - DNA, 20 bp, Artificial Sequence
  Description of Artificial Sequence: Synthetic oligonucleotide
  Target: LAMA2; (+) strand; PAM type: NRG; PAM sequence: GAG
tcaccagataagaaaatatg

SEQ ID NO: 167013 - DNA, 20 bp, Artificial Sequence
  Description of Artificial Sequence: Synthetic oligonucleotide
  Target: LAMA2; (+) strand; PAM type: NRG; PAM sequence: CAG
cagataagaaaatatggaga

SEQ ID NO: 167014 - DNA, 20 bp, Artificial Sequence
  Description of Artificial Sequence: Synthetic oligonucleotide
  Target: LAMA2; (+) strand; PAM type: NRG; PAM sequence: AGG
agataagaaaatatggagac

SEQ ID NO: 167015 - DNA, 20 bp, Artificial Sequence
  Description of Artificial Sequence: Synthetic oligonucleotide
  Target: LAMA2; (+) strand; PAM type: NRG; PAM sequence: TAG
aaatatggagacaggatctt

SEQ ID NO: 167016 - DNA, 20 bp, Artificial Sequence
  Description of Artificial Sequence: Synthetic oligonucleotide
  Target: LAMA2; (+) strand; PAM type: NRG; PAM sequence: AAG
gagacaggatctttagctaa

SEQ ID NO: 167017 - DNA, 20 bp, Artificial Sequence
  Description of Artificial Sequence: Synthetic oligonucleotide
  Target: LAMA2; (+) strand; PAM type: NRG; PAM sequence: AGG
agacaggatctttagctaaa

SEQ ID NO: 167018 - DNA, 20 bp, Artificial Sequence
  Description of Artificial Sequence: Synthetic oligonucleotide
  Target: LAMA2; (+) strand; PAM type: NRG; PAM sequence: CAG
ataatccaaataaaatatga

SEQ ID NO: 167019 - DNA, 20 bp, Artificial Sequence
  Description of Artificial Sequence: Synthetic oligonucleotide
  Target: LAMA2; (+) strand; PAM type: NRG; PAM sequence: TGG
atccaaataaaatatgacag

SEQ ID NO: 167020 - DNA, 20 bp, Artificial Sequence
  Description of Artificial Sequence: Synthetic oligonucleotide
  Target: LAMA2; (+) strand; PAM type: NRG; PAM sequence: CAG
aaataaaatatgacagtggc

SEQ ID NO: 167021 - DNA, 20 bp, Artificial Sequence
  Description of Artificial Sequence: Synthetic oligonucleotide
  Target: LAMA2; (+) strand; PAM type: NRG; PAM sequence: TAG
tgacagtggccagatgaaaa

SEQ ID NO: 167022 - DNA, 20 bp, Artificial Sequence
  Description of Artificial Sequence: Synthetic oligonucleotide
  Target: LAMA2; (+) strand; PAM type: NRG; PAM sequence: TAG
cagtggccagatgaaaatag

SEQ ID NO: 167023 - DNA, 20 bp, Artificial Sequence
  Description of Artificial Sequence: Synthetic oligonucleotide
  Target: LAMA2; (+) strand; PAM type: NRG; PAM sequence: AAG
cagatgaaaatagtagcaac

SEQ ID NO: 167024 - DNA, 20 bp, Artificial Sequence
  Description of Artificial Sequence: Synthetic oligonucleotide
  Target: LAMA2; (+) strand; PAM type: NRG; PAM sequence: AAG
tgaaaatagtagcaacaaga

SEQ ID NO: 167025 - DNA, 20 bp, Artificial Sequence
  Description of Artificial Sequence: Synthetic oligonucleotide
  Target: LAMA2; (+) strand; PAM type: NRG; PAM sequence: AAG
atagtagcaacaagaaagtc

SEQ ID NO: 167026 - DNA, 20 bp, Artificial Sequence
  Description of Artificial Sequence: Synthetic oligonucleotide
  Target: LAMA2; (+) strand; PAM type: NRG; PAM sequence: CAG
gcaacaagaaagtcaagaaa

SEQ ID NO: 167027 - DNA, 20 bp, Artificial Sequence
  Description of Artificial Sequence: Synthetic oligonucleotide
  Target: LAMA2; (+) strand; PAM type: NRG; PAM sequence: GAG
aacaagaaagtcaagaaaca

SEQ ID NO: 167028 - DNA, 20 bp, Artificial Sequence
  Description of Artificial Sequence: Synthetic oligonucleotide
  Target: LAMA2; (+) strand; PAM type: NRG; PAM sequence: GAG
caagaaagtcaagaaacaga

SEQ ID NO: 167029 - DNA, 20 bp, Artificial Sequence
  Description of Artificial Sequence: Synthetic oligonucleotide
  Target: LAMA2; (+) strand; PAM type: NRG; PAM sequence: TAG
agtcaagaaacagagagtaa

SEQ ID NO: 167030 - DNA, 20 bp, Artificial Sequence
  Description of Artificial Sequence: Synthetic oligonucleotide
  Target: LAMA2; (+) strand; PAM type: NRG; PAM sequence: TGG
aacagagagtaatagactca

SEQ ID NO: 167031 - DNA, 20 bp, Artificial Sequence
  Description of Artificial Sequence: Synthetic oligonucleotide
  Target: LAMA2; (+) strand; PAM type: NRG; PAM sequence: TGG
tcatggaactgatgatctaa

SEQ ID NO: 167032 - DNA, 20 bp, Artificial Sequence
  Description of Artificial Sequence: Synthetic oligonucleotide
  Target: LAMA2; (+) strand; PAM type: NRG; PAM sequence: CGG
tgatgatctaatggatacct

SEQ ID NO: 167033 - DNA, 20 bp, Artificial Sequence
  Description of Artificial Sequence: Synthetic oligonucleotide
  Target: LAMA2; (+) strand; PAM type: NRG; PAM sequence: AAG
atctaatggatacctcggat

SEQ ID NO: 167034 - DNA, 20 bp, Artificial Sequence
  Description of Artificial Sequence: Synthetic oligonucleotide
  Target: LAMA2; (+) strand; PAM type: NRG; PAM sequence: GAG
ctaatggatacctcggataa

SEQ ID NO: 167035 - DNA, 20 bp, Artificial Sequence
  Description of Artificial Sequence: Synthetic oligonucleotide
  Target: LAMA2; (+) strand; PAM type: NRG; PAM sequence: GAG
aatggatacctcggataaga

SEQ ID NO: 167036 - DNA, 20 bp, Artificial Sequence
  Description of Artificial Sequence: Synthetic oligonucleotide
  Target: LAMA2; (+) strand; PAM type: NRG; PAM sequence: AGG
atggatacctcggataagag

SEQ ID NO: 167037 - DNA, 20 bp, Artificial Sequence
  Description of Artificial Sequence: Synthetic oligonucleotide
  Target: LAMA2; (+) strand; PAM type: NRG; PAM sequence: TAG
cctcggataagagaggcctc

SEQ ID NO: 167038 - DNA, 20 bp, Artificial Sequence
  Description of Artificial Sequence: Synthetic oligonucleotide
  Target: LAMA2; (+) strand; PAM type: NRG; PAM sequence: AGG
ctcggataagagaggcctct

SEQ ID NO: 167039 - DNA, 20 bp, Artificial Sequence
  Description of Artificial Sequence: Synthetic oligonucleotide
  Target: LAMA2; (+) strand; PAM type: NRG; PAM sequence: TGG
ggcctctaggttgctgacct

SEQ ID NO: 167040 - DNA, 20 bp, Artificial Sequence
  Description of Artificial Sequence: Synthetic oligonucleotide
  Target: LAMA2; (+) strand; PAM type: NRG; PAM sequence: GAG
ggttgctgaccttggcaatt

SEQ ID NO: 167041 - DNA, 20 bp, Artificial Sequence
  Description of Artificial Sequence: Synthetic oligonucleotide
  Target: LAMA2; (+) strand; PAM type: NRG; PAM sequence: CAG
cttggcaattgagtgaatga

SEQ ID NO: 167042 - DNA, 20 bp, Artificial Sequence
  Description of Artificial Sequence: Synthetic oligonucleotide
  Target: LAMA2; (+) strand; PAM type: NRG; PAM sequence: CAG
tgagtgaatgacagtgacct

SEQ ID NO: 167043 - DNA, 20 bp, Artificial Sequence
  Description of Artificial Sequence: Synthetic oligonucleotide
  Target: LAMA2; (+) strand; PAM type: NRG; PAM sequence: GAG
acagtgacctcagatgaaac

SEQ ID NO: 167044 - DNA, 20 bp, Artificial Sequence
  Description of Artificial Sequence: Synthetic oligonucleotide
  Target: LAMA2; (+) strand; PAM type: NRG; PAM sequence: CAG
ctcagatgaaacgagaaata

SEQ ID NO: 167045 - DNA, 20 bp, Artificial Sequence
  Description of Artificial Sequence: Synthetic oligonucleotide
  Target: LAMA2; (+) strand; PAM type: NRG; PAM sequence: AGG
tcagatgaaacgagaaatac

SEQ ID NO: 167046 - DNA, 20 bp, Artificial Sequence
  Description of Artificial Sequence: Synthetic oligonucleotide
  Target: LAMA2; (+) strand; PAM type: NRG; PAM sequence: GAG
agatgaaacgagaaatacag

SEQ ID NO: 167047 - DNA, 20 bp, Artificial Sequence
  Description of Artificial Sequence: Synthetic oligonucleotide
  Target: LAMA2; (+) strand; PAM type: NRG; PAM sequence: AAG
gagaaatacaggagtattac

SEQ ID NO: 167048 - DNA, 20 bp, Artificial Sequence
  Description of Artificial Sequence: Synthetic oligonucleotide
  Target: LAMA2; (+) strand; PAM type: NRG; PAM sequence: AGG
agaaatacaggagtattaca

SEQ ID NO: 167049 - DNA, 20 bp, Artificial Sequence
  Description of Artificial Sequence: Synthetic oligonucleotide
  Target: LAMA2; (+) strand; PAM type: NRG; PAM sequence: TAG
tacaggagtattacaaggtt

SEQ ID NO: 167050 - DNA, 20 bp, Artificial Sequence
  Description of Artificial Sequence: Synthetic oligonucleotide
  Target: LAMA2; (+) strand; PAM type: NRG; PAM sequence: AAG
ggagtattacaaggtttagc

SEQ ID NO: 167051 - DNA, 20 bp, Artificial Sequence
  Description of Artificial Sequence: Synthetic oligonucleotide
  Target: LAMA2; (+) strand; PAM type: NRG; PAM sequence: GAG
agtattacaaggtttagcaa

SEQ ID NO: 167052 - DNA, 20 bp, Artificial Sequence
  Description of Artificial Sequence: Synthetic oligonucleotide
  Target: LAMA2; (+) strand; PAM type: NRG; PAM sequence: AAG
attgttgtcatttcaaattt

SEQ ID NO: 167053 - DNA, 20 bp, Artificial Sequence
  Description of Artificial Sequence: Synthetic oligonucleotide
  Target: LAMA2; (+) strand; PAM type: NRG; PAM sequence: AAG
gtgttatacaatatttattc

SEQ ID NO: 167054 - DNA, 20 bp, Artificial Sequence
  Description of Artificial Sequence: Synthetic oligonucleotide
  Target: LAMA2; (+) strand; PAM type: NRG; PAM sequence: AAG
ttatacaatatttattcaag

SEQ ID NO: 167055 - DNA, 20 bp, Artificial Sequence
  Description of Artificial Sequence: Synthetic oligonucleotide
  Target: LAMA2; (+) strand; PAM type: NRG; PAM sequence: TAG
atatttattcaagaagcaat

SEQ ID NO: 167056 - DNA, 20 bp, Artificial Sequence
  Description of Artificial Sequence: Synthetic oligonucleotide
  Target: LAMA2; (+) strand; PAM type: NRG; PAM sequence: AAG
tttattcaagaagcaattag

SEQ ID NO: 167057 - DNA, 20 bp, Artificial Sequence
  Description of Artificial Sequence: Synthetic oligonucleotide
  Target: LAMA2; (+) strand; PAM type: NRG; PAM sequence: CAG
attcaagaagcaattagaag

SEQ ID NO: 167058 - DNA, 20 bp, Artificial Sequence
  Description of Artificial Sequence: Synthetic oligonucleotide
  Target: LAMA2; (+) strand; PAM type: NRG; PAM sequence: AAG
caagaagcaattagaagcag

SEQ ID NO: 167059 - DNA, 20 bp, Artificial Sequence
  Description of Artificial Sequence: Synthetic oligonucleotide
  Target: LAMA2; (+) strand; PAM type: NRG; PAM sequence: TGG
agcaattagaagcagaagtc

SEQ ID NO: 167060 - DNA, 20 bp, Artificial Sequence
  Description of Artificial Sequence: Synthetic oligonucleotide
  Target: LAMA2; (+) strand; PAM type: NRG; PAM sequence: TAG
agcagaagtctggaacccat

SEQ ID NO: 167061 - DNA, 20 bp, Artificial Sequence
  Description of Artificial Sequence: Synthetic oligonucleotide
  Target: LAMA2; (+) strand; PAM type: NRG; PAM sequence: GAG
cagaagtctggaacccatta

SEQ ID NO: 167062 - DNA, 20 bp, Artificial Sequence
  Description of Artificial Sequence: Synthetic oligonucleotide
  Target: LAMA2; (+) strand; PAM type: NRG; PAM sequence: CAG
tggaacccattagagatatc

SEQ ID NO: 167063 - DNA, 20 bp, Artificial Sequence
  Description of Artificial Sequence: Synthetic oligonucleotide
  Target: LAMA2; (+) strand; PAM type: NRG; PAM sequence: AGG
ggaacccattagagatatcc

SEQ ID NO: 167064 - DNA, 20 bp, Artificial Sequence
  Description of Artificial Sequence: Synthetic oligonucleotide
  Target: LAMA2; (+) strand; PAM type: NRG; PAM sequence: CAG
caggctgaatacataaaata

SEQ ID NO: 167065 - DNA, 20 bp, Artificial Sequence
  Description of Artificial Sequence: Synthetic oligonucleotide
  Target: LAMA2; (+) strand; PAM type: NRG; PAM sequence: GAG
ggctgaatacataaaataca

SEQ ID NO: 167066 - DNA, 20 bp, Artificial Sequence
  Description of Artificial Sequence: Synthetic oligonucleotide
  Target: LAMA2; (+) strand; PAM type: NRG; PAM sequence: TGG
atacataaaatacagagttt

SEQ ID NO: 167067 - DNA, 20 bp, Artificial Sequence
  Description of Artificial Sequence: Synthetic oligonucleotide
  Target: LAMA2; (+) strand; PAM type: NRG; PAM sequence: GGG
tacataaaatacagagtttt

SEQ ID NO: 167068 - DNA, 20 bp, Artificial Sequence
  Description of Artificial Sequence: Synthetic oligonucleotide
  Target: LAMA2; (+) strand; PAM type: NRG; PAM sequence: AAG
tttgggcacaccattaactg

SEQ ID NO: 167069 - DNA, 20 bp, Artificial Sequence
  Description of Artificial Sequence: Synthetic oligonucleotide
  Target: LAMA2; (+) strand; PAM type: NRG; PAM sequence: TAG
cacaccattaactgaagtca

SEQ ID NO: 167070 - DNA, 20 bp, Artificial Sequence
  Description of Artificial Sequence: Synthetic oligonucleotide
  Target: LAMA2; (+) strand; PAM type: NRG; PAM sequence: TGG
attaactgaagtcatagtaa

SEQ ID NO: 167071 - DNA, 20 bp, Artificial Sequence
  Description of Artificial Sequence: Synthetic oligonucleotide
  Target: LAMA2; (+) strand; PAM type: NRG; PAM sequence: AAG
tagtaatggatgaaatcacc

SEQ ID NO: 167072 - DNA, 20 bp, Artificial Sequence
  Description of Artificial Sequence: Synthetic oligonucleotide
  Target: LAMA2; (+) strand; PAM type: NRG; PAM sequence: AGG
agtaatggatgaaatcacca

SEQ ID NO: 167073 - DNA, 20 bp, Artificial Sequence
  Description of Artificial Sequence: Synthetic oligonucleotide
  Target: LAMA2; (+) strand; PAM type: NRG; PAM sequence: TGG
tgaaatcaccaaggtaaatg

SEQ ID NO: 167074 - DNA, 20 bp, Artificial Sequence
  Description of Artificial Sequence: Synthetic oligonucleotide
  Target: LAMA2; (+) strand; PAM type: NRG; PAM sequence: GAG
aaatcaccaaggtaaatgtg

SEQ ID NO: 167075 - DNA, 20 bp, Artificial Sequence
  Description of Artificial Sequence: Synthetic oligonucleotide
  Target: LAMA2; (+) strand; PAM type: NRG; PAM sequence: AGG
aatcaccaaggtaaatgtgg

SEQ ID NO: 167076 - DNA, 20 bp, Artificial Sequence
  Description of Artificial Sequence: Synthetic oligonucleotide
  Target: LAMA2; (+) strand; PAM type: NRG; PAM sequence: GAG
tcaccaaggtaaatgtggag

SEQ ID NO: 167077 - DNA, 20 bp, Artificial Sequence
  Description of Artificial Sequence: Synthetic oligonucleotide
  Target: LAMA2; (+) strand; PAM type: NRG; PAM sequence: AAG
ggtaaatgtggaggagaaaa

SEQ ID NO: 167078 - DNA, 20 bp, Artificial Sequence
  Description of Artificial Sequence: Synthetic oligonucleotide
  Target: LAMA2; (+) strand; PAM type: NRG; PAM sequence: GAG
taaatgtggaggagaaaaaa

SEQ ID NO: 167079 - DNA, 20 bp, Artificial Sequence
  Description of Artificial Sequence: Synthetic oligonucleotide
  Target: LAMA2; (+) strand; PAM type: NRG; PAM sequence: GAG
gtggaggagaaaaaagagat

SEQ ID NO: 167080 - DNA, 20 bp, Artificial Sequence
  Description of Artificial Sequence: Synthetic oligonucleotide
  Target: LAMA2; (+) strand; PAM type: NRG; PAM sequence: AGG
tggaggagaaaaaagagatg

SEQ ID NO: 167081 - DNA, 20 bp, Artificial Sequence
  Description of Artificial Sequence: Synthetic oligonucleotide
  Target: LAMA2; (+) strand; PAM type: NRG; PAM sequence: AAG
gaaaaaagagatgaggacca

SEQ ID NO: 167082 - DNA, 20 bp, Artificial Sequence
  Description of Artificial Sequence: Synthetic oligonucleotide
  Target: LAMA2; (+) strand; PAM type: NRG; PAM sequence: TAG
aaagagatgaggaccaaagt

SEQ ID NO: 167083 - DNA, 20 bp, Artificial Sequence
  Description of Artificial Sequence: Synthetic oligonucleotide
  Target: LAMA2; (+) strand; PAM type: NRG; PAM sequence: AAG
tgaggaccaaagttagaatt

SEQ ID NO: 167084 - DNA, 20 bp, Artificial Sequence
  Description of Artificial Sequence: Synthetic oligonucleotide
  Target: LAMA2; (+) strand; PAM type: NRG; PAM sequence: AGG
gaggaccaaagttagaatta

SEQ ID NO: 167085 - DNA, 20 bp, Artificial Sequence
  Description of Artificial Sequence: Synthetic oligonucleotide
  Target: LAMA2; (+) strand; PAM type: NRG; PAM sequence: GGG
aggaccaaagttagaattaa

SEQ ID NO: 167086 - DNA, 20 bp, Artificial Sequence
  Description of Artificial Sequence: Synthetic oligonucleotide
  Target: LAMA2; (+) strand; PAM type: NRG; PAM sequence: CAG
agggcgtcaattatattgaa

SEQ ID NO: 167087 - DNA, 20 bp, Artificial Sequence
  Description of Artificial Sequence: Synthetic oligonucleotide
  Target: LAMA2; (+) strand; PAM type: NRG; PAM sequence: AAG
cgtcaattatattgaacaga

SEQ ID NO: 167088 - DNA, 20 bp, Artificial Sequence
  Description of Artificial Sequence: Synthetic oligonucleotide
  Target: LAMA2; (+) strand; PAM type: NRG; PAM sequence: AGG
gtcaattatattgaacagaa

SEQ ID NO: 167089 - DNA, 20 bp, Artificial Sequence
  Description of Artificial Sequence: Synthetic oligonucleotide
  Target: LAMA2; (+) strand; PAM type: NRG; PAM sequence: GGG
tcaattatattgaacagaaa

SEQ ID NO: 167090 - DNA, 20 bp, Artificial Sequence
  Description of Artificial Sequence: Synthetic oligonucleotide
  Target: LAMA2; (+) strand; PAM type: NRG; PAM sequence: AAG
attatattgaacagaaaggg

SEQ ID NO: 167091 - DNA, 20 bp, Artificial Sequence
  Description of Artificial Sequence: Synthetic oligonucleotide
  Target: LAMA2; (+) strand; PAM type: NRG; PAM sequence: AGG
ttatattgaacagaaaggga

SEQ ID NO: 167092 - DNA, 20 bp, Artificial Sequence
  Description of Artificial Sequence: Synthetic oligonucleotide
  Target: LAMA2; (+) strand; PAM type: NRG; PAM sequence: AAG
tattgaacagaaagggaagg

SEQ ID NO: 167093 - DNA, 20 bp, Artificial Sequence
  Description of Artificial Sequence: Synthetic oligonucleotide
  Target: LAMA2; (+) strand; PAM type: NRG; PAM sequence: GAG
ttgaacagaaagggaaggaa

SEQ ID NO: 167094 - DNA, 20 bp, Artificial Sequence
  Description of Artificial Sequence: Synthetic oligonucleotide
  Target: LAMA2; (+) strand; PAM type: NRG; PAM sequence: AAG
aagggaaggaagagtcgata

SEQ ID NO: 167095 - DNA, 20 bp, Artificial Sequence
  Description of Artificial Sequence: Synthetic oligonucleotide
  Target: LAMA2; (+) strand; PAM type: NRG; PAM sequence: AGG
agggaaggaagagtcgataa

SEQ ID NO: 167096 - DNA, 20 bp, Artificial Sequence
  Description of Artificial Sequence: Synthetic oligonucleotide
  Target: LAMA2; (+) strand; PAM type: NRG; PAM sequence: GAG
ggaaggaagagtcgataaag

SEQ ID NO: 167097 - DNA, 20 bp, Artificial Sequence
  Description of Artificial Sequence: Synthetic oligonucleotide
  Target: LAMA2; (+) strand; PAM type: NRG; PAM sequence: GAG
gagtcgataaaggagaattc

SEQ ID NO: 167098 - DNA, 20 bp, Artificial Sequence
  Description of Artificial Sequence: Synthetic oligonucleotide
  Target: LAMA2; (+) strand; PAM type: NRG; PAM sequence: TAG
tcgataaaggagaattcgag

SEQ ID NO: 167099 - DNA, 20 bp, Artificial Sequence
  Description of Artificial Sequence: Synthetic oligonucleotide
  Target: LAMA2; (+) strand; PAM type: NRG; PAM sequence: CAG
aaggagaattcgagtagccg

SEQ ID NO: 167100 - DNA, 20 bp, Artificial Sequence
  Description of Artificial Sequence: Synthetic oligonucleotide
  Target: LAMA2; (+) strand; PAM type: NRG; PAM sequence: AAG
gagaattcgagtagccgcag

SEQ ID NO: 167101 - DNA, 20 bp, Artificial Sequence
  Description of Artificial Sequence: Synthetic oligonucleotide
  Target: LAMA2; (+) strand; PAM type: NRG; PAM sequence: TAG
aattcgagtagccgcagaag

SEQ ID NO: 167102 - DNA, 20 bp, Artificial Sequence
  Description of Artificial Sequence: Synthetic oligonucleotide
  Target: LAMA2; (+) strand; PAM type: NRG; PAM sequence: AGG
attcgagtagccgcagaagt

SEQ ID NO: 167103 - DNA, 20 bp, Artificial Sequence
  Description of Artificial Sequence: Synthetic oligonucleotide
  Target: LAMA2; (+) strand; PAM type: NRG; PAM sequence: GAG
tcgagtagccgcagaagtag

SEQ ID NO: 167104 - DNA, 20 bp, Artificial Sequence
  Description of Artificial Sequence: Synthetic oligonucleotide
  Target: LAMA2; (+) strand; PAM type: NRG; PAM sequence: TGG
gaagtaggagaaacatcaac

SEQ ID NO: 167105 - DNA, 20 bp, Artificial Sequence
  Description of Artificial Sequence: Synthetic oligonucleotide
  Target: LAMA2; (+) strand; PAM type: NRG; PAM sequence: AAG
catcaactggcttactctta

SEQ ID NO: 167106 - DNA, 20 bp, Artificial Sequence
  Description of Artificial Sequence: Synthetic oligonucleotide
  Target: LAMA2; (+) strand; PAM type: NRG; PAM sequence: AAG
caactggcttactcttaaag

SEQ ID NO: 167107 - DNA, 20 bp, Artificial Sequence
  Description of Artificial Sequence: Synthetic oligonucleotide
  Target: LAMA2; (+) strand; PAM type: NRG; PAM sequence: TGG
gcttactcttaaagaagcca

SEQ ID NO: 167108 - DNA, 20 bp, Artificial Sequence
  Description of Artificial Sequence: Synthetic oligonucleotide
  Target: LAMA2; (+) strand; PAM type: NRG; PAM sequence: GGG
cttactcttaaagaagccat

SEQ ID NO: 167109 - DNA, 20 bp, Artificial Sequence
  Description of Artificial Sequence: Synthetic oligonucleotide
  Target: LAMA2; (+) strand; PAM type: NRG; PAM sequence: GGG
ttactcttaaagaagccatg

SEQ ID NO: 167110 - DNA, 20 bp, Artificial Sequence
  Description of Artificial Sequence: Synthetic oligonucleotide
  Target: LAMA2; (+) strand; PAM type: NRG; PAM sequence: GGG
tactcttaaagaagccatgg

SEQ ID NO: 167111 - DNA, 20 bp, Artificial Sequence
  Description of Artificial Sequence: Synthetic oligonucleotide
  Target: LAMA2; (+) strand; PAM type: NRG; PAM sequence: TGG
cttaaagaagccatgggggc

SEQ ID NO: 167112 - DNA, 20 bp, Artificial Sequence
  Description of Artificial Sequence: Synthetic oligonucleotide
  Target: LAMA2; (+) strand; PAM type: NRG; PAM sequence: GGG
ttaaagaagccatgggggct

SEQ ID NO: 167113 - DNA, 20 bp, Artificial Sequence
  Description of Artificial Sequence: Synthetic oligonucleotide
  Target: LAMA2; (+) strand; PAM type: NRG; PAM sequence: CGG
gaagccatgggggctgggca

SEQ ID NO: 167114 - DNA, 20 bp, Artificial Sequence
  Description of Artificial Sequence: Synthetic oligonucleotide
  Target: LAMA2; (+) strand; PAM type: NRG; PAM sequence: CAG
gccatgggggctgggcacgg

SEQ ID NO: 167115 - DNA, 20 bp, Artificial Sequence
  Description of Artificial Sequence: Synthetic oligonucleotide
  Target: LAMA2; (+) strand; PAM type: NRG; PAM sequence: TGG
cgcctgtaatcccaacactt

SEQ ID NO: 167116 - DNA, 20 bp, Artificial Sequence
  Description of Artificial Sequence: Synthetic oligonucleotide
  Target: LAMA2; (+) strand; PAM type: NRG; PAM sequence: GGG
gcctgtaatcccaacacttt

SEQ ID NO: 167117 - DNA, 20 bp, Artificial Sequence
  Description of Artificial Sequence: Synthetic oligonucleotide
  Target: LAMA2; (+) strand; PAM type: NRG; PAM sequence: GAG
ctgtaatcccaacactttgg

SEQ ID NO: 167118 - DNA, 20 bp, Artificial Sequence
  Description of Artificial Sequence: Synthetic oligonucleotide
  Target: LAMA2; (+) strand; PAM type: NRG; PAM sequence: AGG
tgtaatcccaacactttggg

SEQ ID NO: 167119 - DNA, 20 bp, Artificial Sequence
  Description of Artificial Sequence: Synthetic oligonucleotide
  Target: LAMA2; (+) strand; PAM type: NRG; PAM sequence: CAG
atcccaacactttgggaggc

SEQ ID NO: 167120 - DNA, 20 bp, Artificial Sequence
  Description of Artificial Sequence: Synthetic oligonucleotide
  Target: LAMA2; (+) strand; PAM type: NRG; PAM sequence: AGG
tcccaacactttgggaggcc

SEQ ID NO: 167121 - DNA, 20 bp, Artificial Sequence
  Description of Artificial Sequence: Synthetic oligonucleotide
  Target: LAMA2; (+) strand; PAM type: NRG; PAM sequence: GGG
cccaacactttgggaggcca

SEQ ID NO: 167122 - DNA, 20 bp, Artificial Sequence
  Description of Artificial Sequence: Synthetic oligonucleotide
  Target: LAMA2; (+) strand; PAM type: NRG; PAM sequence: CAG
aacactttgggaggccaggg

SEQ ID NO: 167123 - DNA, 20 bp, Artificial Sequence
  Description of Artificial Sequence: Synthetic oligonucleotide
  Target: LAMA2; (+) strand; PAM type: NRG; PAM sequence: AGG
acactttgggaggccagggc

SEQ ID NO: 167124 - DNA, 20 bp, Artificial Sequence
  Description of Artificial Sequence: Synthetic oligonucleotide
  Target: LAMA2; (+) strand; PAM type: NRG; PAM sequence: CAG
ctttgggaggccagggcagg

SEQ ID NO: 167125 - DNA, 20 bp, Artificial Sequence
  Description of Artificial Sequence: Synthetic oligonucleotide
  Target: LAMA2; (+) strand; PAM type: NRG; PAM sequence: CGG
aggccagggcaggcagatca

SEQ ID NO: 167126 - DNA, 20 bp, Artificial Sequence
  Description of Artificial Sequence: Synthetic oligonucleotide
  Target: LAMA2; (+) strand; PAM type: NRG; PAM sequence: GGG
ggccagggcaggcagatcac

SEQ ID NO: 167127 - DNA, 20 bp, Artificial Sequence
  Description of Artificial Sequence: Synthetic oligonucleotide
  Target: LAMA2; (+) strand; PAM type: NRG; PAM sequence: GGG
gccagggcaggcagatcacg

SEQ ID NO: 167128 - DNA, 20 bp, Artificial Sequence
  Description of Artificial Sequence: Synthetic oligonucleotide
  Target: LAMA2; (+) strand; PAM type: NRG; PAM sequence: AAG
ggcaggcagatcacggggtc

SEQ ID NO: 167129 - DNA, 20 bp, Artificial Sequence
  Description of Artificial Sequence: Synthetic oligonucleotide
  Target: LAMA2; (+) strand; PAM type: NRG; PAM sequence: GAG
caggcagatcacggggtcaa

SEQ ID NO: 167130 - DNA, 20 bp, Artificial Sequence
  Description of Artificial Sequence: Synthetic oligonucleotide
  Target: LAMA2; (+) strand; PAM type: NRG; PAM sequence: TGG
cagatcacggggtcaagaga

SEQ ID NO: 167131 - DNA, 20 bp, Artificial Sequence
  Description of Artificial Sequence: Synthetic oligonucleotide
  Target: LAMA2; (+) strand; PAM type: NRG; PAM sequence: GAG
gatcacggggtcaagagatg

SEQ ID NO: 167132 - DNA, 20 bp, Artificial Sequence
  Description of Artificial Sequence: Synthetic oligonucleotide
  Target: LAMA2; (+) strand; PAM type: NRG; PAM sequence: TGG
tcaagagatggagacgatcc

SEQ ID NO: 167133 - DNA, 20 bp, Artificial Sequence
  Description of Artificial Sequence: Synthetic oligonucleotide
  Target: LAMA2; (+) strand; PAM type: NRG; PAM sequence: CAG
gagatggagacgatcctggc

SEQ ID NO: 167134 - DNA, 20 bp, Artificial Sequence
  Description of Artificial Sequence: Synthetic oligonucleotide
  Target: LAMA2; (+) strand; PAM type: NRG; PAM sequence: TGG
ggagacgatcctggccagca

SEQ ID NO: 167135 - DNA, 20 bp, Artificial Sequence
  Description of Artificial Sequence: Synthetic oligonucleotide
  Target: LAMA2; (+) strand; PAM type: NRG; PAM sequence: TGG
ctgaaaatacgaaaattaac

SEQ ID NO: 167136 - DNA, 20 bp, Artificial Sequence
  Description of Artificial Sequence: Synthetic oligonucleotide
  Target: LAMA2; (+) strand; PAM type: NRG; PAM sequence: GGG
tgaaaatacgaaaattaact

SEQ ID NO: 167137 - DNA, 20 bp, Artificial Sequence
  Description of Artificial Sequence: Synthetic oligonucleotide
  Target: LAMA2; (+) strand; PAM type: NRG; PAM sequence: TGG
atacgaaaattaactgggca

SEQ ID NO: 167138 - DNA, 20 bp, Artificial Sequence
  Description of Artificial Sequence: Synthetic oligonucleotide
  Target: LAMA2; (+) strand; PAM type: NRG; PAM sequence: CAG
gttacgcatgcctgtaatct

SEQ ID NO: 167139 - DNA, 20 bp, Artificial Sequence
  Description of Artificial Sequence: Synthetic oligonucleotide
  Target: LAMA2; (+) strand; PAM type: NRG; PAM sequence: CAG
tgcctgtaatctcagctact

SEQ ID NO: 167140 - DNA, 20 bp, Artificial Sequence
  Description of Artificial Sequence: Synthetic oligonucleotide
  Target: LAMA2; (+) strand; PAM type: NRG; PAM sequence: AGG
gcctgtaatctcagctactc

SEQ ID NO: 167141 - DNA, 20 bp, Artificial Sequence
  Description of Artificial Sequence: Synthetic oligonucleotide
  Target: LAMA2; (+) strand; PAM type: NRG; PAM sequence: GAG
ctgtaatctcagctactcag

SEQ ID NO: 167142 - DNA, 20 bp, Artificial Sequence
  Description of Artificial Sequence: Synthetic oligonucleotide
  Target: LAMA2; (+) strand; PAM type: NRG; PAM sequence: AGG
tgtaatctcagctactcagg

SEQ ID NO: 167143 - DNA, 20 bp, Artificial Sequence
  Description of Artificial Sequence: Synthetic oligonucleotide
  Target: LAMA2; (+) strand; PAM type: NRG; PAM sequence: GAG
tctcagctactcaggaggct

SEQ ID NO: 167144 - DNA, 20 bp, Artificial Sequence
  Description of Artificial Sequence: Synthetic oligonucleotide
  Target: LAMA2; (+) strand; PAM type: NRG; PAM sequence: AGG
ctcagctactcaggaggctg

SEQ ID NO: 167145 - DNA, 20 bp, Artificial Sequence
  Description of Artificial Sequence: Synthetic oligonucleotide
  Target: LAMA2; (+) strand; PAM type: NRG; PAM sequence: CAG
agctactcaggaggctgagg

SEQ ID NO: 167146 - DNA, 20 bp, Artificial Sequence
  Description of Artificial Sequence: Synthetic oligonucleotide
  Target: LAMA2; (+) strand; PAM type: NRG; PAM sequence: AGG
gctactcaggaggctgaggc

SEQ ID NO: 167147 - DNA, 20 bp, Artificial Sequence
  Description of Artificial Sequence: Synthetic oligonucleotide
  Target: LAMA2; (+) strand; PAM type: NRG; PAM sequence: GAG
tactcaggaggctgaggcag

SEQ ID NO: 167148 - DNA, 20 bp, Artificial Sequence
  Description of Artificial Sequence: Synthetic oligonucleotide
  Target: LAMA2; (+) strand; PAM type: NRG; PAM sequence: TGG
gcaggagaatcgcttgaacc

SEQ ID NO: 167149 - DNA, 20 bp, Artificial Sequence
  Description of Artificial Sequence: Synthetic oligonucleotide
  Target: LAMA2; (+) strand; PAM type: NRG; PAM sequence: GGG
caggagaatcgcttgaacct

SEQ ID NO: 167150 - DNA, 20 bp, Artificial Sequence
  Description of Artificial Sequence: Synthetic oligonucleotide
  Target: LAMA2; (+) strand; PAM type: NRG; PAM sequence: GAG
ggagaatcgcttgaacctgg

SEQ ID NO: 167151 - DNA, 20 bp, Artificial Sequence
  Description of Artificial Sequence: Synthetic oligonucleotide
  Target: LAMA2; (+) strand; PAM type: NRG; PAM sequence: AGG
gagaatcgcttgaacctggg

SEQ ID NO: 167152 - DNA, 20 bp, Artificial Sequence
  Description of Artificial Sequence: Synthetic oligonucleotide
  Target: LAMA2; (+) strand; PAM type: NRG; PAM sequence: CAG
aatcgcttgaacctgggagg

SEQ ID NO: 167153 - DNA, 20 bp, Artificial Sequence
  Description of Artificial Sequence: Synthetic oligonucleotide
  Target: LAMA2; (+) strand; PAM type: NRG; PAM sequence: GAG
tcgcttgaacctgggaggca

SEQ ID NO: 167154 - DNA, 20 bp, Artificial Sequence
  Description of Artificial Sequence: Synthetic oligonucleotide
  Target: LAMA2; (+) strand; PAM type: NRG; PAM sequence: AGG
cgcttgaacctgggaggcag

SEQ ID NO: 167155 - DNA, 20 bp, Artificial Sequence
  Description of Artificial Sequence: Synthetic oligonucleotide
  Target: LAMA2; (+) strand; PAM type: NRG; PAM sequence: CAG
aacctgggaggcagaggttg

SEQ ID NO: 167156 - DNA, 20 bp, Artificial Sequence
  Description of Artificial Sequence: Synthetic oligonucleotide
  Target: LAMA2; (+) strand; PAM type: NRG; PAM sequence: GAG
tgggaggcagaggttgcagt

SEQ ID NO: 167157 - DNA, 20 bp, Artificial Sequence
  Description of Artificial Sequence: Synthetic oligonucleotide
  Target: LAMA2; (+) strand; PAM type: NRG; PAM sequence: GAG
ggcagaggttgcagtgagct

SEQ ID NO: 167158 - DNA, 20 bp, Artificial Sequence
  Description of Artificial Sequence: Synthetic oligonucleotide
  Target: LAMA2; (+) strand; PAM type: NRG; PAM sequence: TGG
gaggttgcagtgagctgaga

SEQ ID NO: 167159 - DNA, 20 bp, Artificial Sequence
  Description of Artificial Sequence: Synthetic oligonucleotide
  Target: LAMA2; (+) strand; PAM type: NRG; PAM sequence: CAG
gagatggtgccactgcactc

SEQ ID NO: 167160 - DNA, 20 bp, Artificial Sequence
  Description of Artificial Sequence: Synthetic oligonucleotide
  Target: LAMA2; (+) strand; PAM type: NRG; PAM sequence: CAG
actgcactccagcctgacta

SEQ ID NO: 167161 - DNA, 20 bp, Artificial Sequence
  Description of Artificial Sequence: Synthetic oligonucleotide
  Target: LAMA2; (+) strand; PAM type: NRG; PAM sequence: GAG
tgcactccagcctgactaca

SEQ ID NO: 167162 - DNA, 20 bp, Artificial Sequence
  Description of Artificial Sequence: Synthetic oligonucleotide
  Target: LAMA2; (+) strand; PAM type: NRG; PAM sequence: GAG
ctccagcctgactacagagc

SEQ ID NO: 167163 - DNA, 20 bp, Artificial Sequence
  Description of Artificial Sequence: Synthetic oligonucleotide
  Target: LAMA2; (+) strand; PAM type: NRG; PAM sequence: AAG
actgtctcaaaaaaaaaaaa

SEQ ID NO: 167164 - DNA, 20 bp, Artificial Sequence
  Description of Artificial Sequence: Synthetic oligonucleotide
  Target: LAMA2; (+) strand; PAM type: NRG; PAM sequence: AAG
tctcaaaaaaaaaaaaaaga

SEQ ID NO: 167165 - DNA, 20 bp, Artificial Sequence
  Description of Artificial Sequence: Synthetic oligonucleotide
  Target: LAMA2; (+) strand; PAM type: NRG; PAM sequence: AAG
aaaaaaaaaaaaaagaaaga

SEQ ID NO: 167166 - DNA, 20 bp, Artificial Sequence
  Description of Artificial Sequence: Synthetic oligonucleotide
  Target: LAMA2; (+) strand; PAM type: NRG; PAM sequence: AAG
aaaaaaaagaaagaaagaaa

SEQ ID NO: 167167 - DNA, 20 bp, Artificial Sequence
  Description of Artificial Sequence: Synthetic oligonucleotide
  Target: LAMA2; (+) strand; PAM type: NRG; PAM sequence: AAG
aaaagaaagaaagaaaaaga

SEQ ID NO: 167168 - DNA, 20 bp, Artificial Sequence
  Description of Artificial Sequence: Synthetic oligonucleotide
  Target: LAMA2; (+) strand; PAM type: NRG; PAM sequence: AAG
gaaagaaagaaaaagaaaga

SEQ ID NO: 167169 - DNA, 20 bp, Artificial Sequence
  Description of Artificial Sequence: Synthetic oligonucleotide
  Target: LAMA2; (+) strand; PAM type: NRG; PAM sequence: TGG
aaaaagaaagaaagaaacca

SEQ ID NO: 167170 - DNA, 20 bp, Artificial Sequence
  Description of Artificial Sequence: Synthetic oligonucleotide
  Target: LAMA2; (+) strand; PAM type: NRG; PAM sequence: GGG
aaaagaaagaaagaaaccat

SEQ ID NO: 167171 - DNA, 20 bp, Artificial Sequence
  Description of Artificial Sequence: Synthetic oligonucleotide
  Target: LAMA2; (+) strand; PAM type: NRG; PAM sequence: AAG
agaaagaaagaaaccatggg

SEQ ID NO: 167172 - DNA, 20 bp, Artificial Sequence
  Description of Artificial Sequence: Synthetic oligonucleotide
  Target: LAMA2; (+) strand; PAM type: NRG; PAM sequence: GAG
aaagaaagaaaccatgggaa

SEQ ID NO: 167173 - DNA, 20 bp, Artificial Sequence
  Description of Artificial Sequence: Synthetic oligonucleotide
  Target: LAMA2; (+) strand; PAM type: NRG; PAM sequence: GAG
agaaagaaaccatgggaaga

SEQ ID NO: 167174 - DNA, 20 bp, Artificial Sequence
  Description of Artificial Sequence: Synthetic oligonucleotide
  Target: LAMA2; (+) strand; PAM type: NRG; PAM sequence: CAG
aaccatgggaagagagtatc

SEQ ID NO: 167175 - DNA, 20 bp, Artificial Sequence
  Description of Artificial Sequence: Synthetic oligonucleotide
  Target: LAMA2; (+) strand; PAM type: NRG; PAM sequence: TGG
tatccagaaatatctatcaa

SEQ ID NO: 167176 - DNA, 20 bp, Artificial Sequence
  Description of Artificial Sequence: Synthetic oligonucleotide
  Target: LAMA2; (+) strand; PAM type: NRG; PAM sequence: CAG
gaaatatctatcaatggcta

SEQ ID NO: 167177 - DNA, 20 bp, Artificial Sequence
  Description of Artificial Sequence: Synthetic oligonucleotide
  Target: LAMA2; (+) strand; PAM type: NRG; PAM sequence: GAG
gctacagaaaacctacatat

SEQ ID NO: 167178 - DNA, 20 bp, Artificial Sequence
  Description of Artificial Sequence: Synthetic oligonucleotide
  Target: LAMA2; (+) strand; PAM type: NRG; PAM sequence: AGG
ctacagaaaacctacatatg

SEQ ID NO: 167179 - DNA, 20 bp, Artificial Sequence
  Description of Artificial Sequence: Synthetic oligonucleotide
  Target: LAMA2; (+) strand; PAM type: NRG; PAM sequence: AAG
atatgaggcctgatgattgt

SEQ ID NO: 167180 - DNA, 20 bp, Artificial Sequence
  Description of Artificial Sequence: Synthetic oligonucleotide
  Target: LAMA2; (+) strand; PAM type: NRG; PAM sequence: TAG
gatgattgtaagttttgctt

SEQ ID NO: 167181 - DNA, 20 bp, Artificial Sequence
  Description of Artificial Sequence: Synthetic oligonucleotide
  Target: LAMA2; (+) strand; PAM type: NRG; PAM sequence: AAG
taagttttgctttagcaaca

SEQ ID NO: 167182 - DNA, 20 bp, Artificial Sequence
  Description of Artificial Sequence: Synthetic oligonucleotide
  Target: LAMA2; (+) strand; PAM type: NRG; PAM sequence: TGG
ctttagcaacaaagatctta

SEQ ID NO: 167183 - DNA, 20 bp, Artificial Sequence
  Description of Artificial Sequence: Synthetic oligonucleotide
  Target: LAMA2; (+) strand; PAM type: NRG; PAM sequence: GGG
tttagcaacaaagatcttat

SEQ ID NO: 167184 - DNA, 20 bp, Artificial Sequence
  Description of Artificial Sequence: Synthetic oligonucleotide
  Target: LAMA2; (+) strand; PAM type: NRG; PAM sequence: TGG
aaagatcttatgggtcatcc

SEQ ID NO: 167185 - DNA, 20 bp, Artificial Sequence
  Description of Artificial Sequence: Synthetic oligonucleotide
  Target: LAMA2; (+) strand; PAM type: NRG; PAM sequence: TGG
catcctggtattatgtttaa

SEQ ID NO: 167186 - DNA, 20 bp, Artificial Sequence
  Description of Artificial Sequence: Synthetic oligonucleotide
  Target: LAMA2; (+) strand; PAM type: NRG; PAM sequence: CAG
attatgtttaatggtgaaac

SEQ ID NO: 167187 - DNA, 20 bp, Artificial Sequence
  Description of Artificial Sequence: Synthetic oligonucleotide
  Target: LAMA2; (+) strand; PAM type: NRG; PAM sequence: AAG
atgtttaatggtgaaaccag

SEQ ID NO: 167188 - DNA, 20 bp, Artificial Sequence
  Description of Artificial Sequence: Synthetic oligonucleotide
  Target: LAMA2; (+) strand; PAM type: NRG; PAM sequence: AAG
tgaaaccagaagcctgttta

SEQ ID NO: 167189 - DNA, 20 bp, Artificial Sequence
  Description of Artificial Sequence: Synthetic oligonucleotide
  Target: LAMA2; (+) strand; PAM type: NRG; PAM sequence: AGG
gaaaccagaagcctgtttaa

SEQ ID NO: 167190 - DNA, 20 bp, Artificial Sequence
  Description of Artificial Sequence: Synthetic oligonucleotide
  Target: LAMA2; (+) strand; PAM type: NRG; PAM sequence: GGG
aaaccagaagcctgtttaaa

SEQ ID NO: 167191 - DNA, 20 bp, Artificial Sequence
  Description of Artificial Sequence: Synthetic oligonucleotide
  Target: LAMA2; (+) strand; PAM type: NRG; PAM sequence: GAG
accagaagcctgtttaaagg

SEQ ID NO: 167192 - DNA, 20 bp, Artificial Sequence
  Description of Artificial Sequence: Synthetic oligonucleotide
  Target: LAMA2; (+) strand; PAM type: NRG; PAM sequence: TGG
aagcctgtttaaagggagaa

SEQ ID NO: 167193 - DNA, 20 bp, Artificial Sequence
  Description of Artificial Sequence: Synthetic oligonucleotide
  Target: LAMA2; (+) strand; PAM type: NRG; PAM sequence: GGG
agcctgtttaaagggagaat

SEQ ID NO: 167194 - DNA, 20 bp, Artificial Sequence
  Description of Artificial Sequence: Synthetic oligonucleotide
  Target: LAMA2; (+) strand; PAM type: NRG; PAM sequence: GAG
cctgtttaaagggagaatgg

SEQ ID NO: 167195 - DNA, 20 bp, Artificial Sequence
  Description of Artificial Sequence: Synthetic oligonucleotide
  Target: LAMA2; (+) strand; PAM type: NRG; PAM sequence: AAG
taaagggagaatgggagatg

SEQ ID NO: 167196 - DNA, 20 bp, Artificial Sequence
  Description of Artificial Sequence: Synthetic oligonucleotide
  Target: LAMA2; (+) strand; PAM type: NRG; PAM sequence: AAG
agggagaatgggagatgaag

SEQ ID NO: 167197 - DNA, 20 bp, Artificial Sequence
  Description of Artificial Sequence: Synthetic oligonucleotide
  Target: LAMA2; (+) strand; PAM type: NRG; PAM sequence: TAG
gagaatgggagatgaagaag

SEQ ID NO: 167198 - DNA, 20 bp, Artificial Sequence
  Description of Artificial Sequence: Synthetic oligonucleotide
  Target: LAMA2; (+) strand; PAM type: NRG; PAM sequence: GAG
gaatgggagatgaagaagta

SEQ ID NO: 167199 - DNA, 20 bp, Artificial Sequence
  Description of Artificial Sequence: Synthetic oligonucleotide
  Target: LAMA2; (+) strand; PAM type: NRG; PAM sequence: CAG
ggagatgaagaagtagagac

SEQ ID NO: 167200 - DNA, 20 bp, Artificial Sequence
  Description of Artificial Sequence: Synthetic oligonucleotide
  Target: LAMA2; (+) strand; PAM type: NRG; PAM sequence: AGG
gagatgaagaagtagagacc

SEQ ID NO: 167201 - DNA, 20 bp, Artificial Sequence
  Description of Artificial Sequence: Synthetic oligonucleotide
  Target: LAMA2; (+) strand; PAM type: NRG; PAM sequence: AAG
tgtaaacaatgtctttttaa

SEQ ID NO: 167202 - DNA, 20 bp, Artificial Sequence
  Description of Artificial Sequence: Synthetic oligonucleotide
  Target: LAMA2; (+) strand; PAM type: NRG; PAM sequence: TAG
ttttaaaagcttatcgaaaa

SEQ ID NO: 167203 - DNA, 20 bp, Artificial Sequence
  Description of Artificial Sequence: Synthetic oligonucleotide
  Target: LAMA2; (+) strand; PAM type: NRG; PAM sequence: AGG
tttaaaagcttatcgaaaat

SEQ ID NO: 167204 - DNA, 20 bp, Artificial Sequence
  Description of Artificial Sequence: Synthetic oligonucleotide
  Target: LAMA2; (+) strand; PAM type: NRG; PAM sequence: TAG
aaagcttatcgaaaatagga

SEQ ID NO: 167205 - DNA, 20 bp, Artificial Sequence
  Description of Artificial Sequence: Synthetic oligonucleotide
  Target: LAMA2; (+) strand; PAM type: NRG; PAM sequence: AAG
aaaataggatagaaattgtc

SEQ ID NO: 167206 - DNA, 20 bp, Artificial Sequence
  Description of Artificial Sequence: Synthetic oligonucleotide
  Target: LAMA2; (+) strand; PAM type: NRG; PAM sequence: GAG
tagaaattgtcaagcaattt

SEQ ID NO: 167207 - DNA, 20 bp, Artificial Sequence
  Description of Artificial Sequence: Synthetic oligonucleotide
  Target: LAMA2; (+) strand; PAM type: NRG; PAM sequence: CAG
tcaagcaatttgagacctca

SEQ ID NO: 167208 - DNA, 20 bp, Artificial Sequence
  Description of Artificial Sequence: Synthetic oligonucleotide
  Target: LAMA2; (+) strand; PAM type: NRG; PAM sequence: AAG
acctcacagatttttttttt

SEQ ID NO: 167209 - DNA, 20 bp, Artificial Sequence
  Description of Artificial Sequence: Synthetic oligonucleotide
  Target: LAMA2; (+) strand; PAM type: NRG; PAM sequence: CAG
cacagattttttttttaaga

SEQ ID NO: 167210 - DNA, 20 bp, Artificial Sequence
  Description of Artificial Sequence: Synthetic oligonucleotide
  Target: LAMA2; (+) strand; PAM type: NRG; PAM sequence: AGG
acagattttttttttaagac

SEQ ID NO: 167211 - DNA, 20 bp, Artificial Sequence
  Description of Artificial Sequence: Synthetic oligonucleotide
  Target: LAMA2; (+) strand; PAM type: NRG; PAM sequence: AAG
attttttttttaagacagga

SEQ ID NO: 167212 - DNA, 20 bp, Artificial Sequence
  Description of Artificial Sequence: Synthetic oligonucleotide
  Target: LAMA2; (+) strand; PAM type: NRG; PAM sequence: AGG
ttttttttttaagacaggaa

SEQ ID NO: 167213 - DNA, 20 bp, Artificial Sequence
  Description of Artificial Sequence: Synthetic oligonucleotide
  Target: LAMA2; (+) strand; PAM type: NRG; PAM sequence: GAG
gaccaatttcaaatattaat

SEQ ID NO: 167214 - DNA, 20 bp, Artificial Sequence
  Description of Artificial Sequence: Synthetic oligonucleotide
  Target: LAMA2; (+) strand; PAM type: NRG; PAM sequence: GAG
tttcaaatattaatgagaat

SEQ ID NO: 167215 - DNA, 20 bp, Artificial Sequence
  Description of Artificial Sequence: Synthetic oligonucleotide
  Target: LAMA2; (+) strand; PAM type: NRG; PAM sequence: AAG
ttaatgagaatgagcctgca

SEQ ID NO: 167216 - DNA, 20 bp, Artificial Sequence
  Description of Artificial Sequence: Synthetic oligonucleotide
  Target: LAMA2; (+) strand; PAM type: NRG; PAM sequence: AGG
taatgagaatgagcctgcaa

SEQ ID NO: 167217 - DNA, 20 bp, Artificial Sequence
  Description of Artificial Sequence: Synthetic oligonucleotide
  Target: LAMA2; (+) strand; PAM type: NRG; PAM sequence: GAG
atgagaatgagcctgcaaag

SEQ ID NO: 167218 - DNA, 20 bp, Artificial Sequence
  Description of Artificial Sequence: Synthetic oligonucleotide
  Target: LAMA2; (+) strand; PAM type: NRG; PAM sequence: AGG
tgagaatgagcctgcaaagg

SEQ ID NO: 167219 - DNA, 20 bp, Artificial Sequence
  Description of Artificial Sequence: Synthetic oligonucleotide
  Target: LAMA2; (+) strand; PAM type: NRG; PAM sequence: GGG
gagaatgagcctgcaaagga

SEQ ID NO: 167220 - DNA, 20 bp, Artificial Sequence
  Description of Artificial Sequence: Synthetic oligonucleotide
  Target: LAMA2; (+) strand; PAM type: NRG; PAM sequence: AAG
agcctgcaaaggagggaata

SEQ ID NO: 167221 - DNA, 20 bp, Artificial Sequence
  Description of Artificial Sequence: Synthetic oligonucleotide
  Target: LAMA2; (+) strand; PAM type: NRG; PAM sequence: TGG
tgcaaaggagggaataaaga

SEQ ID NO: 167222 - DNA, 20 bp, Artificial Sequence
  Description of Artificial Sequence: Synthetic oligonucleotide
  Target: LAMA2; (+) strand; PAM type: NRG; PAM sequence: TGG
aaaggagggaataaagatgg

SEQ ID NO: 167223 - DNA, 20 bp, Artificial Sequence
  Description of Artificial Sequence: Synthetic oligonucleotide
  Target: LAMA2; (+) strand; PAM type: NRG; PAM sequence: GAG
aggagggaataaagatggtg

SEQ ID NO: 167224 - DNA, 20 bp, Artificial Sequence
  Description of Artificial Sequence: Synthetic oligonucleotide
  Target: LAMA2; (+) strand; PAM type: NRG; PAM sequence: TGG
aataaagatggtggagaaaa

SEQ ID NO: 167225 - DNA, 20 bp, Artificial Sequence
  Description of Artificial Sequence: Synthetic oligonucleotide
  Target: LAMA2; (+) strand; PAM type: NRG; PAM sequence: GGG
ataaagatggtggagaaaat

SEQ ID NO: 167226 - DNA, 20 bp, Artificial Sequence
  Description of Artificial Sequence: Synthetic oligonucleotide
  Target: LAMA2; (+) strand; PAM type: NRG; PAM sequence: GGG
taaagatggtggagaaaatg

SEQ ID NO: 167227 - DNA, 20 bp, Artificial Sequence
  Description of Artificial Sequence: Synthetic oligonucleotide
  Target: LAMA2; (+) strand; PAM type: NRG; PAM sequence: GAG
aagatggtggagaaaatggg

SEQ ID NO: 167228 - DNA, 20 bp, Artificial Sequence
  Description of Artificial Sequence: Synthetic oligonucleotide
  Target: LAMA2; (+) strand; PAM type: NRG; PAM sequence: AGG
agatggtggagaaaatgggg

SEQ ID NO: 167229 - DNA, 20 bp, Artificial Sequence
  Description of Artificial Sequence: Synthetic oligonucleotide
  Target: LAMA2; (+) strand; PAM type: NRG; PAM sequence: CAG
tggtggagaaaatggggagg

SEQ ID NO: 167230 - DNA, 20 bp, Artificial Sequence
  Description of Artificial Sequence: Synthetic oligonucleotide
  Target: LAMA2; (+) strand; PAM type: NRG; PAM sequence: AGG
ggtggagaaaatggggaggc

SEQ ID NO: 167231 - DNA, 20 bp, Artificial Sequence
  Description of Artificial Sequence: Synthetic oligonucleotide
  Target: LAMA2; (+) strand; PAM type: NRG; PAM sequence: GAG
tggagaaaatggggaggcag

SEQ ID NO: 167232 - DNA, 20 bp, Artificial Sequence
  Description of Artificial Sequence: Synthetic oligonucleotide
  Target: LAMA2; (+) strand; PAM type: NRG; PAM sequence: AGG
ggagaaaatggggaggcagg

SEQ ID NO: 167233 - DNA, 20 bp, Artificial Sequence
  Description of Artificial Sequence: Synthetic oligonucleotide
  Target: LAMA2; (+) strand; PAM type: NRG; PAM sequence: AAG
aaaatggggaggcaggagga

SEQ ID NO: 167234 - DNA, 20 bp, Artificial Sequence
  Description of Artificial Sequence: Synthetic oligonucleotide
  Target: LAMA2; (+) strand; PAM type: NRG; PAM sequence: AGG
aaatggggaggcaggaggaa

SEQ ID NO: 167235 - DNA, 20 bp, Artificial Sequence
  Description of Artificial Sequence: Synthetic oligonucleotide
  Target: LAMA2; (+) strand; PAM type: NRG; PAM sequence: TAG
aggaggaaaggaaaccaatt

SEQ ID NO: 167236 - DNA, 20 bp, Artificial Sequence
  Description of Artificial Sequence: Synthetic oligonucleotide
  Target: LAMA2; (+) strand; PAM type: NRG; PAM sequence: AGG
ggaggaaaggaaaccaattt

SEQ ID NO: 167237 - DNA, 20 bp, Artificial Sequence
  Description of Artificial Sequence: Synthetic oligonucleotide
  Target: LAMA2; (+) strand; PAM type: NRG; PAM sequence: GAG
aggaaaggaaaccaatttag

SEQ ID NO: 167238 - DNA, 20 bp, Artificial Sequence
  Description of Artificial Sequence: Synthetic oligonucleotide
  Target: LAMA2; (+) strand; PAM type: NRG; PAM sequence: TGG
aaaggaaaccaatttaggag

SEQ ID NO: 167239 - DNA, 20 bp, Artificial Sequence
  Description of Artificial Sequence: Synthetic oligonucleotide
  Target: LAMA2; (+) strand; PAM type: NRG; PAM sequence: GAG
aggaaaccaatttaggagtg

SEQ ID NO: 167240 - DNA, 20 bp, Artificial Sequence
  Description of Artificial Sequence: Synthetic oligonucleotide
  Target: LAMA2; (+) strand; PAM type: NRG; PAM sequence: TAG
aaaccaatttaggagtggag

SEQ ID NO: 167241 - DNA, 20 bp, Artificial Sequence
  Description of Artificial Sequence: Synthetic oligonucleotide
  Target: LAMA2; (+) strand; PAM type: NRG; PAM sequence: CAG
atttaggagtggagtagctt

SEQ ID NO: 167242 - DNA, 20 bp, Artificial Sequence
  Description of Artificial Sequence: Synthetic oligonucleotide
  Target: LAMA2; (+) strand; PAM type: NRG; PAM sequence: AAG
gagtggagtagcttcagaca

SEQ ID NO: 167243 - DNA, 20 bp, Artificial Sequence
  Description of Artificial Sequence: Synthetic oligonucleotide
  Target: LAMA2; (+) strand; PAM type: NRG; PAM sequence: AGG
agtggagtagcttcagacaa

SEQ ID NO: 167244 - DNA, 20 bp, Artificial Sequence
  Description of Artificial Sequence: Synthetic oligonucleotide
  Target: LAMA2; (+) strand; PAM type: NRG; PAM sequence: CGG
gagtagcttcagacaaagga

SEQ ID NO: 167245 - DNA, 20 bp, Artificial Sequence
  Description of Artificial Sequence: Synthetic oligonucleotide
  Target: LAMA2; (+) strand; PAM type: NRG; PAM sequence: AAG
aaggacggaaacaaatgtca

SEQ ID NO: 167246 - DNA, 20 bp, Artificial Sequence
  Description of Artificial Sequence: Synthetic oligonucleotide
  Target: LAMA2; (+) strand; PAM type: NRG; PAM sequence: AGG
aggacggaaacaaatgtcaa

SEQ ID NO: 167247 - DNA, 20 bp, Artificial Sequence
  Description of Artificial Sequence: Synthetic oligonucleotide
  Target: LAMA2; (+) strand; PAM type: NRG; PAM sequence: GGG
ggacggaaacaaatgtcaaa

SEQ ID NO: 167248 - DNA, 20 bp, Artificial Sequence
  Description of Artificial Sequence: Synthetic oligonucleotide
  Target: LAMA2; (+) strand; PAM type: NRG; PAM sequence: TGG
ggaaacaaatgtcaaaggga

SEQ ID NO: 167249 - DNA, 20 bp, Artificial Sequence
  Description of Artificial Sequence: Synthetic oligonucleotide
  Target: LAMA2; (+) strand; PAM type: NRG; PAM sequence: TGG
caaagggatggaaaataatg

SEQ ID NO: 167250 - DNA, 20 bp, Artificial Sequence
  Description of Artificial Sequence: Synthetic oligonucleotide
  Target: LAMA2; (+) strand; PAM type: NRG; PAM sequence: CAG
caatatactgaattgtttgc

SEQ ID NO: 167251 - DNA, 20 bp, Artificial Sequence
  Description of Artificial Sequence: Synthetic oligonucleotide
  Target: LAMA2; (+) strand; PAM type: NRG; PAM sequence: AGG
aatatactgaattgtttgcc

SEQ ID NO: 167252 - DNA, 20 bp, Artificial Sequence
  Description of Artificial Sequence: Synthetic oligonucleotide
  Target: LAMA2; (+) strand; PAM type: NRG; PAM sequence: AAG
gaattgtttgccaggaaacc

SEQ ID NO: 167253 - DNA, 20 bp, Artificial Sequence
  Description of Artificial Sequence: Synthetic oligonucleotide
  Target: LAMA2; (+) strand; PAM type: NRG; PAM sequence: AGG
aattgtttgccaggaaacca

SEQ ID NO: 167254 - DNA, 20 bp, Artificial Sequence
  Description of Artificial Sequence: Synthetic oligonucleotide
  Target: LAMA2; (+) strand; PAM type: NRG; PAM sequence: GGG
attgtttgccaggaaaccaa

SEQ ID NO: 167255 - DNA, 20 bp, Artificial Sequence
  Description of Artificial Sequence: Synthetic oligonucleotide
  Target: LAMA2; (+) strand; PAM type: NRG; PAM sequence: GAG
tgtttgccaggaaaccaagg

SEQ ID NO: 167256 - DNA, 20 bp, Artificial Sequence
  Description of Artificial Sequence: Synthetic oligonucleotide
  Target: LAMA2; (+) strand; PAM type: NRG; PAM sequence: TAG
aaccaagggagcatccaaat

SEQ ID NO: 167257 - DNA, 20 bp, Artificial Sequence
  Description of Artificial Sequence: Synthetic oligonucleotide
  Target: LAMA2; (+) strand; PAM type: NRG; PAM sequence: GAG
ccaagggagcatccaaatta

SEQ ID NO: 167258 - DNA, 20 bp, Artificial Sequence
  Description of Artificial Sequence: Synthetic oligonucleotide
  Target: LAMA2; (+) strand; PAM type: NRG; PAM sequence: AAG
tagagctttcttatctctta

SEQ ID NO: 167259 - DNA, 20 bp, Artificial Sequence
  Description of Artificial Sequence: Synthetic oligonucleotide
  Target: LAMA2; (+) strand; PAM type: NRG; PAM sequence: TAG
agctttcttatctcttaaag

SEQ ID NO: 167260 - DNA, 20 bp, Artificial Sequence
  Description of Artificial Sequence: Synthetic oligonucleotide
  Target: LAMA2; (+) strand; PAM type: NRG; PAM sequence: AGG
gctttcttatctcttaaagt

SEQ ID NO: 167261 - DNA, 20 bp, Artificial Sequence
  Description of Artificial Sequence: Synthetic oligonucleotide
  Target: LAMA2; (+) strand; PAM type: NRG; PAM sequence: GGG
ctttcttatctcttaaagta

SEQ ID NO: 167262 - DNA, 20 bp, Artificial Sequence
  Description of Artificial Sequence: Synthetic oligonucleotide
  Target: LAMA2; (+) strand; PAM type: NRG; PAM sequence: AAG
cttatctcttaaagtagggt

SEQ ID NO: 167263 - DNA, 20 bp, Artificial Sequence
  Description of Artificial Sequence: Synthetic oligonucleotide
  Target: LAMA2; (+) strand; PAM type: NRG; PAM sequence: AGG
ttatctcttaaagtagggta

SEQ ID NO: 167264 - DNA, 20 bp, Artificial Sequence
  Description of Artificial Sequence: Synthetic oligonucleotide
  Target: LAMA2; (+) strand; PAM type: NRG; PAM sequence: TAG
tcttaaagtagggtaaggtg

SEQ ID NO: 167265 - DNA, 20 bp, Artificial Sequence
  Description of Artificial Sequence: Synthetic oligonucleotide
  Target: LAMA2; (+) strand; PAM type: NRG; PAM sequence: AAG
taaagtagggtaaggtgtag

SEQ ID NO: 167266 - DNA, 20 bp, Artificial Sequence
  Description of Artificial Sequence: Synthetic oligonucleotide
  Target: LAMA2; (+) strand; PAM type: NRG; PAM sequence: TAG
agtagggtaaggtgtagaag

SEQ ID NO: 167267 - DNA, 20 bp, Artificial Sequence
  Description of Artificial Sequence: Synthetic oligonucleotide
  Target: LAMA2; (+) strand; PAM type: NRG; PAM sequence: AAG
agggtaaggtgtagaagtag

SEQ ID NO: 167268 - DNA, 20 bp, Artificial Sequence
  Description of Artificial Sequence: Synthetic oligonucleotide
  Target: LAMA2; (+) strand; PAM type: NRG; PAM sequence: GAG
ggtgtagaagtagaagattt

SEQ ID NO: 167269 - DNA, 20 bp, Artificial Sequence
  Description of Artificial Sequence: Synthetic oligonucleotide
  Target: LAMA2; (+) strand; PAM type: NRG; PAM sequence: TGG
agaagtagaagatttgagat

SEQ ID NO: 167270 - DNA, 20 bp, Artificial Sequence
  Description of Artificial Sequence: Synthetic oligonucleotide
  Target: LAMA2; (+) strand; PAM type: NRG; PAM sequence: TGG
gtagaagatttgagattggc

SEQ ID NO: 167271 - DNA, 20 bp, Artificial Sequence
  Description of Artificial Sequence: Synthetic oligonucleotide
  Target: LAMA2; (+) strand; PAM type: NRG; PAM sequence: GGG
tagaagatttgagattggct

SEQ ID NO: 167272 - DNA, 20 bp, Artificial Sequence
  Description of Artificial Sequence: Synthetic oligonucleotide
  Target: LAMA2; (+) strand; PAM type: NRG; PAM sequence: TGG
ttgagattggctgggcacgt

SEQ ID NO: 167273 - DNA, 20 bp, Artificial Sequence
  Description of Artificial Sequence: Synthetic oligonucleotide
  Target: LAMA2; (+) strand; PAM type: NRG; PAM sequence: GGG
tgagattggctgggcacgtt

SEQ ID NO: 167274 - DNA, 20 bp, Artificial Sequence
  Description of Artificial Sequence: Synthetic oligonucleotide
  Target: LAMA2; (+) strand; PAM type: NRG; PAM sequence: GAG
agattggctgggcacgttgg

SEQ ID NO: 167275 - DNA, 20 bp, Artificial Sequence
  Description of Artificial Sequence: Synthetic oligonucleotide
  Target: LAMA2; (+) strand; PAM type: NRG; PAM sequence: AGG
gattggctgggcacgttggg

SEQ ID NO: 167276 - DNA, 20 bp, Artificial Sequence
  Description of Artificial Sequence: Synthetic oligonucleotide
  Target: LAMA2; (+) strand; PAM type: NRG; PAM sequence: GAG
gctgggcacgttgggaggct

SEQ ID NO: 167277 - DNA, 20 bp, Artificial Sequence
  Description of Artificial Sequence: Synthetic oligonucleotide
  Target: LAMA2; (+) strand; PAM type: NRG; PAM sequence: AGG
ctgggcacgttgggaggctg

SEQ ID NO: 167278 - DNA, 20 bp, Artificial Sequence
  Description of Artificial Sequence: Synthetic oligonucleotide
  Target: LAMA2; (+) strand; PAM type: NRG; PAM sequence: TGG
ggcacgttgggaggctgagg

SEQ ID NO: 167279 - DNA, 20 bp, Artificial Sequence
  Description of Artificial Sequence: Synthetic oligonucleotide
  Target: LAMA2; (+) strand; PAM type: NRG; PAM sequence: GGG
gcacgttgggaggctgaggt

SEQ ID NO: 167280 - DNA, 20 bp, Artificial Sequence
  Description of Artificial Sequence: Synthetic oligonucleotide
  Target: LAMA2; (+) strand; PAM type: NRG; PAM sequence: TGG
cgttgggaggctgaggtggg

SEQ ID NO: 167281 - DNA, 20 bp, Artificial Sequence
  Description of Artificial Sequence: Synthetic oligonucleotide
  Target: LAMA2; (+) strand; PAM type: NRG; PAM sequence: GAG
ctgaggtgggtggatcacct

SEQ ID NO: 167282 - DNA, 20 bp, Artificial Sequence
  Description of Artificial Sequence: Synthetic oligonucleotide
  Target: LAMA2; (+) strand; PAM type: NRG; PAM sequence: AGG
tgaggtgggtggatcacctg

SEQ ID NO: 167283 - DNA, 20 bp, Artificial Sequence
  Description of Artificial Sequence: Synthetic oligonucleotide
  Target: LAMA2; (+) strand; PAM type: NRG; PAM sequence: CAG
gtgggtggatcacctgaggt

SEQ ID NO: 167284 - DNA, 20 bp, Artificial Sequence
  Description of Artificial Sequence: Synthetic oligonucleotide
  Target: LAMA2; (+) strand; PAM type: NRG; PAM sequence: AGG
tgggtggatcacctgaggtc

SEQ ID NO: 167285 - DNA, 20 bp, Artificial Sequence
  Description of Artificial Sequence: Synthetic oligonucleotide
  Target: LAMA2; (+) strand; PAM type: NRG; PAM sequence: GAG
ggtggatcacctgaggtcag

SEQ ID NO: 167286 - DNA, 20 bp, Artificial Sequence
  Description of Artificial Sequence: Synthetic oligonucleotide
  Target: LAMA2; (+) strand; PAM type: NRG; PAM sequence: AAG
tcacctgaggtcaggagttc

SEQ ID NO: 167287 - DNA, 20 bp, Artificial Sequence
  Description of Artificial Sequence: Synthetic oligonucleotide
  Target: LAMA2; (+) strand; PAM type: NRG; PAM sequence: CAG
tgaggtcaggagttcaagac

SEQ ID NO: 167288 - DNA, 20 bp, Artificial Sequence
  Description of Artificial Sequence: Synthetic oligonucleotide
  Target: LAMA2; (+) strand; PAM type: NRG; PAM sequence: TGG
tcaggagttcaagaccagcc

SEQ ID NO: 167289 - DNA, 20 bp, Artificial Sequence
  Description of Artificial Sequence: Synthetic oligonucleotide
  Target: LAMA2; (+) strand; PAM type: NRG; PAM sequence: TGG
caagaccagcctggccaaca

SEQ ID NO: 167290 - DNA, 20 bp, Artificial Sequence
  Description of Artificial Sequence: Synthetic oligonucleotide
  Target: LAMA2; (+) strand; PAM type: NRG; PAM sequence: TAG
ctactaaaaatacaaaaaat

SEQ ID NO: 167291 - DNA, 20 bp, Artificial Sequence
  Description of Artificial Sequence: Synthetic oligonucleotide
  Target: LAMA2; (+) strand; PAM type: NRG; PAM sequence: TGG
aaaaatacaaaaaattagcc

SEQ ID NO: 167292 - DNA, 20 bp, Artificial Sequence
  Description of Artificial Sequence: Synthetic oligonucleotide
  Target: LAMA2; (+) strand; PAM type: NRG; PAM sequence: TGG
tacaaaaaattagcctggcg

SEQ ID NO: 167293 - DNA, 20 bp, Artificial Sequence
  Description of Artificial Sequence: Synthetic oligonucleotide
  Target: LAMA2; (+) strand; PAM type: NRG; PAM sequence: TGG
aaaaaattagcctggcgtgg

SEQ ID NO: 167294 - DNA, 20 bp, Artificial Sequence
  Description of Artificial Sequence: Synthetic oligonucleotide
  Target: LAMA2; (+) strand; PAM type: NRG; PAM sequence: TAG
ggcgtggtggtatgtgcctg

SEQ ID NO: 167295 - DNA, 20 bp, Artificial Sequence
  Description of Artificial Sequence: Synthetic oligonucleotide
  Target: LAMA2; (+) strand; PAM type: NRG; PAM sequence: CAG
gtggtatgtgcctgtagtac

SEQ ID NO: 167296 - DNA, 20 bp, Artificial Sequence
  Description of Artificial Sequence: Synthetic oligonucleotide
  Target: LAMA2; (+) strand; PAM type: NRG; PAM sequence: CGG
tgcctgtagtaccagctact

SEQ ID NO: 167297 - DNA, 20 bp, Artificial Sequence
  Description of Artificial Sequence: Synthetic oligonucleotide
  Target: LAMA2; (+) strand; PAM type: NRG; PAM sequence: GGG
gcctgtagtaccagctactc

SEQ ID NO: 167298 - DNA, 20 bp, Artificial Sequence
  Description of Artificial Sequence: Synthetic oligonucleotide
  Target: LAMA2; (+) strand; PAM type: NRG; PAM sequence: AAG
tgtagtaccagctactcggg

SEQ ID NO: 167299 - DNA, 20 bp, Artificial Sequence
  Description of Artificial Sequence: Synthetic oligonucleotide
  Target: LAMA2; (+) strand; PAM type: NRG; PAM sequence: AGG
gtagtaccagctactcggga

SEQ ID NO: 167300 - DNA, 20 bp, Artificial Sequence
  Description of Artificial Sequence: Synthetic oligonucleotide
  Target: LAMA2; (+) strand; PAM type: NRG; PAM sequence: GAG
taccagctactcgggaaggt

SEQ ID NO: 167301 - DNA, 20 bp, Artificial Sequence
  Description of Artificial Sequence: Synthetic oligonucleotide
  Target: LAMA2; (+) strand; PAM type: NRG; PAM sequence: AGG
accagctactcgggaaggtg

SEQ ID NO: 167302 - DNA, 20 bp, Artificial Sequence
  Description of Artificial Sequence: Synthetic oligonucleotide
  Target: LAMA2; (+) strand; PAM type: NRG; PAM sequence: CAG
agctactcgggaaggtgagg

SEQ ID NO: 167303 - DNA, 20 bp, Artificial Sequence
  Description of Artificial Sequence: Synthetic oligonucleotide
  Target: LAMA2; (+) strand; PAM type: NRG; PAM sequence: AGG
gctactcgggaaggtgaggc

SEQ ID NO: 167304 - DNA, 20 bp, Artificial Sequence
  Description of Artificial Sequence: Synthetic oligonucleotide
  Target: LAMA2; (+) strand; PAM type: NRG; PAM sequence: GAG
tactcgggaaggtgaggcag

SEQ ID NO: 167305 - DNA, 20 bp, Artificial Sequence
  Description of Artificial Sequence: Synthetic oligonucleotide
  Target: LAMA2; (+) strand; PAM type: NRG; PAM sequence: CAG
ggcaggagaatccctttatt

SEQ ID NO: 167306 - DNA, 20 bp, Artificial Sequence
  Description of Artificial Sequence: Synthetic oligonucleotide
  Target: LAMA2; (+) strand; PAM type: NRG; PAM sequence: AGG
gcaggagaatccctttattc

SEQ ID NO: 167307 - DNA, 20 bp, Artificial Sequence
  Description of Artificial Sequence: Synthetic oligonucleotide
  Target: LAMA2; (+) strand; PAM type: NRG; PAM sequence: GAG
aggagaatccctttattcag

SEQ ID NO: 167308 - DNA, 20 bp, Artificial Sequence
  Description of Artificial Sequence: Synthetic oligonucleotide
  Target: LAMA2; (+) strand; PAM type: NRG; PAM sequence: AGG
ggagaatccctttattcagg

SEQ ID NO: 167309 - DNA, 20 bp, Artificial Sequence
  Description of Artificial Sequence: Synthetic oligonucleotide
  Target: LAMA2; (+) strand; PAM type: NRG; PAM sequence: CAG
gaatccctttattcaggagg

SEQ ID NO: 167310 - DNA, 20 bp, Artificial Sequence
  Description of Artificial Sequence: Synthetic oligonucleotide
  Target: LAMA2; (+) strand; PAM type: NRG; PAM sequence: GAG
atccctttattcaggaggca

SEQ ID NO: 167311 - DNA, 20 bp, Artificial Sequence
  Description of Artificial Sequence: Synthetic oligonucleotide
  Target: LAMA2; (+) strand; PAM type: NRG; PAM sequence: AGG
tccctttattcaggaggcag

SEQ ID NO: 167312 - DNA, 20 bp, Artificial Sequence
  Description of Artificial Sequence: Synthetic oligonucleotide
  Target: LAMA2; (+) strand; PAM type: NRG; PAM sequence: CAG
tattcaggaggcagaggttg

SEQ ID NO: 167313 - DNA, 20 bp, Artificial Sequence
  Description of Artificial Sequence: Synthetic oligonucleotide
  Target: LAMA2; (+) strand; PAM type: NRG; PAM sequence: GAG
caggaggcagaggttgcagt

SEQ ID NO: 167314 - DNA, 20 bp, Artificial Sequence
  Description of Artificial Sequence: Synthetic oligonucleotide
  Target: LAMA2; (+) strand; PAM type: NRG; PAM sequence: AAG
ggcagaggttgcagtgagcc

SEQ ID NO: 167315 - DNA, 20 bp, Artificial Sequence
  Description of Artificial Sequence: Synthetic oligonucleotide
  Target: LAMA2; (+) strand; PAM type: NRG; PAM sequence: TGG
gaggttgcagtgagccaaga

SEQ ID NO: 167316 - DNA, 20 bp, Artificial Sequence
  Description of Artificial Sequence: Synthetic oligonucleotide
  Target: LAMA2; (+) strand; PAM type: NRG; PAM sequence: CAG
aagatggtgccactgcactc

SEQ ID NO: 167317 - DNA, 20 bp, Artificial Sequence
  Description of Artificial Sequence: Synthetic oligonucleotide
  Target: LAMA2; (+) strand; PAM type: NRG; PAM sequence: TGG
ggtgccactgcactccagcc

SEQ ID NO: 167318 - DNA, 20 bp, Artificial Sequence
  Description of Artificial Sequence: Synthetic oligonucleotide
  Target: LAMA2; (+) strand; PAM type: NRG; PAM sequence: GGG
gtgccactgcactccagcct

SEQ ID NO: 167319 - DNA, 20 bp, Artificial Sequence
  Description of Artificial Sequence: Synthetic oligonucleotide
  Target: LAMA2; (+) strand; PAM type: NRG; PAM sequence: CAG
ctgcactccagcctgggcga

SEQ ID NO: 167320 - DNA, 20 bp, Artificial Sequence
  Description of Artificial Sequence: Synthetic oligonucleotide
  Target: LAMA2; (+) strand; PAM type: NRG; PAM sequence: GAG
gcactccagcctgggcgaca

SEQ ID NO: 167321 - DNA, 20 bp, Artificial Sequence
  Description of Artificial Sequence: Synthetic oligonucleotide
  Target: LAMA2; (+) strand; PAM type: NRG; PAM sequence: AAG
aaaaaaaaaaaaaaaaaaaa

SEQ ID NO: 167322 - DNA, 20 bp, Artificial Sequence
  Description of Artificial Sequence: Synthetic oligonucleotide
  Target: LAMA2; (+) strand; PAM type: NRG; PAM sequence: GAG
aaaaaaaaaaaaaaaaaaaa

SEQ ID NO: 167323 - DNA, 20 bp, Artificial Sequence
  Description of Artificial Sequence: Synthetic oligonucleotide
  Target: LAMA2; (+) strand; PAM type: NRG; PAM sequence: AAG
aaaaaaaaaaaaaagagaaa

SEQ ID NO: 167324 - DNA, 20 bp, Artificial Sequence
  Description of Artificial Sequence: Synthetic oligonucleotide
  Target: LAMA2; (+) strand; PAM type: NRG; PAM sequence: AAG
aaaaaaaaagagaaaaagaa

SEQ ID NO: 167325 - DNA, 20 bp, Artificial Sequence
  Description of Artificial Sequence: Synthetic oligonucleotide
  Target: LAMA2; (+) strand; PAM type: NRG; PAM sequence: AAG
aaaagagaaaaagaaaagaa

SEQ ID NO: 167326 - DNA, 20 bp, Artificial Sequence
  Description of Artificial Sequence: Synthetic oligonucleotide
  Target: LAMA2; (+) strand; PAM type: NRG; PAM sequence: AAG
agaaaaagaaaagaaaagaa

SEQ ID NO: 167327 - DNA, 20 bp, Artificial Sequence
  Description of Artificial Sequence: Synthetic oligonucleotide
  Target: LAMA2; (+) strand; PAM type: NRG; PAM sequence: AAG
aagaaaagaaaagaaaagaa

SEQ ID NO: 167328 - DNA, 20 bp, Artificial Sequence
  Description of Artificial Sequence: Synthetic oligonucleotide
  Target: LAMA2; (+) strand; PAM type: NRG; PAM sequence: TGG
agacttgtaccttgtcatat

SEQ ID NO: 167329 - DNA, 20 bp, Artificial Sequence
  Description of Artificial Sequence: Synthetic oligonucleotide
  Target: LAMA2; (+) strand; PAM type: NRG; PAM sequence: CAG
accttgtcatattggaaaac

SEQ ID NO: 167330 - DNA, 20 bp, Artificial Sequence
  Description of Artificial Sequence: Synthetic oligonucleotide
  Target: LAMA2; (+) strand; PAM type: NRG; PAM sequence: TGG
aaatgatctaaaattcactg

SEQ ID NO: 167331 - DNA, 20 bp, Artificial Sequence
  Description of Artificial Sequence: Synthetic oligonucleotide
  Target: LAMA2; (+) strand; PAM type: NRG; PAM sequence: TAG
aattcactgtggcaatgtca

SEQ ID NO: 167332 - DNA, 20 bp, Artificial Sequence
  Description of Artificial Sequence: Synthetic oligonucleotide
  Target: LAMA2; (+) strand; PAM type: NRG; PAM sequence: AAG
caatgtcatagtttcactgc

SEQ ID NO: 167333 - DNA, 20 bp, Artificial Sequence
  Description of Artificial Sequence: Synthetic oligonucleotide
  Target: LAMA2; (+) strand; PAM type: NRG; PAM sequence: TAG
catagtttcactgcaagaaa

SEQ ID NO: 167334 - DNA, 20 bp, Artificial Sequence
  Description of Artificial Sequence: Synthetic oligonucleotide
  Target: LAMA2; (+) strand; PAM type: NRG; PAM sequence: AAG
aaatagcataaactctcaaa

SEQ ID NO: 167335 - DNA, 20 bp, Artificial Sequence
  Description of Artificial Sequence: Synthetic oligonucleotide
  Target: LAMA2; (+) strand; PAM type: NRG; PAM sequence: GAG
atagcataaactctcaaaaa

SEQ ID NO: 167336 - DNA, 20 bp, Artificial Sequence
  Description of Artificial Sequence: Synthetic oligonucleotide
  Target: LAMA2; (+) strand; PAM type: NRG; PAM sequence: TAG
aaactctcaaaaagagttaa

SEQ ID NO: 167337 - DNA, 20 bp, Artificial Sequence
  Description of Artificial Sequence: Synthetic oligonucleotide
  Target: LAMA2; (+) strand; PAM type: NRG; PAM sequence: AAG
ctctcaaaaagagttaatag

SEQ ID NO: 167338 - DNA, 20 bp, Artificial Sequence
  Description of Artificial Sequence: Synthetic oligonucleotide
  Target: LAMA2; (+) strand; PAM type: NRG; PAM sequence: TGG
ttaaacaaacattaattcca

SEQ ID NO: 167339 - DNA, 20 bp, Artificial Sequence
  Description of Artificial Sequence: Synthetic oligonucleotide
  Target: LAMA2; (+) strand; PAM type: NRG; PAM sequence: TGG
taattccatggcaatatctg

SEQ ID NO: 167340 - DNA, 20 bp, Artificial Sequence
  Description of Artificial Sequence: Synthetic oligonucleotide
  Target: LAMA2; (+) strand; PAM type: NRG; PAM sequence: TGG
ttccatggcaatatctgtgg

SEQ ID NO: 167341 - DNA, 20 bp, Artificial Sequence
  Description of Artificial Sequence: Synthetic oligonucleotide
  Target: LAMA2; (+) strand; PAM type: NRG; PAM sequence: CAG
atctgtggtggaaatgacgt

SEQ ID NO: 167342 - DNA, 20 bp, Artificial Sequence
  Description of Artificial Sequence: Synthetic oligonucleotide
  Target: LAMA2; (+) strand; PAM type: NRG; PAM sequence: TGG
attccctaccaacaattgtc

SEQ ID NO: 167343 - DNA, 20 bp, Artificial Sequence
  Description of Artificial Sequence: Synthetic oligonucleotide
  Target: LAMA2; (+) strand; PAM type: NRG; PAM sequence: TAG
accaacaattgtctggccat

SEQ ID NO: 167344 - DNA, 20 bp, Artificial Sequence
  Description of Artificial Sequence: Synthetic oligonucleotide
  Target: LAMA2; (+) strand; PAM type: NRG; PAM sequence: AAG
aacaattgtctggccattag

SEQ ID NO: 167345 - DNA, 20 bp, Artificial Sequence
  Description of Artificial Sequence: Synthetic oligonucleotide
  Target: LAMA2; (+) strand; PAM type: NRG; PAM sequence: AAG
tcttcttgattgactaaatg

SEQ ID NO: 167346 - DNA, 20 bp, Artificial Sequence
  Description of Artificial Sequence: Synthetic oligonucleotide
  Target: LAMA2; (+) strand; PAM type: NRG; PAM sequence: CAG
tcttgattgactaaatgaag

SEQ ID NO: 167347 - DNA, 20 bp, Artificial Sequence
  Description of Artificial Sequence: Synthetic oligonucleotide
  Target: LAMA2; (+) strand; PAM type: NRG; PAM sequence: GAG
ttgattgactaaatgaagca

SEQ ID NO: 167348 - DNA, 20 bp, Artificial Sequence
  Description of Artificial Sequence: Synthetic oligonucleotide
  Target: LAMA2; (+) strand; PAM type: NRG; PAM sequence: CAG
tgactaaatgaagcagagcc

SEQ ID NO: 167349 - DNA, 20 bp, Artificial Sequence
  Description of Artificial Sequence: Synthetic oligonucleotide
  Target: LAMA2; (+) strand; PAM type: NRG; PAM sequence: TGG
atgaagcagagcccagtcta

SEQ ID NO: 167350 - DNA, 20 bp, Artificial Sequence
  Description of Artificial Sequence: Synthetic oligonucleotide
  Target: LAMA2; (+) strand; PAM type: NRG; PAM sequence: GGG
tgaagcagagcccagtctat

SEQ ID NO: 167351 - DNA, 20 bp, Artificial Sequence
  Description of Artificial Sequence: Synthetic oligonucleotide
  Target: LAMA2; (+) strand; PAM type: NRG; PAM sequence: AAG
cagtctatgggatatcatcc

SEQ ID NO: 167352 - DNA, 20 bp, Artificial Sequence
  Description of Artificial Sequence: Synthetic oligonucleotide
  Target: LAMA2; (+) strand; PAM type: NRG; PAM sequence: AAG
atgggatatcatccaagttc

SEQ ID NO: 167353 - DNA, 20 bp, Artificial Sequence
  Description of Artificial Sequence: Synthetic oligonucleotide
  Target: LAMA2; (+) strand; PAM type: NRG; PAM sequence: TGG
gatatcatccaagttcaagc

SEQ ID NO: 167354 - DNA, 20 bp, Artificial Sequence
  Description of Artificial Sequence: Synthetic oligonucleotide
  Target: LAMA2; (+) strand; PAM type: NRG; PAM sequence: CGG
atcatccaagttcaagctgg

SEQ ID NO: 167355 - DNA, 20 bp, Artificial Sequence
  Description of Artificial Sequence: Synthetic oligonucleotide
  Target: LAMA2; (+) strand; PAM type: NRG; PAM sequence: TGG
agttcaagctggcggcttcg

SEQ ID NO: 167356 - DNA, 20 bp, Artificial Sequence
  Description of Artificial Sequence: Synthetic oligonucleotide
  Target: LAMA2; (+) strand; PAM type: NRG; PAM sequence: CAG
agctggcggcttcgtggctc

SEQ ID NO: 167357 - DNA, 20 bp, Artificial Sequence
  Description of Artificial Sequence: Synthetic oligonucleotide
  Target: LAMA2; (+) strand; PAM type: NRG; PAM sequence: GAG
gcggcttcgtggctccagct

SEQ ID NO: 167358 - DNA, 20 bp, Artificial Sequence
  Description of Artificial Sequence: Synthetic oligonucleotide
  Target: LAMA2; (+) strand; PAM type: NRG; PAM sequence: CAG
gtggctccagctgagattat

SEQ ID NO: 167359 - DNA, 20 bp, Artificial Sequence
  Description of Artificial Sequence: Synthetic oligonucleotide
  Target: LAMA2; (+) strand; PAM type: NRG; PAM sequence: AGG
tggctccagctgagattatc

SEQ ID NO: 167360 - DNA, 20 bp, Artificial Sequence
  Description of Artificial Sequence: Synthetic oligonucleotide
  Target: LAMA2; (+) strand; PAM type: NRG; PAM sequence: AAG
ctccagctgagattatcagg

SEQ ID NO: 167361 - DNA, 20 bp, Artificial Sequence
  Description of Artificial Sequence: Synthetic oligonucleotide
  Target: LAMA2; (+) strand; PAM type: NRG; PAM sequence: TAG
aattcactaacatgtccatc

SEQ ID NO: 167362 - DNA, 20 bp, Artificial Sequence
  Description of Artificial Sequence: Synthetic oligonucleotide
  Target: LAMA2; (+) strand; PAM type: NRG; PAM sequence: AAG
tttctttcgatattgtttat

SEQ ID NO: 167363 - DNA, 20 bp, Artificial Sequence
  Description of Artificial Sequence: Synthetic oligonucleotide
  Target: LAMA2; (+) strand; PAM type: NRG; PAM sequence: AAG
cgatattgtttataagatgt

SEQ ID NO: 167364 - DNA, 20 bp, Artificial Sequence
  Description of Artificial Sequence: Synthetic oligonucleotide
  Target: LAMA2; (+) strand; PAM type: NRG; PAM sequence: CAG
aaatcctgtcttataaaatc

SEQ ID NO: 167365 - DNA, 20 bp, Artificial Sequence
  Description of Artificial Sequence: Synthetic oligonucleotide
  Target: LAMA2; (+) strand; PAM type: NRG; PAM sequence: AAG
ttttctcaactctcaaatgc

SEQ ID NO: 167366 - DNA, 20 bp, Artificial Sequence
  Description of Artificial Sequence: Synthetic oligonucleotide
  Target: LAMA2; (+) strand; PAM type: NRG; PAM sequence: AGG
tttctcaactctcaaatgca

SEQ ID NO: 167367 - DNA, 20 bp, Artificial Sequence
  Description of Artificial Sequence: Synthetic oligonucleotide
  Target: LAMA2; (+) strand; PAM type: NRG; PAM sequence: AAG
tgcaaggatcgcattcccac

SEQ ID NO: 167368 - DNA, 20 bp, Artificial Sequence
  Description of Artificial Sequence: Synthetic oligonucleotide
  Target: LAMA2; (+) strand; PAM type: NRG; PAM sequence: CAG
ctgccatgtttattttttgt

SEQ ID NO: 167369 - DNA, 20 bp, Artificial Sequence
  Description of Artificial Sequence: Synthetic oligonucleotide
  Target: LAMA2; (+) strand; PAM type: NRG; PAM sequence: AGG
tgccatgtttattttttgtc

SEQ ID NO: 167370 - DNA, 20 bp, Artificial Sequence
  Description of Artificial Sequence: Synthetic oligonucleotide
  Target: LAMA2; (+) strand; PAM type: NRG; PAM sequence: TGG
catgtttattttttgtcagg

SEQ ID NO: 167371 - DNA, 20 bp, Artificial Sequence
  Description of Artificial Sequence: Synthetic oligonucleotide
  Target: LAMA2; (+) strand; PAM type: NRG; PAM sequence: AAG
tttaaattattattttccca

SEQ ID NO: 167372 - DNA, 20 bp, Artificial Sequence
  Description of Artificial Sequence: Synthetic oligonucleotide
  Target: LAMA2; (+) strand; PAM type: NRG; PAM sequence: AAG
ttattattttcccaaagtct

SEQ ID NO: 167373 - DNA, 20 bp, Artificial Sequence
  Description of Artificial Sequence: Synthetic oligonucleotide
  Target: LAMA2; (+) strand; PAM type: NRG; PAM sequence: TAG
ccaaagtctaagtaaatttc

SEQ ID NO: 167374 - DNA, 20 bp, Artificial Sequence
  Description of Artificial Sequence: Synthetic oligonucleotide
  Target: LAMA2; (+) strand; PAM type: NRG; PAM sequence: AAG
aagtctaagtaaatttctag

SEQ ID NO: 167375 - DNA, 20 bp, Artificial Sequence
  Description of Artificial Sequence: Synthetic oligonucleotide
  Target: LAMA2; (+) strand; PAM type: NRG; PAM sequence: AGG
agtctaagtaaatttctaga

SEQ ID NO: 167376 - DNA, 20 bp, Artificial Sequence
  Description of Artificial Sequence: Synthetic oligonucleotide
  Target: LAMA2; (+) strand; PAM type: NRG; PAM sequence: TAG
ctaagtaaatttctagaagg

SEQ ID NO: 167377 - DNA, 20 bp, Artificial Sequence
  Description of Artificial Sequence: Synthetic oligonucleotide
  Target: LAMA2; (+) strand; PAM type: NRG; PAM sequence: AGG
taagtaaatttctagaaggt

SEQ ID NO: 167378 - DNA, 20 bp, Artificial Sequence
  Description of Artificial Sequence: Synthetic oligonucleotide
  Target: LAMA2; (+) strand; PAM type: NRG; PAM sequence: CAG
tgttctttcattgcctgttt

SEQ ID NO: 167379 - DNA, 20 bp, Artificial Sequence
  Description of Artificial Sequence: Synthetic oligonucleotide
  Target: LAMA2; (+) strand; PAM type: NRG; PAM sequence: TAG
ctgtttcagtgcattccatg

SEQ ID NO: 167380 - DNA, 20 bp, Artificial Sequence
  Description of Artificial Sequence: Synthetic oligonucleotide
  Target: LAMA2; (+) strand; PAM type: NRG; PAM sequence: AAG
ttcatgaaaattttaatttg

SEQ ID NO: 167381 - DNA, 20 bp, Artificial Sequence
  Description of Artificial Sequence: Synthetic oligonucleotide
  Target: LAMA2; (+) strand; PAM type: NRG; PAM sequence: AAG
gctatttgcacactattctg

SEQ ID NO: 167382 - DNA, 20 bp, Artificial Sequence
  Description of Artificial Sequence: Synthetic oligonucleotide
  Target: LAMA2; (+) strand; PAM type: NRG; PAM sequence: TGG
aagctattctcatttctttg

SEQ ID NO: 167383 - DNA, 20 bp, Artificial Sequence
  Description of Artificial Sequence: Synthetic oligonucleotide
  Target: LAMA2; (+) strand; PAM type: NRG; PAM sequence: AAG
tattctcatttctttgtgga

SEQ ID NO: 167384 - DNA, 20 bp, Artificial Sequence
  Description of Artificial Sequence: Synthetic oligonucleotide
  Target: LAMA2; (+) strand; PAM type: NRG; PAM sequence: AGG
attctcatttctttgtggaa

SEQ ID NO: 167385 - DNA, 20 bp, Artificial Sequence
  Description of Artificial Sequence: Synthetic oligonucleotide
  Target: LAMA2; (+) strand; PAM type: NRG; PAM sequence: AAG
ttctttgtggaaaggtgtta

SEQ ID NO: 167386 - DNA, 20 bp, Artificial Sequence
  Description of Artificial Sequence: Synthetic oligonucleotide
  Target: LAMA2; (+) strand; PAM type: NRG; PAM sequence: AGG
tctttgtggaaaggtgttaa

SEQ ID NO: 167387 - DNA, 20 bp, Artificial Sequence
  Description of Artificial Sequence: Synthetic oligonucleotide
  Target: LAMA2; (+) strand; PAM type: NRG; PAM sequence: GGG
ctttgtggaaaggtgttaaa

SEQ ID NO: 167388 - DNA, 20 bp, Artificial Sequence
  Description of Artificial Sequence: Synthetic oligonucleotide
  Target: LAMA2; (+) strand; PAM type: NRG; PAM sequence: AAG
cccaatgtctcttattatgc

SEQ ID NO: 167389 - DNA, 20 bp, Artificial Sequence
  Description of Artificial Sequence: Synthetic oligonucleotide
  Target: LAMA2; (+) strand; PAM type: NRG; PAM sequence: AAG
gtctcttattatgcaagcat

SEQ ID NO: 167390 - DNA, 20 bp, Artificial Sequence
  Description of Artificial Sequence: Synthetic oligonucleotide
  Target: LAMA2; (+) strand; PAM type: NRG; PAM sequence: AAG
cttattatgcaagcataaga

SEQ ID NO: 167391 - DNA, 20 bp, Artificial Sequence
  Description of Artificial Sequence: Synthetic oligonucleotide
  Target: LAMA2; (+) strand; PAM type: NRG; PAM sequence: AAG
attatgcaagcataagaaag

SEQ ID NO: 167392 - DNA, 20 bp, Artificial Sequence
  Description of Artificial Sequence: Synthetic oligonucleotide
  Target: LAMA2; (+) strand; PAM type: NRG; PAM sequence: GAG
aagaaagaagatatcgatct

SEQ ID NO: 167393 - DNA, 20 bp, Artificial Sequence
  Description of Artificial Sequence: Synthetic oligonucleotide
  Target: LAMA2; (+) strand; PAM type: NRG; PAM sequence: TAG
agatatcgatctgagattgc

SEQ ID NO: 167394 - DNA, 20 bp, Artificial Sequence
  Description of Artificial Sequence: Synthetic oligonucleotide
  Target: LAMA2; (+) strand; PAM type: NRG; PAM sequence: TAG
cgatctgagattgctagttt

SEQ ID NO: 167395 - DNA, 20 bp, Artificial Sequence
  Description of Artificial Sequence: Synthetic oligonucleotide
  Target: LAMA2; (+) strand; PAM type: NRG; PAM sequence: AAG
ttgactcctctgtatttatg

SEQ ID NO: 167396 - DNA, 20 bp, Artificial Sequence
  Description of Artificial Sequence: Synthetic oligonucleotide
  Target: LAMA2; (+) strand; PAM type: NRG; PAM sequence: GAG
acatctatgctttccacctt

SEQ ID NO: 167397 - DNA, 20 bp, Artificial Sequence
  Description of Artificial Sequence: Synthetic oligonucleotide
  Target: LAMA2; (+) strand; PAM type: NRG; PAM sequence: AGG
catctatgctttccaccttg

SEQ ID NO: 167398 - DNA, 20 bp, Artificial Sequence
  Description of Artificial Sequence: Synthetic oligonucleotide
  Target: LAMA2; (+) strand; PAM type: NRG; PAM sequence: TGG
ctatgctttccaccttgagg

SEQ ID NO: 167399 - DNA, 20 bp, Artificial Sequence
  Description of Artificial Sequence: Synthetic oligonucleotide
  Target: LAMA2; (+) strand; PAM type: NRG; PAM sequence: CAG
tttccaccttgaggtggttt

SEQ ID NO: 167400 - DNA, 20 bp, Artificial Sequence
  Description of Artificial Sequence: Synthetic oligonucleotide
  Target: LAMA2; (+) strand; PAM type: NRG; PAM sequence: AAG
caccttgaggtggtttcaga

SEQ ID NO: 167401 - DNA, 20 bp, Artificial Sequence
  Description of Artificial Sequence: Synthetic oligonucleotide
  Target: LAMA2; (+) strand; PAM type: NRG; PAM sequence: TAG
ggtggtttcagaaagcccac

SEQ ID NO: 167402 - DNA, 20 bp, Artificial Sequence
  Description of Artificial Sequence: Synthetic oligonucleotide
  Target: LAMA2; (+) strand; PAM type: NRG; PAM sequence: TGG
ggtttcagaaagcccactag

SEQ ID NO: 167403 - DNA, 20 bp, Artificial Sequence
  Description of Artificial Sequence: Synthetic oligonucleotide
  Target: LAMA2; (+) strand; PAM type: NRG; PAM sequence: GGG
gtttcagaaagcccactagt

SEQ ID NO: 167404 - DNA, 20 bp, Artificial Sequence
  Description of Artificial Sequence: Synthetic oligonucleotide
  Target: LAMA2; (+) strand; PAM type: NRG; PAM sequence: AAG
cccactagtgggcatgtgcc

SEQ ID NO: 167405 - DNA, 20 bp, Artificial Sequence
  Description of Artificial Sequence: Synthetic oligonucleotide
  Target: LAMA2; (+) strand; PAM type: NRG; PAM sequence: AGG
ccactagtgggcatgtgcca

SEQ ID NO: 167406 - DNA, 20 bp, Artificial Sequence
  Description of Artificial Sequence: Synthetic oligonucleotide
  Target: LAMA2; (+) strand; PAM type: NRG; PAM sequence: CAG
gtgggcatgtgccaaggcca

SEQ ID NO: 167407 - DNA, 20 bp, Artificial Sequence
  Description of Artificial Sequence: Synthetic oligonucleotide
  Target: LAMA2; (+) strand; PAM type: NRG; PAM sequence: TAG
tgccaaggccacagtatttg

SEQ ID NO: 167408 - DNA, 20 bp, Artificial Sequence
  Description of Artificial Sequence: Synthetic oligonucleotide
  Target: LAMA2; (+) strand; PAM type: NRG; PAM sequence: TAG
cacctttttctaacatctca

SEQ ID NO: 167409 - DNA, 20 bp, Artificial Sequence
  Description of Artificial Sequence: Synthetic oligonucleotide
  Target: LAMA2; (+) strand; PAM type: NRG; PAM sequence: GAG
cctttttctaacatctcata

SEQ ID NO: 167410 - DNA, 20 bp, Artificial Sequence
  Description of Artificial Sequence: Synthetic oligonucleotide
  Target: LAMA2; (+) strand; PAM type: NRG; PAM sequence: TGG
catctcatagagctaaaacc

SEQ ID NO: 167411 - DNA, 20 bp, Artificial Sequence
  Description of Artificial Sequence: Synthetic oligonucleotide
  Target: LAMA2; (+) strand; PAM type: NRG; PAM sequence: GGG
atctcatagagctaaaacct

SEQ ID NO: 167412 - DNA, 20 bp, Artificial Sequence
  Description of Artificial Sequence: Synthetic oligonucleotide
  Target: LAMA2; (+) strand; PAM type: NRG; PAM sequence: AAG
gagctaaaacctgggatatg

SEQ ID NO: 167413 - DNA, 20 bp, Artificial Sequence
  Description of Artificial Sequence: Synthetic oligonucleotide
  Target: LAMA2; (+) strand; PAM type: NRG; PAM sequence: TAG
tatgaagaaacataaatgcc

SEQ ID NO: 167414 - DNA, 20 bp, Artificial Sequence
  Description of Artificial Sequence: Synthetic oligonucleotide
  Target: LAMA2; (+) strand; PAM type: NRG; PAM sequence: AAG
gaagaaacataaatgcctag

SEQ ID NO: 167415 - DNA, 20 bp, Artificial Sequence
  Description of Artificial Sequence: Synthetic oligonucleotide
  Target: LAMA2; (+) strand; PAM type: NRG; PAM sequence: TAG
ctagaagaaataataaattt

SEQ ID NO: 167416 - DNA, 20 bp, Artificial Sequence
  Description of Artificial Sequence: Synthetic oligonucleotide
  Target: LAMA2; (+) strand; PAM type: NRG; PAM sequence: GAG
agaagaaataataaatttta

SEQ ID NO: 167417 - DNA, 20 bp, Artificial Sequence
  Description of Artificial Sequence: Synthetic oligonucleotide
  Target: LAMA2; (+) strand; PAM type: NRG; PAM sequence: AAG
taataaattttagagactcg

SEQ ID NO: 167418 - DNA, 20 bp, Artificial Sequence
  Description of Artificial Sequence: Synthetic oligonucleotide
  Target: LAMA2; (+) strand; PAM type: NRG; PAM sequence: TAG
tcgaagtctattccccaatt

SEQ ID NO: 167419 - DNA, 20 bp, Artificial Sequence
  Description of Artificial Sequence: Synthetic oligonucleotide
  Target: LAMA2; (+) strand; PAM type: NRG; PAM sequence: GAG
gaagtctattccccaattta

SEQ ID NO: 167420 - DNA, 20 bp, Artificial Sequence
  Description of Artificial Sequence: Synthetic oligonucleotide
  Target: LAMA2; (+) strand; PAM type: NRG; PAM sequence: TAG
gtctattccccaatttagag

SEQ ID NO: 167421 - DNA, 20 bp, Artificial Sequence
  Description of Artificial Sequence: Synthetic oligonucleotide
  Target: LAMA2; (+) strand; PAM type: NRG; PAM sequence: AGG
tctattccccaatttagagt

SEQ ID NO: 167422 - DNA, 20 bp, Artificial Sequence
  Description of Artificial Sequence: Synthetic oligonucleotide
  Target: LAMA2; (+) strand; PAM type: NRG; PAM sequence: GAG
tattccccaatttagagtag

SEQ ID NO: 167423 - DNA, 20 bp, Artificial Sequence
  Description of Artificial Sequence: Synthetic oligonucleotide
  Target: LAMA2; (+) strand; PAM type: NRG; PAM sequence: TAG
gagtaggagaaaaatttaca

SEQ ID NO: 167424 - DNA, 20 bp, Artificial Sequence
  Description of Artificial Sequence: Synthetic oligonucleotide
  Target: LAMA2; (+) strand; PAM type: NRG; PAM sequence: GAG
gtaggagaaaaatttacata

SEQ ID NO: 167425 - DNA, 20 bp, Artificial Sequence
  Description of Artificial Sequence: Synthetic oligonucleotide
  Target: LAMA2; (+) strand; PAM type: NRG; PAM sequence: CAG
aatttacatagagattgatt

SEQ ID NO: 167426 - DNA, 20 bp, Artificial Sequence
  Description of Artificial Sequence: Synthetic oligonucleotide
  Target: LAMA2; (+) strand; PAM type: NRG; PAM sequence: AGG
atttacatagagattgattc

SEQ ID NO: 167427 - DNA, 20 bp, Artificial Sequence
  Description of Artificial Sequence: Synthetic oligonucleotide
  Target: LAMA2; (+) strand; PAM type: NRG; PAM sequence: GGG
tttacatagagattgattca

SEQ ID NO: 167428 - DNA, 20 bp, Artificial Sequence
  Description of Artificial Sequence: Synthetic oligonucleotide
  Target: LAMA2; (+) strand; PAM type: NRG; PAM sequence: AAG
atagagattgattcagggaa

SEQ ID NO: 167429 - DNA, 20 bp, Artificial Sequence
  Description of Artificial Sequence: Synthetic oligonucleotide
  Target: LAMA2; (+) strand; PAM type: NRG; PAM sequence: GAG
agagattgattcagggaaaa

SEQ ID NO: 167430 - DNA, 20 bp, Artificial Sequence
  Description of Artificial Sequence: Synthetic oligonucleotide
  Target: LAMA2; (+) strand; PAM type: NRG; PAM sequence: TAG
ttgattcagggaaaagagaa

SEQ ID NO: 167431 - DNA, 20 bp, Artificial Sequence
  Description of Artificial Sequence: Synthetic oligonucleotide
  Target: LAMA2; (+) strand; PAM type: NRG; PAM sequence: CAG
agaatagcaactcttattgt

SEQ ID NO: 167432 - DNA, 20 bp, Artificial Sequence
  Description of Artificial Sequence: Synthetic oligonucleotide
  Target: LAMA2; (+) strand; PAM type: NRG; PAM sequence: TAG
agcaactcttattgtcagtg

SEQ ID NO: 167433 - DNA, 20 bp, Artificial Sequence
  Description of Artificial Sequence: Synthetic oligonucleotide
  Target: LAMA2; (+) strand; PAM type: NRG; PAM sequence: TAG
tattgtcagtgtagctacga

SEQ ID NO: 167434 - DNA, 20 bp, Artificial Sequence
  Description of Artificial Sequence: Synthetic oligonucleotide
  Target: LAMA2; (+) strand; PAM type: NRG; PAM sequence: CAG
tcagtgtagctacgatagca

SEQ ID NO: 167435 - DNA, 20 bp, Artificial Sequence
  Description of Artificial Sequence: Synthetic oligonucleotide
  Target: LAMA2; (+) strand; PAM type: NRG; PAM sequence: TAG
tagctacgatagcacagtat

SEQ ID NO: 167436 - DNA, 20 bp, Artificial Sequence
  Description of Artificial Sequence: Synthetic oligonucleotide
  Target: LAMA2; (+) strand; PAM type: NRG; PAM sequence: AAG
agtattagtttctcaaatca

SEQ ID NO: 167437 - DNA, 20 bp, Artificial Sequence
  Description of Artificial Sequence: Synthetic oligonucleotide
  Target: LAMA2; (+) strand; PAM type: NRG; PAM sequence: GAG
tattagtttctcaaatcaaa

SEQ ID NO: 167438 - DNA, 20 bp, Artificial Sequence
  Description of Artificial Sequence: Synthetic oligonucleotide
  Target: LAMA2; (+) strand; PAM type: NRG; PAM sequence: AAG
ctttaaaaatatttatatca

SEQ ID NO: 167439 - DNA, 20 bp, Artificial Sequence
  Description of Artificial Sequence: Synthetic oligonucleotide
  Target: LAMA2; (+) strand; PAM type: NRG; PAM sequence: GAG
aaatatttatatcaaagact

SEQ ID NO: 167440 - DNA, 20 bp, Artificial Sequence
  Description of Artificial Sequence: Synthetic oligonucleotide
  Target: LAMA2; (+) strand; PAM type: NRG; PAM sequence: CAG
tcaaagactgagttctctgt

SEQ ID NO: 167441 - DNA, 20 bp, Artificial Sequence
  Description of Artificial Sequence: Synthetic oligonucleotide
  Target: LAMA2; (+) strand; PAM type: NRG; PAM sequence: AAG
tgagttctctgtcagtgata

SEQ ID NO: 167442 - DNA, 20 bp, Artificial Sequence
  Description of Artificial Sequence: Synthetic oligonucleotide
  Target: LAMA2; (+) strand; PAM type: NRG; PAM sequence: GAG
cagtgataaagtgtgtgtgt

SEQ ID NO: 167443 - DNA, 20 bp, Artificial Sequence
  Description of Artificial Sequence: Synthetic oligonucleotide
  Target: LAMA2; (+) strand; PAM type: NRG; PAM sequence: AAG
gtgtgtgagtgtgtgtgtgt

SEQ ID NO: 167444 - DNA, 20 bp, Artificial Sequence
  Description of Artificial Sequence: Synthetic oligonucleotide
  Target: LAMA2; (+) strand; PAM type: NRG; PAM sequence: AAG
gtgagtgtgtgtgtgtaaga

SEQ ID NO: 167445 - DNA, 20 bp, Artificial Sequence
  Description of Artificial Sequence: Synthetic oligonucleotide
  Target: LAMA2; (+) strand; PAM type: NRG; PAM sequence: TAG
taagaaagtatatgtgttca

SEQ ID NO: 167446 - DNA, 20 bp, Artificial Sequence
  Description of Artificial Sequence: Synthetic oligonucleotide
  Target: LAMA2; (+) strand; PAM type: NRG; PAM sequence: TAG
tgttcatagacacacattca

SEQ ID NO: 167447 - DNA, 20 bp, Artificial Sequence
  Description of Artificial Sequence: Synthetic oligonucleotide
  Target: LAMA2; (+) strand; PAM type: NRG; PAM sequence: TAG
catagacacacattcatagc

SEQ ID NO: 167448 - DNA, 20 bp, Artificial Sequence
  Description of Artificial Sequence: Synthetic oligonucleotide
  Target: LAMA2; (+) strand; PAM type: NRG; PAM sequence: AGG
atagacacacattcatagct

SEQ ID NO: 167449 - DNA, 20 bp, Artificial Sequence
  Description of Artificial Sequence: Synthetic oligonucleotide
  Target: LAMA2; (+) strand; PAM type: NRG; PAM sequence: GGG
tagacacacattcatagcta

SEQ ID NO: 167450 - DNA, 20 bp, Artificial Sequence
  Description of Artificial Sequence: Synthetic oligonucleotide
  Target: LAMA2; (+) strand; PAM type: NRG; PAM sequence: CAG
ttcttctcccttttccttta

SEQ ID NO: 167451 - DNA, 20 bp, Artificial Sequence
  Description of Artificial Sequence: Synthetic oligonucleotide
  Target: LAMA2; (+) strand; PAM type: NRG; PAM sequence: TGG
aattgtcaacatcacactgc

SEQ ID NO: 167452 - DNA, 20 bp, Artificial Sequence
  Description of Artificial Sequence: Synthetic oligonucleotide
  Target: LAMA2; (+) strand; PAM type: NRG; PAM sequence: TGG
ttctgtgaacgatgtgctct

SEQ ID NO: 167453 - DNA, 20 bp, Artificial Sequence
  Description of Artificial Sequence: Synthetic oligonucleotide
  Target: LAMA2; (+) strand; PAM type: NRG; PAM sequence: TGG
cgatgtgctcttggatacta

SEQ ID NO: 167454 - DNA, 20 bp, Artificial Sequence
  Description of Artificial Sequence: Synthetic oligonucleotide
  Target: LAMA2; (+) strand; PAM type: NRG; PAM sequence: AAG
ttggatactatggaattgtc

SEQ ID NO: 167455 - DNA, 20 bp, Artificial Sequence
  Description of Artificial Sequence: Synthetic oligonucleotide
  Target: LAMA2; (+) strand; PAM type: NRG; PAM sequence: AGG
tggatactatggaattgtca

SEQ ID NO: 167456 - DNA, 20 bp, Artificial Sequence
  Description of Artificial Sequence: Synthetic oligonucleotide
  Target: LAMA2; (+) strand; PAM type: NRG; PAM sequence: GGG
ggatactatggaattgtcaa

SEQ ID NO: 167457 - DNA, 20 bp, Artificial Sequence
  Description of Artificial Sequence: Synthetic oligonucleotide
  Target: LAMA2; (+) strand; PAM type: NRG; PAM sequence: CAG
agggattgccaaatgactgt

SEQ ID NO: 167458 - DNA, 20 bp, Artificial Sequence
  Description of Artificial Sequence: Synthetic oligonucleotide
  Target: LAMA2; (+) strand; PAM type: NRG; PAM sequence: CAG
gcctgccctctgatttcttc

SEQ ID NO: 167459 - DNA, 20 bp, Artificial Sequence
  Description of Artificial Sequence: Synthetic oligonucleotide
  Target: LAMA2; (+) strand; PAM type: NRG; PAM sequence: AAG
ctctgatttcttccagtaac

SEQ ID NO: 167460 - DNA, 20 bp, Artificial Sequence
  Description of Artificial Sequence: Synthetic oligonucleotide
  Target: LAMA2; (+) strand; PAM type: NRG; PAM sequence: AAG
gatttcttccagtaacaagt

SEQ ID NO: 167461 - DNA, 20 bp, Artificial Sequence
  Description of Artificial Sequence: Synthetic oligonucleotide
  Target: LAMA2; (+) strand; PAM type: NRG; PAM sequence: GAG
ttccagtaacaagtaagatt

SEQ ID NO: 167462 - DNA, 20 bp, Artificial Sequence
  Description of Artificial Sequence: Synthetic oligonucleotide
  Target: LAMA2; (+) strand; PAM type: NRG; PAM sequence: CAG
atataaccatatttcccaat

SEQ ID NO: 167463 - DNA, 20 bp, Artificial Sequence
  Description of Artificial Sequence: Synthetic oligonucleotide
  Target: LAMA2; (+) strand; PAM type: NRG; PAM sequence: TAG
aatcagaaacgccatctgtc

SEQ ID NO: 167464 - DNA, 20 bp, Artificial Sequence
  Description of Artificial Sequence: Synthetic oligonucleotide
  Target: LAMA2; (+) strand; PAM type: NRG; PAM sequence: TGG
aacgccatctgtctagcaca

SEQ ID NO: 167465 - DNA, 20 bp, Artificial Sequence
  Description of Artificial Sequence: Synthetic oligonucleotide
  Target: LAMA2; (+) strand; PAM type: NRG; PAM sequence: GGG
acgccatctgtctagcacat

SEQ ID NO: 167466 - DNA, 20 bp, Artificial Sequence
  Description of Artificial Sequence: Synthetic oligonucleotide
  Target: LAMA2; (+) strand; PAM type: NRG; PAM sequence: TGG
cacatgggctgtctatgatt

SEQ ID NO: 167467 - DNA, 20 bp, Artificial Sequence
  Description of Artificial Sequence: Synthetic oligonucleotide
  Target: LAMA2; (+) strand; PAM type: NRG; PAM sequence: TAG
atttggctattttttccatg

SEQ ID NO: 167468 - DNA, 20 bp, Artificial Sequence
  Description of Artificial Sequence: Synthetic oligonucleotide
  Target: LAMA2; (+) strand; PAM type: NRG; PAM sequence: AAG
gtagacaaaaatctcaattt

SEQ ID NO: 167469 - DNA, 20 bp, Artificial Sequence
  Description of Artificial Sequence: Synthetic oligonucleotide
  Target: LAMA2; (+) strand; PAM type: NRG; PAM sequence: TAG
acaaaaatctcaatttaaga

SEQ ID NO: 167470 - DNA, 20 bp, Artificial Sequence
  Description of Artificial Sequence: Synthetic oligonucleotide
  Target: LAMA2; (+) strand; PAM type: NRG; PAM sequence: GAG
aaaaatctcaatttaagata

SEQ ID NO: 167471 - DNA, 20 bp, Artificial Sequence
  Description of Artificial Sequence: Synthetic oligonucleotide
  Target: LAMA2; (+) strand; PAM type: NRG; PAM sequence: TAG
tagagatatttttaataata

SEQ ID NO: 167472 - DNA, 20 bp, Artificial Sequence
  Description of Artificial Sequence: Synthetic oligonucleotide
  Target: LAMA2; (+) strand; PAM type: NRG; PAM sequence: AAG
ataatatagaaacatgacaa

SEQ ID NO: 167473 - DNA, 20 bp, Artificial Sequence
  Description of Artificial Sequence: Synthetic oligonucleotide
  Target: LAMA2; (+) strand; PAM type: NRG; PAM sequence: GAG
tatagaaacatgacaaaagt

SEQ ID NO: 167474 - DNA, 20 bp, Artificial Sequence
  Description of Artificial Sequence: Synthetic oligonucleotide
  Target: LAMA2; (+) strand; PAM type: NRG; PAM sequence: TGG
agtgagtatataatgctcta

SEQ ID NO: 167475 - DNA, 20 bp, Artificial Sequence
  Description of Artificial Sequence: Synthetic oligonucleotide
  Target: LAMA2; (+) strand; PAM type: NRG; PAM sequence: AAG
ttcctttgaaactctgtccc

SEQ ID NO: 167476 - DNA, 20 bp, Artificial Sequence
  Description of Artificial Sequence: Synthetic oligonucleotide
  Target: LAMA2; (+) strand; PAM type: NRG; PAM sequence: AAG
atacttattaattaaaattg

SEQ ID NO: 167477 - DNA, 20 bp, Artificial Sequence
  Description of Artificial Sequence: Synthetic oligonucleotide
  Target: LAMA2; (+) strand; PAM type: NRG; PAM sequence: AAG
tgaagtaccaatattaatgt

SEQ ID NO: 167478 - DNA, 20 bp, Artificial Sequence
  Description of Artificial Sequence: Synthetic oligonucleotide
  Target: LAMA2; (+) strand; PAM type: NRG; PAM sequence: TGG
tatatatatacaaatatgca

SEQ ID NO: 167479 - DNA, 20 bp, Artificial Sequence
  Description of Artificial Sequence: Synthetic oligonucleotide
  Target: LAMA2; (+) strand; PAM type: NRG; PAM sequence: CAG
gcatggtttcataaatatac

SEQ ID NO: 167480 - DNA, 20 bp, Artificial Sequence
  Description of Artificial Sequence: Synthetic oligonucleotide
  Target: LAMA2; (+) strand; PAM type: NRG; PAM sequence: TAG
accagtctaatgcttgcata

SEQ ID NO: 167481 - DNA, 20 bp, Artificial Sequence
  Description of Artificial Sequence: Synthetic oligonucleotide
  Target: LAMA2; (+) strand; PAM type: NRG; PAM sequence: AAG
tgcccataatatcatctatg

SEQ ID NO: 167482 - DNA, 20 bp, Artificial Sequence
  Description of Artificial Sequence: Synthetic oligonucleotide
  Target: LAMA2; (+) strand; PAM type: NRG; PAM sequence: AGG
gcccataatatcatctatga

SEQ ID NO: 167483 - DNA, 20 bp, Artificial Sequence
  Description of Artificial Sequence: Synthetic oligonucleotide
  Target: LAMA2; (+) strand; PAM type: NRG; PAM sequence: CGG
atcatctatgaaggattgtt

SEQ ID NO: 167484 - DNA, 20 bp, Artificial Sequence
  Description of Artificial Sequence: Synthetic oligonucleotide
  Target: LAMA2; (+) strand; PAM type: NRG; PAM sequence: GGG
tcatctatgaaggattgttc

SEQ ID NO: 167485 - DNA, 20 bp, Artificial Sequence
  Description of Artificial Sequence: Synthetic oligonucleotide
  Target: LAMA2; (+) strand; PAM type: NRG; PAM sequence: TGG
tgcatattatataatttttg

SEQ ID NO: 167486 - DNA, 20 bp, Artificial Sequence
  Description of Artificial Sequence: Synthetic oligonucleotide
  Target: LAMA2; (+) strand; PAM type: NRG; PAM sequence: AAG
ttattttatgtgtttaattc

SEQ ID NO: 167487 - DNA, 20 bp, Artificial Sequence
  Description of Artificial Sequence: Synthetic oligonucleotide
  Target: LAMA2; (+) strand; PAM type: NRG; PAM sequence: TGG
ttatgtgtttaattcaagat

SEQ ID NO: 167488 - DNA, 20 bp, Artificial Sequence
  Description of Artificial Sequence: Synthetic oligonucleotide
  Target: LAMA2; (+) strand; PAM type: NRG; PAM sequence: GGG
tatgtgtttaattcaagatt

SEQ ID NO: 167489 - DNA, 20 bp, Artificial Sequence
  Description of Artificial Sequence: Synthetic oligonucleotide
  Target: LAMA2; (+) strand; PAM type: NRG; PAM sequence: AAG
aagattgggaaataattatc

SEQ ID NO: 167490 - DNA, 20 bp, Artificial Sequence
  Description of Artificial Sequence: Synthetic oligonucleotide
  Target: LAMA2; (+) strand; PAM type: NRG; PAM sequence: AAG
attgaaaaattgtacaatta

SEQ ID NO: 167491 - DNA, 20 bp, Artificial Sequence
  Description of Artificial Sequence: Synthetic oligonucleotide
  Target: LAMA2; (+) strand; PAM type: NRG; PAM sequence: CAG
gaaaaattgtacaattaaag

SEQ ID NO: 167492 - DNA, 20 bp, Artificial Sequence
  Description of Artificial Sequence: Synthetic oligonucleotide
  Target: LAMA2; (+) strand; PAM type: NRG; PAM sequence: AGG
aaaaattgtacaattaaagc

SEQ ID NO: 167493 - DNA, 20 bp, Artificial Sequence
  Description of Artificial Sequence: Synthetic oligonucleotide
  Target: LAMA2; (+) strand; PAM type: NRG; PAM sequence: CGG
ctccaaaaaatgtcatctcc

SEQ ID NO: 167494 - DNA, 20 bp, Artificial Sequence
  Description of Artificial Sequence: Synthetic oligonucleotide
  Target: LAMA2; (+) strand; PAM type: NRG; PAM sequence: CAG
aatgtcatctcccggaatca

SEQ ID NO: 167495 - DNA, 20 bp, Artificial Sequence
  Description of Artificial Sequence: Synthetic oligonucleotide
  Target: LAMA2; (+) strand; PAM type: NRG; PAM sequence: AAG
atcacagcctcctttttctt

SEQ ID NO: 167496 - DNA, 20 bp, Artificial Sequence
  Description of Artificial Sequence: Synthetic oligonucleotide
  Target: LAMA2; (+) strand; PAM type: NRG; PAM sequence: TGG
cagcctcctttttcttaaga

SEQ ID NO: 167497 - DNA, 20 bp, Artificial Sequence
  Description of Artificial Sequence: Synthetic oligonucleotide
  Target: LAMA2; (+) strand; PAM type: NRG; PAM sequence: GAG
cctttttcttaagatggtct

SEQ ID NO: 167498 - DNA, 20 bp, Artificial Sequence
  Description of Artificial Sequence: Synthetic oligonucleotide
  Target: LAMA2; (+) strand; PAM type: NRG; PAM sequence: TGG
ttcttaagatggtctgagct

SEQ ID NO: 167499 - DNA, 20 bp, Artificial Sequence
  Description of Artificial Sequence: Synthetic oligonucleotide
  Target: LAMA2; (+) strand; PAM type: NRG; PAM sequence: TGG
atggtctgagcttggtacca

SEQ ID NO: 167500 - DNA, 20 bp, Artificial Sequence
  Description of Artificial Sequence: Synthetic oligonucleotide
  Target: LAMA2; (+) strand; PAM type: NRG; PAM sequence: CAG
agcttggtaccatggaaaca

SEQ ID NO: 167501 - DNA, 20 bp, Artificial Sequence
  Description of Artificial Sequence: Synthetic oligonucleotide
  Target: LAMA2; (+) strand; PAM type: NRG; PAM sequence: AAG
taccatggaaacacagccct

SEQ ID NO: 167502 - DNA, 20 bp, Artificial Sequence
  Description of Artificial Sequence: Synthetic oligonucleotide
  Target: LAMA2; (+) strand; PAM type: NRG; PAM sequence: AAG
catggaaacacagccctaag

SEQ ID NO: 167503 - DNA, 20 bp, Artificial Sequence
  Description of Artificial Sequence: Synthetic oligonucleotide
  Target: LAMA2; (+) strand; PAM type: NRG; PAM sequence: AAG
acagccctaagaagaaacaa

SEQ ID NO: 167504 - DNA, 20 bp, Artificial Sequence
  Description of Artificial Sequence: Synthetic oligonucleotide
  Target: LAMA2; (+) strand; PAM type: NRG; PAM sequence: TGG
ccctaagaagaaacaaaagc

SEQ ID NO: 167505 - DNA, 20 bp, Artificial Sequence
  Description of Artificial Sequence: Synthetic oligonucleotide
  Target: LAMA2; (+) strand; PAM type: NRG; PAM sequence: CAG
aaagctggaatatcttattt

SEQ ID NO: 167506 - DNA, 20 bp, Artificial Sequence
  Description of Artificial Sequence: Synthetic oligonucleotide
  Target: LAMA2; (+) strand; PAM type: NRG; PAM sequence: TGG
gctgtctgaacattctgcac

SEQ ID NO: 167507 - DNA, 20 bp, Artificial Sequence
  Description of Artificial Sequence: Synthetic oligonucleotide
  Target: LAMA2; (+) strand; PAM type: NRG; PAM sequence: TAG
ttatacattgatgaaaaccc

SEQ ID NO: 167508 - DNA, 20 bp, Artificial Sequence
  Description of Artificial Sequence: Synthetic oligonucleotide
  Target: LAMA2; (+) strand; PAM type: NRG; PAM sequence: AGG
tatacattgatgaaaaccct

SEQ ID NO: 167509 - DNA, 20 bp, Artificial Sequence
  Description of Artificial Sequence: Synthetic oligonucleotide
  Target: LAMA2; (+) strand; PAM type: NRG; PAM sequence: AAG
cactacctgcactttctgtt

SEQ ID NO: 167510 - DNA, 20 bp, Artificial Sequence
  Description of Artificial Sequence: Synthetic oligonucleotide
  Target: LAMA2; (+) strand; PAM type: NRG; PAM sequence: TAG
actttctgttaagtgattta

SEQ ID NO: 167511 - DNA, 20 bp, Artificial Sequence
  Description of Artificial Sequence: Synthetic oligonucleotide
  Target: LAMA2; (+) strand; PAM type: NRG; PAM sequence: CAG
gttaagtgatttatagactt

SEQ ID NO: 167512 - DNA, 20 bp, Artificial Sequence
  Description of Artificial Sequence: Synthetic oligonucleotide
  Target: LAMA2; (+) strand; PAM type: NRG; PAM sequence: AAG
agtgatttatagacttcagt

SEQ ID NO: 167513 - DNA, 20 bp, Artificial Sequence
  Description of Artificial Sequence: Synthetic oligonucleotide
  Target: LAMA2; (+) strand; PAM type: NRG; PAM sequence: AGG
gtgatttatagacttcagta

SEQ ID NO: 167514 - DNA, 20 bp, Artificial Sequence
  Description of Artificial Sequence: Synthetic oligonucleotide
  Target: LAMA2; (+) strand; PAM type: NRG; PAM sequence: CAG
atttatagacttcagtaagg

SEQ ID NO: 167515 - DNA, 20 bp, Artificial Sequence
  Description of Artificial Sequence: Synthetic oligonucleotide
  Target: LAMA2; (+) strand; PAM type: NRG; PAM sequence: AGG
tttatagacttcagtaaggc

SEQ ID NO: 167516 - DNA, 20 bp, Artificial Sequence
  Description of Artificial Sequence: Synthetic oligonucleotide
  Target: LAMA2; (+) strand; PAM type: NRG; PAM sequence: GGG
ttatagacttcagtaaggca

SEQ ID NO: 167517 - DNA, 20 bp, Artificial Sequence
  Description of Artificial Sequence: Synthetic oligonucleotide
  Target: LAMA2; (+) strand; PAM type: NRG; PAM sequence: TAG
tagacttcagtaaggcaggg

SEQ ID NO: 167518 - DNA, 20 bp, Artificial Sequence
  Description of Artificial Sequence: Synthetic oligonucleotide
  Target: LAMA2; (+) strand; PAM type: NRG; PAM sequence: AAG
aggcagggtagttttactct

SEQ ID NO: 167519 - DNA, 20 bp, Artificial Sequence
  Description of Artificial Sequence: Synthetic oligonucleotide
  Target: LAMA2; (+) strand; PAM type: NRG; PAM sequence: TGG
ttgcttttgaaaataatgta

SEQ ID NO: 167520 - DNA, 20 bp, Artificial Sequence
  Description of Artificial Sequence: Synthetic oligonucleotide
  Target: LAMA2; (+) strand; PAM type: NRG; PAM sequence: CAG
cttttgaaaataatgtatgg

SEQ ID NO: 167521 - DNA, 20 bp, Artificial Sequence
  Description of Artificial Sequence: Synthetic oligonucleotide
  Target: LAMA2; (+) strand; PAM type: NRG; PAM sequence: CAG
ataatgtatggcagtttgtt

SEQ ID NO: 167522 - DNA, 20 bp, Artificial Sequence
  Description of Artificial Sequence: Synthetic oligonucleotide
  Target: LAMA2; (+) strand; PAM type: NRG; PAM sequence: TAG
tatggcagtttgttcagaat

SEQ ID NO: 167523 - DNA, 20 bp, Artificial Sequence
  Description of Artificial Sequence: Synthetic oligonucleotide
  Target: LAMA2; (+) strand; PAM type: NRG; PAM sequence: TGG
tttgttcagaattagaattc

SEQ ID NO: 167524 - DNA, 20 bp, Artificial Sequence
  Description of Artificial Sequence: Synthetic oligonucleotide
  Target: LAMA2; (+) strand; PAM type: NRG; PAM sequence: GAG
aattctggacactttatctt

SEQ ID NO: 167525 - DNA, 20 bp, Artificial Sequence
  Description of Artificial Sequence: Synthetic oligonucleotide
  Target: LAMA2; (+) strand; PAM type: NRG; PAM sequence: CAG
actttatcttgagtgttaaa

SEQ ID NO: 167526 - DNA, 20 bp, Artificial Sequence
  Description of Artificial Sequence: Synthetic oligonucleotide
  Target: LAMA2; (+) strand; PAM type: NRG; PAM sequence: CAG
tcttgagtgttaaacagcca

SEQ ID NO: 167527 - DNA, 20 bp, Artificial Sequence
  Description of Artificial Sequence: Synthetic oligonucleotide
  Target: LAMA2; (+) strand; PAM type: NRG; PAM sequence: GAG
ttgagtgttaaacagccaca

SEQ ID NO: 167528 - DNA, 20 bp, Artificial Sequence
  Description of Artificial Sequence: Synthetic oligonucleotide
  Target: LAMA2; (+) strand; PAM type: NRG; PAM sequence: TGG
taaacagccacagagcaatt

SEQ ID NO: 167529 - DNA, 20 bp, Artificial Sequence
  Description of Artificial Sequence: Synthetic oligonucleotide
  Target: LAMA2; (+) strand; PAM type: NRG; PAM sequence: CGG
ctcactttcttcttaatctt

SEQ ID NO: 167530 - DNA, 20 bp, Artificial Sequence
  Description of Artificial Sequence: Synthetic oligonucleotide
  Target: LAMA2; (+) strand; PAM type: NRG; PAM sequence: AAG
atcatctccttttcctctga

SEQ ID NO: 167531 - DNA, 20 bp, Artificial Sequence
  Description of Artificial Sequence: Synthetic oligonucleotide
  Target: LAMA2; (+) strand; PAM type: NRG; PAM sequence: TGG
tgaaagctcctcttttttgt

SEQ ID NO: 167532 - DNA, 20 bp, Artificial Sequence
  Description of Artificial Sequence: Synthetic oligonucleotide
  Target: LAMA2; (+) strand; PAM type: NRG; PAM sequence: TGG
agctcctcttttttgttggc

SEQ ID NO: 167533 - DNA, 20 bp, Artificial Sequence
  Description of Artificial Sequence: Synthetic oligonucleotide
  Target: LAMA2; (+) strand; PAM type: NRG; PAM sequence: AAG
tttttgttggctggaatcac

SEQ ID NO: 167534 - DNA, 20 bp, Artificial Sequence
  Description of Artificial Sequence: Synthetic oligonucleotide
  Target: LAMA2; (+) strand; PAM type: NRG; PAM sequence: CAG
ctggaatcacaagcctttta

SEQ ID NO: 167535 - DNA, 20 bp, Artificial Sequence
  Description of Artificial Sequence: Synthetic oligonucleotide
  Target: LAMA2; (+) strand; PAM type: NRG; PAM sequence: AGG
tggaatcacaagccttttac

SEQ ID NO: 167536 - DNA, 20 bp, Artificial Sequence
  Description of Artificial Sequence: Synthetic oligonucleotide
  Target: LAMA2; (+) strand; PAM type: NRG; PAM sequence: GGG
ggaatcacaagccttttaca

SEQ ID NO: 167537 - DNA, 20 bp, Artificial Sequence
  Description of Artificial Sequence: Synthetic oligonucleotide
  Target: LAMA2; (+) strand; PAM type: NRG; PAM sequence: TAG
gggtgtcaaatgtcaatttt

SEQ ID NO: 167538 - DNA, 20 bp, Artificial Sequence
  Description of Artificial Sequence: Synthetic oligonucleotide
  Target: LAMA2; (+) strand; PAM type: NRG; PAM sequence: AGG
ggtgtcaaatgtcaattttt

SEQ ID NO: 167539 - DNA, 20 bp, Artificial Sequence
  Description of Artificial Sequence: Synthetic oligonucleotide
  Target: LAMA2; (+) strand; PAM type: NRG; PAM sequence: AAG
tcaaatgtcaatttttaggt

SEQ ID NO: 167540 - DNA, 20 bp, Artificial Sequence
  Description of Artificial Sequence: Synthetic oligonucleotide
  Target: LAMA2; (+) strand; PAM type: NRG; PAM sequence: TGG
atgtcaatttttaggtaagc

SEQ ID NO: 167541 - DNA, 20 bp, Artificial Sequence
  Description of Artificial Sequence: Synthetic oligonucleotide
  Target: LAMA2; (+) strand; PAM type: NRG; PAM sequence: AAG
tttaggtaagctggatattg

SEQ ID NO: 167542 - DNA, 20 bp, Artificial Sequence
  Description of Artificial Sequence: Synthetic oligonucleotide
  Target: LAMA2; (+) strand; PAM type: NRG; PAM sequence: GAG
taggtaagctggatattgaa

SEQ ID NO: 167543 - DNA, 20 bp, Artificial Sequence
  Description of Artificial Sequence: Synthetic oligonucleotide
  Target: LAMA2; (+) strand; PAM type: NRG; PAM sequence: AGG
aggtaagctggatattgaag

SEQ ID NO: 167544 - DNA, 20 bp, Artificial Sequence
  Description of Artificial Sequence: Synthetic oligonucleotide
  Target: LAMA2; (+) strand; PAM type: NRG; PAM sequence: TGG
attgaagaggataatataca

SEQ ID NO: 167545 - DNA, 20 bp, Artificial Sequence
  Description of Artificial Sequence: Synthetic oligonucleotide
  Target: LAMA2; (+) strand; PAM type: NRG; PAM sequence: CAG
acatggtcttattgttcatc

SEQ ID NO: 167546 - DNA, 20 bp, Artificial Sequence
  Description of Artificial Sequence: Synthetic oligonucleotide
  Target: LAMA2; (+) strand; PAM type: NRG; PAM sequence: AGG
catggtcttattgttcatcc

SEQ ID NO: 167547 - DNA, 20 bp, Artificial Sequence
  Description of Artificial Sequence: Synthetic oligonucleotide
  Target: LAMA2; (+) strand; PAM type: NRG; PAM sequence: GGG
atggtcttattgttcatcca

SEQ ID NO: 167548 - DNA, 20 bp, Artificial Sequence
  Description of Artificial Sequence: Synthetic oligonucleotide
  Target: LAMA2; (+) strand; PAM type: NRG; PAM sequence: AAG
ttattgttcatccagggacc

SEQ ID NO: 167549 - DNA, 20 bp, Artificial Sequence
  Description of Artificial Sequence: Synthetic oligonucleotide
  Target: LAMA2; (+) strand; PAM type: NRG; PAM sequence: TAG
ttgttcatccagggaccaag

SEQ ID NO: 167550 - DNA, 20 bp, Artificial Sequence
  Description of Artificial Sequence: Synthetic oligonucleotide
  Target: LAMA2; (+) strand; PAM type: NRG; PAM sequence: AAG
atttatttaattgttttaaa

SEQ ID NO: 167551 - DNA, 20 bp, Artificial Sequence
  Description of Artificial Sequence: Synthetic oligonucleotide
  Target: LAMA2; (+) strand; PAM type: NRG; PAM sequence: AAG
atttaattgttttaaaaagt

SEQ ID NO: 167552 - DNA, 20 bp, Artificial Sequence
  Description of Artificial Sequence: Synthetic oligonucleotide
  Target: LAMA2; (+) strand; PAM type: NRG; PAM sequence: TGG
gttttaaaaagtaagccatt

SEQ ID NO: 167553 - DNA, 20 bp, Artificial Sequence
  Description of Artificial Sequence: Synthetic oligonucleotide
  Target: LAMA2; (+) strand; PAM type: NRG; PAM sequence: TAG
aaaaagtaagccatttggat

SEQ ID NO: 167554 - DNA, 20 bp, Artificial Sequence
  Description of Artificial Sequence: Synthetic oligonucleotide
  Target: LAMA2; (+) strand; PAM type: NRG; PAM sequence: TGG
ataattaattgataattccc

SEQ ID NO: 167555 - DNA, 20 bp, Artificial Sequence
  Description of Artificial Sequence: Synthetic oligonucleotide
  Target: LAMA2; (+) strand; PAM type: NRG; PAM sequence: GAG
ttaattgataattccctggt

SEQ ID NO: 167556 - DNA, 20 bp, Artificial Sequence
  Description of Artificial Sequence: Synthetic oligonucleotide
  Target: LAMA2; (+) strand; PAM type: NRG; PAM sequence: AAG
tggtgagtacactataataa

SEQ ID NO: 167557 - DNA, 20 bp, Artificial Sequence
  Description of Artificial Sequence: Synthetic oligonucleotide
  Target: LAMA2; (+) strand; PAM type: NRG; PAM sequence: CAG
gtacactataataaaagcta

SEQ ID NO: 167558 - DNA, 20 bp, Artificial Sequence
  Description of Artificial Sequence: Synthetic oligonucleotide
  Target: LAMA2; (+) strand; PAM type: NRG; PAM sequence: AGG
tacactataataaaagctac

SEQ ID NO: 167559 - DNA, 20 bp, Artificial Sequence
  Description of Artificial Sequence: Synthetic oligonucleotide
  Target: LAMA2; (+) strand; PAM type: NRG; PAM sequence: GAG
cactataataaaagctacag

SEQ ID NO: 167560 - DNA, 20 bp, Artificial Sequence
  Description of Artificial Sequence: Synthetic oligonucleotide
  Target: LAMA2; (+) strand; PAM type: NRG; PAM sequence: AAG
aaaagctacaggagatatac

SEQ ID NO: 167561 - DNA, 20 bp, Artificial Sequence
  Description of Artificial Sequence: Synthetic oligonucleotide
  Target: LAMA2; (+) strand; PAM type: NRG; PAM sequence: GAG
aagctacaggagatatacaa

SEQ ID NO: 167562 - DNA, 20 bp, Artificial Sequence
  Description of Artificial Sequence: Synthetic oligonucleotide
  Target: LAMA2; (+) strand; PAM type: NRG; PAM sequence: AAG
ctacaggagatatacaagag

SEQ ID NO: 167563 - DNA, 20 bp, Artificial Sequence
  Description of Artificial Sequence: Synthetic oligonucleotide
  Target: LAMA2; (+) strand; PAM type: NRG; PAM sequence: TGG
aagagaagcatgccattttt

SEQ ID NO: 167564 - DNA, 20 bp, Artificial Sequence
  Description of Artificial Sequence: Synthetic oligonucleotide
  Target: LAMA2; (+) strand; PAM type: NRG; PAM sequence: GAG
gagaagcatgccattttttg

SEQ ID NO: 167565 - DNA, 20 bp, Artificial Sequence
  Description of Artificial Sequence: Synthetic oligonucleotide
  Target: LAMA2; (+) strand; PAM type: NRG; PAM sequence: AGG
agaagcatgccattttttgg

SEQ ID NO: 167566 - DNA, 20 bp, Artificial Sequence
  Description of Artificial Sequence: Synthetic oligonucleotide
  Target: LAMA2; (+) strand; PAM type: NRG; PAM sequence: GAG
aagcatgccattttttggag

SEQ ID NO: 167567 - DNA, 20 bp, Artificial Sequence
  Description of Artificial Sequence: Synthetic oligonucleotide
  Target: LAMA2; (+) strand; PAM type: NRG; PAM sequence: AAG
cactgtaaaacctgtgtgtt

SEQ ID NO: 167568 - DNA, 20 bp, Artificial Sequence
  Description of Artificial Sequence: Synthetic oligonucleotide
  Target: LAMA2; (+) strand; PAM type: NRG; PAM sequence: AGG
actgtaaaacctgtgtgtta

SEQ ID NO: 167569 - DNA, 20 bp, Artificial Sequence
  Description of Artificial Sequence: Synthetic oligonucleotide
  Target: LAMA2; (+) strand; PAM type: NRG; PAM sequence: GGG
ctgtaaaacctgtgtgttaa

SEQ ID NO: 167570 - DNA, 20 bp, Artificial Sequence
  Description of Artificial Sequence: Synthetic oligonucleotide
  Target: LAMA2; (+) strand; PAM type: NRG; PAM sequence: GGG
tgtaaaacctgtgtgttaag

SEQ ID NO: 167571 - DNA, 20 bp, Artificial Sequence
  Description of Artificial Sequence: Synthetic oligonucleotide
  Target: LAMA2; (+) strand; PAM type: NRG; PAM sequence: AAG
ggggtatcaacttaaatgta

SEQ ID NO: 167572 - DNA, 20 bp, Artificial Sequence
  Description of Artificial Sequence: Synthetic oligonucleotide
  Target: LAMA2; (+) strand; PAM type: NRG; PAM sequence: AAG
ttaaatgtaaagaaaattca

SEQ ID NO: 167573 - DNA, 20 bp, Artificial Sequence
  Description of Artificial Sequence: Synthetic oligonucleotide
  Target: LAMA2; (+) strand; PAM type: NRG; PAM sequence: AGG
taaatgtaaagaaaattcaa

SEQ ID NO: 167574 - DNA, 20 bp, Artificial Sequence
  Description of Artificial Sequence: Synthetic oligonucleotide
  Target: LAMA2; (+) strand; PAM type: NRG; PAM sequence: TGG
caaaacaccacacttaatac

SEQ ID NO: 167575 - DNA, 20 bp, Artificial Sequence
  Description of Artificial Sequence: Synthetic oligonucleotide
  Target: LAMA2; (+) strand; PAM type: NRG; PAM sequence: AAG
aacaccacacttaatactgg

SEQ ID NO: 167576 - DNA, 20 bp, Artificial Sequence
  Description of Artificial Sequence: Synthetic oligonucleotide
  Target: LAMA2; (+) strand; PAM type: NRG; PAM sequence: AAG
cacttaatactggaagcttc

SEQ ID NO: 167577 - DNA, 20 bp, Artificial Sequence
  Description of Artificial Sequence: Synthetic oligonucleotide
  Target: LAMA2; (+) strand; PAM type: NRG; PAM sequence: AAG
aagcttcaagaacatatgaa

SEQ ID NO: 167578 - DNA, 20 bp, Artificial Sequence
  Description of Artificial Sequence: Synthetic oligonucleotide
  Target: LAMA2; (+) strand; PAM type: NRG; PAM sequence: TAG
caagaacatatgaaaagaaa

SEQ ID NO: 167579 - DNA, 20 bp, Artificial Sequence
  Description of Artificial Sequence: Synthetic oligonucleotide
  Target: LAMA2; (+) strand; PAM type: NRG; PAM sequence: TAG
gaacatatgaaaagaaatag

SEQ ID NO: 167580 - DNA, 20 bp, Artificial Sequence
  Description of Artificial Sequence: Synthetic oligonucleotide
  Target: LAMA2; (+) strand; PAM type: NRG; PAM sequence: TGG
agaaatagtagcatgtataa

SEQ ID NO: 167581 - DNA, 20 bp, Artificial Sequence
  Description of Artificial Sequence: Synthetic oligonucleotide
  Target: LAMA2; (+) strand; PAM type: NRG; PAM sequence: GGG
gaaatagtagcatgtataat

SEQ ID NO: 167582 - DNA, 20 bp, Artificial Sequence
  Description of Artificial Sequence: Synthetic oligonucleotide
  Target: LAMA2; (+) strand; PAM type: NRG; PAM sequence: CAG
gggtcttaaacaattaattt

SEQ ID NO: 167583 - DNA, 20 bp, Artificial Sequence
  Description of Artificial Sequence: Synthetic oligonucleotide
  Target: LAMA2; (+) strand; PAM type: NRG; PAM sequence: AGG
ggtcttaaacaattaatttc

SEQ ID NO: 167584 - DNA, 20 bp, Artificial Sequence
  Description of Artificial Sequence: Synthetic oligonucleotide
  Target: LAMA2; (+) strand; PAM type: NRG; PAM sequence: TGG
attaatttcaggattttcac

SEQ ID NO: 167585 - DNA, 20 bp, Artificial Sequence
  Description of Artificial Sequence: Synthetic oligonucleotide
  Target: LAMA2; (+) strand; PAM type: NRG; PAM sequence: TGG
aatttcaggattttcactgg

SEQ ID NO: 167586 - DNA, 20 bp, Artificial Sequence
  Description of Artificial Sequence: Synthetic oligonucleotide
  Target: LAMA2; (+) strand; PAM type: NRG; PAM sequence: GGG
atttcaggattttcactggt

SEQ ID NO: 167587 - DNA, 20 bp, Artificial Sequence
  Description of Artificial Sequence: Synthetic oligonucleotide
  Target: LAMA2; (+) strand; PAM type: NRG; PAM sequence: TAG
aggattttcactggtgggaa

SEQ ID NO: 167588 - DNA, 20 bp, Artificial Sequence
  Description of Artificial Sequence: Synthetic oligonucleotide
  Target: LAMA2; (+) strand; PAM type: NRG; PAM sequence: TAG
attttcactggtgggaatag

SEQ ID NO: 167589 - DNA, 20 bp, Artificial Sequence
  Description of Artificial Sequence: Synthetic oligonucleotide
  Target: LAMA2; (+) strand; PAM type: NRG; PAM sequence: AGG
ttttcactggtgggaatagt

SEQ ID NO: 167590 - DNA, 20 bp, Artificial Sequence
  Description of Artificial Sequence: Synthetic oligonucleotide
  Target: LAMA2; (+) strand; PAM type: NRG; PAM sequence: TGG
gggaatagtaggaaattata

SEQ ID NO: 167591 - DNA, 20 bp, Artificial Sequence
  Description of Artificial Sequence: Synthetic oligonucleotide
  Target: LAMA2; (+) strand; PAM type: NRG; PAM sequence: GGG
ggaatagtaggaaattatat

SEQ ID NO: 167592 - DNA, 20 bp, Artificial Sequence
  Description of Artificial Sequence: Synthetic oligonucleotide
  Target: LAMA2; (+) strand; PAM type: NRG; PAM sequence: AAG
ggcaaatgcttacaaaatac

SEQ ID NO: 167593 - DNA, 20 bp, Artificial Sequence
  Description of Artificial Sequence: Synthetic oligonucleotide
  Target: LAMA2; (+) strand; PAM type: NRG; PAM sequence: AGG
gcaaatgcttacaaaataca

SEQ ID NO: 167594 - DNA, 20 bp, Artificial Sequence
  Description of Artificial Sequence: Synthetic oligonucleotide
  Target: LAMA2; (+) strand; PAM type: NRG; PAM sequence: AAG
aggcatgtgcaaaacctaat

SEQ ID NO: 167595 - DNA, 20 bp, Artificial Sequence
  Description of Artificial Sequence: Synthetic oligonucleotide
  Target: LAMA2; (+) strand; PAM type: NRG; PAM sequence: CAG
gtgcaaaacctaataagtaa

SEQ ID NO: 167596 - DNA, 20 bp, Artificial Sequence
  Description of Artificial Sequence: Synthetic oligonucleotide
  Target: LAMA2; (+) strand; PAM type: NRG; PAM sequence: TGG
acctaataagtaacagaatt

SEQ ID NO: 167597 - DNA, 20 bp, Artificial Sequence
  Description of Artificial Sequence: Synthetic oligonucleotide
  Target: LAMA2; (+) strand; PAM type: NRG; PAM sequence: TGG
aagtaacagaatttggaaca

SEQ ID NO: 167598 - DNA, 20 bp, Artificial Sequence
  Description of Artificial Sequence: Synthetic oligonucleotide
  Target: LAMA2; (+) strand; PAM type: NRG; PAM sequence: CAG
agaatttggaacatggcgtt

SEQ ID NO: 167599 - DNA, 20 bp, Artificial Sequence
  Description of Artificial Sequence: Synthetic oligonucleotide
  Target: LAMA2; (+) strand; PAM type: NRG; PAM sequence: CAG
cagacacaatttcatgatca

SEQ ID NO: 167600 - DNA, 20 bp, Artificial Sequence
  Description of Artificial Sequence: Synthetic oligonucleotide
  Target: LAMA2; (+) strand; PAM type: NRG; PAM sequence: TGG
tgatcacagatgaaaatgaa

SEQ ID NO: 167601 - DNA, 20 bp, Artificial Sequence
  Description of Artificial Sequence: Synthetic oligonucleotide
  Target: LAMA2; (+) strand; PAM type: NRG; PAM sequence: GGG
gatcacagatgaaaatgaat

SEQ ID NO: 167602 - DNA, 20 bp, Artificial Sequence
  Description of Artificial Sequence: Synthetic oligonucleotide
  Target: LAMA2; (+) strand; PAM type: NRG; PAM sequence: GAG
tcacagatgaaaatgaatgg

SEQ ID NO: 167603 - DNA, 20 bp, Artificial Sequence
  Description of Artificial Sequence: Synthetic oligonucleotide
  Target: LAMA2; (+) strand; PAM type: NRG; PAM sequence: AAG
tgaaaatgaatgggagaata

SEQ ID NO: 167604 - DNA, 20 bp, Artificial Sequence
  Description of Artificial Sequence: Synthetic oligonucleotide
  Target: LAMA2; (+) strand; PAM type: NRG; PAM sequence: TAG
ggagaataaagaccatattg

SEQ ID NO: 167605 - DNA, 20 bp, Artificial Sequence
  Description of Artificial Sequence: Synthetic oligonucleotide
  Target: LAMA2; (+) strand; PAM type: NRG; PAM sequence: CAG
ttgtagaaatccttaaatac

SEQ ID NO: 167606 - DNA, 20 bp, Artificial Sequence
  Description of Artificial Sequence: Synthetic oligonucleotide
  Target: LAMA2; (+) strand; PAM type: NRG; PAM sequence: AAG
aaatccttaaataccagtct

SEQ ID NO: 167607 - DNA, 20 bp, Artificial Sequence
  Description of Artificial Sequence: Synthetic oligonucleotide
  Target: LAMA2; (+) strand; PAM type: NRG; PAM sequence: TAG
ttaaataccagtctaagaaa

SEQ ID NO: 167608 - DNA, 20 bp, Artificial Sequence
  Description of Artificial Sequence: Synthetic oligonucleotide
  Target: LAMA2; (+) strand; PAM type: NRG; PAM sequence: AAG
tatttaattttctatgtaat

SEQ ID NO: 167609 - DNA, 20 bp, Artificial Sequence
  Description of Artificial Sequence: Synthetic oligonucleotide
  Target: LAMA2; (+) strand; PAM type: NRG; PAM sequence: AGG
atttaattttctatgtaata

SEQ ID NO: 167610 - DNA, 20 bp, Artificial Sequence
  Description of Artificial Sequence: Synthetic oligonucleotide
  Target: LAMA2; (+) strand; PAM type: NRG; PAM sequence: AAG
atgtaataaggaaacactac

SEQ ID NO: 167611 - DNA, 20 bp, Artificial Sequence
  Description of Artificial Sequence: Synthetic oligonucleotide
  Target: LAMA2; (+) strand; PAM type: NRG; PAM sequence: AAG
caagtttttattttgaaaaa

SEQ ID NO: 167612 - DNA, 20 bp, Artificial Sequence
  Description of Artificial Sequence: Synthetic oligonucleotide
  Target: LAMA2; (+) strand; PAM type: NRG; PAM sequence: AGG
aagtttttattttgaaaaaa

SEQ ID NO: 167613 - DNA, 20 bp, Artificial Sequence
  Description of Artificial Sequence: Synthetic oligonucleotide
  Target: LAMA2; (+) strand; PAM type: NRG; PAM sequence: TGG
aaaaaaggttaatatgatta

SEQ ID NO: 167614 - DNA, 20 bp, Artificial Sequence
  Description of Artificial Sequence: Synthetic oligonucleotide
  Target: LAMA2; (+) strand; PAM type: NRG; PAM sequence: TAG
atatgattatggccacattt

SEQ ID NO: 167615 - DNA, 20 bp, Artificial Sequence
  Description of Artificial Sequence: Synthetic oligonucleotide
  Target: LAMA2; (+) strand; PAM type: NRG; PAM sequence: AGG
tatgattatggccacatttt

SEQ ID NO: 167616 - DNA, 20 bp, Artificial Sequence
  Description of Artificial Sequence: Synthetic oligonucleotide
  Target: LAMA2; (+) strand; PAM type: NRG; PAM sequence: TAG
ttttaggaaaactattatca

SEQ ID NO: 167617 - DNA, 20 bp, Artificial Sequence
  Description of Artificial Sequence: Synthetic oligonucleotide
  Target: LAMA2; (+) strand; PAM type: NRG; PAM sequence: GAG
aaaactattatcatagaatt

SEQ ID NO: 167618 - DNA, 20 bp, Artificial Sequence
  Description of Artificial Sequence: Synthetic oligonucleotide
  Target: LAMA2; (+) strand; PAM type: NRG; PAM sequence: CAG
ttgagtataatgaattgaaa

SEQ ID NO: 167619 - DNA, 20 bp, Artificial Sequence
  Description of Artificial Sequence: Synthetic oligonucleotide
  Target: LAMA2; (+) strand; PAM type: NRG; PAM sequence: AGG
tgagtataatgaattgaaac

SEQ ID NO: 167620 - DNA, 20 bp, Artificial Sequence
  Description of Artificial Sequence: Synthetic oligonucleotide
  Target: LAMA2; (+) strand; PAM type: NRG; PAM sequence: GAG
atgaattgaaacaggcaaat

SEQ ID NO: 167621 - DNA, 20 bp, Artificial Sequence
  Description of Artificial Sequence: Synthetic oligonucleotide
  Target: LAMA2; (+) strand; PAM type: NRG; PAM sequence: AAG
ttgaaacaggcaaatgagaa

SEQ ID NO: 167622 - DNA, 20 bp, Artificial Sequence
  Description of Artificial Sequence: Synthetic oligonucleotide
  Target: LAMA2; (+) strand; PAM type: NRG; PAM sequence: TAG
acaggcaaatgagaaaagca

SEQ ID NO: 167623 - DNA, 20 bp, Artificial Sequence
  Description of Artificial Sequence: Synthetic oligonucleotide
  Target: LAMA2; (+) strand; PAM type: NRG; PAM sequence: GAG
aggcaaatgagaaaagcata

SEQ ID NO: 167624 - DNA, 20 bp, Artificial Sequence
  Description of Artificial Sequence: Synthetic oligonucleotide
  Target: LAMA2; (+) strand; PAM type: NRG; PAM sequence: AAG
aaagcatagagaccaattaa

SEQ ID NO: 167625 - DNA, 20 bp, Artificial Sequence
  Description of Artificial Sequence: Synthetic oligonucleotide
  Target: LAMA2; (+) strand; PAM type: NRG; PAM sequence: AGG
aagcatagagaccaattaaa

SEQ ID NO: 167626 - DNA, 20 bp, Artificial Sequence
  Description of Artificial Sequence: Synthetic oligonucleotide
  Target: LAMA2; (+) strand; PAM type: NRG; PAM sequence: TAG
atagagaccaattaaaaggc

SEQ ID NO: 167627 - DNA, 20 bp, Artificial Sequence
  Description of Artificial Sequence: Synthetic oligonucleotide
  Target: LAMA2; (+) strand; PAM type: NRG; PAM sequence: TAG
caattaaaaggctagtatac

SEQ ID NO: 167628 - DNA, 20 bp, Artificial Sequence
  Description of Artificial Sequence: Synthetic oligonucleotide
  Target: LAMA2; (+) strand; PAM type: NRG; PAM sequence: TGG
aaaaggctagtatactagca

SEQ ID NO: 167629 - DNA, 20 bp, Artificial Sequence
  Description of Artificial Sequence: Synthetic oligonucleotide
  Target: LAMA2; (+) strand; PAM type: NRG; PAM sequence: GGG
aaaggctagtatactagcat

SEQ ID NO: 167630 - DNA, 20 bp, Artificial Sequence
  Description of Artificial Sequence: Synthetic oligonucleotide
  Target: LAMA2; (+) strand; PAM type: NRG; PAM sequence: AAG
tagtatactagcatgggcaa

SEQ ID NO: 167631 - DNA, 20 bp, Artificial Sequence
  Description of Artificial Sequence: Synthetic oligonucleotide
  Target: LAMA2; (+) strand; PAM type: NRG; PAM sequence: TAG
tagcatgggcaaaagataat

SEQ ID NO: 167632 - DNA, 20 bp, Artificial Sequence
  Description of Artificial Sequence: Synthetic oligonucleotide
  Target: LAMA2; (+) strand; PAM type: NRG; PAM sequence: CAG
gggcaaaagataattagaac

SEQ ID NO: 167633 - DNA, 20 bp, Artificial Sequence
  Description of Artificial Sequence: Synthetic oligonucleotide
  Target: LAMA2; (+) strand; PAM type: NRG; PAM sequence: AAG
caaaagataattagaaccag

SEQ ID NO: 167634 - DNA, 20 bp, Artificial Sequence
  Description of Artificial Sequence: Synthetic oligonucleotide
  Target: LAMA2; (+) strand; PAM type: NRG; PAM sequence: TAG
aagataattagaaccagaag

SEQ ID NO: 167635 - DNA, 20 bp, Artificial Sequence
  Description of Artificial Sequence: Synthetic oligonucleotide
  Target: LAMA2; (+) strand; PAM type: NRG; PAM sequence: AGG
agataattagaaccagaagt

SEQ ID NO: 167636 - DNA, 20 bp, Artificial Sequence
  Description of Artificial Sequence: Synthetic oligonucleotide
  Target: LAMA2; (+) strand; PAM type: NRG; PAM sequence: TAG
ttagaaccagaagtaggtaa

SEQ ID NO: 167637 - DNA, 20 bp, Artificial Sequence
  Description of Artificial Sequence: Synthetic oligonucleotide
  Target: LAMA2; (+) strand; PAM type: NRG; PAM sequence: AAG
cagaagtaggtaatagtaat

SEQ ID NO: 167638 - DNA, 20 bp, Artificial Sequence
  Description of Artificial Sequence: Synthetic oligonucleotide
  Target: LAMA2; (+) strand; PAM type: NRG; PAM sequence: TGG
gtaggtaatagtaataagaa

SEQ ID NO: 167639 - DNA, 20 bp, Artificial Sequence
  Description of Artificial Sequence: Synthetic oligonucleotide
  Target: LAMA2; (+) strand; PAM type: NRG; PAM sequence: GAG
aggtaatagtaataagaatg

SEQ ID NO: 167640 - DNA, 20 bp, Artificial Sequence
  Description of Artificial Sequence: Synthetic oligonucleotide
  Target: LAMA2; (+) strand; PAM type: NRG; PAM sequence: AAG
tagtaataagaatggagaca

SEQ ID NO: 167641 - DNA, 20 bp, Artificial Sequence
  Description of Artificial Sequence: Synthetic oligonucleotide
  Target: LAMA2; (+) strand; PAM type: NRG; PAM sequence: AGG
agtaataagaatggagacaa

SEQ ID NO: 167642 - DNA, 20 bp, Artificial Sequence
  Description of Artificial Sequence: Synthetic oligonucleotide
  Target: LAMA2; (+) strand; PAM type: NRG; PAM sequence: GAG
ggagacaaaggaatgaatgt

SEQ ID NO: 167643 - DNA, 20 bp, Artificial Sequence
  Description of Artificial Sequence: Synthetic oligonucleotide
  Target: LAMA2; (+) strand; PAM type: NRG; PAM sequence: TGG
aaggaatgaatgtgagaaaa

SEQ ID NO: 167644 - DNA, 20 bp, Artificial Sequence
  Description of Artificial Sequence: Synthetic oligonucleotide
  Target: LAMA2; (+) strand; PAM type: NRG; PAM sequence: CAG
tgtgagaaaatggtttaata

SEQ ID NO: 167645 - DNA, 20 bp, Artificial Sequence
  Description of Artificial Sequence: Synthetic oligonucleotide
  Target: LAMA2; (+) strand; PAM type: NRG; PAM sequence: CAG
aatggtttaatacagcttta

SEQ ID NO: 167646 - DNA, 20 bp, Artificial Sequence
  Description of Artificial Sequence: Synthetic oligonucleotide
  Target: LAMA2; (+) strand; PAM type: NRG; PAM sequence: CGG
ttaatacagctttacagatt

SEQ ID NO: 167647 - DNA, 20 bp, Artificial Sequence
  Description of Artificial Sequence: Synthetic oligonucleotide
  Target: LAMA2; (+) strand; PAM type: NRG; PAM sequence: TAG
ttacagattcggaaactaat

SEQ ID NO: 167648 - DNA, 20 bp, Artificial Sequence
  Description of Artificial Sequence: Synthetic oligonucleotide
  Target: LAMA2; (+) strand; PAM type: NRG; PAM sequence: GAG
ttcggaaactaattagatgt

SEQ ID NO: 167649 - DNA, 20 bp, Artificial Sequence
  Description of Artificial Sequence: Synthetic oligonucleotide
  Target: LAMA2; (+) strand; PAM type: NRG; PAM sequence: AGG
tcggaaactaattagatgtg

SEQ ID NO: 167650 - DNA, 20 bp, Artificial Sequence
  Description of Artificial Sequence: Synthetic oligonucleotide
  Target: LAMA2; (+) strand; PAM type: NRG; PAM sequence: GGG
cggaaactaattagatgtga

SEQ ID NO: 167651 - DNA, 20 bp, Artificial Sequence
  Description of Artificial Sequence: Synthetic oligonucleotide
  Target: LAMA2; (+) strand; PAM type: NRG; PAM sequence: GGG
ggaaactaattagatgtgag

SEQ ID NO: 167652 - DNA, 20 bp, Artificial Sequence
  Description of Artificial Sequence: Synthetic oligonucleotide
  Target: LAMA2; (+) strand; PAM type: NRG; PAM sequence: GAG
actaattagatgtgaggggt

SEQ ID NO: 167653 - DNA, 20 bp, Artificial Sequence
  Description of Artificial Sequence: Synthetic oligonucleotide
  Target: LAMA2; (+) strand; PAM type: NRG; PAM sequence: AGG
ctaattagatgtgaggggtg

SEQ ID NO: 167654 - DNA, 20 bp, Artificial Sequence
  Description of Artificial Sequence: Synthetic oligonucleotide
  Target: LAMA2; (+) strand; PAM type: NRG; PAM sequence: GGG
taattagatgtgaggggtga

SEQ ID NO: 167655 - DNA, 20 bp, Artificial Sequence
  Description of Artificial Sequence: Synthetic oligonucleotide
  Target: LAMA2; (+) strand; PAM type: NRG; PAM sequence: CGG
agatgtgaggggtgagggtc

SEQ ID NO: 167656 - DNA, 20 bp, Artificial Sequence
  Description of Artificial Sequence: Synthetic oligonucleotide
  Target: LAMA2; (+) strand; PAM type: NRG; PAM sequence: GGG
gatgtgaggggtgagggtcc

SEQ ID NO: 167657 - DNA, 20 bp, Artificial Sequence
  Description of Artificial Sequence: Synthetic oligonucleotide
  Target: LAMA2; (+) strand; PAM type: NRG; PAM sequence: CAG
gtgaggggtgagggtccggg

SEQ ID NO: 167658 - DNA, 20 bp, Artificial Sequence
  Description of Artificial Sequence: Synthetic oligonucleotide
  Target: LAMA2; (+) strand; PAM type: NRG; PAM sequence: AAG
aggggtgagggtccgggcag

SEQ ID NO: 167659 - DNA, 20 bp, Artificial Sequence
  Description of Artificial Sequence: Synthetic oligonucleotide
  Target: LAMA2; (+) strand; PAM type: NRG; PAM sequence: AAG
gagggtccgggcagaagttg

SEQ ID NO: 167660 - DNA, 20 bp, Artificial Sequence
  Description of Artificial Sequence: Synthetic oligonucleotide
  Target: LAMA2; (+) strand; PAM type: NRG; PAM sequence: CAG
gtccgggcagaagttgaaga

SEQ ID NO: 167661 - DNA, 20 bp, Artificial Sequence
  Description of Artificial Sequence: Synthetic oligonucleotide
  Target: LAMA2; (+) strand; PAM type: NRG; PAM sequence: AGG
tccgggcagaagttgaagac

SEQ ID NO: 167662 - DNA, 20 bp, Artificial Sequence
  Description of Artificial Sequence: Synthetic oligonucleotide
  Target: LAMA2; (+) strand; PAM type: NRG; PAM sequence: TAG
agaagttgaagacaggtttt

SEQ ID NO: 167663 - DNA, 20 bp, Artificial Sequence
  Description of Artificial Sequence: Synthetic oligonucleotide
  Target: LAMA2; (+) strand; PAM type: NRG; PAM sequence: AGG
gaagttgaagacaggttttt

SEQ ID NO: 167664 - DNA, 20 bp, Artificial Sequence
  Description of Artificial Sequence: Synthetic oligonucleotide
  Target: LAMA2; (+) strand; PAM type: NRG; PAM sequence: CAG
gttgaagacaggtttttagg

SEQ ID NO: 167665 - DNA, 20 bp, Artificial Sequence
  Description of Artificial Sequence: Synthetic oligonucleotide
  Target: LAMA2; (+) strand; PAM type: NRG; PAM sequence: AGG
ttgaagacaggtttttaggc

SEQ ID NO: 167666 - DNA, 20 bp, Artificial Sequence
  Description of Artificial Sequence: Synthetic oligonucleotide
  Target: LAMA2; (+) strand; PAM type: NRG; PAM sequence: TGG
aggcaggttacccccaaaaa

SEQ ID NO: 167667 - DNA, 20 bp, Artificial Sequence
  Description of Artificial Sequence: Synthetic oligonucleotide
  Target: LAMA2; (+) strand; PAM type: NRG; PAM sequence: TGG
caggttacccccaaaaatgg

SEQ ID NO: 167668 - DNA, 20 bp, Artificial Sequence
  Description of Artificial Sequence: Synthetic oligonucleotide
  Target: LAMA2; (+) strand; PAM type: NRG; PAM sequence: TGG
ggtggtgctattaactgaaa

SEQ ID NO: 167669 - DNA, 20 bp, Artificial Sequence
  Description of Artificial Sequence: Synthetic oligonucleotide
  Target: LAMA2; (+) strand; PAM type: NRG; PAM sequence: GAG
tggtgctattaactgaaatg

SEQ ID NO: 167670 - DNA, 20 bp, Artificial Sequence
  Description of Artificial Sequence: Synthetic oligonucleotide
  Target: LAMA2; (+) strand; PAM type: NRG; PAM sequence: CAG
attaactgaaatggagaaac

SEQ ID NO: 167671 - DNA, 20 bp, Artificial Sequence
  Description of Artificial Sequence: Synthetic oligonucleotide
  Target: LAMA2; (+) strand; PAM type: NRG; PAM sequence: AGG
ttaactgaaatggagaaacc

SEQ ID NO: 167672 - DNA, 20 bp, Artificial Sequence
  Description of Artificial Sequence: Synthetic oligonucleotide
  Target: LAMA2; (+) strand; PAM type: NRG; PAM sequence: GAG
aactgaaatggagaaaccag

SEQ ID NO: 167673 - DNA, 20 bp, Artificial Sequence
  Description of Artificial Sequence: Synthetic oligonucleotide
  Target: LAMA2; (+) strand; PAM type: NRG; PAM sequence: GAG
ctgaaatggagaaaccagga

SEQ ID NO: 167674 - DNA, 20 bp, Artificial Sequence
  Description of Artificial Sequence: Synthetic oligonucleotide
  Target: LAMA2; (+) strand; PAM type: NRG; PAM sequence: GAG
gaaatggagaaaccaggaga

SEQ ID NO: 167675 - DNA, 20 bp, Artificial Sequence
  Description of Artificial Sequence: Synthetic oligonucleotide
  Target: LAMA2; (+) strand; PAM type: NRG; PAM sequence: TAG
agaaaccaggagagagccgt

SEQ ID NO: 167676 - DNA, 20 bp, Artificial Sequence
  Description of Artificial Sequence: Synthetic oligonucleotide
  Target: LAMA2; (+) strand; PAM type: NRG; PAM sequence: GAG
aaaccaggagagagccgtta

SEQ ID NO: 167677 - DNA, 20 bp, Artificial Sequence
  Description of Artificial Sequence: Synthetic oligonucleotide
  Target: LAMA2; (+) strand; PAM type: NRG; PAM sequence: AAG
ccaggagagagccgttagag

SEQ ID NO: 167678 - DNA, 20 bp, Artificial Sequence
  Description of Artificial Sequence: Synthetic oligonucleotide
  Target: LAMA2; (+) strand; PAM type: NRG; PAM sequence: AAG
gagagagccgttagagaaga

SEQ ID NO: 167679 - DNA, 20 bp, Artificial Sequence
  Description of Artificial Sequence: Synthetic oligonucleotide
  Target: LAMA2; (+) strand; PAM type: NRG; PAM sequence: TAG
aagataatttatgtttcaaa

SEQ ID NO: 167680 - DNA, 20 bp, Artificial Sequence
  Description of Artificial Sequence: Synthetic oligonucleotide
  Target: LAMA2; (+) strand; PAM type: NRG; PAM sequence: AGG
agataatttatgtttcaaat

SEQ ID NO: 167681 - DNA, 20 bp, Artificial Sequence
  Description of Artificial Sequence: Synthetic oligonucleotide
  Target: LAMA2; (+) strand; PAM type: NRG; PAM sequence: CAG
atttatgtttcaaataggtt

SEQ ID NO: 167682 - DNA, 20 bp, Artificial Sequence
  Description of Artificial Sequence: Synthetic oligonucleotide
  Target: LAMA2; (+) strand; PAM type: NRG; PAM sequence: TAG
ttcaaataggttcagattga

SEQ ID NO: 167683 - DNA, 20 bp, Artificial Sequence
  Description of Artificial Sequence: Synthetic oligonucleotide
  Target: LAMA2; (+) strand; PAM type: NRG; PAM sequence: TGG
atagaacatatctgtctgaa

SEQ ID NO: 167684 - DNA, 20 bp, Artificial Sequence
  Description of Artificial Sequence: Synthetic oligonucleotide
  Target: LAMA2; (+) strand; PAM type: NRG; PAM sequence: TAG
tctgaatggaaatatgcaaa

SEQ ID NO: 167685 - DNA, 20 bp, Artificial Sequence
  Description of Artificial Sequence: Synthetic oligonucleotide
  Target: LAMA2; (+) strand; PAM type: NRG; PAM sequence: CAG
tggaaatatgcaaatagctg

SEQ ID NO: 167686 - DNA, 20 bp, Artificial Sequence
  Description of Artificial Sequence: Synthetic oligonucleotide
  Target: LAMA2; (+) strand; PAM type: NRG; PAM sequence: AGG
ggaaatatgcaaatagctgc

SEQ ID NO: 167687 - DNA, 20 bp, Artificial Sequence
  Description of Artificial Sequence: Synthetic oligonucleotide
  Target: LAMA2; (+) strand; PAM type: NRG; PAM sequence: TGG
atgcaaatagctgcaggaaa

SEQ ID NO: 167688 - DNA, 20 bp, Artificial Sequence
  Description of Artificial Sequence: Synthetic oligonucleotide
  Target: LAMA2; (+) strand; PAM type: NRG; PAM sequence: CAG
aaatggaaatctgaaaattg

SEQ ID NO: 167689 - DNA, 20 bp, Artificial Sequence
  Description of Artificial Sequence: Synthetic oligonucleotide
  Target: LAMA2; (+) strand; PAM type: NRG; PAM sequence: AGG
aatggaaatctgaaaattgc

SEQ ID NO: 167690 - DNA, 20 bp, Artificial Sequence
  Description of Artificial Sequence: Synthetic oligonucleotide
  Target: LAMA2; (+) strand; PAM type: NRG; PAM sequence: GAG
tggaaatctgaaaattgcag

SEQ ID NO: 167691 - DNA, 20 bp, Artificial Sequence
  Description of Artificial Sequence: Synthetic oligonucleotide
  Target: LAMA2; (+) strand; PAM type: NRG; PAM sequence: CAG
aaatctgaaaattgcaggag

SEQ ID NO: 167692 - DNA, 20 bp, Artificial Sequence
  Description of Artificial Sequence: Synthetic oligonucleotide
  Target: LAMA2; (+) strand; PAM type: NRG; PAM sequence: AAG
gaaaattgcaggagcagatg

SEQ ID NO: 167693 - DNA, 20 bp, Artificial Sequence
  Description of Artificial Sequence: Synthetic oligonucleotide
  Target: LAMA2; (+) strand; PAM type: NRG; PAM sequence: AGG
aaaattgcaggagcagatga

SEQ ID NO: 167694 - DNA, 20 bp, Artificial Sequence
  Description of Artificial Sequence: Synthetic oligonucleotide
  Target: LAMA2; (+) strand; PAM type: NRG; PAM sequence: AAG
attgcaggagcagatgaagg

SEQ ID NO: 167695 - DNA, 20 bp, Artificial Sequence
  Description of Artificial Sequence: Synthetic oligonucleotide
  Target: LAMA2; (+) strand; PAM type: NRG; PAM sequence: GAG
tgcaggagcagatgaaggaa

SEQ ID NO: 167696 - DNA, 20 bp, Artificial Sequence
  Description of Artificial Sequence: Synthetic oligonucleotide
  Target: LAMA2; (+) strand; PAM type: NRG; PAM sequence: AAG
gaaggaagagatatgttaat

SEQ ID NO: 167697 - DNA, 20 bp, Artificial Sequence
  Description of Artificial Sequence: Synthetic oligonucleotide
  Target: LAMA2; (+) strand; PAM type: NRG; PAM sequence: AAG
atatgttaataagtgaatta

SEQ ID NO: 167698 - DNA, 20 bp, Artificial Sequence
  Description of Artificial Sequence: Synthetic oligonucleotide
  Target: LAMA2; (+) strand; PAM type: NRG; PAM sequence: TGG
gttaataagtgaattaaagt

SEQ ID NO: 167699 - DNA, 20 bp, Artificial Sequence
  Description of Artificial Sequence: Synthetic oligonucleotide
  Target: LAMA2; (+) strand; PAM type: NRG; PAM sequence: AAG
taagtgaattaaagttggat

SEQ ID NO: 167700 - DNA, 20 bp, Artificial Sequence
  Description of Artificial Sequence: Synthetic oligonucleotide
  Target: LAMA2; (+) strand; PAM type: NRG; PAM sequence: CAG
taaagttggataagatttcc

SEQ ID NO: 167701 - DNA, 20 bp, Artificial Sequence
  Description of Artificial Sequence: Synthetic oligonucleotide
  Target: LAMA2; (+) strand; PAM type: NRG; PAM sequence: AGG
aaagttggataagatttccc

SEQ ID NO: 167702 - DNA, 20 bp, Artificial Sequence
  Description of Artificial Sequence: Synthetic oligonucleotide
  Target: LAMA2; (+) strand; PAM type: NRG; PAM sequence: AAG
ttcccaggctaatgttatcc

SEQ ID NO: 167703 - DNA, 20 bp, Artificial Sequence
  Description of Artificial Sequence: Synthetic oligonucleotide
  Target: LAMA2; (+) strand; PAM type: NRG; PAM sequence: AGG
tcccaggctaatgttatcca

SEQ ID NO: 167704 - DNA, 20 bp, Artificial Sequence
  Description of Artificial Sequence: Synthetic oligonucleotide
  Target: LAMA2; (+) strand; PAM type: NRG; PAM sequence: GAG
aggctaatgttatccaaggc

SEQ ID NO: 167705 - DNA, 20 bp, Artificial Sequence
  Description of Artificial Sequence: Synthetic oligonucleotide
  Target: LAMA2; (+) strand; PAM type: NRG; PAM sequence: TAG
tgttatccaaggcgagtata

SEQ ID NO: 167706 - DNA, 20 bp, Artificial Sequence
  Description of Artificial Sequence: Synthetic oligonucleotide
  Target: LAMA2; (+) strand; PAM type: NRG; PAM sequence: AAG
atccaaggcgagtatataga

SEQ ID NO: 167707 - DNA, 20 bp, Artificial Sequence
  Description of Artificial Sequence: Synthetic oligonucleotide
  Target: LAMA2; (+) strand; PAM type: NRG; PAM sequence: AAG
cgagtatatagaaagaatga

SEQ ID NO: 167708 - DNA, 20 bp, Artificial Sequence
  Description of Artificial Sequence: Synthetic oligonucleotide
  Target: LAMA2; (+) strand; PAM type: NRG; PAM sequence: CAG
tatatagaaagaatgaaaga

SEQ ID NO: 167709 - DNA, 20 bp, Artificial Sequence
  Description of Artificial Sequence: Synthetic oligonucleotide
  Target: LAMA2; (+) strand; PAM type: NRG; PAM sequence: AGG
atatagaaagaatgaaagac

SEQ ID NO: 167710 - DNA, 20 bp, Artificial Sequence
  Description of Artificial Sequence: Synthetic oligonucleotide
  Target: LAMA2; (+) strand; PAM type: NRG; PAM sequence: TGG
tgaaagacaggactttatgt

SEQ ID NO: 167711 - DNA, 20 bp, Artificial Sequence
  Description of Artificial Sequence: Synthetic oligonucleotide
  Target: LAMA2; (+) strand; PAM type: NRG; PAM sequence: GGG
gaaagacaggactttatgtt

SEQ ID NO: 167712 - DNA, 20 bp, Artificial Sequence
  Description of Artificial Sequence: Synthetic oligonucleotide
  Target: LAMA2; (+) strand; PAM type: NRG; PAM sequence: AAG
gacaggactttatgttggga

SEQ ID NO: 167713 - DNA, 20 bp, Artificial Sequence
  Description of Artificial Sequence: Synthetic oligonucleotide
  Target: LAMA2; (+) strand; PAM type: NRG; PAM sequence: AGG
acaggactttatgttgggaa

SEQ ID NO: 167714 - DNA, 20 bp, Artificial Sequence
  Description of Artificial Sequence: Synthetic oligonucleotide
  Target: LAMA2; (+) strand; PAM type: NRG; PAM sequence: GAG
aggactttatgttgggaaag

SEQ ID NO: 167715 - DNA, 20 bp, Artificial Sequence
  Description of Artificial Sequence: Synthetic oligonucleotide
  Target: LAMA2; (+) strand; PAM type: NRG; PAM sequence: AAG
ttatgttgggaaaggagaaa

SEQ ID NO: 167716 - DNA, 20 bp, Artificial Sequence
  Description of Artificial Sequence: Synthetic oligonucleotide
  Target: LAMA2; (+) strand; PAM type: NRG; PAM sequence: AAG
tgttgggaaaggagaaaaag

SEQ ID NO: 167717 - DNA, 20 bp, Artificial Sequence
  Description of Artificial Sequence: Synthetic oligonucleotide
  Target: LAMA2; (+) strand; PAM type: NRG; PAM sequence: GAG
ttgggaaaggagaaaaagaa

SEQ ID NO: 167718 - DNA, 20 bp, Artificial Sequence
  Description of Artificial Sequence: Synthetic oligonucleotide
  Target: LAMA2; (+) strand; PAM type: NRG; PAM sequence: AAG
aaaggagaaaaagaagagcc

SEQ ID NO: 167719 - DNA, 20 bp, Artificial Sequence
  Description of Artificial Sequence: Synthetic oligonucleotide
  Target: LAMA2; (+) strand; PAM type: NRG; PAM sequence: AGG
aaggagaaaaagaagagcca

SEQ ID NO: 167720 - DNA, 20 bp, Artificial Sequence
  Description of Artificial Sequence: Synthetic oligonucleotide
  Target: LAMA2; (+) strand; PAM type: NRG; PAM sequence: CAG
gagaaaaagaagagccaagg

SEQ ID NO: 167721 - DNA, 20 bp, Artificial Sequence
  Description of Artificial Sequence: Synthetic oligonucleotide
  Target: LAMA2; (+) strand; PAM type: NRG; PAM sequence: AGG
agaaaaagaagagccaaggc

SEQ ID NO: 167722 - DNA, 20 bp, Artificial Sequence
  Description of Artificial Sequence: Synthetic oligonucleotide
  Target: LAMA2; (+) strand; PAM type: NRG; PAM sequence: GAG
aaaaagaagagccaaggcag

SEQ ID NO: 167723 - DNA, 20 bp, Artificial Sequence
  Description of Artificial Sequence: Synthetic oligonucleotide
  Target: LAMA2; (+) strand; PAM type: NRG; PAM sequence: CAG
aagaagagccaaggcaggag

SEQ ID NO: 167724 - DNA, 20 bp, Artificial Sequence
  Description of Artificial Sequence: Synthetic oligonucleotide
  Target: LAMA2; (+) strand; PAM type: NRG; PAM sequence: CAG
agagccaaggcaggagcagt

SEQ ID NO: 167725 - DNA, 20 bp, Artificial Sequence
  Description of Artificial Sequence: Synthetic oligonucleotide
  Target: LAMA2; (+) strand; PAM type: NRG; PAM sequence: AAG
gccaaggcaggagcagtcag

SEQ ID NO: 167726 - DNA, 20 bp, Artificial Sequence
  Description of Artificial Sequence: Synthetic oligonucleotide
  Target: LAMA2; (+) strand; PAM type: NRG; PAM sequence: GAG
caaggcaggagcagtcagaa

SEQ ID NO: 167727 - DNA, 20 bp, Artificial Sequence
  Description of Artificial Sequence: Synthetic oligonucleotide
  Target: LAMA2; (+) strand; PAM type: NRG; PAM sequence: GAG
aggcaggagcagtcagaaga

SEQ ID NO: 167728 - DNA, 20 bp, Artificial Sequence
  Description of Artificial Sequence: Synthetic oligonucleotide
  Target: LAMA2; (+) strand; PAM type: NRG; PAM sequence: AGG
ggcaggagcagtcagaagag

SEQ ID NO: 167729 - DNA, 20 bp, Artificial Sequence
  Description of Artificial Sequence: Synthetic oligonucleotide
  Target: LAMA2; (+) strand; PAM type: NRG; PAM sequence: GGG
gcaggagcagtcagaagaga

SEQ ID NO: 167730 - DNA, 20 bp, Artificial Sequence
  Description of Artificial Sequence: Synthetic oligonucleotide
  Target: LAMA2; (+) strand; PAM type: NRG; PAM sequence: CAG
cagtcagaagagagggaacc

SEQ ID NO: 167731 - DNA, 20 bp, Artificial Sequence
  Description of Artificial Sequence: Synthetic oligonucleotide
  Target: LAMA2; (+) strand; PAM type: NRG; PAM sequence: AGG
agtcagaagagagggaaccc

SEQ ID NO: 167732 - DNA, 20 bp, Artificial Sequence
  Description of Artificial Sequence: Synthetic oligonucleotide
  Target: LAMA2; (+) strand; PAM type: NRG; PAM sequence: CGG
cagaagagagggaacccagg

SEQ ID NO: 167733 - DNA, 20 bp, Artificial Sequence
  Description of Artificial Sequence: Synthetic oligonucleotide
  Target: LAMA2; (+) strand; PAM type: NRG; PAM sequence: AAG
gcggcactgccattgacacc

SEQ ID NO: 167734 - DNA, 20 bp, Artificial Sequence
  Description of Artificial Sequence: Synthetic oligonucleotide
  Target: LAMA2; (+) strand; PAM type: NRG; PAM sequence: AGG
cggcactgccattgacacca

SEQ ID NO: 167735 - DNA, 20 bp, Artificial Sequence
  Description of Artificial Sequence: Synthetic oligonucleotide
  Target: LAMA2; (+) strand; PAM type: NRG; PAM sequence: GGG
ggcactgccattgacaccaa

SEQ ID NO: 167736 - DNA, 20 bp, Artificial Sequence
  Description of Artificial Sequence: Synthetic oligonucleotide
  Target: LAMA2; (+) strand; PAM type: NRG; PAM sequence: GAG
cactgccattgacaccaagg

SEQ ID NO: 167737 - DNA, 20 bp, Artificial Sequence
  Description of Artificial Sequence: Synthetic oligonucleotide
  Target: LAMA2; (+) strand; PAM type: NRG; PAM sequence: GAG
ctgccattgacaccaaggga

SEQ ID NO: 167738 - DNA, 20 bp, Artificial Sequence
  Description of Artificial Sequence: Synthetic oligonucleotide
  Target: LAMA2; (+) strand; PAM type: NRG; PAM sequence: AAG
ccattgacaccaagggagag

SEQ ID NO: 167739 - DNA, 20 bp, Artificial Sequence
  Description of Artificial Sequence: Synthetic oligonucleotide
  Target: LAMA2; (+) strand; PAM type: NRG; PAM sequence: GAG
attgacaccaagggagagaa

SEQ ID NO: 167740 - DNA, 20 bp, Artificial Sequence
  Description of Artificial Sequence: Synthetic oligonucleotide
  Target: LAMA2; (+) strand; PAM type: NRG; PAM sequence: CAG
gacaccaagggagagaagag

SEQ ID NO: 167741 - DNA, 20 bp, Artificial Sequence
  Description of Artificial Sequence: Synthetic oligonucleotide
  Target: LAMA2; (+) strand; PAM type: NRG; PAM sequence: CAG
agggagagaagagcagtgaa

SEQ ID NO: 167742 - DNA, 20 bp, Artificial Sequence
  Description of Artificial Sequence: Synthetic oligonucleotide
  Target: LAMA2; (+) strand; PAM type: NRG; PAM sequence: CAG
agaagagcagtgaacagcat

SEQ ID NO: 167743 - DNA, 20 bp, Artificial Sequence
  Description of Artificial Sequence: Synthetic oligonucleotide
  Target: LAMA2; (+) strand; PAM type: NRG; PAM sequence: AAG
gcatcagttgctgctctcac

SEQ ID NO: 167744 - DNA, 20 bp, Artificial Sequence
  Description of Artificial Sequence: Synthetic oligonucleotide
  Target: LAMA2; (+) strand; PAM type: NRG; PAM sequence: AGG
catcagttgctgctctcaca

SEQ ID NO: 167745 - DNA, 20 bp, Artificial Sequence
  Description of Artificial Sequence: Synthetic oligonucleotide
  Target: LAMA2; (+) strand; PAM type: NRG; PAM sequence: GGG
atcagttgctgctctcacaa

SEQ ID NO: 167746 - DNA, 20 bp, Artificial Sequence
  Description of Artificial Sequence: Synthetic oligonucleotide
  Target: LAMA2; (+) strand; PAM type: NRG; PAM sequence: GAG
cagttgctgctctcacaagg

SEQ ID NO: 167747 - DNA, 20 bp, Artificial Sequence
  Description of Artificial Sequence: Synthetic oligonucleotide
  Target: LAMA2; (+) strand; PAM type: NRG; PAM sequence: TGG
caagggagacccaatgaata

SEQ ID NO: 167748 - DNA, 20 bp, Artificial Sequence
  Description of Artificial Sequence: Synthetic oligonucleotide
  Target: LAMA2; (+) strand; PAM type: NRG; PAM sequence: TGG
gggagacccaatgaatatgg

SEQ ID NO: 167749 - DNA, 20 bp, Artificial Sequence
  Description of Artificial Sequence: Synthetic oligonucleotide
  Target: LAMA2; (+) strand; PAM type: NRG; PAM sequence: GAG
ggcaattgactattgtaatt

SEQ ID NO: 167750 - DNA, 20 bp, Artificial Sequence
  Description of Artificial Sequence: Synthetic oligonucleotide
  Target: LAMA2; (+) strand; PAM type: NRG; PAM sequence: TGG
attgtaattgagcaaataaa

SEQ ID NO: 167751 - DNA, 20 bp, Artificial Sequence
  Description of Artificial Sequence: Synthetic oligonucleotide
  Target: LAMA2; (+) strand; PAM type: NRG; PAM sequence: GGG
ttgtaattgagcaaataaat

SEQ ID NO: 167752 - DNA, 20 bp, Artificial Sequence
  Description of Artificial Sequence: Synthetic oligonucleotide
  Target: LAMA2; (+) strand; PAM type: NRG; PAM sequence: AAG
ataaatgggcttgccgcctg

SEQ ID NO: 167753 - DNA, 20 bp, Artificial Sequence
  Description of Artificial Sequence: Synthetic oligonucleotide
  Target: LAMA2; (+) strand; PAM type: NRG; PAM sequence: TAG
ggcttgccgcctgaagcaca

SEQ ID NO: 167754 - DNA, 20 bp, Artificial Sequence
  Description of Artificial Sequence: Synthetic oligonucleotide
  Target: LAMA2; (+) strand; PAM type: NRG; PAM sequence: AAG
ttgccgcctgaagcacatag

SEQ ID NO: 167755 - DNA, 20 bp, Artificial Sequence
  Description of Artificial Sequence: Synthetic oligonucleotide
  Target: LAMA2; (+) strand; PAM type: NRG; PAM sequence: TGG
cacatagaagccaataacgt

SEQ ID NO: 167756 - DNA, 20 bp, Artificial Sequence
  Description of Artificial Sequence: Synthetic oligonucleotide
  Target: LAMA2; (+) strand; PAM type: NRG; PAM sequence: TGG
gaagccaataacgttggcac

SEQ ID NO: 167757 - DNA, 20 bp, Artificial Sequence
  Description of Artificial Sequence: Synthetic oligonucleotide
  Target: LAMA2; (+) strand; PAM type: NRG; PAM sequence: CGG
aataacgttggcactggctt

SEQ ID NO: 167758 - DNA, 20 bp, Artificial Sequence
  Description of Artificial Sequence: Synthetic oligonucleotide
  Target: LAMA2; (+) strand; PAM type: NRG; PAM sequence: GAG
taacgttggcactggcttcg

SEQ ID NO: 167759 - DNA, 20 bp, Artificial Sequence
  Description of Artificial Sequence: Synthetic oligonucleotide
  Target: LAMA2; (+) strand; PAM type: NRG; PAM sequence: AAG
ttggcactggcttcggagaa

SEQ ID NO: 167760 - DNA, 20 bp, Artificial Sequence
  Description of Artificial Sequence: Synthetic oligonucleotide
  Target: LAMA2; (+) strand; PAM type: NRG; PAM sequence: AAG
cactggcttcggagaaaaga

SEQ ID NO: 167761 - DNA, 20 bp, Artificial Sequence
  Description of Artificial Sequence: Synthetic oligonucleotide
  Target: LAMA2; (+) strand; PAM type: NRG; PAM sequence: AGG
actggcttcggagaaaagaa

SEQ ID NO: 167762 - DNA, 20 bp, Artificial Sequence
  Description of Artificial Sequence: Synthetic oligonucleotide
  Target: LAMA2; (+) strand; PAM type: NRG; PAM sequence: CAG
ggctttactgcaaaattgtt

SEQ ID NO: 167763 - DNA, 20 bp, Artificial Sequence
  Description of Artificial Sequence: Synthetic oligonucleotide
  Target: LAMA2; (+) strand; PAM type: NRG; PAM sequence: AAG
ttactgcaaaattgttcagc

SEQ ID NO: 167764 - DNA, 20 bp, Artificial Sequence
  Description of Artificial Sequence: Synthetic oligonucleotide
  Target: LAMA2; (+) strand; PAM type: NRG; PAM sequence: AGG
tactgcaaaattgttcagca

SEQ ID NO: 167765 - DNA, 20 bp, Artificial Sequence
  Description of Artificial Sequence: Synthetic oligonucleotide
  Target: LAMA2; (+) strand; PAM type: NRG; PAM sequence: GAG
ctgcaaaattgttcagcaag

SEQ ID NO: 167766 - DNA, 20 bp, Artificial Sequence
  Description of Artificial Sequence: Synthetic oligonucleotide
  Target: LAMA2; (+) strand; PAM type: NRG; PAM sequence: AAG
aaattgttcagcaaggagac

SEQ ID NO: 167767 - DNA, 20 bp, Artificial Sequence
  Description of Artificial Sequence: Synthetic oligonucleotide
  Target: LAMA2; (+) strand; PAM type: NRG; PAM sequence: GAG
attgttcagcaaggagacaa

SEQ ID NO: 167768 - DNA, 20 bp, Artificial Sequence
  Description of Artificial Sequence: Synthetic oligonucleotide
  Target: LAMA2; (+) strand; PAM type: NRG; PAM sequence: CAG
ttcagcaaggagacaagagt

SEQ ID NO: 167769 - DNA, 20 bp, Artificial Sequence
  Description of Artificial Sequence: Synthetic oligonucleotide
  Target: LAMA2; (+) strand; PAM type: NRG; PAM sequence: AGG
tcagcaaggagacaagagtc

SEQ ID NO: 167770 - DNA, 20 bp, Artificial Sequence
  Description of Artificial Sequence: Synthetic oligonucleotide
  Target: LAMA2; (+) strand; PAM type: NRG; PAM sequence: TGG
tcaaatctgtctccctaatt

SEQ ID NO: 167771 - DNA, 20 bp, Artificial Sequence
  Description of Artificial Sequence: Synthetic oligonucleotide
  Target: LAMA2; (+) strand; PAM type: NRG; PAM sequence: GGG
caaatctgtctccctaattt

SEQ ID NO: 167772 - DNA, 20 bp, Artificial Sequence
  Description of Artificial Sequence: Synthetic oligonucleotide
  Target: LAMA2; (+) strand; PAM type: NRG; PAM sequence: TGG
tgtctccctaatttgggata

SEQ ID NO: 167773 - DNA, 20 bp, Artificial Sequence
  Description of Artificial Sequence: Synthetic oligonucleotide
  Target: LAMA2; (+) strand; PAM type: NRG; PAM sequence: GGG
gtctccctaatttgggatat

SEQ ID NO: 167774 - DNA, 20 bp, Artificial Sequence
  Description of Artificial Sequence: Synthetic oligonucleotide
  Target: LAMA2; (+) strand; PAM type: NRG; PAM sequence: GGG
tctccctaatttgggatatg

SEQ ID NO: 167775 - DNA, 20 bp, Artificial Sequence
  Description of Artificial Sequence: Synthetic oligonucleotide
  Target: LAMA2; (+) strand; PAM type: NRG; PAM sequence: AAG
ccctaatttgggatatgggg

SEQ ID NO: 167776 - DNA, 20 bp, Artificial Sequence
  Description of Artificial Sequence: Synthetic oligonucleotide
  Target: LAMA2; (+) strand; PAM type: NRG; PAM sequence: AGG
cctaatttgggatatgggga

SEQ ID NO: 167777 - DNA, 20 bp, Artificial Sequence
  Description of Artificial Sequence: Synthetic oligonucleotide
  Target: LAMA2; (+) strand; PAM type: NRG; PAM sequence: AAG
tgggatatggggaaggttgc

SEQ ID NO: 167778 - DNA, 20 bp, Artificial Sequence
  Description of Artificial Sequence: Synthetic oligonucleotide
  Target: LAMA2; (+) strand; PAM type: NRG; PAM sequence: AGG
gggatatggggaaggttgca

SEQ ID NO: 167779 - DNA, 20 bp, Artificial Sequence
  Description of Artificial Sequence: Synthetic oligonucleotide
  Target: LAMA2; (+) strand; PAM type: NRG; PAM sequence: GGG
ggatatggggaaggttgcaa

SEQ ID NO: 167780 - DNA, 20 bp, Artificial Sequence
  Description of Artificial Sequence: Synthetic oligonucleotide
  Target: LAMA2; (+) strand; PAM type: NRG; PAM sequence: GGG
gatatggggaaggttgcaag

SEQ ID NO: 167781 - DNA, 20 bp, Artificial Sequence
  Description of Artificial Sequence: Synthetic oligonucleotide
  Target: LAMA2; (+) strand; PAM type: NRG; PAM sequence: CAG
tggggaaggttgcaaggggt

SEQ ID NO: 167782 - DNA, 20 bp, Artificial Sequence
  Description of Artificial Sequence: Synthetic oligonucleotide
  Target: LAMA2; (+) strand; PAM type: NRG; PAM sequence: AAG
ggaaggttgcaaggggtcag

SEQ ID NO: 167783 - DNA, 20 bp, Artificial Sequence
  Description of Artificial Sequence: Synthetic oligonucleotide
  Target: LAMA2; (+) strand; PAM type: NRG; PAM sequence: AGG
gaaggttgcaaggggtcaga

SEQ ID NO: 167784 - DNA, 20 bp, Artificial Sequence
  Description of Artificial Sequence: Synthetic oligonucleotide
  Target: LAMA2; (+) strand; PAM type: NRG; PAM sequence: AAG
gttgcaaggggtcagaaggc

SEQ ID NO: 167785 - DNA, 20 bp, Artificial Sequence
  Description of Artificial Sequence: Synthetic oligonucleotide
  Target: LAMA2; (+) strand; PAM type: NRG; PAM sequence: AGG
ttgcaaggggtcagaaggca

SEQ ID NO: 167786 - DNA, 20 bp, Artificial Sequence
  Description of Artificial Sequence: Synthetic oligonucleotide
  Target: LAMA2; (+) strand; PAM type: NRG; PAM sequence: AAG
aggggtcagaaggcaaggca

SEQ ID NO: 167787 - DNA, 20 bp, Artificial Sequence
  Description of Artificial Sequence: Synthetic oligonucleotide
  Target: LAMA2; (+) strand; PAM type: NRG; PAM sequence: AGG
ggggtcagaaggcaaggcaa

SEQ ID NO: 167788 - DNA, 20 bp, Artificial Sequence
  Description of Artificial Sequence: Synthetic oligonucleotide
  Target: LAMA2; (+) strand; PAM type: NRG; PAM sequence: TAG
agaaggcaaggcaaaggatt

SEQ ID NO: 167789 - DNA, 20 bp, Artificial Sequence
  Description of Artificial Sequence: Synthetic oligonucleotide
  Target: LAMA2; (+) strand; PAM type: NRG; PAM sequence: TGG
ggcaaaggatttagaaatgc

SEQ ID NO: 167790 - DNA, 20 bp, Artificial Sequence
  Description of Artificial Sequence: Synthetic oligonucleotide
  Target: LAMA2; (+) strand; PAM type: NRG; PAM sequence: TGG
aggatttagaaatgctggct

SEQ ID NO: 167791 - DNA, 20 bp, Artificial Sequence
  Description of Artificial Sequence: Synthetic oligonucleotide
  Target: LAMA2; (+) strand; PAM type: NRG; PAM sequence: CAG
atttagaaatgctggcttgg

SEQ ID NO: 167792 - DNA, 20 bp, Artificial Sequence
  Description of Artificial Sequence: Synthetic oligonucleotide
  Target: LAMA2; (+) strand; PAM type: NRG; PAM sequence: GAG
ttagaaatgctggcttggca

SEQ ID NO: 167793 - DNA, 20 bp, Artificial Sequence
  Description of Artificial Sequence: Synthetic oligonucleotide
  Target: LAMA2; (+) strand; PAM type: NRG; PAM sequence: TGG
ctggcttggcagagtctgat

SEQ ID NO: 167794 - DNA, 20 bp, Artificial Sequence
  Description of Artificial Sequence: Synthetic oligonucleotide
  Target: LAMA2; (+) strand; PAM type: NRG; PAM sequence: GAG
ggcttggcagagtctgattg

SEQ ID NO: 167795 - DNA, 20 bp, Artificial Sequence
  Description of Artificial Sequence: Synthetic oligonucleotide
  Target: LAMA2; (+) strand; PAM type: NRG; PAM sequence: AGG
gcttggcagagtctgattgg

SEQ ID NO: 167796 - DNA, 20 bp, Artificial Sequence
  Description of Artificial Sequence: Synthetic oligonucleotide
  Target: LAMA2; (+) strand; PAM type: NRG; PAM sequence: GGG
cttggcagagtctgattgga

SEQ ID NO: 167797 - DNA, 20 bp, Artificial Sequence
  Description of Artificial Sequence: Synthetic oligonucleotide
  Target: LAMA2; (+) strand; PAM type: NRG; PAM sequence: CAG
gcttcaaatttgatcactta

SEQ ID NO: 167798 - DNA, 20 bp, Artificial Sequence
  Description of Artificial Sequence: Synthetic oligonucleotide
  Target: LAMA2; (+) strand; PAM type: NRG; PAM sequence: AAG
caaatttgatcacttacagt

SEQ ID NO: 167799 - DNA, 20 bp, Artificial Sequence
  Description of Artificial Sequence: Synthetic oligonucleotide
  Target: LAMA2; (+) strand; PAM type: NRG; PAM sequence: AGG
aaatttgatcacttacagta

SEQ ID NO: 167800 - DNA, 20 bp, Artificial Sequence
  Description of Artificial Sequence: Synthetic oligonucleotide
  Target: LAMA2; (+) strand; PAM type: NRG; PAM sequence: GAG
cacttacagtaaggtatatt

SEQ ID NO: 167801 - DNA, 20 bp, Artificial Sequence
  Description of Artificial Sequence: Synthetic oligonucleotide
  Target: LAMA2; (+) strand; PAM type: NRG; PAM sequence: AGG
acttacagtaaggtatattg

SEQ ID NO: 167802 - DNA, 20 bp, Artificial Sequence
  Description of Artificial Sequence: Synthetic oligonucleotide
  Target: LAMA2; (+) strand; PAM type: NRG; PAM sequence: CAG
tacagtaaggtatattgagg

SEQ ID NO: 167803 - DNA, 20 bp, Artificial Sequence
  Description of Artificial Sequence: Synthetic oligonucleotide
  Target: LAMA2; (+) strand; PAM type: NRG; PAM sequence: TAG
aggtatattgaggcagattt

SEQ ID NO: 167804 - DNA, 20 bp, Artificial Sequence
  Description of Artificial Sequence: Synthetic oligonucleotide
  Target: LAMA2; (+) strand; PAM type: NRG; PAM sequence: TGG
attgaggcagattttagccc

SEQ ID NO: 167805 - DNA, 20 bp, Artificial Sequence
  Description of Artificial Sequence: Synthetic oligonucleotide
  Target: LAMA2; (+) strand; PAM type: NRG; PAM sequence: TGG
gattttagccctggatcttc

SEQ ID NO: 167806 - DNA, 20 bp, Artificial Sequence
  Description of Artificial Sequence: Synthetic oligonucleotide
  Target: LAMA2; (+) strand; PAM type: NRG; PAM sequence: GGG
attttagccctggatcttct

SEQ ID NO: 167807 - DNA, 20 bp, Artificial Sequence
  Description of Artificial Sequence: Synthetic oligonucleotide
  Target: LAMA2; (+) strand; PAM type: NRG; PAM sequence: TGG
ccctggatcttctgggccaa

SEQ ID NO: 167808 - DNA, 20 bp, Artificial Sequence
  Description of Artificial Sequence: Synthetic oligonucleotide
  Target: LAMA2; (+) strand; PAM type: NRG; PAM sequence: AAG
caatggacccctcatttctg

SEQ ID NO: 167809 - DNA, 20 bp, Artificial Sequence
  Description of Artificial Sequence: Synthetic oligonucleotide
  Target: LAMA2; (+) strand; PAM type: NRG; PAM sequence: AGG
aatggacccctcatttctga

SEQ ID NO: 167810 - DNA, 20 bp, Artificial Sequence
  Description of Artificial Sequence: Synthetic oligonucleotide
  Target: LAMA2; (+) strand; PAM type: NRG; PAM sequence: GAG
tggacccctcatttctgaag

SEQ ID NO: 167811 - DNA, 20 bp, Artificial Sequence
  Description of Artificial Sequence: Synthetic oligonucleotide
  Target: LAMA2; (+) strand; PAM type: NRG; PAM sequence: CAG
tctgaaggagttccaatgtc

SEQ ID NO: 167812 - DNA, 20 bp, Artificial Sequence
  Description of Artificial Sequence: Synthetic oligonucleotide
  Target: LAMA2; (+) strand; PAM type: NRG; PAM sequence: AGG
ctgaaggagttccaatgtcc

SEQ ID NO: 167813 - DNA, 20 bp, Artificial Sequence
  Description of Artificial Sequence: Synthetic oligonucleotide
  Target: LAMA2; (+) strand; PAM type: NRG; PAM sequence: TGG
tgattttgtccctgtcttgt

SEQ ID NO: 167814 - DNA, 20 bp, Artificial Sequence
  Description of Artificial Sequence: Synthetic oligonucleotide
  Target: LAMA2; (+) strand; PAM type: NRG; PAM sequence: AAG
tgtccctgtcttgttggttc

SEQ ID NO: 167815 - DNA, 20 bp, Artificial Sequence
  Description of Artificial Sequence: Synthetic oligonucleotide
  Target: LAMA2; (+) strand; PAM type: NRG; PAM sequence: AGG
gtccctgtcttgttggttca

SEQ ID NO: 167816 - DNA, 20 bp, Artificial Sequence
  Description of Artificial Sequence: Synthetic oligonucleotide
  Target: LAMA2; (+) strand; PAM type: NRG; PAM sequence: GGG
tccctgtcttgttggttcaa

SEQ ID NO: 167817 - DNA, 20 bp, Artificial Sequence
  Description of Artificial Sequence: Synthetic oligonucleotide
  Target: LAMA2; (+) strand; PAM type: NRG; PAM sequence: GGG
ccctgtcttgttggttcaag

SEQ ID NO: 167818 - DNA, 20 bp, Artificial Sequence
  Description of Artificial Sequence: Synthetic oligonucleotide
  Target: LAMA2; (+) strand; PAM type: NRG; PAM sequence: GAG
ctgtcttgttggttcaaggg

SEQ ID NO: 167819 - DNA, 20 bp, Artificial Sequence
  Description of Artificial Sequence: Synthetic oligonucleotide
  Target: LAMA2; (+) strand; PAM type: NRG; PAM sequence: AGG
tgtcttgttggttcaagggg

SEQ ID NO: 167820 - DNA, 20 bp, Artificial Sequence
  Description of Artificial Sequence: Synthetic oligonucleotide
  Target: LAMA2; (+) strand; PAM type: NRG; PAM sequence: TAG
tgttggttcaaggggaggaa

SEQ ID NO: 167821 - DNA, 20 bp, Artificial Sequence
  Description of Artificial Sequence: Synthetic oligonucleotide
  Target: LAMA2; (+) strand; PAM type: NRG; PAM sequence: TGG
ggttcaaggggaggaatagt

SEQ ID NO: 167822 - DNA, 20 bp, Artificial Sequence
  Description of Artificial Sequence: Synthetic oligonucleotide
  Target: LAMA2; (+) strand; PAM type: NRG; PAM sequence: TGG
ggggaggaatagttggttcc

SEQ ID NO: 167823 - DNA, 20 bp, Artificial Sequence
  Description of Artificial Sequence: Synthetic oligonucleotide
  Target: LAMA2; (+) strand; PAM type: NRG; PAM sequence: TAG
tagttggttcctggtgttgt

SEQ ID NO: 167824 - DNA, 20 bp, Artificial Sequence
  Description of Artificial Sequence: Synthetic oligonucleotide
  Target: LAMA2; (+) strand; PAM type: NRG; PAM sequence: GAG
gttggttcctggtgttgtta

SEQ ID NO: 167825 - DNA, 20 bp, Artificial Sequence
  Description of Artificial Sequence: Synthetic oligonucleotide
  Target: LAMA2; (+) strand; PAM type: NRG; PAM sequence: AGG
ttggttcctggtgttgttag

SEQ ID NO: 167826 - DNA, 20 bp, Artificial Sequence
  Description of Artificial Sequence: Synthetic oligonucleotide
  Target: LAMA2; (+) strand; PAM type: NRG; PAM sequence: TGG
atttttctattgaacatgcc

SEQ ID NO: 167827 - DNA, 20 bp, Artificial Sequence
  Description of Artificial Sequence: Synthetic oligonucleotide
  Target: LAMA2; (+) strand; PAM type: NRG; PAM sequence: GGG
tttttctattgaacatgcct

SEQ ID NO: 167828 - DNA, 20 bp, Artificial Sequence
  Description of Artificial Sequence: Synthetic oligonucleotide
  Target: LAMA2; (+) strand; PAM type: NRG; PAM sequence: CAG
tgcctgggctacatgacttg

SEQ ID NO: 167829 - DNA, 20 bp, Artificial Sequence
  Description of Artificial Sequence: Synthetic oligonucleotide
  Target: LAMA2; (+) strand; PAM type: NRG; PAM sequence: TGG
gctacatgacttgcagcttt

SEQ ID NO: 167830 - DNA, 20 bp, Artificial Sequence
  Description of Artificial Sequence: Synthetic oligonucleotide
  Target: LAMA2; (+) strand; PAM type: NRG; PAM sequence: AAG
tttggctctgttatacctaa

SEQ ID NO: 167831 - DNA, 20 bp, Artificial Sequence
  Description of Artificial Sequence: Synthetic oligonucleotide
  Target: LAMA2; (+) strand; PAM type: NRG; PAM sequence: AGG
ttggctctgttatacctaaa

SEQ ID NO: 167832 - DNA, 20 bp, Artificial Sequence
  Description of Artificial Sequence: Synthetic oligonucleotide
  Target: LAMA2; (+) strand; PAM type: NRG; PAM sequence: CAG
acttgacattttgttatcaa

SEQ ID NO: 167833 - DNA, 20 bp, Artificial Sequence
  Description of Artificial Sequence: Synthetic oligonucleotide
  Target: LAMA2; (+) strand; PAM type: NRG; PAM sequence: AGG
cttgacattttgttatcaac

SEQ ID NO: 167834 - DNA, 20 bp, Artificial Sequence
  Description of Artificial Sequence: Synthetic oligonucleotide
  Target: LAMA2; (+) strand; PAM type: NRG; PAM sequence: GGG
ttgacattttgttatcaaca

SEQ ID NO: 167835 - DNA, 20 bp, Artificial Sequence
  Description of Artificial Sequence: Synthetic oligonucleotide
  Target: LAMA2; (+) strand; PAM type: NRG; PAM sequence: TAG
acattttgttatcaacaggg

SEQ ID NO: 167836 - DNA, 20 bp, Artificial Sequence
  Description of Artificial Sequence: Synthetic oligonucleotide
  Target: LAMA2; (+) strand; PAM type: NRG; PAM sequence: AGG
cattttgttatcaacagggt

SEQ ID NO: 167837 - DNA, 20 bp, Artificial Sequence
  Description of Artificial Sequence: Synthetic oligonucleotide
  Target: LAMA2; (+) strand; PAM type: NRG; PAM sequence: CGG
tgttatcaacagggtaggcc

SEQ ID NO: 167838 - DNA, 20 bp, Artificial Sequence
  Description of Artificial Sequence: Synthetic oligonucleotide
  Target: LAMA2; (+) strand; PAM type: NRG; PAM sequence: TGG
caacagggtaggcccggttt

SEQ ID NO: 167839 - DNA, 20 bp, Artificial Sequence
  Description of Artificial Sequence: Synthetic oligonucleotide
  Target: LAMA2; (+) strand; PAM type: NRG; PAM sequence: TGG
agggtaggcccggttttggt

SEQ ID NO: 167840 - DNA, 20 bp, Artificial Sequence
  Description of Artificial Sequence: Synthetic oligonucleotide
  Target: LAMA2; (+) strand; PAM type: NRG; PAM sequence: TAG
cccggttttggttggtcctg

SEQ ID NO: 167841 - DNA, 20 bp, Artificial Sequence
  Description of Artificial Sequence: Synthetic oligonucleotide
  Target: LAMA2; (+) strand; PAM type: NRG; PAM sequence: CAG
tggtcctgtagttacactct

SEQ ID NO: 167842 - DNA, 20 bp, Artificial Sequence
  Description of Artificial Sequence: Synthetic oligonucleotide
  Target: LAMA2; (+) strand; PAM type: NRG; PAM sequence: GAG
gtcctgtagttacactctca

SEQ ID NO: 167843 - DNA, 20 bp, Artificial Sequence
  Description of Artificial Sequence: Synthetic oligonucleotide
  Target: LAMA2; (+) strand; PAM type: NRG; PAM sequence: AAG
attttgaccatcaataatga

SEQ ID NO: 167844 - DNA, 20 bp, Artificial Sequence
  Description of Artificial Sequence: Synthetic oligonucleotide
  Target: LAMA2; (+) strand; PAM type: NRG; PAM sequence: CAG
ttgaccatcaataatgaaag

SEQ ID NO: 167845 - DNA, 20 bp, Artificial Sequence
  Description of Artificial Sequence: Synthetic oligonucleotide
  Target: LAMA2; (+) strand; PAM type: NRG; PAM sequence: CAG
gaaagcagaatttgaattta

SEQ ID NO: 167846 - DNA, 20 bp, Artificial Sequence
  Description of Artificial Sequence: Synthetic oligonucleotide
  Target: LAMA2; (+) strand; PAM type: NRG; PAM sequence: AAG
gaatttgaatttacagtttt

SEQ ID NO: 167847 - DNA, 20 bp, Artificial Sequence
  Description of Artificial Sequence: Synthetic oligonucleotide
  Target: LAMA2; (+) strand; PAM type: NRG; PAM sequence: AAG
ttacagttttaagaaatttc

SEQ ID NO: 167848 - DNA, 20 bp, Artificial Sequence
  Description of Artificial Sequence: Synthetic oligonucleotide
  Target: LAMA2; (+) strand; PAM type: NRG; PAM sequence: TAG
aaatttcaagaataaaatga

SEQ ID NO: 167849 - DNA, 20 bp, Artificial Sequence
  Description of Artificial Sequence: Synthetic oligonucleotide
  Target: LAMA2; (+) strand; PAM type: NRG; PAM sequence: TGG
tgatagaatactaccctgat

SEQ ID NO: 167850 - DNA, 20 bp, Artificial Sequence
  Description of Artificial Sequence: Synthetic oligonucleotide
  Target: LAMA2; (+) strand; PAM type: NRG; PAM sequence: TAG
agaatactaccctgattggt

SEQ ID NO: 167851 - DNA, 20 bp, Artificial Sequence
  Description of Artificial Sequence: Synthetic oligonucleotide
  Target: LAMA2; (+) strand; PAM type: NRG; PAM sequence: CAG
atactaccctgattggttag

SEQ ID NO: 167852 - DNA, 20 bp, Artificial Sequence
  Description of Artificial Sequence: Synthetic oligonucleotide
  Target: LAMA2; (+) strand; PAM type: NRG; PAM sequence: AGG
tactaccctgattggttagc

SEQ ID NO: 167853 - DNA, 20 bp, Artificial Sequence
  Description of Artificial Sequence: Synthetic oligonucleotide
  Target: LAMA2; (+) strand; PAM type: NRG; PAM sequence: CAG
ttggttagcaggatcaataa

SEQ ID NO: 167854 - DNA, 20 bp, Artificial Sequence
  Description of Artificial Sequence: Synthetic oligonucleotide
  Target: LAMA2; (+) strand; PAM type: NRG; PAM sequence: AGG
tggttagcaggatcaataac

SEQ ID NO: 167855 - DNA, 20 bp, Artificial Sequence
  Description of Artificial Sequence: Synthetic oligonucleotide
  Target: LAMA2; (+) strand; PAM type: NRG; PAM sequence: GGG
ggttagcaggatcaataaca

SEQ ID NO: 167856 - DNA, 20 bp, Artificial Sequence
  Description of Artificial Sequence: Synthetic oligonucleotide
  Target: LAMA2; (+) strand; PAM type: NRG; PAM sequence: GAG
ttatatgatttgtataattt

SEQ ID NO: 167857 - DNA, 20 bp, Artificial Sequence
  Description of Artificial Sequence: Synthetic oligonucleotide
  Target: LAMA2; (+) strand; PAM type: NRG; PAM sequence: AAG
ttgagtaaatttttatgcaa

SEQ ID NO: 167858 - DNA, 20 bp, Artificial Sequence
  Description of Artificial Sequence: Synthetic oligonucleotide
  Target: LAMA2; (+) strand; PAM type: NRG; PAM sequence: AAG
ttttatgcaaaagaccctga

SEQ ID NO: 167859 - DNA, 20 bp, Artificial Sequence
  Description of Artificial Sequence: Synthetic oligonucleotide
  Target: LAMA2; (+) strand; PAM type: NRG; PAM sequence: TGG
atcaaaatatcaaattaaaa

SEQ ID NO: 167860 - DNA, 20 bp, Artificial Sequence
  Description of Artificial Sequence: Synthetic oligonucleotide
  Target: LAMA2; (+) strand; PAM type: NRG; PAM sequence: AAG
aaatatcaaattaaaatggc

SEQ ID NO: 167861 - DNA, 20 bp, Artificial Sequence
  Description of Artificial Sequence: Synthetic oligonucleotide
  Target: LAMA2; (+) strand; PAM type: NRG; PAM sequence: CAG
tcaaattaaaatggcaagtt

SEQ ID NO: 167862 - DNA, 20 bp, Artificial Sequence
  Description of Artificial Sequence: Synthetic oligonucleotide
  Target: LAMA2; (+) strand; PAM type: NRG; PAM sequence: TGG
aattaaaatggcaagttcag

SEQ ID NO: 167863 - DNA, 20 bp, Artificial Sequence
  Description of Artificial Sequence: Synthetic oligonucleotide
  Target: LAMA2; (+) strand; PAM type: NRG; PAM sequence: AAG
ttattgattgcatccactgt

SEQ ID NO: 167864 - DNA, 20 bp, Artificial Sequence
  Description of Artificial Sequence: Synthetic oligonucleotide
  Target: LAMA2; (+) strand; PAM type: NRG; PAM sequence: AAG
gatacacttttttatatcat

SEQ ID NO: 167865 - DNA, 20 bp, Artificial Sequence
  Description of Artificial Sequence: Synthetic oligonucleotide
  Target: LAMA2; (+) strand; PAM type: NRG; PAM sequence: CAG
cacttttttatatcataagc

SEQ ID NO: 167866 - DNA, 20 bp, Artificial Sequence
  Description of Artificial Sequence: Synthetic oligonucleotide
  Target: LAMA2; (+) strand; PAM type: NRG; PAM sequence: TAG
cacacaaaaacttgtgtgtg

SEQ ID NO: 167867 - DNA, 20 bp, Artificial Sequence
  Description of Artificial Sequence: Synthetic oligonucleotide
  Target: LAMA2; (+) strand; PAM type: NRG; PAM sequence: TAG
attttgttattttacatttt

SEQ ID NO: 167868 - DNA, 20 bp, Artificial Sequence
  Description of Artificial Sequence: Synthetic oligonucleotide
  Target: LAMA2; (+) strand; PAM type: NRG; PAM sequence: TAG
catttttagaaaaaaaattt

SEQ ID NO: 167869 - DNA, 20 bp, Artificial Sequence
  Description of Artificial Sequence: Synthetic oligonucleotide
  Target: LAMA2; (+) strand; PAM type: NRG; PAM sequence: TGG
tttagccaaaacctactcaa

SEQ ID NO: 167870 - DNA, 20 bp, Artificial Sequence
  Description of Artificial Sequence: Synthetic oligonucleotide
  Target: LAMA2; (+) strand; PAM type: NRG; PAM sequence: GAG
acctactcaatggatttcat

SEQ ID NO: 167871 - DNA, 20 bp, Artificial Sequence
  Description of Artificial Sequence: Synthetic oligonucleotide
  Target: LAMA2; (+) strand; PAM type: NRG; PAM sequence: AAG
gtcacttatatcaccatcta

SEQ ID NO: 167872 - DNA, 20 bp, Artificial Sequence
  Description of Artificial Sequence: Synthetic oligonucleotide
  Target: LAMA2; (+) strand; PAM type: NRG; PAM sequence: TGG
ttatatcaccatctaaagct

SEQ ID NO: 167873 - DNA, 20 bp, Artificial Sequence
  Description of Artificial Sequence: Synthetic oligonucleotide
  Target: LAMA2; (+) strand; PAM type: NRG; PAM sequence: GGG
tatatcaccatctaaagctt

SEQ ID NO: 167874 - DNA, 20 bp, Artificial Sequence
  Description of Artificial Sequence: Synthetic oligonucleotide
  Target: LAMA2; (+) strand; PAM type: NRG; PAM sequence: TAG
atctaaagcttgggacgtat

SEQ ID NO: 167875 - DNA, 20 bp, Artificial Sequence
  Description of Artificial Sequence: Synthetic oligonucleotide
  Target: LAMA2; (+) strand; PAM type: NRG; PAM sequence: AGG
tctaaagcttgggacgtatt

SEQ ID NO: 167876 - DNA, 20 bp, Artificial Sequence
  Description of Artificial Sequence: Synthetic oligonucleotide
  Target: LAMA2; (+) strand; PAM type: NRG; PAM sequence: AAG
acgtattaggctaattaaca

SEQ ID NO: 167877 - DNA, 20 bp, Artificial Sequence
  Description of Artificial Sequence: Synthetic oligonucleotide
  Target: LAMA2; (+) strand; PAM type: NRG; PAM sequence: AAG
ttaggctaattaacaaagtg

SEQ ID NO: 167878 - DNA, 20 bp, Artificial Sequence
  Description of Artificial Sequence: Synthetic oligonucleotide
  Target: LAMA2; (+) strand; PAM type: NRG; PAM sequence: GAG
agtgaagacctataaattgt

SEQ ID NO: 167879 - DNA, 20 bp, Artificial Sequence
  Description of Artificial Sequence: Synthetic oligonucleotide
  Target: LAMA2; (+) strand; PAM type: NRG; PAM sequence: AAG
gaagacctataaattgtgag

SEQ ID NO: 167880 - DNA, 20 bp, Artificial Sequence
  Description of Artificial Sequence: Synthetic oligonucleotide
  Target: LAMA2; (+) strand; PAM type: NRG; PAM sequence: GAG
agacctataaattgtgagaa

SEQ ID NO: 167881 - DNA, 20 bp, Artificial Sequence
  Description of Artificial Sequence: Synthetic oligonucleotide
  Target: LAMA2; (+) strand; PAM type: NRG; PAM sequence: AAG
cctataaattgtgagaagag

SEQ ID NO: 167882 - DNA, 20 bp, Artificial Sequence
  Description of Artificial Sequence: Synthetic oligonucleotide
  Target: LAMA2; (+) strand; PAM type: NRG; PAM sequence: AAG
aagagaagaattaaaatgtg

SEQ ID NO: 167883 - DNA, 20 bp, Artificial Sequence
  Description of Artificial Sequence: Synthetic oligonucleotide
  Target: LAMA2; (+) strand; PAM type: NRG; PAM sequence: AAG
aagaattaaaatgtgaagca

SEQ ID NO: 167884 - DNA, 20 bp, Artificial Sequence
  Description of Artificial Sequence: Synthetic oligonucleotide
  Target: LAMA2; (+) strand; PAM type: NRG; PAM sequence: CAG
aaaatgtgaagcaaagaaac

SEQ ID NO: 167885 - DNA, 20 bp, Artificial Sequence
  Description of Artificial Sequence: Synthetic oligonucleotide
  Target: LAMA2; (+) strand; PAM type: NRG; PAM sequence: CAG
tgtgaagcaaagaaaccagc

SEQ ID NO: 167886 - DNA, 20 bp, Artificial Sequence
  Description of Artificial Sequence: Synthetic oligonucleotide
  Target: LAMA2; (+) strand; PAM type: NRG; PAM sequence: AGG
gtgaagcaaagaaaccagcc

SEQ ID NO: 167887 - DNA, 20 bp, Artificial Sequence
  Description of Artificial Sequence: Synthetic oligonucleotide
  Target: LAMA2; (+) strand; PAM type: NRG; PAM sequence: GGG
tgaagcaaagaaaccagcca

SEQ ID NO: 167888 - DNA, 20 bp, Artificial Sequence
  Description of Artificial Sequence: Synthetic oligonucleotide
  Target: LAMA2; (+) strand; PAM type: NRG; PAM sequence: AAG
caaagaaaccagccagggca

SEQ ID NO: 167889 - DNA, 20 bp, Artificial Sequence
  Description of Artificial Sequence: Synthetic oligonucleotide
  Target: LAMA2; (+) strand; PAM type: NRG; PAM sequence: AAG
aaaccagccagggcaaagaa

SEQ ID NO: 167890 - DNA, 20 bp, Artificial Sequence
  Description of Artificial Sequence: Synthetic oligonucleotide
  Target: LAMA2; (+) strand; PAM type: NRG; PAM sequence: GAG
accagccagggcaaagaaaa

SEQ ID NO: 167891 - DNA, 20 bp, Artificial Sequence
  Description of Artificial Sequence: Synthetic oligonucleotide
  Target: LAMA2; (+) strand; PAM type: NRG; PAM sequence: AGG
ccagccagggcaaagaaaag

SEQ ID NO: 167892 - DNA, 20 bp, Artificial Sequence
  Description of Artificial Sequence: Synthetic oligonucleotide
  Target: LAMA2; (+) strand; PAM type: NRG; PAM sequence: AAG
gaaaagaggcacttctcccc

SEQ ID NO: 167893 - DNA, 20 bp, Artificial Sequence
  Description of Artificial Sequence: Synthetic oligonucleotide
  Target: LAMA2; (+) strand; PAM type: NRG; PAM sequence: CAG
ttctccccaagacataaaaa

SEQ ID NO: 167894 - DNA, 20 bp, Artificial Sequence
  Description of Artificial Sequence: Synthetic oligonucleotide
  Target: LAMA2; (+) strand; PAM type: NRG; PAM sequence: GAG
aagacataaaaacagattct

SEQ ID NO: 167895 - DNA, 20 bp, Artificial Sequence
  Description of Artificial Sequence: Synthetic oligonucleotide
  Target: LAMA2; (+) strand; PAM type: NRG; PAM sequence: AGG
agacataaaaacagattctg

SEQ ID NO: 167896 - DNA, 20 bp, Artificial Sequence
  Description of Artificial Sequence: Synthetic oligonucleotide
  Target: LAMA2; (+) strand; PAM type: NRG; PAM sequence: TAG
taaaaacagattctgaggaa

SEQ ID NO: 167897 - DNA, 20 bp, Artificial Sequence
  Description of Artificial Sequence: Synthetic oligonucleotide
  Target: LAMA2; (+) strand; PAM type: NRG; PAM sequence: TGG
aacagattctgaggaataga

SEQ ID NO: 167898 - DNA, 20 bp, Artificial Sequence
  Description of Artificial Sequence: Synthetic oligonucleotide
  Target: LAMA2; (+) strand; PAM type: NRG; PAM sequence: GAG
cagattctgaggaatagatg

SEQ ID NO: 167899 - DNA, 20 bp, Artificial Sequence
  Description of Artificial Sequence: Synthetic oligonucleotide
  Target: LAMA2; (+) strand; PAM type: NRG; PAM sequence: AGG
agattctgaggaatagatgg

SEQ ID NO: 167900 - DNA, 20 bp, Artificial Sequence
  Description of Artificial Sequence: Synthetic oligonucleotide
  Target: LAMA2; (+) strand; PAM type: NRG; PAM sequence: GAG
attctgaggaatagatggag

SEQ ID NO: 167901 - DNA, 20 bp, Artificial Sequence
  Description of Artificial Sequence: Synthetic oligonucleotide
  Target: LAMA2; (+) strand; PAM type: NRG; PAM sequence: AGG
ttctgaggaatagatggagg

SEQ ID NO: 167902 - DNA, 20 bp, Artificial Sequence
  Description of Artificial Sequence: Synthetic oligonucleotide
  Target: LAMA2; (+) strand; PAM type: NRG; PAM sequence: GAG
aggaatagatggaggaggct

SEQ ID NO: 167903 - DNA, 20 bp, Artificial Sequence
  Description of Artificial Sequence: Synthetic oligonucleotide
  Target: LAMA2; (+) strand; PAM type: NRG; PAM sequence: CAG
atttatgacttcaatctgtg

SEQ ID NO: 167904 - DNA, 20 bp, Artificial Sequence
  Description of Artificial Sequence: Synthetic oligonucleotide
  Target: LAMA2; (+) strand; PAM type: NRG; PAM sequence: CAG
atgacttcaatctgtgcagt

SEQ ID NO: 167905 - DNA, 20 bp, Artificial Sequence
  Description of Artificial Sequence: Synthetic oligonucleotide
  Target: LAMA2; (+) strand; PAM type: NRG; PAM sequence: GAG
cttcaatctgtgcagtcagt

SEQ ID NO: 167906 - DNA, 20 bp, Artificial Sequence
  Description of Artificial Sequence: Synthetic oligonucleotide
  Target: LAMA2; (+) strand; PAM type: NRG; PAM sequence: TGG
tgtgcagtcagtgagaaata

SEQ ID NO: 167907 - DNA, 20 bp, Artificial Sequence
  Description of Artificial Sequence: Synthetic oligonucleotide
  Target: LAMA2; (+) strand; PAM type: NRG; PAM sequence: GAG
tgcagtcagtgagaaatatg

SEQ ID NO: 167908 - DNA, 20 bp, Artificial Sequence
  Description of Artificial Sequence: Synthetic oligonucleotide
  Target: LAMA2; (+) strand; PAM type: NRG; PAM sequence: AGG
gcagtcagtgagaaatatgg

SEQ ID NO: 167909 - DNA, 20 bp, Artificial Sequence
  Description of Artificial Sequence: Synthetic oligonucleotide
  Target: LAMA2; (+) strand; PAM type: NRG; PAM sequence: GAG
gagaaatatggaggcatgat

SEQ ID NO: 167910 - DNA, 20 bp, Artificial Sequence
  Description of Artificial Sequence: Synthetic oligonucleotide
  Target: LAMA2; (+) strand; PAM type: NRG; PAM sequence: CGG
tgattactgactcatttcca

SEQ ID NO: 167911 - DNA, 20 bp, Artificial Sequence
  Description of Artificial Sequence: Synthetic oligonucleotide
  Target: LAMA2; (+) strand; PAM type: NRG; PAM sequence: TAG
ctgactcatttccacggcat

SEQ ID NO: 167912 - DNA, 20 bp, Artificial Sequence
  Description of Artificial Sequence: Synthetic oligonucleotide
  Target: LAMA2; (+) strand; PAM type: NRG; PAM sequence: AAG
catttccacggcattagttc

SEQ ID NO: 167913 - DNA, 20 bp, Artificial Sequence
  Description of Artificial Sequence: Synthetic oligonucleotide
  Target: LAMA2; (+) strand; PAM type: NRG; PAM sequence: TGG
atctcttaccaaaacaaata

SEQ ID NO: 167914 - DNA, 20 bp, Artificial Sequence
  Description of Artificial Sequence: Synthetic oligonucleotide
  Target: LAMA2; (+) strand; PAM type: NRG; PAM sequence: TAG
tcttaccaaaacaaatatgg

SEQ ID NO: 167915 - DNA, 20 bp, Artificial Sequence
  Description of Artificial Sequence: Synthetic oligonucleotide
  Target: LAMA2; (+) strand; PAM type: NRG; PAM sequence: CGG
tagaaatttaactcttatga

SEQ ID NO: 167916 - DNA, 20 bp, Artificial Sequence
  Description of Artificial Sequence: Synthetic oligonucleotide
  Target: LAMA2; (+) strand; PAM type: NRG; PAM sequence: GAG
gaaatttaactcttatgacg

SEQ ID NO: 167917 - DNA, 20 bp, Artificial Sequence
  Description of Artificial Sequence: Synthetic oligonucleotide
  Target: LAMA2; (+) strand; PAM type: NRG; PAM sequence: TGG
atttaactcttatgacggag

SEQ ID NO: 167918 - DNA, 20 bp, Artificial Sequence
  Description of Artificial Sequence: Synthetic oligonucleotide
  Target: LAMA2; (+) strand; PAM type: NRG; PAM sequence: CAG
taactcttatgacggagtgg

SEQ ID NO: 167919 - DNA, 20 bp, Artificial Sequence
  Description of Artificial Sequence: Synthetic oligonucleotide
  Target: LAMA2; (+) strand; PAM type: NRG; PAM sequence: TAG
tggcagtgctcacacaccct

SEQ ID NO: 167920 - DNA, 20 bp, Artificial Sequence
  Description of Artificial Sequence: Synthetic oligonucleotide
  Target: LAMA2; (+) strand; PAM type: NRG; PAM sequence: AAG
cagtgctcacacacccttag

SEQ ID NO: 167921 - DNA, 20 bp, Artificial Sequence
  Description of Artificial Sequence: Synthetic oligonucleotide
  Target: LAMA2; (+) strand; PAM type: NRG; PAM sequence: CAG
cacacacccttagaagtttc

SEQ ID NO: 167922 - DNA, 20 bp, Artificial Sequence
  Description of Artificial Sequence: Synthetic oligonucleotide
  Target: LAMA2; (+) strand; PAM type: NRG; PAM sequence: AAG
gaagtttccagtgccttccc

SEQ ID NO: 167923 - DNA, 20 bp, Artificial Sequence
  Description of Artificial Sequence: Synthetic oligonucleotide
  Target: LAMA2; (+) strand; PAM type: NRG; PAM sequence: AGG
aagtttccagtgccttccca

SEQ ID NO: 167924 - DNA, 20 bp, Artificial Sequence
  Description of Artificial Sequence: Synthetic oligonucleotide
  Target: LAMA2; (+) strand; PAM type: NRG; PAM sequence: AAG
ttccagtgccttcccaagga

SEQ ID NO: 167925 - DNA, 20 bp, Artificial Sequence
  Description of Artificial Sequence: Synthetic oligonucleotide
  Target: LAMA2; (+) strand; PAM type: NRG; PAM sequence: CAG
gtgccttcccaaggaaagat

SEQ ID NO: 167926 - DNA, 20 bp, Artificial Sequence
  Description of Artificial Sequence: Synthetic oligonucleotide
  Target: LAMA2; (+) strand; PAM type: NRG; PAM sequence: GAG
aaggaaagatcagactcttt

SEQ ID NO: 167927 - DNA, 20 bp, Artificial Sequence
  Description of Artificial Sequence: Synthetic oligonucleotide
  Target: LAMA2; (+) strand; PAM type: NRG; PAM sequence: TAG
agatcagactctttgagcat

SEQ ID NO: 167928 - DNA, 20 bp, Artificial Sequence
  Description of Artificial Sequence: Synthetic oligonucleotide
  Target: LAMA2; (+) strand; PAM type: NRG; PAM sequence: CAG
ctgtaatctgactacctttc

SEQ ID NO: 167929 - DNA, 20 bp, Artificial Sequence
  Description of Artificial Sequence: Synthetic oligonucleotide
  Target: LAMA2; (+) strand; PAM type: NRG; PAM sequence: AGG
tgtaatctgactacctttcc

SEQ ID NO: 167930 - DNA, 20 bp, Artificial Sequence
  Description of Artificial Sequence: Synthetic oligonucleotide
  Target: LAMA2; (+) strand; PAM type: NRG; PAM sequence: AAG
tgactacctttccaggctcc

SEQ ID NO: 167931 - DNA, 20 bp, Artificial Sequence
  Description of Artificial Sequence: Synthetic oligonucleotide
  Target: LAMA2; (+) strand; PAM type: NRG; PAM sequence: AAG
actccattctatataatgcc

SEQ ID NO: 167932 - DNA, 20 bp, Artificial Sequence
  Description of Artificial Sequence: Synthetic oligonucleotide
  Target: LAMA2; (+) strand; PAM type: NRG; PAM sequence: TGG
attctatataatgccaagtt

SEQ ID NO: 167933 - DNA, 20 bp, Artificial Sequence
  Description of Artificial Sequence: Synthetic oligonucleotide
  Target: LAMA2; (+) strand; PAM type: NRG; PAM sequence: TAG
tggcatttcttgcacttatc

SEQ ID NO: 167934 - DNA, 20 bp, Artificial Sequence
  Description of Artificial Sequence: Synthetic oligonucleotide
  Target: LAMA2; (+) strand; PAM type: NRG; PAM sequence: TAG
tgcacttatctagacatcat

SEQ ID NO: 167935 - DNA, 20 bp, Artificial Sequence
  Description of Artificial Sequence: Synthetic oligonucleotide
  Target: LAMA2; (+) strand; PAM type: NRG; PAM sequence: CAG
acttatctagacatcattag

SEQ ID NO: 167936 - DNA, 20 bp, Artificial Sequence
  Description of Artificial Sequence: Synthetic oligonucleotide
  Target: LAMA2; (+) strand; PAM type: NRG; PAM sequence: CAG
gtctgctcttgctattccct

SEQ ID NO: 167937 - DNA, 20 bp, Artificial Sequence
  Description of Artificial Sequence: Synthetic oligonucleotide
  Target: LAMA2; (+) strand; PAM type: NRG; PAM sequence: AAG
tgaaatctaatttattttta

SEQ ID NO: 167938 - DNA, 20 bp, Artificial Sequence
  Description of Artificial Sequence: Synthetic oligonucleotide
  Target: LAMA2; (+) strand; PAM type: NRG; PAM sequence: AGG
gaaatctaatttatttttaa

SEQ ID NO: 167939 - DNA, 20 bp, Artificial Sequence
  Description of Artificial Sequence: Synthetic oligonucleotide
  Target: LAMA2; (+) strand; PAM type: NRG; PAM sequence: TAG
tctgccacaaaacctatcca

SEQ ID NO: 167940 - DNA, 20 bp, Artificial Sequence
  Description of Artificial Sequence: Synthetic oligonucleotide
  Target: LAMA2; (+) strand; PAM type: NRG; PAM sequence: CAG
cacaaaacctatccatagca

SEQ ID NO: 167941 - DNA, 20 bp, Artificial Sequence
  Description of Artificial Sequence: Synthetic oligonucleotide
  Target: LAMA2; (+) strand; PAM type: NRG; PAM sequence: CAG
aacgaacacattttactata

SEQ ID NO: 167942 - DNA, 20 bp, Artificial Sequence
  Description of Artificial Sequence: Synthetic oligonucleotide
  Target: LAMA2; (+) strand; PAM type: NRG; PAM sequence: CAG
aattatttcaatcattcttt

SEQ ID NO: 167943 - DNA, 20 bp, Artificial Sequence
  Description of Artificial Sequence: Synthetic oligonucleotide
  Target: LAMA2; (+) strand; PAM type: NRG; PAM sequence: AGG
attatttcaatcattctttc

SEQ ID NO: 167944 - DNA, 20 bp, Artificial Sequence
  Description of Artificial Sequence: Synthetic oligonucleotide
  Target: LAMA2; (+) strand; PAM type: NRG; PAM sequence: GAG
tatttcaatcattctttcag

SEQ ID NO: 167945 - DNA, 20 bp, Artificial Sequence
  Description of Artificial Sequence: Synthetic oligonucleotide
  Target: LAMA2; (+) strand; PAM type: NRG; PAM sequence: AAG
tcaggagatgaacatttact

SEQ ID NO: 167946 - DNA, 20 bp, Artificial Sequence
  Description of Artificial Sequence: Synthetic oligonucleotide
  Target: LAMA2; (+) strand; PAM type: NRG; PAM sequence: AAG
catcccaacactatgaataa

SEQ ID NO: 167947 - DNA, 20 bp, Artificial Sequence
  Description of Artificial Sequence: Synthetic oligonucleotide
  Target: LAMA2; (+) strand; PAM type: NRG; PAM sequence: AAG
acactatgaataaaagataa

SEQ ID NO: 167948 - DNA, 20 bp, Artificial Sequence
  Description of Artificial Sequence: Synthetic oligonucleotide
  Target: LAMA2; (+) strand; PAM type: NRG; PAM sequence: CAG
gtacatatctgtgtctcaca

SEQ ID NO: 167949 - DNA, 20 bp, Artificial Sequence
  Description of Artificial Sequence: Synthetic oligonucleotide
  Target: LAMA2; (+) strand; PAM type: NRG; PAM sequence: AAG
acagaattgtaaattctttg

SEQ ID NO: 167950 - DNA, 20 bp, Artificial Sequence
  Description of Artificial Sequence: Synthetic oligonucleotide
  Target: LAMA2; (+) strand; PAM type: NRG; PAM sequence: AGG
cagaattgtaaattctttga

SEQ ID NO: 167951 - DNA, 20 bp, Artificial Sequence
  Description of Artificial Sequence: Synthetic oligonucleotide
  Target: LAMA2; (+) strand; PAM type: NRG; PAM sequence: AAG
tcttatttctttctttattc

SEQ ID NO: 167952 - DNA, 20 bp, Artificial Sequence
  Description of Artificial Sequence: Synthetic oligonucleotide
  Target: LAMA2; (+) strand; PAM type: NRG; PAM sequence: AAG
ttctttctttattcaagaaa

SEQ ID NO: 167953 - DNA, 20 bp, Artificial Sequence
  Description of Artificial Sequence: Synthetic oligonucleotide
  Target: LAMA2; (+) strand; PAM type: NRG; PAM sequence: GAG
ttattcaagaaaaagttaat

SEQ ID NO: 167954 - DNA, 20 bp, Artificial Sequence
  Description of Artificial Sequence: Synthetic oligonucleotide
  Target: LAMA2; (+) strand; PAM type: NRG; PAM sequence: AGG
tattcaagaaaaagttaatg

SEQ ID NO: 167955 - DNA, 20 bp, Artificial Sequence
  Description of Artificial Sequence: Synthetic oligonucleotide
  Target: LAMA2; (+) strand; PAM type: NRG; PAM sequence: GGG
attcaagaaaaagttaatga

SEQ ID NO: 167956 - DNA, 20 bp, Artificial Sequence
  Description of Artificial Sequence: Synthetic oligonucleotide
  Target: LAMA2; (+) strand; PAM type: NRG; PAM sequence: TAG
atgagggcccaactcaatgc

SEQ ID NO: 167957 - DNA, 20 bp, Artificial Sequence
  Description of Artificial Sequence: Synthetic oligonucleotide
  Target: LAMA2; (+) strand; PAM type: NRG; PAM sequence: AGG
tgagggcccaactcaatgct

SEQ ID NO: 167958 - DNA, 20 bp, Artificial Sequence
  Description of Artificial Sequence: Synthetic oligonucleotide
  Target: LAMA2; (+) strand; PAM type: NRG; PAM sequence: TGG
gcccaactcaatgctaggca

SEQ ID NO: 167959 - DNA, 20 bp, Artificial Sequence
  Description of Artificial Sequence: Synthetic oligonucleotide
  Target: LAMA2; (+) strand; PAM type: NRG; PAM sequence: TGG
ctaggcatggctcttcgtac

SEQ ID NO: 167960 - DNA, 20 bp, Artificial Sequence
  Description of Artificial Sequence: Synthetic oligonucleotide
  Target: LAMA2; (+) strand; PAM type: NRG; PAM sequence: GGG
taggcatggctcttcgtact

SEQ ID NO: 167961 - DNA, 20 bp, Artificial Sequence
  Description of Artificial Sequence: Synthetic oligonucleotide
  Target: LAMA2; (+) strand; PAM type: NRG; PAM sequence: AAG
tcttcgtactgggaatatat

SEQ ID NO: 167962 - DNA, 20 bp, Artificial Sequence
  Description of Artificial Sequence: Synthetic oligonucleotide
  Target: LAMA2; (+) strand; PAM type: NRG; PAM sequence: CGG
gaatatataagtgaacaaaa

SEQ ID NO: 167963 - DNA, 20 bp, Artificial Sequence
  Description of Artificial Sequence: Synthetic oligonucleotide
  Target: LAMA2; (+) strand; PAM type: NRG; PAM sequence: TAG
acaaaacggcctgtgtttcc

SEQ ID NO: 167964 - DNA, 20 bp, Artificial Sequence
  Description of Artificial Sequence: Synthetic oligonucleotide
  Target: LAMA2; (+) strand; PAM type: NRG; PAM sequence: TGG
gcctgtgtttcctagccttc

SEQ ID NO: 167965 - DNA, 20 bp, Artificial Sequence
  Description of Artificial Sequence: Synthetic oligonucleotide
  Target: LAMA2; (+) strand; PAM type: NRG; PAM sequence: GAG
ctgtgtttcctagccttctg

SEQ ID NO: 167966 - DNA, 20 bp, Artificial Sequence
  Description of Artificial Sequence: Synthetic oligonucleotide
  Target: LAMA2; (+) strand; PAM type: NRG; PAM sequence: AAG
ctggagcttgtattttttat

SEQ ID NO: 167967 - DNA, 20 bp, Artificial Sequence
  Description of Artificial Sequence: Synthetic oligonucleotide
  Target: LAMA2; (+) strand; PAM type: NRG; PAM sequence: GAG
ggagcttgtattttttataa

SEQ ID NO: 167968 - DNA, 20 bp, Artificial Sequence
  Description of Artificial Sequence: Synthetic oligonucleotide
  Target: LAMA2; (+) strand; PAM type: NRG; PAM sequence: GAG
agcttgtattttttataaga

SEQ ID NO: 167969 - DNA, 20 bp, Artificial Sequence
  Description of Artificial Sequence: Synthetic oligonucleotide
  Target: LAMA2; (+) strand; PAM type: NRG; PAM sequence: AAG
tgtattttttataagagagt

SEQ ID NO: 167970 - DNA, 20 bp, Artificial Sequence
  Description of Artificial Sequence: Synthetic oligonucleotide
  Target: LAMA2; (+) strand; PAM type: NRG; PAM sequence: AAG
ttttataagagagtaagata

SEQ ID NO: 167971 - DNA, 20 bp, Artificial Sequence
  Description of Artificial Sequence: Synthetic oligonucleotide
  Target: LAMA2; (+) strand; PAM type: NRG; PAM sequence: TAG
aagagagtaagataaagaaa

SEQ ID NO: 167972 - DNA, 20 bp, Artificial Sequence
  Description of Artificial Sequence: Synthetic oligonucleotide
  Target: LAMA2; (+) strand; PAM type: NRG; PAM sequence: CAG
atagatatataatgtaatat

SEQ ID NO: 167973 - DNA, 20 bp, Artificial Sequence
  Description of Artificial Sequence: Synthetic oligonucleotide
  Target: LAMA2; (+) strand; PAM type: NRG; PAM sequence: AGG
tagatatataatgtaatatc

SEQ ID NO: 167974 - DNA, 20 bp, Artificial Sequence
  Description of Artificial Sequence: Synthetic oligonucleotide
  Target: LAMA2; (+) strand; PAM type: NRG; PAM sequence: AAG
atgtaatatcaggtaatgac

SEQ ID NO: 167975 - DNA, 20 bp, Artificial Sequence
  Description of Artificial Sequence: Synthetic oligonucleotide
  Target: LAMA2; (+) strand; PAM type: NRG; PAM sequence: CAG
caggtaatgacaagtactac

SEQ ID NO: 167976 - DNA, 20 bp, Artificial Sequence
  Description of Artificial Sequence: Synthetic oligonucleotide
  Target: LAMA2; (+) strand; PAM type: NRG; PAM sequence: AGG
aggtaatgacaagtactacc

SEQ ID NO: 167977 - DNA, 20 bp, Artificial Sequence
  Description of Artificial Sequence: Synthetic oligonucleotide
  Target: LAMA2; (+) strand; PAM type: NRG; PAM sequence: GAG
gtaatgacaagtactaccag

SEQ ID NO: 167978 - DNA, 20 bp, Artificial Sequence
  Description of Artificial Sequence: Synthetic oligonucleotide
  Target: LAMA2; (+) strand; PAM type: NRG; PAM sequence: AAG
aagtactaccaggagaaata

SEQ ID NO: 167979 - DNA, 20 bp, Artificial Sequence
  Description of Artificial Sequence: Synthetic oligonucleotide
  Target: LAMA2; (+) strand; PAM type: NRG; PAM sequence: AGG
agtactaccaggagaaataa

SEQ ID NO: 167980 - DNA, 20 bp, Artificial Sequence
  Description of Artificial Sequence: Synthetic oligonucleotide
  Target: LAMA2; (+) strand; PAM type: NRG; PAM sequence: GAG
tactaccaggagaaataaag

SEQ ID NO: 167981 - DNA, 20 bp, Artificial Sequence
  Description of Artificial Sequence: Synthetic oligonucleotide
  Target: LAMA2; (+) strand; PAM type: NRG; PAM sequence: AAG
aggagaaataaaggagactc

SEQ ID NO: 167982 - DNA, 20 bp, Artificial Sequence
  Description of Artificial Sequence: Synthetic oligonucleotide
  Target: LAMA2; (+) strand; PAM type: NRG; PAM sequence: AGG
ggagaaataaaggagactca

SEQ ID NO: 167983 - DNA, 20 bp, Artificial Sequence
  Description of Artificial Sequence: Synthetic oligonucleotide
  Target: LAMA2; (+) strand; PAM type: NRG; PAM sequence: TAG
taaaggagactcaaggaact

SEQ ID NO: 167984 - DNA, 20 bp, Artificial Sequence
  Description of Artificial Sequence: Synthetic oligonucleotide
  Target: LAMA2; (+) strand; PAM type: NRG; PAM sequence: GAG
aaggagactcaaggaactta

SEQ ID NO: 167985 - DNA, 20 bp, Artificial Sequence
  Description of Artificial Sequence: Synthetic oligonucleotide
  Target: LAMA2; (+) strand; PAM type: NRG; PAM sequence: AAG
tcaaggaacttagagtgatg

SEQ ID NO: 167986 - DNA, 20 bp, Artificial Sequence
  Description of Artificial Sequence: Synthetic oligonucleotide
  Target: LAMA2; (+) strand; PAM type: NRG; PAM sequence: AGG
caaggaacttagagtgatga

SEQ ID NO: 167987 - DNA, 20 bp, Artificial Sequence
  Description of Artificial Sequence: Synthetic oligonucleotide
  Target: LAMA2; (+) strand; PAM type: NRG; PAM sequence: TAG
gagtgatgaaggtatgattt

SEQ ID NO: 167988 - DNA, 20 bp, Artificial Sequence
  Description of Artificial Sequence: Synthetic oligonucleotide
  Target: LAMA2; (+) strand; PAM type: NRG; PAM sequence: GAG
atgaaggtatgattttagat

SEQ ID NO: 167989 - DNA, 20 bp, Artificial Sequence
  Description of Artificial Sequence: Synthetic oligonucleotide
  Target: LAMA2; (+) strand; PAM type: NRG; PAM sequence: AGG
tgaaggtatgattttagatg

SEQ ID NO: 167990 - DNA, 20 bp, Artificial Sequence
  Description of Artificial Sequence: Synthetic oligonucleotide
  Target: LAMA2; (+) strand; PAM type: NRG; PAM sequence: TGG
aggtatgattttagatgagg

SEQ ID NO: 167991 - DNA, 20 bp, Artificial Sequence
  Description of Artificial Sequence: Synthetic oligonucleotide
  Target: LAMA2; (+) strand; PAM type: NRG; PAM sequence: CAG
tggtccatgatcttcacaaa

SEQ ID NO: 167992 - DNA, 20 bp, Artificial Sequence
  Description of Artificial Sequence: Synthetic oligonucleotide
  Target: LAMA2; (+) strand; PAM type: NRG; PAM sequence: GAG
catgatcttcacaaacagat

SEQ ID NO: 167993 - DNA, 20 bp, Artificial Sequence
  Description of Artificial Sequence: Synthetic oligonucleotide
  Target: LAMA2; (+) strand; PAM type: NRG; PAM sequence: CAG
acaaacagatgagacttgtg

SEQ ID NO: 167994 - DNA, 20 bp, Artificial Sequence
  Description of Artificial Sequence: Synthetic oligonucleotide
  Target: LAMA2; (+) strand; PAM type: NRG; PAM sequence: TGG
gacttgtgcagaaatgtgaa

SEQ ID NO: 167995 - DNA, 20 bp, Artificial Sequence
  Description of Artificial Sequence: Synthetic oligonucleotide
  Target: LAMA2; (+) strand; PAM type: NRG; PAM sequence: GAG
tgcagaaatgtgaatggtgt

SEQ ID NO: 167996 - DNA, 20 bp, Artificial Sequence
  Description of Artificial Sequence: Synthetic oligonucleotide
  Target: LAMA2; (+) strand; PAM type: NRG; PAM sequence: CAG
gtgagccatgtgaatacctg

SEQ ID NO: 167997 - DNA, 20 bp, Artificial Sequence
  Description of Artificial Sequence: Synthetic oligonucleotide
  Target: LAMA2; (+) strand; PAM type: NRG; PAM sequence: AGG
tgagccatgtgaatacctgc

SEQ ID NO: 167998 - DNA, 20 bp, Artificial Sequence
  Description of Artificial Sequence: Synthetic oligonucleotide
  Target: LAMA2; (+) strand; PAM type: NRG; PAM sequence: AAG
gccatgtgaatacctgcagg

SEQ ID NO: 167999 - DNA, 20 bp, Artificial Sequence
  Description of Artificial Sequence: Synthetic oligonucleotide
  Target: LAMA2; (+) strand; PAM type: NRG; PAM sequence: CAG
gtgaatacctgcaggaagaa

SEQ ID NO: 168000 - DNA, 20 bp, Artificial Sequence
  Description of Artificial Sequence: Synthetic oligonucleotide
  Target: LAMA2; (+) strand; PAM type: NRG; PAM sequence: CAG
tgcaggaagaacagtcccct

SEQ ID NO: 168001 - DNA, 20 bp, Artificial Sequence
  Description of Artificial Sequence: Synthetic oligonucleotide
  Target: LAMA2; (+) strand; PAM type: NRG; PAM sequence: GAG
caggaagaacagtcccctca

SEQ ID NO: 168002 - DNA, 20 bp, Artificial Sequence
  Description of Artificial Sequence: Synthetic oligonucleotide
  Target: LAMA2; (+) strand; PAM type: NRG; PAM sequence: AAG
aacagtcccctcagagaaaa

SEQ ID NO: 168003 - DNA, 20 bp, Artificial Sequence
  Description of Artificial Sequence: Synthetic oligonucleotide
  Target: LAMA2; (+) strand; PAM type: NRG; PAM sequence: TGG
agagaaaaaagtcactgcac

SEQ ID NO: 168004 - DNA, 20 bp, Artificial Sequence
  Description of Artificial Sequence: Synthetic oligonucleotide
  Target: LAMA2; (+) strand; PAM type: NRG; PAM sequence: GAG
aaagtcactgcactggccct

SEQ ID NO: 168005 - DNA, 20 bp, Artificial Sequence
  Description of Artificial Sequence: Synthetic oligonucleotide
  Target: LAMA2; (+) strand; PAM type: NRG; PAM sequence: CAG
tcactgcactggccctgaga

SEQ ID NO: 168006 - DNA, 20 bp, Artificial Sequence
  Description of Artificial Sequence: Synthetic oligonucleotide
  Target: LAMA2; (+) strand; PAM type: NRG; PAM sequence: TGG
ccctgagacagacccatgct

SEQ ID NO: 168007 - DNA, 20 bp, Artificial Sequence
  Description of Artificial Sequence: Synthetic oligonucleotide
  Target: LAMA2; (+) strand; PAM type: NRG; PAM sequence: CAG
tgagacagacccatgcttgg

SEQ ID NO: 168008 - DNA, 20 bp, Artificial Sequence
  Description of Artificial Sequence: Synthetic oligonucleotide
  Target: LAMA2; (+) strand; PAM type: NRG; PAM sequence: CAG
gacccatgcttggcagataa

SEQ ID NO: 168009 - DNA, 20 bp, Artificial Sequence
  Description of Artificial Sequence: Synthetic oligonucleotide
  Target: LAMA2; (+) strand; PAM type: NRG; PAM sequence: AGG
acccatgcttggcagataac

SEQ ID NO: 168010 - DNA, 20 bp, Artificial Sequence
  Description of Artificial Sequence: Synthetic oligonucleotide
  Target: LAMA2; (+) strand; PAM type: NRG; PAM sequence: GAG
ccatgcttggcagataacag

SEQ ID NO: 168011 - DNA, 20 bp, Artificial Sequence
  Description of Artificial Sequence: Synthetic oligonucleotide
  Target: LAMA2; (+) strand; PAM type: NRG; PAM sequence: AGG
catgcttggcagataacagg

SEQ ID NO: 168012 - DNA, 20 bp, Artificial Sequence
  Description of Artificial Sequence: Synthetic oligonucleotide
  Target: LAMA2; (+) strand; PAM type: NRG; PAM sequence: CAG
cttggcagataacaggaggc

SEQ ID NO: 168013 - DNA, 20 bp, Artificial Sequence
  Description of Artificial Sequence: Synthetic oligonucleotide
  Target: LAMA2; (+) strand; PAM type: NRG; PAM sequence: AGG
ttggcagataacaggaggcc

SEQ ID NO: 168014 - DNA, 20 bp, Artificial Sequence
  Description of Artificial Sequence: Synthetic oligonucleotide
  Target: LAMA2; (+) strand; PAM type: NRG; PAM sequence: GGG
tggcagataacaggaggcca

SEQ ID NO: 168015 - DNA, 20 bp, Artificial Sequence
  Description of Artificial Sequence: Synthetic oligonucleotide
  Target: LAMA2; (+) strand; PAM type: NRG; PAM sequence: TGG
cagataacaggaggccaggg

SEQ ID NO: 168016 - DNA, 20 bp, Artificial Sequence
  Description of Artificial Sequence: Synthetic oligonucleotide
  Target: LAMA2; (+) strand; PAM type: NRG; PAM sequence: TGG
taacaggaggccagggtggt

SEQ ID NO: 168017 - DNA, 20 bp, Artificial Sequence
  Description of Artificial Sequence: Synthetic oligonucleotide
  Target: LAMA2; (+) strand; PAM type: NRG; PAM sequence: CAG
ggaggccagggtggttggaa

SEQ ID NO: 168018 - DNA, 20 bp, Artificial Sequence
  Description of Artificial Sequence: Synthetic oligonucleotide
  Target: LAMA2; (+) strand; PAM type: NRG; PAM sequence: GAG
aggccagggtggttggaaca

SEQ ID NO: 168019 - DNA, 20 bp, Artificial Sequence
  Description of Artificial Sequence: Synthetic oligonucleotide
  Target: LAMA2; (+) strand; PAM type: NRG; PAM sequence: GAG
gtggttggaacagagtgaat

SEQ ID NO: 168020 - DNA, 20 bp, Artificial Sequence
  Description of Artificial Sequence: Synthetic oligonucleotide
  Target: LAMA2; (+) strand; PAM type: NRG; PAM sequence: AAG
gttggaacagagtgaatgag

SEQ ID NO: 168021 - DNA, 20 bp, Artificial Sequence
  Description of Artificial Sequence: Synthetic oligonucleotide
  Target: LAMA2; (+) strand; PAM type: NRG; PAM sequence: GAG
tggaacagagtgaatgagaa

SEQ ID NO: 168022 - DNA, 20 bp, Artificial Sequence
  Description of Artificial Sequence: Synthetic oligonucleotide
  Target: LAMA2; (+) strand; PAM type: NRG; PAM sequence: AGG
ggaacagagtgaatgagaag

SEQ ID NO: 168023 - DNA, 20 bp, Artificial Sequence
  Description of Artificial Sequence: Synthetic oligonucleotide
  Target: LAMA2; (+) strand; PAM type: NRG; PAM sequence: GGG
gaacagagtgaatgagaaga

SEQ ID NO: 168024 - DNA, 20 bp, Artificial Sequence
  Description of Artificial Sequence: Synthetic oligonucleotide
  Target: LAMA2; (+) strand; PAM type: NRG; PAM sequence: GGG
aacagagtgaatgagaagag

SEQ ID NO: 168025 - DNA, 20 bp, Artificial Sequence
  Description of Artificial Sequence: Synthetic oligonucleotide
  Target: LAMA2; (+) strand; PAM type: NRG; PAM sequence: GGG
acagagtgaatgagaagagg

SEQ ID NO: 168026 - DNA, 20 bp, Artificial Sequence
  Description of Artificial Sequence: Synthetic oligonucleotide
  Target: LAMA2; (+) strand; PAM type: NRG; PAM sequence: TAG
agtgaatgagaagagggggc

SEQ ID NO: 168027 - DNA, 20 bp, Artificial Sequence
  Description of Artificial Sequence: Synthetic oligonucleotide
  Target: LAMA2; (+) strand; PAM type: NRG; PAM sequence: AGG
gtgaatgagaagagggggct

SEQ ID NO: 168028 - DNA, 20 bp, Artificial Sequence
  Description of Artificial Sequence: Synthetic oligonucleotide
  Target: LAMA2; (+) strand; PAM type: NRG; PAM sequence: GAG
gaatgagaagagggggctag

SEQ ID NO: 168029 - DNA, 20 bp, Artificial Sequence
  Description of Artificial Sequence: Synthetic oligonucleotide
  Target: LAMA2; (+) strand; PAM type: NRG; PAM sequence: AAG
gaagagggggctaggagatg

SEQ ID NO: 168030 - DNA, 20 bp, Artificial Sequence
  Description of Artificial Sequence: Synthetic oligonucleotide
  Target: LAMA2; (+) strand; PAM type: NRG; PAM sequence: CAG
agggggctaggagatgaagt

SEQ ID NO: 168031 - DNA, 20 bp, Artificial Sequence
  Description of Artificial Sequence: Synthetic oligonucleotide
  Target: LAMA2; (+) strand; PAM type: NRG; PAM sequence: AAG
gctaggagatgaagtcagca

SEQ ID NO: 168032 - DNA, 20 bp, Artificial Sequence
  Description of Artificial Sequence: Synthetic oligonucleotide
  Target: LAMA2; (+) strand; PAM type: NRG; PAM sequence: GAG
aatgaatatctaactctcct

SEQ ID NO: 168033 - DNA, 20 bp, Artificial Sequence
  Description of Artificial Sequence: Synthetic oligonucleotide
  Target: LAMA2; (+) strand; PAM type: NRG; PAM sequence: AGG
atgaatatctaactctcctg

SEQ ID NO: 168034 - DNA, 20 bp, Artificial Sequence
  Description of Artificial Sequence: Synthetic oligonucleotide
  Target: LAMA2; (+) strand; PAM type: NRG; PAM sequence: GGG
tgaatatctaactctcctga

SEQ ID NO: 168035 - DNA, 20 bp, Artificial Sequence
  Description of Artificial Sequence: Synthetic oligonucleotide
  Target: LAMA2; (+) strand; PAM type: NRG; PAM sequence: CAG
cctgagggctaaaaatcttc

SEQ ID NO: 168036 - DNA, 20 bp, Artificial Sequence
  Description of Artificial Sequence: Synthetic oligonucleotide
  Target: LAMA2; (+) strand; PAM type: NRG; PAM sequence: TGG
gagggctaaaaatcttccag

SEQ ID NO: 168037 - DNA, 20 bp, Artificial Sequence
  Description of Artificial Sequence: Synthetic oligonucleotide
  Target: LAMA2; (+) strand; PAM type: NRG; PAM sequence: AAG
gctaaaaatcttccagtggc

SEQ ID NO: 168038 - DNA, 20 bp, Artificial Sequence
  Description of Artificial Sequence: Synthetic oligonucleotide
  Target: LAMA2; (+) strand; PAM type: NRG; PAM sequence: GAG
taaaaatcttccagtggcaa

SEQ ID NO: 168039 - DNA, 20 bp, Artificial Sequence
  Description of Artificial Sequence: Synthetic oligonucleotide
  Target: LAMA2; (+) strand; PAM type: NRG; PAM sequence: AGG
aaaaatcttccagtggcaag

SEQ ID NO: 168040 - DNA, 20 bp, Artificial Sequence
  Description of Artificial Sequence: Synthetic oligonucleotide
  Target: LAMA2; (+) strand; PAM type: NRG; PAM sequence: TGG
aatcttccagtggcaagagg

SEQ ID NO: 168041 - DNA, 20 bp, Artificial Sequence
  Description of Artificial Sequence: Synthetic oligonucleotide
  Target: LAMA2; (+) strand; PAM type: NRG; PAM sequence: TGG
tccagtggcaagaggtggct

SEQ ID NO: 168042 - DNA, 20 bp, Artificial Sequence
  Description of Artificial Sequence: Synthetic oligonucleotide
  Target: LAMA2; (+) strand; PAM type: NRG; PAM sequence: CAG
tggcaagaggtggcttggta

SEQ ID NO: 168043 - DNA, 20 bp, Artificial Sequence
  Description of Artificial Sequence: Synthetic oligonucleotide
  Target: LAMA2; (+) strand; PAM type: NRG; PAM sequence: AGG
ggcaagaggtggcttggtac

SEQ ID NO: 168044 - DNA, 20 bp, Artificial Sequence
  Description of Artificial Sequence: Synthetic oligonucleotide
  Target: LAMA2; (+) strand; PAM type: NRG; PAM sequence: CAG
tggcttggtacaggataatc

SEQ ID NO: 168045 - DNA, 20 bp, Artificial Sequence
  Description of Artificial Sequence: Synthetic oligonucleotide
  Target: LAMA2; (+) strand; PAM type: NRG; PAM sequence: TGG
cttggtacaggataatccag

SEQ ID NO: 168046 - DNA, 20 bp, Artificial Sequence
  Description of Artificial Sequence: Synthetic oligonucleotide
  Target: LAMA2; (+) strand; PAM type: NRG; PAM sequence: TGG
taatccagtggtgttattga

SEQ ID NO: 168047 - DNA, 20 bp, Artificial Sequence
  Description of Artificial Sequence: Synthetic oligonucleotide
  Target: LAMA2; (+) strand; PAM type: NRG; PAM sequence: AAG
tccagtggtgttattgatgg

SEQ ID NO: 168048 - DNA, 20 bp, Artificial Sequence
  Description of Artificial Sequence: Synthetic oligonucleotide
  Target: LAMA2; (+) strand; PAM type: NRG; PAM sequence: CAG
ggtgttattgatggaagcac

SEQ ID NO: 168049 - DNA, 20 bp, Artificial Sequence
  Description of Artificial Sequence: Synthetic oligonucleotide
  Target: LAMA2; (+) strand; PAM type: NRG; PAM sequence: CAG
gttattgatggaagcaccag

SEQ ID NO: 168050 - DNA, 20 bp, Artificial Sequence
  Description of Artificial Sequence: Synthetic oligonucleotide
  Target: LAMA2; (+) strand; PAM type: NRG; PAM sequence: CAG
ggaagcaccagcagcatttg

SEQ ID NO: 168051 - DNA, 20 bp, Artificial Sequence
  Description of Artificial Sequence: Synthetic oligonucleotide
  Target: LAMA2; (+) strand; PAM type: NRG; PAM sequence: TAG
gcaccagcagcatttgcaga

SEQ ID NO: 168052 - DNA, 20 bp, Artificial Sequence
  Description of Artificial Sequence: Synthetic oligonucleotide
  Target: LAMA2; (+) strand; PAM type: NRG; PAM sequence: AGG
caccagcagcatttgcagat

SEQ ID NO: 168053 - DNA, 20 bp, Artificial Sequence
  Description of Artificial Sequence: Synthetic oligonucleotide
  Target: LAMA2; (+) strand; PAM type: NRG; PAM sequence: GAG
ccagcagcatttgcagatag

SEQ ID NO: 168054 - DNA, 20 bp, Artificial Sequence
  Description of Artificial Sequence: Synthetic oligonucleotide
  Target: LAMA2; (+) strand; PAM type: NRG; PAM sequence: AAG
agcatttgcagataggagat

SEQ ID NO: 168055 - DNA, 20 bp, Artificial Sequence
  Description of Artificial Sequence: Synthetic oligonucleotide
  Target: LAMA2; (+) strand; PAM type: NRG; PAM sequence: TGG
atttgcagataggagataag

SEQ ID NO: 168056 - DNA, 20 bp, Artificial Sequence
  Description of Artificial Sequence: Synthetic oligonucleotide
  Target: LAMA2; (+) strand; PAM type: NRG; PAM sequence: GAG
ttgcagataggagataagtg

SEQ ID NO: 168057 - DNA, 20 bp, Artificial Sequence
  Description of Artificial Sequence: Synthetic oligonucleotide
  Target: LAMA2; (+) strand; PAM type: NRG; PAM sequence: GAG
ataggagataagtggagtgt

SEQ ID NO: 168058 - DNA, 20 bp, Artificial Sequence
  Description of Artificial Sequence: Synthetic oligonucleotide
  Target: LAMA2; (+) strand; PAM type: NRG; PAM sequence: GAG
aggagataagtggagtgtga

SEQ ID NO: 168059 - DNA, 20 bp, Artificial Sequence
  Description of Artificial Sequence: Synthetic oligonucleotide
  Target: LAMA2; (+) strand; PAM type: NRG; PAM sequence: GAG
gagataagtggagtgtgaga

SEQ ID NO: 168060 - DNA, 20 bp, Artificial Sequence
  Description of Artificial Sequence: Synthetic oligonucleotide
  Target: LAMA2; (+) strand; PAM type: NRG; PAM sequence: AGG
agataagtggagtgtgagag

SEQ ID NO: 168061 - DNA, 20 bp, Artificial Sequence
  Description of Artificial Sequence: Synthetic oligonucleotide
  Target: LAMA2; (+) strand; PAM type: NRG; PAM sequence: GAG
ataagtggagtgtgagagag

SEQ ID NO: 168062 - DNA, 20 bp, Artificial Sequence
  Description of Artificial Sequence: Synthetic oligonucleotide
  Target: LAMA2; (+) strand; PAM type: NRG; PAM sequence: CGG
ggagtgtgagagaggagaca

SEQ ID NO: 168063 - DNA, 20 bp, Artificial Sequence
  Description of Artificial Sequence: Synthetic oligonucleotide
  Target: LAMA2; (+) strand; PAM type: NRG; PAM sequence: TGG
aggagacacggttgacacca

SEQ ID NO: 168064 - DNA, 20 bp, Artificial Sequence
  Description of Artificial Sequence: Synthetic oligonucleotide
  Target: LAMA2; (+) strand; PAM type: NRG; PAM sequence: TGG
acggttgacaccatggtttt

SEQ ID NO: 168065 - DNA, 20 bp, Artificial Sequence
  Description of Artificial Sequence: Synthetic oligonucleotide
  Target: LAMA2; (+) strand; PAM type: NRG; PAM sequence: CAG
gttgacaccatggtttttgg

SEQ ID NO: 168066 - DNA, 20 bp, Artificial Sequence
  Description of Artificial Sequence: Synthetic oligonucleotide
  Target: LAMA2; (+) strand; PAM type: NRG; PAM sequence: GAG
tgacaccatggtttttggca

SEQ ID NO: 168067 - DNA, 20 bp, Artificial Sequence
  Description of Artificial Sequence: Synthetic oligonucleotide
  Target: LAMA2; (+) strand; PAM type: NRG; PAM sequence: TGG
atggtttttggcagagcaaa

SEQ ID NO: 168068 - DNA, 20 bp, Artificial Sequence
  Description of Artificial Sequence: Synthetic oligonucleotide
  Target: LAMA2; (+) strand; PAM type: NRG; PAM sequence: TGG
tggcagagcaaatggaaaca

SEQ ID NO: 168069 - DNA, 20 bp, Artificial Sequence
  Description of Artificial Sequence: Synthetic oligonucleotide
  Target: LAMA2; (+) strand; PAM type: NRG; PAM sequence: GAG
gcagagcaaatggaaacatg

SEQ ID NO: 168070 - DNA, 20 bp, Artificial Sequence
  Description of Artificial Sequence: Synthetic oligonucleotide
  Target: LAMA2; (+) strand; PAM type: NRG; PAM sequence: TGG
gagcaaatggaaacatggag

SEQ ID NO: 168071 - DNA, 20 bp, Artificial Sequence
  Description of Artificial Sequence: Synthetic oligonucleotide
  Target: LAMA2; (+) strand; PAM type: NRG; PAM sequence: TGG
aacatggagtggctgttgac

SEQ ID NO: 168072 - DNA, 20 bp, Artificial Sequence
  Description of Artificial Sequence: Synthetic oligonucleotide
  Target: LAMA2; (+) strand; PAM type: NRG; PAM sequence: GGG
acatggagtggctgttgact

SEQ ID NO: 168073 - DNA, 20 bp, Artificial Sequence
  Description of Artificial Sequence: Synthetic oligonucleotide
  Target: LAMA2; (+) strand; PAM type: NRG; PAM sequence: TGG
ggagtggctgttgactggga

SEQ ID NO: 168074 - DNA, 20 bp, Artificial Sequence
  Description of Artificial Sequence: Synthetic oligonucleotide
  Target: LAMA2; (+) strand; PAM type: NRG; PAM sequence: GGG
gagtggctgttgactgggat

SEQ ID NO: 168075 - DNA, 20 bp, Artificial Sequence
  Description of Artificial Sequence: Synthetic oligonucleotide
  Target: LAMA2; (+) strand; PAM type: NRG; PAM sequence: GGG
agtggctgttgactgggatg

SEQ ID NO: 168076 - DNA, 20 bp, Artificial Sequence
  Description of Artificial Sequence: Synthetic oligonucleotide
  Target: LAMA2; (+) strand; PAM type: NRG; PAM sequence: TAG
ttgactgggatggggaaaat

SEQ ID NO: 168077 - DNA, 20 bp, Artificial Sequence
  Description of Artificial Sequence: Synthetic oligonucleotide
  Target: LAMA2; (+) strand; PAM type: NRG; PAM sequence: AGG
tgactgggatggggaaaatt

SEQ ID NO: 168078 - DNA, 20 bp, Artificial Sequence
  Description of Artificial Sequence: Synthetic oligonucleotide
  Target: LAMA2; (+) strand; PAM type: NRG; PAM sequence: GGG
gactgggatggggaaaatta

SEQ ID NO: 168079 - DNA, 20 bp, Artificial Sequence
  Description of Artificial Sequence: Synthetic oligonucleotide
  Target: LAMA2; (+) strand; PAM type: NRG; PAM sequence: AAG
gggatggggaaaattaggga

SEQ ID NO: 168080 - DNA, 20 bp, Artificial Sequence
  Description of Artificial Sequence: Synthetic oligonucleotide
  Target: LAMA2; (+) strand; PAM type: NRG; PAM sequence: AGG
ggatggggaaaattagggaa

SEQ ID NO: 168081 - DNA, 20 bp, Artificial Sequence
  Description of Artificial Sequence: Synthetic oligonucleotide
  Target: LAMA2; (+) strand; PAM type: NRG; PAM sequence: TGG
gggaaaattagggaaaggtc

SEQ ID NO: 168082 - DNA, 20 bp, Artificial Sequence
  Description of Artificial Sequence: Synthetic oligonucleotide
  Target: LAMA2; (+) strand; PAM type: NRG; PAM sequence: TGG
ggaaaggtctggtgtatttt

SEQ ID NO: 168083 - DNA, 20 bp, Artificial Sequence
  Description of Artificial Sequence: Synthetic oligonucleotide
  Target: LAMA2; (+) strand; PAM type: NRG; PAM sequence: GAG
aaaggtctggtgtatttttg

SEQ ID NO: 168084 - DNA, 20 bp, Artificial Sequence
  Description of Artificial Sequence: Synthetic oligonucleotide
  Target: LAMA2; (+) strand; PAM type: NRG; PAM sequence: AGG
aaggtctggtgtatttttgg

SEQ ID NO: 168085 - DNA, 20 bp, Artificial Sequence
  Description of Artificial Sequence: Synthetic oligonucleotide
  Target: LAMA2; (+) strand; PAM type: NRG; PAM sequence: GGG
aggtctggtgtatttttgga

SEQ ID NO: 168086 - DNA, 20 bp, Artificial Sequence
  Description of Artificial Sequence: Synthetic oligonucleotide
  Target: LAMA2; (+) strand; PAM type: NRG; PAM sequence: GGG
ggtctggtgtatttttggag

SEQ ID NO: 168087 - DNA, 20 bp, Artificial Sequence
  Description of Artificial Sequence: Synthetic oligonucleotide
  Target: LAMA2; (+) strand; PAM type: NRG; PAM sequence: GGG
gtctggtgtatttttggagg

SEQ ID NO: 168088 - DNA, 20 bp, Artificial Sequence
  Description of Artificial Sequence: Synthetic oligonucleotide
  Target: LAMA2; (+) strand; PAM type: NRG; PAM sequence: GAG
ctggtgtatttttggagggg

SEQ ID NO: 168089 - DNA, 20 bp, Artificial Sequence
  Description of Artificial Sequence: Synthetic oligonucleotide
  Target: LAMA2; (+) strand; PAM type: NRG; PAM sequence: TAG
gagggggagaaacttacttt

SEQ ID NO: 168090 - DNA, 20 bp, Artificial Sequence
  Description of Artificial Sequence: Synthetic oligonucleotide
  Target: LAMA2; (+) strand; PAM type: NRG; PAM sequence: AAG
aacttacttttagatctgcg

SEQ ID NO: 168091 - DNA, 20 bp, Artificial Sequence
  Description of Artificial Sequence: Synthetic oligonucleotide
  Target: LAMA2; (+) strand; PAM type: NRG; PAM sequence: AGG
acttacttttagatctgcga

SEQ ID NO: 168092 - DNA, 20 bp, Artificial Sequence
  Description of Artificial Sequence: Synthetic oligonucleotide
  Target: LAMA2; (+) strand; PAM type: NRG; PAM sequence: TAG
tacttttagatctgcgaagg

SEQ ID NO: 168093 - DNA, 20 bp, Artificial Sequence
  Description of Artificial Sequence: Synthetic oligonucleotide
  Target: LAMA2; (+) strand; PAM type: NRG; PAM sequence: AGG
acttttagatctgcgaaggt

SEQ ID NO: 168094 - DNA, 20 bp, Artificial Sequence
  Description of Artificial Sequence: Synthetic oligonucleotide
  Target: LAMA2; (+) strand; PAM type: NRG; PAM sequence: TAG
ggcacaatatttaaatccct

SEQ ID NO: 168095 - DNA, 20 bp, Artificial Sequence
  Description of Artificial Sequence: Synthetic oligonucleotide
  Target: LAMA2; (+) strand; PAM type: NRG; PAM sequence: AGG
gcacaatatttaaatccctt

SEQ ID NO: 168096 - DNA, 20 bp, Artificial Sequence
  Description of Artificial Sequence: Synthetic oligonucleotide
  Target: LAMA2; (+) strand; PAM type: NRG; PAM sequence: AAG
tatttaaatcccttaggact

SEQ ID NO: 168097 - DNA, 20 bp, Artificial Sequence
  Description of Artificial Sequence: Synthetic oligonucleotide
  Target: LAMA2; (+) strand; PAM type: NRG; PAM sequence: GAG
taaatcccttaggactaagt

SEQ ID NO: 168098 - DNA, 20 bp, Artificial Sequence
  Description of Artificial Sequence: Synthetic oligonucleotide
  Target: LAMA2; (+) strand; PAM type: NRG; PAM sequence: CAG
taggactaagtgagatcatt

SEQ ID NO: 168099 - DNA, 20 bp, Artificial Sequence
  Description of Artificial Sequence: Synthetic oligonucleotide
  Target: LAMA2; (+) strand; PAM type: NRG; PAM sequence: GAG
ggactaagtgagatcattca

SEQ ID NO: 168100 - DNA, 20 bp, Artificial Sequence
  Description of Artificial Sequence: Synthetic oligonucleotide
  Target: LAMA2; (+) strand; PAM type: NRG; PAM sequence: AGG
gactaagtgagatcattcag

SEQ ID NO: 168101 - DNA, 20 bp, Artificial Sequence
  Description of Artificial Sequence: Synthetic oligonucleotide
  Target: LAMA2; (+) strand; PAM type: NRG; PAM sequence: GAG
ctaagtgagatcattcagag

SEQ ID NO: 168102 - DNA, 20 bp, Artificial Sequence
  Description of Artificial Sequence: Synthetic oligonucleotide
  Target: LAMA2; (+) strand; PAM type: NRG; PAM sequence: GAG
aagtgagatcattcagagga

SEQ ID NO: 168103 - DNA, 20 bp, Artificial Sequence
  Description of Artificial Sequence: Synthetic oligonucleotide
  Target: LAMA2; (+) strand; PAM type: NRG; PAM sequence: GAG
gtgagatcattcagaggaga

SEQ ID NO: 168104 - DNA, 20 bp, Artificial Sequence
  Description of Artificial Sequence: Synthetic oligonucleotide
  Target: LAMA2; (+) strand; PAM type: NRG; PAM sequence: AGG
tgagatcattcagaggagag

SEQ ID NO: 168105 - DNA, 20 bp, Artificial Sequence
  Description of Artificial Sequence: Synthetic oligonucleotide
  Target: LAMA2; (+) strand; PAM type: NRG; PAM sequence: GAG
agatcattcagaggagagag

SEQ ID NO: 168106 - DNA, 20 bp, Artificial Sequence
  Description of Artificial Sequence: Synthetic oligonucleotide
  Target: LAMA2; (+) strand; PAM type: NRG; PAM sequence: AAG
tcattcagaggagagaggag

SEQ ID NO: 168107 - DNA, 20 bp, Artificial Sequence
  Description of Artificial Sequence: Synthetic oligonucleotide
  Target: LAMA2; (+) strand; PAM type: NRG; PAM sequence: AGG
cattcagaggagagaggaga

SEQ ID NO: 168108 - DNA, 20 bp, Artificial Sequence
  Description of Artificial Sequence: Synthetic oligonucleotide
  Target: LAMA2; (+) strand; PAM type: NRG; PAM sequence: GGG
attcagaggagagaggagaa

SEQ ID NO: 168109 - DNA, 20 bp, Artificial Sequence
  Description of Artificial Sequence: Synthetic oligonucleotide
  Target: LAMA2; (+) strand; PAM type: NRG; PAM sequence: CAG
gaggagagaggagaagggaa

SEQ ID NO: 168110 - DNA, 20 bp, Artificial Sequence
  Description of Artificial Sequence: Synthetic oligonucleotide
  Target: LAMA2; (+) strand; PAM type: NRG; PAM sequence: CAG
gaggagaagggaacagaaat

SEQ ID NO: 168111 - DNA, 20 bp, Artificial Sequence
  Description of Artificial Sequence: Synthetic oligonucleotide
  Target: LAMA2; (+) strand; PAM type: NRG; PAM sequence: AAG
aatcagaaaactgaattgtg

SEQ ID NO: 168112 - DNA, 20 bp, Artificial Sequence
  Description of Artificial Sequence: Synthetic oligonucleotide
  Target: LAMA2; (+) strand; PAM type: NRG; PAM sequence: AAG
actgaattgtgaagcacgtt

SEQ ID NO: 168113 - DNA, 20 bp, Artificial Sequence
  Description of Artificial Sequence: Synthetic oligonucleotide
  Target: LAMA2; (+) strand; PAM type: NRG; PAM sequence: GAG
tgaattgtgaagcacgttaa

SEQ ID NO: 168114 - DNA, 20 bp, Artificial Sequence
  Description of Artificial Sequence: Synthetic oligonucleotide
  Target: LAMA2; (+) strand; PAM type: NRG; PAM sequence: AAG
gtgaagcacgttaagagatc

SEQ ID NO: 168115 - DNA, 20 bp, Artificial Sequence
  Description of Artificial Sequence: Synthetic oligonucleotide
  Target: LAMA2; (+) strand; PAM type: NRG; PAM sequence: AGG
tgaagcacgttaagagatca

SEQ ID NO: 168116 - DNA, 20 bp, Artificial Sequence
  Description of Artificial Sequence: Synthetic oligonucleotide
  Target: LAMA2; (+) strand; PAM type: NRG; PAM sequence: TAG
aagagatcaaggacatgcca

SEQ ID NO: 168117 - DNA, 20 bp, Artificial Sequence
  Description of Artificial Sequence: Synthetic oligonucleotide
  Target: LAMA2; (+) strand; PAM type: NRG; PAM sequence: AAG
gacatgccatagatccaaca

SEQ ID NO: 168118 - DNA, 20 bp, Artificial Sequence
  Description of Artificial Sequence: Synthetic oligonucleotide
  Target: LAMA2; (+) strand; PAM type: NRG; PAM sequence: AGG
acatgccatagatccaacaa

SEQ ID NO: 168119 - DNA, 20 bp, Artificial Sequence
  Description of Artificial Sequence: Synthetic oligonucleotide
  Target: LAMA2; (+) strand; PAM type: NRG; PAM sequence: AAG
atccaacaaaggaaactgaa

SEQ ID NO: 168120 - DNA, 20 bp, Artificial Sequence
  Description of Artificial Sequence: Synthetic oligonucleotide
  Target: LAMA2; (+) strand; PAM type: NRG; PAM sequence: AGG
tccaacaaaggaaactgaaa

SEQ ID NO: 168121 - DNA, 20 bp, Artificial Sequence
  Description of Artificial Sequence: Synthetic oligonucleotide
  Target: LAMA2; (+) strand; PAM type: NRG; PAM sequence: TGG
aaaaggaacaaccaatgaac

SEQ ID NO: 168122 - DNA, 20 bp, Artificial Sequence
  Description of Artificial Sequence: Synthetic oligonucleotide
  Target: LAMA2; (+) strand; PAM type: NRG; PAM sequence: GGG
aaaggaacaaccaatgaact

SEQ ID NO: 168123 - DNA, 20 bp, Artificial Sequence
  Description of Artificial Sequence: Synthetic oligonucleotide
  Target: LAMA2; (+) strand; PAM type: NRG; PAM sequence: CAG
caatgaactgggataaaaac

SEQ ID NO: 168124 - DNA, 20 bp, Artificial Sequence
  Description of Artificial Sequence: Synthetic oligonucleotide
  Target: LAMA2; (+) strand; PAM type: NRG; PAM sequence: AAG
tgaactgggataaaaaccag

SEQ ID NO: 168125 - DNA, 20 bp, Artificial Sequence
  Description of Artificial Sequence: Synthetic oligonucleotide
  Target: LAMA2; (+) strand; PAM type: NRG; PAM sequence: AGG
gaactgggataaaaaccaga

SEQ ID NO: 168126 - DNA, 20 bp, Artificial Sequence
  Description of Artificial Sequence: Synthetic oligonucleotide
  Target: LAMA2; (+) strand; PAM type: NRG; PAM sequence: TGG
ggataaaaaccagaaggaaa

SEQ ID NO: 168127 - DNA, 20 bp, Artificial Sequence
  Description of Artificial Sequence: Synthetic oligonucleotide
  Target: LAMA2; (+) strand; PAM type: NRG; PAM sequence: CAG
aaccagaaggaaatggtttc

SEQ ID NO: 168128 - DNA, 20 bp, Artificial Sequence
  Description of Artificial Sequence: Synthetic oligonucleotide
  Target: LAMA2; (+) strand; PAM type: NRG; PAM sequence: AGG
accagaaggaaatggtttcc

SEQ ID NO: 168129 - DNA, 20 bp, Artificial Sequence
  Description of Artificial Sequence: Synthetic oligonucleotide
  Target: LAMA2; (+) strand; PAM type: NRG; PAM sequence: AAG
agaaggaaatggtttccagg

SEQ ID NO: 168130 - DNA, 20 bp, Artificial Sequence
  Description of Artificial Sequence: Synthetic oligonucleotide
  Target: LAMA2; (+) strand; PAM type: NRG; PAM sequence: CAG
aggaagcccatttatctctg

SEQ ID NO: 168131 - DNA, 20 bp, Artificial Sequence
  Description of Artificial Sequence: Synthetic oligonucleotide
  Target: LAMA2; (+) strand; PAM type: NRG; PAM sequence: TAG
atttatctctgcagtgtcca

SEQ ID NO: 168132 - DNA, 20 bp, Artificial Sequence
  Description of Artificial Sequence: Synthetic oligonucleotide
  Target: LAMA2; (+) strand; PAM type: NRG; PAM sequence: AGG
tttatctctgcagtgtccat

SEQ ID NO: 168133 - DNA, 20 bp, Artificial Sequence
  Description of Artificial Sequence: Synthetic oligonucleotide
  Target: LAMA2; (+) strand; PAM type: NRG; PAM sequence: GAG
tatctctgcagtgtccatag

SEQ ID NO: 168134 - DNA, 20 bp, Artificial Sequence
  Description of Artificial Sequence: Synthetic oligonucleotide
  Target: LAMA2; (+) strand; PAM type: NRG; PAM sequence: CAG
agtgtccataggagatgaca

SEQ ID NO: 168135 - DNA, 20 bp, Artificial Sequence
  Description of Artificial Sequence: Synthetic oligonucleotide
  Target: LAMA2; (+) strand; PAM type: NRG; PAM sequence: GAG
tgtccataggagatgacaca

SEQ ID NO: 168136 - DNA, 20 bp, Artificial Sequence
  Description of Artificial Sequence: Synthetic oligonucleotide
  Target: LAMA2; (+) strand; PAM type: NRG; PAM sequence: GAG
tccataggagatgacacaga

SEQ ID NO: 168137 - DNA, 20 bp, Artificial Sequence
  Description of Artificial Sequence: Synthetic oligonucleotide
  Target: LAMA2; (+) strand; PAM type: NRG; PAM sequence: AAG
taggagatgacacagagagc

SEQ ID NO: 168138 - DNA, 20 bp, Artificial Sequence
  Description of Artificial Sequence: Synthetic oligonucleotide
  Target: LAMA2; (+) strand; PAM type: NRG; PAM sequence: GAG
taaattttaaaaattctgtt

SEQ ID NO: 168139 - DNA, 20 bp, Artificial Sequence
  Description of Artificial Sequence: Synthetic oligonucleotide
  Target: LAMA2; (+) strand; PAM type: NRG; PAM sequence: AGG
aaattttaaaaattctgttg

SEQ ID NO: 168140 - DNA, 20 bp, Artificial Sequence
  Description of Artificial Sequence: Synthetic oligonucleotide
  Target: LAMA2; (+) strand; PAM type: NRG; PAM sequence: GGG
aattttaaaaattctgttga

SEQ ID NO: 168141 - DNA, 20 bp, Artificial Sequence
  Description of Artificial Sequence: Synthetic oligonucleotide
  Target: LAMA2; (+) strand; PAM type: NRG; PAM sequence: GGG
attttaaaaattctgttgag

SEQ ID NO: 168142 - DNA, 20 bp, Artificial Sequence
  Description of Artificial Sequence: Synthetic oligonucleotide
  Target: LAMA2; (+) strand; PAM type: NRG; PAM sequence: GAG
tttaaaaattctgttgaggg

SEQ ID NO: 168143 - DNA, 20 bp, Artificial Sequence
  Description of Artificial Sequence: Synthetic oligonucleotide
  Target: LAMA2; (+) strand; PAM type: NRG; PAM sequence: TGG
aaattctgttgaggggagtt

SEQ ID NO: 168144 - DNA, 20 bp, Artificial Sequence
  Description of Artificial Sequence: Synthetic oligonucleotide
  Target: LAMA2; (+) strand; PAM type: NRG; PAM sequence: TAG
tgttgaggggagtttggaat

SEQ ID NO: 168145 - DNA, 20 bp, Artificial Sequence
  Description of Artificial Sequence: Synthetic oligonucleotide
  Target: LAMA2; (+) strand; PAM type: NRG; PAM sequence: CAG
tgaggggagtttggaattag

SEQ ID NO: 168146 - DNA, 20 bp, Artificial Sequence
  Description of Artificial Sequence: Synthetic oligonucleotide
  Target: LAMA2; (+) strand; PAM type: NRG; PAM sequence: TAG
gagtttggaattagcagcca

SEQ ID NO: 168147 - DNA, 20 bp, Artificial Sequence
  Description of Artificial Sequence: Synthetic oligonucleotide
  Target: LAMA2; (+) strand; PAM type: NRG; PAM sequence: AGG
agtttggaattagcagccat

SEQ ID NO: 168148 - DNA, 20 bp, Artificial Sequence
  Description of Artificial Sequence: Synthetic oligonucleotide
  Target: LAMA2; (+) strand; PAM type: NRG; PAM sequence: GGG
gtttggaattagcagccata

SEQ ID NO: 168149 - DNA, 20 bp, Artificial Sequence
  Description of Artificial Sequence: Synthetic oligonucleotide
  Target: LAMA2; (+) strand; PAM type: NRG; PAM sequence: AAG
gcagccatagggaaatgtaa

SEQ ID NO: 168150 - DNA, 20 bp, Artificial Sequence
  Description of Artificial Sequence: Synthetic oligonucleotide
  Target: LAMA2; (+) strand; PAM type: NRG; PAM sequence: TGG
ccatagggaaatgtaaaaga

SEQ ID NO: 168151 - DNA, 20 bp, Artificial Sequence
  Description of Artificial Sequence: Synthetic oligonucleotide
  Target: LAMA2; (+) strand; PAM type: NRG; PAM sequence: GAG
atgtaaaagatggtcaccat

SEQ ID NO: 168152 - DNA, 20 bp, Artificial Sequence
  Description of Artificial Sequence: Synthetic oligonucleotide
  Target: LAMA2; (+) strand; PAM type: NRG; PAM sequence: AAG
aaagatggtcaccatgagaa

SEQ ID NO: 168153 - DNA, 20 bp, Artificial Sequence
  Description of Artificial Sequence: Synthetic oligonucleotide
  Target: LAMA2; (+) strand; PAM type: NRG; PAM sequence: AAG
ggtcaccatgagaaaagcac

SEQ ID NO: 168154 - DNA, 20 bp, Artificial Sequence
  Description of Artificial Sequence: Synthetic oligonucleotide
  Target: LAMA2; (+) strand; PAM type: NRG; PAM sequence: AGG
gtcaccatgagaaaagcaca

SEQ ID NO: 168155 - DNA, 20 bp, Artificial Sequence
  Description of Artificial Sequence: Synthetic oligonucleotide
  Target: LAMA2; (+) strand; PAM type: NRG; PAM sequence: GAG
agaaaagcacaaggatttct

SEQ ID NO: 168156 - DNA, 20 bp, Artificial Sequence
  Description of Artificial Sequence: Synthetic oligonucleotide
  Target: LAMA2; (+) strand; PAM type: NRG; PAM sequence: TAG
aaagcacaaggatttctgag

SEQ ID NO: 168157 - DNA, 20 bp, Artificial Sequence
  Description of Artificial Sequence: Synthetic oligonucleotide
  Target: LAMA2; (+) strand; PAM type: NRG; PAM sequence: CAG
aggatttctgagtagccctg

SEQ ID NO: 168158 - DNA, 20 bp, Artificial Sequence
  Description of Artificial Sequence: Synthetic oligonucleotide
  Target: LAMA2; (+) strand; PAM type: NRG; PAM sequence: GAG
ctgcagacaaaatgataatt

SEQ ID NO: 168159 - DNA, 20 bp, Artificial Sequence
  Description of Artificial Sequence: Synthetic oligonucleotide
  Target: LAMA2; (+) strand; PAM type: NRG; PAM sequence: GAG
gcagacaaaatgataattga

SEQ ID NO: 168160 - DNA, 20 bp, Artificial Sequence
  Description of Artificial Sequence: Synthetic oligonucleotide
  Target: LAMA2; (+) strand; PAM type: NRG; PAM sequence: AAG
gacaaaatgataattgagag

SEQ ID NO: 168161 - DNA, 20 bp, Artificial Sequence
  Description of Artificial Sequence: Synthetic oligonucleotide
  Target: LAMA2; (+) strand; PAM type: NRG; PAM sequence: TAG
aatgataattgagagaagat

SEQ ID NO: 168162 - DNA, 20 bp, Artificial Sequence
  Description of Artificial Sequence: Synthetic oligonucleotide
  Target: LAMA2; (+) strand; PAM type: NRG; PAM sequence: AGG
atgataattgagagaagatt

SEQ ID NO: 168163 - DNA, 20 bp, Artificial Sequence
  Description of Artificial Sequence: Synthetic oligonucleotide
  Target: LAMA2; (+) strand; PAM type: NRG; PAM sequence: GGG
tgataattgagagaagatta

SEQ ID NO: 168164 - DNA, 20 bp, Artificial Sequence
  Description of Artificial Sequence: Synthetic oligonucleotide
  Target: LAMA2; (+) strand; PAM type: NRG; PAM sequence: GAG
ataattgagagaagattagg

SEQ ID NO: 168165 - DNA, 20 bp, Artificial Sequence
  Description of Artificial Sequence: Synthetic oligonucleotide
  Target: LAMA2; (+) strand; PAM type: NRG; PAM sequence: CAG
gaagattagggagttgtgaa

SEQ ID NO: 168166 - DNA, 20 bp, Artificial Sequence
  Description of Artificial Sequence: Synthetic oligonucleotide
  Target: LAMA2; (+) strand; PAM type: NRG; PAM sequence: AAG
attagggagttgtgaacaga

SEQ ID NO: 168167 - DNA, 20 bp, Artificial Sequence
  Description of Artificial Sequence: Synthetic oligonucleotide
  Target: LAMA2; (+) strand; PAM type: NRG; PAM sequence: AAG
tgaacagaaagaataaactc

SEQ ID NO: 168168 - DNA, 20 bp, Artificial Sequence
  Description of Artificial Sequence: Synthetic oligonucleotide
  Target: LAMA2; (+) strand; PAM type: NRG; PAM sequence: AAG
aaagaataaactcaagcttc

SEQ ID NO: 168169 - DNA, 20 bp, Artificial Sequence
  Description of Artificial Sequence: Synthetic oligonucleotide
  Target: LAMA2; (+) strand; PAM type: NRG; PAM sequence: GAG
aataaactcaagcttcaagt

SEQ ID NO: 168170 - DNA, 20 bp, Artificial Sequence
  Description of Artificial Sequence: Synthetic oligonucleotide
  Target: LAMA2; (+) strand; PAM type: NRG; PAM sequence: TGG
aactcaagcttcaagtgaga

SEQ ID NO: 168171 - DNA, 20 bp, Artificial Sequence
  Description of Artificial Sequence: Synthetic oligonucleotide
  Target: LAMA2; (+) strand; PAM type: NRG; PAM sequence: CAG
gatggaatccctactccctc

SEQ ID NO: 168172 - DNA, 20 bp, Artificial Sequence
  Description of Artificial Sequence: Synthetic oligonucleotide
  Target: LAMA2; (+) strand; PAM type: NRG; PAM sequence: AAG
ggaatccctactccctccag

SEQ ID NO: 168173 - DNA, 20 bp, Artificial Sequence
  Description of Artificial Sequence: Synthetic oligonucleotide
  Target: LAMA2; (+) strand; PAM type: NRG; PAM sequence: AAG
gaagaccttttatgtgatat

SEQ ID NO: 168174 - DNA, 20 bp, Artificial Sequence
  Description of Artificial Sequence: Synthetic oligonucleotide
  Target: LAMA2; (+) strand; PAM type: NRG; PAM sequence: AGG
aagaccttttatgtgatata

SEQ ID NO: 168175 - DNA, 20 bp, Artificial Sequence
  Description of Artificial Sequence: Synthetic oligonucleotide
  Target: LAMA2; (+) strand; PAM type: NRG; PAM sequence: CAG
ttttatgtgatataaggaaa

SEQ ID NO: 168176 - DNA, 20 bp, Artificial Sequence
  Description of Artificial Sequence: Synthetic oligonucleotide
  Target: LAMA2; (+) strand; PAM type: NRG; PAM sequence: AAG
aaaaattgtatcaactattc

SEQ ID NO: 168177 - DNA, 20 bp, Artificial Sequence
  Description of Artificial Sequence: Synthetic oligonucleotide
  Target: LAMA2; (+) strand; PAM type: NRG; PAM sequence: CAG
agaattactacattcctata

SEQ ID NO: 168178 - DNA, 20 bp, Artificial Sequence
  Description of Artificial Sequence: Synthetic oligonucleotide
  Target: LAMA2; (+) strand; PAM type: NRG; PAM sequence: TGG
gaaatgtaatttaatcatac

SEQ ID NO: 168179 - DNA, 20 bp, Artificial Sequence
  Description of Artificial Sequence: Synthetic oligonucleotide
  Target: LAMA2; (+) strand; PAM type: NRG; PAM sequence: TAG
atttaatcatactggctctt

SEQ ID NO: 168180 - DNA, 20 bp, Artificial Sequence
  Description of Artificial Sequence: Synthetic oligonucleotide
  Target: LAMA2; (+) strand; PAM type: NRG; PAM sequence: GAG
ttaatcatactggctcttta

SEQ ID NO: 168181 - DNA, 20 bp, Artificial Sequence
  Description of Artificial Sequence: Synthetic oligonucleotide
  Target: LAMA2; (+) strand; PAM type: NRG; PAM sequence: TAG
aatgtctaaaatctgtttct

SEQ ID NO: 168182 - DNA, 20 bp, Artificial Sequence
  Description of Artificial Sequence: Synthetic oligonucleotide
  Target: LAMA2; (+) strand; PAM type: NRG; PAM sequence: GAG
tgtctaaaatctgtttctta

SEQ ID NO: 168183 - DNA, 20 bp, Artificial Sequence
  Description of Artificial Sequence: Synthetic oligonucleotide
  Target: LAMA2; (+) strand; PAM type: NRG; PAM sequence: AAG
cttagagcccatatatgtat

SEQ ID NO: 168184 - DNA, 20 bp, Artificial Sequence
  Description of Artificial Sequence: Synthetic oligonucleotide
  Target: LAMA2; (+) strand; PAM type: NRG; PAM sequence: GAG
tagagcccatatatgtataa

SEQ ID NO: 168185 - DNA, 20 bp, Artificial Sequence
  Description of Artificial Sequence: Synthetic oligonucleotide
  Target: LAMA2; (+) strand; PAM type: NRG; PAM sequence: GAG
gcgtatgcgtgcatgtgcgt

SEQ ID NO: 168186 - DNA, 20 bp, Artificial Sequence
  Description of Artificial Sequence: Synthetic oligonucleotide
  Target: LAMA2; (+) strand; PAM type: NRG; PAM sequence: CAG
tgtgcgtgagtgtgcatgca

SEQ ID NO: 168187 - DNA, 20 bp, Artificial Sequence
  Description of Artificial Sequence: Synthetic oligonucleotide
  Target: LAMA2; (+) strand; PAM type: NRG; PAM sequence: CAG
tgagtgtgcatgcacagatg

SEQ ID NO: 168188 - DNA, 20 bp, Artificial Sequence
  Description of Artificial Sequence: Synthetic oligonucleotide
  Target: LAMA2; (+) strand; PAM type: NRG; PAM sequence: CAG
tgtgcatgcacagatgcagt

SEQ ID NO: 168189 - DNA, 20 bp, Artificial Sequence
  Description of Artificial Sequence: Synthetic oligonucleotide
  Target: LAMA2; (+) strand; PAM type: NRG; PAM sequence: CAG
tgcacagatgcagtcagtat

SEQ ID NO: 168190 - DNA, 20 bp, Artificial Sequence
  Description of Artificial Sequence: Synthetic oligonucleotide
  Target: LAMA2; (+) strand; PAM type: NRG; PAM sequence: AGG
gcacagatgcagtcagtatc

SEQ ID NO: 168191 - DNA, 20 bp, Artificial Sequence
  Description of Artificial Sequence: Synthetic oligonucleotide
  Target: LAMA2; (+) strand; PAM type: NRG; PAM sequence: GAG
gtatcaggctttaaatgaat

SEQ ID NO: 168192 - DNA, 20 bp, Artificial Sequence
  Description of Artificial Sequence: Synthetic oligonucleotide
  Target: LAMA2; (+) strand; PAM type: NRG; PAM sequence: TGG
aaatgaatgagctaaaaatt

SEQ ID NO: 168193 - DNA, 20 bp, Artificial Sequence
  Description of Artificial Sequence: Synthetic oligonucleotide
  Target: LAMA2; (+) strand; PAM type: NRG; PAM sequence: CAG
tgaatgagctaaaaatttgg

SEQ ID NO: 168194 - DNA, 20 bp, Artificial Sequence
  Description of Artificial Sequence: Synthetic oligonucleotide
  Target: LAMA2; (+) strand; PAM type: NRG; PAM sequence: GAG
aatgagctaaaaatttggca

SEQ ID NO: 168195 - DNA, 20 bp, Artificial Sequence
  Description of Artificial Sequence: Synthetic oligonucleotide
  Target: LAMA2; (+) strand; PAM type: NRG; PAM sequence: CAG
aaaaatttggcagagtgtgt

SEQ ID NO: 168196 - DNA, 20 bp, Artificial Sequence
  Description of Artificial Sequence: Synthetic oligonucleotide
  Target: LAMA2; (+) strand; PAM type: NRG; PAM sequence: AAG
tggcagagtgtgtcagttat

SEQ ID NO: 168197 - DNA, 20 bp, Artificial Sequence
  Description of Artificial Sequence: Synthetic oligonucleotide
  Target: LAMA2; (+) strand; PAM type: NRG; PAM sequence: AAG
ttataagtttattttttgtg

SEQ ID NO: 168198 - DNA, 20 bp, Artificial Sequence
  Description of Artificial Sequence: Synthetic oligonucleotide
  Target: LAMA2; (+) strand; PAM type: NRG; PAM sequence: AGG
tataagtttattttttgtga

SEQ ID NO: 168199 - DNA, 20 bp, Artificial Sequence
  Description of Artificial Sequence: Synthetic oligonucleotide
  Target: LAMA2; (+) strand; PAM type: NRG; PAM sequence: TGG
gaaggcaaaaataaatttgt

SEQ ID NO: 168200 - DNA, 20 bp, Artificial Sequence
  Description of Artificial Sequence: Synthetic oligonucleotide
  Target: LAMA2; (+) strand; PAM type: NRG; PAM sequence: GAG
ttgttggataatgcgtttgt

SEQ ID NO: 168201 - DNA, 20 bp, Artificial Sequence
  Description of Artificial Sequence: Synthetic oligonucleotide
  Target: LAMA2; (+) strand; PAM type: NRG; PAM sequence: TAG
ttggataatgcgtttgtgag

SEQ ID NO: 168202 - DNA, 20 bp, Artificial Sequence
  Description of Artificial Sequence: Synthetic oligonucleotide
  Target: LAMA2; (+) strand; PAM type: NRG; PAM sequence: TAG
gataatgcgtttgtgagtag

SEQ ID NO: 168203 - DNA, 20 bp, Artificial Sequence
  Description of Artificial Sequence: Synthetic oligonucleotide
  Target: LAMA2; (+) strand; PAM type: NRG; PAM sequence: AAG
tttgttcacatattttgcaa

SEQ ID NO: 168204 - DNA, 20 bp, Artificial Sequence
  Description of Artificial Sequence: Synthetic oligonucleotide
  Target: LAMA2; (+) strand; PAM type: NRG; PAM sequence: TAG
ttcacatattttgcaaaagt

SEQ ID NO: 168205 - DNA, 20 bp, Artificial Sequence
  Description of Artificial Sequence: Synthetic oligonucleotide
  Target: LAMA2; (+) strand; PAM type: NRG; PAM sequence: GAG
cacatattttgcaaaagtta

SEQ ID NO: 168206 - DNA, 20 bp, Artificial Sequence
  Description of Artificial Sequence: Synthetic oligonucleotide
  Target: LAMA2; (+) strand; PAM type: NRG; PAM sequence: TAG
gtactattgatgtaacgcat

SEQ ID NO: 168207 - DNA, 20 bp, Artificial Sequence
  Description of Artificial Sequence: Synthetic oligonucleotide
  Target: LAMA2; (+) strand; PAM type: NRG; PAM sequence: AAG
ctattgatgtaacgcattag

SEQ ID NO: 168208 - DNA, 20 bp, Artificial Sequence
  Description of Artificial Sequence: Synthetic oligonucleotide
  Target: LAMA2; (+) strand; PAM type: NRG; PAM sequence: CAG
tgatgtaacgcattagaaga

SEQ ID NO: 168209 - DNA, 20 bp, Artificial Sequence
  Description of Artificial Sequence: Synthetic oligonucleotide
  Target: LAMA2; (+) strand; PAM type: NRG; PAM sequence: TAG
cattagaagacagttaacat

SEQ ID NO: 168210 - DNA, 20 bp, Artificial Sequence
  Description of Artificial Sequence: Synthetic oligonucleotide
  Target: LAMA2; (+) strand; PAM type: NRG; PAM sequence: AGG
attagaagacagttaacatt

SEQ ID NO: 168211 - DNA, 20 bp, Artificial Sequence
  Description of Artificial Sequence: Synthetic oligonucleotide
  Target: LAMA2; (+) strand; PAM type: NRG; PAM sequence: TGG
cagttaacattaggtcctaa

SEQ ID NO: 168212 - DNA, 20 bp, Artificial Sequence
  Description of Artificial Sequence: Synthetic oligonucleotide
  Target: LAMA2; (+) strand; PAM type: NRG; PAM sequence: AAG
tcctaatggcacctgaccaa

SEQ ID NO: 168213 - DNA, 20 bp, Artificial Sequence
  Description of Artificial Sequence: Synthetic oligonucleotide
  Target: LAMA2; (+) strand; PAM type: NRG; PAM sequence: AGG
cctaatggcacctgaccaaa

SEQ ID NO: 168214 - DNA, 20 bp, Artificial Sequence
  Description of Artificial Sequence: Synthetic oligonucleotide
  Target: LAMA2; (+) strand; PAM type: NRG; PAM sequence: GAG
taatggcacctgaccaaaag

SEQ ID NO: 168215 - DNA, 20 bp, Artificial Sequence
  Description of Artificial Sequence: Synthetic oligonucleotide
  Target: LAMA2; (+) strand; PAM type: NRG; PAM sequence: TGG
cacctgaccaaaaggagctg

SEQ ID NO: 168216 - DNA, 20 bp, Artificial Sequence
  Description of Artificial Sequence: Synthetic oligonucleotide
  Target: LAMA2; (+) strand; PAM type: NRG; PAM sequence: GGG
acctgaccaaaaggagctgt

SEQ ID NO: 168217 - DNA, 20 bp, Artificial Sequence
  Description of Artificial Sequence: Synthetic oligonucleotide
  Target: LAMA2; (+) strand; PAM type: NRG; PAM sequence: TGG
accaaaaggagctgtgggcc

SEQ ID NO: 168218 - DNA, 20 bp, Artificial Sequence
  Description of Artificial Sequence: Synthetic oligonucleotide
  Target: LAMA2; (+) strand; PAM type: NRG; PAM sequence: CAG
tacaccttattgcctgtttt

SEQ ID NO: 168219 - DNA, 20 bp, Artificial Sequence
  Description of Artificial Sequence: Synthetic oligonucleotide
  Target: LAMA2; (+) strand; PAM type: NRG; PAM sequence: TAG
gttttcagcatcaactgatt

SEQ ID NO: 168220 - DNA, 20 bp, Artificial Sequence
  Description of Artificial Sequence: Synthetic oligonucleotide
  Target: LAMA2; (+) strand; PAM type: NRG; PAM sequence: AAG
cagcatcaactgatttagtg

SEQ ID NO: 168221 - DNA, 20 bp, Artificial Sequence
  Description of Artificial Sequence: Synthetic oligonucleotide
  Target: LAMA2; (+) strand; PAM type: NRG; PAM sequence: CAG
catcaactgatttagtgaag

SEQ ID NO: 168222 - DNA, 20 bp, Artificial Sequence
  Description of Artificial Sequence: Synthetic oligonucleotide
  Target: LAMA2; (+) strand; PAM type: NRG; PAM sequence: AAG
tgatttagtgaagcagcaaa

SEQ ID NO: 168223 - DNA, 20 bp, Artificial Sequence
  Description of Artificial Sequence: Synthetic oligonucleotide
  Target: LAMA2; (+) strand; PAM type: NRG; PAM sequence: TGG
tgaagcagcaaaaagaaaaa

SEQ ID NO: 168224 - DNA, 20 bp, Artificial Sequence
  Description of Artificial Sequence: Synthetic oligonucleotide
  Target: LAMA2; (+) strand; PAM type: NRG; PAM sequence: CAG
aaaaagaaaaatggtgtgtg

SEQ ID NO: 168225 - DNA, 20 bp, Artificial Sequence
  Description of Artificial Sequence: Synthetic oligonucleotide
  Target: LAMA2; (+) strand; PAM type: NRG; PAM sequence: CAG
gcagcattatctttctgcca

SEQ ID NO: 168226 - DNA, 20 bp, Artificial Sequence
  Description of Artificial Sequence: Synthetic oligonucleotide
  Target: LAMA2; (+) strand; PAM type: NRG; PAM sequence: AAG
gatacatgtttttaatttcc

SEQ ID NO: 168227 - DNA, 20 bp, Artificial Sequence
  Description of Artificial Sequence: Synthetic oligonucleotide
  Target: LAMA2; (+) strand; PAM type: NRG; PAM sequence: CAG
caagtttccaatgcatcatt

SEQ ID NO: 168228 - DNA, 20 bp, Artificial Sequence
  Description of Artificial Sequence: Synthetic oligonucleotide
  Target: LAMA2; (+) strand; PAM type: NRG; PAM sequence: CGG
catcattcagttttatctaa

SEQ ID NO: 168229 - DNA, 20 bp, Artificial Sequence
  Description of Artificial Sequence: Synthetic oligonucleotide
  Target: LAMA2; (+) strand; PAM type: NRG; PAM sequence: GGG
atcattcagttttatctaac

SEQ ID NO: 168230 - DNA, 20 bp, Artificial Sequence
  Description of Artificial Sequence: Synthetic oligonucleotide
  Target: LAMA2; (+) strand; PAM type: NRG; PAM sequence: CAG
agttttatctaacgggaatg

SEQ ID NO: 168231 - DNA, 20 bp, Artificial Sequence
  Description of Artificial Sequence: Synthetic oligonucleotide
  Target: LAMA2; (+) strand; PAM type: NRG; PAM sequence: GAG
tatctaacgggaatgcagct

SEQ ID NO: 168232 - DNA, 20 bp, Artificial Sequence
  Description of Artificial Sequence: Synthetic oligonucleotide
  Target: LAMA2; (+) strand; PAM type: NRG; PAM sequence: GAG
tctaacgggaatgcagctga

SEQ ID NO: 168233 - DNA, 20 bp, Artificial Sequence
  Description of Artificial Sequence: Synthetic oligonucleotide
  Target: LAMA2; (+) strand; PAM type: NRG; PAM sequence: AAG
aacgggaatgcagctgagag

SEQ ID NO: 168234 - DNA, 20 bp, Artificial Sequence
  Description of Artificial Sequence: Synthetic oligonucleotide
  Target: LAMA2; (+) strand; PAM type: NRG; PAM sequence: TAG
cccaaaactacatgctaata

SEQ ID NO: 168235 - DNA, 20 bp, Artificial Sequence
  Description of Artificial Sequence: Synthetic oligonucleotide
  Target: LAMA2; (+) strand; PAM type: NRG; PAM sequence: TAG
aactacatgctaatatagtt

SEQ ID NO: 168236 - DNA, 20 bp, Artificial Sequence
  Description of Artificial Sequence: Synthetic oligonucleotide
  Target: LAMA2; (+) strand; PAM type: NRG; PAM sequence: AAG
gctaatatagtttagttttc

SEQ ID NO: 168237 - DNA, 20 bp, Artificial Sequence
  Description of Artificial Sequence: Synthetic oligonucleotide
  Target: LAMA2; (+) strand; PAM type: NRG; PAM sequence: TGG
agtttagttttcaagtcttg

SEQ ID NO: 168238 - DNA, 20 bp, Artificial Sequence
  Description of Artificial Sequence: Synthetic oligonucleotide
  Target: LAMA2; (+) strand; PAM type: NRG; PAM sequence: GAG
tttagttttcaagtcttgtg

SEQ ID NO: 168239 - DNA, 20 bp, Artificial Sequence
  Description of Artificial Sequence: Synthetic oligonucleotide
  Target: LAMA2; (+) strand; PAM type: NRG; PAM sequence: TGG
tggagtctttttttttttaa

SEQ ID NO: 168240 - DNA, 20 bp, Artificial Sequence
  Description of Artificial Sequence: Synthetic oligonucleotide
  Target: LAMA2; (+) strand; PAM type: NRG; PAM sequence: AAG
ctttttttttttaatggaat

SEQ ID NO: 168241 - DNA, 20 bp, Artificial Sequence
  Description of Artificial Sequence: Synthetic oligonucleotide
  Target: LAMA2; (+) strand; PAM type: NRG; PAM sequence: CAG
ttttaatggaataagatcat

SEQ ID NO: 168242 - DNA, 20 bp, Artificial Sequence
  Description of Artificial Sequence: Synthetic oligonucleotide
  Target: LAMA2; (+) strand; PAM type: NRG; PAM sequence: CAG
gaataagatcatcagaaatc

SEQ ID NO: 168243 - DNA, 20 bp, Artificial Sequence
  Description of Artificial Sequence: Synthetic oligonucleotide
  Target: LAMA2; (+) strand; PAM type: NRG; PAM sequence: AGG
aataagatcatcagaaatcc

SEQ ID NO: 168244 - DNA, 20 bp, Artificial Sequence
  Description of Artificial Sequence: Synthetic oligonucleotide
  Target: LAMA2; (+) strand; PAM type: NRG; PAM sequence: GAG
taagatcatcagaaatccag

SEQ ID NO: 168245 - DNA, 20 bp, Artificial Sequence
  Description of Artificial Sequence: Synthetic oligonucleotide
  Target: LAMA2; (+) strand; PAM type: NRG; PAM sequence: AAG
atcatcagaaatccaggagc

SEQ ID NO: 168246 - DNA, 20 bp, Artificial Sequence
  Description of Artificial Sequence: Synthetic oligonucleotide
  Target: LAMA2; (+) strand; PAM type: NRG; PAM sequence: CAG
tcagaaatccaggagcaaga

SEQ ID NO: 168247 - DNA, 20 bp, Artificial Sequence
  Description of Artificial Sequence: Synthetic oligonucleotide
  Target: LAMA2; (+) strand; PAM type: NRG; PAM sequence: TGG
aatccaggagcaagacagac

SEQ ID NO: 168248 - DNA, 20 bp, Artificial Sequence
  Description of Artificial Sequence: Synthetic oligonucleotide
  Target: LAMA2; (+) strand; PAM type: NRG; PAM sequence: TGG
ggagcaagacagactggctg

SEQ ID NO: 168249 - DNA, 20 bp, Artificial Sequence
  Description of Artificial Sequence: Synthetic oligonucleotide
  Target: LAMA2; (+) strand; PAM type: NRG; PAM sequence: CAG
acagactggctgtggtctac

SEQ ID NO: 168250 - DNA, 20 bp, Artificial Sequence
  Description of Artificial Sequence: Synthetic oligonucleotide
  Target: LAMA2; (+) strand; PAM type: NRG; PAM sequence: TAG
gctgtggtctaccagcattg

SEQ ID NO: 168251 - DNA, 20 bp, Artificial Sequence
  Description of Artificial Sequence: Synthetic oligonucleotide
  Target: LAMA2; (+) strand; PAM type: NRG; PAM sequence: TGG
cagcattgtagtaaaaacat

SEQ ID NO: 168252 - DNA, 20 bp, Artificial Sequence
  Description of Artificial Sequence: Synthetic oligonucleotide
  Target: LAMA2; (+) strand; PAM type: NRG; PAM sequence: GGG
agcattgtagtaaaaacatt

SEQ ID NO: 168253 - DNA, 20 bp, Artificial Sequence
  Description of Artificial Sequence: Synthetic oligonucleotide
  Target: LAMA2; (+) strand; PAM type: NRG; PAM sequence: GGG
gcattgtagtaaaaacattg

SEQ ID NO: 168254 - DNA, 20 bp, Artificial Sequence
  Description of Artificial Sequence: Synthetic oligonucleotide
  Target: LAMA2; (+) strand; PAM type: NRG; PAM sequence: AAG
ttgtagtaaaaacattgggg

SEQ ID NO: 168255 - DNA, 20 bp, Artificial Sequence
  Description of Artificial Sequence: Synthetic oligonucleotide
  Target: LAMA2; (+) strand; PAM type: NRG; PAM sequence: AAG
aaacattggggaagttttat

SEQ ID NO: 168256 - DNA, 20 bp, Artificial Sequence
  Description of Artificial Sequence: Synthetic oligonucleotide
  Target: LAMA2; (+) strand; PAM type: NRG; PAM sequence: TAG
gttttataagacctaattat

SEQ ID NO: 168257 - DNA, 20 bp, Artificial Sequence
  Description of Artificial Sequence: Synthetic oligonucleotide
  Target: LAMA2; (+) strand; PAM type: NRG; PAM sequence: TAG
tattagaaaataccataaaa

SEQ ID NO: 168258 - DNA, 20 bp, Artificial Sequence
  Description of Artificial Sequence: Synthetic oligonucleotide
  Target: LAMA2; (+) strand; PAM type: NRG; PAM sequence: TAG
ccataaaatagtcattttca

SEQ ID NO: 168259 - DNA, 20 bp, Artificial Sequence
  Description of Artificial Sequence: Synthetic oligonucleotide
  Target: LAMA2; (+) strand; PAM type: NRG; PAM sequence: AAG
aatagtcattttcatagaaa

SEQ ID NO: 168260 - DNA, 20 bp, Artificial Sequence
  Description of Artificial Sequence: Synthetic oligonucleotide
  Target: LAMA2; (+) strand; PAM type: NRG; PAM sequence: AAG
aatcacattactttgtgttc

SEQ ID NO: 168261 - DNA, 20 bp, Artificial Sequence
  Description of Artificial Sequence: Synthetic oligonucleotide
  Target: LAMA2; (+) strand; PAM type: NRG; PAM sequence: AGG
atcacattactttgtgttca

SEQ ID NO: 168262 - DNA, 20 bp, Artificial Sequence
  Description of Artificial Sequence: Synthetic oligonucleotide
  Target: LAMA2; (+) strand; PAM type: NRG; PAM sequence: TAG
tttgtgttcaaggtaaaatg

SEQ ID NO: 168263 - DNA, 20 bp, Artificial Sequence
  Description of Artificial Sequence: Synthetic oligonucleotide
  Target: LAMA2; (+) strand; PAM type: NRG; PAM sequence: TGG
gtaaaatgtagtttgaaatc

SEQ ID NO: 168264 - DNA, 20 bp, Artificial Sequence
  Description of Artificial Sequence: Synthetic oligonucleotide
  Target: LAMA2; (+) strand; PAM type: NRG; PAM sequence: TAG
tttgaaatctggatgtaaat

SEQ ID NO: 168265 - DNA, 20 bp, Artificial Sequence
  Description of Artificial Sequence: Synthetic oligonucleotide
  Target: LAMA2; (+) strand; PAM type: NRG; PAM sequence: AAG
aatctggatgtaaattagaa

SEQ ID NO: 168266 - DNA, 20 bp, Artificial Sequence
  Description of Artificial Sequence: Synthetic oligonucleotide
  Target: LAMA2; (+) strand; PAM type: NRG; PAM sequence: AAG
aaaagatattattttattcc

SEQ ID NO: 168267 - DNA, 20 bp, Artificial Sequence
  Description of Artificial Sequence: Synthetic oligonucleotide
  Target: LAMA2; (+) strand; PAM type: NRG; PAM sequence: AAG
tattcacacttcacgtcttg

SEQ ID NO: 168268 - DNA, 20 bp, Artificial Sequence
  Description of Artificial Sequence: Synthetic oligonucleotide
  Target: LAMA2; (+) strand; PAM type: NRG; PAM sequence: CAG
cacttcacgtcttgaagcac

SEQ ID NO: 168269 - DNA, 20 bp, Artificial Sequence
  Description of Artificial Sequence: Synthetic oligonucleotide
  Target: LAMA2; (+) strand; PAM type: NRG; PAM sequence: TGG
ttcacgtcttgaagcaccag

SEQ ID NO: 168270 - DNA, 20 bp, Artificial Sequence
  Description of Artificial Sequence: Synthetic oligonucleotide
  Target: LAMA2; (+) strand; PAM type: NRG; PAM sequence: TGG
ttgaagcaccagtggccatt

SEQ ID NO: 168271 - DNA, 20 bp, Artificial Sequence
  Description of Artificial Sequence: Synthetic oligonucleotide
  Target: LAMA2; (+) strand; PAM type: NRG; PAM sequence: GGG
tgaagcaccagtggccattt

SEQ ID NO: 168272 - DNA, 20 bp, Artificial Sequence
  Description of Artificial Sequence: Synthetic oligonucleotide
  Target: LAMA2; (+) strand; PAM type: NRG; PAM sequence: GAG
caccagtggccatttgggct

SEQ ID NO: 168273 - DNA, 20 bp, Artificial Sequence
  Description of Artificial Sequence: Synthetic oligonucleotide
  Target: LAMA2; (+) strand; PAM type: NRG; PAM sequence: AAG
gccatttgggctgagttttc

SEQ ID NO: 168274 - DNA, 20 bp, Artificial Sequence
  Description of Artificial Sequence: Synthetic oligonucleotide
  Target: LAMA2; (+) strand; PAM type: NRG; PAM sequence: TAG
ttcaagaaaaaaaatttata

SEQ ID NO: 168275 - DNA, 20 bp, Artificial Sequence
  Description of Artificial Sequence: Synthetic oligonucleotide
  Target: LAMA2; (+) strand; PAM type: NRG; PAM sequence: AAG
ttatgccctttttttaacct

SEQ ID NO: 168276 - DNA, 20 bp, Artificial Sequence
  Description of Artificial Sequence: Synthetic oligonucleotide
  Target: LAMA2; (+) strand; PAM type: NRG; PAM sequence: GAG
atgccctttttttaacctaa

SEQ ID NO: 168277 - DNA, 20 bp, Artificial Sequence
  Description of Artificial Sequence: Synthetic oligonucleotide
  Target: LAMA2; (+) strand; PAM type: NRG; PAM sequence: AAG
tttttaacctaagagatatt

SEQ ID NO: 168278 - DNA, 20 bp, Artificial Sequence
  Description of Artificial Sequence: Synthetic oligonucleotide
  Target: LAMA2; (+) strand; PAM type: NRG; PAM sequence: TAG
acctaagagatattaagtaa

SEQ ID NO: 168279 - DNA, 20 bp, Artificial Sequence
  Description of Artificial Sequence: Synthetic oligonucleotide
  Target: LAMA2; (+) strand; PAM type: NRG; PAM sequence: CAG
agtaatagctattccactat

SEQ ID NO: 168280 - DNA, 20 bp, Artificial Sequence
  Description of Artificial Sequence: Synthetic oligonucleotide
  Target: LAMA2; (+) strand; PAM type: NRG; PAM sequence: TAG
cagacaatgtgcataaattc

SEQ ID NO: 168281 - DNA, 20 bp, Artificial Sequence
  Description of Artificial Sequence: Synthetic oligonucleotide
  Target: LAMA2; (+) strand; PAM type: NRG; PAM sequence: CAG
caatgtgcataaattctagt

SEQ ID NO: 168282 - DNA, 20 bp, Artificial Sequence
  Description of Artificial Sequence: Synthetic oligonucleotide
  Target: LAMA2; (+) strand; PAM type: NRG; PAM sequence: TAG
agtcagatttttcttttgat

SEQ ID NO: 168283 - DNA, 20 bp, Artificial Sequence
  Description of Artificial Sequence: Synthetic oligonucleotide
  Target: LAMA2; (+) strand; PAM type: NRG; PAM sequence: TAG
ttcttttgattagtgaacaa

SEQ ID NO: 168284 - DNA, 20 bp, Artificial Sequence
  Description of Artificial Sequence: Synthetic oligonucleotide
  Target: LAMA2; (+) strand; PAM type: NRG; PAM sequence: AGG
tcttttgattagtgaacaat

SEQ ID NO: 168285 - DNA, 20 bp, Artificial Sequence
  Description of Artificial Sequence: Synthetic oligonucleotide
  Target: LAMA2; (+) strand; PAM type: NRG; PAM sequence: TGG
gaacaataggacaattttgc

SEQ ID NO: 168286 - DNA, 20 bp, Artificial Sequence
  Description of Artificial Sequence: Synthetic oligonucleotide
  Target: LAMA2; (+) strand; PAM type: NRG; PAM sequence: TAG
ggacaattttgctggatgtt

SEQ ID NO: 168287 - DNA, 20 bp, Artificial Sequence
  Description of Artificial Sequence: Synthetic oligonucleotide
  Target: LAMA2; (+) strand; PAM type: NRG; PAM sequence: TGG
ctggatgtttagtatattca

SEQ ID NO: 168288 - DNA, 20 bp, Artificial Sequence
  Description of Artificial Sequence: Synthetic oligonucleotide
  Target: LAMA2; (+) strand; PAM type: NRG; PAM sequence: CAG
gtcacatcattattaaattc

SEQ ID NO: 168289 - DNA, 20 bp, Artificial Sequence
  Description of Artificial Sequence: Synthetic oligonucleotide
  Target: LAMA2; (+) strand; PAM type: NRG; PAM sequence: TGG
tatttgtttactgttattaa

SEQ ID NO: 168290 - DNA, 20 bp, Artificial Sequence
  Description of Artificial Sequence: Synthetic oligonucleotide
  Target: LAMA2; (+) strand; PAM type: NRG; PAM sequence: TAG
ggtttttcattgtgacgtcc

SEQ ID NO: 168291 - DNA, 20 bp, Artificial Sequence
  Description of Artificial Sequence: Synthetic oligonucleotide
  Target: LAMA2; (+) strand; PAM type: NRG; PAM sequence: AAG
gtgacgtcctagccttaaat

SEQ ID NO: 168292 - DNA, 20 bp, Artificial Sequence
  Description of Artificial Sequence: Synthetic oligonucleotide
  Target: LAMA2; (+) strand; PAM type: NRG; PAM sequence: CAG
ctagccttaaataagaactt

SEQ ID NO: 168293 - DNA, 20 bp, Artificial Sequence
  Description of Artificial Sequence: Synthetic oligonucleotide
  Target: LAMA2; (+) strand; PAM type: NRG; PAM sequence: AAG
gaacttcagcaataattata

SEQ ID NO: 168294 - DNA, 20 bp, Artificial Sequence
  Description of Artificial Sequence: Synthetic oligonucleotide
  Target: LAMA2; (+) strand; PAM type: NRG; PAM sequence: TGG
ttcagcaataattataaaga

SEQ ID NO: 168295 - DNA, 20 bp, Artificial Sequence
  Description of Artificial Sequence: Synthetic oligonucleotide
  Target: LAMA2; (+) strand; PAM type: NRG; PAM sequence: AAG
tggcatttattactacctaa

SEQ ID NO: 168296 - DNA, 20 bp, Artificial Sequence
  Description of Artificial Sequence: Synthetic oligonucleotide
  Target: LAMA2; (+) strand; PAM type: NRG; PAM sequence: TGG
tgtcccaataaccttgatca

SEQ ID NO: 168297 - DNA, 20 bp, Artificial Sequence
  Description of Artificial Sequence: Synthetic oligonucleotide
  Target: LAMA2; (+) strand; PAM type: NRG; PAM sequence: TAG
ccaataaccttgatcatgga

SEQ ID NO: 168298 - DNA, 20 bp, Artificial Sequence
  Description of Artificial Sequence: Synthetic oligonucleotide
  Target: LAMA2; (+) strand; PAM type: NRG; PAM sequence: AGG
caataaccttgatcatggat

SEQ ID NO: 168299 - DNA, 20 bp, Artificial Sequence
  Description of Artificial Sequence: Synthetic oligonucleotide
  Target: LAMA2; (+) strand; PAM type: NRG; PAM sequence: TGG
atactattttataaaataaa

SEQ ID NO: 168300 - DNA, 20 bp, Artificial Sequence
  Description of Artificial Sequence: Synthetic oligonucleotide
  Target: LAMA2; (+) strand; PAM type: NRG; PAM sequence: CAG
caatccttttctttctgatt

SEQ ID NO: 168301 - DNA, 20 bp, Artificial Sequence
  Description of Artificial Sequence: Synthetic oligonucleotide
  Target: LAMA2; (+) strand; PAM type: NRG; PAM sequence: CAG
ttttctttctgattcagttt

SEQ ID NO: 168302 - DNA, 20 bp, Artificial Sequence
  Description of Artificial Sequence: Synthetic oligonucleotide
  Target: LAMA2; (+) strand; PAM type: NRG; PAM sequence: CAG
tttcagcccctcttgtgtcg

SEQ ID NO: 168303 - DNA, 20 bp, Artificial Sequence
  Description of Artificial Sequence: Synthetic oligonucleotide
  Target: LAMA2; (+) strand; PAM type: NRG; PAM sequence: AAG
cagcccctcttgtgtcgcag

SEQ ID NO: 168304 - DNA, 20 bp, Artificial Sequence
  Description of Artificial Sequence: Synthetic oligonucleotide
  Target: LAMA2; (+) strand; PAM type: NRG; PAM sequence: AGG
agcccctcttgtgtcgcaga

SEQ ID NO: 168305 - DNA, 20 bp, Artificial Sequence
  Description of Artificial Sequence: Synthetic oligonucleotide
  Target: LAMA2; (+) strand; PAM type: NRG; PAM sequence: CGG
acttgacgactaccgctgca

SEQ ID NO: 168306 - DNA, 20 bp, Artificial Sequence
  Description of Artificial Sequence: Synthetic oligonucleotide
  Target: LAMA2; (+) strand; PAM type: NRG; PAM sequence: CGG
accgctgcacggcttgtcca

SEQ ID NO: 168307 - DNA, 20 bp, Artificial Sequence
  Description of Artificial Sequence: Synthetic oligonucleotide
  Target: LAMA2; (+) strand; PAM type: NRG; PAM sequence: GGG
ccgctgcacggcttgtccac

SEQ ID NO: 168308 - DNA, 20 bp, Artificial Sequence
  Description of Artificial Sequence: Synthetic oligonucleotide
  Target: LAMA2; (+) strand; PAM type: NRG; PAM sequence: GGG
cgctgcacggcttgtccacg

SEQ ID NO: 168309 - DNA, 20 bp, Artificial Sequence
  Description of Artificial Sequence: Synthetic oligonucleotide
  Target: LAMA2; (+) strand; PAM type: NRG; PAM sequence: AAG
ggcttgtccacggggatatg

SEQ ID NO: 168310 - DNA, 20 bp, Artificial Sequence
  Description of Artificial Sequence: Synthetic oligonucleotide
  Target: LAMA2; (+) strand; PAM type: NRG; PAM sequence: AGG
gcttgtccacggggatatga

SEQ ID NO: 168311 - DNA, 20 bp, Artificial Sequence
  Description of Artificial Sequence: Synthetic oligonucleotide
  Target: LAMA2; (+) strand; PAM type: NRG; PAM sequence: CAG
gtccacggggatatgaaggc

SEQ ID NO: 168312 - DNA, 20 bp, Artificial Sequence
  Description of Artificial Sequence: Synthetic oligonucleotide
  Target: LAMA2; (+) strand; PAM type: NRG; PAM sequence: AAG
tatgaaggccagtactgtga

SEQ ID NO: 168313 - DNA, 20 bp, Artificial Sequence
  Description of Artificial Sequence: Synthetic oligonucleotide
  Target: LAMA2; (+) strand; PAM type: NRG; PAM sequence: AGG
atgaaggccagtactgtgaa

SEQ ID NO: 168314 - DNA, 20 bp, Artificial Sequence
  Description of Artificial Sequence: Synthetic oligonucleotide
  Target: LAMA2; (+) strand; PAM type: NRG; PAM sequence: CAG
agtactgtgaaaggtaccaa

SEQ ID NO: 168315 - DNA, 20 bp, Artificial Sequence
  Description of Artificial Sequence: Synthetic oligonucleotide
  Target: LAMA2; (+) strand; PAM type: NRG; PAM sequence: CAG
accaacagccatgaaacgta

SEQ ID NO: 168316 - DNA, 20 bp, Artificial Sequence
  Description of Artificial Sequence: Synthetic oligonucleotide
  Target: LAMA2; (+) strand; PAM type: NRG; PAM sequence: GAG
caacagccatgaaacgtaca

SEQ ID NO: 168317 - DNA, 20 bp, Artificial Sequence
  Description of Artificial Sequence: Synthetic oligonucleotide
  Target: LAMA2; (+) strand; PAM type: NRG; PAM sequence: TAG
acgtacagagtaatgatatg

SEQ ID NO: 168318 - DNA, 20 bp, Artificial Sequence
  Description of Artificial Sequence: Synthetic oligonucleotide
  Target: LAMA2; (+) strand; PAM type: NRG; PAM sequence: AGG
cgtacagagtaatgatatgt

SEQ ID NO: 168319 - DNA, 20 bp, Artificial Sequence
  Description of Artificial Sequence: Synthetic oligonucleotide
  Target: LAMA2; (+) strand; PAM type: NRG; PAM sequence: GGG
gtacagagtaatgatatgta

SEQ ID NO: 168320 - DNA, 20 bp, Artificial Sequence
  Description of Artificial Sequence: Synthetic oligonucleotide
  Target: LAMA2; (+) strand; PAM type: NRG; PAM sequence: TGG
aatgatatgtagggactata

SEQ ID NO: 168321 - DNA, 20 bp, Artificial Sequence
  Description of Artificial Sequence: Synthetic oligonucleotide
  Target: LAMA2; (+) strand; PAM type: NRG; PAM sequence: AAG
tatgtagggactatatggta

SEQ ID NO: 168322 - DNA, 20 bp, Artificial Sequence
  Description of Artificial Sequence: Synthetic oligonucleotide
  Target: LAMA2; (+) strand; PAM type: NRG; PAM sequence: AGG
atgtagggactatatggtaa

SEQ ID NO: 168323 - DNA, 20 bp, Artificial Sequence
  Description of Artificial Sequence: Synthetic oligonucleotide
  Target: LAMA2; (+) strand; PAM type: NRG; PAM sequence: GGG
tgtagggactatatggtaaa

SEQ ID NO: 168324 - DNA, 20 bp, Artificial Sequence
  Description of Artificial Sequence: Synthetic oligonucleotide
  Target: LAMA2; (+) strand; PAM type: NRG; PAM sequence: TAG
tatatggtaaagggtcacaa

SEQ ID NO: 168325 - DNA, 20 bp, Artificial Sequence
  Description of Artificial Sequence: Synthetic oligonucleotide
  Target: LAMA2; (+) strand; PAM type: NRG; PAM sequence: AGG
atatggtaaagggtcacaat

SEQ ID NO: 168326 - DNA, 20 bp, Artificial Sequence
  Description of Artificial Sequence: Synthetic oligonucleotide
  Target: LAMA2; (+) strand; PAM type: NRG; PAM sequence: AAG
aggaaaacattcattatttg

SEQ ID NO: 168327 - DNA, 20 bp, Artificial Sequence
  Description of Artificial Sequence: Synthetic oligonucleotide
  Target: LAMA2; (+) strand; PAM type: NRG; PAM sequence: TAG
ttcaatatttgcatatcctt

SEQ ID NO: 168328 - DNA, 20 bp, Artificial Sequence
  Description of Artificial Sequence: Synthetic oligonucleotide
  Target: LAMA2; (+) strand; PAM type: NRG; PAM sequence: AAG
aatatttgcatatcctttag

SEQ ID NO: 168329 - DNA, 20 bp, Artificial Sequence
  Description of Artificial Sequence: Synthetic oligonucleotide
  Target: LAMA2; (+) strand; PAM type: NRG; PAM sequence: TAG
tcaaaaccacttgtgtatct

SEQ ID NO: 168330 - DNA, 20 bp, Artificial Sequence
  Description of Artificial Sequence: Synthetic oligonucleotide
  Target: LAMA2; (+) strand; PAM type: NRG; PAM sequence: AAG
tgtatcttagaatttgtcca

SEQ ID NO: 168331 - DNA, 20 bp, Artificial Sequence
  Description of Artificial Sequence: Synthetic oligonucleotide
  Target: LAMA2; (+) strand; PAM type: NRG; PAM sequence: AAG
tcttagaatttgtccaaaga

SEQ ID NO: 168332 - DNA, 20 bp, Artificial Sequence
  Description of Artificial Sequence: Synthetic oligonucleotide
  Target: LAMA2; (+) strand; PAM type: NRG; PAM sequence: TAG
gtttatttccaccgtatgtt

SEQ ID NO: 168333 - DNA, 20 bp, Artificial Sequence
  Description of Artificial Sequence: Synthetic oligonucleotide
  Target: LAMA2; (+) strand; PAM type: NRG; PAM sequence: AAG
cgtatgtttagactttatca

SEQ ID NO: 168334 - DNA, 20 bp, Artificial Sequence
  Description of Artificial Sequence: Synthetic oligonucleotide
  Target: LAMA2; (+) strand; PAM type: NRG; PAM sequence: TAG
caattatctaacttatgctt

SEQ ID NO: 168335 - DNA, 20 bp, Artificial Sequence
  Description of Artificial Sequence: Synthetic oligonucleotide
  Target: LAMA2; (+) strand; PAM type: NRG; PAM sequence: AAG
atgtaaatataacatttcat

SEQ ID NO: 168336 - DNA, 20 bp, Artificial Sequence
  Description of Artificial Sequence: Synthetic oligonucleotide
  Target: LAMA2; (+) strand; PAM type: NRG; PAM sequence: AAG
aagaataaatcaattttcaa

SEQ ID NO: 168337 - DNA, 20 bp, Artificial Sequence
  Description of Artificial Sequence: Synthetic oligonucleotide
  Target: LAMA2; (+) strand; PAM type: NRG; PAM sequence: TAG
taaatcaattttcaaaagct

SEQ ID NO: 168338 - DNA, 20 bp, Artificial Sequence
  Description of Artificial Sequence: Synthetic oligonucleotide
  Target: LAMA2; (+) strand; PAM type: NRG; PAM sequence: CAG
atcaattttcaaaagcttag

SEQ ID NO: 168339 - DNA, 20 bp, Artificial Sequence
  Description of Artificial Sequence: Synthetic oligonucleotide
  Target: LAMA2; (+) strand; PAM type: NRG; PAM sequence: TAG
aattttcaaaagcttagcag

SEQ ID NO: 168340 - DNA, 20 bp, Artificial Sequence
  Description of Artificial Sequence: Synthetic oligonucleotide
  Target: LAMA2; (+) strand; PAM type: NRG; PAM sequence: AAG
tagcagtagttactactaat

SEQ ID NO: 168341 - DNA, 20 bp, Artificial Sequence
  Description of Artificial Sequence: Synthetic oligonucleotide
  Target: LAMA2; (+) strand; PAM type: NRG; PAM sequence: TGG
agttactactaataagaaac

SEQ ID NO: 168342 - DNA, 20 bp, Artificial Sequence
  Description of Artificial Sequence: Synthetic oligonucleotide
  Target: LAMA2; (+) strand; PAM type: NRG; PAM sequence: TGG
cttttcttattttaatgcac

SEQ ID NO: 168343 - DNA, 20 bp, Artificial Sequence
  Description of Artificial Sequence: Synthetic oligonucleotide
  Target: LAMA2; (+) strand; PAM type: NRG; PAM sequence: TGG
atgcactggaaaatattgtc

SEQ ID NO: 168344 - DNA, 20 bp, Artificial Sequence
  Description of Artificial Sequence: Synthetic oligonucleotide
  Target: LAMA2; (+) strand; PAM type: NRG; PAM sequence: AAG
cactggaaaatattgtctgg

SEQ ID NO: 168345 - DNA, 20 bp, Artificial Sequence
  Description of Artificial Sequence: Synthetic oligonucleotide
  Target: LAMA2; (+) strand; PAM type: NRG; PAM sequence: CAG
tctgaacactatgactacac

SEQ ID NO: 168346 - DNA, 20 bp, Artificial Sequence
  Description of Artificial Sequence: Synthetic oligonucleotide
  Target: LAMA2; (+) strand; PAM type: NRG; PAM sequence: AAG
aacactatgactacaccagc

SEQ ID NO: 168347 - DNA, 20 bp, Artificial Sequence
  Description of Artificial Sequence: Synthetic oligonucleotide
  Target: LAMA2; (+) strand; PAM type: NRG; PAM sequence: TAG
tacataactcaaaatataaa

SEQ ID NO: 168348 - DNA, 20 bp, Artificial Sequence
  Description of Artificial Sequence: Synthetic oligonucleotide
  Target: LAMA2; (+) strand; PAM type: NRG; PAM sequence: AAG
ctcaaaatataaatagtatc

SEQ ID NO: 168349 - DNA, 20 bp, Artificial Sequence
  Description of Artificial Sequence: Synthetic oligonucleotide
  Target: LAMA2; (+) strand; PAM type: NRG; PAM sequence: TAG
tagtatcaagaatttttaat

SEQ ID NO: 168350 - DNA, 20 bp, Artificial Sequence
  Description of Artificial Sequence: Synthetic oligonucleotide
  Target: LAMA2; (+) strand; PAM type: NRG; PAM sequence: CAG
aagaatttttaattagtacc

SEQ ID NO: 168351 - DNA, 20 bp, Artificial Sequence
  Description of Artificial Sequence: Synthetic oligonucleotide
  Target: LAMA2; (+) strand; PAM type: NRG; PAM sequence: AAG
taattagtacccagacaata

SEQ ID NO: 168352 - DNA, 20 bp, Artificial Sequence
  Description of Artificial Sequence: Synthetic oligonucleotide
  Target: LAMA2; (+) strand; PAM type: NRG; PAM sequence: CAG
acaataaagtatttgttatt

SEQ ID NO: 168353 - DNA, 20 bp, Artificial Sequence
  Description of Artificial Sequence: Synthetic oligonucleotide
  Target: LAMA2; (+) strand; PAM type: NRG; PAM sequence: TAG
tattcagttttccttttcaa

SEQ ID NO: 168354 - DNA, 20 bp, Artificial Sequence
  Description of Artificial Sequence: Synthetic oligonucleotide
  Target: LAMA2; (+) strand; PAM type: NRG; PAM sequence: AGG
attcagttttccttttcaat

SEQ ID NO: 168355 - DNA, 20 bp, Artificial Sequence
  Description of Artificial Sequence: Synthetic oligonucleotide
  Target: LAMA2; (+) strand; PAM type: NRG; PAM sequence: CAG
aatctcataatgcatgtata

SEQ ID NO: 168356 - DNA, 20 bp, Artificial Sequence
  Description of Artificial Sequence: Synthetic oligonucleotide
  Target: LAMA2; (+) strand; PAM type: NRG; PAM sequence: CAG
cagctgttaaattgaattct

SEQ ID NO: 168357 - DNA, 20 bp, Artificial Sequence
  Description of Artificial Sequence: Synthetic oligonucleotide
  Target: LAMA2; (+) strand; PAM type: NRG; PAM sequence: TGG
aattctcagtgtaatccaaa

SEQ ID NO: 168358 - DNA, 20 bp, Artificial Sequence
  Description of Artificial Sequence: Synthetic oligonucleotide
  Target: LAMA2; (+) strand; PAM type: NRG; PAM sequence: AAG
tgtaatccaaatggtaaatt

SEQ ID NO: 168359 - DNA, 20 bp, Artificial Sequence
  Description of Artificial Sequence: Synthetic oligonucleotide
  Target: LAMA2; (+) strand; PAM type: NRG; PAM sequence: AGG
gtaatccaaatggtaaatta

SEQ ID NO: 168360 - DNA, 20 bp, Artificial Sequence
  Description of Artificial Sequence: Synthetic oligonucleotide
  Target: LAMA2; (+) strand; PAM type: NRG; PAM sequence: GAG
aatccaaatggtaaattaag

SEQ ID NO: 168361 - DNA, 20 bp, Artificial Sequence
  Description of Artificial Sequence: Synthetic oligonucleotide
  Target: LAMA2; (+) strand; PAM type: NRG; PAM sequence: CAG
aaatggtaaattaaggagta

SEQ ID NO: 168362 - DNA, 20 bp, Artificial Sequence
  Description of Artificial Sequence: Synthetic oligonucleotide
  Target: LAMA2; (+) strand; PAM type: NRG; PAM sequence: TAG
acagttccaaactgattgtc

SEQ ID NO: 168363 - DNA, 20 bp, Artificial Sequence
  Description of Artificial Sequence: Synthetic oligonucleotide
  Target: LAMA2; (+) strand; PAM type: NRG; PAM sequence: AAG
tccaaactgattgtctagaa

SEQ ID NO: 168364 - DNA, 20 bp, Artificial Sequence
  Description of Artificial Sequence: Synthetic oligonucleotide
  Target: LAMA2; (+) strand; PAM type: NRG; PAM sequence: CAG
aagttgcaattaatatcttc

SEQ ID NO: 168365 - DNA, 20 bp, Artificial Sequence
  Description of Artificial Sequence: Synthetic oligonucleotide
  Target: LAMA2; (+) strand; PAM type: NRG; PAM sequence: AAG
tccagatatatattttctgt

SEQ ID NO: 168366 - DNA, 20 bp, Artificial Sequence
  Description of Artificial Sequence: Synthetic oligonucleotide
  Target: LAMA2; (+) strand; PAM type: NRG; PAM sequence: CAG
atatatattttctgtaagat

SEQ ID NO: 168367 - DNA, 20 bp, Artificial Sequence
  Description of Artificial Sequence: Synthetic oligonucleotide
  Target: LAMA2; (+) strand; PAM type: NRG; PAM sequence: TGG
tttctgtaagatcagtatcc

SEQ ID NO: 168368 - DNA, 20 bp, Artificial Sequence
  Description of Artificial Sequence: Synthetic oligonucleotide
  Target: LAMA2; (+) strand; PAM type: NRG; PAM sequence: TGG
aaacttgtcaccaccacttt

SEQ ID NO: 168369 - DNA, 20 bp, Artificial Sequence
  Description of Artificial Sequence: Synthetic oligonucleotide
  Target: LAMA2; (+) strand; PAM type: NRG; PAM sequence: TAG
ccaccacttttggtatattt

SEQ ID NO: 168370 - DNA, 20 bp, Artificial Sequence
  Description of Artificial Sequence: Synthetic oligonucleotide
  Target: LAMA2; (+) strand; PAM type: NRG; PAM sequence: CAG
agatattatctttaatgtaa

SEQ ID NO: 168371 - DNA, 20 bp, Artificial Sequence
  Description of Artificial Sequence: Synthetic oligonucleotide
  Target: LAMA2; (+) strand; PAM type: NRG; PAM sequence: GAG
atattatctttaatgtaaca

SEQ ID NO: 168372 - DNA, 20 bp, Artificial Sequence
  Description of Artificial Sequence: Synthetic oligonucleotide
  Target: LAMA2; (+) strand; PAM type: NRG; PAM sequence: GAG
attatctttaatgtaacaga

SEQ ID NO: 168373 - DNA, 20 bp, Artificial Sequence
  Description of Artificial Sequence: Synthetic oligonucleotide
  Target: LAMA2; (+) strand; PAM type: NRG; PAM sequence: TAG
ctaacattatacacacatga

SEQ ID NO: 168374 - DNA, 20 bp, Artificial Sequence
  Description of Artificial Sequence: Synthetic oligonucleotide
  Target: LAMA2; (+) strand; PAM type: NRG; PAM sequence: TAG
ttatacacacatgatagttt

SEQ ID NO: 168375 - DNA, 20 bp, Artificial Sequence
  Description of Artificial Sequence: Synthetic oligonucleotide
  Target: LAMA2; (+) strand; PAM type: NRG; PAM sequence: TAG
gatagttttagcataattga

SEQ ID NO: 168376 - DNA, 20 bp, Artificial Sequence
  Description of Artificial Sequence: Synthetic oligonucleotide
  Target: LAMA2; (+) strand; PAM type: NRG; PAM sequence: CAG
agttttagcataattgatag

SEQ ID NO: 168377 - DNA, 20 bp, Artificial Sequence
  Description of Artificial Sequence: Synthetic oligonucleotide
  Target: LAMA2; (+) strand; PAM type: NRG; PAM sequence: AAG
cataattgatagcagtataa

SEQ ID NO: 168378 - DNA, 20 bp, Artificial Sequence
  Description of Artificial Sequence: Synthetic oligonucleotide
  Target: LAMA2; (+) strand; PAM type: NRG; PAM sequence: TAG
tgatagcagtataaaagttt

SEQ ID NO: 168379 - DNA, 20 bp, Artificial Sequence
  Description of Artificial Sequence: Synthetic oligonucleotide
  Target: LAMA2; (+) strand; PAM type: NRG; PAM sequence: AAG
agcagtataaaagttttaga

SEQ ID NO: 168380 - DNA, 20 bp, Artificial Sequence
  Description of Artificial Sequence: Synthetic oligonucleotide
  Target: LAMA2; (+) strand; PAM type: NRG; PAM sequence: TAG
aaaagttttagaaagatcca

SEQ ID NO: 168381 - DNA, 20 bp, Artificial Sequence
  Description of Artificial Sequence: Synthetic oligonucleotide
  Target: LAMA2; (+) strand; PAM type: NRG; PAM sequence: CAG
tagacttcgctcaattccaa

SEQ ID NO: 168382 - DNA, 20 bp, Artificial Sequence
  Description of Artificial Sequence: Synthetic oligonucleotide
  Target: LAMA2; (+) strand; PAM type: NRG; PAM sequence: CAG
ttcgctcaattccaacagtt

SEQ ID NO: 168383 - DNA, 20 bp, Artificial Sequence
  Description of Artificial Sequence: Synthetic oligonucleotide
  Target: LAMA2; (+) strand; PAM type: NRG; PAM sequence: CAG
attttcctcatctataatct

SEQ ID NO: 168384 - DNA, 20 bp, Artificial Sequence
  Description of Artificial Sequence: Synthetic oligonucleotide
  Target: LAMA2; (+) strand; PAM type: NRG; PAM sequence: AGG
ttttcctcatctataatctc

SEQ ID NO: 168385 - DNA, 20 bp, Artificial Sequence
  Description of Artificial Sequence: Synthetic oligonucleotide
  Target: LAMA2; (+) strand; PAM type: NRG; PAM sequence: TAG
ataatctcaggaatcattga

SEQ ID NO: 168386 - DNA, 20 bp, Artificial Sequence
  Description of Artificial Sequence: Synthetic oligonucleotide
  Target: LAMA2; (+) strand; PAM type: NRG; PAM sequence: AGG
taatctcaggaatcattgat

SEQ ID NO: 168387 - DNA, 20 bp, Artificial Sequence
  Description of Artificial Sequence: Synthetic oligonucleotide
  Target: LAMA2; (+) strand; PAM type: NRG; PAM sequence: AAG
tacactaatattgtgacaat

SEQ ID NO: 168388 - DNA, 20 bp, Artificial Sequence
  Description of Artificial Sequence: Synthetic oligonucleotide
  Target: LAMA2; (+) strand; PAM type: NRG; PAM sequence: AAG
attgtgacaataagtgtgta

SEQ ID NO: 168389 - DNA, 20 bp, Artificial Sequence
  Description of Artificial Sequence: Synthetic oligonucleotide
  Target: LAMA2; (+) strand; PAM type: NRG; PAM sequence: AGG
ttgtgacaataagtgtgtaa

SEQ ID NO: 168390 - DNA, 20 bp, Artificial Sequence
  Description of Artificial Sequence: Synthetic oligonucleotide
  Target: LAMA2; (+) strand; PAM type: NRG; PAM sequence: TGG
aagtgtgtaaaggacactgt

SEQ ID NO: 168391 - DNA, 20 bp, Artificial Sequence
  Description of Artificial Sequence: Synthetic oligonucleotide
  Target: LAMA2; (+) strand; PAM type: NRG; PAM sequence: TAG
gacactgttggtgccctgcc

SEQ ID NO: 168392 - DNA, 20 bp, Artificial Sequence
  Description of Artificial Sequence: Synthetic oligonucleotide
  Target: LAMA2; (+) strand; PAM type: NRG; PAM sequence: AGG
acactgttggtgccctgcct

SEQ ID NO: 168393 - DNA, 20 bp, Artificial Sequence
  Description of Artificial Sequence: Synthetic oligonucleotide
  Target: LAMA2; (+) strand; PAM type: NRG; PAM sequence: AAG
ctgcctaggcacctacactg

SEQ ID NO: 168394 - DNA, 20 bp, Artificial Sequence
  Description of Artificial Sequence: Synthetic oligonucleotide
  Target: LAMA2; (+) strand; PAM type: NRG; PAM sequence: CAG
cactgaagccttctctccaa

SEQ ID NO: 168395 - DNA, 20 bp, Artificial Sequence
  Description of Artificial Sequence: Synthetic oligonucleotide
  Target: LAMA2; (+) strand; PAM type: NRG; PAM sequence: AAG
tgaagccttctctccaacag

SEQ ID NO: 168396 - DNA, 20 bp, Artificial Sequence
  Description of Artificial Sequence: Synthetic oligonucleotide
  Target: LAMA2; (+) strand; PAM type: NRG; PAM sequence: GAG
aagccttctctccaacagaa

SEQ ID NO: 168397 - DNA, 20 bp, Artificial Sequence
  Description of Artificial Sequence: Synthetic oligonucleotide
  Target: LAMA2; (+) strand; PAM type: NRG; PAM sequence: AGG
agccttctctccaacagaag

SEQ ID NO: 168398 - DNA, 20 bp, Artificial Sequence
  Description of Artificial Sequence: Synthetic oligonucleotide
  Target: LAMA2; (+) strand; PAM type: NRG; PAM sequence: CAG
cttctctccaacagaagagg

SEQ ID NO: 168399 - DNA, 20 bp, Artificial Sequence
  Description of Artificial Sequence: Synthetic oligonucleotide
  Target: LAMA2; (+) strand; PAM type: NRG; PAM sequence: AAG
tctccaacagaagaggcaga

SEQ ID NO: 168400 - DNA, 20 bp, Artificial Sequence
  Description of Artificial Sequence: Synthetic oligonucleotide
  Target: LAMA2; (+) strand; PAM type: NRG; PAM sequence: AGG
ctccaacagaagaggcagaa

SEQ ID NO: 168401 - DNA, 20 bp, Artificial Sequence
  Description of Artificial Sequence: Synthetic oligonucleotide
  Target: LAMA2; (+) strand; PAM type: NRG; PAM sequence: CAG
atgtttacccgcccttcctg

SEQ ID NO: 168402 - DNA, 20 bp, Artificial Sequence
  Description of Artificial Sequence: Synthetic oligonucleotide
  Target: LAMA2; (+) strand; PAM type: NRG; PAM sequence: TGG
tttacccgcccttcctgcag

SEQ ID NO: 168403 - DNA, 20 bp, Artificial Sequence
  Description of Artificial Sequence: Synthetic oligonucleotide
  Target: LAMA2; (+) strand; PAM type: NRG; PAM sequence: CAG
tgcagtggcccatgactaac

SEQ ID NO: 168404 - DNA, 20 bp, Artificial Sequence
  Description of Artificial Sequence: Synthetic oligonucleotide
  Target: LAMA2; (+) strand; PAM type: NRG; PAM sequence: GAG
ggcccatgactaaccagcgt

SEQ ID NO: 168405 - DNA, 20 bp, Artificial Sequence
  Description of Artificial Sequence: Synthetic oligonucleotide
  Target: LAMA2; (+) strand; PAM type: NRG; PAM sequence: GAG
cccatgactaaccagcgtga

SEQ ID NO: 168406 - DNA, 20 bp, Artificial Sequence
  Description of Artificial Sequence: Synthetic oligonucleotide
  Target: LAMA2; (+) strand; PAM type: NRG; PAM sequence: AAG
taaccagcgtgagagtacaa

SEQ ID NO: 168407 - DNA, 20 bp, Artificial Sequence
  Description of Artificial Sequence: Synthetic oligonucleotide
  Target: LAMA2; (+) strand; PAM type: NRG; PAM sequence: CAG
agcgtgagagtacaaaagtc

SEQ ID NO: 168408 - DNA, 20 bp, Artificial Sequence
  Description of Artificial Sequence: Synthetic oligonucleotide
  Target: LAMA2; (+) strand; PAM type: NRG; PAM sequence: TGG
agtacaaaagtccagctctt

SEQ ID NO: 168409 - DNA, 20 bp, Artificial Sequence
  Description of Artificial Sequence: Synthetic oligonucleotide
  Target: LAMA2; (+) strand; PAM type: NRG; PAM sequence: AAG
agtccagctctttggcccct

SEQ ID NO: 168410 - DNA, 20 bp, Artificial Sequence
  Description of Artificial Sequence: Synthetic oligonucleotide
  Target: LAMA2; (+) strand; PAM type: NRG; PAM sequence: TGG
ccagctctttggcccctaag

SEQ ID NO: 168411 - DNA, 20 bp, Artificial Sequence
  Description of Artificial Sequence: Synthetic oligonucleotide
  Target: LAMA2; (+) strand; PAM type: NRG; PAM sequence: AAG
ctttggcccctaagtggaac

SEQ ID NO: 168412 - DNA, 20 bp, Artificial Sequence
  Description of Artificial Sequence: Synthetic oligonucleotide
  Target: LAMA2; (+) strand; PAM type: NRG; PAM sequence: GAG
ccctaagtggaacaagtttt

SEQ ID NO: 168413 - DNA, 20 bp, Artificial Sequence
  Description of Artificial Sequence: Synthetic oligonucleotide
  Target: LAMA2; (+) strand; PAM type: NRG; PAM sequence: CAG
tgagatcttattttatgctc

SEQ ID NO: 168414 - DNA, 20 bp, Artificial Sequence
  Description of Artificial Sequence: Synthetic oligonucleotide
  Target: LAMA2; (+) strand; PAM type: NRG; PAM sequence: GAG
agatcttattttatgctcca

SEQ ID NO: 168415 - DNA, 20 bp, Artificial Sequence
  Description of Artificial Sequence: Synthetic oligonucleotide
  Target: LAMA2; (+) strand; PAM type: NRG; PAM sequence: TGG
ttatgctccagagcactcca

SEQ ID NO: 168416 - DNA, 20 bp, Artificial Sequence
  Description of Artificial Sequence: Synthetic oligonucleotide
  Target: LAMA2; (+) strand; PAM type: NRG; PAM sequence: CAG
tccagagcactccatggaat

SEQ ID NO: 168417 - DNA, 20 bp, Artificial Sequence
  Description of Artificial Sequence: Synthetic oligonucleotide
  Target: LAMA2; (+) strand; PAM type: NRG; PAM sequence: AGG
ccagagcactccatggaatc

SEQ ID NO: 168418 - DNA, 20 bp, Artificial Sequence
  Description of Artificial Sequence: Synthetic oligonucleotide
  Target: LAMA2; (+) strand; PAM type: NRG; PAM sequence: AAG
gcactccatggaatcaggct

SEQ ID NO: 168419 - DNA, 20 bp, Artificial Sequence
  Description of Artificial Sequence: Synthetic oligonucleotide
  Target: LAMA2; (+) strand; PAM type: NRG; PAM sequence: TGG
ccatggaatcaggctaagac

SEQ ID NO: 168420 - DNA, 20 bp, Artificial Sequence
  Description of Artificial Sequence: Synthetic oligonucleotide
  Target: LAMA2; (+) strand; PAM type: NRG; PAM sequence: GGG
catggaatcaggctaagact

SEQ ID NO: 168421 - DNA, 20 bp, Artificial Sequence
  Description of Artificial Sequence: Synthetic oligonucleotide
  Target: LAMA2; (+) strand; PAM type: NRG; PAM sequence: TAG
cctgaaatcatacccttgat

SEQ ID NO: 168422 - DNA, 20 bp, Artificial Sequence
  Description of Artificial Sequence: Synthetic oligonucleotide
  Target: LAMA2; (+) strand; PAM type: NRG; PAM sequence: GAG
tgaaatcatacccttgatta

SEQ ID NO: 168423 - DNA, 20 bp, Artificial Sequence
  Description of Artificial Sequence: Synthetic oligonucleotide
  Target: LAMA2; (+) strand; PAM type: NRG; PAM sequence: TAG
tgcttcacccactcctttgc

SEQ ID NO: 168424 - DNA, 20 bp, Artificial Sequence
  Description of Artificial Sequence: Synthetic oligonucleotide
  Target: LAMA2; (+) strand; PAM type: NRG; PAM sequence: TAG
actcctttgctagattctcc

SEQ ID NO: 168425 - DNA, 20 bp, Artificial Sequence
  Description of Artificial Sequence: Synthetic oligonucleotide
  Target: LAMA2; (+) strand; PAM type: NRG; PAM sequence: AGG
ctcctttgctagattctcct

SEQ ID NO: 168426 - DNA, 20 bp, Artificial Sequence
  Description of Artificial Sequence: Synthetic oligonucleotide
  Target: LAMA2; (+) strand; PAM type: NRG; PAM sequence: TGG
ttctcctaggaacacttaaa

SEQ ID NO: 168427 - DNA, 20 bp, Artificial Sequence
  Description of Artificial Sequence: Synthetic oligonucleotide
  Target: LAMA2; (+) strand; PAM type: NRG; PAM sequence: AAG
cctaggaacacttaaatggt

SEQ ID NO: 168428 - DNA, 20 bp, Artificial Sequence
  Description of Artificial Sequence: Synthetic oligonucleotide
  Target: LAMA2; (+) strand; PAM type: NRG; PAM sequence: CAG
tataaactaatactaattat

SEQ ID NO: 168429 - DNA, 20 bp, Artificial Sequence
  Description of Artificial Sequence: Synthetic oligonucleotide
  Target: LAMA2; (+) strand; PAM type: NRG; PAM sequence: AAG
ctaattatcagcatccactt

SEQ ID NO: 168430 - DNA, 20 bp, Artificial Sequence
  Description of Artificial Sequence: Synthetic oligonucleotide
  Target: LAMA2; (+) strand; PAM type: NRG; PAM sequence: GAG
aattatcagcatccacttaa

SEQ ID NO: 168431 - DNA, 20 bp, Artificial Sequence
  Description of Artificial Sequence: Synthetic oligonucleotide
  Target: LAMA2; (+) strand; PAM type: NRG; PAM sequence: CAG
agagtcttgttttatataac

SEQ ID NO: 168432 - DNA, 20 bp, Artificial Sequence
  Description of Artificial Sequence: Synthetic oligonucleotide
  Target: LAMA2; (+) strand; PAM type: NRG; PAM sequence: CAG
ttgttttatataaccagcaa

SEQ ID NO: 168433 - DNA, 20 bp, Artificial Sequence
  Description of Artificial Sequence: Synthetic oligonucleotide
  Target: LAMA2; (+) strand; PAM type: NRG; PAM sequence: TGG
agcaacagctgtattaatca

SEQ ID NO: 168434 - DNA, 20 bp, Artificial Sequence
  Description of Artificial Sequence: Synthetic oligonucleotide
  Target: LAMA2; (+) strand; PAM type: NRG; PAM sequence: AAG
gctgtattaatcatggcaat

SEQ ID NO: 168435 - DNA, 20 bp, Artificial Sequence
  Description of Artificial Sequence: Synthetic oligonucleotide
  Target: LAMA2; (+) strand; PAM type: NRG; PAM sequence: TAG
gcaataagtaactaaataat

SEQ ID NO: 168436 - DNA, 20 bp, Artificial Sequence
  Description of Artificial Sequence: Synthetic oligonucleotide
  Target: LAMA2; (+) strand; PAM type: NRG; PAM sequence: AGG
caataagtaactaaataatt

SEQ ID NO: 168437 - DNA, 20 bp, Artificial Sequence
  Description of Artificial Sequence: Synthetic oligonucleotide
  Target: LAMA2; (+) strand; PAM type: NRG; PAM sequence: GGG
aataagtaactaaataatta

SEQ ID NO: 168438 - DNA, 20 bp, Artificial Sequence
  Description of Artificial Sequence: Synthetic oligonucleotide
  Target: LAMA2; (+) strand; PAM type: NRG; PAM sequence: AAG
gtaactaaataattagggtt

SEQ ID NO: 168439 - DNA, 20 bp, Artificial Sequence
  Description of Artificial Sequence: Synthetic oligonucleotide
  Target: LAMA2; (+) strand; PAM type: NRG; PAM sequence: TGG
tttctaaataaatccgtatg

SEQ ID NO: 168440 - DNA, 20 bp, Artificial Sequence
  Description of Artificial Sequence: Synthetic oligonucleotide
  Target: LAMA2; (+) strand; PAM type: NRG; PAM sequence: CAG
gtatgtggtaactctaaaca

SEQ ID NO: 168441 - DNA, 20 bp, Artificial Sequence
  Description of Artificial Sequence: Synthetic oligonucleotide
  Target: LAMA2; (+) strand; PAM type: NRG; PAM sequence: CAG
atatttgcatatatataaaa

SEQ ID NO: 168442 - DNA, 20 bp, Artificial Sequence
  Description of Artificial Sequence: Synthetic oligonucleotide
  Target: LAMA2; (+) strand; PAM type: NRG; PAM sequence: TGG
tttgcatatatataaaacag

SEQ ID NO: 168443 - DNA, 20 bp, Artificial Sequence
  Description of Artificial Sequence: Synthetic oligonucleotide
  Target: LAMA2; (+) strand; PAM type: NRG; PAM sequence: CAG
attcacaatttccataccaa

SEQ ID NO: 168444 - DNA, 20 bp, Artificial Sequence
  Description of Artificial Sequence: Synthetic oligonucleotide
  Target: LAMA2; (+) strand; PAM type: NRG; PAM sequence: TAG
atttccataccaacagaaat

SEQ ID NO: 168445 - DNA, 20 bp, Artificial Sequence
  Description of Artificial Sequence: Synthetic oligonucleotide
  Target: LAMA2; (+) strand; PAM type: NRG; PAM sequence: CAG
tccataccaacagaaattag

SEQ ID NO: 168446 - DNA, 20 bp, Artificial Sequence
  Description of Artificial Sequence: Synthetic oligonucleotide
  Target: LAMA2; (+) strand; PAM type: NRG; PAM sequence: TAG
agcagcaattaaataactca

SEQ ID NO: 168447 - DNA, 20 bp, Artificial Sequence
  Description of Artificial Sequence: Synthetic oligonucleotide
  Target: LAMA2; (+) strand; PAM type: NRG; PAM sequence: AAG
aaatatttccatttgttctg

SEQ ID NO: 168448 - DNA, 20 bp, Artificial Sequence
  Description of Artificial Sequence: Synthetic oligonucleotide
  Target: LAMA2; (+) strand; PAM type: NRG; PAM sequence: TGG
ctgaagatatatacatcttt

SEQ ID NO: 168449 - DNA, 20 bp, Artificial Sequence
  Description of Artificial Sequence: Synthetic oligonucleotide
  Target: LAMA2; (+) strand; PAM type: NRG; PAM sequence: TAG
atatatacatcttttggata

SEQ ID NO: 168450 - DNA, 20 bp, Artificial Sequence
  Description of Artificial Sequence: Synthetic oligonucleotide
  Target: LAMA2; (+) strand; PAM type: NRG; PAM sequence: TAG
acatcttttggatatagata

SEQ ID NO: 168451 - DNA, 20 bp, Artificial Sequence
  Description of Artificial Sequence: Synthetic oligonucleotide
  Target: LAMA2; (+) strand; PAM type: NRG; PAM sequence: AGG
catcttttggatatagatat

SEQ ID NO: 168452 - DNA, 20 bp, Artificial Sequence
  Description of Artificial Sequence: Synthetic oligonucleotide
  Target: LAMA2; (+) strand; PAM type: NRG; PAM sequence: AAG
gatatagatataggtgatac

SEQ ID NO: 168453 - DNA, 20 bp, Artificial Sequence
  Description of Artificial Sequence: Synthetic oligonucleotide
  Target: LAMA2; (+) strand; PAM type: NRG; PAM sequence: CAG
acatacttgttaatacccac

SEQ ID NO: 168454 - DNA, 20 bp, Artificial Sequence
  Description of Artificial Sequence: Synthetic oligonucleotide
  Target: LAMA2; (+) strand; PAM type: NRG; PAM sequence: GAG
acttgttaatacccaccagt

SEQ ID NO: 168455 - DNA, 20 bp, Artificial Sequence
  Description of Artificial Sequence: Synthetic oligonucleotide
  Target: LAMA2; (+) strand; PAM type: NRG; PAM sequence: TGG
taatacccaccagtgagctt

SEQ ID NO: 168456 - DNA, 20 bp, Artificial Sequence
  Description of Artificial Sequence: Synthetic oligonucleotide
  Target: LAMA2; (+) strand; PAM type: NRG; PAM sequence: TGG
ccagtgagctttggtattca

SEQ ID NO: 168457 - DNA, 20 bp, Artificial Sequence
  Description of Artificial Sequence: Synthetic oligonucleotide
  Target: LAMA2; (+) strand; PAM type: NRG; PAM sequence: TAG
tgagctttggtattcatggt

SEQ ID NO: 168458 - DNA, 20 bp, Artificial Sequence
  Description of Artificial Sequence: Synthetic oligonucleotide
  Target: LAMA2; (+) strand; PAM type: NRG; PAM sequence: CAG
tttcctgtacctttaaacac

SEQ ID NO: 168459 - DNA, 20 bp, Artificial Sequence
  Description of Artificial Sequence: Synthetic oligonucleotide
  Target: LAMA2; (+) strand; PAM type: NRG; PAM sequence: TAG
cctgtacctttaaacaccag

SEQ ID NO: 168460 - DNA, 20 bp, Artificial Sequence
  Description of Artificial Sequence: Synthetic oligonucleotide
  Target: LAMA2; (+) strand; PAM type: NRG; PAM sequence: AGG
ctgtacctttaaacaccagt

SEQ ID NO: 168461 - DNA, 20 bp, Artificial Sequence
  Description of Artificial Sequence: Synthetic oligonucleotide
  Target: LAMA2; (+) strand; PAM type: NRG; PAM sequence: TGG
acctttaaacaccagtagga

SEQ ID NO: 168462 - DNA, 20 bp, Artificial Sequence
  Description of Artificial Sequence: Synthetic oligonucleotide
  Target: LAMA2; (+) strand; PAM type: NRG; PAM sequence: AAG
accagtaggatggtgactaa

SEQ ID NO: 168463 - DNA, 20 bp, Artificial Sequence
  Description of Artificial Sequence: Synthetic oligonucleotide
  Target: LAMA2; (+) strand; PAM type: NRG; PAM sequence: TGG
atggtgactaaaagcatcgc

SEQ ID NO: 168464 - DNA, 20 bp, Artificial Sequence
  Description of Artificial Sequence: Synthetic oligonucleotide
  Target: LAMA2; (+) strand; PAM type: NRG; PAM sequence: AAG
aagcatcgctggacaccaaa

SEQ ID NO: 168465 - DNA, 20 bp, Artificial Sequence
  Description of Artificial Sequence: Synthetic oligonucleotide
  Target: LAMA2; (+) strand; PAM type: NRG; PAM sequence: CAG
gacaccaaaaagattatcta

SEQ ID NO: 168466 - DNA, 20 bp, Artificial Sequence
  Description of Artificial Sequence: Synthetic oligonucleotide
  Target: LAMA2; (+) strand; PAM type: NRG; PAM sequence: TAG
atgaaaaaaaaattatgata

SEQ ID NO: 168467 - DNA, 20 bp, Artificial Sequence
  Description of Artificial Sequence: Synthetic oligonucleotide
  Target: LAMA2; (+) strand; PAM type: NRG; PAM sequence: TAG
atagctacatttatacactg

SEQ ID NO: 168468 - DNA, 20 bp, Artificial Sequence
  Description of Artificial Sequence: Synthetic oligonucleotide
  Target: LAMA2; (+) strand; PAM type: NRG; PAM sequence: AAG
gtagttaccattttctacaa

SEQ ID NO: 168469 - DNA, 20 bp, Artificial Sequence
  Description of Artificial Sequence: Synthetic oligonucleotide
  Target: LAMA2; (+) strand; PAM type: NRG; PAM sequence: TAG
tttctacaaaagcatgtgta

SEQ ID NO: 168470 - DNA, 20 bp, Artificial Sequence
  Description of Artificial Sequence: Synthetic oligonucleotide
  Target: LAMA2; (+) strand; PAM type: NRG; PAM sequence: TAG
acaaaagcatgtgtatagaa

SEQ ID NO: 168471 - DNA, 20 bp, Artificial Sequence
  Description of Artificial Sequence: Synthetic oligonucleotide
  Target: LAMA2; (+) strand; PAM type: NRG; PAM sequence: AGG
caaaagcatgtgtatagaat

SEQ ID NO: 168472 - DNA, 20 bp, Artificial Sequence
  Description of Artificial Sequence: Synthetic oligonucleotide
  Target: LAMA2; (+) strand; PAM type: NRG; PAM sequence: TAG
agcatgtgtatagaataggc

SEQ ID NO: 168473 - DNA, 20 bp, Artificial Sequence
  Description of Artificial Sequence: Synthetic oligonucleotide
  Target: LAMA2; (+) strand; PAM type: NRG; PAM sequence: AAG
atgtgtatagaataggctag

SEQ ID NO: 168474 - DNA, 20 bp, Artificial Sequence
  Description of Artificial Sequence: Synthetic oligonucleotide
  Target: LAMA2; (+) strand; PAM type: NRG; PAM sequence: AGG
tgtgtatagaataggctaga

SEQ ID NO: 168475 - DNA, 20 bp, Artificial Sequence
  Description of Artificial Sequence: Synthetic oligonucleotide
  Target: LAMA2; (+) strand; PAM type: NRG; PAM sequence: GGG
gtgtatagaataggctagaa

SEQ ID NO: 168476 - DNA, 20 bp, Artificial Sequence
  Description of Artificial Sequence: Synthetic oligonucleotide
  Target: LAMA2; (+) strand; PAM type: NRG; PAM sequence: AAG
aaataacaattattgtgtta

SEQ ID NO: 168477 - DNA, 20 bp, Artificial Sequence
  Description of Artificial Sequence: Synthetic oligonucleotide
  Target: LAMA2; (+) strand; PAM type: NRG; PAM sequence: CAG
taacaattattgtgttaaag

SEQ ID NO: 168478 - DNA, 20 bp, Artificial Sequence
  Description of Artificial Sequence: Synthetic oligonucleotide
  Target: LAMA2; (+) strand; PAM type: NRG; PAM sequence: CAG
gtgttaaagcagaatgatta

SEQ ID NO: 168479 - DNA, 20 bp, Artificial Sequence
  Description of Artificial Sequence: Synthetic oligonucleotide
  Target: LAMA2; (+) strand; PAM type: NRG; PAM sequence: CAG
aaaatttatttgttaatatc

SEQ ID NO: 168480 - DNA, 20 bp, Artificial Sequence
  Description of Artificial Sequence: Synthetic oligonucleotide
  Target: LAMA2; (+) strand; PAM type: NRG; PAM sequence: TAG
atttatttgttaatatccag

SEQ ID NO: 168481 - DNA, 20 bp, Artificial Sequence
  Description of Artificial Sequence: Synthetic oligonucleotide
  Target: LAMA2; (+) strand; PAM type: NRG; PAM sequence: AAG
cagtagtatttaatcgataa

SEQ ID NO: 168482 - DNA, 20 bp, Artificial Sequence
  Description of Artificial Sequence: Synthetic oligonucleotide
  Target: LAMA2; (+) strand; PAM type: NRG; PAM sequence: CAG
atttaatcgataaaagctgt

SEQ ID NO: 168483 - DNA, 20 bp, Artificial Sequence
  Description of Artificial Sequence: Synthetic oligonucleotide
  Target: LAMA2; (+) strand; PAM type: NRG; PAM sequence: TAG
ataaaagctgtcagtttgtg

SEQ ID NO: 168484 - DNA, 20 bp, Artificial Sequence
  Description of Artificial Sequence: Synthetic oligonucleotide
  Target: LAMA2; (+) strand; PAM type: NRG; PAM sequence: TAG
agctgtcagtttgtgtagca

SEQ ID NO: 168485 - DNA, 20 bp, Artificial Sequence
  Description of Artificial Sequence: Synthetic oligonucleotide
  Target: LAMA2; (+) strand; PAM type: NRG; PAM sequence: GAG
ctgtcagtttgtgtagcata

SEQ ID NO: 168486 - DNA, 20 bp, Artificial Sequence
  Description of Artificial Sequence: Synthetic oligonucleotide
  Target: LAMA2; (+) strand; PAM type: NRG; PAM sequence: GAG
agtttgtgtagcatagagat

SEQ ID NO: 168487 - DNA, 20 bp, Artificial Sequence
  Description of Artificial Sequence: Synthetic oligonucleotide
  Target: LAMA2; (+) strand; PAM type: NRG; PAM sequence: CAG
ttgtgtagcatagagatgag

SEQ ID NO: 168488 - DNA, 20 bp, Artificial Sequence
  Description of Artificial Sequence: Synthetic oligonucleotide
  Target: LAMA2; (+) strand; PAM type: NRG; PAM sequence: AGG
tgtgtagcatagagatgagc

SEQ ID NO: 168489 - DNA, 20 bp, Artificial Sequence
  Description of Artificial Sequence: Synthetic oligonucleotide
  Target: LAMA2; (+) strand; PAM type: NRG; PAM sequence: GGG
gtgtagcatagagatgagca

SEQ ID NO: 168490 - DNA, 20 bp, Artificial Sequence
  Description of Artificial Sequence: Synthetic oligonucleotide
  Target: LAMA2; (+) strand; PAM type: NRG; PAM sequence: CAG
tagagatgagcagggccata

SEQ ID NO: 168491 - DNA, 20 bp, Artificial Sequence
  Description of Artificial Sequence: Synthetic oligonucleotide
  Target: LAMA2; (+) strand; PAM type: NRG; PAM sequence: GAG
ggccatacagtatcaaatgt

SEQ ID NO: 168492 - DNA, 20 bp, Artificial Sequence
  Description of Artificial Sequence: Synthetic oligonucleotide
  Target: LAMA2; (+) strand; PAM type: NRG; PAM sequence: AAG
tatcaaatgtgagtgactta

SEQ ID NO: 168493 - DNA, 20 bp, Artificial Sequence
  Description of Artificial Sequence: Synthetic oligonucleotide
  Target: LAMA2; (+) strand; PAM type: NRG; PAM sequence: CAG
agtgacttaaagtgtttttc

SEQ ID NO: 168494 - DNA, 20 bp, Artificial Sequence
  Description of Artificial Sequence: Synthetic oligonucleotide
  Target: LAMA2; (+) strand; PAM type: NRG; PAM sequence: TAG
ccagtcctcaaacattgtta

SEQ ID NO: 168495 - DNA, 20 bp, Artificial Sequence
  Description of Artificial Sequence: Synthetic oligonucleotide
  Target: LAMA2; (+) strand; PAM type: NRG; PAM sequence: CAG
atctctaacatataaatgat

SEQ ID NO: 168496 - DNA, 20 bp, Artificial Sequence
  Description of Artificial Sequence: Synthetic oligonucleotide
  Target: LAMA2; (+) strand; PAM type: NRG; PAM sequence: AGG
tctctaacatataaatgatc

SEQ ID NO: 168497 - DNA, 20 bp, Artificial Sequence
  Description of Artificial Sequence: Synthetic oligonucleotide
  Target: LAMA2; (+) strand; PAM type: NRG; PAM sequence: CAG
ctctgaaaaattgctttatt

SEQ ID NO: 168498 - DNA, 20 bp, Artificial Sequence
  Description of Artificial Sequence: Synthetic oligonucleotide
  Target: LAMA2; (+) strand; PAM type: NRG; PAM sequence: AAG
tattcagctatattaaacca

SEQ ID NO: 168499 - DNA, 20 bp, Artificial Sequence
  Description of Artificial Sequence: Synthetic oligonucleotide
  Target: LAMA2; (+) strand; PAM type: NRG; PAM sequence: TGG
ctatattaaaccaaagttct

SEQ ID NO: 168500 - DNA, 20 bp, Artificial Sequence
  Description of Artificial Sequence: Synthetic oligonucleotide
  Target: LAMA2; (+) strand; PAM type: NRG; PAM sequence: CAG
ccttccaaataaatttgttc

SEQ ID NO: 168501 - DNA, 20 bp, Artificial Sequence
  Description of Artificial Sequence: Synthetic oligonucleotide
  Target: LAMA2; (+) strand; PAM type: NRG; PAM sequence: GAG
aataaatttgttccagtgct

SEQ ID NO: 168502 - DNA, 20 bp, Artificial Sequence
  Description of Artificial Sequence: Synthetic oligonucleotide
  Target: LAMA2; (+) strand; PAM type: NRG; PAM sequence: GAG
taaatttgttccagtgctga

SEQ ID NO: 168503 - DNA, 20 bp, Artificial Sequence
  Description of Artificial Sequence: Synthetic oligonucleotide
  Target: LAMA2; (+) strand; PAM type: NRG; PAM sequence: CAG
aaatcatctttcgacctgct

SEQ ID NO: 168504 - DNA, 20 bp, Artificial Sequence
  Description of Artificial Sequence: Synthetic oligonucleotide
  Target: LAMA2; (+) strand; PAM type: NRG; PAM sequence: CAG
ttcgacctgctcagactgat

SEQ ID NO: 168505 - DNA, 20 bp, Artificial Sequence
  Description of Artificial Sequence: Synthetic oligonucleotide
  Target: LAMA2; (+) strand; PAM type: NRG; PAM sequence: AGG
tcgacctgctcagactgatc

SEQ ID NO: 168506 - DNA, 20 bp, Artificial Sequence
  Description of Artificial Sequence: Synthetic oligonucleotide
  Target: LAMA2; (+) strand; PAM type: NRG; PAM sequence: TAG
cctgctcagactgatcaggt

SEQ ID NO: 168507 - DNA, 20 bp, Artificial Sequence
  Description of Artificial Sequence: Synthetic oligonucleotide
  Target: LAMA2; (+) strand; PAM type: NRG; PAM sequence: AGG
ctgctcagactgatcaggtt

SEQ ID NO: 168508 - DNA, 20 bp, Artificial Sequence
  Description of Artificial Sequence: Synthetic oligonucleotide
  Target: LAMA2; (+) strand; PAM type: NRG; PAM sequence: GAG
taaaactgcttaaatttctt

SEQ ID NO: 168509 - DNA, 20 bp, Artificial Sequence
  Description of Artificial Sequence: Synthetic oligonucleotide
  Target: LAMA2; (+) strand; PAM type: NRG; PAM sequence: TAG
tcttgagtatccctgtaata

SEQ ID NO: 168510 - DNA, 20 bp, Artificial Sequence
  Description of Artificial Sequence: Synthetic oligonucleotide
  Target: LAMA2; (+) strand; PAM type: NRG; PAM sequence: TAG
ttaatcaatctgaatctgct

SEQ ID NO: 168511 - DNA, 20 bp, Artificial Sequence
  Description of Artificial Sequence: Synthetic oligonucleotide
  Target: LAMA2; (+) strand; PAM type: NRG; PAM sequence: AAG
ttattttacctataaatgtt

SEQ ID NO: 168512 - DNA, 20 bp, Artificial Sequence
  Description of Artificial Sequence: Synthetic oligonucleotide
  Target: LAMA2; (+) strand; PAM type: NRG; PAM sequence: AAG
ttttacctataaatgttaag

SEQ ID NO: 168513 - DNA, 20 bp, Artificial Sequence
  Description of Artificial Sequence: Synthetic oligonucleotide
  Target: LAMA2; (+) strand; PAM type: NRG; PAM sequence: AAG
taaatgttaagaagccattt

SEQ ID NO: 168514 - DNA, 20 bp, Artificial Sequence
  Description of Artificial Sequence: Synthetic oligonucleotide
  Target: LAMA2; (+) strand; PAM type: NRG; PAM sequence: TGG
atgttaagaagccatttaag

SEQ ID NO: 168515 - DNA, 20 bp, Artificial Sequence
  Description of Artificial Sequence: Synthetic oligonucleotide
  Target: LAMA2; (+) strand; PAM type: NRG; PAM sequence: CAG
acttacttaaatgctacttt

SEQ ID NO: 168516 - DNA, 20 bp, Artificial Sequence
  Description of Artificial Sequence: Synthetic oligonucleotide
  Target: LAMA2; (+) strand; PAM type: NRG; PAM sequence: AAG
tcaaaaacatgaatgtataa

SEQ ID NO: 168517 - DNA, 20 bp, Artificial Sequence
  Description of Artificial Sequence: Synthetic oligonucleotide
  Target: LAMA2; (+) strand; PAM type: NRG; PAM sequence: CAG
catgttttgccttttctaac

SEQ ID NO: 168518 - DNA, 20 bp, Artificial Sequence
  Description of Artificial Sequence: Synthetic oligonucleotide
  Target: LAMA2; (+) strand; PAM type: NRG; PAM sequence: CAG
tttgccttttctaaccagca

SEQ ID NO: 168519 - DNA, 20 bp, Artificial Sequence
  Description of Artificial Sequence: Synthetic oligonucleotide
  Target: LAMA2; (+) strand; PAM type: NRG; PAM sequence: AGG
ttgccttttctaaccagcac

SEQ ID NO: 168520 - DNA, 20 bp, Artificial Sequence
  Description of Artificial Sequence: Synthetic oligonucleotide
  Target: LAMA2; (+) strand; PAM type: NRG; PAM sequence: GGG
tgccttttctaaccagcaca

SEQ ID NO: 168521 - DNA, 20 bp, Artificial Sequence
  Description of Artificial Sequence: Synthetic oligonucleotide
  Target: LAMA2; (+) strand; PAM type: NRG; PAM sequence: CAG
acagggtgaattaactttca

SEQ ID NO: 168522 - DNA, 20 bp, Artificial Sequence
  Description of Artificial Sequence: Synthetic oligonucleotide
  Target: LAMA2; (+) strand; PAM type: NRG; PAM sequence: CAG
ggtgaattaactttcacagt

SEQ ID NO: 168523 - DNA, 20 bp, Artificial Sequence
  Description of Artificial Sequence: Synthetic oligonucleotide
  Target: LAMA2; (+) strand; PAM type: NRG; PAM sequence: CAG
aactttcacagtcagccatg

SEQ ID NO: 168524 - DNA, 20 bp, Artificial Sequence
  Description of Artificial Sequence: Synthetic oligonucleotide
  Target: LAMA2; (+) strand; PAM type: NRG; PAM sequence: CAG
agtcagccatgcagatttca

SEQ ID NO: 168525 - DNA, 20 bp, Artificial Sequence
  Description of Artificial Sequence: Synthetic oligonucleotide
  Target: LAMA2; (+) strand; PAM type: NRG; PAM sequence: CAG
ccatgcagatttcacagtct

SEQ ID NO: 168526 - DNA, 20 bp, Artificial Sequence
  Description of Artificial Sequence: Synthetic oligonucleotide
  Target: LAMA2; (+) strand; PAM type: NRG; PAM sequence: AGG
catgcagatttcacagtctc

SEQ ID NO: 168527 - DNA, 20 bp, Artificial Sequence
  Description of Artificial Sequence: Synthetic oligonucleotide
  Target: LAMA2; (+) strand; PAM type: NRG; PAM sequence: CAG
gcagatttcacagtctcagg

SEQ ID NO: 168528 - DNA, 20 bp, Artificial Sequence
  Description of Artificial Sequence: Synthetic oligonucleotide
  Target: LAMA2; (+) strand; PAM type: NRG; PAM sequence: AAG
ttcacagtctcaggcagcta

SEQ ID NO: 168529 - DNA, 20 bp, Artificial Sequence
  Description of Artificial Sequence: Synthetic oligonucleotide
  Target: LAMA2; (+) strand; PAM type: NRG; PAM sequence: TGG
cagtctcaggcagctaaaga

SEQ ID NO: 168530 - DNA, 20 bp, Artificial Sequence
  Description of Artificial Sequence: Synthetic oligonucleotide
  Target: LAMA2; (+) strand; PAM type: NRG; PAM sequence: CAG
atggtctatgattatcttgc

SEQ ID NO: 168531 - DNA, 20 bp, Artificial Sequence
  Description of Artificial Sequence: Synthetic oligonucleotide
  Target: LAMA2; (+) strand; PAM type: NRG; PAM sequence: TAG
gattatcttgccagtattta

SEQ ID NO: 168532 - DNA, 20 bp, Artificial Sequence
  Description of Artificial Sequence: Synthetic oligonucleotide
  Target: LAMA2; (+) strand; PAM type: NRG; PAM sequence: TGG
ttgccagtatttatagcttt

SEQ ID NO: 168533 - DNA, 20 bp, Artificial Sequence
  Description of Artificial Sequence: Synthetic oligonucleotide
  Target: LAMA2; (+) strand; PAM type: NRG; PAM sequence: TGG
ataaaacttgttgtccaatc

SEQ ID NO: 168534 - DNA, 20 bp, Artificial Sequence
  Description of Artificial Sequence: Synthetic oligonucleotide
  Target: LAMA2; (+) strand; PAM type: NRG; PAM sequence: GGG
taaaacttgttgtccaatct

SEQ ID NO: 168535 - DNA, 20 bp, Artificial Sequence
  Description of Artificial Sequence: Synthetic oligonucleotide
  Target: LAMA2; (+) strand; PAM type: NRG; PAM sequence: CAG
ctgggacactatattaaaaa

SEQ ID NO: 168536 - DNA, 20 bp, Artificial Sequence
  Description of Artificial Sequence: Synthetic oligonucleotide
  Target: LAMA2; (+) strand; PAM type: NRG; PAM sequence: AGG
tgggacactatattaaaaac

SEQ ID NO: 168537 - DNA, 20 bp, Artificial Sequence
  Description of Artificial Sequence: Synthetic oligonucleotide
  Target: LAMA2; (+) strand; PAM type: NRG; PAM sequence: CAG
gacactatattaaaaacagg

SEQ ID NO: 168538 - DNA, 20 bp, Artificial Sequence
  Description of Artificial Sequence: Synthetic oligonucleotide
  Target: LAMA2; (+) strand; PAM type: NRG; PAM sequence: TAG
ttaaaaacaggcagtgtttt

SEQ ID NO: 168539 - DNA, 20 bp, Artificial Sequence
  Description of Artificial Sequence: Synthetic oligonucleotide
  Target: LAMA2; (+) strand; PAM type: NRG; PAM sequence: AAG
aggcagtgtttttagcaatt

SEQ ID NO: 168540 - DNA, 20 bp, Artificial Sequence
  Description of Artificial Sequence: Synthetic oligonucleotide
  Target: LAMA2; (+) strand; PAM type: NRG; PAM sequence: CAG
tagcaattaagccaaaacaa

SEQ ID NO: 168541 - DNA, 20 bp, Artificial Sequence
  Description of Artificial Sequence: Synthetic oligonucleotide
  Target: LAMA2; (+) strand; PAM type: NRG; PAM sequence: AGG
agcaattaagccaaaacaac

SEQ ID NO: 168542 - DNA, 20 bp, Artificial Sequence
  Description of Artificial Sequence: Synthetic oligonucleotide
  Target: LAMA2; (+) strand; PAM type: NRG; PAM sequence: TAG
taagccaaaacaacaggtaa

SEQ ID NO: 168543 - DNA, 20 bp, Artificial Sequence
  Description of Artificial Sequence: Synthetic oligonucleotide
  Target: LAMA2; (+) strand; PAM type: NRG; PAM sequence: AGG
aagccaaaacaacaggtaat

SEQ ID NO: 168544 - DNA, 20 bp, Artificial Sequence
  Description of Artificial Sequence: Synthetic oligonucleotide
  Target: LAMA2; (+) strand; PAM type: NRG; PAM sequence: TGG
caggtaataggaaattgtcc

SEQ ID NO: 168545 - DNA, 20 bp, Artificial Sequence
  Description of Artificial Sequence: Synthetic oligonucleotide
  Target: LAMA2; (+) strand; PAM type: NRG; PAM sequence: GGG
aggtaataggaaattgtcct

SEQ ID NO: 168546 - DNA, 20 bp, Artificial Sequence
  Description of Artificial Sequence: Synthetic oligonucleotide
  Target: LAMA2; (+) strand; PAM type: NRG; PAM sequence: CAG
ggaaattgtcctgggcaaac

SEQ ID NO: 168547 - DNA, 20 bp, Artificial Sequence
  Description of Artificial Sequence: Synthetic oligonucleotide
  Target: LAMA2; (+) strand; PAM type: NRG; PAM sequence: TGG
cctgggcaaaccagaatgta

SEQ ID NO: 168548 - DNA, 20 bp, Artificial Sequence
  Description of Artificial Sequence: Synthetic oligonucleotide
  Target: LAMA2; (+) strand; PAM type: NRG; PAM sequence: TAG
accagaatgtatggccctgc

SEQ ID NO: 168549 - DNA, 20 bp, Artificial Sequence
  Description of Artificial Sequence: Synthetic oligonucleotide
  Target: LAMA2; (+) strand; PAM type: NRG; PAM sequence: AAG
ggccctgctagcattgtgta

SEQ ID NO: 168550 - DNA, 20 bp, Artificial Sequence
  Description of Artificial Sequence: Synthetic oligonucleotide
  Target: LAMA2; (+) strand; PAM type: NRG; PAM sequence: CAG
gtgtaaagttaccaaacttc

SEQ ID NO: 168551 - DNA, 20 bp, Artificial Sequence
  Description of Artificial Sequence: Synthetic oligonucleotide
  Target: LAMA2; (+) strand; PAM type: NRG; PAM sequence: CGG
aaacttccagtgtcataaca

SEQ ID NO: 168552 - DNA, 20 bp, Artificial Sequence
  Description of Artificial Sequence: Synthetic oligonucleotide
  Target: LAMA2; (+) strand; PAM type: NRG; PAM sequence: GAG
acttccagtgtcataacacg

SEQ ID NO: 168553 - DNA, 20 bp, Artificial Sequence
  Description of Artificial Sequence: Synthetic oligonucleotide
  Target: LAMA2; (+) strand; PAM type: NRG; PAM sequence: TAG
aacacggagtgaaatacact

SEQ ID NO: 168554 - DNA, 20 bp, Artificial Sequence
  Description of Artificial Sequence: Synthetic oligonucleotide
  Target: LAMA2; (+) strand; PAM type: NRG; PAM sequence: AGG
acacggagtgaaatacactt

SEQ ID NO: 168555 - DNA, 20 bp, Artificial Sequence
  Description of Artificial Sequence: Synthetic oligonucleotide
  Target: LAMA2; (+) strand; PAM type: NRG; PAM sequence: TGG
gtgaaatacacttaggtgaa

SEQ ID NO: 168556 - DNA, 20 bp, Artificial Sequence
  Description of Artificial Sequence: Synthetic oligonucleotide
  Target: LAMA2; (+) strand; PAM type: NRG; PAM sequence: TAG
cacttaggtgaatggatgca

SEQ ID NO: 168557 - DNA, 20 bp, Artificial Sequence
  Description of Artificial Sequence: Synthetic oligonucleotide
  Target: LAMA2; (+) strand; PAM type: NRG; PAM sequence: TGG
tgaatggatgcatagatacg

SEQ ID NO: 168558 - DNA, 20 bp, Artificial Sequence
  Description of Artificial Sequence: Synthetic oligonucleotide
  Target: LAMA2; (+) strand; PAM type: NRG; PAM sequence: AAG
atggatgcatagatacgtgg

SEQ ID NO: 168559 - DNA, 20 bp, Artificial Sequence
  Description of Artificial Sequence: Synthetic oligonucleotide
  Target: LAMA2; (+) strand; PAM type: NRG; PAM sequence: GAG
ggatgcatagatacgtggaa

SEQ ID NO: 168560 - DNA, 20 bp, Artificial Sequence
  Description of Artificial Sequence: Synthetic oligonucleotide
  Target: LAMA2; (+) strand; PAM type: NRG; PAM sequence: TGG
tacgtggaagagtcaattaa

SEQ ID NO: 168561 - DNA, 20 bp, Artificial Sequence
  Description of Artificial Sequence: Synthetic oligonucleotide
  Target: LAMA2; (+) strand; PAM type: NRG; PAM sequence: TAG
gtcaattaatggactgcatt

SEQ ID NO: 168562 - DNA, 20 bp, Artificial Sequence
  Description of Artificial Sequence: Synthetic oligonucleotide
  Target: LAMA2; (+) strand; PAM type: NRG; PAM sequence: AGG
tcaattaatggactgcattt

SEQ ID NO: 168563 - DNA, 20 bp, Artificial Sequence
  Description of Artificial Sequence: Synthetic oligonucleotide
  Target: LAMA2; (+) strand; PAM type: NRG; PAM sequence: GGG
caattaatggactgcattta

SEQ ID NO: 168564 - DNA, 20 bp, Artificial Sequence
  Description of Artificial Sequence: Synthetic oligonucleotide
  Target: LAMA2; (+) strand; PAM type: NRG; PAM sequence: CAG
gactgcatttagggttcatc

SEQ ID NO: 168565 - DNA, 20 bp, Artificial Sequence
  Description of Artificial Sequence: Synthetic oligonucleotide
  Target: LAMA2; (+) strand; PAM type: NRG; PAM sequence: TGG
gcatttagggttcatccagt

SEQ ID NO: 168566 - DNA, 20 bp, Artificial Sequence
  Description of Artificial Sequence: Synthetic oligonucleotide
  Target: LAMA2; (+) strand; PAM type: NRG; PAM sequence: CAG
ctctttctacttttccaaat

SEQ ID NO: 168567 - DNA, 20 bp, Artificial Sequence
  Description of Artificial Sequence: Synthetic oligonucleotide
  Target: LAMA2; (+) strand; PAM type: NRG; PAM sequence: CAG
atatcattaacccacttcca

SEQ ID NO: 168568 - DNA, 20 bp, Artificial Sequence
  Description of Artificial Sequence: Synthetic oligonucleotide
  Target: LAMA2; (+) strand; PAM type: NRG; PAM sequence: GAG
acacatgaaaaatccatctt

SEQ ID NO: 168569 - DNA, 20 bp, Artificial Sequence
  Description of Artificial Sequence: Synthetic oligonucleotide
  Target: LAMA2; (+) strand; PAM type: NRG; PAM sequence: AGG
cacatgaaaaatccatcttg

SEQ ID NO: 168570 - DNA, 20 bp, Artificial Sequence
  Description of Artificial Sequence: Synthetic oligonucleotide
  Target: LAMA2; (+) strand; PAM type: NRG; PAM sequence: AAG
atgaaaaatccatcttgagg

SEQ ID NO: 168571 - DNA, 20 bp, Artificial Sequence
  Description of Artificial Sequence: Synthetic oligonucleotide
  Target: LAMA2; (+) strand; PAM type: NRG; PAM sequence: TGG
aatccatcttgaggaagata

SEQ ID NO: 168572 - DNA, 20 bp, Artificial Sequence
  Description of Artificial Sequence: Synthetic oligonucleotide
  Target: LAMA2; (+) strand; PAM type: NRG; PAM sequence: AAG
cttgaggaagatatggcaaa

SEQ ID NO: 168573 - DNA, 20 bp, Artificial Sequence
  Description of Artificial Sequence: Synthetic oligonucleotide
  Target: LAMA2; (+) strand; PAM type: NRG; PAM sequence: AAG
ggaagatatggcaaaaagaa

SEQ ID NO: 168574 - DNA, 20 bp, Artificial Sequence
  Description of Artificial Sequence: Synthetic oligonucleotide
  Target: LAMA2; (+) strand; PAM type: NRG; PAM sequence: AAG
caaaaagaaaagatgaataa

SEQ ID NO: 168575 - DNA, 20 bp, Artificial Sequence
  Description of Artificial Sequence: Synthetic oligonucleotide
  Target: LAMA2; (+) strand; PAM type: NRG; PAM sequence: CAG
aaaagatgaataaaagtaaa

SEQ ID NO: 168576 - DNA, 20 bp, Artificial Sequence
  Description of Artificial Sequence: Synthetic oligonucleotide
  Target: LAMA2; (+) strand; PAM type: NRG; PAM sequence: GAG
taaaagtaaacagaaaatct

SEQ ID NO: 168577 - DNA, 20 bp, Artificial Sequence
  Description of Artificial Sequence: Synthetic oligonucleotide
  Target: LAMA2; (+) strand; PAM type: NRG; PAM sequence: TAG
aagtaaacagaaaatctgag

SEQ ID NO: 168578 - DNA, 20 bp, Artificial Sequence
  Description of Artificial Sequence: Synthetic oligonucleotide
  Target: LAMA2; (+) strand; PAM type: NRG; PAM sequence: TGG
acttgcctcttttgcctcat

SEQ ID NO: 168579 - DNA, 20 bp, Artificial Sequence
  Description of Artificial Sequence: Synthetic oligonucleotide
  Target: LAMA2; (+) strand; PAM type: NRG; PAM sequence: TGG
tgcctcattggtaaaattaa

SEQ ID NO: 168580 - DNA, 20 bp, Artificial Sequence
  Description of Artificial Sequence: Synthetic oligonucleotide
  Target: LAMA2; (+) strand; PAM type: NRG; PAM sequence: GGG
gcctcattggtaaaattaat

SEQ ID NO: 168581 - DNA, 20 bp, Artificial Sequence
  Description of Artificial Sequence: Synthetic oligonucleotide
  Target: LAMA2; (+) strand; PAM type: NRG; PAM sequence: TGG
aattaatgggttgtattatt

SEQ ID NO: 168582 - DNA, 20 bp, Artificial Sequence
  Description of Artificial Sequence: Synthetic oligonucleotide
  Target: LAMA2; (+) strand; PAM type: NRG; PAM sequence: GAG
ttgtattatttggttatttt

SEQ ID NO: 168583 - DNA, 20 bp, Artificial Sequence
  Description of Artificial Sequence: Synthetic oligonucleotide
  Target: LAMA2; (+) strand; PAM type: NRG; PAM sequence: GAG
ttttgagatctgaaattcat

SEQ ID NO: 168584 - DNA, 20 bp, Artificial Sequence
  Description of Artificial Sequence: Synthetic oligonucleotide
  Target: LAMA2; (+) strand; PAM type: NRG; PAM sequence: TAG
agatctgaaattcatgagta

SEQ ID NO: 168585 - DNA, 20 bp, Artificial Sequence
  Description of Artificial Sequence: Synthetic oligonucleotide
  Target: LAMA2; (+) strand; PAM type: NRG; PAM sequence: AGG
gatctgaaattcatgagtat

SEQ ID NO: 168586 - DNA, 20 bp, Artificial Sequence
  Description of Artificial Sequence: Synthetic oligonucleotide
  Target: LAMA2; (+) strand; PAM type: NRG; PAM sequence: GGG
atctgaaattcatgagtata

SEQ ID NO: 168587 - DNA, 20 bp, Artificial Sequence
  Description of Artificial Sequence: Synthetic oligonucleotide
  Target: LAMA2; (+) strand; PAM type: NRG; PAM sequence: AAG
tgaaattcatgagtataggg

SEQ ID NO: 168588 - DNA, 20 bp, Artificial Sequence
  Description of Artificial Sequence: Synthetic oligonucleotide
  Target: LAMA2; (+) strand; PAM type: NRG; PAM sequence: CAG
ttcatgagtatagggaagcc

SEQ ID NO: 168589 - DNA, 20 bp, Artificial Sequence
  Description of Artificial Sequence: Synthetic oligonucleotide
  Target: LAMA2; (+) strand; PAM type: NRG; PAM sequence: AAG
atgagtatagggaagcccag

SEQ ID NO: 168590 - DNA, 20 bp, Artificial Sequence
  Description of Artificial Sequence: Synthetic oligonucleotide
  Target: LAMA2; (+) strand; PAM type: NRG; PAM sequence: TAG
gggaagcccagaagtcaata

SEQ ID NO: 168591 - DNA, 20 bp, Artificial Sequence
  Description of Artificial Sequence: Synthetic oligonucleotide
  Target: LAMA2; (+) strand; PAM type: NRG; PAM sequence: AAG
gcactcatctctaattatac

SEQ ID NO: 168592 - DNA, 20 bp, Artificial Sequence
  Description of Artificial Sequence: Synthetic oligonucleotide
  Target: LAMA2; (+) strand; PAM type: NRG; PAM sequence: GAG
actcatctctaattatacaa

SEQ ID NO: 168593 - DNA, 20 bp, Artificial Sequence
  Description of Artificial Sequence: Synthetic oligonucleotide
  Target: LAMA2; (+) strand; PAM type: NRG; PAM sequence: AGG
ctcatctctaattatacaag

SEQ ID NO: 168594 - DNA, 20 bp, Artificial Sequence
  Description of Artificial Sequence: Synthetic oligonucleotide
  Target: LAMA2; (+) strand; PAM type: NRG; PAM sequence: AAG
tacaagaggacttaacaaaa

SEQ ID NO: 168595 - DNA, 20 bp, Artificial Sequence
  Description of Artificial Sequence: Synthetic oligonucleotide
  Target: LAMA2; (+) strand; PAM type: NRG; PAM sequence: TAG
taacaaaaaagtttatgatc

SEQ ID NO: 168596 - DNA, 20 bp, Artificial Sequence
  Description of Artificial Sequence: Synthetic oligonucleotide
  Target: LAMA2; (+) strand; PAM type: NRG; PAM sequence: GAG
acaaaaaagtttatgatcta

SEQ ID NO: 168597 - DNA, 20 bp, Artificial Sequence
  Description of Artificial Sequence: Synthetic oligonucleotide
  Target: LAMA2; (+) strand; PAM type: NRG; PAM sequence: CAG
aaaaagtttatgatctagag

SEQ ID NO: 168598 - DNA, 20 bp, Artificial Sequence
  Description of Artificial Sequence: Synthetic oligonucleotide
  Target: LAMA2; (+) strand; PAM type: NRG; PAM sequence: CAG
tttatgatctagagcagtca

SEQ ID NO: 168599 - DNA, 20 bp, Artificial Sequence
  Description of Artificial Sequence: Synthetic oligonucleotide
  Target: LAMA2; (+) strand; PAM type: NRG; PAM sequence: CAG
cacagacaaactatgaccca

SEQ ID NO: 168600 - DNA, 20 bp, Artificial Sequence
  Description of Artificial Sequence: Synthetic oligonucleotide
  Target: LAMA2; (+) strand; PAM type: NRG; PAM sequence: AGG
acagacaaactatgacccac

SEQ ID NO: 168601 - DNA, 20 bp, Artificial Sequence
  Description of Artificial Sequence: Synthetic oligonucleotide
  Target: LAMA2; (+) strand; PAM type: NRG; PAM sequence: TGG
tatgacccacaggccaaatt

SEQ ID NO: 168602 - DNA, 20 bp, Artificial Sequence
  Description of Artificial Sequence: Synthetic oligonucleotide
  Target: LAMA2; (+) strand; PAM type: NRG; PAM sequence: TGG
ggcccatttctgattctgta

SEQ ID NO: 168603 - DNA, 20 bp, Artificial Sequence
  Description of Artificial Sequence: Synthetic oligonucleotide
  Target: LAMA2; (+) strand; PAM type: NRG; PAM sequence: AAG
attctgtatggcactcaatt

SEQ ID NO: 168604 - DNA, 20 bp, Artificial Sequence
  Description of Artificial Sequence: Synthetic oligonucleotide
  Target: LAMA2; (+) strand; PAM type: NRG; PAM sequence: CAG
tcaattaagaactgttgtta

SEQ ID NO: 168605 - DNA, 20 bp, Artificial Sequence
  Description of Artificial Sequence: Synthetic oligonucleotide
  Target: LAMA2; (+) strand; PAM type: NRG; PAM sequence: AGG
caattaagaactgttgttac

SEQ ID NO: 168606 - DNA, 20 bp, Artificial Sequence
  Description of Artificial Sequence: Synthetic oligonucleotide
  Target: LAMA2; (+) strand; PAM type: NRG; PAM sequence: CAG
taagaactgttgttacaggt

SEQ ID NO: 168607 - DNA, 20 bp, Artificial Sequence
  Description of Artificial Sequence: Synthetic oligonucleotide
  Target: LAMA2; (+) strand; PAM type: NRG; PAM sequence: CAG
atttacaatcaatttgatga

SEQ ID NO: 168608 - DNA, 20 bp, Artificial Sequence
  Description of Artificial Sequence: Synthetic oligonucleotide
  Target: LAMA2; (+) strand; PAM type: NRG; PAM sequence: AGG
tttacaatcaatttgatgac

SEQ ID NO: 168609 - DNA, 20 bp, Artificial Sequence
  Description of Artificial Sequence: Synthetic oligonucleotide
  Target: LAMA2; (+) strand; PAM type: NRG; PAM sequence: GAG
tacaatcaatttgatgacag

SEQ ID NO: 168610 - DNA, 20 bp, Artificial Sequence
  Description of Artificial Sequence: Synthetic oligonucleotide
  Target: LAMA2; (+) strand; PAM type: NRG; PAM sequence: AGG
acaatcaatttgatgacagg

SEQ ID NO: 168611 - DNA, 20 bp, Artificial Sequence
  Description of Artificial Sequence: Synthetic oligonucleotide
  Target: LAMA2; (+) strand; PAM type: NRG; PAM sequence: AAG
atttgatgacaggaggcact

SEQ ID NO: 168612 - DNA, 20 bp, Artificial Sequence
  Description of Artificial Sequence: Synthetic oligonucleotide
  Target: LAMA2; (+) strand; PAM type: NRG; PAM sequence: AAG
actaagttataacccaaatg

SEQ ID NO: 168613 - DNA, 20 bp, Artificial Sequence
  Description of Artificial Sequence: Synthetic oligonucleotide
  Target: LAMA2; (+) strand; PAM type: NRG; PAM sequence: AGG
ctaagttataacccaaatga

SEQ ID NO: 168614 - DNA, 20 bp, Artificial Sequence
  Description of Artificial Sequence: Synthetic oligonucleotide
  Target: LAMA2; (+) strand; PAM type: NRG; PAM sequence: CAG
tgaaggataatttcaaacct

SEQ ID NO: 168615 - DNA, 20 bp, Artificial Sequence
  Description of Artificial Sequence: Synthetic oligonucleotide
  Target: LAMA2; (+) strand; PAM type: NRG; PAM sequence: AGG
gaaggataatttcaaacctc

SEQ ID NO: 168616 - DNA, 20 bp, Artificial Sequence
  Description of Artificial Sequence: Synthetic oligonucleotide
  Target: LAMA2; (+) strand; PAM type: NRG; PAM sequence: AAG
ggataatttcaaacctcagg

SEQ ID NO: 168617 - DNA, 20 bp, Artificial Sequence
  Description of Artificial Sequence: Synthetic oligonucleotide
  Target: LAMA2; (+) strand; PAM type: NRG; PAM sequence: TAG
aagaatccaattcttctcat

SEQ ID NO: 168618 - DNA, 20 bp, Artificial Sequence
  Description of Artificial Sequence: Synthetic oligonucleotide
  Target: LAMA2; (+) strand; PAM type: NRG; PAM sequence: TAG
aatccaattcttctcattag

SEQ ID NO: 168619 - DNA, 20 bp, Artificial Sequence
  Description of Artificial Sequence: Synthetic oligonucleotide
  Target: LAMA2; (+) strand; PAM type: NRG; PAM sequence: AAG
attagtagcctgatattaca

SEQ ID NO: 168620 - DNA, 20 bp, Artificial Sequence
  Description of Artificial Sequence: Synthetic oligonucleotide
  Target: LAMA2; (+) strand; PAM type: NRG; PAM sequence: CAG
gttttcaattccatcaacaa

SEQ ID NO: 168621 - DNA, 20 bp, Artificial Sequence
  Description of Artificial Sequence: Synthetic oligonucleotide
  Target: LAMA2; (+) strand; PAM type: NRG; PAM sequence: CAG
ttcaattccatcaacaacag

SEQ ID NO: 168622 - DNA, 20 bp, Artificial Sequence
  Description of Artificial Sequence: Synthetic oligonucleotide
  Target: LAMA2; (+) strand; PAM type: NRG; PAM sequence: TAG
tcaacaacagcagaatgctt

SEQ ID NO: 168623 - DNA, 20 bp, Artificial Sequence
  Description of Artificial Sequence: Synthetic oligonucleotide
  Target: LAMA2; (+) strand; PAM type: NRG; PAM sequence: CGG
agaattttatttctttttca

SEQ ID NO: 168624 - DNA, 20 bp, Artificial Sequence
  Description of Artificial Sequence: Synthetic oligonucleotide
  Target: LAMA2; (+) strand; PAM type: NRG; PAM sequence: AAG
gatttttcctatgtcctgca

SEQ ID NO: 168625 - DNA, 20 bp, Artificial Sequence
  Description of Artificial Sequence: Synthetic oligonucleotide
  Target: LAMA2; (+) strand; PAM type: NRG; PAM sequence: CAG
gtttactatctgacccttta

SEQ ID NO: 168626 - DNA, 20 bp, Artificial Sequence
  Description of Artificial Sequence: Synthetic oligonucleotide
  Target: LAMA2; (+) strand; PAM type: NRG; PAM sequence: AGG
tttactatctgaccctttac

SEQ ID NO: 168627 - DNA, 20 bp, Artificial Sequence
  Description of Artificial Sequence: Synthetic oligonucleotide
  Target: LAMA2; (+) strand; PAM type: NRG; PAM sequence: AAG
tatctgaccctttacaggaa

SEQ ID NO: 168628 - DNA, 20 bp, Artificial Sequence
  Description of Artificial Sequence: Synthetic oligonucleotide
  Target: LAMA2; (+) strand; PAM type: NRG; PAM sequence: TGG
aggaaaagttaactaatgta

SEQ ID NO: 168629 - DNA, 20 bp, Artificial Sequence
  Description of Artificial Sequence: Synthetic oligonucleotide
  Target: LAMA2; (+) strand; PAM type: NRG; PAM sequence: CAG
aatgtatggactcttgctat

SEQ ID NO: 168630 - DNA, 20 bp, Artificial Sequence
  Description of Artificial Sequence: Synthetic oligonucleotide
  Target: LAMA2; (+) strand; PAM type: NRG; PAM sequence: AAG
gttttgttgcatcaaaacaa

SEQ ID NO: 168631 - DNA, 20 bp, Artificial Sequence
  Description of Artificial Sequence: Synthetic oligonucleotide
  Target: LAMA2; (+) strand; PAM type: NRG; PAM sequence: TGG
aaagaccacacacaacaatg

SEQ ID NO: 168632 - DNA, 20 bp, Artificial Sequence
  Description of Artificial Sequence: Synthetic oligonucleotide
  Target: LAMA2; (+) strand; PAM type: NRG; PAM sequence: GAG
agaccacacacaacaatgtg

SEQ ID NO: 168633 - DNA, 20 bp, Artificial Sequence
  Description of Artificial Sequence: Synthetic oligonucleotide
  Target: LAMA2; (+) strand; PAM type: NRG; PAM sequence: CAG
gctttgtcactgtttcaatt

SEQ ID NO: 168634 - DNA, 20 bp, Artificial Sequence
  Description of Artificial Sequence: Synthetic oligonucleotide
  Target: LAMA2; (+) strand; PAM type: NRG; PAM sequence: AGG
ctttgtcactgtttcaattc

SEQ ID NO: 168635 - DNA, 20 bp, Artificial Sequence
  Description of Artificial Sequence: Synthetic oligonucleotide
  Target: LAMA2; (+) strand; PAM type: NRG; PAM sequence: TGG
tttcaattcaggtgtgcccc

SEQ ID NO: 168636 - DNA, 20 bp, Artificial Sequence
  Description of Artificial Sequence: Synthetic oligonucleotide
  Target: LAMA2; (+) strand; PAM type: NRG; PAM sequence: TGG
aggtgtgcccctggctatac

SEQ ID NO: 168637 - DNA, 20 bp, Artificial Sequence
  Description of Artificial Sequence: Synthetic oligonucleotide
  Target: LAMA2; (+) strand; PAM type: NRG; PAM sequence: CAG
tgtgcccctggctatactgg

SEQ ID NO: 168638 - DNA, 20 bp, Artificial Sequence
  Description of Artificial Sequence: Synthetic oligonucleotide
  Target: LAMA2; (+) strand; PAM type: NRG; PAM sequence: CAG
ccctggctatactggcagtc

SEQ ID NO: 168639 - DNA, 20 bp, Artificial Sequence
  Description of Artificial Sequence: Synthetic oligonucleotide
  Target: LAMA2; (+) strand; PAM type: NRG; PAM sequence: AGG
cctggctatactggcagtcc

SEQ ID NO: 168640 - DNA, 20 bp, Artificial Sequence
  Description of Artificial Sequence: Synthetic oligonucleotide
  Target: LAMA2; (+) strand; PAM type: NRG; PAM sequence: TGG
actggcagtccaggcaaccc

SEQ ID NO: 168641 - DNA, 20 bp, Artificial Sequence
  Description of Artificial Sequence: Synthetic oligonucleotide
  Target: LAMA2; (+) strand; PAM type: NRG; PAM sequence: GAG
tggcagtccaggcaaccctg

SEQ ID NO: 168642 - DNA, 20 bp, Artificial Sequence
  Description of Artificial Sequence: Synthetic oligonucleotide
  Target: LAMA2; (+) strand; PAM type: NRG; PAM sequence: AGG
ggcagtccaggcaaccctgg

SEQ ID NO: 168643 - DNA, 20 bp, Artificial Sequence
  Description of Artificial Sequence: Synthetic oligonucleotide
  Target: LAMA2; (+) strand; PAM type: NRG; PAM sequence: AAG
caaccctggaggctcctgcc

SEQ ID NO: 168644 - DNA, 20 bp, Artificial Sequence
  Description of Artificial Sequence: Synthetic oligonucleotide
  Target: LAMA2; (+) strand; PAM type: NRG; PAM sequence: GAG
gaggctcctgccaagaatgt

SEQ ID NO: 168645 - DNA, 20 bp, Artificial Sequence
  Description of Artificial Sequence: Synthetic oligonucleotide
  Target: LAMA2; (+) strand; PAM type: NRG; PAM sequence: TGG
gaatgtgagtgtgatcccta

SEQ ID NO: 168646 - DNA, 20 bp, Artificial Sequence
  Description of Artificial Sequence: Synthetic oligonucleotide
  Target: LAMA2; (+) strand; PAM type: NRG; PAM sequence: CAG
tgtgccctgtgaccctgtca

SEQ ID NO: 168647 - DNA, 20 bp, Artificial Sequence
  Description of Artificial Sequence: Synthetic oligonucleotide
  Target: LAMA2; (+) strand; PAM type: NRG; PAM sequence: AGG
gtgccctgtgaccctgtcac

SEQ ID NO: 168648 - DNA, 20 bp, Artificial Sequence
  Description of Artificial Sequence: Synthetic oligonucleotide
  Target: LAMA2; (+) strand; PAM type: NRG; PAM sequence: TGG
ggattctgcacgtgccgacc

SEQ ID NO: 168649 - DNA, 20 bp, Artificial Sequence
  Description of Artificial Sequence: Synthetic oligonucleotide
  Target: LAMA2; (+) strand; PAM type: NRG; PAM sequence: GAG
attctgcacgtgccgacctg

SEQ ID NO: 168650 - DNA, 20 bp, Artificial Sequence
  Description of Artificial Sequence: Synthetic oligonucleotide
  Target: LAMA2; (+) strand; PAM type: NRG; PAM sequence: CGG
cacgtgccgacctggagcca

SEQ ID NO: 168651 - DNA, 20 bp, Artificial Sequence
  Description of Artificial Sequence: Synthetic oligonucleotide
  Target: LAMA2; (+) strand; PAM type: NRG; PAM sequence: GGG
acgtgccgacctggagccac

SEQ ID NO: 168652 - DNA, 20 bp, Artificial Sequence
  Description of Artificial Sequence: Synthetic oligonucleotide
  Target: LAMA2; (+) strand; PAM type: NRG; PAM sequence: AAG
tgccgacctggagccacggg

SEQ ID NO: 168653 - DNA, 20 bp, Artificial Sequence
  Description of Artificial Sequence: Synthetic oligonucleotide
  Target: LAMA2; (+) strand; PAM type: NRG; PAM sequence: AGG
gccgacctggagccacggga

SEQ ID NO: 168654 - DNA, 20 bp, Artificial Sequence
  Description of Artificial Sequence: Synthetic oligonucleotide
  Target: LAMA2; (+) strand; PAM type: NRG; PAM sequence: AAG
gacctggagccacgggaagg

SEQ ID NO: 168655 - DNA, 20 bp, Artificial Sequence
  Description of Artificial Sequence: Synthetic oligonucleotide
  Target: LAMA2; (+) strand; PAM type: NRG; PAM sequence: CGG
gccacgggaaggaagtgtga

SEQ ID NO: 168656 - DNA, 20 bp, Artificial Sequence
  Description of Artificial Sequence: Synthetic oligonucleotide
  Target: LAMA2; (+) strand; PAM type: NRG; PAM sequence: AAG
gaaggaagtgtgacggctgc

SEQ ID NO: 168657 - DNA, 20 bp, Artificial Sequence
  Description of Artificial Sequence: Synthetic oligonucleotide
  Target: LAMA2; (+) strand; PAM type: NRG; PAM sequence: TGG
agtgtgacggctgcaagcac

SEQ ID NO: 168658 - DNA, 20 bp, Artificial Sequence
  Description of Artificial Sequence: Synthetic oligonucleotide
  Target: LAMA2; (+) strand; PAM type: NRG; PAM sequence: GAG
gcaagcactggcatgcacgc

SEQ ID NO: 168659 - DNA, 20 bp, Artificial Sequence
  Description of Artificial Sequence: Synthetic oligonucleotide
  Target: LAMA2; (+) strand; PAM type: NRG; PAM sequence: AGG
caagcactggcatgcacgcg

SEQ ID NO: 168660 - DNA, 20 bp, Artificial Sequence
  Description of Artificial Sequence: Synthetic oligonucleotide
  Target: LAMA2; (+) strand; PAM type: NRG; PAM sequence: GGG
aagcactggcatgcacgcga

SEQ ID NO: 168661 - DNA, 20 bp, Artificial Sequence
  Description of Artificial Sequence: Synthetic oligonucleotide
  Target: LAMA2; (+) strand; PAM type: NRG; PAM sequence: TGG
actggcatgcacgcgagggc

SEQ ID NO: 168662 - DNA, 20 bp, Artificial Sequence
  Description of Artificial Sequence: Synthetic oligonucleotide
  Target: LAMA2; (+) strand; PAM type: NRG; PAM sequence: GGG
ctggcatgcacgcgagggct

SEQ ID NO: 168663 - DNA, 20 bp, Artificial Sequence
  Description of Artificial Sequence: Synthetic oligonucleotide
  Target: LAMA2; (+) strand; PAM type: NRG; PAM sequence: GAG
ggcatgcacgcgagggctgg

SEQ ID NO: 168664 - DNA, 20 bp, Artificial Sequence
  Description of Artificial Sequence: Synthetic oligonucleotide
  Target: LAMA2; (+) strand; PAM type: NRG; PAM sequence: TAG
acgtatactaactttgctgt

SEQ ID NO: 168665 - DNA, 20 bp, Artificial Sequence
  Description of Artificial Sequence: Synthetic oligonucleotide
  Target: LAMA2; (+) strand; PAM type: NRG; PAM sequence: TGG
actaactttgctgttagttt

SEQ ID NO: 168666 - DNA, 20 bp, Artificial Sequence
  Description of Artificial Sequence: Synthetic oligonucleotide
  Target: LAMA2; (+) strand; PAM type: NRG; PAM sequence: GAG
taactttgctgttagttttg

SEQ ID NO: 168667 - DNA, 20 bp, Artificial Sequence
  Description of Artificial Sequence: Synthetic oligonucleotide
  Target: LAMA2; (+) strand; PAM type: NRG; PAM sequence: AGG
aactttgctgttagttttgg

SEQ ID NO: 168668 - DNA, 20 bp, Artificial Sequence
  Description of Artificial Sequence: Synthetic oligonucleotide
  Target: LAMA2; (+) strand; PAM type: NRG; PAM sequence: CAG
agttttggaggccttgattc

SEQ ID NO: 168669 - DNA, 20 bp, Artificial Sequence
  Description of Artificial Sequence: Synthetic oligonucleotide
  Target: LAMA2; (+) strand; PAM type: NRG; PAM sequence: GAG
agttctgtctcatttccaat

SEQ ID NO: 168670 - DNA, 20 bp, Artificial Sequence
  Description of Artificial Sequence: Synthetic oligonucleotide
  Target: LAMA2; (+) strand; PAM type: NRG; PAM sequence: AAG
ctgtctcatttccaatgaga

SEQ ID NO: 168671 - DNA, 20 bp, Artificial Sequence
  Description of Artificial Sequence: Synthetic oligonucleotide
  Target: LAMA2; (+) strand; PAM type: NRG; PAM sequence: GAG
gtctcatttccaatgagaaa

SEQ ID NO: 168672 - DNA, 20 bp, Artificial Sequence
  Description of Artificial Sequence: Synthetic oligonucleotide
  Target: LAMA2; (+) strand; PAM type: NRG; PAM sequence: TAG
ctttttttttttttttgcaa

SEQ ID NO: 168673 - DNA, 20 bp, Artificial Sequence
  Description of Artificial Sequence: Synthetic oligonucleotide
  Target: LAMA2; (+) strand; PAM type: NRG; PAM sequence: GAG
gattgcgtgtccatcctgct

SEQ ID NO: 168674 - DNA, 20 bp, Artificial Sequence
  Description of Artificial Sequence: Synthetic oligonucleotide
  Target: LAMA2; (+) strand; PAM type: NRG; PAM sequence: AAG
cgtgtccatcctgctgagcc

SEQ ID NO: 168675 - DNA, 20 bp, Artificial Sequence
  Description of Artificial Sequence: Synthetic oligonucleotide
  Target: LAMA2; (+) strand; PAM type: NRG; PAM sequence: CAG
ccatcctgctgagccaagaa

SEQ ID NO: 168676 - DNA, 20 bp, Artificial Sequence
  Description of Artificial Sequence: Synthetic oligonucleotide
  Target: LAMA2; (+) strand; PAM type: NRG; PAM sequence: GAG
ctgctgagccaagaacagct

SEQ ID NO: 168677 - DNA, 20 bp, Artificial Sequence
  Description of Artificial Sequence: Synthetic oligonucleotide
  Target: LAMA2; (+) strand; PAM type: NRG; PAM sequence: CAG
agaacagctgagaaaatcct

SEQ ID NO: 168678 - DNA, 20 bp, Artificial Sequence
  Description of Artificial Sequence: Synthetic oligonucleotide
  Target: LAMA2; (+) strand; PAM type: NRG; PAM sequence: TAG
agaaaatcctcagtgtgctt

SEQ ID NO: 168679 - DNA, 20 bp, Artificial Sequence
  Description of Artificial Sequence: Synthetic oligonucleotide
  Target: LAMA2; (+) strand; PAM type: NRG; PAM sequence: CAG
aatcctcagtgtgctttagt

SEQ ID NO: 168680 - DNA, 20 bp, Artificial Sequence
  Description of Artificial Sequence: Synthetic oligonucleotide
  Target: LAMA2; (+) strand; PAM type: NRG; PAM sequence: AAG
tgctttagtcagttcattga

SEQ ID NO: 168681 - DNA, 20 bp, Artificial Sequence
  Description of Artificial Sequence: Synthetic oligonucleotide
  Target: LAMA2; (+) strand; PAM type: NRG; PAM sequence: AAG
tcattgaaagacctacaatg

SEQ ID NO: 168682 - DNA, 20 bp, Artificial Sequence
  Description of Artificial Sequence: Synthetic oligonucleotide
  Target: LAMA2; (+) strand; PAM type: NRG; PAM sequence: TGG
aagacctacaatgaagctcc

SEQ ID NO: 168683 - DNA, 20 bp, Artificial Sequence
  Description of Artificial Sequence: Synthetic oligonucleotide
  Target: LAMA2; (+) strand; PAM type: NRG; PAM sequence: GAG
gacctacaatgaagctcctg

SEQ ID NO: 168684 - DNA, 20 bp, Artificial Sequence
  Description of Artificial Sequence: Synthetic oligonucleotide
  Target: LAMA2; (+) strand; PAM type: NRG; PAM sequence: AGG
acctacaatgaagctcctgg

SEQ ID NO: 168685 - DNA, 20 bp, Artificial Sequence
  Description of Artificial Sequence: Synthetic oligonucleotide
  Target: LAMA2; (+) strand; PAM type: NRG; PAM sequence: CAG
tttatttgatttgtccatct

SEQ ID NO: 168686 - DNA, 20 bp, Artificial Sequence
  Description of Artificial Sequence: Synthetic oligonucleotide
  Target: LAMA2; (+) strand; PAM type: NRG; PAM sequence: AGG
ttatttgatttgtccatctc

SEQ ID NO: 168687 - DNA, 20 bp, Artificial Sequence
  Description of Artificial Sequence: Synthetic oligonucleotide
  Target: LAMA2; (+) strand; PAM type: NRG; PAM sequence: GGG
tatttgatttgtccatctca

SEQ ID NO: 168688 - DNA, 20 bp, Artificial Sequence
  Description of Artificial Sequence: Synthetic oligonucleotide
  Target: LAMA2; (+) strand; PAM type: NRG; PAM sequence: CAG
tttgtccatctcagggttta

SEQ ID NO: 168689 - DNA, 20 bp, Artificial Sequence
  Description of Artificial Sequence: Synthetic oligonucleotide
  Target: LAMA2; (+) strand; PAM type: NRG; PAM sequence: AAG
agggtttacagttttgcctc

SEQ ID NO: 168690 - DNA, 20 bp, Artificial Sequence
  Description of Artificial Sequence: Synthetic oligonucleotide
  Target: LAMA2; (+) strand; PAM type: NRG; PAM sequence: TGG
tttacagttttgcctcaagt

SEQ ID NO: 168691 - DNA, 20 bp, Artificial Sequence
  Description of Artificial Sequence: Synthetic oligonucleotide
  Target: LAMA2; (+) strand; PAM type: NRG; PAM sequence: CAG
agttggcattgcctttgtga

SEQ ID NO: 168692 - DNA, 20 bp, Artificial Sequence
  Description of Artificial Sequence: Synthetic oligonucleotide
  Target: LAMA2; (+) strand; PAM type: NRG; PAM sequence: AAG
attgcctttgtgacagatta

SEQ ID NO: 168693 - DNA, 20 bp, Artificial Sequence
  Description of Artificial Sequence: Synthetic oligonucleotide
  Target: LAMA2; (+) strand; PAM type: NRG; PAM sequence: GAG
ttgtgacagattaaagatgt

SEQ ID NO: 168694 - DNA, 20 bp, Artificial Sequence
  Description of Artificial Sequence: Synthetic oligonucleotide
  Target: LAMA2; (+) strand; PAM type: NRG; PAM sequence: TAG
tgtgagtgtattaaaaaatt

SEQ ID NO: 168695 - DNA, 20 bp, Artificial Sequence
  Description of Artificial Sequence: Synthetic oligonucleotide
  Target: LAMA2; (+) strand; PAM type: NRG; PAM sequence: TGG
ctcctgaatttgtaatcgac

SEQ ID NO: 168696 - DNA, 20 bp, Artificial Sequence
  Description of Artificial Sequence: Synthetic oligonucleotide
  Target: LAMA2; (+) strand; PAM type: NRG; PAM sequence: CAG
tgaatttgtaatcgactgga

SEQ ID NO: 168697 - DNA, 20 bp, Artificial Sequence
  Description of Artificial Sequence: Synthetic oligonucleotide
  Target: LAMA2; (+) strand; PAM type: NRG; PAM sequence: AAG
atcgactggacagatacttt

SEQ ID NO: 168698 - DNA, 20 bp, Artificial Sequence
  Description of Artificial Sequence: Synthetic oligonucleotide
  Target: LAMA2; (+) strand; PAM type: NRG; PAM sequence: CAG
acaactgatgtttcttttcc

SEQ ID NO: 168699 - DNA, 20 bp, Artificial Sequence
  Description of Artificial Sequence: Synthetic oligonucleotide
  Target: LAMA2; (+) strand; PAM type: NRG; PAM sequence: TGG
ccagcttttatgaaaatcca

SEQ ID NO: 168700 - DNA, 20 bp, Artificial Sequence
  Description of Artificial Sequence: Synthetic oligonucleotide
  Target: LAMA2; (+) strand; PAM type: NRG; PAM sequence: GGG
cagcttttatgaaaatccat

SEQ ID NO: 168701 - DNA, 20 bp, Artificial Sequence
  Description of Artificial Sequence: Synthetic oligonucleotide
  Target: LAMA2; (+) strand; PAM type: NRG; PAM sequence: AAG
tcttgaactacaaaacccgt

SEQ ID NO: 168702 - DNA, 20 bp, Artificial Sequence
  Description of Artificial Sequence: Synthetic oligonucleotide
  Target: LAMA2; (+) strand; PAM type: NRG; PAM sequence: CAG
tgaactacaaaacccgtaag

SEQ ID NO: 168703 - DNA, 20 bp, Artificial Sequence
  Description of Artificial Sequence: Synthetic oligonucleotide
  Target: LAMA2; (+) strand; PAM type: NRG; PAM sequence: AAG
acccgtaagcagtaacaatg

SEQ ID NO: 168704 - DNA, 20 bp, Artificial Sequence
  Description of Artificial Sequence: Synthetic oligonucleotide
  Target: LAMA2; (+) strand; PAM type: NRG; PAM sequence: AAG
taagcagtaacaatgaagtc

SEQ ID NO: 168705 - DNA, 20 bp, Artificial Sequence
  Description of Artificial Sequence: Synthetic oligonucleotide
  Target: LAMA2; (+) strand; PAM type: NRG; PAM sequence: CAG
caagtatttttactcacgta

SEQ ID NO: 168706 - DNA, 20 bp, Artificial Sequence
  Description of Artificial Sequence: Synthetic oligonucleotide
  Target: LAMA2; (+) strand; PAM type: NRG; PAM sequence: AAG
tatttttactcacgtacagt

SEQ ID NO: 168707 - DNA, 20 bp, Artificial Sequence
  Description of Artificial Sequence: Synthetic oligonucleotide
  Target: LAMA2; (+) strand; PAM type: NRG; PAM sequence: TGG
ttttactcacgtacagtaag

SEQ ID NO: 168708 - DNA, 20 bp, Artificial Sequence
  Description of Artificial Sequence: Synthetic oligonucleotide
  Target: LAMA2; (+) strand; PAM type: NRG; PAM sequence: GAG
ttactcacgtacagtaagtg

SEQ ID NO: 168709 - DNA, 20 bp, Artificial Sequence
  Description of Artificial Sequence: Synthetic oligonucleotide
  Target: LAMA2; (+) strand; PAM type: NRG; PAM sequence: GAG
actcacgtacagtaagtgga

SEQ ID NO: 168710 - DNA, 20 bp, Artificial Sequence
  Description of Artificial Sequence: Synthetic oligonucleotide
  Target: LAMA2; (+) strand; PAM type: NRG; PAM sequence: CAG
cacgtacagtaagtggagag

SEQ ID NO: 168711 - DNA, 20 bp, Artificial Sequence
  Description of Artificial Sequence: Synthetic oligonucleotide
  Target: LAMA2; (+) strand; PAM type: NRG; PAM sequence: TGG
ctcttttttcttactgattc

SEQ ID NO: 168712 - DNA, 20 bp, Artificial Sequence
  Description of Artificial Sequence: Synthetic oligonucleotide
  Target: LAMA2; (+) strand; PAM type: NRG; PAM sequence: TAG
cttactgattctggattcgc

SEQ ID NO: 168713 - DNA, 20 bp, Artificial Sequence
  Description of Artificial Sequence: Synthetic oligonucleotide
  Target: LAMA2; (+) strand; PAM type: NRG; PAM sequence: AAG
attcgctagtgccatattga

SEQ ID NO: 168714 - DNA, 20 bp, Artificial Sequence
  Description of Artificial Sequence: Synthetic oligonucleotide
  Target: LAMA2; (+) strand; PAM type: NRG; PAM sequence: CAG
tattgaaagtacattgaaat

SEQ ID NO: 168715 - DNA, 20 bp, Artificial Sequence
  Description of Artificial Sequence: Synthetic oligonucleotide
  Target: LAMA2; (+) strand; PAM type: NRG; PAM sequence: TAG
tgaaagtacattgaaatcag

SEQ ID NO: 168716 - DNA, 20 bp, Artificial Sequence
  Description of Artificial Sequence: Synthetic oligonucleotide
  Target: LAMA2; (+) strand; PAM type: NRG; PAM sequence: TGG
cagtagctaaatataattct

SEQ ID NO: 168717 - DNA, 20 bp, Artificial Sequence
  Description of Artificial Sequence: Synthetic oligonucleotide
  Target: LAMA2; (+) strand; PAM type: NRG; PAM sequence: TAG
gcatacattcaaatccaaaa

SEQ ID NO: 168718 - DNA, 20 bp, Artificial Sequence
  Description of Artificial Sequence: Synthetic oligonucleotide
  Target: LAMA2; (+) strand; PAM type: NRG; PAM sequence: AGG
catacattcaaatccaaaat

SEQ ID NO: 168719 - DNA, 20 bp, Artificial Sequence
  Description of Artificial Sequence: Synthetic oligonucleotide
  Target: LAMA2; (+) strand; PAM type: NRG; PAM sequence: AAG
aataggttatttataaattt

SEQ ID NO: 168720 - DNA, 20 bp, Artificial Sequence
  Description of Artificial Sequence: Synthetic oligonucleotide
  Target: LAMA2; (+) strand; PAM type: NRG; PAM sequence: AGG
ataggttatttataaattta

SEQ ID NO: 168721 - DNA, 20 bp, Artificial Sequence
  Description of Artificial Sequence: Synthetic oligonucleotide
  Target: LAMA2; (+) strand; PAM type: NRG; PAM sequence: AAG
ggttatttataaatttaagg

SEQ ID NO: 168722 - DNA, 20 bp, Artificial Sequence
  Description of Artificial Sequence: Synthetic oligonucleotide
  Target: LAMA2; (+) strand; PAM type: NRG; PAM sequence: AGG
gttatttataaatttaagga

SEQ ID NO: 168723 - DNA, 20 bp, Artificial Sequence
  Description of Artificial Sequence: Synthetic oligonucleotide
  Target: LAMA2; (+) strand; PAM type: NRG; PAM sequence: GAG
tatttataaatttaaggaag

SEQ ID NO: 168724 - DNA, 20 bp, Artificial Sequence
  Description of Artificial Sequence: Synthetic oligonucleotide
  Target: LAMA2; (+) strand; PAM type: NRG; PAM sequence: TAG
aaggaaggagtgctcttcta

SEQ ID NO: 168725 - DNA, 20 bp, Artificial Sequence
  Description of Artificial Sequence: Synthetic oligonucleotide
  Target: LAMA2; (+) strand; PAM type: NRG; PAM sequence: AAG
tctatagtattcttttcctc

SEQ ID NO: 168726 - DNA, 20 bp, Artificial Sequence
  Description of Artificial Sequence: Synthetic oligonucleotide
  Target: LAMA2; (+) strand; PAM type: NRG; PAM sequence: AGG
ctatagtattcttttcctca

SEQ ID NO: 168727 - DNA, 20 bp, Artificial Sequence
  Description of Artificial Sequence: Synthetic oligonucleotide
  Target: LAMA2; (+) strand; PAM type: NRG; PAM sequence: TAG
ttcctcaaggaaatttattt

SEQ ID NO: 168728 - DNA, 20 bp, Artificial Sequence
  Description of Artificial Sequence: Synthetic oligonucleotide
  Target: LAMA2; (+) strand; PAM type: NRG; PAM sequence: TAG
tcaacatttacctattgtaa

SEQ ID NO: 168729 - DNA, 20 bp, Artificial Sequence
  Description of Artificial Sequence: Synthetic oligonucleotide
  Target: LAMA2; (+) strand; PAM type: NRG; PAM sequence: TAG
catgtcaacatttcttgttt

SEQ ID NO: 168730 - DNA, 20 bp, Artificial Sequence
  Description of Artificial Sequence: Synthetic oligonucleotide
  Target: LAMA2; (+) strand; PAM type: NRG; PAM sequence: GAG
cttgttttagcatattgttt

SEQ ID NO: 168731 - DNA, 20 bp, Artificial Sequence
  Description of Artificial Sequence: Synthetic oligonucleotide
  Target: LAMA2; (+) strand; PAM type: NRG; PAM sequence: TAG
tgtttgagtctaaatcttaa

SEQ ID NO: 168732 - DNA, 20 bp, Artificial Sequence
  Description of Artificial Sequence: Synthetic oligonucleotide
  Target: LAMA2; (+) strand; PAM type: NRG; PAM sequence: TAG
aatcttaatagtatcttaaa

SEQ ID NO: 168733 - DNA, 20 bp, Artificial Sequence
  Description of Artificial Sequence: Synthetic oligonucleotide
  Target: LAMA2; (+) strand; PAM type: NRG; PAM sequence: AAG
cttaatagtatcttaaatag

SEQ ID NO: 168734 - DNA, 20 bp, Artificial Sequence
  Description of Artificial Sequence: Synthetic oligonucleotide
  Target: LAMA2; (+) strand; PAM type: NRG; PAM sequence: TAG
aagaatttttgtttatgttc

SEQ ID NO: 168735 - DNA, 20 bp, Artificial Sequence
  Description of Artificial Sequence: Synthetic oligonucleotide
  Target: LAMA2; (+) strand; PAM type: NRG; PAM sequence: AAG
tgtttatgttctagttttat

SEQ ID NO: 168736 - DNA, 20 bp, Artificial Sequence
  Description of Artificial Sequence: Synthetic oligonucleotide
  Target: LAMA2; (+) strand; PAM type: NRG; PAM sequence: GAG
tttatgttctagttttataa

SEQ ID NO: 168737 - DNA, 20 bp, Artificial Sequence
  Description of Artificial Sequence: Synthetic oligonucleotide
  Target: LAMA2; (+) strand; PAM type: NRG; PAM sequence: CAG
agttttataagagttaacct

SEQ ID NO: 168738 - DNA, 20 bp, Artificial Sequence
  Description of Artificial Sequence: Synthetic oligonucleotide
  Target: LAMA2; (+) strand; PAM type: NRG; PAM sequence: AAG
tttataagagttaacctcag

SEQ ID NO: 168739 - DNA, 20 bp, Artificial Sequence
  Description of Artificial Sequence: Synthetic oligonucleotide
  Target: LAMA2; (+) strand; PAM type: NRG; PAM sequence: AAG
agagttaacctcagaagcta

SEQ ID NO: 168740 - DNA, 20 bp, Artificial Sequence
  Description of Artificial Sequence: Synthetic oligonucleotide
  Target: LAMA2; (+) strand; PAM type: NRG; PAM sequence: TGG
ttaacctcagaagctaaagc

SEQ ID NO: 168741 - DNA, 20 bp, Artificial Sequence
  Description of Artificial Sequence: Synthetic oligonucleotide
  Target: LAMA2; (+) strand; PAM type: NRG; PAM sequence: AAG
ggattaaaaaatacaccaaa

SEQ ID NO: 168742 - DNA, 20 bp, Artificial Sequence
  Description of Artificial Sequence: Synthetic oligonucleotide
  Target: LAMA2; (+) strand; PAM type: NRG; PAM sequence: AAG
aaaaaatacaccaaaaagtt

SEQ ID NO: 168743 - DNA, 20 bp, Artificial Sequence
  Description of Artificial Sequence: Synthetic oligonucleotide
  Target: LAMA2; (+) strand; PAM type: NRG; PAM sequence: TGG
atacaccaaaaagttaagac

SEQ ID NO: 168744 - DNA, 20 bp, Artificial Sequence
  Description of Artificial Sequence: Synthetic oligonucleotide
  Target: LAMA2; (+) strand; PAM type: NRG; PAM sequence: GGG
tacaccaaaaagttaagact

SEQ ID NO: 168745 - DNA, 20 bp, Artificial Sequence
  Description of Artificial Sequence: Synthetic oligonucleotide
  Target: LAMA2; (+) strand; PAM type: NRG; PAM sequence: TGG
agttaagactgggtgttatt

SEQ ID NO: 168746 - DNA, 20 bp, Artificial Sequence
  Description of Artificial Sequence: Synthetic oligonucleotide
  Target: LAMA2; (+) strand; PAM type: NRG; PAM sequence: GGG
gttaagactgggtgttattt

SEQ ID NO: 168747 - DNA, 20 bp, Artificial Sequence
  Description of Artificial Sequence: Synthetic oligonucleotide
  Target: LAMA2; (+) strand; PAM type: NRG; PAM sequence: TAG
ctgggtgttatttgggaaaa

SEQ ID NO: 168748 - DNA, 20 bp, Artificial Sequence
  Description of Artificial Sequence: Synthetic oligonucleotide
  Target: LAMA2; (+) strand; PAM type: NRG; PAM sequence: AAG
ttacactgaaaataaatgtg

SEQ ID NO: 168749 - DNA, 20 bp, Artificial Sequence
  Description of Artificial Sequence: Synthetic oligonucleotide
  Target: LAMA2; (+) strand; PAM type: NRG; PAM sequence: AGG
tacactgaaaataaatgtga

SEQ ID NO: 168750 - DNA, 20 bp, Artificial Sequence
  Description of Artificial Sequence: Synthetic oligonucleotide
  Target: LAMA2; (+) strand; PAM type: NRG; PAM sequence: TAG
actgaaaataaatgtgaagg

SEQ ID NO: 168751 - DNA, 20 bp, Artificial Sequence
  Description of Artificial Sequence: Synthetic oligonucleotide
  Target: LAMA2; (+) strand; PAM type: NRG; PAM sequence: AGG
ctgaaaataaatgtgaaggt

SEQ ID NO: 168752 - DNA, 20 bp, Artificial Sequence
  Description of Artificial Sequence: Synthetic oligonucleotide
  Target: LAMA2; (+) strand; PAM type: NRG; PAM sequence: GAG
aaataaatgtgaaggtaggt

SEQ ID NO: 168753 - DNA, 20 bp, Artificial Sequence
  Description of Artificial Sequence: Synthetic oligonucleotide
  Target: LAMA2; (+) strand; PAM type: NRG; PAM sequence: GAG
ataaatgtgaaggtaggtga

SEQ ID NO: 168754 - DNA, 20 bp, Artificial Sequence
  Description of Artificial Sequence: Synthetic oligonucleotide
  Target: LAMA2; (+) strand; PAM type: NRG; PAM sequence: AGG
taaatgtgaaggtaggtgag

SEQ ID NO: 168755 - DNA, 20 bp, Artificial Sequence
  Description of Artificial Sequence: Synthetic oligonucleotide
  Target: LAMA2; (+) strand; PAM type: NRG; PAM sequence: GGG
aaatgtgaaggtaggtgaga

SEQ ID NO: 168756 - DNA, 20 bp, Artificial Sequence
  Description of Artificial Sequence: Synthetic oligonucleotide
  Target: LAMA2; (+) strand; PAM type: NRG; PAM sequence: GGG
aatgtgaaggtaggtgagag

SEQ ID NO: 168757 - DNA, 20 bp, Artificial Sequence
  Description of Artificial Sequence: Synthetic oligonucleotide
  Target: LAMA2; (+) strand; PAM type: NRG; PAM sequence: GAG
tgtgaaggtaggtgagaggg

SEQ ID NO: 168758 - DNA, 20 bp, Artificial Sequence
  Description of Artificial Sequence: Synthetic oligonucleotide
  Target: LAMA2; (+) strand; PAM type: NRG; PAM sequence: GAG
tgaaggtaggtgagagggga

SEQ ID NO: 168759 - DNA, 20 bp, Artificial Sequence
  Description of Artificial Sequence: Synthetic oligonucleotide
  Target: LAMA2; (+) strand; PAM type: NRG; PAM sequence: TAG
tacatttatattgtcatatt

SEQ ID NO: 168760 - DNA, 20 bp, Artificial Sequence
  Description of Artificial Sequence: Synthetic oligonucleotide
  Target: LAMA2; (+) strand; PAM type: NRG; PAM sequence: TAG
atattgtcatatttagttga

SEQ ID NO: 168761 - DNA, 20 bp, Artificial Sequence
  Description of Artificial Sequence: Synthetic oligonucleotide
  Target: LAMA2; (+) strand; PAM type: NRG; PAM sequence: AAG
tatacacactaattcttccc

SEQ ID NO: 168762 - DNA, 20 bp, Artificial Sequence
  Description of Artificial Sequence: Synthetic oligonucleotide
  Target: LAMA2; (+) strand; PAM type: NRG; PAM sequence: AAG
atatattttaatgataatta

SEQ ID NO: 168763 - DNA, 20 bp, Artificial Sequence
  Description of Artificial Sequence: Synthetic oligonucleotide
  Target: LAMA2; (+) strand; PAM type: NRG; PAM sequence: AAG
tattttaatgataattaaag

SEQ ID NO: 168764 - DNA, 20 bp, Artificial Sequence
  Description of Artificial Sequence: Synthetic oligonucleotide
  Target: LAMA2; (+) strand; PAM type: NRG; PAM sequence: TAG
tttaatgataattaaagaag

SEQ ID NO: 168765 - DNA, 20 bp, Artificial Sequence
  Description of Artificial Sequence: Synthetic oligonucleotide
  Target: LAMA2; (+) strand; PAM type: NRG; PAM sequence: AAG
attaaagaagtagactatca

SEQ ID NO: 168766 - DNA, 20 bp, Artificial Sequence
  Description of Artificial Sequence: Synthetic oligonucleotide
  Target: LAMA2; (+) strand; PAM type: NRG; PAM sequence: AAG
tattttataatattgctttc

SEQ ID NO: 168767 - DNA, 20 bp, Artificial Sequence
  Description of Artificial Sequence: Synthetic oligonucleotide
  Target: LAMA2; (+) strand; PAM type: NRG; PAM sequence: TAG
ttaacatgcacataattaac

SEQ ID NO: 168768 - DNA, 20 bp, Artificial Sequence
  Description of Artificial Sequence: Synthetic oligonucleotide
  Target: LAMA2; (+) strand; PAM type: NRG; PAM sequence: TAG
ataattaactagataatata

SEQ ID NO: 168769 - DNA, 20 bp, Artificial Sequence
  Description of Artificial Sequence: Synthetic oligonucleotide
  Target: LAMA2; (+) strand; PAM type: NRG; PAM sequence: CAG
atagatattcttaatgtaaa

SEQ ID NO: 168770 - DNA, 20 bp, Artificial Sequence
  Description of Artificial Sequence: Synthetic oligonucleotide
  Target: LAMA2; (+) strand; PAM type: NRG; PAM sequence: CAG
catcacttttattaactatc

SEQ ID NO: 168771 - DNA, 20 bp, Artificial Sequence
  Description of Artificial Sequence: Synthetic oligonucleotide
  Target: LAMA2; (+) strand; PAM type: NRG; PAM sequence: AAG
cacttttattaactatccag

SEQ ID NO: 168772 - DNA, 20 bp, Artificial Sequence
  Description of Artificial Sequence: Synthetic oligonucleotide
  Target: LAMA2; (+) strand; PAM type: NRG; PAM sequence: AAG
agaagcaaacttgaaataaa

SEQ ID NO: 168773 - DNA, 20 bp, Artificial Sequence
  Description of Artificial Sequence: Synthetic oligonucleotide
  Target: LAMA2; (+) strand; PAM type: NRG; PAM sequence: AAG
aaaaagatcatattaatgtt

SEQ ID NO: 168774 - DNA, 20 bp, Artificial Sequence
  Description of Artificial Sequence: Synthetic oligonucleotide
  Target: LAMA2; (+) strand; PAM type: NRG; PAM sequence: TAG
taagcacaaaaattaaacaa

SEQ ID NO: 168775 - DNA, 20 bp, Artificial Sequence
  Description of Artificial Sequence: Synthetic oligonucleotide
  Target: LAMA2; (+) strand; PAM type: NRG; PAM sequence: TGG
aacaatagtacattaaaatc

SEQ ID NO: 168776 - DNA, 20 bp, Artificial Sequence
  Description of Artificial Sequence: Synthetic oligonucleotide
  Target: LAMA2; (+) strand; PAM type: NRG; PAM sequence: GGG
acaatagtacattaaaatct

SEQ ID NO: 168777 - DNA, 20 bp, Artificial Sequence
  Description of Artificial Sequence: Synthetic oligonucleotide
  Target: LAMA2; (+) strand; PAM type: NRG; PAM sequence: GGG
caatagtacattaaaatctg

SEQ ID NO: 168778 - DNA, 20 bp, Artificial Sequence
  Description of Artificial Sequence: Synthetic oligonucleotide
  Target: LAMA2; (+) strand; PAM type: NRG; PAM sequence: TAG
tagtacattaaaatctgggg

SEQ ID NO: 168779 - DNA, 20 bp, Artificial Sequence
  Description of Artificial Sequence: Synthetic oligonucleotide
  Target: LAMA2; (+) strand; PAM type: NRG; PAM sequence: TGG
atctggggtagataatataa

SEQ ID NO: 168780 - DNA, 20 bp, Artificial Sequence
  Description of Artificial Sequence: Synthetic oligonucleotide
  Target: LAMA2; (+) strand; PAM type: NRG; PAM sequence: GGG
tctggggtagataatataat

SEQ ID NO: 168781 - DNA, 20 bp, Artificial Sequence
  Description of Artificial Sequence: Synthetic oligonucleotide
  Target: LAMA2; (+) strand; PAM type: NRG; PAM sequence: TGG
gataatataatgggattatt

SEQ ID NO: 168782 - DNA, 20 bp, Artificial Sequence
  Description of Artificial Sequence: Synthetic oligonucleotide
  Target: LAMA2; (+) strand; PAM type: NRG; PAM sequence: GGG
ataatataatgggattattt

SEQ ID NO: 168783 - DNA, 20 bp, Artificial Sequence
  Description of Artificial Sequence: Synthetic oligonucleotide
  Target: LAMA2; (+) strand; PAM type: NRG; PAM sequence: GGG
taatataatgggattatttg

SEQ ID NO: 168784 - DNA, 20 bp, Artificial Sequence
  Description of Artificial Sequence: Synthetic oligonucleotide
  Target: LAMA2; (+) strand; PAM type: NRG; PAM sequence: AAG
tttggggaacatttctttta

SEQ ID NO: 168785 - DNA, 20 bp, Artificial Sequence
  Description of Artificial Sequence: Synthetic oligonucleotide
  Target: LAMA2; (+) strand; PAM type: NRG; PAM sequence: GAG
tggggaacatttcttttaaa

SEQ ID NO: 168786 - DNA, 20 bp, Artificial Sequence
  Description of Artificial Sequence: Synthetic oligonucleotide
  Target: LAMA2; (+) strand; PAM type: NRG; PAM sequence: TGG
acatttcttttaaagagaat

SEQ ID NO: 168787 - DNA, 20 bp, Artificial Sequence
  Description of Artificial Sequence: Synthetic oligonucleotide
  Target: LAMA2; (+) strand; PAM type: NRG; PAM sequence: TGG
attctgcccatcaacaacaa

SEQ ID NO: 168788 - DNA, 20 bp, Artificial Sequence
  Description of Artificial Sequence: Synthetic oligonucleotide
  Target: LAMA2; (+) strand; PAM type: NRG; PAM sequence: TAG
attttgaatacatttatcat

SEQ ID NO: 168789 - DNA, 20 bp, Artificial Sequence
  Description of Artificial Sequence: Synthetic oligonucleotide
  Target: LAMA2; (+) strand; PAM type: NRG; PAM sequence: TGG
tcttttccctatcacatatg

SEQ ID NO: 168790 - DNA, 20 bp, Artificial Sequence
  Description of Artificial Sequence: Synthetic oligonucleotide
  Target: LAMA2; (+) strand; PAM type: NRG; PAM sequence: GGG
cttttccctatcacatatgt

SEQ ID NO: 168791 - DNA, 20 bp, Artificial Sequence
  Description of Artificial Sequence: Synthetic oligonucleotide
  Target: LAMA2; (+) strand; PAM type: NRG; PAM sequence: AAG
cacttgtcccatgtgatatt

SEQ ID NO: 168792 - DNA, 20 bp, Artificial Sequence
  Description of Artificial Sequence: Synthetic oligonucleotide
  Target: LAMA2; (+) strand; PAM type: NRG; PAM sequence: AAG
gtcccatgtgatattaagaa

SEQ ID NO: 168793 - DNA, 20 bp, Artificial Sequence
  Description of Artificial Sequence: Synthetic oligonucleotide
  Target: LAMA2; (+) strand; PAM type: NRG; PAM sequence: AGG
tcccatgtgatattaagaaa

SEQ ID NO: 168794 - DNA, 20 bp, Artificial Sequence
  Description of Artificial Sequence: Synthetic oligonucleotide
  Target: LAMA2; (+) strand; PAM type: NRG; PAM sequence: GGG
cccatgtgatattaagaaaa

SEQ ID NO: 168795 - DNA, 20 bp, Artificial Sequence
  Description of Artificial Sequence: Synthetic oligonucleotide
  Target: LAMA2; (+) strand; PAM type: NRG; PAM sequence: CAG
taagaaaagggccaatcctc

SEQ ID NO: 168796 - DNA, 20 bp, Artificial Sequence
  Description of Artificial Sequence: Synthetic oligonucleotide
  Target: LAMA2; (+) strand; PAM type: NRG; PAM sequence: AAG
gggccaatcctccagttaca

SEQ ID NO: 168797 - DNA, 20 bp, Artificial Sequence
  Description of Artificial Sequence: Synthetic oligonucleotide
  Target: LAMA2; (+) strand; PAM type: NRG; PAM sequence: CAG
ctccagttacaaagctacac

SEQ ID NO: 168798 - DNA, 20 bp, Artificial Sequence
  Description of Artificial Sequence: Synthetic oligonucleotide
  Target: LAMA2; (+) strand; PAM type: NRG; PAM sequence: AAG
ttgctttattcttgccccac

SEQ ID NO: 168799 - DNA, 20 bp, Artificial Sequence
  Description of Artificial Sequence: Synthetic oligonucleotide
  Target: LAMA2; (+) strand; PAM type: NRG; PAM sequence: AGG
tgctttattcttgccccaca

SEQ ID NO: 168800 - DNA, 20 bp, Artificial Sequence
  Description of Artificial Sequence: Synthetic oligonucleotide
  Target: LAMA2; (+) strand; PAM type: NRG; PAM sequence: CAG
cccacaaggaaatgtattta

SEQ ID NO: 168801 - DNA, 20 bp, Artificial Sequence
  Description of Artificial Sequence: Synthetic oligonucleotide
  Target: LAMA2; (+) strand; PAM type: NRG; PAM sequence: AGG
ccacaaggaaatgtatttac

SEQ ID NO: 168802 - DNA, 20 bp, Artificial Sequence
  Description of Artificial Sequence: Synthetic oligonucleotide
  Target: LAMA2; (+) strand; PAM type: NRG; PAM sequence: GGG
cacaaggaaatgtatttaca

SEQ ID NO: 168803 - DNA, 20 bp, Artificial Sequence
  Description of Artificial Sequence: Synthetic oligonucleotide
  Target: LAMA2; (+) strand; PAM type: NRG; PAM sequence: GGG
acaaggaaatgtatttacag

SEQ ID NO: 168804 - DNA, 20 bp, Artificial Sequence
  Description of Artificial Sequence: Synthetic oligonucleotide
  Target: LAMA2; (+) strand; PAM type: NRG; PAM sequence: TGG
gtatttacaggggttataca

SEQ ID NO: 168805 - DNA, 20 bp, Artificial Sequence
  Description of Artificial Sequence: Synthetic oligonucleotide
  Target: LAMA2; (+) strand; PAM type: NRG; PAM sequence: TAG
caggggttatacatggtatt

SEQ ID NO: 168806 - DNA, 20 bp, Artificial Sequence
  Description of Artificial Sequence: Synthetic oligonucleotide
  Target: LAMA2; (+) strand; PAM type: NRG; PAM sequence: CAG
gttatacatggtatttagtt

SEQ ID NO: 168807 - DNA, 20 bp, Artificial Sequence
  Description of Artificial Sequence: Synthetic oligonucleotide
  Target: LAMA2; (+) strand; PAM type: NRG; PAM sequence: TGG
atggtatttagttcagttgc

SEQ ID NO: 168808 - DNA, 20 bp, Artificial Sequence
  Description of Artificial Sequence: Synthetic oligonucleotide
  Target: LAMA2; (+) strand; PAM type: NRG; PAM sequence: TGG
atttagttcagttgctggac

SEQ ID NO: 168809 - DNA, 20 bp, Artificial Sequence
  Description of Artificial Sequence: Synthetic oligonucleotide
  Target: LAMA2; (+) strand; PAM type: NRG; PAM sequence: AAG
tagttcagttgctggactgg

SEQ ID NO: 168810 - DNA, 20 bp, Artificial Sequence
  Description of Artificial Sequence: Synthetic oligonucleotide
  Target: LAMA2; (+) strand; PAM type: NRG; PAM sequence: AAG
agtgtttatattctttttaa

SEQ ID NO: 168811 - DNA, 20 bp, Artificial Sequence
  Description of Artificial Sequence: Synthetic oligonucleotide
  Target: LAMA2; (+) strand; PAM type: NRG; PAM sequence: TAG
ttatattctttttaaaagaa

SEQ ID NO: 168812 - DNA, 20 bp, Artificial Sequence
  Description of Artificial Sequence: Synthetic oligonucleotide
  Target: LAMA2; (+) strand; PAM type: NRG; PAM sequence: CAG
tattctttttaaaagaatag

SEQ ID NO: 168813 - DNA, 20 bp, Artificial Sequence
  Description of Artificial Sequence: Synthetic oligonucleotide
  Target: LAMA2; (+) strand; PAM type: NRG; PAM sequence: CAG
aagaatagcagtttttattc

SEQ ID NO: 168814 - DNA, 20 bp, Artificial Sequence
  Description of Artificial Sequence: Synthetic oligonucleotide
  Target: LAMA2; (+) strand; PAM type: NRG; PAM sequence: TAG
cagaaaaaaatattaaatta

SEQ ID NO: 168815 - DNA, 20 bp, Artificial Sequence
  Description of Artificial Sequence: Synthetic oligonucleotide
  Target: LAMA2; (+) strand; PAM type: NRG; PAM sequence: AGG
agaaaaaaatattaaattat

SEQ ID NO: 168816 - DNA, 20 bp, Artificial Sequence
  Description of Artificial Sequence: Synthetic oligonucleotide
  Target: LAMA2; (+) strand; PAM type: NRG; PAM sequence: TAG
ataggattgtttttgatatc

SEQ ID NO: 168817 - DNA, 20 bp, Artificial Sequence
  Description of Artificial Sequence: Synthetic oligonucleotide
  Target: LAMA2; (+) strand; PAM type: NRG; PAM sequence: AAG
atatctagactcttttgcta

SEQ ID NO: 168818 - DNA, 20 bp, Artificial Sequence
  Description of Artificial Sequence: Synthetic oligonucleotide
  Target: LAMA2; (+) strand; PAM type: NRG; PAM sequence: CAG
tagactcttttgctaaagca

SEQ ID NO: 168819 - DNA, 20 bp, Artificial Sequence
  Description of Artificial Sequence: Synthetic oligonucleotide
  Target: LAMA2; (+) strand; PAM type: NRG; PAM sequence: TAG
tatcttataattatgctgta

SEQ ID NO: 168820 - DNA, 20 bp, Artificial Sequence
  Description of Artificial Sequence: Synthetic oligonucleotide
  Target: LAMA2; (+) strand; PAM type: NRG; PAM sequence: AAG
attttccatatactgctctt

SEQ ID NO: 168821 - DNA, 20 bp, Artificial Sequence
  Description of Artificial Sequence: Synthetic oligonucleotide
  Target: LAMA2; (+) strand; PAM type: NRG; PAM sequence: TAG
catatactgctcttaagcat

SEQ ID NO: 168822 - DNA, 20 bp, Artificial Sequence
  Description of Artificial Sequence: Synthetic oligonucleotide
  Target: LAMA2; (+) strand; PAM type: NRG; PAM sequence: TAG
tagtgatttccacttacttc

SEQ ID NO: 168823 - DNA, 20 bp, Artificial Sequence
  Description of Artificial Sequence: Synthetic oligonucleotide
  Target: LAMA2; (+) strand; PAM type: NRG; PAM sequence: AGG
agtgatttccacttacttct

SEQ ID NO: 168824 - DNA, 20 bp, Artificial Sequence
  Description of Artificial Sequence: Synthetic oligonucleotide
  Target: LAMA2; (+) strand; PAM type: NRG; PAM sequence: AAG
cctttcactaaactaactct

SEQ ID NO: 168825 - DNA, 20 bp, Artificial Sequence
  Description of Artificial Sequence: Synthetic oligonucleotide
  Target: LAMA2; (+) strand; PAM type: NRG; PAM sequence: CAG
taactctaagaattgttaca

SEQ ID NO: 168826 - DNA, 20 bp, Artificial Sequence
  Description of Artificial Sequence: Synthetic oligonucleotide
  Target: LAMA2; (+) strand; PAM type: NRG; PAM sequence: GAG
actctaagaattgttacaca

SEQ ID NO: 168827 - DNA, 20 bp, Artificial Sequence
  Description of Artificial Sequence: Synthetic oligonucleotide
  Target: LAMA2; (+) strand; PAM type: NRG; PAM sequence: TAG
attgttacacagagtatctt

SEQ ID NO: 168828 - DNA, 20 bp, Artificial Sequence
  Description of Artificial Sequence: Synthetic oligonucleotide
  Target: LAMA2; (+) strand; PAM type: NRG; PAM sequence: TGG
ttctaaaatttctcccgtta

SEQ ID NO: 168829 - DNA, 20 bp, Artificial Sequence
  Description of Artificial Sequence: Synthetic oligonucleotide
  Target: LAMA2; (+) strand; PAM type: NRG; PAM sequence: TGG
atgccatgattctatgatct

SEQ ID NO: 168830 - DNA, 20 bp, Artificial Sequence
  Description of Artificial Sequence: Synthetic oligonucleotide
  Target: LAMA2; (+) strand; PAM type: NRG; PAM sequence: CAG
tctatgatcttggcctttcc

SEQ ID NO: 168831 - DNA, 20 bp, Artificial Sequence
  Description of Artificial Sequence: Synthetic oligonucleotide
  Target: LAMA2; (+) strand; PAM type: NRG; PAM sequence: AGG
ctatgatcttggcctttccc

SEQ ID NO: 168832 - DNA, 20 bp, Artificial Sequence
  Description of Artificial Sequence: Synthetic oligonucleotide
  Target: LAMA2; (+) strand; PAM type: NRG; PAM sequence: CGG
tcttggcctttcccaggatt

SEQ ID NO: 168833 - DNA, 20 bp, Artificial Sequence
  Description of Artificial Sequence: Synthetic oligonucleotide
  Target: LAMA2; (+) strand; PAM type: NRG; PAM sequence: TAG
tcggtttctacttctactcc

SEQ ID NO: 168834 - DNA, 20 bp, Artificial Sequence
  Description of Artificial Sequence: Synthetic oligonucleotide
  Target: LAMA2; (+) strand; PAM type: NRG; PAM sequence: CAG
tctactcctagttttgaaat

SEQ ID NO: 168835 - DNA, 20 bp, Artificial Sequence
  Description of Artificial Sequence: Synthetic oligonucleotide
  Target: LAMA2; (+) strand; PAM type: NRG; PAM sequence: AAG
gttttgaaatcagataaaat

SEQ ID NO: 168836 - DNA, 20 bp, Artificial Sequence
  Description of Artificial Sequence: Synthetic oligonucleotide
  Target: LAMA2; (+) strand; PAM type: NRG; PAM sequence: AAG
aatcagataaaataagacac

SEQ ID NO: 168837 - DNA, 20 bp, Artificial Sequence
  Description of Artificial Sequence: Synthetic oligonucleotide
  Target: LAMA2; (+) strand; PAM type: NRG; PAM sequence: GAG
agataaaataagacacaagt

SEQ ID NO: 168838 - DNA, 20 bp, Artificial Sequence
  Description of Artificial Sequence: Synthetic oligonucleotide
  Target: LAMA2; (+) strand; PAM type: NRG; PAM sequence: AGG
gataaaataagacacaagtg

SEQ ID NO: 168839 - DNA, 20 bp, Artificial Sequence
  Description of Artificial Sequence: Synthetic oligonucleotide
  Target: LAMA2; (+) strand; PAM type: NRG; PAM sequence: AAG
taatatatttctgtatcctt

SEQ ID NO: 168840 - DNA, 20 bp, Artificial Sequence
  Description of Artificial Sequence: Synthetic oligonucleotide
  Target: LAMA2; (+) strand; PAM type: NRG; PAM sequence: TAG
tctgtatccttaagctaaat

SEQ ID NO: 168841 - DNA, 20 bp, Artificial Sequence
  Description of Artificial Sequence: Synthetic oligonucleotide
  Target: LAMA2; (+) strand; PAM type: NRG; PAM sequence: AAG
tccttaagctaaattagtgc

SEQ ID NO: 168842 - DNA, 20 bp, Artificial Sequence
  Description of Artificial Sequence: Synthetic oligonucleotide
  Target: LAMA2; (+) strand; PAM type: NRG; PAM sequence: GAG
cttaagctaaattagtgcaa

SEQ ID NO: 168843 - DNA, 20 bp, Artificial Sequence
  Description of Artificial Sequence: Synthetic oligonucleotide
  Target: LAMA2; (+) strand; PAM type: NRG; PAM sequence: TGG
tagtgcaagagaccaaaaaa

SEQ ID NO: 168844 - DNA, 20 bp, Artificial Sequence
  Description of Artificial Sequence: Synthetic oligonucleotide
  Target: LAMA2; (+) strand; PAM type: NRG; PAM sequence: TGG
gaccaaaaaatggattcacc

SEQ ID NO: 168845 - DNA, 20 bp, Artificial Sequence
  Description of Artificial Sequence: Synthetic oligonucleotide
  Target: LAMA2; (+) strand; PAM type: NRG; PAM sequence: GGG
accaaaaaatggattcacct

SEQ ID NO: 168846 - DNA, 20 bp, Artificial Sequence
  Description of Artificial Sequence: Synthetic oligonucleotide
  Target: LAMA2; (+) strand; PAM type: NRG; PAM sequence: GGG
ccaaaaaatggattcacctg

SEQ ID NO: 168847 - DNA, 20 bp, Artificial Sequence
  Description of Artificial Sequence: Synthetic oligonucleotide
  Target: LAMA2; (+) strand; PAM type: NRG; PAM sequence: CAG
cacctggggtgtttgatctg

SEQ ID NO: 168848 - DNA, 20 bp, Artificial Sequence
  Description of Artificial Sequence: Synthetic oligonucleotide
  Target: LAMA2; (+) strand; PAM type: NRG; PAM sequence: AGG
acctggggtgtttgatctgc

SEQ ID NO: 168849 - DNA, 20 bp, Artificial Sequence
  Description of Artificial Sequence: Synthetic oligonucleotide
  Target: LAMA2; (+) strand; PAM type: NRG; PAM sequence: TAG
ttgatctgcaggacctgttt

SEQ ID NO: 168850 - DNA, 20 bp, Artificial Sequence
  Description of Artificial Sequence: Synthetic oligonucleotide
  Target: LAMA2; (+) strand; PAM type: NRG; PAM sequence: TGG
tgttttagcacatgtaatca

SEQ ID NO: 168851 - DNA, 20 bp, Artificial Sequence
  Description of Artificial Sequence: Synthetic oligonucleotide
  Target: LAMA2; (+) strand; PAM type: NRG; PAM sequence: TGG
tttagcacatgtaatcatgg

SEQ ID NO: 168852 - DNA, 20 bp, Artificial Sequence
  Description of Artificial Sequence: Synthetic oligonucleotide
  Target: LAMA2; (+) strand; PAM type: NRG; PAM sequence: AAG
taatcatggtggaattgcat

SEQ ID NO: 168853 - DNA, 20 bp, Artificial Sequence
  Description of Artificial Sequence: Synthetic oligonucleotide
  Target: LAMA2; (+) strand; PAM type: NRG; PAM sequence: AGG
aatcatggtggaattgcata

SEQ ID NO: 168854 - DNA, 20 bp, Artificial Sequence
  Description of Artificial Sequence: Synthetic oligonucleotide
  Target: LAMA2; (+) strand; PAM type: NRG; PAM sequence: TGG
tggtggaattgcataaggcc

SEQ ID NO: 168855 - DNA, 20 bp, Artificial Sequence
  Description of Artificial Sequence: Synthetic oligonucleotide
  Target: LAMA2; (+) strand; PAM type: NRG; PAM sequence: GGG
ggtggaattgcataaggcct

SEQ ID NO: 168856 - DNA, 20 bp, Artificial Sequence
  Description of Artificial Sequence: Synthetic oligonucleotide
  Target: LAMA2; (+) strand; PAM type: NRG; PAM sequence: GGG
gtggaattgcataaggcctg

SEQ ID NO: 168857 - DNA, 20 bp, Artificial Sequence
  Description of Artificial Sequence: Synthetic oligonucleotide
  Target: LAMA2; (+) strand; PAM type: NRG; PAM sequence: GGG
tggaattgcataaggcctgg

SEQ ID NO: 168858 - DNA, 20 bp, Artificial Sequence
  Description of Artificial Sequence: Synthetic oligonucleotide
  Target: LAMA2; (+) strand; PAM type: NRG; PAM sequence: GAG
attgcataaggcctgggggt

SEQ ID NO: 168859 - DNA, 20 bp, Artificial Sequence
  Description of Artificial Sequence: Synthetic oligonucleotide
  Target: LAMA2; (+) strand; PAM type: NRG; PAM sequence: GAG
tgcataaggcctgggggtga

SEQ ID NO: 168860 - DNA, 20 bp, Artificial Sequence
  Description of Artificial Sequence: Synthetic oligonucleotide
  Target: LAMA2; (+) strand; PAM type: NRG; PAM sequence: AAG
taaggcctgggggtgagagt

SEQ ID NO: 168861 - DNA, 20 bp, Artificial Sequence
  Description of Artificial Sequence: Synthetic oligonucleotide
  Target: LAMA2; (+) strand; PAM type: NRG; PAM sequence: AGG
aaggcctgggggtgagagta

SEQ ID NO: 168862 - DNA, 20 bp, Artificial Sequence
  Description of Artificial Sequence: Synthetic oligonucleotide
  Target: LAMA2; (+) strand; PAM type: NRG; PAM sequence: GGG
aggcctgggggtgagagtaa

SEQ ID NO: 168863 - DNA, 20 bp, Artificial Sequence
  Description of Artificial Sequence: Synthetic oligonucleotide
  Target: LAMA2; (+) strand; PAM type: NRG; PAM sequence: GAG
gcctgggggtgagagtaagg

SEQ ID NO: 168864 - DNA, 20 bp, Artificial Sequence
  Description of Artificial Sequence: Synthetic oligonucleotide
  Target: LAMA2; (+) strand; PAM type: NRG; PAM sequence: AGG
cctgggggtgagagtaaggg

SEQ ID NO: 168865 - DNA, 20 bp, Artificial Sequence
  Description of Artificial Sequence: Synthetic oligonucleotide
  Target: LAMA2; (+) strand; PAM type: NRG; PAM sequence: TAG
gggggtgagagtaagggagg

SEQ ID NO: 168866 - DNA, 20 bp, Artificial Sequence
  Description of Artificial Sequence: Synthetic oligonucleotide
  Target: LAMA2; (+) strand; PAM type: NRG; PAM sequence: TGG
tgagagtaagggaggtagct

SEQ ID NO: 168867 - DNA, 20 bp, Artificial Sequence
  Description of Artificial Sequence: Synthetic oligonucleotide
  Target: LAMA2; (+) strand; PAM type: NRG; PAM sequence: TAG
taagggaggtagcttggctc

SEQ ID NO: 168868 - DNA, 20 bp, Artificial Sequence
  Description of Artificial Sequence: Synthetic oligonucleotide
  Target: LAMA2; (+) strand; PAM type: NRG; PAM sequence: AAG
ggaggtagcttggctctagc

SEQ ID NO: 168869 - DNA, 20 bp, Artificial Sequence
  Description of Artificial Sequence: Synthetic oligonucleotide
  Target: LAMA2; (+) strand; PAM type: NRG; PAM sequence: GAG
aggtagcttggctctagcaa

SEQ ID NO: 168870 - DNA, 20 bp, Artificial Sequence
  Description of Artificial Sequence: Synthetic oligonucleotide
  Target: LAMA2; (+) strand; PAM type: NRG; PAM sequence: TAG
ttggctctagcaagagaatt

SEQ ID NO: 168871 - DNA, 20 bp, Artificial Sequence
  Description of Artificial Sequence: Synthetic oligonucleotide
  Target: LAMA2; (+) strand; PAM type: NRG; PAM sequence: TAG
ctagcaagagaatttagatg

SEQ ID NO: 168872 - DNA, 20 bp, Artificial Sequence
  Description of Artificial Sequence: Synthetic oligonucleotide
  Target: LAMA2; (+) strand; PAM type: NRG; PAM sequence: AAG
caagagaatttagatgtagt

SEQ ID NO: 168873 - DNA, 20 bp, Artificial Sequence
  Description of Artificial Sequence: Synthetic oligonucleotide
  Target: LAMA2; (+) strand; PAM type: NRG; PAM sequence: GAG
agagaatttagatgtagtaa

SEQ ID NO: 168874 - DNA, 20 bp, Artificial Sequence
  Description of Artificial Sequence: Synthetic oligonucleotide
  Target: LAMA2; (+) strand; PAM type: NRG; PAM sequence: CAG
tgtagtaagagaaatgtctg

SEQ ID NO: 168875 - DNA, 20 bp, Artificial Sequence
  Description of Artificial Sequence: Synthetic oligonucleotide
  Target: LAMA2; (+) strand; PAM type: NRG; PAM sequence: TAG
atgtctgcagtgcttgttgt

SEQ ID NO: 168876 - DNA, 20 bp, Artificial Sequence
  Description of Artificial Sequence: Synthetic oligonucleotide
  Target: LAMA2; (+) strand; PAM type: NRG; PAM sequence: TAG
tgcagtgcttgttgttagta

SEQ ID NO: 168877 - DNA, 20 bp, Artificial Sequence
  Description of Artificial Sequence: Synthetic oligonucleotide
  Target: LAMA2; (+) strand; PAM type: NRG; PAM sequence: CAG
tgttagtatagtactgacta

SEQ ID NO: 168878 - DNA, 20 bp, Artificial Sequence
  Description of Artificial Sequence: Synthetic oligonucleotide
  Target: LAMA2; (+) strand; PAM type: NRG; PAM sequence: AGG
gttagtatagtactgactac

SEQ ID NO: 168879 - DNA, 20 bp, Artificial Sequence
  Description of Artificial Sequence: Synthetic oligonucleotide
  Target: LAMA2; (+) strand; PAM type: NRG; PAM sequence: TAG
ataaactttctcctattgct

SEQ ID NO: 168880 - DNA, 20 bp, Artificial Sequence
  Description of Artificial Sequence: Synthetic oligonucleotide
  Target: LAMA2; (+) strand; PAM type: NRG; PAM sequence: AAG
tttctcctattgcttagaat

SEQ ID NO: 168881 - DNA, 20 bp, Artificial Sequence
  Description of Artificial Sequence: Synthetic oligonucleotide
  Target: LAMA2; (+) strand; PAM type: NRG; PAM sequence: CAG
gcttagaataagtaaacact

SEQ ID NO: 168882 - DNA, 20 bp, Artificial Sequence
  Description of Artificial Sequence: Synthetic oligonucleotide
  Target: LAMA2; (+) strand; PAM type: NRG; PAM sequence: TAG
gaataagtaaacactcagtt

SEQ ID NO: 168883 - DNA, 20 bp, Artificial Sequence
  Description of Artificial Sequence: Synthetic oligonucleotide
  Target: LAMA2; (+) strand; PAM type: NRG; PAM sequence: TAG
taagtaaacactcagtttag

SEQ ID NO: 168884 - DNA, 20 bp, Artificial Sequence
  Description of Artificial Sequence: Synthetic oligonucleotide
  Target: LAMA2; (+) strand; PAM type: NRG; PAM sequence: AAG
tttagtagcatgtattgtac

SEQ ID NO: 168885 - DNA, 20 bp, Artificial Sequence
  Description of Artificial Sequence: Synthetic oligonucleotide
  Target: LAMA2; (+) strand; PAM type: NRG; PAM sequence: GAG
tagtagcatgtattgtacaa

SEQ ID NO: 168886 - DNA, 20 bp, Artificial Sequence
  Description of Artificial Sequence: Synthetic oligonucleotide
  Target: LAMA2; (+) strand; PAM type: NRG; PAM sequence: TAG
agagttaattttgcttcctt

SEQ ID NO: 168887 - DNA, 20 bp, Artificial Sequence
  Description of Artificial Sequence: Synthetic oligonucleotide
  Target: LAMA2; (+) strand; PAM type: NRG; PAM sequence: TGG
gcttcctttagttacttccc

SEQ ID NO: 168888 - DNA, 20 bp, Artificial Sequence
  Description of Artificial Sequence: Synthetic oligonucleotide
  Target: LAMA2; (+) strand; PAM type: NRG; PAM sequence: GGG
cttcctttagttacttccct

SEQ ID NO: 168889 - DNA, 20 bp, Artificial Sequence
  Description of Artificial Sequence: Synthetic oligonucleotide
  Target: LAMA2; (+) strand; PAM type: NRG; PAM sequence: TAG
cttccctgggaaatataatt

SEQ ID NO: 168890 - DNA, 20 bp, Artificial Sequence
  Description of Artificial Sequence: Synthetic oligonucleotide
  Target: LAMA2; (+) strand; PAM type: NRG; PAM sequence: TGG
atttagactgatccacatca

SEQ ID NO: 168891 - DNA, 20 bp, Artificial Sequence
  Description of Artificial Sequence: Synthetic oligonucleotide
  Target: LAMA2; (+) strand; PAM type: NRG; PAM sequence: CAG
ggatttgtgtatttcaaaaa

SEQ ID NO: 168892 - DNA, 20 bp, Artificial Sequence
  Description of Artificial Sequence: Synthetic oligonucleotide
  Target: LAMA2; (+) strand; PAM type: NRG; PAM sequence: AAG
tgtgtatttcaaaaacagaa

SEQ ID NO: 168893 - DNA, 20 bp, Artificial Sequence
  Description of Artificial Sequence: Synthetic oligonucleotide
  Target: LAMA2; (+) strand; PAM type: NRG; PAM sequence: AAG
atttcaaaaacagaaaagaa

SEQ ID NO: 168894 - DNA, 20 bp, Artificial Sequence
  Description of Artificial Sequence: Synthetic oligonucleotide
  Target: LAMA2; (+) strand; PAM type: NRG; PAM sequence: AAG
caaaaacagaaaagaaaaga

SEQ ID NO: 168895 - DNA, 20 bp, Artificial Sequence
  Description of Artificial Sequence: Synthetic oligonucleotide
  Target: LAMA2; (+) strand; PAM type: NRG; PAM sequence: GAG
aaaacagaaaagaaaagaaa

SEQ ID NO: 168896 - DNA, 20 bp, Artificial Sequence
  Description of Artificial Sequence: Synthetic oligonucleotide
  Target: LAMA2; (+) strand; PAM type: NRG; PAM sequence: GAG
aacagaaaagaaaagaaaga

SEQ ID NO: 168897 - DNA, 20 bp, Artificial Sequence
  Description of Artificial Sequence: Synthetic oligonucleotide
  Target: LAMA2; (+) strand; PAM type: NRG; PAM sequence: CAG
gaaaagaaaagaaagagaga

SEQ ID NO: 168898 - DNA, 20 bp, Artificial Sequence
  Description of Artificial Sequence: Synthetic oligonucleotide
  Target: LAMA2; (+) strand; PAM type: NRG; PAM sequence: AAG
aaatgcatgataaatgacct

SEQ ID NO: 168899 - DNA, 20 bp, Artificial Sequence
  Description of Artificial Sequence: Synthetic oligonucleotide
  Target: LAMA2; (+) strand; PAM type: NRG; PAM sequence: CAG
gcctgatcattgtgtgatct

SEQ ID NO: 168900 - DNA, 20 bp, Artificial Sequence
  Description of Artificial Sequence: Synthetic oligonucleotide
  Target: LAMA2; (+) strand; PAM type: NRG; PAM sequence: AGG
cctgatcattgtgtgatctc

SEQ ID NO: 168901 - DNA, 20 bp, Artificial Sequence
  Description of Artificial Sequence: Synthetic oligonucleotide
  Target: LAMA2; (+) strand; PAM type: NRG; PAM sequence: TGG
atctcaggtaatttgcatat

SEQ ID NO: 168902 - DNA, 20 bp, Artificial Sequence
  Description of Artificial Sequence: Synthetic oligonucleotide
  Target: LAMA2; (+) strand; PAM type: NRG; PAM sequence: AAG
ggtaatttgcatattggtga

SEQ ID NO: 168903 - DNA, 20 bp, Artificial Sequence
  Description of Artificial Sequence: Synthetic oligonucleotide
  Target: LAMA2; (+) strand; PAM type: NRG; PAM sequence: AGG
gtaatttgcatattggtgaa

SEQ ID NO: 168904 - DNA, 20 bp, Artificial Sequence
  Description of Artificial Sequence: Synthetic oligonucleotide
  Target: LAMA2; (+) strand; PAM type: NRG; PAM sequence: TAG
ctatacactcactgtaaatt

SEQ ID NO: 168905 - DNA, 20 bp, Artificial Sequence
  Description of Artificial Sequence: Synthetic oligonucleotide
  Target: LAMA2; (+) strand; PAM type: NRG; PAM sequence: TAG
cactcactgtaaatttagtt

SEQ ID NO: 168906 - DNA, 20 bp, Artificial Sequence
  Description of Artificial Sequence: Synthetic oligonucleotide
  Target: LAMA2; (+) strand; PAM type: NRG; PAM sequence: AGG
actcactgtaaatttagttt

SEQ ID NO: 168907 - DNA, 20 bp, Artificial Sequence
  Description of Artificial Sequence: Synthetic oligonucleotide
  Target: LAMA2; (+) strand; PAM type: NRG; PAM sequence: AAG
gtttaggctcttatttctca

SEQ ID NO: 168908 - DNA, 20 bp, Artificial Sequence
  Description of Artificial Sequence: Synthetic oligonucleotide
  Target: LAMA2; (+) strand; PAM type: NRG; PAM sequence: AAG
aagtatataaaattctgctg

SEQ ID NO: 168909 - DNA, 20 bp, Artificial Sequence
  Description of Artificial Sequence: Synthetic oligonucleotide
  Target: LAMA2; (+) strand; PAM type: NRG; PAM sequence: GAG
gtatataaaattctgctgaa

SEQ ID NO: 168910 - DNA, 20 bp, Artificial Sequence
  Description of Artificial Sequence: Synthetic oligonucleotide
  Target: LAMA2; (+) strand; PAM type: NRG; PAM sequence: CAG
taaaattctgctgaagagat

SEQ ID NO: 168911 - DNA, 20 bp, Artificial Sequence
  Description of Artificial Sequence: Synthetic oligonucleotide
  Target: LAMA2; (+) strand; PAM type: NRG; PAM sequence: AGG
aaaattctgctgaagagatc

SEQ ID NO: 168912 - DNA, 20 bp, Artificial Sequence
  Description of Artificial Sequence: Synthetic oligonucleotide
  Target: LAMA2; (+) strand; PAM type: NRG; PAM sequence: AAG
tgaagagatcaggcaaaaca

SEQ ID NO: 168913 - DNA, 20 bp, Artificial Sequence
  Description of Artificial Sequence: Synthetic oligonucleotide
  Target: LAMA2; (+) strand; PAM type: NRG; PAM sequence: CAG
caggcaaaacaaagccaatg

SEQ ID NO: 168914 - DNA, 20 bp, Artificial Sequence
  Description of Artificial Sequence: Synthetic oligonucleotide
  Target: LAMA2; (+) strand; PAM type: NRG; PAM sequence: AGG
aggcaaaacaaagccaatgc

SEQ ID NO: 168915 - DNA, 20 bp, Artificial Sequence
  Description of Artificial Sequence: Synthetic oligonucleotide
  Target: LAMA2; (+) strand; PAM type: NRG; PAM sequence: AAG
agccaatgcaggaactgtga

SEQ ID NO: 168916 - DNA, 20 bp, Artificial Sequence
  Description of Artificial Sequence: Synthetic oligonucleotide
  Target: LAMA2; (+) strand; PAM type: NRG; PAM sequence: AGG
gccaatgcaggaactgtgaa

SEQ ID NO: 168917 - DNA, 20 bp, Artificial Sequence
  Description of Artificial Sequence: Synthetic oligonucleotide
  Target: LAMA2; (+) strand; PAM type: NRG; PAM sequence: TGG
aactgtgaaaggacttccct

SEQ ID NO: 168918 - DNA, 20 bp, Artificial Sequence
  Description of Artificial Sequence: Synthetic oligonucleotide
  Target: LAMA2; (+) strand; PAM type: NRG; PAM sequence: TGG
aggacttcccttggacacct

SEQ ID NO: 168919 - DNA, 20 bp, Artificial Sequence
  Description of Artificial Sequence: Synthetic oligonucleotide
  Target: LAMA2; (+) strand; PAM type: NRG; PAM sequence: AAG
ttggacaccttggtccctaa

SEQ ID NO: 168920 - DNA, 20 bp, Artificial Sequence
  Description of Artificial Sequence: Synthetic oligonucleotide
  Target: LAMA2; (+) strand; PAM type: NRG; PAM sequence: TAG
tggtccctaaaagatactta

SEQ ID NO: 168921 - DNA, 20 bp, Artificial Sequence
  Description of Artificial Sequence: Synthetic oligonucleotide
  Target: LAMA2; (+) strand; PAM type: NRG; PAM sequence: CAG
taaaagatacttatagcttc

SEQ ID NO: 168922 - DNA, 20 bp, Artificial Sequence
  Description of Artificial Sequence: Synthetic oligonucleotide
  Target: LAMA2; (+) strand; PAM type: NRG; PAM sequence: AGG
aaaagatacttatagcttcc

SEQ ID NO: 168923 - DNA, 20 bp, Artificial Sequence
  Description of Artificial Sequence: Synthetic oligonucleotide
  Target: LAMA2; (+) strand; PAM type: NRG; PAM sequence: GGG
aaagatacttatagcttcca

SEQ ID NO: 168924 - DNA, 20 bp, Artificial Sequence
  Description of Artificial Sequence: Synthetic oligonucleotide
  Target: LAMA2; (+) strand; PAM type: NRG; PAM sequence: CAG
atacttatagcttccaggga

SEQ ID NO: 168925 - DNA, 20 bp, Artificial Sequence
  Description of Artificial Sequence: Synthetic oligonucleotide
  Target: LAMA2; (+) strand; PAM type: NRG; PAM sequence: CAG
tagcttccagggacagttgc

SEQ ID NO: 168926 - DNA, 20 bp, Artificial Sequence
  Description of Artificial Sequence: Synthetic oligonucleotide
  Target: LAMA2; (+) strand; PAM type: NRG; PAM sequence: TGG
ggacagttgccagtgacccc

SEQ ID NO: 168927 - DNA, 20 bp, Artificial Sequence
  Description of Artificial Sequence: Synthetic oligonucleotide
  Target: LAMA2; (+) strand; PAM type: NRG; PAM sequence: TGG
cagtgacccctggattttac

SEQ ID NO: 168928 - DNA, 20 bp, Artificial Sequence
  Description of Artificial Sequence: Synthetic oligonucleotide
  Target: LAMA2; (+) strand; PAM type: NRG; PAM sequence: TGG
ggattttactggatccaaaa

SEQ ID NO: 168929 - DNA, 20 bp, Artificial Sequence
  Description of Artificial Sequence: Synthetic oligonucleotide
  Target: LAMA2; (+) strand; PAM type: NRG; PAM sequence: CAG
atccaaaatggaattttttg

SEQ ID NO: 168930 - DNA, 20 bp, Artificial Sequence
  Description of Artificial Sequence: Synthetic oligonucleotide
  Target: LAMA2; (+) strand; PAM type: NRG; PAM sequence: CAG
atggaattttttgcagcaca

SEQ ID NO: 168931 - DNA, 20 bp, Artificial Sequence
  Description of Artificial Sequence: Synthetic oligonucleotide
  Target: LAMA2; (+) strand; PAM type: NRG; PAM sequence: AGG
tggaattttttgcagcacac

SEQ ID NO: 168932 - DNA, 20 bp, Artificial Sequence
  Description of Artificial Sequence: Synthetic oligonucleotide
  Target: LAMA2; (+) strand; PAM type: NRG; PAM sequence: TGG
gcacacaggccttttatatg

SEQ ID NO: 168933 - DNA, 20 bp, Artificial Sequence
  Description of Artificial Sequence: Synthetic oligonucleotide
  Target: LAMA2; (+) strand; PAM type: NRG; PAM sequence: AAG
ggattttcactactatcatg

SEQ ID NO: 168934 - DNA, 20 bp, Artificial Sequence
  Description of Artificial Sequence: Synthetic oligonucleotide
  Target: LAMA2; (+) strand; PAM type: NRG; PAM sequence: TAG
caaataatctgtgtccacgt

SEQ ID NO: 168935 - DNA, 20 bp, Artificial Sequence
  Description of Artificial Sequence: Synthetic oligonucleotide
  Target: LAMA2; (+) strand; PAM type: NRG; PAM sequence: AGG
aaataatctgtgtccacgtt

SEQ ID NO: 168936 - DNA, 20 bp, Artificial Sequence
  Description of Artificial Sequence: Synthetic oligonucleotide
  Target: LAMA2; (+) strand; PAM type: NRG; PAM sequence: TAG
gtccacgttaggaacctatt

SEQ ID NO: 168937 - DNA, 20 bp, Artificial Sequence
  Description of Artificial Sequence: Synthetic oligonucleotide
  Target: LAMA2; (+) strand; PAM type: NRG; PAM sequence: CAG
aggaacctatttagacatca

SEQ ID NO: 168938 - DNA, 20 bp, Artificial Sequence
  Description of Artificial Sequence: Synthetic oligonucleotide
  Target: LAMA2; (+) strand; PAM type: NRG; PAM sequence: TAG
ttagacatcacagtctctca

SEQ ID NO: 168939 - DNA, 20 bp, Artificial Sequence
  Description of Artificial Sequence: Synthetic oligonucleotide
  Target: LAMA2; (+) strand; PAM type: NRG; PAM sequence: TAG
acatcacagtctctcatagt

SEQ ID NO: 168940 - DNA, 20 bp, Artificial Sequence
  Description of Artificial Sequence: Synthetic oligonucleotide
  Target: LAMA2; (+) strand; PAM type: NRG; PAM sequence: CAG
catagttagtgacctaaatt

SEQ ID NO: 168941 - DNA, 20 bp, Artificial Sequence
  Description of Artificial Sequence: Synthetic oligonucleotide
  Target: LAMA2; (+) strand; PAM type: NRG; PAM sequence: CAG
ctaaattcagccccaccatg

SEQ ID NO: 168942 - DNA, 20 bp, Artificial Sequence
  Description of Artificial Sequence: Synthetic oligonucleotide
  Target: LAMA2; (+) strand; PAM type: NRG; PAM sequence: GAG
aaattcagccccaccatgca

SEQ ID NO: 168943 - DNA, 20 bp, Artificial Sequence
  Description of Artificial Sequence: Synthetic oligonucleotide
  Target: LAMA2; (+) strand; PAM type: NRG; PAM sequence: CAG
tcagccccaccatgcagagt

SEQ ID NO: 168944 - DNA, 20 bp, Artificial Sequence
  Description of Artificial Sequence: Synthetic oligonucleotide
  Target: LAMA2; (+) strand; PAM type: NRG; PAM sequence: GAG
accatgcagagtcagttcct

SEQ ID NO: 168945 - DNA, 20 bp, Artificial Sequence
  Description of Artificial Sequence: Synthetic oligonucleotide
  Target: LAMA2; (+) strand; PAM type: NRG; PAM sequence: AAG
gtcagttcctgagcataact

SEQ ID NO: 168946 - DNA, 20 bp, Artificial Sequence
  Description of Artificial Sequence: Synthetic oligonucleotide
  Target: LAMA2; (+) strand; PAM type: NRG; PAM sequence: CAG
atttattcaccttcaaattc

SEQ ID NO: 168947 - DNA, 20 bp, Artificial Sequence
  Description of Artificial Sequence: Synthetic oligonucleotide
  Target: LAMA2; (+) strand; PAM type: NRG; PAM sequence: AGG
tttattcaccttcaaattcc

SEQ ID NO: 168948 - DNA, 20 bp, Artificial Sequence
  Description of Artificial Sequence: Synthetic oligonucleotide
  Target: LAMA2; (+) strand; PAM type: NRG; PAM sequence: AAG
caaattccaggcattctcta

SEQ ID NO: 168949 - DNA, 20 bp, Artificial Sequence
  Description of Artificial Sequence: Synthetic oligonucleotide
  Target: LAMA2; (+) strand; PAM type: NRG; PAM sequence: CAG
ctaaagtcccttttaccaca

SEQ ID NO: 168950 - DNA, 20 bp, Artificial Sequence
  Description of Artificial Sequence: Synthetic oligonucleotide
  Target: LAMA2; (+) strand; PAM type: NRG; PAM sequence: AGG
taaagtcccttttaccacac

SEQ ID NO: 168951 - DNA, 20 bp, Artificial Sequence
  Description of Artificial Sequence: Synthetic oligonucleotide
  Target: LAMA2; (+) strand; PAM type: NRG; PAM sequence: GGG
aaagtcccttttaccacaca

SEQ ID NO: 168952 - DNA, 20 bp, Artificial Sequence
  Description of Artificial Sequence: Synthetic oligonucleotide
  Target: LAMA2; (+) strand; PAM type: NRG; PAM sequence: TAG
ccacacagggttcatcataa

SEQ ID NO: 168953 - DNA, 20 bp, Artificial Sequence
  Description of Artificial Sequence: Synthetic oligonucleotide
  Target: LAMA2; (+) strand; PAM type: NRG; PAM sequence: AAG
cataatagtaattttattta

SEQ ID NO: 168954 - DNA, 20 bp, Artificial Sequence
  Description of Artificial Sequence: Synthetic oligonucleotide
  Target: LAMA2; (+) strand; PAM type: NRG; PAM sequence: AGG
ataatagtaattttatttaa

SEQ ID NO: 168955 - DNA, 20 bp, Artificial Sequence
  Description of Artificial Sequence: Synthetic oligonucleotide
  Target: LAMA2; (+) strand; PAM type: NRG; PAM sequence: GAG
tttaaaggctcaccttgact

SEQ ID NO: 168956 - DNA, 20 bp, Artificial Sequence
  Description of Artificial Sequence: Synthetic oligonucleotide
  Target: LAMA2; (+) strand; PAM type: NRG; PAM sequence: CAG
actgagaacttaccatttgc

SEQ ID NO: 168957 - DNA, 20 bp, Artificial Sequence
  Description of Artificial Sequence: Synthetic oligonucleotide
  Target: LAMA2; (+) strand; PAM type: NRG; PAM sequence: AGG
ctgagaacttaccatttgcc

SEQ ID NO: 168958 - DNA, 20 bp, Artificial Sequence
  Description of Artificial Sequence: Synthetic oligonucleotide
  Target: LAMA2; (+) strand; PAM type: NRG; PAM sequence: AAG
catttgccaggcactatatt

SEQ ID NO: 168959 - DNA, 20 bp, Artificial Sequence
  Description of Artificial Sequence: Synthetic oligonucleotide
  Target: LAMA2; (+) strand; PAM type: NRG; PAM sequence: TGG
tatattaagcattttacacg

SEQ ID NO: 168960 - DNA, 20 bp, Artificial Sequence
  Description of Artificial Sequence: Synthetic oligonucleotide
  Target: LAMA2; (+) strand; PAM type: NRG; PAM sequence: AAG
tatcatccccactgtgtgat

SEQ ID NO: 168961 - DNA, 20 bp, Artificial Sequence
  Description of Artificial Sequence: Synthetic oligonucleotide
  Target: LAMA2; (+) strand; PAM type: NRG; PAM sequence: GAG
tcatccccactgtgtgataa

SEQ ID NO: 168962 - DNA, 20 bp, Artificial Sequence
  Description of Artificial Sequence: Synthetic oligonucleotide
  Target: LAMA2; (+) strand; PAM type: NRG; PAM sequence: TAG
tgtgataagagaactgaatt

SEQ ID NO: 168963 - DNA, 20 bp, Artificial Sequence
  Description of Artificial Sequence: Synthetic oligonucleotide
  Target: LAMA2; (+) strand; PAM type: NRG; PAM sequence: AGG
gtgataagagaactgaattt

SEQ ID NO: 168964 - DNA, 20 bp, Artificial Sequence
  Description of Artificial Sequence: Synthetic oligonucleotide
  Target: LAMA2; (+) strand; PAM type: NRG; PAM sequence: TAG
ataagagaactgaatttagg

SEQ ID NO: 168965 - DNA, 20 bp, Artificial Sequence
  Description of Artificial Sequence: Synthetic oligonucleotide
  Target: LAMA2; (+) strand; PAM type: NRG; PAM sequence: AGG
taagagaactgaatttaggt

SEQ ID NO: 168966 - DNA, 20 bp, Artificial Sequence
  Description of Artificial Sequence: Synthetic oligonucleotide
  Target: LAMA2; (+) strand; PAM type: NRG; PAM sequence: AAG
gaactgaatttaggtaggtt

SEQ ID NO: 168967 - DNA, 20 bp, Artificial Sequence
  Description of Artificial Sequence: Synthetic oligonucleotide
  Target: LAMA2; (+) strand; PAM type: NRG; PAM sequence: CAG
ggtaggttaagtcattttct

SEQ ID NO: 168968 - DNA, 20 bp, Artificial Sequence
  Description of Artificial Sequence: Synthetic oligonucleotide
  Target: LAMA2; (+) strand; PAM type: NRG; PAM sequence: CAG
tcattttctcagtgactttt

SEQ ID NO: 168969 - DNA, 20 bp, Artificial Sequence
  Description of Artificial Sequence: Synthetic oligonucleotide
  Target: LAMA2; (+) strand; PAM type: NRG; PAM sequence: TAG
ttttctcagtgacttttcag

SEQ ID NO: 168970 - DNA, 20 bp, Artificial Sequence
  Description of Artificial Sequence: Synthetic oligonucleotide
  Target: LAMA2; (+) strand; PAM type: NRG; PAM sequence: GAG
tttcagtagatccgtgattt

SEQ ID NO: 168971 - DNA, 20 bp, Artificial Sequence
  Description of Artificial Sequence: Synthetic oligonucleotide
  Target: LAMA2; (+) strand; PAM type: NRG; PAM sequence: TGG
gtagatccgtgatttgagca

SEQ ID NO: 168972 - DNA, 20 bp, Artificial Sequence
  Description of Artificial Sequence: Synthetic oligonucleotide
  Target: LAMA2; (+) strand; PAM type: NRG; PAM sequence: GGG
tagatccgtgatttgagcat

SEQ ID NO: 168973 - DNA, 20 bp, Artificial Sequence
  Description of Artificial Sequence: Synthetic oligonucleotide
  Target: LAMA2; (+) strand; PAM type: NRG; PAM sequence: CAG
tccgtgatttgagcatgggt

SEQ ID NO: 168974 - DNA, 20 bp, Artificial Sequence
  Description of Artificial Sequence: Synthetic oligonucleotide
  Target: LAMA2; (+) strand; PAM type: NRG; PAM sequence: TGG
tattttcttaacctctatgc

SEQ ID NO: 168975 - DNA, 20 bp, Artificial Sequence
  Description of Artificial Sequence: Synthetic oligonucleotide
  Target: LAMA2; (+) strand; PAM type: NRG; PAM sequence: CAG
ctatgctggctactgataaa

SEQ ID NO: 168976 - DNA, 20 bp, Artificial Sequence
  Description of Artificial Sequence: Synthetic oligonucleotide
  Target: LAMA2; (+) strand; PAM type: NRG; PAM sequence: GAG
atgctggctactgataaaca

SEQ ID NO: 168977 - DNA, 20 bp, Artificial Sequence
  Description of Artificial Sequence: Synthetic oligonucleotide
  Target: LAMA2; (+) strand; PAM type: NRG; PAM sequence: AAG
tggctactgataaacagaga

SEQ ID NO: 168978 - DNA, 20 bp, Artificial Sequence
  Description of Artificial Sequence: Synthetic oligonucleotide
  Target: LAMA2; (+) strand; PAM type: NRG; PAM sequence: TGG
ataaacagagaaagcaaacg

SEQ ID NO: 168979 - DNA, 20 bp, Artificial Sequence
  Description of Artificial Sequence: Synthetic oligonucleotide
  Target: LAMA2; (+) strand; PAM type: NRG; PAM sequence: TAG
cagagaaagcaaacgtggtt

SEQ ID NO: 168980 - DNA, 20 bp, Artificial Sequence
  Description of Artificial Sequence: Synthetic oligonucleotide
  Target: LAMA2; (+) strand; PAM type: NRG; PAM sequence: CAG
gaaagcaaacgtggtttagc

SEQ ID NO: 168981 - DNA, 20 bp, Artificial Sequence
  Description of Artificial Sequence: Synthetic oligonucleotide
  Target: LAMA2; (+) strand; PAM type: NRG; PAM sequence: CAG
atattcaacattaatgaatt

SEQ ID NO: 168982 - DNA, 20 bp, Artificial Sequence
  Description of Artificial Sequence: Synthetic oligonucleotide
  Target: LAMA2; (+) strand; PAM type: NRG; PAM sequence: TAG
tcatttactgcttccatgtt

SEQ ID NO: 168983 - DNA, 20 bp, Artificial Sequence
  Description of Artificial Sequence: Synthetic oligonucleotide
  Target: LAMA2; (+) strand; PAM type: NRG; PAM sequence: GAG
atttactgcttccatgttta

SEQ ID NO: 168984 - DNA, 20 bp, Artificial Sequence
  Description of Artificial Sequence: Synthetic oligonucleotide
  Target: LAMA2; (+) strand; PAM type: NRG; PAM sequence: GAG
attaaaaataaatataaaac

SEQ ID NO: 168985 - DNA, 20 bp, Artificial Sequence
  Description of Artificial Sequence: Synthetic oligonucleotide
  Target: LAMA2; (+) strand; PAM type: NRG; PAM sequence: GAG
acgagctaaaattacaaaat

SEQ ID NO: 168986 - DNA, 20 bp, Artificial Sequence
  Description of Artificial Sequence: Synthetic oligonucleotide
  Target: LAMA2; (+) strand; PAM type: NRG; PAM sequence: AAG
attacaaaatgagaaatttt

SEQ ID NO: 168987 - DNA, 20 bp, Artificial Sequence
  Description of Artificial Sequence: Synthetic oligonucleotide
  Target: LAMA2; (+) strand; PAM type: NRG; PAM sequence: CAG
attttaagtgtatgtaatct

SEQ ID NO: 168988 - DNA, 20 bp, Artificial Sequence
  Description of Artificial Sequence: Synthetic oligonucleotide
  Target: LAMA2; (+) strand; PAM type: NRG; PAM sequence: GAG
tttattttctgctaatcatt

SEQ ID NO: 168989 - DNA, 20 bp, Artificial Sequence
  Description of Artificial Sequence: Synthetic oligonucleotide
  Target: LAMA2; (+) strand; PAM type: NRG; PAM sequence: AAG
ctaatcattgagactcctct

SEQ ID NO: 168990 - DNA, 20 bp, Artificial Sequence
  Description of Artificial Sequence: Synthetic oligonucleotide
  Target: LAMA2; (+) strand; PAM type: NRG; PAM sequence: TGG
ctctaagatttaaaacatta

SEQ ID NO: 168991 - DNA, 20 bp, Artificial Sequence
  Description of Artificial Sequence: Synthetic oligonucleotide
  Target: LAMA2; (+) strand; PAM type: NRG; PAM sequence: TGG
ttaaaacattatggcattta

SEQ ID NO: 168992 - DNA, 20 bp, Artificial Sequence
  Description of Artificial Sequence: Synthetic oligonucleotide
  Target: LAMA2; (+) strand; PAM type: NRG; PAM sequence: TAG
aaacattatggcatttatgg

SEQ ID NO: 168993 - DNA, 20 bp, Artificial Sequence
  Description of Artificial Sequence: Synthetic oligonucleotide
  Target: LAMA2; (+) strand; PAM type: NRG; PAM sequence: CAG
tatggtagattccttttcat

SEQ ID NO: 168994 - DNA, 20 bp, Artificial Sequence
  Description of Artificial Sequence: Synthetic oligonucleotide
  Target: LAMA2; (+) strand; PAM type: NRG; PAM sequence: GAG
tggtagattccttttcatca

SEQ ID NO: 168995 - DNA, 20 bp, Artificial Sequence
  Description of Artificial Sequence: Synthetic oligonucleotide
  Target: LAMA2; (+) strand; PAM type: NRG; PAM sequence: AAG
ccttttcatcagagattgtc

SEQ ID NO: 168996 - DNA, 20 bp, Artificial Sequence
  Description of Artificial Sequence: Synthetic oligonucleotide
  Target: LAMA2; (+) strand; PAM type: NRG; PAM sequence: TAG
tttcatcagagattgtcaag

SEQ ID NO: 168997 - DNA, 20 bp, Artificial Sequence
  Description of Artificial Sequence: Synthetic oligonucleotide
  Target: LAMA2; (+) strand; PAM type: NRG; PAM sequence: GAG
tcatcagagattgtcaagta

SEQ ID NO: 168998 - DNA, 20 bp, Artificial Sequence
  Description of Artificial Sequence: Synthetic oligonucleotide
  Target: LAMA2; (+) strand; PAM type: NRG; PAM sequence: CAG
agtagagactgtcttctatg

SEQ ID NO: 168999 - DNA, 20 bp, Artificial Sequence
  Description of Artificial Sequence: Synthetic oligonucleotide
  Target: LAMA2; (+) strand; PAM type: NRG; PAM sequence: AAG
agagactgtcttctatgcag

SEQ ID NO: 169000 - DNA, 20 bp, Artificial Sequence
  Description of Artificial Sequence: Synthetic oligonucleotide
  Target: LAMA2; (+) strand; PAM type: NRG; PAM sequence: AAG
ctgtcttctatgcagaagaa

SEQ ID NO: 169001 - DNA, 20 bp, Artificial Sequence
  Description of Artificial Sequence: Synthetic oligonucleotide
  Target: LAMA2; (+) strand; PAM type: NRG; PAM sequence: TAG
ctatgcagaagaaaagatac

SEQ ID NO: 169002 - DNA, 20 bp, Artificial Sequence
  Description of Artificial Sequence: Synthetic oligonucleotide
  Target: LAMA2; (+) strand; PAM type: NRG; PAM sequence: TGG
gcagaagaaaagatactagc

SEQ ID NO: 169003 - DNA, 20 bp, Artificial Sequence
  Description of Artificial Sequence: Synthetic oligonucleotide
  Target: LAMA2; (+) strand; PAM type: NRG; PAM sequence: GGG
cagaagaaaagatactagct

SEQ ID NO: 169004 - DNA, 20 bp, Artificial Sequence
  Description of Artificial Sequence: Synthetic oligonucleotide
  Target: LAMA2; (+) strand; PAM type: NRG; PAM sequence: CAG
aaagatactagctgggtgcc

SEQ ID NO: 169005 - DNA, 20 bp, Artificial Sequence
  Description of Artificial Sequence: Synthetic oligonucleotide
  Target: LAMA2; (+) strand; PAM type: NRG; PAM sequence: CAG
gggtgcccagattaacttca

SEQ ID NO: 169006 - DNA, 20 bp, Artificial Sequence
  Description of Artificial Sequence: Synthetic oligonucleotide
  Target: LAMA2; (+) strand; PAM type: NRG; PAM sequence: AAG
cacagcctctttttttctaa

SEQ ID NO: 169007 - DNA, 20 bp, Artificial Sequence
  Description of Artificial Sequence: Synthetic oligonucleotide
  Target: LAMA2; (+) strand; PAM type: NRG; PAM sequence: AGG
acagcctctttttttctaaa

SEQ ID NO: 169008 - DNA, 20 bp, Artificial Sequence
  Description of Artificial Sequence: Synthetic oligonucleotide
  Target: LAMA2; (+) strand; PAM type: NRG; PAM sequence: TGG
tttttctaaaaggaattatt

SEQ ID NO: 169009 - DNA, 20 bp, Artificial Sequence
  Description of Artificial Sequence: Synthetic oligonucleotide
  Target: LAMA2; (+) strand; PAM type: NRG; PAM sequence: GGG
ttttctaaaaggaattattt

SEQ ID NO: 169010 - DNA, 20 bp, Artificial Sequence
  Description of Artificial Sequence: Synthetic oligonucleotide
  Target: LAMA2; (+) strand; PAM type: NRG; PAM sequence: CAG
ctaaaaggaattatttggga

SEQ ID NO: 169011 - DNA, 20 bp, Artificial Sequence
  Description of Artificial Sequence: Synthetic oligonucleotide
  Target: LAMA2; (+) strand; PAM type: NRG; PAM sequence: AAG
acagctttacaatgttatgt

SEQ ID NO: 169012 - DNA, 20 bp, Artificial Sequence
  Description of Artificial Sequence: Synthetic oligonucleotide
  Target: LAMA2; (+) strand; PAM type: NRG; PAM sequence: TGG
ctttacaatgttatgtaagt

SEQ ID NO: 169013 - DNA, 20 bp, Artificial Sequence
  Description of Artificial Sequence: Synthetic oligonucleotide
  Target: LAMA2; (+) strand; PAM type: NRG; PAM sequence: GAG
acaatgttatgtaagttggt

SEQ ID NO: 169014 - DNA, 20 bp, Artificial Sequence
  Description of Artificial Sequence: Synthetic oligonucleotide
  Target: LAMA2; (+) strand; PAM type: NRG; PAM sequence: AAG
atgtaagttggtgagttctg

SEQ ID NO: 169015 - DNA, 20 bp, Artificial Sequence
  Description of Artificial Sequence: Synthetic oligonucleotide
  Target: LAMA2; (+) strand; PAM type: NRG; PAM sequence: GAG
gtaagttggtgagttctgaa

SEQ ID NO: 169016 - DNA, 20 bp, Artificial Sequence
  Description of Artificial Sequence: Synthetic oligonucleotide
  Target: LAMA2; (+) strand; PAM type: NRG; PAM sequence: AAG
ttttattaatttcccaaatt

SEQ ID NO: 169017 - DNA, 20 bp, Artificial Sequence
  Description of Artificial Sequence: Synthetic oligonucleotide
  Target: LAMA2; (+) strand; PAM type: NRG; PAM sequence: AAG
aattaagatttcttcttgat

SEQ ID NO: 169018 - DNA, 20 bp, Artificial Sequence
  Description of Artificial Sequence: Synthetic oligonucleotide
  Target: LAMA2; (+) strand; PAM type: NRG; PAM sequence: TAG
cctctttcaactgtcattca

SEQ ID NO: 169019 - DNA, 20 bp, Artificial Sequence
  Description of Artificial Sequence: Synthetic oligonucleotide
  Target: LAMA2; (+) strand; PAM type: NRG; PAM sequence: GAG
cacatgtcattttataaaat

SEQ ID NO: 169020 - DNA, 20 bp, Artificial Sequence
  Description of Artificial Sequence: Synthetic oligonucleotide
  Target: LAMA2; (+) strand; PAM type: NRG; PAM sequence: AAG
agaacaactaacctgccttc

SEQ ID NO: 169021 - DNA, 20 bp, Artificial Sequence
  Description of Artificial Sequence: Synthetic oligonucleotide
  Target: LAMA2; (+) strand; PAM type: NRG; PAM sequence: AAG
aagaaacttaaaaatgaaca

SEQ ID NO: 169022 - DNA, 20 bp, Artificial Sequence
  Description of Artificial Sequence: Synthetic oligonucleotide
  Target: LAMA2; (+) strand; PAM type: NRG; PAM sequence: AAG
aaacttaaaaatgaacaaag

SEQ ID NO: 169023 - DNA, 20 bp, Artificial Sequence
  Description of Artificial Sequence: Synthetic oligonucleotide
  Target: LAMA2; (+) strand; PAM type: NRG; PAM sequence: CAG
agaagccattatttgcttaa

SEQ ID NO: 169024 - DNA, 20 bp, Artificial Sequence
  Description of Artificial Sequence: Synthetic oligonucleotide
  Target: LAMA2; (+) strand; PAM type: NRG; PAM sequence: AAG
ccattatttgcttaacagta

SEQ ID NO: 169025 - DNA, 20 bp, Artificial Sequence
  Description of Artificial Sequence: Synthetic oligonucleotide
  Target: LAMA2; (+) strand; PAM type: NRG; PAM sequence: TAG
atttgcttaacagtaaagtt

SEQ ID NO: 169026 - DNA, 20 bp, Artificial Sequence
  Description of Artificial Sequence: Synthetic oligonucleotide
  Target: LAMA2; (+) strand; PAM type: NRG; PAM sequence: TGG
gtattttgaaacacaaaact

SEQ ID NO: 169027 - DNA, 20 bp, Artificial Sequence
  Description of Artificial Sequence: Synthetic oligonucleotide
  Target: LAMA2; (+) strand; PAM type: NRG; PAM sequence: CAG
gtaaactcatatcattaaca

SEQ ID NO: 169028 - DNA, 20 bp, Artificial Sequence
  Description of Artificial Sequence: Synthetic oligonucleotide
  Target: LAMA2; (+) strand; PAM type: NRG; PAM sequence: TAG
aacccatgtgatgtttaaaa

SEQ ID NO: 169029 - DNA, 20 bp, Artificial Sequence
  Description of Artificial Sequence: Synthetic oligonucleotide
  Target: LAMA2; (+) strand; PAM type: NRG; PAM sequence: GAG
tgatgtttaaaatagattat

SEQ ID NO: 169030 - DNA, 20 bp, Artificial Sequence
  Description of Artificial Sequence: Synthetic oligonucleotide
  Target: LAMA2; (+) strand; PAM type: NRG; PAM sequence: TGG
tgtttaaaatagattatgag

SEQ ID NO: 169031 - DNA, 20 bp, Artificial Sequence
  Description of Artificial Sequence: Synthetic oligonucleotide
  Target: LAMA2; (+) strand; PAM type: NRG; PAM sequence: TAG
aaaatagattatgagtggca

SEQ ID NO: 169032 - DNA, 20 bp, Artificial Sequence
  Description of Artificial Sequence: Synthetic oligonucleotide
  Target: LAMA2; (+) strand; PAM type: NRG; PAM sequence: TAG
agtaaaatgtattactctcc

SEQ ID NO: 169033 - DNA, 20 bp, Artificial Sequence
  Description of Artificial Sequence: Synthetic oligonucleotide
  Target: LAMA2; (+) strand; PAM type: NRG; PAM sequence: GAG
taaaatgtattactctccta

SEQ ID NO: 169034 - DNA, 20 bp, Artificial Sequence
  Description of Artificial Sequence: Synthetic oligonucleotide
  Target: LAMA2; (+) strand; PAM type: NRG; PAM sequence: CAG
tgtattactctcctagagaa

SEQ ID NO: 169035 - DNA, 20 bp, Artificial Sequence
  Description of Artificial Sequence: Synthetic oligonucleotide
  Target: LAMA2; (+) strand; PAM type: NRG; PAM sequence: TAG
tagagaacagaaattaaaat

SEQ ID NO: 169036 - DNA, 20 bp, Artificial Sequence
  Description of Artificial Sequence: Synthetic oligonucleotide
  Target: LAMA2; (+) strand; PAM type: NRG; PAM sequence: TGG
aaattaaaattagtatctgt

SEQ ID NO: 169037 - DNA, 20 bp, Artificial Sequence
  Description of Artificial Sequence: Synthetic oligonucleotide
  Target: LAMA2; (+) strand; PAM type: NRG; PAM sequence: AAG
taaaattagtatctgttggc

SEQ ID NO: 169038 - DNA, 20 bp, Artificial Sequence
  Description of Artificial Sequence: Synthetic oligonucleotide
  Target: LAMA2; (+) strand; PAM type: NRG; PAM sequence: TAG
ttcataaaaattgcctgaaa

SEQ ID NO: 169039 - DNA, 20 bp, Artificial Sequence
  Description of Artificial Sequence: Synthetic oligonucleotide
  Target: LAMA2; (+) strand; PAM type: NRG; PAM sequence: TGG
gcattttataaatatcaaat

SEQ ID NO: 169040 - DNA, 20 bp, Artificial Sequence
  Description of Artificial Sequence: Synthetic oligonucleotide
  Target: LAMA2; (+) strand; PAM type: NRG; PAM sequence: TAG
gcctatttttaatcactgca

SEQ ID NO: 169041 - DNA, 20 bp, Artificial Sequence
  Description of Artificial Sequence: Synthetic oligonucleotide
  Target: LAMA2; (+) strand; PAM type: NRG; PAM sequence: TGG
tatttttaatcactgcatag

SEQ ID NO: 169042 - DNA, 20 bp, Artificial Sequence
  Description of Artificial Sequence: Synthetic oligonucleotide
  Target: LAMA2; (+) strand; PAM type: NRG; PAM sequence: GGG
atttttaatcactgcatagt

SEQ ID NO: 169043 - DNA, 20 bp, Artificial Sequence
  Description of Artificial Sequence: Synthetic oligonucleotide
  Target: LAMA2; (+) strand; PAM type: NRG; PAM sequence: GGG
tttttaatcactgcatagtg

SEQ ID NO: 169044 - DNA, 20 bp, Artificial Sequence
  Description of Artificial Sequence: Synthetic oligonucleotide
  Target: LAMA2; (+) strand; PAM type: NRG; PAM sequence: TGG
tcactgcatagtggggtttt

SEQ ID NO: 169045 - DNA, 20 bp, Artificial Sequence
  Description of Artificial Sequence: Synthetic oligonucleotide
  Target: LAMA2; (+) strand; PAM type: NRG; PAM sequence: GGG
cactgcatagtggggttttt

SEQ ID NO: 169046 - DNA, 20 bp, Artificial Sequence
  Description of Artificial Sequence: Synthetic oligonucleotide
  Target: LAMA2; (+) strand; PAM type: NRG; PAM sequence: CAG
gtggggtttttgggatatat

SEQ ID NO: 169047 - DNA, 20 bp, Artificial Sequence
  Description of Artificial Sequence: Synthetic oligonucleotide
  Target: LAMA2; (+) strand; PAM type: NRG; PAM sequence: TAG
atatcagcttttattattta

SEQ ID NO: 169048 - DNA, 20 bp, Artificial Sequence
  Description of Artificial Sequence: Synthetic oligonucleotide
  Target: LAMA2; (+) strand; PAM type: NRG; PAM sequence: AAG
ctttgcttgccaatttgcaa

SEQ ID NO: 169049 - DNA, 20 bp, Artificial Sequence
  Description of Artificial Sequence: Synthetic oligonucleotide
  Target: LAMA2; (+) strand; PAM type: NRG; PAM sequence: GAG
atgttttctacttgcaacct

SEQ ID NO: 169050 - DNA, 20 bp, Artificial Sequence
  Description of Artificial Sequence: Synthetic oligonucleotide
  Target: LAMA2; (+) strand; PAM type: NRG; PAM sequence: AAG
ttctacttgcaacctgagat

SEQ ID NO: 169051 - DNA, 20 bp, Artificial Sequence
  Description of Artificial Sequence: Synthetic oligonucleotide
  Target: LAMA2; (+) strand; PAM type: NRG; PAM sequence: TAG
cttgcaacctgagataagcc

SEQ ID NO: 169052 - DNA, 20 bp, Artificial Sequence
  Description of Artificial Sequence: Synthetic oligonucleotide
  Target: LAMA2; (+) strand; PAM type: NRG; PAM sequence: TGG
gagataagcctagctaaatg

SEQ ID NO: 169053 - DNA, 20 bp, Artificial Sequence
  Description of Artificial Sequence: Synthetic oligonucleotide
  Target: LAMA2; (+) strand; PAM type: NRG; PAM sequence: TGG
tttccttaactctgtaaaat

SEQ ID NO: 169054 - DNA, 20 bp, Artificial Sequence
  Description of Artificial Sequence: Synthetic oligonucleotide
  Target: LAMA2; (+) strand; PAM type: NRG; PAM sequence: TGG
attggcaacttccaaccact

SEQ ID NO: 169055 - DNA, 20 bp, Artificial Sequence
  Description of Artificial Sequence: Synthetic oligonucleotide
  Target: LAMA2; (+) strand; PAM type: NRG; PAM sequence: CGG
ttccaaccacttggtgaaac

SEQ ID NO: 169056 - DNA, 20 bp, Artificial Sequence
  Description of Artificial Sequence: Synthetic oligonucleotide
  Target: LAMA2; (+) strand; PAM type: NRG; PAM sequence: AAG
caaccacttggtgaaaccgg

SEQ ID NO: 169057 - DNA, 20 bp, Artificial Sequence
  Description of Artificial Sequence: Synthetic oligonucleotide
  Target: LAMA2; (+) strand; PAM type: NRG; PAM sequence: AAG
ttggtgaaaccggaagtctg

SEQ ID NO: 169058 - DNA, 20 bp, Artificial Sequence
  Description of Artificial Sequence: Synthetic oligonucleotide
  Target: LAMA2; (+) strand; PAM type: NRG; PAM sequence: CAG
ttttatcctatcttgatcta

SEQ ID NO: 169059 - DNA, 20 bp, Artificial Sequence
  Description of Artificial Sequence: Synthetic oligonucleotide
  Target: LAMA2; (+) strand; PAM type: NRG; PAM sequence: GAG
ttatcctatcttgatctaca

SEQ ID NO: 169060 - DNA, 20 bp, Artificial Sequence
  Description of Artificial Sequence: Synthetic oligonucleotide
  Target: LAMA2; (+) strand; PAM type: NRG; PAM sequence: TAG
atcaacattgtcgtttttaa

SEQ ID NO: 169061 - DNA, 20 bp, Artificial Sequence
  Description of Artificial Sequence: Synthetic oligonucleotide
  Target: LAMA2; (+) strand; PAM type: NRG; PAM sequence: CAG
acattgtcgtttttaatagc

SEQ ID NO: 169062 - DNA, 20 bp, Artificial Sequence
  Description of Artificial Sequence: Synthetic oligonucleotide
  Target: LAMA2; (+) strand; PAM type: NRG; PAM sequence: AAG
ttaatagccagttgccacca

SEQ ID NO: 169063 - DNA, 20 bp, Artificial Sequence
  Description of Artificial Sequence: Synthetic oligonucleotide
  Target: LAMA2; (+) strand; PAM type: NRG; PAM sequence: CAG
aagatctgatcacaataatg

SEQ ID NO: 169064 - DNA, 20 bp, Artificial Sequence
  Description of Artificial Sequence: Synthetic oligonucleotide
  Target: LAMA2; (+) strand; PAM type: NRG; PAM sequence: GAG
gatctgatcacaataatgca

SEQ ID NO: 169065 - DNA, 20 bp, Artificial Sequence
  Description of Artificial Sequence: Synthetic oligonucleotide
  Target: LAMA2; (+) strand; PAM type: NRG; PAM sequence: TAG
agacctttatatattatcac

SEQ ID NO: 169066 - DNA, 20 bp, Artificial Sequence
  Description of Artificial Sequence: Synthetic oligonucleotide
  Target: LAMA2; (+) strand; PAM type: NRG; PAM sequence: TGG
taatcaaaaatgattaataa

SEQ ID NO: 169067 - DNA, 20 bp, Artificial Sequence
  Description of Artificial Sequence: Synthetic oligonucleotide
  Target: LAMA2; (+) strand; PAM type: NRG; PAM sequence: CAG
tcaaaaatgattaataatgg

SEQ ID NO: 169068 - DNA, 20 bp, Artificial Sequence
  Description of Artificial Sequence: Synthetic oligonucleotide
  Target: LAMA2; (+) strand; PAM type: NRG; PAM sequence: TGG
cagtgattgccccctatata

SEQ ID NO: 169069 - DNA, 20 bp, Artificial Sequence
  Description of Artificial Sequence: Synthetic oligonucleotide
  Target: LAMA2; (+) strand; PAM type: NRG; PAM sequence: GGG
agtgattgccccctatatat

SEQ ID NO: 169070 - DNA, 20 bp, Artificial Sequence
  Description of Artificial Sequence: Synthetic oligonucleotide
  Target: LAMA2; (+) strand; PAM type: NRG; PAM sequence: GAG
tgattgccccctatatatgg

SEQ ID NO: 169071 - DNA, 20 bp, Artificial Sequence
  Description of Artificial Sequence: Synthetic oligonucleotide
  Target: LAMA2; (+) strand; PAM type: NRG; PAM sequence: CAG
ttgccccctatatatgggag

SEQ ID NO: 169072 - DNA, 20 bp, Artificial Sequence
  Description of Artificial Sequence: Synthetic oligonucleotide
  Target: LAMA2; (+) strand; PAM type: NRG; PAM sequence: TAG
atatgggagcagaaacaaaa

SEQ ID NO: 169073 - DNA, 20 bp, Artificial Sequence
  Description of Artificial Sequence: Synthetic oligonucleotide
  Target: LAMA2; (+) strand; PAM type: NRG; PAM sequence: TGG
agcagaaacaaaatagaatg

SEQ ID NO: 169074 - DNA, 20 bp, Artificial Sequence
  Description of Artificial Sequence: Synthetic oligonucleotide
  Target: LAMA2; (+) strand; PAM type: NRG; PAM sequence: CAG
ggttatcactgtaatgaaaa

SEQ ID NO: 169075 - DNA, 20 bp, Artificial Sequence
  Description of Artificial Sequence: Synthetic oligonucleotide
  Target: LAMA2; (+) strand; PAM type: NRG; PAM sequence: AGG
gttatcactgtaatgaaaac

SEQ ID NO: 169076 - DNA, 20 bp, Artificial Sequence
  Description of Artificial Sequence: Synthetic oligonucleotide
  Target: LAMA2; (+) strand; PAM type: NRG; PAM sequence: CAG
tgaaaaatgatgataaacat

SEQ ID NO: 169077 - DNA, 20 bp, Artificial Sequence
  Description of Artificial Sequence: Synthetic oligonucleotide
  Target: LAMA2; (+) strand; PAM type: NRG; PAM sequence: CAG
gataaacatcagttgatctc

SEQ ID NO: 169078 - DNA, 20 bp, Artificial Sequence
  Description of Artificial Sequence: Synthetic oligonucleotide
  Target: LAMA2; (+) strand; PAM type: NRG; PAM sequence: AAG
tctgctcgtactcactgctc

SEQ ID NO: 169079 - DNA, 20 bp, Artificial Sequence
  Description of Artificial Sequence: Synthetic oligonucleotide
  Target: LAMA2; (+) strand; PAM type: NRG; PAM sequence: AAG
ctcgtactcactgctcaagt

SEQ ID NO: 169080 - DNA, 20 bp, Artificial Sequence
  Description of Artificial Sequence: Synthetic oligonucleotide
  Target: LAMA2; (+) strand; PAM type: NRG; PAM sequence: AAG
tcaagtaagttcttatttga

SEQ ID NO: 169081 - DNA, 20 bp, Artificial Sequence
  Description of Artificial Sequence: Synthetic oligonucleotide
  Target: LAMA2; (+) strand; PAM type: NRG; PAM sequence: AGG
caagtaagttcttatttgaa

SEQ ID NO: 169082 - DNA, 20 bp, Artificial Sequence
  Description of Artificial Sequence: Synthetic oligonucleotide
  Target: LAMA2; (+) strand; PAM type: NRG; PAM sequence: CAG
taagttcttatttgaaagga

SEQ ID NO: 169083 - DNA, 20 bp, Artificial Sequence
  Description of Artificial Sequence: Synthetic oligonucleotide
  Target: LAMA2; (+) strand; PAM type: NRG; PAM sequence: AAG
ttcttatttgaaaggacagt

SEQ ID NO: 169084 - DNA, 20 bp, Artificial Sequence
  Description of Artificial Sequence: Synthetic oligonucleotide
  Target: LAMA2; (+) strand; PAM type: NRG; PAM sequence: TAG
aaaggacagtaagtatgtca

SEQ ID NO: 169085 - DNA, 20 bp, Artificial Sequence
  Description of Artificial Sequence: Synthetic oligonucleotide
  Target: LAMA2; (+) strand; PAM type: NRG; PAM sequence: TAG
aagtatgtcatagttttctg

SEQ ID NO: 169086 - DNA, 20 bp, Artificial Sequence
  Description of Artificial Sequence: Synthetic oligonucleotide
  Target: LAMA2; (+) strand; PAM type: NRG; PAM sequence: AAG
gtcatagttttctgtagtct

SEQ ID NO: 169087 - DNA, 20 bp, Artificial Sequence
  Description of Artificial Sequence: Synthetic oligonucleotide
  Target: LAMA2; (+) strand; PAM type: NRG; PAM sequence: CAG
tgtgtcatgttgttcacatc

SEQ ID NO: 169088 - DNA, 20 bp, Artificial Sequence
  Description of Artificial Sequence: Synthetic oligonucleotide
  Target: LAMA2; (+) strand; PAM type: NRG; PAM sequence: AGG
gtgtcatgttgttcacatcc

SEQ ID NO: 169089 - DNA, 20 bp, Artificial Sequence
  Description of Artificial Sequence: Synthetic oligonucleotide
  Target: LAMA2; (+) strand; PAM type: NRG; PAM sequence: TAG
tgttgttcacatccaggtgt

SEQ ID NO: 169090 - DNA, 20 bp, Artificial Sequence
  Description of Artificial Sequence: Synthetic oligonucleotide
  Target: LAMA2; (+) strand; PAM type: NRG; PAM sequence: AGG
gttgttcacatccaggtgtt

SEQ ID NO: 169091 - DNA, 20 bp, Artificial Sequence
  Description of Artificial Sequence: Synthetic oligonucleotide
  Target: LAMA2; (+) strand; PAM type: NRG; PAM sequence: TAG
cttctactcatttgttttgt

SEQ ID NO: 169092 - DNA, 20 bp, Artificial Sequence
  Description of Artificial Sequence: Synthetic oligonucleotide
  Target: LAMA2; (+) strand; PAM type: NRG; PAM sequence: AAG
ctcatttgttttgttagtaa

SEQ ID NO: 169093 - DNA, 20 bp, Artificial Sequence
  Description of Artificial Sequence: Synthetic oligonucleotide
  Target: LAMA2; (+) strand; PAM type: NRG; PAM sequence: GAG
tttgttagtaaaagatattt

SEQ ID NO: 169094 - DNA, 20 bp, Artificial Sequence
  Description of Artificial Sequence: Synthetic oligonucleotide
  Target: LAMA2; (+) strand; PAM type: NRG; PAM sequence: TAG
gagtttcttgttgtcaacct

SEQ ID NO: 169095 - DNA, 20 bp, Artificial Sequence
  Description of Artificial Sequence: Synthetic oligonucleotide
  Target: LAMA2; (+) strand; PAM type: NRG; PAM sequence: TGG
cttgttgtcaaccttagcat

SEQ ID NO: 169096 - DNA, 20 bp, Artificial Sequence
  Description of Artificial Sequence: Synthetic oligonucleotide
  Target: LAMA2; (+) strand; PAM type: NRG; PAM sequence: CAG
tgtcaaccttagcattggtc

SEQ ID NO: 169097 - DNA, 20 bp, Artificial Sequence
  Description of Artificial Sequence: Synthetic oligonucleotide
  Target: LAMA2; (+) strand; PAM type: NRG; PAM sequence: AGG
gtcaaccttagcattggtcc

SEQ ID NO: 169098 - DNA, 20 bp, Artificial Sequence
  Description of Artificial Sequence: Synthetic oligonucleotide
  Target: LAMA2; (+) strand; PAM type: NRG; PAM sequence: TGG
tggtccaggctaacaatgtg

SEQ ID NO: 169099 - DNA, 20 bp, Artificial Sequence
  Description of Artificial Sequence: Synthetic oligonucleotide
  Target: LAMA2; (+) strand; PAM type: NRG; PAM sequence: TGG
caggctaacaatgtgtggaa

SEQ ID NO: 169100 - DNA, 20 bp, Artificial Sequence
  Description of Artificial Sequence: Synthetic oligonucleotide
  Target: LAMA2; (+) strand; PAM type: NRG; PAM sequence: TAG
ggcaactatcaccgtgattc

SEQ ID NO: 169101 - DNA, 20 bp, Artificial Sequence
  Description of Artificial Sequence: Synthetic oligonucleotide
  Target: LAMA2; (+) strand; PAM type: NRG; PAM sequence: TAG
gtgattctagatgattttcc

SEQ ID NO: 169102 - DNA, 20 bp, Artificial Sequence
  Description of Artificial Sequence: Synthetic oligonucleotide
  Target: LAMA2; (+) strand; PAM type: NRG; PAM sequence: TAG
tagatgattttcctagttgt

SEQ ID NO: 169103 - DNA, 20 bp, Artificial Sequence
  Description of Artificial Sequence: Synthetic oligonucleotide
  Target: LAMA2; (+) strand; PAM type: NRG; PAM sequence: GAG
gatgattttcctagttgtta

SEQ ID NO: 169104 - DNA, 20 bp, Artificial Sequence
  Description of Artificial Sequence: Synthetic oligonucleotide
  Target: LAMA2; (+) strand; PAM type: NRG; PAM sequence: CAG
ttttcctagttgttagagat

SEQ ID NO: 169105 - DNA, 20 bp, Artificial Sequence
  Description of Artificial Sequence: Synthetic oligonucleotide
  Target: LAMA2; (+) strand; PAM type: NRG; PAM sequence: CAG
tagttgttagagatcagtct

SEQ ID NO: 169106 - DNA, 20 bp, Artificial Sequence
  Description of Artificial Sequence: Synthetic oligonucleotide
  Target: LAMA2; (+) strand; PAM type: NRG; PAM sequence: TGG
ttgttagagatcagtctcag

SEQ ID NO: 169107 - DNA, 20 bp, Artificial Sequence
  Description of Artificial Sequence: Synthetic oligonucleotide
  Target: LAMA2; (+) strand; PAM type: NRG; PAM sequence: GAG
tcagtggtttgtatattatt

SEQ ID NO: 169108 - DNA, 20 bp, Artificial Sequence
  Description of Artificial Sequence: Synthetic oligonucleotide
  Target: LAMA2; (+) strand; PAM type: NRG; PAM sequence: AGG
cagtggtttgtatattattg

SEQ ID NO: 169109 - DNA, 20 bp, Artificial Sequence
  Description of Artificial Sequence: Synthetic oligonucleotide
  Target: LAMA2; (+) strand; PAM type: NRG; PAM sequence: AAG
tggtttgtatattattgagg

SEQ ID NO: 169110 - DNA, 20 bp, Artificial Sequence
  Description of Artificial Sequence: Synthetic oligonucleotide
  Target: LAMA2; (+) strand; PAM type: NRG; PAM sequence: TAG
tattgaggaagctgttctgc

SEQ ID NO: 169111 - DNA, 20 bp, Artificial Sequence
  Description of Artificial Sequence: Synthetic oligonucleotide
  Target: LAMA2; (+) strand; PAM type: NRG; PAM sequence: AAG
agctgttctgctagctgatt

SEQ ID NO: 169112 - DNA, 20 bp, Artificial Sequence
  Description of Artificial Sequence: Synthetic oligonucleotide
  Target: LAMA2; (+) strand; PAM type: NRG; PAM sequence: AGG
gctgttctgctagctgatta

SEQ ID NO: 169113 - DNA, 20 bp, Artificial Sequence
  Description of Artificial Sequence: Synthetic oligonucleotide
  Target: LAMA2; (+) strand; PAM type: NRG; PAM sequence: GAG
tgttctgctagctgattaag

SEQ ID NO: 169114 - DNA, 20 bp, Artificial Sequence
  Description of Artificial Sequence: Synthetic oligonucleotide
  Target: LAMA2; (+) strand; PAM type: NRG; PAM sequence: CAG
tagctgattaaggagttgca

SEQ ID NO: 169115 - DNA, 20 bp, Artificial Sequence
  Description of Artificial Sequence: Synthetic oligonucleotide
  Target: LAMA2; (+) strand; PAM type: NRG; PAM sequence: TAG
tgcacagttgaattatcgta

SEQ ID NO: 169116 - DNA, 20 bp, Artificial Sequence
  Description of Artificial Sequence: Synthetic oligonucleotide
  Target: LAMA2; (+) strand; PAM type: NRG; PAM sequence: GAG
cacagttgaattatcgtata

SEQ ID NO: 169117 - DNA, 20 bp, Artificial Sequence
  Description of Artificial Sequence: Synthetic oligonucleotide
  Target: LAMA2; (+) strand; PAM type: NRG; PAM sequence: CAG
gttgaattatcgtatagaga

SEQ ID NO: 169118 - DNA, 20 bp, Artificial Sequence
  Description of Artificial Sequence: Synthetic oligonucleotide
  Target: LAMA2; (+) strand; PAM type: NRG; PAM sequence: CAG
atcactgttgcctttgtttt

SEQ ID NO: 169119 - DNA, 20 bp, Artificial Sequence
  Description of Artificial Sequence: Synthetic oligonucleotide
  Target: LAMA2; (+) strand; PAM type: NRG; PAM sequence: AAG
ctgttgcctttgttttcagc

SEQ ID NO: 169120 - DNA, 20 bp, Artificial Sequence
  Description of Artificial Sequence: Synthetic oligonucleotide
  Target: LAMA2; (+) strand; PAM type: NRG; PAM sequence: AAG
ttttcagcaagttttatttg

SEQ ID NO: 169121 - DNA, 20 bp, Artificial Sequence
  Description of Artificial Sequence: Synthetic oligonucleotide
  Target: LAMA2; (+) strand; PAM type: NRG; PAM sequence: GAG
ttcagcaagttttatttgaa

SEQ ID NO: 169122 - DNA, 20 bp, Artificial Sequence
  Description of Artificial Sequence: Synthetic oligonucleotide
  Target: LAMA2; (+) strand; PAM type: NRG; PAM sequence: TGG
tttgattgcaatttctactc

SEQ ID NO: 169123 - DNA, 20 bp, Artificial Sequence
  Description of Artificial Sequence: Synthetic oligonucleotide
  Target: LAMA2; (+) strand; PAM type: NRG; PAM sequence: AAG
attgcaatttctactctggc

SEQ ID NO: 169124 - DNA, 20 bp, Artificial Sequence
  Description of Artificial Sequence: Synthetic oligonucleotide
  Target: LAMA2; (+) strand; PAM type: NRG; PAM sequence: AGG
ttgcaatttctactctggca

SEQ ID NO: 169125 - DNA, 20 bp, Artificial Sequence
  Description of Artificial Sequence: Synthetic oligonucleotide
  Target: LAMA2; (+) strand; PAM type: NRG; PAM sequence: CAG
atttctactctggcaaggct

SEQ ID NO: 169126 - DNA, 20 bp, Artificial Sequence
  Description of Artificial Sequence: Synthetic oligonucleotide
  Target: LAMA2; (+) strand; PAM type: NRG; PAM sequence: AGG
tttctactctggcaaggctc

SEQ ID NO: 169127 - DNA, 20 bp, Artificial Sequence
  Description of Artificial Sequence: Synthetic oligonucleotide
  Target: LAMA2; (+) strand; PAM type: NRG; PAM sequence: GAG
tctactctggcaaggctcag

SEQ ID NO: 169128 - DNA, 20 bp, Artificial Sequence
  Description of Artificial Sequence: Synthetic oligonucleotide
  Target: LAMA2; (+) strand; PAM type: NRG; PAM sequence: AGG
ctactctggcaaggctcagg

SEQ ID NO: 169129 - DNA, 20 bp, Artificial Sequence
  Description of Artificial Sequence: Synthetic oligonucleotide
  Target: LAMA2; (+) strand; PAM type: NRG; PAM sequence: AAG
ggaggttttattgaccttga

SEQ ID NO: 169130 - DNA, 20 bp, Artificial Sequence
  Description of Artificial Sequence: Synthetic oligonucleotide
  Target: LAMA2; (+) strand; PAM type: NRG; PAM sequence: AAG
actaaaatcacataatctta

SEQ ID NO: 169131 - DNA, 20 bp, Artificial Sequence
  Description of Artificial Sequence: Synthetic oligonucleotide
  Target: LAMA2; (+) strand; PAM type: NRG; PAM sequence: TGG
aaatcacataatcttaaagt

SEQ ID NO: 169132 - DNA, 20 bp, Artificial Sequence
  Description of Artificial Sequence: Synthetic oligonucleotide
  Target: LAMA2; (+) strand; PAM type: NRG; PAM sequence: AAG
tcacataatcttaaagttgg

SEQ ID NO: 169133 - DNA, 20 bp, Artificial Sequence
  Description of Artificial Sequence: Synthetic oligonucleotide
  Target: LAMA2; (+) strand; PAM type: NRG; PAM sequence: AAG
atcttaaagttggaagaaat

SEQ ID NO: 169134 - DNA, 20 bp, Artificial Sequence
  Description of Artificial Sequence: Synthetic oligonucleotide
  Target: LAMA2; (+) strand; PAM type: NRG; PAM sequence: TAG
gttggaagaaataagtaaac

SEQ ID NO: 169135 - DNA, 20 bp, Artificial Sequence
  Description of Artificial Sequence: Synthetic oligonucleotide
  Target: LAMA2; (+) strand; PAM type: NRG; PAM sequence: TAG
aagaaataagtaaactagcc

SEQ ID NO: 169136 - DNA, 20 bp, Artificial Sequence
  Description of Artificial Sequence: Synthetic oligonucleotide
  Target: LAMA2; (+) strand; PAM type: NRG; PAM sequence: CAG
tttctgtgacatccacaaaa

SEQ ID NO: 169137 - DNA, 20 bp, Artificial Sequence
  Description of Artificial Sequence: Synthetic oligonucleotide
  Target: LAMA2; (+) strand; PAM type: NRG; PAM sequence: CAG
tgtgacatccacaaaacaga

SEQ ID NO: 169138 - DNA, 20 bp, Artificial Sequence
  Description of Artificial Sequence: Synthetic oligonucleotide
  Target: LAMA2; (+) strand; PAM type: NRG; PAM sequence: AAG
aacagacagcatcctaatgc

SEQ ID NO: 169139 - DNA, 20 bp, Artificial Sequence
  Description of Artificial Sequence: Synthetic oligonucleotide
  Target: LAMA2; (+) strand; PAM type: NRG; PAM sequence: AGG
acagacagcatcctaatgca

SEQ ID NO: 169140 - DNA, 20 bp, Artificial Sequence
  Description of Artificial Sequence: Synthetic oligonucleotide
  Target: LAMA2; (+) strand; PAM type: NRG; PAM sequence: AAG
gacagcatcctaatgcaagg

SEQ ID NO: 169141 - DNA, 20 bp, Artificial Sequence
  Description of Artificial Sequence: Synthetic oligonucleotide
  Target: LAMA2; (+) strand; PAM type: NRG; PAM sequence: TGG
catcctaatgcaaggaagca

SEQ ID NO: 169142 - DNA, 20 bp, Artificial Sequence
  Description of Artificial Sequence: Synthetic oligonucleotide
  Target: LAMA2; (+) strand; PAM type: NRG; PAM sequence: AAG
caaggaagcatggtgttatg

SEQ ID NO: 169143 - DNA, 20 bp, Artificial Sequence
  Description of Artificial Sequence: Synthetic oligonucleotide
  Target: LAMA2; (+) strand; PAM type: NRG; PAM sequence: TGG
ggaagcatggtgttatgaag

SEQ ID NO: 169144 - DNA, 20 bp, Artificial Sequence
  Description of Artificial Sequence: Synthetic oligonucleotide
  Target: LAMA2; (+) strand; PAM type: NRG; PAM sequence: CAG
atggtgttatgaagtggcta

SEQ ID NO: 169145 - DNA, 20 bp, Artificial Sequence
  Description of Artificial Sequence: Synthetic oligonucleotide
  Target: LAMA2; (+) strand; PAM type: NRG; PAM sequence: AAG
gtgttatgaagtggctacag

SEQ ID NO: 169146 - DNA, 20 bp, Artificial Sequence
  Description of Artificial Sequence: Synthetic oligonucleotide
  Target: LAMA2; (+) strand; PAM type: NRG; PAM sequence: AGG
tgttatgaagtggctacaga

SEQ ID NO: 169147 - DNA, 20 bp, Artificial Sequence
  Description of Artificial Sequence: Synthetic oligonucleotide
  Target: LAMA2; (+) strand; PAM type: NRG; PAM sequence: TAG
gctacagaaggtttgaaacc

SEQ ID NO: 169148 - DNA, 20 bp, Artificial Sequence
  Description of Artificial Sequence: Synthetic oligonucleotide
  Target: LAMA2; (+) strand; PAM type: NRG; PAM sequence: TGG
cattttcatcctctgtaaaa

SEQ ID NO: 169149 - DNA, 20 bp, Artificial Sequence
  Description of Artificial Sequence: Synthetic oligonucleotide
  Target: LAMA2; (+) strand; PAM type: NRG; PAM sequence: AAG
atgctacatacatgtatgtg

SEQ ID NO: 169150 - DNA, 20 bp, Artificial Sequence
  Description of Artificial Sequence: Synthetic oligonucleotide
  Target: LAMA2; (+) strand; PAM type: NRG; PAM sequence: AAG
tacatgtatgtgaagtatct

SEQ ID NO: 169151 - DNA, 20 bp, Artificial Sequence
  Description of Artificial Sequence: Synthetic oligonucleotide
  Target: LAMA2; (+) strand; PAM type: NRG; PAM sequence: TAG
tgtgaagtatctaagcataa

SEQ ID NO: 169152 - DNA, 20 bp, Artificial Sequence
  Description of Artificial Sequence: Synthetic oligonucleotide
  Target: LAMA2; (+) strand; PAM type: NRG; PAM sequence: AGG
gtgaagtatctaagcataat

SEQ ID NO: 169153 - DNA, 20 bp, Artificial Sequence
  Description of Artificial Sequence: Synthetic oligonucleotide
  Target: LAMA2; (+) strand; PAM type: NRG; PAM sequence: TAG
aataggtgctcaataaattc

SEQ ID NO: 169154 - DNA, 20 bp, Artificial Sequence
  Description of Artificial Sequence: Synthetic oligonucleotide
  Target: LAMA2; (+) strand; PAM type: NRG; PAM sequence: AGG
ataggtgctcaataaattct

SEQ ID NO: 169155 - DNA, 20 bp, Artificial Sequence
  Description of Artificial Sequence: Synthetic oligonucleotide
  Target: LAMA2; (+) strand; PAM type: NRG; PAM sequence: AAG
tgtgaccatttttttcccca

SEQ ID NO: 169156 - DNA, 20 bp, Artificial Sequence
  Description of Artificial Sequence: Synthetic oligonucleotide
  Target: LAMA2; (+) strand; PAM type: NRG; PAM sequence: CAG
tgatgttttgtgcaacgcat

SEQ ID NO: 169157 - DNA, 20 bp, Artificial Sequence
  Description of Artificial Sequence: Synthetic oligonucleotide
  Target: LAMA2; (+) strand; PAM type: NRG; PAM sequence: TAG
ttctgatgaaatattttctt

SEQ ID NO: 169158 - DNA, 20 bp, Artificial Sequence
  Description of Artificial Sequence: Synthetic oligonucleotide
  Target: LAMA2; (+) strand; PAM type: NRG; PAM sequence: TAG
atgaaatattttctttagtt

SEQ ID NO: 169159 - DNA, 20 bp, Artificial Sequence
  Description of Artificial Sequence: Synthetic oligonucleotide
  Target: LAMA2; (+) strand; PAM type: NRG; PAM sequence: AGG
tgaaatattttctttagttt

SEQ ID NO: 169160 - DNA, 20 bp, Artificial Sequence
  Description of Artificial Sequence: Synthetic oligonucleotide
  Target: LAMA2; (+) strand; PAM type: NRG; PAM sequence: CAG
ctttagtttaggctgacttt

SEQ ID NO: 169161 - DNA, 20 bp, Artificial Sequence
  Description of Artificial Sequence: Synthetic oligonucleotide
  Target: LAMA2; (+) strand; PAM type: NRG; PAM sequence: TAG
cctgttactatctctaattc

SEQ ID NO: 169162 - DNA, 20 bp, Artificial Sequence
  Description of Artificial Sequence: Synthetic oligonucleotide
  Target: LAMA2; (+) strand; PAM type: NRG; PAM sequence: AGG
ctgttactatctctaattct

SEQ ID NO: 169163 - DNA, 20 bp, Artificial Sequence
  Description of Artificial Sequence: Synthetic oligonucleotide
  Target: LAMA2; (+) strand; PAM type: NRG; PAM sequence: AAG
tctctaattctaggttcttc

SEQ ID NO: 169164 - DNA, 20 bp, Artificial Sequence
  Description of Artificial Sequence: Synthetic oligonucleotide
  Target: LAMA2; (+) strand; PAM type: NRG; PAM sequence: TGG
gtcactgaaaaccactttta

SEQ ID NO: 169165 - DNA, 20 bp, Artificial Sequence
  Description of Artificial Sequence: Synthetic oligonucleotide
  Target: LAMA2; (+) strand; PAM type: NRG; PAM sequence: AAG
cttacatttctcctgtcttt

SEQ ID NO: 169166 - DNA, 20 bp, Artificial Sequence
  Description of Artificial Sequence: Synthetic oligonucleotide
  Target: LAMA2; (+) strand; PAM type: NRG; PAM sequence: TAG
cccttcacatgcattattta

SEQ ID NO: 169167 - DNA, 20 bp, Artificial Sequence
  Description of Artificial Sequence: Synthetic oligonucleotide
  Target: LAMA2; (+) strand; PAM type: NRG; PAM sequence: TGG
ttatagattcataaacactc

SEQ ID NO: 169168 - DNA, 20 bp, Artificial Sequence
  Description of Artificial Sequence: Synthetic oligonucleotide
  Target: LAMA2; (+) strand; PAM type: NRG; PAM sequence: GAG
atttttctcatctgtaaaat

SEQ ID NO: 169169 - DNA, 20 bp, Artificial Sequence
  Description of Artificial Sequence: Synthetic oligonucleotide
  Target: LAMA2; (+) strand; PAM type: NRG; PAM sequence: AGG
tttttctcatctgtaaaatg

SEQ ID NO: 169170 - DNA, 20 bp, Artificial Sequence
  Description of Artificial Sequence: Synthetic oligonucleotide
  Target: LAMA2; (+) strand; PAM type: NRG; PAM sequence: TGG
ctgtaaaatgaggatatgaa

SEQ ID NO: 169171 - DNA, 20 bp, Artificial Sequence
  Description of Artificial Sequence: Synthetic oligonucleotide
  Target: LAMA2; (+) strand; PAM type: NRG; PAM sequence: TAG
tatgaatggtacttacctca

SEQ ID NO: 169172 - DNA, 20 bp, Artificial Sequence
  Description of Artificial Sequence: Synthetic oligonucleotide
  Target: LAMA2; (+) strand; PAM type: NRG; PAM sequence: AAG
atagaattgctttaaatatt

SEQ ID NO: 169173 - DNA, 20 bp, Artificial Sequence
  Description of Artificial Sequence: Synthetic oligonucleotide
  Target: LAMA2; (+) strand; PAM type: NRG; PAM sequence: GAG
aattgctttaaatattaagt

SEQ ID NO: 169174 - DNA, 20 bp, Artificial Sequence
  Description of Artificial Sequence: Synthetic oligonucleotide
  Target: LAMA2; (+) strand; PAM type: NRG; PAM sequence: TGG
aatattaagtgagataatga

SEQ ID NO: 169175 - DNA, 20 bp, Artificial Sequence
  Description of Artificial Sequence: Synthetic oligonucleotide
  Target: LAMA2; (+) strand; PAM type: NRG; PAM sequence: AAG
taagtgagataatgatggca

SEQ ID NO: 169176 - DNA, 20 bp, Artificial Sequence
  Description of Artificial Sequence: Synthetic oligonucleotide
  Target: LAMA2; (+) strand; PAM type: NRG; PAM sequence: CAG
ggcaaagtataatacattgc

SEQ ID NO: 169177 - DNA, 20 bp, Artificial Sequence
  Description of Artificial Sequence: Synthetic oligonucleotide
  Target: LAMA2; (+) strand; PAM type: NRG; PAM sequence: TAG
ataatacattgccagtcatg

SEQ ID NO: 169178 - DNA, 20 bp, Artificial Sequence
  Description of Artificial Sequence: Synthetic oligonucleotide
  Target: LAMA2; (+) strand; PAM type: NRG; PAM sequence: TAG
gtcatgtagtgactgttgtg

SEQ ID NO: 169179 - DNA, 20 bp, Artificial Sequence
  Description of Artificial Sequence: Synthetic oligonucleotide
  Target: LAMA2; (+) strand; PAM type: NRG; PAM sequence: TAG
tattatcccattattattta

SEQ ID NO: 169180 - DNA, 20 bp, Artificial Sequence
  Description of Artificial Sequence: Synthetic oligonucleotide
  Target: LAMA2; (+) strand; PAM type: NRG; PAM sequence: AAG
tattatttatagtactttca

SEQ ID NO: 169181 - DNA, 20 bp, Artificial Sequence
  Description of Artificial Sequence: Synthetic oligonucleotide
  Target: LAMA2; (+) strand; PAM type: NRG; PAM sequence: TAG
agtactttcaaagtttccat

SEQ ID NO: 169182 - DNA, 20 bp, Artificial Sequence
  Description of Artificial Sequence: Synthetic oligonucleotide
  Target: LAMA2; (+) strand; PAM type: NRG; PAM sequence: AAG
aagtttccattagtgttttg

SEQ ID NO: 169183 - DNA, 20 bp, Artificial Sequence
  Description of Artificial Sequence: Synthetic oligonucleotide
  Target: LAMA2; (+) strand; PAM type: NRG; PAM sequence: GAG
gtttccattagtgttttgaa

SEQ ID NO: 169184 - DNA, 20 bp, Artificial Sequence
  Description of Artificial Sequence: Synthetic oligonucleotide
  Target: LAMA2; (+) strand; PAM type: NRG; PAM sequence: TAG
gttttcccatgtattatata

SEQ ID NO: 169185 - DNA, 20 bp, Artificial Sequence
  Description of Artificial Sequence: Synthetic oligonucleotide
  Target: LAMA2; (+) strand; PAM type: NRG; PAM sequence: TGG
aaaacataaatatcgttact

SEQ ID NO: 169186 - DNA, 20 bp, Artificial Sequence
  Description of Artificial Sequence: Synthetic oligonucleotide
  Target: LAMA2; (+) strand; PAM type: NRG; PAM sequence: CAG
tggtatgtcgacaaattcat

SEQ ID NO: 169187 - DNA, 20 bp, Artificial Sequence
  Description of Artificial Sequence: Synthetic oligonucleotide
  Target: LAMA2; (+) strand; PAM type: NRG; PAM sequence: CAG
gtcgacaaattcatcagtct

SEQ ID NO: 169188 - DNA, 20 bp, Artificial Sequence
  Description of Artificial Sequence: Synthetic oligonucleotide
  Target: LAMA2; (+) strand; PAM type: NRG; PAM sequence: GAG
caaattcatcagtctcagct

SEQ ID NO: 169189 - DNA, 20 bp, Artificial Sequence
  Description of Artificial Sequence: Synthetic oligonucleotide
  Target: LAMA2; (+) strand; PAM type: NRG; PAM sequence: AGG
aaattcatcagtctcagctg

SEQ ID NO: 169190 - DNA, 20 bp, Artificial Sequence
  Description of Artificial Sequence: Synthetic oligonucleotide
  Target: LAMA2; (+) strand; PAM type: NRG; PAM sequence: CAG
tcagtctcagctgaggtcta

SEQ ID NO: 169191 - DNA, 20 bp, Artificial Sequence
  Description of Artificial Sequence: Synthetic oligonucleotide
  Target: LAMA2; (+) strand; PAM type: NRG; PAM sequence: AAG
acagctttcctctctattca

SEQ ID NO: 169192 - DNA, 20 bp, Artificial Sequence
  Description of Artificial Sequence: Synthetic oligonucleotide
  Target: LAMA2; (+) strand; PAM type: NRG; PAM sequence: CAG
ctctctattcaaagaaatga

SEQ ID NO: 169193 - DNA, 20 bp, Artificial Sequence
  Description of Artificial Sequence: Synthetic oligonucleotide
  Target: LAMA2; (+) strand; PAM type: NRG; PAM sequence: AGG
tctctattcaaagaaatgac

SEQ ID NO: 169194 - DNA, 20 bp, Artificial Sequence
  Description of Artificial Sequence: Synthetic oligonucleotide
  Target: LAMA2; (+) strand; PAM type: NRG; PAM sequence: AAG
tcaaagaaatgacaggttaa

SEQ ID NO: 169195 - DNA, 20 bp, Artificial Sequence
  Description of Artificial Sequence: Synthetic oligonucleotide
  Target: LAMA2; (+) strand; PAM type: NRG; PAM sequence: AGG
caaagaaatgacaggttaaa

SEQ ID NO: 169196 - DNA, 20 bp, Artificial Sequence
  Description of Artificial Sequence: Synthetic oligonucleotide
  Target: LAMA2; (+) strand; PAM type: NRG; PAM sequence: TGG
aaaggtcttcttaatgactc

SEQ ID NO: 169197 - DNA, 20 bp, Artificial Sequence
  Description of Artificial Sequence: Synthetic oligonucleotide
  Target: LAMA2; (+) strand; PAM type: NRG; PAM sequence: GAG
ctggaatcaaatttttattt

SEQ ID NO: 169198 - DNA, 20 bp, Artificial Sequence
  Description of Artificial Sequence: Synthetic oligonucleotide
  Target: LAMA2; (+) strand; PAM type: NRG; PAM sequence: AAG
gaatcaaatttttatttgag

SEQ ID NO: 169199 - DNA, 20 bp, Artificial Sequence
  Description of Artificial Sequence: Synthetic oligonucleotide
  Target: LAMA2; (+) strand; PAM type: NRG; PAM sequence: TAG
agaagatatttattttaaaa

SEQ ID NO: 169200 - DNA, 20 bp, Artificial Sequence
  Description of Artificial Sequence: Synthetic oligonucleotide
  Target: LAMA2; (+) strand; PAM type: NRG; PAM sequence: AAG
atgactaaatacatcttaat

SEQ ID NO: 169201 - DNA, 20 bp, Artificial Sequence
  Description of Artificial Sequence: Synthetic oligonucleotide
  Target: LAMA2; (+) strand; PAM type: NRG; PAM sequence: AAG
ctaaatatatgctaatgtaa

SEQ ID NO: 169202 - DNA, 20 bp, Artificial Sequence
  Description of Artificial Sequence: Synthetic oligonucleotide
  Target: LAMA2; (+) strand; PAM type: NRG; PAM sequence: AAG
aatgtaaaagtttctttttg

SEQ ID NO: 169203 - DNA, 20 bp, Artificial Sequence
  Description of Artificial Sequence: Synthetic oligonucleotide
  Target: LAMA2; (+) strand; PAM type: NRG; PAM sequence: AGG
atgtaaaagtttctttttga

SEQ ID NO: 169204 - DNA, 20 bp, Artificial Sequence
  Description of Artificial Sequence: Synthetic oligonucleotide
  Target: LAMA2; (+) strand; PAM type: NRG; PAM sequence: GGG
tgtaaaagtttctttttgaa

SEQ ID NO: 169205 - DNA, 20 bp, Artificial Sequence
  Description of Artificial Sequence: Synthetic oligonucleotide
  Target: LAMA2; (+) strand; PAM type: NRG; PAM sequence: GGG
gtaaaagtttctttttgaag

SEQ ID NO: 169206 - DNA, 20 bp, Artificial Sequence
  Description of Artificial Sequence: Synthetic oligonucleotide
  Target: LAMA2; (+) strand; PAM type: NRG; PAM sequence: AAG
gtttctttttgaaggggaaa

SEQ ID NO: 169207 - DNA, 20 bp, Artificial Sequence
  Description of Artificial Sequence: Synthetic oligonucleotide
  Target: LAMA2; (+) strand; PAM type: NRG; PAM sequence: AGG
tttctttttgaaggggaaaa

SEQ ID NO: 169208 - DNA, 20 bp, Artificial Sequence
  Description of Artificial Sequence: Synthetic oligonucleotide
  Target: LAMA2; (+) strand; PAM type: NRG; PAM sequence: GGG
ttctttttgaaggggaaaaa

SEQ ID NO: 169209 - DNA, 20 bp, Artificial Sequence
  Description of Artificial Sequence: Synthetic oligonucleotide
  Target: LAMA2; (+) strand; PAM type: NRG; PAM sequence: AAG
tttttgaaggggaaaaaggg

SEQ ID NO: 169210 - DNA, 20 bp, Artificial Sequence
  Description of Artificial Sequence: Synthetic oligonucleotide
  Target: LAMA2; (+) strand; PAM type: NRG; PAM sequence: GAG
tgaaggggaaaaagggaagt

SEQ ID NO: 169211 - DNA, 20 bp, Artificial Sequence
  Description of Artificial Sequence: Synthetic oligonucleotide
  Target: LAMA2; (+) strand; PAM type: NRG; PAM sequence: TAG
ggaaaaagggaagtgagaaa

SEQ ID NO: 169212 - DNA, 20 bp, Artificial Sequence
  Description of Artificial Sequence: Synthetic oligonucleotide
  Target: LAMA2; (+) strand; PAM type: NRG; PAM sequence: CAG
gaagtgagaaatagaaaatt

SEQ ID NO: 169213 - DNA, 20 bp, Artificial Sequence
  Description of Artificial Sequence: Synthetic oligonucleotide
  Target: LAMA2; (+) strand; PAM type: NRG; PAM sequence: CAG
agaaatagaaaattcagatc

SEQ ID NO: 169214 - DNA, 20 bp, Artificial Sequence
  Description of Artificial Sequence: Synthetic oligonucleotide
  Target: LAMA2; (+) strand; PAM type: NRG; PAM sequence: AGG
gaaatagaaaattcagatcc

SEQ ID NO: 169215 - DNA, 20 bp, Artificial Sequence
  Description of Artificial Sequence: Synthetic oligonucleotide
  Target: LAMA2; (+) strand; PAM type: NRG; PAM sequence: GGG
aaatagaaaattcagatcca

SEQ ID NO: 169216 - DNA, 20 bp, Artificial Sequence
  Description of Artificial Sequence: Synthetic oligonucleotide
  Target: LAMA2; (+) strand; PAM type: NRG; PAM sequence: TGG
cagatccagggaaccgtcaa

SEQ ID NO: 169217 - DNA, 20 bp, Artificial Sequence
  Description of Artificial Sequence: Synthetic oligonucleotide
  Target: LAMA2; (+) strand; PAM type: NRG; PAM sequence: TAG
aaccgtcaatggcattcatc

SEQ ID NO: 169218 - DNA, 20 bp, Artificial Sequence
  Description of Artificial Sequence: Synthetic oligonucleotide
  Target: LAMA2; (+) strand; PAM type: NRG; PAM sequence: AGG
accgtcaatggcattcatct

SEQ ID NO: 169219 - DNA, 20 bp, Artificial Sequence
  Description of Artificial Sequence: Synthetic oligonucleotide
  Target: LAMA2; (+) strand; PAM type: NRG; PAM sequence: GAG
cgtcaatggcattcatctag

SEQ ID NO: 169220 - DNA, 20 bp, Artificial Sequence
  Description of Artificial Sequence: Synthetic oligonucleotide
  Target: LAMA2; (+) strand; PAM type: NRG; PAM sequence: GAG
tcaatggcattcatctagga

SEQ ID NO: 169221 - DNA, 20 bp, Artificial Sequence
  Description of Artificial Sequence: Synthetic oligonucleotide
  Target: LAMA2; (+) strand; PAM type: NRG; PAM sequence: TAG
tcattttattcctatttgat

SEQ ID NO: 169222 - DNA, 20 bp, Artificial Sequence
  Description of Artificial Sequence: Synthetic oligonucleotide
  Target: LAMA2; (+) strand; PAM type: NRG; PAM sequence: GAG
attttattcctatttgatta

SEQ ID NO: 169223 - DNA, 20 bp, Artificial Sequence
  Description of Artificial Sequence: Synthetic oligonucleotide
  Target: LAMA2; (+) strand; PAM type: NRG; PAM sequence: CAG
ttattcctatttgattagag

SEQ ID NO: 169224 - DNA, 20 bp, Artificial Sequence
  Description of Artificial Sequence: Synthetic oligonucleotide
  Target: LAMA2; (+) strand; PAM type: NRG; PAM sequence: GAG
attcctatttgattagagca

SEQ ID NO: 169225 - DNA, 20 bp, Artificial Sequence
  Description of Artificial Sequence: Synthetic oligonucleotide
  Target: LAMA2; (+) strand; PAM type: NRG; PAM sequence: TGG
tatgtatcgctacctaaaat

SEQ ID NO: 169226 - DNA, 20 bp, Artificial Sequence
  Description of Artificial Sequence: Synthetic oligonucleotide
  Target: LAMA2; (+) strand; PAM type: NRG; PAM sequence: TAG
cgctacctaaaattggttaa

SEQ ID NO: 169227 - DNA, 20 bp, Artificial Sequence
  Description of Artificial Sequence: Synthetic oligonucleotide
  Target: LAMA2; (+) strand; PAM type: NRG; PAM sequence: CAG
ttcgccctttcaaaaatact

SEQ ID NO: 169228 - DNA, 20 bp, Artificial Sequence
  Description of Artificial Sequence: Synthetic oligonucleotide
  Target: LAMA2; (+) strand; PAM type: NRG; PAM sequence: TAG
aatactcagtgtcctcattt

SEQ ID NO: 169229 - DNA, 20 bp, Artificial Sequence
  Description of Artificial Sequence: Synthetic oligonucleotide
  Target: LAMA2; (+) strand; PAM type: NRG; PAM sequence: CAG
cagtgtcctcattttagctt

SEQ ID NO: 169230 - DNA, 20 bp, Artificial Sequence
  Description of Artificial Sequence: Synthetic oligonucleotide
  Target: LAMA2; (+) strand; PAM type: NRG; PAM sequence: TGG
cattttagcttcagcttctt

SEQ ID NO: 169231 - DNA, 20 bp, Artificial Sequence
  Description of Artificial Sequence: Synthetic oligonucleotide
  Target: LAMA2; (+) strand; PAM type: NRG; PAM sequence: TGG
tagcttcagcttctttggtt

SEQ ID NO: 169232 - DNA, 20 bp, Artificial Sequence
  Description of Artificial Sequence: Synthetic oligonucleotide
  Target: LAMA2; (+) strand; PAM type: NRG; PAM sequence: CAG
cagcttctttggtttggatg

SEQ ID NO: 169233 - DNA, 20 bp, Artificial Sequence
  Description of Artificial Sequence: Synthetic oligonucleotide
  Target: LAMA2; (+) strand; PAM type: NRG; PAM sequence: CAG
gtgtgtgattttttttgtga

SEQ ID NO: 169234 - DNA, 20 bp, Artificial Sequence
  Description of Artificial Sequence: Synthetic oligonucleotide
  Target: LAMA2; (+) strand; PAM type: NRG; PAM sequence: AAG
gtgattttttttgtgacagt

SEQ ID NO: 169235 - DNA, 20 bp, Artificial Sequence
  Description of Artificial Sequence: Synthetic oligonucleotide
  Target: LAMA2; (+) strand; PAM type: NRG; PAM sequence: CAG
ttttttttgtgacagtaagc

SEQ ID NO: 169236 - DNA, 20 bp, Artificial Sequence
  Description of Artificial Sequence: Synthetic oligonucleotide
  Target: LAMA2; (+) strand; PAM type: NRG; PAM sequence: TAG
tttttgtgacagtaagccag

SEQ ID NO: 169237 - DNA, 20 bp, Artificial Sequence
  Description of Artificial Sequence: Synthetic oligonucleotide
  Target: LAMA2; (+) strand; PAM type: NRG; PAM sequence: TGG
aagccagtagttattatgca

SEQ ID NO: 169238 - DNA, 20 bp, Artificial Sequence
  Description of Artificial Sequence: Synthetic oligonucleotide
  Target: LAMA2; (+) strand; PAM type: NRG; PAM sequence: GGG
agccagtagttattatgcat

SEQ ID NO: 169239 - DNA, 20 bp, Artificial Sequence
  Description of Artificial Sequence: Synthetic oligonucleotide
  Target: LAMA2; (+) strand; PAM type: NRG; PAM sequence: GGG
gccagtagttattatgcatg

SEQ ID NO: 169240 - DNA, 20 bp, Artificial Sequence
  Description of Artificial Sequence: Synthetic oligonucleotide
  Target: LAMA2; (+) strand; PAM type: NRG; PAM sequence: TGG
ttattatgcatggggaatcc

SEQ ID NO: 169241 - DNA, 20 bp, Artificial Sequence
  Description of Artificial Sequence: Synthetic oligonucleotide
  Target: LAMA2; (+) strand; PAM type: NRG; PAM sequence: TAG
ttatgcatggggaatcctgg

SEQ ID NO: 169242 - DNA, 20 bp, Artificial Sequence
  Description of Artificial Sequence: Synthetic oligonucleotide
  Target: LAMA2; (+) strand; PAM type: NRG; PAM sequence: CAG
ggggaatcctggtagaaatg

SEQ ID NO: 169243 - DNA, 20 bp, Artificial Sequence
  Description of Artificial Sequence: Synthetic oligonucleotide
  Target: LAMA2; (+) strand; PAM type: NRG; PAM sequence: CAG
tattttgtgctaattgctaa

SEQ ID NO: 169244 - DNA, 20 bp, Artificial Sequence
  Description of Artificial Sequence: Synthetic oligonucleotide
  Target: LAMA2; (+) strand; PAM type: NRG; PAM sequence: AAG
ttgtgctaattgctaacaga

SEQ ID NO: 169245 - DNA, 20 bp, Artificial Sequence
  Description of Artificial Sequence: Synthetic oligonucleotide
  Target: LAMA2; (+) strand; PAM type: NRG; PAM sequence: TGG
aacagaaagatctgtaatac

SEQ ID NO: 169246 - DNA, 20 bp, Artificial Sequence
  Description of Artificial Sequence: Synthetic oligonucleotide
  Target: LAMA2; (+) strand; PAM type: NRG; PAM sequence: CAG
atttgccccttacatgtgcc

SEQ ID NO: 169247 - DNA, 20 bp, Artificial Sequence
  Description of Artificial Sequence: Synthetic oligonucleotide
  Target: LAMA2; (+) strand; PAM type: NRG; PAM sequence: TAG
cagccataacaatctgaatt

SEQ ID NO: 169248 - DNA, 20 bp, Artificial Sequence
  Description of Artificial Sequence: Synthetic oligonucleotide
  Target: LAMA2; (+) strand; PAM type: NRG; PAM sequence: TAG
agtactgtgtttgttaatat

SEQ ID NO: 169249 - DNA, 20 bp, Artificial Sequence
  Description of Artificial Sequence: Synthetic oligonucleotide
  Target: LAMA2; (+) strand; PAM type: NRG; PAM sequence: TAG
aatttatcctgacactttta

SEQ ID NO: 169250 - DNA, 20 bp, Artificial Sequence
  Description of Artificial Sequence: Synthetic oligonucleotide
  Target: LAMA2; (+) strand; PAM type: NRG; PAM sequence: AGG
atttatcctgacacttttat

SEQ ID NO: 169251 - DNA, 20 bp, Artificial Sequence
  Description of Artificial Sequence: Synthetic oligonucleotide
  Target: LAMA2; (+) strand; PAM type: NRG; PAM sequence: AAG
tcctgacacttttataggca

SEQ ID NO: 169252 - DNA, 20 bp, Artificial Sequence
  Description of Artificial Sequence: Synthetic oligonucleotide
  Target: LAMA2; (+) strand; PAM type: NRG; PAM sequence: CGG
cacttttataggcaaagcct

SEQ ID NO: 169253 - DNA, 20 bp, Artificial Sequence
  Description of Artificial Sequence: Synthetic oligonucleotide
  Target: LAMA2; (+) strand; PAM type: NRG; PAM sequence: TAG
ggcaaagcctcggaaacatt

SEQ ID NO: 169254 - DNA, 20 bp, Artificial Sequence
  Description of Artificial Sequence: Synthetic oligonucleotide
  Target: LAMA2; (+) strand; PAM type: NRG; PAM sequence: TGG
agtcatgtaaaatataatca

SEQ ID NO: 169255 - DNA, 20 bp, Artificial Sequence
  Description of Artificial Sequence: Synthetic oligonucleotide
  Target: LAMA2; (+) strand; PAM type: NRG; PAM sequence: TAG
gcttttgctcctgtgcattt

SEQ ID NO: 169256 - DNA, 20 bp, Artificial Sequence
  Description of Artificial Sequence: Synthetic oligonucleotide
  Target: LAMA2; (+) strand; PAM type: NRG; PAM sequence: AGG
cttttgctcctgtgcatttt

SEQ ID NO: 169257 - DNA, 20 bp, Artificial Sequence
  Description of Artificial Sequence: Synthetic oligonucleotide
  Target: LAMA2; (+) strand; PAM type: NRG; PAM sequence: CAG
ttgctcctgtgcattttagg

SEQ ID NO: 169258 - DNA, 20 bp, Artificial Sequence
  Description of Artificial Sequence: Synthetic oligonucleotide
  Target: LAMA2; (+) strand; PAM type: NRG; PAM sequence: AGG
tgctcctgtgcattttaggc

SEQ ID NO: 169259 - DNA, 20 bp, Artificial Sequence
  Description of Artificial Sequence: Synthetic oligonucleotide
  Target: LAMA2; (+) strand; PAM type: NRG; PAM sequence: TAG
atttcactttgtaaccttat

SEQ ID NO: 169260 - DNA, 20 bp, Artificial Sequence
  Description of Artificial Sequence: Synthetic oligonucleotide
  Target: LAMA2; (+) strand; PAM type: NRG; PAM sequence: TGG
cttattagtattgctgaatt

SEQ ID NO: 169261 - DNA, 20 bp, Artificial Sequence
  Description of Artificial Sequence: Synthetic oligonucleotide
  Target: LAMA2; (+) strand; PAM type: NRG; PAM sequence: GAG
tattagtattgctgaatttg

SEQ ID NO: 169262 - DNA, 20 bp, Artificial Sequence
  Description of Artificial Sequence: Synthetic oligonucleotide
  Target: LAMA2; (+) strand; PAM type: NRG; PAM sequence: TGG
gtattgctgaatttggagaa

SEQ ID NO: 169263 - DNA, 20 bp, Artificial Sequence
  Description of Artificial Sequence: Synthetic oligonucleotide
  Target: LAMA2; (+) strand; PAM type: NRG; PAM sequence: TGG
gctgaatttggagaatggtt

SEQ ID NO: 169264 - DNA, 20 bp, Artificial Sequence
  Description of Artificial Sequence: Synthetic oligonucleotide
  Target: LAMA2; (+) strand; PAM type: NRG; PAM sequence: AAG
aatttggagaatggtttgga

SEQ ID NO: 169265 - DNA, 20 bp, Artificial Sequence
  Description of Artificial Sequence: Synthetic oligonucleotide
  Target: LAMA2; (+) strand; PAM type: NRG; PAM sequence: AGG
atttggagaatggtttggaa

SEQ ID NO: 169266 - DNA, 20 bp, Artificial Sequence
  Description of Artificial Sequence: Synthetic oligonucleotide
  Target: LAMA2; (+) strand; PAM type: NRG; PAM sequence: GAG
atggtttggaaaggttcttt

SEQ ID NO: 169267 - DNA, 20 bp, Artificial Sequence
  Description of Artificial Sequence: Synthetic oligonucleotide
  Target: LAMA2; (+) strand; PAM type: NRG; PAM sequence: AGG
tggtttggaaaggttctttg

SEQ ID NO: 169268 - DNA, 20 bp, Artificial Sequence
  Description of Artificial Sequence: Synthetic oligonucleotide
  Target: LAMA2; (+) strand; PAM type: NRG; PAM sequence: AAG
ttctttgaggtcctgattgt

SEQ ID NO: 169269 - DNA, 20 bp, Artificial Sequence
  Description of Artificial Sequence: Synthetic oligonucleotide
  Target: LAMA2; (+) strand; PAM type: NRG; PAM sequence: TAG
ttgaggtcctgattgtaaga

SEQ ID NO: 169270 - DNA, 20 bp, Artificial Sequence
  Description of Artificial Sequence: Synthetic oligonucleotide
  Target: LAMA2; (+) strand; PAM type: NRG; PAM sequence: AGG
tgaggtcctgattgtaagat

SEQ ID NO: 169271 - DNA, 20 bp, Artificial Sequence
  Description of Artificial Sequence: Synthetic oligonucleotide
  Target: LAMA2; (+) strand; PAM type: NRG; PAM sequence: GAG
gataggtgttcatttacact

SEQ ID NO: 169272 - DNA, 20 bp, Artificial Sequence
  Description of Artificial Sequence: Synthetic oligonucleotide
  Target: LAMA2; (+) strand; PAM type: NRG; PAM sequence: AAG
gccattactgcactttatca

SEQ ID NO: 169273 - DNA, 20 bp, Artificial Sequence
  Description of Artificial Sequence: Synthetic oligonucleotide
  Target: LAMA2; (+) strand; PAM type: NRG; PAM sequence: CAG
tactgcactttatcaaagaa

SEQ ID NO: 169274 - DNA, 20 bp, Artificial Sequence
  Description of Artificial Sequence: Synthetic oligonucleotide
  Target: LAMA2; (+) strand; PAM type: NRG; PAM sequence: CAG
tatcaaagaacagttgttta

SEQ ID NO: 169275 - DNA, 20 bp, Artificial Sequence
  Description of Artificial Sequence: Synthetic oligonucleotide
  Target: LAMA2; (+) strand; PAM type: NRG; PAM sequence: CAG
ccatgtctctacacactctt

SEQ ID NO: 169276 - DNA, 20 bp, Artificial Sequence
  Description of Artificial Sequence: Synthetic oligonucleotide
  Target: LAMA2; (+) strand; PAM type: NRG; PAM sequence: TAG
tcttcagattttccctatga

SEQ ID NO: 169277 - DNA, 20 bp, Artificial Sequence
  Description of Artificial Sequence: Synthetic oligonucleotide
  Target: LAMA2; (+) strand; PAM type: NRG; PAM sequence: TGG
ctatgatagtaaattacatt

SEQ ID NO: 169278 - DNA, 20 bp, Artificial Sequence
  Description of Artificial Sequence: Synthetic oligonucleotide
  Target: LAMA2; (+) strand; PAM type: NRG; PAM sequence: CAG
ccatttccaatgtttgttgc

SEQ ID NO: 169279 - DNA, 20 bp, Artificial Sequence
  Description of Artificial Sequence: Synthetic oligonucleotide
  Target: LAMA2; (+) strand; PAM type: NRG; PAM sequence: TGG
atgtttgttgccagacactt

SEQ ID NO: 169280 - DNA, 20 bp, Artificial Sequence
  Description of Artificial Sequence: Synthetic oligonucleotide
  Target: LAMA2; (+) strand; PAM type: NRG; PAM sequence: GAG
ccagacactttggacttttt

SEQ ID NO: 169281 - DNA, 20 bp, Artificial Sequence
  Description of Artificial Sequence: Synthetic oligonucleotide
  Target: LAMA2; (+) strand; PAM type: NRG; PAM sequence: AGG
cagacactttggactttttg

SEQ ID NO: 169282 - DNA, 20 bp, Artificial Sequence
  Description of Artificial Sequence: Synthetic oligonucleotide
  Target: LAMA2; (+) strand; PAM type: NRG; PAM sequence: GGG
agacactttggactttttga

SEQ ID NO: 169283 - DNA, 20 bp, Artificial Sequence
  Description of Artificial Sequence: Synthetic oligonucleotide
  Target: LAMA2; (+) strand; PAM type: NRG; PAM sequence: AAG
gactttttgagggcaaataa

SEQ ID NO: 169284 - DNA, 20 bp, Artificial Sequence
  Description of Artificial Sequence: Synthetic oligonucleotide
  Target: LAMA2; (+) strand; PAM type: NRG; PAM sequence: TAG
tttttgagggcaaataaaag

SEQ ID NO: 169285 - DNA, 20 bp, Artificial Sequence
  Description of Artificial Sequence: Synthetic oligonucleotide
  Target: LAMA2; (+) strand; PAM type: NRG; PAM sequence: TGG
gggcaaataaaagtagcttc

SEQ ID NO: 169286 - DNA, 20 bp, Artificial Sequence
  Description of Artificial Sequence: Synthetic oligonucleotide
  Target: LAMA2; (+) strand; PAM type: NRG; PAM sequence: AAG
ataaaagtagcttctggtgt

SEQ ID NO: 169287 - DNA, 20 bp, Artificial Sequence
  Description of Artificial Sequence: Synthetic oligonucleotide
  Target: LAMA2; (+) strand; PAM type: NRG; PAM sequence: CAG
gtaagtgaaatattttgtgt

SEQ ID NO: 169288 - DNA, 20 bp, Artificial Sequence
  Description of Artificial Sequence: Synthetic oligonucleotide
  Target: LAMA2; (+) strand; PAM type: NRG; PAM sequence: TAG
tattttgtgtcagaataaaa

SEQ ID NO: 169289 - DNA, 20 bp, Artificial Sequence
  Description of Artificial Sequence: Synthetic oligonucleotide
  Target: LAMA2; (+) strand; PAM type: NRG; PAM sequence: AAG
aaatagcaaaccattatgta

SEQ ID NO: 169290 - DNA, 20 bp, Artificial Sequence
  Description of Artificial Sequence: Synthetic oligonucleotide
  Target: LAMA2; (+) strand; PAM type: NRG; PAM sequence: AGG
aatagcaaaccattatgtaa

SEQ ID NO: 169291 - DNA, 20 bp, Artificial Sequence
  Description of Artificial Sequence: Synthetic oligonucleotide
  Target: LAMA2; (+) strand; PAM type: NRG; PAM sequence: GGG
atagcaaaccattatgtaaa

SEQ ID NO: 169292 - DNA, 20 bp, Artificial Sequence
  Description of Artificial Sequence: Synthetic oligonucleotide
  Target: LAMA2; (+) strand; PAM type: NRG; PAM sequence: GAG
tgtttaccttataacttcat

SEQ ID NO: 169293 - DNA, 20 bp, Artificial Sequence
  Description of Artificial Sequence: Synthetic oligonucleotide
  Target: LAMA2; (+) strand; PAM type: NRG; PAM sequence: TAG
taccttataacttcatgagc

SEQ ID NO: 169294 - DNA, 20 bp, Artificial Sequence
  Description of Artificial Sequence: Synthetic oligonucleotide
  Target: LAMA2; (+) strand; PAM type: NRG; PAM sequence: CAG
cttcatgagctagacttgta

SEQ ID NO: 169295 - DNA, 20 bp, Artificial Sequence
  Description of Artificial Sequence: Synthetic oligonucleotide
  Target: LAMA2; (+) strand; PAM type: NRG; PAM sequence: AAG
catgagctagacttgtacag

SEQ ID NO: 169296 - DNA, 20 bp, Artificial Sequence
  Description of Artificial Sequence: Synthetic oligonucleotide
  Target: LAMA2; (+) strand; PAM type: NRG; PAM sequence: TGG
aagctttgaaaaaatcccca

SEQ ID NO: 169297 - DNA, 20 bp, Artificial Sequence
  Description of Artificial Sequence: Synthetic oligonucleotide
  Target: LAMA2; (+) strand; PAM type: NRG; PAM sequence: AAG
cccatggctgtcatattcat

SEQ ID NO: 169298 - DNA, 20 bp, Artificial Sequence
  Description of Artificial Sequence: Synthetic oligonucleotide
  Target: LAMA2; (+) strand; PAM type: NRG; PAM sequence: CAG
ataagtctctctgacccatt

SEQ ID NO: 169299 - DNA, 20 bp, Artificial Sequence
  Description of Artificial Sequence: Synthetic oligonucleotide
  Target: LAMA2; (+) strand; PAM type: NRG; PAM sequence: CAG
gtctctctgacccattcaga

SEQ ID NO: 169300 - DNA, 20 bp, Artificial Sequence
  Description of Artificial Sequence: Synthetic oligonucleotide
  Target: LAMA2; (+) strand; PAM type: NRG; PAM sequence: TAG
tgacccattcagacagatgt

SEQ ID NO: 169301 - DNA, 20 bp, Artificial Sequence
  Description of Artificial Sequence: Synthetic oligonucleotide
  Target: LAMA2; (+) strand; PAM type: NRG; PAM sequence: TGG
acagatgttagtatattgct

SEQ ID NO: 169302 - DNA, 20 bp, Artificial Sequence
  Description of Artificial Sequence: Synthetic oligonucleotide
  Target: LAMA2; (+) strand; PAM type: NRG; PAM sequence: GAG
agatgttagtatattgcttg

SEQ ID NO: 169303 - DNA, 20 bp, Artificial Sequence
  Description of Artificial Sequence: Synthetic oligonucleotide
  Target: LAMA2; (+) strand; PAM type: NRG; PAM sequence: TGG
taaaacttacctttcactta

SEQ ID NO: 169304 - DNA, 20 bp, Artificial Sequence
  Description of Artificial Sequence: Synthetic oligonucleotide
  Target: LAMA2; (+) strand; PAM type: NRG; PAM sequence: AAG
cttgtactttgttccccaaa

SEQ ID NO: 169305 - DNA, 20 bp, Artificial Sequence
  Description of Artificial Sequence: Synthetic oligonucleotide
  Target: LAMA2; (+) strand; PAM type: NRG; PAM sequence: CAG
tgttccccaaaaagcaaata

SEQ ID NO: 169306 - DNA, 20 bp, Artificial Sequence
  Description of Artificial Sequence: Synthetic oligonucleotide
  Target: LAMA2; (+) strand; PAM type: NRG; PAM sequence: AAG
aaagcaaatacagataccat

SEQ ID NO: 169307 - DNA, 20 bp, Artificial Sequence
  Description of Artificial Sequence: Synthetic oligonucleotide
  Target: LAMA2; (+) strand; PAM type: NRG; PAM sequence: TGG
aatacagataccataagaca

SEQ ID NO: 169308 - DNA, 20 bp, Artificial Sequence
  Description of Artificial Sequence: Synthetic oligonucleotide
  Target: LAMA2; (+) strand; PAM type: NRG; PAM sequence: GGG
atacagataccataagacat

SEQ ID NO: 169309 - DNA, 20 bp, Artificial Sequence
  Description of Artificial Sequence: Synthetic oligonucleotide
  Target: LAMA2; (+) strand; PAM type: NRG; PAM sequence: TGG
atgggataataataaacctt

SEQ ID NO: 169310 - DNA, 20 bp, Artificial Sequence
  Description of Artificial Sequence: Synthetic oligonucleotide
  Target: LAMA2; (+) strand; PAM type: NRG; PAM sequence: CAG
taataataaacctttggaca

SEQ ID NO: 169311 - DNA, 20 bp, Artificial Sequence
  Description of Artificial Sequence: Synthetic oligonucleotide
  Target: LAMA2; (+) strand; PAM type: NRG; PAM sequence: TGG
ttggacacagaaacataaaa

SEQ ID NO: 169312 - DNA, 20 bp, Artificial Sequence
  Description of Artificial Sequence: Synthetic oligonucleotide
  Target: LAMA2; (+) strand; PAM type: NRG; PAM sequence: GAG
aaacataaaatggaatgtat

SEQ ID NO: 169313 - DNA, 20 bp, Artificial Sequence
  Description of Artificial Sequence: Synthetic oligonucleotide
  Target: LAMA2; (+) strand; PAM type: NRG; PAM sequence: AAG
tggaatgtatgagcccttga

SEQ ID NO: 169314 - DNA, 20 bp, Artificial Sequence
  Description of Artificial Sequence: Synthetic oligonucleotide
  Target: LAMA2; (+) strand; PAM type: NRG; PAM sequence: GAG
gaatgtatgagcccttgaaa

SEQ ID NO: 169315 - DNA, 20 bp, Artificial Sequence
  Description of Artificial Sequence: Synthetic oligonucleotide
  Target: LAMA2; (+) strand; PAM type: NRG; PAM sequence: CAG
taaatacattttcatttcaa

SEQ ID NO: 169316 - DNA, 20 bp, Artificial Sequence
  Description of Artificial Sequence: Synthetic oligonucleotide
  Target: LAMA2; (+) strand; PAM type: NRG; PAM sequence: AAG
cattttcatttcaacagctg

SEQ ID NO: 169317 - DNA, 20 bp, Artificial Sequence
  Description of Artificial Sequence: Synthetic oligonucleotide
  Target: LAMA2; (+) strand; PAM type: NRG; PAM sequence: GAG
tcatttcaacagctgaagat

SEQ ID NO: 169318 - DNA, 20 bp, Artificial Sequence
  Description of Artificial Sequence: Synthetic oligonucleotide
  Target: LAMA2; (+) strand; PAM type: NRG; PAM sequence: AGG
catttcaacagctgaagatg

SEQ ID NO: 169319 - DNA, 20 bp, Artificial Sequence
  Description of Artificial Sequence: Synthetic oligonucleotide
  Target: LAMA2; (+) strand; PAM type: NRG; PAM sequence: CAG
ctgaagatgaggaaccaaaa

SEQ ID NO: 169320 - DNA, 20 bp, Artificial Sequence
  Description of Artificial Sequence: Synthetic oligonucleotide
  Target: LAMA2; (+) strand; PAM type: NRG; PAM sequence: TGG
agatgaggaaccaaaacaga

SEQ ID NO: 169321 - DNA, 20 bp, Artificial Sequence
  Description of Artificial Sequence: Synthetic oligonucleotide
  Target: LAMA2; (+) strand; PAM type: NRG; PAM sequence: GGG
gatgaggaaccaaaacagat

SEQ ID NO: 169322 - DNA, 20 bp, Artificial Sequence
  Description of Artificial Sequence: Synthetic oligonucleotide
  Target: LAMA2; (+) strand; PAM type: NRG; PAM sequence: CAG
gaggaaccaaaacagatggg

SEQ ID NO: 169323 - DNA, 20 bp, Artificial Sequence
  Description of Artificial Sequence: Synthetic oligonucleotide
  Target: LAMA2; (+) strand; PAM type: NRG; PAM sequence: AGG
aggaaccaaaacagatgggc

SEQ ID NO: 169324 - DNA, 20 bp, Artificial Sequence
  Description of Artificial Sequence: Synthetic oligonucleotide
  Target: LAMA2; (+) strand; PAM type: NRG; PAM sequence: GGG
ggaaccaaaacagatgggca

SEQ ID NO: 169325 - DNA, 20 bp, Artificial Sequence
  Description of Artificial Sequence: Synthetic oligonucleotide
  Target: LAMA2; (+) strand; PAM type: NRG; PAM sequence: GGG
gaaccaaaacagatgggcag

SEQ ID NO: 169326 - DNA, 20 bp, Artificial Sequence
  Description of Artificial Sequence: Synthetic oligonucleotide
  Target: LAMA2; (+) strand; PAM type: NRG; PAM sequence: TAG
caaaacagatgggcagggga

SEQ ID NO: 169327 - DNA, 20 bp, Artificial Sequence
  Description of Artificial Sequence: Synthetic oligonucleotide
  Target: LAMA2; (+) strand; PAM type: NRG; PAM sequence: GAG
gggcaggggatagaataaat

SEQ ID NO: 169328 - DNA, 20 bp, Artificial Sequence
  Description of Artificial Sequence: Synthetic oligonucleotide
  Target: LAMA2; (+) strand; PAM type: NRG; PAM sequence: GAG
gcaggggatagaataaatga

SEQ ID NO: 169329 - DNA, 20 bp, Artificial Sequence
  Description of Artificial Sequence: Synthetic oligonucleotide
  Target: LAMA2; (+) strand; PAM type: NRG; PAM sequence: CAG
agaataaatgagagaaaaat

SEQ ID NO: 169330 - DNA, 20 bp, Artificial Sequence
  Description of Artificial Sequence: Synthetic oligonucleotide
  Target: LAMA2; (+) strand; PAM type: NRG; PAM sequence: TGG
tcagtattcatcatgcctct

SEQ ID NO: 169331 - DNA, 20 bp, Artificial Sequence
  Description of Artificial Sequence: Synthetic oligonucleotide
  Target: LAMA2; (+) strand; PAM type: NRG; PAM sequence: TAG
catcatgcctcttggcattc

SEQ ID NO: 169332 - DNA, 20 bp, Artificial Sequence
  Description of Artificial Sequence: Synthetic oligonucleotide
  Target: LAMA2; (+) strand; PAM type: NRG; PAM sequence: TAG
cttggcattctagtacaccg

SEQ ID NO: 169333 - DNA, 20 bp, Artificial Sequence
  Description of Artificial Sequence: Synthetic oligonucleotide
  Target: LAMA2; (+) strand; PAM type: NRG; PAM sequence: CAG
tagtacaccgtagcatatta

SEQ ID NO: 169334 - DNA, 20 bp, Artificial Sequence
  Description of Artificial Sequence: Synthetic oligonucleotide
  Target: LAMA2; (+) strand; PAM type: NRG; PAM sequence: CAG
cgtagcatattacagtacat

SEQ ID NO: 169335 - DNA, 20 bp, Artificial Sequence
  Description of Artificial Sequence: Synthetic oligonucleotide
  Target: LAMA2; (+) strand; PAM type: NRG; PAM sequence: TAG
atattacagtacatcagctc

SEQ ID NO: 169336 - DNA, 20 bp, Artificial Sequence
  Description of Artificial Sequence: Synthetic oligonucleotide
  Target: LAMA2; (+) strand; PAM type: NRG; PAM sequence: TGG
tcagctctagttctgcattc

SEQ ID NO: 169337 - DNA, 20 bp, Artificial Sequence
  Description of Artificial Sequence: Synthetic oligonucleotide
  Target: LAMA2; (+) strand; PAM type: NRG; PAM sequence: AAG
ccctgatttattcttgtatg

SEQ ID NO: 169338 - DNA, 20 bp, Artificial Sequence
  Description of Artificial Sequence: Synthetic oligonucleotide
  Target: LAMA2; (+) strand; PAM type: NRG; PAM sequence: GAG
tcttgtatgaagtaaaaact

SEQ ID NO: 169339 - DNA, 20 bp, Artificial Sequence
  Description of Artificial Sequence: Synthetic oligonucleotide
  Target: LAMA2; (+) strand; PAM type: NRG; PAM sequence: TAG
agtaaaaactgagaaaacga

SEQ ID NO: 169340 - DNA, 20 bp, Artificial Sequence
  Description of Artificial Sequence: Synthetic oligonucleotide
  Target: LAMA2; (+) strand; PAM type: NRG; PAM sequence: AGG
gtaaaaactgagaaaacgat

SEQ ID NO: 169341 - DNA, 20 bp, Artificial Sequence
  Description of Artificial Sequence: Synthetic oligonucleotide
  Target: LAMA2; (+) strand; PAM type: NRG; PAM sequence: TGG
aaaacgataggtactttcct

SEQ ID NO: 169342 - DNA, 20 bp, Artificial Sequence
  Description of Artificial Sequence: Synthetic oligonucleotide
  Target: LAMA2; (+) strand; PAM type: NRG; PAM sequence: TGG
gtactttccttggaaatttc

SEQ ID NO: 169343 - DNA, 20 bp, Artificial Sequence
  Description of Artificial Sequence: Synthetic oligonucleotide
  Target: LAMA2; (+) strand; PAM type: NRG; PAM sequence: TAG
tggaaatttctggaaccatc

SEQ ID NO: 169344 - DNA, 20 bp, Artificial Sequence
  Description of Artificial Sequence: Synthetic oligonucleotide
  Target: LAMA2; (+) strand; PAM type: NRG; PAM sequence: AAG
aatttctggaaccatctagt

SEQ ID NO: 169345 - DNA, 20 bp, Artificial Sequence
  Description of Artificial Sequence: Synthetic oligonucleotide
  Target: LAMA2; (+) strand; PAM type: NRG; PAM sequence: AGG
atttctggaaccatctagta

SEQ ID NO: 169346 - DNA, 20 bp, Artificial Sequence
  Description of Artificial Sequence: Synthetic oligonucleotide
  Target: LAMA2; (+) strand; PAM type: NRG; PAM sequence: GAG
ttctggaaccatctagtaag

SEQ ID NO: 169347 - DNA, 20 bp, Artificial Sequence
  Description of Artificial Sequence: Synthetic oligonucleotide
  Target: LAMA2; (+) strand; PAM type: NRG; PAM sequence: TAG
accatctagtaaggagtatc

SEQ ID NO: 169348 - DNA, 20 bp, Artificial Sequence
  Description of Artificial Sequence: Synthetic oligonucleotide
  Target: LAMA2; (+) strand; PAM type: NRG; PAM sequence: TGG
aaactgattcaattccttct

SEQ ID NO: 169349 - DNA, 20 bp, Artificial Sequence
  Description of Artificial Sequence: Synthetic oligonucleotide
  Target: LAMA2; (+) strand; PAM type: NRG; PAM sequence: TAG
attcaattccttcttggaaa

SEQ ID NO: 169350 - DNA, 20 bp, Artificial Sequence
  Description of Artificial Sequence: Synthetic oligonucleotide
  Target: LAMA2; (+) strand; PAM type: NRG; PAM sequence: AGG
ttcaattccttcttggaaat

SEQ ID NO: 169351 - DNA, 20 bp, Artificial Sequence
  Description of Artificial Sequence: Synthetic oligonucleotide
  Target: LAMA2; (+) strand; PAM type: NRG; PAM sequence: TAG
aattccttcttggaaatagg

SEQ ID NO: 169352 - DNA, 20 bp, Artificial Sequence
  Description of Artificial Sequence: Synthetic oligonucleotide
  Target: LAMA2; (+) strand; PAM type: NRG; PAM sequence: AGG
attccttcttggaaataggt

SEQ ID NO: 169353 - DNA, 20 bp, Artificial Sequence
  Description of Artificial Sequence: Synthetic oligonucleotide
  Target: LAMA2; (+) strand; PAM type: NRG; PAM sequence: AAG
atatattattaaataaatta

SEQ ID NO: 169354 - DNA, 20 bp, Artificial Sequence
  Description of Artificial Sequence: Synthetic oligonucleotide
  Target: LAMA2; (+) strand; PAM type: NRG; PAM sequence: AAG
taatttaatgtttgctatca

SEQ ID NO: 169355 - DNA, 20 bp, Artificial Sequence
  Description of Artificial Sequence: Synthetic oligonucleotide
  Target: LAMA2; (+) strand; PAM type: NRG; PAM sequence: AGG
aatttaatgtttgctatcaa

SEQ ID NO: 169356 - DNA, 20 bp, Artificial Sequence
  Description of Artificial Sequence: Synthetic oligonucleotide
  Target: LAMA2; (+) strand; PAM type: NRG; PAM sequence: AAG
aaggcacacactgccctaaa

SEQ ID NO: 169357 - DNA, 20 bp, Artificial Sequence
  Description of Artificial Sequence: Synthetic oligonucleotide
  Target: LAMA2; (+) strand; PAM type: NRG; PAM sequence: TGG
acacactgccctaaaaagca

SEQ ID NO: 169358 - DNA, 20 bp, Artificial Sequence
  Description of Artificial Sequence: Synthetic oligonucleotide
  Target: LAMA2; (+) strand; PAM type: NRG; PAM sequence: AAG
aacatcctattatcattacc

SEQ ID NO: 169359 - DNA, 20 bp, Artificial Sequence
  Description of Artificial Sequence: Synthetic oligonucleotide
  Target: LAMA2; (+) strand; PAM type: NRG; PAM sequence: AAG
atcattaccaagtatcttta

SEQ ID NO: 169360 - DNA, 20 bp, Artificial Sequence
  Description of Artificial Sequence: Synthetic oligonucleotide
  Target: LAMA2; (+) strand; PAM type: NRG; PAM sequence: TGG
ccaagtatctttaaagatct

SEQ ID NO: 169361 - DNA, 20 bp, Artificial Sequence
  Description of Artificial Sequence: Synthetic oligonucleotide
  Target: LAMA2; (+) strand; PAM type: NRG; PAM sequence: GAG
aagtatctttaaagatcttg

SEQ ID NO: 169362 - DNA, 20 bp, Artificial Sequence
  Description of Artificial Sequence: Synthetic oligonucleotide
  Target: LAMA2; (+) strand; PAM type: NRG; PAM sequence: AGG
agtatctttaaagatcttgg

SEQ ID NO: 169363 - DNA, 20 bp, Artificial Sequence
  Description of Artificial Sequence: Synthetic oligonucleotide
  Target: LAMA2; (+) strand; PAM type: NRG; PAM sequence: AAG
aaagatcttggaggtgaaaa

SEQ ID NO: 169364 - DNA, 20 bp, Artificial Sequence
  Description of Artificial Sequence: Synthetic oligonucleotide
  Target: LAMA2; (+) strand; PAM type: NRG; PAM sequence: GAG
agatcttggaggtgaaaaaa

SEQ ID NO: 169365 - DNA, 20 bp, Artificial Sequence
  Description of Artificial Sequence: Synthetic oligonucleotide
  Target: LAMA2; (+) strand; PAM type: NRG; PAM sequence: TAG
caaattgcttgcttgcatcc

SEQ ID NO: 169366 - DNA, 20 bp, Artificial Sequence
  Description of Artificial Sequence: Synthetic oligonucleotide
  Target: LAMA2; (+) strand; PAM type: NRG; PAM sequence: AGG
aaattgcttgcttgcatcct

SEQ ID NO: 169367 - DNA, 20 bp, Artificial Sequence
  Description of Artificial Sequence: Synthetic oligonucleotide
  Target: LAMA2; (+) strand; PAM type: NRG; PAM sequence: TAG
tgcccaaaatacatcttcac

SEQ ID NO: 169368 - DNA, 20 bp, Artificial Sequence
  Description of Artificial Sequence: Synthetic oligonucleotide
  Target: LAMA2; (+) strand; PAM type: NRG; PAM sequence: GAG
cccaaaatacatcttcacta

SEQ ID NO: 169369 - DNA, 20 bp, Artificial Sequence
  Description of Artificial Sequence: Synthetic oligonucleotide
  Target: LAMA2; (+) strand; PAM type: NRG; PAM sequence: AGG
ccaaaatacatcttcactag

SEQ ID NO: 169370 - DNA, 20 bp, Artificial Sequence
  Description of Artificial Sequence: Synthetic oligonucleotide
  Target: LAMA2; (+) strand; PAM type: NRG; PAM sequence: TGG
catcttcactagaggtcaaa

SEQ ID NO: 169371 - DNA, 20 bp, Artificial Sequence
  Description of Artificial Sequence: Synthetic oligonucleotide
  Target: LAMA2; (+) strand; PAM type: NRG; PAM sequence: TGG
ttttaaaacaatgatgaact

SEQ ID NO: 169372 - DNA, 20 bp, Artificial Sequence
  Description of Artificial Sequence: Synthetic oligonucleotide
  Target: LAMA2; (+) strand; PAM type: NRG; PAM sequence: GGG
tttaaaacaatgatgaactt

SEQ ID NO: 169373 - DNA, 20 bp, Artificial Sequence
  Description of Artificial Sequence: Synthetic oligonucleotide
  Target: LAMA2; (+) strand; PAM type: NRG; PAM sequence: CAG
aacaatgatgaacttgggct

SEQ ID NO: 169374 - DNA, 20 bp, Artificial Sequence
  Description of Artificial Sequence: Synthetic oligonucleotide
  Target: LAMA2; (+) strand; PAM type: NRG; PAM sequence: GAG
atgatgaacttgggctcagt

SEQ ID NO: 169375 - DNA, 20 bp, Artificial Sequence
  Description of Artificial Sequence: Synthetic oligonucleotide
  Target: LAMA2; (+) strand; PAM type: NRG; PAM sequence: GAG
gatgaacttgggctcagtga

SEQ ID NO: 169376 - DNA, 20 bp, Artificial Sequence
  Description of Artificial Sequence: Synthetic oligonucleotide
  Target: LAMA2; (+) strand; PAM type: NRG; PAM sequence: AAG
gaacttgggctcagtgagag

SEQ ID NO: 169377 - DNA, 20 bp, Artificial Sequence
  Description of Artificial Sequence: Synthetic oligonucleotide
  Target: LAMA2; (+) strand; PAM type: NRG; PAM sequence: CAG
tgtttttaacctatgaattg

SEQ ID NO: 169378 - DNA, 20 bp, Artificial Sequence
  Description of Artificial Sequence: Synthetic oligonucleotide
  Target: LAMA2; (+) strand; PAM type: NRG; PAM sequence: AAG
acctatgaattgcagcttga

SEQ ID NO: 169379 - DNA, 20 bp, Artificial Sequence
  Description of Artificial Sequence: Synthetic oligonucleotide
  Target: LAMA2; (+) strand; PAM type: NRG; PAM sequence: AAG
cacatgtgcaaaacttgaaa

SEQ ID NO: 169380 - DNA, 20 bp, Artificial Sequence
  Description of Artificial Sequence: Synthetic oligonucleotide
  Target: LAMA2; (+) strand; PAM type: NRG; PAM sequence: CAG
caaaacttgaaaaagtgtgt

SEQ ID NO: 169381 - DNA, 20 bp, Artificial Sequence
  Description of Artificial Sequence: Synthetic oligonucleotide
  Target: LAMA2; (+) strand; PAM type: NRG; PAM sequence: CAG
gtgtcagttatcgattgtat

SEQ ID NO: 169382 - DNA, 20 bp, Artificial Sequence
  Description of Artificial Sequence: Synthetic oligonucleotide
  Target: LAMA2; (+) strand; PAM type: NRG; PAM sequence: AAG
tgtatcagttatacattcca

SEQ ID NO: 169383 - DNA, 20 bp, Artificial Sequence
  Description of Artificial Sequence: Synthetic oligonucleotide
  Target: LAMA2; (+) strand; PAM type: NRG; PAM sequence: TAG
cagttatacattccaaagtt

SEQ ID NO: 169384 - DNA, 20 bp, Artificial Sequence
  Description of Artificial Sequence: Synthetic oligonucleotide
  Target: LAMA2; (+) strand; PAM type: NRG; PAM sequence: TAG
ttatacattccaaagtttag

SEQ ID NO: 169385 - DNA, 20 bp, Artificial Sequence
  Description of Artificial Sequence: Synthetic oligonucleotide
  Target: LAMA2; (+) strand; PAM type: NRG; PAM sequence: AAG
gtttagtagcttaaaacaac

SEQ ID NO: 169386 - DNA, 20 bp, Artificial Sequence
  Description of Artificial Sequence: Synthetic oligonucleotide
  Target: LAMA2; (+) strand; PAM type: NRG; PAM sequence: TAG
catacactctcatgattctg

SEQ ID NO: 169387 - DNA, 20 bp, Artificial Sequence
  Description of Artificial Sequence: Synthetic oligonucleotide
  Target: LAMA2; (+) strand; PAM type: NRG; PAM sequence: AGG
atacactctcatgattctgt

SEQ ID NO: 169388 - DNA, 20 bp, Artificial Sequence
  Description of Artificial Sequence: Synthetic oligonucleotide
  Target: LAMA2; (+) strand; PAM type: NRG; PAM sequence: TGG
actctcatgattctgtaggt

SEQ ID NO: 169389 - DNA, 20 bp, Artificial Sequence
  Description of Artificial Sequence: Synthetic oligonucleotide
  Target: LAMA2; (+) strand; PAM type: NRG; PAM sequence: TGG
gattctgtaggttggcaatt

SEQ ID NO: 169390 - DNA, 20 bp, Artificial Sequence
  Description of Artificial Sequence: Synthetic oligonucleotide
  Target: LAMA2; (+) strand; PAM type: NRG; PAM sequence: GGG
attctgtaggttggcaattt

SEQ ID NO: 169391 - DNA, 20 bp, Artificial Sequence
  Description of Artificial Sequence: Synthetic oligonucleotide
  Target: LAMA2; (+) strand; PAM type: NRG; PAM sequence: GAG
gtaggttggcaatttgggct

SEQ ID NO: 169392 - DNA, 20 bp, Artificial Sequence
  Description of Artificial Sequence: Synthetic oligonucleotide
  Target: LAMA2; (+) strand; PAM type: NRG; PAM sequence: CAG
ttggcaatttgggctgagct

SEQ ID NO: 169393 - DNA, 20 bp, Artificial Sequence
  Description of Artificial Sequence: Synthetic oligonucleotide
  Target: LAMA2; (+) strand; PAM type: NRG; PAM sequence: TGG
caatttgggctgagctcagt

SEQ ID NO: 169394 - DNA, 20 bp, Artificial Sequence
  Description of Artificial Sequence: Synthetic oligonucleotide
  Target: LAMA2; (+) strand; PAM type: NRG; PAM sequence: CAG
ttgggctgagctcagttgga

SEQ ID NO: 169395 - DNA, 20 bp, Artificial Sequence
  Description of Artificial Sequence: Synthetic oligonucleotide
  Target: LAMA2; (+) strand; PAM type: NRG; PAM sequence: TAG
agatcttccactgtcacgcc

SEQ ID NO: 169396 - DNA, 20 bp, Artificial Sequence
  Description of Artificial Sequence: Synthetic oligonucleotide
  Target: LAMA2; (+) strand; PAM type: NRG; PAM sequence: AGG
gatcttccactgtcacgcct

SEQ ID NO: 169397 - DNA, 20 bp, Artificial Sequence
  Description of Artificial Sequence: Synthetic oligonucleotide
  Target: LAMA2; (+) strand; PAM type: NRG; PAM sequence: GGG
atcttccactgtcacgccta

SEQ ID NO: 169398 - DNA, 20 bp, Artificial Sequence
  Description of Artificial Sequence: Synthetic oligonucleotide
  Target: LAMA2; (+) strand; PAM type: NRG; PAM sequence: GGG
tcttccactgtcacgcctag

SEQ ID NO: 169399 - DNA, 20 bp, Artificial Sequence
  Description of Artificial Sequence: Synthetic oligonucleotide
  Target: LAMA2; (+) strand; PAM type: NRG; PAM sequence: CAG
ctgtcacgcctaggggctcc

SEQ ID NO: 169400 - DNA, 20 bp, Artificial Sequence
  Description of Artificial Sequence: Synthetic oligonucleotide
  Target: LAMA2; (+) strand; PAM type: NRG; PAM sequence: TGG
cacgcctaggggctcccaga

SEQ ID NO: 169401 - DNA, 20 bp, Artificial Sequence
  Description of Artificial Sequence: Synthetic oligonucleotide
  Target: LAMA2; (+) strand; PAM type: NRG; PAM sequence: AAG
aggggctcccagatggcctc

SEQ ID NO: 169402 - DNA, 20 bp, Artificial Sequence
  Description of Artificial Sequence: Synthetic oligonucleotide
  Target: LAMA2; (+) strand; PAM type: NRG; PAM sequence: TGG
agatggcctcaagcccaaat

SEQ ID NO: 169403 - DNA, 20 bp, Artificial Sequence
  Description of Artificial Sequence: Synthetic oligonucleotide
  Target: LAMA2; (+) strand; PAM type: NRG; PAM sequence: GGG
gatggcctcaagcccaaatt

SEQ ID NO: 169404 - DNA, 20 bp, Artificial Sequence
  Description of Artificial Sequence: Synthetic oligonucleotide
  Target: LAMA2; (+) strand; PAM type: NRG; PAM sequence: GGG
atggcctcaagcccaaattg

SEQ ID NO: 169405 - DNA, 20 bp, Artificial Sequence
  Description of Artificial Sequence: Synthetic oligonucleotide
  Target: LAMA2; (+) strand; PAM type: NRG; PAM sequence: AAG
tcacgttgcctcccttcctc

SEQ ID NO: 169406 - DNA, 20 bp, Artificial Sequence
  Description of Artificial Sequence: Synthetic oligonucleotide
  Target: LAMA2; (+) strand; PAM type: NRG; PAM sequence: AGG
cacgttgcctcccttcctca

SEQ ID NO: 169407 - DNA, 20 bp, Artificial Sequence
  Description of Artificial Sequence: Synthetic oligonucleotide
  Target: LAMA2; (+) strand; PAM type: NRG; PAM sequence: GAG
cgttgcctcccttcctcaag

SEQ ID NO: 169408 - DNA, 20 bp, Artificial Sequence
  Description of Artificial Sequence: Synthetic oligonucleotide
  Target: LAMA2; (+) strand; PAM type: NRG; PAM sequence: AGG
gttgcctcccttcctcaagg

SEQ ID NO: 169409 - DNA, 20 bp, Artificial Sequence
  Description of Artificial Sequence: Synthetic oligonucleotide
  Target: LAMA2; (+) strand; PAM type: NRG; PAM sequence: TGG
cttcctcaaggaggctaacc

SEQ ID NO: 169410 - DNA, 20 bp, Artificial Sequence
  Description of Artificial Sequence: Synthetic oligonucleotide
  Target: LAMA2; (+) strand; PAM type: NRG; PAM sequence: GGG
ttcctcaaggaggctaacct

SEQ ID NO: 169411 - DNA, 20 bp, Artificial Sequence
  Description of Artificial Sequence: Synthetic oligonucleotide
  Target: LAMA2; (+) strand; PAM type: NRG; PAM sequence: AAG
gctaacctgggattgttctg

SEQ ID NO: 169412 - DNA, 20 bp, Artificial Sequence
  Description of Artificial Sequence: Synthetic oligonucleotide
  Target: LAMA2; (+) strand; PAM type: NRG; PAM sequence: AGG
ctaacctgggattgttctga

SEQ ID NO: 169413 - DNA, 20 bp, Artificial Sequence
  Description of Artificial Sequence: Synthetic oligonucleotide
  Target: LAMA2; (+) strand; PAM type: NRG; PAM sequence: CAG
acctgggattgttctgaagg

SEQ ID NO: 169414 - DNA, 20 bp, Artificial Sequence
  Description of Artificial Sequence: Synthetic oligonucleotide
  Target: LAMA2; (+) strand; PAM type: NRG; PAM sequence: CAG
tgggattgttctgaaggcag

SEQ ID NO: 169415 - DNA, 20 bp, Artificial Sequence
  Description of Artificial Sequence: Synthetic oligonucleotide
  Target: LAMA2; (+) strand; PAM type: NRG; PAM sequence: AGG
gggattgttctgaaggcagc

SEQ ID NO: 169416 - DNA, 20 bp, Artificial Sequence
  Description of Artificial Sequence: Synthetic oligonucleotide
  Target: LAMA2; (+) strand; PAM type: NRG; PAM sequence: GGG
ggattgttctgaaggcagca

SEQ ID NO: 169417 - DNA, 20 bp, Artificial Sequence
  Description of Artificial Sequence: Synthetic oligonucleotide
  Target: LAMA2; (+) strand; PAM type: NRG; PAM sequence: GGG
gattgttctgaaggcagcag

SEQ ID NO: 169418 - DNA, 20 bp, Artificial Sequence
  Description of Artificial Sequence: Synthetic oligonucleotide
  Target: LAMA2; (+) strand; PAM type: NRG; PAM sequence: AAG
tctgaaggcagcaggggtcc

SEQ ID NO: 169419 - DNA, 20 bp, Artificial Sequence
  Description of Artificial Sequence: Synthetic oligonucleotide
  Target: LAMA2; (+) strand; PAM type: NRG; PAM sequence: GAG
tgaaggcagcaggggtccaa

SEQ ID NO: 169420 - DNA, 20 bp, Artificial Sequence
  Description of Artificial Sequence: Synthetic oligonucleotide
  Target: LAMA2; (+) strand; PAM type: NRG; PAM sequence: AAG
gcaggggtccaagagtgtga

SEQ ID NO: 169421 - DNA, 20 bp, Artificial Sequence
  Description of Artificial Sequence: Synthetic oligonucleotide
  Target: LAMA2; (+) strand; PAM type: NRG; PAM sequence: CAG
ggggtccaagagtgtgaaag

SEQ ID NO: 169422 - DNA, 20 bp, Artificial Sequence
  Description of Artificial Sequence: Synthetic oligonucleotide
  Target: LAMA2; (+) strand; PAM type: NRG; PAM sequence: AAG
tccaagagtgtgaaagcaga

SEQ ID NO: 169423 - DNA, 20 bp, Artificial Sequence
  Description of Artificial Sequence: Synthetic oligonucleotide
  Target: LAMA2; (+) strand; PAM type: NRG; PAM sequence: TGG
gttgctctgccacattctgt

SEQ ID NO: 169424 - DNA, 20 bp, Artificial Sequence
  Description of Artificial Sequence: Synthetic oligonucleotide
  Target: LAMA2; (+) strand; PAM type: NRG; PAM sequence: CAG
ctctgccacattctgttggt

SEQ ID NO: 169425 - DNA, 20 bp, Artificial Sequence
  Description of Artificial Sequence: Synthetic oligonucleotide
  Target: LAMA2; (+) strand; PAM type: NRG; PAM sequence: GAG
ctgccacattctgttggtca

SEQ ID NO: 169426 - DNA, 20 bp, Artificial Sequence
  Description of Artificial Sequence: Synthetic oligonucleotide
  Target: LAMA2; (+) strand; PAM type: NRG; PAM sequence: AAG
gttggtcagagtatgttgca

SEQ ID NO: 169427 - DNA, 20 bp, Artificial Sequence
  Description of Artificial Sequence: Synthetic oligonucleotide
  Target: LAMA2; (+) strand; PAM type: NRG; PAM sequence: CAG
agtatgttgcaaagctaacc

SEQ ID NO: 169428 - DNA, 20 bp, Artificial Sequence
  Description of Artificial Sequence: Synthetic oligonucleotide
  Target: LAMA2; (+) strand; PAM type: NRG; PAM sequence: AAG
tgcaaagctaacccagattc

SEQ ID NO: 169429 - DNA, 20 bp, Artificial Sequence
  Description of Artificial Sequence: Synthetic oligonucleotide
  Target: LAMA2; (+) strand; PAM type: NRG; PAM sequence: AGG
gcaaagctaacccagattca

SEQ ID NO: 169430 - DNA, 20 bp, Artificial Sequence
  Description of Artificial Sequence: Synthetic oligonucleotide
  Target: LAMA2; (+) strand; PAM type: NRG; PAM sequence: GGG
caaagctaacccagattcaa

SEQ ID NO: 169431 - DNA, 20 bp, Artificial Sequence
  Description of Artificial Sequence: Synthetic oligonucleotide
  Target: LAMA2; (+) strand; PAM type: NRG; PAM sequence: GGG
aaagctaacccagattcaag

SEQ ID NO: 169432 - DNA, 20 bp, Artificial Sequence
  Description of Artificial Sequence: Synthetic oligonucleotide
  Target: LAMA2; (+) strand; PAM type: NRG; PAM sequence: AAG
gctaacccagattcaagggg

SEQ ID NO: 169433 - DNA, 20 bp, Artificial Sequence
  Description of Artificial Sequence: Synthetic oligonucleotide
  Target: LAMA2; (+) strand; PAM type: NRG; PAM sequence: AGG
ctaacccagattcaagggga

SEQ ID NO: 169434 - DNA, 20 bp, Artificial Sequence
  Description of Artificial Sequence: Synthetic oligonucleotide
  Target: LAMA2; (+) strand; PAM type: NRG; PAM sequence: GGG
taacccagattcaaggggaa

SEQ ID NO: 169435 - DNA, 20 bp, Artificial Sequence
  Description of Artificial Sequence: Synthetic oligonucleotide
  Target: LAMA2; (+) strand; PAM type: NRG; PAM sequence: AAG
cccagattcaaggggaaggg

SEQ ID NO: 169436 - DNA, 20 bp, Artificial Sequence
  Description of Artificial Sequence: Synthetic oligonucleotide
  Target: LAMA2; (+) strand; PAM type: NRG; PAM sequence: TAG
agattcaaggggaagggaag

SEQ ID NO: 169437 - DNA, 20 bp, Artificial Sequence
  Description of Artificial Sequence: Synthetic oligonucleotide
  Target: LAMA2; (+) strand; PAM type: NRG; PAM sequence: GAG
tagacttcacatcttaatgt

SEQ ID NO: 169438 - DNA, 20 bp, Artificial Sequence
  Description of Artificial Sequence: Synthetic oligonucleotide
  Target: LAMA2; (+) strand; PAM type: NRG; PAM sequence: AGG
agacttcacatcttaatgtg

SEQ ID NO: 169439 - DNA, 20 bp, Artificial Sequence
  Description of Artificial Sequence: Synthetic oligonucleotide
  Target: LAMA2; (+) strand; PAM type: NRG; PAM sequence: TGG
tcacatcttaatgtgaggtg

SEQ ID NO: 169440 - DNA, 20 bp, Artificial Sequence
  Description of Artificial Sequence: Synthetic oligonucleotide
  Target: LAMA2; (+) strand; PAM type: NRG; PAM sequence: AAG
tcttaatgtgaggtgtggca

SEQ ID NO: 169441 - DNA, 20 bp, Artificial Sequence
  Description of Artificial Sequence: Synthetic oligonucleotide
  Target: LAMA2; (+) strand; PAM type: NRG; PAM sequence: AAG
taatgtgaggtgtggcaaag

SEQ ID NO: 169442 - DNA, 20 bp, Artificial Sequence
  Description of Artificial Sequence: Synthetic oligonucleotide
  Target: LAMA2; (+) strand; PAM type: NRG; PAM sequence: CAG
gtgtggcaaagaagtattaa

SEQ ID NO: 169443 - DNA, 20 bp, Artificial Sequence
  Description of Artificial Sequence: Synthetic oligonucleotide
  Target: LAMA2; (+) strand; PAM type: NRG; PAM sequence: GAG
cttttttttttttttttttt

SEQ ID NO: 169444 - DNA, 20 bp, Artificial Sequence
  Description of Artificial Sequence: Synthetic oligonucleotide
  Target: LAMA2; (+) strand; PAM type: NRG; PAM sequence: TGG
ttttttttttttttttgaga

SEQ ID NO: 169445 - DNA, 20 bp, Artificial Sequence
  Description of Artificial Sequence: Synthetic oligonucleotide
  Target: LAMA2; (+) strand; PAM type: NRG; PAM sequence: GAG
ttttttttttttttgagatg

SEQ ID NO: 169446 - DNA, 20 bp, Artificial Sequence
  Description of Artificial Sequence: Synthetic oligonucleotide
  Target: LAMA2; (+) strand; PAM type: NRG; PAM sequence: CAG
tggagtctcactctgtttcc

SEQ ID NO: 169447 - DNA, 20 bp, Artificial Sequence
  Description of Artificial Sequence: Synthetic oligonucleotide
  Target: LAMA2; (+) strand; PAM type: NRG; PAM sequence: AGG
ggagtctcactctgtttccc

SEQ ID NO: 169448 - DNA, 20 bp, Artificial Sequence
  Description of Artificial Sequence: Synthetic oligonucleotide
  Target: LAMA2; (+) strand; PAM type: NRG; PAM sequence: AAG
tcactctgtttcccaggctg

SEQ ID NO: 169449 - DNA, 20 bp, Artificial Sequence
  Description of Artificial Sequence: Synthetic oligonucleotide
  Target: LAMA2; (+) strand; PAM type: NRG; PAM sequence: CAG
ctgtttcccaggctgaagtg

SEQ ID NO: 169450 - DNA, 20 bp, Artificial Sequence
  Description of Artificial Sequence: Synthetic oligonucleotide
  Target: LAMA2; (+) strand; PAM type: NRG; PAM sequence: TGG
tttcccaggctgaagtgcag

SEQ ID NO: 169451 - DNA, 20 bp, Artificial Sequence
  Description of Artificial Sequence: Synthetic oligonucleotide
  Target: LAMA2; (+) strand; PAM type: NRG; PAM sequence: TAG
tgaagtgcagtggcatgatc

SEQ ID NO: 169452 - DNA, 20 bp, Artificial Sequence
  Description of Artificial Sequence: Synthetic oligonucleotide
  Target: LAMA2; (+) strand; PAM type: NRG; PAM sequence: AGG
gaagtgcagtggcatgatct

SEQ ID NO: 169453 - DNA, 20 bp, Artificial Sequence
  Description of Artificial Sequence: Synthetic oligonucleotide
  Target: LAMA2; (+) strand; PAM type: NRG; PAM sequence: CAG
ggcatgatctaggctcactg

SEQ ID NO: 169454 - DNA, 20 bp, Artificial Sequence
  Description of Artificial Sequence: Synthetic oligonucleotide
  Target: LAMA2; (+) strand; PAM type: NRG; PAM sequence: TGG
tcactgcagcctctacctcc

SEQ ID NO: 169455 - DNA, 20 bp, Artificial Sequence
  Description of Artificial Sequence: Synthetic oligonucleotide
  Target: LAMA2; (+) strand; PAM type: NRG; PAM sequence: GGG
cactgcagcctctacctcct

SEQ ID NO: 169456 - DNA, 20 bp, Artificial Sequence
  Description of Artificial Sequence: Synthetic oligonucleotide
  Target: LAMA2; (+) strand; PAM type: NRG; PAM sequence: AAG
agcctctacctcctgggttc

SEQ ID NO: 169457 - DNA, 20 bp, Artificial Sequence
  Description of Artificial Sequence: Synthetic oligonucleotide
  Target: LAMA2; (+) strand; PAM type: NRG; PAM sequence: CAG
ttcaagtgatactcctccct

SEQ ID NO: 169458 - DNA, 20 bp, Artificial Sequence
  Description of Artificial Sequence: Synthetic oligonucleotide
  Target: LAMA2; (+) strand; PAM type: NRG; PAM sequence: GAG
tactcctccctcagcctccc

SEQ ID NO: 169459 - DNA, 20 bp, Artificial Sequence
  Description of Artificial Sequence: Synthetic oligonucleotide
  Target: LAMA2; (+) strand; PAM type: NRG; PAM sequence: TAG
tcctccctcagcctcccgag

SEQ ID NO: 169460 - DNA, 20 bp, Artificial Sequence
  Description of Artificial Sequence: Synthetic oligonucleotide
  Target: LAMA2; (+) strand; PAM type: NRG; PAM sequence: CGG
tccctcagcctcccgagtag

SEQ ID NO: 169461 - DNA, 20 bp, Artificial Sequence
  Description of Artificial Sequence: Synthetic oligonucleotide
  Target: LAMA2; (+) strand; PAM type: NRG; PAM sequence: GGG
ccctcagcctcccgagtagc

SEQ ID NO: 169462 - DNA, 20 bp, Artificial Sequence
  Description of Artificial Sequence: Synthetic oligonucleotide
  Target: LAMA2; (+) strand; PAM type: NRG; PAM sequence: TAG
agcctcccgagtagcgggac

SEQ ID NO: 169463 - DNA, 20 bp, Artificial Sequence
  Description of Artificial Sequence: Synthetic oligonucleotide
  Target: LAMA2; (+) strand; PAM type: NRG; PAM sequence: GAG
cctcccgagtagcgggacta

SEQ ID NO: 169464 - DNA, 20 bp, Artificial Sequence
  Description of Artificial Sequence: Synthetic oligonucleotide
  Target: LAMA2; (+) strand; PAM type: NRG; PAM sequence: AGG
ctcccgagtagcgggactag

SEQ ID NO: 169465 - DNA, 20 bp, Artificial Sequence
  Description of Artificial Sequence: Synthetic oligonucleotide
  Target: LAMA2; (+) strand; PAM type: NRG; PAM sequence: TGG
gaggcacatgccaccacacc

SEQ ID NO: 169466 - DNA, 20 bp, Artificial Sequence
  Description of Artificial Sequence: Synthetic oligonucleotide
  Target: LAMA2; (+) strand; PAM type: NRG; PAM sequence: TAG
ctggctaatttttgtatttt

SEQ ID NO: 169467 - DNA, 20 bp, Artificial Sequence
  Description of Artificial Sequence: Synthetic oligonucleotide
  Target: LAMA2; (+) strand; PAM type: NRG; PAM sequence: TAG
gctaatttttgtatttttag

SEQ ID NO: 169468 - DNA, 20 bp, Artificial Sequence
  Description of Artificial Sequence: Synthetic oligonucleotide
  Target: LAMA2; (+) strand; PAM type: NRG; PAM sequence: GAG
taatttttgtatttttagta

SEQ ID NO: 169469 - DNA, 20 bp, Artificial Sequence
  Description of Artificial Sequence: Synthetic oligonucleotide
  Target: LAMA2; (+) strand; PAM type: NRG; PAM sequence: TGG
ttttgtatttttagtagaga

SEQ ID NO: 169470 - DNA, 20 bp, Artificial Sequence
  Description of Artificial Sequence: Synthetic oligonucleotide
  Target: LAMA2; (+) strand; PAM type: NRG; PAM sequence: GGG
tttgtatttttagtagagat

SEQ ID NO: 169471 - DNA, 20 bp, Artificial Sequence
  Description of Artificial Sequence: Synthetic oligonucleotide
  Target: LAMA2; (+) strand; PAM type: NRG; PAM sequence: GGG
ttgtatttttagtagagatg

SEQ ID NO: 169472 - DNA, 20 bp, Artificial Sequence
  Description of Artificial Sequence: Synthetic oligonucleotide
  Target: LAMA2; (+) strand; PAM type: NRG; PAM sequence: TGG
gagatggggtttcaccatgt

SEQ ID NO: 169473 - DNA, 20 bp, Artificial Sequence
  Description of Artificial Sequence: Synthetic oligonucleotide
  Target: LAMA2; (+) strand; PAM type: NRG; PAM sequence: CAG
tggggtttcaccatgttggc

SEQ ID NO: 169474 - DNA, 20 bp, Artificial Sequence
  Description of Artificial Sequence: Synthetic oligonucleotide
  Target: LAMA2; (+) strand; PAM type: NRG; PAM sequence: AGG
ggggtttcaccatgttggcc

SEQ ID NO: 169475 - DNA, 20 bp, Artificial Sequence
  Description of Artificial Sequence: Synthetic oligonucleotide
  Target: LAMA2; (+) strand; PAM type: NRG; PAM sequence: TGG
tttcaccatgttggccaggc

SEQ ID NO: 169476 - DNA, 20 bp, Artificial Sequence
  Description of Artificial Sequence: Synthetic oligonucleotide
  Target: LAMA2; (+) strand; PAM type: NRG; PAM sequence: AAG
ggtctcaaacttctcacctc

SEQ ID NO: 169477 - DNA, 20 bp, Artificial Sequence
  Description of Artificial Sequence: Synthetic oligonucleotide
  Target: LAMA2; (+) strand; PAM type: NRG; PAM sequence: AAG
tcaagtgatctgcccatctc

SEQ ID NO: 169478 - DNA, 20 bp, Artificial Sequence
  Description of Artificial Sequence: Synthetic oligonucleotide
  Target: LAMA2; (+) strand; PAM type: NRG; PAM sequence: TGG
ctcaagcctcccatactgct

SEQ ID NO: 169479 - DNA, 20 bp, Artificial Sequence
  Description of Artificial Sequence: Synthetic oligonucleotide
  Target: LAMA2; (+) strand; PAM type: NRG; PAM sequence: CAG
ctcccatactgcttggatta

SEQ ID NO: 169480 - DNA, 20 bp, Artificial Sequence
  Description of Artificial Sequence: Synthetic oligonucleotide
  Target: LAMA2; (+) strand; PAM type: NRG; PAM sequence: AGG
tcccatactgcttggattac

SEQ ID NO: 169481 - DNA, 20 bp, Artificial Sequence
  Description of Artificial Sequence: Synthetic oligonucleotide
  Target: LAMA2; (+) strand; PAM type: NRG; PAM sequence: GAG
actgcttggattacaggcct

SEQ ID NO: 169482 - DNA, 20 bp, Artificial Sequence
  Description of Artificial Sequence: Synthetic oligonucleotide
  Target: LAMA2; (+) strand; PAM type: NRG; PAM sequence: CAG
caggcctgagccaccacacc

SEQ ID NO: 169483 - DNA, 20 bp, Artificial Sequence
  Description of Artificial Sequence: Synthetic oligonucleotide
  Target: LAMA2; (+) strand; PAM type: NRG; PAM sequence: CAG
cctgagccaccacacccagc

SEQ ID NO: 169484 - DNA, 20 bp, Artificial Sequence
  Description of Artificial Sequence: Synthetic oligonucleotide
  Target: LAMA2; (+) strand; PAM type: NRG; PAM sequence: TAG
gagccaccacacccagccag

SEQ ID NO: 169485 - DNA, 20 bp, Artificial Sequence
  Description of Artificial Sequence: Synthetic oligonucleotide
  Target: LAMA2; (+) strand; PAM type: NRG; PAM sequence: CAG
taaccatttttaattgtccc

SEQ ID NO: 169486 - DNA, 20 bp, Artificial Sequence
  Description of Artificial Sequence: Synthetic oligonucleotide
  Target: LAMA2; (+) strand; PAM type: NRG; PAM sequence: CAG
tgatcatcgctttgatctgt

SEQ ID NO: 169487 - DNA, 20 bp, Artificial Sequence
  Description of Artificial Sequence: Synthetic oligonucleotide
  Target: LAMA2; (+) strand; PAM type: NRG; PAM sequence: TGG
tcgctttgatctgtcagtca

SEQ ID NO: 169488 - DNA, 20 bp, Artificial Sequence
  Description of Artificial Sequence: Synthetic oligonucleotide
  Target: LAMA2; (+) strand; PAM type: NRG; PAM sequence: AAG
catggtgttctttcctccta

SEQ ID NO: 169489 - DNA, 20 bp, Artificial Sequence
  Description of Artificial Sequence: Synthetic oligonucleotide
  Target: LAMA2; (+) strand; PAM type: NRG; PAM sequence: GAG
cgtccatctctccctttcct

SEQ ID NO: 169490 - DNA, 20 bp, Artificial Sequence
  Description of Artificial Sequence: Synthetic oligonucleotide
  Target: LAMA2; (+) strand; PAM type: NRG; PAM sequence: CAG
gagtcaaaactgaaatcctt

SEQ ID NO: 169491 - DNA, 20 bp, Artificial Sequence
  Description of Artificial Sequence: Synthetic oligonucleotide
  Target: LAMA2; (+) strand; PAM type: NRG; PAM sequence: AGG
agtcaaaactgaaatccttc

SEQ ID NO: 169492 - DNA, 20 bp, Artificial Sequence
  Description of Artificial Sequence: Synthetic oligonucleotide
  Target: LAMA2; (+) strand; PAM type: NRG; PAM sequence: CAG
caaaactgaaatccttcagg

SEQ ID NO: 169493 - DNA, 20 bp, Artificial Sequence
  Description of Artificial Sequence: Synthetic oligonucleotide
  Target: LAMA2; (+) strand; PAM type: NRG; PAM sequence: AGG
aaaactgaaatccttcaggc

SEQ ID NO: 169494 - DNA, 20 bp, Artificial Sequence
  Description of Artificial Sequence: Synthetic oligonucleotide
  Target: LAMA2; (+) strand; PAM type: NRG; PAM sequence: TAG
ccttcaggcaggtatctgaa

SEQ ID NO: 169495 - DNA, 20 bp, Artificial Sequence
  Description of Artificial Sequence: Synthetic oligonucleotide
  Target: LAMA2; (+) strand; PAM type: NRG; PAM sequence: CGG
gaatagtcattcttgttgat

SEQ ID NO: 169496 - DNA, 20 bp, Artificial Sequence
  Description of Artificial Sequence: Synthetic oligonucleotide
  Target: LAMA2; (+) strand; PAM type: NRG; PAM sequence: CAG
agtcattcttgttgatcgga

SEQ ID NO: 169497 - DNA, 20 bp, Artificial Sequence
  Description of Artificial Sequence: Synthetic oligonucleotide
  Target: LAMA2; (+) strand; PAM type: NRG; PAM sequence: AAG
gtctctgcctctgcaatcac

SEQ ID NO: 169498 - DNA, 20 bp, Artificial Sequence
  Description of Artificial Sequence: Synthetic oligonucleotide
  Target: LAMA2; (+) strand; PAM type: NRG; PAM sequence: TAG
ctgcctctgcaatcacaaga

SEQ ID NO: 169499 - DNA, 20 bp, Artificial Sequence
  Description of Artificial Sequence: Synthetic oligonucleotide
  Target: LAMA2; (+) strand; PAM type: NRG; PAM sequence: GAG
cctgttcctcacacatctgt

SEQ ID NO: 169500 - DNA, 20 bp, Artificial Sequence
  Description of Artificial Sequence: Synthetic oligonucleotide
  Target: LAMA2; (+) strand; PAM type: NRG; PAM sequence: AGG
ctgttcctcacacatctgtg

SEQ ID NO: 169501 - DNA, 20 bp, Artificial Sequence
  Description of Artificial Sequence: Synthetic oligonucleotide
  Target: LAMA2; (+) strand; PAM type: NRG; PAM sequence: CAG
ttctatcttgttctcacatt

SEQ ID NO: 169502 - DNA, 20 bp, Artificial Sequence
  Description of Artificial Sequence: Synthetic oligonucleotide
  Target: LAMA2; (+) strand; PAM type: NRG; PAM sequence: AAG
tatcttgttctcacattcag

SEQ ID NO: 169503 - DNA, 20 bp, Artificial Sequence
  Description of Artificial Sequence: Synthetic oligonucleotide
  Target: LAMA2; (+) strand; PAM type: NRG; PAM sequence: CGG
cacattcagaagttttcttc

SEQ ID NO: 169504 - DNA, 20 bp, Artificial Sequence
  Description of Artificial Sequence: Synthetic oligonucleotide
  Target: LAMA2; (+) strand; PAM type: NRG; PAM sequence: TGG
ttctcactatttcatgtact

SEQ ID NO: 169505 - DNA, 20 bp, Artificial Sequence
  Description of Artificial Sequence: Synthetic oligonucleotide
  Target: LAMA2; (+) strand; PAM type: NRG; PAM sequence: GGG
tctcactatttcatgtactt

SEQ ID NO: 169506 - DNA, 20 bp, Artificial Sequence
  Description of Artificial Sequence: Synthetic oligonucleotide
  Target: LAMA2; (+) strand; PAM type: NRG; PAM sequence: AAG
cttgccattctctttgtcca

SEQ ID NO: 169507 - DNA, 20 bp, Artificial Sequence
  Description of Artificial Sequence: Synthetic oligonucleotide
  Target: LAMA2; (+) strand; PAM type: NRG; PAM sequence: TAG
cccttctctcacaaaaatat

SEQ ID NO: 169508 - DNA, 20 bp, Artificial Sequence
  Description of Artificial Sequence: Synthetic oligonucleotide
  Target: LAMA2; (+) strand; PAM type: NRG; PAM sequence: AAG
actgaatattaactgtgtac

SEQ ID NO: 169509 - DNA, 20 bp, Artificial Sequence
  Description of Artificial Sequence: Synthetic oligonucleotide
  Target: LAMA2; (+) strand; PAM type: NRG; PAM sequence: TAG
ctgtgtacaagaccctttcc

SEQ ID NO: 169510 - DNA, 20 bp, Artificial Sequence
  Description of Artificial Sequence: Synthetic oligonucleotide
  Target: LAMA2; (+) strand; PAM type: NRG; PAM sequence: AGG
tgtgtacaagaccctttcct

SEQ ID NO: 169511 - DNA, 20 bp, Artificial Sequence
  Description of Artificial Sequence: Synthetic oligonucleotide
  Target: LAMA2; (+) strand; PAM type: NRG; PAM sequence: AAG
ctttcctaggcaccataacc

SEQ ID NO: 169512 - DNA, 20 bp, Artificial Sequence
  Description of Artificial Sequence: Synthetic oligonucleotide
  Target: LAMA2; (+) strand; PAM type: NRG; PAM sequence: AGG
tttcctaggcaccataacca

SEQ ID NO: 169513 - DNA, 20 bp, Artificial Sequence
  Description of Artificial Sequence: Synthetic oligonucleotide
  Target: LAMA2; (+) strand; PAM type: NRG; PAM sequence: AAG
gcaccataaccaaggtgttt

SEQ ID NO: 169514 - DNA, 20 bp, Artificial Sequence
  Description of Artificial Sequence: Synthetic oligonucleotide
  Target: LAMA2; (+) strand; PAM type: NRG; PAM sequence: AGG
caccataaccaaggtgttta

SEQ ID NO: 169515 - DNA, 20 bp, Artificial Sequence
  Description of Artificial Sequence: Synthetic oligonucleotide
  Target: LAMA2; (+) strand; PAM type: NRG; PAM sequence: GAG
tttaaggtcccttctttaac

SEQ ID NO: 169516 - DNA, 20 bp, Artificial Sequence
  Description of Artificial Sequence: Synthetic oligonucleotide
  Target: LAMA2; (+) strand; PAM type: NRG; PAM sequence: AGG
ttaaggtcccttctttaacg

SEQ ID NO: 169517 - DNA, 20 bp, Artificial Sequence
  Description of Artificial Sequence: Synthetic oligonucleotide
  Target: LAMA2; (+) strand; PAM type: NRG; PAM sequence: AAG
aggtcccttctttaacgagg

SEQ ID NO: 169518 - DNA, 20 bp, Artificial Sequence
  Description of Artificial Sequence: Synthetic oligonucleotide
  Target: LAMA2; (+) strand; PAM type: NRG; PAM sequence: AAG
cccttctttaacgaggaaga

SEQ ID NO: 169519 - DNA, 20 bp, Artificial Sequence
  Description of Artificial Sequence: Synthetic oligonucleotide
  Target: LAMA2; (+) strand; PAM type: NRG; PAM sequence: AAG
aaagaatatataaataaatt

SEQ ID NO: 169520 - DNA, 20 bp, Artificial Sequence
  Description of Artificial Sequence: Synthetic oligonucleotide
  Target: LAMA2; (+) strand; PAM type: NRG; PAM sequence: TAG
aaataaattaagtaataatg

SEQ ID NO: 169521 - DNA, 20 bp, Artificial Sequence
  Description of Artificial Sequence: Synthetic oligonucleotide
  Target: LAMA2; (+) strand; PAM type: NRG; PAM sequence: CAG
aagtaataatgtagcccaaa

SEQ ID NO: 169522 - DNA, 20 bp, Artificial Sequence
  Description of Artificial Sequence: Synthetic oligonucleotide
  Target: LAMA2; (+) strand; PAM type: NRG; PAM sequence: AGG
agtaataatgtagcccaaac

SEQ ID NO: 169523 - DNA, 20 bp, Artificial Sequence
  Description of Artificial Sequence: Synthetic oligonucleotide
  Target: LAMA2; (+) strand; PAM type: NRG; PAM sequence: AAG
aatgtagcccaaacaggcat

SEQ ID NO: 169524 - DNA, 20 bp, Artificial Sequence
  Description of Artificial Sequence: Synthetic oligonucleotide
  Target: LAMA2; (+) strand; PAM type: NRG; PAM sequence: AAG
cccaaacaggcataagtgtt

SEQ ID NO: 169525 - DNA, 20 bp, Artificial Sequence
  Description of Artificial Sequence: Synthetic oligonucleotide
  Target: LAMA2; (+) strand; PAM type: NRG; PAM sequence: AAG
aacaggcataagtgttaaga

SEQ ID NO: 169526 - DNA, 20 bp, Artificial Sequence
  Description of Artificial Sequence: Synthetic oligonucleotide
  Target: LAMA2; (+) strand; PAM type: NRG; PAM sequence: AAG
gcataagtgttaagaaagca

SEQ ID NO: 169527 - DNA, 20 bp, Artificial Sequence
  Description of Artificial Sequence: Synthetic oligonucleotide
  Target: LAMA2; (+) strand; PAM type: NRG; PAM sequence: AGG
cataagtgttaagaaagcaa

SEQ ID NO: 169528 - DNA, 20 bp, Artificial Sequence
  Description of Artificial Sequence: Synthetic oligonucleotide
  Target: LAMA2; (+) strand; PAM type: NRG; PAM sequence: CAG
ttaagaaagcaaaggaaatg

SEQ ID NO: 169529 - DNA, 20 bp, Artificial Sequence
  Description of Artificial Sequence: Synthetic oligonucleotide
  Target: LAMA2; (+) strand; PAM type: NRG; PAM sequence: TAG
agaaagcaaaggaaatgcag

SEQ ID NO: 169530 - DNA, 20 bp, Artificial Sequence
  Description of Artificial Sequence: Synthetic oligonucleotide
  Target: LAMA2; (+) strand; PAM type: NRG; PAM sequence: TGG
aaaggaaatgcagtagtgac

SEQ ID NO: 169531 - DNA, 20 bp, Artificial Sequence
  Description of Artificial Sequence: Synthetic oligonucleotide
  Target: LAMA2; (+) strand; PAM type: NRG; PAM sequence: CAG
aaatgcagtagtgactggcg

SEQ ID NO: 169532 - DNA, 20 bp, Artificial Sequence
  Description of Artificial Sequence: Synthetic oligonucleotide
  Target: LAMA2; (+) strand; PAM type: NRG; PAM sequence: AGG
aatgcagtagtgactggcgc

SEQ ID NO: 169533 - DNA, 20 bp, Artificial Sequence
  Description of Artificial Sequence: Synthetic oligonucleotide
  Target: LAMA2; (+) strand; PAM type: NRG; PAM sequence: GGG
atgcagtagtgactggcgca

SEQ ID NO: 169534 - DNA, 20 bp, Artificial Sequence
  Description of Artificial Sequence: Synthetic oligonucleotide
  Target: LAMA2; (+) strand; PAM type: NRG; PAM sequence: TAG
gtagtgactggcgcagggta

SEQ ID NO: 169535 - DNA, 20 bp, Artificial Sequence
  Description of Artificial Sequence: Synthetic oligonucleotide
  Target: LAMA2; (+) strand; PAM type: NRG; PAM sequence: AGG
tagtgactggcgcagggtat

SEQ ID NO: 169536 - DNA, 20 bp, Artificial Sequence
  Description of Artificial Sequence: Synthetic oligonucleotide
  Target: LAMA2; (+) strand; PAM type: NRG; PAM sequence: GGG
agtgactggcgcagggtata

SEQ ID NO: 169537 - DNA, 20 bp, Artificial Sequence
  Description of Artificial Sequence: Synthetic oligonucleotide
  Target: LAMA2; (+) strand; PAM type: NRG; PAM sequence: TGG
actggcgcagggtatagggc

SEQ ID NO: 169538 - DNA, 20 bp, Artificial Sequence
  Description of Artificial Sequence: Synthetic oligonucleotide
  Target: LAMA2; (+) strand; PAM type: NRG; PAM sequence: GGG
ctggcgcagggtatagggct

SEQ ID NO: 169539 - DNA, 20 bp, Artificial Sequence
  Description of Artificial Sequence: Synthetic oligonucleotide
  Target: LAMA2; (+) strand; PAM type: NRG; PAM sequence: GGG
tggcgcagggtatagggctg

SEQ ID NO: 169540 - DNA, 20 bp, Artificial Sequence
  Description of Artificial Sequence: Synthetic oligonucleotide
  Target: LAMA2; (+) strand; PAM type: NRG; PAM sequence: GGG
ggcgcagggtatagggctgg

SEQ ID NO: 169541 - DNA, 20 bp, Artificial Sequence
  Description of Artificial Sequence: Synthetic oligonucleotide
  Target: LAMA2; (+) strand; PAM type: NRG; PAM sequence: TGG
gcagggtatagggctggggg

SEQ ID NO: 169542 - DNA, 20 bp, Artificial Sequence
  Description of Artificial Sequence: Synthetic oligonucleotide
  Target: LAMA2; (+) strand; PAM type: NRG; PAM sequence: TGG
gggtatagggctgggggtgg

SEQ ID NO: 169543 - DNA, 20 bp, Artificial Sequence
  Description of Artificial Sequence: Synthetic oligonucleotide
  Target: LAMA2; (+) strand; PAM type: NRG; PAM sequence: GGG
ggtatagggctgggggtggt

SEQ ID NO: 169544 - DNA, 20 bp, Artificial Sequence
  Description of Artificial Sequence: Synthetic oligonucleotide
  Target: LAMA2; (+) strand; PAM type: NRG; PAM sequence: GGG
gtatagggctgggggtggtg

SEQ ID NO: 169545 - DNA, 20 bp, Artificial Sequence
  Description of Artificial Sequence: Synthetic oligonucleotide
  Target: LAMA2; (+) strand; PAM type: NRG; PAM sequence: GAG
atagggctgggggtggtggg

SEQ ID NO: 169546 - DNA, 20 bp, Artificial Sequence
  Description of Artificial Sequence: Synthetic oligonucleotide
  Target: LAMA2; (+) strand; PAM type: NRG; PAM sequence: CAG
ctgggggtggtggggagttt

SEQ ID NO: 169547 - DNA, 20 bp, Artificial Sequence
  Description of Artificial Sequence: Synthetic oligonucleotide
  Target: LAMA2; (+) strand; PAM type: NRG; PAM sequence: AGG
tgggggtggtggggagtttc

SEQ ID NO: 169548 - DNA, 20 bp, Artificial Sequence
  Description of Artificial Sequence: Synthetic oligonucleotide
  Target: LAMA2; (+) strand; PAM type: NRG; PAM sequence: CAG
tggtggggagtttcaggtaa

SEQ ID NO: 169549 - DNA, 20 bp, Artificial Sequence
  Description of Artificial Sequence: Synthetic oligonucleotide
  Target: LAMA2; (+) strand; PAM type: NRG; PAM sequence: TAG
gtttcaggtaacagtaattt

SEQ ID NO: 169550 - DNA, 20 bp, Artificial Sequence
  Description of Artificial Sequence: Synthetic oligonucleotide
  Target: LAMA2; (+) strand; PAM type: NRG; PAM sequence: CAG
aacagtaattttagaatcat

SEQ ID NO: 169551 - DNA, 20 bp, Artificial Sequence
  Description of Artificial Sequence: Synthetic oligonucleotide
  Target: LAMA2; (+) strand; PAM type: NRG; PAM sequence: AGG
acagtaattttagaatcatc

SEQ ID NO: 169552 - DNA, 20 bp, Artificial Sequence
  Description of Artificial Sequence: Synthetic oligonucleotide
  Target: LAMA2; (+) strand; PAM type: NRG; PAM sequence: GGG
cagtaattttagaatcatca

SEQ ID NO: 169553 - DNA, 20 bp, Artificial Sequence
  Description of Artificial Sequence: Synthetic oligonucleotide
  Target: LAMA2; (+) strand; PAM type: NRG; PAM sequence: AAG
cagggacttgctctctgaaa

SEQ ID NO: 169554 - DNA, 20 bp, Artificial Sequence
  Description of Artificial Sequence: Synthetic oligonucleotide
  Target: LAMA2; (+) strand; PAM type: NRG; PAM sequence: GAG
tctctgaaaaagtgacactt

SEQ ID NO: 169555 - DNA, 20 bp, Artificial Sequence
  Description of Artificial Sequence: Synthetic oligonucleotide
  Target: LAMA2; (+) strand; PAM type: NRG; PAM sequence: TAG
gagcacttgacctgaacacc

SEQ ID NO: 169556 - DNA, 20 bp, Artificial Sequence
  Description of Artificial Sequence: Synthetic oligonucleotide
  Target: LAMA2; (+) strand; PAM type: NRG; PAM sequence: AGG
agcacttgacctgaacacct

SEQ ID NO: 169557 - DNA, 20 bp, Artificial Sequence
  Description of Artificial Sequence: Synthetic oligonucleotide
  Target: LAMA2; (+) strand; PAM type: NRG; PAM sequence: CAG
tgacctgaacacctaggaac

SEQ ID NO: 169558 - DNA, 20 bp, Artificial Sequence
  Description of Artificial Sequence: Synthetic oligonucleotide
  Target: LAMA2; (+) strand; PAM type: NRG; PAM sequence: AGG
gacctgaacacctaggaacc

SEQ ID NO: 169559 - DNA, 20 bp, Artificial Sequence
  Description of Artificial Sequence: Synthetic oligonucleotide
  Target: LAMA2; (+) strand; PAM type: NRG; PAM sequence: TGG
ctgaacacctaggaaccagg

SEQ ID NO: 169560 - DNA, 20 bp, Artificial Sequence
  Description of Artificial Sequence: Synthetic oligonucleotide
  Target: LAMA2; (+) strand; PAM type: NRG; PAM sequence: GGG
tgaacacctaggaaccaggt

SEQ ID NO: 169561 - DNA, 20 bp, Artificial Sequence
  Description of Artificial Sequence: Synthetic oligonucleotide
  Target: LAMA2; (+) strand; PAM type: NRG; PAM sequence: GAG
aacacctaggaaccaggtgg

SEQ ID NO: 169562 - DNA, 20 bp, Artificial Sequence
  Description of Artificial Sequence: Synthetic oligonucleotide
  Target: LAMA2; (+) strand; PAM type: NRG; PAM sequence: AAG
acctaggaaccaggtgggag

SEQ ID NO: 169563 - DNA, 20 bp, Artificial Sequence
  Description of Artificial Sequence: Synthetic oligonucleotide
  Target: LAMA2; (+) strand; PAM type: NRG; PAM sequence: AAG
gaaccaggtgggagaagacc

SEQ ID NO: 169564 - DNA, 20 bp, Artificial Sequence
  Description of Artificial Sequence: Synthetic oligonucleotide
  Target: LAMA2; (+) strand; PAM type: NRG; PAM sequence: AGG
aaccaggtgggagaagacca

SEQ ID NO: 169565 - DNA, 20 bp, Artificial Sequence
  Description of Artificial Sequence: Synthetic oligonucleotide
  Target: LAMA2; (+) strand; PAM type: NRG; PAM sequence: GGG
accaggtgggagaagaccaa

SEQ ID NO: 169566 - DNA, 20 bp, Artificial Sequence
  Description of Artificial Sequence: Synthetic oligonucleotide
  Target: LAMA2; (+) strand; PAM type: NRG; PAM sequence: GAG
caggtgggagaagaccaagg

SEQ ID NO: 169567 - DNA, 20 bp, Artificial Sequence
  Description of Artificial Sequence: Synthetic oligonucleotide
  Target: LAMA2; (+) strand; PAM type: NRG; PAM sequence: AAG
gtgggagaagaccaagggag

SEQ ID NO: 169568 - DNA, 20 bp, Artificial Sequence
  Description of Artificial Sequence: Synthetic oligonucleotide
  Target: LAMA2; (+) strand; PAM type: NRG; PAM sequence: TAG
agaccaagggagaagaattc

SEQ ID NO: 169569 - DNA, 20 bp, Artificial Sequence
  Description of Artificial Sequence: Synthetic oligonucleotide
  Target: LAMA2; (+) strand; PAM type: NRG; PAM sequence: AGG
gaccaagggagaagaattct

SEQ ID NO: 169570 - DNA, 20 bp, Artificial Sequence
  Description of Artificial Sequence: Synthetic oligonucleotide
  Target: LAMA2; (+) strand; PAM type: NRG; PAM sequence: TAG
caagggagaagaattctagg

SEQ ID NO: 169571 - DNA, 20 bp, Artificial Sequence
  Description of Artificial Sequence: Synthetic oligonucleotide
  Target: LAMA2; (+) strand; PAM type: NRG; PAM sequence: GAG
agggagaagaattctaggta

SEQ ID NO: 169572 - DNA, 20 bp, Artificial Sequence
  Description of Artificial Sequence: Synthetic oligonucleotide
  Target: LAMA2; (+) strand; PAM type: NRG; PAM sequence: AAG
gagaagaattctaggtagag

SEQ ID NO: 169573 - DNA, 20 bp, Artificial Sequence
  Description of Artificial Sequence: Synthetic oligonucleotide
  Target: LAMA2; (+) strand; PAM type: NRG; PAM sequence: CAG
agaattctaggtagagaaga

SEQ ID NO: 169574 - DNA, 20 bp, Artificial Sequence
  Description of Artificial Sequence: Synthetic oligonucleotide
  Target: LAMA2; (+) strand; PAM type: NRG; PAM sequence: AAG
ttctaggtagagaagacagc

SEQ ID NO: 169575 - DNA, 20 bp, Artificial Sequence
  Description of Artificial Sequence: Synthetic oligonucleotide
  Target: LAMA2; (+) strand; PAM type: NRG; PAM sequence: AAG
gtagagaagacagcaagcaa

SEQ ID NO: 169576 - DNA, 20 bp, Artificial Sequence
  Description of Artificial Sequence: Synthetic oligonucleotide
  Target: LAMA2; (+) strand; PAM type: NRG; PAM sequence: AGG
tagagaagacagcaagcaaa

SEQ ID NO: 169577 - DNA, 20 bp, Artificial Sequence
  Description of Artificial Sequence: Synthetic oligonucleotide
  Target: LAMA2; (+) strand; PAM type: NRG; PAM sequence: AAG
tccaaatccttgctcccttg

SEQ ID NO: 169578 - DNA, 20 bp, Artificial Sequence
  Description of Artificial Sequence: Synthetic oligonucleotide
  Target: LAMA2; (+) strand; PAM type: NRG; PAM sequence: GAG
tccttgctcccttgaagatt

SEQ ID NO: 169579 - DNA, 20 bp, Artificial Sequence
  Description of Artificial Sequence: Synthetic oligonucleotide
  Target: LAMA2; (+) strand; PAM type: NRG; PAM sequence: TGG
catccctataatttatcacc

SEQ ID NO: 169580 - DNA, 20 bp, Artificial Sequence
  Description of Artificial Sequence: Synthetic oligonucleotide
  Target: LAMA2; (+) strand; PAM type: NRG; PAM sequence: CAG
ctataatttatcacctggtc

SEQ ID NO: 169581 - DNA, 20 bp, Artificial Sequence
  Description of Artificial Sequence: Synthetic oligonucleotide
  Target: LAMA2; (+) strand; PAM type: NRG; PAM sequence: TGG
taatttatcacctggtccag

SEQ ID NO: 169582 - DNA, 20 bp, Artificial Sequence
  Description of Artificial Sequence: Synthetic oligonucleotide
  Target: LAMA2; (+) strand; PAM type: NRG; PAM sequence: TGG
ggtccagtggttttatcctt

SEQ ID NO: 169583 - DNA, 20 bp, Artificial Sequence
  Description of Artificial Sequence: Synthetic oligonucleotide
  Target: LAMA2; (+) strand; PAM type: NRG; PAM sequence: TGG
ggttttatcctttggctaca

SEQ ID NO: 169584 - DNA, 20 bp, Artificial Sequence
  Description of Artificial Sequence: Synthetic oligonucleotide
  Target: LAMA2; (+) strand; PAM type: NRG; PAM sequence: TGG
ctacatggtttttcaattac

SEQ ID NO: 169585 - DNA, 20 bp, Artificial Sequence
  Description of Artificial Sequence: Synthetic oligonucleotide
  Target: LAMA2; (+) strand; PAM type: NRG; PAM sequence: CAG
actggaatatttttaaaata

SEQ ID NO: 169586 - DNA, 20 bp, Artificial Sequence
  Description of Artificial Sequence: Synthetic oligonucleotide
  Target: LAMA2; (+) strand; PAM type: NRG; PAM sequence: TGG
ggaatatttttaaaatacag

SEQ ID NO: 169587 - DNA, 20 bp, Artificial Sequence
  Description of Artificial Sequence: Synthetic oligonucleotide
  Target: LAMA2; (+) strand; PAM type: NRG; PAM sequence: CAG
gtggttcacgcctatgatcc

SEQ ID NO: 169588 - DNA, 20 bp, Artificial Sequence
  Description of Artificial Sequence: Synthetic oligonucleotide
  Target: LAMA2; (+) strand; PAM type: NRG; PAM sequence: TGG
acgcctatgatcccagcact

SEQ ID NO: 169589 - DNA, 20 bp, Artificial Sequence
  Description of Artificial Sequence: Synthetic oligonucleotide
  Target: LAMA2; (+) strand; PAM type: NRG; PAM sequence: GGG
cgcctatgatcccagcactt

SEQ ID NO: 169590 - DNA, 20 bp, Artificial Sequence
  Description of Artificial Sequence: Synthetic oligonucleotide
  Target: LAMA2; (+) strand; PAM type: NRG; PAM sequence: GGG
gcctatgatcccagcacttg

SEQ ID NO: 169591 - DNA, 20 bp, Artificial Sequence
  Description of Artificial Sequence: Synthetic oligonucleotide
  Target: LAMA2; (+) strand; PAM type: NRG; PAM sequence: AAG
tatgatcccagcacttgggg

SEQ ID NO: 169592 - DNA, 20 bp, Artificial Sequence
  Description of Artificial Sequence: Synthetic oligonucleotide
  Target: LAMA2; (+) strand; PAM type: NRG; PAM sequence: GAG
tcccagcacttggggaagct

SEQ ID NO: 169593 - DNA, 20 bp, Artificial Sequence
  Description of Artificial Sequence: Synthetic oligonucleotide
  Target: LAMA2; (+) strand; PAM type: NRG; PAM sequence: AGG
cccagcacttggggaagctg

SEQ ID NO: 169594 - DNA, 20 bp, Artificial Sequence
  Description of Artificial Sequence: Synthetic oligonucleotide
  Target: LAMA2; (+) strand; PAM type: NRG; PAM sequence: TGG
agcacttggggaagctgagg

SEQ ID NO: 169595 - DNA, 20 bp, Artificial Sequence
  Description of Artificial Sequence: Synthetic oligonucleotide
  Target: LAMA2; (+) strand; PAM type: NRG; PAM sequence: GGG
gcacttggggaagctgaggt

SEQ ID NO: 169596 - DNA, 20 bp, Artificial Sequence
  Description of Artificial Sequence: Synthetic oligonucleotide
  Target: LAMA2; (+) strand; PAM type: NRG; PAM sequence: GAG
acttggggaagctgaggtgg

SEQ ID NO: 169597 - DNA, 20 bp, Artificial Sequence
  Description of Artificial Sequence: Synthetic oligonucleotide
  Target: LAMA2; (+) strand; PAM type: NRG; PAM sequence: AGG
cttggggaagctgaggtggg

SEQ ID NO: 169598 - DNA, 20 bp, Artificial Sequence
  Description of Artificial Sequence: Synthetic oligonucleotide
  Target: LAMA2; (+) strand; PAM type: NRG; PAM sequence: GAG
ctgaggtgggaggatcactt

SEQ ID NO: 169599 - DNA, 20 bp, Artificial Sequence
  Description of Artificial Sequence: Synthetic oligonucleotide
  Target: LAMA2; (+) strand; PAM type: NRG; PAM sequence: AGG
tgaggtgggaggatcacttg

SEQ ID NO: 169600 - DNA, 20 bp, Artificial Sequence
  Description of Artificial Sequence: Synthetic oligonucleotide
  Target: LAMA2; (+) strand; PAM type: NRG; PAM sequence: CAG
gtgggaggatcacttgaggc

SEQ ID NO: 169601 - DNA, 20 bp, Artificial Sequence
  Description of Artificial Sequence: Synthetic oligonucleotide
  Target: LAMA2; (+) strand; PAM type: NRG; PAM sequence: AGG
tgggaggatcacttgaggcc

SEQ ID NO: 169602 - DNA, 20 bp, Artificial Sequence
  Description of Artificial Sequence: Synthetic oligonucleotide
  Target: LAMA2; (+) strand; PAM type: NRG; PAM sequence: GAG
ggaggatcacttgaggccag

SEQ ID NO: 169603 - DNA, 20 bp, Artificial Sequence
  Description of Artificial Sequence: Synthetic oligonucleotide
  Target: LAMA2; (+) strand; PAM type: NRG; PAM sequence: CAG
tgaggccaggagtctgacat

SEQ ID NO: 169604 - DNA, 20 bp, Artificial Sequence
  Description of Artificial Sequence: Synthetic oligonucleotide
  Target: LAMA2; (+) strand; PAM type: NRG; PAM sequence: CAG
gccaggagtctgacatcagc

SEQ ID NO: 169605 - DNA, 20 bp, Artificial Sequence
  Description of Artificial Sequence: Synthetic oligonucleotide
  Target: LAMA2; (+) strand; PAM type: NRG; PAM sequence: AGG
ccaggagtctgacatcagcc

SEQ ID NO: 169606 - DNA, 20 bp, Artificial Sequence
  Description of Artificial Sequence: Synthetic oligonucleotide
  Target: LAMA2; (+) strand; PAM type: NRG; PAM sequence: GGG
caggagtctgacatcagcca

SEQ ID NO: 169607 - DNA, 20 bp, Artificial Sequence
  Description of Artificial Sequence: Synthetic oligonucleotide
  Target: LAMA2; (+) strand; PAM type: NRG; PAM sequence: CAG
tgacatcagccagggcaaca

SEQ ID NO: 169608 - DNA, 20 bp, Artificial Sequence
  Description of Artificial Sequence: Synthetic oligonucleotide
  Target: LAMA2; (+) strand; PAM type: NRG; PAM sequence: AAG
atcagccagggcaacacagc

SEQ ID NO: 169609 - DNA, 20 bp, Artificial Sequence
  Description of Artificial Sequence: Synthetic oligonucleotide
  Target: LAMA2; (+) strand; PAM type: NRG; PAM sequence: TAG
ccatctctatgttaaaaaac

SEQ ID NO: 169610 - DNA, 20 bp, Artificial Sequence
  Description of Artificial Sequence: Synthetic oligonucleotide
  Target: LAMA2; (+) strand; PAM type: NRG; PAM sequence: TGG
ctctatgttaaaaaactagc

SEQ ID NO: 169611 - DNA, 20 bp, Artificial Sequence
  Description of Artificial Sequence: Synthetic oligonucleotide
  Target: LAMA2; (+) strand; PAM type: NRG; PAM sequence: TGG
gttaaaaaactagctggatg

SEQ ID NO: 169612 - DNA, 20 bp, Artificial Sequence
  Description of Artificial Sequence: Synthetic oligonucleotide
  Target: LAMA2; (+) strand; PAM type: NRG; PAM sequence: TGG
aaaaaactagctggatgtgg

SEQ ID NO: 169613 - DNA, 20 bp, Artificial Sequence
  Description of Artificial Sequence: Synthetic oligonucleotide
  Target: LAMA2; (+) strand; PAM type: NRG; PAM sequence: TAG
gatgtggtggcatgtgcctg

SEQ ID NO: 169614 - DNA, 20 bp, Artificial Sequence
  Description of Artificial Sequence: Synthetic oligonucleotide
  Target: LAMA2; (+) strand; PAM type: NRG; PAM sequence: CGG
tgcctgtagtctcaaccact

SEQ ID NO: 169615 - DNA, 20 bp, Artificial Sequence
  Description of Artificial Sequence: Synthetic oligonucleotide
  Target: LAMA2; (+) strand; PAM type: NRG; PAM sequence: GGG
gcctgtagtctcaaccactc

SEQ ID NO: 169616 - DNA, 20 bp, Artificial Sequence
  Description of Artificial Sequence: Synthetic oligonucleotide
  Target: LAMA2; (+) strand; PAM type: NRG; PAM sequence: GAG
ctgtagtctcaaccactcgg

SEQ ID NO: 169617 - DNA, 20 bp, Artificial Sequence
  Description of Artificial Sequence: Synthetic oligonucleotide
  Target: LAMA2; (+) strand; PAM type: NRG; PAM sequence: AGG
tgtagtctcaaccactcggg

SEQ ID NO: 169618 - DNA, 20 bp, Artificial Sequence
  Description of Artificial Sequence: Synthetic oligonucleotide
  Target: LAMA2; (+) strand; PAM type: NRG; PAM sequence: GAG
tctcaaccactcgggaggct

SEQ ID NO: 169619 - DNA, 20 bp, Artificial Sequence
  Description of Artificial Sequence: Synthetic oligonucleotide
  Target: LAMA2; (+) strand; PAM type: NRG; PAM sequence: AGG
ctcaaccactcgggaggctg

SEQ ID NO: 169620 - DNA, 20 bp, Artificial Sequence
  Description of Artificial Sequence: Synthetic oligonucleotide
  Target: LAMA2; (+) strand; PAM type: NRG; PAM sequence: CAG
aaccactcgggaggctgagg

SEQ ID NO: 169621 - DNA, 20 bp, Artificial Sequence
  Description of Artificial Sequence: Synthetic oligonucleotide
  Target: LAMA2; (+) strand; PAM type: NRG; PAM sequence: AGG
accactcgggaggctgaggc

SEQ ID NO: 169622 - DNA, 20 bp, Artificial Sequence
  Description of Artificial Sequence: Synthetic oligonucleotide
  Target: LAMA2; (+) strand; PAM type: NRG; PAM sequence: GAG
cactcgggaggctgaggcag

SEQ ID NO: 169623 - DNA, 20 bp, Artificial Sequence
  Description of Artificial Sequence: Synthetic oligonucleotide
  Target: LAMA2; (+) strand; PAM type: NRG; PAM sequence: AGG
actcgggaggctgaggcagg

SEQ ID NO: 169624 - DNA, 20 bp, Artificial Sequence
  Description of Artificial Sequence: Synthetic oligonucleotide
  Target: LAMA2; (+) strand; PAM type: NRG; PAM sequence: TAG
ctgaggcaggaggatcactt

SEQ ID NO: 169625 - DNA, 20 bp, Artificial Sequence
  Description of Artificial Sequence: Synthetic oligonucleotide
  Target: LAMA2; (+) strand; PAM type: NRG; PAM sequence: CAG
gcaggaggatcactttagcc

SEQ ID NO: 169626 - DNA, 20 bp, Artificial Sequence
  Description of Artificial Sequence: Synthetic oligonucleotide
  Target: LAMA2; (+) strand; PAM type: NRG; PAM sequence: AGG
caggaggatcactttagccc

SEQ ID NO: 169627 - DNA, 20 bp, Artificial Sequence
  Description of Artificial Sequence: Synthetic oligonucleotide
  Target: LAMA2; (+) strand; PAM type: NRG; PAM sequence: GAG
ggaggatcactttagcccag

SEQ ID NO: 169628 - DNA, 20 bp, Artificial Sequence
  Description of Artificial Sequence: Synthetic oligonucleotide
  Target: LAMA2; (+) strand; PAM type: NRG; PAM sequence: GAG
tcactttagcccaggagttt

SEQ ID NO: 169629 - DNA, 20 bp, Artificial Sequence
  Description of Artificial Sequence: Synthetic oligonucleotide
  Target: LAMA2; (+) strand; PAM type: NRG; PAM sequence: AGG
cactttagcccaggagtttg

SEQ ID NO: 169630 - DNA, 20 bp, Artificial Sequence
  Description of Artificial Sequence: Synthetic oligonucleotide
  Target: LAMA2; (+) strand; PAM type: NRG; PAM sequence: CAG
agcccaggagtttgaggccg

SEQ ID NO: 169631 - DNA, 20 bp, Artificial Sequence
  Description of Artificial Sequence: Synthetic oligonucleotide
  Target: LAMA2; (+) strand; PAM type: NRG; PAM sequence: GAG
caggagtttgaggccgcagt

SEQ ID NO: 169632 - DNA, 20 bp, Artificial Sequence
  Description of Artificial Sequence: Synthetic oligonucleotide
  Target: LAMA2; (+) strand; PAM type: NRG; PAM sequence: CAG
atgatcacaccactgtactc

SEQ ID NO: 169633 - DNA, 20 bp, Artificial Sequence
  Description of Artificial Sequence: Synthetic oligonucleotide
  Target: LAMA2; (+) strand; PAM type: NRG; PAM sequence: TGG
cacaccactgtactccagca

SEQ ID NO: 169634 - DNA, 20 bp, Artificial Sequence
  Description of Artificial Sequence: Synthetic oligonucleotide
  Target: LAMA2; (+) strand; PAM type: NRG; PAM sequence: GGG
acaccactgtactccagcat

SEQ ID NO: 169635 - DNA, 20 bp, Artificial Sequence
  Description of Artificial Sequence: Synthetic oligonucleotide
  Target: LAMA2; (+) strand; PAM type: NRG; PAM sequence: TGG
ccactgtactccagcatggg

SEQ ID NO: 169636 - DNA, 20 bp, Artificial Sequence
  Description of Artificial Sequence: Synthetic oligonucleotide
  Target: LAMA2; (+) strand; PAM type: NRG; PAM sequence: CAG
ctgtactccagcatgggtgg

SEQ ID NO: 169637 - DNA, 20 bp, Artificial Sequence
  Description of Artificial Sequence: Synthetic oligonucleotide
  Target: LAMA2; (+) strand; PAM type: NRG; PAM sequence: GAG
gtactccagcatgggtggca

SEQ ID NO: 169638 - DNA, 20 bp, Artificial Sequence
  Description of Artificial Sequence: Synthetic oligonucleotide
  Target: LAMA2; (+) strand; PAM type: NRG; PAM sequence: AAG
tccagcatgggtggcagagc

SEQ ID NO: 169639 - DNA, 20 bp, Artificial Sequence
  Description of Artificial Sequence: Synthetic oligonucleotide
  Target: LAMA2; (+) strand; PAM type: NRG; PAM sequence: CAG
ggcagagcaagaccctgtct

SEQ ID NO: 169640 - DNA, 20 bp, Artificial Sequence
  Description of Artificial Sequence: Synthetic oligonucleotide
  Target: LAMA2; (+) strand; PAM type: NRG; PAM sequence: TAG
gtctcagaaaaaaataaaaa

SEQ ID NO: 169641 - DNA, 20 bp, Artificial Sequence
  Description of Artificial Sequence: Synthetic oligonucleotide
  Target: LAMA2; (+) strand; PAM type: NRG; PAM sequence: TGG
aataaaaatagaaatactga

SEQ ID NO: 169642 - DNA, 20 bp, Artificial Sequence
  Description of Artificial Sequence: Synthetic oligonucleotide
  Target: LAMA2; (+) strand; PAM type: NRG; PAM sequence: TAG
aaaatagaaatactgatggt

SEQ ID NO: 169643 - DNA, 20 bp, Artificial Sequence
  Description of Artificial Sequence: Synthetic oligonucleotide
  Target: LAMA2; (+) strand; PAM type: NRG; PAM sequence: CAG
ctgatggttagaccttacca

SEQ ID NO: 169644 - DNA, 20 bp, Artificial Sequence
  Description of Artificial Sequence: Synthetic oligonucleotide
  Target: LAMA2; (+) strand; PAM type: NRG; PAM sequence: TGG
ccatcaaaaatcatattctg

SEQ ID NO: 169645 - DNA, 20 bp, Artificial Sequence
  Description of Artificial Sequence: Synthetic oligonucleotide
  Target: LAMA2; (+) strand; PAM type: NRG; PAM sequence: TGG
tcaaaaatcatattctgtgg

SEQ ID NO: 169646 - DNA, 20 bp, Artificial Sequence
  Description of Artificial Sequence: Synthetic oligonucleotide
  Target: LAMA2; (+) strand; PAM type: NRG; PAM sequence: GAG
aaatcatattctgtggtggt

SEQ ID NO: 169647 - DNA, 20 bp, Artificial Sequence
  Description of Artificial Sequence: Synthetic oligonucleotide
  Target: LAMA2; (+) strand; PAM type: NRG; PAM sequence: AGG
aatcatattctgtggtggtg

SEQ ID NO: 169648 - DNA, 20 bp, Artificial Sequence
  Description of Artificial Sequence: Synthetic oligonucleotide
  Target: LAMA2; (+) strand; PAM type: NRG; PAM sequence: GAG
tcatattctgtggtggtgag

SEQ ID NO: 169649 - DNA, 20 bp, Artificial Sequence
  Description of Artificial Sequence: Synthetic oligonucleotide
  Target: LAMA2; (+) strand; PAM type: NRG; PAM sequence: AGG
catattctgtggtggtgagg

SEQ ID NO: 169650 - DNA, 20 bp, Artificial Sequence
  Description of Artificial Sequence: Synthetic oligonucleotide
  Target: LAMA2; (+) strand; PAM type: NRG; PAM sequence: GGG
atattctgtggtggtgagga

SEQ ID NO: 169651 - DNA, 20 bp, Artificial Sequence
  Description of Artificial Sequence: Synthetic oligonucleotide
  Target: LAMA2; (+) strand; PAM type: NRG; PAM sequence: AAG
tctgtggtggtgaggaggga

SEQ ID NO: 169652 - DNA, 20 bp, Artificial Sequence
  Description of Artificial Sequence: Synthetic oligonucleotide
  Target: LAMA2; (+) strand; PAM type: NRG; PAM sequence: GAG
tgtggtggtgaggagggaaa

SEQ ID NO: 169653 - DNA, 20 bp, Artificial Sequence
  Description of Artificial Sequence: Synthetic oligonucleotide
  Target: LAMA2; (+) strand; PAM type: NRG; PAM sequence: CAG
tggtgaggagggaaagagcc

SEQ ID NO: 169654 - DNA, 20 bp, Artificial Sequence
  Description of Artificial Sequence: Synthetic oligonucleotide
  Target: LAMA2; (+) strand; PAM type: NRG; PAM sequence: AGG
ggtgaggagggaaagagccc

SEQ ID NO: 169655 - DNA, 20 bp, Artificial Sequence
  Description of Artificial Sequence: Synthetic oligonucleotide
  Target: LAMA2; (+) strand; PAM type: NRG; PAM sequence: TGG
aaatgttcatgtgattccaa

SEQ ID NO: 169656 - DNA, 20 bp, Artificial Sequence
  Description of Artificial Sequence: Synthetic oligonucleotide
  Target: LAMA2; (+) strand; PAM type: NRG; PAM sequence: GGG
aatgttcatgtgattccaat

SEQ ID NO: 169657 - DNA, 20 bp, Artificial Sequence
  Description of Artificial Sequence: Synthetic oligonucleotide
  Target: LAMA2; (+) strand; PAM type: NRG; PAM sequence: CAG
gttcatgtgattccaatggg

SEQ ID NO: 169658 - DNA, 20 bp, Artificial Sequence
  Description of Artificial Sequence: Synthetic oligonucleotide
  Target: LAMA2; (+) strand; PAM type: NRG; PAM sequence: AAG
gtgattccaatgggcagcca

SEQ ID NO: 169659 - DNA, 20 bp, Artificial Sequence
  Description of Artificial Sequence: Synthetic oligonucleotide
  Target: LAMA2; (+) strand; PAM type: NRG; PAM sequence: AGG
tgattccaatgggcagccaa

SEQ ID NO: 169660 - DNA, 20 bp, Artificial Sequence
  Description of Artificial Sequence: Synthetic oligonucleotide
  Target: LAMA2; (+) strand; PAM type: NRG; PAM sequence: GAG
tccaatgggcagccaaaggt

SEQ ID NO: 169661 - DNA, 20 bp, Artificial Sequence
  Description of Artificial Sequence: Synthetic oligonucleotide
  Target: LAMA2; (+) strand; PAM type: NRG; PAM sequence: CAG
tgttgtcacattctaatgtg

SEQ ID NO: 169662 - DNA, 20 bp, Artificial Sequence
  Description of Artificial Sequence: Synthetic oligonucleotide
  Target: LAMA2; (+) strand; PAM type: NRG; PAM sequence: GAG
ttgtcacattctaatgtgca

SEQ ID NO: 169663 - DNA, 20 bp, Artificial Sequence
  Description of Artificial Sequence: Synthetic oligonucleotide
  Target: LAMA2; (+) strand; PAM type: NRG; PAM sequence: TGG
tctaatgtgcagagataatg

SEQ ID NO: 169664 - DNA, 20 bp, Artificial Sequence
  Description of Artificial Sequence: Synthetic oligonucleotide
  Target: LAMA2; (+) strand; PAM type: NRG; PAM sequence: GGG
ctaatgtgcagagataatgt

SEQ ID NO: 169665 - DNA, 20 bp, Artificial Sequence
  Description of Artificial Sequence: Synthetic oligonucleotide
  Target: LAMA2; (+) strand; PAM type: NRG; PAM sequence: CAG
tgcagagataatgtgggacg

SEQ ID NO: 169666 - DNA, 20 bp, Artificial Sequence
  Description of Artificial Sequence: Synthetic oligonucleotide
  Target: LAMA2; (+) strand; PAM type: NRG; PAM sequence: TAG
ggacgcagattctgatttcc

SEQ ID NO: 169667 - DNA, 20 bp, Artificial Sequence
  Description of Artificial Sequence: Synthetic oligonucleotide
  Target: LAMA2; (+) strand; PAM type: NRG; PAM sequence: TGG
agattctgatttcctagatc

SEQ ID NO: 169668 - DNA, 20 bp, Artificial Sequence
  Description of Artificial Sequence: Synthetic oligonucleotide
  Target: LAMA2; (+) strand; PAM type: NRG; PAM sequence: GGG
gattctgatttcctagatct

SEQ ID NO: 169669 - DNA, 20 bp, Artificial Sequence
  Description of Artificial Sequence: Synthetic oligonucleotide
  Target: LAMA2; (+) strand; PAM type: NRG; PAM sequence: GGG
attctgatttcctagatctg

SEQ ID NO: 169670 - DNA, 20 bp, Artificial Sequence
  Description of Artificial Sequence: Synthetic oligonucleotide
  Target: LAMA2; (+) strand; PAM type: NRG; PAM sequence: TAG
ctgatttcctagatctgggg

SEQ ID NO: 169671 - DNA, 20 bp, Artificial Sequence
  Description of Artificial Sequence: Synthetic oligonucleotide
  Target: LAMA2; (+) strand; PAM type: NRG; PAM sequence: GAG
gatttcctagatctggggta

SEQ ID NO: 169672 - DNA, 20 bp, Artificial Sequence
  Description of Artificial Sequence: Synthetic oligonucleotide
  Target: LAMA2; (+) strand; PAM type: NRG; PAM sequence: AAG
cccgattatacatttctaat

SEQ ID NO: 169673 - DNA, 20 bp, Artificial Sequence
  Description of Artificial Sequence: Synthetic oligonucleotide
  Target: LAMA2; (+) strand; PAM type: NRG; PAM sequence: CAG
atacatttctaataagcttc

SEQ ID NO: 169674 - DNA, 20 bp, Artificial Sequence
  Description of Artificial Sequence: Synthetic oligonucleotide
  Target: LAMA2; (+) strand; PAM type: NRG; PAM sequence: AGG
tacatttctaataagcttcc

SEQ ID NO: 169675 - DNA, 20 bp, Artificial Sequence
  Description of Artificial Sequence: Synthetic oligonucleotide
  Target: LAMA2; (+) strand; PAM type: NRG; PAM sequence: TGG
atttctaataagcttccagg

SEQ ID NO: 169676 - DNA, 20 bp, Artificial Sequence
  Description of Artificial Sequence: Synthetic oligonucleotide
  Target: LAMA2; (+) strand; PAM type: NRG; PAM sequence: TGG
ccaggtggtgccaaaactgt

SEQ ID NO: 169677 - DNA, 20 bp, Artificial Sequence
  Description of Artificial Sequence: Synthetic oligonucleotide
  Target: LAMA2; (+) strand; PAM type: NRG; PAM sequence: AAG
gttggtctgattgctactca

SEQ ID NO: 169678 - DNA, 20 bp, Artificial Sequence
  Description of Artificial Sequence: Synthetic oligonucleotide
  Target: LAMA2; (+) strand; PAM type: NRG; PAM sequence: TGG
tctgattgctactcaaagtg

SEQ ID NO: 169679 - DNA, 20 bp, Artificial Sequence
  Description of Artificial Sequence: Synthetic oligonucleotide
  Target: LAMA2; (+) strand; PAM type: NRG; PAM sequence: CAG
gctactcaaagtgtggtgca

SEQ ID NO: 169680 - DNA, 20 bp, Artificial Sequence
  Description of Artificial Sequence: Synthetic oligonucleotide
  Target: LAMA2; (+) strand; PAM type: NRG; PAM sequence: CAG
aagtgtggtgcacagaccaa

SEQ ID NO: 169681 - DNA, 20 bp, Artificial Sequence
  Description of Artificial Sequence: Synthetic oligonucleotide
  Target: LAMA2; (+) strand; PAM type: NRG; PAM sequence: TAG
tgtggtgcacagaccaacag

SEQ ID NO: 169682 - DNA, 20 bp, Artificial Sequence
  Description of Artificial Sequence: Synthetic oligonucleotide
  Target: LAMA2; (+) strand; PAM type: NRG; PAM sequence: TGG
ccaacagtagcaatatcacc

SEQ ID NO: 169683 - DNA, 20 bp, Artificial Sequence
  Description of Artificial Sequence: Synthetic oligonucleotide
  Target: LAMA2; (+) strand; PAM type: NRG; PAM sequence: GGG
caacagtagcaatatcacct

SEQ ID NO: 169684 - DNA, 20 bp, Artificial Sequence
  Description of Artificial Sequence: Synthetic oligonucleotide
  Target: LAMA2; (+) strand; PAM type: NRG; PAM sequence: GAG
acagtagcaatatcacctgg

SEQ ID NO: 169685 - DNA, 20 bp, Artificial Sequence
  Description of Artificial Sequence: Synthetic oligonucleotide
  Target: LAMA2; (+) strand; PAM type: NRG; PAM sequence: TAG
aatatcacctgggagcttgt

SEQ ID NO: 169686 - DNA, 20 bp, Artificial Sequence
  Description of Artificial Sequence: Synthetic oligonucleotide
  Target: LAMA2; (+) strand; PAM type: NRG; PAM sequence: AAG
cacctgggagcttgttagaa

SEQ ID NO: 169687 - DNA, 20 bp, Artificial Sequence
  Description of Artificial Sequence: Synthetic oligonucleotide
  Target: LAMA2; (+) strand; PAM type: NRG; PAM sequence: CAG
ttgttagaaaagcacattct

SEQ ID NO: 169688 - DNA, 20 bp, Artificial Sequence
  Description of Artificial Sequence: Synthetic oligonucleotide
  Target: LAMA2; (+) strand; PAM type: NRG; PAM sequence: CAG
tagaaaagcacattctcagt

SEQ ID NO: 169689 - DNA, 20 bp, Artificial Sequence
  Description of Artificial Sequence: Synthetic oligonucleotide
  Target: LAMA2; (+) strand; PAM type: NRG; PAM sequence: GAG
gaaaagcacattctcagtca

SEQ ID NO: 169690 - DNA, 20 bp, Artificial Sequence
  Description of Artificial Sequence: Synthetic oligonucleotide
  Target: LAMA2; (+) strand; PAM type: NRG; PAM sequence: AAG
cacattctcagtcagagact

SEQ ID NO: 169691 - DNA, 20 bp, Artificial Sequence
  Description of Artificial Sequence: Synthetic oligonucleotide
  Target: LAMA2; (+) strand; PAM type: NRG; PAM sequence: GAG
cattctcagtcagagactaa

SEQ ID NO: 169692 - DNA, 20 bp, Artificial Sequence
  Description of Artificial Sequence: Synthetic oligonucleotide
  Target: LAMA2; (+) strand; PAM type: NRG; PAM sequence: CAG
agtcagagactaagagaaac

SEQ ID NO: 169693 - DNA, 20 bp, Artificial Sequence
  Description of Artificial Sequence: Synthetic oligonucleotide
  Target: LAMA2; (+) strand; PAM type: NRG; PAM sequence: AGG
gtcagagactaagagaaacc

SEQ ID NO: 169694 - DNA, 20 bp, Artificial Sequence
  Description of Artificial Sequence: Synthetic oligonucleotide
  Target: LAMA2; (+) strand; PAM type: NRG; PAM sequence: CAG
gatcaaatcacctcctgatt

SEQ ID NO: 169695 - DNA, 20 bp, Artificial Sequence
  Description of Artificial Sequence: Synthetic oligonucleotide
  Target: LAMA2; (+) strand; PAM type: NRG; PAM sequence: TAG
acctcctgattcagaaatac

SEQ ID NO: 169696 - DNA, 20 bp, Artificial Sequence
  Description of Artificial Sequence: Synthetic oligonucleotide
  Target: LAMA2; (+) strand; PAM type: NRG; PAM sequence: AGG
cctcctgattcagaaatact

SEQ ID NO: 169697 - DNA, 20 bp, Artificial Sequence
  Description of Artificial Sequence: Synthetic oligonucleotide
  Target: LAMA2; (+) strand; PAM type: NRG; PAM sequence: GGG
ctcctgattcagaaatacta

SEQ ID NO: 169698 - DNA, 20 bp, Artificial Sequence
  Description of Artificial Sequence: Synthetic oligonucleotide
  Target: LAMA2; (+) strand; PAM type: NRG; PAM sequence: GGG
tcctgattcagaaatactag

SEQ ID NO: 169699 - DNA, 20 bp, Artificial Sequence
  Description of Artificial Sequence: Synthetic oligonucleotide
  Target: LAMA2; (+) strand; PAM type: NRG; PAM sequence: GGG
cctgattcagaaatactagg

SEQ ID NO: 169700 - DNA, 20 bp, Artificial Sequence
  Description of Artificial Sequence: Synthetic oligonucleotide
  Target: LAMA2; (+) strand; PAM type: NRG; PAM sequence: TGG
ttcagaaatactagggggtg

SEQ ID NO: 169701 - DNA, 20 bp, Artificial Sequence
  Description of Artificial Sequence: Synthetic oligonucleotide
  Target: LAMA2; (+) strand; PAM type: NRG; PAM sequence: CAG
aaatactagggggtgtggac

SEQ ID NO: 169702 - DNA, 20 bp, Artificial Sequence
  Description of Artificial Sequence: Synthetic oligonucleotide
  Target: LAMA2; (+) strand; PAM type: NRG; PAM sequence: TAG
gggggtgtggaccagccctc

SEQ ID NO: 169703 - DNA, 20 bp, Artificial Sequence
  Description of Artificial Sequence: Synthetic oligonucleotide
  Target: LAMA2; (+) strand; PAM type: NRG; PAM sequence: AGG
ggggtgtggaccagccctct

SEQ ID NO: 169704 - DNA, 20 bp, Artificial Sequence
  Description of Artificial Sequence: Synthetic oligonucleotide
  Target: LAMA2; (+) strand; PAM type: NRG; PAM sequence: AAG
cagccctctaggatttccga

SEQ ID NO: 169705 - DNA, 20 bp, Artificial Sequence
  Description of Artificial Sequence: Synthetic oligonucleotide
  Target: LAMA2; (+) strand; PAM type: NRG; PAM sequence: TGG
aggatttccgaaagtcctac

SEQ ID NO: 169706 - DNA, 20 bp, Artificial Sequence
  Description of Artificial Sequence: Synthetic oligonucleotide
  Target: LAMA2; (+) strand; PAM type: NRG; PAM sequence: TGG
atttccgaaagtcctactgg

SEQ ID NO: 169707 - DNA, 20 bp, Artificial Sequence
  Description of Artificial Sequence: Synthetic oligonucleotide
  Target: LAMA2; (+) strand; PAM type: NRG; PAM sequence: GAG
aaagtcctactggtggttct

SEQ ID NO: 169708 - DNA, 20 bp, Artificial Sequence
  Description of Artificial Sequence: Synthetic oligonucleotide
  Target: LAMA2; (+) strand; PAM type: NRG; PAM sequence: AGG
aagtcctactggtggttctg

SEQ ID NO: 169709 - DNA, 20 bp, Artificial Sequence
  Description of Artificial Sequence: Synthetic oligonucleotide
  Target: LAMA2; (+) strand; PAM type: NRG; PAM sequence: AAG
ggtggttctgaggcccacta

SEQ ID NO: 169710 - DNA, 20 bp, Artificial Sequence
  Description of Artificial Sequence: Synthetic oligonucleotide
  Target: LAMA2; (+) strand; PAM type: NRG; PAM sequence: GAG
tctgaggcccactaaagctt

SEQ ID NO: 169711 - DNA, 20 bp, Artificial Sequence
  Description of Artificial Sequence: Synthetic oligonucleotide
  Target: LAMA2; (+) strand; PAM type: NRG; PAM sequence: CAG
gcccactaaagcttgagaac

SEQ ID NO: 169712 - DNA, 20 bp, Artificial Sequence
  Description of Artificial Sequence: Synthetic oligonucleotide
  Target: LAMA2; (+) strand; PAM type: NRG; PAM sequence: TGG
aaagcttgagaaccagactg

SEQ ID NO: 169713 - DNA, 20 bp, Artificial Sequence
  Description of Artificial Sequence: Synthetic oligonucleotide
  Target: LAMA2; (+) strand; PAM type: NRG; PAM sequence: TGG
gagaaccagactgtggatct

SEQ ID NO: 169714 - DNA, 20 bp, Artificial Sequence
  Description of Artificial Sequence: Synthetic oligonucleotide
  Target: LAMA2; (+) strand; PAM type: NRG; PAM sequence: TAG
agactgtggatcttggtgtt

SEQ ID NO: 169715 - DNA, 20 bp, Artificial Sequence
  Description of Artificial Sequence: Synthetic oligonucleotide
  Target: LAMA2; (+) strand; PAM type: NRG; PAM sequence: CAG
tggatcttggtgtttagaca

SEQ ID NO: 169716 - DNA, 20 bp, Artificial Sequence
  Description of Artificial Sequence: Synthetic oligonucleotide
  Target: LAMA2; (+) strand; PAM type: NRG; PAM sequence: TGG
gtgtttagacacagtcaatt

SEQ ID NO: 169717 - DNA, 20 bp, Artificial Sequence
  Description of Artificial Sequence: Synthetic oligonucleotide
  Target: LAMA2; (+) strand; PAM type: NRG; PAM sequence: GAG
agtcaatttggcacttaact

SEQ ID NO: 169718 - DNA, 20 bp, Artificial Sequence
  Description of Artificial Sequence: Synthetic oligonucleotide
  Target: LAMA2; (+) strand; PAM type: NRG; PAM sequence: TGG
ttttctctaattgtttaatg

SEQ ID NO: 169719 - DNA, 20 bp, Artificial Sequence
  Description of Artificial Sequence: Synthetic oligonucleotide
  Target: LAMA2; (+) strand; PAM type: NRG; PAM sequence: AAG
tctaattgtttaatgtggac

SEQ ID NO: 169720 - DNA, 20 bp, Artificial Sequence
  Description of Artificial Sequence: Synthetic oligonucleotide
  Target: LAMA2; (+) strand; PAM type: NRG; PAM sequence: AAG
taatgtggacaagtctgttg

SEQ ID NO: 169721 - DNA, 20 bp, Artificial Sequence
  Description of Artificial Sequence: Synthetic oligonucleotide
  Target: LAMA2; (+) strand; PAM type: NRG; PAM sequence: CGG
ctgttgaagtttgcattgaa

SEQ ID NO: 169722 - DNA, 20 bp, Artificial Sequence
  Description of Artificial Sequence: Synthetic oligonucleotide
  Target: LAMA2; (+) strand; PAM type: NRG; PAM sequence: GGG
tgttgaagtttgcattgaac

SEQ ID NO: 169723 - DNA, 20 bp, Artificial Sequence
  Description of Artificial Sequence: Synthetic oligonucleotide
  Target: LAMA2; (+) strand; PAM type: NRG; PAM sequence: GGG
gttgaagtttgcattgaacg

SEQ ID NO: 169724 - DNA, 20 bp, Artificial Sequence
  Description of Artificial Sequence: Synthetic oligonucleotide
  Target: LAMA2; (+) strand; PAM type: NRG; PAM sequence: AAG
ttgcattgaacggggctatg

SEQ ID NO: 169725 - DNA, 20 bp, Artificial Sequence
  Description of Artificial Sequence: Synthetic oligonucleotide
  Target: LAMA2; (+) strand; PAM type: NRG; PAM sequence: TGG
agccaaaataatcttttact

SEQ ID NO: 169726 - DNA, 20 bp, Artificial Sequence
  Description of Artificial Sequence: Synthetic oligonucleotide
  Target: LAMA2; (+) strand; PAM type: NRG; PAM sequence: CAG
tcttttacttggtttccatg

SEQ ID NO: 169727 - DNA, 20 bp, Artificial Sequence
  Description of Artificial Sequence: Synthetic oligonucleotide
  Target: LAMA2; (+) strand; PAM type: NRG; PAM sequence: TGG
gtttccatgcagtgcaaatt

SEQ ID NO: 169728 - DNA, 20 bp, Artificial Sequence
  Description of Artificial Sequence: Synthetic oligonucleotide
  Target: LAMA2; (+) strand; PAM type: NRG; PAM sequence: TGG
gtgcaaatttggtttcattc

SEQ ID NO: 169729 - DNA, 20 bp, Artificial Sequence
  Description of Artificial Sequence: Synthetic oligonucleotide
  Target: LAMA2; (+) strand; PAM type: NRG; PAM sequence: TAG
aaatttggtttcattctggc

SEQ ID NO: 169730 - DNA, 20 bp, Artificial Sequence
  Description of Artificial Sequence: Synthetic oligonucleotide
  Target: LAMA2; (+) strand; PAM type: NRG; PAM sequence: AGG
aatttggtttcattctggct

SEQ ID NO: 169731 - DNA, 20 bp, Artificial Sequence
  Description of Artificial Sequence: Synthetic oligonucleotide
  Target: LAMA2; (+) strand; PAM type: NRG; PAM sequence: GAG
tttggtttcattctggctag

SEQ ID NO: 169732 - DNA, 20 bp, Artificial Sequence
  Description of Artificial Sequence: Synthetic oligonucleotide
  Target: LAMA2; (+) strand; PAM type: NRG; PAM sequence: AAG
ggtttcattctggctaggag

SEQ ID NO: 169733 - DNA, 20 bp, Artificial Sequence
  Description of Artificial Sequence: Synthetic oligonucleotide
  Target: LAMA2; (+) strand; PAM type: NRG; PAM sequence: GAG
tttcattctggctaggagaa

SEQ ID NO: 169734 - DNA, 20 bp, Artificial Sequence
  Description of Artificial Sequence: Synthetic oligonucleotide
  Target: LAMA2; (+) strand; PAM type: NRG; PAM sequence: AAG
attctggctaggagaagagt

SEQ ID NO: 169735 - DNA, 20 bp, Artificial Sequence
  Description of Artificial Sequence: Synthetic oligonucleotide
  Target: LAMA2; (+) strand; PAM type: NRG; PAM sequence: GAG
tctggctaggagaagagtaa

SEQ ID NO: 169736 - DNA, 20 bp, Artificial Sequence
  Description of Artificial Sequence: Synthetic oligonucleotide
  Target: LAMA2; (+) strand; PAM type: NRG; PAM sequence: TAG
taggagaagagtaagagata

SEQ ID NO: 169737 - DNA, 20 bp, Artificial Sequence
  Description of Artificial Sequence: Synthetic oligonucleotide
  Target: LAMA2; (+) strand; PAM type: NRG; PAM sequence: TAG
aagagtaagagatatagccc

SEQ ID NO: 169738 - DNA, 20 bp, Artificial Sequence
  Description of Artificial Sequence: Synthetic oligonucleotide
  Target: LAMA2; (+) strand; PAM type: NRG; PAM sequence: CAG
aagagatatagccctagttc

SEQ ID NO: 169739 - DNA, 20 bp, Artificial Sequence
  Description of Artificial Sequence: Synthetic oligonucleotide
  Target: LAMA2; (+) strand; PAM type: NRG; PAM sequence: TGG
ctagttccagacttctgctc

SEQ ID NO: 169740 - DNA, 20 bp, Artificial Sequence
  Description of Artificial Sequence: Synthetic oligonucleotide
  Target: LAMA2; (+) strand; PAM type: NRG; PAM sequence: AAG
gacttctgctctggcctcca

SEQ ID NO: 169741 - DNA, 20 bp, Artificial Sequence
  Description of Artificial Sequence: Synthetic oligonucleotide
  Target: LAMA2; (+) strand; PAM type: NRG; PAM sequence: CAG
ccaaagcctctttgttcatt

SEQ ID NO: 169742 - DNA, 20 bp, Artificial Sequence
  Description of Artificial Sequence: Synthetic oligonucleotide
  Target: LAMA2; (+) strand; PAM type: NRG; PAM sequence: AAG
ctttgttcattcagcttgtg

SEQ ID NO: 169743 - DNA, 20 bp, Artificial Sequence
  Description of Artificial Sequence: Synthetic oligonucleotide
  Target: LAMA2; (+) strand; PAM type: NRG; PAM sequence: CAG
tcattcagcttgtgaagcat

SEQ ID NO: 169744 - DNA, 20 bp, Artificial Sequence
  Description of Artificial Sequence: Synthetic oligonucleotide
  Target: LAMA2; (+) strand; PAM type: NRG; PAM sequence: AGG
cattcagcttgtgaagcatc

SEQ ID NO: 169745 - DNA, 20 bp, Artificial Sequence
  Description of Artificial Sequence: Synthetic oligonucleotide
  Target: LAMA2; (+) strand; PAM type: NRG; PAM sequence: GAG
ttcagcttgtgaagcatcag

SEQ ID NO: 169746 - DNA, 20 bp, Artificial Sequence
  Description of Artificial Sequence: Synthetic oligonucleotide
  Target: LAMA2; (+) strand; PAM type: NRG; PAM sequence: AAG
tgaagcatcaggagcttgca

SEQ ID NO: 169747 - DNA, 20 bp, Artificial Sequence
  Description of Artificial Sequence: Synthetic oligonucleotide
  Target: LAMA2; (+) strand; PAM type: NRG; PAM sequence: CAG
aggagcttgcaaagcccctg

SEQ ID NO: 169748 - DNA, 20 bp, Artificial Sequence
  Description of Artificial Sequence: Synthetic oligonucleotide
  Target: LAMA2; (+) strand; PAM type: NRG; PAM sequence: AGG
ggagcttgcaaagcccctgc

SEQ ID NO: 169749 - DNA, 20 bp, Artificial Sequence
  Description of Artificial Sequence: Synthetic oligonucleotide
  Target: LAMA2; (+) strand; PAM type: NRG; PAM sequence: CAG
cccctgcaggtgacgctcta

SEQ ID NO: 169750 - DNA, 20 bp, Artificial Sequence
  Description of Artificial Sequence: Synthetic oligonucleotide
  Target: LAMA2; (+) strand; PAM type: NRG; PAM sequence: AAG
gctctacagttgtcacctgc

SEQ ID NO: 169751 - DNA, 20 bp, Artificial Sequence
  Description of Artificial Sequence: Synthetic oligonucleotide
  Target: LAMA2; (+) strand; PAM type: NRG; PAM sequence: AAG
ctacagttgtcacctgcaag

SEQ ID NO: 169752 - DNA, 20 bp, Artificial Sequence
  Description of Artificial Sequence: Synthetic oligonucleotide
  Target: LAMA2; (+) strand; PAM type: NRG; PAM sequence: CAG
ttgtcacctgcaagaagctg

SEQ ID NO: 169753 - DNA, 20 bp, Artificial Sequence
  Description of Artificial Sequence: Synthetic oligonucleotide
  Target: LAMA2; (+) strand; PAM type: NRG; PAM sequence: AGG
tgtcacctgcaagaagctgc

SEQ ID NO: 169754 - DNA, 20 bp, Artificial Sequence
  Description of Artificial Sequence: Synthetic oligonucleotide
  Target: LAMA2; (+) strand; PAM type: NRG; PAM sequence: AAG
aagctgcaggtgtcacctgc

SEQ ID NO: 169755 - DNA, 20 bp, Artificial Sequence
  Description of Artificial Sequence: Synthetic oligonucleotide
  Target: LAMA2; (+) strand; PAM type: NRG; PAM sequence: AAG
ctgcaggtgtcacctgcaag

SEQ ID NO: 169756 - DNA, 20 bp, Artificial Sequence
  Description of Artificial Sequence: Synthetic oligonucleotide
  Target: LAMA2; (+) strand; PAM type: NRG; PAM sequence: AAG
gcaagaagctgatttattaa

SEQ ID NO: 169757 - DNA, 20 bp, Artificial Sequence
  Description of Artificial Sequence: Synthetic oligonucleotide
  Target: LAMA2; (+) strand; PAM type: NRG; PAM sequence: CAG
tgatttattaaaagccctgc

SEQ ID NO: 169758 - DNA, 20 bp, Artificial Sequence
  Description of Artificial Sequence: Synthetic oligonucleotide
  Target: LAMA2; (+) strand; PAM type: NRG; PAM sequence: AGG
gatttattaaaagccctgcc

SEQ ID NO: 169759 - DNA, 20 bp, Artificial Sequence
  Description of Artificial Sequence: Synthetic oligonucleotide
  Target: LAMA2; (+) strand; PAM type: NRG; PAM sequence: GGG
atttattaaaagccctgcca

SEQ ID NO: 169760 - DNA, 20 bp, Artificial Sequence
  Description of Artificial Sequence: Synthetic oligonucleotide
  Target: LAMA2; (+) strand; PAM type: NRG; PAM sequence: CAG
tattaaaagccctgccaggg

SEQ ID NO: 169761 - DNA, 20 bp, Artificial Sequence
  Description of Artificial Sequence: Synthetic oligonucleotide
  Target: LAMA2; (+) strand; PAM type: NRG; PAM sequence: AAG
agggcagtttaatccctgtg

SEQ ID NO: 169762 - DNA, 20 bp, Artificial Sequence
  Description of Artificial Sequence: Synthetic oligonucleotide
  Target: LAMA2; (+) strand; PAM type: NRG; PAM sequence: TAG
gtgatattgtaactcacctc

SEQ ID NO: 169763 - DNA, 20 bp, Artificial Sequence
  Description of Artificial Sequence: Synthetic oligonucleotide
  Target: LAMA2; (+) strand; PAM type: NRG; PAM sequence: AAG
tcctccttctctttgtttac

SEQ ID NO: 169764 - DNA, 20 bp, Artificial Sequence
  Description of Artificial Sequence: Synthetic oligonucleotide
  Target: LAMA2; (+) strand; PAM type: NRG; PAM sequence: CAG
ttctctttgtttacaagcac

SEQ ID NO: 169765 - DNA, 20 bp, Artificial Sequence
  Description of Artificial Sequence: Synthetic oligonucleotide
  Target: LAMA2; (+) strand; PAM type: NRG; PAM sequence: TGG
tgtttacaagcaccagttaa

SEQ ID NO: 169766 - DNA, 20 bp, Artificial Sequence
  Description of Artificial Sequence: Synthetic oligonucleotide
  Target: LAMA2; (+) strand; PAM type: NRG; PAM sequence: AAG
ttaatggttttctctccatt

SEQ ID NO: 169767 - DNA, 20 bp, Artificial Sequence
  Description of Artificial Sequence: Synthetic oligonucleotide
  Target: LAMA2; (+) strand; PAM type: NRG; PAM sequence: CAG
atggttttctctccattaag

SEQ ID NO: 169768 - DNA, 20 bp, Artificial Sequence
  Description of Artificial Sequence: Synthetic oligonucleotide
  Target: LAMA2; (+) strand; PAM type: NRG; PAM sequence: CAG
tttctctccattaagcagct

SEQ ID NO: 169769 - DNA, 20 bp, Artificial Sequence
  Description of Artificial Sequence: Synthetic oligonucleotide
  Target: LAMA2; (+) strand; PAM type: NRG; PAM sequence: AGG
ttctctccattaagcagctc

SEQ ID NO: 169770 - DNA, 20 bp, Artificial Sequence
  Description of Artificial Sequence: Synthetic oligonucleotide
  Target: LAMA2; (+) strand; PAM type: NRG; PAM sequence: GGG
tctctccattaagcagctca

SEQ ID NO: 169771 - DNA, 20 bp, Artificial Sequence
  Description of Artificial Sequence: Synthetic oligonucleotide
  Target: LAMA2; (+) strand; PAM type: NRG; PAM sequence: GGG
ctctccattaagcagctcag

SEQ ID NO: 169772 - DNA, 20 bp, Artificial Sequence
  Description of Artificial Sequence: Synthetic oligonucleotide
  Target: LAMA2; (+) strand; PAM type: NRG; PAM sequence: TAG
cagctcaggggactgctgtt

SEQ ID NO: 169773 - DNA, 20 bp, Artificial Sequence
  Description of Artificial Sequence: Synthetic oligonucleotide
  Target: LAMA2; (+) strand; PAM type: NRG; PAM sequence: GAG
gctcaggggactgctgttta

SEQ ID NO: 169774 - DNA, 20 bp, Artificial Sequence
  Description of Artificial Sequence: Synthetic oligonucleotide
  Target: LAMA2; (+) strand; PAM type: NRG; PAM sequence: AAG
gacctaattgaattcttgcc

SEQ ID NO: 169775 - DNA, 20 bp, Artificial Sequence
  Description of Artificial Sequence: Synthetic oligonucleotide
  Target: LAMA2; (+) strand; PAM type: NRG; PAM sequence: TGG
aattgaattcttgccaagtt

SEQ ID NO: 169776 - DNA, 20 bp, Artificial Sequence
  Description of Artificial Sequence: Synthetic oligonucleotide
  Target: LAMA2; (+) strand; PAM type: NRG; PAM sequence: GGG
attgaattcttgccaagttt

SEQ ID NO: 169777 - DNA, 20 bp, Artificial Sequence
  Description of Artificial Sequence: Synthetic oligonucleotide
  Target: LAMA2; (+) strand; PAM type: NRG; PAM sequence: CAG
tgccaagtttgggcatgatc

SEQ ID NO: 169778 - DNA, 20 bp, Artificial Sequence
  Description of Artificial Sequence: Synthetic oligonucleotide
  Target: LAMA2; (+) strand; PAM type: NRG; PAM sequence: GAG
ccaagtttgggcatgatcca

SEQ ID NO: 169779 - DNA, 20 bp, Artificial Sequence
  Description of Artificial Sequence: Synthetic oligonucleotide
  Target: LAMA2; (+) strand; PAM type: NRG; PAM sequence: CGG
tccagagctgctccaattct

SEQ ID NO: 169780 - DNA, 20 bp, Artificial Sequence
  Description of Artificial Sequence: Synthetic oligonucleotide
  Target: LAMA2; (+) strand; PAM type: NRG; PAM sequence: TAG
cccctattctaacatgtata

SEQ ID NO: 169781 - DNA, 20 bp, Artificial Sequence
  Description of Artificial Sequence: Synthetic oligonucleotide
  Target: LAMA2; (+) strand; PAM type: NRG; PAM sequence: CAG
agcattgatacctctatctg

SEQ ID NO: 169782 - DNA, 20 bp, Artificial Sequence
  Description of Artificial Sequence: Synthetic oligonucleotide
  Target: LAMA2; (+) strand; PAM type: NRG; PAM sequence: AAG
tacctctatctgcagaatgt

SEQ ID NO: 169783 - DNA, 20 bp, Artificial Sequence
  Description of Artificial Sequence: Synthetic oligonucleotide
  Target: LAMA2; (+) strand; PAM type: NRG; PAM sequence: GAG
gaaattgtaactgtatacat

SEQ ID NO: 169784 - DNA, 20 bp, Artificial Sequence
  Description of Artificial Sequence: Synthetic oligonucleotide
  Target: LAMA2; (+) strand; PAM type: NRG; PAM sequence: GAG
aattgtaactgtatacatga

SEQ ID NO: 169785 - DNA, 20 bp, Artificial Sequence
  Description of Artificial Sequence: Synthetic oligonucleotide
  Target: LAMA2; (+) strand; PAM type: NRG; PAM sequence: CAG
atgagagtatattataaatg

SEQ ID NO: 169786 - DNA, 20 bp, Artificial Sequence
  Description of Artificial Sequence: Synthetic oligonucleotide
  Target: LAMA2; (+) strand; PAM type: NRG; PAM sequence: TAG
agagtatattataaatgcag

SEQ ID NO: 169787 - DNA, 20 bp, Artificial Sequence
  Description of Artificial Sequence: Synthetic oligonucleotide
  Target: LAMA2; (+) strand; PAM type: NRG; PAM sequence: TGG
atgcagtagttcctgctcct

SEQ ID NO: 169788 - DNA, 20 bp, Artificial Sequence
  Description of Artificial Sequence: Synthetic oligonucleotide
  Target: LAMA2; (+) strand; PAM type: NRG; PAM sequence: CAG
agttcctgctccttggcgtg

SEQ ID NO: 169789 - DNA, 20 bp, Artificial Sequence
  Description of Artificial Sequence: Synthetic oligonucleotide
  Target: LAMA2; (+) strand; PAM type: NRG; PAM sequence: AAG
atgttttttaaatctgctaa

SEQ ID NO: 169790 - DNA, 20 bp, Artificial Sequence
  Description of Artificial Sequence: Synthetic oligonucleotide
  Target: LAMA2; (+) strand; PAM type: NRG; PAM sequence: TGG
gattcaatatatgttaattt

SEQ ID NO: 169791 - DNA, 20 bp, Artificial Sequence
  Description of Artificial Sequence: Synthetic oligonucleotide
  Target: LAMA2; (+) strand; PAM type: NRG; PAM sequence: GAG
gaaattatacgactatttat

SEQ ID NO: 169792 - DNA, 20 bp, Artificial Sequence
  Description of Artificial Sequence: Synthetic oligonucleotide
  Target: LAMA2; (+) strand; PAM type: NRG; PAM sequence: AAG
atgagatctattccataatg

SEQ ID NO: 169793 - DNA, 20 bp, Artificial Sequence
  Description of Artificial Sequence: Synthetic oligonucleotide
  Target: LAMA2; (+) strand; PAM type: NRG; PAM sequence: GAG
gagatctattccataatgaa

SEQ ID NO: 169794 - DNA, 20 bp, Artificial Sequence
  Description of Artificial Sequence: Synthetic oligonucleotide
  Target: LAMA2; (+) strand; PAM type: NRG; PAM sequence: TGG
accaattctaccacctatcc

SEQ ID NO: 169795 - DNA, 20 bp, Artificial Sequence
  Description of Artificial Sequence: Synthetic oligonucleotide
  Target: LAMA2; (+) strand; PAM type: NRG; PAM sequence: TAG
cccctaccaccaaatttgaa

SEQ ID NO: 169796 - DNA, 20 bp, Artificial Sequence
  Description of Artificial Sequence: Synthetic oligonucleotide
  Target: LAMA2; (+) strand; PAM type: NRG; PAM sequence: TGG
tttgaatagcacctctttga

SEQ ID NO: 169797 - DNA, 20 bp, Artificial Sequence
  Description of Artificial Sequence: Synthetic oligonucleotide
  Target: LAMA2; (+) strand; PAM type: NRG; PAM sequence: TGG
tttgatggccaaaaatatta

SEQ ID NO: 169798 - DNA, 20 bp, Artificial Sequence
  Description of Artificial Sequence: Synthetic oligonucleotide
  Target: LAMA2; (+) strand; PAM type: NRG; PAM sequence: GAG
atggccaaaaatattatggt

SEQ ID NO: 169799 - DNA, 20 bp, Artificial Sequence
  Description of Artificial Sequence: Synthetic oligonucleotide
  Target: LAMA2; (+) strand; PAM type: NRG; PAM sequence: TAG
aaatattatggtgagtgtat

SEQ ID NO: 169800 - DNA, 20 bp, Artificial Sequence
  Description of Artificial Sequence: Synthetic oligonucleotide
  Target: LAMA2; (+) strand; PAM type: NRG; PAM sequence: AAG
tccattttcgtattgctata

SEQ ID NO: 169801 - DNA, 20 bp, Artificial Sequence
  Description of Artificial Sequence: Synthetic oligonucleotide
  Target: LAMA2; (+) strand; PAM type: NRG; PAM sequence: AAG
ttgctataaagaaatgcctg

SEQ ID NO: 169802 - DNA, 20 bp, Artificial Sequence
  Description of Artificial Sequence: Synthetic oligonucleotide
  Target: LAMA2; (+) strand; PAM type: NRG; PAM sequence: CGG
ataaagaaatgcctgaagct

SEQ ID NO: 169803 - DNA, 20 bp, Artificial Sequence
  Description of Artificial Sequence: Synthetic oligonucleotide
  Target: LAMA2; (+) strand; PAM type: NRG; PAM sequence: AAG
ctgaagctcggcaatttgta

SEQ ID NO: 169804 - DNA, 20 bp, Artificial Sequence
  Description of Artificial Sequence: Synthetic oligonucleotide
  Target: LAMA2; (+) strand; PAM type: NRG; PAM sequence: AAG
gctcggcaatttgtaaagaa

SEQ ID NO: 169805 - DNA, 20 bp, Artificial Sequence
  Description of Artificial Sequence: Synthetic oligonucleotide
  Target: LAMA2; (+) strand; PAM type: NRG; PAM sequence: GAG
tcggcaatttgtaaagaaaa

SEQ ID NO: 169806 - DNA, 20 bp, Artificial Sequence
  Description of Artificial Sequence: Synthetic oligonucleotide
  Target: LAMA2; (+) strand; PAM type: NRG; PAM sequence: AGG
cggcaatttgtaaagaaaag

SEQ ID NO: 169807 - DNA, 20 bp, Artificial Sequence
  Description of Artificial Sequence: Synthetic oligonucleotide
  Target: LAMA2; (+) strand; PAM type: NRG; PAM sequence: TGG
gtaaagaaaagaggtataat

SEQ ID NO: 169808 - DNA, 20 bp, Artificial Sequence
  Description of Artificial Sequence: Synthetic oligonucleotide
  Target: LAMA2; (+) strand; PAM type: NRG; PAM sequence: TGG
aaagaggtataattggctca

SEQ ID NO: 169809 - DNA, 20 bp, Artificial Sequence
  Description of Artificial Sequence: Synthetic oligonucleotide
  Target: LAMA2; (+) strand; PAM type: NRG; PAM sequence: CAG
taattggctcatggttccat

SEQ ID NO: 169810 - DNA, 20 bp, Artificial Sequence
  Description of Artificial Sequence: Synthetic oligonucleotide
  Target: LAMA2; (+) strand; PAM type: NRG; PAM sequence: AGG
aattggctcatggttccatc

SEQ ID NO: 169811 - DNA, 20 bp, Artificial Sequence
  Description of Artificial Sequence: Synthetic oligonucleotide
  Target: LAMA2; (+) strand; PAM type: NRG; PAM sequence: CAG
catggttccatcaggctgta

SEQ ID NO: 169812 - DNA, 20 bp, Artificial Sequence
  Description of Artificial Sequence: Synthetic oligonucleotide
  Target: LAMA2; (+) strand; PAM type: NRG; PAM sequence: AGG
atggttccatcaggctgtac

SEQ ID NO: 169813 - DNA, 20 bp, Artificial Sequence
  Description of Artificial Sequence: Synthetic oligonucleotide
  Target: LAMA2; (+) strand; PAM type: NRG; PAM sequence: AAG
gttccatcaggctgtacagg

SEQ ID NO: 169814 - DNA, 20 bp, Artificial Sequence
  Description of Artificial Sequence: Synthetic oligonucleotide
  Target: LAMA2; (+) strand; PAM type: NRG; PAM sequence: TGG
atcaggctgtacaggaagca

SEQ ID NO: 169815 - DNA, 20 bp, Artificial Sequence
  Description of Artificial Sequence: Synthetic oligonucleotide
  Target: LAMA2; (+) strand; PAM type: NRG; PAM sequence: TGG
ggctgtacaggaagcatggc

SEQ ID NO: 169816 - DNA, 20 bp, Artificial Sequence
  Description of Artificial Sequence: Synthetic oligonucleotide
  Target: LAMA2; (+) strand; PAM type: NRG; PAM sequence: GGG
gctgtacaggaagcatggct

SEQ ID NO: 169817 - DNA, 20 bp, Artificial Sequence
  Description of Artificial Sequence: Synthetic oligonucleotide
  Target: LAMA2; (+) strand; PAM type: NRG; PAM sequence: GGG
ctgtacaggaagcatggctg

SEQ ID NO: 169818 - DNA, 20 bp, Artificial Sequence
  Description of Artificial Sequence: Synthetic oligonucleotide
  Target: LAMA2; (+) strand; PAM type: NRG; PAM sequence: TGG
tacaggaagcatggctgggg

SEQ ID NO: 169819 - DNA, 20 bp, Artificial Sequence
  Description of Artificial Sequence: Synthetic oligonucleotide
  Target: LAMA2; (+) strand; PAM type: NRG; PAM sequence: CAG
aagcatggctggggtggcct

SEQ ID NO: 169820 - DNA, 20 bp, Artificial Sequence
  Description of Artificial Sequence: Synthetic oligonucleotide
  Target: LAMA2; (+) strand; PAM type: NRG; PAM sequence: AGG
agcatggctggggtggcctc

SEQ ID NO: 169821 - DNA, 20 bp, Artificial Sequence
  Description of Artificial Sequence: Synthetic oligonucleotide
  Target: LAMA2; (+) strand; PAM type: NRG; PAM sequence: GGG
gcatggctggggtggcctca

SEQ ID NO: 169822 - DNA, 20 bp, Artificial Sequence
  Description of Artificial Sequence: Synthetic oligonucleotide
  Target: LAMA2; (+) strand; PAM type: NRG; PAM sequence: TGG
cctcagggaactttcactca

SEQ ID NO: 169823 - DNA, 20 bp, Artificial Sequence
  Description of Artificial Sequence: Synthetic oligonucleotide
  Target: LAMA2; (+) strand; PAM type: NRG; PAM sequence: CAG
cagggaactttcactcatgg

SEQ ID NO: 169824 - DNA, 20 bp, Artificial Sequence
  Description of Artificial Sequence: Synthetic oligonucleotide
  Target: LAMA2; (+) strand; PAM type: NRG; PAM sequence: AAG
ggaactttcactcatggcag

SEQ ID NO: 169825 - DNA, 20 bp, Artificial Sequence
  Description of Artificial Sequence: Synthetic oligonucleotide
  Target: LAMA2; (+) strand; PAM type: NRG; PAM sequence: AGG
gaactttcactcatggcaga

SEQ ID NO: 169826 - DNA, 20 bp, Artificial Sequence
  Description of Artificial Sequence: Synthetic oligonucleotide
  Target: LAMA2; (+) strand; PAM type: NRG; PAM sequence: AAG
ttcactcatggcagaaggca

SEQ ID NO: 169827 - DNA, 20 bp, Artificial Sequence
  Description of Artificial Sequence: Synthetic oligonucleotide
  Target: LAMA2; (+) strand; PAM type: NRG; PAM sequence: TGG
ctcatggcagaaggcaaagc

SEQ ID NO: 169828 - DNA, 20 bp, Artificial Sequence
  Description of Artificial Sequence: Synthetic oligonucleotide
  Target: LAMA2; (+) strand; PAM type: NRG; PAM sequence: GAG
catggcagaaggcaaagctg

SEQ ID NO: 169829 - DNA, 20 bp, Artificial Sequence
  Description of Artificial Sequence: Synthetic oligonucleotide
  Target: LAMA2; (+) strand; PAM type: NRG; PAM sequence: CAG
ggcagaaggcaaagctggag

SEQ ID NO: 169830 - DNA, 20 bp, Artificial Sequence
  Description of Artificial Sequence: Synthetic oligonucleotide
  Target: LAMA2; (+) strand; PAM type: NRG; PAM sequence: AGG
gcagaaggcaaagctggagc

SEQ ID NO: 169831 - DNA, 20 bp, Artificial Sequence
  Description of Artificial Sequence: Synthetic oligonucleotide
  Target: LAMA2; (+) strand; PAM type: NRG; PAM sequence: CAG
ctggagcaggcatcttcaca

SEQ ID NO: 169832 - DNA, 20 bp, Artificial Sequence
  Description of Artificial Sequence: Synthetic oligonucleotide
  Target: LAMA2; (+) strand; PAM type: NRG; PAM sequence: AGG
tggagcaggcatcttcacac

SEQ ID NO: 169833 - DNA, 20 bp, Artificial Sequence
  Description of Artificial Sequence: Synthetic oligonucleotide
  Target: LAMA2; (+) strand; PAM type: NRG; PAM sequence: CAG
agcaggcatcttcacacagg

SEQ ID NO: 169834 - DNA, 20 bp, Artificial Sequence
  Description of Artificial Sequence: Synthetic oligonucleotide
  Target: LAMA2; (+) strand; PAM type: NRG; PAM sequence: GAG
caggcatcttcacacaggca

SEQ ID NO: 169835 - DNA, 20 bp, Artificial Sequence
  Description of Artificial Sequence: Synthetic oligonucleotide
  Target: LAMA2; (+) strand; PAM type: NRG; PAM sequence: CAG
gcatcttcacacaggcagag

SEQ ID NO: 169836 - DNA, 20 bp, Artificial Sequence
  Description of Artificial Sequence: Synthetic oligonucleotide
  Target: LAMA2; (+) strand; PAM type: NRG; PAM sequence: AGG
catcttcacacaggcagagc

SEQ ID NO: 169837 - DNA, 20 bp, Artificial Sequence
  Description of Artificial Sequence: Synthetic oligonucleotide
  Target: LAMA2; (+) strand; PAM type: NRG; PAM sequence: GAG
tcttcacacaggcagagcag

SEQ ID NO: 169838 - DNA, 20 bp, Artificial Sequence
  Description of Artificial Sequence: Synthetic oligonucleotide
  Target: LAMA2; (+) strand; PAM type: NRG; PAM sequence: AGG
cttcacacaggcagagcagg

SEQ ID NO: 169839 - DNA, 20 bp, Artificial Sequence
  Description of Artificial Sequence: Synthetic oligonucleotide
  Target: LAMA2; (+) strand; PAM type: NRG; PAM sequence: AAG
cacacaggcagagcaggagg

SEQ ID NO: 169840 - DNA, 20 bp, Artificial Sequence
  Description of Artificial Sequence: Synthetic oligonucleotide
  Target: LAMA2; (+) strand; PAM type: NRG; PAM sequence: TGG
acaggcagagcaggaggaag

SEQ ID NO: 169841 - DNA, 20 bp, Artificial Sequence
  Description of Artificial Sequence: Synthetic oligonucleotide
  Target: LAMA2; (+) strand; PAM type: NRG; PAM sequence: GGG
caggcagagcaggaggaagt

SEQ ID NO: 169842 - DNA, 20 bp, Artificial Sequence
  Description of Artificial Sequence: Synthetic oligonucleotide
  Target: LAMA2; (+) strand; PAM type: NRG; PAM sequence: GGG
aggcagagcaggaggaagtg

SEQ ID NO: 169843 - DNA, 20 bp, Artificial Sequence
  Description of Artificial Sequence: Synthetic oligonucleotide
  Target: LAMA2; (+) strand; PAM type: NRG; PAM sequence: GGG
ggcagagcaggaggaagtgg

SEQ ID NO: 169844 - DNA, 20 bp, Artificial Sequence
  Description of Artificial Sequence: Synthetic oligonucleotide
  Target: LAMA2; (+) strand; PAM type: NRG; PAM sequence: TGG
gagcaggaggaagtgggggc

SEQ ID NO: 169845 - DNA, 20 bp, Artificial Sequence
  Description of Artificial Sequence: Synthetic oligonucleotide
  Target: LAMA2; (+) strand; PAM type: NRG; PAM sequence: GAG
gcaggaggaagtgggggctg

SEQ ID NO: 169846 - DNA, 20 bp, Artificial Sequence
  Description of Artificial Sequence: Synthetic oligonucleotide
  Target: LAMA2; (+) strand; PAM type: NRG; PAM sequence: AGG
caggaggaagtgggggctgg

SEQ ID NO: 169847 - DNA, 20 bp, Artificial Sequence
  Description of Artificial Sequence: Synthetic oligonucleotide
  Target: LAMA2; (+) strand; PAM type: NRG; PAM sequence: TGG
gaggaagtgggggctggagg

SEQ ID NO: 169848 - DNA, 20 bp, Artificial Sequence
  Description of Artificial Sequence: Synthetic oligonucleotide
  Target: LAMA2; (+) strand; PAM type: NRG; PAM sequence: CAG
ggcacacacttttaaataac

SEQ ID NO: 169849 - DNA, 20 bp, Artificial Sequence
  Description of Artificial Sequence: Synthetic oligonucleotide
  Target: LAMA2; (+) strand; PAM type: NRG; PAM sequence: AGG
gcacacacttttaaataacc

SEQ ID NO: 169850 - DNA, 20 bp, Artificial Sequence
  Description of Artificial Sequence: Synthetic oligonucleotide
  Target: LAMA2; (+) strand; PAM type: NRG; PAM sequence: GAG
tttaaataaccaggtcttat

SEQ ID NO: 169851 - DNA, 20 bp, Artificial Sequence
  Description of Artificial Sequence: Synthetic oligonucleotide
  Target: LAMA2; (+) strand; PAM type: NRG; PAM sequence: GAG
tcttatgagaactctgtcat

SEQ ID NO: 169852 - DNA, 20 bp, Artificial Sequence
  Description of Artificial Sequence: Synthetic oligonucleotide
  Target: LAMA2; (+) strand; PAM type: NRG; PAM sequence: TAG
ctctgtcatgagaacatcac

SEQ ID NO: 169853 - DNA, 20 bp, Artificial Sequence
  Description of Artificial Sequence: Synthetic oligonucleotide
  Target: LAMA2; (+) strand; PAM type: NRG; PAM sequence: AGG
tctgtcatgagaacatcact

SEQ ID NO: 169854 - DNA, 20 bp, Artificial Sequence
  Description of Artificial Sequence: Synthetic oligonucleotide
  Target: LAMA2; (+) strand; PAM type: NRG; PAM sequence: GGG
ctgtcatgagaacatcacta

SEQ ID NO: 169855 - DNA, 20 bp, Artificial Sequence
  Description of Artificial Sequence: Synthetic oligonucleotide
  Target: LAMA2; (+) strand; PAM type: NRG; PAM sequence: CGG
tcatgagaacatcactaggg

SEQ ID NO: 169856 - DNA, 20 bp, Artificial Sequence
  Description of Artificial Sequence: Synthetic oligonucleotide
  Target: LAMA2; (+) strand; PAM type: NRG; PAM sequence: TGG
tgagaacatcactagggcgg

SEQ ID NO: 169857 - DNA, 20 bp, Artificial Sequence
  Description of Artificial Sequence: Synthetic oligonucleotide
  Target: LAMA2; (+) strand; PAM type: NRG; PAM sequence: AAG
atcactagggcggtggtgct

SEQ ID NO: 169858 - DNA, 20 bp, Artificial Sequence
  Description of Artificial Sequence: Synthetic oligonucleotide
  Target: LAMA2; (+) strand; PAM type: NRG; PAM sequence: CAG
ctaagccattaaaaccactc

SEQ ID NO: 169859 - DNA, 20 bp, Artificial Sequence
  Description of Artificial Sequence: Synthetic oligonucleotide
  Target: LAMA2; (+) strand; PAM type: NRG; PAM sequence: GAG
agtgattcaatacctcccac

SEQ ID NO: 169860 - DNA, 20 bp, Artificial Sequence
  Description of Artificial Sequence: Synthetic oligonucleotide
  Target: LAMA2; (+) strand; PAM type: NRG; PAM sequence: AGG
gtgattcaatacctcccacg

SEQ ID NO: 169861 - DNA, 20 bp, Artificial Sequence
  Description of Artificial Sequence: Synthetic oligonucleotide
  Target: LAMA2; (+) strand; PAM type: NRG; PAM sequence: CAG
ctcccacgaggccccatatc

SEQ ID NO: 169862 - DNA, 20 bp, Artificial Sequence
  Description of Artificial Sequence: Synthetic oligonucleotide
  Target: LAMA2; (+) strand; PAM type: NRG; PAM sequence: TGG
cgaggccccatatccagtat

SEQ ID NO: 169863 - DNA, 20 bp, Artificial Sequence
  Description of Artificial Sequence: Synthetic oligonucleotide
  Target: LAMA2; (+) strand; PAM type: NRG; PAM sequence: GGG
gaggccccatatccagtatt

SEQ ID NO: 169864 - DNA, 20 bp, Artificial Sequence
  Description of Artificial Sequence: Synthetic oligonucleotide
  Target: LAMA2; (+) strand; PAM type: NRG; PAM sequence: GGG
aggccccatatccagtattg

SEQ ID NO: 169865 - DNA, 20 bp, Artificial Sequence
  Description of Artificial Sequence: Synthetic oligonucleotide
  Target: LAMA2; (+) strand; PAM type: NRG; PAM sequence: GAG
tggggatgacatttcaatat

SEQ ID NO: 169866 - DNA, 20 bp, Artificial Sequence
  Description of Artificial Sequence: Synthetic oligonucleotide
  Target: LAMA2; (+) strand; PAM type: NRG; PAM sequence: TGG
tgacatttcaatatgagatt

SEQ ID NO: 169867 - DNA, 20 bp, Artificial Sequence
  Description of Artificial Sequence: Synthetic oligonucleotide
  Target: LAMA2; (+) strand; PAM type: NRG; PAM sequence: TGG
atttcaatatgagatttgga

SEQ ID NO: 169868 - DNA, 20 bp, Artificial Sequence
  Description of Artificial Sequence: Synthetic oligonucleotide
  Target: LAMA2; (+) strand; PAM type: NRG; PAM sequence: GGG
tttcaatatgagatttggat

SEQ ID NO: 169869 - DNA, 20 bp, Artificial Sequence
  Description of Artificial Sequence: Synthetic oligonucleotide
  Target: LAMA2; (+) strand; PAM type: NRG; PAM sequence: GGG
ttcaatatgagatttggatg

SEQ ID NO: 169870 - DNA, 20 bp, Artificial Sequence
  Description of Artificial Sequence: Synthetic oligonucleotide
  Target: LAMA2; (+) strand; PAM type: NRG; PAM sequence: CAG
atgagatttggatggggaca

SEQ ID NO: 169871 - DNA, 20 bp, Artificial Sequence
  Description of Artificial Sequence: Synthetic oligonucleotide
  Target: LAMA2; (+) strand; PAM type: NRG; PAM sequence: TGG
acacagatccaaaccatatc

SEQ ID NO: 169872 - DNA, 20 bp, Artificial Sequence
  Description of Artificial Sequence: Synthetic oligonucleotide
  Target: LAMA2; (+) strand; PAM type: NRG; PAM sequence: TAG
cagatccaaaccatatctgg

SEQ ID NO: 169873 - DNA, 20 bp, Artificial Sequence
  Description of Artificial Sequence: Synthetic oligonucleotide
  Target: LAMA2; (+) strand; PAM type: NRG; PAM sequence: TAG
aaccatatctggtagaatat

SEQ ID NO: 169874 - DNA, 20 bp, Artificial Sequence
  Description of Artificial Sequence: Synthetic oligonucleotide
  Target: LAMA2; (+) strand; PAM type: NRG; PAM sequence: TGG
tggtagaatattagcattct

SEQ ID NO: 169875 - DNA, 20 bp, Artificial Sequence
  Description of Artificial Sequence: Synthetic oligonucleotide
  Target: LAMA2; (+) strand; PAM type: NRG; PAM sequence: AAG
ttagcattcttggctactta

SEQ ID NO: 169876 - DNA, 20 bp, Artificial Sequence
  Description of Artificial Sequence: Synthetic oligonucleotide
  Target: LAMA2; (+) strand; PAM type: NRG; PAM sequence: TAG
tcttggctacttaaagaata

SEQ ID NO: 169877 - DNA, 20 bp, Artificial Sequence
  Description of Artificial Sequence: Synthetic oligonucleotide
  Target: LAMA2; (+) strand; PAM type: NRG; PAM sequence: TAG
cttaaagaatatagtttttc

SEQ ID NO: 169878 - DNA, 20 bp, Artificial Sequence
  Description of Artificial Sequence: Synthetic oligonucleotide
  Target: LAMA2; (+) strand; PAM type: NRG; PAM sequence: TAG
aatatagtttttctagcctt

SEQ ID NO: 169879 - DNA, 20 bp, Artificial Sequence
  Description of Artificial Sequence: Synthetic oligonucleotide
  Target: LAMA2; (+) strand; PAM type: NRG; PAM sequence: AAG
tttagcaattatttatctat

SEQ ID NO: 169880 - DNA, 20 bp, Artificial Sequence
  Description of Artificial Sequence: Synthetic oligonucleotide
  Target: LAMA2; (+) strand; PAM type: NRG; PAM sequence: AAG
ttatttatctataagactga

SEQ ID NO: 169881 - DNA, 20 bp, Artificial Sequence
  Description of Artificial Sequence: Synthetic oligonucleotide
  Target: LAMA2; (+) strand; PAM type: NRG; PAM sequence: GAG
atttatctataagactgaaa

SEQ ID NO: 169882 - DNA, 20 bp, Artificial Sequence
  Description of Artificial Sequence: Synthetic oligonucleotide
  Target: LAMA2; (+) strand; PAM type: NRG; PAM sequence: AGG
tttatctataagactgaaag

SEQ ID NO: 169883 - DNA, 20 bp, Artificial Sequence
  Description of Artificial Sequence: Synthetic oligonucleotide
  Target: LAMA2; (+) strand; PAM type: NRG; PAM sequence: AAG
ctgaaagaggttaatcatca

SEQ ID NO: 169884 - DNA, 20 bp, Artificial Sequence
  Description of Artificial Sequence: Synthetic oligonucleotide
  Target: LAMA2; (+) strand; PAM type: NRG; PAM sequence: TAG
aaagaggttaatcatcaaag

SEQ ID NO: 169885 - DNA, 20 bp, Artificial Sequence
  Description of Artificial Sequence: Synthetic oligonucleotide
  Target: LAMA2; (+) strand; PAM type: NRG; PAM sequence: AGG
aagaggttaatcatcaaagt

SEQ ID NO: 169886 - DNA, 20 bp, Artificial Sequence
  Description of Artificial Sequence: Synthetic oligonucleotide
  Target: LAMA2; (+) strand; PAM type: NRG; PAM sequence: GGG
agaggttaatcatcaaagta

SEQ ID NO: 169887 - DNA, 20 bp, Artificial Sequence
  Description of Artificial Sequence: Synthetic oligonucleotide
  Target: LAMA2; (+) strand; PAM type: NRG; PAM sequence: GAG
tcatcaaagtagggatttgt

SEQ ID NO: 169888 - DNA, 20 bp, Artificial Sequence
  Description of Artificial Sequence: Synthetic oligonucleotide
  Target: LAMA2; (+) strand; PAM type: NRG; PAM sequence: TGG
tgtgagactgcatctaatca

SEQ ID NO: 169889 - DNA, 20 bp, Artificial Sequence
  Description of Artificial Sequence: Synthetic oligonucleotide
  Target: LAMA2; (+) strand; PAM type: NRG; PAM sequence: GGG
gtgagactgcatctaatcat

SEQ ID NO: 169890 - DNA, 20 bp, Artificial Sequence
  Description of Artificial Sequence: Synthetic oligonucleotide
  Target: LAMA2; (+) strand; PAM type: NRG; PAM sequence: TGG
agactgcatctaatcatggg

SEQ ID NO: 169891 - DNA, 20 bp, Artificial Sequence
  Description of Artificial Sequence: Synthetic oligonucleotide
  Target: LAMA2; (+) strand; PAM type: NRG; PAM sequence: TAG
catctaatcatgggtggtaa

SEQ ID NO: 169892 - DNA, 20 bp, Artificial Sequence
  Description of Artificial Sequence: Synthetic oligonucleotide
  Target: LAMA2; (+) strand; PAM type: NRG; PAM sequence: AAG
tcatgggtggtaatagactg

SEQ ID NO: 169893 - DNA, 20 bp, Artificial Sequence
  Description of Artificial Sequence: Synthetic oligonucleotide
  Target: LAMA2; (+) strand; PAM type: NRG; PAM sequence: AGG
catgggtggtaatagactga

SEQ ID NO: 169894 - DNA, 20 bp, Artificial Sequence
  Description of Artificial Sequence: Synthetic oligonucleotide
  Target: LAMA2; (+) strand; PAM type: NRG; PAM sequence: GGG
atgggtggtaatagactgaa

SEQ ID NO: 169895 - DNA, 20 bp, Artificial Sequence
  Description of Artificial Sequence: Synthetic oligonucleotide
  Target: LAMA2; (+) strand; PAM type: NRG; PAM sequence: AAG
ggtaatagactgaagggata

SEQ ID NO: 169896 - DNA, 20 bp, Artificial Sequence
  Description of Artificial Sequence: Synthetic oligonucleotide
  Target: LAMA2; (+) strand; PAM type: NRG; PAM sequence: GAG
taatagactgaagggataaa

SEQ ID NO: 169897 - DNA, 20 bp, Artificial Sequence
  Description of Artificial Sequence: Synthetic oligonucleotide
  Target: LAMA2; (+) strand; PAM type: NRG; PAM sequence: AGG
aatagactgaagggataaag

SEQ ID NO: 169898 - DNA, 20 bp, Artificial Sequence
  Description of Artificial Sequence: Synthetic oligonucleotide
  Target: LAMA2; (+) strand; PAM type: NRG; PAM sequence: CAG
actgaagggataaagaggaa

SEQ ID NO: 169899 - DNA, 20 bp, Artificial Sequence
  Description of Artificial Sequence: Synthetic oligonucleotide
  Target: LAMA2; (+) strand; PAM type: NRG; PAM sequence: TGG
aagggataaagaggaacagt

SEQ ID NO: 169900 - DNA, 20 bp, Artificial Sequence
  Description of Artificial Sequence: Synthetic oligonucleotide
  Target: LAMA2; (+) strand; PAM type: NRG; PAM sequence: AAG
ggaacagttggcaaataaat

SEQ ID NO: 169901 - DNA, 20 bp, Artificial Sequence
  Description of Artificial Sequence: Synthetic oligonucleotide
  Target: LAMA2; (+) strand; PAM type: NRG; PAM sequence: AAG
aagtcaataaatattatcat

SEQ ID NO: 169902 - DNA, 20 bp, Artificial Sequence
  Description of Artificial Sequence: Synthetic oligonucleotide
  Target: LAMA2; (+) strand; PAM type: NRG; PAM sequence: TAG
attatcataagaaaacacta

SEQ ID NO: 169903 - DNA, 20 bp, Artificial Sequence
  Description of Artificial Sequence: Synthetic oligonucleotide
  Target: LAMA2; (+) strand; PAM type: NRG; PAM sequence: AAG
tcataagaaaacactataga

SEQ ID NO: 169904 - DNA, 20 bp, Artificial Sequence
  Description of Artificial Sequence: Synthetic oligonucleotide
  Target: LAMA2; (+) strand; PAM type: NRG; PAM sequence: AAG
agaaaacactatagaaagaa

SEQ ID NO: 169905 - DNA, 20 bp, Artificial Sequence
  Description of Artificial Sequence: Synthetic oligonucleotide
  Target: LAMA2; (+) strand; PAM type: NRG; PAM sequence: TGG
tgactttttattttattttt

SEQ ID NO: 169906 - DNA, 20 bp, Artificial Sequence
  Description of Artificial Sequence: Synthetic oligonucleotide
  Target: LAMA2; (+) strand; PAM type: NRG; PAM sequence: GGG
gactttttattttatttttt

SEQ ID NO: 169907 - DNA, 20 bp, Artificial Sequence
  Description of Artificial Sequence: Synthetic oligonucleotide
  Target: LAMA2; (+) strand; PAM type: NRG; PAM sequence: GGG
actttttattttattttttg

SEQ ID NO: 169908 - DNA, 20 bp, Artificial Sequence
  Description of Artificial Sequence: Synthetic oligonucleotide
  Target: LAMA2; (+) strand; PAM type: NRG; PAM sequence: GGG
ctttttattttattttttgg

SEQ ID NO: 169909 - DNA, 20 bp, Artificial Sequence
  Description of Artificial Sequence: Synthetic oligonucleotide
  Target: LAMA2; (+) strand; PAM type: NRG; PAM sequence: GGG
tttttattttattttttggg

SEQ ID NO: 169910 - DNA, 20 bp, Artificial Sequence
  Description of Artificial Sequence: Synthetic oligonucleotide
  Target: LAMA2; (+) strand; PAM type: NRG; PAM sequence: TGG
ttattttattttttgggggg

SEQ ID NO: 169911 - DNA, 20 bp, Artificial Sequence
  Description of Artificial Sequence: Synthetic oligonucleotide
  Target: LAMA2; (+) strand; PAM type: NRG; PAM sequence: GAG
attttattttttggggggtg

SEQ ID NO: 169912 - DNA, 20 bp, Artificial Sequence
  Description of Artificial Sequence: Synthetic oligonucleotide
  Target: LAMA2; (+) strand; PAM type: NRG; PAM sequence: CAG
ttttttggggggtggagtct

SEQ ID NO: 169913 - DNA, 20 bp, Artificial Sequence
  Description of Artificial Sequence: Synthetic oligonucleotide
  Target: LAMA2; (+) strand; PAM type: NRG; PAM sequence: CAG
tggagtctcagtctgtcgcc

SEQ ID NO: 169914 - DNA, 20 bp, Artificial Sequence
  Description of Artificial Sequence: Synthetic oligonucleotide
  Target: LAMA2; (+) strand; PAM type: NRG; PAM sequence: AGG
ggagtctcagtctgtcgccc

SEQ ID NO: 169915 - DNA, 20 bp, Artificial Sequence
  Description of Artificial Sequence: Synthetic oligonucleotide
  Target: LAMA2; (+) strand; PAM type: NRG; PAM sequence: TGG
tctcagtctgtcgcccaggc

SEQ ID NO: 169916 - DNA, 20 bp, Artificial Sequence
  Description of Artificial Sequence: Synthetic oligonucleotide
  Target: LAMA2; (+) strand; PAM type: NRG; PAM sequence: GAG
tcagtctgtcgcccaggctg

SEQ ID NO: 169917 - DNA, 20 bp, Artificial Sequence
  Description of Artificial Sequence: Synthetic oligonucleotide
  Target: LAMA2; (+) strand; PAM type: NRG; PAM sequence: CAG
ctgtcgcccaggctggagtg

SEQ ID NO: 169918 - DNA, 20 bp, Artificial Sequence
  Description of Artificial Sequence: Synthetic oligonucleotide
  Target: LAMA2; (+) strand; PAM type: NRG; PAM sequence: TGG
tcgcccaggctggagtgcag

SEQ ID NO: 169919 - DNA, 20 bp, Artificial Sequence
  Description of Artificial Sequence: Synthetic oligonucleotide
  Target: LAMA2; (+) strand; PAM type: NRG; PAM sequence: TGG
ggagtgcagtggtgcaatct

SEQ ID NO: 169920 - DNA, 20 bp, Artificial Sequence
  Description of Artificial Sequence: Synthetic oligonucleotide
  Target: LAMA2; (+) strand; PAM type: NRG; PAM sequence: CAG
tcactgcaacctccgcctcc

SEQ ID NO: 169921 - DNA, 20 bp, Artificial Sequence
  Description of Artificial Sequence: Synthetic oligonucleotide
  Target: LAMA2; (+) strand; PAM type: NRG; PAM sequence: AAG
aacctccgcctcccagtttc

SEQ ID NO: 169922 - DNA, 20 bp, Artificial Sequence
  Description of Artificial Sequence: Synthetic oligonucleotide
  Target: LAMA2; (+) strand; PAM type: NRG; PAM sequence: CAG
ttcaagtgattctcctgcct

SEQ ID NO: 169923 - DNA, 20 bp, Artificial Sequence
  Description of Artificial Sequence: Synthetic oligonucleotide
  Target: LAMA2; (+) strand; PAM type: NRG; PAM sequence: TGG
attctcctgcctcagccttc

SEQ ID NO: 169924 - DNA, 20 bp, Artificial Sequence
  Description of Artificial Sequence: Synthetic oligonucleotide
  Target: LAMA2; (+) strand; PAM type: NRG; PAM sequence: GGG
ttctcctgcctcagccttct

SEQ ID NO: 169925 - DNA, 20 bp, Artificial Sequence
  Description of Artificial Sequence: Synthetic oligonucleotide
  Target: LAMA2; (+) strand; PAM type: NRG; PAM sequence: TAG
tcctgcctcagccttctggg

SEQ ID NO: 169926 - DNA, 20 bp, Artificial Sequence
  Description of Artificial Sequence: Synthetic oligonucleotide
  Target: LAMA2; (+) strand; PAM type: NRG; PAM sequence: GAG
cctcagccttctgggtagct

SEQ ID NO: 169927 - DNA, 20 bp, Artificial Sequence
  Description of Artificial Sequence: Synthetic oligonucleotide
  Target: LAMA2; (+) strand; PAM type: NRG; PAM sequence: CAG
cttctgggtagctgagacta

SEQ ID NO: 169928 - DNA, 20 bp, Artificial Sequence
  Description of Artificial Sequence: Synthetic oligonucleotide
  Target: LAMA2; (+) strand; PAM type: NRG; PAM sequence: AGG
ttctgggtagctgagactac

SEQ ID NO: 169929 - DNA, 20 bp, Artificial Sequence
  Description of Artificial Sequence: Synthetic oligonucleotide
  Target: LAMA2; (+) strand; PAM type: NRG; PAM sequence: GGG
tctgggtagctgagactaca

SEQ ID NO: 169930 - DNA, 20 bp, Artificial Sequence
  Description of Artificial Sequence: Synthetic oligonucleotide
  Target: LAMA2; (+) strand; PAM type: NRG; PAM sequence: GGG
ctgggtagctgagactacag

SEQ ID NO: 169931 - DNA, 20 bp, Artificial Sequence
  Description of Artificial Sequence: Synthetic oligonucleotide
  Target: LAMA2; (+) strand; PAM type: NRG; PAM sequence: TGG
caggggcccgccaccacgcc

SEQ ID NO: 169932 - DNA, 20 bp, Artificial Sequence
  Description of Artificial Sequence: Synthetic oligonucleotide
  Target: LAMA2; (+) strand; PAM type: NRG; PAM sequence: TAG
ctggctaatttttgtatttt

SEQ ID NO: 169933 - DNA, 20 bp, Artificial Sequence
  Description of Artificial Sequence: Synthetic oligonucleotide
  Target: LAMA2; (+) strand; PAM type: NRG; PAM sequence: TAG
gctaatttttgtatttttag

SEQ ID NO: 169934 - DNA, 20 bp, Artificial Sequence
  Description of Artificial Sequence: Synthetic oligonucleotide
  Target: LAMA2; (+) strand; PAM type: NRG; PAM sequence: GAG
taatttttgtatttttagta

SEQ ID NO: 169935 - DNA, 20 bp, Artificial Sequence
  Description of Artificial Sequence: Synthetic oligonucleotide
  Target: LAMA2; (+) strand; PAM type: NRG; PAM sequence: CAG
ttttgtatttttagtagaga

SEQ ID NO: 169936 - DNA, 20 bp, Artificial Sequence
  Description of Artificial Sequence: Synthetic oligonucleotide
  Target: LAMA2; (+) strand; PAM type: NRG; PAM sequence: AGG
tttgtatttttagtagagac

SEQ ID NO: 169937 - DNA, 20 bp, Artificial Sequence
  Description of Artificial Sequence: Synthetic oligonucleotide
  Target: LAMA2; (+) strand; PAM type: NRG; PAM sequence: GGG
ttgtatttttagtagagaca

SEQ ID NO: 169938 - DNA, 20 bp, Artificial Sequence
  Description of Artificial Sequence: Synthetic oligonucleotide
  Target: LAMA2; (+) strand; PAM type: NRG; PAM sequence: TGG
gagacagggtttcaccatgt

SEQ ID NO: 169939 - DNA, 20 bp, Artificial Sequence
  Description of Artificial Sequence: Synthetic oligonucleotide
  Target: LAMA2; (+) strand; PAM type: NRG; PAM sequence: CAG
cagggtttcaccatgttggt

SEQ ID NO: 169940 - DNA, 20 bp, Artificial Sequence
  Description of Artificial Sequence: Synthetic oligonucleotide
  Target: LAMA2; (+) strand; PAM type: NRG; PAM sequence: AGG
agggtttcaccatgttggtc

SEQ ID NO: 169941 - DNA, 20 bp, Artificial Sequence
  Description of Artificial Sequence: Synthetic oligonucleotide
  Target: LAMA2; (+) strand; PAM type: NRG; PAM sequence: TGG
tttcaccatgttggtcaggc

SEQ ID NO: 169942 - DNA, 20 bp, Artificial Sequence
  Description of Artificial Sequence: Synthetic oligonucleotide
  Target: LAMA2; (+) strand; PAM type: NRG; PAM sequence: CAG
tggtcttgaactcctgacct

SEQ ID NO: 169943 - DNA, 20 bp, Artificial Sequence
  Description of Artificial Sequence: Synthetic oligonucleotide
  Target: LAMA2; (+) strand; PAM type: NRG; PAM sequence: AGG
ggtcttgaactcctgacctc

SEQ ID NO: 169944 - DNA, 20 bp, Artificial Sequence
  Description of Artificial Sequence: Synthetic oligonucleotide
  Target: LAMA2; (+) strand; PAM type: NRG; PAM sequence: CGG
ctcaggtgatccacccacct

SEQ ID NO: 169945 - DNA, 20 bp, Artificial Sequence
  Description of Artificial Sequence: Synthetic oligonucleotide
  Target: LAMA2; (+) strand; PAM type: NRG; PAM sequence: AAG
ccacccacctcggcctctca

SEQ ID NO: 169946 - DNA, 20 bp, Artificial Sequence
  Description of Artificial Sequence: Synthetic oligonucleotide
  Target: LAMA2; (+) strand; PAM type: NRG; PAM sequence: TGG
acctcggcctctcaaagtgt

SEQ ID NO: 169947 - DNA, 20 bp, Artificial Sequence
  Description of Artificial Sequence: Synthetic oligonucleotide
  Target: LAMA2; (+) strand; PAM type: NRG; PAM sequence: GGG
cctcggcctctcaaagtgtt

SEQ ID NO: 169948 - DNA, 20 bp, Artificial Sequence
  Description of Artificial Sequence: Synthetic oligonucleotide
  Target: LAMA2; (+) strand; PAM type: NRG; PAM sequence: CAG
ctctcaaagtgttgggatta

SEQ ID NO: 169949 - DNA, 20 bp, Artificial Sequence
  Description of Artificial Sequence: Synthetic oligonucleotide
  Target: LAMA2; (+) strand; PAM type: NRG; PAM sequence: AGG
tctcaaagtgttgggattac

SEQ ID NO: 169950 - DNA, 20 bp, Artificial Sequence
  Description of Artificial Sequence: Synthetic oligonucleotide
  Target: LAMA2; (+) strand; PAM type: NRG; PAM sequence: GAG
agtgttgggattacaggcat

SEQ ID NO: 169951 - DNA, 20 bp, Artificial Sequence
  Description of Artificial Sequence: Synthetic oligonucleotide
  Target: LAMA2; (+) strand; PAM type: NRG; PAM sequence: CGG
caggcatgagccaccacacc

SEQ ID NO: 169952 - DNA, 20 bp, Artificial Sequence
  Description of Artificial Sequence: Synthetic oligonucleotide
  Target: LAMA2; (+) strand; PAM type: NRG; PAM sequence: TAG
ccaccacacccggccttctt

SEQ ID NO: 169953 - DNA, 20 bp, Artificial Sequence
  Description of Artificial Sequence: Synthetic oligonucleotide
  Target: LAMA2; (+) strand; PAM type: NRG; PAM sequence: TAG
tttttaattattctactcaa

SEQ ID NO: 169954 - DNA, 20 bp, Artificial Sequence
  Description of Artificial Sequence: Synthetic oligonucleotide
  Target: LAMA2; (+) strand; PAM type: NRG; PAM sequence: AAG
tattctactcaatagatacc

SEQ ID NO: 169955 - DNA, 20 bp, Artificial Sequence
  Description of Artificial Sequence: Synthetic oligonucleotide
  Target: LAMA2; (+) strand; PAM type: NRG; PAM sequence: AAG
ttttgaatgtgtaatacata

SEQ ID NO: 169956 - DNA, 20 bp, Artificial Sequence
  Description of Artificial Sequence: Synthetic oligonucleotide
  Target: LAMA2; (+) strand; PAM type: NRG; PAM sequence: TGG
tgtgtaatacataaagcatg

SEQ ID NO: 169957 - DNA, 20 bp, Artificial Sequence
  Description of Artificial Sequence: Synthetic oligonucleotide
  Target: LAMA2; (+) strand; PAM type: NRG; PAM sequence: GAG
tgtaatacataaagcatgtg

SEQ ID NO: 169958 - DNA, 20 bp, Artificial Sequence
  Description of Artificial Sequence: Synthetic oligonucleotide
  Target: LAMA2; (+) strand; PAM type: NRG; PAM sequence: AGG
gtaatacataaagcatgtgg

SEQ ID NO: 169959 - DNA, 20 bp, Artificial Sequence
  Description of Artificial Sequence: Synthetic oligonucleotide
  Target: LAMA2; (+) strand; PAM type: NRG; PAM sequence: CAG
caaattactatgactttctc

SEQ ID NO: 169960 - DNA, 20 bp, Artificial Sequence
  Description of Artificial Sequence: Synthetic oligonucleotide
  Target: LAMA2; (+) strand; PAM type: NRG; PAM sequence: TGG
ctttctccagtgcaatctaa

SEQ ID NO: 169961 - DNA, 20 bp, Artificial Sequence
  Description of Artificial Sequence: Synthetic oligonucleotide
  Target: LAMA2; (+) strand; PAM type: NRG; PAM sequence: GAG
ttctccagtgcaatctaatg

SEQ ID NO: 169962 - DNA, 20 bp, Artificial Sequence
  Description of Artificial Sequence: Synthetic oligonucleotide
  Target: LAMA2; (+) strand; PAM type: NRG; PAM sequence: TAG
ctaatggagcaccacacatt

SEQ ID NO: 169963 - DNA, 20 bp, Artificial Sequence
  Description of Artificial Sequence: Synthetic oligonucleotide
  Target: LAMA2; (+) strand; PAM type: NRG; PAM sequence: TGG
agcaccacacatttagactc

SEQ ID NO: 169964 - DNA, 20 bp, Artificial Sequence
  Description of Artificial Sequence: Synthetic oligonucleotide
  Target: LAMA2; (+) strand; PAM type: NRG; PAM sequence: GAG
caccacacatttagactctg

SEQ ID NO: 169965 - DNA, 20 bp, Artificial Sequence
  Description of Artificial Sequence: Synthetic oligonucleotide
  Target: LAMA2; (+) strand; PAM type: NRG; PAM sequence: TGG
ggagcatgttttattccctg

SEQ ID NO: 169966 - DNA, 20 bp, Artificial Sequence
  Description of Artificial Sequence: Synthetic oligonucleotide
  Target: LAMA2; (+) strand; PAM type: NRG; PAM sequence: CAG
catgttttattccctgtgga

SEQ ID NO: 169967 - DNA, 20 bp, Artificial Sequence
  Description of Artificial Sequence: Synthetic oligonucleotide
  Target: LAMA2; (+) strand; PAM type: NRG; PAM sequence: AGG
atgttttattccctgtggac

SEQ ID NO: 169968 - DNA, 20 bp, Artificial Sequence
  Description of Artificial Sequence: Synthetic oligonucleotide
  Target: LAMA2; (+) strand; PAM type: NRG; PAM sequence: TAG
gttcctttcgattgctcatg

SEQ ID NO: 169969 - DNA, 20 bp, Artificial Sequence
  Description of Artificial Sequence: Synthetic oligonucleotide
  Target: LAMA2; (+) strand; PAM type: NRG; PAM sequence: AGG
ttcctttcgattgctcatgt

SEQ ID NO: 169970 - DNA, 20 bp, Artificial Sequence
  Description of Artificial Sequence: Synthetic oligonucleotide
  Target: LAMA2; (+) strand; PAM type: NRG; PAM sequence: GGG
tcctttcgattgctcatgta

SEQ ID NO: 169971 - DNA, 20 bp, Artificial Sequence
  Description of Artificial Sequence: Synthetic oligonucleotide
  Target: LAMA2; (+) strand; PAM type: NRG; PAM sequence: TAG
cgattgctcatgtagggatt

SEQ ID NO: 169972 - DNA, 20 bp, Artificial Sequence
  Description of Artificial Sequence: Synthetic oligonucleotide
  Target: LAMA2; (+) strand; PAM type: NRG; PAM sequence: AGG
gattgctcatgtagggattt

SEQ ID NO: 169973 - DNA, 20 bp, Artificial Sequence
  Description of Artificial Sequence: Synthetic oligonucleotide
  Target: LAMA2; (+) strand; PAM type: NRG; PAM sequence: GGG
attgctcatgtagggattta

SEQ ID NO: 169974 - DNA, 20 bp, Artificial Sequence
  Description of Artificial Sequence: Synthetic oligonucleotide
  Target: LAMA2; (+) strand; PAM type: NRG; PAM sequence: GGG
ttgctcatgtagggatttag

SEQ ID NO: 169975 - DNA, 20 bp, Artificial Sequence
  Description of Artificial Sequence: Synthetic oligonucleotide
  Target: LAMA2; (+) strand; PAM type: NRG; PAM sequence: GGG
tgctcatgtagggatttagg

SEQ ID NO: 169976 - DNA, 20 bp, Artificial Sequence
  Description of Artificial Sequence: Synthetic oligonucleotide
  Target: LAMA2; (+) strand; PAM type: NRG; PAM sequence: AAG
atgttatattctatgcctta

SEQ ID NO: 169977 - DNA, 20 bp, Artificial Sequence
  Description of Artificial Sequence: Synthetic oligonucleotide
  Target: LAMA2; (+) strand; PAM type: NRG; PAM sequence: AGG
tgttatattctatgccttaa

SEQ ID NO: 169978 - DNA, 20 bp, Artificial Sequence
  Description of Artificial Sequence: Synthetic oligonucleotide
  Target: LAMA2; (+) strand; PAM type: NRG; PAM sequence: TGG
atctatttgctcctcctctt

SEQ ID NO: 169979 - DNA, 20 bp, Artificial Sequence
  Description of Artificial Sequence: Synthetic oligonucleotide
  Target: LAMA2; (+) strand; PAM type: NRG; PAM sequence: CAG
gctcctcctctttggtccct

SEQ ID NO: 169980 - DNA, 20 bp, Artificial Sequence
  Description of Artificial Sequence: Synthetic oligonucleotide
  Target: LAMA2; (+) strand; PAM type: NRG; PAM sequence: CAG
ttatattatcgcctctattt

SEQ ID NO: 169981 - DNA, 20 bp, Artificial Sequence
  Description of Artificial Sequence: Synthetic oligonucleotide
  Target: LAMA2; (+) strand; PAM type: NRG; PAM sequence: AGG
tatattatcgcctctatttc

SEQ ID NO: 169982 - DNA, 20 bp, Artificial Sequence
  Description of Artificial Sequence: Synthetic oligonucleotide
  Target: LAMA2; (+) strand; PAM type: NRG; PAM sequence: TGG
atcgcctctatttcaggttc

SEQ ID NO: 169983 - DNA, 20 bp, Artificial Sequence
  Description of Artificial Sequence: Synthetic oligonucleotide
  Target: LAMA2; (+) strand; PAM type: NRG; PAM sequence: GGG
tcgcctctatttcaggttct

SEQ ID NO: 169984 - DNA, 20 bp, Artificial Sequence
  Description of Artificial Sequence: Synthetic oligonucleotide
  Target: LAMA2; (+) strand; PAM type: NRG; PAM sequence: TAG
ctcaaccatcatccatttga

SEQ ID NO: 169985 - DNA, 20 bp, Artificial Sequence
  Description of Artificial Sequence: Synthetic oligonucleotide
  Target: LAMA2; (+) strand; PAM type: NRG; PAM sequence: GAG
tttgatagcattaatattct

SEQ ID NO: 169986 - DNA, 20 bp, Artificial Sequence
  Description of Artificial Sequence: Synthetic oligonucleotide
  Target: LAMA2; (+) strand; PAM type: NRG; PAM sequence: GAG
tagcattaatattctgagat

SEQ ID NO: 169987 - DNA, 20 bp, Artificial Sequence
  Description of Artificial Sequence: Synthetic oligonucleotide
  Target: LAMA2; (+) strand; PAM type: NRG; PAM sequence: TAG
cattaatattctgagatgag

SEQ ID NO: 169988 - DNA, 20 bp, Artificial Sequence
  Description of Artificial Sequence: Synthetic oligonucleotide
  Target: LAMA2; (+) strand; PAM type: NRG; PAM sequence: TGG
atgagtagtttcatcttcca

SEQ ID NO: 169989 - DNA, 20 bp, Artificial Sequence
  Description of Artificial Sequence: Synthetic oligonucleotide
  Target: LAMA2; (+) strand; PAM type: NRG; PAM sequence: TGG
atcttccatggaattattct

SEQ ID NO: 169990 - DNA, 20 bp, Artificial Sequence
  Description of Artificial Sequence: Synthetic oligonucleotide
  Target: LAMA2; (+) strand; PAM type: NRG; PAM sequence: TAG
ttggaccataaaatatttca

SEQ ID NO: 169991 - DNA, 20 bp, Artificial Sequence
  Description of Artificial Sequence: Synthetic oligonucleotide
  Target: LAMA2; (+) strand; PAM type: NRG; PAM sequence: TGG
gaattctttgaacatctgcc

SEQ ID NO: 169992 - DNA, 20 bp, Artificial Sequence
  Description of Artificial Sequence: Synthetic oligonucleotide
  Target: LAMA2; (+) strand; PAM type: NRG; PAM sequence: GGG
aattctttgaacatctgcct

SEQ ID NO: 169993 - DNA, 20 bp, Artificial Sequence
  Description of Artificial Sequence: Synthetic oligonucleotide
  Target: LAMA2; (+) strand; PAM type: NRG; PAM sequence: TAG
gaacatctgcctgggatgtt

SEQ ID NO: 169994 - DNA, 20 bp, Artificial Sequence
  Description of Artificial Sequence: Synthetic oligonucleotide
  Target: LAMA2; (+) strand; PAM type: NRG; PAM sequence: CAG
catctgcctgggatgtttag

SEQ ID NO: 169995 - DNA, 20 bp, Artificial Sequence
  Description of Artificial Sequence: Synthetic oligonucleotide
  Target: LAMA2; (+) strand; PAM type: NRG; PAM sequence: AAG
ctgcctgggatgtttagcag

SEQ ID NO: 169996 - DNA, 20 bp, Artificial Sequence
  Description of Artificial Sequence: Synthetic oligonucleotide
  Target: LAMA2; (+) strand; PAM type: NRG; PAM sequence: CAG
tctttgtcacttctctttca

SEQ ID NO: 169997 - DNA, 20 bp, Artificial Sequence
  Description of Artificial Sequence: Synthetic oligonucleotide
  Target: LAMA2; (+) strand; PAM type: NRG; PAM sequence: TGG
cacttctctttcacagtttg

SEQ ID NO: 169998 - DNA, 20 bp, Artificial Sequence
  Description of Artificial Sequence: Synthetic oligonucleotide
  Target: LAMA2; (+) strand; PAM type: NRG; PAM sequence: GAG
cttctctttcacagtttgtg

SEQ ID NO: 169999 - DNA, 20 bp, Artificial Sequence
  Description of Artificial Sequence: Synthetic oligonucleotide
  Target: LAMA2; (+) strand; PAM type: NRG; PAM sequence: GAG
ctttcacagtttgtggagat

SEQ ID NO: 170000 - DNA, 20 bp, Artificial Sequence
  Description of Artificial Sequence: Synthetic oligonucleotide
  Target: LAMA2; (+) strand; PAM type: NRG; PAM sequence: TGG
gtttgtggagatgagtgcac

SEQ ID NO: 170001 - DNA, 20 bp, Artificial Sequence
  Description of Artificial Sequence: Synthetic oligonucleotide
  Target: LAMA2; (+) strand; PAM type: NRG; PAM sequence: CGG
gagtgcactggccttcttct

SEQ ID NO: 170002 - DNA, 20 bp, Artificial Sequence
  Description of Artificial Sequence: Synthetic oligonucleotide
  Target: LAMA2; (+) strand; PAM type: NRG; PAM sequence: TGG
tggccttcttctcggtgact

SEQ ID NO: 170003 - DNA, 20 bp, Artificial Sequence
  Description of Artificial Sequence: Synthetic oligonucleotide
  Target: LAMA2; (+) strand; PAM type: NRG; PAM sequence: TGG
tctcggtgacttggctcgcc

SEQ ID NO: 170004 - DNA, 20 bp, Artificial Sequence
  Description of Artificial Sequence: Synthetic oligonucleotide
  Target: LAMA2; (+) strand; PAM type: NRG; PAM sequence: GAG
tcggtgacttggctcgcctg

SEQ ID NO: 170005 - DNA, 20 bp, Artificial Sequence
  Description of Artificial Sequence: Synthetic oligonucleotide
  Target: LAMA2; (+) strand; PAM type: NRG; PAM sequence: CAG
gtgacttggctcgcctggag

SEQ ID NO: 170006 - DNA, 20 bp, Artificial Sequence
  Description of Artificial Sequence: Synthetic oligonucleotide
  Target: LAMA2; (+) strand; PAM type: NRG; PAM sequence: TGG
cttggctcgcctggagcaga

SEQ ID NO: 170007 - DNA, 20 bp, Artificial Sequence
  Description of Artificial Sequence: Synthetic oligonucleotide
  Target: LAMA2; (+) strand; PAM type: NRG; PAM sequence: GAG
cgcctggagcagatggtcat

SEQ ID NO: 170008 - DNA, 20 bp, Artificial Sequence
  Description of Artificial Sequence: Synthetic oligonucleotide
  Target: LAMA2; (+) strand; PAM type: NRG; PAM sequence: TGG
gtcatgagcatcaacctcac

SEQ ID NO: 170009 - DNA, 20 bp, Artificial Sequence
  Description of Artificial Sequence: Synthetic oligonucleotide
  Target: LAMA2; (+) strand; PAM type: NRG; PAM sequence: TGG
gcgccatataaaatgctgta

SEQ ID NO: 170010 - DNA, 20 bp, Artificial Sequence
  Description of Artificial Sequence: Synthetic oligonucleotide
  Target: LAMA2; (+) strand; PAM type: NRG; PAM sequence: CAG
atggtcttgaaaatatgact

SEQ ID NO: 170011 - DNA, 20 bp, Artificial Sequence
  Description of Artificial Sequence: Synthetic oligonucleotide
  Target: LAMA2; (+) strand; PAM type: NRG; PAM sequence: AGG
tggtcttgaaaatatgactc

SEQ ID NO: 170012 - DNA, 20 bp, Artificial Sequence
  Description of Artificial Sequence: Synthetic oligonucleotide
  Target: LAMA2; (+) strand; PAM type: NRG; PAM sequence: GAG
gtcttgaaaatatgactcag

SEQ ID NO: 170013 - DNA, 20 bp, Artificial Sequence
  Description of Artificial Sequence: Synthetic oligonucleotide
  Target: LAMA2; (+) strand; PAM type: NRG; PAM sequence: AAG
aaaatatgactcaggagcta

SEQ ID NO: 170014 - DNA, 20 bp, Artificial Sequence
  Description of Artificial Sequence: Synthetic oligonucleotide
  Target: LAMA2; (+) strand; PAM type: NRG; PAM sequence: AGG
aaatatgactcaggagctaa

SEQ ID NO: 170015 - DNA, 20 bp, Artificial Sequence
  Description of Artificial Sequence: Synthetic oligonucleotide
  Target: LAMA2; (+) strand; PAM type: NRG; PAM sequence: TAG
tatgactcaggagctaaagg

SEQ ID NO: 170016 - DNA, 20 bp, Artificial Sequence
  Description of Artificial Sequence: Synthetic oligonucleotide
  Target: LAMA2; (+) strand; PAM type: NRG; PAM sequence: AGG
atgactcaggagctaaaggt

SEQ ID NO: 170017 - DNA, 20 bp, Artificial Sequence
  Description of Artificial Sequence: Synthetic oligonucleotide
  Target: LAMA2; (+) strand; PAM type: NRG; PAM sequence: TGG
ctcaggagctaaaggtaggt

SEQ ID NO: 170018 - DNA, 20 bp, Artificial Sequence
  Description of Artificial Sequence: Synthetic oligonucleotide
  Target: LAMA2; (+) strand; PAM type: NRG; PAM sequence: CAG
gagctaaaggtaggttggtg

SEQ ID NO: 170019 - DNA, 20 bp, Artificial Sequence
  Description of Artificial Sequence: Synthetic oligonucleotide
  Target: LAMA2; (+) strand; PAM type: NRG; PAM sequence: AAG
aggtaggttggtgcagtcac

SEQ ID NO: 170020 - DNA, 20 bp, Artificial Sequence
  Description of Artificial Sequence: Synthetic oligonucleotide
  Target: LAMA2; (+) strand; PAM type: NRG; PAM sequence: AAG
aggttggtgcagtcacaagc

SEQ ID NO: 170021 - DNA, 20 bp, Artificial Sequence
  Description of Artificial Sequence: Synthetic oligonucleotide
  Target: LAMA2; (+) strand; PAM type: NRG; PAM sequence: AGG
ggttggtgcagtcacaagca

SEQ ID NO: 170022 - DNA, 20 bp, Artificial Sequence
  Description of Artificial Sequence: Synthetic oligonucleotide
  Target: LAMA2; (+) strand; PAM type: NRG; PAM sequence: GGG
gttggtgcagtcacaagcaa

SEQ ID NO: 170023 - DNA, 20 bp, Artificial Sequence
  Description of Artificial Sequence: Synthetic oligonucleotide
  Target: LAMA2; (+) strand; PAM type: NRG; PAM sequence: CAG
gtgcagtcacaagcaagggc

SEQ ID NO: 170024 - DNA, 20 bp, Artificial Sequence
  Description of Artificial Sequence: Synthetic oligonucleotide
  Target: LAMA2; (+) strand; PAM type: NRG; PAM sequence: AGG
tgcagtcacaagcaagggcc

SEQ ID NO: 170025 - DNA, 20 bp, Artificial Sequence
  Description of Artificial Sequence: Synthetic oligonucleotide
  Target: LAMA2; (+) strand; PAM type: NRG; PAM sequence: GGG
gcagtcacaagcaagggcca

SEQ ID NO: 170026 - DNA, 20 bp, Artificial Sequence
  Description of Artificial Sequence: Synthetic oligonucleotide
  Target: LAMA2; (+) strand; PAM type: NRG; PAM sequence: AAG
cacaagcaagggccagggac

SEQ ID NO: 170027 - DNA, 20 bp, Artificial Sequence
  Description of Artificial Sequence: Synthetic oligonucleotide
  Target: LAMA2; (+) strand; PAM type: NRG; PAM sequence: AGG
acaagcaagggccagggaca

SEQ ID NO: 170028 - DNA, 20 bp, Artificial Sequence
  Description of Artificial Sequence: Synthetic oligonucleotide
  Target: LAMA2; (+) strand; PAM type: NRG; PAM sequence: CAG
aagggccagggacaaggtga

SEQ ID NO: 170029 - DNA, 20 bp, Artificial Sequence
  Description of Artificial Sequence: Synthetic oligonucleotide
  Target: LAMA2; (+) strand; PAM type: NRG; PAM sequence: AAG
ggccagggacaaggtgacag

SEQ ID NO: 170030 - DNA, 20 bp, Artificial Sequence
  Description of Artificial Sequence: Synthetic oligonucleotide
  Target: LAMA2; (+) strand; PAM type: NRG; PAM sequence: AAG
caaggtgacagaagcttcac

SEQ ID NO: 170031 - DNA, 20 bp, Artificial Sequence
  Description of Artificial Sequence: Synthetic oligonucleotide
  Target: LAMA2; (+) strand; PAM type: NRG; PAM sequence: CGG
ggtgacagaagcttcacaag

SEQ ID NO: 170032 - DNA, 20 bp, Artificial Sequence
  Description of Artificial Sequence: Synthetic oligonucleotide
  Target: LAMA2; (+) strand; PAM type: NRG; PAM sequence: TGG
agaagcttcacaagcggtat

SEQ ID NO: 170033 - DNA, 20 bp, Artificial Sequence
  Description of Artificial Sequence: Synthetic oligonucleotide
  Target: LAMA2; (+) strand; PAM type: NRG; PAM sequence: TGG
caagcggtattggctgtaat

SEQ ID NO: 170034 - DNA, 20 bp, Artificial Sequence
  Description of Artificial Sequence: Synthetic oligonucleotide
  Target: LAMA2; (+) strand; PAM type: NRG; PAM sequence: CAG
attggtaaatgttcttccca

SEQ ID NO: 170035 - DNA, 20 bp, Artificial Sequence
  Description of Artificial Sequence: Synthetic oligonucleotide
  Target: LAMA2; (+) strand; PAM type: NRG; PAM sequence: AAG
tcttcccacagccccaaatc

SEQ ID NO: 170036 - DNA, 20 bp, Artificial Sequence
  Description of Artificial Sequence: Synthetic oligonucleotide
  Target: LAMA2; (+) strand; PAM type: NRG; PAM sequence: AGG
cttcccacagccccaaatca

SEQ ID NO: 170037 - DNA, 20 bp, Artificial Sequence
  Description of Artificial Sequence: Synthetic oligonucleotide
  Target: LAMA2; (+) strand; PAM type: NRG; PAM sequence: GGG
ttcccacagccccaaatcaa

SEQ ID NO: 170038 - DNA, 20 bp, Artificial Sequence
  Description of Artificial Sequence: Synthetic oligonucleotide
  Target: LAMA2; (+) strand; PAM type: NRG; PAM sequence: TAG
aaatcaagggacacaactgt

SEQ ID NO: 170039 - DNA, 20 bp, Artificial Sequence
  Description of Artificial Sequence: Synthetic oligonucleotide
  Target: LAMA2; (+) strand; PAM type: NRG; PAM sequence: AGG
aatcaagggacacaactgtt

SEQ ID NO: 170040 - DNA, 20 bp, Artificial Sequence
  Description of Artificial Sequence: Synthetic oligonucleotide
  Target: LAMA2; (+) strand; PAM type: NRG; PAM sequence: GGG
atcaagggacacaactgtta

SEQ ID NO: 170041 - DNA, 20 bp, Artificial Sequence
  Description of Artificial Sequence: Synthetic oligonucleotide
  Target: LAMA2; (+) strand; PAM type: NRG; PAM sequence: CAG
acacaactgttagggaaatt

SEQ ID NO: 170042 - DNA, 20 bp, Artificial Sequence
  Description of Artificial Sequence: Synthetic oligonucleotide
  Target: LAMA2; (+) strand; PAM type: NRG; PAM sequence: GAG
acaactgttagggaaattca

SEQ ID NO: 170043 - DNA, 20 bp, Artificial Sequence
  Description of Artificial Sequence: Synthetic oligonucleotide
  Target: LAMA2; (+) strand; PAM type: NRG; PAM sequence: CAG
aattcagagactttcttaac

SEQ ID NO: 170044 - DNA, 20 bp, Artificial Sequence
  Description of Artificial Sequence: Synthetic oligonucleotide
  Target: LAMA2; (+) strand; PAM type: NRG; PAM sequence: AAG
aaccagtgtttttcaaactc

SEQ ID NO: 170045 - DNA, 20 bp, Artificial Sequence
  Description of Artificial Sequence: Synthetic oligonucleotide
  Target: LAMA2; (+) strand; PAM type: NRG; PAM sequence: CAG
aactcaagaactataatata

SEQ ID NO: 170046 - DNA, 20 bp, Artificial Sequence
  Description of Artificial Sequence: Synthetic oligonucleotide
  Target: LAMA2; (+) strand; PAM type: NRG; PAM sequence: AAG
ataatatacagatttctatt

SEQ ID NO: 170047 - DNA, 20 bp, Artificial Sequence
  Description of Artificial Sequence: Synthetic oligonucleotide
  Target: LAMA2; (+) strand; PAM type: NRG; PAM sequence: AGG
taatatacagatttctatta

SEQ ID NO: 170048 - DNA, 20 bp, Artificial Sequence
  Description of Artificial Sequence: Synthetic oligonucleotide
  Target: LAMA2; (+) strand; PAM type: NRG; PAM sequence: GGG
aatatacagatttctattaa

SEQ ID NO: 170049 - DNA, 20 bp, Artificial Sequence
  Description of Artificial Sequence: Synthetic oligonucleotide
  Target: LAMA2; (+) strand; PAM type: NRG; PAM sequence: AAG
acagatttctattaagggaa

SEQ ID NO: 170050 - DNA, 20 bp, Artificial Sequence
  Description of Artificial Sequence: Synthetic oligonucleotide
  Target: LAMA2; (+) strand; PAM type: NRG; PAM sequence: GAG
agatttctattaagggaaaa

SEQ ID NO: 170051 - DNA, 20 bp, Artificial Sequence
  Description of Artificial Sequence: Synthetic oligonucleotide
  Target: LAMA2; (+) strand; PAM type: NRG; PAM sequence: CAG
aaagagtctcatgtaccccc

SEQ ID NO: 170052 - DNA, 20 bp, Artificial Sequence
  Description of Artificial Sequence: Synthetic oligonucleotide
  Target: LAMA2; (+) strand; PAM type: NRG; PAM sequence: TGG
ctcatgtaccccccagtgtc

SEQ ID NO: 170053 - DNA, 20 bp, Artificial Sequence
  Description of Artificial Sequence: Synthetic oligonucleotide
  Target: LAMA2; (+) strand; PAM type: NRG; PAM sequence: CAG
ccccagtgtctggcctaaat

SEQ ID NO: 170054 - DNA, 20 bp, Artificial Sequence
  Description of Artificial Sequence: Synthetic oligonucleotide
  Target: LAMA2; (+) strand; PAM type: NRG; PAM sequence: CAG
aatatgtgcaaacataaaat

SEQ ID NO: 170055 - DNA, 20 bp, Artificial Sequence
  Description of Artificial Sequence: Synthetic oligonucleotide
  Target: LAMA2; (+) strand; PAM type: NRG; PAM sequence: AGG
atatgtgcaaacataaaatc

SEQ ID NO: 170056 - DNA, 20 bp, Artificial Sequence
  Description of Artificial Sequence: Synthetic oligonucleotide
  Target: LAMA2; (+) strand; PAM type: NRG; PAM sequence: TAG
gtataaactctttatactta

SEQ ID NO: 170057 - DNA, 20 bp, Artificial Sequence
  Description of Artificial Sequence: Synthetic oligonucleotide
  Target: LAMA2; (+) strand; PAM type: NRG; PAM sequence: AAG
aaattaaaaacattaatata

SEQ ID NO: 170058 - DNA, 20 bp, Artificial Sequence
  Description of Artificial Sequence: Synthetic oligonucleotide
  Target: LAMA2; (+) strand; PAM type: NRG; PAM sequence: TGG
aatataaagtaacatgattt

SEQ ID NO: 170059 - DNA, 20 bp, Artificial Sequence
  Description of Artificial Sequence: Synthetic oligonucleotide
  Target: LAMA2; (+) strand; PAM type: NRG; PAM sequence: TGG
gtaacatgattttggctgaa

SEQ ID NO: 170060 - DNA, 20 bp, Artificial Sequence
  Description of Artificial Sequence: Synthetic oligonucleotide
  Target: LAMA2; (+) strand; PAM type: NRG; PAM sequence: AAG
tggaaattgctgcttgcaac

SEQ ID NO: 170061 - DNA, 20 bp, Artificial Sequence
  Description of Artificial Sequence: Synthetic oligonucleotide
  Target: LAMA2; (+) strand; PAM type: NRG; PAM sequence: TAG
attgctgcttgcaacaagaa

SEQ ID NO: 170062 - DNA, 20 bp, Artificial Sequence
  Description of Artificial Sequence: Synthetic oligonucleotide
  Target: LAMA2; (+) strand; PAM type: NRG; PAM sequence: AGG
ttgctgcttgcaacaagaat

SEQ ID NO: 170063 - DNA, 20 bp, Artificial Sequence
  Description of Artificial Sequence: Synthetic oligonucleotide
  Target: LAMA2; (+) strand; PAM type: NRG; PAM sequence: CAG
ggatattgactattttcaca

SEQ ID NO: 170064 - DNA, 20 bp, Artificial Sequence
  Description of Artificial Sequence: Synthetic oligonucleotide
  Target: LAMA2; (+) strand; PAM type: NRG; PAM sequence: CAG
ttttcacacagttcttccac

SEQ ID NO: 170065 - DNA, 20 bp, Artificial Sequence
  Description of Artificial Sequence: Synthetic oligonucleotide
  Target: LAMA2; (+) strand; PAM type: NRG; PAM sequence: GAG
ttcacacagttcttccacca

SEQ ID NO: 170066 - DNA, 20 bp, Artificial Sequence
  Description of Artificial Sequence: Synthetic oligonucleotide
  Target: LAMA2; (+) strand; PAM type: NRG; PAM sequence: TGG
ttcttccaccagagatgatg

SEQ ID NO: 170067 - DNA, 20 bp, Artificial Sequence
  Description of Artificial Sequence: Synthetic oligonucleotide
  Target: LAMA2; (+) strand; PAM type: NRG; PAM sequence: CAG
ctaccttaccacatttgaac

SEQ ID NO: 170068 - DNA, 20 bp, Artificial Sequence
  Description of Artificial Sequence: Synthetic oligonucleotide
  Target: LAMA2; (+) strand; PAM type: NRG; PAM sequence: GAG
accttaccacatttgaacca

SEQ ID NO: 170069 - DNA, 20 bp, Artificial Sequence
  Description of Artificial Sequence: Synthetic oligonucleotide
  Target: LAMA2; (+) strand; PAM type: NRG; PAM sequence: GAG
cttaccacatttgaaccaga

SEQ ID NO: 170070 - DNA, 20 bp, Artificial Sequence
  Description of Artificial Sequence: Synthetic oligonucleotide
  Target: LAMA2; (+) strand; PAM type: NRG; PAM sequence: AAG
gaaccagagagccccctaca

SEQ ID NO: 170071 - DNA, 20 bp, Artificial Sequence
  Description of Artificial Sequence: Synthetic oligonucleotide
  Target: LAMA2; (+) strand; PAM type: NRG; PAM sequence: AGG
aaccagagagccccctacaa

SEQ ID NO: 170072 - DNA, 20 bp, Artificial Sequence
  Description of Artificial Sequence: Synthetic oligonucleotide
  Target: LAMA2; (+) strand; PAM type: NRG; PAM sequence: GGG
accagagagccccctacaaa

SEQ ID NO: 170073 - DNA, 20 bp, Artificial Sequence
  Description of Artificial Sequence: Synthetic oligonucleotide
  Target: LAMA2; (+) strand; PAM type: NRG; PAM sequence: GAG
aagggtcctgaaatgaatgt

SEQ ID NO: 170074 - DNA, 20 bp, Artificial Sequence
  Description of Artificial Sequence: Synthetic oligonucleotide
  Target: LAMA2; (+) strand; PAM type: NRG; PAM sequence: AAG
gaatgtgagcatcacttgac

SEQ ID NO: 170075 - DNA, 20 bp, Artificial Sequence
  Description of Artificial Sequence: Synthetic oligonucleotide
  Target: LAMA2; (+) strand; PAM type: NRG; PAM sequence: CAG
gtttatgtgactaacgtgct

SEQ ID NO: 170076 - DNA, 20 bp, Artificial Sequence
  Description of Artificial Sequence: Synthetic oligonucleotide
  Target: LAMA2; (+) strand; PAM type: NRG; PAM sequence: TAG
ctaacgtgctcagtctgcca

SEQ ID NO: 170077 - DNA, 20 bp, Artificial Sequence
  Description of Artificial Sequence: Synthetic oligonucleotide
  Target: LAMA2; (+) strand; PAM type: NRG; PAM sequence: AGG
taacgtgctcagtctgccat

SEQ ID NO: 170078 - DNA, 20 bp, Artificial Sequence
  Description of Artificial Sequence: Synthetic oligonucleotide
  Target: LAMA2; (+) strand; PAM type: NRG; PAM sequence: CAG
ctgccataggctcaaacaca

SEQ ID NO: 170079 - DNA, 20 bp, Artificial Sequence
  Description of Artificial Sequence: Synthetic oligonucleotide
  Target: LAMA2; (+) strand; PAM type: NRG; PAM sequence: AGG
tgccataggctcaaacacac

SEQ ID NO: 170080 - DNA, 20 bp, Artificial Sequence
  Description of Artificial Sequence: Synthetic oligonucleotide
  Target: LAMA2; (+) strand; PAM type: NRG; PAM sequence: TAG
ctcaaacacacaggcaaatg

SEQ ID NO: 170081 - DNA, 20 bp, Artificial Sequence
  Description of Artificial Sequence: Synthetic oligonucleotide
  Target: LAMA2; (+) strand; PAM type: NRG; PAM sequence: AGG
tcaaacacacaggcaaatgt

SEQ ID NO: 170082 - DNA, 20 bp, Artificial Sequence
  Description of Artificial Sequence: Synthetic oligonucleotide
  Target: LAMA2; (+) strand; PAM type: NRG; PAM sequence: GAG
cacaggcaaatgtaggcact

SEQ ID NO: 170083 - DNA, 20 bp, Artificial Sequence
  Description of Artificial Sequence: Synthetic oligonucleotide
  Target: LAMA2; (+) strand; PAM type: NRG; PAM sequence: CAG
gcaaatgtaggcactgagat

SEQ ID NO: 170084 - DNA, 20 bp, Artificial Sequence
  Description of Artificial Sequence: Synthetic oligonucleotide
  Target: LAMA2; (+) strand; PAM type: NRG; PAM sequence: AGG
caaatgtaggcactgagatc

SEQ ID NO: 170085 - DNA, 20 bp, Artificial Sequence
  Description of Artificial Sequence: Synthetic oligonucleotide
  Target: LAMA2; (+) strand; PAM type: NRG; PAM sequence: TGG
atgtaggcactgagatcagg

SEQ ID NO: 170086 - DNA, 20 bp, Artificial Sequence
  Description of Artificial Sequence: Synthetic oligonucleotide
  Target: LAMA2; (+) strand; PAM type: NRG; PAM sequence: CAG
aggtggccatattcatctct

SEQ ID NO: 170087 - DNA, 20 bp, Artificial Sequence
  Description of Artificial Sequence: Synthetic oligonucleotide
  Target: LAMA2; (+) strand; PAM type: NRG; PAM sequence: AGG
ggtggccatattcatctctc

SEQ ID NO: 170088 - DNA, 20 bp, Artificial Sequence
  Description of Artificial Sequence: Synthetic oligonucleotide
  Target: LAMA2; (+) strand; PAM type: NRG; PAM sequence: TAG
atattcatctctcaggtgcc

SEQ ID NO: 170089 - DNA, 20 bp, Artificial Sequence
  Description of Artificial Sequence: Synthetic oligonucleotide
  Target: LAMA2; (+) strand; PAM type: NRG; PAM sequence: TGG
catctctcaggtgcctagcc

SEQ ID NO: 170090 - DNA, 20 bp, Artificial Sequence
  Description of Artificial Sequence: Synthetic oligonucleotide
  Target: LAMA2; (+) strand; PAM type: NRG; PAM sequence: GGG
atctctcaggtgcctagcct

SEQ ID NO: 170091 - DNA, 20 bp, Artificial Sequence
  Description of Artificial Sequence: Synthetic oligonucleotide
  Target: LAMA2; (+) strand; PAM type: NRG; PAM sequence: CAG
caggtgcctagcctgggatc

SEQ ID NO: 170092 - DNA, 20 bp, Artificial Sequence
  Description of Artificial Sequence: Synthetic oligonucleotide
  Target: LAMA2; (+) strand; PAM type: NRG; PAM sequence: AAG
aaatgcttacattaatattt

SEQ ID NO: 170093 - DNA, 20 bp, Artificial Sequence
  Description of Artificial Sequence: Synthetic oligonucleotide
  Target: LAMA2; (+) strand; PAM type: NRG; PAM sequence: AGG
aatgcttacattaatattta

SEQ ID NO: 170094 - DNA, 20 bp, Artificial Sequence
  Description of Artificial Sequence: Synthetic oligonucleotide
  Target: LAMA2; (+) strand; PAM type: NRG; PAM sequence: TAG
tcaaaatgaaaacacatgat

SEQ ID NO: 170095 - DNA, 20 bp, Artificial Sequence
  Description of Artificial Sequence: Synthetic oligonucleotide
  Target: LAMA2; (+) strand; PAM type: NRG; PAM sequence: AAG
atgattagaatcttgtacta

SEQ ID NO: 170096 - DNA, 20 bp, Artificial Sequence
  Description of Artificial Sequence: Synthetic oligonucleotide
  Target: LAMA2; (+) strand; PAM type: NRG; PAM sequence: GAG
gattagaatcttgtactaaa

SEQ ID NO: 170097 - DNA, 20 bp, Artificial Sequence
  Description of Artificial Sequence: Synthetic oligonucleotide
  Target: LAMA2; (+) strand; PAM type: NRG; PAM sequence: TAG
agaatcttgtactaaagagc

SEQ ID NO: 170098 - DNA, 20 bp, Artificial Sequence
  Description of Artificial Sequence: Synthetic oligonucleotide
  Target: LAMA2; (+) strand; PAM type: NRG; PAM sequence: TAG
ttgtactaaagagctagaac

SEQ ID NO: 170099 - DNA, 20 bp, Artificial Sequence
  Description of Artificial Sequence: Synthetic oligonucleotide
  Target: LAMA2; (+) strand; PAM type: NRG; PAM sequence: TAG
tactaaagagctagaactag

SEQ ID NO: 170100 - DNA, 20 bp, Artificial Sequence
  Description of Artificial Sequence: Synthetic oligonucleotide
  Target: LAMA2; (+) strand; PAM type: NRG; PAM sequence: AAG
tagaactagtagacctttaa

SEQ ID NO: 170101 - DNA, 20 bp, Artificial Sequence
  Description of Artificial Sequence: Synthetic oligonucleotide
  Target: LAMA2; (+) strand; PAM type: NRG; PAM sequence: AAG
acctttaaaagttcttcaac

SEQ ID NO: 170102 - DNA, 20 bp, Artificial Sequence
  Description of Artificial Sequence: Synthetic oligonucleotide
  Target: LAMA2; (+) strand; PAM type: NRG; PAM sequence: CAG
aaaagttcttcaacaagcac

SEQ ID NO: 170103 - DNA, 20 bp, Artificial Sequence
  Description of Artificial Sequence: Synthetic oligonucleotide
  Target: LAMA2; (+) strand; PAM type: NRG; PAM sequence: TGG
ataaacactgttctaaattg

SEQ ID NO: 170104 - DNA, 20 bp, Artificial Sequence
  Description of Artificial Sequence: Synthetic oligonucleotide
  Target: LAMA2; (+) strand; PAM type: NRG; PAM sequence: AAG
actgttctaaattgtggtta

SEQ ID NO: 170105 - DNA, 20 bp, Artificial Sequence
  Description of Artificial Sequence: Synthetic oligonucleotide
  Target: LAMA2; (+) strand; PAM type: NRG; PAM sequence: TGG
taaattgtggttaaagcttt

SEQ ID NO: 170106 - DNA, 20 bp, Artificial Sequence
  Description of Artificial Sequence: Synthetic oligonucleotide
  Target: LAMA2; (+) strand; PAM type: NRG; PAM sequence: TAG
attgtggttaaagcttttgg

SEQ ID NO: 170107 - DNA, 20 bp, Artificial Sequence
  Description of Artificial Sequence: Synthetic oligonucleotide
  Target: LAMA2; (+) strand; PAM type: NRG; PAM sequence: GAG
taaagcttttggtagttaac

SEQ ID NO: 170108 - DNA, 20 bp, Artificial Sequence
  Description of Artificial Sequence: Synthetic oligonucleotide
  Target: LAMA2; (+) strand; PAM type: NRG; PAM sequence: AGG
aaagcttttggtagttaacg

SEQ ID NO: 170109 - DNA, 20 bp, Artificial Sequence
  Description of Artificial Sequence: Synthetic oligonucleotide
  Target: LAMA2; (+) strand; PAM type: NRG; PAM sequence: TAG
gcttttggtagttaacgagg

SEQ ID NO: 170110 - DNA, 20 bp, Artificial Sequence
  Description of Artificial Sequence: Synthetic oligonucleotide
  Target: LAMA2; (+) strand; PAM type: NRG; PAM sequence: AGG
cttttggtagttaacgaggt

SEQ ID NO: 170111 - DNA, 20 bp, Artificial Sequence
  Description of Artificial Sequence: Synthetic oligonucleotide
  Target: LAMA2; (+) strand; PAM type: NRG; PAM sequence: GAG
tttggtagttaacgaggtag

SEQ ID NO: 170112 - DNA, 20 bp, Artificial Sequence
  Description of Artificial Sequence: Synthetic oligonucleotide
  Target: LAMA2; (+) strand; PAM type: NRG; PAM sequence: AAG
cgaggtaggagaaaacatta

SEQ ID NO: 170113 - DNA, 20 bp, Artificial Sequence
  Description of Artificial Sequence: Synthetic oligonucleotide
  Target: LAMA2; (+) strand; PAM type: NRG; PAM sequence: TGG
ggagaaaacattaaagaaat

SEQ ID NO: 170114 - DNA, 20 bp, Artificial Sequence
  Description of Artificial Sequence: Synthetic oligonucleotide
  Target: LAMA2; (+) strand; PAM type: NRG; PAM sequence: GGG
gagaaaacattaaagaaatt

SEQ ID NO: 170115 - DNA, 20 bp, Artificial Sequence
  Description of Artificial Sequence: Synthetic oligonucleotide
  Target: LAMA2; (+) strand; PAM type: NRG; PAM sequence: GGG
agaaaacattaaagaaattg

SEQ ID NO: 170116 - DNA, 20 bp, Artificial Sequence
  Description of Artificial Sequence: Synthetic oligonucleotide
  Target: LAMA2; (+) strand; PAM type: NRG; PAM sequence: TGG
attggggttgtttcacctga

SEQ ID NO: 170117 - DNA, 20 bp, Artificial Sequence
  Description of Artificial Sequence: Synthetic oligonucleotide
  Target: LAMA2; (+) strand; PAM type: NRG; PAM sequence: AAG
gttgtttcacctgatggaaa

SEQ ID NO: 170118 - DNA, 20 bp, Artificial Sequence
  Description of Artificial Sequence: Synthetic oligonucleotide
  Target: LAMA2; (+) strand; PAM type: NRG; PAM sequence: AAG
cacctgatggaaaaagatga

SEQ ID NO: 170119 - DNA, 20 bp, Artificial Sequence
  Description of Artificial Sequence: Synthetic oligonucleotide
  Target: LAMA2; (+) strand; PAM type: NRG; PAM sequence: AGG
acctgatggaaaaagatgaa

SEQ ID NO: 170120 - DNA, 20 bp, Artificial Sequence
  Description of Artificial Sequence: Synthetic oligonucleotide
  Target: LAMA2; (+) strand; PAM type: NRG; PAM sequence: CAG
gaaaggtgtcaacttactat

SEQ ID NO: 170121 - DNA, 20 bp, Artificial Sequence
  Description of Artificial Sequence: Synthetic oligonucleotide
  Target: LAMA2; (+) strand; PAM type: NRG; PAM sequence: CAG
acttactatcagtcaattat

SEQ ID NO: 170122 - DNA, 20 bp, Artificial Sequence
  Description of Artificial Sequence: Synthetic oligonucleotide
  Target: LAMA2; (+) strand; PAM type: NRG; PAM sequence: AAG
tcaattatcagatatttatt

SEQ ID NO: 170123 - DNA, 20 bp, Artificial Sequence
  Description of Artificial Sequence: Synthetic oligonucleotide
  Target: LAMA2; (+) strand; PAM type: NRG; PAM sequence: TAG
agatatttattaagaaatta

SEQ ID NO: 170124 - DNA, 20 bp, Artificial Sequence
  Description of Artificial Sequence: Synthetic oligonucleotide
  Target: LAMA2; (+) strand; PAM type: NRG; PAM sequence: CAG
taagaaattatagaatacct

SEQ ID NO: 170125 - DNA, 20 bp, Artificial Sequence
  Description of Artificial Sequence: Synthetic oligonucleotide
  Target: LAMA2; (+) strand; PAM type: NRG; PAM sequence: TGG
gaatacctcagcattgcact

SEQ ID NO: 170126 - DNA, 20 bp, Artificial Sequence
  Description of Artificial Sequence: Synthetic oligonucleotide
  Target: LAMA2; (+) strand; PAM type: NRG; PAM sequence: TGG
cagcattgcacttggttccc

SEQ ID NO: 170127 - DNA, 20 bp, Artificial Sequence
  Description of Artificial Sequence: Synthetic oligonucleotide
  Target: LAMA2; (+) strand; PAM type: NRG; PAM sequence: GGG
agcattgcacttggttccct

SEQ ID NO: 170128 - DNA, 20 bp, Artificial Sequence
  Description of Artificial Sequence: Synthetic oligonucleotide
  Target: LAMA2; (+) strand; PAM type: NRG; PAM sequence: GGG
gcattgcacttggttccctg

SEQ ID NO: 170129 - DNA, 20 bp, Artificial Sequence
  Description of Artificial Sequence: Synthetic oligonucleotide
  Target: LAMA2; (+) strand; PAM type: NRG; PAM sequence: TAG
tttaatatcttcactaccct

SEQ ID NO: 170130 - DNA, 20 bp, Artificial Sequence
  Description of Artificial Sequence: Synthetic oligonucleotide
  Target: LAMA2; (+) strand; PAM type: NRG; PAM sequence: AGG
ttaatatcttcactaccctt

SEQ ID NO: 170131 - DNA, 20 bp, Artificial Sequence
  Description of Artificial Sequence: Synthetic oligonucleotide
  Target: LAMA2; (+) strand; PAM type: NRG; PAM sequence: TAG
ttcactacccttaggaaatg

SEQ ID NO: 170132 - DNA, 20 bp, Artificial Sequence
  Description of Artificial Sequence: Synthetic oligonucleotide
  Target: LAMA2; (+) strand; PAM type: NRG; PAM sequence: AAG
ataatcattaaacaataatc

SEQ ID NO: 170133 - DNA, 20 bp, Artificial Sequence
  Description of Artificial Sequence: Synthetic oligonucleotide
  Target: LAMA2; (+) strand; PAM type: NRG; PAM sequence: TAG
ttaaacaataatcaagcaat

SEQ ID NO: 170134 - DNA, 20 bp, Artificial Sequence
  Description of Artificial Sequence: Synthetic oligonucleotide
  Target: LAMA2; (+) strand; PAM type: NRG; PAM sequence: AAG
acaataatcaagcaattagc

SEQ ID NO: 170135 - DNA, 20 bp, Artificial Sequence
  Description of Artificial Sequence: Synthetic oligonucleotide
  Target: LAMA2; (+) strand; PAM type: NRG; PAM sequence: AAG
atgtgttttacaaacattca

SEQ ID NO: 170136 - DNA, 20 bp, Artificial Sequence
  Description of Artificial Sequence: Synthetic oligonucleotide
  Target: LAMA2; (+) strand; PAM type: NRG; PAM sequence: TAG
tacaaacattcaaagtacat

SEQ ID NO: 170137 - DNA, 20 bp, Artificial Sequence
  Description of Artificial Sequence: Synthetic oligonucleotide
  Target: LAMA2; (+) strand; PAM type: NRG; PAM sequence: CAG
attcaaagtacattagcgca

SEQ ID NO: 170138 - DNA, 20 bp, Artificial Sequence
  Description of Artificial Sequence: Synthetic oligonucleotide
  Target: LAMA2; (+) strand; PAM type: NRG; PAM sequence: GAG
tcaaagtacattagcgcaca

SEQ ID NO: 170139 - DNA, 20 bp, Artificial Sequence
  Description of Artificial Sequence: Synthetic oligonucleotide
  Target: LAMA2; (+) strand; PAM type: NRG; PAM sequence: TGG
gtacattagcgcacagagac

SEQ ID NO: 170140 - DNA, 20 bp, Artificial Sequence
  Description of Artificial Sequence: Synthetic oligonucleotide
  Target: LAMA2; (+) strand; PAM type: NRG; PAM sequence: GAG
acattagcgcacagagactg

SEQ ID NO: 170141 - DNA, 20 bp, Artificial Sequence
  Description of Artificial Sequence: Synthetic oligonucleotide
  Target: LAMA2; (+) strand; PAM type: NRG; PAM sequence: CAG
cgcacagagactggagaaat

SEQ ID NO: 170142 - DNA, 20 bp, Artificial Sequence
  Description of Artificial Sequence: Synthetic oligonucleotide
  Target: LAMA2; (+) strand; PAM type: NRG; PAM sequence: AAG
cagagactggagaaatcagt

SEQ ID NO: 170143 - DNA, 20 bp, Artificial Sequence
  Description of Artificial Sequence: Synthetic oligonucleotide
  Target: LAMA2; (+) strand; PAM type: NRG; PAM sequence: CAG
ctggagaaatcagtaagatt

SEQ ID NO: 170144 - DNA, 20 bp, Artificial Sequence
  Description of Artificial Sequence: Synthetic oligonucleotide
  Target: LAMA2; (+) strand; PAM type: NRG; PAM sequence: AGG
tggagaaatcagtaagattc

SEQ ID NO: 170145 - DNA, 20 bp, Artificial Sequence
  Description of Artificial Sequence: Synthetic oligonucleotide
  Target: LAMA2; (+) strand; PAM type: NRG; PAM sequence: GGG
ggagaaatcagtaagattca

SEQ ID NO: 170146 - DNA, 20 bp, Artificial Sequence
  Description of Artificial Sequence: Synthetic oligonucleotide
  Target: LAMA2; (+) strand; PAM type: NRG; PAM sequence: CAG
tcagtaagattcagggtaac

SEQ ID NO: 170147 - DNA, 20 bp, Artificial Sequence
  Description of Artificial Sequence: Synthetic oligonucleotide
  Target: LAMA2; (+) strand; PAM type: NRG; PAM sequence: GAG
agtaagattcagggtaacca

SEQ ID NO: 170148 - DNA, 20 bp, Artificial Sequence
  Description of Artificial Sequence: Synthetic oligonucleotide
  Target: LAMA2; (+) strand; PAM type: NRG; PAM sequence: GAG
ccagagaatgtaccattact

SEQ ID NO: 170149 - DNA, 20 bp, Artificial Sequence
  Description of Artificial Sequence: Synthetic oligonucleotide
  Target: LAMA2; (+) strand; PAM type: NRG; PAM sequence: GAG
agagaatgtaccattactga

SEQ ID NO: 170150 - DNA, 20 bp, Artificial Sequence
  Description of Artificial Sequence: Synthetic oligonucleotide
  Target: LAMA2; (+) strand; PAM type: NRG; PAM sequence: TGG
actgagagtataatttctgt

SEQ ID NO: 170151 - DNA, 20 bp, Artificial Sequence
  Description of Artificial Sequence: Synthetic oligonucleotide
  Target: LAMA2; (+) strand; PAM type: NRG; PAM sequence: AAG
ataatttctgttggaatttg

SEQ ID NO: 170152 - DNA, 20 bp, Artificial Sequence
  Description of Artificial Sequence: Synthetic oligonucleotide
  Target: LAMA2; (+) strand; PAM type: NRG; PAM sequence: TAG
ttctgttggaatttgaagtg

SEQ ID NO: 170153 - DNA, 20 bp, Artificial Sequence
  Description of Artificial Sequence: Synthetic oligonucleotide
  Target: LAMA2; (+) strand; PAM type: NRG; PAM sequence: TAG
ttgaagtgtagacacaattt

SEQ ID NO: 170154 - DNA, 20 bp, Artificial Sequence
  Description of Artificial Sequence: Synthetic oligonucleotide
  Target: LAMA2; (+) strand; PAM type: NRG; PAM sequence: TAG
aagtgtagacacaattttag

SEQ ID NO: 170155 - DNA, 20 bp, Artificial Sequence
  Description of Artificial Sequence: Synthetic oligonucleotide
  Target: LAMA2; (+) strand; PAM type: NRG; PAM sequence: GAG
gtgtagacacaattttagta

SEQ ID NO: 170156 - DNA, 20 bp, Artificial Sequence
  Description of Artificial Sequence: Synthetic oligonucleotide
  Target: LAMA2; (+) strand; PAM type: NRG; PAM sequence: AAG
tagacacaattttagtagag

SEQ ID NO: 170157 - DNA, 20 bp, Artificial Sequence
  Description of Artificial Sequence: Synthetic oligonucleotide
  Target: LAMA2; (+) strand; PAM type: NRG; PAM sequence: TAG
tagagaagtatttgttgctt

SEQ ID NO: 170158 - DNA, 20 bp, Artificial Sequence
  Description of Artificial Sequence: Synthetic oligonucleotide
  Target: LAMA2; (+) strand; PAM type: NRG; PAM sequence: GAG
gagaagtatttgttgcttta

SEQ ID NO: 170159 - DNA, 20 bp, Artificial Sequence
  Description of Artificial Sequence: Synthetic oligonucleotide
  Target: LAMA2; (+) strand; PAM type: NRG; PAM sequence: AGG
agaagtatttgttgctttag

SEQ ID NO: 170160 - DNA, 20 bp, Artificial Sequence
  Description of Artificial Sequence: Synthetic oligonucleotide
  Target: LAMA2; (+) strand; PAM type: NRG; PAM sequence: AAG
agtatttgttgctttagagg

SEQ ID NO: 170161 - DNA, 20 bp, Artificial Sequence
  Description of Artificial Sequence: Synthetic oligonucleotide
  Target: LAMA2; (+) strand; PAM type: NRG; PAM sequence: AGG
gtatttgttgctttagagga

SEQ ID NO: 170162 - DNA, 20 bp, Artificial Sequence
  Description of Artificial Sequence: Synthetic oligonucleotide
  Target: LAMA2; (+) strand; PAM type: NRG; PAM sequence: AAG
tgctttagaggaaggcatct

SEQ ID NO: 170163 - DNA, 20 bp, Artificial Sequence
  Description of Artificial Sequence: Synthetic oligonucleotide
  Target: LAMA2; (+) strand; PAM type: NRG; PAM sequence: TGG
aagatttattcactacacat

SEQ ID NO: 170164 - DNA, 20 bp, Artificial Sequence
  Description of Artificial Sequence: Synthetic oligonucleotide
  Target: LAMA2; (+) strand; PAM type: NRG; PAM sequence: TAG
atttattcactacacattgg

SEQ ID NO: 170165 - DNA, 20 bp, Artificial Sequence
  Description of Artificial Sequence: Synthetic oligonucleotide
  Target: LAMA2; (+) strand; PAM type: NRG; PAM sequence: TAG
cacattggtagatattcttt

SEQ ID NO: 170166 - DNA, 20 bp, Artificial Sequence
  Description of Artificial Sequence: Synthetic oligonucleotide
  Target: LAMA2; (+) strand; PAM type: NRG; PAM sequence: AGG
acattggtagatattctttt

SEQ ID NO: 170167 - DNA, 20 bp, Artificial Sequence
  Description of Artificial Sequence: Synthetic oligonucleotide
  Target: LAMA2; (+) strand; PAM type: NRG; PAM sequence: AAG
taattctgaccataaccttt

SEQ ID NO: 170168 - DNA, 20 bp, Artificial Sequence
  Description of Artificial Sequence: Synthetic oligonucleotide
  Target: LAMA2; (+) strand; PAM type: NRG; PAM sequence: AGG
aattctgaccataaccttta

SEQ ID NO: 170169 - DNA, 20 bp, Artificial Sequence
  Description of Artificial Sequence: Synthetic oligonucleotide
  Target: LAMA2; (+) strand; PAM type: NRG; PAM sequence: AAG
ctgaccataacctttaaggt

SEQ ID NO: 170170 - DNA, 20 bp, Artificial Sequence
  Description of Artificial Sequence: Synthetic oligonucleotide
  Target: LAMA2; (+) strand; PAM type: NRG; PAM sequence: CAG
gtattattatccctattttc

SEQ ID NO: 170171 - DNA, 20 bp, Artificial Sequence
  Description of Artificial Sequence: Synthetic oligonucleotide
  Target: LAMA2; (+) strand; PAM type: NRG; PAM sequence: AAG
ttattatccctattttccag

SEQ ID NO: 170172 - DNA, 20 bp, Artificial Sequence
  Description of Artificial Sequence: Synthetic oligonucleotide
  Target: LAMA2; (+) strand; PAM type: NRG; PAM sequence: AAG
ttatccctattttccagaag

SEQ ID NO: 170173 - DNA, 20 bp, Artificial Sequence
  Description of Artificial Sequence: Synthetic oligonucleotide
  Target: LAMA2; (+) strand; PAM type: NRG; PAM sequence: AAG
aaaccaataatgatgataac

SEQ ID NO: 170174 - DNA, 20 bp, Artificial Sequence
  Description of Artificial Sequence: Synthetic oligonucleotide
  Target: LAMA2; (+) strand; PAM type: NRG; PAM sequence: AAG
aataactaacatttattgaa

SEQ ID NO: 170175 - DNA, 20 bp, Artificial Sequence
  Description of Artificial Sequence: Synthetic oligonucleotide
  Target: LAMA2; (+) strand; PAM type: NRG; PAM sequence: TAG
actaacatttattgaaaagc

SEQ ID NO: 170176 - DNA, 20 bp, Artificial Sequence
  Description of Artificial Sequence: Synthetic oligonucleotide
  Target: LAMA2; (+) strand; PAM type: NRG; PAM sequence: AGG
ctaacatttattgaaaagct

SEQ ID NO: 170177 - DNA, 20 bp, Artificial Sequence
  Description of Artificial Sequence: Synthetic oligonucleotide
  Target: LAMA2; (+) strand; PAM type: NRG; PAM sequence: AAG
aaaagctaggcaattgactg

SEQ ID NO: 170178 - DNA, 20 bp, Artificial Sequence
  Description of Artificial Sequence: Synthetic oligonucleotide
  Target: LAMA2; (+) strand; PAM type: NRG; PAM sequence: TGG
caattgactgaagtcttaaa

SEQ ID NO: 170179 - DNA, 20 bp, Artificial Sequence
  Description of Artificial Sequence: Synthetic oligonucleotide
  Target: LAMA2; (+) strand; PAM type: NRG; PAM sequence: TAG
cttaaatggattaccataca

SEQ ID NO: 170180 - DNA, 20 bp, Artificial Sequence
  Description of Artificial Sequence: Synthetic oligonucleotide
  Target: LAMA2; (+) strand; PAM type: NRG; PAM sequence: CAG
attaccatacatagctttta

SEQ ID NO: 170181 - DNA, 20 bp, Artificial Sequence
  Description of Artificial Sequence: Synthetic oligonucleotide
  Target: LAMA2; (+) strand; PAM type: NRG; PAM sequence: AAG
atagcttttacagaaactcc

SEQ ID NO: 170182 - DNA, 20 bp, Artificial Sequence
  Description of Artificial Sequence: Synthetic oligonucleotide
  Target: LAMA2; (+) strand; PAM type: NRG; PAM sequence: TAG
tttacagaaactccaagaaa

SEQ ID NO: 170183 - DNA, 20 bp, Artificial Sequence
  Description of Artificial Sequence: Synthetic oligonucleotide
  Target: LAMA2; (+) strand; PAM type: NRG; PAM sequence: AGG
ttacagaaactccaagaaat

SEQ ID NO: 170184 - DNA, 20 bp, Artificial Sequence
  Description of Artificial Sequence: Synthetic oligonucleotide
  Target: LAMA2; (+) strand; PAM type: NRG; PAM sequence: AAG
agaaactccaagaaatagga

SEQ ID NO: 170185 - DNA, 20 bp, Artificial Sequence
  Description of Artificial Sequence: Synthetic oligonucleotide
  Target: LAMA2; (+) strand; PAM type: NRG; PAM sequence: AAG
aactccaagaaataggaaag

SEQ ID NO: 170186 - DNA, 20 bp, Artificial Sequence
  Description of Artificial Sequence: Synthetic oligonucleotide
  Target: LAMA2; (+) strand; PAM type: NRG; PAM sequence: TGG
aaataggaaagaagttgtca

SEQ ID NO: 170187 - DNA, 20 bp, Artificial Sequence
  Description of Artificial Sequence: Synthetic oligonucleotide
  Target: LAMA2; (+) strand; PAM type: NRG; PAM sequence: AAG
tccccaaatttatatgttga

SEQ ID NO: 170188 - DNA, 20 bp, Artificial Sequence
  Description of Artificial Sequence: Synthetic oligonucleotide
  Target: LAMA2; (+) strand; PAM type: NRG; PAM sequence: CAG
tatatgttgaaagtctgtca

SEQ ID NO: 170189 - DNA, 20 bp, Artificial Sequence
  Description of Artificial Sequence: Synthetic oligonucleotide
  Target: LAMA2; (+) strand; PAM type: NRG; PAM sequence: TGG
gaaagtctgtcacagtccat

SEQ ID NO: 170190 - DNA, 20 bp, Artificial Sequence
  Description of Artificial Sequence: Synthetic oligonucleotide
  Target: LAMA2; (+) strand; PAM type: NRG; PAM sequence: GAG
aagtctgtcacagtccattg

SEQ ID NO: 170191 - DNA, 20 bp, Artificial Sequence
  Description of Artificial Sequence: Synthetic oligonucleotide
  Target: LAMA2; (+) strand; PAM type: NRG; PAM sequence: TAG
gacaaataccataaactgat

SEQ ID NO: 170192 - DNA, 20 bp, Artificial Sequence
  Description of Artificial Sequence: Synthetic oligonucleotide
  Target: LAMA2; (+) strand; PAM type: NRG; PAM sequence: TAG
actgattagcttataaacaa

SEQ ID NO: 170193 - DNA, 20 bp, Artificial Sequence
  Description of Artificial Sequence: Synthetic oligonucleotide
  Target: LAMA2; (+) strand; PAM type: NRG; PAM sequence: CAG
caatagaaatatatctctca

SEQ ID NO: 170194 - DNA, 20 bp, Artificial Sequence
  Description of Artificial Sequence: Synthetic oligonucleotide
  Target: LAMA2; (+) strand; PAM type: NRG; PAM sequence: GAG
aatatatctctcacagttct

SEQ ID NO: 170195 - DNA, 20 bp, Artificial Sequence
  Description of Artificial Sequence: Synthetic oligonucleotide
  Target: LAMA2; (+) strand; PAM type: NRG; PAM sequence: AGG
atatatctctcacagttctg

SEQ ID NO: 170196 - DNA, 20 bp, Artificial Sequence
  Description of Artificial Sequence: Synthetic oligonucleotide
  Target: LAMA2; (+) strand; PAM type: NRG; PAM sequence: TGG
atctctcacagttctgaggc

SEQ ID NO: 170197 - DNA, 20 bp, Artificial Sequence
  Description of Artificial Sequence: Synthetic oligonucleotide
  Target: LAMA2; (+) strand; PAM type: NRG; PAM sequence: GGG
tctctcacagttctgaggct

SEQ ID NO: 170198 - DNA, 20 bp, Artificial Sequence
  Description of Artificial Sequence: Synthetic oligonucleotide
  Target: LAMA2; (+) strand; PAM type: NRG; PAM sequence: AAG
ctcacagttctgaggctggg

SEQ ID NO: 170199 - DNA, 20 bp, Artificial Sequence
  Description of Artificial Sequence: Synthetic oligonucleotide
  Target: LAMA2; (+) strand; PAM type: NRG; PAM sequence: AAG
gttctgaggctgggaagccc

SEQ ID NO: 170200 - DNA, 20 bp, Artificial Sequence
  Description of Artificial Sequence: Synthetic oligonucleotide
  Target: LAMA2; (+) strand; PAM type: NRG; PAM sequence: AAG
aggctgggaagcccaagatc

SEQ ID NO: 170201 - DNA, 20 bp, Artificial Sequence
  Description of Artificial Sequence: Synthetic oligonucleotide
  Target: LAMA2; (+) strand; PAM type: NRG; PAM sequence: AGG
ggctgggaagcccaagatca

SEQ ID NO: 170202 - DNA, 20 bp, Artificial Sequence
  Description of Artificial Sequence: Synthetic oligonucleotide
  Target: LAMA2; (+) strand; PAM type: NRG; PAM sequence: CAG
gaagcccaagatcaaggtac

SEQ ID NO: 170203 - DNA, 20 bp, Artificial Sequence
  Description of Artificial Sequence: Synthetic oligonucleotide
  Target: LAMA2; (+) strand; PAM type: NRG; PAM sequence: TAG
taccagcaatgttcaatgtc

SEQ ID NO: 170204 - DNA, 20 bp, Artificial Sequence
  Description of Artificial Sequence: Synthetic oligonucleotide
  Target: LAMA2; (+) strand; PAM type: NRG; PAM sequence: AAG
gcaatgttcaatgtctagtg

SEQ ID NO: 170205 - DNA, 20 bp, Artificial Sequence
  Description of Artificial Sequence: Synthetic oligonucleotide
  Target: LAMA2; (+) strand; PAM type: NRG; PAM sequence: AGG
caatgttcaatgtctagtga

SEQ ID NO: 170206 - DNA, 20 bp, Artificial Sequence
  Description of Artificial Sequence: Synthetic oligonucleotide
  Target: LAMA2; (+) strand; PAM type: NRG; PAM sequence: CAG
tagtgaaggcctgttcctca

SEQ ID NO: 170207 - DNA, 20 bp, Artificial Sequence
  Description of Artificial Sequence: Synthetic oligonucleotide
  Target: LAMA2; (+) strand; PAM type: NRG; PAM sequence: GAG
gtgaaggcctgttcctcaca

SEQ ID NO: 170208 - DNA, 20 bp, Artificial Sequence
  Description of Artificial Sequence: Synthetic oligonucleotide
  Target: LAMA2; (+) strand; PAM type: NRG; PAM sequence: AGG
tgaaggcctgttcctcacag

SEQ ID NO: 170209 - DNA, 20 bp, Artificial Sequence
  Description of Artificial Sequence: Synthetic oligonucleotide
  Target: LAMA2; (+) strand; PAM type: NRG; PAM sequence: GGG
gaaggcctgttcctcacaga

SEQ ID NO: 170210 - DNA, 20 bp, Artificial Sequence
  Description of Artificial Sequence: Synthetic oligonucleotide
  Target: LAMA2; (+) strand; PAM type: NRG; PAM sequence: TGG
catttaattcatttaatatc

SEQ ID NO: 170211 - DNA, 20 bp, Artificial Sequence
  Description of Artificial Sequence: Synthetic oligonucleotide
  Target: LAMA2; (+) strand; PAM type: NRG; PAM sequence: GAG
tcatttaatatctggatact

SEQ ID NO: 170212 - DNA, 20 bp, Artificial Sequence
  Description of Artificial Sequence: Synthetic oligonucleotide
  Target: LAMA2; (+) strand; PAM type: NRG; PAM sequence: AGG
catttaatatctggatactg

SEQ ID NO: 170213 - DNA, 20 bp, Artificial Sequence
  Description of Artificial Sequence: Synthetic oligonucleotide
  Target: LAMA2; (+) strand; PAM type: NRG; PAM sequence: AAG
aatatctggatactgaggaa

SEQ ID NO: 170214 - DNA, 20 bp, Artificial Sequence
  Description of Artificial Sequence: Synthetic oligonucleotide
  Target: LAMA2; (+) strand; PAM type: NRG; PAM sequence: AGG
atatctggatactgaggaaa

SEQ ID NO: 170215 - DNA, 20 bp, Artificial Sequence
  Description of Artificial Sequence: Synthetic oligonucleotide
  Target: LAMA2; (+) strand; PAM type: NRG; PAM sequence: TAG
ctggatactgaggaaaagga

SEQ ID NO: 170216 - DNA, 20 bp, Artificial Sequence
  Description of Artificial Sequence: Synthetic oligonucleotide
  Target: LAMA2; (+) strand; PAM type: NRG; PAM sequence: TAG
atactgaggaaaaggatagc

SEQ ID NO: 170217 - DNA, 20 bp, Artificial Sequence
  Description of Artificial Sequence: Synthetic oligonucleotide
  Target: LAMA2; (+) strand; PAM type: NRG; PAM sequence: TGG
gaaaaggatagctagctctc

SEQ ID NO: 170218 - DNA, 20 bp, Artificial Sequence
  Description of Artificial Sequence: Synthetic oligonucleotide
  Target: LAMA2; (+) strand; PAM type: NRG; PAM sequence: GGG
aaaaggatagctagctctct

SEQ ID NO: 170219 - DNA, 20 bp, Artificial Sequence
  Description of Artificial Sequence: Synthetic oligonucleotide
  Target: LAMA2; (+) strand; PAM type: NRG; PAM sequence: GGG
aaaggatagctagctctctg

SEQ ID NO: 170220 - DNA, 20 bp, Artificial Sequence
  Description of Artificial Sequence: Synthetic oligonucleotide
  Target: LAMA2; (+) strand; PAM type: NRG; PAM sequence: AAG
ctctctggggtctctttaat

SEQ ID NO: 170221 - DNA, 20 bp, Artificial Sequence
  Description of Artificial Sequence: Synthetic oligonucleotide
  Target: LAMA2; (+) strand; PAM type: NRG; PAM sequence: AGG
tctctggggtctctttaata

SEQ ID NO: 170222 - DNA, 20 bp, Artificial Sequence
  Description of Artificial Sequence: Synthetic oligonucleotide
  Target: LAMA2; (+) strand; PAM type: NRG; PAM sequence: GGG
ctctggggtctctttaataa

SEQ ID NO: 170223 - DNA, 20 bp, Artificial Sequence
  Description of Artificial Sequence: Synthetic oligonucleotide
  Target: LAMA2; (+) strand; PAM type: NRG; PAM sequence: AAG
gggcactaatcccaatcatg

SEQ ID NO: 170224 - DNA, 20 bp, Artificial Sequence
  Description of Artificial Sequence: Synthetic oligonucleotide
  Target: LAMA2; (+) strand; PAM type: NRG; PAM sequence: AGG
ggcactaatcccaatcatga

SEQ ID NO: 170225 - DNA, 20 bp, Artificial Sequence
  Description of Artificial Sequence: Synthetic oligonucleotide
  Target: LAMA2; (+) strand; PAM type: NRG; PAM sequence: AAG
catgactcaatcacttccca

SEQ ID NO: 170226 - DNA, 20 bp, Artificial Sequence
  Description of Artificial Sequence: Synthetic oligonucleotide
  Target: LAMA2; (+) strand; PAM type: NRG; PAM sequence: AGG
atgactcaatcacttcccaa

SEQ ID NO: 170227 - DNA, 20 bp, Artificial Sequence
  Description of Artificial Sequence: Synthetic oligonucleotide
  Target: LAMA2; (+) strand; PAM type: NRG; PAM sequence: TGG
acctcctaatatcatcacat

SEQ ID NO: 170228 - DNA, 20 bp, Artificial Sequence
  Description of Artificial Sequence: Synthetic oligonucleotide
  Target: LAMA2; (+) strand; PAM type: NRG; PAM sequence: GGG
cctcctaatatcatcacatt

SEQ ID NO: 170229 - DNA, 20 bp, Artificial Sequence
  Description of Artificial Sequence: Synthetic oligonucleotide
  Target: LAMA2; (+) strand; PAM type: NRG; PAM sequence: TAG
aatatcatcacattgggaac

SEQ ID NO: 170230 - DNA, 20 bp, Artificial Sequence
  Description of Artificial Sequence: Synthetic oligonucleotide
  Target: LAMA2; (+) strand; PAM type: NRG; PAM sequence: AGG
atatcatcacattgggaact

SEQ ID NO: 170231 - DNA, 20 bp, Artificial Sequence
  Description of Artificial Sequence: Synthetic oligonucleotide
  Target: LAMA2; (+) strand; PAM type: NRG; PAM sequence: TGG
ggaactaggatgtcaacaca

SEQ ID NO: 170232 - DNA, 20 bp, Artificial Sequence
  Description of Artificial Sequence: Synthetic oligonucleotide
  Target: LAMA2; (+) strand; PAM type: NRG; PAM sequence: TAG
ggatgtcaacacatggatat

SEQ ID NO: 170233 - DNA, 20 bp, Artificial Sequence
  Description of Artificial Sequence: Synthetic oligonucleotide
  Target: LAMA2; (+) strand; PAM type: NRG; PAM sequence: AAG
tgtcaacacatggatattag

SEQ ID NO: 170234 - DNA, 20 bp, Artificial Sequence
  Description of Artificial Sequence: Synthetic oligonucleotide
  Target: LAMA2; (+) strand; PAM type: NRG; PAM sequence: AGG
gtcaacacatggatattaga

SEQ ID NO: 170235 - DNA, 20 bp, Artificial Sequence
  Description of Artificial Sequence: Synthetic oligonucleotide
  Target: LAMA2; (+) strand; PAM type: NRG; PAM sequence: GAG
cattctgccttctgccgtgt

SEQ ID NO: 170236 - DNA, 20 bp, Artificial Sequence
  Description of Artificial Sequence: Synthetic oligonucleotide
  Target: LAMA2; (+) strand; PAM type: NRG; PAM sequence: AGG
attctgccttctgccgtgtg

SEQ ID NO: 170237 - DNA, 20 bp, Artificial Sequence
  Description of Artificial Sequence: Synthetic oligonucleotide
  Target: LAMA2; (+) strand; PAM type: NRG; PAM sequence: CAG
ccttctgccgtgtgaggaca

SEQ ID NO: 170238 - DNA, 20 bp, Artificial Sequence
  Description of Artificial Sequence: Synthetic oligonucleotide
  Target: LAMA2; (+) strand; PAM type: NRG; PAM sequence: AGG
cttctgccgtgtgaggacac

SEQ ID NO: 170239 - DNA, 20 bp, Artificial Sequence
  Description of Artificial Sequence: Synthetic oligonucleotide
  Target: LAMA2; (+) strand; PAM type: NRG; PAM sequence: GGG
ttctgccgtgtgaggacaca

SEQ ID NO: 170240 - DNA, 20 bp, Artificial Sequence
  Description of Artificial Sequence: Synthetic oligonucleotide
  Target: LAMA2; (+) strand; PAM type: NRG; PAM sequence: GAG
ctgccgtgtgaggacacagg

SEQ ID NO: 170241 - DNA, 20 bp, Artificial Sequence
  Description of Artificial Sequence: Synthetic oligonucleotide
  Target: LAMA2; (+) strand; PAM type: NRG; PAM sequence: AAG
ccgtgtgaggacacagggag

SEQ ID NO: 170242 - DNA, 20 bp, Artificial Sequence
  Description of Artificial Sequence: Synthetic oligonucleotide
  Target: LAMA2; (+) strand; PAM type: NRG; PAM sequence: AGG
cgtgtgaggacacagggaga

SEQ ID NO: 170243 - DNA, 20 bp, Artificial Sequence
  Description of Artificial Sequence: Synthetic oligonucleotide
  Target: LAMA2; (+) strand; PAM type: NRG; PAM sequence: CAG
gtgaggacacagggagaagg

SEQ ID NO: 170244 - DNA, 20 bp, Artificial Sequence
  Description of Artificial Sequence: Synthetic oligonucleotide
  Target: LAMA2; (+) strand; PAM type: NRG; PAM sequence: CAG
gagaaggcagctgtgcttaa

SEQ ID NO: 170245 - DNA, 20 bp, Artificial Sequence
  Description of Artificial Sequence: Synthetic oligonucleotide
  Target: LAMA2; (+) strand; PAM type: NRG; PAM sequence: GAG
gaaggcagctgtgcttaaca

SEQ ID NO: 170246 - DNA, 20 bp, Artificial Sequence
  Description of Artificial Sequence: Synthetic oligonucleotide
  Target: LAMA2; (+) strand; PAM type: NRG; PAM sequence: GAG
tgtgcttaacagagccatgt

SEQ ID NO: 170247 - DNA, 20 bp, Artificial Sequence
  Description of Artificial Sequence: Synthetic oligonucleotide
  Target: LAMA2; (+) strand; PAM type: NRG; PAM sequence: CAG
gcttaacagagccatgtgag

SEQ ID NO: 170248 - DNA, 20 bp, Artificial Sequence
  Description of Artificial Sequence: Synthetic oligonucleotide
  Target: LAMA2; (+) strand; PAM type: NRG; PAM sequence: GAG
ttaacagagccatgtgagca

SEQ ID NO: 170249 - DNA, 20 bp, Artificial Sequence
  Description of Artificial Sequence: Synthetic oligonucleotide
  Target: LAMA2; (+) strand; PAM type: NRG; PAM sequence: AGG
taacagagccatgtgagcag

SEQ ID NO: 170250 - DNA, 20 bp, Artificial Sequence
  Description of Artificial Sequence: Synthetic oligonucleotide
  Target: LAMA2; (+) strand; PAM type: NRG; PAM sequence: CAG
cagagccatgtgagcagagg

SEQ ID NO: 170251 - DNA, 20 bp, Artificial Sequence
  Description of Artificial Sequence: Synthetic oligonucleotide
  Target: LAMA2; (+) strand; PAM type: NRG; PAM sequence: TGG
agccatgtgagcagaggcag

SEQ ID NO: 170252 - DNA, 20 bp, Artificial Sequence
  Description of Artificial Sequence: Synthetic oligonucleotide
  Target: LAMA2; (+) strand; PAM type: NRG; PAM sequence: TAG
gcagaggcagtggtgtgaat

SEQ ID NO: 170253 - DNA, 20 bp, Artificial Sequence
  Description of Artificial Sequence: Synthetic oligonucleotide
  Target: LAMA2; (+) strand; PAM type: NRG; PAM sequence: TGG
tggtgtgaattagatctgtc

SEQ ID NO: 170254 - DNA, 20 bp, Artificial Sequence
  Description of Artificial Sequence: Synthetic oligonucleotide
  Target: LAMA2; (+) strand; PAM type: NRG; PAM sequence: CAG
tgtgaattagatctgtctgg

SEQ ID NO: 170255 - DNA, 20 bp, Artificial Sequence
  Description of Artificial Sequence: Synthetic oligonucleotide
  Target: LAMA2; (+) strand; PAM type: NRG; PAM sequence: AAG
atctgtctggcagatattaa

SEQ ID NO: 170256 - DNA, 20 bp, Artificial Sequence
  Description of Artificial Sequence: Synthetic oligonucleotide
  Target: LAMA2; (+) strand; PAM type: NRG; PAM sequence: CAG
gtctggcagatattaaaagt

SEQ ID NO: 170257 - DNA, 20 bp, Artificial Sequence
  Description of Artificial Sequence: Synthetic oligonucleotide
  Target: LAMA2; (+) strand; PAM type: NRG; PAM sequence: TAG
atattaaaagtcagacctgc

SEQ ID NO: 170258 - DNA, 20 bp, Artificial Sequence
  Description of Artificial Sequence: Synthetic oligonucleotide
  Target: LAMA2; (+) strand; PAM type: NRG; PAM sequence: AAG
aaagtcagacctgctagtga

SEQ ID NO: 170259 - DNA, 20 bp, Artificial Sequence
  Description of Artificial Sequence: Synthetic oligonucleotide
  Target: LAMA2; (+) strand; PAM type: NRG; PAM sequence: AAG
cagacctgctagtgaaagat

SEQ ID NO: 170260 - DNA, 20 bp, Artificial Sequence
  Description of Artificial Sequence: Synthetic oligonucleotide
  Target: LAMA2; (+) strand; PAM type: NRG; PAM sequence: AGG
agacctgctagtgaaagata

SEQ ID NO: 170261 - DNA, 20 bp, Artificial Sequence
  Description of Artificial Sequence: Synthetic oligonucleotide
  Target: LAMA2; (+) strand; PAM type: NRG; PAM sequence: TGG
ctgctagtgaaagataaggc

SEQ ID NO: 170262 - DNA, 20 bp, Artificial Sequence
  Description of Artificial Sequence: Synthetic oligonucleotide
  Target: LAMA2; (+) strand; PAM type: NRG; PAM sequence: GAG
gctagtgaaagataaggctg

SEQ ID NO: 170263 - DNA, 20 bp, Artificial Sequence
  Description of Artificial Sequence: Synthetic oligonucleotide
  Target: LAMA2; (+) strand; PAM type: NRG; PAM sequence: CAG
aaagataaggctggagactt

SEQ ID NO: 170264 - DNA, 20 bp, Artificial Sequence
  Description of Artificial Sequence: Synthetic oligonucleotide
  Target: LAMA2; (+) strand; PAM type: NRG; PAM sequence: GAG
ataaggctggagacttcagt

SEQ ID NO: 170265 - DNA, 20 bp, Artificial Sequence
  Description of Artificial Sequence: Synthetic oligonucleotide
  Target: LAMA2; (+) strand; PAM type: NRG; PAM sequence: AGG
taaggctggagacttcagtg

SEQ ID NO: 170266 - DNA, 20 bp, Artificial Sequence
  Description of Artificial Sequence: Synthetic oligonucleotide
  Target: LAMA2; (+) strand; PAM type: NRG; PAM sequence: CAG
ggctggagacttcagtgagg

SEQ ID NO: 170267 - DNA, 20 bp, Artificial Sequence
  Description of Artificial Sequence: Synthetic oligonucleotide
  Target: LAMA2; (+) strand; PAM type: NRG; PAM sequence: AGG
gctggagacttcagtgaggc

SEQ ID NO: 170268 - DNA, 20 bp, Artificial Sequence
  Description of Artificial Sequence: Synthetic oligonucleotide
  Target: LAMA2; (+) strand; PAM type: NRG; PAM sequence: GGG
ctggagacttcagtgaggca

SEQ ID NO: 170269 - DNA, 20 bp, Artificial Sequence
  Description of Artificial Sequence: Synthetic oligonucleotide
  Target: LAMA2; (+) strand; PAM type: NRG; PAM sequence: TGG
agtgaggcagggtgatatga

SEQ ID NO: 170270 - DNA, 20 bp, Artificial Sequence
  Description of Artificial Sequence: Synthetic oligonucleotide
  Target: LAMA2; (+) strand; PAM type: NRG; PAM sequence: AAG
gatatgatggacaaccttga

SEQ ID NO: 170271 - DNA, 20 bp, Artificial Sequence
  Description of Artificial Sequence: Synthetic oligonucleotide
  Target: LAMA2; (+) strand; PAM type: NRG; PAM sequence: CAG
tgatggacaaccttgaaagc

SEQ ID NO: 170272 - DNA, 20 bp, Artificial Sequence
  Description of Artificial Sequence: Synthetic oligonucleotide
  Target: LAMA2; (+) strand; PAM type: NRG; PAM sequence: AGG
gatggacaaccttgaaagcc

SEQ ID NO: 170273 - DNA, 20 bp, Artificial Sequence
  Description of Artificial Sequence: Synthetic oligonucleotide
  Target: LAMA2; (+) strand; PAM type: NRG; PAM sequence: CAG
ggacaaccttgaaagccagg

SEQ ID NO: 170274 - DNA, 20 bp, Artificial Sequence
  Description of Artificial Sequence: Synthetic oligonucleotide
  Target: LAMA2; (+) strand; PAM type: NRG; PAM sequence: GAG
acaaccttgaaagccaggca

SEQ ID NO: 170275 - DNA, 20 bp, Artificial Sequence
  Description of Artificial Sequence: Synthetic oligonucleotide
  Target: LAMA2; (+) strand; PAM type: NRG; PAM sequence: AGG
caaccttgaaagccaggcag

SEQ ID NO: 170276 - DNA, 20 bp, Artificial Sequence
  Description of Artificial Sequence: Synthetic oligonucleotide
  Target: LAMA2; (+) strand; PAM type: NRG; PAM sequence: GAG
aaagccaggcagaggaacct

SEQ ID NO: 170277 - DNA, 20 bp, Artificial Sequence
  Description of Artificial Sequence: Synthetic oligonucleotide
  Target: LAMA2; (+) strand; PAM type: NRG; PAM sequence: TGG
aggaacctgagtttaccttg

SEQ ID NO: 170278 - DNA, 20 bp, Artificial Sequence
  Description of Artificial Sequence: Synthetic oligonucleotide
  Target: LAMA2; (+) strand; PAM type: NRG; PAM sequence: TGG
ctgagtttaccttgtggtcc

SEQ ID NO: 170279 - DNA, 20 bp, Artificial Sequence
  Description of Artificial Sequence: Synthetic oligonucleotide
  Target: LAMA2; (+) strand; PAM type: NRG; PAM sequence: CAG
taccttgtggtcctggtatt

SEQ ID NO: 170280 - DNA, 20 bp, Artificial Sequence
  Description of Artificial Sequence: Synthetic oligonucleotide
  Target: LAMA2; (+) strand; PAM type: NRG; PAM sequence: AGG
accttgtggtcctggtattc

SEQ ID NO: 170281 - DNA, 20 bp, Artificial Sequence
  Description of Artificial Sequence: Synthetic oligonucleotide
  Target: LAMA2; (+) strand; PAM type: NRG; PAM sequence: GGG
ccttgtggtcctggtattca

SEQ ID NO: 170282 - DNA, 20 bp, Artificial Sequence
  Description of Artificial Sequence: Synthetic oligonucleotide
  Target: LAMA2; (+) strand; PAM type: NRG; PAM sequence: AAG
tgtggtcctggtattcaggg

SEQ ID NO: 170283 - DNA, 20 bp, Artificial Sequence
  Description of Artificial Sequence: Synthetic oligonucleotide
  Target: LAMA2; (+) strand; PAM type: NRG; PAM sequence: AAG
tcctggtattcagggaagtg

SEQ ID NO: 170284 - DNA, 20 bp, Artificial Sequence
  Description of Artificial Sequence: Synthetic oligonucleotide
  Target: LAMA2; (+) strand; PAM type: NRG; PAM sequence: GAG
ctggtattcagggaagtgaa

SEQ ID NO: 170285 - DNA, 20 bp, Artificial Sequence
  Description of Artificial Sequence: Synthetic oligonucleotide
  Target: LAMA2; (+) strand; PAM type: NRG; PAM sequence: AAG
aagtgaagagttttaatgaa

SEQ ID NO: 170286 - DNA, 20 bp, Artificial Sequence
  Description of Artificial Sequence: Synthetic oligonucleotide
  Target: LAMA2; (+) strand; PAM type: NRG; PAM sequence: CAG
ttaatgaaaagaatgccgat

SEQ ID NO: 170287 - DNA, 20 bp, Artificial Sequence
  Description of Artificial Sequence: Synthetic oligonucleotide
  Target: LAMA2; (+) strand; PAM type: NRG; PAM sequence: TGG
tcagttattttccttgtata

SEQ ID NO: 170288 - DNA, 20 bp, Artificial Sequence
  Description of Artificial Sequence: Synthetic oligonucleotide
  Target: LAMA2; (+) strand; PAM type: NRG; PAM sequence: GAG
agttattttccttgtatatg

SEQ ID NO: 170289 - DNA, 20 bp, Artificial Sequence
  Description of Artificial Sequence: Synthetic oligonucleotide
  Target: LAMA2; (+) strand; PAM type: NRG; PAM sequence: GAG
ttattttccttgtatatgga

SEQ ID NO: 170290 - DNA, 20 bp, Artificial Sequence
  Description of Artificial Sequence: Synthetic oligonucleotide
  Target: LAMA2; (+) strand; PAM type: NRG; PAM sequence: CAG
ccttgtatatggagagaata

SEQ ID NO: 170291 - DNA, 20 bp, Artificial Sequence
  Description of Artificial Sequence: Synthetic oligonucleotide
  Target: LAMA2; (+) strand; PAM type: NRG; PAM sequence: TAG
tacagaaaaataaattaaac

SEQ ID NO: 170292 - DNA, 20 bp, Artificial Sequence
  Description of Artificial Sequence: Synthetic oligonucleotide
  Target: LAMA2; (+) strand; PAM type: NRG; PAM sequence: AAG
aaaaataaattaaactagaa

SEQ ID NO: 170293 - DNA, 20 bp, Artificial Sequence
  Description of Artificial Sequence: Synthetic oligonucleotide
  Target: LAMA2; (+) strand; PAM type: NRG; PAM sequence: TAG
aactagaaaagcaaacattt

SEQ ID NO: 170294 - DNA, 20 bp, Artificial Sequence
  Description of Artificial Sequence: Synthetic oligonucleotide
  Target: LAMA2; (+) strand; PAM type: NRG; PAM sequence: AAG
acattttaaaactaatactt

SEQ ID NO: 170295 - DNA, 20 bp, Artificial Sequence
  Description of Artificial Sequence: Synthetic oligonucleotide
  Target: LAMA2; (+) strand; PAM type: NRG; PAM sequence: TGG
taaaactaatacttaagcaa

SEQ ID NO: 170296 - DNA, 20 bp, Artificial Sequence
  Description of Artificial Sequence: Synthetic oligonucleotide
  Target: LAMA2; (+) strand; PAM type: NRG; PAM sequence: AAG
tacttaagcaatggatgatg

SEQ ID NO: 170297 - DNA, 20 bp, Artificial Sequence
  Description of Artificial Sequence: Synthetic oligonucleotide
  Target: LAMA2; (+) strand; PAM type: NRG; PAM sequence: AAG
aagcaatggatgatgaagta

SEQ ID NO: 170298 - DNA, 20 bp, Artificial Sequence
  Description of Artificial Sequence: Synthetic oligonucleotide
  Target: LAMA2; (+) strand; PAM type: NRG; PAM sequence: GAG
gcaatggatgatgaagtaaa

SEQ ID NO: 170299 - DNA, 20 bp, Artificial Sequence
  Description of Artificial Sequence: Synthetic oligonucleotide
  Target: LAMA2; (+) strand; PAM type: NRG; PAM sequence: AGG
caatggatgatgaagtaaag

SEQ ID NO: 170300 - DNA, 20 bp, Artificial Sequence
  Description of Artificial Sequence: Synthetic oligonucleotide
  Target: LAMA2; (+) strand; PAM type: NRG; PAM sequence: TAG
atgaagtaaagaggatccta

SEQ ID NO: 170301 - DNA, 20 bp, Artificial Sequence
  Description of Artificial Sequence: Synthetic oligonucleotide
  Target: LAMA2; (+) strand; PAM type: NRG; PAM sequence: AAG
aagtaaagaggatcctatag

SEQ ID NO: 170302 - DNA, 20 bp, Artificial Sequence
  Description of Artificial Sequence: Synthetic oligonucleotide
  Target: LAMA2; (+) strand; PAM type: NRG; PAM sequence: GAG
gtaaagaggatcctatagaa

SEQ ID NO: 170303 - DNA, 20 bp, Artificial Sequence
  Description of Artificial Sequence: Synthetic oligonucleotide
  Target: LAMA2; (+) strand; PAM type: NRG; PAM sequence: AGG
taaagaggatcctatagaag

SEQ ID NO: 170304 - DNA, 20 bp, Artificial Sequence
  Description of Artificial Sequence: Synthetic oligonucleotide
  Target: LAMA2; (+) strand; PAM type: NRG; PAM sequence: AAG
ccaatttgtgaacatcttct

SEQ ID NO: 170305 - DNA, 20 bp, Artificial Sequence
  Description of Artificial Sequence: Synthetic oligonucleotide
  Target: LAMA2; (+) strand; PAM type: NRG; PAM sequence: AAG
ttgtgaacatcttctaagcc

SEQ ID NO: 170306 - DNA, 20 bp, Artificial Sequence
  Description of Artificial Sequence: Synthetic oligonucleotide
  Target: LAMA2; (+) strand; PAM type: NRG; PAM sequence: AGG
tgtgaacatcttctaagcca

SEQ ID NO: 170307 - DNA, 20 bp, Artificial Sequence
  Description of Artificial Sequence: Synthetic oligonucleotide
  Target: LAMA2; (+) strand; PAM type: NRG; PAM sequence: GGG
gtgaacatcttctaagccaa

SEQ ID NO: 170308 - DNA, 20 bp, Artificial Sequence
  Description of Artificial Sequence: Synthetic oligonucleotide
  Target: LAMA2; (+) strand; PAM type: NRG; PAM sequence: CAG
atcttctaagccaagggatt

SEQ ID NO: 170309 - DNA, 20 bp, Artificial Sequence
  Description of Artificial Sequence: Synthetic oligonucleotide
  Target: LAMA2; (+) strand; PAM type: NRG; PAM sequence: TGG
ttcagtgacccatccacttc

SEQ ID NO: 170310 - DNA, 20 bp, Artificial Sequence
  Description of Artificial Sequence: Synthetic oligonucleotide
  Target: LAMA2; (+) strand; PAM type: NRG; PAM sequence: TGG
gtgacccatccacttctggc

SEQ ID NO: 170311 - DNA, 20 bp, Artificial Sequence
  Description of Artificial Sequence: Synthetic oligonucleotide
  Target: LAMA2; (+) strand; PAM type: NRG; PAM sequence: CAG
cttctggctggatattgatc

SEQ ID NO: 170312 - DNA, 20 bp, Artificial Sequence
  Description of Artificial Sequence: Synthetic oligonucleotide
  Target: LAMA2; (+) strand; PAM type: NRG; PAM sequence: TGG
ggatattgatccagatgacc

SEQ ID NO: 170313 - DNA, 20 bp, Artificial Sequence
  Description of Artificial Sequence: Synthetic oligonucleotide
  Target: LAMA2; (+) strand; PAM type: NRG; PAM sequence: TAG
cctggattatccttaaattc

SEQ ID NO: 170314 - DNA, 20 bp, Artificial Sequence
  Description of Artificial Sequence: Synthetic oligonucleotide
  Target: LAMA2; (+) strand; PAM type: NRG; PAM sequence: GAG
tcacttgacatttgtatact

SEQ ID NO: 170315 - DNA, 20 bp, Artificial Sequence
  Description of Artificial Sequence: Synthetic oligonucleotide
  Target: LAMA2; (+) strand; PAM type: NRG; PAM sequence: AGG
cacttgacatttgtatactg

SEQ ID NO: 170316 - DNA, 20 bp, Artificial Sequence
  Description of Artificial Sequence: Synthetic oligonucleotide
  Target: LAMA2; (+) strand; PAM type: NRG; PAM sequence: TGG
gtatactgaggatcaccttc

SEQ ID NO: 170317 - DNA, 20 bp, Artificial Sequence
  Description of Artificial Sequence: Synthetic oligonucleotide
  Target: LAMA2; (+) strand; PAM type: NRG; PAM sequence: AAG
ttctggtattataaaaactt

SEQ ID NO: 170318 - DNA, 20 bp, Artificial Sequence
  Description of Artificial Sequence: Synthetic oligonucleotide
  Target: LAMA2; (+) strand; PAM type: NRG; PAM sequence: CAG
ctcaatttctttaactatgt

SEQ ID NO: 170319 - DNA, 20 bp, Artificial Sequence
  Description of Artificial Sequence: Synthetic oligonucleotide
  Target: LAMA2; (+) strand; PAM type: NRG; PAM sequence: AAG
taactatgtcagtgctcccc

SEQ ID NO: 170320 - DNA, 20 bp, Artificial Sequence
  Description of Artificial Sequence: Synthetic oligonucleotide
  Target: LAMA2; (+) strand; PAM type: NRG; PAM sequence: CAG
tgtcagtgctccccaagctt

SEQ ID NO: 170321 - DNA, 20 bp, Artificial Sequence
  Description of Artificial Sequence: Synthetic oligonucleotide
  Target: LAMA2; (+) strand; PAM type: NRG; PAM sequence: AAG
tgctccccaagcttcagcca

SEQ ID NO: 170322 - DNA, 20 bp, Artificial Sequence
  Description of Artificial Sequence: Synthetic oligonucleotide
  Target: LAMA2; (+) strand; PAM type: NRG; PAM sequence: AAG
agcttcagccaaagaccatc

SEQ ID NO: 170323 - DNA, 20 bp, Artificial Sequence
  Description of Artificial Sequence: Synthetic oligonucleotide
  Target: LAMA2; (+) strand; PAM type: NRG; PAM sequence: AGG
gcttcagccaaagaccatca

SEQ ID NO: 170324 - DNA, 20 bp, Artificial Sequence
  Description of Artificial Sequence: Synthetic oligonucleotide
  Target: LAMA2; (+) strand; PAM type: NRG; PAM sequence: TGG
catcaaggacacacatgtga

SEQ ID NO: 170325 - DNA, 20 bp, Artificial Sequence
  Description of Artificial Sequence: Synthetic oligonucleotide
  Target: LAMA2; (+) strand; PAM type: NRG; PAM sequence: AAG
gacacacatgtgatggaaca

SEQ ID NO: 170326 - DNA, 20 bp, Artificial Sequence
  Description of Artificial Sequence: Synthetic oligonucleotide
  Target: LAMA2; (+) strand; PAM type: NRG; PAM sequence: TGG
acacatgtgatggaacaaag

SEQ ID NO: 170327 - DNA, 20 bp, Artificial Sequence
  Description of Artificial Sequence: Synthetic oligonucleotide
  Target: LAMA2; (+) strand; PAM type: NRG; PAM sequence: GGG
cacatgtgatggaacaaagt

SEQ ID NO: 170328 - DNA, 20 bp, Artificial Sequence
  Description of Artificial Sequence: Synthetic oligonucleotide
  Target: LAMA2; (+) strand; PAM type: NRG; PAM sequence: AAG
atttattaacttgttgcaac

SEQ ID NO: 170329 - DNA, 20 bp, Artificial Sequence
  Description of Artificial Sequence: Synthetic oligonucleotide
  Target: LAMA2; (+) strand; PAM type: NRG; PAM sequence: AGG
tttattaacttgttgcaaca

SEQ ID NO: 170330 - DNA, 20 bp, Artificial Sequence
  Description of Artificial Sequence: Synthetic oligonucleotide
  Target: LAMA2; (+) strand; PAM type: NRG; PAM sequence: GGG
ttattaacttgttgcaacaa

SEQ ID NO: 170331 - DNA, 20 bp, Artificial Sequence
  Description of Artificial Sequence: Synthetic oligonucleotide
  Target: LAMA2; (+) strand; PAM type: NRG; PAM sequence: GGG
tattaacttgttgcaacaag

SEQ ID NO: 170332 - DNA, 20 bp, Artificial Sequence
  Description of Artificial Sequence: Synthetic oligonucleotide
  Target: LAMA2; (+) strand; PAM type: NRG; PAM sequence: TGG
acaaggggcactgaacacca

SEQ ID NO: 170333 - DNA, 20 bp, Artificial Sequence
  Description of Artificial Sequence: Synthetic oligonucleotide
  Target: LAMA2; (+) strand; PAM type: NRG; PAM sequence: GGG
caaggggcactgaacaccat

SEQ ID NO: 170334 - DNA, 20 bp, Artificial Sequence
  Description of Artificial Sequence: Synthetic oligonucleotide
  Target: LAMA2; (+) strand; PAM type: NRG; PAM sequence: GGG
aaggggcactgaacaccatg

SEQ ID NO: 170335 - DNA, 20 bp, Artificial Sequence
  Description of Artificial Sequence: Synthetic oligonucleotide
  Target: LAMA2; (+) strand; PAM type: NRG; PAM sequence: GGG
aggggcactgaacaccatgg

SEQ ID NO: 170336 - DNA, 20 bp, Artificial Sequence
  Description of Artificial Sequence: Synthetic oligonucleotide
  Target: LAMA2; (+) strand; PAM type: NRG; PAM sequence: TGG
tgaacaccatgggggaattg

SEQ ID NO: 170337 - DNA, 20 bp, Artificial Sequence
  Description of Artificial Sequence: Synthetic oligonucleotide
  Target: LAMA2; (+) strand; PAM type: NRG; PAM sequence: GGG
gaacaccatgggggaattgt

SEQ ID NO: 170338 - DNA, 20 bp, Artificial Sequence
  Description of Artificial Sequence: Synthetic oligonucleotide
  Target: LAMA2; (+) strand; PAM type: NRG; PAM sequence: AAG
gaattgtgggctgtctcaat

SEQ ID NO: 170339 - DNA, 20 bp, Artificial Sequence
  Description of Artificial Sequence: Synthetic oligonucleotide
  Target: LAMA2; (+) strand; PAM type: NRG; PAM sequence: AAG
ttgtgggctgtctcaataag

SEQ ID NO: 170340 - DNA, 20 bp, Artificial Sequence
  Description of Artificial Sequence: Synthetic oligonucleotide
  Target: LAMA2; (+) strand; PAM type: NRG; PAM sequence: AGG
tgtgggctgtctcaataaga

SEQ ID NO: 170341 - DNA, 20 bp, Artificial Sequence
  Description of Artificial Sequence: Synthetic oligonucleotide
  Target: LAMA2; (+) strand; PAM type: NRG; PAM sequence: TAG
ctgtctcaataagaaggtgt

SEQ ID NO: 170342 - DNA, 20 bp, Artificial Sequence
  Description of Artificial Sequence: Synthetic oligonucleotide
  Target: LAMA2; (+) strand; PAM type: NRG; PAM sequence: AGG
tgtctcaataagaaggtgtt

SEQ ID NO: 170343 - DNA, 20 bp, Artificial Sequence
  Description of Artificial Sequence: Synthetic oligonucleotide
  Target: LAMA2; (+) strand; PAM type: NRG; PAM sequence: TAG
aaggtgttaggaataacttc

SEQ ID NO: 170344 - DNA, 20 bp, Artificial Sequence
  Description of Artificial Sequence: Synthetic oligonucleotide
  Target: LAMA2; (+) strand; PAM type: NRG; PAM sequence: GAG
aggaataacttctagtattt

SEQ ID NO: 170345 - DNA, 20 bp, Artificial Sequence
  Description of Artificial Sequence: Synthetic oligonucleotide
  Target: LAMA2; (+) strand; PAM type: NRG; PAM sequence: AGG
ggaataacttctagtatttg

SEQ ID NO: 170346 - DNA, 20 bp, Artificial Sequence
  Description of Artificial Sequence: Synthetic oligonucleotide
  Target: LAMA2; (+) strand; PAM type: NRG; PAM sequence: TAG
tctagtatttgaggctgtgc

SEQ ID NO: 170347 - DNA, 20 bp, Artificial Sequence
  Description of Artificial Sequence: Synthetic oligonucleotide
  Target: LAMA2; (+) strand; PAM type: NRG; PAM sequence: AAG
gaggctgtgctagataactt

SEQ ID NO: 170348 - DNA, 20 bp, Artificial Sequence
  Description of Artificial Sequence: Synthetic oligonucleotide
  Target: LAMA2; (+) strand; PAM type: NRG; PAM sequence: AGG
aggctgtgctagataactta

SEQ ID NO: 170349 - DNA, 20 bp, Artificial Sequence
  Description of Artificial Sequence: Synthetic oligonucleotide
  Target: LAMA2; (+) strand; PAM type: NRG; PAM sequence: TAG
tgtgctagataacttaaggt

SEQ ID NO: 170350 - DNA, 20 bp, Artificial Sequence
  Description of Artificial Sequence: Synthetic oligonucleotide
  Target: LAMA2; (+) strand; PAM type: NRG; PAM sequence: TGG
acttaaggttagcactcaac

SEQ ID NO: 170351 - DNA, 20 bp, Artificial Sequence
  Description of Artificial Sequence: Synthetic oligonucleotide
  Target: LAMA2; (+) strand; PAM type: NRG; PAM sequence: GGG
cttaaggttagcactcaact

SEQ ID NO: 170352 - DNA, 20 bp, Artificial Sequence
  Description of Artificial Sequence: Synthetic oligonucleotide
  Target: LAMA2; (+) strand; PAM type: NRG; PAM sequence: CAG
gcactcaactgggtgctatt

SEQ ID NO: 170353 - DNA, 20 bp, Artificial Sequence
  Description of Artificial Sequence: Synthetic oligonucleotide
  Target: LAMA2; (+) strand; PAM type: NRG; PAM sequence: AAG
ctcaactgggtgctattcag

SEQ ID NO: 170354 - DNA, 20 bp, Artificial Sequence
  Description of Artificial Sequence: Synthetic oligonucleotide
  Target: LAMA2; (+) strand; PAM type: NRG; PAM sequence: TGG
aactgggtgctattcagaag

SEQ ID NO: 170355 - DNA, 20 bp, Artificial Sequence
  Description of Artificial Sequence: Synthetic oligonucleotide
  Target: LAMA2; (+) strand; PAM type: NRG; PAM sequence: GGG
actgggtgctattcagaagt

SEQ ID NO: 170356 - DNA, 20 bp, Artificial Sequence
  Description of Artificial Sequence: Synthetic oligonucleotide
  Target: LAMA2; (+) strand; PAM type: NRG; PAM sequence: GAG
tgggtgctattcagaagtgg

SEQ ID NO: 170357 - DNA, 20 bp, Artificial Sequence
  Description of Artificial Sequence: Synthetic oligonucleotide
  Target: LAMA2; (+) strand; PAM type: NRG; PAM sequence: GAG
agaagtgggagtaattctgt

SEQ ID NO: 170358 - DNA, 20 bp, Artificial Sequence
  Description of Artificial Sequence: Synthetic oligonucleotide
  Target: LAMA2; (+) strand; PAM type: NRG; PAM sequence: TAG
agtattttgtgaatcctatc

SEQ ID NO: 170359 - DNA, 20 bp, Artificial Sequence
  Description of Artificial Sequence: Synthetic oligonucleotide
  Target: LAMA2; (+) strand; PAM type: NRG; PAM sequence: GAG
tattttgtgaatcctatcta

SEQ ID NO: 170360 - DNA, 20 bp, Artificial Sequence
  Description of Artificial Sequence: Synthetic oligonucleotide
  Target: LAMA2; (+) strand; PAM type: NRG; PAM sequence: AGG
attttgtgaatcctatctag

SEQ ID NO: 170361 - DNA, 20 bp, Artificial Sequence
  Description of Artificial Sequence: Synthetic oligonucleotide
  Target: LAMA2; (+) strand; PAM type: NRG; PAM sequence: GGG
ttttgtgaatcctatctaga

SEQ ID NO: 170362 - DNA, 20 bp, Artificial Sequence
  Description of Artificial Sequence: Synthetic oligonucleotide
  Target: LAMA2; (+) strand; PAM type: NRG; PAM sequence: AAG
tgtgaatcctatctagaggg

SEQ ID NO: 170363 - DNA, 20 bp, Artificial Sequence
  Description of Artificial Sequence: Synthetic oligonucleotide
  Target: LAMA2; (+) strand; PAM type: NRG; PAM sequence: AGG
gtgaatcctatctagaggga

SEQ ID NO: 170364 - DNA, 20 bp, Artificial Sequence
  Description of Artificial Sequence: Synthetic oligonucleotide
  Target: LAMA2; (+) strand; PAM type: NRG; PAM sequence: AAG
aatcctatctagagggaagg

SEQ ID NO: 170365 - DNA, 20 bp, Artificial Sequence
  Description of Artificial Sequence: Synthetic oligonucleotide
  Target: LAMA2; (+) strand; PAM type: NRG; PAM sequence: CAG
tatctagagggaaggaagaa

SEQ ID NO: 170366 - DNA, 20 bp, Artificial Sequence
  Description of Artificial Sequence: Synthetic oligonucleotide
  Target: LAMA2; (+) strand; PAM type: NRG; PAM sequence: GAG
tctagagggaaggaagaaca

SEQ ID NO: 170367 - DNA, 20 bp, Artificial Sequence
  Description of Artificial Sequence: Synthetic oligonucleotide
  Target: LAMA2; (+) strand; PAM type: NRG; PAM sequence: AGG
ctagagggaaggaagaacag

SEQ ID NO: 170368 - DNA, 20 bp, Artificial Sequence
  Description of Artificial Sequence: Synthetic oligonucleotide
  Target: LAMA2; (+) strand; PAM type: NRG; PAM sequence: GGG
tagagggaaggaagaacaga

SEQ ID NO: 170369 - DNA, 20 bp, Artificial Sequence
  Description of Artificial Sequence: Synthetic oligonucleotide
  Target: LAMA2; (+) strand; PAM type: NRG; PAM sequence: GAG
gagggaaggaagaacagagg

SEQ ID NO: 170370 - DNA, 20 bp, Artificial Sequence
  Description of Artificial Sequence: Synthetic oligonucleotide
  Target: LAMA2; (+) strand; PAM type: NRG; PAM sequence: AGG
agggaaggaagaacagaggg

SEQ ID NO: 170371 - DNA, 20 bp, Artificial Sequence
  Description of Artificial Sequence: Synthetic oligonucleotide
  Target: LAMA2; (+) strand; PAM type: NRG; PAM sequence: AAG
ggaagaacagagggaggata

SEQ ID NO: 170372 - DNA, 20 bp, Artificial Sequence
  Description of Artificial Sequence: Synthetic oligonucleotide
  Target: LAMA2; (+) strand; PAM type: NRG; PAM sequence: AAG
aggataaagctatgattaat

SEQ ID NO: 170373 - DNA, 20 bp, Artificial Sequence
  Description of Artificial Sequence: Synthetic oligonucleotide
  Target: LAMA2; (+) strand; PAM type: NRG; PAM sequence: AGG
ggataaagctatgattaata

SEQ ID NO: 170374 - DNA, 20 bp, Artificial Sequence
  Description of Artificial Sequence: Synthetic oligonucleotide
  Target: LAMA2; (+) strand; PAM type: NRG; PAM sequence: GAG
ataaagctatgattaataag

SEQ ID NO: 170375 - DNA, 20 bp, Artificial Sequence
  Description of Artificial Sequence: Synthetic oligonucleotide
  Target: LAMA2; (+) strand; PAM type: NRG; PAM sequence: AGG
taaagctatgattaataagg

SEQ ID NO: 170376 - DNA, 20 bp, Artificial Sequence
  Description of Artificial Sequence: Synthetic oligonucleotide
  Target: LAMA2; (+) strand; PAM type: NRG; PAM sequence: CAG
agctatgattaataaggagg

SEQ ID NO: 170377 - DNA, 20 bp, Artificial Sequence
  Description of Artificial Sequence: Synthetic oligonucleotide
  Target: LAMA2; (+) strand; PAM type: NRG; PAM sequence: TAG
gaggcagtgttcattcatat

SEQ ID NO: 170378 - DNA, 20 bp, Artificial Sequence
  Description of Artificial Sequence: Synthetic oligonucleotide
  Target: LAMA2; (+) strand; PAM type: NRG; PAM sequence: CAG
cagtgttcattcatattagc

SEQ ID NO: 170379 - DNA, 20 bp, Artificial Sequence
  Description of Artificial Sequence: Synthetic oligonucleotide
  Target: LAMA2; (+) strand; PAM type: NRG; PAM sequence: AGG
agtgttcattcatattagcc

SEQ ID NO: 170380 - DNA, 20 bp, Artificial Sequence
  Description of Artificial Sequence: Synthetic oligonucleotide
  Target: LAMA2; (+) strand; PAM type: NRG; PAM sequence: TGG
cattcatattagccaggaaa

SEQ ID NO: 170381 - DNA, 20 bp, Artificial Sequence
  Description of Artificial Sequence: Synthetic oligonucleotide
  Target: LAMA2; (+) strand; PAM type: NRG; PAM sequence: GGG
attcatattagccaggaaat

SEQ ID NO: 170382 - DNA, 20 bp, Artificial Sequence
  Description of Artificial Sequence: Synthetic oligonucleotide
  Target: LAMA2; (+) strand; PAM type: NRG; PAM sequence: GAG
tcatattagccaggaaatgg

SEQ ID NO: 170383 - DNA, 20 bp, Artificial Sequence
  Description of Artificial Sequence: Synthetic oligonucleotide
  Target: LAMA2; (+) strand; PAM type: NRG; PAM sequence: AGG
catattagccaggaaatggg

SEQ ID NO: 170384 - DNA, 20 bp, Artificial Sequence
  Description of Artificial Sequence: Synthetic oligonucleotide
  Target: LAMA2; (+) strand; PAM type: NRG; PAM sequence: TGG
ttagccaggaaatgggaggt

SEQ ID NO: 170385 - DNA, 20 bp, Artificial Sequence
  Description of Artificial Sequence: Synthetic oligonucleotide
  Target: LAMA2; (+) strand; PAM type: NRG; PAM sequence: GGG
tagccaggaaatgggaggtt

SEQ ID NO: 170386 - DNA, 20 bp, Artificial Sequence
  Description of Artificial Sequence: Synthetic oligonucleotide
  Target: LAMA2; (+) strand; PAM type: NRG; PAM sequence: GGG
agccaggaaatgggaggttg

SEQ ID NO: 170387 - DNA, 20 bp, Artificial Sequence
  Description of Artificial Sequence: Synthetic oligonucleotide
  Target: LAMA2; (+) strand; PAM type: NRG; PAM sequence: TAG
caggaaatgggaggttgggg

SEQ ID NO: 170388 - DNA, 20 bp, Artificial Sequence
  Description of Artificial Sequence: Synthetic oligonucleotide
  Target: LAMA2; (+) strand; PAM type: NRG; PAM sequence: TGG
gggaggttggggtagttttg

SEQ ID NO: 170389 - DNA, 20 bp, Artificial Sequence
  Description of Artificial Sequence: Synthetic oligonucleotide
  Target: LAMA2; (+) strand; PAM type: NRG; PAM sequence: TGG
ggtctacacaaaacccgcta

SEQ ID NO: 170390 - DNA, 20 bp, Artificial Sequence
  Description of Artificial Sequence: Synthetic oligonucleotide
  Target: LAMA2; (+) strand; PAM type: NRG; PAM sequence: TAG
gctatggttttgtctgcgct

SEQ ID NO: 170391 - DNA, 20 bp, Artificial Sequence
  Description of Artificial Sequence: Synthetic oligonucleotide
  Target: LAMA2; (+) strand; PAM type: NRG; PAM sequence: CAG
ttgtctgcgcttagacatta

SEQ ID NO: 170392 - DNA, 20 bp, Artificial Sequence
  Description of Artificial Sequence: Synthetic oligonucleotide
  Target: LAMA2; (+) strand; PAM type: NRG; PAM sequence: AGG
tgtctgcgcttagacattac

SEQ ID NO: 170393 - DNA, 20 bp, Artificial Sequence
  Description of Artificial Sequence: Synthetic oligonucleotide
  Target: LAMA2; (+) strand; PAM type: NRG; PAM sequence: GGG
gtctgcgcttagacattaca

SEQ ID NO: 170394 - DNA, 20 bp, Artificial Sequence
  Description of Artificial Sequence: Synthetic oligonucleotide
  Target: LAMA2; (+) strand; PAM type: NRG; PAM sequence: TAG
tgcgcttagacattacaggg

SEQ ID NO: 170395 - DNA, 20 bp, Artificial Sequence
  Description of Artificial Sequence: Synthetic oligonucleotide
  Target: LAMA2; (+) strand; PAM type: NRG; PAM sequence: TGG
ttttctgtttcattcatcac

SEQ ID NO: 170396 - DNA, 20 bp, Artificial Sequence
  Description of Artificial Sequence: Synthetic oligonucleotide
  Target: LAMA2; (+) strand; PAM type: NRG; PAM sequence: CAG
tgtttcattcatcactggtt

SEQ ID NO: 170397 - DNA, 20 bp, Artificial Sequence
  Description of Artificial Sequence: Synthetic oligonucleotide
  Target: LAMA2; (+) strand; PAM type: NRG; PAM sequence: GAG
tttcattcatcactggttca

SEQ ID NO: 170398 - DNA, 20 bp, Artificial Sequence
  Description of Artificial Sequence: Synthetic oligonucleotide
  Target: LAMA2; (+) strand; PAM type: NRG; PAM sequence: TAG
cagagtgaccttgtctaatt

SEQ ID NO: 170399 - DNA, 20 bp, Artificial Sequence
  Description of Artificial Sequence: Synthetic oligonucleotide
  Target: LAMA2; (+) strand; PAM type: NRG; PAM sequence: GAG
tgtctaatttagtgtcctat

SEQ ID NO: 170400 - DNA, 20 bp, Artificial Sequence
  Description of Artificial Sequence: Synthetic oligonucleotide
  Target: LAMA2; (+) strand; PAM type: NRG; PAM sequence: TAG
atgagattatttatgttcca

SEQ ID NO: 170401 - DNA, 20 bp, Artificial Sequence
  Description of Artificial Sequence: Synthetic oligonucleotide
  Target: LAMA2; (+) strand; PAM type: NRG; PAM sequence: AGG
tgagattatttatgttccat

SEQ ID NO: 170402 - DNA, 20 bp, Artificial Sequence
  Description of Artificial Sequence: Synthetic oligonucleotide
  Target: LAMA2; (+) strand; PAM type: NRG; PAM sequence: TGG
tgttccataggaaaaaaata

SEQ ID NO: 170403 - DNA, 20 bp, Artificial Sequence
  Description of Artificial Sequence: Synthetic oligonucleotide
  Target: LAMA2; (+) strand; PAM type: NRG; PAM sequence: TAG
aaaaaatatggccctgctgt

SEQ ID NO: 170404 - DNA, 20 bp, Artificial Sequence
  Description of Artificial Sequence: Synthetic oligonucleotide
  Target: LAMA2; (+) strand; PAM type: NRG; PAM sequence: AGG
aaaaatatggccctgctgtt

SEQ ID NO: 170405 - DNA, 20 bp, Artificial Sequence
  Description of Artificial Sequence: Synthetic oligonucleotide
  Target: LAMA2; (+) strand; PAM type: NRG; PAM sequence: CAG
atatggccctgctgttaggc

SEQ ID NO: 170406 - DNA, 20 bp, Artificial Sequence
  Description of Artificial Sequence: Synthetic oligonucleotide
  Target: LAMA2; (+) strand; PAM type: NRG; PAM sequence: TAG
cctgctgttaggccagttcc

SEQ ID NO: 170407 - DNA, 20 bp, Artificial Sequence
  Description of Artificial Sequence: Synthetic oligonucleotide
  Target: LAMA2; (+) strand; PAM type: NRG; PAM sequence: GAG
ggccagttcctagcaacacc

SEQ ID NO: 170408 - DNA, 20 bp, Artificial Sequence
  Description of Artificial Sequence: Synthetic oligonucleotide
  Target: LAMA2; (+) strand; PAM type: NRG; PAM sequence: AGG
gccagttcctagcaacaccg

SEQ ID NO: 170409 - DNA, 20 bp, Artificial Sequence
  Description of Artificial Sequence: Synthetic oligonucleotide
  Target: LAMA2; (+) strand; PAM type: NRG; PAM sequence: CAG
gttcctagcaacaccgagga

SEQ ID NO: 170410 - DNA, 20 bp, Artificial Sequence
  Description of Artificial Sequence: Synthetic oligonucleotide
  Target: LAMA2; (+) strand; PAM type: NRG; PAM sequence: AGG
ttcctagcaacaccgaggac

SEQ ID NO: 170411 - DNA, 20 bp, Artificial Sequence
  Description of Artificial Sequence: Synthetic oligonucleotide
  Target: LAMA2; (+) strand; PAM type: NRG; PAM sequence: CAG
tagcaacaccgaggacaggc

SEQ ID NO: 170412 - DNA, 20 bp, Artificial Sequence
  Description of Artificial Sequence: Synthetic oligonucleotide
  Target: LAMA2; (+) strand; PAM type: NRG; PAM sequence: TAG
aacaccgaggacaggccagt

SEQ ID NO: 170413 - DNA, 20 bp, Artificial Sequence
  Description of Artificial Sequence: Synthetic oligonucleotide
  Target: LAMA2; (+) strand; PAM type: NRG; PAM sequence: TAG
ccgaggacaggccagttagt

SEQ ID NO: 170414 - DNA, 20 bp, Artificial Sequence
  Description of Artificial Sequence: Synthetic oligonucleotide
  Target: LAMA2; (+) strand; PAM type: NRG; PAM sequence: TAG
caggccagttagttagcgcc

SEQ ID NO: 170415 - DNA, 20 bp, Artificial Sequence
  Description of Artificial Sequence: Synthetic oligonucleotide
  Target: LAMA2; (+) strand; PAM type: NRG; PAM sequence: CAG
ccagttagttagcgcctagc

SEQ ID NO: 170416 - DNA, 20 bp, Artificial Sequence
  Description of Artificial Sequence: Synthetic oligonucleotide
  Target: LAMA2; (+) strand; PAM type: NRG; PAM sequence: AGG
cagttagttagcgcctagcc

SEQ ID NO: 170417 - DNA, 20 bp, Artificial Sequence
  Description of Artificial Sequence: Synthetic oligonucleotide
  Target: LAMA2; (+) strand; PAM type: NRG; PAM sequence: AAG
cctagccaggtctctatgtt

SEQ ID NO: 170418 - DNA, 20 bp, Artificial Sequence
  Description of Artificial Sequence: Synthetic oligonucleotide
  Target: LAMA2; (+) strand; PAM type: NRG; PAM sequence: AGG
ctagccaggtctctatgtta

SEQ ID NO: 170419 - DNA, 20 bp, Artificial Sequence
  Description of Artificial Sequence: Synthetic oligonucleotide
  Target: LAMA2; (+) strand; PAM type: NRG; PAM sequence: TGG
tgatctgtgtctctgttaat

SEQ ID NO: 170420 - DNA, 20 bp, Artificial Sequence
  Description of Artificial Sequence: Synthetic oligonucleotide
  Target: LAMA2; (+) strand; PAM type: NRG; PAM sequence: TGG
tgtgtctctgttaattggaa

SEQ ID NO: 170421 - DNA, 20 bp, Artificial Sequence
  Description of Artificial Sequence: Synthetic oligonucleotide
  Target: LAMA2; (+) strand; PAM type: NRG; PAM sequence: GGG
gtgtctctgttaattggaat

SEQ ID NO: 170422 - DNA, 20 bp, Artificial Sequence
  Description of Artificial Sequence: Synthetic oligonucleotide
  Target: LAMA2; (+) strand; PAM type: NRG; PAM sequence: GAG
gtctctgttaattggaatgg

SEQ ID NO: 170423 - DNA, 20 bp, Artificial Sequence
  Description of Artificial Sequence: Synthetic oligonucleotide
  Target: LAMA2; (+) strand; PAM type: NRG; PAM sequence: TGG
attggaatgggagccttaaa

SEQ ID NO: 170424 - DNA, 20 bp, Artificial Sequence
  Description of Artificial Sequence: Synthetic oligonucleotide
  Target: LAMA2; (+) strand; PAM type: NRG; PAM sequence: GGG
ttggaatgggagccttaaat

SEQ ID NO: 170425 - DNA, 20 bp, Artificial Sequence
  Description of Artificial Sequence: Synthetic oligonucleotide
  Target: LAMA2; (+) strand; PAM type: NRG; PAM sequence: CAG
aatgggagccttaaatgggc

SEQ ID NO: 170426 - DNA, 20 bp, Artificial Sequence
  Description of Artificial Sequence: Synthetic oligonucleotide
  Target: LAMA2; (+) strand; PAM type: NRG; PAM sequence: AGG
atgggagccttaaatgggcc

SEQ ID NO: 170427 - DNA, 20 bp, Artificial Sequence
  Description of Artificial Sequence: Synthetic oligonucleotide
  Target: LAMA2; (+) strand; PAM type: NRG; PAM sequence: AAG
gagccttaaatgggccaggc

SEQ ID NO: 170428 - DNA, 20 bp, Artificial Sequence
  Description of Artificial Sequence: Synthetic oligonucleotide
  Target: LAMA2; (+) strand; PAM type: NRG; PAM sequence: AGG
agccttaaatgggccaggca

SEQ ID NO: 170429 - DNA, 20 bp, Artificial Sequence
  Description of Artificial Sequence: Synthetic oligonucleotide
  Target: LAMA2; (+) strand; PAM type: NRG; PAM sequence: GAG
ccttaaatgggccaggcaag

SEQ ID NO: 170430 - DNA, 20 bp, Artificial Sequence
  Description of Artificial Sequence: Synthetic oligonucleotide
  Target: LAMA2; (+) strand; PAM type: NRG; PAM sequence: AAG
gcacatttttaactgtcttc

SEQ ID NO: 170431 - DNA, 20 bp, Artificial Sequence
  Description of Artificial Sequence: Synthetic oligonucleotide
  Target: LAMA2; (+) strand; PAM type: NRG; PAM sequence: CAG
atttttaactgtcttcaaga

SEQ ID NO: 170432 - DNA, 20 bp, Artificial Sequence
  Description of Artificial Sequence: Synthetic oligonucleotide
  Target: LAMA2; (+) strand; PAM type: NRG; PAM sequence: TGG
cagtttgctctttcatgaaa

SEQ ID NO: 170433 - DNA, 20 bp, Artificial Sequence
  Description of Artificial Sequence: Synthetic oligonucleotide
  Target: LAMA2; (+) strand; PAM type: NRG; PAM sequence: TAG
ggaataatgcttacccccca

SEQ ID NO: 170434 - DNA, 20 bp, Artificial Sequence
  Description of Artificial Sequence: Synthetic oligonucleotide
  Target: LAMA2; (+) strand; PAM type: NRG; PAM sequence: GAG
aataatgcttaccccccata

SEQ ID NO: 170435 - DNA, 20 bp, Artificial Sequence
  Description of Artificial Sequence: Synthetic oligonucleotide
  Target: LAMA2; (+) strand; PAM type: NRG; PAM sequence: AAG
atgaaaaaacaaaacataaa

SEQ ID NO: 170436 - DNA, 20 bp, Artificial Sequence
  Description of Artificial Sequence: Synthetic oligonucleotide
  Target: LAMA2; (+) strand; PAM type: NRG; PAM sequence: TGG
aaaacaaaacataaaaagcc

SEQ ID NO: 170437 - DNA, 20 bp, Artificial Sequence
  Description of Artificial Sequence: Synthetic oligonucleotide
  Target: LAMA2; (+) strand; PAM type: NRG; PAM sequence: TAG
aacataaaaagcctggcaca

SEQ ID NO: 170438 - DNA, 20 bp, Artificial Sequence
  Description of Artificial Sequence: Synthetic oligonucleotide
  Target: LAMA2; (+) strand; PAM type: NRG; PAM sequence: AAG
gcacatagtaatttctcaat

SEQ ID NO: 170439 - DNA, 20 bp, Artificial Sequence
  Description of Artificial Sequence: Synthetic oligonucleotide
  Target: LAMA2; (+) strand; PAM type: NRG; PAM sequence: TGG
ttattatttgcctgaatatt

SEQ ID NO: 170440 - DNA, 20 bp, Artificial Sequence
  Description of Artificial Sequence: Synthetic oligonucleotide
  Target: LAMA2; (+) strand; PAM type: NRG; PAM sequence: AAG
tggcatgacactcaatgtgt

SEQ ID NO: 170441 - DNA, 20 bp, Artificial Sequence
  Description of Artificial Sequence: Synthetic oligonucleotide
  Target: LAMA2; (+) strand; PAM type: NRG; PAM sequence: CAG
acactcaatgtgtaagtgcc

SEQ ID NO: 170442 - DNA, 20 bp, Artificial Sequence
  Description of Artificial Sequence: Synthetic oligonucleotide
  Target: LAMA2; (+) strand; PAM type: NRG; PAM sequence: TAG
gtgtaagtgcccagttgaaa

SEQ ID NO: 170443 - DNA, 20 bp, Artificial Sequence
  Description of Artificial Sequence: Synthetic oligonucleotide
  Target: LAMA2; (+) strand; PAM type: NRG; PAM sequence: AAG
gtttccttatcttttctttg

SEQ ID NO: 170444 - DNA, 20 bp, Artificial Sequence
  Description of Artificial Sequence: Synthetic oligonucleotide
  Target: LAMA2; (+) strand; PAM type: NRG; PAM sequence: AGG
tttccttatcttttctttga

SEQ ID NO: 170445 - DNA, 20 bp, Artificial Sequence
  Description of Artificial Sequence: Synthetic oligonucleotide
  Target: LAMA2; (+) strand; PAM type: NRG; PAM sequence: GAG
cttatcttttctttgaaggt

SEQ ID NO: 170446 - DNA, 20 bp, Artificial Sequence
  Description of Artificial Sequence: Synthetic oligonucleotide
  Target: LAMA2; (+) strand; PAM type: NRG; PAM sequence: AAG
atcttttctttgaaggtgag

SEQ ID NO: 170447 - DNA, 20 bp, Artificial Sequence
  Description of Artificial Sequence: Synthetic oligonucleotide
  Target: LAMA2; (+) strand; PAM type: NRG; PAM sequence: AGG
tcttttctttgaaggtgaga

SEQ ID NO: 170448 - DNA, 20 bp, Artificial Sequence
  Description of Artificial Sequence: Synthetic oligonucleotide
  Target: LAMA2; (+) strand; PAM type: NRG; PAM sequence: AAG
tctttgaaggtgagaaggct

SEQ ID NO: 170449 - DNA, 20 bp, Artificial Sequence
  Description of Artificial Sequence: Synthetic oligonucleotide
  Target: LAMA2; (+) strand; PAM type: NRG; PAM sequence: AAG
ctgtcgaacactatcactgc

SEQ ID NO: 170450 - DNA, 20 bp, Artificial Sequence
  Description of Artificial Sequence: Synthetic oligonucleotide
  Target: LAMA2; (+) strand; PAM type: NRG; PAM sequence: AGG
tgtcgaacactatcactgca

SEQ ID NO: 170451 - DNA, 20 bp, Artificial Sequence
  Description of Artificial Sequence: Synthetic oligonucleotide
  Target: LAMA2; (+) strand; PAM type: NRG; PAM sequence: TGG
ccatttactaaaaatgttta

SEQ ID NO: 170452 - DNA, 20 bp, Artificial Sequence
  Description of Artificial Sequence: Synthetic oligonucleotide
  Target: LAMA2; (+) strand; PAM type: NRG; PAM sequence: GGG
catttactaaaaatgtttat

SEQ ID NO: 170453 - DNA, 20 bp, Artificial Sequence
  Description of Artificial Sequence: Synthetic oligonucleotide
  Target: LAMA2; (+) strand; PAM type: NRG; PAM sequence: TGG
tactaaaaatgtttatggga

SEQ ID NO: 170454 - DNA, 20 bp, Artificial Sequence
  Description of Artificial Sequence: Synthetic oligonucleotide
  Target: LAMA2; (+) strand; PAM type: NRG; PAM sequence: CAG
ttatgggatggaatcttttt

SEQ ID NO: 170455 - DNA, 20 bp, Artificial Sequence
  Description of Artificial Sequence: Synthetic oligonucleotide
  Target: LAMA2; (+) strand; PAM type: NRG; PAM sequence: CAG
ttcagcacttgctgtcacct

SEQ ID NO: 170456 - DNA, 20 bp, Artificial Sequence
  Description of Artificial Sequence: Synthetic oligonucleotide
  Target: LAMA2; (+) strand; PAM type: NRG; PAM sequence: CGG
agcacttgctgtcacctcag

SEQ ID NO: 170457 - DNA, 20 bp, Artificial Sequence
  Description of Artificial Sequence: Synthetic oligonucleotide
  Target: LAMA2; (+) strand; PAM type: NRG; PAM sequence: GGG
gcacttgctgtcacctcagc

SEQ ID NO: 170458 - DNA, 20 bp, Artificial Sequence
  Description of Artificial Sequence: Synthetic oligonucleotide
  Target: LAMA2; (+) strand; PAM type: NRG; PAM sequence: CAG
gctgtcacctcagcgggccc

SEQ ID NO: 170459 - DNA, 20 bp, Artificial Sequence
  Description of Artificial Sequence: Synthetic oligonucleotide
  Target: LAMA2; (+) strand; PAM type: NRG; PAM sequence: GAG
tgtcacctcagcgggcccca

SEQ ID NO: 170460 - DNA, 20 bp, Artificial Sequence
  Description of Artificial Sequence: Synthetic oligonucleotide
  Target: LAMA2; (+) strand; PAM type: NRG; PAM sequence: GAG
tcacctcagcgggccccaga

SEQ ID NO: 170461 - DNA, 20 bp, Artificial Sequence
  Description of Artificial Sequence: Synthetic oligonucleotide
  Target: LAMA2; (+) strand; PAM type: NRG; PAM sequence: AGG
cacctcagcgggccccagag

SEQ ID NO: 170462 - DNA, 20 bp, Artificial Sequence
  Description of Artificial Sequence: Synthetic oligonucleotide
  Target: LAMA2; (+) strand; PAM type: NRG; PAM sequence: CAG
gggccccagagaggcttatt

SEQ ID NO: 170463 - DNA, 20 bp, Artificial Sequence
  Description of Artificial Sequence: Synthetic oligonucleotide
  Target: LAMA2; (+) strand; PAM type: NRG; PAM sequence: TGG
cccagagaggcttattcagc

SEQ ID NO: 170464 - DNA, 20 bp, Artificial Sequence
  Description of Artificial Sequence: Synthetic oligonucleotide
  Target: LAMA2; (+) strand; PAM type: NRG; PAM sequence: CAG
agagaggcttattcagctgg

SEQ ID NO: 170465 - DNA, 20 bp, Artificial Sequence
  Description of Artificial Sequence: Synthetic oligonucleotide
  Target: LAMA2; (+) strand; PAM type: NRG; PAM sequence: GAG
agaggcttattcagctggca

SEQ ID NO: 170466 - DNA, 20 bp, Artificial Sequence
  Description of Artificial Sequence: Synthetic oligonucleotide
  Target: LAMA2; (+) strand; PAM type: NRG; PAM sequence: AGG
gaggcttattcagctggcag

SEQ ID NO: 170467 - DNA, 20 bp, Artificial Sequence
  Description of Artificial Sequence: Synthetic oligonucleotide
  Target: LAMA2; (+) strand; PAM type: NRG; PAM sequence: GGG
aggcttattcagctggcaga

SEQ ID NO: 170468 - DNA, 20 bp, Artificial Sequence
  Description of Artificial Sequence: Synthetic oligonucleotide
  Target: LAMA2; (+) strand; PAM type: NRG; PAM sequence: GAG
cactcgtgaccgaaatgaac

SEQ ID NO: 170469 - DNA, 20 bp, Artificial Sequence
  Description of Artificial Sequence: Synthetic oligonucleotide
  Target: LAMA2; (+) strand; PAM type: NRG; PAM sequence: CAG
gaaatgaacgagctgctgac

SEQ ID NO: 170470 - DNA, 20 bp, Artificial Sequence
  Description of Artificial Sequence: Synthetic oligonucleotide
  Target: LAMA2; (+) strand; PAM type: NRG; PAM sequence: AGG
aaatgaacgagctgctgacc

SEQ ID NO: 170471 - DNA, 20 bp, Artificial Sequence
  Description of Artificial Sequence: Synthetic oligonucleotide
  Target: LAMA2; (+) strand; PAM type: NRG; PAM sequence: GGG
aatgaacgagctgctgacca

SEQ ID NO: 170472 - DNA, 20 bp, Artificial Sequence
  Description of Artificial Sequence: Synthetic oligonucleotide
  Target: LAMA2; (+) strand; PAM type: NRG; PAM sequence: AAG
aacgagctgctgaccagggt

SEQ ID NO: 170473 - DNA, 20 bp, Artificial Sequence
  Description of Artificial Sequence: Synthetic oligonucleotide
  Target: LAMA2; (+) strand; PAM type: NRG; PAM sequence: AGG
acgagctgctgaccagggta

SEQ ID NO: 170474 - DNA, 20 bp, Artificial Sequence
  Description of Artificial Sequence: Synthetic oligonucleotide
  Target: LAMA2; (+) strand; PAM type: NRG; PAM sequence: TGG
agctgctgaccagggtaagg

SEQ ID NO: 170475 - DNA, 20 bp, Artificial Sequence
  Description of Artificial Sequence: Synthetic oligonucleotide
  Target: LAMA2; (+) strand; PAM type: NRG; PAM sequence: AAG
caaaattatgaatcttctga

SEQ ID NO: 170476 - DNA, 20 bp, Artificial Sequence
  Description of Artificial Sequence: Synthetic oligonucleotide
  Target: LAMA2; (+) strand; PAM type: NRG; PAM sequence: CAG
aattatgaatcttctgaaag

SEQ ID NO: 170477 - DNA, 20 bp, Artificial Sequence
  Description of Artificial Sequence: Synthetic oligonucleotide
  Target: LAMA2; (+) strand; PAM type: NRG; PAM sequence: TAG
atgaatcttctgaaagcaga

SEQ ID NO: 170478 - DNA, 20 bp, Artificial Sequence
  Description of Artificial Sequence: Synthetic oligonucleotide
  Target: LAMA2; (+) strand; PAM type: NRG; PAM sequence: AAG
gcagatagattatgtcaatg

SEQ ID NO: 170479 - DNA, 20 bp, Artificial Sequence
  Description of Artificial Sequence: Synthetic oligonucleotide
  Target: LAMA2; (+) strand; PAM type: NRG; PAM sequence: AGG
cagatagattatgtcaatga

SEQ ID NO: 170480 - DNA, 20 bp, Artificial Sequence
  Description of Artificial Sequence: Synthetic oligonucleotide
  Target: LAMA2; (+) strand; PAM type: NRG; PAM sequence: AAG
aatgaaggaaaattacttca

SEQ ID NO: 170481 - DNA, 20 bp, Artificial Sequence
  Description of Artificial Sequence: Synthetic oligonucleotide
  Target: LAMA2; (+) strand; PAM type: NRG; PAM sequence: TGG
cttcttcctaattcccaatt

SEQ ID NO: 170482 - DNA, 20 bp, Artificial Sequence
  Description of Artificial Sequence: Synthetic oligonucleotide
  Target: LAMA2; (+) strand; PAM type: NRG; PAM sequence: TAG
tcccaatttggtatataaaa

SEQ ID NO: 170483 - DNA, 20 bp, Artificial Sequence
  Description of Artificial Sequence: Synthetic oligonucleotide
  Target: LAMA2; (+) strand; PAM type: NRG; PAM sequence: TAG
ttctgcttcaaatcaaatca

SEQ ID NO: 170484 - DNA, 20 bp, Artificial Sequence
  Description of Artificial Sequence: Synthetic oligonucleotide
  Target: LAMA2; (+) strand; PAM type: NRG; PAM sequence: CAG
tcaaatcaaatcatagaaat

SEQ ID NO: 170485 - DNA, 20 bp, Artificial Sequence
  Description of Artificial Sequence: Synthetic oligonucleotide
  Target: LAMA2; (+) strand; PAM type: NRG; PAM sequence: TAG
aatcaaatcatagaaatcag

SEQ ID NO: 170486 - DNA, 20 bp, Artificial Sequence
  Description of Artificial Sequence: Synthetic oligonucleotide
  Target: LAMA2; (+) strand; PAM type: NRG; PAM sequence: CAG
tcatagaaatcagtagcacg

SEQ ID NO: 170487 - DNA, 20 bp, Artificial Sequence
  Description of Artificial Sequence: Synthetic oligonucleotide
  Target: LAMA2; (+) strand; PAM type: NRG; PAM sequence: TGG
tcagtagcacgcagaaaaat

SEQ ID NO: 170488 - DNA, 20 bp, Artificial Sequence
  Description of Artificial Sequence: Synthetic oligonucleotide
  Target: LAMA2; (+) strand; PAM type: NRG; PAM sequence: GGG
cagtagcacgcagaaaaatt

SEQ ID NO: 170489 - DNA, 20 bp, Artificial Sequence
  Description of Artificial Sequence: Synthetic oligonucleotide
  Target: LAMA2; (+) strand; PAM type: NRG; PAM sequence: GGG
agtagcacgcagaaaaattg

SEQ ID NO: 170490 - DNA, 20 bp, Artificial Sequence
  Description of Artificial Sequence: Synthetic oligonucleotide
  Target: LAMA2; (+) strand; PAM type: NRG; PAM sequence: TGG
gcagaaaaattggggatacc

SEQ ID NO: 170491 - DNA, 20 bp, Artificial Sequence
  Description of Artificial Sequence: Synthetic oligonucleotide
  Target: LAMA2; (+) strand; PAM type: NRG; PAM sequence: TGG
ggatacctggaaattgtcaa

SEQ ID NO: 170492 - DNA, 20 bp, Artificial Sequence
  Description of Artificial Sequence: Synthetic oligonucleotide
  Target: LAMA2; (+) strand; PAM type: NRG; PAM sequence: AAG
ggaaattgtcaatggctaaa

SEQ ID NO: 170493 - DNA, 20 bp, Artificial Sequence
  Description of Artificial Sequence: Synthetic oligonucleotide
  Target: LAMA2; (+) strand; PAM type: NRG; PAM sequence: CAG
ttgtcaatggctaaaaagtc

SEQ ID NO: 170494 - DNA, 20 bp, Artificial Sequence
  Description of Artificial Sequence: Synthetic oligonucleotide
  Target: LAMA2; (+) strand; PAM type: NRG; PAM sequence: CAG
ggctaaaaagtccagaatga

SEQ ID NO: 170495 - DNA, 20 bp, Artificial Sequence
  Description of Artificial Sequence: Synthetic oligonucleotide
  Target: LAMA2; (+) strand; PAM type: NRG; PAM sequence: GAG
ccagaatgacagtgtatttt

SEQ ID NO: 170496 - DNA, 20 bp, Artificial Sequence
  Description of Artificial Sequence: Synthetic oligonucleotide
  Target: LAMA2; (+) strand; PAM type: NRG; PAM sequence: CAG
tgtattttgagaactttatt

SEQ ID NO: 170497 - DNA, 20 bp, Artificial Sequence
  Description of Artificial Sequence: Synthetic oligonucleotide
  Target: LAMA2; (+) strand; PAM type: NRG; PAM sequence: TAG
attttgagaactttattcag

SEQ ID NO: 170498 - DNA, 20 bp, Artificial Sequence
  Description of Artificial Sequence: Synthetic oligonucleotide
  Target: LAMA2; (+) strand; PAM type: NRG; PAM sequence: TGG
actttattcagtagcctccg

SEQ ID NO: 170499 - DNA, 20 bp, Artificial Sequence
  Description of Artificial Sequence: Synthetic oligonucleotide
  Target: LAMA2; (+) strand; PAM type: NRG; PAM sequence: AAG
attcagtagcctccgtggta

SEQ ID NO: 170500 - DNA, 20 bp, Artificial Sequence
  Description of Artificial Sequence: Synthetic oligonucleotide
  Target: LAMA2; (+) strand; PAM type: NRG; PAM sequence: AAG
gtatctgttctgatttccaa

SEQ ID NO: 170501 - DNA, 20 bp, Artificial Sequence
  Description of Artificial Sequence: Synthetic oligonucleotide
  Target: LAMA2; (+) strand; PAM type: NRG; PAM sequence: AAG
gcactatctttgattgtgta

SEQ ID NO: 170502 - DNA, 20 bp, Artificial Sequence
  Description of Artificial Sequence: Synthetic oligonucleotide
  Target: LAMA2; (+) strand; PAM type: NRG; PAM sequence: GAG
actatctttgattgtgtaaa

SEQ ID NO: 170503 - DNA, 20 bp, Artificial Sequence
  Description of Artificial Sequence: Synthetic oligonucleotide
  Target: LAMA2; (+) strand; PAM type: NRG; PAM sequence: AAG
tctttgattgtgtaaagaga

SEQ ID NO: 170504 - DNA, 20 bp, Artificial Sequence
  Description of Artificial Sequence: Synthetic oligonucleotide
  Target: LAMA2; (+) strand; PAM type: NRG; PAM sequence: TGG
aaaacaaatgaaaatgcttg

SEQ ID NO: 170505 - DNA, 20 bp, Artificial Sequence
  Description of Artificial Sequence: Synthetic oligonucleotide
  Target: LAMA2; (+) strand; PAM type: NRG; PAM sequence: TGG
tggtctctttcatctcatcg

SEQ ID NO: 170506 - DNA, 20 bp, Artificial Sequence
  Description of Artificial Sequence: Synthetic oligonucleotide
  Target: LAMA2; (+) strand; PAM type: NRG; PAM sequence: GGG
ggtctctttcatctcatcgt

SEQ ID NO: 170507 - DNA, 20 bp, Artificial Sequence
  Description of Artificial Sequence: Synthetic oligonucleotide
  Target: LAMA2; (+) strand; PAM type: NRG; PAM sequence: TAG
tcatcgtgggatttttgcat

SEQ ID NO: 170508 - DNA, 20 bp, Artificial Sequence
  Description of Artificial Sequence: Synthetic oligonucleotide
  Target: LAMA2; (+) strand; PAM type: NRG; PAM sequence: TAG
gtgggatttttgcattagta

SEQ ID NO: 170509 - DNA, 20 bp, Artificial Sequence
  Description of Artificial Sequence: Synthetic oligonucleotide
  Target: LAMA2; (+) strand; PAM type: NRG; PAM sequence: CAG
tttgcattagtatagaaata

SEQ ID NO: 170510 - DNA, 20 bp, Artificial Sequence
  Description of Artificial Sequence: Synthetic oligonucleotide
  Target: LAMA2; (+) strand; PAM type: NRG; PAM sequence: CAG
tatagaaatacagtgtaaat

SEQ ID NO: 170511 - DNA, 20 bp, Artificial Sequence
  Description of Artificial Sequence: Synthetic oligonucleotide
  Target: LAMA2; (+) strand; PAM type: NRG; PAM sequence: AAG
aaatcagtctttccacacaa

SEQ ID NO: 170512 - DNA, 20 bp, Artificial Sequence
  Description of Artificial Sequence: Synthetic oligonucleotide
  Target: LAMA2; (+) strand; PAM type: NRG; PAM sequence: GAG
atcagtctttccacacaaaa

SEQ ID NO: 170513 - DNA, 20 bp, Artificial Sequence
  Description of Artificial Sequence: Synthetic oligonucleotide
  Target: LAMA2; (+) strand; PAM type: NRG; PAM sequence: AGG
tcagtctttccacacaaaag

SEQ ID NO: 170514 - DNA, 20 bp, Artificial Sequence
  Description of Artificial Sequence: Synthetic oligonucleotide
  Target: LAMA2; (+) strand; PAM type: NRG; PAM sequence: GAG
gaggaaatcttctctattgt

SEQ ID NO: 170515 - DNA, 20 bp, Artificial Sequence
  Description of Artificial Sequence: Synthetic oligonucleotide
  Target: LAMA2; (+) strand; PAM type: NRG; PAM sequence: AAG
ttctctattgtgagactcca

SEQ ID NO: 170516 - DNA, 20 bp, Artificial Sequence
  Description of Artificial Sequence: Synthetic oligonucleotide
  Target: LAMA2; (+) strand; PAM type: NRG; PAM sequence: AAG
tgtgagactccaaagtgctt

SEQ ID NO: 170517 - DNA, 20 bp, Artificial Sequence
  Description of Artificial Sequence: Synthetic oligonucleotide
  Target: LAMA2; (+) strand; PAM type: NRG; PAM sequence: AAG
agtgcttaagacacttttta

SEQ ID NO: 170518 - DNA, 20 bp, Artificial Sequence
  Description of Artificial Sequence: Synthetic oligonucleotide
  Target: LAMA2; (+) strand; PAM type: NRG; PAM sequence: CAG
cttaagacactttttaaagt

SEQ ID NO: 170519 - DNA, 20 bp, Artificial Sequence
  Description of Artificial Sequence: Synthetic oligonucleotide
  Target: LAMA2; (+) strand; PAM type: NRG; PAM sequence: AAG
ctttttaaagtcagaatgta

SEQ ID NO: 170520 - DNA, 20 bp, Artificial Sequence
  Description of Artificial Sequence: Synthetic oligonucleotide
  Target: LAMA2; (+) strand; PAM type: NRG; PAM sequence: CAG
aaagtccatgttgcatttat

SEQ ID NO: 170521 - DNA, 20 bp, Artificial Sequence
  Description of Artificial Sequence: Synthetic oligonucleotide
  Target: LAMA2; (+) strand; PAM type: NRG; PAM sequence: AGG
aagtccatgttgcatttatc

SEQ ID NO: 170522 - DNA, 20 bp, Artificial Sequence
  Description of Artificial Sequence: Synthetic oligonucleotide
  Target: LAMA2; (+) strand; PAM type: NRG; PAM sequence: AAG
tgcatttatcaggcttttta

SEQ ID NO: 170523 - DNA, 20 bp, Artificial Sequence
  Description of Artificial Sequence: Synthetic oligonucleotide
  Target: LAMA2; (+) strand; PAM type: NRG; PAM sequence: TGG
tatcaggctttttaaagaat

SEQ ID NO: 170524 - DNA, 20 bp, Artificial Sequence
  Description of Artificial Sequence: Synthetic oligonucleotide
  Target: LAMA2; (+) strand; PAM type: NRG; PAM sequence: TGG
ttaaattttcaaaactgcga

SEQ ID NO: 170525 - DNA, 20 bp, Artificial Sequence
  Description of Artificial Sequence: Synthetic oligonucleotide
  Target: LAMA2; (+) strand; PAM type: NRG; PAM sequence: CAG
atggtattaaaaactttttg

SEQ ID NO: 170526 - DNA, 20 bp, Artificial Sequence
  Description of Artificial Sequence: Synthetic oligonucleotide
  Target: LAMA2; (+) strand; PAM type: NRG; PAM sequence: TAG
tattaaaaactttttgcagt

SEQ ID NO: 170527 - DNA, 20 bp, Artificial Sequence
  Description of Artificial Sequence: Synthetic oligonucleotide
  Target: LAMA2; (+) strand; PAM type: NRG; PAM sequence: GAG
ttaaaaactttttgcagtta

SEQ ID NO: 170528 - DNA, 20 bp, Artificial Sequence
  Description of Artificial Sequence: Synthetic oligonucleotide
  Target: LAMA2; (+) strand; PAM type: NRG; PAM sequence: AAG
ctttttgcagttagagaatg

SEQ ID NO: 170529 - DNA, 20 bp, Artificial Sequence
  Description of Artificial Sequence: Synthetic oligonucleotide
  Target: LAMA2; (+) strand; PAM type: NRG; PAM sequence: AAG
agaatgaagaaaacaacata

SEQ ID NO: 170530 - DNA, 20 bp, Artificial Sequence
  Description of Artificial Sequence: Synthetic oligonucleotide
  Target: LAMA2; (+) strand; PAM type: NRG; PAM sequence: TGG
acataaagcccgccatcttg

SEQ ID NO: 170531 - DNA, 20 bp, Artificial Sequence
  Description of Artificial Sequence: Synthetic oligonucleotide
  Target: LAMA2; (+) strand; PAM type: NRG; PAM sequence: CAG
aaagcccgccatcttgtggc

SEQ ID NO: 170532 - DNA, 20 bp, Artificial Sequence
  Description of Artificial Sequence: Synthetic oligonucleotide
  Target: LAMA2; (+) strand; PAM type: NRG; PAM sequence: AAG
tgtggccagaaatatgcatg

SEQ ID NO: 170533 - DNA, 20 bp, Artificial Sequence
  Description of Artificial Sequence: Synthetic oligonucleotide
  Target: LAMA2; (+) strand; PAM type: NRG; PAM sequence: TAG
gccagaaatatgcatgaagc

SEQ ID NO: 170534 - DNA, 20 bp, Artificial Sequence
  Description of Artificial Sequence: Synthetic oligonucleotide
  Target: LAMA2; (+) strand; PAM type: NRG; PAM sequence: CGG
aatatgcatgaagctagaaa

SEQ ID NO: 170535 - DNA, 20 bp, Artificial Sequence
  Description of Artificial Sequence: Synthetic oligonucleotide
  Target: LAMA2; (+) strand; PAM type: NRG; PAM sequence: GGG
atatgcatgaagctagaaac

SEQ ID NO: 170536 - DNA, 20 bp, Artificial Sequence
  Description of Artificial Sequence: Synthetic oligonucleotide
  Target: LAMA2; (+) strand; PAM type: NRG; PAM sequence: GGG
tatgcatgaagctagaaacg

SEQ ID NO: 170537 - DNA, 20 bp, Artificial Sequence
  Description of Artificial Sequence: Synthetic oligonucleotide
  Target: LAMA2; (+) strand; PAM type: NRG; PAM sequence: AAG
aagctagaaacggggctgca

SEQ ID NO: 170538 - DNA, 20 bp, Artificial Sequence
  Description of Artificial Sequence: Synthetic oligonucleotide
  Target: LAMA2; (+) strand; PAM type: NRG; PAM sequence: CGG
agaaacggggctgcaaagta

SEQ ID NO: 170539 - DNA, 20 bp, Artificial Sequence
  Description of Artificial Sequence: Synthetic oligonucleotide
  Target: LAMA2; (+) strand; PAM type: NRG; PAM sequence: AAG
cggatttaatttgattatct

SEQ ID NO: 170540 - DNA, 20 bp, Artificial Sequence
  Description of Artificial Sequence: Synthetic oligonucleotide
  Target: LAMA2; (+) strand; PAM type: NRG; PAM sequence: GAG
gatttaatttgattatctaa

SEQ ID NO: 170541 - DNA, 20 bp, Artificial Sequence
  Description of Artificial Sequence: Synthetic oligonucleotide
  Target: LAMA2; (+) strand; PAM type: NRG; PAM sequence: AAG
tctaagagctttaaatgata

SEQ ID NO: 170542 - DNA, 20 bp, Artificial Sequence
  Description of Artificial Sequence: Synthetic oligonucleotide
  Target: LAMA2; (+) strand; PAM type: NRG; PAM sequence: GAG
taagagctttaaatgataaa

SEQ ID NO: 170543 - DNA, 20 bp, Artificial Sequence
  Description of Artificial Sequence: Synthetic oligonucleotide
  Target: LAMA2; (+) strand; PAM type: NRG; PAM sequence: TGG
ctttaaatgataaagagtat

SEQ ID NO: 170544 - DNA, 20 bp, Artificial Sequence
  Description of Artificial Sequence: Synthetic oligonucleotide
  Target: LAMA2; (+) strand; PAM type: NRG; PAM sequence: GAG
ttaaatgataaagagtattg

SEQ ID NO: 170545 - DNA, 20 bp, Artificial Sequence
  Description of Artificial Sequence: Synthetic oligonucleotide
  Target: LAMA2; (+) strand; PAM type: NRG; PAM sequence: TAG
atgataaagagtattggagc

SEQ ID NO: 170546 - DNA, 20 bp, Artificial Sequence
  Description of Artificial Sequence: Synthetic oligonucleotide
  Target: LAMA2; (+) strand; PAM type: NRG; PAM sequence: AAG
ataaagagtattggagctag

SEQ ID NO: 170547 - DNA, 20 bp, Artificial Sequence
  Description of Artificial Sequence: Synthetic oligonucleotide
  Target: LAMA2; (+) strand; PAM type: NRG; PAM sequence: AGG
taaagagtattggagctaga

SEQ ID NO: 170548 - DNA, 20 bp, Artificial Sequence
  Description of Artificial Sequence: Synthetic oligonucleotide
  Target: LAMA2; (+) strand; PAM type: NRG; PAM sequence: TGG
tattggagctagaaggttcc

SEQ ID NO: 170549 - DNA, 20 bp, Artificial Sequence
  Description of Artificial Sequence: Synthetic oligonucleotide
  Target: LAMA2; (+) strand; PAM type: NRG; PAM sequence: GGG
attggagctagaaggttcct

SEQ ID NO: 170550 - DNA, 20 bp, Artificial Sequence
  Description of Artificial Sequence: Synthetic oligonucleotide
  Target: LAMA2; (+) strand; PAM type: NRG; PAM sequence: GGG
ttggagctagaaggttcctg

SEQ ID NO: 170551 - DNA, 20 bp, Artificial Sequence
  Description of Artificial Sequence: Synthetic oligonucleotide
  Target: LAMA2; (+) strand; PAM type: NRG; PAM sequence: GAG
gaaggttcctggggattatc

SEQ ID NO: 170552 - DNA, 20 bp, Artificial Sequence
  Description of Artificial Sequence: Synthetic oligonucleotide
  Target: LAMA2; (+) strand; PAM type: NRG; PAM sequence: AAG
cgagtccactttgtatttta

SEQ ID NO: 170553 - DNA, 20 bp, Artificial Sequence
  Description of Artificial Sequence: Synthetic oligonucleotide
  Target: LAMA2; (+) strand; PAM type: NRG; PAM sequence: AAG
gtccactttgtattttaaag

SEQ ID NO: 170554 - DNA, 20 bp, Artificial Sequence
  Description of Artificial Sequence: Synthetic oligonucleotide
  Target: LAMA2; (+) strand; PAM type: NRG; PAM sequence: GAG
ccactttgtattttaaagaa

SEQ ID NO: 170555 - DNA, 20 bp, Artificial Sequence
  Description of Artificial Sequence: Synthetic oligonucleotide
  Target: LAMA2; (+) strand; PAM type: NRG; PAM sequence: CGG
attttaaagaagagctgcct

SEQ ID NO: 170556 - DNA, 20 bp, Artificial Sequence
  Description of Artificial Sequence: Synthetic oligonucleotide
  Target: LAMA2; (+) strand; PAM type: NRG; PAM sequence: GGG
ttttaaagaagagctgcctc

SEQ ID NO: 170557 - DNA, 20 bp, Artificial Sequence
  Description of Artificial Sequence: Synthetic oligonucleotide
  Target: LAMA2; (+) strand; PAM type: NRG; PAM sequence: CAG
agagctgcctcgggccatga

SEQ ID NO: 170558 - DNA, 20 bp, Artificial Sequence
  Description of Artificial Sequence: Synthetic oligonucleotide
  Target: LAMA2; (+) strand; PAM type: NRG; PAM sequence: TGG
acagtgaaacgaattaacaa

SEQ ID NO: 170559 - DNA, 20 bp, Artificial Sequence
  Description of Artificial Sequence: Synthetic oligonucleotide
  Target: LAMA2; (+) strand; PAM type: NRG; PAM sequence: CAG
gccatacaatttgctaaact

SEQ ID NO: 170560 - DNA, 20 bp, Artificial Sequence
  Description of Artificial Sequence: Synthetic oligonucleotide
  Target: LAMA2; (+) strand; PAM type: NRG; PAM sequence: AGG
ccatacaatttgctaaactc

SEQ ID NO: 170561 - DNA, 20 bp, Artificial Sequence
  Description of Artificial Sequence: Synthetic oligonucleotide
  Target: LAMA2; (+) strand; PAM type: NRG; PAM sequence: GGG
catacaatttgctaaactca

SEQ ID NO: 170562 - DNA, 20 bp, Artificial Sequence
  Description of Artificial Sequence: Synthetic oligonucleotide
  Target: LAMA2; (+) strand; PAM type: NRG; PAM sequence: AAG
tttgctaaactcagggactt

SEQ ID NO: 170563 - DNA, 20 bp, Artificial Sequence
  Description of Artificial Sequence: Synthetic oligonucleotide
  Target: LAMA2; (+) strand; PAM type: NRG; PAM sequence: TGG
ctaaactcagggacttaagc

SEQ ID NO: 170564 - DNA, 20 bp, Artificial Sequence
  Description of Artificial Sequence: Synthetic oligonucleotide
  Target: LAMA2; (+) strand; PAM type: NRG; PAM sequence: CAG
tcagggacttaagctggacc

SEQ ID NO: 170565 - DNA, 20 bp, Artificial Sequence
  Description of Artificial Sequence: Synthetic oligonucleotide
  Target: LAMA2; (+) strand; PAM type: NRG; PAM sequence: AAG
cttaagctggacccagtctc

SEQ ID NO: 170566 - DNA, 20 bp, Artificial Sequence
  Description of Artificial Sequence: Synthetic oligonucleotide
  Target: LAMA2; (+) strand; PAM type: NRG; PAM sequence: TGG
cccagtctcaagattcccac

SEQ ID NO: 170567 - DNA, 20 bp, Artificial Sequence
  Description of Artificial Sequence: Synthetic oligonucleotide
  Target: LAMA2; (+) strand; PAM type: NRG; PAM sequence: CAG
tctcaagattcccactggcc

SEQ ID NO: 170568 - DNA, 20 bp, Artificial Sequence
  Description of Artificial Sequence: Synthetic oligonucleotide
  Target: LAMA2; (+) strand; PAM type: NRG; PAM sequence: TAG
ggcccagtactttttctaca

SEQ ID NO: 170569 - DNA, 20 bp, Artificial Sequence
  Description of Artificial Sequence: Synthetic oligonucleotide
  Target: LAMA2; (+) strand; PAM type: NRG; PAM sequence: CGG
ttttctacatagcctgctgt

SEQ ID NO: 170570 - DNA, 20 bp, Artificial Sequence
  Description of Artificial Sequence: Synthetic oligonucleotide
  Target: LAMA2; (+) strand; PAM type: NRG; PAM sequence: TAG
tacatagcctgctgtcggtt

SEQ ID NO: 170571 - DNA, 20 bp, Artificial Sequence
  Description of Artificial Sequence: Synthetic oligonucleotide
  Target: LAMA2; (+) strand; PAM type: NRG; PAM sequence: AGG
acatagcctgctgtcggttt

SEQ ID NO: 170572 - DNA, 20 bp, Artificial Sequence
  Description of Artificial Sequence: Synthetic oligonucleotide
  Target: LAMA2; (+) strand; PAM type: NRG; PAM sequence: CAG
tcggtttaggaaaatatcca

SEQ ID NO: 170573 - DNA, 20 bp, Artificial Sequence
  Description of Artificial Sequence: Synthetic oligonucleotide
  Target: LAMA2; (+) strand; PAM type: NRG; PAM sequence: AGG
cggtttaggaaaatatccac

SEQ ID NO: 170574 - DNA, 20 bp, Artificial Sequence
  Description of Artificial Sequence: Synthetic oligonucleotide
  Target: LAMA2; (+) strand; PAM type: NRG; PAM sequence: TAG
atatccacaggaaaatcaaa

SEQ ID NO: 170575 - DNA, 20 bp, Artificial Sequence
  Description of Artificial Sequence: Synthetic oligonucleotide
  Target: LAMA2; (+) strand; PAM type: NRG; PAM sequence: AGG
tatccacaggaaaatcaaat

SEQ ID NO: 170576 - DNA, 20 bp, Artificial Sequence
  Description of Artificial Sequence: Synthetic oligonucleotide
  Target: LAMA2; (+) strand; PAM type: NRG; PAM sequence: GAG
ggaaaatcaaataggcttct

SEQ ID NO: 170577 - DNA, 20 bp, Artificial Sequence
  Description of Artificial Sequence: Synthetic oligonucleotide
  Target: LAMA2; (+) strand; PAM type: NRG; PAM sequence: CGG
gagcacataatgctaaacaa

SEQ ID NO: 170578 - DNA, 20 bp, Artificial Sequence
  Description of Artificial Sequence: Synthetic oligonucleotide
  Target: LAMA2; (+) strand; PAM type: NRG; PAM sequence: TAG
caacggccctgatgttacaa

SEQ ID NO: 170579 - DNA, 20 bp, Artificial Sequence
  Description of Artificial Sequence: Synthetic oligonucleotide
  Target: LAMA2; (+) strand; PAM type: NRG; PAM sequence: CAG
tagcatactaaacacttttt

SEQ ID NO: 170580 - DNA, 20 bp, Artificial Sequence
  Description of Artificial Sequence: Synthetic oligonucleotide
  Target: LAMA2; (+) strand; PAM type: NRG; PAM sequence: TAG
aacactttttcagaatctca

SEQ ID NO: 170581 - DNA, 20 bp, Artificial Sequence
  Description of Artificial Sequence: Synthetic oligonucleotide
  Target: LAMA2; (+) strand; PAM type: NRG; PAM sequence: TAG
agaatctcatagcaacaata

SEQ ID NO: 170582 - DNA, 20 bp, Artificial Sequence
  Description of Artificial Sequence: Synthetic oligonucleotide
  Target: LAMA2; (+) strand; PAM type: NRG; PAM sequence: CAG
tagcaacaatatagaatgta

SEQ ID NO: 170583 - DNA, 20 bp, Artificial Sequence
  Description of Artificial Sequence: Synthetic oligonucleotide
  Target: LAMA2; (+) strand; PAM type: NRG; PAM sequence: CGG
tagaatgtacagatacaaca

SEQ ID NO: 170584 - DNA, 20 bp, Artificial Sequence
  Description of Artificial Sequence: Synthetic oligonucleotide
  Target: LAMA2; (+) strand; PAM type: NRG; PAM sequence: GAG
gaatgtacagatacaacacg

SEQ ID NO: 170585 - DNA, 20 bp, Artificial Sequence
  Description of Artificial Sequence: Synthetic oligonucleotide
  Target: LAMA2; (+) strand; PAM type: NRG; PAM sequence: TAG
agtttcttgccaaatgtatg

SEQ ID NO: 170586 - DNA, 20 bp, Artificial Sequence
  Description of Artificial Sequence: Synthetic oligonucleotide
  Target: LAMA2; (+) strand; PAM type: NRG; PAM sequence: TAG
tgccaaatgtatgtagacat

SEQ ID NO: 170587 - DNA, 20 bp, Artificial Sequence
  Description of Artificial Sequence: Synthetic oligonucleotide
  Target: LAMA2; (+) strand; PAM type: NRG; PAM sequence: GAG
tgtagacattagattaaatt

SEQ ID NO: 170588 - DNA, 20 bp, Artificial Sequence
  Description of Artificial Sequence: Synthetic oligonucleotide
  Target: LAMA2; (+) strand; PAM type: NRG; PAM sequence: AAG
aattcatatttgttataaat

SEQ ID NO: 170589 - DNA, 20 bp, Artificial Sequence
  Description of Artificial Sequence: Synthetic oligonucleotide
  Target: LAMA2; (+) strand; PAM type: NRG; PAM sequence: CAG
tataaataagaattttctaa

SEQ ID NO: 170590 - DNA, 20 bp, Artificial Sequence
  Description of Artificial Sequence: Synthetic oligonucleotide
  Target: LAMA2; (+) strand; PAM type: NRG; PAM sequence: AGG
ataaataagaattttctaac

SEQ ID NO: 170591 - DNA, 20 bp, Artificial Sequence
  Description of Artificial Sequence: Synthetic oligonucleotide
  Target: LAMA2; (+) strand; PAM type: NRG; PAM sequence: TGG
aagaattttctaacaggtca

SEQ ID NO: 170592 - DNA, 20 bp, Artificial Sequence
  Description of Artificial Sequence: Synthetic oligonucleotide
  Target: LAMA2; (+) strand; PAM type: NRG; PAM sequence: TAG
aattttctaacaggtcatgg

SEQ ID NO: 170593 - DNA, 20 bp, Artificial Sequence
  Description of Artificial Sequence: Synthetic oligonucleotide
  Target: LAMA2; (+) strand; PAM type: NRG; PAM sequence: AAG
gtagaataaatcaatttaac

SEQ ID NO: 170594 - DNA, 20 bp, Artificial Sequence
  Description of Artificial Sequence: Synthetic oligonucleotide
  Target: LAMA2; (+) strand; PAM type: NRG; PAM sequence: AAG
ataaatgttcataacataca

SEQ ID NO: 170595 - DNA, 20 bp, Artificial Sequence
  Description of Artificial Sequence: Synthetic oligonucleotide
  Target: LAMA2; (+) strand; PAM type: NRG; PAM sequence: AAG
gttcataacatacaaagcct

SEQ ID NO: 170596 - DNA, 20 bp, Artificial Sequence
  Description of Artificial Sequence: Synthetic oligonucleotide
  Target: LAMA2; (+) strand; PAM type: NRG; PAM sequence: TGG
acaaagcctaagttacgtgt

SEQ ID NO: 170597 - DNA, 20 bp, Artificial Sequence
  Description of Artificial Sequence: Synthetic oligonucleotide
  Target: LAMA2; (+) strand; PAM type: NRG; PAM sequence: CAG
aagcctaagttacgtgttgg

SEQ ID NO: 170598 - DNA, 20 bp, Artificial Sequence
  Description of Artificial Sequence: Synthetic oligonucleotide
  Target: LAMA2; (+) strand; PAM type: NRG; PAM sequence: GAG
ggcagatgaaaaatatgaat

SEQ ID NO: 170599 - DNA, 20 bp, Artificial Sequence
  Description of Artificial Sequence: Synthetic oligonucleotide
  Target: LAMA2; (+) strand; PAM type: NRG; PAM sequence: AGG
gcagatgaaaaatatgaatg

SEQ ID NO: 170600 - DNA, 20 bp, Artificial Sequence
  Description of Artificial Sequence: Synthetic oligonucleotide
  Target: LAMA2; (+) strand; PAM type: NRG; PAM sequence: AAG
tgaggctcaatctgtcttca

SEQ ID NO: 170601 - DNA, 20 bp, Artificial Sequence
  Description of Artificial Sequence: Synthetic oligonucleotide
  Target: LAMA2; (+) strand; PAM type: NRG; PAM sequence: GAG
atctgtcttcaaagaacttt

SEQ ID NO: 170602 - DNA, 20 bp, Artificial Sequence
  Description of Artificial Sequence: Synthetic oligonucleotide
  Target: LAMA2; (+) strand; PAM type: NRG; PAM sequence: CAG
gtgtgtgtgtgtgtgtacat

SEQ ID NO: 170603 - DNA, 20 bp, Artificial Sequence
  Description of Artificial Sequence: Synthetic oligonucleotide
  Target: LAMA2; (+) strand; PAM type: NRG; PAM sequence: AAG
gtgtgtgtacatcagcattt

SEQ ID NO: 170604 - DNA, 20 bp, Artificial Sequence
  Description of Artificial Sequence: Synthetic oligonucleotide
  Target: LAMA2; (+) strand; PAM type: NRG; PAM sequence: TGG
tacatcagcatttaagtgta

SEQ ID NO: 170605 - DNA, 20 bp, Artificial Sequence
  Description of Artificial Sequence: Synthetic oligonucleotide
  Target: LAMA2; (+) strand; PAM type: NRG; PAM sequence: GAG
catcagcatttaagtgtatg

SEQ ID NO: 170606 - DNA, 20 bp, Artificial Sequence
  Description of Artificial Sequence: Synthetic oligonucleotide
  Target: LAMA2; (+) strand; PAM type: NRG; PAM sequence: AGG
atcagcatttaagtgtatgg

SEQ ID NO: 170607 - DNA, 20 bp, Artificial Sequence
  Description of Artificial Sequence: Synthetic oligonucleotide
  Target: LAMA2; (+) strand; PAM type: NRG; PAM sequence: TAG
aagtgtatggaggaccatat

SEQ ID NO: 170608 - DNA, 20 bp, Artificial Sequence
  Description of Artificial Sequence: Synthetic oligonucleotide
  Target: LAMA2; (+) strand; PAM type: NRG; PAM sequence: CAG
ccatattagacaactgcatg

SEQ ID NO: 170609 - DNA, 20 bp, Artificial Sequence
  Description of Artificial Sequence: Synthetic oligonucleotide
  Target: LAMA2; (+) strand; PAM type: NRG; PAM sequence: AGG
catattagacaactgcatgc

SEQ ID NO: 170610 - DNA, 20 bp, Artificial Sequence
  Description of Artificial Sequence: Synthetic oligonucleotide
  Target: LAMA2; (+) strand; PAM type: NRG; PAM sequence: AAG
ataaaacatgaaataaaata

SEQ ID NO: 170611 - DNA, 20 bp, Artificial Sequence
  Description of Artificial Sequence: Synthetic oligonucleotide
  Target: LAMA2; (+) strand; PAM type: NRG; PAM sequence: CGG
aacatgaaataaaataaagt

SEQ ID NO: 170612 - DNA, 20 bp, Artificial Sequence
  Description of Artificial Sequence: Synthetic oligonucleotide
  Target: LAMA2; (+) strand; PAM type: NRG; PAM sequence: AAG
atgaaataaaataaagtcgg

SEQ ID NO: 170613 - DNA, 20 bp, Artificial Sequence
  Description of Artificial Sequence: Synthetic oligonucleotide
  Target: LAMA2; (+) strand; PAM type: NRG; PAM sequence: TGG
aataaagtcggaagaaattc

SEQ ID NO: 170614 - DNA, 20 bp, Artificial Sequence
  Description of Artificial Sequence: Synthetic oligonucleotide
  Target: LAMA2; (+) strand; PAM type: NRG; PAM sequence: GAG
taaagtcggaagaaattctg

SEQ ID NO: 170615 - DNA, 20 bp, Artificial Sequence
  Description of Artificial Sequence: Synthetic oligonucleotide
  Target: LAMA2; (+) strand; PAM type: NRG; PAM sequence: TAG
tctggagaaatatttaataa

SEQ ID NO: 170616 - DNA, 20 bp, Artificial Sequence
  Description of Artificial Sequence: Synthetic oligonucleotide
  Target: LAMA2; (+) strand; PAM type: NRG; PAM sequence: TAG
atagaataatttcatctgct

SEQ ID NO: 170617 - DNA, 20 bp, Artificial Sequence
  Description of Artificial Sequence: Synthetic oligonucleotide
  Target: LAMA2; (+) strand; PAM type: NRG; PAM sequence: AGG
tagaataatttcatctgctt

SEQ ID NO: 170618 - DNA, 20 bp, Artificial Sequence
  Description of Artificial Sequence: Synthetic oligonucleotide
  Target: LAMA2; (+) strand; PAM type: NRG; PAM sequence: GGG
agaataatttcatctgctta

SEQ ID NO: 170619 - DNA, 20 bp, Artificial Sequence
  Description of Artificial Sequence: Synthetic oligonucleotide
  Target: LAMA2; (+) strand; PAM type: NRG; PAM sequence: GGG
gaataatttcatctgcttag

SEQ ID NO: 170620 - DNA, 20 bp, Artificial Sequence
  Description of Artificial Sequence: Synthetic oligonucleotide
  Target: LAMA2; (+) strand; PAM type: NRG; PAM sequence: TAG
ttcatctgcttaggggtaat

SEQ ID NO: 170621 - DNA, 20 bp, Artificial Sequence
  Description of Artificial Sequence: Synthetic oligonucleotide
  Target: LAMA2; (+) strand; PAM type: NRG; PAM sequence: TGG
aaaaaatttcatgtaataaa

SEQ ID NO: 170622 - DNA, 20 bp, Artificial Sequence
  Description of Artificial Sequence: Synthetic oligonucleotide
  Target: LAMA2; (+) strand; PAM type: NRG; PAM sequence: TGG
ttcacttaactaatactttt

SEQ ID NO: 170623 - DNA, 20 bp, Artificial Sequence
  Description of Artificial Sequence: Synthetic oligonucleotide
  Target: LAMA2; (+) strand; PAM type: NRG; PAM sequence: GGG
tcacttaactaatacttttt

SEQ ID NO: 170624 - DNA, 20 bp, Artificial Sequence
  Description of Artificial Sequence: Synthetic oligonucleotide
  Target: LAMA2; (+) strand; PAM type: NRG; PAM sequence: GAG
acttaactaatactttttgg

SEQ ID NO: 170625 - DNA, 20 bp, Artificial Sequence
  Description of Artificial Sequence: Synthetic oligonucleotide
  Target: LAMA2; (+) strand; PAM type: NRG; PAM sequence: TAG
tttgggagtctctcatgttc

SEQ ID NO: 170626 - DNA, 20 bp, Artificial Sequence
  Description of Artificial Sequence: Synthetic oligonucleotide
  Target: LAMA2; (+) strand; PAM type: NRG; PAM sequence: AGG
ttgggagtctctcatgttct

SEQ ID NO: 170627 - DNA, 20 bp, Artificial Sequence
  Description of Artificial Sequence: Synthetic oligonucleotide
  Target: LAMA2; (+) strand; PAM type: NRG; PAM sequence: TGG
tgttctaggaattatgacac

SEQ ID NO: 170628 - DNA, 20 bp, Artificial Sequence
  Description of Artificial Sequence: Synthetic oligonucleotide
  Target: LAMA2; (+) strand; PAM type: NRG; PAM sequence: GGG
gttctaggaattatgacact

SEQ ID NO: 170629 - DNA, 20 bp, Artificial Sequence
  Description of Artificial Sequence: Synthetic oligonucleotide
  Target: LAMA2; (+) strand; PAM type: NRG; PAM sequence: GGG
ttctaggaattatgacactg

SEQ ID NO: 170630 - DNA, 20 bp, Artificial Sequence
  Description of Artificial Sequence: Synthetic oligonucleotide
  Target: LAMA2; (+) strand; PAM type: NRG; PAM sequence: TAG
aggaattatgacactgggga

SEQ ID NO: 170631 - DNA, 20 bp, Artificial Sequence
  Description of Artificial Sequence: Synthetic oligonucleotide
  Target: LAMA2; (+) strand; PAM type: NRG; PAM sequence: AAG
aattatgacactggggatag

SEQ ID NO: 170632 - DNA, 20 bp, Artificial Sequence
  Description of Artificial Sequence: Synthetic oligonucleotide
  Target: LAMA2; (+) strand; PAM type: NRG; PAM sequence: GAG
gacactggggatagaagtgt

SEQ ID NO: 170633 - DNA, 20 bp, Artificial Sequence
  Description of Artificial Sequence: Synthetic oligonucleotide
  Target: LAMA2; (+) strand; PAM type: NRG; PAM sequence: CAG
gaagtgtgagcaaaactgcg

SEQ ID NO: 170634 - DNA, 20 bp, Artificial Sequence
  Description of Artificial Sequence: Synthetic oligonucleotide
  Target: LAMA2; (+) strand; PAM type: NRG; PAM sequence: TGG
tgcgcagtccttgccctcat

SEQ ID NO: 170635 - DNA, 20 bp, Artificial Sequence
  Description of Artificial Sequence: Synthetic oligonucleotide
  Target: LAMA2; (+) strand; PAM type: NRG; PAM sequence: TAG
agtccttgccctcattggct

SEQ ID NO: 170636 - DNA, 20 bp, Artificial Sequence
  Description of Artificial Sequence: Synthetic oligonucleotide
  Target: LAMA2; (+) strand; PAM type: NRG; PAM sequence: TAG
ttgccctcattggcttagta

SEQ ID NO: 170637 - DNA, 20 bp, Artificial Sequence
  Description of Artificial Sequence: Synthetic oligonucleotide
  Target: LAMA2; (+) strand; PAM type: NRG; PAM sequence: TAG
atagtctaatgatctgacgt

SEQ ID NO: 170638 - DNA, 20 bp, Artificial Sequence
  Description of Artificial Sequence: Synthetic oligonucleotide
  Target: LAMA2; (+) strand; PAM type: NRG; PAM sequence: GAG
agtctaatgatctgacgtta

SEQ ID NO: 170639 - DNA, 20 bp, Artificial Sequence
  Description of Artificial Sequence: Synthetic oligonucleotide
  Target: LAMA2; (+) strand; PAM type: NRG; PAM sequence: AAG
tctgacgttagagacacaaa

SEQ ID NO: 170640 - DNA, 20 bp, Artificial Sequence
  Description of Artificial Sequence: Synthetic oligonucleotide
  Target: LAMA2; (+) strand; PAM type: NRG; PAM sequence: GAG
ttcttttttttttttttttt

SEQ ID NO: 170641 - DNA, 20 bp, Artificial Sequence
  Description of Artificial Sequence: Synthetic oligonucleotide
  Target: LAMA2; (+) strand; PAM type: NRG; PAM sequence: CAG
ttttttttttttttttgaga

SEQ ID NO: 170642 - DNA, 20 bp, Artificial Sequence
  Description of Artificial Sequence: Synthetic oligonucleotide
  Target: LAMA2; (+) strand; PAM type: NRG; PAM sequence: GAG
ttttttttttttttgagaca

SEQ ID NO: 170643 - DNA, 20 bp, Artificial Sequence
  Description of Artificial Sequence: Synthetic oligonucleotide
  Target: LAMA2; (+) strand; PAM type: NRG; PAM sequence: GAG
cagagtcttgctctgtcgcc

SEQ ID NO: 170644 - DNA, 20 bp, Artificial Sequence
  Description of Artificial Sequence: Synthetic oligonucleotide
  Target: LAMA2; (+) strand; PAM type: NRG; PAM sequence: AGG
agagtcttgctctgtcgccg

SEQ ID NO: 170645 - DNA, 20 bp, Artificial Sequence
  Description of Artificial Sequence: Synthetic oligonucleotide
  Target: LAMA2; (+) strand; PAM type: NRG; PAM sequence: TGG
tcttgctctgtcgccgaggc

SEQ ID NO: 170646 - DNA, 20 bp, Artificial Sequence
  Description of Artificial Sequence: Synthetic oligonucleotide
  Target: LAMA2; (+) strand; PAM type: NRG; PAM sequence: GAG
ttgctctgtcgccgaggctg

SEQ ID NO: 170647 - DNA, 20 bp, Artificial Sequence
  Description of Artificial Sequence: Synthetic oligonucleotide
  Target: LAMA2; (+) strand; PAM type: NRG; PAM sequence: CAG
ctgtcgccgaggctggagtg

SEQ ID NO: 170648 - DNA, 20 bp, Artificial Sequence
  Description of Artificial Sequence: Synthetic oligonucleotide
  Target: LAMA2; (+) strand; PAM type: NRG; PAM sequence: TGG
tcgccgaggctggagtgcag

SEQ ID NO: 170649 - DNA, 20 bp, Artificial Sequence
  Description of Artificial Sequence: Synthetic oligonucleotide
  Target: LAMA2; (+) strand; PAM type: NRG; PAM sequence: TGG
ggagtgcagtggtgcgatct

SEQ ID NO: 170650 - DNA, 20 bp, Artificial Sequence
  Description of Artificial Sequence: Synthetic oligonucleotide
  Target: LAMA2; (+) strand; PAM type: NRG; PAM sequence: CGG
tcactgcaacctccgcctcc

SEQ ID NO: 170651 - DNA, 20 bp, Artificial Sequence
  Description of Artificial Sequence: Synthetic oligonucleotide
  Target: LAMA2; (+) strand; PAM type: NRG; PAM sequence: GGG
cactgcaacctccgcctccc

SEQ ID NO: 170652 - DNA, 20 bp, Artificial Sequence
  Description of Artificial Sequence: Synthetic oligonucleotide
  Target: LAMA2; (+) strand; PAM type: NRG; PAM sequence: AAG
aacctccgcctcccgggttc

SEQ ID NO: 170653 - DNA, 20 bp, Artificial Sequence
  Description of Artificial Sequence: Synthetic oligonucleotide
  Target: LAMA2; (+) strand; PAM type: NRG; PAM sequence: CAG
ttcaagtgattttcctgcct

SEQ ID NO: 170654 - DNA, 20 bp, Artificial Sequence
  Description of Artificial Sequence: Synthetic oligonucleotide
  Target: LAMA2; (+) strand; PAM type: NRG; PAM sequence: AAG
ttttcctgcctcagcctccc

SEQ ID NO: 170655 - DNA, 20 bp, Artificial Sequence
  Description of Artificial Sequence: Synthetic oligonucleotide
  Target: LAMA2; (+) strand; PAM type: NRG; PAM sequence: TAG
tcctgcctcagcctcccaag

SEQ ID NO: 170656 - DNA, 20 bp, Artificial Sequence
  Description of Artificial Sequence: Synthetic oligonucleotide
  Target: LAMA2; (+) strand; PAM type: NRG; PAM sequence: TGG
gcctcagcctcccaagtagc

SEQ ID NO: 170657 - DNA, 20 bp, Artificial Sequence
  Description of Artificial Sequence: Synthetic oligonucleotide
  Target: LAMA2; (+) strand; PAM type: NRG; PAM sequence: GGG
cctcagcctcccaagtagct

SEQ ID NO: 170658 - DNA, 20 bp, Artificial Sequence
  Description of Artificial Sequence: Synthetic oligonucleotide
  Target: LAMA2; (+) strand; PAM type: NRG; PAM sequence: CAG
ctcccaagtagctgggatta

SEQ ID NO: 170659 - DNA, 20 bp, Artificial Sequence
  Description of Artificial Sequence: Synthetic oligonucleotide
  Target: LAMA2; (+) strand; PAM type: NRG; PAM sequence: AGG
tcccaagtagctgggattac

SEQ ID NO: 170660 - DNA, 20 bp, Artificial Sequence
  Description of Artificial Sequence: Synthetic oligonucleotide
  Target: LAMA2; (+) strand; PAM type: NRG; PAM sequence: TGG
caggtgtgtgccaccacacc

SEQ ID NO: 170661 - DNA, 20 bp, Artificial Sequence
  Description of Artificial Sequence: Synthetic oligonucleotide
  Target: LAMA2; (+) strand; PAM type: NRG; PAM sequence: TAG
gctaattttttttgtatttt

SEQ ID NO: 170662 - DNA, 20 bp, Artificial Sequence
  Description of Artificial Sequence: Synthetic oligonucleotide
  Target: LAMA2; (+) strand; PAM type: NRG; PAM sequence: TAG
aattttttttgtatttttag

SEQ ID NO: 170663 - DNA, 20 bp, Artificial Sequence
  Description of Artificial Sequence: Synthetic oligonucleotide
  Target: LAMA2; (+) strand; PAM type: NRG; PAM sequence: GAG
ttttttttgtatttttagta

SEQ ID NO: 170664 - DNA, 20 bp, Artificial Sequence
  Description of Artificial Sequence: Synthetic oligonucleotide
  Target: LAMA2; (+) strand; PAM type: NRG; PAM sequence: CGG
ttttgtatttttagtagaga

SEQ ID NO: 170665 - DNA, 20 bp, Artificial Sequence
  Description of Artificial Sequence: Synthetic oligonucleotide
  Target: LAMA2; (+) strand; PAM type: NRG; PAM sequence: GGG
tttgtatttttagtagagac

SEQ ID NO: 170666 - DNA, 20 bp, Artificial Sequence
  Description of Artificial Sequence: Synthetic oligonucleotide
  Target: LAMA2; (+) strand; PAM type: NRG; PAM sequence: CAG
acgggtttcaccatgttcgt

SEQ ID NO: 170667 - DNA, 20 bp, Artificial Sequence
  Description of Artificial Sequence: Synthetic oligonucleotide
  Target: LAMA2; (+) strand; PAM type: NRG; PAM sequence: AGG
cgggtttcaccatgttcgtc

SEQ ID NO: 170668 - DNA, 20 bp, Artificial Sequence
  Description of Artificial Sequence: Synthetic oligonucleotide
  Target: LAMA2; (+) strand; PAM type: NRG; PAM sequence: TGG
tttcaccatgttcgtcaggc

SEQ ID NO: 170669 - DNA, 20 bp, Artificial Sequence
  Description of Artificial Sequence: Synthetic oligonucleotide
  Target: LAMA2; (+) strand; PAM type: NRG; PAM sequence: TGG
accttgtgattcgcctgcct

SEQ ID NO: 170670 - DNA, 20 bp, Artificial Sequence
  Description of Artificial Sequence: Synthetic oligonucleotide
  Target: LAMA2; (+) strand; PAM type: NRG; PAM sequence: TGG
gccttggcctcccaaaatgc

SEQ ID NO: 170671 - DNA, 20 bp, Artificial Sequence
  Description of Artificial Sequence: Synthetic oligonucleotide
  Target: LAMA2; (+) strand; PAM type: NRG; PAM sequence: GGG
ccttggcctcccaaaatgct

SEQ ID NO: 170672 - DNA, 20 bp, Artificial Sequence
  Description of Artificial Sequence: Synthetic oligonucleotide
  Target: LAMA2; (+) strand; PAM type: NRG; PAM sequence: CAG
ctcccaaaatgctgggatta

SEQ ID NO: 170673 - DNA, 20 bp, Artificial Sequence
  Description of Artificial Sequence: Synthetic oligonucleotide
  Target: LAMA2; (+) strand; PAM type: NRG; PAM sequence: AGG
tcccaaaatgctgggattac

SEQ ID NO: 170674 - DNA, 20 bp, Artificial Sequence
  Description of Artificial Sequence: Synthetic oligonucleotide
  Target: LAMA2; (+) strand; PAM type: NRG; PAM sequence: GAG
aatgctgggattacaggcat

SEQ ID NO: 170675 - DNA, 20 bp, Artificial Sequence
  Description of Artificial Sequence: Synthetic oligonucleotide
  Target: LAMA2; (+) strand; PAM type: NRG; PAM sequence: TGG
caggcatgagccaccgcacc

SEQ ID NO: 170676 - DNA, 20 bp, Artificial Sequence
  Description of Artificial Sequence: Synthetic oligonucleotide
  Target: LAMA2; (+) strand; PAM type: NRG; PAM sequence: AAG
gagccaccgcacctggccac

SEQ ID NO: 170677 - DNA, 20 bp, Artificial Sequence
  Description of Artificial Sequence: Synthetic oligonucleotide
  Target: LAMA2; (+) strand; PAM type: NRG; PAM sequence: AAG
ccaccgcacctggccacaag

SEQ ID NO: 170678 - DNA, 20 bp, Artificial Sequence
  Description of Artificial Sequence: Synthetic oligonucleotide
  Target: LAMA2; (+) strand; PAM type: NRG; PAM sequence: AAG
gccacaagaagtatttcatt

SEQ ID NO: 170679 - DNA, 20 bp, Artificial Sequence
  Description of Artificial Sequence: Synthetic oligonucleotide
  Target: LAMA2; (+) strand; PAM type: NRG; PAM sequence: GAG
cacaagaagtatttcattaa

SEQ ID NO: 170680 - DNA, 20 bp, Artificial Sequence
  Description of Artificial Sequence: Synthetic oligonucleotide
  Target: LAMA2; (+) strand; PAM type: NRG; PAM sequence: CAG
aagtatttcattaagagtgt

SEQ ID NO: 170681 - DNA, 20 bp, Artificial Sequence
  Description of Artificial Sequence: Synthetic oligonucleotide
  Target: LAMA2; (+) strand; PAM type: NRG; PAM sequence: CAG
cctatactctttaccctttc

SEQ ID NO: 170682 - DNA, 20 bp, Artificial Sequence
  Description of Artificial Sequence: Synthetic oligonucleotide
  Target: LAMA2; (+) strand; PAM type: NRG; PAM sequence: CAG
atactctttaccctttccag

SEQ ID NO: 170683 - DNA, 20 bp, Artificial Sequence
  Description of Artificial Sequence: Synthetic oligonucleotide
  Target: LAMA2; (+) strand; PAM type: NRG; PAM sequence: CAG
ctcatgctatgttttttaaa

SEQ ID NO: 170684 - DNA, 20 bp, Artificial Sequence
  Description of Artificial Sequence: Synthetic oligonucleotide
  Target: LAMA2; (+) strand; PAM type: NRG; PAM sequence: TAG
tttaaacagactttattttt

SEQ ID NO: 170685 - DNA, 20 bp, Artificial Sequence
  Description of Artificial Sequence: Synthetic oligonucleotide
  Target: LAMA2; (+) strand; PAM type: NRG; PAM sequence: CAG
acagactttattttttagaa

SEQ ID NO: 170686 - DNA, 20 bp, Artificial Sequence
  Description of Artificial Sequence: Synthetic oligonucleotide
  Target: LAMA2; (+) strand; PAM type: NRG; PAM sequence: AAG
ttattttttagaacagctta

SEQ ID NO: 170687 - DNA, 20 bp, Artificial Sequence
  Description of Artificial Sequence: Synthetic oligonucleotide
  Target: LAMA2; (+) strand; PAM type: NRG; PAM sequence: AAG
ttagaacagcttaaagttca

SEQ ID NO: 170688 - DNA, 20 bp, Artificial Sequence
  Description of Artificial Sequence: Synthetic oligonucleotide
  Target: LAMA2; (+) strand; PAM type: NRG; PAM sequence: GAG
ttaaagttcaaagaaaaatt

SEQ ID NO: 170689 - DNA, 20 bp, Artificial Sequence
  Description of Artificial Sequence: Synthetic oligonucleotide
  Target: LAMA2; (+) strand; PAM type: NRG; PAM sequence: AAG
tcaaagaaaaattgagtgta

SEQ ID NO: 170690 - DNA, 20 bp, Artificial Sequence
  Description of Artificial Sequence: Synthetic oligonucleotide
  Target: LAMA2; (+) strand; PAM type: NRG; PAM sequence: CAG
gaaaaattgagtgtaaagtt

SEQ ID NO: 170691 - DNA, 20 bp, Artificial Sequence
  Description of Artificial Sequence: Synthetic oligonucleotide
  Target: LAMA2; (+) strand; PAM type: NRG; PAM sequence: GAG
aaaattgagtgtaaagttca

SEQ ID NO: 170692 - DNA, 20 bp, Artificial Sequence
  Description of Artificial Sequence: Synthetic oligonucleotide
  Target: LAMA2; (+) strand; PAM type: NRG; PAM sequence: CAG
gcccccacaaccttccccac

SEQ ID NO: 170693 - DNA, 20 bp, Artificial Sequence
  Description of Artificial Sequence: Synthetic oligonucleotide
  Target: LAMA2; (+) strand; PAM type: NRG; PAM sequence: TGG
cacaaccttccccaccagaa

SEQ ID NO: 170694 - DNA, 20 bp, Artificial Sequence
  Description of Artificial Sequence: Synthetic oligonucleotide
  Target: LAMA2; (+) strand; PAM type: NRG; PAM sequence: TAG
ccagaatggtacatttatta

SEQ ID NO: 170695 - DNA, 20 bp, Artificial Sequence
  Description of Artificial Sequence: Synthetic oligonucleotide
  Target: LAMA2; (+) strand; PAM type: NRG; PAM sequence: AAG
ttattatagtcgataaacct

SEQ ID NO: 170696 - DNA, 20 bp, Artificial Sequence
  Description of Artificial Sequence: Synthetic oligonucleotide
  Target: LAMA2; (+) strand; PAM type: NRG; PAM sequence: AAG
tgacacctcctcatcaccca

SEQ ID NO: 170697 - DNA, 20 bp, Artificial Sequence
  Description of Artificial Sequence: Synthetic oligonucleotide
  Target: LAMA2; (+) strand; PAM type: NRG; PAM sequence: TAG
tcctcatcacccaaagtcca

SEQ ID NO: 170698 - DNA, 20 bp, Artificial Sequence
  Description of Artificial Sequence: Synthetic oligonucleotide
  Target: LAMA2; (+) strand; PAM type: NRG; PAM sequence: TAG
ccaaagtccatagtttacat

SEQ ID NO: 170699 - DNA, 20 bp, Artificial Sequence
  Description of Artificial Sequence: Synthetic oligonucleotide
  Target: LAMA2; (+) strand; PAM type: NRG; PAM sequence: AGG
caaagtccatagtttacatt

SEQ ID NO: 170700 - DNA, 20 bp, Artificial Sequence
  Description of Artificial Sequence: Synthetic oligonucleotide
  Target: LAMA2; (+) strand; PAM type: NRG; PAM sequence: GGG
aaagtccatagtttacatta

SEQ ID NO: 170701 - DNA, 20 bp, Artificial Sequence
  Description of Artificial Sequence: Synthetic oligonucleotide
  Target: LAMA2; (+) strand; PAM type: NRG; PAM sequence: TGG
tttacattagggttccctct

SEQ ID NO: 170702 - DNA, 20 bp, Artificial Sequence
  Description of Artificial Sequence: Synthetic oligonucleotide
  Target: LAMA2; (+) strand; PAM type: NRG; PAM sequence: TGG
tcttggtattgtacattcta

SEQ ID NO: 170703 - DNA, 20 bp, Artificial Sequence
  Description of Artificial Sequence: Synthetic oligonucleotide
  Target: LAMA2; (+) strand; PAM type: NRG; PAM sequence: GGG
cttggtattgtacattctat

SEQ ID NO: 170704 - DNA, 20 bp, Artificial Sequence
  Description of Artificial Sequence: Synthetic oligonucleotide
  Target: LAMA2; (+) strand; PAM type: NRG; PAM sequence: TGG
tattgtacattctatgggtt

SEQ ID NO: 170705 - DNA, 20 bp, Artificial Sequence
  Description of Artificial Sequence: Synthetic oligonucleotide
  Target: LAMA2; (+) strand; PAM type: NRG; PAM sequence: TAG
tccaccgttgttgtaaaata

SEQ ID NO: 170706 - DNA, 20 bp, Artificial Sequence
  Description of Artificial Sequence: Synthetic oligonucleotide
  Target: LAMA2; (+) strand; PAM type: NRG; PAM sequence: AAG
cgttgttgtaaaatatagaa

SEQ ID NO: 170707 - DNA, 20 bp, Artificial Sequence
  Description of Artificial Sequence: Synthetic oligonucleotide
  Target: LAMA2; (+) strand; PAM type: NRG; PAM sequence: TGG
cctccctcttccttgacccc

SEQ ID NO: 170708 - DNA, 20 bp, Artificial Sequence
  Description of Artificial Sequence: Synthetic oligonucleotide
  Target: LAMA2; (+) strand; PAM type: NRG; PAM sequence: TAG
tcatatttttactacatcca

SEQ ID NO: 170709 - DNA, 20 bp, Artificial Sequence
  Description of Artificial Sequence: Synthetic oligonucleotide
  Target: LAMA2; (+) strand; PAM type: NRG; PAM sequence: TGG
atccatagttttgccttttt

SEQ ID NO: 170710 - DNA, 20 bp, Artificial Sequence
  Description of Artificial Sequence: Synthetic oligonucleotide
  Target: LAMA2; (+) strand; PAM type: NRG; PAM sequence: TAG
tttgccttttttggaatata

SEQ ID NO: 170711 - DNA, 20 bp, Artificial Sequence
  Description of Artificial Sequence: Synthetic oligonucleotide
  Target: LAMA2; (+) strand; PAM type: NRG; PAM sequence: TGG
ccttttttggaatatatagc

SEQ ID NO: 170712 - DNA, 20 bp, Artificial Sequence
  Description of Artificial Sequence: Synthetic oligonucleotide
  Target: LAMA2; (+) strand; PAM type: NRG; PAM sequence: CAG
aatatatagctggaatcata

SEQ ID NO: 170713 - DNA, 20 bp, Artificial Sequence
  Description of Artificial Sequence: Synthetic oligonucleotide
  Target: LAMA2; (+) strand; PAM type: NRG; PAM sequence: TGG
atagctggaatcatacagtg

SEQ ID NO: 170714 - DNA, 20 bp, Artificial Sequence
  Description of Artificial Sequence: Synthetic oligonucleotide
  Target: LAMA2; (+) strand; PAM type: NRG; PAM sequence: TAG
agtgtggtactttttcatat

SEQ ID NO: 170715 - DNA, 20 bp, Artificial Sequence
  Description of Artificial Sequence: Synthetic oligonucleotide
  Target: LAMA2; (+) strand; PAM type: NRG; PAM sequence: TGG
tcatattagcttctttccct

SEQ ID NO: 170716 - DNA, 20 bp, Artificial Sequence
  Description of Artificial Sequence: Synthetic oligonucleotide
  Target: LAMA2; (+) strand; PAM type: NRG; PAM sequence: AAG
tcccttggtaatatacactt

SEQ ID NO: 170717 - DNA, 20 bp, Artificial Sequence
  Description of Artificial Sequence: Synthetic oligonucleotide
  Target: LAMA2; (+) strand; PAM type: NRG; PAM sequence: AGG
cccttggtaatatacactta

SEQ ID NO: 170718 - DNA, 20 bp, Artificial Sequence
  Description of Artificial Sequence: Synthetic oligonucleotide
  Target: LAMA2; (+) strand; PAM type: NRG; PAM sequence: TAG
catattttttcatgacttta

SEQ ID NO: 170719 - DNA, 20 bp, Artificial Sequence
  Description of Artificial Sequence: Synthetic oligonucleotide
  Target: LAMA2; (+) strand; PAM type: NRG; PAM sequence: TAG
ctttatagctcatttctttg

SEQ ID NO: 170720 - DNA, 20 bp, Artificial Sequence
  Description of Artificial Sequence: Synthetic oligonucleotide
  Target: LAMA2; (+) strand; PAM type: NRG; PAM sequence: TAG
ttgaataatatttcattgtt

SEQ ID NO: 170721 - DNA, 20 bp, Artificial Sequence
  Description of Artificial Sequence: Synthetic oligonucleotide
  Target: LAMA2; (+) strand; PAM type: NRG; PAM sequence: AAG
acttattcattcccctactg

SEQ ID NO: 170722 - DNA, 20 bp, Artificial Sequence
  Description of Artificial Sequence: Synthetic oligonucleotide
  Target: LAMA2; (+) strand; PAM type: NRG; PAM sequence: AGG
cttattcattcccctactga

SEQ ID NO: 170723 - DNA, 20 bp, Artificial Sequence
  Description of Artificial Sequence: Synthetic oligonucleotide
  Target: LAMA2; (+) strand; PAM type: NRG; PAM sequence: TGG
tcccctactgaaggacatct

SEQ ID NO: 170724 - DNA, 20 bp, Artificial Sequence
  Description of Artificial Sequence: Synthetic oligonucleotide
  Target: LAMA2; (+) strand; PAM type: NRG; PAM sequence: TGG
tcttggttgcttccaaattt

SEQ ID NO: 170725 - DNA, 20 bp, Artificial Sequence
  Description of Artificial Sequence: Synthetic oligonucleotide
  Target: LAMA2; (+) strand; PAM type: NRG; PAM sequence: CAG
tggttgcttccaaattttgg

SEQ ID NO: 170726 - DNA, 20 bp, Artificial Sequence
  Description of Artificial Sequence: Synthetic oligonucleotide
  Target: LAMA2; (+) strand; PAM type: NRG; PAM sequence: AAG
aaattttggcagcatgaatc

SEQ ID NO: 170727 - DNA, 20 bp, Artificial Sequence
  Description of Artificial Sequence: Synthetic oligonucleotide
  Target: LAMA2; (+) strand; PAM type: NRG; PAM sequence: CAG
ttgctgtaaacatctttgtg

SEQ ID NO: 170728 - DNA, 20 bp, Artificial Sequence
  Description of Artificial Sequence: Synthetic oligonucleotide
  Target: LAMA2; (+) strand; PAM type: NRG; PAM sequence: TGG
tctttgtgcagacttttgtg

SEQ ID NO: 170729 - DNA, 20 bp, Artificial Sequence
  Description of Artificial Sequence: Synthetic oligonucleotide
  Target: LAMA2; (+) strand; PAM type: NRG; PAM sequence: AAG
gcagacttttgtgtggactt

SEQ ID NO: 170730 - DNA, 20 bp, Artificial Sequence
  Description of Artificial Sequence: Synthetic oligonucleotide
  Target: LAMA2; (+) strand; PAM type: NRG; PAM sequence: TGG
acttaagttttcaacctatt

SEQ ID NO: 170731 - DNA, 20 bp, Artificial Sequence
  Description of Artificial Sequence: Synthetic oligonucleotide
  Target: LAMA2; (+) strand; PAM type: NRG; PAM sequence: GGG
cttaagttttcaacctattt

SEQ ID NO: 170732 - DNA, 20 bp, Artificial Sequence
  Description of Artificial Sequence: Synthetic oligonucleotide
  Target: LAMA2; (+) strand; PAM type: NRG; PAM sequence: AAG
aacctatttgggtgaatata

SEQ ID NO: 170733 - DNA, 20 bp, Artificial Sequence
  Description of Artificial Sequence: Synthetic oligonucleotide
  Target: LAMA2; (+) strand; PAM type: NRG; PAM sequence: AGG
acctatttgggtgaatataa

SEQ ID NO: 170734 - DNA, 20 bp, Artificial Sequence
  Description of Artificial Sequence: Synthetic oligonucleotide
  Target: LAMA2; (+) strand; PAM type: NRG; PAM sequence: GAG
ctatttgggtgaatataaag

SEQ ID NO: 170735 - DNA, 20 bp, Artificial Sequence
  Description of Artificial Sequence: Synthetic oligonucleotide
  Target: LAMA2; (+) strand; PAM type: NRG; PAM sequence: TGG
atataaaggagcatgattgc

SEQ ID NO: 170736 - DNA, 20 bp, Artificial Sequence
  Description of Artificial Sequence: Synthetic oligonucleotide
  Target: LAMA2; (+) strand; PAM type: NRG; PAM sequence: TGG
aaaggagcatgattgctgga

SEQ ID NO: 170737 - DNA, 20 bp, Artificial Sequence
  Description of Artificial Sequence: Synthetic oligonucleotide
  Target: LAMA2; (+) strand; PAM type: NRG; PAM sequence: TGG
agcatgattgctggatggta

SEQ ID NO: 170738 - DNA, 20 bp, Artificial Sequence
  Description of Artificial Sequence: Synthetic oligonucleotide
  Target: LAMA2; (+) strand; PAM type: NRG; PAM sequence: AAG
tgattgctggatggtatggt

SEQ ID NO: 170739 - DNA, 20 bp, Artificial Sequence
  Description of Artificial Sequence: Synthetic oligonucleotide
  Target: LAMA2; (+) strand; PAM type: NRG; PAM sequence: GAG
attgctggatggtatggtaa

SEQ ID NO: 170740 - DNA, 20 bp, Artificial Sequence
  Description of Artificial Sequence: Synthetic oligonucleotide
  Target: LAMA2; (+) strand; PAM type: NRG; PAM sequence: TAG
tggtatggtaagagtatatt

SEQ ID NO: 170741 - DNA, 20 bp, Artificial Sequence
  Description of Artificial Sequence: Synthetic oligonucleotide
  Target: LAMA2; (+) strand; PAM type: NRG; PAM sequence: AAG
aagagtatatttagttttga

SEQ ID NO: 170742 - DNA, 20 bp, Artificial Sequence
  Description of Artificial Sequence: Synthetic oligonucleotide
  Target: LAMA2; (+) strand; PAM type: NRG; PAM sequence: TGG
ttaccaaaatgtattccaaa

SEQ ID NO: 170743 - DNA, 20 bp, Artificial Sequence
  Description of Artificial Sequence: Synthetic oligonucleotide
  Target: LAMA2; (+) strand; PAM type: NRG; PAM sequence: CGG
tttctattttgcattcccac

SEQ ID NO: 170744 - DNA, 20 bp, Artificial Sequence
  Description of Artificial Sequence: Synthetic oligonucleotide
  Target: LAMA2; (+) strand; PAM type: NRG; PAM sequence: GAG
cattcccaccggcaataaat

SEQ ID NO: 170745 - DNA, 20 bp, Artificial Sequence
  Description of Artificial Sequence: Synthetic oligonucleotide
  Target: LAMA2; (+) strand; PAM type: NRG; PAM sequence: GAG
ttcccaccggcaataaatga

SEQ ID NO: 170746 - DNA, 20 bp, Artificial Sequence
  Description of Artificial Sequence: Synthetic oligonucleotide
  Target: LAMA2; (+) strand; PAM type: NRG; PAM sequence: TAG
ctgttgctccacatcctcaa

SEQ ID NO: 170747 - DNA, 20 bp, Artificial Sequence
  Description of Artificial Sequence: Synthetic oligonucleotide
  Target: LAMA2; (+) strand; PAM type: NRG; PAM sequence: TGG
tccacatcctcaatagcatt

SEQ ID NO: 170748 - DNA, 20 bp, Artificial Sequence
  Description of Artificial Sequence: Synthetic oligonucleotide
  Target: LAMA2; (+) strand; PAM type: NRG; PAM sequence: TAG
tcaatagcatttggtgtttt

SEQ ID NO: 170749 - DNA, 20 bp, Artificial Sequence
  Description of Artificial Sequence: Synthetic oligonucleotide
  Target: LAMA2; (+) strand; PAM type: NRG; PAM sequence: TGG
catttggtgtttttagtgtt

SEQ ID NO: 170750 - DNA, 20 bp, Artificial Sequence
  Description of Artificial Sequence: Synthetic oligonucleotide
  Target: LAMA2; (+) strand; PAM type: NRG; PAM sequence: AAG
ttggattttgtcattctaat

SEQ ID NO: 170751 - DNA, 20 bp, Artificial Sequence
  Description of Artificial Sequence: Synthetic oligonucleotide
  Target: LAMA2; (+) strand; PAM type: NRG; PAM sequence: TGG
gtcattctaataagtgtgta

SEQ ID NO: 170752 - DNA, 20 bp, Artificial Sequence
  Description of Artificial Sequence: Synthetic oligonucleotide
  Target: LAMA2; (+) strand; PAM type: NRG; PAM sequence: TAG
atggtatctcattcttgttt

SEQ ID NO: 170753 - DNA, 20 bp, Artificial Sequence
  Description of Artificial Sequence: Synthetic oligonucleotide
  Target: LAMA2; (+) strand; PAM type: NRG; PAM sequence: GAG
ccttaatgacatatgatgtc

SEQ ID NO: 170754 - DNA, 20 bp, Artificial Sequence
  Description of Artificial Sequence: Synthetic oligonucleotide
  Target: LAMA2; (+) strand; PAM type: NRG; PAM sequence: TGG
tgccatctgtatatcttctt

SEQ ID NO: 170755 - DNA, 20 bp, Artificial Sequence
  Description of Artificial Sequence: Synthetic oligonucleotide
  Target: LAMA2; (+) strand; PAM type: NRG; PAM sequence: AAG
atctgtatatcttctttggt

SEQ ID NO: 170756 - DNA, 20 bp, Artificial Sequence
  Description of Artificial Sequence: Synthetic oligonucleotide
  Target: LAMA2; (+) strand; PAM type: NRG; PAM sequence: AGG
tctgtatatcttctttggta

SEQ ID NO: 170757 - DNA, 20 bp, Artificial Sequence
  Description of Artificial Sequence: Synthetic oligonucleotide
  Target: LAMA2; (+) strand; PAM type: NRG; PAM sequence: TAG
tctttggtaaggtgtctatt

SEQ ID NO: 170758 - DNA, 20 bp, Artificial Sequence
  Description of Artificial Sequence: Synthetic oligonucleotide
  Target: LAMA2; (+) strand; PAM type: NRG; PAM sequence: AGG
ctttggtaaggtgtctattt

SEQ ID NO: 170759 - DNA, 20 bp, Artificial Sequence
  Description of Artificial Sequence: Synthetic oligonucleotide
  Target: LAMA2; (+) strand; PAM type: NRG; PAM sequence: TGG
gtctttttccattttttcat

SEQ ID NO: 170760 - DNA, 20 bp, Artificial Sequence
  Description of Artificial Sequence: Synthetic oligonucleotide
  Target: LAMA2; (+) strand; PAM type: NRG; PAM sequence: GGG
tctttttccattttttcatt

SEQ ID NO: 170761 - DNA, 20 bp, Artificial Sequence
  Description of Artificial Sequence: Synthetic oligonucleotide
  Target: LAMA2; (+) strand; PAM type: NRG; PAM sequence: CAG
ggttgttttcttgtcgaatt

SEQ ID NO: 170762 - DNA, 20 bp, Artificial Sequence
  Description of Artificial Sequence: Synthetic oligonucleotide
  Target: LAMA2; (+) strand; PAM type: NRG; PAM sequence: GAG
ttgttttcttgtcgaattca

SEQ ID NO: 170763 - DNA, 20 bp, Artificial Sequence
  Description of Artificial Sequence: Synthetic oligonucleotide
  Target: LAMA2; (+) strand; PAM type: NRG; PAM sequence: TGG
tcagagttttttgtatattt

SEQ ID NO: 170764 - DNA, 20 bp, Artificial Sequence
  Description of Artificial Sequence: Synthetic oligonucleotide
  Target: LAMA2; (+) strand; PAM type: NRG; PAM sequence: GGG
cagagttttttgtatatttt

SEQ ID NO: 170765 - DNA, 20 bp, Artificial Sequence
  Description of Artificial Sequence: Synthetic oligonucleotide
  Target: LAMA2; (+) strand; PAM type: NRG; PAM sequence: TAG
tttttgtatattttgggtaa

SEQ ID NO: 170766 - DNA, 20 bp, Artificial Sequence
  Description of Artificial Sequence: Synthetic oligonucleotide
  Target: LAMA2; (+) strand; PAM type: NRG; PAM sequence: CAG
tttgggtaatagtcctttat

SEQ ID NO: 170767 - DNA, 20 bp, Artificial Sequence
  Description of Artificial Sequence: Synthetic oligonucleotide
  Target: LAMA2; (+) strand; PAM type: NRG; PAM sequence: TGG
cattatttgcttcccctctg

SEQ ID NO: 170768 - DNA, 20 bp, Artificial Sequence
  Description of Artificial Sequence: Synthetic oligonucleotide
  Target: LAMA2; (+) strand; PAM type: NRG; PAM sequence: GAG
gtggcttgtcttgttctctt

SEQ ID NO: 170769 - DNA, 20 bp, Artificial Sequence
  Description of Artificial Sequence: Synthetic oligonucleotide
  Target: LAMA2; (+) strand; PAM type: NRG; PAM sequence: AAG
gcttgtcttgttctcttgag

SEQ ID NO: 170770 - DNA, 20 bp, Artificial Sequence
  Description of Artificial Sequence: Synthetic oligonucleotide
  Target: LAMA2; (+) strand; PAM type: NRG; PAM sequence: CAG
ctcttgagaagtgtctttca

SEQ ID NO: 170771 - DNA, 20 bp, Artificial Sequence
  Description of Artificial Sequence: Synthetic oligonucleotide
  Target: LAMA2; (+) strand; PAM type: NRG; PAM sequence: GAG
cttgagaagtgtctttcaca

SEQ ID NO: 170772 - DNA, 20 bp, Artificial Sequence
  Description of Artificial Sequence: Synthetic oligonucleotide
  Target: LAMA2; (+) strand; PAM type: NRG; PAM sequence: CAG
gagaagtgtctttcacagag

SEQ ID NO: 170773 - DNA, 20 bp, Artificial Sequence
  Description of Artificial Sequence: Synthetic oligonucleotide
  Target: LAMA2; (+) strand; PAM type: NRG; PAM sequence: AAG
aagtgtctttcacagagcag

SEQ ID NO: 170774 - DNA, 20 bp, Artificial Sequence
  Description of Artificial Sequence: Synthetic oligonucleotide
  Target: LAMA2; (+) strand; PAM type: NRG; PAM sequence: AAG
agaagtttttaattgtaacg

SEQ ID NO: 170775 - DNA, 20 bp, Artificial Sequence
  Description of Artificial Sequence: Synthetic oligonucleotide
  Target: LAMA2; (+) strand; PAM type: NRG; PAM sequence: CAG
tttttaattgtaacgaagcc

SEQ ID NO: 170776 - DNA, 20 bp, Artificial Sequence
  Description of Artificial Sequence: Synthetic oligonucleotide
  Target: LAMA2; (+) strand; PAM type: NRG; PAM sequence: TAG
acgaagcccagcttatcaat

SEQ ID NO: 170777 - DNA, 20 bp, Artificial Sequence
  Description of Artificial Sequence: Synthetic oligonucleotide
  Target: LAMA2; (+) strand; PAM type: NRG; PAM sequence: AGG
cgaagcccagcttatcaatt

SEQ ID NO: 170778 - DNA, 20 bp, Artificial Sequence
  Description of Artificial Sequence: Synthetic oligonucleotide
  Target: LAMA2; (+) strand; PAM type: NRG; PAM sequence: GAG
caattaggtttctccttgtt

SEQ ID NO: 170779 - DNA, 20 bp, Artificial Sequence
  Description of Artificial Sequence: Synthetic oligonucleotide
  Target: LAMA2; (+) strand; PAM type: NRG; PAM sequence: TGG
gtttctccttgttgagcctt

SEQ ID NO: 170780 - DNA, 20 bp, Artificial Sequence
  Description of Artificial Sequence: Synthetic oligonucleotide
  Target: LAMA2; (+) strand; PAM type: NRG; PAM sequence: AAG
agcctttggtgttgtatcta

SEQ ID NO: 170781 - DNA, 20 bp, Artificial Sequence
  Description of Artificial Sequence: Synthetic oligonucleotide
  Target: LAMA2; (+) strand; PAM type: NRG; PAM sequence: CGG
aagactcattgccatatcca

SEQ ID NO: 170782 - DNA, 20 bp, Artificial Sequence
  Description of Artificial Sequence: Synthetic oligonucleotide
  Target: LAMA2; (+) strand; PAM type: NRG; PAM sequence: TAG
ttgccatatccacggtcatc

SEQ ID NO: 170783 - DNA, 20 bp, Artificial Sequence
  Description of Artificial Sequence: Synthetic oligonucleotide
  Target: LAMA2; (+) strand; PAM type: NRG; PAM sequence: TAG
ttttctcctatgctatcttc

SEQ ID NO: 170784 - DNA, 20 bp, Artificial Sequence
  Description of Artificial Sequence: Synthetic oligonucleotide
  Target: LAMA2; (+) strand; PAM type: NRG; PAM sequence: AGG
tttctcctatgctatcttct

SEQ ID NO: 170785 - DNA, 20 bp, Artificial Sequence
  Description of Artificial Sequence: Synthetic oligonucleotide
  Target: LAMA2; (+) strand; PAM type: NRG; PAM sequence: GAG
tctcctatgctatcttctag

SEQ ID NO: 170786 - DNA, 20 bp, Artificial Sequence
  Description of Artificial Sequence: Synthetic oligonucleotide
  Target: LAMA2; (+) strand; PAM type: NRG; PAM sequence: CAG
gctatcttctaggagcgtta

SEQ ID NO: 170787 - DNA, 20 bp, Artificial Sequence
  Description of Artificial Sequence: Synthetic oligonucleotide
  Target: LAMA2; (+) strand; PAM type: NRG; PAM sequence: TAG
acagttttgcattttacact

SEQ ID NO: 170788 - DNA, 20 bp, Artificial Sequence
  Description of Artificial Sequence: Synthetic oligonucleotide
  Target: LAMA2; (+) strand; PAM type: NRG; PAM sequence: AGG
cagttttgcattttacactt

SEQ ID NO: 170789 - DNA, 20 bp, Artificial Sequence
  Description of Artificial Sequence: Synthetic oligonucleotide
  Target: LAMA2; (+) strand; PAM type: NRG; PAM sequence: TAG
ttaggtctataatccatttt

SEQ ID NO: 170790 - DNA, 20 bp, Artificial Sequence
  Description of Artificial Sequence: Synthetic oligonucleotide
  Target: LAMA2; (+) strand; PAM type: NRG; PAM sequence: CAG
aaaataaactttttacttta

SEQ ID NO: 170791 - DNA, 20 bp, Artificial Sequence
  Description of Artificial Sequence: Synthetic oligonucleotide
  Target: LAMA2; (+) strand; PAM type: NRG; PAM sequence: TAG
ataaactttttactttacag

SEQ ID NO: 170792 - DNA, 20 bp, Artificial Sequence
  Description of Artificial Sequence: Synthetic oligonucleotide
  Target: LAMA2; (+) strand; PAM type: NRG; PAM sequence: TAG
tttttactttacagtagttt

SEQ ID NO: 170793 - DNA, 20 bp, Artificial Sequence
  Description of Artificial Sequence: Synthetic oligonucleotide
  Target: LAMA2; (+) strand; PAM type: NRG; PAM sequence: AAG
tagatttcaaaaaacttgca

SEQ ID NO: 170794 - DNA, 20 bp, Artificial Sequence
  Description of Artificial Sequence: Synthetic oligonucleotide
  Target: LAMA2; (+) strand; PAM type: NRG; PAM sequence: GAG
gatttcaaaaaacttgcaaa

SEQ ID NO: 170795 - DNA, 20 bp, Artificial Sequence
  Description of Artificial Sequence: Synthetic oligonucleotide
  Target: LAMA2; (+) strand; PAM type: NRG; PAM sequence: GAG
tttcaaaaaacttgcaaaga

SEQ ID NO: 170796 - DNA, 20 bp, Artificial Sequence
  Description of Artificial Sequence: Synthetic oligonucleotide
  Target: LAMA2; (+) strand; PAM type: NRG; PAM sequence: AAG
aaacttgcaaagagagtacc

SEQ ID NO: 170797 - DNA, 20 bp, Artificial Sequence
  Description of Artificial Sequence: Synthetic oligonucleotide
  Target: LAMA2; (+) strand; PAM type: NRG; PAM sequence: GAG
acttgcaaagagagtaccaa

SEQ ID NO: 170798 - DNA, 20 bp, Artificial Sequence
  Description of Artificial Sequence: Synthetic oligonucleotide
  Target: LAMA2; (+) strand; PAM type: NRG; PAM sequence: CAG
gccttcacatactccattcc

SEQ ID NO: 170799 - DNA, 20 bp, Artificial Sequence
  Description of Artificial Sequence: Synthetic oligonucleotide
  Target: LAMA2; (+) strand; PAM type: NRG; PAM sequence: TAG
ccattgttaacatcttacat

SEQ ID NO: 170800 - DNA, 20 bp, Artificial Sequence
  Description of Artificial Sequence: Synthetic oligonucleotide
  Target: LAMA2; (+) strand; PAM type: NRG; PAM sequence: TGG
gttaacatcttacattagca

SEQ ID NO: 170801 - DNA, 20 bp, Artificial Sequence
  Description of Artificial Sequence: Synthetic oligonucleotide
  Target: LAMA2; (+) strand; PAM type: NRG; PAM sequence: TAG
tacatgtgtcatatacatat

SEQ ID NO: 170802 - DNA, 20 bp, Artificial Sequence
  Description of Artificial Sequence: Synthetic oligonucleotide
  Target: LAMA2; (+) strand; PAM type: NRG; PAM sequence: GAG
acatattagctcatatacat

SEQ ID NO: 170803 - DNA, 20 bp, Artificial Sequence
  Description of Artificial Sequence: Synthetic oligonucleotide
  Target: LAMA2; (+) strand; PAM type: NRG; PAM sequence: AAG
tgaaatattaccattaaccc

SEQ ID NO: 170804 - DNA, 20 bp, Artificial Sequence
  Description of Artificial Sequence: Synthetic oligonucleotide
  Target: LAMA2; (+) strand; PAM type: NRG; PAM sequence: CAG
agactgtattcatatttttt

SEQ ID NO: 170805 - DNA, 20 bp, Artificial Sequence
  Description of Artificial Sequence: Synthetic oligonucleotide
  Target: LAMA2; (+) strand; PAM type: NRG; PAM sequence: CAG
tgaatgtttttttactgttt

SEQ ID NO: 170806 - DNA, 20 bp, Artificial Sequence
  Description of Artificial Sequence: Synthetic oligonucleotide
  Target: LAMA2; (+) strand; PAM type: NRG; PAM sequence: AGG
gaatgtttttttactgtttc

SEQ ID NO: 170807 - DNA, 20 bp, Artificial Sequence
  Description of Artificial Sequence: Synthetic oligonucleotide
  Target: LAMA2; (+) strand; PAM type: NRG; PAM sequence: CAG
tactgtttcaggatcccatg

SEQ ID NO: 170808 - DNA, 20 bp, Artificial Sequence
  Description of Artificial Sequence: Synthetic oligonucleotide
  Target: LAMA2; (+) strand; PAM type: NRG; PAM sequence: AGG
actgtttcaggatcccatgc

SEQ ID NO: 170809 - DNA, 20 bp, Artificial Sequence
  Description of Artificial Sequence: Synthetic oligonucleotide
  Target: LAMA2; (+) strand; PAM type: NRG; PAM sequence: TAG
gcaggatactacattacatt

SEQ ID NO: 170810 - DNA, 20 bp, Artificial Sequence
  Description of Artificial Sequence: Synthetic oligonucleotide
  Target: LAMA2; (+) strand; PAM type: NRG; PAM sequence: TAG
atttagccattgtgtcttct

SEQ ID NO: 170811 - DNA, 20 bp, Artificial Sequence
  Description of Artificial Sequence: Synthetic oligonucleotide
  Target: LAMA2; (+) strand; PAM type: NRG; PAM sequence: AGG
tttagccattgtgtcttctt

SEQ ID NO: 170812 - DNA, 20 bp, Artificial Sequence
  Description of Artificial Sequence: Synthetic oligonucleotide
  Target: LAMA2; (+) strand; PAM type: NRG; PAM sequence: GGG
ttagccattgtgtcttctta

SEQ ID NO: 170813 - DNA, 20 bp, Artificial Sequence
  Description of Artificial Sequence: Synthetic oligonucleotide
  Target: LAMA2; (+) strand; PAM type: NRG; PAM sequence: TAG
gtgtcttcttagggttcctc

SEQ ID NO: 170814 - DNA, 20 bp, Artificial Sequence
  Description of Artificial Sequence: Synthetic oligonucleotide
  Target: LAMA2; (+) strand; PAM type: NRG; PAM sequence: CAG
cactgtcaaaaatactgtaa

SEQ ID NO: 170815 - DNA, 20 bp, Artificial Sequence
  Description of Artificial Sequence: Synthetic oligonucleotide
  Target: LAMA2; (+) strand; PAM type: NRG; PAM sequence: GAG
acagtgtttctgatgacttt

SEQ ID NO: 170816 - DNA, 20 bp, Artificial Sequence
  Description of Artificial Sequence: Synthetic oligonucleotide
  Target: LAMA2; (+) strand; PAM type: NRG; PAM sequence: GAG
agtgtttctgatgactttga

SEQ ID NO: 170817 - DNA, 20 bp, Artificial Sequence
  Description of Artificial Sequence: Synthetic oligonucleotide
  Target: LAMA2; (+) strand; PAM type: NRG; PAM sequence: TGG
ttctgatgactttgagagtt

SEQ ID NO: 170818 - DNA, 20 bp, Artificial Sequence
  Description of Artificial Sequence: Synthetic oligonucleotide
  Target: LAMA2; (+) strand; PAM type: NRG; PAM sequence: CAG
gatgactttgagagtttgga

SEQ ID NO: 170819 - DNA, 20 bp, Artificial Sequence
  Description of Artificial Sequence: Synthetic oligonucleotide
  Target: LAMA2; (+) strand; PAM type: NRG; PAM sequence: AGG
atgactttgagagtttggac

SEQ ID NO: 170820 - DNA, 20 bp, Artificial Sequence
  Description of Artificial Sequence: Synthetic oligonucleotide
  Target: LAMA2; (+) strand; PAM type: NRG; PAM sequence: TGG
tttggacaggttcatgtgtt

SEQ ID NO: 170821 - DNA, 20 bp, Artificial Sequence
  Description of Artificial Sequence: Synthetic oligonucleotide
  Target: LAMA2; (+) strand; PAM type: NRG; PAM sequence: AAG
gacaggttcatgtgtttggt

SEQ ID NO: 170822 - DNA, 20 bp, Artificial Sequence
  Description of Artificial Sequence: Synthetic oligonucleotide
  Target: LAMA2; (+) strand; PAM type: NRG; PAM sequence: TGG
ttggtaagctgtccctcaat

SEQ ID NO: 170823 - DNA, 20 bp, Artificial Sequence
  Description of Artificial Sequence: Synthetic oligonucleotide
  Target: LAMA2; (+) strand; PAM type: NRG; PAM sequence: GGG
tggtaagctgtccctcaatt

SEQ ID NO: 170824 - DNA, 20 bp, Artificial Sequence
  Description of Artificial Sequence: Synthetic oligonucleotide
  Target: LAMA2; (+) strand; PAM type: NRG; PAM sequence: GGG
ggtaagctgtccctcaattg

SEQ ID NO: 170825 - DNA, 20 bp, Artificial Sequence
  Description of Artificial Sequence: Synthetic oligonucleotide
  Target: LAMA2; (+) strand; PAM type: NRG; PAM sequence: TAG
cctcatatctttctcatgat

SEQ ID NO: 170826 - DNA, 20 bp, Artificial Sequence
  Description of Artificial Sequence: Synthetic oligonucleotide
  Target: LAMA2; (+) strand; PAM type: NRG; PAM sequence: TGG
tatctttctcatgattagaa

SEQ ID NO: 170827 - DNA, 20 bp, Artificial Sequence
  Description of Artificial Sequence: Synthetic oligonucleotide
  Target: LAMA2; (+) strand; PAM type: NRG; PAM sequence: GAG
catgattagaatggaattat

SEQ ID NO: 170828 - DNA, 20 bp, Artificial Sequence
  Description of Artificial Sequence: Synthetic oligonucleotide
  Target: LAMA2; (+) strand; PAM type: NRG; PAM sequence: TGG
aatggaattatgagtttttg

SEQ ID NO: 170829 - DNA, 20 bp, Artificial Sequence
  Description of Artificial Sequence: Synthetic oligonucleotide
  Target: LAMA2; (+) strand; PAM type: NRG; PAM sequence: GGG
atggaattatgagtttttgt

SEQ ID NO: 170830 - DNA, 20 bp, Artificial Sequence
  Description of Artificial Sequence: Synthetic oligonucleotide
  Target: LAMA2; (+) strand; PAM type: NRG; PAM sequence: CAG
agtttttgtgggaaaaactt

SEQ ID NO: 170831 - DNA, 20 bp, Artificial Sequence
  Description of Artificial Sequence: Synthetic oligonucleotide
  Target: LAMA2; (+) strand; PAM type: NRG; PAM sequence: GAG
tttttgtgggaaaaacttca

SEQ ID NO: 170832 - DNA, 20 bp, Artificial Sequence
  Description of Artificial Sequence: Synthetic oligonucleotide
  Target: LAMA2; (+) strand; PAM type: NRG; PAM sequence: AGG
ttttgtgggaaaaacttcag

SEQ ID NO: 170833 - DNA, 20 bp, Artificial Sequence
  Description of Artificial Sequence: Synthetic oligonucleotide
  Target: LAMA2; (+) strand; PAM type: NRG; PAM sequence: AAG
tgggaaaaacttcagaggta

SEQ ID NO: 170834 - DNA, 20 bp, Artificial Sequence
  Description of Artificial Sequence: Synthetic oligonucleotide
  Target: LAMA2; (+) strand; PAM type: NRG; PAM sequence: AAG
agtaccattttcatcacatc

SEQ ID NO: 170835 - DNA, 20 bp, Artificial Sequence
  Description of Artificial Sequence: Synthetic oligonucleotide
  Target: LAMA2; (+) strand; PAM type: NRG; PAM sequence: TGG
accaatatgacttattactg

SEQ ID NO: 170836 - DNA, 20 bp, Artificial Sequence
  Description of Artificial Sequence: Synthetic oligonucleotide
  Target: LAMA2; (+) strand; PAM type: NRG; PAM sequence: TAG
ccctgatcacctgactaaca

SEQ ID NO: 170837 - DNA, 20 bp, Artificial Sequence
  Description of Artificial Sequence: Synthetic oligonucleotide
  Target: LAMA2; (+) strand; PAM type: NRG; PAM sequence: CAG
ctgactaacatagtgtttgc

SEQ ID NO: 170838 - DNA, 20 bp, Artificial Sequence
  Description of Artificial Sequence: Synthetic oligonucleotide
  Target: LAMA2; (+) strand; PAM type: NRG; PAM sequence: AAG
tgccagatttttccactgta

SEQ ID NO: 170839 - DNA, 20 bp, Artificial Sequence
  Description of Artificial Sequence: Synthetic oligonucleotide
  Target: LAMA2; (+) strand; PAM type: NRG; PAM sequence: CAG
atttttatctgcccattctt

SEQ ID NO: 170840 - DNA, 20 bp, Artificial Sequence
  Description of Artificial Sequence: Synthetic oligonucleotide
  Target: LAMA2; (+) strand; PAM type: NRG; PAM sequence: CAG
atctgcccattcttcagatt

SEQ ID NO: 170841 - DNA, 20 bp, Artificial Sequence
  Description of Artificial Sequence: Synthetic oligonucleotide
  Target: LAMA2; (+) strand; PAM type: NRG; PAM sequence: AAG
cttcagattcagtaacataa

SEQ ID NO: 170842 - DNA, 20 bp, Artificial Sequence
  Description of Artificial Sequence: Synthetic oligonucleotide
  Target: LAMA2; (+) strand; PAM type: NRG; PAM sequence: AGG
ttcagattcagtaacataaa

SEQ ID NO: 170843 - DNA, 20 bp, Artificial Sequence
  Description of Artificial Sequence: Synthetic oligonucleotide
  Target: LAMA2; (+) strand; PAM type: NRG; PAM sequence: CAG
attcagtaacataaaaggcg

SEQ ID NO: 170844 - DNA, 20 bp, Artificial Sequence
  Description of Artificial Sequence: Synthetic oligonucleotide
  Target: LAMA2; (+) strand; PAM type: NRG; PAM sequence: TAG
taacataaaaggcgcagaaa

SEQ ID NO: 170845 - DNA, 20 bp, Artificial Sequence
  Description of Artificial Sequence: Synthetic oligonucleotide
  Target: LAMA2; (+) strand; PAM type: NRG; PAM sequence: AGG
aacataaaaggcgcagaaat

SEQ ID NO: 170846 - DNA, 20 bp, Artificial Sequence
  Description of Artificial Sequence: Synthetic oligonucleotide
  Target: LAMA2; (+) strand; PAM type: NRG; PAM sequence: AAG
cgcagaaataggactactga

SEQ ID NO: 170847 - DNA, 20 bp, Artificial Sequence
  Description of Artificial Sequence: Synthetic oligonucleotide
  Target: LAMA2; (+) strand; PAM type: NRG; PAM sequence: AAG
aaataggactactgaaagca

SEQ ID NO: 170848 - DNA, 20 bp, Artificial Sequence
  Description of Artificial Sequence: Synthetic oligonucleotide
  Target: LAMA2; (+) strand; PAM type: NRG; PAM sequence: TGG
gaaagcaaagatcactttga

SEQ ID NO: 170849 - DNA, 20 bp, Artificial Sequence
  Description of Artificial Sequence: Synthetic oligonucleotide
  Target: LAMA2; (+) strand; PAM type: NRG; PAM sequence: GGG
aaagcaaagatcactttgat

SEQ ID NO: 170850 - DNA, 20 bp, Artificial Sequence
  Description of Artificial Sequence: Synthetic oligonucleotide
  Target: LAMA2; (+) strand; PAM type: NRG; PAM sequence: GAG
aaagatcactttgatgggtt

SEQ ID NO: 170851 - DNA, 20 bp, Artificial Sequence
  Description of Artificial Sequence: Synthetic oligonucleotide
  Target: LAMA2; (+) strand; PAM type: NRG; PAM sequence: AAG
gatcactttgatgggttgag

SEQ ID NO: 170852 - DNA, 20 bp, Artificial Sequence
  Description of Artificial Sequence: Synthetic oligonucleotide
  Target: LAMA2; (+) strand; PAM type: NRG; PAM sequence: AGG
atcactttgatgggttgaga

SEQ ID NO: 170853 - DNA, 20 bp, Artificial Sequence
  Description of Artificial Sequence: Synthetic oligonucleotide
  Target: LAMA2; (+) strand; PAM type: NRG; PAM sequence: GGG
tcactttgatgggttgagaa

SEQ ID NO: 170854 - DNA, 20 bp, Artificial Sequence
  Description of Artificial Sequence: Synthetic oligonucleotide
  Target: LAMA2; (+) strand; PAM type: NRG; PAM sequence: GGG
cactttgatgggttgagaag

SEQ ID NO: 170855 - DNA, 20 bp, Artificial Sequence
  Description of Artificial Sequence: Synthetic oligonucleotide
  Target: LAMA2; (+) strand; PAM type: NRG; PAM sequence: GGG
actttgatgggttgagaagg

SEQ ID NO: 170856 - DNA, 20 bp, Artificial Sequence
  Description of Artificial Sequence: Synthetic oligonucleotide
  Target: LAMA2; (+) strand; PAM type: NRG; PAM sequence: GAG
tttgatgggttgagaagggg

SEQ ID NO: 170857 - DNA, 20 bp, Artificial Sequence
  Description of Artificial Sequence: Synthetic oligonucleotide
  Target: LAMA2; (+) strand; PAM type: NRG; PAM sequence: AGG
ttgatgggttgagaaggggg

SEQ ID NO: 170858 - DNA, 20 bp, Artificial Sequence
  Description of Artificial Sequence: Synthetic oligonucleotide
  Target: LAMA2; (+) strand; PAM type: NRG; PAM sequence: CAG
ttacaaatatatcttccatg

SEQ ID NO: 170859 - DNA, 20 bp, Artificial Sequence
  Description of Artificial Sequence: Synthetic oligonucleotide
  Target: LAMA2; (+) strand; PAM type: NRG; PAM sequence: AAG
catgcagaccataaatactc

SEQ ID NO: 170860 - DNA, 20 bp, Artificial Sequence
  Description of Artificial Sequence: Synthetic oligonucleotide
  Target: LAMA2; (+) strand; PAM type: NRG; PAM sequence: TGG
accaattctctctttccctg

SEQ ID NO: 170861 - DNA, 20 bp, Artificial Sequence
  Description of Artificial Sequence: Synthetic oligonucleotide
  Target: LAMA2; (+) strand; PAM type: NRG; PAM sequence: AAG
ttctctctttccctgtggtc

SEQ ID NO: 170862 - DNA, 20 bp, Artificial Sequence
  Description of Artificial Sequence: Synthetic oligonucleotide
  Target: LAMA2; (+) strand; PAM type: NRG; PAM sequence: AAG
tcaagctgcatgacaatcaa

SEQ ID NO: 170863 - DNA, 20 bp, Artificial Sequence
  Description of Artificial Sequence: Synthetic oligonucleotide
  Target: LAMA2; (+) strand; PAM type: NRG; PAM sequence: AGG
caagctgcatgacaatcaaa

SEQ ID NO: 170864 - DNA, 20 bp, Artificial Sequence
  Description of Artificial Sequence: Synthetic oligonucleotide
  Target: LAMA2; (+) strand; PAM type: NRG; PAM sequence: CAG
aatcaaaaggtgaattaata

SEQ ID NO: 170865 - DNA, 20 bp, Artificial Sequence
  Description of Artificial Sequence: Synthetic oligonucleotide
  Target: LAMA2; (+) strand; PAM type: NRG; PAM sequence: TGG
aaaaggtgaattaatacaga

SEQ ID NO: 170866 - DNA, 20 bp, Artificial Sequence
  Description of Artificial Sequence: Synthetic oligonucleotide
  Target: LAMA2; (+) strand; PAM type: NRG; PAM sequence: TAG
aatacagatggaattataat

SEQ ID NO: 170867 - DNA, 20 bp, Artificial Sequence
  Description of Artificial Sequence: Synthetic oligonucleotide
  Target: LAMA2; (+) strand; PAM type: NRG; PAM sequence: GAG
tacagatggaattataatta

SEQ ID NO: 170868 - DNA, 20 bp, Artificial Sequence
  Description of Artificial Sequence: Synthetic oligonucleotide
  Target: LAMA2; (+) strand; PAM type: NRG; PAM sequence: GAG
cagatggaattataattaga

SEQ ID NO: 170869 - DNA, 20 bp, Artificial Sequence
  Description of Artificial Sequence: Synthetic oligonucleotide
  Target: LAMA2; (+) strand; PAM type: NRG; PAM sequence: TAG
tggaattataattagagagt

SEQ ID NO: 170870 - DNA, 20 bp, Artificial Sequence
  Description of Artificial Sequence: Synthetic oligonucleotide
  Target: LAMA2; (+) strand; PAM type: NRG; PAM sequence: TGG
attataattagagagttaga

SEQ ID NO: 170871 - DNA, 20 bp, Artificial Sequence
  Description of Artificial Sequence: Synthetic oligonucleotide
  Target: LAMA2; (+) strand; PAM type: NRG; PAM sequence: CAG
atggtttcattatccaaaat

SEQ ID NO: 170872 - DNA, 20 bp, Artificial Sequence
  Description of Artificial Sequence: Synthetic oligonucleotide
  Target: LAMA2; (+) strand; PAM type: NRG; PAM sequence: AGG
tggtttcattatccaaaatc

SEQ ID NO: 170873 - DNA, 20 bp, Artificial Sequence
  Description of Artificial Sequence: Synthetic oligonucleotide
  Target: LAMA2; (+) strand; PAM type: NRG; PAM sequence: AAG
tcattatccaaaatcaggct

SEQ ID NO: 170874 - DNA, 20 bp, Artificial Sequence
  Description of Artificial Sequence: Synthetic oligonucleotide
  Target: LAMA2; (+) strand; PAM type: NRG; PAM sequence: CAG
gcacgctaatgcctctatct

SEQ ID NO: 170875 - DNA, 20 bp, Artificial Sequence
  Description of Artificial Sequence: Synthetic oligonucleotide
  Target: LAMA2; (+) strand; PAM type: NRG; PAM sequence: GAG
acgctaatgcctctatctca

SEQ ID NO: 170876 - DNA, 20 bp, Artificial Sequence
  Description of Artificial Sequence: Synthetic oligonucleotide
  Target: LAMA2; (+) strand; PAM type: NRG; PAM sequence: CAG
cagagtcatgaatgatcctg

SEQ ID NO: 170877 - DNA, 20 bp, Artificial Sequence
  Description of Artificial Sequence: Synthetic oligonucleotide
  Target: LAMA2; (+) strand; PAM type: NRG; PAM sequence: CAG
aatgatcctgcagttgtgac

SEQ ID NO: 170878 - DNA, 20 bp, Artificial Sequence
  Description of Artificial Sequence: Synthetic oligonucleotide
  Target: LAMA2; (+) strand; PAM type: NRG; PAM sequence: AGG
atgatcctgcagttgtgacc

SEQ ID NO: 170879 - DNA, 20 bp, Artificial Sequence
  Description of Artificial Sequence: Synthetic oligonucleotide
  Target: LAMA2; (+) strand; PAM type: NRG; PAM sequence: GGG
tgatcctgcagttgtgacca

SEQ ID NO: 170880 - DNA, 20 bp, Artificial Sequence
  Description of Artificial Sequence: Synthetic oligonucleotide
  Target: LAMA2; (+) strand; PAM type: NRG; PAM sequence: GAG
tgcagttgtgaccagggtat

SEQ ID NO: 170881 - DNA, 20 bp, Artificial Sequence
  Description of Artificial Sequence: Synthetic oligonucleotide
  Target: LAMA2; (+) strand; PAM type: NRG; PAM sequence: CAG
tgaccagggtatgagaaatg

SEQ ID NO: 170882 - DNA, 20 bp, Artificial Sequence
  Description of Artificial Sequence: Synthetic oligonucleotide
  Target: LAMA2; (+) strand; PAM type: NRG; PAM sequence: TGG
ccagggtatgagaaatgcag

SEQ ID NO: 170883 - DNA, 20 bp, Artificial Sequence
  Description of Artificial Sequence: Synthetic oligonucleotide
  Target: LAMA2; (+) strand; PAM type: NRG; PAM sequence: TAG
ccaattacccatgactacat

SEQ ID NO: 170884 - DNA, 20 bp, Artificial Sequence
  Description of Artificial Sequence: Synthetic oligonucleotide
  Target: LAMA2; (+) strand; PAM type: NRG; PAM sequence: GAG
aattacccatgactacatta

SEQ ID NO: 170885 - DNA, 20 bp, Artificial Sequence
  Description of Artificial Sequence: Synthetic oligonucleotide
  Target: LAMA2; (+) strand; PAM type: NRG; PAM sequence: AGG
attacccatgactacattag

SEQ ID NO: 170886 - DNA, 20 bp, Artificial Sequence
  Description of Artificial Sequence: Synthetic oligonucleotide
  Target: LAMA2; (+) strand; PAM type: NRG; PAM sequence: GAG
tacccatgactacattagag

SEQ ID NO: 170887 - DNA, 20 bp, Artificial Sequence
  Description of Artificial Sequence: Synthetic oligonucleotide
  Target: LAMA2; (+) strand; PAM type: NRG; PAM sequence: CAG
catgactacattagaggaga

SEQ ID NO: 170888 - DNA, 20 bp, Artificial Sequence
  Description of Artificial Sequence: Synthetic oligonucleotide
  Target: LAMA2; (+) strand; PAM type: NRG; PAM sequence: TAG
cattagaggagacagtgctc

SEQ ID NO: 170889 - DNA, 20 bp, Artificial Sequence
  Description of Artificial Sequence: Synthetic oligonucleotide
  Target: LAMA2; (+) strand; PAM type: NRG; PAM sequence: TAG
gaggagacagtgctctagac

SEQ ID NO: 170890 - DNA, 20 bp, Artificial Sequence
  Description of Artificial Sequence: Synthetic oligonucleotide
  Target: LAMA2; (+) strand; PAM type: NRG; PAM sequence: AGG
aggagacagtgctctagact

SEQ ID NO: 170891 - DNA, 20 bp, Artificial Sequence
  Description of Artificial Sequence: Synthetic oligonucleotide
  Target: LAMA2; (+) strand; PAM type: NRG; PAM sequence: TGG
tctagactaggactgcacat

SEQ ID NO: 170892 - DNA, 20 bp, Artificial Sequence
  Description of Artificial Sequence: Synthetic oligonucleotide
  Target: LAMA2; (+) strand; PAM type: NRG; PAM sequence: CAG
ggactgcacattggaattac

SEQ ID NO: 170893 - DNA, 20 bp, Artificial Sequence
  Description of Artificial Sequence: Synthetic oligonucleotide
  Target: LAMA2; (+) strand; PAM type: NRG; PAM sequence: AGG
gactgcacattggaattacc

SEQ ID NO: 170894 - DNA, 20 bp, Artificial Sequence
  Description of Artificial Sequence: Synthetic oligonucleotide
  Target: LAMA2; (+) strand; PAM type: NRG; PAM sequence: GAG
ctgcacattggaattaccag

SEQ ID NO: 170895 - DNA, 20 bp, Artificial Sequence
  Description of Artificial Sequence: Synthetic oligonucleotide
  Target: LAMA2; (+) strand; PAM type: NRG; PAM sequence: TAG
ggagccctatctcacaccca

SEQ ID NO: 170896 - DNA, 20 bp, Artificial Sequence
  Description of Artificial Sequence: Synthetic oligonucleotide
  Target: LAMA2; (+) strand; PAM type: NRG; PAM sequence: AGG
gagccctatctcacacccat

SEQ ID NO: 170897 - DNA, 20 bp, Artificial Sequence
  Description of Artificial Sequence: Synthetic oligonucleotide
  Target: LAMA2; (+) strand; PAM type: NRG; PAM sequence: CAG
cacacccataggttgtgatg

SEQ ID NO: 170898 - DNA, 20 bp, Artificial Sequence
  Description of Artificial Sequence: Synthetic oligonucleotide
  Target: LAMA2; (+) strand; PAM type: NRG; PAM sequence: TGG
cccataggttgtgatgcagt

SEQ ID NO: 170899 - DNA, 20 bp, Artificial Sequence
  Description of Artificial Sequence: Synthetic oligonucleotide
  Target: LAMA2; (+) strand; PAM type: NRG; PAM sequence: TGG
aggttgtgatgcagttggtc

SEQ ID NO: 170900 - DNA, 20 bp, Artificial Sequence
  Description of Artificial Sequence: Synthetic oligonucleotide
  Target: LAMA2; (+) strand; PAM type: NRG; PAM sequence: GGG
ggttgtgatgcagttggtct

SEQ ID NO: 170901 - DNA, 20 bp, Artificial Sequence
  Description of Artificial Sequence: Synthetic oligonucleotide
  Target: LAMA2; (+) strand; PAM type: NRG; PAM sequence: GGG
gttgtgatgcagttggtctg

SEQ ID NO: 170902 - DNA, 20 bp, Artificial Sequence
  Description of Artificial Sequence: Synthetic oligonucleotide
  Target: LAMA2; (+) strand; PAM type: NRG; PAM sequence: TAG
gtgatgcagttggtctgggg

SEQ ID NO: 170903 - DNA, 20 bp, Artificial Sequence
  Description of Artificial Sequence: Synthetic oligonucleotide
  Target: LAMA2; (+) strand; PAM type: NRG; PAM sequence: GAG
gatgcagttggtctggggta

SEQ ID NO: 170904 - DNA, 20 bp, Artificial Sequence
  Description of Artificial Sequence: Synthetic oligonucleotide
  Target: LAMA2; (+) strand; PAM type: NRG; PAM sequence: CAG
cagttggtctggggtagagt

SEQ ID NO: 170905 - DNA, 20 bp, Artificial Sequence
  Description of Artificial Sequence: Synthetic oligonucleotide
  Target: LAMA2; (+) strand; PAM type: NRG; PAM sequence: TGG
ctggggtagagtcagaccac

SEQ ID NO: 170906 - DNA, 20 bp, Artificial Sequence
  Description of Artificial Sequence: Synthetic oligonucleotide
  Target: LAMA2; (+) strand; PAM type: NRG; PAM sequence: GGG
tggggtagagtcagaccact

SEQ ID NO: 170907 - DNA, 20 bp, Artificial Sequence
  Description of Artificial Sequence: Synthetic oligonucleotide
  Target: LAMA2; (+) strand; PAM type: NRG; PAM sequence: AAG
gtcagaccactgggatattc

SEQ ID NO: 170908 - DNA, 20 bp, Artificial Sequence
  Description of Artificial Sequence: Synthetic oligonucleotide
  Target: LAMA2; (+) strand; PAM type: NRG; PAM sequence: CAG
tgggatattcaagaactccc

SEQ ID NO: 170909 - DNA, 20 bp, Artificial Sequence
  Description of Artificial Sequence: Synthetic oligonucleotide
  Target: LAMA2; (+) strand; PAM type: NRG; PAM sequence: AAG
ctccccagattatactgata

SEQ ID NO: 170910 - DNA, 20 bp, Artificial Sequence
  Description of Artificial Sequence: Synthetic oligonucleotide
  Target: LAMA2; (+) strand; PAM type: NRG; PAM sequence: TAG
aaagaattactgtgatcctg

SEQ ID NO: 170911 - DNA, 20 bp, Artificial Sequence
  Description of Artificial Sequence: Synthetic oligonucleotide
  Target: LAMA2; (+) strand; PAM type: NRG; PAM sequence: TAG
gtgatcctgtagttacctaa

SEQ ID NO: 170912 - DNA, 20 bp, Artificial Sequence
  Description of Artificial Sequence: Synthetic oligonucleotide
  Target: LAMA2; (+) strand; PAM type: NRG; PAM sequence: AAG
cctgtagttacctaatagct

SEQ ID NO: 170913 - DNA, 20 bp, Artificial Sequence
  Description of Artificial Sequence: Synthetic oligonucleotide
  Target: LAMA2; (+) strand; PAM type: NRG; PAM sequence: TGG
agctaagactctcttccctc

SEQ ID NO: 170914 - DNA, 20 bp, Artificial Sequence
  Description of Artificial Sequence: Synthetic oligonucleotide
  Target: LAMA2; (+) strand; PAM type: NRG; PAM sequence: TGG
cctctggaaaatgccttaat

SEQ ID NO: 170915 - DNA, 20 bp, Artificial Sequence
  Description of Artificial Sequence: Synthetic oligonucleotide
  Target: LAMA2; (+) strand; PAM type: NRG; PAM sequence: CAG
cttttttttttttttttaaa

SEQ ID NO: 170916 - DNA, 20 bp, Artificial Sequence
  Description of Artificial Sequence: Synthetic oligonucleotide
  Target: LAMA2; (+) strand; PAM type: NRG; PAM sequence: GAG
tttttttttttttttaaaca

SEQ ID NO: 170917 - DNA, 20 bp, Artificial Sequence
  Description of Artificial Sequence: Synthetic oligonucleotide
  Target: LAMA2; (+) strand; PAM type: NRG; PAM sequence: CAG
agagtttcacccttgttgtc

SEQ ID NO: 170918 - DNA, 20 bp, Artificial Sequence
  Description of Artificial Sequence: Synthetic oligonucleotide
  Target: LAMA2; (+) strand; PAM type: NRG; PAM sequence: AGG
gagtttcacccttgttgtcc

SEQ ID NO: 170919 - DNA, 20 bp, Artificial Sequence
  Description of Artificial Sequence: Synthetic oligonucleotide
  Target: LAMA2; (+) strand; PAM type: NRG; PAM sequence: TGG
ttcacccttgttgtccaggc

SEQ ID NO: 170920 - DNA, 20 bp, Artificial Sequence
  Description of Artificial Sequence: Synthetic oligonucleotide
  Target: LAMA2; (+) strand; PAM type: NRG; PAM sequence: GAG
cacccttgttgtccaggctg

SEQ ID NO: 170921 - DNA, 20 bp, Artificial Sequence
  Description of Artificial Sequence: Synthetic oligonucleotide
  Target: LAMA2; (+) strand; PAM type: NRG; PAM sequence: TGG
ttgtccaggctggagtacaa

SEQ ID NO: 170922 - DNA, 20 bp, Artificial Sequence
  Description of Artificial Sequence: Synthetic oligonucleotide
  Target: LAMA2; (+) strand; PAM type: NRG; PAM sequence: CAG
ggagtacaatggtgtgaact

SEQ ID NO: 170923 - DNA, 20 bp, Artificial Sequence
  Description of Artificial Sequence: Synthetic oligonucleotide
  Target: LAMA2; (+) strand; PAM type: NRG; PAM sequence: TAG
tcactgcaacctccacctcc

SEQ ID NO: 170924 - DNA, 20 bp, Artificial Sequence
  Description of Artificial Sequence: Synthetic oligonucleotide
  Target: LAMA2; (+) strand; PAM type: NRG; PAM sequence: AGG
cactgcaacctccacctcct

SEQ ID NO: 170925 - DNA, 20 bp, Artificial Sequence
  Description of Artificial Sequence: Synthetic oligonucleotide
  Target: LAMA2; (+) strand; PAM type: NRG; PAM sequence: AAG
aacctccacctcctaggttc

SEQ ID NO: 170926 - DNA, 20 bp, Artificial Sequence
  Description of Artificial Sequence: Synthetic oligonucleotide
  Target: LAMA2; (+) strand; PAM type: NRG; PAM sequence: CAG
ttcaagcaattctcctgctt

SEQ ID NO: 170927 - DNA, 20 bp, Artificial Sequence
  Description of Artificial Sequence: Synthetic oligonucleotide
  Target: LAMA2; (+) strand; PAM type: NRG; PAM sequence: AAG
ttctcctgcttcagcctccc

SEQ ID NO: 170928 - DNA, 20 bp, Artificial Sequence
  Description of Artificial Sequence: Synthetic oligonucleotide
  Target: LAMA2; (+) strand; PAM type: NRG; PAM sequence: TAG
tcctgcttcagcctcccaag

SEQ ID NO: 170929 - DNA, 20 bp, Artificial Sequence
  Description of Artificial Sequence: Synthetic oligonucleotide
  Target: LAMA2; (+) strand; PAM type: NRG; PAM sequence: TGG
gcttcagcctcccaagtagc

SEQ ID NO: 170930 - DNA, 20 bp, Artificial Sequence
  Description of Artificial Sequence: Synthetic oligonucleotide
  Target: LAMA2; (+) strand; PAM type: NRG; PAM sequence: GGG
cttcagcctcccaagtagct

SEQ ID NO: 170931 - DNA, 20 bp, Artificial Sequence
  Description of Artificial Sequence: Synthetic oligonucleotide
  Target: LAMA2; (+) strand; PAM type: NRG; PAM sequence: CAG
ctcccaagtagctgggattg

SEQ ID NO: 170932 - DNA, 20 bp, Artificial Sequence
  Description of Artificial Sequence: Synthetic oligonucleotide
  Target: LAMA2; (+) strand; PAM type: NRG; PAM sequence: AGG
tcccaagtagctgggattgc

SEQ ID NO: 170933 - DNA, 20 bp, Artificial Sequence
  Description of Artificial Sequence: Synthetic oligonucleotide
  Target: LAMA2; (+) strand; PAM type: NRG; PAM sequence: CAG
caggcacctgctaccatgcc

SEQ ID NO: 170934 - DNA, 20 bp, Artificial Sequence
  Description of Artificial Sequence: Synthetic oligonucleotide
  Target: LAMA2; (+) strand; PAM type: NRG; PAM sequence: AAG
attttttttttttttttttt

SEQ ID NO: 170935 - DNA, 20 bp, Artificial Sequence
  Description of Artificial Sequence: Synthetic oligonucleotide
  Target: LAMA2; (+) strand; PAM type: NRG; PAM sequence: TAG
tttttttttttttttttaag

SEQ ID NO: 170936 - DNA, 20 bp, Artificial Sequence
  Description of Artificial Sequence: Synthetic oligonucleotide
  Target: LAMA2; (+) strand; PAM type: NRG; PAM sequence: GAG
tttttttttttttttaagta

SEQ ID NO: 170937 - DNA, 20 bp, Artificial Sequence
  Description of Artificial Sequence: Synthetic oligonucleotide
  Target: LAMA2; (+) strand; PAM type: NRG; PAM sequence: CAG
tttttttttttaagtagaga

SEQ ID NO: 170938 - DNA, 20 bp, Artificial Sequence
  Description of Artificial Sequence: Synthetic oligonucleotide
  Target: LAMA2; (+) strand; PAM type: NRG; PAM sequence: AGG
ttttttttttaagtagagac

SEQ ID NO: 170939 - DNA, 20 bp, Artificial Sequence
  Description of Artificial Sequence: Synthetic oligonucleotide
  Target: LAMA2; (+) strand; PAM type: NRG; PAM sequence: GGG
tttttttttaagtagagaca

SEQ ID NO: 170940 - DNA, 20 bp, Artificial Sequence
  Description of Artificial Sequence: Synthetic oligonucleotide
  Target: LAMA2; (+) strand; PAM type: NRG; PAM sequence: TGG
gagacagggtttcatcatgt

SEQ ID NO: 170941 - DNA, 20 bp, Artificial Sequence
  Description of Artificial Sequence: Synthetic oligonucleotide
  Target: LAMA2; (+) strand; PAM type: NRG; PAM sequence: CAG
cagggtttcatcatgttggc

SEQ ID NO: 170942 - DNA, 20 bp, Artificial Sequence
  Description of Artificial Sequence: Synthetic oligonucleotide
  Target: LAMA2; (+) strand; PAM type: NRG; PAM sequence: AGG
agggtttcatcatgttggcc

SEQ ID NO: 170943 - DNA, 20 bp, Artificial Sequence
  Description of Artificial Sequence: Synthetic oligonucleotide
  Target: LAMA2; (+) strand; PAM type: NRG; PAM sequence: TGG
tttcatcatgttggccaggc

SEQ ID NO: 170944 - DNA, 20 bp, Artificial Sequence
  Description of Artificial Sequence: Synthetic oligonucleotide
  Target: LAMA2; (+) strand; PAM type: NRG; PAM sequence: CGG
tggtctcgaacccctgacct

SEQ ID NO: 170945 - DNA, 20 bp, Artificial Sequence
  Description of Artificial Sequence: Synthetic oligonucleotide
  Target: LAMA2; (+) strand; PAM type: NRG; PAM sequence: GGG
ggtctcgaacccctgacctc

SEQ ID NO: 170946 - DNA, 20 bp, Artificial Sequence
  Description of Artificial Sequence: Synthetic oligonucleotide
  Target: LAMA2; (+) strand; PAM type: NRG; PAM sequence: CAG
ctcgggtgatccacccgcct

SEQ ID NO: 170947 - DNA, 20 bp, Artificial Sequence
  Description of Artificial Sequence: Synthetic oligonucleotide
  Target: LAMA2; (+) strand; PAM type: NRG; PAM sequence: AAG
ccacccgcctcagcctccca

SEQ ID NO: 170948 - DNA, 20 bp, Artificial Sequence
  Description of Artificial Sequence: Synthetic oligonucleotide
  Target: LAMA2; (+) strand; PAM type: NRG; PAM sequence: TGG
gcctcagcctcccaaagtgc

SEQ ID NO: 170949 - DNA, 20 bp, Artificial Sequence
  Description of Artificial Sequence: Synthetic oligonucleotide
  Target: LAMA2; (+) strand; PAM type: NRG; PAM sequence: GGG
cctcagcctcccaaagtgct

SEQ ID NO: 170950 - DNA, 20 bp, Artificial Sequence
  Description of Artificial Sequence: Synthetic oligonucleotide
  Target: LAMA2; (+) strand; PAM type: NRG; PAM sequence: CAG
ctcccaaagtgctgggatta

SEQ ID NO: 170951 - DNA, 20 bp, Artificial Sequence
  Description of Artificial Sequence: Synthetic oligonucleotide
  Target: LAMA2; (+) strand; PAM type: NRG; PAM sequence: AGG
tcccaaagtgctgggattac

SEQ ID NO: 170952 - DNA, 20 bp, Artificial Sequence
  Description of Artificial Sequence: Synthetic oligonucleotide
  Target: LAMA2; (+) strand; PAM type: NRG; PAM sequence: GAG
agtgctgggattacaggcgt

SEQ ID NO: 170953 - DNA, 20 bp, Artificial Sequence
  Description of Artificial Sequence: Synthetic oligonucleotide
  Target: LAMA2; (+) strand; PAM type: NRG; PAM sequence: CAG
caggcgtgagccaccatgcc

SEQ ID NO: 170954 - DNA, 20 bp, Artificial Sequence
  Description of Artificial Sequence: Synthetic oligonucleotide
  Target: LAMA2; (+) strand; PAM type: NRG; PAM sequence: TGG
tatgctcctttttctctgct

SEQ ID NO: 170955 - DNA, 20 bp, Artificial Sequence
  Description of Artificial Sequence: Synthetic oligonucleotide
  Target: LAMA2; (+) strand; PAM type: NRG; PAM sequence: TGG
ctcctttttctctgcttggt

SEQ ID NO: 170956 - DNA, 20 bp, Artificial Sequence
  Description of Artificial Sequence: Synthetic oligonucleotide
  Target: LAMA2; (+) strand; PAM type: NRG; PAM sequence: CAG
tctctgcttggttggctcac

SEQ ID NO: 170957 - DNA, 20 bp, Artificial Sequence
  Description of Artificial Sequence: Synthetic oligonucleotide
  Target: LAMA2; (+) strand; PAM type: NRG; PAM sequence: CAG
ggctcaccagtcacttgata

SEQ ID NO: 170958 - DNA, 20 bp, Artificial Sequence
  Description of Artificial Sequence: Synthetic oligonucleotide
  Target: LAMA2; (+) strand; PAM type: NRG; PAM sequence: TAG
cagtcacttgatacagtctt

SEQ ID NO: 170959 - DNA, 20 bp, Artificial Sequence
  Description of Artificial Sequence: Synthetic oligonucleotide
  Target: LAMA2; (+) strand; PAM type: NRG; PAM sequence: AAG
ttgatacagtctttagattt

SEQ ID NO: 170960 - DNA, 20 bp, Artificial Sequence
  Description of Artificial Sequence: Synthetic oligonucleotide
  Target: LAMA2; (+) strand; PAM type: NRG; PAM sequence: GAG
gatacagtctttagatttaa

SEQ ID NO: 170961 - DNA, 20 bp, Artificial Sequence
  Description of Artificial Sequence: Synthetic oligonucleotide
  Target: LAMA2; (+) strand; PAM type: NRG; PAM sequence: AAG
tagatttaagagcacatgtc

SEQ ID NO: 170962 - DNA, 20 bp, Artificial Sequence
  Description of Artificial Sequence: Synthetic oligonucleotide
  Target: LAMA2; (+) strand; PAM type: NRG; PAM sequence: AGG
agatttaagagcacatgtca

SEQ ID NO: 170963 - DNA, 20 bp, Artificial Sequence
  Description of Artificial Sequence: Synthetic oligonucleotide
  Target: LAMA2; (+) strand; PAM type: NRG; PAM sequence: TAG
ttgatcctgcatgactgctg

SEQ ID NO: 170964 - DNA, 20 bp, Artificial Sequence
  Description of Artificial Sequence: Synthetic oligonucleotide
  Target: LAMA2; (+) strand; PAM type: NRG; PAM sequence: AGG
tgatcctgcatgactgctgt

SEQ ID NO: 170965 - DNA, 20 bp, Artificial Sequence
  Description of Artificial Sequence: Synthetic oligonucleotide
  Target: LAMA2; (+) strand; PAM type: NRG; PAM sequence: GAG
atcctgcatgactgctgtag

SEQ ID NO: 170966 - DNA, 20 bp, Artificial Sequence
  Description of Artificial Sequence: Synthetic oligonucleotide
  Target: LAMA2; (+) strand; PAM type: NRG; PAM sequence: AAG
ggagctaccctctcttcttt

SEQ ID NO: 170967 - DNA, 20 bp, Artificial Sequence
  Description of Artificial Sequence: Synthetic oligonucleotide
  Target: LAMA2; (+) strand; PAM type: NRG; PAM sequence: AGG
gagctaccctctcttcttta

SEQ ID NO: 170968 - DNA, 20 bp, Artificial Sequence
  Description of Artificial Sequence: Synthetic oligonucleotide
  Target: LAMA2; (+) strand; PAM type: NRG; PAM sequence: GGG
agctaccctctcttctttaa

SEQ ID NO: 170969 - DNA, 20 bp, Artificial Sequence
  Description of Artificial Sequence: Synthetic oligonucleotide
  Target: LAMA2; (+) strand; PAM type: NRG; PAM sequence: TGG
ttatactcattgtttttaaa

SEQ ID NO: 170970 - DNA, 20 bp, Artificial Sequence
  Description of Artificial Sequence: Synthetic oligonucleotide
  Target: LAMA2; (+) strand; PAM type: NRG; PAM sequence: GAG
atactcattgtttttaaatg

SEQ ID NO: 170971 - DNA, 20 bp, Artificial Sequence
  Description of Artificial Sequence: Synthetic oligonucleotide
  Target: LAMA2; (+) strand; PAM type: NRG; PAM sequence: TGG
atctaattccctaatatccc

SEQ ID NO: 170972 - DNA, 20 bp, Artificial Sequence
  Description of Artificial Sequence: Synthetic oligonucleotide
  Target: LAMA2; (+) strand; PAM type: NRG; PAM sequence: GGG
tctaattccctaatatccct

SEQ ID NO: 170973 - DNA, 20 bp, Artificial Sequence
  Description of Artificial Sequence: Synthetic oligonucleotide
  Target: LAMA2; (+) strand; PAM type: NRG; PAM sequence: AAG
ttccctaatatccctgggta

SEQ ID NO: 170974 - DNA, 20 bp, Artificial Sequence
  Description of Artificial Sequence: Synthetic oligonucleotide
  Target: LAMA2; (+) strand; PAM type: NRG; PAM sequence: AAG
cctaatatccctgggtaaag

SEQ ID NO: 170975 - DNA, 20 bp, Artificial Sequence
  Description of Artificial Sequence: Synthetic oligonucleotide
  Target: LAMA2; (+) strand; PAM type: NRG; PAM sequence: AAG
aagaagacattattccaccc

SEQ ID NO: 170976 - DNA, 20 bp, Artificial Sequence
  Description of Artificial Sequence: Synthetic oligonucleotide
  Target: LAMA2; (+) strand; PAM type: NRG; PAM sequence: AAG
ttaattcatgtataaatata

SEQ ID NO: 170977 - DNA, 20 bp, Artificial Sequence
  Description of Artificial Sequence: Synthetic oligonucleotide
  Target: LAMA2; (+) strand; PAM type: NRG; PAM sequence: TGG
tgccattttattttactcac

SEQ ID NO: 170978 - DNA, 20 bp, Artificial Sequence
  Description of Artificial Sequence: Synthetic oligonucleotide
  Target: LAMA2; (+) strand; PAM type: NRG; PAM sequence: AAG
cattttattttactcactgg

SEQ ID NO: 170979 - DNA, 20 bp, Artificial Sequence
  Description of Artificial Sequence: Synthetic oligonucleotide
  Target: LAMA2; (+) strand; PAM type: NRG; PAM sequence: AAG
tttactcactggaagaaccc

SEQ ID NO: 170980 - DNA, 20 bp, Artificial Sequence
  Description of Artificial Sequence: Synthetic oligonucleotide
  Target: LAMA2; (+) strand; PAM type: NRG; PAM sequence: GAG
aacccaagttcctcacatat

SEQ ID NO: 170981 - DNA, 20 bp, Artificial Sequence
  Description of Artificial Sequence: Synthetic oligonucleotide
  Target: LAMA2; (+) strand; PAM type: NRG; PAM sequence: CAG
aacatattcaaactgcccta

SEQ ID NO: 170982 - DNA, 20 bp, Artificial Sequence
  Description of Artificial Sequence: Synthetic oligonucleotide
  Target: LAMA2; (+) strand; PAM type: NRG; PAM sequence: AAG
tacagtatgtgtgaaatatt

SEQ ID NO: 170983 - DNA, 20 bp, Artificial Sequence
  Description of Artificial Sequence: Synthetic oligonucleotide
  Target: LAMA2; (+) strand; PAM type: NRG; PAM sequence: TAG
gatgactctacttacctcta

SEQ ID NO: 170984 - DNA, 20 bp, Artificial Sequence
  Description of Artificial Sequence: Synthetic oligonucleotide
  Target: LAMA2; (+) strand; PAM type: NRG; PAM sequence: TAG
acctctatagctattgtcct

SEQ ID NO: 170985 - DNA, 20 bp, Artificial Sequence
  Description of Artificial Sequence: Synthetic oligonucleotide
  Target: LAMA2; (+) strand; PAM type: NRG; PAM sequence: CAG
ccttagctcctttctttttt

SEQ ID NO: 170986 - DNA, 20 bp, Artificial Sequence
  Description of Artificial Sequence: Synthetic oligonucleotide
  Target: LAMA2; (+) strand; PAM type: NRG; PAM sequence: GAG
ttagctcctttcttttttca

SEQ ID NO: 170987 - DNA, 20 bp, Artificial Sequence
  Description of Artificial Sequence: Synthetic oligonucleotide
  Target: LAMA2; (+) strand; PAM type: NRG; PAM sequence: AAG
ttcagagccaaaatttttta

SEQ ID NO: 170988 - DNA, 20 bp, Artificial Sequence
  Description of Artificial Sequence: Synthetic oligonucleotide
  Target: LAMA2; (+) strand; PAM type: NRG; PAM sequence: TGG
gccaaaattttttaaagact

SEQ ID NO: 170989 - DNA, 20 bp, Artificial Sequence
  Description of Artificial Sequence: Synthetic oligonucleotide
  Target: LAMA2; (+) strand; PAM type: NRG; PAM sequence: GAG
caaaattttttaaagacttg

SEQ ID NO: 170990 - DNA, 20 bp, Artificial Sequence
  Description of Artificial Sequence: Synthetic oligonucleotide
  Target: LAMA2; (+) strand; PAM type: NRG; PAM sequence: AAG
ttttttaaagacttggagac

SEQ ID NO: 170991 - DNA, 20 bp, Artificial Sequence
  Description of Artificial Sequence: Synthetic oligonucleotide
  Target: LAMA2; (+) strand; PAM type: NRG; PAM sequence: TGG
tttctcactccactgctgcc

SEQ ID NO: 170992 - DNA, 20 bp, Artificial Sequence
  Description of Artificial Sequence: Synthetic oligonucleotide
  Target: LAMA2; (+) strand; PAM type: NRG; PAM sequence: CAG
gctgcctggattttcactcc

SEQ ID NO: 170993 - DNA, 20 bp, Artificial Sequence
  Description of Artificial Sequence: Synthetic oligonucleotide
  Target: LAMA2; (+) strand; PAM type: NRG; PAM sequence: AAG
actactgaaactgtttttat

SEQ ID NO: 170994 - DNA, 20 bp, Artificial Sequence
  Description of Artificial Sequence: Synthetic oligonucleotide
  Target: LAMA2; (+) strand; PAM type: NRG; PAM sequence: TGG
taagataaccaatgacaatc

SEQ ID NO: 170995 - DNA, 20 bp, Artificial Sequence
  Description of Artificial Sequence: Synthetic oligonucleotide
  Target: LAMA2; (+) strand; PAM type: NRG; PAM sequence: TGG
aatctggtaactaaatccac

SEQ ID NO: 170996 - DNA, 20 bp, Artificial Sequence
  Description of Artificial Sequence: Synthetic oligonucleotide
  Target: LAMA2; (+) strand; PAM type: NRG; PAM sequence: CAG
aattttacttgaaatctctg

SEQ ID NO: 170997 - DNA, 20 bp, Artificial Sequence
  Description of Artificial Sequence: Synthetic oligonucleotide
  Target: LAMA2; (+) strand; PAM type: NRG; PAM sequence: AAG
attctccaacctttcattct

SEQ ID NO: 170998 - DNA, 20 bp, Artificial Sequence
  Description of Artificial Sequence: Synthetic oligonucleotide
  Target: LAMA2; (+) strand; PAM type: NRG; PAM sequence: AGG
ttctccaacctttcattcta

SEQ ID NO: 170999 - DNA, 20 bp, Artificial Sequence
  Description of Artificial Sequence: Synthetic oligonucleotide
  Target: LAMA2; (+) strand; PAM type: NRG; PAM sequence: AAG
ttcctctcatcatcccttca

SEQ ID NO: 171000 - DNA, 20 bp, Artificial Sequence
  Description of Artificial Sequence: Synthetic oligonucleotide
  Target: LAMA2; (+) strand; PAM type: NRG; PAM sequence: CGG
tctcatcatcccttcaaagt

SEQ ID NO: 171001 - DNA, 20 bp, Artificial Sequence
  Description of Artificial Sequence: Synthetic oligonucleotide
  Target: LAMA2; (+) strand; PAM type: NRG; PAM sequence: TGG
ccttcaaagtcggtgttcct

SEQ ID NO: 171002 - DNA, 20 bp, Artificial Sequence
  Description of Artificial Sequence: Synthetic oligonucleotide
  Target: LAMA2; (+) strand; PAM type: NRG; PAM sequence: GGG
cttcaaagtcggtgttcctt

SEQ ID NO: 171003 - DNA, 20 bp, Artificial Sequence
  Description of Artificial Sequence: Synthetic oligonucleotide
  Target: LAMA2; (+) strand; PAM type: NRG; PAM sequence: GGG
ttcaaagtcggtgttccttg

SEQ ID NO: 171004 - DNA, 20 bp, Artificial Sequence
  Description of Artificial Sequence: Synthetic oligonucleotide
  Target: LAMA2; (+) strand; PAM type: NRG; PAM sequence: TAG
agtcggtgttccttggggac

SEQ ID NO: 171005 - DNA, 20 bp, Artificial Sequence
  Description of Artificial Sequence: Synthetic oligonucleotide
  Target: LAMA2; (+) strand; PAM type: NRG; PAM sequence: AGG
gtcggtgttccttggggact

SEQ ID NO: 171006 - DNA, 20 bp, Artificial Sequence
  Description of Artificial Sequence: Synthetic oligonucleotide
  Target: LAMA2; (+) strand; PAM type: NRG; PAM sequence: CAG
gttccttggggactaggcct

SEQ ID NO: 171007 - DNA, 20 bp, Artificial Sequence
  Description of Artificial Sequence: Synthetic oligonucleotide
  Target: LAMA2; (+) strand; PAM type: NRG; PAM sequence: TGG
tcactgtataacactttctt

SEQ ID NO: 171008 - DNA, 20 bp, Artificial Sequence
  Description of Artificial Sequence: Synthetic oligonucleotide
  Target: LAMA2; (+) strand; PAM type: NRG; PAM sequence: AAG
ggtcttcaattgccatgtac

SEQ ID NO: 171009 - DNA, 20 bp, Artificial Sequence
  Description of Artificial Sequence: Synthetic oligonucleotide
  Target: LAMA2; (+) strand; PAM type: NRG; PAM sequence: AAG
attcataaatctatattttc

SEQ ID NO: 171010 - DNA, 20 bp, Artificial Sequence
  Description of Artificial Sequence: Synthetic oligonucleotide
  Target: LAMA2; (+) strand; PAM type: NRG; PAM sequence: AGG
ttcataaatctatattttca

SEQ ID NO: 171011 - DNA, 20 bp, Artificial Sequence
  Description of Artificial Sequence: Synthetic oligonucleotide
  Target: LAMA2; (+) strand; PAM type: NRG; PAM sequence: TGG
ctgacttcattctcatgctt

SEQ ID NO: 171012 - DNA, 20 bp, Artificial Sequence
  Description of Artificial Sequence: Synthetic oligonucleotide
  Target: LAMA2; (+) strand; PAM type: NRG; PAM sequence: TGG
tggtcctatgtgccttacta

SEQ ID NO: 171013 - DNA, 20 bp, Artificial Sequence
  Description of Artificial Sequence: Synthetic oligonucleotide
  Target: LAMA2; (+) strand; PAM type: NRG; PAM sequence: TGG
ctatgtgccttactatggat

SEQ ID NO: 171014 - DNA, 20 bp, Artificial Sequence
  Description of Artificial Sequence: Synthetic oligonucleotide
  Target: LAMA2; (+) strand; PAM type: NRG; PAM sequence: AAG
aaactcatcatttcctctta

SEQ ID NO: 171015 - DNA, 20 bp, Artificial Sequence
  Description of Artificial Sequence: Synthetic oligonucleotide
  Target: LAMA2; (+) strand; PAM type: NRG; PAM sequence: TAG
agcccattatttctcctgtg

SEQ ID NO: 171016 - DNA, 20 bp, Artificial Sequence
  Description of Artificial Sequence: Synthetic oligonucleotide
  Target: LAMA2; (+) strand; PAM type: NRG; PAM sequence: CAG
ttctcctgtgtagaacatct

SEQ ID NO: 171017 - DNA, 20 bp, Artificial Sequence
  Description of Artificial Sequence: Synthetic oligonucleotide
  Target: LAMA2; (+) strand; PAM type: NRG; PAM sequence: CAG
catctcagtgttttatccgc

SEQ ID NO: 171018 - DNA, 20 bp, Artificial Sequence
  Description of Artificial Sequence: Synthetic oligonucleotide
  Target: LAMA2; (+) strand; PAM type: NRG; PAM sequence: CAG
tttatccgccagtatatgcc

SEQ ID NO: 171019 - DNA, 20 bp, Artificial Sequence
  Description of Artificial Sequence: Synthetic oligonucleotide
  Target: LAMA2; (+) strand; PAM type: NRG; PAM sequence: AAG
agtatatgcccagtctccca

SEQ ID NO: 171020 - DNA, 20 bp, Artificial Sequence
  Description of Artificial Sequence: Synthetic oligonucleotide
  Target: LAMA2; (+) strand; PAM type: NRG; PAM sequence: GAG
tatatgcccagtctcccaaa

SEQ ID NO: 171021 - DNA, 20 bp, Artificial Sequence
  Description of Artificial Sequence: Synthetic oligonucleotide
  Target: LAMA2; (+) strand; PAM type: NRG; PAM sequence: TAG
ccagtctcccaaagagaaat

SEQ ID NO: 171022 - DNA, 20 bp, Artificial Sequence
  Description of Artificial Sequence: Synthetic oligonucleotide
  Target: LAMA2; (+) strand; PAM type: NRG; PAM sequence: CAG
gtctcccaaagagaaattag

SEQ ID NO: 171023 - DNA, 20 bp, Artificial Sequence
  Description of Artificial Sequence: Synthetic oligonucleotide
  Target: LAMA2; (+) strand; PAM type: NRG; PAM sequence: AGG
tctcccaaagagaaattagc

SEQ ID NO: 171024 - DNA, 20 bp, Artificial Sequence
  Description of Artificial Sequence: Synthetic oligonucleotide
  Target: LAMA2; (+) strand; PAM type: NRG; PAM sequence: CAG
ctttcatccttcatcaaatt

SEQ ID NO: 171025 - DNA, 20 bp, Artificial Sequence
  Description of Artificial Sequence: Synthetic oligonucleotide
  Target: LAMA2; (+) strand; PAM type: NRG; PAM sequence: TGG
tcaaattcagtttccttcta

SEQ ID NO: 171026 - DNA, 20 bp, Artificial Sequence
  Description of Artificial Sequence: Synthetic oligonucleotide
  Target: LAMA2; (+) strand; PAM type: NRG; PAM sequence: AAG
cttctatggtgactctttgt

SEQ ID NO: 171027 - DNA, 20 bp, Artificial Sequence
  Description of Artificial Sequence: Synthetic oligonucleotide
  Target: LAMA2; (+) strand; PAM type: NRG; PAM sequence: TGG
ctaacctgttgttatttata

SEQ ID NO: 171028 - DNA, 20 bp, Artificial Sequence
  Description of Artificial Sequence: Synthetic oligonucleotide
  Target: LAMA2; (+) strand; PAM type: NRG; PAM sequence: CAG
acctgttgttatttatatgg

SEQ ID NO: 171029 - DNA, 20 bp, Artificial Sequence
  Description of Artificial Sequence: Synthetic oligonucleotide
  Target: LAMA2; (+) strand; PAM type: NRG; PAM sequence: GAG
ctgttgttatttatatggca

SEQ ID NO: 171030 - DNA, 20 bp, Artificial Sequence
  Description of Artificial Sequence: Synthetic oligonucleotide
  Target: LAMA2; (+) strand; PAM type: NRG; PAM sequence: CAG
agagtgaacattctaaattg

SEQ ID NO: 171031 - DNA, 20 bp, Artificial Sequence
  Description of Artificial Sequence: Synthetic oligonucleotide
  Target: LAMA2; (+) strand; PAM type: NRG; PAM sequence: TGG
ctcttccttaaattgtacta

SEQ ID NO: 171032 - DNA, 20 bp, Artificial Sequence
  Description of Artificial Sequence: Synthetic oligonucleotide
  Target: LAMA2; (+) strand; PAM type: NRG; PAM sequence: CAG
ctatggctttccactttttt

SEQ ID NO: 171033 - DNA, 20 bp, Artificial Sequence
  Description of Artificial Sequence: Synthetic oligonucleotide
  Target: LAMA2; (+) strand; PAM type: NRG; PAM sequence: AGG
tatggctttccacttttttc

SEQ ID NO: 171034 - DNA, 20 bp, Artificial Sequence
  Description of Artificial Sequence: Synthetic oligonucleotide
  Target: LAMA2; (+) strand; PAM type: NRG; PAM sequence: CAG
acttttttcaggatgacata

SEQ ID NO: 171035 - DNA, 20 bp, Artificial Sequence
  Description of Artificial Sequence: Synthetic oligonucleotide
  Target: LAMA2; (+) strand; PAM type: NRG; PAM sequence: TGG
tcatctctccccactactca

SEQ ID NO: 171036 - DNA, 20 bp, Artificial Sequence
  Description of Artificial Sequence: Synthetic oligonucleotide
  Target: LAMA2; (+) strand; PAM type: NRG; PAM sequence: TGG
tctccccactactcatggtc

SEQ ID NO: 171037 - DNA, 20 bp, Artificial Sequence
  Description of Artificial Sequence: Synthetic oligonucleotide
  Target: LAMA2; (+) strand; PAM type: NRG; PAM sequence: TGG
ctactcatggtctggtcatc

SEQ ID NO: 171038 - DNA, 20 bp, Artificial Sequence
  Description of Artificial Sequence: Synthetic oligonucleotide
  Target: LAMA2; (+) strand; PAM type: NRG; PAM sequence: CGG
tctggtcatctggaccccta

SEQ ID NO: 171039 - DNA, 20 bp, Artificial Sequence
  Description of Artificial Sequence: Synthetic oligonucleotide
  Target: LAMA2; (+) strand; PAM type: NRG; PAM sequence: GAG
catctggacccctacggatt

SEQ ID NO: 171040 - DNA, 20 bp, Artificial Sequence
  Description of Artificial Sequence: Synthetic oligonucleotide
  Target: LAMA2; (+) strand; PAM type: NRG; PAM sequence: AGG
atctggacccctacggattg

SEQ ID NO: 171041 - DNA, 20 bp, Artificial Sequence
  Description of Artificial Sequence: Synthetic oligonucleotide
  Target: LAMA2; (+) strand; PAM type: NRG; PAM sequence: GGG
tctggacccctacggattga

SEQ ID NO: 171042 - DNA, 20 bp, Artificial Sequence
  Description of Artificial Sequence: Synthetic oligonucleotide
  Target: LAMA2; (+) strand; PAM type: NRG; PAM sequence: AAG
cccctacggattgagggtat

SEQ ID NO: 171043 - DNA, 20 bp, Artificial Sequence
  Description of Artificial Sequence: Synthetic oligonucleotide
  Target: LAMA2; (+) strand; PAM type: NRG; PAM sequence: CAG
tacggattgagggtataagc

SEQ ID NO: 171044 - DNA, 20 bp, Artificial Sequence
  Description of Artificial Sequence: Synthetic oligonucleotide
  Target: LAMA2; (+) strand; PAM type: NRG; PAM sequence: TGG
agaaacctacaaattttctt

SEQ ID NO: 171045 - DNA, 20 bp, Artificial Sequence
  Description of Artificial Sequence: Synthetic oligonucleotide
  Target: LAMA2; (+) strand; PAM type: NRG; PAM sequence: TGG
tccaattcattaccacacac

SEQ ID NO: 171046 - DNA, 20 bp, Artificial Sequence
  Description of Artificial Sequence: Synthetic oligonucleotide
  Target: LAMA2; (+) strand; PAM type: NRG; PAM sequence: GGG
ccaattcattaccacacact

SEQ ID NO: 171047 - DNA, 20 bp, Artificial Sequence
  Description of Artificial Sequence: Synthetic oligonucleotide
  Target: LAMA2; (+) strand; PAM type: NRG; PAM sequence: TGG
tgggcttccacttgtgtgta

SEQ ID NO: 171048 - DNA, 20 bp, Artificial Sequence
  Description of Artificial Sequence: Synthetic oligonucleotide
  Target: LAMA2; (+) strand; PAM type: NRG; PAM sequence: TAG
tcatccaatctcatattgtg

SEQ ID NO: 171049 - DNA, 20 bp, Artificial Sequence
  Description of Artificial Sequence: Synthetic oligonucleotide
  Target: LAMA2; (+) strand; PAM type: NRG; PAM sequence: TGG
caatctcatattgtgtagtt

SEQ ID NO: 171050 - DNA, 20 bp, Artificial Sequence
  Description of Artificial Sequence: Synthetic oligonucleotide
  Target: LAMA2; (+) strand; PAM type: NRG; PAM sequence: GGG
aatctcatattgtgtagttt

SEQ ID NO: 171051 - DNA, 20 bp, Artificial Sequence
  Description of Artificial Sequence: Synthetic oligonucleotide
  Target: LAMA2; (+) strand; PAM type: NRG; PAM sequence: TAG
ggattaccacatttgttttt

SEQ ID NO: 171052 - DNA, 20 bp, Artificial Sequence
  Description of Artificial Sequence: Synthetic oligonucleotide
  Target: LAMA2; (+) strand; PAM type: NRG; PAM sequence: TGG
taccacatttgttttttagc

SEQ ID NO: 171053 - DNA, 20 bp, Artificial Sequence
  Description of Artificial Sequence: Synthetic oligonucleotide
  Target: LAMA2; (+) strand; PAM type: NRG; PAM sequence: TAG
caaatctgttctccgtaacg

SEQ ID NO: 171054 - DNA, 20 bp, Artificial Sequence
  Description of Artificial Sequence: Synthetic oligonucleotide
  Target: LAMA2; (+) strand; PAM type: NRG; PAM sequence: CAG
tctgttctccgtaacgtagc

SEQ ID NO: 171055 - DNA, 20 bp, Artificial Sequence
  Description of Artificial Sequence: Synthetic oligonucleotide
  Target: LAMA2; (+) strand; PAM type: NRG; PAM sequence: CAG
caaatgtgaatacgtcatcg

SEQ ID NO: 171056 - DNA, 20 bp, Artificial Sequence
  Description of Artificial Sequence: Synthetic oligonucleotide
  Target: LAMA2; (+) strand; PAM type: NRG; PAM sequence: TAG
actcttcccctgacttccct

SEQ ID NO: 171057 - DNA, 20 bp, Artificial Sequence
  Description of Artificial Sequence: Synthetic oligonucleotide
  Target: LAMA2; (+) strand; PAM type: NRG; PAM sequence: AGG
ctcttcccctgacttccctt

SEQ ID NO: 171058 - DNA, 20 bp, Artificial Sequence
  Description of Artificial Sequence: Synthetic oligonucleotide
  Target: LAMA2; (+) strand; PAM type: NRG; PAM sequence: TAG
cctgacttcccttaggctcg

SEQ ID NO: 171059 - DNA, 20 bp, Artificial Sequence
  Description of Artificial Sequence: Synthetic oligonucleotide
  Target: LAMA2; (+) strand; PAM type: NRG; PAM sequence: AGG
ctgacttcccttaggctcgt

SEQ ID NO: 171060 - DNA, 20 bp, Artificial Sequence
  Description of Artificial Sequence: Synthetic oligonucleotide
  Target: LAMA2; (+) strand; PAM type: NRG; PAM sequence: AAG
tcccttaggctcgtaggata

SEQ ID NO: 171061 - DNA, 20 bp, Artificial Sequence
  Description of Artificial Sequence: Synthetic oligonucleotide
  Target: LAMA2; (+) strand; PAM type: NRG; PAM sequence: TGG
aaagaccaaaattctcccct

SEQ ID NO: 171062 - DNA, 20 bp, Artificial Sequence
  Description of Artificial Sequence: Synthetic oligonucleotide
  Target: LAMA2; (+) strand; PAM type: NRG; PAM sequence: TGG
tctcccatcacttgtgcccc

SEQ ID NO: 171063 - DNA, 20 bp, Artificial Sequence
  Description of Artificial Sequence: Synthetic oligonucleotide
  Target: LAMA2; (+) strand; PAM type: NRG; PAM sequence: CAG
gcccctggccatctgcactc

SEQ ID NO: 171064 - DNA, 20 bp, Artificial Sequence
  Description of Artificial Sequence: Synthetic oligonucleotide
  Target: LAMA2; (+) strand; PAM type: NRG; PAM sequence: CAG
actccagccatactgtcccc

SEQ ID NO: 171065 - DNA, 20 bp, Artificial Sequence
  Description of Artificial Sequence: Synthetic oligonucleotide
  Target: LAMA2; (+) strand; PAM type: NRG; PAM sequence: AAG
agccactttgtcccaccaca

SEQ ID NO: 171066 - DNA, 20 bp, Artificial Sequence
  Description of Artificial Sequence: Synthetic oligonucleotide
  Target: LAMA2; (+) strand; PAM type: NRG; PAM sequence: AAG
catttctttattttgcctta

SEQ ID NO: 171067 - DNA, 20 bp, Artificial Sequence
  Description of Artificial Sequence: Synthetic oligonucleotide
  Target: LAMA2; (+) strand; PAM type: NRG; PAM sequence: AGG
atttctttattttgccttaa

SEQ ID NO: 171068 - DNA, 20 bp, Artificial Sequence
  Description of Artificial Sequence: Synthetic oligonucleotide
  Target: LAMA2; (+) strand; PAM type: NRG; PAM sequence: CAG
ccaatttacctttcaaatct

SEQ ID NO: 171069 - DNA, 20 bp, Artificial Sequence
  Description of Artificial Sequence: Synthetic oligonucleotide
  Target: LAMA2; (+) strand; PAM type: NRG; PAM sequence: AAG
tttcaaatctcagctcgtga

SEQ ID NO: 171070 - DNA, 20 bp, Artificial Sequence
  Description of Artificial Sequence: Synthetic oligonucleotide
  Target: LAMA2; (+) strand; PAM type: NRG; PAM sequence: CAG
gaaagccctctgtgccatcg

SEQ ID NO: 171071 - DNA, 20 bp, Artificial Sequence
  Description of Artificial Sequence: Synthetic oligonucleotide
  Target: LAMA2; (+) strand; PAM type: NRG; PAM sequence: AGG
aaagccctctgtgccatcgc

SEQ ID NO: 171072 - DNA, 20 bp, Artificial Sequence
  Description of Artificial Sequence: Synthetic oligonucleotide
  Target: LAMA2; (+) strand; PAM type: NRG; PAM sequence: GGG
aagccctctgtgccatcgca

SEQ ID NO: 171073 - DNA, 20 bp, Artificial Sequence
  Description of Artificial Sequence: Synthetic oligonucleotide
  Target: LAMA2; (+) strand; PAM type: NRG; PAM sequence: GGG
agccctctgtgccatcgcag

SEQ ID NO: 171074 - DNA, 20 bp, Artificial Sequence
  Description of Artificial Sequence: Synthetic oligonucleotide
  Target: LAMA2; (+) strand; PAM type: NRG; PAM sequence: AAG
tgtgccatcgcaggggttcc

SEQ ID NO: 171075 - DNA, 20 bp, Artificial Sequence
  Description of Artificial Sequence: Synthetic oligonucleotide
  Target: LAMA2; (+) strand; PAM type: NRG; PAM sequence: TAG
ttataccactatttttcctc

SEQ ID NO: 171076 - DNA, 20 bp, Artificial Sequence
  Description of Artificial Sequence: Synthetic oligonucleotide
  Target: LAMA2; (+) strand; PAM type: NRG; PAM sequence: TAG
actatttttcctctagtttg

SEQ ID NO: 171077 - DNA, 20 bp, Artificial Sequence
  Description of Artificial Sequence: Synthetic oligonucleotide
  Target: LAMA2; (+) strand; PAM type: NRG; PAM sequence: TAG
tcatttgacaaataactata

SEQ ID NO: 171078 - DNA, 20 bp, Artificial Sequence
  Description of Artificial Sequence: Synthetic oligonucleotide
  Target: LAMA2; (+) strand; PAM type: NRG; PAM sequence: CAG
caaataactatatagtccac

SEQ ID NO: 171079 - DNA, 20 bp, Artificial Sequence
  Description of Artificial Sequence: Synthetic oligonucleotide
  Target: LAMA2; (+) strand; PAM type: NRG; PAM sequence: TAG
ctatatagtccaccagacta

SEQ ID NO: 171080 - DNA, 20 bp, Artificial Sequence
  Description of Artificial Sequence: Synthetic oligonucleotide
  Target: LAMA2; (+) strand; PAM type: NRG; PAM sequence: TGG
accagactatagactccaaa

SEQ ID NO: 171081 - DNA, 20 bp, Artificial Sequence
  Description of Artificial Sequence: Synthetic oligonucleotide
  Target: LAMA2; (+) strand; PAM type: NRG; PAM sequence: GGG
ccagactatagactccaaat

SEQ ID NO: 171082 - DNA, 20 bp, Artificial Sequence
  Description of Artificial Sequence: Synthetic oligonucleotide
  Target: LAMA2; (+) strand; PAM type: NRG; PAM sequence: AAG
actatagactccaaatgggc

SEQ ID NO: 171083 - DNA, 20 bp, Artificial Sequence
  Description of Artificial Sequence: Synthetic oligonucleotide
  Target: LAMA2; (+) strand; PAM type: NRG; PAM sequence: CAG
aacctttttgtttcttacca

SEQ ID NO: 171084 - DNA, 20 bp, Artificial Sequence
  Description of Artificial Sequence: Synthetic oligonucleotide
  Target: LAMA2; (+) strand; PAM type: NRG; PAM sequence: TAG
caccaatattgtacacataa

SEQ ID NO: 171085 - DNA, 20 bp, Artificial Sequence
  Description of Artificial Sequence: Synthetic oligonucleotide
  Target: LAMA2; (+) strand; PAM type: NRG; PAM sequence: AGG
accaatattgtacacataat

SEQ ID NO: 171086 - DNA, 20 bp, Artificial Sequence
  Description of Artificial Sequence: Synthetic oligonucleotide
  Target: LAMA2; (+) strand; PAM type: NRG; PAM sequence: AAG
ttgtacacataataggtgtt

SEQ ID NO: 171087 - DNA, 20 bp, Artificial Sequence
  Description of Artificial Sequence: Synthetic oligonucleotide
  Target: LAMA2; (+) strand; PAM type: NRG; PAM sequence: AAG
ttaattgtgaatgattttaa

SEQ ID NO: 171088 - DNA, 20 bp, Artificial Sequence
  Description of Artificial Sequence: Synthetic oligonucleotide
  Target: LAMA2; (+) strand; PAM type: NRG; PAM sequence: AAG
tttaaaagcatttgaacaac

SEQ ID NO: 171089 - DNA, 20 bp, Artificial Sequence
  Description of Artificial Sequence: Synthetic oligonucleotide
  Target: LAMA2; (+) strand; PAM type: NRG; PAM sequence: TGG
aaagcatttgaacaacaaga

SEQ ID NO: 171090 - DNA, 20 bp, Artificial Sequence
  Description of Artificial Sequence: Synthetic oligonucleotide
  Target: LAMA2; (+) strand; PAM type: NRG; PAM sequence: TAG
tgaacaacaagatggaaatg

SEQ ID NO: 171091 - DNA, 20 bp, Artificial Sequence
  Description of Artificial Sequence: Synthetic oligonucleotide
  Target: LAMA2; (+) strand; PAM type: NRG; PAM sequence: CAG
tctttaaaatgtgttaaaat

SEQ ID NO: 171092 - DNA, 20 bp, Artificial Sequence
  Description of Artificial Sequence: Synthetic oligonucleotide
  Target: LAMA2; (+) strand; PAM type: NRG; PAM sequence: AGG
ctttaaaatgtgttaaaatc

SEQ ID NO: 171093 - DNA, 20 bp, Artificial Sequence
  Description of Artificial Sequence: Synthetic oligonucleotide
  Target: LAMA2; (+) strand; PAM type: NRG; PAM sequence: AAG
cttaactatttatattctgt

SEQ ID NO: 171094 - DNA, 20 bp, Artificial Sequence
  Description of Artificial Sequence: Synthetic oligonucleotide
  Target: LAMA2; (+) strand; PAM type: NRG; PAM sequence: AGG
ttaactatttatattctgta

SEQ ID NO: 171095 - DNA, 20 bp, Artificial Sequence
  Description of Artificial Sequence: Synthetic oligonucleotide
  Target: LAMA2; (+) strand; PAM type: NRG; PAM sequence: GGG
taactatttatattctgtaa

SEQ ID NO: 171096 - DNA, 20 bp, Artificial Sequence
  Description of Artificial Sequence: Synthetic oligonucleotide
  Target: LAMA2; (+) strand; PAM type: NRG; PAM sequence: GGG
aactatttatattctgtaag

SEQ ID NO: 171097 - DNA, 20 bp, Artificial Sequence
  Description of Artificial Sequence: Synthetic oligonucleotide
  Target: LAMA2; (+) strand; PAM type: NRG; PAM sequence: GAG
ctatttatattctgtaaggg

SEQ ID NO: 171098 - DNA, 20 bp, Artificial Sequence
  Description of Artificial Sequence: Synthetic oligonucleotide
  Target: LAMA2; (+) strand; PAM type: NRG; PAM sequence: TAG
tgtaaggggagaatgctatg

SEQ ID NO: 171099 - DNA, 20 bp, Artificial Sequence
  Description of Artificial Sequence: Synthetic oligonucleotide
  Target: LAMA2; (+) strand; PAM type: NRG; PAM sequence: TAG
aaggggagaatgctatgtag

SEQ ID NO: 171100 - DNA, 20 bp, Artificial Sequence
  Description of Artificial Sequence: Synthetic oligonucleotide
  Target: LAMA2; (+) strand; PAM type: NRG; PAM sequence: AAG
tgaaaatgaaacatttccaa

SEQ ID NO: 171101 - DNA, 20 bp, Artificial Sequence
  Description of Artificial Sequence: Synthetic oligonucleotide
  Target: LAMA2; (+) strand; PAM type: NRG; PAM sequence: AGG
gaaaatgaaacatttccaaa

SEQ ID NO: 171102 - DNA, 20 bp, Artificial Sequence
  Description of Artificial Sequence: Synthetic oligonucleotide
  Target: LAMA2; (+) strand; PAM type: NRG; PAM sequence: TAG
catttccaaaaggatgaaac

SEQ ID NO: 171103 - DNA, 20 bp, Artificial Sequence
  Description of Artificial Sequence: Synthetic oligonucleotide
  Target: LAMA2; (+) strand; PAM type: NRG; PAM sequence: AAG
aactagtttttaaacgattt

SEQ ID NO: 171104 - DNA, 20 bp, Artificial Sequence
  Description of Artificial Sequence: Synthetic oligonucleotide
  Target: LAMA2; (+) strand; PAM type: NRG; PAM sequence: AAG
gatttaagtgccaatattat

SEQ ID NO: 171105 - DNA, 20 bp, Artificial Sequence
  Description of Artificial Sequence: Synthetic oligonucleotide
  Target: LAMA2; (+) strand; PAM type: NRG; PAM sequence: AAG
tgccaatattataagtttac

SEQ ID NO: 171106 - DNA, 20 bp, Artificial Sequence
  Description of Artificial Sequence: Synthetic oligonucleotide
  Target: LAMA2; (+) strand; PAM type: NRG; PAM sequence: TAG
agtttacaagattttattta

SEQ ID NO: 171107 - DNA, 20 bp, Artificial Sequence
  Description of Artificial Sequence: Synthetic oligonucleotide
  Target: LAMA2; (+) strand; PAM type: NRG; PAM sequence: AAG
attttatttatagtttttaa

SEQ ID NO: 171108 - DNA, 20 bp, Artificial Sequence
  Description of Artificial Sequence: Synthetic oligonucleotide
  Target: LAMA2; (+) strand; PAM type: NRG; PAM sequence: CAG
taaaagatttcaactgctaa

SEQ ID NO: 171109 - DNA, 20 bp, Artificial Sequence
  Description of Artificial Sequence: Synthetic oligonucleotide
  Target: LAMA2; (+) strand; PAM type: NRG; PAM sequence: AAG
ttctccttttatatttttaa

SEQ ID NO: 171110 - DNA, 20 bp, Artificial Sequence
  Description of Artificial Sequence: Synthetic oligonucleotide
  Target: LAMA2; (+) strand; PAM type: NRG; PAM sequence: AAG
atatatatataatataaaac

SEQ ID NO: 171111 - DNA, 20 bp, Artificial Sequence
  Description of Artificial Sequence: Synthetic oligonucleotide
  Target: LAMA2; (+) strand; PAM type: NRG; PAM sequence: TGG
taaaacaagtcatatctttt

SEQ ID NO: 171112 - DNA, 20 bp, Artificial Sequence
  Description of Artificial Sequence: Synthetic oligonucleotide
  Target: LAMA2; (+) strand; PAM type: NRG; PAM sequence: TGG
caagtcatatctttttggtt

SEQ ID NO: 171113 - DNA, 20 bp, Artificial Sequence
  Description of Artificial Sequence: Synthetic oligonucleotide
  Target: LAMA2; (+) strand; PAM type: NRG; PAM sequence: TGG
tggtttggaacttttaaaat

SEQ ID NO: 171114 - DNA, 20 bp, Artificial Sequence
  Description of Artificial Sequence: Synthetic oligonucleotide
  Target: LAMA2; (+) strand; PAM type: NRG; PAM sequence: TAG
aaattggcacgtgaaatatt

SEQ ID NO: 171115 - DNA, 20 bp, Artificial Sequence
  Description of Artificial Sequence: Synthetic oligonucleotide
  Target: LAMA2; (+) strand; PAM type: NRG; PAM sequence: AGG
aattggcacgtgaaatattt

SEQ ID NO: 171116 - DNA, 20 bp, Artificial Sequence
  Description of Artificial Sequence: Synthetic oligonucleotide
  Target: LAMA2; (+) strand; PAM type: NRG; PAM sequence: AAG
tggcacgtgaaatatttagg

SEQ ID NO: 171117 - DNA, 20 bp, Artificial Sequence
  Description of Artificial Sequence: Synthetic oligonucleotide
  Target: LAMA2; (+) strand; PAM type: NRG; PAM sequence: TGG
atttaggaagaaattccaca

SEQ ID NO: 171118 - DNA, 20 bp, Artificial Sequence
  Description of Artificial Sequence: Synthetic oligonucleotide
  Target: LAMA2; (+) strand; PAM type: NRG; PAM sequence: TGG
gaagaaattccacatggaac

SEQ ID NO: 171119 - DNA, 20 bp, Artificial Sequence
  Description of Artificial Sequence: Synthetic oligonucleotide
  Target: LAMA2; (+) strand; PAM type: NRG; PAM sequence: CGG
actggctcattgtcattcca

SEQ ID NO: 171120 - DNA, 20 bp, Artificial Sequence
  Description of Artificial Sequence: Synthetic oligonucleotide
  Target: LAMA2; (+) strand; PAM type: NRG; PAM sequence: GGG
ctggctcattgtcattccac

SEQ ID NO: 171121 - DNA, 20 bp, Artificial Sequence
  Description of Artificial Sequence: Synthetic oligonucleotide
  Target: LAMA2; (+) strand; PAM type: NRG; PAM sequence: GGG
tggctcattgtcattccacg

SEQ ID NO: 171122 - DNA, 20 bp, Artificial Sequence
  Description of Artificial Sequence: Synthetic oligonucleotide
  Target: LAMA2; (+) strand; PAM type: NRG; PAM sequence: CAG
tcattgtcattccacggggt

SEQ ID NO: 171123 - DNA, 20 bp, Artificial Sequence
  Description of Artificial Sequence: Synthetic oligonucleotide
  Target: LAMA2; (+) strand; PAM type: NRG; PAM sequence: TGG
tgtcattccacggggtcagc

SEQ ID NO: 171124 - DNA, 20 bp, Artificial Sequence
  Description of Artificial Sequence: Synthetic oligonucleotide
  Target: LAMA2; (+) strand; PAM type: NRG; PAM sequence: TGG
cttctttccttgtgtgttgt

SEQ ID NO: 171125 - DNA, 20 bp, Artificial Sequence
  Description of Artificial Sequence: Synthetic oligonucleotide
  Target: LAMA2; (+) strand; PAM type: NRG; PAM sequence: TGG
ttgtgtgttgttggtcctta

SEQ ID NO: 171126 - DNA, 20 bp, Artificial Sequence
  Description of Artificial Sequence: Synthetic oligonucleotide
  Target: LAMA2; (+) strand; PAM type: NRG; PAM sequence: GAG
gtccttatggcttgcctgat

SEQ ID NO: 171127 - DNA, 20 bp, Artificial Sequence
  Description of Artificial Sequence: Synthetic oligonucleotide
  Target: LAMA2; (+) strand; PAM type: NRG; PAM sequence: TAG
atgagtgcttcactaccact

SEQ ID NO: 171128 - DNA, 20 bp, Artificial Sequence
  Description of Artificial Sequence: Synthetic oligonucleotide
  Target: LAMA2; (+) strand; PAM type: NRG; PAM sequence: TGG
ttcactaccacttagacata

SEQ ID NO: 171129 - DNA, 20 bp, Artificial Sequence
  Description of Artificial Sequence: Synthetic oligonucleotide
  Target: LAMA2; (+) strand; PAM type: NRG; PAM sequence: GAG
cactaccacttagacatatg

SEQ ID NO: 171130 - DNA, 20 bp, Artificial Sequence
  Description of Artificial Sequence: Synthetic oligonucleotide
  Target: LAMA2; (+) strand; PAM type: NRG; PAM sequence: TGG
accacttagacatatggagc

SEQ ID NO: 171131 - DNA, 20 bp, Artificial Sequence
  Description of Artificial Sequence: Synthetic oligonucleotide
  Target: LAMA2; (+) strand; PAM type: NRG; PAM sequence: TGG
acatatggagctggtaatat

SEQ ID NO: 171132 - DNA, 20 bp, Artificial Sequence
  Description of Artificial Sequence: Synthetic oligonucleotide
  Target: LAMA2; (+) strand; PAM type: NRG; PAM sequence: AAG
tatggagctggtaatattgg

SEQ ID NO: 171133 - DNA, 20 bp, Artificial Sequence
  Description of Artificial Sequence: Synthetic oligonucleotide
  Target: LAMA2; (+) strand; PAM type: NRG; PAM sequence: GAG
aatattggaagatgaccctt

SEQ ID NO: 171134 - DNA, 20 bp, Artificial Sequence
  Description of Artificial Sequence: Synthetic oligonucleotide
  Target: LAMA2; (+) strand; PAM type: NRG; PAM sequence: GAG
tattggaagatgacccttga

SEQ ID NO: 171135 - DNA, 20 bp, Artificial Sequence
  Description of Artificial Sequence: Synthetic oligonucleotide
  Target: LAMA2; (+) strand; PAM type: NRG; PAM sequence: TAG
tttgatctgaaatctaattt

SEQ ID NO: 171136 - DNA, 20 bp, Artificial Sequence
  Description of Artificial Sequence: Synthetic oligonucleotide
  Target: LAMA2; (+) strand; PAM type: NRG; PAM sequence: CAG
gatctgaaatctaattttag

SEQ ID NO: 171137 - DNA, 20 bp, Artificial Sequence
  Description of Artificial Sequence: Synthetic oligonucleotide
  Target: LAMA2; (+) strand; PAM type: NRG; PAM sequence: AGG
atctgaaatctaattttagc

SEQ ID NO: 171138 - DNA, 20 bp, Artificial Sequence
  Description of Artificial Sequence: Synthetic oligonucleotide
  Target: LAMA2; (+) strand; PAM type: NRG; PAM sequence: GAG
attttagcaggaaaccatat

SEQ ID NO: 171139 - DNA, 20 bp, Artificial Sequence
  Description of Artificial Sequence: Synthetic oligonucleotide
  Target: LAMA2; (+) strand; PAM type: NRG; PAM sequence: AAG
catatgagtccacaaatgca

SEQ ID NO: 171140 - DNA, 20 bp, Artificial Sequence
  Description of Artificial Sequence: Synthetic oligonucleotide
  Target: LAMA2; (+) strand; PAM type: NRG; PAM sequence: AGG
atatgagtccacaaatgcaa

SEQ ID NO: 171141 - DNA, 20 bp, Artificial Sequence
  Description of Artificial Sequence: Synthetic oligonucleotide
  Target: LAMA2; (+) strand; PAM type: NRG; PAM sequence: TAG
tgagtccacaaatgcaaagg

SEQ ID NO: 171142 - DNA, 20 bp, Artificial Sequence
  Description of Artificial Sequence: Synthetic oligonucleotide
  Target: LAMA2; (+) strand; PAM type: NRG; PAM sequence: CAG
tccacaaatgcaaaggtaga

SEQ ID NO: 171143 - DNA, 20 bp, Artificial Sequence
  Description of Artificial Sequence: Synthetic oligonucleotide
  Target: LAMA2; (+) strand; PAM type: NRG; PAM sequence: AAG
tgcaaaggtagacagtatct

SEQ ID NO: 171144 - DNA, 20 bp, Artificial Sequence
  Description of Artificial Sequence: Synthetic oligonucleotide
  Target: LAMA2; (+) strand; PAM type: NRG; PAM sequence: CAG
tctaagcaatgttatctatt

SEQ ID NO: 171145 - DNA, 20 bp, Artificial Sequence
  Description of Artificial Sequence: Synthetic oligonucleotide
  Target: LAMA2; (+) strand; PAM type: NRG; PAM sequence: TAG
aagcaatgttatctattcag

SEQ ID NO: 171146 - DNA, 20 bp, Artificial Sequence
  Description of Artificial Sequence: Synthetic oligonucleotide
  Target: LAMA2; (+) strand; PAM type: NRG; PAM sequence: TAG
aatgttatctattcagtagt

SEQ ID NO: 171147 - DNA, 20 bp, Artificial Sequence
  Description of Artificial Sequence: Synthetic oligonucleotide
  Target: LAMA2; (+) strand; PAM type: NRG; PAM sequence: AGG
atgttatctattcagtagtt

SEQ ID NO: 171148 - DNA, 20 bp, Artificial Sequence
  Description of Artificial Sequence: Synthetic oligonucleotide
  Target: LAMA2; (+) strand; PAM type: NRG; PAM sequence: TAG
agtagttaggtttgctccat

SEQ ID NO: 171149 - DNA, 20 bp, Artificial Sequence
  Description of Artificial Sequence: Synthetic oligonucleotide
  Target: LAMA2; (+) strand; PAM type: NRG; PAM sequence: TAG
aggtttgctccattagattc

SEQ ID NO: 171150 - DNA, 20 bp, Artificial Sequence
  Description of Artificial Sequence: Synthetic oligonucleotide
  Target: LAMA2; (+) strand; PAM type: NRG; PAM sequence: AAG
tagattctagttttaacata

SEQ ID NO: 171151 - DNA, 20 bp, Artificial Sequence
  Description of Artificial Sequence: Synthetic oligonucleotide
  Target: LAMA2; (+) strand; PAM type: NRG; PAM sequence: AAG
attctagttttaacataaag

SEQ ID NO: 171152 - DNA, 20 bp, Artificial Sequence
  Description of Artificial Sequence: Synthetic oligonucleotide
  Target: LAMA2; (+) strand; PAM type: NRG; PAM sequence: AGG
ttctagttttaacataaaga

SEQ ID NO: 171153 - DNA, 20 bp, Artificial Sequence
  Description of Artificial Sequence: Synthetic oligonucleotide
  Target: LAMA2; (+) strand; PAM type: NRG; PAM sequence: CAG
tagttttaacataaagaagg

SEQ ID NO: 171154 - DNA, 20 bp, Artificial Sequence
  Description of Artificial Sequence: Synthetic oligonucleotide
  Target: LAMA2; (+) strand; PAM type: NRG; PAM sequence: TGG
aggcagaaaatgaaacacac

SEQ ID NO: 171155 - DNA, 20 bp, Artificial Sequence
  Description of Artificial Sequence: Synthetic oligonucleotide
  Target: LAMA2; (+) strand; PAM type: NRG; PAM sequence: AAG
cacactggtcatatccaacc

SEQ ID NO: 171156 - DNA, 20 bp, Artificial Sequence
  Description of Artificial Sequence: Synthetic oligonucleotide
  Target: LAMA2; (+) strand; PAM type: NRG; PAM sequence: CAG
ccaaccaagaaaattatgtg

SEQ ID NO: 171157 - DNA, 20 bp, Artificial Sequence
  Description of Artificial Sequence: Synthetic oligonucleotide
  Target: LAMA2; (+) strand; PAM type: NRG; PAM sequence: AAG
gaaaattatgtgcagatttt

SEQ ID NO: 171158 - DNA, 20 bp, Artificial Sequence
  Description of Artificial Sequence: Synthetic oligonucleotide
  Target: LAMA2; (+) strand; PAM type: NRG; PAM sequence: GAG
aaattatgtgcagattttaa

SEQ ID NO: 171159 - DNA, 20 bp, Artificial Sequence
  Description of Artificial Sequence: Synthetic oligonucleotide
  Target: LAMA2; (+) strand; PAM type: NRG; PAM sequence: AGG
aattatgtgcagattttaag

SEQ ID NO: 171160 - DNA, 20 bp, Artificial Sequence
  Description of Artificial Sequence: Synthetic oligonucleotide
  Target: LAMA2; (+) strand; PAM type: NRG; PAM sequence: CAG
tgtgcagattttaagaggca

SEQ ID NO: 171161 - DNA, 20 bp, Artificial Sequence
  Description of Artificial Sequence: Synthetic oligonucleotide
  Target: LAMA2; (+) strand; PAM type: NRG; PAM sequence: TAG
gcagattttaagaggcacag

SEQ ID NO: 171162 - DNA, 20 bp, Artificial Sequence
  Description of Artificial Sequence: Synthetic oligonucleotide
  Target: LAMA2; (+) strand; PAM type: NRG; PAM sequence: GAG
gaggcacagtagaactgctt

SEQ ID NO: 171163 - DNA, 20 bp, Artificial Sequence
  Description of Artificial Sequence: Synthetic oligonucleotide
  Target: LAMA2; (+) strand; PAM type: NRG; PAM sequence: AAG
cagtagaactgcttgagcta

SEQ ID NO: 171164 - DNA, 20 bp, Artificial Sequence
  Description of Artificial Sequence: Synthetic oligonucleotide
  Target: LAMA2; (+) strand; PAM type: NRG; PAM sequence: CAG
tagaactgcttgagctaaag

SEQ ID NO: 171165 - DNA, 20 bp, Artificial Sequence
  Description of Artificial Sequence: Synthetic oligonucleotide
  Target: LAMA2; (+) strand; PAM type: NRG; PAM sequence: AGG
agaactgcttgagctaaagc

SEQ ID NO: 171166 - DNA, 20 bp, Artificial Sequence
  Description of Artificial Sequence: Synthetic oligonucleotide
  Target: LAMA2; (+) strand; PAM type: NRG; PAM sequence: AAG
ctgcttgagctaaagcagga

SEQ ID NO: 171167 - DNA, 20 bp, Artificial Sequence
  Description of Artificial Sequence: Synthetic oligonucleotide
  Target: LAMA2; (+) strand; PAM type: NRG; PAM sequence: CAG
gagctaaagcaggaaagtaa

SEQ ID NO: 171168 - DNA, 20 bp, Artificial Sequence
  Description of Artificial Sequence: Synthetic oligonucleotide
  Target: LAMA2; (+) strand; PAM type: NRG; PAM sequence: CAG
aaagtaacagctacattgtt

SEQ ID NO: 171169 - DNA, 20 bp, Artificial Sequence
  Description of Artificial Sequence: Synthetic oligonucleotide
  Target: LAMA2; (+) strand; PAM type: NRG; PAM sequence: AAG
gtaacagctacattgttcag

SEQ ID NO: 171170 - DNA, 20 bp, Artificial Sequence
  Description of Artificial Sequence: Synthetic oligonucleotide
  Target: LAMA2; (+) strand; PAM type: NRG; PAM sequence: TGG
gtaaattaacgtgtgcctaa

SEQ ID NO: 171171 - DNA, 20 bp, Artificial Sequence
  Description of Artificial Sequence: Synthetic oligonucleotide
  Target: LAMA2; (+) strand; PAM type: NRG; PAM sequence: TAG
taatggtaatgcatgctgcc

SEQ ID NO: 171172 - DNA, 20 bp, Artificial Sequence
  Description of Artificial Sequence: Synthetic oligonucleotide
  Target: LAMA2; (+) strand; PAM type: NRG; PAM sequence: AAG
aatactctaaaaaacaaaac

SEQ ID NO: 171173 - DNA, 20 bp, Artificial Sequence
  Description of Artificial Sequence: Synthetic oligonucleotide
  Target: LAMA2; (+) strand; PAM type: NRG; PAM sequence: TAG
aaaaacaaaacaagaaaaaa

SEQ ID NO: 171174 - DNA, 20 bp, Artificial Sequence
  Description of Artificial Sequence: Synthetic oligonucleotide
  Target: LAMA2; (+) strand; PAM type: NRG; PAM sequence: AAG
aaaacaagaaaaaatagaaa

SEQ ID NO: 171175 - DNA, 20 bp, Artificial Sequence
  Description of Artificial Sequence: Synthetic oligonucleotide
  Target: LAMA2; (+) strand; PAM type: NRG; PAM sequence: TGG
agaaaaaatagaaaaagaaa

SEQ ID NO: 171176 - DNA, 20 bp, Artificial Sequence
  Description of Artificial Sequence: Synthetic oligonucleotide
  Target: LAMA2; (+) strand; PAM type: NRG; PAM sequence: GGG
gaaaaaatagaaaaagaaat

SEQ ID NO: 171177 - DNA, 20 bp, Artificial Sequence
  Description of Artificial Sequence: Synthetic oligonucleotide
  Target: LAMA2; (+) strand; PAM type: NRG; PAM sequence: TAG
gaaatgggaaaaaaaaaacc

SEQ ID NO: 171178 - DNA, 20 bp, Artificial Sequence
  Description of Artificial Sequence: Synthetic oligonucleotide
  Target: LAMA2; (+) strand; PAM type: NRG; PAM sequence: GAG
gggaaaaaaaaaacctagtt

SEQ ID NO: 171179 - DNA, 20 bp, Artificial Sequence
  Description of Artificial Sequence: Synthetic oligonucleotide
  Target: LAMA2; (+) strand; PAM type: NRG; PAM sequence: AAG
ttgagtgaatgtcaacataa

SEQ ID NO: 171180 - DNA, 20 bp, Artificial Sequence
  Description of Artificial Sequence: Synthetic oligonucleotide
  Target: LAMA2; (+) strand; PAM type: NRG; PAM sequence: AAG
tgaatgtcaacataaaagaa

SEQ ID NO: 171181 - DNA, 20 bp, Artificial Sequence
  Description of Artificial Sequence: Synthetic oligonucleotide
  Target: LAMA2; (+) strand; PAM type: NRG; PAM sequence: AGG
gaatgtcaacataaaagaaa

SEQ ID NO: 171182 - DNA, 20 bp, Artificial Sequence
  Description of Artificial Sequence: Synthetic oligonucleotide
  Target: LAMA2; (+) strand; PAM type: NRG; PAM sequence: AAG
cataaaagaaaaggtaatca

SEQ ID NO: 171183 - DNA, 20 bp, Artificial Sequence
  Description of Artificial Sequence: Synthetic oligonucleotide
  Target: LAMA2; (+) strand; PAM type: NRG; PAM sequence: AGG
ataaaagaaaaggtaatcaa

SEQ ID NO: 171184 - DNA, 20 bp, Artificial Sequence
  Description of Artificial Sequence: Synthetic oligonucleotide
  Target: LAMA2; (+) strand; PAM type: NRG; PAM sequence: AAG
aagaaaaggtaatcaaaggc

SEQ ID NO: 171185 - DNA, 20 bp, Artificial Sequence
  Description of Artificial Sequence: Synthetic oligonucleotide
  Target: LAMA2; (+) strand; PAM type: NRG; PAM sequence: GAG
gaaaaggtaatcaaaggcaa

SEQ ID NO: 171186 - DNA, 20 bp, Artificial Sequence
  Description of Artificial Sequence: Synthetic oligonucleotide
  Target: LAMA2; (+) strand; PAM type: NRG; PAM sequence: GAG
aaaggtaatcaaaggcaaga

SEQ ID NO: 171187 - DNA, 20 bp, Artificial Sequence
  Description of Artificial Sequence: Synthetic oligonucleotide
  Target: LAMA2; (+) strand; PAM type: NRG; PAM sequence: AAG
atcaaaggcaagagagatac

SEQ ID NO: 171188 - DNA, 20 bp, Artificial Sequence
  Description of Artificial Sequence: Synthetic oligonucleotide
  Target: LAMA2; (+) strand; PAM type: NRG; PAM sequence: AAG
agagatacaagatactgtgt

SEQ ID NO: 171189 - DNA, 20 bp, Artificial Sequence
  Description of Artificial Sequence: Synthetic oligonucleotide
  Target: LAMA2; (+) strand; PAM type: NRG; PAM sequence: AGG
gagatacaagatactgtgta

SEQ ID NO: 171190 - DNA, 20 bp, Artificial Sequence
  Description of Artificial Sequence: Synthetic oligonucleotide
  Target: LAMA2; (+) strand; PAM type: NRG; PAM sequence: AAG
tgtgtaaggcatcatttaca

SEQ ID NO: 171191 - DNA, 20 bp, Artificial Sequence
  Description of Artificial Sequence: Synthetic oligonucleotide
  Target: LAMA2; (+) strand; PAM type: NRG; PAM sequence: AGG
gtgtaaggcatcatttacaa

SEQ ID NO: 171192 - DNA, 20 bp, Artificial Sequence
  Description of Artificial Sequence: Synthetic oligonucleotide
  Target: LAMA2; (+) strand; PAM type: NRG; PAM sequence: AAG
atttacaaaggaacactgta

SEQ ID NO: 171193 - DNA, 20 bp, Artificial Sequence
  Description of Artificial Sequence: Synthetic oligonucleotide
  Target: LAMA2; (+) strand; PAM type: NRG; PAM sequence: CAG
aaggaacactgtaaagattg

SEQ ID NO: 171194 - DNA, 20 bp, Artificial Sequence
  Description of Artificial Sequence: Synthetic oligonucleotide
  Target: LAMA2; (+) strand; PAM type: NRG; PAM sequence: TAG
acactgtaaagattgcagaa

SEQ ID NO: 171195 - DNA, 20 bp, Artificial Sequence
  Description of Artificial Sequence: Synthetic oligonucleotide
  Target: LAMA2; (+) strand; PAM type: NRG; PAM sequence: GAG
actgtaaagattgcagaata

SEQ ID NO: 171196 - DNA, 20 bp, Artificial Sequence
  Description of Artificial Sequence: Synthetic oligonucleotide
  Target: LAMA2; (+) strand; PAM type: NRG; PAM sequence: AGG
ctgtaaagattgcagaatag

SEQ ID NO: 171197 - DNA, 20 bp, Artificial Sequence
  Description of Artificial Sequence: Synthetic oligonucleotide
  Target: LAMA2; (+) strand; PAM type: NRG; PAM sequence: AAG
aaagattgcagaatagaggt

SEQ ID NO: 171198 - DNA, 20 bp, Artificial Sequence
  Description of Artificial Sequence: Synthetic oligonucleotide
  Target: LAMA2; (+) strand; PAM type: NRG; PAM sequence: GAG
agattgcagaatagaggtaa

SEQ ID NO: 171199 - DNA, 20 bp, Artificial Sequence
  Description of Artificial Sequence: Synthetic oligonucleotide
  Target: LAMA2; (+) strand; PAM type: NRG; PAM sequence: AAG
aggtaagagaatgttaaaat

SEQ ID NO: 171200 - DNA, 20 bp, Artificial Sequence
  Description of Artificial Sequence: Synthetic oligonucleotide
  Target: LAMA2; (+) strand; PAM type: NRG; PAM sequence: AAG
atgttaaaataagaaaatcc

SEQ ID NO: 171201 - DNA, 20 bp, Artificial Sequence
  Description of Artificial Sequence: Synthetic oligonucleotide
  Target: LAMA2; (+) strand; PAM type: NRG; PAM sequence: TAG
taaaataagaaaatccaaga

SEQ ID NO: 171202 - DNA, 20 bp, Artificial Sequence
  Description of Artificial Sequence: Synthetic oligonucleotide
  Target: LAMA2; (+) strand; PAM type: NRG; PAM sequence: GAG
aaataagaaaatccaagata

SEQ ID NO: 171203 - DNA, 20 bp, Artificial Sequence
  Description of Artificial Sequence: Synthetic oligonucleotide
  Target: LAMA2; (+) strand; PAM type: NRG; PAM sequence: AAG
aaatccaagatagagaatga

SEQ ID NO: 171204 - DNA, 20 bp, Artificial Sequence
  Description of Artificial Sequence: Synthetic oligonucleotide
  Target: LAMA2; (+) strand; PAM type: NRG; PAM sequence: AGG
aatccaagatagagaatgaa

SEQ ID NO: 171205 - DNA, 20 bp, Artificial Sequence
  Description of Artificial Sequence: Synthetic oligonucleotide
  Target: LAMA2; (+) strand; PAM type: NRG; PAM sequence: AAG
ccaagatagagaatgaaagg

SEQ ID NO: 171206 - DNA, 20 bp, Artificial Sequence
  Description of Artificial Sequence: Synthetic oligonucleotide
  Target: LAMA2; (+) strand; PAM type: NRG; PAM sequence: TAG
aggaagattgtacaacatat

SEQ ID NO: 171207 - DNA, 20 bp, Artificial Sequence
  Description of Artificial Sequence: Synthetic oligonucleotide
  Target: LAMA2; (+) strand; PAM type: NRG; PAM sequence: AGG
ggaagattgtacaacatatt

SEQ ID NO: 171208 - DNA, 20 bp, Artificial Sequence
  Description of Artificial Sequence: Synthetic oligonucleotide
  Target: LAMA2; (+) strand; PAM type: NRG; PAM sequence: GAG
tacaacatattaggataaat

SEQ ID NO: 171209 - DNA, 20 bp, Artificial Sequence
  Description of Artificial Sequence: Synthetic oligonucleotide
  Target: LAMA2; (+) strand; PAM type: NRG; PAM sequence: AAG
aacatattaggataaatgag

SEQ ID NO: 171210 - DNA, 20 bp, Artificial Sequence
  Description of Artificial Sequence: Synthetic oligonucleotide
  Target: LAMA2; (+) strand; PAM type: NRG; PAM sequence: AAG
agttatttgtcaaatactca

SEQ ID NO: 171211 - DNA, 20 bp, Artificial Sequence
  Description of Artificial Sequence: Synthetic oligonucleotide
  Target: LAMA2; (+) strand; PAM type: NRG; PAM sequence: AGG
gttatttgtcaaatactcaa

SEQ ID NO: 171212 - DNA, 20 bp, Artificial Sequence
  Description of Artificial Sequence: Synthetic oligonucleotide
  Target: LAMA2; (+) strand; PAM type: NRG; PAM sequence: AAG
ttgtcaaatactcaaaggac

SEQ ID NO: 171213 - DNA, 20 bp, Artificial Sequence
  Description of Artificial Sequence: Synthetic oligonucleotide
  Target: LAMA2; (+) strand; PAM type: NRG; PAM sequence: TAG
atactcaaaggacaagataa

SEQ ID NO: 171214 - DNA, 20 bp, Artificial Sequence
  Description of Artificial Sequence: Synthetic oligonucleotide
  Target: LAMA2; (+) strand; PAM type: NRG; PAM sequence: AAG
aggacaagataatagtgaat

SEQ ID NO: 171215 - DNA, 20 bp, Artificial Sequence
  Description of Artificial Sequence: Synthetic oligonucleotide
  Target: LAMA2; (+) strand; PAM type: NRG; PAM sequence: AAG
acaagataatagtgaataag

SEQ ID NO: 171216 - DNA, 20 bp, Artificial Sequence
  Description of Artificial Sequence: Synthetic oligonucleotide
  Target: LAMA2; (+) strand; PAM type: NRG; PAM sequence: AAG
agataatagtgaataagaag

SEQ ID NO: 171217 - DNA, 20 bp, Artificial Sequence
  Description of Artificial Sequence: Synthetic oligonucleotide
  Target: LAMA2; (+) strand; PAM type: NRG; PAM sequence: AGG
gataatagtgaataagaaga

SEQ ID NO: 171218 - DNA, 20 bp, Artificial Sequence
  Description of Artificial Sequence: Synthetic oligonucleotide
  Target: LAMA2; (+) strand; PAM type: NRG; PAM sequence: AAG
gaataagaagaaggatgact

SEQ ID NO: 171219 - DNA, 20 bp, Artificial Sequence
  Description of Artificial Sequence: Synthetic oligonucleotide
  Target: LAMA2; (+) strand; PAM type: NRG; PAM sequence: GAG
ataagaagaaggatgactaa

SEQ ID NO: 171220 - DNA, 20 bp, Artificial Sequence
  Description of Artificial Sequence: Synthetic oligonucleotide
  Target: LAMA2; (+) strand; PAM type: NRG; PAM sequence: TGG
gaagaaggatgactaagaga

SEQ ID NO: 171221 - DNA, 20 bp, Artificial Sequence
  Description of Artificial Sequence: Synthetic oligonucleotide
  Target: LAMA2; (+) strand; PAM type: NRG; PAM sequence: GAG
agaaggatgactaagagatg

SEQ ID NO: 171222 - DNA, 20 bp, Artificial Sequence
  Description of Artificial Sequence: Synthetic oligonucleotide
  Target: LAMA2; (+) strand; PAM type: NRG; PAM sequence: TGG
ggatgactaagagatggaga

SEQ ID NO: 171223 - DNA, 20 bp, Artificial Sequence
  Description of Artificial Sequence: Synthetic oligonucleotide
  Target: LAMA2; (+) strand; PAM type: NRG; PAM sequence: CAG
gatggtaatttaataaaaca

SEQ ID NO: 171224 - DNA, 20 bp, Artificial Sequence
  Description of Artificial Sequence: Synthetic oligonucleotide
  Target: LAMA2; (+) strand; PAM type: NRG; PAM sequence: AAG
gtaatttaataaaacacaga

SEQ ID NO: 171225 - DNA, 20 bp, Artificial Sequence
  Description of Artificial Sequence: Synthetic oligonucleotide
  Target: LAMA2; (+) strand; PAM type: NRG; PAM sequence: GAG
aatttaataaaacacagaaa

SEQ ID NO: 171226 - DNA, 20 bp, Artificial Sequence
  Description of Artificial Sequence: Synthetic oligonucleotide
  Target: LAMA2; (+) strand; PAM type: NRG; PAM sequence: CAG
cagaaagagccaaactgaat

SEQ ID NO: 171227 - DNA, 20 bp, Artificial Sequence
  Description of Artificial Sequence: Synthetic oligonucleotide
  Target: LAMA2; (+) strand; PAM type: NRG; PAM sequence: CAG
aagagccaaactgaatcaga

SEQ ID NO: 171228 - DNA, 20 bp, Artificial Sequence
  Description of Artificial Sequence: Synthetic oligonucleotide
  Target: LAMA2; (+) strand; PAM type: NRG; PAM sequence: TAG
gccaaactgaatcagacaga

SEQ ID NO: 171229 - DNA, 20 bp, Artificial Sequence
  Description of Artificial Sequence: Synthetic oligonucleotide
  Target: LAMA2; (+) strand; PAM type: NRG; PAM sequence: TAG
gacagatagttcctatcatg

SEQ ID NO: 171230 - DNA, 20 bp, Artificial Sequence
  Description of Artificial Sequence: Synthetic oligonucleotide
  Target: LAMA2; (+) strand; PAM type: NRG; PAM sequence: TAG
agttcctatcatgtagtatt

SEQ ID NO: 171231 - DNA, 20 bp, Artificial Sequence
  Description of Artificial Sequence: Synthetic oligonucleotide
  Target: LAMA2; (+) strand; PAM type: NRG; PAM sequence: TAG
ttcattcataacattatcaa

SEQ ID NO: 171232 - DNA, 20 bp, Artificial Sequence
  Description of Artificial Sequence: Synthetic oligonucleotide
  Target: LAMA2; (+) strand; PAM type: NRG; PAM sequence: TGG
acattatcaatagcctgtcc

SEQ ID NO: 171233 - DNA, 20 bp, Artificial Sequence
  Description of Artificial Sequence: Synthetic oligonucleotide
  Target: LAMA2; (+) strand; PAM type: NRG; PAM sequence: GGG
cattatcaatagcctgtcct

SEQ ID NO: 171234 - DNA, 20 bp, Artificial Sequence
  Description of Artificial Sequence: Synthetic oligonucleotide
  Target: LAMA2; (+) strand; PAM type: NRG; PAM sequence: GAG
atcaatagcctgtcctgggt

SEQ ID NO: 171235 - DNA, 20 bp, Artificial Sequence
  Description of Artificial Sequence: Synthetic oligonucleotide
  Target: LAMA2; (+) strand; PAM type: NRG; PAM sequence: TGG
gatttttgtgaattttgctt

SEQ ID NO: 171236 - DNA, 20 bp, Artificial Sequence
  Description of Artificial Sequence: Synthetic oligonucleotide
  Target: LAMA2; (+) strand; PAM type: NRG; PAM sequence: CAG
ttttgtgaattttgctttgg

SEQ ID NO: 171237 - DNA, 20 bp, Artificial Sequence
  Description of Artificial Sequence: Synthetic oligonucleotide
  Target: LAMA2; (+) strand; PAM type: NRG; PAM sequence: TAG
ctatctatcaccactaccca

SEQ ID NO: 171238 - DNA, 20 bp, Artificial Sequence
  Description of Artificial Sequence: Synthetic oligonucleotide
  Target: LAMA2; (+) strand; PAM type: NRG; PAM sequence: AGG
tatctatcaccactacccat

SEQ ID NO: 171239 - DNA, 20 bp, Artificial Sequence
  Description of Artificial Sequence: Synthetic oligonucleotide
  Target: LAMA2; (+) strand; PAM type: NRG; PAM sequence: TAG
tcaccactacccataggtga

SEQ ID NO: 171240 - DNA, 20 bp, Artificial Sequence
  Description of Artificial Sequence: Synthetic oligonucleotide
  Target: LAMA2; (+) strand; PAM type: NRG; PAM sequence: TAG
aggtgatagtgcatttgtca

SEQ ID NO: 171241 - DNA, 20 bp, Artificial Sequence
  Description of Artificial Sequence: Synthetic oligonucleotide
  Target: LAMA2; (+) strand; PAM type: NRG; PAM sequence: AGG
ggtgatagtgcatttgtcat

SEQ ID NO: 171242 - DNA, 20 bp, Artificial Sequence
  Description of Artificial Sequence: Synthetic oligonucleotide
  Target: LAMA2; (+) strand; PAM type: NRG; PAM sequence: AAG
ttgtcataggcttctttatg

SEQ ID NO: 171243 - DNA, 20 bp, Artificial Sequence
  Description of Artificial Sequence: Synthetic oligonucleotide
  Target: LAMA2; (+) strand; PAM type: NRG; PAM sequence: TGG
cttctttatgaagtctctcg

SEQ ID NO: 171244 - DNA, 20 bp, Artificial Sequence
  Description of Artificial Sequence: Synthetic oligonucleotide
  Target: LAMA2; (+) strand; PAM type: NRG; PAM sequence: GGG
ttctttatgaagtctctcgt

SEQ ID NO: 171245 - DNA, 20 bp, Artificial Sequence
  Description of Artificial Sequence: Synthetic oligonucleotide
  Target: LAMA2; (+) strand; PAM type: NRG; PAM sequence: CAG
ctctcgtgggtatttttgac

SEQ ID NO: 171246 - DNA, 20 bp, Artificial Sequence
  Description of Artificial Sequence: Synthetic oligonucleotide
  Target: LAMA2; (+) strand; PAM type: NRG; PAM sequence: AGG
tctcgtgggtatttttgacc

SEQ ID NO: 171247 - DNA, 20 bp, Artificial Sequence
  Description of Artificial Sequence: Synthetic oligonucleotide
  Target: LAMA2; (+) strand; PAM type: NRG; PAM sequence: GGG
ctcgtgggtatttttgacca

SEQ ID NO: 171248 - DNA, 20 bp, Artificial Sequence
  Description of Artificial Sequence: Synthetic oligonucleotide
  Target: LAMA2; (+) strand; PAM type: NRG; PAM sequence: GAG
caacttaattactgtgtaat

SEQ ID NO: 171249 - DNA, 20 bp, Artificial Sequence
  Description of Artificial Sequence: Synthetic oligonucleotide
  Target: LAMA2; (+) strand; PAM type: NRG; PAM sequence: TAG
atgatttttaaaaatatatc

SEQ ID NO: 171250 - DNA, 20 bp, Artificial Sequence
  Description of Artificial Sequence: Synthetic oligonucleotide
  Target: LAMA2; (+) strand; PAM type: NRG; PAM sequence: AAG
gaaatgtgttaattgactga

SEQ ID NO: 171251 - DNA, 20 bp, Artificial Sequence
  Description of Artificial Sequence: Synthetic oligonucleotide
  Target: LAMA2; (+) strand; PAM type: NRG; PAM sequence: AAG
agtcaaaacttatatactta

SEQ ID NO: 171252 - DNA, 20 bp, Artificial Sequence
  Description of Artificial Sequence: Synthetic oligonucleotide
  Target: LAMA2; (+) strand; PAM type: NRG; PAM sequence: TGG
tacttaaagtatacattaac

SEQ ID NO: 171253 - DNA, 20 bp, Artificial Sequence
  Description of Artificial Sequence: Synthetic oligonucleotide
  Target: LAMA2; (+) strand; PAM type: NRG; PAM sequence: GAG
cttaaagtatacattaactg

SEQ ID NO: 171254 - DNA, 20 bp, Artificial Sequence
  Description of Artificial Sequence: Synthetic oligonucleotide
  Target: LAMA2; (+) strand; PAM type: NRG; PAM sequence: CAG
aaagtatacattaactggag

SEQ ID NO: 171255 - DNA, 20 bp, Artificial Sequence
  Description of Artificial Sequence: Synthetic oligonucleotide
  Target: LAMA2; (+) strand; PAM type: NRG; PAM sequence: TAG
agcagtgtcctccactcacc

SEQ ID NO: 171256 - DNA, 20 bp, Artificial Sequence
  Description of Artificial Sequence: Synthetic oligonucleotide
  Target: LAMA2; (+) strand; PAM type: NRG; PAM sequence: CAG
tccactcacctagaatactc

SEQ ID NO: 171257 - DNA, 20 bp, Artificial Sequence
  Description of Artificial Sequence: Synthetic oligonucleotide
  Target: LAMA2; (+) strand; PAM type: NRG; PAM sequence: TGG
atgtattttactactctttc

SEQ ID NO: 171258 - DNA, 20 bp, Artificial Sequence
  Description of Artificial Sequence: Synthetic oligonucleotide
  Target: LAMA2; (+) strand; PAM type: NRG; PAM sequence: TAG
ttactactctttctggatgt

SEQ ID NO: 171259 - DNA, 20 bp, Artificial Sequence
  Description of Artificial Sequence: Synthetic oligonucleotide
  Target: LAMA2; (+) strand; PAM type: NRG; PAM sequence: TAG
gatgttagccaaacacaaaa

SEQ ID NO: 171260 - DNA, 20 bp, Artificial Sequence
  Description of Artificial Sequence: Synthetic oligonucleotide
  Target: LAMA2; (+) strand; PAM type: NRG; PAM sequence: TGG
agccaaacacaaaatagtgt

SEQ ID NO: 171261 - DNA, 20 bp, Artificial Sequence
  Description of Artificial Sequence: Synthetic oligonucleotide
  Target: LAMA2; (+) strand; PAM type: NRG; PAM sequence: GGG
gccaaacacaaaatagtgtt

SEQ ID NO: 171262 - DNA, 20 bp, Artificial Sequence
  Description of Artificial Sequence: Synthetic oligonucleotide
  Target: LAMA2; (+) strand; PAM type: NRG; PAM sequence: AAG
gttgggtacaaacaaaatat

SEQ ID NO: 171263 - DNA, 20 bp, Artificial Sequence
  Description of Artificial Sequence: Synthetic oligonucleotide
  Target: LAMA2; (+) strand; PAM type: NRG; PAM sequence: GAG
caaacaaaatataagtctgt

SEQ ID NO: 171264 - DNA, 20 bp, Artificial Sequence
  Description of Artificial Sequence: Synthetic oligonucleotide
  Target: LAMA2; (+) strand; PAM type: NRG; PAM sequence: AAG
aagtctgtgagacaaaaaaa

SEQ ID NO: 171265 - DNA, 20 bp, Artificial Sequence
  Description of Artificial Sequence: Synthetic oligonucleotide
  Target: LAMA2; (+) strand; PAM type: NRG; PAM sequence: AAG
ctccaattccctgtacatgt

SEQ ID NO: 171266 - DNA, 20 bp, Artificial Sequence
  Description of Artificial Sequence: Synthetic oligonucleotide
  Target: LAMA2; (+) strand; PAM type: NRG; PAM sequence: CAG
attccctgtacatgtaagtt

SEQ ID NO: 171267 - DNA, 20 bp, Artificial Sequence
  Description of Artificial Sequence: Synthetic oligonucleotide
  Target: LAMA2; (+) strand; PAM type: NRG; PAM sequence: AAG
ctgtacatgtaagttcagat

SEQ ID NO: 171268 - DNA, 20 bp, Artificial Sequence
  Description of Artificial Sequence: Synthetic oligonucleotide
  Target: LAMA2; (+) strand; PAM type: NRG; PAM sequence: AAG
ttccttttcacctgtgtaaa

SEQ ID NO: 171269 - DNA, 20 bp, Artificial Sequence
  Description of Artificial Sequence: Synthetic oligonucleotide
  Target: LAMA2; (+) strand; PAM type: NRG; PAM sequence: GAG
ccttttcacctgtgtaaaaa

SEQ ID NO: 171270 - DNA, 20 bp, Artificial Sequence
  Description of Artificial Sequence: Synthetic oligonucleotide
  Target: LAMA2; (+) strand; PAM type: NRG; PAM sequence: AGG
cttttcacctgtgtaaaaag

SEQ ID NO: 171271 - DNA, 20 bp, Artificial Sequence
  Description of Artificial Sequence: Synthetic oligonucleotide
  Target: LAMA2; (+) strand; PAM type: NRG; PAM sequence: GGG
ttttcacctgtgtaaaaaga

SEQ ID NO: 171272 - DNA, 20 bp, Artificial Sequence
  Description of Artificial Sequence: Synthetic oligonucleotide
  Target: LAMA2; (+) strand; PAM type: NRG; PAM sequence: CAG
cttctatatatctctaaatt

SEQ ID NO: 171273 - DNA, 20 bp, Artificial Sequence
  Description of Artificial Sequence: Synthetic oligonucleotide
  Target: LAMA2; (+) strand; PAM type: NRG; PAM sequence: AGG
ttctatatatctctaaattc

SEQ ID NO: 171274 - DNA, 20 bp, Artificial Sequence
  Description of Artificial Sequence: Synthetic oligonucleotide
  Target: LAMA2; (+) strand; PAM type: NRG; PAM sequence: AAG
tatatatctctaaattcagg

SEQ ID NO: 171275 - DNA, 20 bp, Artificial Sequence
  Description of Artificial Sequence: Synthetic oligonucleotide
  Target: LAMA2; (+) strand; PAM type: NRG; PAM sequence: GAG
tatatctctaaattcaggaa

SEQ ID NO: 171276 - DNA, 20 bp, Artificial Sequence
  Description of Artificial Sequence: Synthetic oligonucleotide
  Target: LAMA2; (+) strand; PAM type: NRG; PAM sequence: AAG
tctctaaattcaggaagagt

SEQ ID NO: 171277 - DNA, 20 bp, Artificial Sequence
  Description of Artificial Sequence: Synthetic oligonucleotide
  Target: LAMA2; (+) strand; PAM type: NRG; PAM sequence: GAG
taaattcaggaagagtaagt

SEQ ID NO: 171278 - DNA, 20 bp, Artificial Sequence
  Description of Artificial Sequence: Synthetic oligonucleotide
  Target: LAMA2; (+) strand; PAM type: NRG; PAM sequence: GAG
gaagagtaagtgagacacac

SEQ ID NO: 171279 - DNA, 20 bp, Artificial Sequence
  Description of Artificial Sequence: Synthetic oligonucleotide
  Target: LAMA2; (+) strand; PAM type: NRG; PAM sequence: GAG
agagtaagtgagacacacga

SEQ ID NO: 171280 - DNA, 20 bp, Artificial Sequence
  Description of Artificial Sequence: Synthetic oligonucleotide
  Target: LAMA2; (+) strand; PAM type: NRG; PAM sequence: AAG
gagacacacgagagtgctgt

SEQ ID NO: 171281 - DNA, 20 bp, Artificial Sequence
  Description of Artificial Sequence: Synthetic oligonucleotide
  Target: LAMA2; (+) strand; PAM type: NRG; PAM sequence: TGG
tgcaaacatgtatataaatt

SEQ ID NO: 171282 - DNA, 20 bp, Artificial Sequence
  Description of Artificial Sequence: Synthetic oligonucleotide
  Target: LAMA2; (+) strand; PAM type: NRG; PAM sequence: TAG
tttggcataactattcacaa

SEQ ID NO: 171283 - DNA, 20 bp, Artificial Sequence
  Description of Artificial Sequence: Synthetic oligonucleotide
  Target: LAMA2; (+) strand; PAM type: NRG; PAM sequence: AAG
cataactattcacaatagca

SEQ ID NO: 171284 - DNA, 20 bp, Artificial Sequence
  Description of Artificial Sequence: Synthetic oligonucleotide
  Target: LAMA2; (+) strand; PAM type: NRG; PAM sequence: TGG
tattcacaatagcaaagaca

SEQ ID NO: 171285 - DNA, 20 bp, Artificial Sequence
  Description of Artificial Sequence: Synthetic oligonucleotide
  Target: LAMA2; (+) strand; PAM type: NRG; PAM sequence: AAG
caaagacatggaatcaacct

SEQ ID NO: 171286 - DNA, 20 bp, Artificial Sequence
  Description of Artificial Sequence: Synthetic oligonucleotide
  Target: LAMA2; (+) strand; PAM type: NRG; PAM sequence: TAG
acctaagtgcccatcaataa

SEQ ID NO: 171287 - DNA, 20 bp, Artificial Sequence
  Description of Artificial Sequence: Synthetic oligonucleotide
  Target: LAMA2; (+) strand; PAM type: NRG; PAM sequence: TGG
agtgcccatcaataatagac

SEQ ID NO: 171288 - DNA, 20 bp, Artificial Sequence
  Description of Artificial Sequence: Synthetic oligonucleotide
  Target: LAMA2; (+) strand; PAM type: NRG; PAM sequence: AAG
catcaataatagactggcta

SEQ ID NO: 171289 - DNA, 20 bp, Artificial Sequence
  Description of Artificial Sequence: Synthetic oligonucleotide
  Target: LAMA2; (+) strand; PAM type: NRG; PAM sequence: TGG
tagactggctaaagaaaatg

SEQ ID NO: 171290 - DNA, 20 bp, Artificial Sequence
  Description of Artificial Sequence: Synthetic oligonucleotide
  Target: LAMA2; (+) strand; PAM type: NRG; PAM sequence: TGG
aatgtggtacatacacacca

SEQ ID NO: 171291 - DNA, 20 bp, Artificial Sequence
  Description of Artificial Sequence: Synthetic oligonucleotide
  Target: LAMA2; (+) strand; PAM type: NRG; PAM sequence: CAG
acacaccatggaatactatg

SEQ ID NO: 171292 - DNA, 20 bp, Artificial Sequence
  Description of Artificial Sequence: Synthetic oligonucleotide
  Target: LAMA2; (+) strand; PAM type: NRG; PAM sequence: AAG
aatactatgcagccataaaa

SEQ ID NO: 171293 - DNA, 20 bp, Artificial Sequence
  Description of Artificial Sequence: Synthetic oligonucleotide
  Target: LAMA2; (+) strand; PAM type: NRG; PAM sequence: GAG
atgcagccataaaaaagaat

SEQ ID NO: 171294 - DNA, 20 bp, Artificial Sequence
  Description of Artificial Sequence: Synthetic oligonucleotide
  Target: LAMA2; (+) strand; PAM type: NRG; PAM sequence: CAG
gaatgagttcatgtcctttg

SEQ ID NO: 171295 - DNA, 20 bp, Artificial Sequence
  Description of Artificial Sequence: Synthetic oligonucleotide
  Target: LAMA2; (+) strand; PAM type: NRG; PAM sequence: AGG
aatgagttcatgtcctttgc

SEQ ID NO: 171296 - DNA, 20 bp, Artificial Sequence
  Description of Artificial Sequence: Synthetic oligonucleotide
  Target: LAMA2; (+) strand; PAM type: NRG; PAM sequence: GGG
atgagttcatgtcctttgca

SEQ ID NO: 171297 - DNA, 20 bp, Artificial Sequence
  Description of Artificial Sequence: Synthetic oligonucleotide
  Target: LAMA2; (+) strand; PAM type: NRG; PAM sequence: TGG
tcatgtcctttgcagggaca

SEQ ID NO: 171298 - DNA, 20 bp, Artificial Sequence
  Description of Artificial Sequence: Synthetic oligonucleotide
  Target: LAMA2; (+) strand; PAM type: NRG; PAM sequence: TGG
gtcctttgcagggacatgga

SEQ ID NO: 171299 - DNA, 20 bp, Artificial Sequence
  Description of Artificial Sequence: Synthetic oligonucleotide
  Target: LAMA2; (+) strand; PAM type: NRG; PAM sequence: GAG
cctttgcagggacatggatg

SEQ ID NO: 171300 - DNA, 20 bp, Artificial Sequence
  Description of Artificial Sequence: Synthetic oligonucleotide
  Target: LAMA2; (+) strand; PAM type: NRG; PAM sequence: TGG
tgcagggacatggatggagc

SEQ ID NO: 171301 - DNA, 20 bp, Artificial Sequence
  Description of Artificial Sequence: Synthetic oligonucleotide
  Target: LAMA2; (+) strand; PAM type: NRG; PAM sequence: GAG
cagggacatggatggagctg

SEQ ID NO: 171302 - DNA, 20 bp, Artificial Sequence
  Description of Artificial Sequence: Synthetic oligonucleotide
  Target: LAMA2; (+) strand; PAM type: NRG; PAM sequence: AGG
agggacatggatggagctgg

SEQ ID NO: 171303 - DNA, 20 bp, Artificial Sequence
  Description of Artificial Sequence: Synthetic oligonucleotide
  Target: LAMA2; (+) strand; PAM type: NRG; PAM sequence: TAG
gagctggaggacattaccct

SEQ ID NO: 171304 - DNA, 20 bp, Artificial Sequence
  Description of Artificial Sequence: Synthetic oligonucleotide
  Target: LAMA2; (+) strand; PAM type: NRG; PAM sequence: CAG
ttacccttagcaaactaaca

SEQ ID NO: 171305 - DNA, 20 bp, Artificial Sequence
  Description of Artificial Sequence: Synthetic oligonucleotide
  Target: LAMA2; (+) strand; PAM type: NRG; PAM sequence: AGG
tacccttagcaaactaacac

SEQ ID NO: 171306 - DNA, 20 bp, Artificial Sequence
  Description of Artificial Sequence: Synthetic oligonucleotide
  Target: LAMA2; (+) strand; PAM type: NRG; PAM sequence: CAG
ttagcaaactaacacaggaa

SEQ ID NO: 171307 - DNA, 20 bp, Artificial Sequence
  Description of Artificial Sequence: Synthetic oligonucleotide
  Target: LAMA2; (+) strand; PAM type: NRG; PAM sequence: TGG
ctgtatgtcccacttataaa

SEQ ID NO: 171308 - DNA, 20 bp, Artificial Sequence
  Description of Artificial Sequence: Synthetic oligonucleotide
  Target: LAMA2; (+) strand; PAM type: NRG; PAM sequence: GGG
tgtatgtcccacttataaat

SEQ ID NO: 171309 - DNA, 20 bp, Artificial Sequence
  Description of Artificial Sequence: Synthetic oligonucleotide
  Target: LAMA2; (+) strand; PAM type: NRG; PAM sequence: GAG
tatgtcccacttataaatgg

SEQ ID NO: 171310 - DNA, 20 bp, Artificial Sequence
  Description of Artificial Sequence: Synthetic oligonucleotide
  Target: LAMA2; (+) strand; PAM type: NRG; PAM sequence: GAG
ataaatgggagttaaatgat

SEQ ID NO: 171311 - DNA, 20 bp, Artificial Sequence
  Description of Artificial Sequence: Synthetic oligonucleotide
  Target: LAMA2; (+) strand; PAM type: NRG; PAM sequence: TAG
agttaaatgatgagaacaca

SEQ ID NO: 171312 - DNA, 20 bp, Artificial Sequence
  Description of Artificial Sequence: Synthetic oligonucleotide
  Target: LAMA2; (+) strand; PAM type: NRG; PAM sequence: TAG
gatgagaacacatagacatg

SEQ ID NO: 171313 - DNA, 20 bp, Artificial Sequence
  Description of Artificial Sequence: Synthetic oligonucleotide
  Target: LAMA2; (+) strand; PAM type: NRG; PAM sequence: AAG
gagaacacatagacatgtag

SEQ ID NO: 171314 - DNA, 20 bp, Artificial Sequence
  Description of Artificial Sequence: Synthetic oligonucleotide
  Target: LAMA2; (+) strand; PAM type: NRG; PAM sequence: AGG
agaacacatagacatgtaga

SEQ ID NO: 171315 - DNA, 20 bp, Artificial Sequence
  Description of Artificial Sequence: Synthetic oligonucleotide
  Target: LAMA2; (+) strand; PAM type: NRG; PAM sequence: GGG
gaacacatagacatgtagaa

SEQ ID NO: 171316 - DNA, 20 bp, Artificial Sequence
  Description of Artificial Sequence: Synthetic oligonucleotide
  Target: LAMA2; (+) strand; PAM type: NRG; PAM sequence: TGG
tagaagggaacaatgttcac

SEQ ID NO: 171317 - DNA, 20 bp, Artificial Sequence
  Description of Artificial Sequence: Synthetic oligonucleotide
  Target: LAMA2; (+) strand; PAM type: NRG; PAM sequence: GGG
agaagggaacaatgttcact

SEQ ID NO: 171318 - DNA, 20 bp, Artificial Sequence
  Description of Artificial Sequence: Synthetic oligonucleotide
  Target: LAMA2; (+) strand; PAM type: NRG; PAM sequence: GGG
gaagggaacaatgttcactg

SEQ ID NO: 171319 - DNA, 20 bp, Artificial Sequence
  Description of Artificial Sequence: Synthetic oligonucleotide
  Target: LAMA2; (+) strand; PAM type: NRG; PAM sequence: CAG
caatgttcactggggcctac

SEQ ID NO: 171320 - DNA, 20 bp, Artificial Sequence
  Description of Artificial Sequence: Synthetic oligonucleotide
  Target: LAMA2; (+) strand; PAM type: NRG; PAM sequence: GAG
atgttcactggggcctacca

SEQ ID NO: 171321 - DNA, 20 bp, Artificial Sequence
  Description of Artificial Sequence: Synthetic oligonucleotide
  Target: LAMA2; (+) strand; PAM type: NRG; PAM sequence: AGG
tgttcactggggcctaccag

SEQ ID NO: 171322 - DNA, 20 bp, Artificial Sequence
  Description of Artificial Sequence: Synthetic oligonucleotide
  Target: LAMA2; (+) strand; PAM type: NRG; PAM sequence: GGG
gttcactggggcctaccaga

SEQ ID NO: 171323 - DNA, 20 bp, Artificial Sequence
  Description of Artificial Sequence: Synthetic oligonucleotide
  Target: LAMA2; (+) strand; PAM type: NRG; PAM sequence: CGG
cactggggcctaccagaggg

SEQ ID NO: 171324 - DNA, 20 bp, Artificial Sequence
  Description of Artificial Sequence: Synthetic oligonucleotide
  Target: LAMA2; (+) strand; PAM type: NRG; PAM sequence: GAG
ctggggcctaccagagggcg

SEQ ID NO: 171325 - DNA, 20 bp, Artificial Sequence
  Description of Artificial Sequence: Synthetic oligonucleotide
  Target: LAMA2; (+) strand; PAM type: NRG; PAM sequence: AGG
tggggcctaccagagggcgg

SEQ ID NO: 171326 - DNA, 20 bp, Artificial Sequence
  Description of Artificial Sequence: Synthetic oligonucleotide
  Target: LAMA2; (+) strand; PAM type: NRG; PAM sequence: TGG
gcctaccagagggcggagga

SEQ ID NO: 171327 - DNA, 20 bp, Artificial Sequence
  Description of Artificial Sequence: Synthetic oligonucleotide
  Target: LAMA2; (+) strand; PAM type: NRG; PAM sequence: GGG
cctaccagagggcggaggat

SEQ ID NO: 171328 - DNA, 20 bp, Artificial Sequence
  Description of Artificial Sequence: Synthetic oligonucleotide
  Target: LAMA2; (+) strand; PAM type: NRG; PAM sequence: AAG
accagagggcggaggatggg

SEQ ID NO: 171329 - DNA, 20 bp, Artificial Sequence
  Description of Artificial Sequence: Synthetic oligonucleotide
  Target: LAMA2; (+) strand; PAM type: NRG; PAM sequence: AGG
ccagagggcggaggatggga

SEQ ID NO: 171330 - DNA, 20 bp, Artificial Sequence
  Description of Artificial Sequence: Synthetic oligonucleotide
  Target: LAMA2; (+) strand; PAM type: NRG; PAM sequence: GAG
gggcggaggatgggaaggat

SEQ ID NO: 171331 - DNA, 20 bp, Artificial Sequence
  Description of Artificial Sequence: Synthetic oligonucleotide
  Target: LAMA2; (+) strand; PAM type: NRG; PAM sequence: GAG
gcggaggatgggaaggatga

SEQ ID NO: 171332 - DNA, 20 bp, Artificial Sequence
  Description of Artificial Sequence: Synthetic oligonucleotide
  Target: LAMA2; (+) strand; PAM type: NRG; PAM sequence: AGG
cggaggatgggaaggatgag

SEQ ID NO: 171333 - DNA, 20 bp, Artificial Sequence
  Description of Artificial Sequence: Synthetic oligonucleotide
  Target: LAMA2; (+) strand; PAM type: NRG; PAM sequence: TGG
ggatgggaaggatgagagga

SEQ ID NO: 171334 - DNA, 20 bp, Artificial Sequence
  Description of Artificial Sequence: Synthetic oligonucleotide
  Target: LAMA2; (+) strand; PAM type: NRG; PAM sequence: GAG
atgggaaggatgagaggatg

SEQ ID NO: 171335 - DNA, 20 bp, Artificial Sequence
  Description of Artificial Sequence: Synthetic oligonucleotide
  Target: LAMA2; (+) strand; PAM type: NRG; PAM sequence: GAG
gggaaggatgagaggatgga

SEQ ID NO: 171336 - DNA, 20 bp, Artificial Sequence
  Description of Artificial Sequence: Synthetic oligonucleotide
  Target: LAMA2; (+) strand; PAM type: NRG; PAM sequence: AGG
ggaaggatgagaggatggag

SEQ ID NO: 171337 - DNA, 20 bp, Artificial Sequence
  Description of Artificial Sequence: Synthetic oligonucleotide
  Target: LAMA2; (+) strand; PAM type: NRG; PAM sequence: TAG
gatgagaggatggagaggat

SEQ ID NO: 171338 - DNA, 20 bp, Artificial Sequence
  Description of Artificial Sequence: Synthetic oligonucleotide
  Target: LAMA2; (+) strand; PAM type: NRG; PAM sequence: AGG
atgagaggatggagaggatt

SEQ ID NO: 171339 - DNA, 20 bp, Artificial Sequence
  Description of Artificial Sequence: Synthetic oligonucleotide
  Target: LAMA2; (+) strand; PAM type: NRG; PAM sequence: AAG
agaggatggagaggattagg

SEQ ID NO: 171340 - DNA, 20 bp, Artificial Sequence
  Description of Artificial Sequence: Synthetic oligonucleotide
  Target: LAMA2; (+) strand; PAM type: NRG; PAM sequence: TGG
ggattaggaagaataactta

SEQ ID NO: 171341 - DNA, 20 bp, Artificial Sequence
  Description of Artificial Sequence: Synthetic oligonucleotide
  Target: LAMA2; (+) strand; PAM type: NRG; PAM sequence: GGG
gattaggaagaataacttat

SEQ ID NO: 171342 - DNA, 20 bp, Artificial Sequence
  Description of Artificial Sequence: Synthetic oligonucleotide
  Target: LAMA2; (+) strand; PAM type: NRG; PAM sequence: TGG
gaagaataacttatgggcac

SEQ ID NO: 171343 - DNA, 20 bp, Artificial Sequence
  Description of Artificial Sequence: Synthetic oligonucleotide
  Target: LAMA2; (+) strand; PAM type: NRG; PAM sequence: GGG
aagaataacttatgggcact

SEQ ID NO: 171344 - DNA, 20 bp, Artificial Sequence
  Description of Artificial Sequence: Synthetic oligonucleotide
  Target: LAMA2; (+) strand; PAM type: NRG; PAM sequence: TGG
tgggcactgggcttaatacc

SEQ ID NO: 171345 - DNA, 20 bp, Artificial Sequence
  Description of Artificial Sequence: Synthetic oligonucleotide
  Target: LAMA2; (+) strand; PAM type: NRG; PAM sequence: GGG
gggcactgggcttaatacct

SEQ ID NO: 171346 - DNA, 20 bp, Artificial Sequence
  Description of Artificial Sequence: Synthetic oligonucleotide
  Target: LAMA2; (+) strand; PAM type: NRG; PAM sequence: TGG
gcaacaaaccccattatgca

SEQ ID NO: 171347 - DNA, 20 bp, Artificial Sequence
  Description of Artificial Sequence: Synthetic oligonucleotide
  Target: LAMA2; (+) strand; PAM type: NRG; PAM sequence: GGG
caacaaaccccattatgcat

SEQ ID NO: 171348 - DNA, 20 bp, Artificial Sequence
  Description of Artificial Sequence: Synthetic oligonucleotide
  Target: LAMA2; (+) strand; PAM type: NRG; PAM sequence: AAG
acatgtatccctgaacttaa

SEQ ID NO: 171349 - DNA, 20 bp, Artificial Sequence
  Description of Artificial Sequence: Synthetic oligonucleotide
  Target: LAMA2; (+) strand; PAM type: NRG; PAM sequence: AAG
taaaaaaatataaaaaatac

SEQ ID NO: 171350 - DNA, 20 bp, Artificial Sequence
  Description of Artificial Sequence: Synthetic oligonucleotide
  Target: LAMA2; (+) strand; PAM type: NRG; PAM sequence: GAG
taaaaaatacaagtaattct

SEQ ID NO: 171351 - DNA, 20 bp, Artificial Sequence
  Description of Artificial Sequence: Synthetic oligonucleotide
  Target: LAMA2; (+) strand; PAM type: NRG; PAM sequence: AGG
aaaaaatacaagtaattctg

SEQ ID NO: 171352 - DNA, 20 bp, Artificial Sequence
  Description of Artificial Sequence: Synthetic oligonucleotide
  Target: LAMA2; (+) strand; PAM type: NRG; PAM sequence: CAG
atacaagtaattctgaggta

SEQ ID NO: 171353 - DNA, 20 bp, Artificial Sequence
  Description of Artificial Sequence: Synthetic oligonucleotide
  Target: LAMA2; (+) strand; PAM type: NRG; PAM sequence: GAG
agtaattctgaggtacagat

SEQ ID NO: 171354 - DNA, 20 bp, Artificial Sequence
  Description of Artificial Sequence: Synthetic oligonucleotide
  Target: LAMA2; (+) strand; PAM type: NRG; PAM sequence: TAG
tgactgtgtaactcatcctt

SEQ ID NO: 171355 - DNA, 20 bp, Artificial Sequence
  Description of Artificial Sequence: Synthetic oligonucleotide
  Target: LAMA2; (+) strand; PAM type: NRG; PAM sequence: AAG
ttagcatgctaacccgcatt

SEQ ID NO: 171356 - DNA, 20 bp, Artificial Sequence
  Description of Artificial Sequence: Synthetic oligonucleotide
  Target: LAMA2; (+) strand; PAM type: NRG; PAM sequence: TGG
ccgcattaagttgatgcttt

SEQ ID NO: 171357 - DNA, 20 bp, Artificial Sequence
  Description of Artificial Sequence: Synthetic oligonucleotide
  Target: LAMA2; (+) strand; PAM type: NRG; PAM sequence: CGG
taagttgatgcttttggtgc

SEQ ID NO: 171358 - DNA, 20 bp, Artificial Sequence
  Description of Artificial Sequence: Synthetic oligonucleotide
  Target: LAMA2; (+) strand; PAM type: NRG; PAM sequence: GGG
aagttgatgcttttggtgcc

SEQ ID NO: 171359 - DNA, 20 bp, Artificial Sequence
  Description of Artificial Sequence: Synthetic oligonucleotide
  Target: LAMA2; (+) strand; PAM type: NRG; PAM sequence: TGG
cctcacgtctcctcctcttc

SEQ ID NO: 171360 - DNA, 20 bp, Artificial Sequence
  Description of Artificial Sequence: Synthetic oligonucleotide
  Target: LAMA2; (+) strand; PAM type: NRG; PAM sequence: TAG
cgtctcctcctcttctggaa

SEQ ID NO: 171361 - DNA, 20 bp, Artificial Sequence
  Description of Artificial Sequence: Synthetic oligonucleotide
  Target: LAMA2; (+) strand; PAM type: NRG; PAM sequence: TAG
cctcctcttctggaatagcc

SEQ ID NO: 171362 - DNA, 20 bp, Artificial Sequence
  Description of Artificial Sequence: Synthetic oligonucleotide
  Target: LAMA2; (+) strand; PAM type: NRG; PAM sequence: GAG
tcctcttctggaatagccta

SEQ ID NO: 171363 - DNA, 20 bp, Artificial Sequence
  Description of Artificial Sequence: Synthetic oligonucleotide
  Target: LAMA2; (+) strand; PAM type: NRG; PAM sequence: GAG
ctcttctggaatagcctaga

SEQ ID NO: 171364 - DNA, 20 bp, Artificial Sequence
  Description of Artificial Sequence: Synthetic oligonucleotide
  Target: LAMA2; (+) strand; PAM type: NRG; PAM sequence: AGG
tcttctggaatagcctagag

SEQ ID NO: 171365 - DNA, 20 bp, Artificial Sequence
  Description of Artificial Sequence: Synthetic oligonucleotide
  Target: LAMA2; (+) strand; PAM type: NRG; PAM sequence: AAG
tctggaatagcctagagagg

SEQ ID NO: 171366 - DNA, 20 bp, Artificial Sequence
  Description of Artificial Sequence: Synthetic oligonucleotide
  Target: LAMA2; (+) strand; PAM type: NRG; PAM sequence: TAG
ggaagctcttcttctgtgtt

SEQ ID NO: 171367 - DNA, 20 bp, Artificial Sequence
  Description of Artificial Sequence: Synthetic oligonucleotide
  Target: LAMA2; (+) strand; PAM type: NRG; PAM sequence: GAG
aagctcttcttctgtgttta

SEQ ID NO: 171368 - DNA, 20 bp, Artificial Sequence
  Description of Artificial Sequence: Synthetic oligonucleotide
  Target: LAMA2; (+) strand; PAM type: NRG; PAM sequence: AGG
agctcttcttctgtgtttag

SEQ ID NO: 171369 - DNA, 20 bp, Artificial Sequence
  Description of Artificial Sequence: Synthetic oligonucleotide
  Target: LAMA2; (+) strand; PAM type: NRG; PAM sequence: GGG
gctcttcttctgtgtttaga

SEQ ID NO: 171370 - DNA, 20 bp, Artificial Sequence
  Description of Artificial Sequence: Synthetic oligonucleotide
  Target: LAMA2; (+) strand; PAM type: NRG; PAM sequence: AAG
cttcttctgtgtttagaggg

SEQ ID NO: 171371 - DNA, 20 bp, Artificial Sequence
  Description of Artificial Sequence: Synthetic oligonucleotide
  Target: LAMA2; (+) strand; PAM type: NRG; PAM sequence: AGG
ttcttctgtgtttagaggga

SEQ ID NO: 171372 - DNA, 20 bp, Artificial Sequence
  Description of Artificial Sequence: Synthetic oligonucleotide
  Target: LAMA2; (+) strand; PAM type: NRG; PAM sequence: CAG
tagagggaaggtatctcctt

SEQ ID NO: 171373 - DNA, 20 bp, Artificial Sequence
  Description of Artificial Sequence: Synthetic oligonucleotide
  Target: LAMA2; (+) strand; PAM type: NRG; PAM sequence: AAG
gggaaggtatctccttcagt

SEQ ID NO: 171374 - DNA, 20 bp, Artificial Sequence
  Description of Artificial Sequence: Synthetic oligonucleotide
  Target: LAMA2; (+) strand; PAM type: NRG; PAM sequence: TGG
tccttcagtaagcactgtgc

SEQ ID NO: 171375 - DNA, 20 bp, Artificial Sequence
  Description of Artificial Sequence: Synthetic oligonucleotide
  Target: LAMA2; (+) strand; PAM type: NRG; PAM sequence: AAG
taagcactgtgctggccctg

SEQ ID NO: 171376 - DNA, 20 bp, Artificial Sequence
  Description of Artificial Sequence: Synthetic oligonucleotide
  Target: LAMA2; (+) strand; PAM type: NRG; PAM sequence: GAG
agcactgtgctggccctgaa

SEQ ID NO: 171377 - DNA, 20 bp, Artificial Sequence
  Description of Artificial Sequence: Synthetic oligonucleotide
  Target: LAMA2; (+) strand; PAM type: NRG; PAM sequence: CAG
tactgccactcccaccccac

SEQ ID NO: 171378 - DNA, 20 bp, Artificial Sequence
  Description of Artificial Sequence: Synthetic oligonucleotide
  Target: LAMA2; (+) strand; PAM type: NRG; PAM sequence: TGG
ccactcccaccccaccagcg

SEQ ID NO: 171379 - DNA, 20 bp, Artificial Sequence
  Description of Artificial Sequence: Synthetic oligonucleotide
  Target: LAMA2; (+) strand; PAM type: NRG; PAM sequence: AAG
tggaacttcgtgtgtattca

SEQ ID NO: 171380 - DNA, 20 bp, Artificial Sequence
  Description of Artificial Sequence: Synthetic oligonucleotide
  Target: LAMA2; (+) strand; PAM type: NRG; PAM sequence: AGG
ggaacttcgtgtgtattcaa

SEQ ID NO: 171381 - DNA, 20 bp, Artificial Sequence
  Description of Artificial Sequence: Synthetic oligonucleotide
  Target: LAMA2; (+) strand; PAM type: NRG; PAM sequence: CAG
ttcgtgtgtattcaaaggtc

SEQ ID NO: 171382 - DNA, 20 bp, Artificial Sequence
  Description of Artificial Sequence: Synthetic oligonucleotide
  Target: LAMA2; (+) strand; PAM type: NRG; PAM sequence: GAG
ggtccagtttgaattactgt

SEQ ID NO: 171383 - DNA, 20 bp, Artificial Sequence
  Description of Artificial Sequence: Synthetic oligonucleotide
  Target: LAMA2; (+) strand; PAM type: NRG; PAM sequence: AGG
gtccagtttgaattactgtg

SEQ ID NO: 171384 - DNA, 20 bp, Artificial Sequence
  Description of Artificial Sequence: Synthetic oligonucleotide
  Target: LAMA2; (+) strand; PAM type: NRG; PAM sequence: CAG
agtttgaattactgtgaggc

SEQ ID NO: 171385 - DNA, 20 bp, Artificial Sequence
  Description of Artificial Sequence: Synthetic oligonucleotide
  Target: LAMA2; (+) strand; PAM type: NRG; PAM sequence: TGG
ttgaattactgtgaggccag

SEQ ID NO: 171386 - DNA, 20 bp, Artificial Sequence
  Description of Artificial Sequence: Synthetic oligonucleotide
  Target: LAMA2; (+) strand; PAM type: NRG; PAM sequence: TAG
attactgtgaggccagtggc

SEQ ID NO: 171387 - DNA, 20 bp, Artificial Sequence
  Description of Artificial Sequence: Synthetic oligonucleotide
  Target: LAMA2; (+) strand; PAM type: NRG; PAM sequence: AAG
ctgtgaggccagtggctaga

SEQ ID NO: 171388 - DNA, 20 bp, Artificial Sequence
  Description of Artificial Sequence: Synthetic oligonucleotide
  Target: LAMA2; (+) strand; PAM type: NRG; PAM sequence: CAG
tgaggccagtggctagaaag

SEQ ID NO: 171389 - DNA, 20 bp, Artificial Sequence
  Description of Artificial Sequence: Synthetic oligonucleotide
  Target: LAMA2; (+) strand; PAM type: NRG; PAM sequence: TAG
ccagtggctagaaagcagtg

SEQ ID NO: 171390 - DNA, 20 bp, Artificial Sequence
  Description of Artificial Sequence: Synthetic oligonucleotide
  Target: LAMA2; (+) strand; PAM type: NRG; PAM sequence: TGG
tggctagaaagcagtgtagt

SEQ ID NO: 171391 - DNA, 20 bp, Artificial Sequence
  Description of Artificial Sequence: Synthetic oligonucleotide
  Target: LAMA2; (+) strand; PAM type: NRG; PAM sequence: GGG
ggctagaaagcagtgtagtt

SEQ ID NO: 171392 - DNA, 20 bp, Artificial Sequence
  Description of Artificial Sequence: Synthetic oligonucleotide
  Target: LAMA2; (+) strand; PAM type: NRG; PAM sequence: TGG
gaaagcagtgtagttgggac

SEQ ID NO: 171393 - DNA, 20 bp, Artificial Sequence
  Description of Artificial Sequence: Synthetic oligonucleotide
  Target: LAMA2; (+) strand; PAM type: NRG; PAM sequence: GAG
aagcagtgtagttgggactg

SEQ ID NO: 171394 - DNA, 20 bp, Artificial Sequence
  Description of Artificial Sequence: Synthetic oligonucleotide
  Target: LAMA2; (+) strand; PAM type: NRG; PAM sequence: TGG
ggactggagattcacatgcc

SEQ ID NO: 171395 - DNA, 20 bp, Artificial Sequence
  Description of Artificial Sequence: Synthetic oligonucleotide
  Target: LAMA2; (+) strand; PAM type: NRG; PAM sequence: AAG
acatgcctggctcttctccc

SEQ ID NO: 171396 - DNA, 20 bp, Artificial Sequence
  Description of Artificial Sequence: Synthetic oligonucleotide
  Target: LAMA2; (+) strand; PAM type: NRG; PAM sequence: TAG
cttctcccaagcttcaactg

SEQ ID NO: 171397 - DNA, 20 bp, Artificial Sequence
  Description of Artificial Sequence: Synthetic oligonucleotide
  Target: LAMA2; (+) strand; PAM type: NRG; PAM sequence: GAG
aagcttcaactgtagctctt

SEQ ID NO: 171398 - DNA, 20 bp, Artificial Sequence
  Description of Artificial Sequence: Synthetic oligonucleotide
  Target: LAMA2; (+) strand; PAM type: NRG; PAM sequence: CAG
cttcaactgtagctcttgag

SEQ ID NO: 171399 - DNA, 20 bp, Artificial Sequence
  Description of Artificial Sequence: Synthetic oligonucleotide
  Target: LAMA2; (+) strand; PAM type: NRG; PAM sequence: CAG
caactgtagctcttgagcag

SEQ ID NO: 171400 - DNA, 20 bp, Artificial Sequence
  Description of Artificial Sequence: Synthetic oligonucleotide
  Target: LAMA2; (+) strand; PAM type: NRG; PAM sequence: GAG
cttgagcagcagcttcctct

SEQ ID NO: 171401 - DNA, 20 bp, Artificial Sequence
  Description of Artificial Sequence: Synthetic oligonucleotide
  Target: LAMA2; (+) strand; PAM type: NRG; PAM sequence: CAG
ctgagcttctaaaaaatgcc

SEQ ID NO: 171402 - DNA, 20 bp, Artificial Sequence
  Description of Artificial Sequence: Synthetic oligonucleotide
  Target: LAMA2; (+) strand; PAM type: NRG; PAM sequence: CAG
aaaatgcccagaaaattgcc

SEQ ID NO: 171403 - DNA, 20 bp, Artificial Sequence
  Description of Artificial Sequence: Synthetic oligonucleotide
  Target: LAMA2; (+) strand; PAM type: NRG; PAM sequence: TGG
gcccagccaaccacatttcc

SEQ ID NO: 171404 - DNA, 20 bp, Artificial Sequence
  Description of Artificial Sequence: Synthetic oligonucleotide
  Target: LAMA2; (+) strand; PAM type: NRG; PAM sequence: AAG
agccaaccacatttcctggc

SEQ ID NO: 171405 - DNA, 20 bp, Artificial Sequence
  Description of Artificial Sequence: Synthetic oligonucleotide
  Target: LAMA2; (+) strand; PAM type: NRG; PAM sequence: TAG
accacatttcctggcaagca

SEQ ID NO: 171406 - DNA, 20 bp, Artificial Sequence
  Description of Artificial Sequence: Synthetic oligonucleotide
  Target: LAMA2; (+) strand; PAM type: NRG; PAM sequence: CAG
tttcctggcaagcatagcac

SEQ ID NO: 171407 - DNA, 20 bp, Artificial Sequence
  Description of Artificial Sequence: Synthetic oligonucleotide
  Target: LAMA2; (+) strand; PAM type: NRG; PAM sequence: AGG
ttcctggcaagcatagcacc

SEQ ID NO: 171408 - DNA, 20 bp, Artificial Sequence
  Description of Artificial Sequence: Synthetic oligonucleotide
  Target: LAMA2; (+) strand; PAM type: NRG; PAM sequence: TGG
caagcatagcaccaggcata

SEQ ID NO: 171409 - DNA, 20 bp, Artificial Sequence
  Description of Artificial Sequence: Synthetic oligonucleotide
  Target: LAMA2; (+) strand; PAM type: NRG; PAM sequence: CAG
catagcaccaggcatatggt

SEQ ID NO: 171410 - DNA, 20 bp, Artificial Sequence
  Description of Artificial Sequence: Synthetic oligonucleotide
  Target: LAMA2; (+) strand; PAM type: NRG; PAM sequence: GAG
accaggcatatggtcagttt

SEQ ID NO: 171411 - DNA, 20 bp, Artificial Sequence
  Description of Artificial Sequence: Synthetic oligonucleotide
  Target: LAMA2; (+) strand; PAM type: NRG; PAM sequence: TAG
atggtcagtttgagtgctat

SEQ ID NO: 171412 - DNA, 20 bp, Artificial Sequence
  Description of Artificial Sequence: Synthetic oligonucleotide
  Target: LAMA2; (+) strand; PAM type: NRG; PAM sequence: TAG
tcagtttgagtgctattaga

SEQ ID NO: 171413 - DNA, 20 bp, Artificial Sequence
  Description of Artificial Sequence: Synthetic oligonucleotide
  Target: LAMA2; (+) strand; PAM type: NRG; PAM sequence: AGG
cagtttgagtgctattagat

SEQ ID NO: 171414 - DNA, 20 bp, Artificial Sequence
  Description of Artificial Sequence: Synthetic oligonucleotide
  Target: LAMA2; (+) strand; PAM type: NRG; PAM sequence: TAG
gagtgctattagataggctt

SEQ ID NO: 171415 - DNA, 20 bp, Artificial Sequence
  Description of Artificial Sequence: Synthetic oligonucleotide
  Target: LAMA2; (+) strand; PAM type: NRG; PAM sequence: AAG
agataggctttagaacttcc

SEQ ID NO: 171416 - DNA, 20 bp, Artificial Sequence
  Description of Artificial Sequence: Synthetic oligonucleotide
  Target: LAMA2; (+) strand; PAM type: NRG; PAM sequence: AGG
gataggctttagaacttcca

SEQ ID NO: 171417 - DNA, 20 bp, Artificial Sequence
  Description of Artificial Sequence: Synthetic oligonucleotide
  Target: LAMA2; (+) strand; PAM type: NRG; PAM sequence: GGG
ataggctttagaacttccaa

SEQ ID NO: 171418 - DNA, 20 bp, Artificial Sequence
  Description of Artificial Sequence: Synthetic oligonucleotide
  Target: LAMA2; (+) strand; PAM type: NRG; PAM sequence: TGG
tagaacttccaagggatcat

SEQ ID NO: 171419 - DNA, 20 bp, Artificial Sequence
  Description of Artificial Sequence: Synthetic oligonucleotide
  Target: LAMA2; (+) strand; PAM type: NRG; PAM sequence: CAG
tatgacccacgacaatttgc

SEQ ID NO: 171420 - DNA, 20 bp, Artificial Sequence
  Description of Artificial Sequence: Synthetic oligonucleotide
  Target: LAMA2; (+) strand; PAM type: NRG; PAM sequence: TGG
aatttgccagacactatgct

SEQ ID NO: 171421 - DNA, 20 bp, Artificial Sequence
  Description of Artificial Sequence: Synthetic oligonucleotide
  Target: LAMA2; (+) strand; PAM type: NRG; PAM sequence: GAG
gacactatgcttggcactct

SEQ ID NO: 171422 - DNA, 20 bp, Artificial Sequence
  Description of Artificial Sequence: Synthetic oligonucleotide
  Target: LAMA2; (+) strand; PAM type: NRG; PAM sequence: AGG
acactatgcttggcactctg

SEQ ID NO: 171423 - DNA, 20 bp, Artificial Sequence
  Description of Artificial Sequence: Synthetic oligonucleotide
  Target: LAMA2; (+) strand; PAM type: NRG; PAM sequence: AAG
ttggcactctgaggaataaa

SEQ ID NO: 171424 - DNA, 20 bp, Artificial Sequence
  Description of Artificial Sequence: Synthetic oligonucleotide
  Target: LAMA2; (+) strand; PAM type: NRG; PAM sequence: GAG
ggcactctgaggaataaaaa

SEQ ID NO: 171425 - DNA, 20 bp, Artificial Sequence
  Description of Artificial Sequence: Synthetic oligonucleotide
  Target: LAMA2; (+) strand; PAM type: NRG; PAM sequence: AAG
ctctgaggaataaaaagagt

SEQ ID NO: 171426 - DNA, 20 bp, Artificial Sequence
  Description of Artificial Sequence: Synthetic oligonucleotide
  Target: LAMA2; (+) strand; PAM type: NRG; PAM sequence: CAG
gaggaataaaaagagtaaga

SEQ ID NO: 171427 - DNA, 20 bp, Artificial Sequence
  Description of Artificial Sequence: Synthetic oligonucleotide
  Target: LAMA2; (+) strand; PAM type: NRG; PAM sequence: TAG
aaaagagtaagacagatccc

SEQ ID NO: 171428 - DNA, 20 bp, Artificial Sequence
  Description of Artificial Sequence: Synthetic oligonucleotide
  Target: LAMA2; (+) strand; PAM type: NRG; PAM sequence: TGG
tttctaatctatctatctaa

SEQ ID NO: 171429 - DNA, 20 bp, Artificial Sequence
  Description of Artificial Sequence: Synthetic oligonucleotide
  Target: LAMA2; (+) strand; PAM type: NRG; PAM sequence: GAG
tctaatctatctatctaatg

SEQ ID NO: 171430 - DNA, 20 bp, Artificial Sequence
  Description of Artificial Sequence: Synthetic oligonucleotide
  Target: LAMA2; (+) strand; PAM type: NRG; PAM sequence: TGG
ctatctatctaatggagata

SEQ ID NO: 171431 - DNA, 20 bp, Artificial Sequence
  Description of Artificial Sequence: Synthetic oligonucleotide
  Target: LAMA2; (+) strand; PAM type: NRG; PAM sequence: AAG
tatctaatggagatatggca

SEQ ID NO: 171432 - DNA, 20 bp, Artificial Sequence
  Description of Artificial Sequence: Synthetic oligonucleotide
  Target: LAMA2; (+) strand; PAM type: NRG; PAM sequence: AAG
atatggcaaagcacctaaca

SEQ ID NO: 171433 - DNA, 20 bp, Artificial Sequence
  Description of Artificial Sequence: Synthetic oligonucleotide
  Target: LAMA2; (+) strand; PAM type: NRG; PAM sequence: TAG
ctaacaaagtcactacccat

SEQ ID NO: 171434 - DNA, 20 bp, Artificial Sequence
  Description of Artificial Sequence: Synthetic oligonucleotide
  Target: LAMA2; (+) strand; PAM type: NRG; PAM sequence: GAG
aacaaagtcactacccatta

SEQ ID NO: 171435 - DNA, 20 bp, Artificial Sequence
  Description of Artificial Sequence: Synthetic oligonucleotide
  Target: LAMA2; (+) strand; PAM type: NRG; PAM sequence: TAG
ctacccattagagttgtgaa

SEQ ID NO: 171436 - DNA, 20 bp, Artificial Sequence
  Description of Artificial Sequence: Synthetic oligonucleotide
  Target: LAMA2; (+) strand; PAM type: NRG; PAM sequence: TGG
cccattagagttgtgaatag

SEQ ID NO: 171437 - DNA, 20 bp, Artificial Sequence
  Description of Artificial Sequence: Synthetic oligonucleotide
  Target: LAMA2; (+) strand; PAM type: NRG; PAM sequence: AAG
ataattatttttgaaaatct

SEQ ID NO: 171438 - DNA, 20 bp, Artificial Sequence
  Description of Artificial Sequence: Synthetic oligonucleotide
  Target: LAMA2; (+) strand; PAM type: NRG; PAM sequence: AAG
tatttttgaaaatctaagaa

SEQ ID NO: 171439 - DNA, 20 bp, Artificial Sequence
  Description of Artificial Sequence: Synthetic oligonucleotide
  Target: LAMA2; (+) strand; PAM type: NRG; PAM sequence: GAG
tttttgaaaatctaagaaaa

SEQ ID NO: 171440 - DNA, 20 bp, Artificial Sequence
  Description of Artificial Sequence: Synthetic oligonucleotide
  Target: LAMA2; (+) strand; PAM type: NRG; PAM sequence: GAG
tttgaaaatctaagaaaaga

SEQ ID NO: 171441 - DNA, 20 bp, Artificial Sequence
  Description of Artificial Sequence: Synthetic oligonucleotide
  Target: LAMA2; (+) strand; PAM type: NRG; PAM sequence: TAG
taagaaaagagagcatgtgc

SEQ ID NO: 171442 - DNA, 20 bp, Artificial Sequence
  Description of Artificial Sequence: Synthetic oligonucleotide
  Target: LAMA2; (+) strand; PAM type: NRG; PAM sequence: TAG
aaagagagcatgtgctagaa

SEQ ID NO: 171443 - DNA, 20 bp, Artificial Sequence
  Description of Artificial Sequence: Synthetic oligonucleotide
  Target: LAMA2; (+) strand; PAM type: NRG; PAM sequence: AGG
aagagagcatgtgctagaat

SEQ ID NO: 171444 - DNA, 20 bp, Artificial Sequence
  Description of Artificial Sequence: Synthetic oligonucleotide
  Target: LAMA2; (+) strand; PAM type: NRG; PAM sequence: AAG
gagcatgtgctagaataggt

SEQ ID NO: 171445 - DNA, 20 bp, Artificial Sequence
  Description of Artificial Sequence: Synthetic oligonucleotide
  Target: LAMA2; (+) strand; PAM type: NRG; PAM sequence: AGG
agcatgtgctagaataggta

SEQ ID NO: 171446 - DNA, 20 bp, Artificial Sequence
  Description of Artificial Sequence: Synthetic oligonucleotide
  Target: LAMA2; (+) strand; PAM type: NRG; PAM sequence: GAG
catgtgctagaataggtaag

SEQ ID NO: 171447 - DNA, 20 bp, Artificial Sequence
  Description of Artificial Sequence: Synthetic oligonucleotide
  Target: LAMA2; (+) strand; PAM type: NRG; PAM sequence: AGG
atgtgctagaataggtaagg

SEQ ID NO: 171448 - DNA, 20 bp, Artificial Sequence
  Description of Artificial Sequence: Synthetic oligonucleotide
  Target: LAMA2; (+) strand; PAM type: NRG; PAM sequence: GGG
tgtgctagaataggtaagga

SEQ ID NO: 171449 - DNA, 20 bp, Artificial Sequence
  Description of Artificial Sequence: Synthetic oligonucleotide
  Target: LAMA2; (+) strand; PAM type: NRG; PAM sequence: GAG
taggtaaggagggcttcact

SEQ ID NO: 171450 - DNA, 20 bp, Artificial Sequence
  Description of Artificial Sequence: Synthetic oligonucleotide
  Target: LAMA2; (+) strand; PAM type: NRG; PAM sequence: AAG
gtaaggagggcttcactgag

SEQ ID NO: 171451 - DNA, 20 bp, Artificial Sequence
  Description of Artificial Sequence: Synthetic oligonucleotide
  Target: LAMA2; (+) strand; PAM type: NRG; PAM sequence: TGG
ggagggcttcactgagaaga

SEQ ID NO: 171452 - DNA, 20 bp, Artificial Sequence
  Description of Artificial Sequence: Synthetic oligonucleotide
  Target: LAMA2; (+) strand; PAM type: NRG; PAM sequence: GAG
agggcttcactgagaagatg

SEQ ID NO: 171453 - DNA, 20 bp, Artificial Sequence
  Description of Artificial Sequence: Synthetic oligonucleotide
  Target: LAMA2; (+) strand; PAM type: NRG; PAM sequence: TGG
cttcactgagaagatggagt

SEQ ID NO: 171454 - DNA, 20 bp, Artificial Sequence
  Description of Artificial Sequence: Synthetic oligonucleotide
  Target: LAMA2; (+) strand; PAM type: NRG; PAM sequence: AAG
gagttggaattgaatctcga

SEQ ID NO: 171455 - DNA, 20 bp, Artificial Sequence
  Description of Artificial Sequence: Synthetic oligonucleotide
  Target: LAMA2; (+) strand; PAM type: NRG; PAM sequence: TGG
tggaattgaatctcgaaagc

SEQ ID NO: 171456 - DNA, 20 bp, Artificial Sequence
  Description of Artificial Sequence: Synthetic oligonucleotide
  Target: LAMA2; (+) strand; PAM type: NRG; PAM sequence: TGG
ctcgaaagctggatttgttt

SEQ ID NO: 171457 - DNA, 20 bp, Artificial Sequence
  Description of Artificial Sequence: Synthetic oligonucleotide
  Target: LAMA2; (+) strand; PAM type: NRG; PAM sequence: AAG
aagctggatttgttttggat

SEQ ID NO: 171458 - DNA, 20 bp, Artificial Sequence
  Description of Artificial Sequence: Synthetic oligonucleotide
  Target: LAMA2; (+) strand; PAM type: NRG; PAM sequence: TAG
ctggatttgttttggataag

SEQ ID NO: 171459 - DNA, 20 bp, Artificial Sequence
  Description of Artificial Sequence: Synthetic oligonucleotide
  Target: LAMA2; (+) strand; PAM type: NRG; PAM sequence: GAG
ggatttgttttggataagta

SEQ ID NO: 171460 - DNA, 20 bp, Artificial Sequence
  Description of Artificial Sequence: Synthetic oligonucleotide
  Target: LAMA2; (+) strand; PAM type: NRG; PAM sequence: AAG
tttgttttggataagtagag

SEQ ID NO: 171461 - DNA, 20 bp, Artificial Sequence
  Description of Artificial Sequence: Synthetic oligonucleotide
  Target: LAMA2; (+) strand; PAM type: NRG; PAM sequence: GAG
tgttttggataagtagagaa

SEQ ID NO: 171462 - DNA, 20 bp, Artificial Sequence
  Description of Artificial Sequence: Synthetic oligonucleotide
  Target: LAMA2; (+) strand; PAM type: NRG; PAM sequence: AAG
tggataagtagagaagagtt

SEQ ID NO: 171463 - DNA, 20 bp, Artificial Sequence
  Description of Artificial Sequence: Synthetic oligonucleotide
  Target: LAMA2; (+) strand; PAM type: NRG; PAM sequence: AAG
ataagtagagaagagttaag

SEQ ID NO: 171464 - DNA, 20 bp, Artificial Sequence
  Description of Artificial Sequence: Synthetic oligonucleotide
  Target: LAMA2; (+) strand; PAM type: NRG; PAM sequence: AAG
agagaagagttaagaagcaa

SEQ ID NO: 171465 - DNA, 20 bp, Artificial Sequence
  Description of Artificial Sequence: Synthetic oligonucleotide
  Target: LAMA2; (+) strand; PAM type: NRG; PAM sequence: GAG
tatgaacaaaatcttttttt

SEQ ID NO: 171466 - DNA, 20 bp, Artificial Sequence
  Description of Artificial Sequence: Synthetic oligonucleotide
  Target: LAMA2; (+) strand; PAM type: NRG; PAM sequence: AAG
tttttttgagaatgttccaa

SEQ ID NO: 171467 - DNA, 20 bp, Artificial Sequence
  Description of Artificial Sequence: Synthetic oligonucleotide
  Target: LAMA2; (+) strand; PAM type: NRG; PAM sequence: AGG
ttttttgagaatgttccaaa

SEQ ID NO: 171468 - DNA, 20 bp, Artificial Sequence
  Description of Artificial Sequence: Synthetic oligonucleotide
  Target: LAMA2; (+) strand; PAM type: NRG; PAM sequence: AAG
tttgagaatgttccaaaagg

SEQ ID NO: 171469 - DNA, 20 bp, Artificial Sequence
  Description of Artificial Sequence: Synthetic oligonucleotide
  Target: LAMA2; (+) strand; PAM type: NRG; PAM sequence: TAG
gagaatgttccaaaaggaag

SEQ ID NO: 171470 - DNA, 20 bp, Artificial Sequence
  Description of Artificial Sequence: Synthetic oligonucleotide
  Target: LAMA2; (+) strand; PAM type: NRG; PAM sequence: AGG
agaatgttccaaaaggaagt

SEQ ID NO: 171471 - DNA, 20 bp, Artificial Sequence
  Description of Artificial Sequence: Synthetic oligonucleotide
  Target: LAMA2; (+) strand; PAM type: NRG; PAM sequence: AAG
tgttccaaaaggaagtaggc

SEQ ID NO: 171472 - DNA, 20 bp, Artificial Sequence
  Description of Artificial Sequence: Synthetic oligonucleotide
  Target: LAMA2; (+) strand; PAM type: NRG; PAM sequence: AAG
tccaaaaggaagtaggcaag

SEQ ID NO: 171473 - DNA, 20 bp, Artificial Sequence
  Description of Artificial Sequence: Synthetic oligonucleotide
  Target: LAMA2; (+) strand; PAM type: NRG; PAM sequence: TGG
aaggaagtaggcaagaagaa

SEQ ID NO: 171474 - DNA, 20 bp, Artificial Sequence
  Description of Artificial Sequence: Synthetic oligonucleotide
  Target: LAMA2; (+) strand; PAM type: NRG; PAM sequence: AAG
taggcaagaagaatggtaat

SEQ ID NO: 171475 - DNA, 20 bp, Artificial Sequence
  Description of Artificial Sequence: Synthetic oligonucleotide
  Target: LAMA2; (+) strand; PAM type: NRG; PAM sequence: AGG
aggcaagaagaatggtaata

SEQ ID NO: 171476 - DNA, 20 bp, Artificial Sequence
  Description of Artificial Sequence: Synthetic oligonucleotide
  Target: LAMA2; (+) strand; PAM type: NRG; PAM sequence: TGG
aagaagaatggtaataaggt

SEQ ID NO: 171477 - DNA, 20 bp, Artificial Sequence
  Description of Artificial Sequence: Synthetic oligonucleotide
  Target: LAMA2; (+) strand; PAM type: NRG; PAM sequence: AAG
agaatggtaataaggttggc

SEQ ID NO: 171478 - DNA, 20 bp, Artificial Sequence
  Description of Artificial Sequence: Synthetic oligonucleotide
  Target: LAMA2; (+) strand; PAM type: NRG; PAM sequence: TGG
ggtaataaggttggcaagat

SEQ ID NO: 171479 - DNA, 20 bp, Artificial Sequence
  Description of Artificial Sequence: Synthetic oligonucleotide
  Target: LAMA2; (+) strand; PAM type: NRG; PAM sequence: TAG
ataaggttggcaagattggt

SEQ ID NO: 171480 - DNA, 20 bp, Artificial Sequence
  Description of Artificial Sequence: Synthetic oligonucleotide
  Target: LAMA2; (+) strand; PAM type: NRG; PAM sequence: AGG
taaggttggcaagattggtt

SEQ ID NO: 171481 - DNA, 20 bp, Artificial Sequence
  Description of Artificial Sequence: Synthetic oligonucleotide
  Target: LAMA2; (+) strand; PAM type: NRG; PAM sequence: TAG
tggttaggaaaattgttttt

SEQ ID NO: 171482 - DNA, 20 bp, Artificial Sequence
  Description of Artificial Sequence: Synthetic oligonucleotide
  Target: LAMA2; (+) strand; PAM type: NRG; PAM sequence: TAG
agtcctgtatataacaactt

SEQ ID NO: 171483 - DNA, 20 bp, Artificial Sequence
  Description of Artificial Sequence: Synthetic oligonucleotide
  Target: LAMA2; (+) strand; PAM type: NRG; PAM sequence: GAG
tcctgtatataacaacttta

SEQ ID NO: 171484 - DNA, 20 bp, Artificial Sequence
  Description of Artificial Sequence: Synthetic oligonucleotide
  Target: LAMA2; (+) strand; PAM type: NRG; PAM sequence: AAG
ctttagagaatatttactat

SEQ ID NO: 171485 - DNA, 20 bp, Artificial Sequence
  Description of Artificial Sequence: Synthetic oligonucleotide
  Target: LAMA2; (+) strand; PAM type: NRG; PAM sequence: TAG
agagaatatttactataagt

SEQ ID NO: 171486 - DNA, 20 bp, Artificial Sequence
  Description of Artificial Sequence: Synthetic oligonucleotide
  Target: LAMA2; (+) strand; PAM type: NRG; PAM sequence: AGG
gagaatatttactataagtt

SEQ ID NO: 171487 - DNA, 20 bp, Artificial Sequence
  Description of Artificial Sequence: Synthetic oligonucleotide
  Target: LAMA2; (+) strand; PAM type: NRG; PAM sequence: TAG
ctataagttaggcatcatac

SEQ ID NO: 171488 - DNA, 20 bp, Artificial Sequence
  Description of Artificial Sequence: Synthetic oligonucleotide
  Target: LAMA2; (+) strand; PAM type: NRG; PAM sequence: AGG
tataagttaggcatcatact

SEQ ID NO: 171489 - DNA, 20 bp, Artificial Sequence
  Description of Artificial Sequence: Synthetic oligonucleotide
  Target: LAMA2; (+) strand; PAM type: NRG; PAM sequence: GAG
taagttaggcatcatactag

SEQ ID NO: 171490 - DNA, 20 bp, Artificial Sequence
  Description of Artificial Sequence: Synthetic oligonucleotide
  Target: LAMA2; (+) strand; PAM type: NRG; PAM sequence: TGG
ttaggcatcatactaggagc

SEQ ID NO: 171491 - DNA, 20 bp, Artificial Sequence
  Description of Artificial Sequence: Synthetic oligonucleotide
  Target: LAMA2; (+) strand; PAM type: NRG; PAM sequence: CAG
tggatatatgataaacaaaa

SEQ ID NO: 171492 - DNA, 20 bp, Artificial Sequence
  Description of Artificial Sequence: Synthetic oligonucleotide
  Target: LAMA2; (+) strand; PAM type: NRG; PAM sequence: AAG
tatgataaacaaaacagacc

SEQ ID NO: 171493 - DNA, 20 bp, Artificial Sequence
  Description of Artificial Sequence: Synthetic oligonucleotide
  Target: LAMA2; (+) strand; PAM type: NRG; PAM sequence: TAG
agaccaagttctcaccccct

SEQ ID NO: 171494 - DNA, 20 bp, Artificial Sequence
  Description of Artificial Sequence: Synthetic oligonucleotide
  Target: LAMA2; (+) strand; PAM type: NRG; PAM sequence: GAG
accaagttctcaccccctta

SEQ ID NO: 171495 - DNA, 20 bp, Artificial Sequence
  Description of Artificial Sequence: Synthetic oligonucleotide
  Target: LAMA2; (+) strand; PAM type: NRG; PAM sequence: CAG
cccccttagagcttacctta

SEQ ID NO: 171496 - DNA, 20 bp, Artificial Sequence
  Description of Artificial Sequence: Synthetic oligonucleotide
  Target: LAMA2; (+) strand; PAM type: NRG; PAM sequence: TGG
cttagagcttaccttacagt

SEQ ID NO: 171497 - DNA, 20 bp, Artificial Sequence
  Description of Artificial Sequence: Synthetic oligonucleotide
  Target: LAMA2; (+) strand; PAM type: NRG; PAM sequence: GAG
tagagcttaccttacagttg

SEQ ID NO: 171498 - DNA, 20 bp, Artificial Sequence
  Description of Artificial Sequence: Synthetic oligonucleotide
  Target: LAMA2; (+) strand; PAM type: NRG; PAM sequence: GAG
gagcttaccttacagttgga

SEQ ID NO: 171499 - DNA, 20 bp, Artificial Sequence
  Description of Artificial Sequence: Synthetic oligonucleotide
  Target: LAMA2; (+) strand; PAM type: NRG; PAM sequence: AGG
agcttaccttacagttggag

SEQ ID NO: 171500 - DNA, 20 bp, Artificial Sequence
  Description of Artificial Sequence: Synthetic oligonucleotide
  Target: LAMA2; (+) strand; PAM type: NRG; PAM sequence: TAG
ttggagaggttgtcaataaa

SEQ ID NO: 171501 - DNA, 20 bp, Artificial Sequence
  Description of Artificial Sequence: Synthetic oligonucleotide
  Target: LAMA2; (+) strand; PAM type: NRG; PAM sequence: AGG
tggagaggttgtcaataaat

SEQ ID NO: 171502 - DNA, 20 bp, Artificial Sequence
  Description of Artificial Sequence: Synthetic oligonucleotide
  Target: LAMA2; (+) strand; PAM type: NRG; PAM sequence: GAG
gaggttgtcaataaataggt

SEQ ID NO: 171503 - DNA, 20 bp, Artificial Sequence
  Description of Artificial Sequence: Synthetic oligonucleotide
  Target: LAMA2; (+) strand; PAM type: NRG; PAM sequence: AAG
aaataggtgagccaattact

SEQ ID NO: 171504 - DNA, 20 bp, Artificial Sequence
  Description of Artificial Sequence: Synthetic oligonucleotide
  Target: LAMA2; (+) strand; PAM type: NRG; PAM sequence: TGG
ctaagtaattctcaaatcca

SEQ ID NO: 171505 - DNA, 20 bp, Artificial Sequence
  Description of Artificial Sequence: Synthetic oligonucleotide
  Target: LAMA2; (+) strand; PAM type: NRG; PAM sequence: AAG
ctcaaatccatggtgctatg

SEQ ID NO: 171506 - DNA, 20 bp, Artificial Sequence
  Description of Artificial Sequence: Synthetic oligonucleotide
  Target: LAMA2; (+) strand; PAM type: NRG; PAM sequence: AGG
tcaaatccatggtgctatga

SEQ ID NO: 171507 - DNA, 20 bp, Artificial Sequence
  Description of Artificial Sequence: Synthetic oligonucleotide
  Target: LAMA2; (+) strand; PAM type: NRG; PAM sequence: CAG
atgaaggaaacgtcctgctg

SEQ ID NO: 171508 - DNA, 20 bp, Artificial Sequence
  Description of Artificial Sequence: Synthetic oligonucleotide
  Target: LAMA2; (+) strand; PAM type: NRG; PAM sequence: AGG
tgaaggaaacgtcctgctgc

SEQ ID NO: 171509 - DNA, 20 bp, Artificial Sequence
  Description of Artificial Sequence: Synthetic oligonucleotide
  Target: LAMA2; (+) strand; PAM type: NRG; PAM sequence: AAG
aggaaacgtcctgctgcagg

SEQ ID NO: 171510 - DNA, 20 bp, Artificial Sequence
  Description of Artificial Sequence: Synthetic oligonucleotide
  Target: LAMA2; (+) strand; PAM type: NRG; PAM sequence: TGG
acgtcctgctgcaggaagtg

SEQ ID NO: 171511 - DNA, 20 bp, Artificial Sequence
  Description of Artificial Sequence: Synthetic oligonucleotide
  Target: LAMA2; (+) strand; PAM type: NRG; PAM sequence: TAG
ctgcaggaagtgtggaaacc

SEQ ID NO: 171512 - DNA, 20 bp, Artificial Sequence
  Description of Artificial Sequence: Synthetic oligonucleotide
  Target: LAMA2; (+) strand; PAM type: NRG; PAM sequence: AGG
tgcaggaagtgtggaaacct

SEQ ID NO: 171513 - DNA, 20 bp, Artificial Sequence
  Description of Artificial Sequence: Synthetic oligonucleotide
  Target: LAMA2; (+) strand; PAM type: NRG; PAM sequence: TAG
aggaagtgtggaaacctagg

SEQ ID NO: 171514 - DNA, 20 bp, Artificial Sequence
  Description of Artificial Sequence: Synthetic oligonucleotide
  Target: LAMA2; (+) strand; PAM type: NRG; PAM sequence: TGG
tggaaacctaggtagcaccc

SEQ ID NO: 171515 - DNA, 20 bp, Artificial Sequence
  Description of Artificial Sequence: Synthetic oligonucleotide
  Target: LAMA2; (+) strand; PAM type: NRG; PAM sequence: GGG
ggaaacctaggtagcaccct

SEQ ID NO: 171516 - DNA, 20 bp, Artificial Sequence
  Description of Artificial Sequence: Synthetic oligonucleotide
  Target: LAMA2; (+) strand; PAM type: NRG; PAM sequence: TGG
cctaggtagcaccctgggaa

SEQ ID NO: 171517 - DNA, 20 bp, Artificial Sequence
  Description of Artificial Sequence: Synthetic oligonucleotide
  Target: LAMA2; (+) strand; PAM type: NRG; PAM sequence: AAG
accctgggaatggccacgct

SEQ ID NO: 171518 - DNA, 20 bp, Artificial Sequence
  Description of Artificial Sequence: Synthetic oligonucleotide
  Target: LAMA2; (+) strand; PAM type: NRG; PAM sequence: AGG
ccctgggaatggccacgcta

SEQ ID NO: 171519 - DNA, 20 bp, Artificial Sequence
  Description of Artificial Sequence: Synthetic oligonucleotide
  Target: LAMA2; (+) strand; PAM type: NRG; PAM sequence: GAG
ctgggaatggccacgctaag

SEQ ID NO: 171520 - DNA, 20 bp, Artificial Sequence
  Description of Artificial Sequence: Synthetic oligonucleotide
  Target: LAMA2; (+) strand; PAM type: NRG; PAM sequence: AAG
ggaatggccacgctaaggag

SEQ ID NO: 171521 - DNA, 20 bp, Artificial Sequence
  Description of Artificial Sequence: Synthetic oligonucleotide
  Target: LAMA2; (+) strand; PAM type: NRG; PAM sequence: AAG
aggagaagcacttaaactga

SEQ ID NO: 171522 - DNA, 20 bp, Artificial Sequence
  Description of Artificial Sequence: Synthetic oligonucleotide
  Target: LAMA2; (+) strand; PAM type: NRG; PAM sequence: TGG
gcacttaaactgaaagctga

SEQ ID NO: 171523 - DNA, 20 bp, Artificial Sequence
  Description of Artificial Sequence: Synthetic oligonucleotide
  Target: LAMA2; (+) strand; PAM type: NRG; PAM sequence: GGG
cacttaaactgaaagctgat

SEQ ID NO: 171524 - DNA, 20 bp, Artificial Sequence
  Description of Artificial Sequence: Synthetic oligonucleotide
  Target: LAMA2; (+) strand; PAM type: NRG; PAM sequence: AAG
actgaaagctgatgggtaac

SEQ ID NO: 171525 - DNA, 20 bp, Artificial Sequence
  Description of Artificial Sequence: Synthetic oligonucleotide
  Target: LAMA2; (+) strand; PAM type: NRG; PAM sequence: AGG
ctgaaagctgatgggtaaca

SEQ ID NO: 171526 - DNA, 20 bp, Artificial Sequence
  Description of Artificial Sequence: Synthetic oligonucleotide
  Target: LAMA2; (+) strand; PAM type: NRG; PAM sequence: CAG
gctgatgggtaacaaggacc

SEQ ID NO: 171527 - DNA, 20 bp, Artificial Sequence
  Description of Artificial Sequence: Synthetic oligonucleotide
  Target: LAMA2; (+) strand; PAM type: NRG; PAM sequence: CAG
taacaaggacccagtcttta

SEQ ID NO: 171528 - DNA, 20 bp, Artificial Sequence
  Description of Artificial Sequence: Synthetic oligonucleotide
  Target: LAMA2; (+) strand; PAM type: NRG; PAM sequence: AGG
aacaaggacccagtctttac

SEQ ID NO: 171529 - DNA, 20 bp, Artificial Sequence
  Description of Artificial Sequence: Synthetic oligonucleotide
  Target: LAMA2; (+) strand; PAM type: NRG; PAM sequence: GAG
acccagtctttacaggtgtt

SEQ ID NO: 171530 - DNA, 20 bp, Artificial Sequence
  Description of Artificial Sequence: Synthetic oligonucleotide
  Target: LAMA2; (+) strand; PAM type: NRG; PAM sequence: AGG
cccagtctttacaggtgttg

SEQ ID NO: 171531 - DNA, 20 bp, Artificial Sequence
  Description of Artificial Sequence: Synthetic oligonucleotide
  Target: LAMA2; (+) strand; PAM type: NRG; PAM sequence: GAG
cagtctttacaggtgttgag

SEQ ID NO: 171532 - DNA, 20 bp, Artificial Sequence
  Description of Artificial Sequence: Synthetic oligonucleotide
  Target: LAMA2; (+) strand; PAM type: NRG; PAM sequence: AAG
tctttacaggtgttgaggag

SEQ ID NO: 171533 - DNA, 20 bp, Artificial Sequence
  Description of Artificial Sequence: Synthetic oligonucleotide
  Target: LAMA2; (+) strand; PAM type: NRG; PAM sequence: TAG
tgttgaggagaagctcattc

SEQ ID NO: 171534 - DNA, 20 bp, Artificial Sequence
  Description of Artificial Sequence: Synthetic oligonucleotide
  Target: LAMA2; (+) strand; PAM type: NRG; PAM sequence: AGG
gttgaggagaagctcattct

SEQ ID NO: 171535 - DNA, 20 bp, Artificial Sequence
  Description of Artificial Sequence: Synthetic oligonucleotide
  Target: LAMA2; (+) strand; PAM type: NRG; PAM sequence: AAG
ggagaagctcattctaggta

SEQ ID NO: 171536 - DNA, 20 bp, Artificial Sequence
  Description of Artificial Sequence: Synthetic oligonucleotide
  Target: LAMA2; (+) strand; PAM type: NRG; PAM sequence: TGG
ctcattctaggtaaagacaa

SEQ ID NO: 171537 - DNA, 20 bp, Artificial Sequence
  Description of Artificial Sequence: Synthetic oligonucleotide
  Target: LAMA2; (+) strand; PAM type: NRG; PAM sequence: GGG
tcattctaggtaaagacaat

SEQ ID NO: 171538 - DNA, 20 bp, Artificial Sequence
  Description of Artificial Sequence: Synthetic oligonucleotide
  Target: LAMA2; (+) strand; PAM type: NRG; PAM sequence: AAG
aggtaaagacaatgggatac

SEQ ID NO: 171539 - DNA, 20 bp, Artificial Sequence
  Description of Artificial Sequence: Synthetic oligonucleotide
  Target: LAMA2; (+) strand; PAM type: NRG; PAM sequence: AAG
taaagacaatgggatacaag

SEQ ID NO: 171540 - DNA, 20 bp, Artificial Sequence
  Description of Artificial Sequence: Synthetic oligonucleotide
  Target: LAMA2; (+) strand; PAM type: NRG; PAM sequence: AGG
aaagacaatgggatacaaga

SEQ ID NO: 171541 - DNA, 20 bp, Artificial Sequence
  Description of Artificial Sequence: Synthetic oligonucleotide
  Target: LAMA2; (+) strand; PAM type: NRG; PAM sequence: AAG
atgggatacaagaaggtgct

SEQ ID NO: 171542 - DNA, 20 bp, Artificial Sequence
  Description of Artificial Sequence: Synthetic oligonucleotide
  Target: LAMA2; (+) strand; PAM type: NRG; PAM sequence: AAG
ggatacaagaaggtgctaag

SEQ ID NO: 171543 - DNA, 20 bp, Artificial Sequence
  Description of Artificial Sequence: Synthetic oligonucleotide
  Target: LAMA2; (+) strand; PAM type: NRG; PAM sequence: AGG
gatacaagaaggtgctaaga

SEQ ID NO: 171544 - DNA, 20 bp, Artificial Sequence
  Description of Artificial Sequence: Synthetic oligonucleotide
  Target: LAMA2; (+) strand; PAM type: NRG; PAM sequence: GGG
atacaagaaggtgctaagaa

SEQ ID NO: 171545 - DNA, 20 bp, Artificial Sequence
  Description of Artificial Sequence: Synthetic oligonucleotide
  Target: LAMA2; (+) strand; PAM type: NRG; PAM sequence: GAG
agaaggtgctaagaagggat

SEQ ID NO: 171546 - DNA, 20 bp, Artificial Sequence
  Description of Artificial Sequence: Synthetic oligonucleotide
  Target: LAMA2; (+) strand; PAM type: NRG; PAM sequence: CAG
ttaatatactaaaactatgc

SEQ ID NO: 171547 - DNA, 20 bp, Artificial Sequence
  Description of Artificial Sequence: Synthetic oligonucleotide
  Target: LAMA2; (+) strand; PAM type: NRG; PAM sequence: AGG
taatatactaaaactatgcc

SEQ ID NO: 171548 - DNA, 20 bp, Artificial Sequence
  Description of Artificial Sequence: Synthetic oligonucleotide
  Target: LAMA2; (+) strand; PAM type: NRG; PAM sequence: GGG
aatatactaaaactatgcca

SEQ ID NO: 171549 - DNA, 20 bp, Artificial Sequence
  Description of Artificial Sequence: Synthetic oligonucleotide
  Target: LAMA2; (+) strand; PAM type: NRG; PAM sequence: GAG
tatactaaaactatgccagg

SEQ ID NO: 171550 - DNA, 20 bp, Artificial Sequence
  Description of Artificial Sequence: Synthetic oligonucleotide
  Target: LAMA2; (+) strand; PAM type: NRG; PAM sequence: AGG
atactaaaactatgccaggg

SEQ ID NO: 171551 - DNA, 20 bp, Artificial Sequence
  Description of Artificial Sequence: Synthetic oligonucleotide
  Target: LAMA2; (+) strand; PAM type: NRG; PAM sequence: TAG
tgccagggaggttgattgca

SEQ ID NO: 171552 - DNA, 20 bp, Artificial Sequence
  Description of Artificial Sequence: Synthetic oligonucleotide
  Target: LAMA2; (+) strand; PAM type: NRG; PAM sequence: AGG
gccagggaggttgattgcat

SEQ ID NO: 171553 - DNA, 20 bp, Artificial Sequence
  Description of Artificial Sequence: Synthetic oligonucleotide
  Target: LAMA2; (+) strand; PAM type: NRG; PAM sequence: GGG
ccagggaggttgattgcata

SEQ ID NO: 171554 - DNA, 20 bp, Artificial Sequence
  Description of Artificial Sequence: Synthetic oligonucleotide
  Target: LAMA2; (+) strand; PAM type: NRG; PAM sequence: TAG
aggttgattgcatagggtct

SEQ ID NO: 171555 - DNA, 20 bp, Artificial Sequence
  Description of Artificial Sequence: Synthetic oligonucleotide
  Target: LAMA2; (+) strand; PAM type: NRG; PAM sequence: TGG
ttttaacttctttcttatca

SEQ ID NO: 171556 - DNA, 20 bp, Artificial Sequence
  Description of Artificial Sequence: Synthetic oligonucleotide
  Target: LAMA2; (+) strand; PAM type: NRG; PAM sequence: GAG
ttaacttctttcttatcatg

SEQ ID NO: 171557 - DNA, 20 bp, Artificial Sequence
  Description of Artificial Sequence: Synthetic oligonucleotide
  Target: LAMA2; (+) strand; PAM type: NRG; PAM sequence: TAG
ctttcttatcatggagtttg

SEQ ID NO: 171558 - DNA, 20 bp, Artificial Sequence
  Description of Artificial Sequence: Synthetic oligonucleotide
  Target: LAMA2; (+) strand; PAM type: NRG; PAM sequence: AGG
tttcttatcatggagtttgt

SEQ ID NO: 171559 - DNA, 20 bp, Artificial Sequence
  Description of Artificial Sequence: Synthetic oligonucleotide
  Target: LAMA2; (+) strand; PAM type: NRG; PAM sequence: TAG
ttgtaggattcttgacaatt

SEQ ID NO: 171560 - DNA, 20 bp, Artificial Sequence
  Description of Artificial Sequence: Synthetic oligonucleotide
  Target: LAMA2; (+) strand; PAM type: NRG; PAM sequence: AAG
ttcttgacaatttagtattg

SEQ ID NO: 171561 - DNA, 20 bp, Artificial Sequence
  Description of Artificial Sequence: Synthetic oligonucleotide
  Target: LAMA2; (+) strand; PAM type: NRG; PAM sequence: AAG
gtaatcatataatcaatact

SEQ ID NO: 171562 - DNA, 20 bp, Artificial Sequence
  Description of Artificial Sequence: Synthetic oligonucleotide
  Target: LAMA2; (+) strand; PAM type: NRG; PAM sequence: CAG
aaatgaaataacctgtacaa

SEQ ID NO: 171563 - DNA, 20 bp, Artificial Sequence
  Description of Artificial Sequence: Synthetic oligonucleotide
  Target: LAMA2; (+) strand; PAM type: NRG; PAM sequence: AAG
taacctgtacaacagatcat

SEQ ID NO: 171564 - DNA, 20 bp, Artificial Sequence
  Description of Artificial Sequence: Synthetic oligonucleotide
  Target: LAMA2; (+) strand; PAM type: NRG; PAM sequence: CAG
ctgtacaacagatcataagc

SEQ ID NO: 171565 - DNA, 20 bp, Artificial Sequence
  Description of Artificial Sequence: Synthetic oligonucleotide
  Target: LAMA2; (+) strand; PAM type: NRG; PAM sequence: GAG
gtacaacagatcataagcca

SEQ ID NO: 171566 - DNA, 20 bp, Artificial Sequence
  Description of Artificial Sequence: Synthetic oligonucleotide
  Target: LAMA2; (+) strand; PAM type: NRG; PAM sequence: AGG
tacaacagatcataagccag

SEQ ID NO: 171567 - DNA, 20 bp, Artificial Sequence
  Description of Artificial Sequence: Synthetic oligonucleotide
  Target: LAMA2; (+) strand; PAM type: NRG; PAM sequence: AAG
aacagatcataagccagagg

SEQ ID NO: 171568 - DNA, 20 bp, Artificial Sequence
  Description of Artificial Sequence: Synthetic oligonucleotide
  Target: LAMA2; (+) strand; PAM type: NRG; PAM sequence: AAG
atcataagccagaggaagtt

SEQ ID NO: 171569 - DNA, 20 bp, Artificial Sequence
  Description of Artificial Sequence: Synthetic oligonucleotide
  Target: LAMA2; (+) strand; PAM type: NRG; PAM sequence: CAG
tgaatatgatcttgatcatc

SEQ ID NO: 171570 - DNA, 20 bp, Artificial Sequence
  Description of Artificial Sequence: Synthetic oligonucleotide
  Target: LAMA2; (+) strand; PAM type: NRG; PAM sequence: AAG
cttgatcatccagaatttaa

SEQ ID NO: 171571 - DNA, 20 bp, Artificial Sequence
  Description of Artificial Sequence: Synthetic oligonucleotide
  Target: LAMA2; (+) strand; PAM type: NRG; PAM sequence: GAG
tgatcatccagaatttaaaa

SEQ ID NO: 171572 - DNA, 20 bp, Artificial Sequence
  Description of Artificial Sequence: Synthetic oligonucleotide
  Target: LAMA2; (+) strand; PAM type: NRG; PAM sequence: CAG
catccagaatttaaaagaga

SEQ ID NO: 171573 - DNA, 20 bp, Artificial Sequence
  Description of Artificial Sequence: Synthetic oligonucleotide
  Target: LAMA2; (+) strand; PAM type: NRG; PAM sequence: TAG
tacatttactttttaaaatt

SEQ ID NO: 171574 - DNA, 20 bp, Artificial Sequence
  Description of Artificial Sequence: Synthetic oligonucleotide
  Target: LAMA2; (+) strand; PAM type: NRG; PAM sequence: GAG
ttttaaaatttagacacttt

SEQ ID NO: 171575 - DNA, 20 bp, Artificial Sequence
  Description of Artificial Sequence: Synthetic oligonucleotide
  Target: LAMA2; (+) strand; PAM type: NRG; PAM sequence: AAG
agacactttgagttataaat

SEQ ID NO: 171576 - DNA, 20 bp, Artificial Sequence
  Description of Artificial Sequence: Synthetic oligonucleotide
  Target: LAMA2; (+) strand; PAM type: NRG; PAM sequence: TGG
tttgagttataaataagaat

SEQ ID NO: 171577 - DNA, 20 bp, Artificial Sequence
  Description of Artificial Sequence: Synthetic oligonucleotide
  Target: LAMA2; (+) strand; PAM type: NRG; PAM sequence: TGG
taaataagaattggtccact

SEQ ID NO: 171578 - DNA, 20 bp, Artificial Sequence
  Description of Artificial Sequence: Synthetic oligonucleotide
  Target: LAMA2; (+) strand; PAM type: NRG; PAM sequence: TGG
ggtgtgaaattatgatcttt

SEQ ID NO: 171579 - DNA, 20 bp, Artificial Sequence
  Description of Artificial Sequence: Synthetic oligonucleotide
  Target: LAMA2; (+) strand; PAM type: NRG; PAM sequence: CAG
attatgatcttttggtaata

SEQ ID NO: 171580 - DNA, 20 bp, Artificial Sequence
  Description of Artificial Sequence: Synthetic oligonucleotide
  Target: LAMA2; (+) strand; PAM type: NRG; PAM sequence: AAG
atacagaaaatatattgatg

SEQ ID NO: 171581 - DNA, 20 bp, Artificial Sequence
  Description of Artificial Sequence: Synthetic oligonucleotide
  Target: LAMA2; (+) strand; PAM type: NRG; PAM sequence: AAG
aaaatatattgatgaagaaa

SEQ ID NO: 171582 - DNA, 20 bp, Artificial Sequence
  Description of Artificial Sequence: Synthetic oligonucleotide
  Target: LAMA2; (+) strand; PAM type: NRG; PAM sequence: AAG
gaagaaaaagaatatatttt

SEQ ID NO: 171583 - DNA, 20 bp, Artificial Sequence
  Description of Artificial Sequence: Synthetic oligonucleotide
  Target: LAMA2; (+) strand; PAM type: NRG; PAM sequence: AAG
atgtacattttctgtaccat

SEQ ID NO: 171584 - DNA, 20 bp, Artificial Sequence
  Description of Artificial Sequence: Synthetic oligonucleotide
  Target: LAMA2; (+) strand; PAM type: NRG; PAM sequence: GAG
gtacattttctgtaccataa

SEQ ID NO: 171585 - DNA, 20 bp, Artificial Sequence
  Description of Artificial Sequence: Synthetic oligonucleotide
  Target: LAMA2; (+) strand; PAM type: NRG; PAM sequence: TAG
ttctgtaccataagagacac

SEQ ID NO: 171586 - DNA, 20 bp, Artificial Sequence
  Description of Artificial Sequence: Synthetic oligonucleotide
  Target: LAMA2; (+) strand; PAM type: NRG; PAM sequence: TGG
tgtaccataagagacactag

SEQ ID NO: 171587 - DNA, 20 bp, Artificial Sequence
  Description of Artificial Sequence: Synthetic oligonucleotide
  Target: LAMA2; (+) strand; PAM type: NRG; PAM sequence: AAG
gtattgatacattaatccgt

SEQ ID NO: 171588 - DNA, 20 bp, Artificial Sequence
  Description of Artificial Sequence: Synthetic oligonucleotide
  Target: LAMA2; (+) strand; PAM type: NRG; PAM sequence: AGG
tattgatacattaatccgta

SEQ ID NO: 171589 - DNA, 20 bp, Artificial Sequence
  Description of Artificial Sequence: Synthetic oligonucleotide
  Target: LAMA2; (+) strand; PAM type: NRG; PAM sequence: AAG
gatacattaatccgtaaggt

SEQ ID NO: 171590 - DNA, 20 bp, Artificial Sequence
  Description of Artificial Sequence: Synthetic oligonucleotide
  Target: LAMA2; (+) strand; PAM type: NRG; PAM sequence: TGG
taatccgtaaggtaagatat

SEQ ID NO: 171591 - DNA, 20 bp, Artificial Sequence
  Description of Artificial Sequence: Synthetic oligonucleotide
  Target: LAMA2; (+) strand; PAM type: NRG; PAM sequence: AAG
tccgtaaggtaagatattgg

SEQ ID NO: 171592 - DNA, 20 bp, Artificial Sequence
  Description of Artificial Sequence: Synthetic oligonucleotide
  Target: LAMA2; (+) strand; PAM type: NRG; PAM sequence: TAG
attggaagatgaccaaaata

SEQ ID NO: 171593 - DNA, 20 bp, Artificial Sequence
  Description of Artificial Sequence: Synthetic oligonucleotide
  Target: LAMA2; (+) strand; PAM type: NRG; PAM sequence: AAG
agatgaccaaaatatagatc

SEQ ID NO: 171594 - DNA, 20 bp, Artificial Sequence
  Description of Artificial Sequence: Synthetic oligonucleotide
  Target: LAMA2; (+) strand; PAM type: NRG; PAM sequence: TGG
atagatcaagttccttatta

SEQ ID NO: 171595 - DNA, 20 bp, Artificial Sequence
  Description of Artificial Sequence: Synthetic oligonucleotide
  Target: LAMA2; (+) strand; PAM type: NRG; PAM sequence: CAG
aagttccttattatggtgtt

SEQ ID NO: 171596 - DNA, 20 bp, Artificial Sequence
  Description of Artificial Sequence: Synthetic oligonucleotide
  Target: LAMA2; (+) strand; PAM type: NRG; PAM sequence: AAG
tggtgttcagtaatatgtga

SEQ ID NO: 171597 - DNA, 20 bp, Artificial Sequence
  Description of Artificial Sequence: Synthetic oligonucleotide
  Target: LAMA2; (+) strand; PAM type: NRG; PAM sequence: AAG
gttcagtaatatgtgaaagt

SEQ ID NO: 171598 - DNA, 20 bp, Artificial Sequence
  Description of Artificial Sequence: Synthetic oligonucleotide
  Target: LAMA2; (+) strand; PAM type: NRG; PAM sequence: GAG
tcagtaatatgtgaaagtaa

SEQ ID NO: 171599 - DNA, 20 bp, Artificial Sequence
  Description of Artificial Sequence: Synthetic oligonucleotide
  Target: LAMA2; (+) strand; PAM type: NRG; PAM sequence: TGG
gtaatatgtgaaagtaagag

SEQ ID NO: 171600 - DNA, 20 bp, Artificial Sequence
  Description of Artificial Sequence: Synthetic oligonucleotide
  Target: LAMA2; (+) strand; PAM type: NRG; PAM sequence: AAG
aaagtaagagtggtaccata

SEQ ID NO: 171601 - DNA, 20 bp, Artificial Sequence
  Description of Artificial Sequence: Synthetic oligonucleotide
  Target: LAMA2; (+) strand; PAM type: NRG; PAM sequence: CAG
aagagtggtaccataaagtt

SEQ ID NO: 171602 - DNA, 20 bp, Artificial Sequence
  Description of Artificial Sequence: Synthetic oligonucleotide
  Target: LAMA2; (+) strand; PAM type: NRG; PAM sequence: AAG
tggtaccataaagttcagtc

SEQ ID NO: 171603 - DNA, 20 bp, Artificial Sequence
  Description of Artificial Sequence: Synthetic oligonucleotide
  Target: LAMA2; (+) strand; PAM type: NRG; PAM sequence: TAG
ccataaagttcagtcaagtc

SEQ ID NO: 171604 - DNA, 20 bp, Artificial Sequence
  Description of Artificial Sequence: Synthetic oligonucleotide
  Target: LAMA2; (+) strand; PAM type: NRG; PAM sequence: TAG
aagttcagtcaagtctagac

SEQ ID NO: 171605 - DNA, 20 bp, Artificial Sequence
  Description of Artificial Sequence: Synthetic oligonucleotide
  Target: LAMA2; (+) strand; PAM type: NRG; PAM sequence: AAG
ctagactagaaaaatatcca

SEQ ID NO: 171606 - DNA, 20 bp, Artificial Sequence
  Description of Artificial Sequence: Synthetic oligonucleotide
  Target: LAMA2; (+) strand; PAM type: NRG; PAM sequence: CAG
gactagaaaaatatccaaag

SEQ ID NO: 171607 - DNA, 20 bp, Artificial Sequence
  Description of Artificial Sequence: Synthetic oligonucleotide
  Target: LAMA2; (+) strand; PAM type: NRG; PAM sequence: TAG
gaaaaatatccaaagcagtt

SEQ ID NO: 171608 - DNA, 20 bp, Artificial Sequence
  Description of Artificial Sequence: Synthetic oligonucleotide
  Target: LAMA2; (+) strand; PAM type: NRG; PAM sequence: GAG
cttttcttttcttttttttt

SEQ ID NO: 171609 - DNA, 20 bp, Artificial Sequence
  Description of Artificial Sequence: Synthetic oligonucleotide
  Target: LAMA2; (+) strand; PAM type: NRG; PAM sequence: CAG
tcttttctttttttttgaga

SEQ ID NO: 171610 - DNA, 20 bp, Artificial Sequence
  Description of Artificial Sequence: Synthetic oligonucleotide
  Target: LAMA2; (+) strand; PAM type: NRG; PAM sequence: GAG
ttttctttttttttgagaca

SEQ ID NO: 171611 - DNA, 20 bp, Artificial Sequence
  Description of Artificial Sequence: Synthetic oligonucleotide
  Target: LAMA2; (+) strand; PAM type: NRG; PAM sequence: AGG
tttctttttttttgagacag

SEQ ID NO: 171612 - DNA, 20 bp, Artificial Sequence
  Description of Artificial Sequence: Synthetic oligonucleotide
  Target: LAMA2; (+) strand; PAM type: NRG; PAM sequence: CAG
acagaggctcgctctgtcgc

SEQ ID NO: 171613 - DNA, 20 bp, Artificial Sequence
  Description of Artificial Sequence: Synthetic oligonucleotide
  Target: LAMA2; (+) strand; PAM type: NRG; PAM sequence: AGG
cagaggctcgctctgtcgcc

SEQ ID NO: 171614 - DNA, 20 bp, Artificial Sequence
  Description of Artificial Sequence: Synthetic oligonucleotide
  Target: LAMA2; (+) strand; PAM type: NRG; PAM sequence: TGG
ggctcgctctgtcgccaggc

SEQ ID NO: 171615 - DNA, 20 bp, Artificial Sequence
  Description of Artificial Sequence: Synthetic oligonucleotide
  Target: LAMA2; (+) strand; PAM type: NRG; PAM sequence: GAG
ctcgctctgtcgccaggctg

SEQ ID NO: 171616 - DNA, 20 bp, Artificial Sequence
  Description of Artificial Sequence: Synthetic oligonucleotide
  Target: LAMA2; (+) strand; PAM type: NRG; PAM sequence: CAG
tctgtcgccaggctggagtg

SEQ ID NO: 171617 - DNA, 20 bp, Artificial Sequence
  Description of Artificial Sequence: Synthetic oligonucleotide
  Target: LAMA2; (+) strand; PAM type: NRG; PAM sequence: TGG
gtcgccaggctggagtgcag

SEQ ID NO: 171618 - DNA, 20 bp, Artificial Sequence
  Description of Artificial Sequence: Synthetic oligonucleotide
  Target: LAMA2; (+) strand; PAM type: NRG; PAM sequence: CGG
ggagtgcagtggcgtgatct

SEQ ID NO: 171619 - DNA, 20 bp, Artificial Sequence
  Description of Artificial Sequence: Synthetic oligonucleotide
  Target: LAMA2; (+) strand; PAM type: NRG; PAM sequence: AAG
cgtgatctcggctcactgcc

SEQ ID NO: 171620 - DNA, 20 bp, Artificial Sequence
  Description of Artificial Sequence: Synthetic oligonucleotide
  Target: LAMA2; (+) strand; PAM type: NRG; PAM sequence: TAG
cactgccaagctgttgacct

SEQ ID NO: 171621 - DNA, 20 bp, Artificial Sequence
  Description of Artificial Sequence: Synthetic oligonucleotide
  Target: LAMA2; (+) strand; PAM type: NRG; PAM sequence: TAG
gccaagctgttgaccttagt

SEQ ID NO: 171622 - DNA, 20 bp, Artificial Sequence
  Description of Artificial Sequence: Synthetic oligonucleotide
  Target: LAMA2; (+) strand; PAM type: NRG; PAM sequence: CAG
gttgaccttagttagtgatt

SEQ ID NO: 171623 - DNA, 20 bp, Artificial Sequence
  Description of Artificial Sequence: Synthetic oligonucleotide
  Target: LAMA2; (+) strand; PAM type: NRG; PAM sequence: AAG
gaccttagttagtgattcag

SEQ ID NO: 171624 - DNA, 20 bp, Artificial Sequence
  Description of Artificial Sequence: Synthetic oligonucleotide
  Target: LAMA2; (+) strand; PAM type: NRG; PAM sequence: TGG
agaagtaacatttaaataat

SEQ ID NO: 171625 - DNA, 20 bp, Artificial Sequence
  Description of Artificial Sequence: Synthetic oligonucleotide
  Target: LAMA2; (+) strand; PAM type: NRG; PAM sequence: GGG
gaagtaacatttaaataatt

SEQ ID NO: 171626 - DNA, 20 bp, Artificial Sequence
  Description of Artificial Sequence: Synthetic oligonucleotide
  Target: LAMA2; (+) strand; PAM type: NRG; PAM sequence: GAG
acatttaaataattgggtat

SEQ ID NO: 171627 - DNA, 20 bp, Artificial Sequence
  Description of Artificial Sequence: Synthetic oligonucleotide
  Target: LAMA2; (+) strand; PAM type: NRG; PAM sequence: AAG
tatatgtgtctgtgtgtaaa

SEQ ID NO: 171628 - DNA, 20 bp, Artificial Sequence
  Description of Artificial Sequence: Synthetic oligonucleotide
  Target: LAMA2; (+) strand; PAM type: NRG; PAM sequence: CAG
taaaaagttatttgacccat

SEQ ID NO: 171629 - DNA, 20 bp, Artificial Sequence
  Description of Artificial Sequence: Synthetic oligonucleotide
  Target: LAMA2; (+) strand; PAM type: NRG; PAM sequence: GAG
atttgacccatcagaccttt

SEQ ID NO: 171630 - DNA, 20 bp, Artificial Sequence
  Description of Artificial Sequence: Synthetic oligonucleotide
  Target: LAMA2; (+) strand; PAM type: NRG; PAM sequence: CAG
cctttgagtgcaaacacgtg

SEQ ID NO: 171631 - DNA, 20 bp, Artificial Sequence
  Description of Artificial Sequence: Synthetic oligonucleotide
  Target: LAMA2; (+) strand; PAM type: NRG; PAM sequence: AGG
ctttgagtgcaaacacgtgc

SEQ ID NO: 171632 - DNA, 20 bp, Artificial Sequence
  Description of Artificial Sequence: Synthetic oligonucleotide
  Target: LAMA2; (+) strand; PAM type: NRG; PAM sequence: AAG
tgagtgcaaacacgtgcagg

SEQ ID NO: 171633 - DNA, 20 bp, Artificial Sequence
  Description of Artificial Sequence: Synthetic oligonucleotide
  Target: LAMA2; (+) strand; PAM type: NRG; PAM sequence: AAG
gcaaacacgtgcaggaagcc

SEQ ID NO: 171634 - DNA, 20 bp, Artificial Sequence
  Description of Artificial Sequence: Synthetic oligonucleotide
  Target: LAMA2; (+) strand; PAM type: NRG; PAM sequence: AAG
acgtgcaggaagccaagttt

SEQ ID NO: 171635 - DNA, 20 bp, Artificial Sequence
  Description of Artificial Sequence: Synthetic oligonucleotide
  Target: LAMA2; (+) strand; PAM type: NRG; PAM sequence: AGG
cgtgcaggaagccaagttta

SEQ ID NO: 171636 - DNA, 20 bp, Artificial Sequence
  Description of Artificial Sequence: Synthetic oligonucleotide
  Target: LAMA2; (+) strand; PAM type: NRG; PAM sequence: TGG
gccaagtttaaggaaattaa

SEQ ID NO: 171637 - DNA, 20 bp, Artificial Sequence
  Description of Artificial Sequence: Synthetic oligonucleotide
  Target: LAMA2; (+) strand; PAM type: NRG; PAM sequence: CAG
aacataattacaacactcac

SEQ ID NO: 171638 - DNA, 20 bp, Artificial Sequence
  Description of Artificial Sequence: Synthetic oligonucleotide
  Target: LAMA2; (+) strand; PAM type: NRG; PAM sequence: AAG
aattacaacactcaccagaa

SEQ ID NO: 171639 - DNA, 20 bp, Artificial Sequence
  Description of Artificial Sequence: Synthetic oligonucleotide
  Target: LAMA2; (+) strand; PAM type: NRG; PAM sequence: AAG
acaacactcaccagaaaagc

SEQ ID NO: 171640 - DNA, 20 bp, Artificial Sequence
  Description of Artificial Sequence: Synthetic oligonucleotide
  Target: LAMA2; (+) strand; PAM type: NRG; PAM sequence: AGG
caacactcaccagaaaagca

SEQ ID NO: 171641 - DNA, 20 bp, Artificial Sequence
  Description of Artificial Sequence: Synthetic oligonucleotide
  Target: LAMA2; (+) strand; PAM type: NRG; PAM sequence: GAG
caccagaaaagcaaggattt

SEQ ID NO: 171642 - DNA, 20 bp, Artificial Sequence
  Description of Artificial Sequence: Synthetic oligonucleotide
  Target: LAMA2; (+) strand; PAM type: NRG; PAM sequence: TAG
aagcaaggatttgagtaacc

SEQ ID NO: 171643 - DNA, 20 bp, Artificial Sequence
  Description of Artificial Sequence: Synthetic oligonucleotide
  Target: LAMA2; (+) strand; PAM type: NRG; PAM sequence: AGG
agcaaggatttgagtaacct

SEQ ID NO: 171644 - DNA, 20 bp, Artificial Sequence
  Description of Artificial Sequence: Synthetic oligonucleotide
  Target: LAMA2; (+) strand; PAM type: NRG; PAM sequence: GGG
gcaaggatttgagtaaccta

SEQ ID NO: 171645 - DNA, 20 bp, Artificial Sequence
  Description of Artificial Sequence: Synthetic oligonucleotide
  Target: LAMA2; (+) strand; PAM type: NRG; PAM sequence: TGG
gatttgagtaacctagggac

SEQ ID NO: 171646 - DNA, 20 bp, Artificial Sequence
  Description of Artificial Sequence: Synthetic oligonucleotide
  Target: LAMA2; (+) strand; PAM type: NRG; PAM sequence: CAG
taacctagggactggatgca

SEQ ID NO: 171647 - DNA, 20 bp, Artificial Sequence
  Description of Artificial Sequence: Synthetic oligonucleotide
  Target: LAMA2; (+) strand; PAM type: NRG; PAM sequence: AAG
aaaaaaatttttaaatccaa

SEQ ID NO: 171648 - DNA, 20 bp, Artificial Sequence
  Description of Artificial Sequence: Synthetic oligonucleotide
  Target: LAMA2; (+) strand; PAM type: NRG; PAM sequence: TAG
taattccattattaatgttt

SEQ ID NO: 171649 - DNA, 20 bp, Artificial Sequence
  Description of Artificial Sequence: Synthetic oligonucleotide
  Target: LAMA2; (+) strand; PAM type: NRG; PAM sequence: AAG
ttccattattaatgttttag

SEQ ID NO: 171650 - DNA, 20 bp, Artificial Sequence
  Description of Artificial Sequence: Synthetic oligonucleotide
  Target: LAMA2; (+) strand; PAM type: NRG; PAM sequence: CAG
atgttttagaagaataaatc

SEQ ID NO: 171651 - DNA, 20 bp, Artificial Sequence
  Description of Artificial Sequence: Synthetic oligonucleotide
  Target: LAMA2; (+) strand; PAM type: NRG; PAM sequence: GAG
gttttagaagaataaatcca

SEQ ID NO: 171652 - DNA, 20 bp, Artificial Sequence
  Description of Artificial Sequence: Synthetic oligonucleotide
  Target: LAMA2; (+) strand; PAM type: NRG; PAM sequence: TGG
tccagagcattataatactt

SEQ ID NO: 171653 - DNA, 20 bp, Artificial Sequence
  Description of Artificial Sequence: Synthetic oligonucleotide
  Target: LAMA2; (+) strand; PAM type: NRG; PAM sequence: CAG
tatatgtactgcaaattata

SEQ ID NO: 171654 - DNA, 20 bp, Artificial Sequence
  Description of Artificial Sequence: Synthetic oligonucleotide
  Target: LAMA2; (+) strand; PAM type: NRG; PAM sequence: TGG
aaaaaattttaattttccaa

SEQ ID NO: 171655 - DNA, 20 bp, Artificial Sequence
  Description of Artificial Sequence: Synthetic oligonucleotide
  Target: LAMA2; (+) strand; PAM type: NRG; PAM sequence: CAG
atttgtgatgttaacacttg

SEQ ID NO: 171656 - DNA, 20 bp, Artificial Sequence
  Description of Artificial Sequence: Synthetic oligonucleotide
  Target: LAMA2; (+) strand; PAM type: NRG; PAM sequence: AGG
tttgtgatgttaacacttgc

SEQ ID NO: 171657 - DNA, 20 bp, Artificial Sequence
  Description of Artificial Sequence: Synthetic oligonucleotide
  Target: LAMA2; (+) strand; PAM type: NRG; PAM sequence: GAG
gatgttaacacttgcaggat

SEQ ID NO: 171658 - DNA, 20 bp, Artificial Sequence
  Description of Artificial Sequence: Synthetic oligonucleotide
  Target: LAMA2; (+) strand; PAM type: NRG; PAM sequence: AAG
gttaacacttgcaggatgag

SEQ ID NO: 171659 - DNA, 20 bp, Artificial Sequence
  Description of Artificial Sequence: Synthetic oligonucleotide
  Target: LAMA2; (+) strand; PAM type: NRG; PAM sequence: TAG
acacttgcaggatgagaagt

SEQ ID NO: 171660 - DNA, 20 bp, Artificial Sequence
  Description of Artificial Sequence: Synthetic oligonucleotide
  Target: LAMA2; (+) strand; PAM type: NRG; PAM sequence: TAG
gatgagaagttagatgataa

SEQ ID NO: 171661 - DNA, 20 bp, Artificial Sequence
  Description of Artificial Sequence: Synthetic oligonucleotide
  Target: LAMA2; (+) strand; PAM type: NRG; PAM sequence: TGG
agaagttagatgataatagt

SEQ ID NO: 171662 - DNA, 20 bp, Artificial Sequence
  Description of Artificial Sequence: Synthetic oligonucleotide
  Target: LAMA2; (+) strand; PAM type: NRG; PAM sequence: TGG
attaaacctcttgctgccct

SEQ ID NO: 171663 - DNA, 20 bp, Artificial Sequence
  Description of Artificial Sequence: Synthetic oligonucleotide
  Target: LAMA2; (+) strand; PAM type: NRG; PAM sequence: CAG
ccttggaaaatcacaaaatg

SEQ ID NO: 171664 - DNA, 20 bp, Artificial Sequence
  Description of Artificial Sequence: Synthetic oligonucleotide
  Target: LAMA2; (+) strand; PAM type: NRG; PAM sequence: TAG
aaaatgcagtacaattcctc

SEQ ID NO: 171665 - DNA, 20 bp, Artificial Sequence
  Description of Artificial Sequence: Synthetic oligonucleotide
  Target: LAMA2; (+) strand; PAM type: NRG; PAM sequence: TGG
tcttttaccatgttctgtgc

SEQ ID NO: 171666 - DNA, 20 bp, Artificial Sequence
  Description of Artificial Sequence: Synthetic oligonucleotide
  Target: LAMA2; (+) strand; PAM type: NRG; PAM sequence: CAG
ttaccatgttctgtgctggc

SEQ ID NO: 171667 - DNA, 20 bp, Artificial Sequence
  Description of Artificial Sequence: Synthetic oligonucleotide
  Target: LAMA2; (+) strand; PAM type: NRG; PAM sequence: TAG
ttctgtgctggccagacatt

SEQ ID NO: 171668 - DNA, 20 bp, Artificial Sequence
  Description of Artificial Sequence: Synthetic oligonucleotide
  Target: LAMA2; (+) strand; PAM type: NRG; PAM sequence: TGG
tattttaaatattaattctc

SEQ ID NO: 171669 - DNA, 20 bp, Artificial Sequence
  Description of Artificial Sequence: Synthetic oligonucleotide
  Target: LAMA2; (+) strand; PAM type: NRG; PAM sequence: TAG
attaattctctggccatgcc

SEQ ID NO: 171670 - DNA, 20 bp, Artificial Sequence
  Description of Artificial Sequence: Synthetic oligonucleotide
  Target: LAMA2; (+) strand; PAM type: NRG; PAM sequence: AAG
tctggccatgcctagtatgc

SEQ ID NO: 171671 - DNA, 20 bp, Artificial Sequence
  Description of Artificial Sequence: Synthetic oligonucleotide
  Target: LAMA2; (+) strand; PAM type: NRG; PAM sequence: TGG
tgcctagtatgcaagcactc

SEQ ID NO: 171672 - DNA, 20 bp, Artificial Sequence
  Description of Artificial Sequence: Synthetic oligonucleotide
  Target: LAMA2; (+) strand; PAM type: NRG; PAM sequence: AAG
gtatgcaagcactctggtac

SEQ ID NO: 171673 - DNA, 20 bp, Artificial Sequence
  Description of Artificial Sequence: Synthetic oligonucleotide
  Target: LAMA2; (+) strand; PAM type: NRG; PAM sequence: TAG
agcactctggtacaagattc

SEQ ID NO: 171674 - DNA, 20 bp, Artificial Sequence
  Description of Artificial Sequence: Synthetic oligonucleotide
  Target: LAMA2; (+) strand; PAM type: NRG; PAM sequence: GAG
cactctggtacaagattcta

SEQ ID NO: 171675 - DNA, 20 bp, Artificial Sequence
  Description of Artificial Sequence: Synthetic oligonucleotide
  Target: LAMA2; (+) strand; PAM type: NRG; PAM sequence: TGG
gtgttaatatgctgccaact

SEQ ID NO: 171676 - DNA, 20 bp, Artificial Sequence
  Description of Artificial Sequence: Synthetic oligonucleotide
  Target: LAMA2; (+) strand; PAM type: NRG; PAM sequence: GAG
accttattcaaaactatatt

SEQ ID NO: 171677 - DNA, 20 bp, Artificial Sequence
  Description of Artificial Sequence: Synthetic oligonucleotide
  Target: LAMA2; (+) strand; PAM type: NRG; PAM sequence: CAG
tattcaaaactatattgaga

SEQ ID NO: 171678 - DNA, 20 bp, Artificial Sequence
  Description of Artificial Sequence: Synthetic oligonucleotide
  Target: LAMA2; (+) strand; PAM type: NRG; PAM sequence: TAG
attctctaattcattatctg

SEQ ID NO: 171679 - DNA, 20 bp, Artificial Sequence
  Description of Artificial Sequence: Synthetic oligonucleotide
  Target: LAMA2; (+) strand; PAM type: NRG; PAM sequence: TAG
tctaattcattatctgtagt

SEQ ID NO: 171680 - DNA, 20 bp, Artificial Sequence
  Description of Artificial Sequence: Synthetic oligonucleotide
  Target: LAMA2; (+) strand; PAM type: NRG; PAM sequence: TAG
ttagactatccatatctttt

SEQ ID NO: 171681 - DNA, 20 bp, Artificial Sequence
  Description of Artificial Sequence: Synthetic oligonucleotide
  Target: LAMA2; (+) strand; PAM type: NRG; PAM sequence: AAG
tatccatatctttttagtaa

SEQ ID NO: 171682 - DNA, 20 bp, Artificial Sequence
  Description of Artificial Sequence: Synthetic oligonucleotide
  Target: LAMA2; (+) strand; PAM type: NRG; PAM sequence: GAG
tccatatctttttagtaaaa

SEQ ID NO: 171683 - DNA, 20 bp, Artificial Sequence
  Description of Artificial Sequence: Synthetic oligonucleotide
  Target: LAMA2; (+) strand; PAM type: NRG; PAM sequence: AAG
atatctttttagtaaaagag

SEQ ID NO: 171684 - DNA, 20 bp, Artificial Sequence
  Description of Artificial Sequence: Synthetic oligonucleotide
  Target: LAMA2; (+) strand; PAM type: NRG; PAM sequence: AAG
tctttttagtaaaagagaag

SEQ ID NO: 171685 - DNA, 20 bp, Artificial Sequence
  Description of Artificial Sequence: Synthetic oligonucleotide
  Target: LAMA2; (+) strand; PAM type: NRG; PAM sequence: AGG
ctttttagtaaaagagaaga

SEQ ID NO: 171686 - DNA, 20 bp, Artificial Sequence
  Description of Artificial Sequence: Synthetic oligonucleotide
  Target: LAMA2; (+) strand; PAM type: NRG; PAM sequence: TAG
agagaagaaggcttatatat

SEQ ID NO: 171687 - DNA, 20 bp, Artificial Sequence
  Description of Artificial Sequence: Synthetic oligonucleotide
  Target: LAMA2; (+) strand; PAM type: NRG; PAM sequence: TAG
atattagcatatgcaacaca

SEQ ID NO: 171688 - DNA, 20 bp, Artificial Sequence
  Description of Artificial Sequence: Synthetic oligonucleotide
  Target: LAMA2; (+) strand; PAM type: NRG; PAM sequence: AAG
atgcaacacatagaaaaatg

SEQ ID NO: 171689 - DNA, 20 bp, Artificial Sequence
  Description of Artificial Sequence: Synthetic oligonucleotide
  Target: LAMA2; (+) strand; PAM type: NRG; PAM sequence: CAG
aaaatgaagtataaaccttt

SEQ ID NO: 171690 - DNA, 20 bp, Artificial Sequence
  Description of Artificial Sequence: Synthetic oligonucleotide
  Target: LAMA2; (+) strand; PAM type: NRG; PAM sequence: AGG
aaatgaagtataaacctttc

SEQ ID NO: 171691 - DNA, 20 bp, Artificial Sequence
  Description of Artificial Sequence: Synthetic oligonucleotide
  Target: LAMA2; (+) strand; PAM type: NRG; PAM sequence: GGG
aatgaagtataaacctttca

SEQ ID NO: 171692 - DNA, 20 bp, Artificial Sequence
  Description of Artificial Sequence: Synthetic oligonucleotide
  Target: LAMA2; (+) strand; PAM type: NRG; PAM sequence: AAG
tctaaaccttgtaattttta

SEQ ID NO: 171693 - DNA, 20 bp, Artificial Sequence
  Description of Artificial Sequence: Synthetic oligonucleotide
  Target: LAMA2; (+) strand; PAM type: NRG; PAM sequence: TGG
catttttgtttgactaaata

SEQ ID NO: 171694 - DNA, 20 bp, Artificial Sequence
  Description of Artificial Sequence: Synthetic oligonucleotide
  Target: LAMA2; (+) strand; PAM type: NRG; PAM sequence: CAG
tgaacacgttgaatgcattc

SEQ ID NO: 171695 - DNA, 20 bp, Artificial Sequence
  Description of Artificial Sequence: Synthetic oligonucleotide
  Target: LAMA2; (+) strand; PAM type: NRG; PAM sequence: TAG
aatgatattttaaatgtaaa

SEQ ID NO: 171696 - DNA, 20 bp, Artificial Sequence
  Description of Artificial Sequence: Synthetic oligonucleotide
  Target: LAMA2; (+) strand; PAM type: NRG; PAM sequence: GAG
tgatattttaaatgtaaata

SEQ ID NO: 171697 - DNA, 20 bp, Artificial Sequence
  Description of Artificial Sequence: Synthetic oligonucleotide
  Target: LAMA2; (+) strand; PAM type: NRG; PAM sequence: AGG
gatattttaaatgtaaatag

SEQ ID NO: 171698 - DNA, 20 bp, Artificial Sequence
  Description of Artificial Sequence: Synthetic oligonucleotide
  Target: LAMA2; (+) strand; PAM type: NRG; PAM sequence: GAG
aaatagaggtgaatgtgcct

SEQ ID NO: 171699 - DNA, 20 bp, Artificial Sequence
  Description of Artificial Sequence: Synthetic oligonucleotide
  Target: LAMA2; (+) strand; PAM type: NRG; PAM sequence: TGG
atgtgcctgagaatactctt

SEQ ID NO: 171700 - DNA, 20 bp, Artificial Sequence
  Description of Artificial Sequence: Synthetic oligonucleotide
  Target: LAMA2; (+) strand; PAM type: NRG; PAM sequence: GGG
tgtgcctgagaatactcttt

SEQ ID NO: 171701 - DNA, 20 bp, Artificial Sequence
  Description of Artificial Sequence: Synthetic oligonucleotide
  Target: LAMA2; (+) strand; PAM type: NRG; PAM sequence: GAG
tgcctgagaatactctttgg

SEQ ID NO: 171702 - DNA, 20 bp, Artificial Sequence
  Description of Artificial Sequence: Synthetic oligonucleotide
  Target: LAMA2; (+) strand; PAM type: NRG; PAM sequence: AGG
gcctgagaatactctttggg

SEQ ID NO: 171703 - DNA, 20 bp, Artificial Sequence
  Description of Artificial Sequence: Synthetic oligonucleotide
  Target: LAMA2; (+) strand; PAM type: NRG; PAM sequence: TGG
tgagaatactctttgggagg

SEQ ID NO: 171704 - DNA, 20 bp, Artificial Sequence
  Description of Artificial Sequence: Synthetic oligonucleotide
  Target: LAMA2; (+) strand; PAM type: NRG; PAM sequence: GGG
gagaatactctttgggaggt

SEQ ID NO: 171705 - DNA, 20 bp, Artificial Sequence
  Description of Artificial Sequence: Synthetic oligonucleotide
  Target: LAMA2; (+) strand; PAM type: NRG; PAM sequence: GGG
agaatactctttgggaggtg

SEQ ID NO: 171706 - DNA, 20 bp, Artificial Sequence
  Description of Artificial Sequence: Synthetic oligonucleotide
  Target: LAMA2; (+) strand; PAM type: NRG; PAM sequence: TGG
tttgggaggtggggctgttt

SEQ ID NO: 171707 - DNA, 20 bp, Artificial Sequence
  Description of Artificial Sequence: Synthetic oligonucleotide
  Target: LAMA2; (+) strand; PAM type: NRG; PAM sequence: GGG
ttgggaggtggggctgtttt

SEQ ID NO: 171708 - DNA, 20 bp, Artificial Sequence
  Description of Artificial Sequence: Synthetic oligonucleotide
  Target: LAMA2; (+) strand; PAM type: NRG; PAM sequence: GGG
tgggaggtggggctgttttg

SEQ ID NO: 171709 - DNA, 20 bp, Artificial Sequence
  Description of Artificial Sequence: Synthetic oligonucleotide
  Target: LAMA2; (+) strand; PAM type: NRG; PAM sequence: AAG
tgcatgattctgtgattaac

SEQ ID NO: 171710 - DNA, 20 bp, Artificial Sequence
  Description of Artificial Sequence: Synthetic oligonucleotide
  Target: LAMA2; (+) strand; PAM type: NRG; PAM sequence: TGG
gtgattaacaagcatatttc

SEQ ID NO: 171711 - DNA, 20 bp, Artificial Sequence
  Description of Artificial Sequence: Synthetic oligonucleotide
  Target: LAMA2; (+) strand; PAM type: NRG; PAM sequence: TGG
atatttctggtgctatcata

SEQ ID NO: 171712 - DNA, 20 bp, Artificial Sequence
  Description of Artificial Sequence: Synthetic oligonucleotide
  Target: LAMA2; (+) strand; PAM type: NRG; PAM sequence: AAG
tctggtgctatcatatggaa

SEQ ID NO: 171713 - DNA, 20 bp, Artificial Sequence
  Description of Artificial Sequence: Synthetic oligonucleotide
  Target: LAMA2; (+) strand; PAM type: NRG; PAM sequence: TAG
gtgctatcatatggaaaagt

SEQ ID NO: 171714 - DNA, 20 bp, Artificial Sequence
  Description of Artificial Sequence: Synthetic oligonucleotide
  Target: LAMA2; (+) strand; PAM type: NRG; PAM sequence: TGG
attctcccttaacattttat

SEQ ID NO: 171715 - DNA, 20 bp, Artificial Sequence
  Description of Artificial Sequence: Synthetic oligonucleotide
  Target: LAMA2; (+) strand; PAM type: NRG; PAM sequence: CAG
atctttgatgtgttataaaa

SEQ ID NO: 171716 - DNA, 20 bp, Artificial Sequence
  Description of Artificial Sequence: Synthetic oligonucleotide
  Target: LAMA2; (+) strand; PAM type: NRG; PAM sequence: AGG
tctttgatgtgttataaaac

SEQ ID NO: 171717 - DNA, 20 bp, Artificial Sequence
  Description of Artificial Sequence: Synthetic oligonucleotide
  Target: LAMA2; (+) strand; PAM type: NRG; PAM sequence: GAG
taaaacaggcatttactact

SEQ ID NO: 171718 - DNA, 20 bp, Artificial Sequence
  Description of Artificial Sequence: Synthetic oligonucleotide
  Target: LAMA2; (+) strand; PAM type: NRG; PAM sequence: TAG
aacaggcatttactactgag

SEQ ID NO: 171719 - DNA, 20 bp, Artificial Sequence
  Description of Artificial Sequence: Synthetic oligonucleotide
  Target: LAMA2; (+) strand; PAM type: NRG; PAM sequence: AAG
gcatttactactgagtagct

SEQ ID NO: 171720 - DNA, 20 bp, Artificial Sequence
  Description of Artificial Sequence: Synthetic oligonucleotide
  Target: LAMA2; (+) strand; PAM type: NRG; PAM sequence: TAG
attgatctaaaacaaatcta

SEQ ID NO: 171721 - DNA, 20 bp, Artificial Sequence
  Description of Artificial Sequence: Synthetic oligonucleotide
  Target: LAMA2; (+) strand; PAM type: NRG; PAM sequence: AGG
ttgatctaaaacaaatctat

SEQ ID NO: 171722 - DNA, 20 bp, Artificial Sequence
  Description of Artificial Sequence: Synthetic oligonucleotide
  Target: LAMA2; (+) strand; PAM type: NRG; PAM sequence: AAG
taaaacaaatctataggatc

SEQ ID NO: 171723 - DNA, 20 bp, Artificial Sequence
  Description of Artificial Sequence: Synthetic oligonucleotide
  Target: LAMA2; (+) strand; PAM type: NRG; PAM sequence: GAG
tctataggatcaagcttatt

SEQ ID NO: 171724 - DNA, 20 bp, Artificial Sequence
  Description of Artificial Sequence: Synthetic oligonucleotide
  Target: LAMA2; (+) strand; PAM type: NRG; PAM sequence: AGG
ctataggatcaagcttattg

SEQ ID NO: 171725 - DNA, 20 bp, Artificial Sequence
  Description of Artificial Sequence: Synthetic oligonucleotide
  Target: LAMA2; (+) strand; PAM type: NRG; PAM sequence: CAG
taggatcaagcttattgagg

SEQ ID NO: 171726 - DNA, 20 bp, Artificial Sequence
  Description of Artificial Sequence: Synthetic oligonucleotide
  Target: LAMA2; (+) strand; PAM type: NRG; PAM sequence: CAG
atcaagcttattgaggcaga

SEQ ID NO: 171727 - DNA, 20 bp, Artificial Sequence
  Description of Artificial Sequence: Synthetic oligonucleotide
  Target: LAMA2; (+) strand; PAM type: NRG; PAM sequence: AAG
agacagcctgtttgtctctc

SEQ ID NO: 171728 - DNA, 20 bp, Artificial Sequence
  Description of Artificial Sequence: Synthetic oligonucleotide
  Target: LAMA2; (+) strand; PAM type: NRG; PAM sequence: GAG
acagcctgtttgtctctcaa

SEQ ID NO: 171729 - DNA, 20 bp, Artificial Sequence
  Description of Artificial Sequence: Synthetic oligonucleotide
  Target: LAMA2; (+) strand; PAM type: NRG; PAM sequence: CAG
ctgcactccacacacttttt

SEQ ID NO: 171730 - DNA, 20 bp, Artificial Sequence
  Description of Artificial Sequence: Synthetic oligonucleotide
  Target: LAMA2; (+) strand; PAM type: NRG; PAM sequence: TGG
ctttttcagtaaataaaata

SEQ ID NO: 171731 - DNA, 20 bp, Artificial Sequence
  Description of Artificial Sequence: Synthetic oligonucleotide
  Target: LAMA2; (+) strand; PAM type: NRG; PAM sequence: TGG
atggacaaaactgcaacatg

SEQ ID NO: 171732 - DNA, 20 bp, Artificial Sequence
  Description of Artificial Sequence: Synthetic oligonucleotide
  Target: LAMA2; (+) strand; PAM type: NRG; PAM sequence: GAG
ggacaaaactgcaacatgtg

SEQ ID NO: 171733 - DNA, 20 bp, Artificial Sequence
  Description of Artificial Sequence: Synthetic oligonucleotide
  Target: LAMA2; (+) strand; PAM type: NRG; PAM sequence: AGG
gacaaaactgcaacatgtgg

SEQ ID NO: 171734 - DNA, 20 bp, Artificial Sequence
  Description of Artificial Sequence: Synthetic oligonucleotide
  Target: LAMA2; (+) strand; PAM type: NRG; PAM sequence: AAG
actgcaacatgtggaggctg

SEQ ID NO: 171735 - DNA, 20 bp, Artificial Sequence
  Description of Artificial Sequence: Synthetic oligonucleotide
  Target: LAMA2; (+) strand; PAM type: NRG; PAM sequence: AAG
tggaggctgaagattccatt

SEQ ID NO: 171736 - DNA, 20 bp, Artificial Sequence
  Description of Artificial Sequence: Synthetic oligonucleotide
  Target: LAMA2; (+) strand; PAM type: NRG; PAM sequence: AGG
ggaggctgaagattccatta

SEQ ID NO: 171737 - DNA, 20 bp, Artificial Sequence
  Description of Artificial Sequence: Synthetic oligonucleotide
  Target: LAMA2; (+) strand; PAM type: NRG; PAM sequence: TGG
aagattccattaaggacttt

SEQ ID NO: 171738 - DNA, 20 bp, Artificial Sequence
  Description of Artificial Sequence: Synthetic oligonucleotide
  Target: LAMA2; (+) strand; PAM type: NRG; PAM sequence: AAG
cttttggcatctgtacctta

SEQ ID NO: 171739 - DNA, 20 bp, Artificial Sequence
  Description of Artificial Sequence: Synthetic oligonucleotide
  Target: LAMA2; (+) strand; PAM type: NRG; PAM sequence: TAG
ttattgcttcttctctgcca

SEQ ID NO: 171740 - DNA, 20 bp, Artificial Sequence
  Description of Artificial Sequence: Synthetic oligonucleotide
  Target: LAMA2; (+) strand; PAM type: NRG; PAM sequence: AAG
tctctgccatagcatataac

SEQ ID NO: 171741 - DNA, 20 bp, Artificial Sequence
  Description of Artificial Sequence: Synthetic oligonucleotide
  Target: LAMA2; (+) strand; PAM type: NRG; PAM sequence: AAG
atataacaagcgttttttaa

SEQ ID NO: 171742 - DNA, 20 bp, Artificial Sequence
  Description of Artificial Sequence: Synthetic oligonucleotide
  Target: LAMA2; (+) strand; PAM type: NRG; PAM sequence: CAG
gttttttaaaagaccaaata

SEQ ID NO: 171743 - DNA, 20 bp, Artificial Sequence
  Description of Artificial Sequence: Synthetic oligonucleotide
  Target: LAMA2; (+) strand; PAM type: NRG; PAM sequence: TGG
gctctctgatttccatttaa

SEQ ID NO: 171744 - DNA, 20 bp, Artificial Sequence
  Description of Artificial Sequence: Synthetic oligonucleotide
  Target: LAMA2; (+) strand; PAM type: NRG; PAM sequence: AAG
ctctgatttccatttaatgg

SEQ ID NO: 171745 - DNA, 20 bp, Artificial Sequence
  Description of Artificial Sequence: Synthetic oligonucleotide
  Target: LAMA2; (+) strand; PAM type: NRG; PAM sequence: AAG
tgatttccatttaatggaag

SEQ ID NO: 171746 - DNA, 20 bp, Artificial Sequence
  Description of Artificial Sequence: Synthetic oligonucleotide
  Target: LAMA2; (+) strand; PAM type: NRG; PAM sequence: AAG
atttaatggaagaagtaata

SEQ ID NO: 171747 - DNA, 20 bp, Artificial Sequence
  Description of Artificial Sequence: Synthetic oligonucleotide
  Target: LAMA2; (+) strand; PAM type: NRG; PAM sequence: GAG
taaagtttaattgtatacgt

SEQ ID NO: 171748 - DNA, 20 bp, Artificial Sequence
  Description of Artificial Sequence: Synthetic oligonucleotide
  Target: LAMA2; (+) strand; PAM type: NRG; PAM sequence: TGG
tttaattgtatacgtgagca

SEQ ID NO: 171749 - DNA, 20 bp, Artificial Sequence
  Description of Artificial Sequence: Synthetic oligonucleotide
  Target: LAMA2; (+) strand; PAM type: NRG; PAM sequence: GGG
ttaattgtatacgtgagcat

SEQ ID NO: 171750 - DNA, 20 bp, Artificial Sequence
  Description of Artificial Sequence: Synthetic oligonucleotide
  Target: LAMA2; (+) strand; PAM type: NRG; PAM sequence: GGG
taattgtatacgtgagcatg

SEQ ID NO: 171751 - DNA, 20 bp, Artificial Sequence
  Description of Artificial Sequence: Synthetic oligonucleotide
  Target: LAMA2; (+) strand; PAM type: NRG; PAM sequence: TGG
aataattcatcgattgccgt

SEQ ID NO: 171752 - DNA, 20 bp, Artificial Sequence
  Description of Artificial Sequence: Synthetic oligonucleotide
  Target: LAMA2; (+) strand; PAM type: NRG; PAM sequence: AAG
catcgattgccgttggctca

SEQ ID NO: 171753 - DNA, 20 bp, Artificial Sequence
  Description of Artificial Sequence: Synthetic oligonucleotide
  Target: LAMA2; (+) strand; PAM type: NRG; PAM sequence: AAG
tggctcaaagtaatatttga

SEQ ID NO: 171754 - DNA, 20 bp, Artificial Sequence
  Description of Artificial Sequence: Synthetic oligonucleotide
  Target: LAMA2; (+) strand; PAM type: NRG; PAM sequence: CAG
gtaatatttgaaagaaaatg

SEQ ID NO: 171755 - DNA, 20 bp, Artificial Sequence
  Description of Artificial Sequence: Synthetic oligonucleotide
  Target: LAMA2; (+) strand; PAM type: NRG; PAM sequence: CAG
tatttgaaagaaaatgcagc

SEQ ID NO: 171756 - DNA, 20 bp, Artificial Sequence
  Description of Artificial Sequence: Synthetic oligonucleotide
  Target: LAMA2; (+) strand; PAM type: NRG; PAM sequence: TGG
ttgaaagaaaatgcagccag

SEQ ID NO: 171757 - DNA, 20 bp, Artificial Sequence
  Description of Artificial Sequence: Synthetic oligonucleotide
  Target: LAMA2; (+) strand; PAM type: NRG; PAM sequence: GGG
tgaaagaaaatgcagccagt

SEQ ID NO: 171758 - DNA, 20 bp, Artificial Sequence
  Description of Artificial Sequence: Synthetic oligonucleotide
  Target: LAMA2; (+) strand; PAM type: NRG; PAM sequence: GAG
aaagaaaatgcagccagtgg

SEQ ID NO: 171759 - DNA, 20 bp, Artificial Sequence
  Description of Artificial Sequence: Synthetic oligonucleotide
  Target: LAMA2; (+) strand; PAM type: NRG; PAM sequence: TAG
gcagccagtgggagcttatc

SEQ ID NO: 171760 - DNA, 20 bp, Artificial Sequence
  Description of Artificial Sequence: Synthetic oligonucleotide
  Target: LAMA2; (+) strand; PAM type: NRG; PAM sequence: TAG
agtgggagcttatctagctg

SEQ ID NO: 171761 - DNA, 20 bp, Artificial Sequence
  Description of Artificial Sequence: Synthetic oligonucleotide
  Target: LAMA2; (+) strand; PAM type: NRG; PAM sequence: TGG
aattatgtgtttcccgaatt

SEQ ID NO: 171762 - DNA, 20 bp, Artificial Sequence
  Description of Artificial Sequence: Synthetic oligonucleotide
  Target: LAMA2; (+) strand; PAM type: NRG; PAM sequence: TAG
gtttcccgaatttggatcat

SEQ ID NO: 171763 - DNA, 20 bp, Artificial Sequence
  Description of Artificial Sequence: Synthetic oligonucleotide
  Target: LAMA2; (+) strand; PAM type: NRG; PAM sequence: AGG
tttcccgaatttggatcatt

SEQ ID NO: 171764 - DNA, 20 bp, Artificial Sequence
  Description of Artificial Sequence: Synthetic oligonucleotide
  Target: LAMA2; (+) strand; PAM type: NRG; PAM sequence: AAG
tttggatcattaggctacca

SEQ ID NO: 171765 - DNA, 20 bp, Artificial Sequence
  Description of Artificial Sequence: Synthetic oligonucleotide
  Target: LAMA2; (+) strand; PAM type: NRG; PAM sequence: CAG
tcattaggctaccaaagtga

SEQ ID NO: 171766 - DNA, 20 bp, Artificial Sequence
  Description of Artificial Sequence: Synthetic oligonucleotide
  Target: LAMA2; (+) strand; PAM type: NRG; PAM sequence: CAG
ttaggctaccaaagtgacag

SEQ ID NO: 171767 - DNA, 20 bp, Artificial Sequence
  Description of Artificial Sequence: Synthetic oligonucleotide
  Target: LAMA2; (+) strand; PAM type: NRG; PAM sequence: TGG
gctaccaaagtgacagcaga

SEQ ID NO: 171768 - DNA, 20 bp, Artificial Sequence
  Description of Artificial Sequence: Synthetic oligonucleotide
  Target: LAMA2; (+) strand; PAM type: NRG; PAM sequence: GAG
ccaaagtgacagcagatggc

SEQ ID NO: 171769 - DNA, 20 bp, Artificial Sequence
  Description of Artificial Sequence: Synthetic oligonucleotide
  Target: LAMA2; (+) strand; PAM type: NRG; PAM sequence: CAG
aagtgacagcagatggcgag

SEQ ID NO: 171770 - DNA, 20 bp, Artificial Sequence
  Description of Artificial Sequence: Synthetic oligonucleotide
  Target: LAMA2; (+) strand; PAM type: NRG; PAM sequence: CGG
acagcagatggcgagcagac

SEQ ID NO: 171771 - DNA, 20 bp, Artificial Sequence
  Description of Artificial Sequence: Synthetic oligonucleotide
  Target: LAMA2; (+) strand; PAM type: NRG; PAM sequence: CAG
cagatggcgagcagaccgga

SEQ ID NO: 171772 - DNA, 20 bp, Artificial Sequence
  Description of Artificial Sequence: Synthetic oligonucleotide
  Target: LAMA2; (+) strand; PAM type: NRG; PAM sequence: AGG
agatggcgagcagaccggac

SEQ ID NO: 171773 - DNA, 20 bp, Artificial Sequence
  Description of Artificial Sequence: Synthetic oligonucleotide
  Target: LAMA2; (+) strand; PAM type: NRG; PAM sequence: GAG
agcagaccggacaggatgct

SEQ ID NO: 171774 - DNA, 20 bp, Artificial Sequence
  Description of Artificial Sequence: Synthetic oligonucleotide
  Target: LAMA2; (+) strand; PAM type: NRG; PAM sequence: GAG
cagaccggacaggatgctga

SEQ ID NO: 171775 - DNA, 20 bp, Artificial Sequence
  Description of Artificial Sequence: Synthetic oligonucleotide
  Target: LAMA2; (+) strand; PAM type: NRG; PAM sequence: AGG
agaccggacaggatgctgag

SEQ ID NO: 171776 - DNA, 20 bp, Artificial Sequence
  Description of Artificial Sequence: Synthetic oligonucleotide
  Target: LAMA2; (+) strand; PAM type: NRG; PAM sequence: AAG
gatgctgagaggaccaacac

SEQ ID NO: 171777 - DNA, 20 bp, Artificial Sequence
  Description of Artificial Sequence: Synthetic oligonucleotide
  Target: LAMA2; (+) strand; PAM type: NRG; PAM sequence: GAG
tgctgagaggaccaacacaa

SEQ ID NO: 171778 - DNA, 20 bp, Artificial Sequence
  Description of Artificial Sequence: Synthetic oligonucleotide
  Target: LAMA2; (+) strand; PAM type: NRG; PAM sequence: AAG
agaggaccaacacaagagca

SEQ ID NO: 171779 - DNA, 20 bp, Artificial Sequence
  Description of Artificial Sequence: Synthetic oligonucleotide
  Target: LAMA2; (+) strand; PAM type: NRG; PAM sequence: TGG
caacacaagagcaaagtccc

SEQ ID NO: 171780 - DNA, 20 bp, Artificial Sequence
  Description of Artificial Sequence: Synthetic oligonucleotide
  Target: LAMA2; (+) strand; PAM type: NRG; PAM sequence: GGG
aacacaagagcaaagtccct

SEQ ID NO: 171781 - DNA, 20 bp, Artificial Sequence
  Description of Artificial Sequence: Synthetic oligonucleotide
  Target: LAMA2; (+) strand; PAM type: NRG; PAM sequence: GAG
cacaagagcaaagtccctgg

SEQ ID NO: 171782 - DNA, 20 bp, Artificial Sequence
  Description of Artificial Sequence: Synthetic oligonucleotide
  Target: LAMA2; (+) strand; PAM type: NRG; PAM sequence: AAG
agtccctgggagaattcatt

SEQ ID NO: 171783 - DNA, 20 bp, Artificial Sequence
  Description of Artificial Sequence: Synthetic oligonucleotide
  Target: LAMA2; (+) strand; PAM type: NRG; PAM sequence: AGG
gtccctgggagaattcatta

SEQ ID NO: 171784 - DNA, 20 bp, Artificial Sequence
  Description of Artificial Sequence: Synthetic oligonucleotide
  Target: LAMA2; (+) strand; PAM type: NRG; PAM sequence: GAG
ccctgggagaattcattaag

SEQ ID NO: 171785 - DNA, 20 bp, Artificial Sequence
  Description of Artificial Sequence: Synthetic oligonucleotide
  Target: LAMA2; (+) strand; PAM type: NRG; PAM sequence: CGG
aattcattaaggagcttgcc

SEQ ID NO: 171786 - DNA, 20 bp, Artificial Sequence
  Description of Artificial Sequence: Synthetic oligonucleotide
  Target: LAMA2; (+) strand; PAM type: NRG; PAM sequence: GGG
attcattaaggagcttgccc

SEQ ID NO: 171787 - DNA, 20 bp, Artificial Sequence
  Description of Artificial Sequence: Synthetic oligonucleotide
  Target: LAMA2; (+) strand; PAM type: NRG; PAM sequence: CAG
taaggagcttgcccgggatg

SEQ ID NO: 171788 - DNA, 20 bp, Artificial Sequence
  Description of Artificial Sequence: Synthetic oligonucleotide
  Target: LAMA2; (+) strand; PAM type: NRG; PAM sequence: AAG
ggagcttgcccgggatgcag

SEQ ID NO: 171789 - DNA, 20 bp, Artificial Sequence
  Description of Artificial Sequence: Synthetic oligonucleotide
  Target: LAMA2; (+) strand; PAM type: NRG; PAM sequence: AGG
gagcttgcccgggatgcaga

SEQ ID NO: 171790 - DNA, 20 bp, Artificial Sequence
  Description of Artificial Sequence: Synthetic oligonucleotide
  Target: LAMA2; (+) strand; PAM type: NRG; PAM sequence: TAG
gcccgggatgcagaaggtat

SEQ ID NO: 171791 - DNA, 20 bp, Artificial Sequence
  Description of Artificial Sequence: Synthetic oligonucleotide
  Target: LAMA2; (+) strand; PAM type: NRG; PAM sequence: AAG
gggatgcagaaggtattaga

SEQ ID NO: 171792 - DNA, 20 bp, Artificial Sequence
  Description of Artificial Sequence: Synthetic oligonucleotide
  Target: LAMA2; (+) strand; PAM type: NRG; PAM sequence: CAG
ttaatcatcatttctcccaa

SEQ ID NO: 171793 - DNA, 20 bp, Artificial Sequence
  Description of Artificial Sequence: Synthetic oligonucleotide
  Target: LAMA2; (+) strand; PAM type: NRG; PAM sequence: CAG
tttctcccaacagaaaaaca

SEQ ID NO: 171794 - DNA, 20 bp, Artificial Sequence
  Description of Artificial Sequence: Synthetic oligonucleotide
  Target: LAMA2; (+) strand; PAM type: NRG; PAM sequence: AAG
tcccaacagaaaaacacaga

SEQ ID NO: 171795 - DNA, 20 bp, Artificial Sequence
  Description of Artificial Sequence: Synthetic oligonucleotide
  Target: LAMA2; (+) strand; PAM type: NRG; PAM sequence: AGG
cccaacagaaaaacacagaa

SEQ ID NO: 171796 - DNA, 20 bp, Artificial Sequence
  Description of Artificial Sequence: Synthetic oligonucleotide
  Target: LAMA2; (+) strand; PAM type: NRG; PAM sequence: GGG
ccaacagaaaaacacagaaa

SEQ ID NO: 171797 - DNA, 20 bp, Artificial Sequence
  Description of Artificial Sequence: Synthetic oligonucleotide
  Target: LAMA2; (+) strand; PAM type: NRG; PAM sequence: CAG
aaacacagaaagggatgaca

SEQ ID NO: 171798 - DNA, 20 bp, Artificial Sequence
  Description of Artificial Sequence: Synthetic oligonucleotide
  Target: LAMA2; (+) strand; PAM type: NRG; PAM sequence: AGG
aacacagaaagggatgacac

SEQ ID NO: 171799 - DNA, 20 bp, Artificial Sequence
  Description of Artificial Sequence: Synthetic oligonucleotide
  Target: LAMA2; (+) strand; PAM type: NRG; PAM sequence: TGG
agaaagggatgacacaggac

SEQ ID NO: 171800 - DNA, 20 bp, Artificial Sequence
  Description of Artificial Sequence: Synthetic oligonucleotide
  Target: LAMA2; (+) strand; PAM type: NRG; PAM sequence: AAG
actggaatttctcttgttat

SEQ ID NO: 171801 - DNA, 20 bp, Artificial Sequence
  Description of Artificial Sequence: Synthetic oligonucleotide
  Target: LAMA2; (+) strand; PAM type: NRG; PAM sequence: AAG
aagtgacatctgtaaaatca

SEQ ID NO: 171802 - DNA, 20 bp, Artificial Sequence
  Description of Artificial Sequence: Synthetic oligonucleotide
  Target: LAMA2; (+) strand; PAM type: NRG; PAM sequence: AGG
agtgacatctgtaaaatcaa

SEQ ID NO: 171803 - DNA, 20 bp, Artificial Sequence
  Description of Artificial Sequence: Synthetic oligonucleotide
  Target: LAMA2; (+) strand; PAM type: NRG; PAM sequence: TAG
gacatctgtaaaatcaaagg

SEQ ID NO: 171804 - DNA, 20 bp, Artificial Sequence
  Description of Artificial Sequence: Synthetic oligonucleotide
  Target: LAMA2; (+) strand; PAM type: NRG; PAM sequence: GAG
catctgtaaaatcaaaggta

SEQ ID NO: 171805 - DNA, 20 bp, Artificial Sequence
  Description of Artificial Sequence: Synthetic oligonucleotide
  Target: LAMA2; (+) strand; PAM type: NRG; PAM sequence: AAG
atcaaaggtagagtttcaaa

SEQ ID NO: 171806 - DNA, 20 bp, Artificial Sequence
  Description of Artificial Sequence: Synthetic oligonucleotide
  Target: LAMA2; (+) strand; PAM type: NRG; PAM sequence: TAG
aaaggtagagtttcaaaaag

SEQ ID NO: 171807 - DNA, 20 bp, Artificial Sequence
  Description of Artificial Sequence: Synthetic oligonucleotide
  Target: LAMA2; (+) strand; PAM type: NRG; PAM sequence: TGG
tagagtttcaaaaagtagtg

SEQ ID NO: 171808 - DNA, 20 bp, Artificial Sequence
  Description of Artificial Sequence: Synthetic oligonucleotide
  Target: LAMA2; (+) strand; PAM type: NRG; PAM sequence: AAG
tttcaaaaagtagtgtggtt

SEQ ID NO: 171809 - DNA, 20 bp, Artificial Sequence
  Description of Artificial Sequence: Synthetic oligonucleotide
  Target: LAMA2; (+) strand; PAM type: NRG; PAM sequence: AAG
gtagtgtggttaagatattc

SEQ ID NO: 171810 - DNA, 20 bp, Artificial Sequence
  Description of Artificial Sequence: Synthetic oligonucleotide
  Target: LAMA2; (+) strand; PAM type: NRG; PAM sequence: AGG
tagtgtggttaagatattca

SEQ ID NO: 171811 - DNA, 20 bp, Artificial Sequence
  Description of Artificial Sequence: Synthetic oligonucleotide
  Target: LAMA2; (+) strand; PAM type: NRG; PAM sequence: GGG
agtgtggttaagatattcaa

SEQ ID NO: 171812 - DNA, 20 bp, Artificial Sequence
  Description of Artificial Sequence: Synthetic oligonucleotide
  Target: LAMA2; (+) strand; PAM type: NRG; PAM sequence: GAG
attcaagggtattatctgct

SEQ ID NO: 171813 - DNA, 20 bp, Artificial Sequence
  Description of Artificial Sequence: Synthetic oligonucleotide
  Target: LAMA2; (+) strand; PAM type: NRG; PAM sequence: CAG
tgctgagaacctgtgacctg

SEQ ID NO: 171814 - DNA, 20 bp, Artificial Sequence
  Description of Artificial Sequence: Synthetic oligonucleotide
  Target: LAMA2; (+) strand; PAM type: NRG; PAM sequence: TAG
tgtgacctgcagtgttaaat

SEQ ID NO: 171815 - DNA, 20 bp, Artificial Sequence
  Description of Artificial Sequence: Synthetic oligonucleotide
  Target: LAMA2; (+) strand; PAM type: NRG; PAM sequence: TAG
cagtgttaaattagcgacaa

SEQ ID NO: 171816 - DNA, 20 bp, Artificial Sequence
  Description of Artificial Sequence: Synthetic oligonucleotide
  Target: LAMA2; (+) strand; PAM type: NRG; PAM sequence: TAG
aattagcgacaatagtgaat

SEQ ID NO: 171817 - DNA, 20 bp, Artificial Sequence
  Description of Artificial Sequence: Synthetic oligonucleotide
  Target: LAMA2; (+) strand; PAM type: NRG; PAM sequence: GAG
aatagtgaattagcgacaat

SEQ ID NO: 171818 - DNA, 20 bp, Artificial Sequence
  Description of Artificial Sequence: Synthetic oligonucleotide
  Target: LAMA2; (+) strand; PAM type: NRG; PAM sequence: AGG
atagtgaattagcgacaatg

SEQ ID NO: 171819 - DNA, 20 bp, Artificial Sequence
  Description of Artificial Sequence: Synthetic oligonucleotide
  Target: LAMA2; (+) strand; PAM type: NRG; PAM sequence: GGG
tagtgaattagcgacaatga

SEQ ID NO: 171820 - DNA, 20 bp, Artificial Sequence
  Description of Artificial Sequence: Synthetic oligonucleotide
  Target: LAMA2; (+) strand; PAM type: NRG; PAM sequence: CAG
tgaattagcgacaatgaggg

SEQ ID NO: 171821 - DNA, 20 bp, Artificial Sequence
  Description of Artificial Sequence: Synthetic oligonucleotide
  Target: LAMA2; (+) strand; PAM type: NRG; PAM sequence: TAG
tagcgacaatgagggcagaa

SEQ ID NO: 171822 - DNA, 20 bp, Artificial Sequence
  Description of Artificial Sequence: Synthetic oligonucleotide
  Target: LAMA2; (+) strand; PAM type: NRG; PAM sequence: CAG
cgacaatgagggcagaatag

SEQ ID NO: 171823 - DNA, 20 bp, Artificial Sequence
  Description of Artificial Sequence: Synthetic oligonucleotide
  Target: LAMA2; (+) strand; PAM type: NRG; PAM sequence: TGG
agcagtaaattcttgtaaca

SEQ ID NO: 171824 - DNA, 20 bp, Artificial Sequence
  Description of Artificial Sequence: Synthetic oligonucleotide
  Target: LAMA2; (+) strand; PAM type: NRG; PAM sequence: AAG
catggctattataattacat

SEQ ID NO: 171825 - DNA, 20 bp, Artificial Sequence
  Description of Artificial Sequence: Synthetic oligonucleotide
  Target: LAMA2; (+) strand; PAM type: NRG; PAM sequence: TAG
ctattataattacataagaa

SEQ ID NO: 171826 - DNA, 20 bp, Artificial Sequence
  Description of Artificial Sequence: Synthetic oligonucleotide
  Target: LAMA2; (+) strand; PAM type: NRG; PAM sequence: AGG
tattataattacataagaat

SEQ ID NO: 171827 - DNA, 20 bp, Artificial Sequence
  Description of Artificial Sequence: Synthetic oligonucleotide
  Target: LAMA2; (+) strand; PAM type: NRG; PAM sequence: AAG
ttgttattgtttttatttga

SEQ ID NO: 171828 - DNA, 20 bp, Artificial Sequence
  Description of Artificial Sequence: Synthetic oligonucleotide
  Target: LAMA2; (+) strand; PAM type: NRG; PAM sequence: AAG
tttttatttgaaagtattta

SEQ ID NO: 171829 - DNA, 20 bp, Artificial Sequence
  Description of Artificial Sequence: Synthetic oligonucleotide
  Target: LAMA2; (+) strand; PAM type: NRG; PAM sequence: AAG
ttaaagtatttttcattttc

SEQ ID NO: 171830 - DNA, 20 bp, Artificial Sequence
  Description of Artificial Sequence: Synthetic oligonucleotide
  Target: LAMA2; (+) strand; PAM type: NRG; PAM sequence: AAG
agtatttttcattttcaagc

SEQ ID NO: 171831 - DNA, 20 bp, Artificial Sequence
  Description of Artificial Sequence: Synthetic oligonucleotide
  Target: LAMA2; (+) strand; PAM type: NRG; PAM sequence: AAG
tcattccacttgatacatta

SEQ ID NO: 171832 - DNA, 20 bp, Artificial Sequence
  Description of Artificial Sequence: Synthetic oligonucleotide
  Target: LAMA2; (+) strand; PAM type: NRG; PAM sequence: CAG
ttccacttgatacattaaag

SEQ ID NO: 171833 - DNA, 20 bp, Artificial Sequence
  Description of Artificial Sequence: Synthetic oligonucleotide
  Target: LAMA2; (+) strand; PAM type: NRG; PAM sequence: TAG
gatacattaaagcagcactt

SEQ ID NO: 171834 - DNA, 20 bp, Artificial Sequence
  Description of Artificial Sequence: Synthetic oligonucleotide
  Target: LAMA2; (+) strand; PAM type: NRG; PAM sequence: TGG
agcactttagtttctccaaa

SEQ ID NO: 171835 - DNA, 20 bp, Artificial Sequence
  Description of Artificial Sequence: Synthetic oligonucleotide
  Target: LAMA2; (+) strand; PAM type: NRG; PAM sequence: TGG
ccaaatggcttttcaaatac

SEQ ID NO: 171836 - DNA, 20 bp, Artificial Sequence
  Description of Artificial Sequence: Synthetic oligonucleotide
  Target: LAMA2; (+) strand; PAM type: NRG; PAM sequence: GGG
caaatggcttttcaaatact

SEQ ID NO: 171837 - DNA, 20 bp, Artificial Sequence
  Description of Artificial Sequence: Synthetic oligonucleotide
  Target: LAMA2; (+) strand; PAM type: NRG; PAM sequence: GGG
aaatggcttttcaaatactg

SEQ ID NO: 171838 - DNA, 20 bp, Artificial Sequence
  Description of Artificial Sequence: Synthetic oligonucleotide
  Target: LAMA2; (+) strand; PAM type: NRG; PAM sequence: TGG
gcttttcaaatactggggac

SEQ ID NO: 171839 - DNA, 20 bp, Artificial Sequence
  Description of Artificial Sequence: Synthetic oligonucleotide
  Target: LAMA2; (+) strand; PAM type: NRG; PAM sequence: TGG
tttaatgaacatctgttgct

SEQ ID NO: 171840 - DNA, 20 bp, Artificial Sequence
  Description of Artificial Sequence: Synthetic oligonucleotide
  Target: LAMA2; (+) strand; PAM type: NRG; PAM sequence: GGG
ttaatgaacatctgttgctt

SEQ ID NO: 171841 - DNA, 20 bp, Artificial Sequence
  Description of Artificial Sequence: Synthetic oligonucleotide
  Target: LAMA2; (+) strand; PAM type: NRG; PAM sequence: TGG
aacatctgttgcttgggatt

SEQ ID NO: 171842 - DNA, 20 bp, Artificial Sequence
  Description of Artificial Sequence: Synthetic oligonucleotide
  Target: LAMA2; (+) strand; PAM type: NRG; PAM sequence: GAG
atttggatgtgctactttat

SEQ ID NO: 171843 - DNA, 20 bp, Artificial Sequence
  Description of Artificial Sequence: Synthetic oligonucleotide
  Target: LAMA2; (+) strand; PAM type: NRG; PAM sequence: AAG
tggatgtgctactttatgag

SEQ ID NO: 171844 - DNA, 20 bp, Artificial Sequence
  Description of Artificial Sequence: Synthetic oligonucleotide
  Target: LAMA2; (+) strand; PAM type: NRG; PAM sequence: TGG
tgctactttatgagaagctc

SEQ ID NO: 171845 - DNA, 20 bp, Artificial Sequence
  Description of Artificial Sequence: Synthetic oligonucleotide
  Target: LAMA2; (+) strand; PAM type: NRG; PAM sequence: TAG
atgagaagctctggtgcatt

SEQ ID NO: 171846 - DNA, 20 bp, Artificial Sequence
  Description of Artificial Sequence: Synthetic oligonucleotide
  Target: LAMA2; (+) strand; PAM type: NRG; PAM sequence: TAG
gcatttagctcacaattctc

SEQ ID NO: 171847 - DNA, 20 bp, Artificial Sequence
  Description of Artificial Sequence: Synthetic oligonucleotide
  Target: LAMA2; (+) strand; PAM type: NRG; PAM sequence: AGG
catttagctcacaattctct

SEQ ID NO: 171848 - DNA, 20 bp, Artificial Sequence
  Description of Artificial Sequence: Synthetic oligonucleotide
  Target: LAMA2; (+) strand; PAM type: NRG; PAM sequence: GAG
tttagctcacaattctctag

SEQ ID NO: 171849 - DNA, 20 bp, Artificial Sequence
  Description of Artificial Sequence: Synthetic oligonucleotide
  Target: LAMA2; (+) strand; PAM type: NRG; PAM sequence: TAG
gctcacaattctctaggagt

SEQ ID NO: 171850 - DNA, 20 bp, Artificial Sequence
  Description of Artificial Sequence: Synthetic oligonucleotide
  Target: LAMA2; (+) strand; PAM type: NRG; PAM sequence: GAG
tgccatctactaacatgaat

SEQ ID NO: 171851 - DNA, 20 bp, Artificial Sequence
  Description of Artificial Sequence: Synthetic oligonucleotide
  Target: LAMA2; (+) strand; PAM type: NRG; PAM sequence: AAG
atctactaacatgaatgaga

SEQ ID NO: 171852 - DNA, 20 bp, Artificial Sequence
  Description of Artificial Sequence: Synthetic oligonucleotide
  Target: LAMA2; (+) strand; PAM type: NRG; PAM sequence: TGG
tactaacatgaatgagaaag

SEQ ID NO: 171853 - DNA, 20 bp, Artificial Sequence
  Description of Artificial Sequence: Synthetic oligonucleotide
  Target: LAMA2; (+) strand; PAM type: NRG; PAM sequence: AAG
taacatgaatgagaaagtgg

SEQ ID NO: 171854 - DNA, 20 bp, Artificial Sequence
  Description of Artificial Sequence: Synthetic oligonucleotide
  Target: LAMA2; (+) strand; PAM type: NRG; PAM sequence: TGG
agaaagtggaagccattttt

SEQ ID NO: 171855 - DNA, 20 bp, Artificial Sequence
  Description of Artificial Sequence: Synthetic oligonucleotide
  Target: LAMA2; (+) strand; PAM type: NRG; PAM sequence: AAG
tggaagccattttttggcaa

SEQ ID NO: 171856 - DNA, 20 bp, Artificial Sequence
  Description of Artificial Sequence: Synthetic oligonucleotide
  Target: LAMA2; (+) strand; PAM type: NRG; PAM sequence: AAG
ttttggcaaaagcccaaatt

SEQ ID NO: 171857 - DNA, 20 bp, Artificial Sequence
  Description of Artificial Sequence: Synthetic oligonucleotide
  Target: LAMA2; (+) strand; PAM type: NRG; PAM sequence: AAG
agcccaaattaagaaactta

SEQ ID NO: 171858 - DNA, 20 bp, Artificial Sequence
  Description of Artificial Sequence: Synthetic oligonucleotide
  Target: LAMA2; (+) strand; PAM type: NRG; PAM sequence: CAG
attaagaaacttaaagaata

SEQ ID NO: 171859 - DNA, 20 bp, Artificial Sequence
  Description of Artificial Sequence: Synthetic oligonucleotide
  Target: LAMA2; (+) strand; PAM type: NRG; PAM sequence: TAG
actcgccccccaaaaaaacc

SEQ ID NO: 171860 - DNA, 20 bp, Artificial Sequence
  Description of Artificial Sequence: Synthetic oligonucleotide
  Target: LAMA2; (+) strand; PAM type: NRG; PAM sequence: TAG
aataaacgtgcatgcatgtt

SEQ ID NO: 171861 - DNA, 20 bp, Artificial Sequence
  Description of Artificial Sequence: Synthetic oligonucleotide
  Target: LAMA2; (+) strand; PAM type: NRG; PAM sequence: TGG
gtgcatgcatgtttagaaat

SEQ ID NO: 171862 - DNA, 20 bp, Artificial Sequence
  Description of Artificial Sequence: Synthetic oligonucleotide
  Target: LAMA2; (+) strand; PAM type: NRG; PAM sequence: GGG
tgcatgcatgtttagaaatt

SEQ ID NO: 171863 - DNA, 20 bp, Artificial Sequence
  Description of Artificial Sequence: Synthetic oligonucleotide
  Target: LAMA2; (+) strand; PAM type: NRG; PAM sequence: AAG
tttttgttgttttttgcttg

SEQ ID NO: 171864 - DNA, 20 bp, Artificial Sequence
  Description of Artificial Sequence: Synthetic oligonucleotide
  Target: LAMA2; (+) strand; PAM type: NRG; PAM sequence: CAG
ttgttgttttttgcttgaag

SEQ ID NO: 171865 - DNA, 20 bp, Artificial Sequence
  Description of Artificial Sequence: Synthetic oligonucleotide
  Target: LAMA2; (+) strand; PAM type: NRG; PAM sequence: TAG
ctctgcaatattatgcattt

SEQ ID NO: 171866 - DNA, 20 bp, Artificial Sequence
  Description of Artificial Sequence: Synthetic oligonucleotide
  Target: LAMA2; (+) strand; PAM type: NRG; PAM sequence: TAG
agatactttgcttcataatg

SEQ ID NO: 171867 - DNA, 20 bp, Artificial Sequence
  Description of Artificial Sequence: Synthetic oligonucleotide
  Target: LAMA2; (+) strand; PAM type: NRG; PAM sequence: AAG
cataatgtagccaaataaat

SEQ ID NO: 171868 - DNA, 20 bp, Artificial Sequence
  Description of Artificial Sequence: Synthetic oligonucleotide
  Target: LAMA2; (+) strand; PAM type: NRG; PAM sequence: AGG
ataatgtagccaaataaata

SEQ ID NO: 171869 - DNA, 20 bp, Artificial Sequence
  Description of Artificial Sequence: Synthetic oligonucleotide
  Target: LAMA2; (+) strand; PAM type: NRG; PAM sequence: GAG
agccaaataaataaggatgt

SEQ ID NO: 171870 - DNA, 20 bp, Artificial Sequence
  Description of Artificial Sequence: Synthetic oligonucleotide
  Target: LAMA2; (+) strand; PAM type: NRG; PAM sequence: AAG
aaggatgtgagatcaacttc

SEQ ID NO: 171871 - DNA, 20 bp, Artificial Sequence
  Description of Artificial Sequence: Synthetic oligonucleotide
  Target: LAMA2; (+) strand; PAM type: NRG; PAM sequence: AGG
aggatgtgagatcaacttca

SEQ ID NO: 171872 - DNA, 20 bp, Artificial Sequence
  Description of Artificial Sequence: Synthetic oligonucleotide
  Target: LAMA2; (+) strand; PAM type: NRG; PAM sequence: CAG
atgtgagatcaacttcaagg

SEQ ID NO: 171873 - DNA, 20 bp, Artificial Sequence
  Description of Artificial Sequence: Synthetic oligonucleotide
  Target: LAMA2; (+) strand; PAM type: NRG; PAM sequence: TAG
agattctgactgataattct

SEQ ID NO: 171874 - DNA, 20 bp, Artificial Sequence
  Description of Artificial Sequence: Synthetic oligonucleotide
  Target: LAMA2; (+) strand; PAM type: NRG; PAM sequence: AGG
gattctgactgataattctt

SEQ ID NO: 171875 - DNA, 20 bp, Artificial Sequence
  Description of Artificial Sequence: Synthetic oligonucleotide
  Target: LAMA2; (+) strand; PAM type: NRG; PAM sequence: TGG
tgataattcttaggcatcac

SEQ ID NO: 171876 - DNA, 20 bp, Artificial Sequence
  Description of Artificial Sequence: Synthetic oligonucleotide
  Target: LAMA2; (+) strand; PAM type: NRG; PAM sequence: AAG
attcttaggcatcactggcc

SEQ ID NO: 171877 - DNA, 20 bp, Artificial Sequence
  Description of Artificial Sequence: Synthetic oligonucleotide
  Target: LAMA2; (+) strand; PAM type: NRG; PAM sequence: AAG
cttaggcatcactggccaag

SEQ ID NO: 171878 - DNA, 20 bp, Artificial Sequence
  Description of Artificial Sequence: Synthetic oligonucleotide
  Target: LAMA2; (+) strand; PAM type: NRG; PAM sequence: GAG
taggcatcactggccaagaa

SEQ ID NO: 171879 - DNA, 20 bp, Artificial Sequence
  Description of Artificial Sequence: Synthetic oligonucleotide
  Target: LAMA2; (+) strand; PAM type: NRG; PAM sequence: AAG
tcccaaatgttcaccactgc

SEQ ID NO: 171880 - DNA, 20 bp, Artificial Sequence
  Description of Artificial Sequence: Synthetic oligonucleotide
  Target: LAMA2; (+) strand; PAM type: NRG; PAM sequence: AAG
caaatgttcaccactgcaag

SEQ ID NO: 171881 - DNA, 20 bp, Artificial Sequence
  Description of Artificial Sequence: Synthetic oligonucleotide
  Target: LAMA2; (+) strand; PAM type: NRG; PAM sequence: CAG
ttcaccactgcaagaagcaa

SEQ ID NO: 171882 - DNA, 20 bp, Artificial Sequence
  Description of Artificial Sequence: Synthetic oligonucleotide
  Target: LAMA2; (+) strand; PAM type: NRG; PAM sequence: AGG
tcaccactgcaagaagcaac

SEQ ID NO: 171883 - DNA, 20 bp, Artificial Sequence
  Description of Artificial Sequence: Synthetic oligonucleotide
  Target: LAMA2; (+) strand; PAM type: NRG; PAM sequence: GGG
caccactgcaagaagcaaca

SEQ ID NO: 171884 - DNA, 20 bp, Artificial Sequence
  Description of Artificial Sequence: Synthetic oligonucleotide
  Target: LAMA2; (+) strand; PAM type: NRG; PAM sequence: GAG
aagcaacagggttttaattt

SEQ ID NO: 171885 - DNA, 20 bp, Artificial Sequence
  Description of Artificial Sequence: Synthetic oligonucleotide
  Target: LAMA2; (+) strand; PAM type: NRG; PAM sequence: GAG
gcaacagggttttaatttga

SEQ ID NO: 171886 - DNA, 20 bp, Artificial Sequence
  Description of Artificial Sequence: Synthetic oligonucleotide
  Target: LAMA2; (+) strand; PAM type: NRG; PAM sequence: GAG
tttaatttgagagctaattt

SEQ ID NO: 171887 - DNA, 20 bp, Artificial Sequence
  Description of Artificial Sequence: Synthetic oligonucleotide
  Target: LAMA2; (+) strand; PAM type: NRG; PAM sequence: AGG
ttaatttgagagctaatttg

SEQ ID NO: 171888 - DNA, 20 bp, Artificial Sequence
  Description of Artificial Sequence: Synthetic oligonucleotide
  Target: LAMA2; (+) strand; PAM type: NRG; PAM sequence: AAG
ttgagagctaatttgaggca

SEQ ID NO: 171889 - DNA, 20 bp, Artificial Sequence
  Description of Artificial Sequence: Synthetic oligonucleotide
  Target: LAMA2; (+) strand; PAM type: NRG; PAM sequence: AGG
tgagagctaatttgaggcaa

SEQ ID NO: 171890 - DNA, 20 bp, Artificial Sequence
  Description of Artificial Sequence: Synthetic oligonucleotide
  Target: LAMA2; (+) strand; PAM type: NRG; PAM sequence: GAG
ctaatttgaggcaaaggtgt

SEQ ID NO: 171891 - DNA, 20 bp, Artificial Sequence
  Description of Artificial Sequence: Synthetic oligonucleotide
  Target: LAMA2; (+) strand; PAM type: NRG; PAM sequence: AGG
taatttgaggcaaaggtgtg

SEQ ID NO: 171892 - DNA, 20 bp, Artificial Sequence
  Description of Artificial Sequence: Synthetic oligonucleotide
  Target: LAMA2; (+) strand; PAM type: NRG; PAM sequence: CAG
aaaggtgtgaggttctgaaa

SEQ ID NO: 171893 - DNA, 20 bp, Artificial Sequence
  Description of Artificial Sequence: Synthetic oligonucleotide
  Target: LAMA2; (+) strand; PAM type: NRG; PAM sequence: CAG
gaaacagaaattatttctgc

SEQ ID NO: 171894 - DNA, 20 bp, Artificial Sequence
  Description of Artificial Sequence: Synthetic oligonucleotide
  Target: LAMA2; (+) strand; PAM type: NRG; PAM sequence: CAG
tatttctgccagaaaaatct

SEQ ID NO: 171895 - DNA, 20 bp, Artificial Sequence
  Description of Artificial Sequence: Synthetic oligonucleotide
  Target: LAMA2; (+) strand; PAM type: NRG; PAM sequence: TGG
aaatctcagttaattcattg

SEQ ID NO: 171896 - DNA, 20 bp, Artificial Sequence
  Description of Artificial Sequence: Synthetic oligonucleotide
  Target: LAMA2; (+) strand; PAM type: NRG; PAM sequence: TAG
cattgtggtttatcctctgc

SEQ ID NO: 171897 - DNA, 20 bp, Artificial Sequence
  Description of Artificial Sequence: Synthetic oligonucleotide
  Target: LAMA2; (+) strand; PAM type: NRG; PAM sequence: AAG
ggtttatcctctgctagatg

SEQ ID NO: 171898 - DNA, 20 bp, Artificial Sequence
  Description of Artificial Sequence: Synthetic oligonucleotide
  Target: LAMA2; (+) strand; PAM type: NRG; PAM sequence: TAG
tgaagctgttgtactttccc

SEQ ID NO: 171899 - DNA, 20 bp, Artificial Sequence
  Description of Artificial Sequence: Synthetic oligonucleotide
  Target: LAMA2; (+) strand; PAM type: NRG; PAM sequence: AAG
ttttccattaatgctacttg

SEQ ID NO: 171900 - DNA, 20 bp, Artificial Sequence
  Description of Artificial Sequence: Synthetic oligonucleotide
  Target: LAMA2; (+) strand; PAM type: NRG; PAM sequence: CAG
aacaacaacaaatcccactg

SEQ ID NO: 171901 - DNA, 20 bp, Artificial Sequence
  Description of Artificial Sequence: Synthetic oligonucleotide
  Target: LAMA2; (+) strand; PAM type: NRG; PAM sequence: AGG
acaacaacaaatcccactgc

SEQ ID NO: 171902 - DNA, 20 bp, Artificial Sequence
  Description of Artificial Sequence: Synthetic oligonucleotide
  Target: LAMA2; (+) strand; PAM type: NRG; PAM sequence: TAG
acaacaaatcccactgcagg

SEQ ID NO: 171903 - DNA, 20 bp, Artificial Sequence
  Description of Artificial Sequence: Synthetic oligonucleotide
  Target: LAMA2; (+) strand; PAM type: NRG; PAM sequence: GAG
aacaaatcccactgcaggta

SEQ ID NO: 171904 - DNA, 20 bp, Artificial Sequence
  Description of Artificial Sequence: Synthetic oligonucleotide
  Target: LAMA2; (+) strand; PAM type: NRG; PAM sequence: GAG
aggtagagcaccttcactct

SEQ ID NO: 171905 - DNA, 20 bp, Artificial Sequence
  Description of Artificial Sequence: Synthetic oligonucleotide
  Target: LAMA2; (+) strand; PAM type: NRG; PAM sequence: CGG
tagagcaccttcactctgag

SEQ ID NO: 171906 - DNA, 20 bp, Artificial Sequence
  Description of Artificial Sequence: Synthetic oligonucleotide
  Target: LAMA2; (+) strand; PAM type: NRG; PAM sequence: AAG
tcactctgagcggatcccca

SEQ ID NO: 171907 - DNA, 20 bp, Artificial Sequence
  Description of Artificial Sequence: Synthetic oligonucleotide
  Target: LAMA2; (+) strand; PAM type: NRG; PAM sequence: AGG
cactctgagcggatccccaa

SEQ ID NO: 171908 - DNA, 20 bp, Artificial Sequence
  Description of Artificial Sequence: Synthetic oligonucleotide
  Target: LAMA2; (+) strand; PAM type: NRG; PAM sequence: TAG
gagcggatccccaaaggccc

SEQ ID NO: 171909 - DNA, 20 bp, Artificial Sequence
  Description of Artificial Sequence: Synthetic oligonucleotide
  Target: LAMA2; (+) strand; PAM type: NRG; PAM sequence: CAG
aaaggccctagtcaatgctc

SEQ ID NO: 171910 - DNA, 20 bp, Artificial Sequence
  Description of Artificial Sequence: Synthetic oligonucleotide
  Target: LAMA2; (+) strand; PAM type: NRG; PAM sequence: AGG
aaggccctagtcaatgctcc

SEQ ID NO: 171911 - DNA, 20 bp, Artificial Sequence
  Description of Artificial Sequence: Synthetic oligonucleotide
  Target: LAMA2; (+) strand; PAM type: NRG; PAM sequence: TAG
catttcaaacacccaacacc

SEQ ID NO: 171912 - DNA, 20 bp, Artificial Sequence
  Description of Artificial Sequence: Synthetic oligonucleotide
  Target: LAMA2; (+) strand; PAM type: NRG; PAM sequence: CAG
ttcaaacacccaacacctag

SEQ ID NO: 171913 - DNA, 20 bp, Artificial Sequence
  Description of Artificial Sequence: Synthetic oligonucleotide
  Target: LAMA2; (+) strand; PAM type: NRG; PAM sequence: TGG
caacacctagcagcccatcc

SEQ ID NO: 171914 - DNA, 20 bp, Artificial Sequence
  Description of Artificial Sequence: Synthetic oligonucleotide
  Target: LAMA2; (+) strand; PAM type: NRG; PAM sequence: GGG
aacacctagcagcccatcct

SEQ ID NO: 171915 - DNA, 20 bp, Artificial Sequence
  Description of Artificial Sequence: Synthetic oligonucleotide
  Target: LAMA2; (+) strand; PAM type: NRG; PAM sequence: GGG
acacctagcagcccatcctg

SEQ ID NO: 171916 - DNA, 20 bp, Artificial Sequence
  Description of Artificial Sequence: Synthetic oligonucleotide
  Target: LAMA2; (+) strand; PAM type: NRG; PAM sequence: TGG
aatttgtttcaatcaaacac

SEQ ID NO: 171917 - DNA, 20 bp, Artificial Sequence
  Description of Artificial Sequence: Synthetic oligonucleotide
  Target: LAMA2; (+) strand; PAM type: NRG; PAM sequence: GAG
tttcaatcaaacactggtat

SEQ ID NO: 171918 - DNA, 20 bp, Artificial Sequence
  Description of Artificial Sequence: Synthetic oligonucleotide
  Target: LAMA2; (+) strand; PAM type: NRG; PAM sequence: TAG
actggtatgagaataaatgc

SEQ ID NO: 171919 - DNA, 20 bp, Artificial Sequence
  Description of Artificial Sequence: Synthetic oligonucleotide
  Target: LAMA2; (+) strand; PAM type: NRG; PAM sequence: TAG
ataaatgctagcatatgttt

SEQ ID NO: 171920 - DNA, 20 bp, Artificial Sequence
  Description of Artificial Sequence: Synthetic oligonucleotide
  Target: LAMA2; (+) strand; PAM type: NRG; PAM sequence: TAG
aatgctagcatatgttttag

SEQ ID NO: 171921 - DNA, 20 bp, Artificial Sequence
  Description of Artificial Sequence: Synthetic oligonucleotide
  Target: LAMA2; (+) strand; PAM type: NRG; PAM sequence: AAG
gaaccttccatctcccacca

SEQ ID NO: 171922 - DNA, 20 bp, Artificial Sequence
  Description of Artificial Sequence: Synthetic oligonucleotide
  Target: LAMA2; (+) strand; PAM type: NRG; PAM sequence: GAG
accttccatctcccaccaaa

SEQ ID NO: 171923 - DNA, 20 bp, Artificial Sequence
  Description of Artificial Sequence: Synthetic oligonucleotide
  Target: LAMA2; (+) strand; PAM type: NRG; PAM sequence: GAG
cttccatctcccaccaaaga

SEQ ID NO: 171924 - DNA, 20 bp, Artificial Sequence
  Description of Artificial Sequence: Synthetic oligonucleotide
  Target: LAMA2; (+) strand; PAM type: NRG; PAM sequence: TGG
caaagagagatgcatattca

SEQ ID NO: 171925 - DNA, 20 bp, Artificial Sequence
  Description of Artificial Sequence: Synthetic oligonucleotide
  Target: LAMA2; (+) strand; PAM type: NRG; PAM sequence: TGG
catattcatggttacctctt

SEQ ID NO: 171926 - DNA, 20 bp, Artificial Sequence
  Description of Artificial Sequence: Synthetic oligonucleotide
  Target: LAMA2; (+) strand; PAM type: NRG; PAM sequence: TGG
atatgaatatttgcttcttc

SEQ ID NO: 171927 - DNA, 20 bp, Artificial Sequence
  Description of Artificial Sequence: Synthetic oligonucleotide
  Target: LAMA2; (+) strand; PAM type: NRG; PAM sequence: GGG
tatgaatatttgcttcttct

SEQ ID NO: 171928 - DNA, 20 bp, Artificial Sequence
  Description of Artificial Sequence: Synthetic oligonucleotide
  Target: LAMA2; (+) strand; PAM type: NRG; PAM sequence: TAG
atttgcttcttctgggtgcc

SEQ ID NO: 171929 - DNA, 20 bp, Artificial Sequence
  Description of Artificial Sequence: Synthetic oligonucleotide
  Target: LAMA2; (+) strand; PAM type: NRG; PAM sequence: AGG
tttgcttcttctgggtgcct

SEQ ID NO: 171930 - DNA, 20 bp, Artificial Sequence
  Description of Artificial Sequence: Synthetic oligonucleotide
  Target: LAMA2; (+) strand; PAM type: NRG; PAM sequence: GGG
ttgcttcttctgggtgccta

SEQ ID NO: 171931 - DNA, 20 bp, Artificial Sequence
  Description of Artificial Sequence: Synthetic oligonucleotide
  Target: LAMA2; (+) strand; PAM type: NRG; PAM sequence: TAG
ttctgggtgcctagggcctc

SEQ ID NO: 171932 - DNA, 20 bp, Artificial Sequence
  Description of Artificial Sequence: Synthetic oligonucleotide
  Target: LAMA2; (+) strand; PAM type: NRG; PAM sequence: AGG
tctgggtgcctagggcctct

SEQ ID NO: 171933 - DNA, 20 bp, Artificial Sequence
  Description of Artificial Sequence: Synthetic oligonucleotide
  Target: LAMA2; (+) strand; PAM type: NRG; PAM sequence: TGG
ggtactatttgtacaatttg

SEQ ID NO: 171934 - DNA, 20 bp, Artificial Sequence
  Description of Artificial Sequence: Synthetic oligonucleotide
  Target: LAMA2; (+) strand; PAM type: NRG; PAM sequence: CAG
ttgtacaatttgtggaccaa

SEQ ID NO: 171935 - DNA, 20 bp, Artificial Sequence
  Description of Artificial Sequence: Synthetic oligonucleotide
  Target: LAMA2; (+) strand; PAM type: NRG; PAM sequence: AGG
tgtacaatttgtggaccaac

SEQ ID NO: 171936 - DNA, 20 bp, Artificial Sequence
  Description of Artificial Sequence: Synthetic oligonucleotide
  Target: LAMA2; (+) strand; PAM type: NRG; PAM sequence: GGG
gtacaatttgtggaccaaca

SEQ ID NO: 171937 - DNA, 20 bp, Artificial Sequence
  Description of Artificial Sequence: Synthetic oligonucleotide
  Target: LAMA2; (+) strand; PAM type: NRG; PAM sequence: GGG
tacaatttgtggaccaacag

SEQ ID NO: 171938 - DNA, 20 bp, Artificial Sequence
  Description of Artificial Sequence: Synthetic oligonucleotide
  Target: LAMA2; (+) strand; PAM type: NRG; PAM sequence: TAG
aatttgtggaccaacagggg

SEQ ID NO: 171939 - DNA, 20 bp, Artificial Sequence
  Description of Artificial Sequence: Synthetic oligonucleotide
  Target: LAMA2; (+) strand; PAM type: NRG; PAM sequence: TGG
gtggaccaacaggggtagac

SEQ ID NO: 171940 - DNA, 20 bp, Artificial Sequence
  Description of Artificial Sequence: Synthetic oligonucleotide
  Target: LAMA2; (+) strand; PAM type: NRG; PAM sequence: GAG
ggaccaacaggggtagactg

SEQ ID NO: 171941 - DNA, 20 bp, Artificial Sequence
  Description of Artificial Sequence: Synthetic oligonucleotide
  Target: LAMA2; (+) strand; PAM type: NRG; PAM sequence: TGG
caacaggggtagactggaga

SEQ ID NO: 171942 - DNA, 20 bp, Artificial Sequence
  Description of Artificial Sequence: Synthetic oligonucleotide
  Target: LAMA2; (+) strand; PAM type: NRG; PAM sequence: GAG
acaggggtagactggagatg

SEQ ID NO: 171943 - DNA, 20 bp, Artificial Sequence
  Description of Artificial Sequence: Synthetic oligonucleotide
  Target: LAMA2; (+) strand; PAM type: NRG; PAM sequence: CAG
ctggagatggagatttatcc

SEQ ID NO: 171944 - DNA, 20 bp, Artificial Sequence
  Description of Artificial Sequence: Synthetic oligonucleotide
  Target: LAMA2; (+) strand; PAM type: NRG; PAM sequence: AGG
tggagatggagatttatccc

SEQ ID NO: 171945 - DNA, 20 bp, Artificial Sequence
  Description of Artificial Sequence: Synthetic oligonucleotide
  Target: LAMA2; (+) strand; PAM type: NRG; PAM sequence: CAG
caaatcccacgtctatacac

SEQ ID NO: 171946 - DNA, 20 bp, Artificial Sequence
  Description of Artificial Sequence: Synthetic oligonucleotide
  Target: LAMA2; (+) strand; PAM type: NRG; PAM sequence: GAG
aatcccacgtctatacacca

SEQ ID NO: 171947 - DNA, 20 bp, Artificial Sequence
  Description of Artificial Sequence: Synthetic oligonucleotide
  Target: LAMA2; (+) strand; PAM type: NRG; PAM sequence: AAG
ccacgtctatacaccagaga

SEQ ID NO: 171948 - DNA, 20 bp, Artificial Sequence
  Description of Artificial Sequence: Synthetic oligonucleotide
  Target: LAMA2; (+) strand; PAM type: NRG; PAM sequence: AGG
cacgtctatacaccagagaa

SEQ ID NO: 171949 - DNA, 20 bp, Artificial Sequence
  Description of Artificial Sequence: Synthetic oligonucleotide
  Target: LAMA2; (+) strand; PAM type: NRG; PAM sequence: AAG
gaaaggattacccatcacca

SEQ ID NO: 171950 - DNA, 20 bp, Artificial Sequence
  Description of Artificial Sequence: Synthetic oligonucleotide
  Target: LAMA2; (+) strand; PAM type: NRG; PAM sequence: AGG
aaaggattacccatcaccaa

SEQ ID NO: 171951 - DNA, 20 bp, Artificial Sequence
  Description of Artificial Sequence: Synthetic oligonucleotide
  Target: LAMA2; (+) strand; PAM type: NRG; PAM sequence: TAG
ctcgttccctaaattatgca

SEQ ID NO: 171952 - DNA, 20 bp, Artificial Sequence
  Description of Artificial Sequence: Synthetic oligonucleotide
  Target: LAMA2; (+) strand; PAM type: NRG; PAM sequence: CAG
tccctaaattatgcatagat

SEQ ID NO: 171953 - DNA, 20 bp, Artificial Sequence
  Description of Artificial Sequence: Synthetic oligonucleotide
  Target: LAMA2; (+) strand; PAM type: NRG; PAM sequence: AGG
ccctaaattatgcatagatc

SEQ ID NO: 171954 - DNA, 20 bp, Artificial Sequence
  Description of Artificial Sequence: Synthetic oligonucleotide
  Target: LAMA2; (+) strand; PAM type: NRG; PAM sequence: TGG
taaattatgcatagatcagg

SEQ ID NO: 171955 - DNA, 20 bp, Artificial Sequence
  Description of Artificial Sequence: Synthetic oligonucleotide
  Target: LAMA2; (+) strand; PAM type: NRG; PAM sequence: CAG
gtggtctgattgtgtctgtc

SEQ ID NO: 171956 - DNA, 20 bp, Artificial Sequence
  Description of Artificial Sequence: Synthetic oligonucleotide
  Target: LAMA2; (+) strand; PAM type: NRG; PAM sequence: TAG
tctgattgtgtctgtccaga

SEQ ID NO: 171957 - DNA, 20 bp, Artificial Sequence
  Description of Artificial Sequence: Synthetic oligonucleotide
  Target: LAMA2; (+) strand; PAM type: NRG; PAM sequence: AGG
ctgattgtgtctgtccagat

SEQ ID NO: 171958 - DNA, 20 bp, Artificial Sequence
  Description of Artificial Sequence: Synthetic oligonucleotide
  Target: LAMA2; (+) strand; PAM type: NRG; PAM sequence: GGG
tgattgtgtctgtccagata

SEQ ID NO: 171959 - DNA, 20 bp, Artificial Sequence
  Description of Artificial Sequence: Synthetic oligonucleotide
  Target: LAMA2; (+) strand; PAM type: NRG; PAM sequence: AAG
acccttttctaatttatgtg

SEQ ID NO: 171960 - DNA, 20 bp, Artificial Sequence
  Description of Artificial Sequence: Synthetic oligonucleotide
  Target: LAMA2; (+) strand; PAM type: NRG; PAM sequence: TGG
aatttatgtgaagtgccatg

SEQ ID NO: 171961 - DNA, 20 bp, Artificial Sequence
  Description of Artificial Sequence: Synthetic oligonucleotide
  Target: LAMA2; (+) strand; PAM type: NRG; PAM sequence: GGG
atttatgtgaagtgccatgt

SEQ ID NO: 171962 - DNA, 20 bp, Artificial Sequence
  Description of Artificial Sequence: Synthetic oligonucleotide
  Target: LAMA2; (+) strand; PAM type: NRG; PAM sequence: TAG
atgtgaagtgccatgtggga

SEQ ID NO: 171963 - DNA, 20 bp, Artificial Sequence
  Description of Artificial Sequence: Synthetic oligonucleotide
  Target: LAMA2; (+) strand; PAM type: NRG; PAM sequence: TAG
catgtgggatagctatactt

SEQ ID NO: 171964 - DNA, 20 bp, Artificial Sequence
  Description of Artificial Sequence: Synthetic oligonucleotide
  Target: LAMA2; (+) strand; PAM type: NRG; PAM sequence: AGG
atgtgggatagctatacttt

SEQ ID NO: 171965 - DNA, 20 bp, Artificial Sequence
  Description of Artificial Sequence: Synthetic oligonucleotide
  Target: LAMA2; (+) strand; PAM type: NRG; PAM sequence: GGG
tgtgggatagctatacttta

SEQ ID NO: 171966 - DNA, 20 bp, Artificial Sequence
  Description of Artificial Sequence: Synthetic oligonucleotide
  Target: LAMA2; (+) strand; PAM type: NRG; PAM sequence: AAG
tagctatactttagggaaat

SEQ ID NO: 171967 - DNA, 20 bp, Artificial Sequence
  Description of Artificial Sequence: Synthetic oligonucleotide
  Target: LAMA2; (+) strand; PAM type: NRG; PAM sequence: CAG
acaccactcacttttgcctg

SEQ ID NO: 171968 - DNA, 20 bp, Artificial Sequence
  Description of Artificial Sequence: Synthetic oligonucleotide
  Target: LAMA2; (+) strand; PAM type: NRG; PAM sequence: AGG
caccactcacttttgcctgc

SEQ ID NO: 171969 - DNA, 20 bp, Artificial Sequence
  Description of Artificial Sequence: Synthetic oligonucleotide
  Target: LAMA2; (+) strand; PAM type: NRG; PAM sequence: TGG
ttttgcctgcaggcactatt

SEQ ID NO: 171970 - DNA, 20 bp, Artificial Sequence
  Description of Artificial Sequence: Synthetic oligonucleotide
  Target: LAMA2; (+) strand; PAM type: NRG; PAM sequence: TAG
tgcctgcaggcactatttgg

SEQ ID NO: 171971 - DNA, 20 bp, Artificial Sequence
  Description of Artificial Sequence: Synthetic oligonucleotide
  Target: LAMA2; (+) strand; PAM type: NRG; PAM sequence: AAG
caactgttaaaattgaatga

SEQ ID NO: 171972 - DNA, 20 bp, Artificial Sequence
  Description of Artificial Sequence: Synthetic oligonucleotide
  Target: LAMA2; (+) strand; PAM type: NRG; PAM sequence: AGG
aactgttaaaattgaatgaa

SEQ ID NO: 171973 - DNA, 20 bp, Artificial Sequence
  Description of Artificial Sequence: Synthetic oligonucleotide
  Target: LAMA2; (+) strand; PAM type: NRG; PAM sequence: CAG
aggtcaaatttaaattgtac

SEQ ID NO: 171974 - DNA, 20 bp, Artificial Sequence
  Description of Artificial Sequence: Synthetic oligonucleotide
  Target: LAMA2; (+) strand; PAM type: NRG; PAM sequence: GAG
gtcaaatttaaattgtacca

SEQ ID NO: 171975 - DNA, 20 bp, Artificial Sequence
  Description of Artificial Sequence: Synthetic oligonucleotide
  Target: LAMA2; (+) strand; PAM type: NRG; PAM sequence: GAG
agcaacactaaatgttcatt

SEQ ID NO: 171976 - DNA, 20 bp, Artificial Sequence
  Description of Artificial Sequence: Synthetic oligonucleotide
  Target: LAMA2; (+) strand; PAM type: NRG; PAM sequence: AAG
gttcattgagatgtaataca

SEQ ID NO: 171977 - DNA, 20 bp, Artificial Sequence
  Description of Artificial Sequence: Synthetic oligonucleotide
  Target: LAMA2; (+) strand; PAM type: NRG; PAM sequence: TGG
ttgagatgtaatacaaagct

SEQ ID NO: 171978 - DNA, 20 bp, Artificial Sequence
  Description of Artificial Sequence: Synthetic oligonucleotide
  Target: LAMA2; (+) strand; PAM type: NRG; PAM sequence: CAG
agatgtaatacaaagcttgg

SEQ ID NO: 171979 - DNA, 20 bp, Artificial Sequence
  Description of Artificial Sequence: Synthetic oligonucleotide
  Target: LAMA2; (+) strand; PAM type: NRG; PAM sequence: TGG
tacaaagcttggcagtttaa

SEQ ID NO: 171980 - DNA, 20 bp, Artificial Sequence
  Description of Artificial Sequence: Synthetic oligonucleotide
  Target: LAMA2; (+) strand; PAM type: NRG; PAM sequence: GAG
caaagcttggcagtttaatg

SEQ ID NO: 171981 - DNA, 20 bp, Artificial Sequence
  Description of Artificial Sequence: Synthetic oligonucleotide
  Target: LAMA2; (+) strand; PAM type: NRG; PAM sequence: AAG
ggcagtttaatggagaaaaa

SEQ ID NO: 171982 - DNA, 20 bp, Artificial Sequence
  Description of Artificial Sequence: Synthetic oligonucleotide
  Target: LAMA2; (+) strand; PAM type: NRG; PAM sequence: GAG
cagtttaatggagaaaaaaa

SEQ ID NO: 171983 - DNA, 20 bp, Artificial Sequence
  Description of Artificial Sequence: Synthetic oligonucleotide
  Target: LAMA2; (+) strand; PAM type: NRG; PAM sequence: AAG
ttaatggagaaaaaaagaga

SEQ ID NO: 171984 - DNA, 20 bp, Artificial Sequence
  Description of Artificial Sequence: Synthetic oligonucleotide
  Target: LAMA2; (+) strand; PAM type: NRG; PAM sequence: TGG
atggagaaaaaaagagaaag

SEQ ID NO: 171985 - DNA, 20 bp, Artificial Sequence
  Description of Artificial Sequence: Synthetic oligonucleotide
  Target: LAMA2; (+) strand; PAM type: NRG; PAM sequence: GGG
tggagaaaaaaagagaaagt

SEQ ID NO: 171986 - DNA, 20 bp, Artificial Sequence
  Description of Artificial Sequence: Synthetic oligonucleotide
  Target: LAMA2; (+) strand; PAM type: NRG; PAM sequence: GGG
ggagaaaaaaagagaaagtg

SEQ ID NO: 171987 - DNA, 20 bp, Artificial Sequence
  Description of Artificial Sequence: Synthetic oligonucleotide
  Target: LAMA2; (+) strand; PAM type: NRG; PAM sequence: GGG
gagaaaaaaagagaaagtgg

SEQ ID NO: 171988 - DNA, 20 bp, Artificial Sequence
  Description of Artificial Sequence: Synthetic oligonucleotide
  Target: LAMA2; (+) strand; PAM type: NRG; PAM sequence: AAG
aaaaaaagagaaagtggggg

SEQ ID NO: 171989 - DNA, 20 bp, Artificial Sequence
  Description of Artificial Sequence: Synthetic oligonucleotide
  Target: LAMA2; (+) strand; PAM type: NRG; PAM sequence: AGG
aaaaaagagaaagtggggga

SEQ ID NO: 171990 - DNA, 20 bp, Artificial Sequence
  Description of Artificial Sequence: Synthetic oligonucleotide
  Target: LAMA2; (+) strand; PAM type: NRG; PAM sequence: AAG
aaagagaaagtgggggaagg

SEQ ID NO: 171991 - DNA, 20 bp, Artificial Sequence
  Description of Artificial Sequence: Synthetic oligonucleotide
  Target: LAMA2; (+) strand; PAM type: NRG; PAM sequence: AGG
aagagaaagtgggggaagga

SEQ ID NO: 171992 - DNA, 20 bp, Artificial Sequence
  Description of Artificial Sequence: Synthetic oligonucleotide
  Target: LAMA2; (+) strand; PAM type: NRG; PAM sequence: GGG
agagaaagtgggggaaggaa

SEQ ID NO: 171993 - DNA, 20 bp, Artificial Sequence
  Description of Artificial Sequence: Synthetic oligonucleotide
  Target: LAMA2; (+) strand; PAM type: NRG; PAM sequence: GAG
agaaagtgggggaaggaagg

SEQ ID NO: 171994 - DNA, 20 bp, Artificial Sequence
  Description of Artificial Sequence: Synthetic oligonucleotide
  Target: LAMA2; (+) strand; PAM type: NRG; PAM sequence: AGG
gaaagtgggggaaggaaggg

SEQ ID NO: 171995 - DNA, 20 bp, Artificial Sequence
  Description of Artificial Sequence: Synthetic oligonucleotide
  Target: LAMA2; (+) strand; PAM type: NRG; PAM sequence: GGG
aaagtgggggaaggaaggga

SEQ ID NO: 171996 - DNA, 20 bp, Artificial Sequence
  Description of Artificial Sequence: Synthetic oligonucleotide
  Target: LAMA2; (+) strand; PAM type: NRG; PAM sequence: GGG
aagtgggggaaggaagggag

SEQ ID NO: 171997 - DNA, 20 bp, Artificial Sequence
  Description of Artificial Sequence: Synthetic oligonucleotide
  Target: LAMA2; (+) strand; PAM type: NRG; PAM sequence: GAG
gtgggggaaggaagggaggg

SEQ ID NO: 171998 - DNA, 20 bp, Artificial Sequence
  Description of Artificial Sequence: Synthetic oligonucleotide
  Target: LAMA2; (+) strand; PAM type: NRG; PAM sequence: AGG
tgggggaaggaagggagggg

SEQ ID NO: 171999 - DNA, 20 bp, Artificial Sequence
  Description of Artificial Sequence: Synthetic oligonucleotide
  Target: LAMA2; (+) strand; PAM type: NRG; PAM sequence: GGG
gggggaaggaagggagggga

SEQ ID NO: 172000 - DNA, 20 bp, Artificial Sequence
  Description of Artificial Sequence: Synthetic oligonucleotide
  Target: LAMA2; (+) strand; PAM type: NRG; PAM sequence: AAG
ggaaggaagggaggggaggg

SEQ ID NO: 172001 - DNA, 20 bp, Artificial Sequence
  Description of Artificial Sequence: Synthetic oligonucleotide
  Target: LAMA2; (+) strand; PAM type: NRG; PAM sequence: AGG
gaaggaagggaggggaggga

SEQ ID NO: 172002 - DNA, 20 bp, Artificial Sequence
  Description of Artificial Sequence: Synthetic oligonucleotide
  Target: LAMA2; (+) strand; PAM type: NRG; PAM sequence: AAG
ggaagggaggggagggaagg

SEQ ID NO: 172003 - DNA, 20 bp, Artificial Sequence
  Description of Artificial Sequence: Synthetic oligonucleotide
  Target: LAMA2; (+) strand; PAM type: NRG; PAM sequence: GAG
aagggaggggagggaaggaa

SEQ ID NO: 172004 - DNA, 20 bp, Artificial Sequence
  Description of Artificial Sequence: Synthetic oligonucleotide
  Target: LAMA2; (+) strand; PAM type: NRG; PAM sequence: GAG
gggaggggagggaaggaaga

SEQ ID NO: 172005 - DNA, 20 bp, Artificial Sequence
  Description of Artificial Sequence: Synthetic oligonucleotide
  Target: LAMA2; (+) strand; PAM type: NRG; PAM sequence: AGG
ggaggggagggaaggaagag

SEQ ID NO: 172006 - DNA, 20 bp, Artificial Sequence
  Description of Artificial Sequence: Synthetic oligonucleotide
  Target: LAMA2; (+) strand; PAM type: NRG; PAM sequence: GGG
gaggggagggaaggaagaga

SEQ ID NO: 172007 - DNA, 20 bp, Artificial Sequence
  Description of Artificial Sequence: Synthetic oligonucleotide
  Target: LAMA2; (+) strand; PAM type: NRG; PAM sequence: GGG
aggggagggaaggaagagag

SEQ ID NO: 172008 - DNA, 20 bp, Artificial Sequence
  Description of Artificial Sequence: Synthetic oligonucleotide
  Target: LAMA2; (+) strand; PAM type: NRG; PAM sequence: GAG
gggagggaaggaagagaggg

SEQ ID NO: 172009 - DNA, 20 bp, Artificial Sequence
  Description of Artificial Sequence: Synthetic oligonucleotide
  Target: LAMA2; (+) strand; PAM type: NRG; PAM sequence: AGG
ggagggaaggaagagagggg

SEQ ID NO: 172010 - DNA, 20 bp, Artificial Sequence
  Description of Artificial Sequence: Synthetic oligonucleotide
  Target: LAMA2; (+) strand; PAM type: NRG; PAM sequence: GGG
gagggaaggaagagagggga

SEQ ID NO: 172011 - DNA, 20 bp, Artificial Sequence
  Description of Artificial Sequence: Synthetic oligonucleotide
  Target: LAMA2; (+) strand; PAM type: NRG; PAM sequence: GAG
gggaaggaagagaggggagg

SEQ ID NO: 172012 - DNA, 20 bp, Artificial Sequence
  Description of Artificial Sequence: Synthetic oligonucleotide
  Target: LAMA2; (+) strand; PAM type: NRG; PAM sequence: AGG
ggaaggaagagaggggaggg

SEQ ID NO: 172013 - DNA, 20 bp, Artificial Sequence
  Description of Artificial Sequence: Synthetic oligonucleotide
  Target: LAMA2; (+) strand; PAM type: NRG; PAM sequence: AAG
aagagaggggagggaggaaa

SEQ ID NO: 172014 - DNA, 20 bp, Artificial Sequence
  Description of Artificial Sequence: Synthetic oligonucleotide
  Target: LAMA2; (+) strand; PAM type: NRG; PAM sequence: AGG
agagaggggagggaggaaaa

SEQ ID NO: 172015 - DNA, 20 bp, Artificial Sequence
  Description of Artificial Sequence: Synthetic oligonucleotide
  Target: LAMA2; (+) strand; PAM type: NRG; PAM sequence: AAG
gaggggagggaggaaaaagg

SEQ ID NO: 172016 - DNA, 20 bp, Artificial Sequence
  Description of Artificial Sequence: Synthetic oligonucleotide
  Target: LAMA2; (+) strand; PAM type: NRG; PAM sequence: AGG
aggggagggaggaaaaagga

SEQ ID NO: 172017 - DNA, 20 bp, Artificial Sequence
  Description of Artificial Sequence: Synthetic oligonucleotide
  Target: LAMA2; (+) strand; PAM type: NRG; PAM sequence: AAG
ggagggaggaaaaaggaagg

SEQ ID NO: 172018 - DNA, 20 bp, Artificial Sequence
  Description of Artificial Sequence: Synthetic oligonucleotide
  Target: LAMA2; (+) strand; PAM type: NRG; PAM sequence: AGG
gagggaggaaaaaggaagga

SEQ ID NO: 172019 - DNA, 20 bp, Artificial Sequence
  Description of Artificial Sequence: Synthetic oligonucleotide
  Target: LAMA2; (+) strand; PAM type: NRG; PAM sequence: GGG
agggaggaaaaaggaaggaa

SEQ ID NO: 172020 - DNA, 20 bp, Artificial Sequence
  Description of Artificial Sequence: Synthetic oligonucleotide
  Target: LAMA2; (+) strand; PAM type: NRG; PAM sequence: GAG
ggaggaaaaaggaaggaagg

SEQ ID NO: 172021 - DNA, 20 bp, Artificial Sequence
  Description of Artificial Sequence: Synthetic oligonucleotide
  Target: LAMA2; (+) strand; PAM type: NRG; PAM sequence: AGG
gaggaaaaaggaaggaaggg

SEQ ID NO: 172022 - DNA, 20 bp, Artificial Sequence
  Description of Artificial Sequence: Synthetic oligonucleotide
  Target: LAMA2; (+) strand; PAM type: NRG; PAM sequence: GGG
aggaaaaaggaaggaaggga

SEQ ID NO: 172023 - DNA, 20 bp, Artificial Sequence
  Description of Artificial Sequence: Synthetic oligonucleotide
  Target: LAMA2; (+) strand; PAM type: NRG; PAM sequence: GAG
gaaaaaggaaggaagggagg

SEQ ID NO: 172024 - DNA, 20 bp, Artificial Sequence
  Description of Artificial Sequence: Synthetic oligonucleotide
  Target: LAMA2; (+) strand; PAM type: NRG; PAM sequence: AGG
aaaaaggaaggaagggaggg

SEQ ID NO: 172025 - DNA, 20 bp, Artificial Sequence
  Description of Artificial Sequence: Synthetic oligonucleotide
  Target: LAMA2; (+) strand; PAM type: NRG; PAM sequence: GGG
aaaaggaaggaagggaggga

SEQ ID NO: 172026 - DNA, 20 bp, Artificial Sequence
  Description of Artificial Sequence: Synthetic oligonucleotide
  Target: LAMA2; (+) strand; PAM type: NRG; PAM sequence: GAG
aaggaaggaagggagggagg

SEQ ID NO: 172027 - DNA, 20 bp, Artificial Sequence
  Description of Artificial Sequence: Synthetic oligonucleotide
  Target: LAMA2; (+) strand; PAM type: NRG; PAM sequence: AGG
aggaaggaagggagggaggg

SEQ ID NO: 172028 - DNA, 20 bp, Artificial Sequence
  Description of Artificial Sequence: Synthetic oligonucleotide
  Target: LAMA2; (+) strand; PAM type: NRG; PAM sequence: GAG
gaaggaagggagggagggag

SEQ ID NO: 172029 - DNA, 20 bp, Artificial Sequence
  Description of Artificial Sequence: Synthetic oligonucleotide
  Target: LAMA2; (+) strand; PAM type: NRG; PAM sequence: GAG
aggaagggagggagggagga

SEQ ID NO: 172030 - DNA, 20 bp, Artificial Sequence
  Description of Artificial Sequence: Synthetic oligonucleotide
  Target: LAMA2; (+) strand; PAM type: NRG; PAM sequence: AGG
ggaagggagggagggaggag

SEQ ID NO: 172031 - DNA, 20 bp, Artificial Sequence
  Description of Artificial Sequence: Synthetic oligonucleotide
  Target: LAMA2; (+) strand; PAM type: NRG; PAM sequence: GGG
gaagggagggagggaggaga

SEQ ID NO: 172032 - DNA, 20 bp, Artificial Sequence
  Description of Artificial Sequence: Synthetic oligonucleotide
  Target: LAMA2; (+) strand; PAM type: NRG; PAM sequence: AAG
gggagggagggaggagaggg

SEQ ID NO: 172033 - DNA, 20 bp, Artificial Sequence
  Description of Artificial Sequence: Synthetic oligonucleotide
  Target: LAMA2; (+) strand; PAM type: NRG; PAM sequence: AGG
ggagggagggaggagaggga

SEQ ID NO: 172034 - DNA, 20 bp, Artificial Sequence
  Description of Artificial Sequence: Synthetic oligonucleotide
  Target: LAMA2; (+) strand; PAM type: NRG; PAM sequence: AAG
gggagggaggagagggaagg

SEQ ID NO: 172035 - DNA, 20 bp, Artificial Sequence
  Description of Artificial Sequence: Synthetic oligonucleotide
  Target: LAMA2; (+) strand; PAM type: NRG; PAM sequence: AGG
ggagggaggagagggaagga

SEQ ID NO: 172036 - DNA, 20 bp, Artificial Sequence
  Description of Artificial Sequence: Synthetic oligonucleotide
  Target: LAMA2; (+) strand; PAM type: NRG; PAM sequence: GGG
gagggaggagagggaaggaa

SEQ ID NO: 172037 - DNA, 20 bp, Artificial Sequence
  Description of Artificial Sequence: Synthetic oligonucleotide
  Target: LAMA2; (+) strand; PAM type: NRG; PAM sequence: GAG
gggaggagagggaaggaagg

SEQ ID NO: 172038 - DNA, 20 bp, Artificial Sequence
  Description of Artificial Sequence: Synthetic oligonucleotide
  Target: LAMA2; (+) strand; PAM type: NRG; PAM sequence: AGG
ggaggagagggaaggaaggg

SEQ ID NO: 172039 - DNA, 20 bp, Artificial Sequence
  Description of Artificial Sequence: Synthetic oligonucleotide
  Target: LAMA2; (+) strand; PAM type: NRG; PAM sequence: GGG
gaggagagggaaggaaggga

SEQ ID NO: 172040 - DNA, 20 bp, Artificial Sequence
  Description of Artificial Sequence: Synthetic oligonucleotide
  Target: LAMA2; (+) strand; PAM type: NRG; PAM sequence: GGG
aggagagggaaggaagggag

SEQ ID NO: 172041 - DNA, 20 bp, Artificial Sequence
  Description of Artificial Sequence: Synthetic oligonucleotide
  Target: LAMA2; (+) strand; PAM type: NRG; PAM sequence: GAG
gagagggaaggaagggaggg

SEQ ID NO: 172042 - DNA, 20 bp, Artificial Sequence
  Description of Artificial Sequence: Synthetic oligonucleotide
  Target: LAMA2; (+) strand; PAM type: NRG; PAM sequence: AGG
agagggaaggaagggagggg

SEQ ID NO: 172043 - DNA, 20 bp, Artificial Sequence
  Description of Artificial Sequence: Synthetic oligonucleotide
  Target: LAMA2; (+) strand; PAM type: NRG; PAM sequence: GGG
gagggaaggaagggagggga

SEQ ID NO: 172044 - DNA, 20 bp, Artificial Sequence
  Description of Artificial Sequence: Synthetic oligonucleotide
  Target: LAMA2; (+) strand; PAM type: NRG; PAM sequence: GAG
gggaaggaagggaggggagg

SEQ ID NO: 172045 - DNA, 20 bp, Artificial Sequence
  Description of Artificial Sequence: Synthetic oligonucleotide
  Target: LAMA2; (+) strand; PAM type: NRG; PAM sequence: AGG
ggaaggaagggaggggaggg

SEQ ID NO: 172046 - DNA, 20 bp, Artificial Sequence
  Description of Artificial Sequence: Synthetic oligonucleotide
  Target: LAMA2; (+) strand; PAM type: NRG; PAM sequence: GGG
gaaggaagggaggggaggga

SEQ ID NO: 172047 - DNA, 20 bp, Artificial Sequence
  Description of Artificial Sequence: Synthetic oligonucleotide
  Target: LAMA2; (+) strand; PAM type: NRG; PAM sequence: GGG
aaggaagggaggggagggag

SEQ ID NO: 172048 - DNA, 20 bp, Artificial Sequence
  Description of Artificial Sequence: Synthetic oligonucleotide
  Target: LAMA2; (+) strand; PAM type: NRG; PAM sequence: GAG
ggaagggaggggagggaggg

SEQ ID NO: 172049 - DNA, 20 bp, Artificial Sequence
  Description of Artificial Sequence: Synthetic oligonucleotide
  Target: LAMA2; (+) strand; PAM type: NRG; PAM sequence: AGG
gaagggaggggagggagggg

SEQ ID NO: 172050 - DNA, 20 bp, Artificial Sequence
  Description of Artificial Sequence: Synthetic oligonucleotide
  Target: LAMA2; (+) strand; PAM type: NRG; PAM sequence: GGG
aagggaggggagggagggga

SEQ ID NO: 172051 - DNA, 20 bp, Artificial Sequence
  Description of Artificial Sequence: Synthetic oligonucleotide
  Target: LAMA2; (+) strand; PAM type: NRG; PAM sequence: GAG
gggaggggagggaggggagg

SEQ ID NO: 172052 - DNA, 20 bp, Artificial Sequence
  Description of Artificial Sequence: Synthetic oligonucleotide
  Target: LAMA2; (+) strand; PAM type: NRG; PAM sequence: AGG
ggaggggagggaggggaggg

SEQ ID NO: 172053 - DNA, 20 bp, Artificial Sequence
  Description of Artificial Sequence: Synthetic oligonucleotide
  Target: LAMA2; (+) strand; PAM type: NRG; PAM sequence: GGG
gaggggagggaggggaggga

SEQ ID NO: 172054 - DNA, 20 bp, Artificial Sequence
  Description of Artificial Sequence: Synthetic oligonucleotide
  Target: LAMA2; (+) strand; PAM type: NRG; PAM sequence: GAG
ggggagggaggggagggagg

SEQ ID NO: 172055 - DNA, 20 bp, Artificial Sequence
  Description of Artificial Sequence: Synthetic oligonucleotide
  Target: LAMA2; (+) strand; PAM type: NRG; PAM sequence: AGG
gggagggaggggagggaggg

SEQ ID NO: 172056 - DNA, 20 bp, Artificial Sequence
  Description of Artificial Sequence: Synthetic oligonucleotide
  Target: LAMA2; (+) strand; PAM type: NRG; PAM sequence: AAG
agggaggggagggagggagg

SEQ ID NO: 172057 - DNA, 20 bp, Artificial Sequence
  Description of Artificial Sequence: Synthetic oligonucleotide
  Target: LAMA2; (+) strand; PAM type: NRG; PAM sequence: AGG
gggaggggagggagggagga

SEQ ID NO: 172058 - DNA, 20 bp, Artificial Sequence
  Description of Artificial Sequence: Synthetic oligonucleotide
  Target: LAMA2; (+) strand; PAM type: NRG; PAM sequence: CAG
gggagggagggaggaaggaa

SEQ ID NO: 172059 - DNA, 20 bp, Artificial Sequence
  Description of Artificial Sequence: Synthetic oligonucleotide
  Target: LAMA2; (+) strand; PAM type: NRG; PAM sequence: GAG
gagggagggaggaaggaaca

SEQ ID NO: 172060 - DNA, 20 bp, Artificial Sequence
  Description of Artificial Sequence: Synthetic oligonucleotide
  Target: LAMA2; (+) strand; PAM type: NRG; PAM sequence: AGG
agggagggaggaaggaacag

SEQ ID NO: 172061 - DNA, 20 bp, Artificial Sequence
  Description of Artificial Sequence: Synthetic oligonucleotide
  Target: LAMA2; (+) strand; PAM type: NRG; PAM sequence: GGG
gggagggaggaaggaacaga

SEQ ID NO: 172062 - DNA, 20 bp, Artificial Sequence
  Description of Artificial Sequence: Synthetic oligonucleotide
  Target: LAMA2; (+) strand; PAM type: NRG; PAM sequence: GAG
gagggaggaaggaacagagg

SEQ ID NO: 172063 - DNA, 20 bp, Artificial Sequence
  Description of Artificial Sequence: Synthetic oligonucleotide
  Target: LAMA2; (+) strand; PAM type: NRG; PAM sequence: AGG
agggaggaaggaacagaggg

SEQ ID NO: 172064 - DNA, 20 bp, Artificial Sequence
  Description of Artificial Sequence: Synthetic oligonucleotide
  Target: LAMA2; (+) strand; PAM type: NRG; PAM sequence: AAG
aggaaggaacagagggagga

SEQ ID NO: 172065 - DNA, 20 bp, Artificial Sequence
  Description of Artificial Sequence: Synthetic oligonucleotide
  Target: LAMA2; (+) strand; PAM type: NRG; PAM sequence: AGG
ggaaggaacagagggaggaa

SEQ ID NO: 172066 - DNA, 20 bp, Artificial Sequence
  Description of Artificial Sequence: Synthetic oligonucleotide
  Target: LAMA2; (+) strand; PAM type: NRG; PAM sequence: GGG
gaaggaacagagggaggaaa

SEQ ID NO: 172067 - DNA, 20 bp, Artificial Sequence
  Description of Artificial Sequence: Synthetic oligonucleotide
  Target: LAMA2; (+) strand; PAM type: NRG; PAM sequence: GGG
aaggaacagagggaggaaag

SEQ ID NO: 172068 - DNA, 20 bp, Artificial Sequence
  Description of Artificial Sequence: Synthetic oligonucleotide
  Target: LAMA2; (+) strand; PAM type: NRG; PAM sequence: AAG
gaacagagggaggaaagggg

SEQ ID NO: 172069 - DNA, 20 bp, Artificial Sequence
  Description of Artificial Sequence: Synthetic oligonucleotide
  Target: LAMA2; (+) strand; PAM type: NRG; PAM sequence: AGG
aacagagggaggaaagggga

SEQ ID NO: 172070 - DNA, 20 bp, Artificial Sequence
  Description of Artificial Sequence: Synthetic oligonucleotide
  Target: LAMA2; (+) strand; PAM type: NRG; PAM sequence: GGG
acagagggaggaaaggggaa

SEQ ID NO: 172071 - DNA, 20 bp, Artificial Sequence
  Description of Artificial Sequence: Synthetic oligonucleotide
  Target: LAMA2; (+) strand; PAM type: NRG; PAM sequence: GAG
agagggaggaaaggggaagg

SEQ ID NO: 172072 - DNA, 20 bp, Artificial Sequence
  Description of Artificial Sequence: Synthetic oligonucleotide
  Target: LAMA2; (+) strand; PAM type: NRG; PAM sequence: GAG
agggaggaaaggggaaggga

SEQ ID NO: 172073 - DNA, 20 bp, Artificial Sequence
  Description of Artificial Sequence: Synthetic oligonucleotide
  Target: LAMA2; (+) strand; PAM type: NRG; PAM sequence: GAG
ggaggaaaggggaagggaga

SEQ ID NO: 172074 - DNA, 20 bp, Artificial Sequence
  Description of Artificial Sequence: Synthetic oligonucleotide
  Target: LAMA2; (+) strand; PAM type: NRG; PAM sequence: AGG
gaggaaaggggaagggagag

SEQ ID NO: 172075 - DNA, 20 bp, Artificial Sequence
  Description of Artificial Sequence: Synthetic oligonucleotide
  Target: LAMA2; (+) strand; PAM type: NRG; PAM sequence: AAG
aaaggggaagggagagagga

SEQ ID NO: 172076 - DNA, 20 bp, Artificial Sequence
  Description of Artificial Sequence: Synthetic oligonucleotide
  Target: LAMA2; (+) strand; PAM type: NRG; PAM sequence: AAG
ggggaagggagagaggaaag

SEQ ID NO: 172077 - DNA, 20 bp, Artificial Sequence
  Description of Artificial Sequence: Synthetic oligonucleotide
  Target: LAMA2; (+) strand; PAM type: NRG; PAM sequence: AGG
gggaagggagagaggaaaga

SEQ ID NO: 172078 - DNA, 20 bp, Artificial Sequence
  Description of Artificial Sequence: Synthetic oligonucleotide
  Target: LAMA2; (+) strand; PAM type: NRG; PAM sequence: AAG
aagggagagaggaaagaagg

SEQ ID NO: 172079 - DNA, 20 bp, Artificial Sequence
  Description of Artificial Sequence: Synthetic oligonucleotide
  Target: LAMA2; (+) strand; PAM type: NRG; PAM sequence: AGG
agggagagaggaaagaagga

SEQ ID NO: 172080 - DNA, 20 bp, Artificial Sequence
  Description of Artificial Sequence: Synthetic oligonucleotide
  Target: LAMA2; (+) strand; PAM type: NRG; PAM sequence: GGG
gggagagaggaaagaaggaa

SEQ ID NO: 172081 - DNA, 20 bp, Artificial Sequence
  Description of Artificial Sequence: Synthetic oligonucleotide
  Target: LAMA2; (+) strand; PAM type: NRG; PAM sequence: AAG
gagaggaaagaaggaaggga

SEQ ID NO: 172082 - DNA, 20 bp, Artificial Sequence
  Description of Artificial Sequence: Synthetic oligonucleotide
  Target: LAMA2; (+) strand; PAM type: NRG; PAM sequence: AGG
agaggaaagaaggaagggaa

SEQ ID NO: 172083 - DNA, 20 bp, Artificial Sequence
  Description of Artificial Sequence: Synthetic oligonucleotide
  Target: LAMA2; (+) strand; PAM type: NRG; PAM sequence: GAG
aggaaagaaggaagggaaag
